United States Patent Application Publication US 2007/0031850 A1 - sequence listing, part 7

SEQ ID NO: 182009 - DNA, 25 bp, Probe sequence
acggcagaacttgcaaaaggtagac

SEQ ID NO: 182010 - DNA, 25 bp, Probe sequence
acagggtgtacattttcagcagtta

SEQ ID NO: 182011 - DNA, 25 bp, Probe sequence
aaatcatttcattcatgtggtgtat

SEQ ID NO: 182012 - DNA, 25 bp, Probe sequence
aaacctaaaatagcattaaccattg

SEQ ID NO: 182013 - DNA, 25 bp, Probe sequence
aaacggggatgattgctacagcaga

SEQ ID NO: 182014 - DNA, 25 bp, Probe sequence
aacaccgaatttaccagaagctgaa

SEQ ID NO: 182015 - DNA, 25 bp, Probe sequence
aacatacgcatggaacagggtgtac

SEQ ID NO: 182016 - DNA, 25 bp, Probe sequence
aaccattgcaggtactgatccaaca

SEQ ID NO: 182017 - DNA, 25 bp, Probe sequence
aattatgcaggctggccgcatcttt

SEQ ID NO: 182018 - DNA, 25 bp, Probe sequence
ccggcgtaatggctgatttaaaatc

SEQ ID NO: 182019 - DNA, 25 bp, Probe sequence
ccagtgaatcattttgcatatttaa

SEQ ID NO: 182020 - DNA, 25 bp, Probe sequence
gcgtcgttacaagtattgttgctca

SEQ ID NO: 182021 - DNA, 25 bp, Probe sequence
gcagatactatggaaacgattcgtc

SEQ ID NO: 182022 - DNA, 25 bp, Probe sequence
tccaacaggtggtgccggcgtaatg

SEQ ID NO: 182023 - DNA, 25 bp, Probe sequence
gaaataacgggactaaccattgata

SEQ ID NO: 182024 - DNA, 25 bp, Probe sequence
gaaacgattcgtcattatttaatgc

SEQ ID NO: 182025 - DNA, 25 bp, Probe sequence
gatcctgttatgttggcgaaaagcg

SEQ ID NO: 182026 - DNA, 25 bp, Probe sequence
gttgctcaaaatacattgggcgtac

SEQ ID NO: 182027 - DNA, 25 bp, Probe sequence
gtaattgatcctgttatgttggcga

SEQ ID NO: 182028 - DNA, 25 bp, Probe sequence
gtggtgccggcgtaatggctgattt

SEQ ID NO: 182029 - DNA, 25 bp, Probe sequence
gtggtgtatatggtatgggcgtcgt

SEQ ID NO: 182030 - DNA, 25 bp, Probe sequence
ggtatgggcgtcgttacaagtattg

SEQ ID NO: 182031 - DNA, 25 bp, Probe sequence
ggtactgatccaacaggtggtgccg

SEQ ID NO: 182032 - DNA, 25 bp, Probe sequence
ggctggccgcatctttattaatgag

SEQ ID NO: 182033 - DNA, 25 bp, Probe sequence
ggcgaaaagcggtgattcattaatg

SEQ ID NO: 182034 - DNA, 25 bp, Probe sequence
tcatcattaaaggcggtcattcaaa

SEQ ID NO: 182035 - DNA, 25 bp, Probe sequence
ttttcagcagttataacggcagaac

SEQ ID NO: 182036 - DNA, 25 bp, Probe sequence
ttgggcgtacaacatattcataatt

SEQ ID NO: 182037 - DNA, 25 bp, Probe sequence
attcatatgagttttggctttcagc

SEQ ID NO: 182038 - DNA, 25 bp, Probe sequence
ataggtgtcatatgagtcgtaattt

SEQ ID NO: 182039 - DNA, 25 bp, Probe sequence
atacatttatccataggggtcgcta

SEQ ID NO: 182040 - DNA, 25 bp, Probe sequence
atcacgccactcaagtagcaagtat

SEQ ID NO: 182041 - DNA, 25 bp, Probe sequence
atgacttaccacatattttaaaaga

SEQ ID NO: 182042 - DNA, 25 bp, Probe sequence
agttgctattttagatacgggtatt

SEQ ID NO: 182043 - DNA, 25 bp, Probe sequence
actacagatagtaatcacgccactc

SEQ ID NO: 182044 - DNA, 25 bp, Probe sequence
aaatcgattttaaagctcctggcgt

SEQ ID NO: 182045 - DNA, 25 bp, Probe sequence
aaatgattcaaagccatccaatgta

SEQ ID NO: 182046 - DNA, 25 bp, Probe sequence
aaaaggcataacttggagtatcaaa

SEQ ID NO: 182047 - DNA, 25 bp, Probe sequence
aacgaagtatattctatcacagcaa

SEQ ID NO: 182048 - DNA, 25 bp, Probe sequence
aagccatttatatatgcacctacta

SEQ ID NO: 182049 - DNA, 25 bp, Probe sequence
aattgggcatggagcagtctaaata

SEQ ID NO: 182050 - DNA, 25 bp, Probe sequence
ctgacaaataatcttgaattccgaa

SEQ ID NO: 182051 - DNA, 25 bp, Probe sequence
gccatccaatgtaaaagttgctatt

SEQ ID NO: 182052 - DNA, 25 bp, Probe sequence
gcctatttcactgcttatctgacaa

SEQ ID NO: 182053 - DNA, 25 bp, Probe sequence
gctcctggcgtagacgtatatacaa

SEQ ID NO: 182054 - DNA, 25 bp, Probe sequence
gaattccgaaatgacttaccacata

SEQ ID NO: 182055 - DNA, 25 bp, Probe sequence
gagttttggctttcagcgttacaat

SEQ ID NO: 182056 - DNA, 25 bp, Probe sequence
gagtcgtaatttaatacatttatcc

SEQ ID NO: 182057 - DNA, 25 bp, Probe sequence
gatcaaaagatgagttacttactgt

SEQ ID NO: 182058 - DNA, 25 bp, Probe sequence
gtagcaagtattatcacatatggag

SEQ ID NO: 182059 - DNA, 25 bp, Probe sequence
gtagccgcagcagggaataacatgg

SEQ ID NO: 182060 - DNA, 25 bp, Probe sequence
ggggtcgctatatttataatttctt

SEQ ID NO: 182061 - DNA, 25 bp, Probe sequence
ggtattatcttagtagccgcagcag

SEQ ID NO: 182062 - DNA, 25 bp, Probe sequence
tgactatccagcacgttttaacgaa

SEQ ID NO: 182063 - DNA, 25 bp, Probe sequence
taaccttaaaggcgatatagacaac

SEQ ID NO: 182064 - DNA, 25 bp, Probe sequence
taaatggaacatcttttgcagccgc

SEQ ID NO: 182065 - DNA, 25 bp, Probe sequence
tatgcacctactaaaaaaatcgatt

SEQ ID NO: 182066 - DNA, 25 bp, Probe sequence
tatatttataatttctttctcgttt

SEQ ID NO: 182067 - DNA, 25 bp, Probe sequence
ttatagtgactatccagcacgtttt

SEQ ID NO: 182068 - DNA, 25 bp, Probe sequence
ttaaagctcctggcgtagacgtata

SEQ ID NO: 182069 - DNA, 25 bp, Probe sequence
ttacatgatgctataaagaacgcta

SEQ ID NO: 182070 - DNA, 25 bp, Probe sequence
ttggtatcagtaaatcagtaagtat

SEQ ID NO: 182071 - DNA, 25 bp, Probe sequence
atttagtatgtcgcctaactcggct

SEQ ID NO: 182072 - DNA, 25 bp, Probe sequence
acaggcatcgatttagacgaattgt

SEQ ID NO: 182073 - DNA, 25 bp, Probe sequence
cacacccaaacgcacagttcaaagt

SEQ ID NO: 182074 - DNA, 25 bp, Probe sequence
aacaacaatcagtaccattcttcat

SEQ ID NO: 182075 - DNA, 25 bp, Probe sequence
aacgtgccaaagatggacacacgat

SEQ ID NO: 182076 - DNA, 25 bp, Probe sequence
aagacaccggcgcgtatacttatac

SEQ ID NO: 182077 - DNA, 25 bp, Probe sequence
aagggcttattacaggcatcgattt

SEQ ID NO: 182078 - DNA, 25 bp, Probe sequence
aagtggtcagtatacgcacattaat

SEQ ID NO: 182079 - DNA, 25 bp, Probe sequence
aatcgccgaatttaatgacaaagca

SEQ ID NO: 182080 - DNA, 25 bp, Probe sequence
cagtcacgtacaaacgacaatcatc

SEQ ID NO: 182081 - DNA, 25 bp, Probe sequence
ctttgacaccagcaataccgaatgt

SEQ ID NO: 182082 - DNA, 25 bp, Probe sequence
ctgctggacaatgtacatggtatgt

SEQ ID NO: 182083 - DNA, 25 bp, Probe sequence
gcaatcctttgacaccagcaatacc

SEQ ID NO: 182084 - DNA, 25 bp, Probe sequence
gaagtttcatcatataattacatcc

SEQ ID NO: 182085 - DNA, 25 bp, Probe sequence
gaaccatctctgcttcagaagtttc

SEQ ID NO: 182086 - DNA, 25 bp, Probe sequence
gaacaacttatatactgctggacaa

SEQ ID NO: 182087 - DNA, 25 bp, Probe sequence
gaaaacaattttactgacgatgaca

SEQ ID NO: 182088 - DNA, 25 bp, Probe sequence
gacaatcatcaacacgcaaatcaac

SEQ ID NO: 182089 - DNA, 25 bp, Probe sequence
gacacacgattagtacattttgggg

SEQ ID NO: 182090 - DNA, 25 bp, Probe sequence
gacacccaacacgaggatcaatttt

SEQ ID NO: 182091 - DNA, 25 bp, Probe sequence
gacgatgacaactcttactttattt

SEQ ID NO: 182092 - DNA, 25 bp, Probe sequence
gacgcaattgattcacacacaccgc

SEQ ID NO: 182093 - DNA, 25 bp, Probe sequence
gtatacgcacattaatgacgcaatt

SEQ ID NO: 182094 - DNA, 25 bp, Probe sequence
gtatgacgaattacaaatcgccgaa

SEQ ID NO: 182095 - DNA, 25 bp, Probe sequence
gtaccattcttcattaagtggtcag

SEQ ID NO: 182096 - DNA, 25 bp, Probe sequence
gtgaataaagacaccggcgcgtata

SEQ ID NO: 182097 - DNA, 25 bp, Probe sequence
ggtatgtctttgataaacgtgccaa

SEQ ID NO: 182098 - DNA, 25 bp, Probe sequence
ggattggtgaatatatcgtttcatc

SEQ ID NO: 182099 - DNA, 25 bp, Probe sequence
ggcttcaaagtagatagacacccaa

SEQ ID NO: 182100 - DNA, 25 bp, Probe sequence
ggccaagcttcaagcaatggcttca

SEQ ID NO: 182101 - DNA, 25 bp, Probe sequence
tgatcagcctcttatcacaagtaag

SEQ ID NO: 182102 - DNA, 25 bp, Probe sequence
tcgtttcatcaagaaccatctctgc

SEQ ID NO: 182103 - DNA, 25 bp, Probe sequence
tcaaacgtcaccaagcaatcctttg

SEQ ID NO: 182104 - DNA, 25 bp, Probe sequence
taaaatcattgatcagcctcttatc

SEQ ID NO: 182105 - DNA, 25 bp, Probe sequence
tttggcctccaagtggcgaccatta

SEQ ID NO: 182106 - DNA, 25 bp, Probe sequence
caattgctgcaatggcaccttgtcc

SEQ ID NO: 182107 - DNA, 25 bp, Probe sequence
atgcagaattagctaagcgctctca

SEQ ID NO: 182108 - DNA, 25 bp, Probe sequence
atgtctgacaaggaattggaacaag

SEQ ID NO: 182109 - DNA, 25 bp, Probe sequence
atggtttgatttttatagtactgaa

SEQ ID NO: 182110 - DNA, 25 bp, Probe sequence
atggctatgacactagaacaatggg

SEQ ID NO: 182111 - DNA, 25 bp, Probe sequence
agtggcgaccattacataaaacata

SEQ ID NO: 182112 - DNA, 25 bp, Probe sequence
agctgcaaagccaatcattaatgat

SEQ ID NO: 182113 - DNA, 25 bp, Probe sequence
agcgcatagtcgtgaaaatgctatt

SEQ ID NO: 182114 - DNA, 25 bp, Probe sequence
acaaaagtttggcctccaagtggcg

SEQ ID NO: 182115 - DNA, 25 bp, Probe sequence
aaacttatatgctttgttaattcca

SEQ ID NO: 182116 - DNA, 25 bp, Probe sequence
aaaacatatgtatttccaagcgcat

SEQ ID NO: 182117 - DNA, 25 bp, Probe sequence
aaaattgtaccaagctgcaaagcca

SEQ ID NO: 182118 - DNA, 25 bp, Probe sequence
aaaatgctatttatacaattgctgc

SEQ ID NO: 182119 - DNA, 25 bp, Probe sequence
aagatacggcaaaatggtttgattt

SEQ ID NO: 182120 - DNA, 25 bp, Probe sequence
aagtacttgcgcatgatattttagc

SEQ ID NO: 182121 - DNA, 25 bp, Probe sequence
gcgctctcaaagtgatcataagctt

SEQ ID NO: 182122 - DNA, 25 bp, Probe sequence
gcgtcgatttttcaatatggctatg

SEQ ID NO: 182123 - DNA, 25 bp, Probe sequence
gctgcaatggcaccttgtccatata

SEQ ID NO: 182124 - DNA, 25 bp, Probe sequence
gcatacatgagcgtcgatttttcaa

SEQ ID NO: 182125 - DNA, 25 bp, Probe sequence
gaaagttgcatacatgagcgtcgat

SEQ ID NO: 182126 - DNA, 25 bp, Probe sequence
gatatttatgaggatgactttattc

SEQ ID NO: 182127 - DNA, 25 bp, Probe sequence
gtatttccaagcgcatagtcgtgaa

SEQ ID NO: 182128 - DNA, 25 bp, Probe sequence
gtaccaagctgcaaagccaatcatt

SEQ ID NO: 182129 - DNA, 25 bp, Probe sequence
ggtgaagtacttgcgcatgatattt

SEQ ID NO: 182130 - DNA, 25 bp, Probe sequence
ggtgaatcatacgaagaaatcatta

SEQ ID NO: 182131 - DNA, 25 bp, Probe sequence
ggttgaaggtgaagtacttgcgcat

SEQ ID NO: 182132 - DNA, 25 bp, Probe sequence
ggatgacataattaacgtatttgag

SEQ ID NO: 182133 - DNA, 25 bp, Probe sequence
ggcctccaagtggcgaccattacat

SEQ ID NO: 182134 - DNA, 25 bp, Probe sequence
ggcaccttgtccatatatttatgca

SEQ ID NO: 182135 - DNA, 25 bp, Probe sequence
taaattagccgaatcaatgtctgac

SEQ ID NO: 182136 - DNA, 25 bp, Probe sequence
tagccgaatcaatgtctgacaagga

SEQ ID NO: 182137 - DNA, 25 bp, Probe sequence
tagctaagcgctctcaaagtgatca

SEQ ID NO: 182138 - DNA, 25 bp, Probe sequence
ttttagcgcaaattgttggtgaatc

SEQ ID NO: 182139 - DNA, 25 bp, Probe sequence
attgcaatgtggaattgggaacgga

SEQ ID NO: 182140 - DNA, 25 bp, Probe sequence
attaaaccttgatgacacagaagaa

SEQ ID NO: 182141 - DNA, 25 bp, Probe sequence
gtaaaaggttaatctcctatggtgg

SEQ ID NO: 182142 - DNA, 25 bp, Probe sequence
atctcctatggtggtttgttaaaag

SEQ ID NO: 182143 - DNA, 25 bp, Probe sequence
aggcgatttgattcatacagatgat

SEQ ID NO: 182144 - DNA, 25 bp, Probe sequence
aggttaatctcctatggtggtttgt

SEQ ID NO: 182145 - DNA, 25 bp, Probe sequence
agccgatgaagatggattttctatt

SEQ ID NO: 182146 - DNA, 25 bp, Probe sequence
acagatgatgacgaaaaagccgatg

SEQ ID NO: 182147 - DNA, 25 bp, Probe sequence
aaagccgatgaagatggattttcta

SEQ ID NO: 182148 - DNA, 25 bp, Probe sequence
aaaattaaaccttgatgacacagaa

SEQ ID NO: 182149 - DNA, 25 bp, Probe sequence
aaggttaatctcctatggtggtttg

SEQ ID NO: 182150 - DNA, 25 bp, Probe sequence
caccgtaaaaggttaatctcctatg

SEQ ID NO: 182151 - DNA, 25 bp, Probe sequence
gccgatgaagatggattttctatta

SEQ ID NO: 182152 - DNA, 25 bp, Probe sequence
gaaggcgatttgattcatacagatg

SEQ ID NO: 182153 - DNA, 25 bp, Probe sequence
gaagaaggcgatttgattcatacag

SEQ ID NO: 182154 - DNA, 25 bp, Probe sequence
gacacagaagaaggcgatttgattc

SEQ ID NO: 182155 - DNA, 25 bp, Probe sequence
gatgatgacgaaaaagccgatgaag

SEQ ID NO: 182156 - DNA, 25 bp, Probe sequence
gatgacacagaagaaggcgatttga

SEQ ID NO: 182157 - DNA, 25 bp, Probe sequence
gatttgattcatacagatgatgacg

SEQ ID NO: 182158 - DNA, 25 bp, Probe sequence
gttaatctcctatggtggtttgtta

SEQ ID NO: 182159 - DNA, 25 bp, Probe sequence
gtctgatttggaggaaggtttacac

SEQ ID NO: 182160 - DNA, 25 bp, Probe sequence
ggttaatctcctatggtggtttgtt

SEQ ID NO: 182161 - DNA, 25 bp, Probe sequence
ggcgatttgattcatacagatgatg

SEQ ID NO: 182162 - DNA, 25 bp, Probe sequence
taaaaggttaatctcctatggtggt

SEQ ID NO: 182163 - DNA, 25 bp, Probe sequence
tgatttggaggaaggtttacaccgt

SEQ ID NO: 182164 - DNA, 25 bp, Probe sequence
tgcaatgtggaattgggaacggaaa

SEQ ID NO: 182165 - DNA, 25 bp, Probe sequence
tgaagatggattttctattattgca

SEQ ID NO: 182166 - DNA, 25 bp, Probe sequence
tctcctatggtggtttgttaaaaga

SEQ ID NO: 182167 - DNA, 25 bp, Probe sequence
taatctcctatggtggtttgttaaa

SEQ ID NO: 182168 - DNA, 25 bp, Probe sequence
taaaaaattaaaccttgatgacaca

SEQ ID NO: 182169 - DNA, 25 bp, Probe sequence
tttctattattgcaatgtggaattg

SEQ ID NO: 182170 - DNA, 25 bp, Probe sequence
ttaatctcctatggtggtttgttaa

SEQ ID NO: 182171 - DNA, 25 bp, Probe sequence
ttgatgacacagaagaaggcgattt

SEQ ID NO: 182172 - DNA, 25 bp, Probe sequence
ttgtctgatttggaggaaggtttac

SEQ ID NO: 182173 - DNA, 25 bp, Probe sequence
acccttatgacctgatttggttagt

SEQ ID NO: 182174 - DNA, 25 bp, Probe sequence
agacccttatgacctgatttggtta

SEQ ID NO: 182175 - DNA, 25 bp, Probe sequence
actactaggggagcctaatgatatg

SEQ ID NO: 182176 - DNA, 25 bp, Probe sequence
aaatgttgaaaccgtttgctaagat

SEQ ID NO: 182177 - DNA, 25 bp, Probe sequence
aaccgtttgctaagattaatttgca

SEQ ID NO: 182178 - DNA, 25 bp, Probe sequence
aaggaactactaggggagcctaatg

SEQ ID NO: 182179 - DNA, 25 bp, Probe sequence
aatgttgaaaccgtttgctaagatt

SEQ ID NO: 182180 - DNA, 25 bp, Probe sequence
cagacccttatgacctgatttggtt

SEQ ID NO: 182181 - DNA, 25 bp, Probe sequence
cttatgacctgatttggttagtacc

SEQ ID NO: 182182 - DNA, 25 bp, Probe sequence
tactaaggaactactaggggagcct

SEQ ID NO: 182183 - DNA, 25 bp, Probe sequence
cccttatgacctgatttggttagta

SEQ ID NO: 182184 - DNA, 25 bp, Probe sequence
gaatactaaggaactactaggggag

SEQ ID NO: 182185 - DNA, 25 bp, Probe sequence
gcaattgaatactaaggaactacta

SEQ ID NO: 182186 - DNA, 25 bp, Probe sequence
gaactactaggggagcctaatgata

SEQ ID NO: 182187 - DNA, 25 bp, Probe sequence
gaaaatgttgaaaccgtttgctaag

SEQ ID NO: 182188 - DNA, 25 bp, Probe sequence
gaaaccgtttgctaagattaatttg

SEQ ID NO: 182189 - DNA, 25 bp, Probe sequence
gacccttatgacctgatttggttag

SEQ ID NO: 182190 - DNA, 25 bp, Probe sequence
gagcctaatgatatggctgagatga

SEQ ID NO: 182191 - DNA, 25 bp, Probe sequence
ggaactactaggggagcctaatgat

SEQ ID NO: 182192 - DNA, 25 bp, Probe sequence
gttgaaaccgtttgctaagattaat

SEQ ID NO: 182193 - DNA, 25 bp, Probe sequence
gttcagacccttatgacctgatttg

SEQ ID NO: 182194 - DNA, 25 bp, Probe sequence
gggagcctaatgatatggctgagat

SEQ ID NO: 182195 - DNA, 25 bp, Probe sequence
ggggagcctaatgatatggctgaga

SEQ ID NO: 182196 - DNA, 25 bp, Probe sequence
tgttcagacccttatgacctgattt

SEQ ID NO: 182197 - DNA, 25 bp, Probe sequence
tgacctgatttggttagtaccaacg

SEQ ID NO: 182198 - DNA, 25 bp, Probe sequence
tgctaagattaatttgcaattgaat

SEQ ID NO: 182199 - DNA, 25 bp, Probe sequence
tcagacccttatgacctgatttggt

SEQ ID NO: 182200 - DNA, 25 bp, Probe sequence
tactaggggagcctaatgatatggc

SEQ ID NO: 182201 - DNA, 25 bp, Probe sequence
taggggagcctaatgatatggctga

SEQ ID NO: 182202 - DNA, 25 bp, Probe sequence
tatgacctgatttggttagtaccaa

SEQ ID NO: 182203 - DNA, 25 bp, Probe sequence
ttatgacctgatttggttagtacca

SEQ ID NO: 182204 - DNA, 25 bp, Probe sequence
ttcagacccttatgacctgatttgg

SEQ ID NO: 182205 - DNA, 25 bp, Probe sequence
ttgaaaccgtttgctaagattaatt

SEQ ID NO: 182206 - DNA, 25 bp, Probe sequence
ttgaaaatgttgaaaccgtttgcta

SEQ ID NO: 182207 - DNA, 25 bp, Probe sequence
atattgaacaatttttgggaagaat

SEQ ID NO: 182208 - DNA, 25 bp, Probe sequence
ataaagcgtcctcttgtgaaattag

SEQ ID NO: 182209 - DNA, 25 bp, Probe sequence
agaataaagcgtcctcttgtgaaat

SEQ ID NO: 182210 - DNA, 25 bp, Probe sequence
agcgtcctcttgtgaaattagagaa

SEQ ID NO: 182211 - DNA, 25 bp, Probe sequence
aaagcgtcctcttgtgaaattagag

SEQ ID NO: 182212 - DNA, 25 bp, Probe sequence
aagcgtcctcttgtgaaattagaga

SEQ ID NO: 182213 - DNA, 25 bp, Probe sequence
aagaataaagcgtcctcttgtgaaa

SEQ ID NO: 182214 - DNA, 25 bp, Probe sequence
aataaagcgtcctcttgtgaaatta

SEQ ID NO: 182215 - DNA, 25 bp, Probe sequence
cttgtgaaattagagaacgctttat

SEQ ID NO: 182216 - DNA, 25 bp, Probe sequence
cttttaaaactactgatttattgat

SEQ ID NO: 182217 - DNA, 25 bp, Probe sequence
cgtcctcttgtgaaattagagaacg

SEQ ID NO: 182218 - DNA, 25 bp, Probe sequence
ttttgggaagaataaagcgtcctct

SEQ ID NO: 182219 - DNA, 25 bp, Probe sequence
gcgtcctcttgtgaaattagagaac

SEQ ID NO: 182220 - DNA, 25 bp, Probe sequence
gaataaagcgtcctcttgtgaaatt

SEQ ID NO: 182221 - DNA, 25 bp, Probe sequence
gaagaataaagcgtcctcttgtgaa

SEQ ID NO: 182222 - DNA, 25 bp, Probe sequence
gaaattagagaacgctttattactt

SEQ ID NO: 182223 - DNA, 25 bp, Probe sequence
gtgcttacttttaaaactactgatt

SEQ ID NO: 182224 - DNA, 25 bp, Probe sequence
gtcctcttgtgaaattagagaacgc

SEQ ID NO: 182225 - DNA, 25 bp, Probe sequence
gtgaaattagagaacgctttattac

SEQ ID NO: 182226 - DNA, 25 bp, Probe sequence
gggaagaataaagcgtcctcttgtg

SEQ ID NO: 182227 - DNA, 25 bp, Probe sequence
ggaagaataaagcgtcctcttgtga

SEQ ID NO: 182228 - DNA, 25 bp, Probe sequence
tgggaagaataaagcgtcctcttgt

SEQ ID NO: 182229 - DNA, 25 bp, Probe sequence
tgtgaaattagagaacgctttatta

SEQ ID NO: 182230 - DNA, 25 bp, Probe sequence
tgaaattagagaacgctttattact

SEQ ID NO: 182231 - DNA, 25 bp, Probe sequence
tgcttacttttaaaactactgattt

SEQ ID NO: 182232 - DNA, 25 bp, Probe sequence
tcctcttgtgaaattagagaacgct

SEQ ID NO: 182233 - DNA, 25 bp, Probe sequence
tcttgtgaaattagagaacgcttta

SEQ ID NO: 182234 - DNA, 25 bp, Probe sequence
taaaactactgatttattgataaat

SEQ ID NO: 182235 - DNA, 25 bp, Probe sequence
taaagcgtcctcttgtgaaattaga

SEQ ID NO: 182236 - DNA, 25 bp, Probe sequence
tacttttaaaactactgatttattg

SEQ ID NO: 182237 - DNA, 25 bp, Probe sequence
tttgggaagaataaagcgtcctctt

SEQ ID NO: 182238 - DNA, 25 bp, Probe sequence
tttaaaactactgatttattgataa

SEQ ID NO: 182239 - DNA, 25 bp, Probe sequence
ttgggaagaataaagcgtcctcttg

SEQ ID NO: 182240 - DNA, 25 bp, Probe sequence
ttgtgaaattagagaacgctttatt

SEQ ID NO: 182241 - DNA, 25 bp, Probe sequence
atataacactggtggcgctggacat

SEQ ID NO: 182242 - DNA, 25 bp, Probe sequence
atcaacttgggattcagtagcacct

SEQ ID NO: 182243 - DNA, 25 bp, Probe sequence
atcagaaggttcatcagtaaatgtg

SEQ ID NO: 182244 - DNA, 25 bp, Probe sequence
atcaggtggcaatattcatgctgta

SEQ ID NO: 182245 - DNA, 25 bp, Probe sequence
aggtgtatcaccagcaaatgctcct

SEQ ID NO: 182246 - DNA, 25 bp, Probe sequence
agaaaacattactcgcatcatcatt

SEQ ID NO: 182247 - DNA, 25 bp, Probe sequence
agcaaatgctcctgaaagtgttcaa

SEQ ID NO: 182248 - DNA, 25 bp, Probe sequence
agcagtaggtttaggaatcgtagca

SEQ ID NO: 182249 - DNA, 25 bp, Probe sequence
aaatgctcaaactcaacaaccacaa

SEQ ID NO: 182250 - DNA, 25 bp, Probe sequence
aaagtgttcaagatgccgcagcagt

SEQ ID NO: 182251 - DNA, 25 bp, Probe sequence
aaagcatctttagcgcaaatggcgc

SEQ ID NO: 182252 - DNA, 25 bp, Probe sequence
aacattactcgcatcatcattagca

SEQ ID NO: 182253 - DNA, 25 bp, Probe sequence
aatcacaagaagttgaagcaccaca

SEQ ID NO: 182254 - DNA, 25 bp, Probe sequence
aattgctcaacgtgaatcaggtggc

SEQ ID NO: 182255 - DNA, 25 bp, Probe sequence
aattcacaagttactgcaacaccaa

SEQ ID NO: 182256 - DNA, 25 bp, Probe sequence
cttgggattcagtagcacctgctaa

SEQ ID NO: 182257 - DNA, 25 bp, Probe sequence
cgcaaatggcgcaatcaaatgatca

SEQ ID NO: 182258 - DNA, 25 bp, Probe sequence
gcgctggacattgggttactgcata

SEQ ID NO: 182259 - DNA, 25 bp, Probe sequence
gcatcaacatcaaacaattcacaag

SEQ ID NO: 182260 - DNA, 25 bp, Probe sequence
gcaggaaatgcaggtcacgaagccc

SEQ ID NO: 182261 - DNA, 25 bp, Probe sequence
gaatcagatggtacacactttgctt

SEQ ID NO: 182262 - DNA, 25 bp, Probe sequence
gaagcaccacaaaatgctcaaactc

SEQ ID NO: 182263 - DNA, 25 bp, Probe sequence
gaagcggacttaaataaagcatctt

SEQ ID NO: 182264 - DNA, 25 bp, Probe sequence
gactatgaagggtttacttatcact

SEQ ID NO: 182265 - DNA, 25 bp, Probe sequence
gtatcaattcttacaatcaacttgg

SEQ ID NO: 182266 - DNA, 25 bp, Probe sequence
gtaaatccaacatcaggtgcagctg

SEQ ID NO: 182267 - DNA, 25 bp, Probe sequence
gtggcgctggacattgggttactgc

SEQ ID NO: 182268 - DNA, 25 bp, Probe sequence
gggtttacttatcactttgaatcag

SEQ ID NO: 182269 - DNA, 25 bp, Probe sequence
ggtgcagctggtaagtatcaattct

SEQ ID NO: 182270 - DNA, 25 bp, Probe sequence
ggcaatattcatgctgtaaatccaa

SEQ ID NO: 182271 - DNA, 25 bp, Probe sequence
tgcttggaattaccatgcaacaggt

SEQ ID NO: 182272 - DNA, 25 bp, Probe sequence
tcaacaaccacaagcatcaacatca

SEQ ID NO: 182273 - DNA, 25 bp, Probe sequence
tacacactttgcttggaattaccat

SEQ ID NO: 182274 - DNA, 25 bp, Probe sequence
ttactgcaacaccaactgaatcaaa

SEQ ID NO: 182275 - DNA, 25 bp, Probe sequence
attagccaagcgattatcattatga

SEQ ID NO: 182276 - DNA, 25 bp, Probe sequence
attattagccaagcgattatcatta

SEQ ID NO: 182277 - DNA, 25 bp, Probe sequence
atatctgttacgattattagccaag

SEQ ID NO: 182278 - DNA, 25 bp, Probe sequence
atctgttacgattattagccaagcg

SEQ ID NO: 182279 - DNA, 25 bp, Probe sequence
agcgattatcattatgaaagaaatt

SEQ ID NO: 182280 - DNA, 25 bp, Probe sequence
agccaagcgattatcattatgaaag

SEQ ID NO: 182281 - DNA, 25 bp, Probe sequence
acgattattagccaagcgattatca

SEQ ID NO: 182282 - DNA, 25 bp, Probe sequence
acaaatatctgttacgattattagc

SEQ ID NO: 182283 - DNA, 25 bp, Probe sequence
aaatatctgttacgattattagcca

SEQ ID NO: 182284 - DNA, 25 bp, Probe sequence
aagcgattatcattatgaaagaaat

SEQ ID NO: 182285 - DNA, 25 bp, Probe sequence
aatatctgttacgattattagccaa

SEQ ID NO: 182286 - DNA, 25 bp, Probe sequence
caagcgattatcattatgaaagaaa

SEQ ID NO: 182287 - DNA, 25 bp, Probe sequence
caaatatctgttacgattattagcc

SEQ ID NO: 182288 - DNA, 25 bp, Probe sequence
ctgttacgattattagccaagcgat

SEQ ID NO: 182289 - DNA, 25 bp, Probe sequence
cgattattagccaagcgattatcat

SEQ ID NO: 182290 - DNA, 25 bp, Probe sequence
ccaagcgattatcattatgaaagaa

SEQ ID NO: 182291 - DNA, 25 bp, Probe sequence
gccaagcgattatcattatgaaaga

SEQ ID NO: 182292 - DNA, 25 bp, Probe sequence
gcgattatcattatgaaagaaattc

SEQ ID NO: 182293 - DNA, 25 bp, Probe sequence
gattattagccaagcgattatcatt

SEQ ID NO: 182294 - DNA, 25 bp, Probe sequence
gttacgattattagccaagcgatta

SEQ ID NO: 182295 - DNA, 25 bp, Probe sequence
tgttacgattattagccaagcgatt

SEQ ID NO: 182296 - DNA, 25 bp, Probe sequence
tgaaagaaattcaagacgaggtaaa

SEQ ID NO: 182297 - DNA, 25 bp, Probe sequence
tctgttacgattattagccaagcga

SEQ ID NO: 182298 - DNA, 25 bp, Probe sequence
tacgattattagccaagcgattatc

SEQ ID NO: 182299 - DNA, 25 bp, Probe sequence
tagccaagcgattatcattatgaaa

SEQ ID NO: 182300 - DNA, 25 bp, Probe sequence
tatctgttacgattattagccaagc

SEQ ID NO: 182301 - DNA, 25 bp, Probe sequence
tattagccaagcgattatcattatg

SEQ ID NO: 182302 - DNA, 25 bp, Probe sequence
ttattagccaagcgattatcattat

SEQ ID NO: 182303 - DNA, 25 bp, Probe sequence
ttacgattattagccaagcgattat

SEQ ID NO: 182304 - DNA, 25 bp, Probe sequence
ttagccaagcgattatcattatgaa

SEQ ID NO: 182305 - DNA, 25 bp, Probe sequence
attagccgatttggtaattgaagaa

SEQ ID NO: 182306 - DNA, 25 bp, Probe sequence
atattagccgatttggtaattgaag

SEQ ID NO: 182307 - DNA, 25 bp, Probe sequence
ataatcgacgtattgaagatagaac

SEQ ID NO: 182308 - DNA, 25 bp, Probe sequence
atcgagatattagccgatttggtaa

SEQ ID NO: 182309 - DNA, 25 bp, Probe sequence
atgaacttatcgagatattagccga

SEQ ID NO: 182310 - DNA, 25 bp, Probe sequence
agatattagccgatttggtaattga

SEQ ID NO: 182311 - DNA, 25 bp, Probe sequence
acttatcgagatattagccgatttg

SEQ ID NO: 182312 - DNA, 25 bp, Probe sequence
acatggatgaacttatcgagatatt

SEQ ID NO: 182313 - DNA, 25 bp, Probe sequence
aaacatggatgaacttatcgagata

SEQ ID NO: 182314 - DNA, 25 bp, Probe sequence
aaaaacatggatgaacttatcgaga

SEQ ID NO: 182315 - DNA, 25 bp, Probe sequence
aaaacatggatgaacttatcgagat

SEQ ID NO: 182316 - DNA, 25 bp, Probe sequence
aacatggatgaacttatcgagatat

SEQ ID NO: 182317 - DNA, 25 bp, Probe sequence
aacttatcgagatattagccgattt

SEQ ID NO: 182318 - DNA, 25 bp, Probe sequence
aacggagtgaaaaacatggatgaac

SEQ ID NO: 182319 - DNA, 25 bp, Probe sequence
aatcgacgtattgaagatagaacaa

SEQ ID NO: 182320 - DNA, 25 bp, Probe sequence
cttatcgagatattagccgatttgg

SEQ ID NO: 182321 - DNA, 25 bp, Probe sequence
catggatgaacttatcgagatatta

SEQ ID NO: 182322 - DNA, 25 bp, Probe sequence
ctgaataatcgacgtattgaagata

SEQ ID NO: 182323 - DNA, 25 bp, Probe sequence
cgagatattagccgatttggtaatt

SEQ ID NO: 182324 - DNA, 25 bp, Probe sequence
gaataatcgacgtattgaagataga

SEQ ID NO: 182325 - DNA, 25 bp, Probe sequence
gaagatagaacaaataacggagtga

SEQ ID NO: 182326 - DNA, 25 bp, Probe sequence
gaacttatcgagatattagccgatt

SEQ ID NO: 182327 - DNA, 25 bp, Probe sequence
gaaaaacatggatgaacttatcgag

SEQ ID NO: 182328 - DNA, 25 bp, Probe sequence
gagatattagccgatttggtaattg

SEQ ID NO: 182329 - DNA, 25 bp, Probe sequence
gatgaacttatcgagatattagccg

SEQ ID NO: 182330 - DNA, 25 bp, Probe sequence
gatattagccgatttggtaattgaa

SEQ ID NO: 182331 - DNA, 25 bp, Probe sequence
ggatgaacttatcgagatattagcc

SEQ ID NO: 182332 - DNA, 25 bp, Probe sequence
tgaacttatcgagatattagccgat

SEQ ID NO: 182333 - DNA, 25 bp, Probe sequence
tcgagatattagccgatttggtaat

SEQ ID NO: 182334 - DNA, 25 bp, Probe sequence
tagccgatttggtaattgaagaaat

SEQ ID NO: 182335 - DNA, 25 bp, Probe sequence
tatcgagatattagccgatttggta

SEQ ID NO: 182336 - DNA, 25 bp, Probe sequence
tattagccgatttggtaattgaaga

SEQ ID NO: 182337 - DNA, 25 bp, Probe sequence
ttatcgagatattagccgatttggt

SEQ ID NO: 182338 - DNA, 25 bp, Probe sequence
ttagccgatttggtaattgaagaaa

SEQ ID NO: 182339 - DNA, 25 bp, Probe sequence
attggttggtataactggtcaaatg

SEQ ID NO: 182340 - DNA, 25 bp, Probe sequence
attgactctcaaaatatagataatc

SEQ ID NO: 182341 - DNA, 25 bp, Probe sequence
atcgtctgtgattacttattctgta

SEQ ID NO: 182342 - DNA, 25 bp, Probe sequence
atgctaaataaaatcgtaattgtcg

SEQ ID NO: 182343 - DNA, 25 bp, Probe sequence
atggagaaatcgtctgtgattactt

SEQ ID NO: 182344 - DNA, 25 bp, Probe sequence
aggaggatagaaaaattgcaacgtt

SEQ ID NO: 182345 - DNA, 25 bp, Probe sequence
agtattttagatattgactctcaaa

SEQ ID NO: 182346 - DNA, 25 bp, Probe sequence
agcatttggcaagttagcttctaat

SEQ ID NO: 182347 - DNA, 25 bp, Probe sequence
acgttttgtgttgcaacgcaccgaa

SEQ ID NO: 182348 - DNA, 25 bp, Probe sequence
acactttgtcactgaattatatgtt

SEQ ID NO: 182349 - DNA, 25 bp, Probe sequence
aacacactttgtcactgaattatat

SEQ ID NO: 182350 - DNA, 25 bp, Probe sequence
aatcccaaaataatgaaattctctc

SEQ ID NO: 182351 - DNA, 25 bp, Probe sequence
caacgttttgtgttgcaacgcaccg

SEQ ID NO: 182352 - DNA, 25 bp, Probe sequence
caaacacactttgtcactgaattat

SEQ ID NO: 182353 - DNA, 25 bp, Probe sequence
gcaacgcaccgaaattataaagatg

SEQ ID NO: 182354 - DNA, 25 bp, Probe sequence
gaaatcgtctgtgattacttattct

SEQ ID NO: 182355 - DNA, 25 bp, Probe sequence
gaaattctctcagatagtattttag

SEQ ID NO: 182356 - DNA, 25 bp, Probe sequence
gacgaaagacgcacaaatatttgaa

SEQ ID NO: 182357 - DNA, 25 bp, Probe sequence
gacggacaaacacactttgtcactg

SEQ ID NO: 182358 - DNA, 25 bp, Probe sequence
gagactgacgaaagacgcacaaata

SEQ ID NO: 182359 - DNA, 25 bp, Probe sequence
gataatcatgacttattagaaattt

SEQ ID NO: 182360 - DNA, 25 bp, Probe sequence
gttttgtgttgcaacgcaccgaaat

SEQ ID NO: 182361 - DNA, 25 bp, Probe sequence
gtatgataaagacggacaaacacac

SEQ ID NO: 182362 - DNA, 25 bp, Probe sequence
gtctgtgattacttattctgtaaag

SEQ ID NO: 182363 - DNA, 25 bp, Probe sequence
gtgttgcaacgcaccgaaattataa

SEQ ID NO: 182364 - DNA, 25 bp, Probe sequence
ggtataactggtcaaatgagatcaa

SEQ ID NO: 182365 - DNA, 25 bp, Probe sequence
tgtcccctaaatcccaaaataatga

SEQ ID NO: 182366 - DNA, 25 bp, Probe sequence
tacattggttggtataactggtcaa

SEQ ID NO: 182367 - DNA, 25 bp, Probe sequence
tacttattctgtaaagcatttggca

SEQ ID NO: 182368 - DNA, 25 bp, Probe sequence
tatgtcccctaaatcccaaaataat

SEQ ID NO: 182369 - DNA, 25 bp, Probe sequence
tattctgtaaagcatttggcaagtt

SEQ ID NO: 182370 - DNA, 25 bp, Probe sequence
tttgtgttgcaacgcaccgaaatta

SEQ ID NO: 182371 - DNA, 25 bp, Probe sequence
ttggcaagttagcttctaatataga

SEQ ID NO: 182372 - DNA, 25 bp, Probe sequence
ttgtcactgaattatatgttgaaac

SEQ ID NO: 182373 - DNA, 25 bp, Probe sequence
attctttcaagggcattttcctgag

SEQ ID NO: 182374 - DNA, 25 bp, Probe sequence
attttcctgagtatgcggtaatgcc

SEQ ID NO: 182375 - DNA, 25 bp, Probe sequence
atgcggtaatgccaggcgtattaat

SEQ ID NO: 182376 - DNA, 25 bp, Probe sequence
acaggtgcggtagctattttaaata

SEQ ID NO: 182377 - DNA, 25 bp, Probe sequence
aaattatacctcacagacagccatt

SEQ ID NO: 182378 - DNA, 25 bp, Probe sequence
aacgtcaagtagtacctggtgatac

SEQ ID NO: 182379 - DNA, 25 bp, Probe sequence
aacttgcttgtagttgtgaacttac

SEQ ID NO: 182380 - DNA, 25 bp, Probe sequence
aacgaaccattctttcaagggcatt

SEQ ID NO: 182381 - DNA, 25 bp, Probe sequence
aagggcattttcctgagtatgcggt

SEQ ID NO: 182382 - DNA, 25 bp, Probe sequence
aaggtaatgctaaagctactgtcga

SEQ ID NO: 182383 - DNA, 25 bp, Probe sequence
aatgctaaagctactgtcgatggtc

SEQ ID NO: 182384 - DNA, 25 bp, Probe sequence
aatcgctttatttgctggtattgat

SEQ ID NO: 182385 - DNA, 25 bp, Probe sequence
ctcacagacagccatttttattaat

SEQ ID NO: 182386 - DNA, 25 bp, Probe sequence
gcgttagctcaaacaggtgcggtag

SEQ ID NO: 182387 - DNA, 25 bp, Probe sequence
gctcaaacaggtgcggtagctattt

SEQ ID NO: 182388 - DNA, 25 bp, Probe sequence
gctaaagctactgtcgatggtcaac

SEQ ID NO: 182389 - DNA, 25 bp, Probe sequence
gctactgtcgatggtcaacttgctt

SEQ ID NO: 182390 - DNA, 25 bp, Probe sequence
gaagcgttagctcaaacaggtgcgg

SEQ ID NO: 182391 - DNA, 25 bp, Probe sequence
gaaccattctttcaagggcattttc

SEQ ID NO: 182392 - DNA, 25 bp, Probe sequence
gaacttacatttgcaattcaagatg

SEQ ID NO: 182393 - DNA, 25 bp, Probe sequence
gagtatgcggtaatgccaggcgtat

SEQ ID NO: 182394 - DNA, 25 bp, Probe sequence
gtatcaggaaacgaaccattctttc

SEQ ID NO: 182395 - DNA, 25 bp, Probe sequence
gtagttgtgaacttacatttgcaat

SEQ ID NO: 182396 - DNA, 25 bp, Probe sequence
gtcgatggtcaacttgcttgtagtt

SEQ ID NO: 182397 - DNA, 25 bp, Probe sequence
gtggctattaaacaagtatcaggaa

SEQ ID NO: 182398 - DNA, 25 bp, Probe sequence
ggtaaaatcgctttatttgctggta

SEQ ID NO: 182399 - DNA, 25 bp, Probe sequence
ttaaacgtcaagtagtacctggtga

SEQ ID NO: 182400 - DNA, 25 bp, Probe sequence
tgctggtattgataaatgtcgtttt

SEQ ID NO: 182401 - DNA, 25 bp, Probe sequence
taacgttggaagtagaaatcactaa

SEQ ID NO: 182402 - DNA, 25 bp, Probe sequence
tacctggtgatactttaacgttgga

SEQ ID NO: 182403 - DNA, 25 bp, Probe sequence
tactgtcgatggtcaacttgcttgt

SEQ ID NO: 182404 - DNA, 25 bp, Probe sequence
tacctcacagacagccatttttatt

SEQ ID NO: 182405 - DNA, 25 bp, Probe sequence
tatacctcacagacagccattttta

SEQ ID NO: 182406 - DNA, 25 bp, Probe sequence
ttaaacaaattatacctcacagaca

SEQ ID NO: 182407 - DNA, 25 bp, Probe sequence
atatgttagtaaaatgcgtgcaagt

SEQ ID NO: 182408 - DNA, 25 bp, Probe sequence
atggcagcatcattagctaagggta

SEQ ID NO: 182409 - DNA, 25 bp, Probe sequence
aggttttgaagctttaggcgcagaa

SEQ ID NO: 182410 - DNA, 25 bp, Probe sequence
agattttccaagtgtaggagcaaca

SEQ ID NO: 182411 - DNA, 25 bp, Probe sequence
acagcatctttattagcttctgata

SEQ ID NO: 182412 - DNA, 25 bp, Probe sequence
aacgcacctagatagaggctatgtt

SEQ ID NO: 182413 - DNA, 25 bp, Probe sequence
aagcgactgatttaagagcagcagc

SEQ ID NO: 182414 - DNA, 25 bp, Probe sequence
aaggtgcacaagttaaagcgactga

SEQ ID NO: 182415 - DNA, 25 bp, Probe sequence
aatggtaatatttatgctaatgcta

SEQ ID NO: 182416 - DNA, 25 bp, Probe sequence
gctggtacagacacaattacaatca

SEQ ID NO: 182417 - DNA, 25 bp, Probe sequence
gcagagttcaaacgtatgaatgcta

SEQ ID NO: 182418 - DNA, 25 bp, Probe sequence
gcaagactaggacatgctattgttg

SEQ ID NO: 182419 - DNA, 25 bp, Probe sequence
gaattactggtgctggtacagacac

SEQ ID NO: 182420 - DNA, 25 bp, Probe sequence
gaaggtcgtagtgctaaacttgaag

SEQ ID NO: 182421 - DNA, 25 bp, Probe sequence
gaaaatgctgttgtcgttgatgcaa

SEQ ID NO: 182422 - DNA, 25 bp, Probe sequence
gacatgctattgttgcattgcctgg

SEQ ID NO: 182423 - DNA, 25 bp, Probe sequence
gaggctatgttgacttacacggtaa

SEQ ID NO: 182424 - DNA, 25 bp, Probe sequence
gatggtattcgtgtacgtgctgaag

SEQ ID NO: 182425 - DNA, 25 bp, Probe sequence
gatatttttgtacgtggtgcaatca

SEQ ID NO: 182426 - DNA, 25 bp, Probe sequence
gattgagcaacacattaaaggtttt

SEQ ID NO: 182427 - DNA, 25 bp, Probe sequence
gtacgtggtgcaatcaaagaacata

SEQ ID NO: 182428 - DNA, 25 bp, Probe sequence
gggacctcttttagcaagactagga

SEQ ID NO: 182429 - DNA, 25 bp, Probe sequence
ggtgtagaacatgctatcattccag

SEQ ID NO: 182430 - DNA, 25 bp, Probe sequence
ggtgcagacattgaacgtattaacg

SEQ ID NO: 182431 - DNA, 25 bp, Probe sequence
ggtaaaagtcaattgcaaggtgcac

SEQ ID NO: 182432 - DNA, 25 bp, Probe sequence
tgctgacgttacatacaaaaaggac

SEQ ID NO: 182433 - DNA, 25 bp, Probe sequence
tgcgtgcaagtattttagttatggg

SEQ ID NO: 182434 - DNA, 25 bp, Probe sequence
tcgttgatgcaacaaagactctaaa

SEQ ID NO: 182435 - DNA, 25 bp, Probe sequence
taatgttccagctttaagtgatgta

SEQ ID NO: 182436 - DNA, 25 bp, Probe sequence
tacatcaattcatttagattttcca

SEQ ID NO: 182437 - DNA, 25 bp, Probe sequence
ttaggcgcagaaattcatcttgaaa

SEQ ID NO: 182438 - DNA, 25 bp, Probe sequence
ttagttatgggacctcttttagcaa

SEQ ID NO: 182439 - DNA, 25 bp, Probe sequence
ttactgaattaacgcacctagatag

SEQ ID NO: 182440 - DNA, 25 bp, Probe sequence
ttagctggattagttgctgatggta

SEQ ID NO: 182441 - DNA, 25 bp, Probe sequence
attgcctattgggctttacaatcaa

SEQ ID NO: 182442 - DNA, 25 bp, Probe sequence
attaggcactgcagtaagcaatttt

SEQ ID NO: 182443 - DNA, 25 bp, Probe sequence
atttgttgctattttattaggcact

SEQ ID NO: 182444 - DNA, 25 bp, Probe sequence
atatcggacaatatgcagttatcca

SEQ ID NO: 182445 - DNA, 25 bp, Probe sequence
atccatttagtgttacatgttgtat

SEQ ID NO: 182446 - DNA, 25 bp, Probe sequence
atgtatttgtattgcctattgggct

SEQ ID NO: 182447 - DNA, 25 bp, Probe sequence
agcaattttattgtagatttgttac

SEQ ID NO: 182448 - DNA, 25 bp, Probe sequence
actcgacgcaggtaaaatatttaat

SEQ ID NO: 182449 - DNA, 25 bp, Probe sequence
acaatactcgacgcaggtaaaatat

SEQ ID NO: 182450 - DNA, 25 bp, Probe sequence
aagtgtgtatgatatttgttgctat

SEQ ID NO: 182451 - DNA, 25 bp, Probe sequence
aatatgcagttatccatttagtgtt

SEQ ID NO: 182452 - DNA, 25 bp, Probe sequence
catgttgtatgtatttgtattgcct

SEQ ID NO: 182453 - DNA, 25 bp, Probe sequence
gccactcaattacaagtgtgtatga

SEQ ID NO: 182454 - DNA, 25 bp, Probe sequence
gcctattgggctttacaatcaatta

SEQ ID NO: 182455 - DNA, 25 bp, Probe sequence
gctattttattaggcactgcagtaa

SEQ ID NO: 182456 - DNA, 25 bp, Probe sequence
gcagttatccatttagtgttacatg

SEQ ID NO: 182457 - DNA, 25 bp, Probe sequence
gacaatatgcagttatccatttagt

SEQ ID NO: 182458 - DNA, 25 bp, Probe sequence
gatttgttacaatactcgacgcagg

SEQ ID NO: 182459 - DNA, 25 bp, Probe sequence
gttgtatgtatttgtattgcctatt

SEQ ID NO: 182460 - DNA, 25 bp, Probe sequence
gttgctattttattaggcactgcag

SEQ ID NO: 182461 - DNA, 25 bp, Probe sequence
gttacaatactcgacgcaggtaaaa

SEQ ID NO: 182462 - DNA, 25 bp, Probe sequence
gttatccatttagtgttacatgttg

SEQ ID NO: 182463 - DNA, 25 bp, Probe sequence
gtattgcctattgggctttacaatc

SEQ ID NO: 182464 - DNA, 25 bp, Probe sequence
gtatttgtattgcctattgggcttt

SEQ ID NO: 182465 - DNA, 25 bp, Probe sequence
gtatgtatttgtattgcctattggg

SEQ ID NO: 182466 - DNA, 25 bp, Probe sequence
gtgtatgatatttgttgctatttta

SEQ ID NO: 182467 - DNA, 25 bp, Probe sequence
ggattatatcggacaatatgcagtt

SEQ ID NO: 182468 - DNA, 25 bp, Probe sequence
ggcactgcagtaagcaattttattg

SEQ ID NO: 182469 - DNA, 25 bp, Probe sequence
tgggctttacaatcaattagattag

SEQ ID NO: 182470 - DNA, 25 bp, Probe sequence
tgcagttatccatttagtgttacat

SEQ ID NO: 182471 - DNA, 25 bp, Probe sequence
tcggacaatatgcagttatccattt

SEQ ID NO: 182472 - DNA, 25 bp, Probe sequence
tttgtattgcctattgggctttaca

SEQ ID NO: 182473 - DNA, 25 bp, Probe sequence
tttgttacaatactcgacgcaggta

SEQ ID NO: 182474 - DNA, 25 bp, Probe sequence
ttttattaggcactgcagtaagcaa

SEQ ID NO: 182475 - DNA, 25 bp, Probe sequence
attgtcactcctaatggttctgttt

SEQ ID NO: 182476 - DNA, 25 bp, Probe sequence
attgctgtaagcgatggctttgttg

SEQ ID NO: 182477 - DNA, 25 bp, Probe sequence
attaaacctagatattgtcactcct

SEQ ID NO: 182478 - DNA, 25 bp, Probe sequence
atattccaactgtagctgctttaaa

SEQ ID NO: 182479 - DNA, 25 bp, Probe sequence
atcgtgataatgttgaactcgttgt

SEQ ID NO: 182480 - DNA, 25 bp, Probe sequence
atgttgaactcgttgttatgcaaac

SEQ ID NO: 182481 - DNA, 25 bp, Probe sequence
aggtgtcatgagtggacatattcca

SEQ ID NO: 182482 - DNA, 25 bp, Probe sequence
actcctaatggttctgtttacaatc

SEQ ID NO: 182483 - DNA, 25 bp, Probe sequence
aaataaccgtttgcgtgtggctgaa

SEQ ID NO: 182484 - DNA, 25 bp, Probe sequence
aaacctagatattgtcactcctaat

SEQ ID NO: 182485 - DNA, 25 bp, Probe sequence
aacagctggtgagataggtgtcatg

SEQ ID NO: 182486 - DNA, 25 bp, Probe sequence
aagcaagagcagagtctcacttgga

SEQ ID NO: 182487 - DNA, 25 bp, Probe sequence
aagcgatggctttgttgaagttaga

SEQ ID NO: 182488 - DNA, 25 bp, Probe sequence
aatggttctgtttacaatcgtgata

SEQ ID NO: 182489 - DNA, 25 bp, Probe sequence
aatgatgacgacaatactgatattc

SEQ ID NO: 182490 - DNA, 25 bp, Probe sequence
caatactgatattcatagagccgaa

SEQ ID NO: 182491 - DNA, 25 bp, Probe sequence
cattgttcagactgcagaaactgca

SEQ ID NO: 182492 - DNA, 25 bp, Probe sequence
gctgctttaaaaacaggctttgtaa

SEQ ID NO: 182493 - DNA, 25 bp, Probe sequence
gagctttagagagagcaaataaccg

SEQ ID NO: 182494 - DNA, 25 bp, Probe sequence
gagcagagtctcacttggaaaatga

SEQ ID NO: 182495 - DNA, 25 bp, Probe sequence
gagaaattgatgttgaaagagctaa

SEQ ID NO: 182496 - DNA, 25 bp, Probe sequence
gatattgtcactcctaatggttctg

SEQ ID NO: 182497 - DNA, 25 bp, Probe sequence
gtttcaatcattgttcagactgcag

SEQ ID NO: 182498 - DNA, 25 bp, Probe sequence
gtttgcgtgtggctgaattaaaata

SEQ ID NO: 182499 - DNA, 25 bp, Probe sequence
gtagctgctttaaaaacaggctttg

SEQ ID NO: 182500 - DNA, 25 bp, Probe sequence
gtcactcctaatggttctgtttaca

SEQ ID NO: 182501 - DNA, 25 bp, Probe sequence
gtctcacttggaaaatgatgacgac

SEQ ID NO: 182502 - DNA, 25 bp, Probe sequence
gtgaaatttcacgatggaactgaat

SEQ ID NO: 182503 - DNA, 25 bp, Probe sequence
ggttctgtttacaatcgtgataatg

SEQ ID NO: 182504 - DNA, 25 bp, Probe sequence
ggacatattccaactgtagctgctt

SEQ ID NO: 182505 - DNA, 25 bp, Probe sequence
ggaactgaatatattgctgtaagcg

SEQ ID NO: 182506 - DNA, 25 bp, Probe sequence
taaccgtttgcgtgtggctgaatta

SEQ ID NO: 182507 - DNA, 25 bp, Probe sequence
ttatgcaaacaacagctggtgagat

SEQ ID NO: 182508 - DNA, 25 bp, Probe sequence
ttcatagagccgaaagagctttaga

SEQ ID NO: 182509 - DNA, 25 bp, Probe sequence
attacttatgcgtcatttattgcta

SEQ ID NO: 182510 - DNA, 25 bp, Probe sequence
atttaacattacttatgcgtcattt

SEQ ID NO: 182511 - DNA, 25 bp, Probe sequence
atttgcaacgtcttaacaagtcatc

SEQ ID NO: 182512 - DNA, 25 bp, Probe sequence
atatttaacattacttatgcgtcat

SEQ ID NO: 182513 - DNA, 25 bp, Probe sequence
atcacaacatttgcaacgtcttaac

SEQ ID NO: 182514 - DNA, 25 bp, Probe sequence
atgcgtcatttattgctaaaattat

SEQ ID NO: 182515 - DNA, 25 bp, Probe sequence
atgtgctatcacaacatttgcaacg

SEQ ID NO: 182516 - DNA, 25 bp, Probe sequence
acttatgcgtcatttattgctaaaa

SEQ ID NO: 182517 - DNA, 25 bp, Probe sequence
acatttgcaacgtcttaacaagtca

SEQ ID NO: 182518 - DNA, 25 bp, Probe sequence
acattacttatgcgtcatttattgc

SEQ ID NO: 182519 - DNA, 25 bp, Probe sequence
acaacatttgcaacgtcttaacaag

SEQ ID NO: 182520 - DNA, 25 bp, Probe sequence
aacatttgcaacgtcttaacaagtc

SEQ ID NO: 182521 - DNA, 25 bp, Probe sequence
aattatgtgctatcacaacatttgc

SEQ ID NO: 182522 - DNA, 25 bp, Probe sequence
caacatttgcaacgtcttaacaagt

SEQ ID NO: 182523 - DNA, 25 bp, Probe sequence
cacaacatttgcaacgtcttaacaa

SEQ ID NO: 182524 - DNA, 25 bp, Probe sequence
catttgcaacgtcttaacaagtcat

SEQ ID NO: 182525 - DNA, 25 bp, Probe sequence
cattacttatgcgtcatttattgct

SEQ ID NO: 182526 - DNA, 25 bp, Probe sequence
ctatcacaacatttgcaacgtctta

SEQ ID NO: 182527 - DNA, 25 bp, Probe sequence
gcgtcatttattgctaaaattattg

SEQ ID NO: 182528 - DNA, 25 bp, Probe sequence
gctatcacaacatttgcaacgtctt

SEQ ID NO: 182529 - DNA, 25 bp, Probe sequence
gacaaacaaaaattatgtgctatca

SEQ ID NO: 182530 - DNA, 25 bp, Probe sequence
gtgctatcacaacatttgcaacgtc

SEQ ID NO: 182531 - DNA, 25 bp, Probe sequence
tgtgctatcacaacatttgcaacgt

SEQ ID NO: 182532 - DNA, 25 bp, Probe sequence
tgctatcacaacatttgcaacgtct

SEQ ID NO: 182533 - DNA, 25 bp, Probe sequence
tcacaacatttgcaacgtcttaaca

SEQ ID NO: 182534 - DNA, 25 bp, Probe sequence
taacattacttatgcgtcatttatt

SEQ ID NO: 182535 - DNA, 25 bp, Probe sequence
taaacatttctaaatatttaacatt

SEQ ID NO: 182536 - DNA, 25 bp, Probe sequence
tacttatgcgtcatttattgctaaa

SEQ ID NO: 182537 - DNA, 25 bp, Probe sequence
tatcacaacatttgcaacgtcttaa

SEQ ID NO: 182538 - DNA, 25 bp, Probe sequence
tttgcaacgtcttaacaagtcatct

SEQ ID NO: 182539 - DNA, 25 bp, Probe sequence
ttatgtgctatcacaacatttgcaa

SEQ ID NO: 182540 - DNA, 25 bp, Probe sequence
ttatgcgtcatttattgctaaaatt

SEQ ID NO: 182541 - DNA, 25 bp, Probe sequence
ttacttatgcgtcatttattgctaa

SEQ ID NO: 182542 - DNA, 25 bp, Probe sequence
ttaacattacttatgcgtcatttat

SEQ ID NO: 182543 - DNA, 25 bp, Probe sequence
gggaattggccgtgtaactcaagtt

SEQ ID NO: 182544 - DNA, 25 bp, Probe sequence
atcggattgttcggtggtgccggtg

SEQ ID NO: 182545 - DNA, 25 bp, Probe sequence
atggctgaatatttccgtgacgaac

SEQ ID NO: 182546 - DNA, 25 bp, Probe sequence
acaacatcgctcaagagcacggtgg

SEQ ID NO: 182547 - DNA, 25 bp, Probe sequence
aaatgaatgagccacctggtgcacg

SEQ ID NO: 182548 - DNA, 25 bp, Probe sequence
aacagccatggtattcgggcaaatg

SEQ ID NO: 182549 - DNA, 25 bp, Probe sequence
aacgccttggttattgatgtgccta

SEQ ID NO: 182550 - DNA, 25 bp, Probe sequence
aagctggttctgaggtatctgcatt

SEQ ID NO: 182551 - DNA, 25 bp, Probe sequence
aattcaattcttcttatctcaaaac

SEQ ID NO: 182552 - DNA, 25 bp, Probe sequence
cacctggtgcacgtatgcgtgttgc

SEQ ID NO: 182553 - DNA, 25 bp, Probe sequence
ctgccgatgactatactgacccagc

SEQ ID NO: 182554 - DNA, 25 bp, Probe sequence
cgacagcgtttgcccatttagatgc

SEQ ID NO: 182555 - DNA, 25 bp, Probe sequence
gccggtgtaggtgaacgtactcgtg

SEQ ID NO: 182556 - DNA, 25 bp, Probe sequence
gcgatggattcaactgatggtgtcc

SEQ ID NO: 182557 - DNA, 25 bp, Probe sequence
gcacggtggtatttctgtattcgcc

SEQ ID NO: 182558 - DNA, 25 bp, Probe sequence
gcaccagcattcgatgaactttcaa

SEQ ID NO: 182559 - DNA, 25 bp, Probe sequence
gaacgcgcacgtagaattcaattct

SEQ ID NO: 182560 - DNA, 25 bp, Probe sequence
gaaattagtgattctgttcgccgcg

SEQ ID NO: 182561 - DNA, 25 bp, Probe sequence
gttgcgctgcaattaggtgacgacg

SEQ ID NO: 182562 - DNA, 25 bp, Probe sequence
gttaccaaccaacacttgctactga

SEQ ID NO: 182563 - DNA, 25 bp, Probe sequence
gtatttctgtattcgccggtgtagg

SEQ ID NO: 182564 - DNA, 25 bp, Probe sequence
gtagatttactagcaccttatatta

SEQ ID NO: 182565 - DNA, 25 bp, Probe sequence
gtagctcgtgatgtacaatcaacac

SEQ ID NO: 182566 - DNA, 25 bp, Probe sequence
gtaactcaagttatgggtcctgtaa

SEQ ID NO: 182567 - DNA, 25 bp, Probe sequence
gtgacgacgttgttcgtacaattgc

SEQ ID NO: 182568 - DNA, 25 bp, Probe sequence
gggtatttatccagccgtggatcca

SEQ ID NO: 182569 - DNA, 25 bp, Probe sequence
gtggatccattagcgtctacatcaa

SEQ ID NO: 182570 - DNA, 25 bp, Probe sequence
gggtcctgtaattgatgttcgattt

SEQ ID NO: 182571 - DNA, 25 bp, Probe sequence
tgccttctgcagtaggttaccaacc

SEQ ID NO: 182572 - DNA, 25 bp, Probe sequence
tgcgtgttgcattatctggtttaac

SEQ ID NO: 182573 - DNA, 25 bp, Probe sequence
tccatcgtcaagcaccagcattcga

SEQ ID NO: 182574 - DNA, 25 bp, Probe sequence
tcaagcggtattcgtacctgccgat

SEQ ID NO: 182575 - DNA, 25 bp, Probe sequence
tattaggtcgtatgccttctgcagt

SEQ ID NO: 182576 - DNA, 25 bp, Probe sequence
ttatctcaaaacttccacgtagcgg

SEQ ID NO: 182577 - DNA, 25 bp, Probe sequence
atagtcattatgtcagcgttcttga

SEQ ID NO: 182578 - DNA, 25 bp, Probe sequence
atctgttcaagcactagctaaccat

SEQ ID NO: 182579 - DNA, 25 bp, Probe sequence
atgctaagacctcgtaaaattacta

SEQ ID NO: 182580 - DNA, 25 bp, Probe sequence
agggcaacaaggtgttgatttccta

SEQ ID NO: 182581 - DNA, 25 bp, Probe sequence
agtagacgtacctgatcaaccttct

SEQ ID NO: 182582 - DNA, 25 bp, Probe sequence
agctaaccatgctatagacttatac

SEQ ID NO: 182583 - DNA, 25 bp, Probe sequence
actgcagttgcaggggcaagtagca

SEQ ID NO: 182584 - DNA, 25 bp, Probe sequence
acagtattgtagttttagggcaaca

SEQ ID NO: 182585 - DNA, 25 bp, Probe sequence
acaaaacaattcacaccatatatgg

SEQ ID NO: 182586 - DNA, 25 bp, Probe sequence
aacaagcctacatctagacaagtat

SEQ ID NO: 182587 - DNA, 25 bp, Probe sequence
aaccatccaatgctaagacctcgta

SEQ ID NO: 182588 - DNA, 25 bp, Probe sequence
caagttcaaaacttcgtagagctga

SEQ ID NO: 182589 - DNA, 25 bp, Probe sequence
catggtcatttgtcttcttatgaat

SEQ ID NO: 182590 - DNA, 25 bp, Probe sequence
ctatcttaagtgtaatcttgcctca

SEQ ID NO: 182591 - DNA, 25 bp, Probe sequence
gccactgataatgcaactgaactta

SEQ ID NO: 182592 - DNA, 25 bp, Probe sequence
gcaggtgcatatagtgcaaacgtgc

SEQ ID NO: 182593 - DNA, 25 bp, Probe sequence
tgaaattgttggtggttccgcagcg

SEQ ID NO: 182594 - DNA, 25 bp, Probe sequence
gcaactgaacttattgatgacttat

SEQ ID NO: 182595 - DNA, 25 bp, Probe sequence
gaaagcgatgaacatggtatcaagt

SEQ ID NO: 182596 - DNA, 25 bp, Probe sequence
gacaagtattaccattatctcaaga

SEQ ID NO: 182597 - DNA, 25 bp, Probe sequence
gactgcgatgaaaaatgccactgat

SEQ ID NO: 182598 - DNA, 25 bp, Probe sequence
gacgcaaaagcaagtgagcatgcaa

SEQ ID NO: 182599 - DNA, 25 bp, Probe sequence
gagcatgcaacacgtatgactgcga

SEQ ID NO: 182600 - DNA, 25 bp, Probe sequence
gagacaagcagaaattacgcaacaa

SEQ ID NO: 182601 - DNA, 25 bp, Probe sequence
gagtattctcaagtagacgtacctg

SEQ ID NO: 182602 - DNA, 25 bp, Probe sequence
gaggttatgacattgagtattctca

SEQ ID NO: 182603 - DNA, 25 bp, Probe sequence
gatcaaccttctttcaaatctgttc

SEQ ID NO: 182604 - DNA, 25 bp, Probe sequence
gtcagcgttcttgaaaacaagccta

SEQ ID NO: 182605 - DNA, 25 bp, Probe sequence
gtcttcttatgaatttgagccagat

SEQ ID NO: 182606 - DNA, 25 bp, Probe sequence
gtgtaatcttgcctcaatatgttga

SEQ ID NO: 182607 - DNA, 25 bp, Probe sequence
ggcaagtagcaatacaaaccatcca

SEQ ID NO: 182608 - DNA, 25 bp, Probe sequence
tggtggttccgcagcgcttgaataa

SEQ ID NO: 182609 - DNA, 25 bp, Probe sequence
tgcaagatgcaattactgcagttgc

SEQ ID NO: 182610 - DNA, 25 bp, Probe sequence
tatgttgagagtttgatttacggaa

SEQ ID NO: 182611 - DNA, 25 bp, Probe sequence
atcaagttgatacattgcacttcat

SEQ ID NO: 182612 - DNA, 25 bp, Probe sequence
atgcttacttgaatgatcatcatca

SEQ ID NO: 182613 - DNA, 25 bp, Probe sequence
acgcgcgatgatggcaggatttatt

SEQ ID NO: 182614 - DNA, 25 bp, Probe sequence
actactaaccagtaacttcatgtac

SEQ ID NO: 182615 - DNA, 25 bp, Probe sequence
actttactgtaggcctgtattataa

SEQ ID NO: 182616 - DNA, 25 bp, Probe sequence
aaatgtttgtcatgatgttcggtgt

SEQ ID NO: 182617 - DNA, 25 bp, Probe sequence
aagcaacacacgaaccagatttacc

SEQ ID NO: 182618 - DNA, 25 bp, Probe sequence
caaatgtaatgacgccagatatgtt

SEQ ID NO: 182619 - DNA, 25 bp, Probe sequence
catgtactttactgtaggcctgtat

SEQ ID NO: 182620 - DNA, 25 bp, Probe sequence
cttcatgtactttactgtaggcctg

SEQ ID NO: 182621 - DNA, 25 bp, Probe sequence
ctgtaggcctgtattataaagtaat

SEQ ID NO: 182622 - DNA, 25 bp, Probe sequence
gcgcgatgatggcaggatttattat

SEQ ID NO: 182623 - DNA, 25 bp, Probe sequence
gaatgatcatcatcaattttataaa

SEQ ID NO: 182624 - DNA, 25 bp, Probe sequence
gatgttcggtgttaccatattcgcc

SEQ ID NO: 182625 - DNA, 25 bp, Probe sequence
gaggatgtcattgtgaaggagaaac

SEQ ID NO: 182626 - DNA, 25 bp, Probe sequence
gttaccatattcgcctttatgggtt

SEQ ID NO: 182627 - DNA, 25 bp, Probe sequence
gtttttcaaatgtaatgacgccaga

SEQ ID NO: 182628 - DNA, 25 bp, Probe sequence
gtttcatgcgtttttcaaatgtaat

SEQ ID NO: 182629 - DNA, 25 bp, Probe sequence
gtactttactgtaggcctgtattat

SEQ ID NO: 182630 - DNA, 25 bp, Probe sequence
gtaatgacgccagatatgttaaatc

SEQ ID NO: 182631 - DNA, 25 bp, Probe sequence
ggtgttaccatattcgcctttatgg

SEQ ID NO: 182632 - DNA, 25 bp, Probe sequence
tgttcggtgttaccatattcgcctt

SEQ ID NO: 182633 - DNA, 25 bp, Probe sequence
tccgaactactaaccagtaacttca

SEQ ID NO: 182634 - DNA, 25 bp, Probe sequence
tactcattttatttacaaactccga

SEQ ID NO: 182635 - DNA, 25 bp, Probe sequence
taggtttattctatgcttacttgaa

SEQ ID NO: 182636 - DNA, 25 bp, Probe sequence
tatcagttaaagcaacacacgaacc

SEQ ID NO: 182637 - DNA, 25 bp, Probe sequence
tattacgcgcgatgatggcaggatt

SEQ ID NO: 182638 - DNA, 25 bp, Probe sequence
tatttagtttcatgcgtttttcaaa

SEQ ID NO: 182639 - DNA, 25 bp, Probe sequence
tattcgcctttatgggttatgaaca

SEQ ID NO: 182640 - DNA, 25 bp, Probe sequence
tttgtcatgatgttcggtgttacca

SEQ ID NO: 182641 - DNA, 25 bp, Probe sequence
ttacaaactccgaactactaaccag

SEQ ID NO: 182642 - DNA, 25 bp, Probe sequence
tttgcgttagtactcattttattta

SEQ ID NO: 182643 - DNA, 25 bp, Probe sequence
tttatttagtttcatgcgtttttca

SEQ ID NO: 182644 - DNA, 25 bp, Probe sequence
ttctatgcttacttgaatgatcatc

SEQ ID NO: 182645 - DNA, 25 bp, Probe sequence
attcttctcaggtgtaagaccagcg

SEQ ID NO: 182646 - DNA, 25 bp, Probe sequence
attccagttgtagatatcacacgtt

SEQ ID NO: 182647 - DNA, 25 bp, Probe sequence
atttgtatctatgttgctattggtc

SEQ ID NO: 182648 - DNA, 25 bp, Probe sequence
atctcgtgttggtggatctgcacaa

SEQ ID NO: 182649 - DNA, 25 bp, Probe sequence
atgtccgtaactgatgtaggtactg

SEQ ID NO: 182650 - DNA, 25 bp, Probe sequence
atggacaaatcttcttacaatctga

SEQ ID NO: 182651 - DNA, 25 bp, Probe sequence
gacctccaggtcgtgaagcataccc

SEQ ID NO: 182652 - DNA, 25 bp, Probe sequence
actgcattaccaattatcgaaacac

SEQ ID NO: 182653 - DNA, 25 bp, Probe sequence
acactattgttgtagcagcatcagc

SEQ ID NO: 182654 - DNA, 25 bp, Probe sequence
aaacgatgacttaggtggcggttca

SEQ ID NO: 182655 - DNA, 25 bp, Probe sequence
aacacaactaaaacacgtccagtag

SEQ ID NO: 182656 - DNA, 25 bp, Probe sequence
aagcagcagcttatcgtgagttatc

SEQ ID NO: 182657 - DNA, 25 bp, Probe sequence
catttgcacaattcggttcagacct

SEQ ID NO: 182658 - DNA, 25 bp, Probe sequence
gcaggcgctttagactacactattg

SEQ ID NO: 182659 - DNA, 25 bp, Probe sequence
gcagcatcagcttctgaaccttctc

SEQ ID NO: 182660 - DNA, 25 bp, Probe sequence
tccataacggcgtacttggtttagc

SEQ ID NO: 182661 - DNA, 25 bp, Probe sequence
gaaagttgctggtacgttacgtctt

SEQ ID NO: 182662 - DNA, 25 bp, Probe sequence
gaaatcagtgcattacttcgctcac

SEQ ID NO: 182663 - DNA, 25 bp, Probe sequence
gagctagtagaattccataacggcg

SEQ ID NO: 182664 - DNA, 25 bp, Probe sequence
gagtcaaacgtgggtgtggttattt

SEQ ID NO: 182665 - DNA, 25 bp, Probe sequence
gatggtattgcattaattcacggat

SEQ ID NO: 182666 - DNA, 25 bp, Probe sequence
gtacgttacgtcttgacttagcgtc

SEQ ID NO: 182667 - DNA, 25 bp, Probe sequence
gtgcattacttcgctcacaaattga

SEQ ID NO: 182668 - DNA, 25 bp, Probe sequence
ggacaaggaccgattaacacaacta

SEQ ID NO: 182669 - DNA, 25 bp, Probe sequence
gtgatatttcagcttatgtaccaac

SEQ ID NO: 182670 - DNA, 25 bp, Probe sequence
ggtggcttaccagatgctgagaagt

SEQ ID NO: 182671 - DNA, 25 bp, Probe sequence
ggtggcggttcaattactgcattac

SEQ ID NO: 182672 - DNA, 25 bp, Probe sequence
ggacaatctgtatctcgtgttggtg

SEQ ID NO: 182673 - DNA, 25 bp, Probe sequence
taaacgtactggtcgtatcatggaa

SEQ ID NO: 182674 - DNA, 25 bp, Probe sequence
taaatgacgttatggctggtgagct

SEQ ID NO: 182675 - DNA, 25 bp, Probe sequence
tacccaggtgacgtattctacttac

SEQ ID NO: 182676 - DNA, 25 bp, Probe sequence
ttattattacgtagacctccaggtc

SEQ ID NO: 182677 - DNA, 25 bp, Probe sequence
ttagcccaaaaccttgaagagtcaa

SEQ ID NO: 182678 - DNA, 25 bp, Probe sequence
ttctgaaccttctccattattatat

SEQ ID NO: 182679 - DNA, 25 bp, Probe sequence
atttactgacattaatccatacatt

SEQ ID NO: 182680 - DNA, 25 bp, Probe sequence
atagctgacgtattcaaggcgttcc

SEQ ID NO: 182681 - DNA, 25 bp, Probe sequence
ataacggacactacaatcaagattt

SEQ ID NO: 182682 - DNA, 25 bp, Probe sequence
agtcggcacaactgtattagatggt

SEQ ID NO: 182683 - DNA, 25 bp, Probe sequence
actcaacaaacgaagttatctaaag

SEQ ID NO: 182684 - DNA, 25 bp, Probe sequence
aactcaaacagcagaacaacgtcgt

SEQ ID NO: 182685 - DNA, 25 bp, Probe sequence
aaatatgatgtacgtgttagcagat

SEQ ID NO: 182686 - DNA, 25 bp, Probe sequence
aagcttatataacggacactacaat

SEQ ID NO: 182687 - DNA, 25 bp, Probe sequence
aagattgtcaaactagtaactcaac

SEQ ID NO: 182688 - DNA, 25 bp, Probe sequence
aatggttgacagtaatccaactcaa

SEQ ID NO: 182689 - DNA, 25 bp, Probe sequence
aatgatcttgtccaattacaaagaa

SEQ ID NO: 182690 - DNA, 25 bp, Probe sequence
caaggcgttccaaagcttatataac

SEQ ID NO: 182691 - DNA, 25 bp, Probe sequence
caaacagcagaacaacgtcgtgagt

SEQ ID NO: 182692 - DNA, 25 bp, Probe sequence
gctgacgtattcaaggcgttccaaa

SEQ ID NO: 182693 - DNA, 25 bp, Probe sequence
gctaaagcattatttgacgtgtcat

SEQ ID NO: 182694 - DNA, 25 bp, Probe sequence
gacactacaatcaagattttgcaac

SEQ ID NO: 182695 - DNA, 25 bp, Probe sequence
gacagtaatccaactcaaacagcag

SEQ ID NO: 182696 - DNA, 25 bp, Probe sequence
gacatatctcattaatagctgacgt

SEQ ID NO: 182697 - DNA, 25 bp, Probe sequence
gacgtattcaaggcgttccaaagct

SEQ ID NO: 182698 - DNA, 25 bp, Probe sequence
gagtcaacatatgaattgagtcaag

SEQ ID NO: 182699 - DNA, 25 bp, Probe sequence
gatgtacgtgttagcagataataga

SEQ ID NO: 182700 - DNA, 25 bp, Probe sequence
gttaaagtcggcacaactgtattag

SEQ ID NO: 182701 - DNA, 25 bp, Probe sequence
gttagaaatgatcttgtccaattac

SEQ ID NO: 182702 - DNA, 25 bp, Probe sequence
gtattcaaggcgttccaaagcttat

SEQ ID NO: 182703 - DNA, 25 bp, Probe sequence
gtagctaacaagtatgctaaagcat

SEQ ID NO: 182704 - DNA, 25 bp, Probe sequence
gtaatccaactcaaacagcagaaca

SEQ ID NO: 182705 - DNA, 25 bp, Probe sequence
gtcaaactagtaactcaacaaacga

SEQ ID NO: 182706 - DNA, 25 bp, Probe sequence
gtgagttgattaatggtgtatttac

SEQ ID NO: 182707 - DNA, 25 bp, Probe sequence
gtggatttagagttaaagtcggcac

SEQ ID NO: 182708 - DNA, 25 bp, Probe sequence
ggtgtatttactgacattaatccat

SEQ ID NO: 182709 - DNA, 25 bp, Probe sequence
ggtagtgttagaaatgatcttgtcc

SEQ ID NO: 182710 - DNA, 25 bp, Probe sequence
ggcacaactgtattagatggtagtg

SEQ ID NO: 182711 - DNA, 25 bp, Probe sequence
ttttgcaacaattgagtcaacatat

SEQ ID NO: 182712 - DNA, 25 bp, Probe sequence
ttgacgtgtcattagatacaaataa

SEQ ID NO: 182713 - DNA, 25 bp, Probe sequence
gctggaggcgttgagtggggtactg

SEQ ID NO: 182714 - DNA, 25 bp, Probe sequence
attaacagagatatcgatgacgcag

SEQ ID NO: 182715 - DNA, 25 bp, Probe sequence
attattcatgaagcaaacgtacgtg

SEQ ID NO: 182716 - DNA, 25 bp, Probe sequence
agcacaaagtgaaatcaatagccaa

SEQ ID NO: 182717 - DNA, 25 bp, Probe sequence
aaagcattggttgacaagtatctaa

SEQ ID NO: 182718 - DNA, 25 bp, Probe sequence
aacgtacgtgcaaacggtatgattg

SEQ ID NO: 182719 - DNA, 25 bp, Probe sequence
aacggtatgattgaaacagcacaaa

SEQ ID NO: 182720 - DNA, 25 bp, Probe sequence
aagaacgtgccattgcagatattaa

SEQ ID NO: 182721 - DNA, 25 bp, Probe sequence
aagttcgcatggggtccattgaaag

SEQ ID NO: 182722 - DNA, 25 bp, Probe sequence
aataatcaagtatctgaactatcag

SEQ ID NO: 182723 - DNA, 25 bp, Probe sequence
caatagccaaaaagaacgtgccatt

SEQ ID NO: 182724 - DNA, 25 bp, Probe sequence
caagtatctaaaagaggcaggcgat

SEQ ID NO: 182725 - DNA, 25 bp, Probe sequence
cttaaaaagttcgcatggggtccat

SEQ ID NO: 182726 - DNA, 25 bp, Probe sequence
gccaaaaagaacgtgccattgcaga

SEQ ID NO: 182727 - DNA, 25 bp, Probe sequence
gctaaggttcaagcacgtcaacagc

SEQ ID NO: 182728 - DNA, 25 bp, Probe sequence
gcatggggtccattgaaagatgtaa

SEQ ID NO: 182729 - DNA, 25 bp, Probe sequence
gcagctggaggcgttgagtggggta

SEQ ID NO: 182730 - DNA, 25 bp, Probe sequence
gcacgtcaacagcaagaacaaatta

SEQ ID NO: 182731 - DNA, 25 bp, Probe sequence
gaagcaaacgtacgtgcaaacggta

SEQ ID NO: 182732 - DNA, 25 bp, Probe sequence
gaagatgctaaggttcaagcacgtc

SEQ ID NO: 182733 - DNA, 25 bp, Probe sequence
gaactatcagtgttaattgcttcta

SEQ ID NO: 182734 - DNA, 25 bp, Probe sequence
gagatatcgatgacgcagaacaagc

SEQ ID NO: 182735 - DNA, 25 bp, Probe sequence
gatgacgcagaacaagctaagttaa

SEQ ID NO: 182736 - DNA, 25 bp, Probe sequence
ggcgttgagtggggtactgtgattg

SEQ ID NO: 182737 - DNA, 25 bp, Probe sequence
gtgccattgcagatattaataatca

SEQ ID NO: 182738 - DNA, 25 bp, Probe sequence
gtgattgtacaggtcctaactttca

SEQ ID NO: 182739 - DNA, 25 bp, Probe sequence
gtgttaattgcttctaaagttctta

SEQ ID NO: 182740 - DNA, 25 bp, Probe sequence
ggggtactgtgattgtacaggtcct

SEQ ID NO: 182741 - DNA, 25 bp, Probe sequence
ggttcaagcacgtcaacagcaagaa

SEQ ID NO: 182742 - DNA, 25 bp, Probe sequence
ggaggcgttgagtggggtactgtga

SEQ ID NO: 182743 - DNA, 25 bp, Probe sequence
tggtgcagctggaggcgttgagtgg

SEQ ID NO: 182744 - DNA, 25 bp, Probe sequence
ttaaatgcacagaaacttgaagaag

SEQ ID NO: 182745 - DNA, 25 bp, Probe sequence
ttcttggtgcagctggaggcgttga

SEQ ID NO: 182746 - DNA, 25 bp, Probe sequence
ttgtacaggtcctaactttcatcgt

SEQ ID NO: 182747 - DNA, 25 bp, Probe sequence
attgcattcatgacatttgctggat

SEQ ID NO: 182748 - DNA, 25 bp, Probe sequence
atttaatcgcagcagcaatcgcaat

SEQ ID NO: 182749 - DNA, 25 bp, Probe sequence
atcagcattaggagcaggtatcggt

SEQ ID NO: 182750 - DNA, 25 bp, Probe sequence
atcatcggtgtagtaattgcattca

SEQ ID NO: 182751 - DNA, 25 bp, Probe sequence
atcgcagcagcaatcgcaattggtt

SEQ ID NO: 182752 - DNA, 25 bp, Probe sequence
atgggtatcatgttcattggtgtag

SEQ ID NO: 182753 - DNA, 25 bp, Probe sequence
agaacagttgaaggtgtagcacgtc

SEQ ID NO: 182754 - DNA, 25 bp, Probe sequence
aattggtttatcagcattaggagca

SEQ ID NO: 182755 - DNA, 25 bp, Probe sequence
catgttcattggtgtaggtttagtt

SEQ ID NO: 182756 - DNA, 25 bp, Probe sequence
gcacgtcaaccagaagcacgtggtc

SEQ ID NO: 182757 - DNA, 25 bp, Probe sequence
gcattaggagcaggtatcggtaacg

SEQ ID NO: 182758 - DNA, 25 bp, Probe sequence
gcaggtatcggtaacggtttaatcg

SEQ ID NO: 182759 - DNA, 25 bp, Probe sequence
gcagcagcaatcgcaattggtttat

SEQ ID NO: 182760 - DNA, 25 bp, Probe sequence
gaaggtgtagcacgtcaaccagaag

SEQ ID NO: 182761 - DNA, 25 bp, Probe sequence
gcaatcgcaattggtttatcagcat

SEQ ID NO: 182762 - DNA, 25 bp, Probe sequence
gaatttaatcgcagcagcaatcgca

SEQ ID NO: 182763 - DNA, 25 bp, Probe sequence
gaggcattacctatcatcggtgtag

SEQ ID NO: 182764 - DNA, 25 bp, Probe sequence
gttgaggcattacctatcatcggtg

SEQ ID NO: 182765 - DNA, 25 bp, Probe sequence
gtcaaccagaagcacgtggtcaatt

SEQ ID NO: 182766 - DNA, 25 bp, Probe sequence
gtaattgcattcatgacatttgctg

SEQ ID NO: 182767 - DNA, 25 bp, Probe sequence
gtggtcaattaatgggtatcatgtt

SEQ ID NO: 182768 - DNA, 25 bp, Probe sequence
ggtgtagcacgtcaaccagaagcac

SEQ ID NO: 182769 - DNA, 25 bp, Probe sequence
ggtttaatcgtttcaagaacagttg

SEQ ID NO: 182770 - DNA, 25 bp, Probe sequence
ggtttagttgaggcattacctatca

SEQ ID NO: 182771 - DNA, 25 bp, Probe sequence
ggcattacctatcatcggtgtagta

SEQ ID NO: 182772 - DNA, 25 bp, Probe sequence
tggtgtaggtttagttgaggcatta

SEQ ID NO: 182773 - DNA, 25 bp, Probe sequence
tgtagcacgtcaaccagaagcacgt

SEQ ID NO: 182774 - DNA, 25 bp, Probe sequence
tgcattcatgacatttgctggataa

SEQ ID NO: 182775 - DNA, 25 bp, Probe sequence
tcgcaattggtttatcagcattagg

SEQ ID NO: 182776 - DNA, 25 bp, Probe sequence
tcggtgtagtaattgcattcatgac

SEQ ID NO: 182777 - DNA, 25 bp, Probe sequence
tacctatcatcggtgtagtaattgc

SEQ ID NO: 182778 - DNA, 25 bp, Probe sequence
taggagcaggtatcggtaacggttt

SEQ ID NO: 182779 - DNA, 25 bp, Probe sequence
tatcatgttcattggtgtaggttta

SEQ ID NO: 182780 - DNA, 25 bp, Probe sequence
ttaatcgcagcagcaatcgcaattg

SEQ ID NO: 182781 - DNA, 25 bp, Probe sequence
atatctttattatgctttcgatggt

SEQ ID NO: 182782 - DNA, 25 bp, Probe sequence
atcacacattgtggtggaaatcacc

SEQ ID NO: 182783 - DNA, 25 bp, Probe sequence
atcgttttcaatttatcaagtatat

SEQ ID NO: 182784 - DNA, 25 bp, Probe sequence
atgcgtggtacgaaacaatatctta

SEQ ID NO: 182785 - DNA, 25 bp, Probe sequence
atggatttttgatttcgtgagggga

SEQ ID NO: 182786 - DNA, 25 bp, Probe sequence
acttgctatcatttgtacgcgtaat

SEQ ID NO: 182787 - DNA, 25 bp, Probe sequence
acttcaacattaacgcttggtctgc

SEQ ID NO: 182788 - DNA, 25 bp, Probe sequence
acagctgatgcaacagtgactttaa

SEQ ID NO: 182789 - DNA, 25 bp, Probe sequence
acagccgttttggccattggcaatt

SEQ ID NO: 182790 - DNA, 25 bp, Probe sequence
aagagttcacttcaacattaacgct

SEQ ID NO: 182791 - DNA, 25 bp, Probe sequence
aaggtggtcaattccacttcttagc

SEQ ID NO: 182792 - DNA, 25 bp, Probe sequence
aatactgttaactcacttttatgga

SEQ ID NO: 182793 - DNA, 25 bp, Probe sequence
aattccacttcttagcagtaacgct

SEQ ID NO: 182794 - DNA, 25 bp, Probe sequence
caaatccccgctcgtgagttggaat

SEQ ID NO: 182795 - DNA, 25 bp, Probe sequence
cagtgactttaacgttgtctacaac

SEQ ID NO: 182796 - DNA, 25 bp, Probe sequence
cgctcgtgagttggaatttattcgg

SEQ ID NO: 182797 - DNA, 25 bp, Probe sequence
gctaatatgttaggtcttccgtttt

SEQ ID NO: 182798 - DNA, 25 bp, Probe sequence
gcttggtctgcgtttgtacggtaac

SEQ ID NO: 182799 - DNA, 25 bp, Probe sequence
gcagtaacgctgattctgtacattt

SEQ ID NO: 182800 - DNA, 25 bp, Probe sequence
gaccaactggcaaacaaaatttcgt

SEQ ID NO: 182801 - DNA, 25 bp, Probe sequence
gatgatacttgttacggcgtttctt

SEQ ID NO: 182802 - DNA, 25 bp, Probe sequence
gatactattaacattacttgctggc

SEQ ID NO: 182803 - DNA, 25 bp, Probe sequence
gattctgtacatttttatagctaat

SEQ ID NO: 182804 - DNA, 25 bp, Probe sequence
gtttcttgtttttctacttgctatc

SEQ ID NO: 182805 - DNA, 25 bp, Probe sequence
gtttggcaagcattttcaatatttg

SEQ ID NO: 182806 - DNA, 25 bp, Probe sequence
gtatcccaggattaattgtttggca

SEQ ID NO: 182807 - DNA, 25 bp, Probe sequence
gtacggtaacatatttgcaggtgag

SEQ ID NO: 182808 - DNA, 25 bp, Probe sequence
ggggttggattattagtatcccagg

SEQ ID NO: 182809 - DNA, 25 bp, Probe sequence
ggaacaatccaagcatatatcttta

SEQ ID NO: 182810 - DNA, 25 bp, Probe sequence
tgctttcgatggtttatatgtcaca

SEQ ID NO: 182811 - DNA, 25 bp, Probe sequence
taaaggttatgtacagccgttttgg

SEQ ID NO: 182812 - DNA, 25 bp, Probe sequence
tacttgctggcttattctttaacga

SEQ ID NO: 182813 - DNA, 25 bp, Probe sequence
tattctttaacgaaccagcatgggg

SEQ ID NO: 182814 - DNA, 25 bp, Probe sequence
ttattcggttttgatatcgttttca

SEQ ID NO: 182815 - DNA, 25 bp, Probe sequence
ataacttctaaatcaatcactcaat

SEQ ID NO: 182816 - DNA, 25 bp, Probe sequence
atgtctgaagcatctaatccttacg

SEQ ID NO: 182817 - DNA, 25 bp, Probe sequence
agctgacttacattttgcacctact

SEQ ID NO: 182818 - DNA, 25 bp, Probe sequence
aaagtgttgttgtcactggtaatac

SEQ ID NO: 182819 - DNA, 25 bp, Probe sequence
aaaaatgctgcatcgcatttgttaa

SEQ ID NO: 182820 - DNA, 25 bp, Probe sequence
aatgctcgagccaattgttgttgtt

SEQ ID NO: 182821 - DNA, 25 bp, Probe sequence
cagacactttctgagataacttcta

SEQ ID NO: 182822 - DNA, 25 bp, Probe sequence
gccataaagatggctcctttagtta

SEQ ID NO: 182823 - DNA, 25 bp, Probe sequence
gcgattgatgctatgaaatatacag

SEQ ID NO: 182824 - DNA, 25 bp, Probe sequence
gcttgattcagtattaagtaccttt

SEQ ID NO: 182825 - DNA, 25 bp, Probe sequence
gcaggtggtttagcggcattttata

SEQ ID NO: 182826 - DNA, 25 bp, Probe sequence
gcacctactaaaaatgctgcatcgc

SEQ ID NO: 182827 - DNA, 25 bp, Probe sequence
gaagcagggcttagaagttatgata

SEQ ID NO: 182828 - DNA, 25 bp, Probe sequence
gaacaagacccgaagccataaagat

SEQ ID NO: 182829 - DNA, 25 bp, Probe sequence
gaaaaaccagacatggtacttgtac

SEQ ID NO: 182830 - DNA, 25 bp, Probe sequence
gaaatcaggacagacactttctgag

SEQ ID NO: 182831 - DNA, 25 bp, Probe sequence
gacaattataaatctaacatcatgg

SEQ ID NO: 182832 - DNA, 25 bp, Probe sequence
gaccatatttggaacaagacccgaa

SEQ ID NO: 182833 - DNA, 25 bp, Probe sequence
gagccaattgttgttgttacagcac

SEQ ID NO: 182834 - DNA, 25 bp, Probe sequence
gagagattatatcatcaaatgtctg

SEQ ID NO: 182835 - DNA, 25 bp, Probe sequence
gatggctcctttagttaaagctttg

SEQ ID NO: 182836 - DNA, 25 bp, Probe sequence
gatgacgacatttgcaggtggttta

SEQ ID NO: 182837 - DNA, 25 bp, Probe sequence
gattggacacgttgaagcagggctt

SEQ ID NO: 182838 - DNA, 25 bp, Probe sequence
gttgttgttacagcacagcatagag

SEQ ID NO: 182839 - DNA, 25 bp, Probe sequence
gttatgataaatattcaccttttcc

SEQ ID NO: 182840 - DNA, 25 bp, Probe sequence
gtttagcggcattttataaccaagt

SEQ ID NO: 182841 - DNA, 25 bp, Probe sequence
ggtgatacgatgacgacatttgcag

SEQ ID NO: 182842 - DNA, 25 bp, Probe sequence
ggtacttgtacatggtgatacgatg

SEQ ID NO: 182843 - DNA, 25 bp, Probe sequence
ggaacaagaaaaaatgctcgagcca

SEQ ID NO: 182844 - DNA, 25 bp, Probe sequence
tgacttacattttgcacctactaaa

SEQ ID NO: 182845 - DNA, 25 bp, Probe sequence
tgaagcatctaatccttacggtgat

SEQ ID NO: 182846 - DNA, 25 bp, Probe sequence
taaccaagtgccgattggacacgtt

SEQ ID NO: 182847 - DNA, 25 bp, Probe sequence
ttagttggtgtattagctgacttac

SEQ ID NO: 182848 - DNA, 25 bp, Probe sequence
ttacggtgatggatttgcttcagaa

SEQ ID NO: 182849 - DNA, 25 bp, Probe sequence
attgctgcacttgatgaaaagctaa

SEQ ID NO: 182850 - DNA, 25 bp, Probe sequence
attagctatcgttccaattttaaga

SEQ ID NO: 182851 - DNA, 25 bp, Probe sequence
atattcgcttcatgtgtttaattgc

SEQ ID NO: 182852 - DNA, 25 bp, Probe sequence
atcgttccaattttaagagctggtt

SEQ ID NO: 182853 - DNA, 25 bp, Probe sequence
atgacggctaaacgattagctggta

SEQ ID NO: 182854 - DNA, 25 bp, Probe sequence
agagctggtttaggtatgactgatg

SEQ ID NO: 182855 - DNA, 25 bp, Probe sequence
agaatttagagaacttgtagacgaa

SEQ ID NO: 182856 - DNA, 25 bp, Probe sequence
acttcattgaagaaacgtggcgcta

SEQ ID NO: 182857 - DNA, 25 bp, Probe sequence
aagcatatatcacaccagggttagg

SEQ ID NO: 182858 - DNA, 25 bp, Probe sequence
aaggctgtagagtattttgctaagt

SEQ ID NO: 182859 - DNA, 25 bp, Probe sequence
aattgcagcaccagaaggcgtagaa

SEQ ID NO: 182860 - DNA, 25 bp, Probe sequence
gctaagttacctcaagatattactg

SEQ ID NO: 182861 - DNA, 25 bp, Probe sequence
gcttcatgtgtttaattgcagcacc

SEQ ID NO: 182862 - DNA, 25 bp, Probe sequence
gaaacgcctgtaactaaaatgacgg

SEQ ID NO: 182863 - DNA, 25 bp, Probe sequence
gacaaatcattgttgttgatcctat

SEQ ID NO: 182864 - DNA, 25 bp, Probe sequence
gacgctggagatagattgtttggta

SEQ ID NO: 182865 - DNA, 25 bp, Probe sequence
gagatcccgaaacattaaaggctgt

SEQ ID NO: 182866 - DNA, 25 bp, Probe sequence
gagacttagagcttcaggatgttga

SEQ ID NO: 182867 - DNA, 25 bp, Probe sequence
gagtattttgctaagttacctcaag

SEQ ID NO: 182868 - DNA, 25 bp, Probe sequence
gatcctatgttagcaacaggcgcat

SEQ ID NO: 182869 - DNA, 25 bp, Probe sequence
gttagcaacaggcgcatcagcaatt

SEQ ID NO: 182870 - DNA, 25 bp, Probe sequence
gtaaagtacacgttttcgatcatcc

SEQ ID NO: 182871 - DNA, 25 bp, Probe sequence
gtacacgttttcgatcatccattaa

SEQ ID NO: 182872 - DNA, 25 bp, Probe sequence
gtaactagagacttagagcttcagg

SEQ ID NO: 182873 - DNA, 25 bp, Probe sequence
gtggcgctaaaaatattcgcttcat

SEQ ID NO: 182874 - DNA, 25 bp, Probe sequence
ggatgttgatattgaaacgcctgta

SEQ ID NO: 182875 - DNA, 25 bp, Probe sequence
ggcgtagaaaagatgcatgaagcac

SEQ ID NO: 182876 - DNA, 25 bp, Probe sequence
ggcgcatcagcaattgaagctatta

SEQ ID NO: 182877 - DNA, 25 bp, Probe sequence
taattcaacacaaactaagctatat

SEQ ID NO: 182878 - DNA, 25 bp, Probe sequence
tagacgaagttggtatgttgatggc

SEQ ID NO: 182879 - DNA, 25 bp, Probe sequence
tagatatttatattgctgcacttga

SEQ ID NO: 182880 - DNA, 25 bp, Probe sequence
taggtatgactgatggtattttaag

SEQ ID NO: 182881 - DNA, 25 bp, Probe sequence
ttgatggcatatgaagtaactagag

SEQ ID NO: 182882 - DNA, 25 bp, Probe sequence
ttcgatcatccattaattcaacaca

SEQ ID NO: 182883 - DNA, 25 bp, Probe sequence
atcgcatcggaaaattttgtatcgg

SEQ ID NO: 182884 - DNA, 25 bp, Probe sequence
atccaggacgccgatattatggtgg

SEQ ID NO: 182885 - DNA, 25 bp, Probe sequence
atgttcaaccacattcaggttcaca

SEQ ID NO: 182886 - DNA, 25 bp, Probe sequence
agcgttagagcataagcctaagctt

SEQ ID NO: 182887 - DNA, 25 bp, Probe sequence
agcctaagcttattgtggcaggagc

SEQ ID NO: 182888 - DNA, 25 bp, Probe sequence
acatggctgtttacttagttgcatt

SEQ ID NO: 182889 - DNA, 25 bp, Probe sequence
acacctgctgcaacaacgcgtggat

SEQ ID NO: 182890 - DNA, 25 bp, Probe sequence
acacacaaaacattacgcggaccac

SEQ ID NO: 182891 - DNA, 25 bp, Probe sequence
aaaataccattccgttcgatcaaga

SEQ ID NO: 182892 - DNA, 25 bp, Probe sequence
aacattacgcggaccacgtggtggt

SEQ ID NO: 182893 - DNA, 25 bp, Probe sequence
aacagctgaatatcctctatatcaa

SEQ ID NO: 182894 - DNA, 25 bp, Probe sequence
aagcagttgcttttggagaagcgtt

SEQ ID NO: 182895 - DNA, 25 bp, Probe sequence
aatgggcgacacagttttaggtatg

SEQ ID NO: 182896 - DNA, 25 bp, Probe sequence
caggttcacaagcgaacatggctgt

SEQ ID NO: 182897 - DNA, 25 bp, Probe sequence
cagataatcacttagtagctgttga

SEQ ID NO: 182898 - DNA, 25 bp, Probe sequence
cggcaggtttacatccaaatccagt

SEQ ID NO: 182899 - DNA, 25 bp, Probe sequence
gcaggattagtagcggcaggtttac

SEQ ID NO: 182900 - DNA, 25 bp, Probe sequence
gcatcgcaattgatcgtgctaaagc

SEQ ID NO: 182901 - DNA, 25 bp, Probe sequence
gcaacatagagttaatcgcatcgga

SEQ ID NO: 182902 - DNA, 25 bp, Probe sequence
gaatttgagtcatggtggtcacttg

SEQ ID NO: 182903 - DNA, 25 bp, Probe sequence
gaatatgctgattttgtaacaacta

SEQ ID NO: 182904 - DNA, 25 bp, Probe sequence
gaacgcgttgcgaaattaacagctg

SEQ ID NO: 182905 - DNA, 25 bp, Probe sequence
gattcagttggtatcacatgtaaca

SEQ ID NO: 182906 - DNA, 25 bp, Probe sequence
gtatcggaagcggttatggaagcac

SEQ ID NO: 182907 - DNA, 25 bp, Probe sequence
gtggtatacgtttaggtacacctgc

SEQ ID NO: 182908 - DNA, 25 bp, Probe sequence
gtggtcacttgacacatggagcgcc

SEQ ID NO: 182909 - DNA, 25 bp, Probe sequence
gtggacctcttgagcatgttattgc

SEQ ID NO: 182910 - DNA, 25 bp, Probe sequence
gtggcaggagcatcagcatattcaa

SEQ ID NO: 182911 - DNA, 25 bp, Probe sequence
gggtctataggacttactggtaaag

SEQ ID NO: 182912 - DNA, 25 bp, Probe sequence
ggtagacatggcacatattgcagga

SEQ ID NO: 182913 - DNA, 25 bp, Probe sequence
ggagcgcctgttaattttagtggta

SEQ ID NO: 182914 - DNA, 25 bp, Probe sequence
tgctgaaggctatccaggacgccga

SEQ ID NO: 182915 - DNA, 25 bp, Probe sequence
ggaagcacaaggttcagtgttgact

SEQ ID NO: 182916 - DNA, 25 bp, Probe sequence
ttccctggtattcaaggtggacctc

SEQ ID NO: 182917 - DNA, 25 bp, Probe sequence
acgcttttcagcatatgaaggatcc

SEQ ID NO: 182918 - DNA, 25 bp, Probe sequence
actattgccacatctaggccgaaaa

SEQ ID NO: 182919 - DNA, 25 bp, Probe sequence
aaatagggactgtcggttcgatgga

SEQ ID NO: 182920 - DNA, 25 bp, Probe sequence
aacatgtatgtgtacctgtaaggac

SEQ ID NO: 182921 - DNA, 25 bp, Probe sequence
aacatattactgttccttgtggaat

SEQ ID NO: 182922 - DNA, 25 bp, Probe sequence
caacatcggaagtcattggcgaaaa

SEQ ID NO: 182923 - DNA, 25 bp, Probe sequence
aatgcattagatgttgtgagtaaag

SEQ ID NO: 182924 - DNA, 25 bp, Probe sequence
aattgtaactattgccacatctagg

SEQ ID NO: 182925 - DNA, 25 bp, Probe sequence
gcagaaactatttttaatgcattag

SEQ ID NO: 182926 - DNA, 25 bp, Probe sequence
gcaacatacgcttttcagcatatga

SEQ ID NO: 182927 - DNA, 25 bp, Probe sequence
gcaagtaggacaggcaattgtaact

SEQ ID NO: 182928 - DNA, 25 bp, Probe sequence
gaaaaagattggtggcgaacgtgct

SEQ ID NO: 182929 - DNA, 25 bp, Probe sequence
gacaggcgttacttttgcttttcaa

SEQ ID NO: 182930 - DNA, 25 bp, Probe sequence
ggaagaagtttccgtcgttccagat

SEQ ID NO: 182931 - DNA, 25 bp, Probe sequence
gagacaggcgttacttttgcttttc

SEQ ID NO: 182932 - DNA, 25 bp, Probe sequence
gagatatatgtttaattggatgttc

SEQ ID NO: 182933 - DNA, 25 bp, Probe sequence
gatgttgtgagtaaagagacaggcg

SEQ ID NO: 182934 - DNA, 25 bp, Probe sequence
gatgttcaacatcggaagtcattgg

SEQ ID NO: 182935 - DNA, 25 bp, Probe sequence
gatgtacatgctggagggagtttgg

SEQ ID NO: 182936 - DNA, 25 bp, Probe sequence
gattggtggcgaacgtgctaaatac

SEQ ID NO: 182937 - DNA, 25 bp, Probe sequence
gttccttgtggaattgatattggtc

SEQ ID NO: 182938 - DNA, 25 bp, Probe sequence
gtggtcgaacatattactgttcctt

SEQ ID NO: 182939 - DNA, 25 bp, Probe sequence
gtaactattgccacatctaggccga

SEQ ID NO: 182940 - DNA, 25 bp, Probe sequence
gtcggttcgatggaagttgcagaaa

SEQ ID NO: 182941 - DNA, 25 bp, Probe sequence
gggactgtcggttcgatggaagttg

SEQ ID NO: 182942 - DNA, 25 bp, Probe sequence
ggagggagtttggcaacatacgctt

SEQ ID NO: 182943 - DNA, 25 bp, Probe sequence
gggagtttggcaacatacgcttttc

SEQ ID NO: 182944 - DNA, 25 bp, Probe sequence
ggcgttacttttgcttttcaaggat

SEQ ID NO: 182945 - DNA, 25 bp, Probe sequence
ggatgtgaacatatcaacagagcga

SEQ ID NO: 182946 - DNA, 25 bp, Probe sequence
tccgtcgttccagatgtacatgctg

SEQ ID NO: 182947 - DNA, 25 bp, Probe sequence
taggcatgcatattaaacatgtatg

SEQ ID NO: 182948 - DNA, 25 bp, Probe sequence
tttggcaacatacgcttttcagcat

SEQ ID NO: 182949 - DNA, 25 bp, Probe sequence
ttacttttgcttttcaaggatgtga

SEQ ID NO: 182950 - DNA, 25 bp, Probe sequence
ttgccacatctaggccgaaaaagat

SEQ ID NO: 182951 - DNA, 25 bp, Probe sequence
attatccctttgatacatctactaa

SEQ ID NO: 182952 - DNA, 25 bp, Probe sequence
atatctggaagtcaaagcgacgaaa

SEQ ID NO: 182953 - DNA, 25 bp, Probe sequence
agcgacgaaagtacacaaggtgaag

SEQ ID NO: 182954 - DNA, 25 bp, Probe sequence
accttaattatccctttgatacatc

SEQ ID NO: 182955 - DNA, 25 bp, Probe sequence
acaccttaattatccctttgataca

SEQ ID NO: 182956 - DNA, 25 bp, Probe sequence
aaagcgacgaaagtacacaaggtga

SEQ ID NO: 182957 - DNA, 25 bp, Probe sequence
aaaacaagaaagtcgtcatgaaaca

SEQ ID NO: 182958 - DNA, 25 bp, Probe sequence
aaaagcgatgctcaaatagtagaaa

SEQ ID NO: 182959 - DNA, 25 bp, Probe sequence
aacagagattcaatataaggatata

SEQ ID NO: 182960 - DNA, 25 bp, Probe sequence
aagttctggcattagagagtaataa

SEQ ID NO: 182961 - DNA, 25 bp, Probe sequence
aatcagcaagttctggcattagaga

SEQ ID NO: 182962 - DNA, 25 bp, Probe sequence
aattatccctttgatacatctacta

SEQ ID NO: 182963 - DNA, 25 bp, Probe sequence
cagcaagttctggcattagagagta

SEQ ID NO: 182964 - DNA, 25 bp, Probe sequence
cttaattatccctttgatacatcta

SEQ ID NO: 182965 - DNA, 25 bp, Probe sequence
ctagacaaaacgttgatgcacaaga

SEQ ID NO: 182966 - DNA, 25 bp, Probe sequence
gcgatgctcaaatagtagaaatact

SEQ ID NO: 182967 - DNA, 25 bp, Probe sequence
gcacaagaaaaaacatatactacta

SEQ ID NO: 182968 - DNA, 25 bp, Probe sequence
gcaagttctggcattagagagtaat

SEQ ID NO: 182969 - DNA, 25 bp, Probe sequence
gaattttacagaaaagagttgcaag

SEQ ID NO: 182970 - DNA, 25 bp, Probe sequence
gacaataaaacaggaaaacacttcg

SEQ ID NO: 182971 - DNA, 25 bp, Probe sequence
gaaagtcgtcatgaaacaacaattg

SEQ ID NO: 182972 - DNA, 25 bp, Probe sequence
gacaaaacgttgatgcacaagaaaa

SEQ ID NO: 182973 - DNA, 25 bp, Probe sequence
gagtcggataatattaattttgaat

SEQ ID NO: 182974 - DNA, 25 bp, Probe sequence
gataccgatatagaaaaaatcattc

SEQ ID NO: 182975 - DNA, 25 bp, Probe sequence
gatatatctggaagtcaaagcgacg

SEQ ID NO: 182976 - DNA, 25 bp, Probe sequence
gttgagtgaagaattaggggttagt

SEQ ID NO: 182977 - DNA, 25 bp, Probe sequence
gtaagcaaacgatttttaataatat

SEQ ID NO: 182978 - DNA, 25 bp, Probe sequence
gtcaaagcgacgaaagtacacaagg

SEQ ID NO: 182979 - DNA, 25 bp, Probe sequence
gtcgtcatgaaacaacaattgaatt

SEQ ID NO: 182980 - DNA, 25 bp, Probe sequence
gtgaagaattaggggttagtaagca

SEQ ID NO: 182981 - DNA, 25 bp, Probe sequence
ggatatatctggaagtcaaagcgac

SEQ ID NO: 182982 - DNA, 25 bp, Probe sequence
ggaagtcaaagcgacgaaagtacac

SEQ ID NO: 182983 - DNA, 25 bp, Probe sequence
taattatccctttgatacatctact

SEQ ID NO: 182984 - DNA, 25 bp, Probe sequence
ttatccctttgatacatctactaac

SEQ ID NO: 182985 - DNA, 25 bp, Probe sequence
attatattcgcagcaatcttttttg

SEQ ID NO: 182986 - DNA, 25 bp, Probe sequence
attttacggtattccacgtgctgca

SEQ ID NO: 182987 - DNA, 25 bp, Probe sequence
atatataacacatcctttcatttca

SEQ ID NO: 182988 - DNA, 25 bp, Probe sequence
atatgtctgcttttcaggtcttatt

SEQ ID NO: 182989 - DNA, 25 bp, Probe sequence
atgtggattggtatgctaggctttg

SEQ ID NO: 182990 - DNA, 25 bp, Probe sequence
aggcaatcgtatacatccatggttc

SEQ ID NO: 182991 - DNA, 25 bp, Probe sequence
aggtcttattgcagccatattactt

SEQ ID NO: 182992 - DNA, 25 bp, Probe sequence
agcacattcagattcagttgggcct

SEQ ID NO: 182993 - DNA, 25 bp, Probe sequence
agcttggcttgtaccattcatgctc

SEQ ID NO: 182994 - DNA, 25 bp, Probe sequence
acaagttattatttcgggcctcatg

SEQ ID NO: 182995 - DNA, 25 bp, Probe sequence
caatggatcttgttgctgcgttagc

SEQ ID NO: 182996 - DNA, 25 bp, Probe sequence
cacgtgctgcaaatgtcgcgtacga

SEQ ID NO: 182997 - DNA, 25 bp, Probe sequence
cagattcagttgggcctatcgactc

SEQ ID NO: 182998 - DNA, 25 bp, Probe sequence
catgtctatcggagcattttacggt

SEQ ID NO: 182999 - DNA, 25 bp, Probe sequence
cttacaggcatattactccccttta

SEQ ID NO: 183000 - DNA, 25 bp, Probe sequence
cgggtttatttttgctgtcgtgatt

SEQ ID NO: 183001 - DNA, 25 bp, Probe sequence
gctgtcgtgatttacatgtctatcg

SEQ ID NO: 183002 - DNA, 25 bp, Probe sequence
gcagatatcgatttagcttggcttg

SEQ ID NO: 183003 - DNA, 25 bp, Probe sequence
gtttatgatgttacctttagcagat

SEQ ID NO: 183004 - DNA, 25 bp, Probe sequence
gtttaaaggcctcacagatcgcatg

SEQ ID NO: 183005 - DNA, 25 bp, Probe sequence
gtattgctgtcattttcaaccctga

SEQ ID NO: 183006 - DNA, 25 bp, Probe sequence
gtaccattcatgctctttgctatta

SEQ ID NO: 183007 - DNA, 25 bp, Probe sequence
gggcctcatgttattttcactattt

SEQ ID NO: 183008 - DNA, 25 bp, Probe sequence
ggtacaagacacattttacctgtgc

SEQ ID NO: 183009 - DNA, 25 bp, Probe sequence
tggaatgatttactttgcacttgca

SEQ ID NO: 183010 - DNA, 25 bp, Probe sequence
tgcacttgcatacgttggggcatca

SEQ ID NO: 183011 - DNA, 25 bp, Probe sequence
tgctctttgctattatcggtttcat

SEQ ID NO: 183012 - DNA, 25 bp, Probe sequence
tcgactcgcaactgttattacattg

SEQ ID NO: 183013 - DNA, 25 bp, Probe sequence
taacaacatgtataggactcgtcaa

SEQ ID NO: 183014 - DNA, 25 bp, Probe sequence
tacatccatggttcgggtttatttt

SEQ ID NO: 183015 - DNA, 25 bp, Probe sequence
tactcccctttattactgttattgt

SEQ ID NO: 183016 - DNA, 25 bp, Probe sequence
tattttcactattttttggagccgg

SEQ ID NO: 183017 - DNA, 25 bp, Probe sequence
ttggggcatcaacagctccaggaaa

SEQ ID NO: 183018 - DNA, 25 bp, Probe sequence
ttgttgctgcgttagctttttccgt

SEQ ID NO: 183019 - DNA, 25 bp, Probe sequence
atagaggcacactttggtttgcaaa

SEQ ID NO: 183020 - DNA, 25 bp, Probe sequence
atacctatgaagaacttgtaagttt

SEQ ID NO: 183021 - DNA, 25 bp, Probe sequence
atcaagaggtatattcgctgtgaac

SEQ ID NO: 183022 - DNA, 25 bp, Probe sequence
atgttttcacattgcatgaatatgt

SEQ ID NO: 183023 - DNA, 25 bp, Probe sequence
atgtcgtattcgcacaaagaattaa

SEQ ID NO: 183024 - DNA, 25 bp, Probe sequence
aggtgtttcgaattatgttgaagac

SEQ ID NO: 183025 - DNA, 25 bp, Probe sequence
agcggaaagtattgcaaaagaggtt

SEQ ID NO: 183026 - DNA, 25 bp, Probe sequence
acatgtcgtagcccattagcggaaa

SEQ ID NO: 183027 - DNA, 25 bp, Probe sequence
acaatcaaggtgtttcgaattatgt

SEQ ID NO: 183028 - DNA, 25 bp, Probe sequence
aagaggttatgccaaatcatcaatt

SEQ ID NO: 183029 - DNA, 25 bp, Probe sequence
caggtaacacatgtcgtagcccatt

SEQ ID NO: 183030 - DNA, 25 bp, Probe sequence
catttagctgaaacgaccttatcgc

SEQ ID NO: 183031 - DNA, 25 bp, Probe sequence
cgaccttatcgcaacaatttactga

SEQ ID NO: 183032 - DNA, 25 bp, Probe sequence
gctgaaacgaccttatcgcaacaat

SEQ ID NO: 183033 - DNA, 25 bp, Probe sequence
gcaggagaagttatagatccatacg

SEQ ID NO: 183034 - DNA, 25 bp, Probe sequence
gcaaaatcatgttttcacattgcat

SEQ ID NO: 183035 - DNA, 25 bp, Probe sequence
gaattaatagaggcacactttggtt

SEQ ID NO: 183036 - DNA, 25 bp, Probe sequence
gaagattttattcgtttgtacaggt

SEQ ID NO: 183037 - DNA, 25 bp, Probe sequence
gaagacttagttgaagaacatcatt

SEQ ID NO: 183038 - DNA, 25 bp, Probe sequence
gaagcagatttgaaagcagatatta

SEQ ID NO: 183039 - DNA, 25 bp, Probe sequence
gaacatcatttagctgaaacgacct

SEQ ID NO: 183040 - DNA, 25 bp, Probe sequence
gaaacgaccttatcgcaacaattta

SEQ ID NO: 183041 - DNA, 25 bp, Probe sequence
gaggtatattcgctgtgaacaatca

SEQ ID NO: 183042 - DNA, 25 bp, Probe sequence
gaggcacactttggtttgcaaaatc

SEQ ID NO: 183043 - DNA, 25 bp, Probe sequence
gtagcccattagcggaaagtattgc

SEQ ID NO: 183044 - DNA, 25 bp, Probe sequence
gtatgtacatacctatgaagaactt

SEQ ID NO: 183045 - DNA, 25 bp, Probe sequence
gtacaggtaacacatgtcgtagccc

SEQ ID NO: 183046 - DNA, 25 bp, Probe sequence
gtaacacatgtcgtagcccattagc

SEQ ID NO: 183047 - DNA, 25 bp, Probe sequence
gtcgtagcccattagcggaaagtat

SEQ ID NO: 183048 - DNA, 25 bp, Probe sequence
tggtttgcaaaatcatgttttcaca

SEQ ID NO: 183049 - DNA, 25 bp, Probe sequence
tatgccaaatcatcaatttgaatca

SEQ ID NO: 183050 - DNA, 25 bp, Probe sequence
tattcgctgtgaacaatcaaggtgt

SEQ ID NO: 183051 - DNA, 25 bp, Probe sequence
ttattcgtttgtacaggtaacacat

SEQ ID NO: 183052 - DNA, 25 bp, Probe sequence
ttagctgaaacgaccttatcgcaac

SEQ ID NO: 183053 - DNA, 25 bp, Probe sequence
ataaaattgcaagacctggttctat

SEQ ID NO: 183054 - DNA, 25 bp, Probe sequence
ataaatgaacctctagctgctccaa

SEQ ID NO: 183055 - DNA, 25 bp, Probe sequence
atgccaagccattctgtaggtagac

SEQ ID NO: 183056 - DNA, 25 bp, Probe sequence
atccgcttattgttcatatacacag

SEQ ID NO: 183057 - DNA, 25 bp, Probe sequence
atgaagatttacagcaatatcctaa

SEQ ID NO: 183058 - DNA, 25 bp, Probe sequence
atgatgtgttacattcacttgatga

SEQ ID NO: 183059 - DNA, 25 bp, Probe sequence
aggctatctatgtcgaaaagtttct

SEQ ID NO: 183060 - DNA, 25 bp, Probe sequence
agttgctgttagaatgccaagccat

SEQ ID NO: 183061 - DNA, 25 bp, Probe sequence
agattgcacatcttttccttataaa

SEQ ID NO: 183062 - DNA, 25 bp, Probe sequence
accttcaccaacaactttcaatcat

SEQ ID NO: 183063 - DNA, 25 bp, Probe sequence
acggctttgagctgaatgataatac

SEQ ID NO: 183064 - DNA, 25 bp, Probe sequence
acttccgaatagtatcgcccatgct

SEQ ID NO: 183065 - DNA, 25 bp, Probe sequence
aagtggtagaccttcaccaacaact

SEQ ID NO: 183066 - DNA, 25 bp, Probe sequence
gctgctccaagtgctaatttaagtg

SEQ ID NO: 183067 - DNA, 25 bp, Probe sequence
gaagcgcaattcattcaattatgtc

SEQ ID NO: 183068 - DNA, 25 bp, Probe sequence
gaacagccaattgcaccaggtatga

SEQ ID NO: 183069 - DNA, 25 bp, Probe sequence
gaaaagtttctggaggtttatcatc

SEQ ID NO: 183070 - DNA, 25 bp, Probe sequence
gaaacagtttatggacttgcagcaa

SEQ ID NO: 183071 - DNA, 25 bp, Probe sequence
gaaaggcgtgattaagttggatact

SEQ ID NO: 183072 - DNA, 25 bp, Probe sequence
gaaagtacggttttagattgcacat

SEQ ID NO: 183073 - DNA, 25 bp, Probe sequence
gacctggttctataacagcagcaat

SEQ ID NO: 183074 - DNA, 25 bp, Probe sequence
gattggtcttctatagcttttattg

SEQ ID NO: 183075 - DNA, 25 bp, Probe sequence
gttaatgcaggcattctggccgggc

SEQ ID NO: 183076 - DNA, 25 bp, Probe sequence
gtatcgcccatgctgattataatga

SEQ ID NO: 183077 - DNA, 25 bp, Probe sequence
gtccatctgacaatccgcttattgt

SEQ ID NO: 183078 - DNA, 25 bp, Probe sequence
ggtggcgtttataccaagtgaagcg

SEQ ID NO: 183079 - DNA, 25 bp, Probe sequence
ggatccacgcgtagaaaagttaatg

SEQ ID NO: 183080 - DNA, 25 bp, Probe sequence
ggacttgcagcaaatgcgacagatg

SEQ ID NO: 183081 - DNA, 25 bp, Probe sequence
ggaggtttatcatcagttgctgtta

SEQ ID NO: 183082 - DNA, 25 bp, Probe sequence
tgaagctaaaggccgtccatctgac

SEQ ID NO: 183083 - DNA, 25 bp, Probe sequence
tcagcggcgtatatatacggctttg

SEQ ID NO: 183084 - DNA, 25 bp, Probe sequence
tcacccaatacaccacttacaatta

SEQ ID NO: 183085 - DNA, 25 bp, Probe sequence
tataagcattactcacccaatacac

SEQ ID NO: 183086 - DNA, 25 bp, Probe sequence
ttttacatatactttggatccacgc

SEQ ID NO: 183087 - DNA, 25 bp, Probe sequence
aatggccacgatcgaatcgtctcat

SEQ ID NO: 183088 - DNA, 25 bp, Probe sequence
aatggacgcgtacggactttgtagt

SEQ ID NO: 183089 - DNA, 25 bp, Probe sequence
caggggatgcattaaagcccttaat

SEQ ID NO: 183090 - DNA, 25 bp, Probe sequence
cgagctgaatggttaatgttagatg

SEQ ID NO: 183091 - DNA, 25 bp, Probe sequence
cgaaccacatcaggcattgtttgca

SEQ ID NO: 183092 - DNA, 25 bp, Probe sequence
gccggatttaaatgttattgctact

SEQ ID NO: 183093 - DNA, 25 bp, Probe sequence
gcgatgattatgaagttcgacttag

SEQ ID NO: 183094 - DNA, 25 bp, Probe sequence
gctgagaagcatcaatcacaaatac

SEQ ID NO: 183095 - DNA, 25 bp, Probe sequence
gatgtctccaacggttacgagattc

SEQ ID NO: 183096 - DNA, 25 bp, Probe sequence
gctttgcctcattttatggtagaac

SEQ ID NO: 183097 - DNA, 25 bp, Probe sequence
gaagtaatgttgcatttcttacaac

SEQ ID NO: 183098 - DNA, 25 bp, Probe sequence
gaagcaattcatttaacacaacaaa

SEQ ID NO: 183099 - DNA, 25 bp, Probe sequence
gatgatgcaacaatcgtagatatcg

SEQ ID NO: 183100 - DNA, 25 bp, Probe sequence
gatgatatgccgaaagcgatgatta

SEQ ID NO: 183101 - DNA, 25 bp, Probe sequence
gatcgaatcgtctcatttaaatggt

SEQ ID NO: 183102 - DNA, 25 bp, Probe sequence
gatttacctcacgttatggaaaaag

SEQ ID NO: 183103 - DNA, 25 bp, Probe sequence
gttggctttgcctcattttatggta

SEQ ID NO: 183104 - DNA, 25 bp, Probe sequence
gttagatgtatttcaatggacgcgt

SEQ ID NO: 183105 - DNA, 25 bp, Probe sequence
gtttgaacaaacacgagctgaatgg

SEQ ID NO: 183106 - DNA, 25 bp, Probe sequence
gtagatatcggaacgggtagtggtg

SEQ ID NO: 183107 - DNA, 25 bp, Probe sequence
gtggtgtacttgcaattactttgaa

SEQ ID NO: 183108 - DNA, 25 bp, Probe sequence
ggtagaacgtttgatgtaaactcaa

SEQ ID NO: 183109 - DNA, 25 bp, Probe sequence
ggttacaatcaaggtgaggcactta

SEQ ID NO: 183110 - DNA, 25 bp, Probe sequence
ggcagcccagttgtttttgaaattg

SEQ ID NO: 183111 - DNA, 25 bp, Probe sequence
ggatatgctatttatgaatcaatca

SEQ ID NO: 183112 - DNA, 25 bp, Probe sequence
ggaacgggtagtggtgtacttgcaa

SEQ ID NO: 183113 - DNA, 25 bp, Probe sequence
ggcattgtttgcagataaccatgga

SEQ ID NO: 183114 - DNA, 25 bp, Probe sequence
tggaaaaaggcagcccagttgtttt

SEQ ID NO: 183115 - DNA, 25 bp, Probe sequence
tgaacggcttgatatctaatccacc

SEQ ID NO: 183116 - DNA, 25 bp, Probe sequence
tgaatatggctcgtaataatgctga

SEQ ID NO: 183117 - DNA, 25 bp, Probe sequence
tacagtatatagttggctttgcctc

SEQ ID NO: 183118 - DNA, 25 bp, Probe sequence
tacgagattcgaaccacatcaggca

SEQ ID NO: 183119 - DNA, 25 bp, Probe sequence
tatggttacgatgtctccaacggtt

SEQ ID NO: 183120 - DNA, 25 bp, Probe sequence
tattgctactgatatttcacttgaa

SEQ ID NO: 183121 - DNA, 25 bp, Probe sequence
atccacaaagccgtgtaacagacca

SEQ ID NO: 183122 - DNA, 25 bp, Probe sequence
acaacaaaagtatgcgtcacaacgt

SEQ ID NO: 183123 - DNA, 25 bp, Probe sequence
aactggtgtcattgcaacatcttct

SEQ ID NO: 183124 - DNA, 25 bp, Probe sequence
aactgtagatgtttatcgtaactat

SEQ ID NO: 183125 - DNA, 25 bp, Probe sequence
aatcaggtggacgtattcatacttc

SEQ ID NO: 183126 - DNA, 25 bp, Probe sequence
caacagctacagtggcagttttacc

SEQ ID NO: 183127 - DNA, 25 bp, Probe sequence
cacgtaaacacaactgactctgcag

SEQ ID NO: 183128 - DNA, 25 bp, Probe sequence
cgcgttcaacgtgtgcctgaaacag

SEQ ID NO: 183129 - DNA, 25 bp, Probe sequence
gcagtcggtactggtgatcgttcag

SEQ ID NO: 183130 - DNA, 25 bp, Probe sequence
gcacgtttatacgatatgaaagttc

SEQ ID NO: 183131 - DNA, 25 bp, Probe sequence
gaagcgtctgaaagtgaccatggtg

SEQ ID NO: 183132 - DNA, 25 bp, Probe sequence
gaaattagtttctcagtttctggta

SEQ ID NO: 183133 - DNA, 25 bp, Probe sequence
gactctgcagtacgtattacccatt

SEQ ID NO: 183134 - DNA, 25 bp, Probe sequence
gacgtattcatacttcaacagctac

SEQ ID NO: 183135 - DNA, 25 bp, Probe sequence
gagaagtctcaaattcaaaaccgtg

SEQ ID NO: 183136 - DNA, 25 bp, Probe sequence
gagcaagctgatttacaaaaaactg

SEQ ID NO: 183137 - DNA, 25 bp, Probe sequence
gaggctgcgatttttgctggtgatt

SEQ ID NO: 183138 - DNA, 25 bp, Probe sequence
gatcgttcagaacgtattcgaactt

SEQ ID NO: 183139 - DNA, 25 bp, Probe sequence
gatgcactgactttatcagagcaga

SEQ ID NO: 183140 - DNA, 25 bp, Probe sequence
gtttctggtaatggcgcgtatagta

SEQ ID NO: 183141 - DNA, 25 bp, Probe sequence
gtattcgaacttataattatccaca

SEQ ID NO: 183142 - DNA, 25 bp, Probe sequence
gtataggtctaacgcttcaaaaatt

SEQ ID NO: 183143 - DNA, 25 bp, Probe sequence
gtatcgttcaagtggtgcaggtggt

SEQ ID NO: 183144 - DNA, 25 bp, Probe sequence
gtcacaacgtaaatcagcagtcggt

SEQ ID NO: 183145 - DNA, 25 bp, Probe sequence
gtcattgcaacatcttctgagaagt

SEQ ID NO: 183146 - DNA, 25 bp, Probe sequence
gtgacccagatgttgtaaatgattc

SEQ ID NO: 183147 - DNA, 25 bp, Probe sequence
ggtggtgatgaggctgcgatttttg

SEQ ID NO: 183148 - DNA, 25 bp, Probe sequence
ggcagttttaccagaagttgaagat

SEQ ID NO: 183149 - DNA, 25 bp, Probe sequence
tgaaaatggtgcgcaccgcgttcaa

SEQ ID NO: 183150 - DNA, 25 bp, Probe sequence
tgaactgttaagtgacccagatgtt

SEQ ID NO: 183151 - DNA, 25 bp, Probe sequence
tgcaggtggtcagcacgtaaacaca

SEQ ID NO: 183152 - DNA, 25 bp, Probe sequence
taaagctgaacttccaaatcttgaa

SEQ ID NO: 183153 - DNA, 25 bp, Probe sequence
tattacccatttaccaactggtgtc

SEQ ID NO: 183154 - DNA, 25 bp, Probe sequence
tattgattcctaaagatcctaatga

SEQ ID NO: 183155 - DNA, 25 bp, Probe sequence
attgttgctggattagatatggatt

SEQ ID NO: 183156 - DNA, 25 bp, Probe sequence
atcagcagatggacaccgtgttatt

SEQ ID NO: 183157 - DNA, 25 bp, Probe sequence
atgtatgaaacttaccattccggtt

SEQ ID NO: 183158 - DNA, 25 bp, Probe sequence
aggtgccaatgaaagttatgagcca

SEQ ID NO: 183159 - DNA, 25 bp, Probe sequence
accaatgcctaaattgatggctgtc

SEQ ID NO: 183160 - DNA, 25 bp, Probe sequence
accggcgattgatgatcgatatcat

SEQ ID NO: 183161 - DNA, 25 bp, Probe sequence
accgtgttattgttgctggattaga

SEQ ID NO: 183162 - DNA, 25 bp, Probe sequence
aaagttatgagccacgttgtcgcgc

SEQ ID NO: 183163 - DNA, 25 bp, Probe sequence
aactatcagcagatggacaccgtgt

SEQ ID NO: 183164 - DNA, 25 bp, Probe sequence
gaaacttaccattccggttggatag

SEQ ID NO: 183165 - DNA, 25 bp, Probe sequence
cagtttgtgctgtttgtggttcttc

SEQ ID NO: 183166 - DNA, 25 bp, Probe sequence
cgcaccatatcgtagcacctagtga

SEQ ID NO: 183167 - DNA, 25 bp, Probe sequence
ccatatcgtagcacctagtgataat

SEQ ID NO: 183168 - DNA, 25 bp, Probe sequence
gctgtttgtggttcttcatctagta

SEQ ID NO: 183169 - DNA, 25 bp, Probe sequence
gaaccgttcgaaccaatgcctaaat

SEQ ID NO: 183170 - DNA, 25 bp, Probe sequence
gaaaaagtggtctctcataatggta

SEQ ID NO: 183171 - DNA, 25 bp, Probe sequence
gaaacttcaagcagtttgtgctgtt

SEQ ID NO: 183172 - DNA, 25 bp, Probe sequence
gatggctgtcagtgaacaagtaacg

SEQ ID NO: 183173 - DNA, 25 bp, Probe sequence
gatccgattatcttagtaggtgcca

SEQ ID NO: 183174 - DNA, 25 bp, Probe sequence
gatatggattttaggggcgaaccgt

SEQ ID NO: 183175 - DNA, 25 bp, Probe sequence
gattatcttagtaggtgccaatgaa

SEQ ID NO: 183176 - DNA, 25 bp, Probe sequence
gtattacaggtagtatgtttagcgg

SEQ ID NO: 183177 - DNA, 25 bp, Probe sequence
gtaaaccagctaaaatcgatgatcc

SEQ ID NO: 183178 - DNA, 25 bp, Probe sequence
gtcgttgtatttaaaccggcgattg

SEQ ID NO: 183179 - DNA, 25 bp, Probe sequence
gtggtctctcataatggtaatgcca

SEQ ID NO: 183180 - DNA, 25 bp, Probe sequence
gtggttcttcatctagtagaacgca

SEQ ID NO: 183181 - DNA, 25 bp, Probe sequence
ggtaatgccattgaagcgattaata

SEQ ID NO: 183182 - DNA, 25 bp, Probe sequence
ggacaccgtgttattgttgctggat

SEQ ID NO: 183183 - DNA, 25 bp, Probe sequence
taggggcgaaccgttcgaaccaatg

SEQ ID NO: 183184 - DNA, 25 bp, Probe sequence
tgtttagcggtaaatccgaagaact

SEQ ID NO: 183185 - DNA, 25 bp, Probe sequence
tccggttggatagaatgtattacag

SEQ ID NO: 183186 - DNA, 25 bp, Probe sequence
tcgatgatccgattatcttagtagg

SEQ ID NO: 183187 - DNA, 25 bp, Probe sequence
tttgtgctgtttgtggttcttcatc

SEQ ID NO: 183188 - DNA, 25 bp, Probe sequence
ttcatctagtagaacgcaacgatta

SEQ ID NO: 183189 - DNA, 25 bp, Probe sequence
attctgttttggctagcattaattt

SEQ ID NO: 183190 - DNA, 25 bp, Probe sequence
attaattttcttagttgccgctacg

SEQ ID NO: 183191 - DNA, 25 bp, Probe sequence
attttgcaattctgttttggctagc

SEQ ID NO: 183192 - DNA, 25 bp, Probe sequence
atttaagtttcactgtcattctcta

SEQ ID NO: 183193 - DNA, 25 bp, Probe sequence
atgtctttacattttgcaattctgt

SEQ ID NO: 183194 - DNA, 25 bp, Probe sequence
agttgccgctacgtttatactcgta

SEQ ID NO: 183195 - DNA, 25 bp, Probe sequence
agtttcactgtcattctctatattt

SEQ ID NO: 183196 - DNA, 25 bp, Probe sequence
aaagagtcctatttaagtttcactg

SEQ ID NO: 183197 - DNA, 25 bp, Probe sequence
aagtttcactgtcattctctatatt

SEQ ID NO: 183198 - DNA, 25 bp, Probe sequence
cttagttgccgctacgtttatactc

SEQ ID NO: 183199 - DNA, 25 bp, Probe sequence
gccgctacgtttatactcgtattaa

SEQ ID NO: 183200 - DNA, 25 bp, Probe sequence
gctacgtttatactcgtattaatga

SEQ ID NO: 183201 - DNA, 25 bp, Probe sequence
gctagcattaattttcttagttgcc

SEQ ID NO: 183202 - DNA, 25 bp, Probe sequence
gcattaattttcttagttgccgcta

SEQ ID NO: 183203 - DNA, 25 bp, Probe sequence
gcaattctgttttggctagcattaa

SEQ ID NO: 183204 - DNA, 25 bp, Probe sequence
gagtcctatttaagtttcactgtca

SEQ ID NO: 183205 - DNA, 25 bp, Probe sequence
gttgccgctacgtttatactcgtat

SEQ ID NO: 183206 - DNA, 25 bp, Probe sequence
gttttggctagcattaattttctta

SEQ ID NO: 183207 - DNA, 25 bp, Probe sequence
gtttcactgtcattctctatatttt

SEQ ID NO: 183208 - DNA, 25 bp, Probe sequence
gtctttacattttgcaattctgttt

SEQ ID NO: 183209 - DNA, 25 bp, Probe sequence
gtcctatttaagtttcactgtcatt

SEQ ID NO: 183210 - DNA, 25 bp, Probe sequence
tagttgccgctacgtttatactcgt

SEQ ID NO: 183211 - DNA, 25 bp, Probe sequence
tgaaaaaaactggcaaagaatctaa

SEQ ID NO: 183212 - DNA, 25 bp, Probe sequence
taattttcttagttgccgctacgtt

SEQ ID NO: 183213 - DNA, 25 bp, Probe sequence
taagtttcactgtcattctctatat

SEQ ID NO: 183214 - DNA, 25 bp, Probe sequence
tacacatttatatttggtgtgctat

SEQ ID NO: 183215 - DNA, 25 bp, Probe sequence
tacattttgcaattctgttttggct

SEQ ID NO: 183216 - DNA, 25 bp, Probe sequence
ttttcttagttgccgctacgtttat

SEQ ID NO: 183217 - DNA, 25 bp, Probe sequence
ttagttgccgctacgtttatactcg

SEQ ID NO: 183218 - DNA, 25 bp, Probe sequence
ttaagtttcactgtcattctctata

SEQ ID NO: 183219 - DNA, 25 bp, Probe sequence
ttcttagttgccgctacgtttatac

SEQ ID NO: 183220 - DNA, 25 bp, Probe sequence
ttgccgctacgtttatactcgtatt

SEQ ID NO: 183221 - DNA, 25 bp, Probe sequence
ttgcaattctgttttggctagcatt

SEQ ID NO: 183222 - DNA, 25 bp, Probe sequence
ttggctagcattaattttcttagtt

SEQ ID NO: 183223 - DNA, 25 bp, Probe sequence
attcatcctgagtatcaccaagtaa

SEQ ID NO: 183224 - DNA, 25 bp, Probe sequence
attcgctgctgcggatggacgtgtg

SEQ ID NO: 183225 - DNA, 25 bp, Probe sequence
atttcatctgattcacatccattct

SEQ ID NO: 183226 - DNA, 25 bp, Probe sequence
atacccagttattcgtttagatatt

SEQ ID NO: 183227 - DNA, 25 bp, Probe sequence
acactggacgtcaaaaattcgctgc

SEQ ID NO: 183228 - DNA, 25 bp, Probe sequence
aggaattcatcctgagtatcaccaa

SEQ ID NO: 183229 - DNA, 25 bp, Probe sequence
acatccattctacactggacgtcaa

SEQ ID NO: 183230 - DNA, 25 bp, Probe sequence
aaaattcgctgctgcggatggacgt

SEQ ID NO: 183231 - DNA, 25 bp, Probe sequence
aagcggttctacaaaaacatcttca

SEQ ID NO: 183232 - DNA, 25 bp, Probe sequence
cagttattcgtttagatatttcatc

SEQ ID NO: 183233 - DNA, 25 bp, Probe sequence
catctgattcacatccattctacac

SEQ ID NO: 183234 - DNA, 25 bp, Probe sequence
ctgctgcggatggacgtgtggaacg

SEQ ID NO: 183235 - DNA, 25 bp, Probe sequence
ccattctacactggacgtcaaaaat

SEQ ID NO: 183236 - DNA, 25 bp, Probe sequence
cgctgctgcggatggacgtgtggaa

SEQ ID NO: 183237 - DNA, 25 bp, Probe sequence
gcggttctacaaaaacatcttcaga

SEQ ID NO: 183238 - DNA, 25 bp, Probe sequence
gaattcatcctgagtatcaccaagt

SEQ ID NO: 183239 - DNA, 25 bp, Probe sequence
gaaatgatggagtgggaagatggaa

SEQ ID NO: 183240 - DNA, 25 bp, Probe sequence
gacgtcaaaaattcgctgctgcgga

SEQ ID NO: 183241 - DNA, 25 bp, Probe sequence
gatactactacaaacttcaaattct

SEQ ID NO: 183242 - DNA, 25 bp, Probe sequence
gatatttcatctgattcacatccat

SEQ ID NO: 183243 - DNA, 25 bp, Probe sequence
gattcacatccattctacactggac

SEQ ID NO: 183244 - DNA, 25 bp, Probe sequence
gtatcaccaagtaatctttttagat

SEQ ID NO: 183245 - DNA, 25 bp, Probe sequence
gtaatctttttagatactactacaa

SEQ ID NO: 183246 - DNA, 25 bp, Probe sequence
gtcaaaaattcgctgctgcggatgg

SEQ ID NO: 183247 - DNA, 25 bp, Probe sequence
ggatggacgtgtggaacgtttcaac

SEQ ID NO: 183248 - DNA, 25 bp, Probe sequence
ggaagatggaaaagaatacccagtt

SEQ ID NO: 183249 - DNA, 25 bp, Probe sequence
tggacgtcaaaaattcgctgctgcg

SEQ ID NO: 183250 - DNA, 25 bp, Probe sequence
tggacgtgtggaacgtttcaacaaa

SEQ ID NO: 183251 - DNA, 25 bp, Probe sequence
tcctgagtatcaccaagtaatcttt

SEQ ID NO: 183252 - DNA, 25 bp, Probe sequence
tcacatccattctacactggacgtc

SEQ ID NO: 183253 - DNA, 25 bp, Probe sequence
tctgattcacatccattctacactg

SEQ ID NO: 183254 - DNA, 25 bp, Probe sequence
tactactacaaacttcaaattctta

SEQ ID NO: 183255 - DNA, 25 bp, Probe sequence
ttcatctgattcacatccattctac

SEQ ID NO: 183256 - DNA, 25 bp, Probe sequence
ttcaaattcttaagcggttctacaa

SEQ ID NO: 183257 - DNA, 25 bp, Probe sequence
attggcagaagttcaacgcgtaaag

SEQ ID NO: 183258 - DNA, 25 bp, Probe sequence
atagtggcgccacctaaagcaggta

SEQ ID NO: 183259 - DNA, 25 bp, Probe sequence
attgtctgaacgtcgtatcttccct

SEQ ID NO: 183260 - DNA, 25 bp, Probe sequence
attattcaacgcgcatcatggattt

SEQ ID NO: 183261 - DNA, 25 bp, Probe sequence
atagcgaatgcaatcagtacgaaca

SEQ ID NO: 183262 - DNA, 25 bp, Probe sequence
ataacgagattagcacgcgcttata

SEQ ID NO: 183263 - DNA, 25 bp, Probe sequence
atctgctagccaaattcgtcgtttt

SEQ ID NO: 183264 - DNA, 25 bp, Probe sequence
agaacgtacatctcctcagtatgaa

SEQ ID NO: 183265 - DNA, 25 bp, Probe sequence
acgaaccaccagaacaccatgttaa

SEQ ID NO: 183266 - DNA, 25 bp, Probe sequence
acgggttcacgtatggacgatatga

SEQ ID NO: 183267 - DNA, 25 bp, Probe sequence
actgcattagttgatacgggttcac

SEQ ID NO: 183268 - DNA, 25 bp, Probe sequence
actatactaccaaggaactcactca

SEQ ID NO: 183269 - DNA, 25 bp, Probe sequence
aaaagcattcttcggtgcagcgaga

SEQ ID NO: 183270 - DNA, 25 bp, Probe sequence
caccgattggtttaggtcaacgtgg

SEQ ID NO: 183271 - DNA, 25 bp, Probe sequence
catttccaagctttgacaccacttt

SEQ ID NO: 183272 - DNA, 25 bp, Probe sequence
ctcctcagtatgaatcattccacga

SEQ ID NO: 183273 - DNA, 25 bp, Probe sequence
ccaagtggtcgtacattatcaggtg

SEQ ID NO: 183274 - DNA, 25 bp, Probe sequence
gaagatttcttcaagcagctacaaa

SEQ ID NO: 183275 - DNA, 25 bp, Probe sequence
gaagctgctgaagtcgttcattcaa

SEQ ID NO: 183276 - DNA, 25 bp, Probe sequence
gactttgtcaatgaccataacgcag

SEQ ID NO: 183277 - DNA, 25 bp, Probe sequence
gacaccactttatccagatgagcgt

SEQ ID NO: 183278 - DNA, 25 bp, Probe sequence
gatcctgcatctttacacaaaccaa

SEQ ID NO: 183279 - DNA, 25 bp, Probe sequence
gtttaacaatacttgcaactgcatt

SEQ ID NO: 183280 - DNA, 25 bp, Probe sequence
gtacgaacaaaccagatgcaaagct

SEQ ID NO: 183281 - DNA, 25 bp, Probe sequence
gtcaacgtggtttaatagtggcgcc

SEQ ID NO: 183282 - DNA, 25 bp, Probe sequence
ggtggtttagatcctgcatctttac

SEQ ID NO: 183283 - DNA, 25 bp, Probe sequence
tcatggatttagtaacaccgattgg

SEQ ID NO: 183284 - DNA, 25 bp, Probe sequence
taagaaatctattcactgactcaac

SEQ ID NO: 183285 - DNA, 25 bp, Probe sequence
taacttagttattccaccaagtggt

SEQ ID NO: 183286 - DNA, 25 bp, Probe sequence
tagttggcgagcgtcctgaagaggt

SEQ ID NO: 183287 - DNA, 25 bp, Probe sequence
tagcacgcgcttataacttagttat

SEQ ID NO: 183288 - DNA, 25 bp, Probe sequence
ttattttgttagttggcgagcgtcc

SEQ ID NO: 183289 - DNA, 25 bp, Probe sequence
ttcattcaacgtttgacgaaccacc

SEQ ID NO: 183290 - DNA, 25 bp, Probe sequence
ttagaacgctcagtagaagctgctg

SEQ ID NO: 183291 - DNA, 25 bp, Probe sequence
atcctaaagtacgcatgatgtcatt

SEQ ID NO: 183292 - DNA, 25 bp, Probe sequence
atgtttatttagagttccgtcatac

SEQ ID NO: 183293 - DNA, 25 bp, Probe sequence
agtccagttgtacttaaaccatctg

SEQ ID NO: 183294 - DNA, 25 bp, Probe sequence
accatctgaagaaacaccatttgca

SEQ ID NO: 183295 - DNA, 25 bp, Probe sequence
acgccgcggagatgatttagttgtt

SEQ ID NO: 183296 - DNA, 25 bp, Probe sequence
acaccatttgcagctgttattttag

SEQ ID NO: 183297 - DNA, 25 bp, Probe sequence
aacaatctggtttaggtcgtgaatg

SEQ ID NO: 183298 - DNA, 25 bp, Probe sequence
aacttccctacaaaccaaacatcat

SEQ ID NO: 183299 - DNA, 25 bp, Probe sequence
aacattgcataaagtagctcgttct

SEQ ID NO: 183300 - DNA, 25 bp, Probe sequence
aaggatactttgcacgtccgacaat

SEQ ID NO: 183301 - DNA, 25 bp, Probe sequence
caagtaggccctatcattagtaaaa

SEQ ID NO: 183302 - DNA, 25 bp, Probe sequence
gccaagtgcgtgtcggtaatccaag

SEQ ID NO: 183303 - DNA, 25 bp, Probe sequence
gctgaattattttatggtggtcctg

SEQ ID NO: 183304 - DNA, 25 bp, Probe sequence
gcacgtccgacaatttttattaatg

SEQ ID NO: 183305 - DNA, 25 bp, Probe sequence
gaagttataaatccagcaaccgaag

SEQ ID NO: 183306 - DNA, 25 bp, Probe sequence
gaagcggctaaagcaacaacaggca

SEQ ID NO: 183307 - DNA, 25 bp, Probe sequence
gaacaatttagccaagtgcgtgtcg

SEQ ID NO: 183308 - DNA, 25 bp, Probe sequence
gacgatattgtacaagctattacgg

SEQ ID NO: 183309 - DNA, 25 bp, Probe sequence
gagttccgtcatacatctgtgaaag

SEQ ID NO: 183310 - DNA, 25 bp, Probe sequence
gagagactacacaaagcaatacatt

SEQ ID NO: 183311 - DNA, 25 bp, Probe sequence
gatggtacacaagtaggccctatca

SEQ ID NO: 183312 - DNA, 25 bp, Probe sequence
gatcaggccctactggttctaaaat

SEQ ID NO: 183313 - DNA, 25 bp, Probe sequence
gttgcagcgagagacgcattagata

SEQ ID NO: 183314 - DNA, 25 bp, Probe sequence
gtagctcgttctattgaagcaggta

SEQ ID NO: 183315 - DNA, 25 bp, Probe sequence
gtcgtgaatggggcgattatggtat

SEQ ID NO: 183316 - DNA, 25 bp, Probe sequence
gggactaaaccattttgttgcagcg

SEQ ID NO: 183317 - DNA, 25 bp, Probe sequence
gggccagtaatgtcagttatcactt

SEQ ID NO: 183318 - DNA, 25 bp, Probe sequence
ggtatcattagagcttggtggcaaa

SEQ ID NO: 183319 - DNA, 25 bp, Probe sequence
tgcggctggtagtccagttgtactt

SEQ ID NO: 183320 - DNA, 25 bp, Probe sequence
tcattatctgagcgtgtccattatc

SEQ ID NO: 183321 - DNA, 25 bp, Probe sequence
tacgaatttgaagaacgccgcggag

SEQ ID NO: 183322 - DNA, 25 bp, Probe sequence
tactggtcaagtatgtacagctggt

SEQ ID NO: 183323 - DNA, 25 bp, Probe sequence
taggtgctcctttatcattatctga

SEQ ID NO: 183324 - DNA, 25 bp, Probe sequence
ttagcagcagcatttgcggctggta

SEQ ID NO: 183325 - DNA, 25 bp, Probe sequence
atttatgtgctaactgaaaaaggta

SEQ ID NO: 183326 - DNA, 25 bp, Probe sequence
atctctcaagatgtaatgactgttc

SEQ ID NO: 183327 - DNA, 25 bp, Probe sequence
atgtcgatttaacagatcaacgtac

SEQ ID NO: 183328 - DNA, 25 bp, Probe sequence
agttgtcagagcttgcacaatggga

SEQ ID NO: 183329 - DNA, 25 bp, Probe sequence
agcaaatcatttctacgagtccagt

SEQ ID NO: 183330 - DNA, 25 bp, Probe sequence
agcgttagcagaggctttacatcca

SEQ ID NO: 183331 - DNA, 25 bp, Probe sequence
acgagtccagtacaaattatttatg

SEQ ID NO: 183332 - DNA, 25 bp, Probe sequence
aacaccacgtgctttaagtcttaag

SEQ ID NO: 183333 - DNA, 25 bp, Probe sequence
aataacaccacgtgctttaagtctt

SEQ ID NO: 183334 - DNA, 25 bp, Probe sequence
aatcatttctacgagtccagtacaa

SEQ ID NO: 183335 - DNA, 25 bp, Probe sequence
caccacgtgctttaagtcttaagtt

SEQ ID NO: 183336 - DNA, 25 bp, Probe sequence
catttctacgagtccagtacaaatt

SEQ ID NO: 183337 - DNA, 25 bp, Probe sequence
cttggtagaagttggaatggattaa

SEQ ID NO: 183338 - DNA, 25 bp, Probe sequence
gcatgggcgcaatcatatgtcgatt

SEQ ID NO: 183339 - DNA, 25 bp, Probe sequence
gcagaggctttacatccaattgaag

SEQ ID NO: 183340 - DNA, 25 bp, Probe sequence
gaagcatgggcgcaatcatatgtcg

SEQ ID NO: 183341 - DNA, 25 bp, Probe sequence
gaaaaaggtaaagcgttagcagagg

SEQ ID NO: 183342 - DNA, 25 bp, Probe sequence
gagcttgcacaatgggagttagttg

SEQ ID NO: 183343 - DNA, 25 bp, Probe sequence
gattaatcattaattatctctcaag

SEQ ID NO: 183344 - DNA, 25 bp, Probe sequence
gtatgtccgtatctcgaagaaactt

SEQ ID NO: 183345 - DNA, 25 bp, Probe sequence
gtcagagcttgcacaatgggagtta

SEQ ID NO: 183346 - DNA, 25 bp, Probe sequence
gtacaaattatttatgtgctaactg

SEQ ID NO: 183347 - DNA, 25 bp, Probe sequence
gtcttaagttgtcagagcttgcaca

SEQ ID NO: 183348 - DNA, 25 bp, Probe sequence
gggcgcaatcatatgtcgatttaac

SEQ ID NO: 183349 - DNA, 25 bp, Probe sequence
gggagttagttgagaagcaaatcat

SEQ ID NO: 183350 - DNA, 25 bp, Probe sequence
ggaagtatgtccgtatctcgaagaa

SEQ ID NO: 183351 - DNA, 25 bp, Probe sequence
tgtccgtatctcgaagaaactttta

SEQ ID NO: 183352 - DNA, 25 bp, Probe sequence
tgttcagcacacttttccgatatga

SEQ ID NO: 183353 - DNA, 25 bp, Probe sequence
taatgactgttcagcacacttttcc

SEQ ID NO: 183354 - DNA, 25 bp, Probe sequence
tacatccaattgaagcatgggcgca

SEQ ID NO: 183355 - DNA, 25 bp, Probe sequence
ttagcagaggctttacatccaattg

SEQ ID NO: 183356 - DNA, 25 bp, Probe sequence
ttaacagatcaacgtactgctaaat

SEQ ID NO: 183357 - DNA, 25 bp, Probe sequence
ttcagcacacttttccgatatgaaa

SEQ ID NO: 183358 - DNA, 25 bp, Probe sequence
ttgaaaacaataacaccacgtgctt

SEQ ID NO: 183359 - DNA, 25 bp, Probe sequence
ttaccgggaggatgtccacttgggc

SEQ ID NO: 183360 - DNA, 25 bp, Probe sequence
atccaggttttgctactgatttgca

SEQ ID NO: 183361 - DNA, 25 bp, Probe sequence
agagcaggagcttgtttaattattg

SEQ ID NO: 183362 - DNA, 25 bp, Probe sequence
acagcctattacaccattattattt

SEQ ID NO: 183363 - DNA, 25 bp, Probe sequence
aaagctttaggtgctgaaattgatg

SEQ ID NO: 183364 - DNA, 25 bp, Probe sequence
aacaattaacattatgctagctgca

SEQ ID NO: 183365 - DNA, 25 bp, Probe sequence
aacactagtatatccaggttttgct

SEQ ID NO: 183366 - DNA, 25 bp, Probe sequence
aatgtgtgattggtttaccgggagg

SEQ ID NO: 183367 - DNA, 25 bp, Probe sequence
aatcattacgtgcttcatactatat

SEQ ID NO: 183368 - DNA, 25 bp, Probe sequence
cacttgggccacgtccaattgatca

SEQ ID NO: 183369 - DNA, 25 bp, Probe sequence
cacatatatgtgtatcgctgcagca

SEQ ID NO: 183370 - DNA, 25 bp, Probe sequence
gctagctgcagtttatgcaacagga

SEQ ID NO: 183371 - DNA, 25 bp, Probe sequence
gctttaggtgcagatatttggacgg

SEQ ID NO: 183372 - DNA, 25 bp, Probe sequence
gaattacatggttctgagtatcaag

SEQ ID NO: 183373 - DNA, 25 bp, Probe sequence
gaagggttaccgcaaatctctgatg

SEQ ID NO: 183374 - DNA, 25 bp, Probe sequence
gaggtggacgcacactaaatgggga

SEQ ID NO: 183375 - DNA, 25 bp, Probe sequence
gaaccggaagtagttgatgttgcta

SEQ ID NO: 183376 - DNA, 25 bp, Probe sequence
gaaaatgctgctaaagaaccggaag

SEQ ID NO: 183377 - DNA, 25 bp, Probe sequence
gatgggtgccatgttaggtagattt

SEQ ID NO: 183378 - DNA, 25 bp, Probe sequence
gatgttgctaacttcttaacaagta

SEQ ID NO: 183379 - DNA, 25 bp, Probe sequence
gatacgatttatccggagcgtttta

SEQ ID NO: 183380 - DNA, 25 bp, Probe sequence
gatatggttagcgtaggtgcaacaa

SEQ ID NO: 183381 - DNA, 25 bp, Probe sequence
gatttgcaacagcctattacaccat

SEQ ID NO: 183382 - DNA, 25 bp, Probe sequence
gtgtatcgctgcagcatgtggagaa

SEQ ID NO: 183383 - DNA, 25 bp, Probe sequence
gtgctgtagctatcattcctgcaac

SEQ ID NO: 183384 - DNA, 25 bp, Probe sequence
gtggcgcgaaaaacagtgctgtagc

SEQ ID NO: 183385 - DNA, 25 bp, Probe sequence
ggggaagttaatatcagtggcgcga

SEQ ID NO: 183386 - DNA, 25 bp, Probe sequence
ggtccttcatttgtaactgatacga

SEQ ID NO: 183387 - DNA, 25 bp, Probe sequence
ggtgctgaagtttatgctagcgatt

SEQ ID NO: 183388 - DNA, 25 bp, Probe sequence
ggccacgtccaattgatcaacatat

SEQ ID NO: 183389 - DNA, 25 bp, Probe sequence
tcattcctgcaacattattagctca

SEQ ID NO: 183390 - DNA, 25 bp, Probe sequence
ttatttatggcaaatggtccttcat

SEQ ID NO: 183391 - DNA, 25 bp, Probe sequence
ttgacgaaggcacagcaacgataaa

SEQ ID NO: 183392 - DNA, 25 bp, Probe sequence
ttgctggtttaattgctgagggtgt

SEQ ID NO: 183393 - DNA, 25 bp, Probe sequence
tacctaacggttattgaccgtattg

SEQ ID NO: 183394 - DNA, 25 bp, Probe sequence
atcgtttggcacgtaatacttccga

SEQ ID NO: 183395 - DNA, 25 bp, Probe sequence
aggtcatggttatcgtaaaatagcc

SEQ ID NO: 183396 - DNA, 25 bp, Probe sequence
agatacttgcaagtttttccgaatt

SEQ ID NO: 183397 - DNA, 25 bp, Probe sequence
aaatatatctttgaatcttatgcca

SEQ ID NO: 183398 - DNA, 25 bp, Probe sequence
aaatctatgaaccgtcctgaattac

SEQ ID NO: 183399 - DNA, 25 bp, Probe sequence
aaaagcttgtaggaggctacattcg

SEQ ID NO: 183400 - DNA, 25 bp, Probe sequence
aagtcaaaaattcaacaggcaagtt

SEQ ID NO: 183401 - DNA, 25 bp, Probe sequence
aatgttgaattttttagcttgtctg

SEQ ID NO: 183402 - DNA, 25 bp, Probe sequence
aatgctccagatacttgcaagtttt

SEQ ID NO: 183403 - DNA, 25 bp, Probe sequence
aatccagacttaacatctgcactca

SEQ ID NO: 183404 - DNA, 25 bp, Probe sequence
caaaccatcgaagacaatccagact

SEQ ID NO: 183405 - DNA, 25 bp, Probe sequence
cactcaaaccaaccattcatcaata

SEQ ID NO: 183406 - DNA, 25 bp, Probe sequence
caggcaagttaatgctccagatact

SEQ ID NO: 183407 - DNA, 25 bp, Probe sequence
gcctcaaacactctactttcaaata

SEQ ID NO: 183408 - DNA, 25 bp, Probe sequence
gctatgtgactaaaaaaggcaatcc

SEQ ID NO: 183409 - DNA, 25 bp, Probe sequence
gcttgtctgaacgtatggaagtcaa

SEQ ID NO: 183410 - DNA, 25 bp, Probe sequence
gaattacagcgcatgttaaatgatg

SEQ ID NO: 183411 - DNA, 25 bp, Probe sequence
gaattttttagcttgtctgaacgta

SEQ ID NO: 183412 - DNA, 25 bp, Probe sequence
gaatcttatgccaaaggtcatggtt

SEQ ID NO: 183413 - DNA, 25 bp, Probe sequence
gaatccatggataaatcacagctca

SEQ ID NO: 183414 - DNA, 25 bp, Probe sequence
gaaccgtcctgaattacagcgcatg

SEQ ID NO: 183415 - DNA, 25 bp, Probe sequence
gatcggggtatatcaggaaaatcta

SEQ ID NO: 183416 - DNA, 25 bp, Probe sequence
gagggacaaattacacaaatagagc

SEQ ID NO: 183417 - DNA, 25 bp, Probe sequence
gttgatatatatgcagatcggggta

SEQ ID NO: 183418 - DNA, 25 bp, Probe sequence
gtttttgcctcaaacactctacttt

SEQ ID NO: 183419 - DNA, 25 bp, Probe sequence
gtaatacttccgatttacttacaat

SEQ ID NO: 183420 - DNA, 25 bp, Probe sequence
ggaaaattagactgtgttatggttt

SEQ ID NO: 183421 - DNA, 25 bp, Probe sequence
ggcacgtaatacttccgatttactt

SEQ ID NO: 183422 - DNA, 25 bp, Probe sequence
ggcaatcttccattaggatataata

SEQ ID NO: 183423 - DNA, 25 bp, Probe sequence
tcaacatgaagctaacatcgttaaa

SEQ ID NO: 183424 - DNA, 25 bp, Probe sequence
taaagttctcaaacaagttgtcgaa

SEQ ID NO: 183425 - DNA, 25 bp, Probe sequence
ttatcaaggcaatcttccattagga

SEQ ID NO: 183426 - DNA, 25 bp, Probe sequence
ttaacatctgcactcaaaccaacca

SEQ ID NO: 183427 - DNA, 25 bp, Probe sequence
ataacctagaattcactcaagcaat

SEQ ID NO: 183428 - DNA, 25 bp, Probe sequence
atcactattcctgtagcaatccatt

SEQ ID NO: 183429 - DNA, 25 bp, Probe sequence
atgcttcacacagcccattcgaaga

SEQ ID NO: 183430 - DNA, 25 bp, Probe sequence
atgagcggtttctacacaattgtta

SEQ ID NO: 183431 - DNA, 25 bp, Probe sequence
aggtgtttctgaaggtgctgctcgt

SEQ ID NO: 183432 - DNA, 25 bp, Probe sequence
acagcccattcgaagaaaacgtagc

SEQ ID NO: 183433 - DNA, 25 bp, Probe sequence
aaagcaattccatttggtacagcta

SEQ ID NO: 183434 - DNA, 25 bp, Probe sequence
aaaagttgttgaatacgctcatgaa

SEQ ID NO: 183435 - DNA, 25 bp, Probe sequence
aaggtgtttctgtagaagctgaatt

SEQ ID NO: 183436 - DNA, 25 bp, Probe sequence
aatacttaggacctgcacgtgaagc

SEQ ID NO: 183437 - DNA, 25 bp, Probe sequence
caagcaattttagaagcgtcacaag

SEQ ID NO: 183438 - DNA, 25 bp, Probe sequence
gctgaattaggtactgttggtggac

SEQ ID NO: 183439 - DNA, 25 bp, Probe sequence
gctggtttcacatcagtaatgatcg

SEQ ID NO: 183440 - DNA, 25 bp, Probe sequence
gcattagcgccagcattaggttcag

SEQ ID NO: 183441 - DNA, 25 bp, Probe sequence
gcatgacttaaacatcactattcct

SEQ ID NO: 183442 - DNA, 25 bp, Probe sequence
gaagctatcgatgctggtttcacat

SEQ ID NO: 183443 - DNA, 25 bp, Probe sequence
gaagatgatgttgtagcagacggca

SEQ ID NO: 183444 - DNA, 25 bp, Probe sequence
gaaaatggttatgcggtaggtcaat

SEQ ID NO: 183445 - DNA, 25 bp, Probe sequence
gaaaaccaaatcgcttcagcaaaag

SEQ ID NO: 183446 - DNA, 25 bp, Probe sequence
gacaaagaagtttacgatcctcgta

SEQ ID NO: 183447 - DNA, 25 bp, Probe sequence
gacggcatcatttatgctgatccta

SEQ ID NO: 183448 - DNA, 25 bp, Probe sequence
gatcctcgtaaatacttaggacctg

SEQ ID NO: 183449 - DNA, 25 bp, Probe sequence
gttgtagcagacggcatcatttatg

SEQ ID NO: 183450 - DNA, 25 bp, Probe sequence
gtaaacactgaaaaccaaatcgctt

SEQ ID NO: 183451 - DNA, 25 bp, Probe sequence
ggtgctgctcgttacatgagcggtt

SEQ ID NO: 183452 - DNA, 25 bp, Probe sequence
ggtttaccattagtattacacggtg

SEQ ID NO: 183453 - DNA, 25 bp, Probe sequence
ggttgaagggttaatgcatgactta

SEQ ID NO: 183454 - DNA, 25 bp, Probe sequence
tcctgtagcaatccatttagaccat

SEQ ID NO: 183455 - DNA, 25 bp, Probe sequence
tcagcaaaagcagttcgtgacgttt

SEQ ID NO: 183456 - DNA, 25 bp, Probe sequence
tattacacggtggtactggtatccc

SEQ ID NO: 183457 - DNA, 25 bp, Probe sequence
taatgatcgatgcttcacacagccc

SEQ ID NO: 183458 - DNA, 25 bp, Probe sequence
tatgctgatcctaaagaatgtcaag

SEQ ID NO: 183459 - DNA, 25 bp, Probe sequence
tttagaccatggttcaagctttgaa

SEQ ID NO: 183460 - DNA, 25 bp, Probe sequence
ttaggttcagttcatggtccataca

SEQ ID NO: 183461 - DNA, 25 bp, Probe sequence
attaccgtttattgaagcgattcgt

SEQ ID NO: 183462 - DNA, 25 bp, Probe sequence
atgagtccttatcaacatggtgaag

SEQ ID NO: 183463 - DNA, 25 bp, Probe sequence
aggtggtacattacgcttaggctta

SEQ ID NO: 183464 - DNA, 25 bp, Probe sequence
agggtattacagcatcttctctagg

SEQ ID NO: 183465 - DNA, 25 bp, Probe sequence
acgaatgcagacgttgttatcactg

SEQ ID NO: 183466 - DNA, 25 bp, Probe sequence
actgccttatattaaagctgctgga

SEQ ID NO: 183467 - DNA, 25 bp, Probe sequence
acagccggtaaagtgtattcacacg

SEQ ID NO: 183468 - DNA, 25 bp, Probe sequence
aaaattgcattattctgtgacatta

SEQ ID NO: 183469 - DNA, 25 bp, Probe sequence
aagaacgtcgtggtgattacttagg

SEQ ID NO: 183470 - DNA, 25 bp, Probe sequence
ctgaattagacccagcaacaccata

SEQ ID NO: 183471 - DNA, 25 bp, Probe sequence
tcgtccgcacccgatttttaaatca

SEQ ID NO: 183472 - DNA, 25 bp, Probe sequence
gccgaataccttgcagatgtcgacg

SEQ ID NO: 183473 - DNA, 25 bp, Probe sequence
gcgattcgtcaaattcgtagcgatt

SEQ ID NO: 183474 - DNA, 25 bp, Probe sequence
gcaacaccatacccaattatagatt

SEQ ID NO: 183475 - DNA, 25 bp, Probe sequence
gaaggcacattggcacaagatgttt

SEQ ID NO: 183476 - DNA, 25 bp, Probe sequence
gaacagttcaagttattccgcatat

SEQ ID NO: 183477 - DNA, 25 bp, Probe sequence
gaaagacatcgtcatcgttatgaat

SEQ ID NO: 183478 - DNA, 25 bp, Probe sequence
gagattccgacaaatgatttcttta

SEQ ID NO: 183479 - DNA, 25 bp, Probe sequence
gaggcttaggtattcaaccagactt

SEQ ID NO: 183480 - DNA, 25 bp, Probe sequence
gatccatacttaaatgttgacccag

SEQ ID NO: 183481 - DNA, 25 bp, Probe sequence
gatattgagtcattaccgtttattg

SEQ ID NO: 183482 - DNA, 25 bp, Probe sequence
gttgacccaggtacaatgagtcctt

SEQ ID NO: 183483 - DNA, 25 bp, Probe sequence
gttatcactgaaattggcggtacaa

SEQ ID NO: 183484 - DNA, 25 bp, Probe sequence
gtcgacggtattttagtaccaggtg

SEQ ID NO: 183485 - DNA, 25 bp, Probe sequence
gtgcagaaactgacctagacttagg

SEQ ID NO: 183486 - DNA, 25 bp, Probe sequence
gtgttattgaatgtcgtgatgcaga

SEQ ID NO: 183487 - DNA, 25 bp, Probe sequence
gtggatttggtttccgtgcaagtga

SEQ ID NO: 183488 - DNA, 25 bp, Probe sequence
ggtggcgtagtttcatcattaggga

SEQ ID NO: 183489 - DNA, 25 bp, Probe sequence
tgttcactgtacattactgccttat

SEQ ID NO: 183490 - DNA, 25 bp, Probe sequence
tgaaggcgcacattcagctgaatta

SEQ ID NO: 183491 - DNA, 25 bp, Probe sequence
tccacccagaattcttatctagacc

SEQ ID NO: 183492 - DNA, 25 bp, Probe sequence
tattcgtaacggatgatggtgcaga

SEQ ID NO: 183493 - DNA, 25 bp, Probe sequence
ttattgcttgtcaattccacccaga

SEQ ID NO: 183494 - DNA, 25 bp, Probe sequence
ttatctagaccaaatcgtccgcacc

SEQ ID NO: 183495 - DNA, 25 bp, Probe sequence
atatcgctttaatggtattggttca

SEQ ID NO: 183496 - DNA, 25 bp, Probe sequence
aggaccaattggcaaagaacgacta

SEQ ID NO: 183497 - DNA, 25 bp, Probe sequence
agaacgactatattacttggactta

SEQ ID NO: 183498 - DNA, 25 bp, Probe sequence
acgaacgtgctggattcatgcatac

SEQ ID NO: 183499 - DNA, 25 bp, Probe sequence
acatcgttactatcagcatgaaggt

SEQ ID NO: 183500 - DNA, 25 bp, Probe sequence
acaaatatattcatctttacctaaa

SEQ ID NO: 183501 - DNA, 25 bp, Probe sequence
aaaggttggctttatcgcattggag

SEQ ID NO: 183502 - DNA, 25 bp, Probe sequence
aaagcatttgatgaacaatatcgtt

SEQ ID NO: 183503 - DNA, 25 bp, Probe sequence
aatatcgttcagcaattaatgattt

SEQ ID NO: 183504 - DNA, 25 bp, Probe sequence
ctatgacaaccttaatgtgattacg

SEQ ID NO: 183505 - DNA, 25 bp, Probe sequence
ctgattttaatcatctatatctagt

SEQ ID NO: 183506 - DNA, 25 bp, Probe sequence
cgaacaaactgatgattatgtcgtt

SEQ ID NO: 183507 - DNA, 25 bp, Probe sequence
gcatgaaggttatgatacacctgaa

SEQ ID NO: 183508 - DNA, 25 bp, Probe sequence
gaaggtatcactttaaaagcatttg

SEQ ID NO: 183509 - DNA, 25 bp, Probe sequence
gaagtgaccaatgtacatatcatta

SEQ ID NO: 183510 - DNA, 25 bp, Probe sequence
gaagtggataaatcatatcgcttta

SEQ ID NO: 183511 - DNA, 25 bp, Probe sequence
gaacgcatgaacattgctgctattg

SEQ ID NO: 183512 - DNA, 25 bp, Probe sequence
gaactttgttttgaaggtatcactt

SEQ ID NO: 183513 - DNA, 25 bp, Probe sequence
gaacattgctgctattgaagtggat

SEQ ID NO: 183514 - DNA, 25 bp, Probe sequence
gaaagtcgttcagaagtgaccaatg

SEQ ID NO: 183515 - DNA, 25 bp, Probe sequence
gatgcggaaaatgacaatgcttgga

SEQ ID NO: 183516 - DNA, 25 bp, Probe sequence
gatacacctgaaaatgtcgtttata

SEQ ID NO: 183517 - DNA, 25 bp, Probe sequence
gttcaaggtgtatttcctgatttta

SEQ ID NO: 183518 - DNA, 25 bp, Probe sequence
gtattacatcgttactatcagcatg

SEQ ID NO: 183519 - DNA, 25 bp, Probe sequence
gtgattacgatgattctgtttggag

SEQ ID NO: 183520 - DNA, 25 bp, Probe sequence
gtggtgggcttttttgtattacatc

SEQ ID NO: 183521 - DNA, 25 bp, Probe sequence
ggattcatgcatacagcgactaaag

SEQ ID NO: 183522 - DNA, 25 bp, Probe sequence
ggagcagattggtgaacgcatgaac

SEQ ID NO: 183523 - DNA, 25 bp, Probe sequence
ggctttatcgcattggagcagattg

SEQ ID NO: 183524 - DNA, 25 bp, Probe sequence
tggacttagattcaaaacatgtttc

SEQ ID NO: 183525 - DNA, 25 bp, Probe sequence
tgtcgtttatattcgttcattatcg

SEQ ID NO: 183526 - DNA, 25 bp, Probe sequence
tcattgccgcaatatgttcaaggtg

SEQ ID NO: 183527 - DNA, 25 bp, Probe sequence
tcaaggttttggatatggcacgaaa

SEQ ID NO: 183528 - DNA, 25 bp, Probe sequence
taatgattgatggccaaaaggttgg

SEQ ID NO: 183529 - DNA, 25 bp, Probe sequence
atattatgcctgtatggagtattaa

SEQ ID NO: 183530 - DNA, 25 bp, Probe sequence
atgatgaagtatacggcttaactaa

SEQ ID NO: 183531 - DNA, 25 bp, Probe sequence
atgtatttatttcgcctctaaaaat

SEQ ID NO: 183532 - DNA, 25 bp, Probe sequence
atgtcttataaagcatatccattct

SEQ ID NO: 183533 - DNA, 25 bp, Probe sequence
acgattgaaggttctgttttcggag

SEQ ID NO: 183534 - DNA, 25 bp, Probe sequence
acgttgtagctgttacacaagaagt

SEQ ID NO: 183535 - DNA, 25 bp, Probe sequence
aaagccgcatattatgcctgtatgg

SEQ ID NO: 183536 - DNA, 25 bp, Probe sequence
aaagcatatccattctttagagata

SEQ ID NO: 183537 - DNA, 25 bp, Probe sequence
aaaactggcgtggttggtacaattg

SEQ ID NO: 183538 - DNA, 25 bp, Probe sequence
aacaagtcgtgatattccatttgat

SEQ ID NO: 183539 - DNA, 25 bp, Probe sequence
aaggtagtaagcagtttattctcat

SEQ ID NO: 183540 - DNA, 25 bp, Probe sequence
aatggacgttgatcgttttgctact

SEQ ID NO: 183541 - DNA, 25 bp, Probe sequence
aatgaatgtatttatttcgcctcta

SEQ ID NO: 183542 - DNA, 25 bp, Probe sequence
aattgtctaatgaacttacatttta

SEQ ID NO: 183543 - DNA, 25 bp, Probe sequence
cagagcgttaaaagttcgagatgaa

SEQ ID NO: 183544 - DNA, 25 bp, Probe sequence
ctagtacgcctaaattataaaagtg

SEQ ID NO: 183545 - DNA, 25 bp, Probe sequence
gaatggctagatgaacttagagatg

SEQ ID NO: 183546 - DNA, 25 bp, Probe sequence
gaagaagggcatctactaaacgttg

SEQ ID NO: 183547 - DNA, 25 bp, Probe sequence
gaagaaagtgtggccgtatcatttt

SEQ ID NO: 183548 - DNA, 25 bp, Probe sequence
gaagagtgtgatttaattacgattg

SEQ ID NO: 183549 - DNA, 25 bp, Probe sequence
gacgttgatcgttttgctacttatg

SEQ ID NO: 183550 - DNA, 25 bp, Probe sequence
gatagcgacgaaaaaaagccgcata

SEQ ID NO: 183551 - DNA, 25 bp, Probe sequence
gtttcagcgcaaaaattgtctaatg

SEQ ID NO: 183552 - DNA, 25 bp, Probe sequence
gtttgatgaacaagaccatattatt

SEQ ID NO: 183553 - DNA, 25 bp, Probe sequence
gtaggcgtttggacagaagaaagtg

SEQ ID NO: 183554 - DNA, 25 bp, Probe sequence
gtaagcagtttattctcattagtga

SEQ ID NO: 183555 - DNA, 25 bp, Probe sequence
gtgaagcgtatgtaggcgtttggac

SEQ ID NO: 183556 - DNA, 25 bp, Probe sequence
gggcatctactaaacgttgtagctg

SEQ ID NO: 183557 - DNA, 25 bp, Probe sequence
ggttctgttttcggagaatggctag

SEQ ID NO: 183558 - DNA, 25 bp, Probe sequence
ggttggtacaattgtttcagcgcaa

SEQ ID NO: 183559 - DNA, 25 bp, Probe sequence
ggccgtatcatttttaacaagtcgt

SEQ ID NO: 183560 - DNA, 25 bp, Probe sequence
tgatcgttttgctacttatgaatta

SEQ ID NO: 183561 - DNA, 25 bp, Probe sequence
tcaaagaatttgtccaagatgtagc

SEQ ID NO: 183562 - DNA, 25 bp, Probe sequence
ttagagatgatcataaagccgttgc

SEQ ID NO: 183563 - DNA, 25 bp, Probe sequence
attacttgctaacgagttgaattca

SEQ ID NO: 183564 - DNA, 25 bp, Probe sequence
attacctgttattgttcacgaagct

SEQ ID NO: 183565 - DNA, 25 bp, Probe sequence
atatcgaatccatggttgaaaccgg

SEQ ID NO: 183566 - DNA, 25 bp, Probe sequence
agtgcgacagacaaattgcatcagc

SEQ ID NO: 183567 - DNA, 25 bp, Probe sequence
agtttgcatactcggaatcgctagg

SEQ ID NO: 183568 - DNA, 25 bp, Probe sequence
agaccttcgtatatatcgaatccat

SEQ ID NO: 183569 - DNA, 25 bp, Probe sequence
acgaattcgcttattatcgaacaga

SEQ ID NO: 183570 - DNA, 25 bp, Probe sequence
actactaatgtaccagagcacgtta

SEQ ID NO: 183571 - DNA, 25 bp, Probe sequence
acagtactggagaatgaacgcgcat

SEQ ID NO: 183572 - DNA, 25 bp, Probe sequence
aaaagcgaattattgcgttcagttt

SEQ ID NO: 183573 - DNA, 25 bp, Probe sequence
aacaatcagcaatcttacgaaaact

SEQ ID NO: 183574 - DNA, 25 bp, Probe sequence
aaggattctttggtgtagctggttt

SEQ ID NO: 183575 - DNA, 25 bp, Probe sequence
aattgcatcagctatttcaagttat

SEQ ID NO: 183576 - DNA, 25 bp, Probe sequence
gcggcaacgcaattaacggataagt

SEQ ID NO: 183577 - DNA, 25 bp, Probe sequence
gaacgcgcatttttagctgaacttg

SEQ ID NO: 183578 - DNA, 25 bp, Probe sequence
gaaaccggacgaacatcaatctaat

SEQ ID NO: 183579 - DNA, 25 bp, Probe sequence
gagcacgttatagaagcaggtagac

SEQ ID NO: 183580 - DNA, 25 bp, Probe sequence
gatggtgattggtacggtgaagata

SEQ ID NO: 183581 - DNA, 25 bp, Probe sequence
gatgatcttccgacagcaggtggct

SEQ ID NO: 183582 - DNA, 25 bp, Probe sequence
gataacacacatttcttcaatacga

SEQ ID NO: 183583 - DNA, 25 bp, Probe sequence
gttgtctatacgtcaagaccttcgt

SEQ ID NO: 183584 - DNA, 25 bp, Probe sequence
gttcacgaagctagtgcgacagaca

SEQ ID NO: 183585 - DNA, 25 bp, Probe sequence
gtttatacccgttatcttattatga

SEQ ID NO: 183586 - DNA, 25 bp, Probe sequence
gtttggctgtatttggcatggtgat

SEQ ID NO: 183587 - DNA, 25 bp, Probe sequence
ggttcaacgagcatgttattacttg

SEQ ID NO: 183588 - DNA, 25 bp, Probe sequence
ggcaactgctgaaacgaattcgctt

SEQ ID NO: 183589 - DNA, 25 bp, Probe sequence
ggctatggcgttatgatttgttatc

SEQ ID NO: 183590 - DNA, 25 bp, Probe sequence
tggtaatgagccgaacttaacgtta

SEQ ID NO: 183591 - DNA, 25 bp, Probe sequence
tgtagctggttttgacctactcgtc

SEQ ID NO: 183592 - DNA, 25 bp, Probe sequence
tccgacagcaggtggctatggcgtt

SEQ ID NO: 183593 - DNA, 25 bp, Probe sequence
taagccgggagatgatcttccgaca

SEQ ID NO: 183594 - DNA, 25 bp, Probe sequence
ttcaatatcttggtgcggcaacgca

SEQ ID NO: 183595 - DNA, 25 bp, Probe sequence
ttgcgttcagtttgcatactcggaa

SEQ ID NO: 183596 - DNA, 25 bp, Probe sequence
ttgacctactcgtcgatgaggatga

SEQ ID NO: 183597 - DNA, 25 bp, Probe sequence
cttgacgggccagctataggttttt

SEQ ID NO: 183598 - DNA, 25 bp, Probe sequence
attccagactatacacatgctcgtt

SEQ ID NO: 183599 - DNA, 25 bp, Probe sequence
atcaagacgtttatcaagacattat

SEQ ID NO: 183600 - DNA, 25 bp, Probe sequence
atgaacgtcctgaacttggtaatga

SEQ ID NO: 183601 - DNA, 25 bp, Probe sequence
aggatcacgtaatttagtaggacat

SEQ ID NO: 183602 - DNA, 25 bp, Probe sequence
agtgctcatgcctctgaaaatgcag

SEQ ID NO: 183603 - DNA, 25 bp, Probe sequence
acggaaaaagtgctcatgcctctga

SEQ ID NO: 183604 - DNA, 25 bp, Probe sequence
aaagcagctaatattattccagact

SEQ ID NO: 183605 - DNA, 25 bp, Probe sequence
aacgtgtgcatggtgtgattttaga

SEQ ID NO: 183606 - DNA, 25 bp, Probe sequence
aacgattgatactttggcagtggat

SEQ ID NO: 183607 - DNA, 25 bp, Probe sequence
aatggcgttgatggggttagagtta

SEQ ID NO: 183608 - DNA, 25 bp, Probe sequence
aatgcattagacgctatgattagtt

SEQ ID NO: 183609 - DNA, 25 bp, Probe sequence
gctgcgagtgtacatggtgatgaag

SEQ ID NO: 183610 - DNA, 25 bp, Probe sequence
gcttcttatgtcaaggctggtgtga

SEQ ID NO: 183611 - DNA, 25 bp, Probe sequence
gcaactgggtttatagcgacatatg

SEQ ID NO: 183612 - DNA, 25 bp, Probe sequence
gaaggtggggaaaatggtagcgcta

SEQ ID NO: 183613 - DNA, 25 bp, Probe sequence
gaagagcatgcgcatttgaaaggga

SEQ ID NO: 183614 - DNA, 25 bp, Probe sequence
gaaatatttgcgtctcgaactttaa

SEQ ID NO: 183615 - DNA, 25 bp, Probe sequence
gacattgccttaatgattcatccgg

SEQ ID NO: 183616 - DNA, 25 bp, Probe sequence
gatgattttggttatggctctacgg

SEQ ID NO: 183617 - DNA, 25 bp, Probe sequence
gattttagatggcgggaaagcagct

SEQ ID NO: 183618 - DNA, 25 bp, Probe sequence
gttgtgccaacaatacatcctcata

SEQ ID NO: 183619 - DNA, 25 bp, Probe sequence
gtaggacatacgcatagatttagag

SEQ ID NO: 183620 - DNA, 25 bp, Probe sequence
gtaaatcaaatcgcacgtggagctg

SEQ ID NO: 183621 - DNA, 25 bp, Probe sequence
gtggtcataatatcattggaactgc

SEQ ID NO: 183622 - DNA, 25 bp, Probe sequence
ggtagcgctaaagcttcttatgtca

SEQ ID NO: 183623 - DNA, 25 bp, Probe sequence
ggatgtccagctgaagaaggtgggg

SEQ ID NO: 183624 - DNA, 25 bp, Probe sequence
ggagctgcgatacagactggttgtg

SEQ ID NO: 183625 - DNA, 25 bp, Probe sequence
ggaacgtaagtcatgttgtgccaac

SEQ ID NO: 183626 - DNA, 25 bp, Probe sequence
tacacatgctcgtttttatactaga

SEQ ID NO: 183627 - DNA, 25 bp, Probe sequence
tagcagaatacgatgctttgccagg

SEQ ID NO: 183628 - DNA, 25 bp, Probe sequence
tagcacaactacgacaacatattaa

SEQ ID NO: 183629 - DNA, 25 bp, Probe sequence
tatggctctacggatacagggaacg

SEQ ID NO: 183630 - DNA, 25 bp, Probe sequence
ttgggtcatgcttgtggtcataata

SEQ ID NO: 183631 - DNA, 25 bp, Probe sequence
attcccagctaatatctatatggca

SEQ ID NO: 183632 - DNA, 25 bp, Probe sequence
attcttgctagctgtattcccagct

SEQ ID NO: 183633 - DNA, 25 bp, Probe sequence
attaaaagaccatctcaatgcttga

SEQ ID NO: 183634 - DNA, 25 bp, Probe sequence
ataggtgtattgcattttacacgag

SEQ ID NO: 183635 - DNA, 25 bp, Probe sequence
atacaatcaatctattcttgctagc

SEQ ID NO: 183636 - DNA, 25 bp, Probe sequence
atcaatctattcttgctagctgtat

SEQ ID NO: 183637 - DNA, 25 bp, Probe sequence
atctattcttgctagctgtattccc

SEQ ID NO: 183638 - DNA, 25 bp, Probe sequence
atggcaactatatttaaggttacct

SEQ ID NO: 183639 - DNA, 25 bp, Probe sequence
acacgagaacgacaatttagaaata

SEQ ID NO: 183640 - DNA, 25 bp, Probe sequence
acagcggttcttgttacaggaatct

SEQ ID NO: 183641 - DNA, 25 bp, Probe sequence
caatcaatctattcttgctagctgt

SEQ ID NO: 183642 - DNA, 25 bp, Probe sequence
cttgctagctgtattcccagctaat

SEQ ID NO: 183643 - DNA, 25 bp, Probe sequence
ctattcttgctagctgtattcccag

SEQ ID NO: 183644 - DNA, 25 bp, Probe sequence
cccagctaatatctatatggcagtt

SEQ ID NO: 183645 - DNA, 25 bp, Probe sequence
cctatgcagttcgtgttaatgggac

SEQ ID NO: 183646 - DNA, 25 bp, Probe sequence
gccaacatggcaactatatttaagg

SEQ ID NO: 183647 - DNA, 25 bp, Probe sequence
gcggttcttgttacaggaatctttg

SEQ ID NO: 183648 - DNA, 25 bp, Probe sequence
gctgtattcccagctaatatctata

SEQ ID NO: 183649 - DNA, 25 bp, Probe sequence
gcattttacacgagaacgacaattt

SEQ ID NO: 183650 - DNA, 25 bp, Probe sequence
gcagttcgtgttaatgggactaatt

SEQ ID NO: 183651 - DNA, 25 bp, Probe sequence
gaaaaacagcggttcttgttacagg

SEQ ID NO: 183652 - DNA, 25 bp, Probe sequence
gaccatctcaatgcttgaaaaatac

SEQ ID NO: 183653 - DNA, 25 bp, Probe sequence
gagatattatttggacttgcacttt

SEQ ID NO: 183654 - DNA, 25 bp, Probe sequence
gatattatttggacttgcactttta

SEQ ID NO: 183655 - DNA, 25 bp, Probe sequence
gttcttgttacaggaatctttgaga

SEQ ID NO: 183656 - DNA, 25 bp, Probe sequence
ggttacctatgcagttcgtgttaat

SEQ ID NO: 183657 - DNA, 25 bp, Probe sequence
ggagataaacaattgccaacatggc

SEQ ID NO: 183658 - DNA, 25 bp, Probe sequence
tatttggacttgcacttttaattaa

SEQ ID NO: 183659 - DNA, 25 bp, Probe sequence
taaggttacctatgcagttcgtgtt

SEQ ID NO: 183660 - DNA, 25 bp, Probe sequence
taaaagaccatctcaatgcttgaaa

SEQ ID NO: 183661 - DNA, 25 bp, Probe sequence
tacctatgcagttcgtgttaatggg

SEQ ID NO: 183662 - DNA, 25 bp, Probe sequence
tatatggcagttaaaaagttacctt

SEQ ID NO: 183663 - DNA, 25 bp, Probe sequence
tattgcattttacacgagaacgaca

SEQ ID NO: 183664 - DNA, 25 bp, Probe sequence
ttagaaatatcataccgaaatgttt

SEQ ID NO: 183665 - DNA, 25 bp, Probe sequence
atacgatggcgattatttctgatat

SEQ ID NO: 183666 - DNA, 25 bp, Probe sequence
atgttactggtactgtcaattcaat

SEQ ID NO: 183667 - DNA, 25 bp, Probe sequence
aggtgtcgcttcgatgatgttagga

SEQ ID NO: 183668 - DNA, 25 bp, Probe sequence
aggtcatacaggtggtacgattgat

SEQ ID NO: 183669 - DNA, 25 bp, Probe sequence
agtctctaacgatataggtgtcgct

SEQ ID NO: 183670 - DNA, 25 bp, Probe sequence
agtttagcaatggcgatttatttcc

SEQ ID NO: 183671 - DNA, 25 bp, Probe sequence
agcgtttgccacaagctcaatatca

SEQ ID NO: 183672 - DNA, 25 bp, Probe sequence
agcgagagcgttgctaattgaggca

SEQ ID NO: 183673 - DNA, 25 bp, Probe sequence
agcgcacgcaatggtacgtattggt

SEQ ID NO: 183674 - DNA, 25 bp, Probe sequence
aaaactggtagcggtgcatttatga

SEQ ID NO: 183675 - DNA, 25 bp, Probe sequence
gcgtgacggtcatacactaacaacg

SEQ ID NO: 183676 - DNA, 25 bp, Probe sequence
gcagctgtagatgttcctgttgcaa

SEQ ID NO: 183677 - DNA, 25 bp, Probe sequence
gaatcagccacttggacgtgcgatt

SEQ ID NO: 183678 - DNA, 25 bp, Probe sequence
gaagcaattgatggttttcatgttg

SEQ ID NO: 183679 - DNA, 25 bp, Probe sequence
gacgtgcgattggcaatgcgcttga

SEQ ID NO: 183680 - DNA, 25 bp, Probe sequence
gagcgtgcagcattaacgatggcta

SEQ ID NO: 183681 - DNA, 25 bp, Probe sequence
gagtgggcgtggattaggtcataca

SEQ ID NO: 183682 - DNA, 25 bp, Probe sequence
gatggctatggttaattctggtgat

SEQ ID NO: 183683 - DNA, 25 bp, Probe sequence
gatgatgttaggagcgggacgttta

SEQ ID NO: 183684 - DNA, 25 bp, Probe sequence
gatgctgaagcattagcgcacgcaa

SEQ ID NO: 183685 - DNA, 25 bp, Probe sequence
gataagcactcaacaggtggtgtag

SEQ ID NO: 183686 - DNA, 25 bp, Probe sequence
gatacaactacattggttttagcac

SEQ ID NO: 183687 - DNA, 25 bp, Probe sequence
gattcacagtaatcgccaagatgta

SEQ ID NO: 183688 - DNA, 25 bp, Probe sequence
gattggcaatgcgcttgagttacaa

SEQ ID NO: 183689 - DNA, 25 bp, Probe sequence
gttattgaccatccagagcgtttgc

SEQ ID NO: 183690 - DNA, 25 bp, Probe sequence
gttttagcaccattagtagcagctg

SEQ ID NO: 183691 - DNA, 25 bp, Probe sequence
gtaaaaagattgctgctggtgcaga

SEQ ID NO: 183692 - DNA, 25 bp, Probe sequence
ggtgcagatgcaattgtattagatg

SEQ ID NO: 183693 - DNA, 25 bp, Probe sequence
ggttctcaaatggttgtacttgcaa

SEQ ID NO: 183694 - DNA, 25 bp, Probe sequence
ggacaaggtccgaaagatttaacag

SEQ ID NO: 183695 - DNA, 25 bp, Probe sequence
tgtatcgcctacattaattcataaa

SEQ ID NO: 183696 - DNA, 25 bp, Probe sequence
tgatttagcggttggtattgtttta

SEQ ID NO: 183697 - DNA, 25 bp, Probe sequence
tcaataccattaattgcctcttcaa

SEQ ID NO: 183698 - DNA, 25 bp, Probe sequence
tatgccttaagggatgttactggta

SEQ ID NO: 183699 - DNA, 25 bp, Probe sequence
atatacttagcttcattgtcccttc

SEQ ID NO: 183700 - DNA, 25 bp, Probe sequence
atctaccatttcatttacagttgct

SEQ ID NO: 183701 - DNA, 25 bp, Probe sequence
atctgcttgtatttcaatcgacatt

SEQ ID NO: 183702 - DNA, 25 bp, Probe sequence
atctgtatcagacatgaacccttat

SEQ ID NO: 183703 - DNA, 25 bp, Probe sequence
atgtcactatacttaattgcttcta

SEQ ID NO: 183704 - DNA, 25 bp, Probe sequence
agtttaaattctatatctgcttgta

SEQ ID NO: 183705 - DNA, 25 bp, Probe sequence
acccttatatcgttgcatcactcgt

SEQ ID NO: 183706 - DNA, 25 bp, Probe sequence
acatcatctgtagtgccatatttca

SEQ ID NO: 183707 - DNA, 25 bp, Probe sequence
aactcacctttctatgtatctacca

SEQ ID NO: 183708 - DNA, 25 bp, Probe sequence
aatggtatcctagctttaatttcag

SEQ ID NO: 183709 - DNA, 25 bp, Probe sequence
aatggtgttggcaaaggtaactcac

SEQ ID NO: 183710 - DNA, 25 bp, Probe sequence
caaaaggcttcaatacatcatctgt

SEQ ID NO: 183711 - DNA, 25 bp, Probe sequence
cattgcaggtattttcggttttgga

SEQ ID NO: 183712 - DNA, 25 bp, Probe sequence
ctgcacagtctaccatttcatctag

SEQ ID NO: 183713 - DNA, 25 bp, Probe sequence
cgagtcaagacgtcgtgcagcgtta

SEQ ID NO: 183714 - DNA, 25 bp, Probe sequence
cgacattaagcaacgcttcttcgga

SEQ ID NO: 183715 - DNA, 25 bp, Probe sequence
gccaccatttgtagcaggattactt

SEQ ID NO: 183716 - DNA, 25 bp, Probe sequence
gctgccattccaattattttcctag

SEQ ID NO: 183717 - DNA, 25 bp, Probe sequence
gcacactaaactgggttgccgttat

SEQ ID NO: 183718 - DNA, 25 bp, Probe sequence
gcttcattgtcccttcaaaacataa

SEQ ID NO: 183719 - DNA, 25 bp, Probe sequence
gaatacattcggtgttatttgtgga

SEQ ID NO: 183720 - DNA, 25 bp, Probe sequence
gaagttaactttgcacgtttcatta

SEQ ID NO: 183721 - DNA, 25 bp, Probe sequence
gacttatgggatttattcttgtttg

SEQ ID NO: 183722 - DNA, 25 bp, Probe sequence
gataaaccatcaacatacatttcaa

SEQ ID NO: 183723 - DNA, 25 bp, Probe sequence
gattacttattgcagccattttcgc

SEQ ID NO: 183724 - DNA, 25 bp, Probe sequence
gtcgtgcagcgttatcaagcttctg

SEQ ID NO: 183725 - DNA, 25 bp, Probe sequence
gtgccatatttcattttgactgaga

SEQ ID NO: 183726 - DNA, 25 bp, Probe sequence
gggtatcatctttgcttatgtctat

SEQ ID NO: 183727 - DNA, 25 bp, Probe sequence
ggtgtatttgcagttggtattttca

SEQ ID NO: 183728 - DNA, 25 bp, Probe sequence
ggagtgatttcattcaaggcgtcat

SEQ ID NO: 183729 - DNA, 25 bp, Probe sequence
ggcactgtctttgcagatgcgattg

SEQ ID NO: 183730 - DNA, 25 bp, Probe sequence
tgactgagatgccaccatttgtagc

SEQ ID NO: 183731 - DNA, 25 bp, Probe sequence
tacagttgcttttgtctttgcttat

SEQ ID NO: 183732 - DNA, 25 bp, Probe sequence
ttcgaaggtgtggtttggagtgatt

SEQ ID NO: 183733 - DNA, 25 bp, Probe sequence
ataggtatgcaaacatcagtagata

SEQ ID NO: 183734 - DNA, 25 bp, Probe sequence
ataattggatgtttaaatcttactt

SEQ ID NO: 183735 - DNA, 25 bp, Probe sequence
atcacaagacttcacaaatatctca

SEQ ID NO: 183736 - DNA, 25 bp, Probe sequence
acgcaatcgaaattgctggtaatgc

SEQ ID NO: 183737 - DNA, 25 bp, Probe sequence
acttcttctcattacacgttaaatt

SEQ ID NO: 183738 - DNA, 25 bp, Probe sequence
acatcagtagataaacataattgga

SEQ ID NO: 183739 - DNA, 25 bp, Probe sequence
aacaattagaaaacgcaatcgaaat

SEQ ID NO: 183740 - DNA, 25 bp, Probe sequence
aaccctgtaggtacattaactgaat

SEQ ID NO: 183741 - DNA, 25 bp, Probe sequence
aagaattatcacaagacttcacaaa

SEQ ID NO: 183742 - DNA, 25 bp, Probe sequence
aagaagctgcgaaaggttactctgc

SEQ ID NO: 183743 - DNA, 25 bp, Probe sequence
aagtagcaaactggacagtagctta

SEQ ID NO: 183744 - DNA, 25 bp, Probe sequence
aaggttactctgcagaacaaatggt

SEQ ID NO: 183745 - DNA, 25 bp, Probe sequence
aatgcttagagcaatcaattgttaa

SEQ ID NO: 183746 - DNA, 25 bp, Probe sequence
caatcaattgttaaagaagctgcga

SEQ ID NO: 183747 - DNA, 25 bp, Probe sequence
cctaacttcttctcattacacgtta

SEQ ID NO: 183748 - DNA, 25 bp, Probe sequence
gccaatatgtagacgaattagctga

SEQ ID NO: 183749 - DNA, 25 bp, Probe sequence
gcgaaaggttactctgcagaacaaa

SEQ ID NO: 183750 - DNA, 25 bp, Probe sequence
gaattatataatgaagcaagccaat

SEQ ID NO: 183751 - DNA, 25 bp, Probe sequence
gaatcaacaagtagcaaactggaca

SEQ ID NO: 183752 - DNA, 25 bp, Probe sequence
gtaggaggaaaccctgtaggtacat

SEQ ID NO: 183753 - DNA, 25 bp, Probe sequence
gaagatatgtttataggtatgcaaa

SEQ ID NO: 183754 - DNA, 25 bp, Probe sequence
gaagcaagccaatatgtagacgaat

SEQ ID NO: 183755 - DNA, 25 bp, Probe sequence
gaagctgcgaaaggttactctgcag

SEQ ID NO: 183756 - DNA, 25 bp, Probe sequence
gacttcacaaatatctcaaaacaat

SEQ ID NO: 183757 - DNA, 25 bp, Probe sequence
ggatgtttaaatcttacttaagcta

SEQ ID NO: 183758 - DNA, 25 bp, Probe sequence
ggtacattaactgaatgcttagagc

SEQ ID NO: 183759 - DNA, 25 bp, Probe sequence
ggaaaccctgtaggtacattaactg

SEQ ID NO: 183760 - DNA, 25 bp, Probe sequence
ggcgatgatgtatcagaagatatgt

SEQ ID NO: 183761 - DNA, 25 bp, Probe sequence
tgaaagaattttagcggtaggagga

SEQ ID NO: 183762 - DNA, 25 bp, Probe sequence
tactctgcagaacaaatggttgaag

SEQ ID NO: 183763 - DNA, 25 bp, Probe sequence
tagcggtaggaggaaaccctgtagg

SEQ ID NO: 183764 - DNA, 25 bp, Probe sequence
tatgtagacgaattagctgaaagaa

SEQ ID NO: 183765 - DNA, 25 bp, Probe sequence
ttcttctcattacacgttaaatttg

SEQ ID NO: 183766 - DNA, 25 bp, Probe sequence
ttctcattacacgttaaatttgaag

SEQ ID NO: 183767 - DNA, 25 bp, Probe sequence
attgggcgtaggtttatggcttgta

SEQ ID NO: 183768 - DNA, 25 bp, Probe sequence
attaaactaatcacagcactaccta

SEQ ID NO: 183769 - DNA, 25 bp, Probe sequence
atagtgtgattttacagaaaggtga

SEQ ID NO: 183770 - DNA, 25 bp, Probe sequence
atcacagcactacctaatcgaacta

SEQ ID NO: 183771 - DNA, 25 bp, Probe sequence
atcgaactaaattattgggcgtagg

SEQ ID NO: 183772 - DNA, 25 bp, Probe sequence
atgacctaccaagaaattatcaatt

SEQ ID NO: 183773 - DNA, 25 bp, Probe sequence
agatgataatgcgaaagtaaaactt

SEQ ID NO: 183774 - DNA, 25 bp, Probe sequence
agcactacctaatcgaactaaatta

SEQ ID NO: 183775 - DNA, 25 bp, Probe sequence
acagcactacctaatcgaactaaat

SEQ ID NO: 183776 - DNA, 25 bp, Probe sequence
actaatcacagcactacctaatcga

SEQ ID NO: 183777 - DNA, 25 bp, Probe sequence
acatggcaccaaccaaatgattatg

SEQ ID NO: 183778 - DNA, 25 bp, Probe sequence
acaacatggcaccaaccaaatgatt

SEQ ID NO: 183779 - DNA, 25 bp, Probe sequence
aaactaatcacagcactacctaatc

SEQ ID NO: 183780 - DNA, 25 bp, Probe sequence
aatcgcaggcgattattaaactaat

SEQ ID NO: 183781 - DNA, 25 bp, Probe sequence
aatcgttctttttagatgataatgc

SEQ ID NO: 183782 - DNA, 25 bp, Probe sequence
aattcaacatgacctaccaagaaat

SEQ ID NO: 183783 - DNA, 25 bp, Probe sequence
caacatgacctaccaagaaattatc

SEQ ID NO: 183784 - DNA, 25 bp, Probe sequence
caacaattttttaaacaacatccag

SEQ ID NO: 183785 - DNA, 25 bp, Probe sequence
cagtccgtaatttcggttatcgaat

SEQ ID NO: 183786 - DNA, 25 bp, Probe sequence
gcttgtacctaaaccagtccgtaat

SEQ ID NO: 183787 - DNA, 25 bp, Probe sequence
acaacatccagaagcggcaaataaa

SEQ ID NO: 183788 - DNA, 25 bp, Probe sequence
gggcgtaggtttatggcttgtacct

SEQ ID NO: 183789 - DNA, 25 bp, Probe sequence
gaagcggcaaataaaaatagtgtga

SEQ ID NO: 183790 - DNA, 25 bp, Probe sequence
gaaaacaacatggcaccaaccaaat

SEQ ID NO: 183791 - DNA, 25 bp, Probe sequence
gattatgaaaaatcgttctttttag

SEQ ID NO: 183792 - DNA, 25 bp, Probe sequence
gtatatattttgaatcgcaggcgat

SEQ ID NO: 183793 - DNA, 25 bp, Probe sequence
gtggaaaacaacatggcaccaacca

SEQ ID NO: 183794 - DNA, 25 bp, Probe sequence
ggttaattcaacatgacctaccaag

SEQ ID NO: 183795 - DNA, 25 bp, Probe sequence
ggcaccaaccaaatgattatgaaaa

SEQ ID NO: 183796 - DNA, 25 bp, Probe sequence
tggcttgtacctaaaccagtccgta

SEQ ID NO: 183797 - DNA, 25 bp, Probe sequence
tatggcttgtacctaaaccagtccg

SEQ ID NO: 183798 - DNA, 25 bp, Probe sequence
taatttcggttatcgaatgtttgct

SEQ ID NO: 183799 - DNA, 25 bp, Probe sequence
taatcacagcactacctaatcgaac

SEQ ID NO: 183800 - DNA, 25 bp, Probe sequence
taaacaacatccagaagcggcaaat

SEQ ID NO: 183801 - DNA, 25 bp, Probe sequence
attctttctattatttcaatcctaa

SEQ ID NO: 183802 - DNA, 25 bp, Probe sequence
atagatacagacattttccaaacgt

SEQ ID NO: 183803 - DNA, 25 bp, Probe sequence
atacgtgtacagtttcgttttaatg

SEQ ID NO: 183804 - DNA, 25 bp, Probe sequence
atggttatcatttttatactcagtt

SEQ ID NO: 183805 - DNA, 25 bp, Probe sequence
agacggatactggactacttggatg

SEQ ID NO: 183806 - DNA, 25 bp, Probe sequence
agctttatttgaatcaggcgcacat

SEQ ID NO: 183807 - DNA, 25 bp, Probe sequence
acaacaggtcatcctgatttttcag

SEQ ID NO: 183808 - DNA, 25 bp, Probe sequence
aaaagcggctaatgacttattgcaa

SEQ ID NO: 183809 - DNA, 25 bp, Probe sequence
aacaggctattgcaagtatgtcaca

SEQ ID NO: 183810 - DNA, 25 bp, Probe sequence
aagccatttattttacttgttgtag

SEQ ID NO: 183811 - DNA, 25 bp, Probe sequence
aagcgaatgcaaatcctgttataac

SEQ ID NO: 183812 - DNA, 25 bp, Probe sequence
aagaagaagcgttaaagccatttat

SEQ ID NO: 183813 - DNA, 25 bp, Probe sequence
caatatacgatttatacgcacacgt

SEQ ID NO: 183814 - DNA, 25 bp, Probe sequence
ccatctcaaggatttagagcgttta

SEQ ID NO: 183815 - DNA, 25 bp, Probe sequence
gcgtagtgaagctttggaatttcgt

SEQ ID NO: 183816 - DNA, 25 bp, Probe sequence
gaattgtggatataaccgttggaat

SEQ ID NO: 183817 - DNA, 25 bp, Probe sequence
gaagaatttgaacctggaaaccaat

SEQ ID NO: 183818 - DNA, 25 bp, Probe sequence
gaaccgttagtaggacaaacagctt

SEQ ID NO: 183819 - DNA, 25 bp, Probe sequence
gaaaaatcaatctgtcgttggaatt

SEQ ID NO: 183820 - DNA, 25 bp, Probe sequence
gaaacaggggcattatactatcgtg

SEQ ID NO: 183821 - DNA, 25 bp, Probe sequence
gatatgctttatggcaagtatttac

SEQ ID NO: 183822 - DNA, 25 bp, Probe sequence
gttatttctttttagctgaaactga

SEQ ID NO: 183823 - DNA, 25 bp, Probe sequence
gtatgtcacaagcacagtatgatgc

SEQ ID NO: 183824 - DNA, 25 bp, Probe sequence
gtaggagatcaagtcatcttttatc

SEQ ID NO: 183825 - DNA, 25 bp, Probe sequence
gtacagtgattgaagtgtcttatga

SEQ ID NO: 183826 - DNA, 25 bp, Probe sequence
gtcatcttttatcaagttcagacgg

SEQ ID NO: 183827 - DNA, 25 bp, Probe sequence
ggattgaaatctccatttgaaatgg

SEQ ID NO: 183828 - DNA, 25 bp, Probe sequence
ggactacttggatgtggtgaaatta

SEQ ID NO: 183829 - DNA, 25 bp, Probe sequence
tggtcacgacaaaaagattctttct

SEQ ID NO: 183830 - DNA, 25 bp, Probe sequence
tgaaaaaccaccaattcctggtaga

SEQ ID NO: 183831 - DNA, 25 bp, Probe sequence
taagtggtcttggtaaaggcgaaat

SEQ ID NO: 183832 - DNA, 25 bp, Probe sequence
tacacacgtatagtcaaagtcaaac

SEQ ID NO: 183833 - DNA, 25 bp, Probe sequence
tactcagttagaagaaggcgacaat

SEQ ID NO: 183834 - DNA, 25 bp, Probe sequence
tacgcacacgtacaacggtattaaa

SEQ ID NO: 183835 - DNA, 25 bp, Probe sequence
atttctatatattgcgttagtatgt

SEQ ID NO: 183836 - DNA, 25 bp, Probe sequence
atattgcgttagtatgtggtgtgat

SEQ ID NO: 183837 - DNA, 25 bp, Probe sequence
atagcaggtcttggtgctttcttac

SEQ ID NO: 183838 - DNA, 25 bp, Probe sequence
ataccgcagtatccgagcatgacaa

SEQ ID NO: 183839 - DNA, 25 bp, Probe sequence
atccgagcatgacaattccacgtat

SEQ ID NO: 183840 - DNA, 25 bp, Probe sequence
atgtggtgtgatagcaggtcttggt

SEQ ID NO: 183841 - DNA, 25 bp, Probe sequence
accgcagtatccgagcatgacaatt

SEQ ID NO: 183842 - DNA, 25 bp, Probe sequence
acatataccgcagtatccgagcatg

SEQ ID NO: 183843 - DNA, 25 bp, Probe sequence
acaagcaaatcagcgcctcattaaa

SEQ ID NO: 183844 - DNA, 25 bp, Probe sequence
aaagtttagcgcattgttaattaat

SEQ ID NO: 183845 - DNA, 25 bp, Probe sequence
aagacaagcaaatcagcgcctcatt

SEQ ID NO: 183846 - DNA, 25 bp, Probe sequence
aatgtgctgccattatgcggtacct

SEQ ID NO: 183847 - DNA, 25 bp, Probe sequence
aatcagcgcctcattaaagtttagc

SEQ ID NO: 183848 - DNA, 25 bp, Probe sequence
caggtcttggtgctttcttacatat

SEQ ID NO: 183849 - DNA, 25 bp, Probe sequence
cttacatataccgcagtatccgagc

SEQ ID NO: 183850 - DNA, 25 bp, Probe sequence
cttggtgctttcttacatataccgc

SEQ ID NO: 183851 - DNA, 25 bp, Probe sequence
ctgccattatgcggtacctttgtag

SEQ ID NO: 183852 - DNA, 25 bp, Probe sequence
cgagcatgacaattccacgtatagt

SEQ ID NO: 183853 - DNA, 25 bp, Probe sequence
cgcctcattaaagtttagcgcattg

SEQ ID NO: 183854 - DNA, 25 bp, Probe sequence
gccattatgcggtacctttgtagct

SEQ ID NO: 183855 - DNA, 25 bp, Probe sequence
gcgcattgttaattaatgtgctgcc

SEQ ID NO: 183856 - DNA, 25 bp, Probe sequence
gcggtacctttgtagcttcaaatta

SEQ ID NO: 183857 - DNA, 25 bp, Probe sequence
gctttcttacatataccgcagtatc

SEQ ID NO: 183858 - DNA, 25 bp, Probe sequence
gcagtatccgagcatgacaattcca

SEQ ID NO: 183859 - DNA, 25 bp, Probe sequence
gcaaatcagcgcctcattaaagttt

SEQ ID NO: 183860 - DNA, 25 bp, Probe sequence
gaatgatttgaagcaatttctatat

SEQ ID NO: 183861 - DNA, 25 bp, Probe sequence
gtatccgagcatgacaattccacgt

SEQ ID NO: 183862 - DNA, 25 bp, Probe sequence
gtgctatgttgacttttaaagacaa

SEQ ID NO: 183863 - DNA, 25 bp, Probe sequence
gtgatagcaggtcttggtgctttct

SEQ ID NO: 183864 - DNA, 25 bp, Probe sequence
ggtgctttcttacatataccgcagt

SEQ ID NO: 183865 - DNA, 25 bp, Probe sequence
ggtcttggtgctttcttacatatac

SEQ ID NO: 183866 - DNA, 25 bp, Probe sequence
ggaattatcagtgctatgttgactt

SEQ ID NO: 183867 - DNA, 25 bp, Probe sequence
ttatgcggtacctttgtagcttcaa

SEQ ID NO: 183868 - DNA, 25 bp, Probe sequence
ttatcagtgctatgttgacttttaa

SEQ ID NO: 183869 - DNA, 25 bp, Probe sequence
atgggaaatttctggcacgttaaat

SEQ ID NO: 183870 - DNA, 25 bp, Probe sequence
attatggggcggtcaacgtctaagt

SEQ ID NO: 183871 - DNA, 25 bp, Probe sequence
attcagtacaatgcaccattaccta

SEQ ID NO: 183872 - DNA, 25 bp, Probe sequence
atcgtgaattgtttggtgatttccc

SEQ ID NO: 183873 - DNA, 25 bp, Probe sequence
atgattgtcgatggtgaaattttca

SEQ ID NO: 183874 - DNA, 25 bp, Probe sequence
accgtatttggtcagaacatcgtga

SEQ ID NO: 183875 - DNA, 25 bp, Probe sequence
acgatgcaatcgtcagacattacat

SEQ ID NO: 183876 - DNA, 25 bp, Probe sequence
aaagctttagacgttattcagtaca

SEQ ID NO: 183877 - DNA, 25 bp, Probe sequence
aacacggaacgatagagtcgatact

SEQ ID NO: 183878 - DNA, 25 bp, Probe sequence
aagtgtacacacattgtatcgaatg

SEQ ID NO: 183879 - DNA, 25 bp, Probe sequence
aaggtcaaacattagaccgtatttg

SEQ ID NO: 183880 - DNA, 25 bp, Probe sequence
cagtacatactatttcttcaggaat

SEQ ID NO: 183881 - DNA, 25 bp, Probe sequence
ccattacctaatattttgcctgaaa

SEQ ID NO: 183882 - DNA, 25 bp, Probe sequence
gcggtcaacgtctaagtgagtttgg

SEQ ID NO: 183883 - DNA, 25 bp, Probe sequence
gcaaagattttccgcttctaactaa

SEQ ID NO: 183884 - DNA, 25 bp, Probe sequence
gaagcctagagagttctgtttagtt

SEQ ID NO: 183885 - DNA, 25 bp, Probe sequence
gaaattttcaaactgactactggta

SEQ ID NO: 183886 - DNA, 25 bp, Probe sequence
gatttcacattgatgattagctatg

SEQ ID NO: 183887 - DNA, 25 bp, Probe sequence
gatttcccaagcaaagattttccgc

SEQ ID NO: 183888 - DNA, 25 bp, Probe sequence
gttggtgtgtgtcagcacatccaaa

SEQ ID NO: 183889 - DNA, 25 bp, Probe sequence
gttgcgaatcatgttcaacacggaa

SEQ ID NO: 183890 - DNA, 25 bp, Probe sequence
gtatcgaatgatttctttacattgg

SEQ ID NO: 183891 - DNA, 25 bp, Probe sequence
gtcagcacatccaaatggtacgagc

SEQ ID NO: 183892 - DNA, 25 bp, Probe sequence
gtgcaccctgataattcttatgctt

SEQ ID NO: 183893 - DNA, 25 bp, Probe sequence
gtggatgcaagagaatcactttcta

SEQ ID NO: 183894 - DNA, 25 bp, Probe sequence
gggcaatatggcaaatctgaatgtt

SEQ ID NO: 183895 - DNA, 25 bp, Probe sequence
ggtacgagcgagattattaatggac

SEQ ID NO: 183896 - DNA, 25 bp, Probe sequence
ggagaattctattttattccagcag

SEQ ID NO: 183897 - DNA, 25 bp, Probe sequence
tggggaatgttggtgtgtgtcagca

SEQ ID NO: 183898 - DNA, 25 bp, Probe sequence
tgactactggtacaaactttatttt

SEQ ID NO: 183899 - DNA, 25 bp, Probe sequence
tcactttctattcatgtgcaccctg

SEQ ID NO: 183900 - DNA, 25 bp, Probe sequence
tagactttatgatttcaatcgtcaa

SEQ ID NO: 183901 - DNA, 25 bp, Probe sequence
tagacaatgatacaactggggaatg

SEQ ID NO: 183902 - DNA, 25 bp, Probe sequence
ttccagcaggaacagtacatactat

SEQ ID NO: 183903 - DNA, 25 bp, Probe sequence
attcctagagaagatgttgcgacag

SEQ ID NO: 183904 - DNA, 25 bp, Probe sequence
attacgctgatgactatttaagacg

SEQ ID NO: 183905 - DNA, 25 bp, Probe sequence
atcttttcagtaggttctggaggga

SEQ ID NO: 183906 - DNA, 25 bp, Probe sequence
atacaattttacatccaggggcact

SEQ ID NO: 183907 - DNA, 25 bp, Probe sequence
atccaggggcacttacaaatgcagc

SEQ ID NO: 183908 - DNA, 25 bp, Probe sequence
atggtgctgttaaatcaatgattgc

SEQ ID NO: 183909 - DNA, 25 bp, Probe sequence
agcggtgatttaaagccatatacaa

SEQ ID NO: 183910 - DNA, 25 bp, Probe sequence
aaatgcagcaggatctggaaagata

SEQ ID NO: 183911 - DNA, 25 bp, Probe sequence
aaagttatcttttcagtaggttctg

SEQ ID NO: 183912 - DNA, 25 bp, Probe sequence
aatcattttaatcaccaagagtttc

SEQ ID NO: 183913 - DNA, 25 bp, Probe sequence
aactgagacgtttaaaccattcgat

SEQ ID NO: 183914 - DNA, 25 bp, Probe sequence
aatcaccaagagtttcaaattatta

SEQ ID NO: 183915 - DNA, 25 bp, Probe sequence
caatagagactttaactgagacgtt

SEQ ID NO: 183916 - DNA, 25 bp, Probe sequence
caggcttttgatgatagcggtgatt

SEQ ID NO: 183917 - DNA, 25 bp, Probe sequence
gctaaacattacgctgatgactatt

SEQ ID NO: 183918 - DNA, 25 bp, Probe sequence
gaatattttggttataggtgctaat

SEQ ID NO: 183919 - DNA, 25 bp, Probe sequence
gaaagcaattcttgttgatgttgaa

SEQ ID NO: 183920 - DNA, 25 bp, Probe sequence
gaaattgtcacatccaatcatttta

SEQ ID NO: 183921 - DNA, 25 bp, Probe sequence
gactatttaagacgttcaggtttga

SEQ ID NO: 183922 - DNA, 25 bp, Probe sequence
gacgtcaggcttttgatgatagcgg

SEQ ID NO: 183923 - DNA, 25 bp, Probe sequence
gacgttcaggtttgaattatacaat

SEQ ID NO: 183924 - DNA, 25 bp, Probe sequence
gatgttgcgacagtattaaaagaaa

SEQ ID NO: 183925 - DNA, 25 bp, Probe sequence
gatcaacttaatgcgttaaaatcac

SEQ ID NO: 183926 - DNA, 25 bp, Probe sequence
gattcgagacgtcaggcttttgatg

SEQ ID NO: 183927 - DNA, 25 bp, Probe sequence
gttcgttactagtgcaacaattagc

SEQ ID NO: 183928 - DNA, 25 bp, Probe sequence
gtaggttcgttactagtgcaacaat

SEQ ID NO: 183929 - DNA, 25 bp, Probe sequence
gggcacttacaaatgcagcaggatc

SEQ ID NO: 183930 - DNA, 25 bp, Probe sequence
ggtgctaatggcggtgtaggttcgt

SEQ ID NO: 183931 - DNA, 25 bp, Probe sequence
ggtttcaacatatgattcgagacgt

SEQ ID NO: 183932 - DNA, 25 bp, Probe sequence
ggcggtgtaggttcgttactagtgc

SEQ ID NO: 183933 - DNA, 25 bp, Probe sequence
taatgcgttaaaatcacaaggtatg

SEQ ID NO: 183934 - DNA, 25 bp, Probe sequence
taaacactatgtcatggtttcaaca

SEQ ID NO: 183935 - DNA, 25 bp, Probe sequence
tattgtcgatttagatggtgctgtt

SEQ ID NO: 183936 - DNA, 25 bp, Probe sequence
ttttacatccaggggcacttacaaa

SEQ ID NO: 183937 - DNA, 25 bp, Probe sequence
attagttgtctatcaacttgatcgg

SEQ ID NO: 183938 - DNA, 25 bp, Probe sequence
atttacgagagagcgacacattagt

SEQ ID NO: 183939 - DNA, 25 bp, Probe sequence
atgatcgtgtatcaacgaaagatta

SEQ ID NO: 183940 - DNA, 25 bp, Probe sequence
acttgatcggttaggtagaacgaca

SEQ ID NO: 183941 - DNA, 25 bp, Probe sequence
aacgtacagagcttgttaagtgttt

SEQ ID NO: 183942 - DNA, 25 bp, Probe sequence
aagaatttgggtgtgggtgtgtata

SEQ ID NO: 183943 - DNA, 25 bp, Probe sequence
aagtggtgtcaaacgtacagagctt

SEQ ID NO: 183944 - DNA, 25 bp, Probe sequence
cagagcttgttaagtgtttagatta

SEQ ID NO: 183945 - DNA, 25 bp, Probe sequence
ctatcaacttgatcggttaggtaga

SEQ ID NO: 183946 - DNA, 25 bp, Probe sequence
gcgacacattagttgtctatcaact

SEQ ID NO: 183947 - DNA, 25 bp, Probe sequence
gaatttgggtgtgggtgtgtatata

SEQ ID NO: 183948 - DNA, 25 bp, Probe sequence
gaataagtggtgtcaaacgtacaga

SEQ ID NO: 183949 - DNA, 25 bp, Probe sequence
gaacgacaaaactattaattgaatt

SEQ ID NO: 183950 - DNA, 25 bp, Probe sequence
gaaagattaatatcgatacacttaa

SEQ ID NO: 183951 - DNA, 25 bp, Probe sequence
gacacattagttgtctatcaacttg

SEQ ID NO: 183952 - DNA, 25 bp, Probe sequence
gagcgacacattagttgtctatcaa

SEQ ID NO: 183953 - DNA, 25 bp, Probe sequence
gagagcgacacattagttgtctatc

SEQ ID NO: 183954 - DNA, 25 bp, Probe sequence
gagagagcgacacattagttgtcta

SEQ ID NO: 183955 - DNA, 25 bp, Probe sequence
gattatttacgagagagcgacacat

SEQ ID NO: 183956 - DNA, 25 bp, Probe sequence
gttgtctatcaacttgatcggttag

SEQ ID NO: 183957 - DNA, 25 bp, Probe sequence
gtacagagcttgttaagtgtttaga

SEQ ID NO: 183958 - DNA, 25 bp, Probe sequence
gtcaaacgtacagagcttgttaagt

SEQ ID NO: 183959 - DNA, 25 bp, Probe sequence
gtgtcaaacgtacagagcttgttaa

SEQ ID NO: 183960 - DNA, 25 bp, Probe sequence
gtggtgtcaaacgtacagagcttgt

SEQ ID NO: 183961 - DNA, 25 bp, Probe sequence
gtgggtgtgtatatagtgaaagaat

SEQ ID NO: 183962 - DNA, 25 bp, Probe sequence
ggtgtgggtgtgtatatagtgaaag

SEQ ID NO: 183963 - DNA, 25 bp, Probe sequence
ggtgtcaaacgtacagagcttgtta

SEQ ID NO: 183964 - DNA, 25 bp, Probe sequence
tgggtgtgggtgtgtatatagtgaa

SEQ ID NO: 183965 - DNA, 25 bp, Probe sequence
tgatcggttaggtagaacgacaaaa

SEQ ID NO: 183966 - DNA, 25 bp, Probe sequence
tcaacttgatcggttaggtagaacg

SEQ ID NO: 183967 - DNA, 25 bp, Probe sequence
taatatcgatacacttaaagaattt

SEQ ID NO: 183968 - DNA, 25 bp, Probe sequence
tacgagagagcgacacattagttgt

SEQ ID NO: 183969 - DNA, 25 bp, Probe sequence
tttgggtgtgggtgtgtatatagtg

SEQ ID NO: 183970 - DNA, 25 bp, Probe sequence
ttaaagaatttgggtgtgggtgtgt

SEQ ID NO: 183971 - DNA, 25 bp, Probe sequence
atatttatctttactttggtttgag

SEQ ID NO: 183972 - DNA, 25 bp, Probe sequence
atcaactctagcgcttctggtatgt

SEQ ID NO: 183973 - DNA, 25 bp, Probe sequence
atgcacgtgatttattagtattaca

SEQ ID NO: 183974 - DNA, 25 bp, Probe sequence
agatttatcaactctagcgcttctg

SEQ ID NO: 183975 - DNA, 25 bp, Probe sequence
actctagcgcttctggtatgtacga

SEQ ID NO: 183976 - DNA, 25 bp, Probe sequence
aaacgttgctattgatattcgaagt

SEQ ID NO: 183977 - DNA, 25 bp, Probe sequence
aaaagactacgataatgccagaaag

SEQ ID NO: 183978 - DNA, 25 bp, Probe sequence
aacaacgactaatgattttgaagtt

SEQ ID NO: 183979 - DNA, 25 bp, Probe sequence
aagttcataaactatgtagtgtcta

SEQ ID NO: 183980 - DNA, 25 bp, Probe sequence
aagtgccttgctaataatgatgttc

SEQ ID NO: 183981 - DNA, 25 bp, Probe sequence
cagagtacttaacctcttttataca

SEQ ID NO: 183982 - DNA, 25 bp, Probe sequence
cgaagtggagaaattcatttggtat

SEQ ID NO: 183983 - DNA, 25 bp, Probe sequence
cctgacttaattaaacgtattgacg

SEQ ID NO: 183984 - DNA, 25 bp, Probe sequence
gcttctggtatgtacgagcgattaa

SEQ ID NO: 183985 - DNA, 25 bp, Probe sequence
gaagctgagttattaacaacgacta

SEQ ID NO: 183986 - DNA, 25 bp, Probe sequence
gaacgaaatacaaaacgatctgaat

SEQ ID NO: 183987 - DNA, 25 bp, Probe sequence
gaaatttctcttgagcgtgcttatt

SEQ ID NO: 183988 - DNA, 25 bp, Probe sequence
gacaagacctgaattacaaagtatt

SEQ ID NO: 183989 - DNA, 25 bp, Probe sequence
gacaatggcgagtttgattttaatc

SEQ ID NO: 183990 - DNA, 25 bp, Probe sequence
gacacacaagattatagtgatttgg

SEQ ID NO: 183991 - DNA, 25 bp, Probe sequence
gagcgtgcttattatttggttgaaa

SEQ ID NO: 183992 - DNA, 25 bp, Probe sequence
gatgatagccttgatatattaatac

SEQ ID NO: 183993 - DNA, 25 bp, Probe sequence
gatgattatctttctaagtacatat

SEQ ID NO: 183994 - DNA, 25 bp, Probe sequence
gatatttgctaataagtgccttgct

SEQ ID NO: 183995 - DNA, 25 bp, Probe sequence
gatttaccatatgtatatataccaa

SEQ ID NO: 183996 - DNA, 25 bp, Probe sequence
gattggttggagaagagatatttgc

SEQ ID NO: 183997 - DNA, 25 bp, Probe sequence
gttatggtgaaatttctcttgagcg

SEQ ID NO: 183998 - DNA, 25 bp, Probe sequence
gtattcaaatatttatctttacttt

SEQ ID NO: 183999 - DNA, 25 bp, Probe sequence
gtacatatttactgacatagattat

SEQ ID NO: 184000 - DNA, 25 bp, Probe sequence
gtgagcgtaaatgcacgtgatttat

SEQ ID NO: 184001 - DNA, 25 bp, Probe sequence
ggtattagatgatgatagccttgat

SEQ ID NO: 184002 - DNA, 25 bp, Probe sequence
taataacttagatttaccatatgta

SEQ ID NO: 184003 - DNA, 25 bp, Probe sequence
tattgacgacaattttcatattatt

SEQ ID NO: 184004 - DNA, 25 bp, Probe sequence
ttactttggtttgagagatttctta

SEQ ID NO: 184005 - DNA, 25 bp, Probe sequence
attagtgtttcaaattcatcaagat

SEQ ID NO: 184006 - DNA, 25 bp, Probe sequence
atcattggctcaagtgcaacaaatt

SEQ ID NO: 184007 - DNA, 25 bp, Probe sequence
atgattcgtagtcaagatcctatta

SEQ ID NO: 184008 - DNA, 25 bp, Probe sequence
atggtcttcaagacaagatgcgctt

SEQ ID NO: 184009 - DNA, 25 bp, Probe sequence
atggcatcattagttcaaatggaac

SEQ ID NO: 184010 - DNA, 25 bp, Probe sequence
agcaaaatcatgtgcaactacagat

SEQ ID NO: 184011 - DNA, 25 bp, Probe sequence
agcgccaacaaatttattatgaggt

SEQ ID NO: 184012 - DNA, 25 bp, Probe sequence
acgaatgaagaggatggcgcagcaa

SEQ ID NO: 184013 - DNA, 25 bp, Probe sequence
aactgataaaggtacaggcattaaa

SEQ ID NO: 184014 - DNA, 25 bp, Probe sequence
aagcattaacttcagatgtaacggc

SEQ ID NO: 184015 - DNA, 25 bp, Probe sequence
aagatcctattaatggcgtaagtca

SEQ ID NO: 184016 - DNA, 25 bp, Probe sequence
aagtttcctgaaggtgaatattcaa

SEQ ID NO: 184017 - DNA, 25 bp, Probe sequence
aatgcggaaacaatggcttatcaaa

SEQ ID NO: 184018 - DNA, 25 bp, Probe sequence
aattcatcaagatttaatgcggaaa

SEQ ID NO: 184019 - DNA, 25 bp, Probe sequence
catggtttatcattggctcaagtgc

SEQ ID NO: 184020 - DNA, 25 bp, Probe sequence
gcgtaagtcatagtgaatggtcttc

SEQ ID NO: 184021 - DNA, 25 bp, Probe sequence
gaagatgaaacatggatgcgagata

SEQ ID NO: 184022 - DNA, 25 bp, Probe sequence
gaaacgttagttattggagatagcg

SEQ ID NO: 184023 - DNA, 25 bp, Probe sequence
gaaacaatggcttatcaaactgata

SEQ ID NO: 184024 - DNA, 25 bp, Probe sequence
gaaatccaagcattaacttcagatg

SEQ ID NO: 184025 - DNA, 25 bp, Probe sequence
gacaagatgcgcttgctggtaagat

SEQ ID NO: 184026 - DNA, 25 bp, Probe sequence
gatgcgcttgctggtaagatagatt

SEQ ID NO: 184027 - DNA, 25 bp, Probe sequence
gattgggtaactaagtttcctgaag

SEQ ID NO: 184028 - DNA, 25 bp, Probe sequence
gttcgcattctgaaatacatcaact

SEQ ID NO: 184029 - DNA, 25 bp, Probe sequence
gtgcaactacagattagtgtttcaa

SEQ ID NO: 184030 - DNA, 25 bp, Probe sequence
ggtttatcattggctcaagtgcaac

SEQ ID NO: 184031 - DNA, 25 bp, Probe sequence
ggatggcgcagcaaaatatttagca

SEQ ID NO: 184032 - DNA, 25 bp, Probe sequence
ggatgcgagatatgattcgtagtca

SEQ ID NO: 184033 - DNA, 25 bp, Probe sequence
ggagatagcgacaatgatagagcaa

SEQ ID NO: 184034 - DNA, 25 bp, Probe sequence
ggacgttcgcattctgaaatacatc

SEQ ID NO: 184035 - DNA, 25 bp, Probe sequence
tttagctaagcgccaacaaatttat

SEQ ID NO: 184036 - DNA, 25 bp, Probe sequence
ttatgaggtatttccttttgaaggt

SEQ ID NO: 184037 - DNA, 25 bp, Probe sequence
ttgctggtaagatagattgggtaac

SEQ ID NO: 184038 - DNA, 25 bp, Probe sequence
ttctgaaatacatcaacttgtacct

SEQ ID NO: 184039 - DNA, 25 bp, Probe sequence
attttagatgagccagcagctggtt

SEQ ID NO: 184040 - DNA, 25 bp, Probe sequence
atataggttttgtatctcatagttt

SEQ ID NO: 184041 - DNA, 25 bp, Probe sequence
ataggttttgtatctcatagtttac

SEQ ID NO: 184042 - DNA, 25 bp, Probe sequence
aggttttgtatctcatagtttactg

SEQ ID NO: 184043 - DNA, 25 bp, Probe sequence
actgtacgacaacatataggttttg

SEQ ID NO: 184044 - DNA, 25 bp, Probe sequence
acatataggttttgtatctcatagt

SEQ ID NO: 184045 - DNA, 25 bp, Probe sequence
acatgtcacgatttttccagaaaaa

SEQ ID NO: 184046 - DNA, 25 bp, Probe sequence
aaatgtagcagttcaaagatggaat

SEQ ID NO: 184047 - DNA, 25 bp, Probe sequence
aaacatgtcacgatttttccagaaa

SEQ ID NO: 184048 - DNA, 25 bp, Probe sequence
aaaacatgtcacgatttttccagaa

SEQ ID NO: 184049 - DNA, 25 bp, Probe sequence
aacaatatattggttatttatctac

SEQ ID NO: 184050 - DNA, 25 bp, Probe sequence
aacatgtcacgatttttccagaaaa

SEQ ID NO: 184051 - DNA, 25 bp, Probe sequence
aagagggtgaaagagtaatcgatgt

SEQ ID NO: 184052 - DNA, 25 bp, Probe sequence
aatcaattggtgtttatcaagatat

SEQ ID NO: 184053 - DNA, 25 bp, Probe sequence
caacatataggttttgtatctcata

SEQ ID NO: 184054 - DNA, 25 bp, Probe sequence
cagcagctggtttagactttattgc

SEQ ID NO: 184055 - DNA, 25 bp, Probe sequence
caggttttaattttagatgagccag

SEQ ID NO: 184056 - DNA, 25 bp, Probe sequence
catagtttactggaaaagtttcaag

SEQ ID NO: 184057 - DNA, 25 bp, Probe sequence
ccagcagctggtttagactttattg

SEQ ID NO: 184058 - DNA, 25 bp, Probe sequence
gccagcagctggtttagactttatt

SEQ ID NO: 184059 - DNA, 25 bp, Probe sequence
gactcattgtcagattcatatccaa

SEQ ID NO: 184060 - DNA, 25 bp, Probe sequence
gagccagcagctggtttagacttta

SEQ ID NO: 184061 - DNA, 25 bp, Probe sequence
gatggaataatcgattttctatggc

SEQ ID NO: 184062 - DNA, 25 bp, Probe sequence
gatgagccagcagctggtttagact

SEQ ID NO: 184063 - DNA, 25 bp, Probe sequence
gttttgtatctcatagtttactgga

SEQ ID NO: 184064 - DNA, 25 bp, Probe sequence
gttttaattttagatgagccagcag

SEQ ID NO: 184065 - DNA, 25 bp, Probe sequence
gtatctcatagtttactggaaaagt

SEQ ID NO: 184066 - DNA, 25 bp, Probe sequence
tgactcattgtcagattcatatcca

SEQ ID NO: 184067 - DNA, 25 bp, Probe sequence
tactggaaaagtttcaagagggtga

SEQ ID NO: 184068 - DNA, 25 bp, Probe sequence
tacttgactcattgtcagattcata

SEQ ID NO: 184069 - DNA, 25 bp, Probe sequence
tatacttgactcattgtcagattca

SEQ ID NO: 184070 - DNA, 25 bp, Probe sequence
tttccagaaaaatgtagcagttcaa

SEQ ID NO: 184071 - DNA, 25 bp, Probe sequence
tttgtatctcatagtttactggaaa

SEQ ID NO: 184072 - DNA, 25 bp, Probe sequence
ttaattttagatgagccagcagctg

SEQ ID NO: 184073 - DNA, 25 bp, Probe sequence
acttcttcctactcgaacgtattag

SEQ ID NO: 184074 - DNA, 25 bp, Probe sequence
attaatcttatctggctttgatgaa

SEQ ID NO: 184075 - DNA, 25 bp, Probe sequence
atttatgcaataccagatttaacag

SEQ ID NO: 184076 - DNA, 25 bp, Probe sequence
aggtcaaattcaagaagcttaccaa

SEQ ID NO: 184077 - DNA, 25 bp, Probe sequence
agagattactatttcgatattatcg

SEQ ID NO: 184078 - DNA, 25 bp, Probe sequence
accattctactatccatttactttt

SEQ ID NO: 184079 - DNA, 25 bp, Probe sequence
acgatttctggcgtagatggtgcaa

SEQ ID NO: 184080 - DNA, 25 bp, Probe sequence
acgtattagaaaagcattcccagac

SEQ ID NO: 184081 - DNA, 25 bp, Probe sequence
aaatatgccacagaactcggttatg

SEQ ID NO: 184082 - DNA, 25 bp, Probe sequence
aaacaaattgctcaaaatgccattg

SEQ ID NO: 184083 - DNA, 25 bp, Probe sequence
aacaggtgtgaatatttctattgaa

SEQ ID NO: 184084 - DNA, 25 bp, Probe sequence
aactcggttatgatgcactttctgc

SEQ ID NO: 184085 - DNA, 25 bp, Probe sequence
aagcattcccagacaaattaatctt

SEQ ID NO: 184086 - DNA, 25 bp, Probe sequence
aaggtttatatgcagcgttactcgt

SEQ ID NO: 184087 - DNA, 25 bp, Probe sequence
ctacatataacgttaatggtcgccg

SEQ ID NO: 184088 - DNA, 25 bp, Probe sequence
ctactatccatttacttttgaagaa

SEQ ID NO: 184089 - DNA, 25 bp, Probe sequence
gcgttactcgttccttttgatgaaa

SEQ ID NO: 184090 - DNA, 25 bp, Probe sequence
gaagcacatcgacaaacattagatc

SEQ ID NO: 184091 - DNA, 25 bp, Probe sequence
gaaacagtgttatcaatggggattt

SEQ ID NO: 184092 - DNA, 25 bp, Probe sequence
gacaaacattagatcaactcattgc

SEQ ID NO: 184093 - DNA, 25 bp, Probe sequence
gacggtctttatgtaaatggtagct

SEQ ID NO: 184094 - DNA, 25 bp, Probe sequence
gatggtgcaattggttctacatata

SEQ ID NO: 184095 - DNA, 25 bp, Probe sequence
gatcaactcattgcaaaatacgatt

SEQ ID NO: 184096 - DNA, 25 bp, Probe sequence
gattgctcaagtaggttcgttagat

SEQ ID NO: 184097 - DNA, 25 bp, Probe sequence
gttgccaaagaggcagttggggata

SEQ ID NO: 184098 - DNA, 25 bp, Probe sequence
gttagttcaagctacgatttctggc

SEQ ID NO: 184099 - DNA, 25 bp, Probe sequence
gtaacaccattctactatccattta

SEQ ID NO: 184100 - DNA, 25 bp, Probe sequence
ggtagctcaggcgaaaactttttat

SEQ ID NO: 184101 - DNA, 25 bp, Probe sequence
tggggatttatccaacattgaaaga

SEQ ID NO: 184102 - DNA, 25 bp, Probe sequence
tcaaaccttttaacgaagcacatcg

SEQ ID NO: 184103 - DNA, 25 bp, Probe sequence
tatgatgcactttctgccgtaacac

SEQ ID NO: 184104 - DNA, 25 bp, Probe sequence
tatatgcagcgttactcgttccttt

SEQ ID NO: 184105 - DNA, 25 bp, Probe sequence
tttctattgaacaattcagcgagct

SEQ ID NO: 184106 - DNA, 25 bp, Probe sequence
ttgttggtgttaaatatacagcgcc

SEQ ID NO: 184107 - DNA, 25 bp, Probe sequence
atccacatcaatcatcaaatggccg

SEQ ID NO: 184108 - DNA, 25 bp, Probe sequence
atgcagcattacacagagatttaga

SEQ ID NO: 184109 - DNA, 25 bp, Probe sequence
acgttgggcaacacacggtgtaccg

SEQ ID NO: 184110 - DNA, 25 bp, Probe sequence
acatgccattattatctgaaaaacc

SEQ ID NO: 184111 - DNA, 25 bp, Probe sequence
acaaggtgtatcattcatttcagaa

SEQ ID NO: 184112 - DNA, 25 bp, Probe sequence
aatgggctggcgtaccaactgaagt

SEQ ID NO: 184113 - DNA, 25 bp, Probe sequence
caatcttgtctcaaatcgttgcaaa

SEQ ID NO: 184114 - DNA, 25 bp, Probe sequence
caaatggccgttttactctagttca

SEQ ID NO: 184115 - DNA, 25 bp, Probe sequence
cacgcaatgcattctttatcggacg

SEQ ID NO: 184116 - DNA, 25 bp, Probe sequence
cgggtcctgaaatcgcagttgcatc

SEQ ID NO: 184117 - DNA, 25 bp, Probe sequence
gaaggcgacacttatgtcattcctc

SEQ ID NO: 184118 - DNA, 25 bp, Probe sequence
gaaggtttcaatgttatcgcatcag

SEQ ID NO: 184119 - DNA, 25 bp, Probe sequence
gaagcagaccacacattgttattac

SEQ ID NO: 184120 - DNA, 25 bp, Probe sequence
gaagcagaccgcatttacgttattg

SEQ ID NO: 184121 - DNA, 25 bp, Probe sequence
gaacaaccagcagtaatgcgtcgta

SEQ ID NO: 184122 - DNA, 25 bp, Probe sequence
gaaaactctcatccacatcaatcat

SEQ ID NO: 184123 - DNA, 25 bp, Probe sequence
gacacttatgtcattcctcatgtac

SEQ ID NO: 184124 - DNA, 25 bp, Probe sequence
gacaaagacacaatctatgttgcta

SEQ ID NO: 184125 - DNA, 25 bp, Probe sequence
gagtttgtctacaacatgccattat

SEQ ID NO: 184126 - DNA, 25 bp, Probe sequence
gaggttatgactctgcaggtatcgc

SEQ ID NO: 184127 - DNA, 25 bp, Probe sequence
gataaaccacgtaaccttgctaaat

SEQ ID NO: 184128 - DNA, 25 bp, Probe sequence
gttgtgtcattattacatggttcat

SEQ ID NO: 184129 - DNA, 25 bp, Probe sequence
gttattgcagcaggtacaagctacc

SEQ ID NO: 184130 - DNA, 25 bp, Probe sequence
gtacaagctaccatgcaggtttagt

SEQ ID NO: 184131 - DNA, 25 bp, Probe sequence
gtgtttatgcacactacatgttaaa

SEQ ID NO: 184132 - DNA, 25 bp, Probe sequence
ggtgtaccgaatcatgaaaactctc

SEQ ID NO: 184133 - DNA, 25 bp, Probe sequence
ggaattgttggttatattggctatg

SEQ ID NO: 184134 - DNA, 25 bp, Probe sequence
tggaatcggtcacacacgttgggca

SEQ ID NO: 184135 - DNA, 25 bp, Probe sequence
tgttcgtttatatttctcaatcagg

SEQ ID NO: 184136 - DNA, 25 bp, Probe sequence
tgcagtattatcaatcttgtctcaa

SEQ ID NO: 184137 - DNA, 25 bp, Probe sequence
tccatgaccatgaaatcgttattgt

SEQ ID NO: 184138 - DNA, 25 bp, Probe sequence
tatcggacgtactattgactataac

SEQ ID NO: 184139 - DNA, 25 bp, Probe sequence
tatcgcatcagacgcacttgcaatg

SEQ ID NO: 184140 - DNA, 25 bp, Probe sequence
ttgcaggttcaactttatcacgtga

SEQ ID NO: 184141 - DNA, 25 bp, Probe sequence
attgaaaatattactgactctacgc

SEQ ID NO: 184142 - DNA, 25 bp, Probe sequence
aggacaaccagcagtacaaccagca

SEQ ID NO: 184143 - DNA, 25 bp, Probe sequence
agcagtacaaccagcaaaccaaggt

SEQ ID NO: 184144 - DNA, 25 bp, Probe sequence
agcagcacaaccaaatacacaacca

SEQ ID NO: 184145 - DNA, 25 bp, Probe sequence
accaaggacaaccagcagtacaacc

SEQ ID NO: 184146 - DNA, 25 bp, Probe sequence
aacaaactacagcacaaggtgtcac

SEQ ID NO: 184147 - DNA, 25 bp, Probe sequence
aacaggaagttgctgatacaaaatc

SEQ ID NO: 184148 - DNA, 25 bp, Probe sequence
aaccagcagtacaaccagcaaacca

SEQ ID NO: 184149 - DNA, 25 bp, Probe sequence
aaggacaaccagcagtacaaccagc

SEQ ID NO: 184150 - DNA, 25 bp, Probe sequence
aattaataaacaaactacagcacaa

SEQ ID NO: 184151 - DNA, 25 bp, Probe sequence
caaccagcagtacaaccagcaaacc

SEQ ID NO: 184152 - DNA, 25 bp, Probe sequence
caaccaaatacacaaccagctggac

SEQ ID NO: 184153 - DNA, 25 bp, Probe sequence
caaactacagcacaaggtgtcacaa

SEQ ID NO: 184154 - DNA, 25 bp, Probe sequence
ccaaggacaaccagcagtacaacca

SEQ ID NO: 184155 - DNA, 25 bp, Probe sequence
cctgccaaccaaggacaaccagcag

SEQ ID NO: 184156 - DNA, 25 bp, Probe sequence
gccaaccaaggacaaccagcagtac

SEQ ID NO: 184157 - DNA, 25 bp, Probe sequence
ccaaccaaggacaaccagcagtaca

SEQ ID NO: 184158 - DNA, 25 bp, Probe sequence
ccagcagtacaaccagcaaaccaag

SEQ ID NO: 184159 - DNA, 25 bp, Probe sequence
gcagcacaaccaaatacacaaccag

SEQ ID NO: 184160 - DNA, 25 bp, Probe sequence
gcagcacttgtaactaaaattaaca

SEQ ID NO: 184161 - DNA, 25 bp, Probe sequence
gcacaaccaaatacacaaccagctg

SEQ ID NO: 184162 - DNA, 25 bp, Probe sequence
gcaatagatgcagcacatacaaatg

SEQ ID NO: 184163 - DNA, 25 bp, Probe sequence
gaagttgcagcacttgtaactaaaa

SEQ ID NO: 184164 - DNA, 25 bp, Probe sequence
gacaaccagcagtacaaccagcaaa

SEQ ID NO: 184165 - DNA, 25 bp, Probe sequence
gagcagcacaaccaaatacacaacc

SEQ ID NO: 184166 - DNA, 25 bp, Probe sequence
gatgaagttgcagcacttgtaacta

SEQ ID NO: 184167 - DNA, 25 bp, Probe sequence
gatgcagcacatacaaatgcggaag

SEQ ID NO: 184168 - DNA, 25 bp, Probe sequence
gttgcagcacttgtaactaaaatta

SEQ ID NO: 184169 - DNA, 25 bp, Probe sequence
ggagcagcacaaccaaatacacaac

SEQ ID NO: 184170 - DNA, 25 bp, Probe sequence
ggacaaccagcagtacaaccagcaa

SEQ ID NO: 184171 - DNA, 25 bp, Probe sequence
ggaagttgctgatacaaaatcaaaa

SEQ ID NO: 184172 - DNA, 25 bp, Probe sequence
taatcctacagcacagccagctgca

SEQ ID NO: 184173 - DNA, 25 bp, Probe sequence
tagatgcagcacatacaaatgcgga

SEQ ID NO: 184174 - DNA, 25 bp, Probe sequence
ttgaaaatattactgactctacgca

SEQ ID NO: 184175 - DNA, 25 bp, Probe sequence
atcagttggttcagctgcaaacaat

SEQ ID NO: 184176 - DNA, 25 bp, Probe sequence
atgtaactaacactgacgaccacca

SEQ ID NO: 184177 - DNA, 25 bp, Probe sequence
atggtgtagatcaggcgaaagacgc

SEQ ID NO: 184178 - DNA, 25 bp, Probe sequence
agttggttcagctgcaaacaataaa

SEQ ID NO: 184179 - DNA, 25 bp, Probe sequence
agacaaaatcagctcaacaaggaaa

SEQ ID NO: 184180 - DNA, 25 bp, Probe sequence
accaccaagctaagacaaaatcagc

SEQ ID NO: 184181 - DNA, 25 bp, Probe sequence
acgaccaccaagctaagacaaaatc

SEQ ID NO: 184182 - DNA, 25 bp, Probe sequence
actgacgaccaccaagctaagacaa

SEQ ID NO: 184183 - DNA, 25 bp, Probe sequence
acaaatgcagaagttgctgaattac

SEQ ID NO: 184184 - DNA, 25 bp, Probe sequence
acaacgtattaatcctgaagttaag

SEQ ID NO: 184185 - DNA, 25 bp, Probe sequence
aaatgcagaagttgctgaattacaa

SEQ ID NO: 184186 - DNA, 25 bp, Probe sequence
aacacaaacaaatgcagaagttgct

SEQ ID NO: 184187 - DNA, 25 bp, Probe sequence
aagaatctattgatcaaagtgacca

SEQ ID NO: 184188 - DNA, 25 bp, Probe sequence
aagacaaaatcagctcaacaaggaa

SEQ ID NO: 184189 - DNA, 25 bp, Probe sequence
aatgtaactaacactgacgaccacc

SEQ ID NO: 184190 - DNA, 25 bp, Probe sequence
aatctattgatcaaagtgaccagtt

SEQ ID NO: 184191 - DNA, 25 bp, Probe sequence
cagttggttcagctgcaaacaataa

SEQ ID NO: 184192 - DNA, 25 bp, Probe sequence
cttaatgtaactaacactgacgacc

SEQ ID NO: 184193 - DNA, 25 bp, Probe sequence
ctaagacaaaatcagctcaacaagg

SEQ ID NO: 184194 - DNA, 25 bp, Probe sequence
ctgacgaccaccaagctaagacaaa

SEQ ID NO: 184195 - DNA, 25 bp, Probe sequence
cgaccaccaagctaagacaaaatca

SEQ ID NO: 184196 - DNA, 25 bp, Probe sequence
gcttaatgtaactaacactgacgac

SEQ ID NO: 184197 - DNA, 25 bp, Probe sequence
gaatctattgatcaaagtgaccagt

SEQ ID NO: 184198 - DNA, 25 bp, Probe sequence
gacgaccaccaagctaagacaaaat

SEQ ID NO: 184199 - DNA, 25 bp, Probe sequence
gaccaccaagctaagacaaaatcag

SEQ ID NO: 184200 - DNA, 25 bp, Probe sequence
gttggttcagctgcaaacaataaag

SEQ ID NO: 184201 - DNA, 25 bp, Probe sequence
tgtaactaacactgacgaccaccaa

SEQ ID NO: 184202 - DNA, 25 bp, Probe sequence
tgtagatcaggcgaaagacgctgga

SEQ ID NO: 184203 - DNA, 25 bp, Probe sequence
tgacgaccaccaagctaagacaaaa

SEQ ID NO: 184204 - DNA, 25 bp, Probe sequence
taatgtaactaacactgacgaccac

SEQ ID NO: 184205 - DNA, 25 bp, Probe sequence
tcagttggttcagctgcaaacaata

SEQ ID NO: 184206 - DNA, 25 bp, Probe sequence
taagacaaaatcagctcaacaagga

SEQ ID NO: 184207 - DNA, 25 bp, Probe sequence
ttaatgtaactaacactgacgacca

SEQ ID NO: 184208 - DNA, 25 bp, Probe sequence
ttggttcagctgcaaacaataaagc

SEQ ID NO: 184209 - DNA, 25 bp, Probe sequence
atagctgcaattacgccagatgcaa

SEQ ID NO: 184210 - DNA, 25 bp, Probe sequence
atcacaacaagaagtggctgatact

SEQ ID NO: 184211 - DNA, 25 bp, Probe sequence
agttagacaagcagctacagctaga

SEQ ID NO: 184212 - DNA, 25 bp, Probe sequence
agaagctgctaaacaacaagttcaa

SEQ ID NO: 184213 - DNA, 25 bp, Probe sequence
agctacaatagctgcaattacgcca

SEQ ID NO: 184214 - DNA, 25 bp, Probe sequence
aaagttgatcaagcagtagttactg

SEQ ID NO: 184215 - DNA, 25 bp, Probe sequence
aaaccagcagcaaaacaagcaattg

SEQ ID NO: 184216 - DNA, 25 bp, Probe sequence
aaacggctgctgatgcagcaataga

SEQ ID NO: 184217 - DNA, 25 bp, Probe sequence
aaactactaatgaagctacaatagc

SEQ ID NO: 184218 - DNA, 25 bp, Probe sequence
aagaagttagacaagcagctacagc

SEQ ID NO: 184219 - DNA, 25 bp, Probe sequence
aagaacaacaagctgcaaaagataa

SEQ ID NO: 184220 - DNA, 25 bp, Probe sequence
aatagatgcagctcattcaaatgtg

SEQ ID NO: 184221 - DNA, 25 bp, Probe sequence
aatattacggattcaactcaaacta

SEQ ID NO: 184222 - DNA, 25 bp, Probe sequence
caatagctgcaattacgccagatgc

SEQ ID NO: 184223 - DNA, 25 bp, Probe sequence
caagagattcaagctacaccagatg

SEQ ID NO: 184224 - DNA, 25 bp, Probe sequence
caaactgaaaaaacggctgctgatg

SEQ ID NO: 184225 - DNA, 25 bp, Probe sequence
ctcaagaaacagcaattgatgctaa

SEQ ID NO: 184226 - DNA, 25 bp, Probe sequence
gctcaaacagaaggtttacatgaca

SEQ ID NO: 184227 - DNA, 25 bp, Probe sequence
gcagtagttactgcaaacgctgata

SEQ ID NO: 184228 - DNA, 25 bp, Probe sequence
gcagaggcaaatgcagcagtagatg

SEQ ID NO: 184229 - DNA, 25 bp, Probe sequence
gcagctcattcaaatgtggaagttg

SEQ ID NO: 184230 - DNA, 25 bp, Probe sequence
gcagcaatagatgcagctcattcaa

SEQ ID NO: 184231 - DNA, 25 bp, Probe sequence
gcagctacagctagaaaagcgcaaa

SEQ ID NO: 184232 - DNA, 25 bp, Probe sequence
gcaaatgttaaaccagcagcaaaac

SEQ ID NO: 184233 - DNA, 25 bp, Probe sequence
gcaattacgccagatgcaaatgtta

SEQ ID NO: 184234 - DNA, 25 bp, Probe sequence
gaagtggctgatactaaagcaaaag

SEQ ID NO: 184235 - DNA, 25 bp, Probe sequence
gaagtagcagaggcaaatgcagcag

SEQ ID NO: 184236 - DNA, 25 bp, Probe sequence
gatgcagctcattcaaatgtggaag

SEQ ID NO: 184237 - DNA, 25 bp, Probe sequence
tgcacaagatttagaacgcgttaaa

SEQ ID NO: 184238 - DNA, 25 bp, Probe sequence
tgcaagagattcaagctacaccaga

SEQ ID NO: 184239 - DNA, 25 bp, Probe sequence
tcaactcaaactaaaatggatgctt

SEQ ID NO: 184240 - DNA, 25 bp, Probe sequence
taatgctacagcaaatacagatgta

SEQ ID NO: 184241 - DNA, 25 bp, Probe sequence
tagatgcagctcaaacagaaggttt

SEQ ID NO: 184242 - DNA, 25 bp, Probe sequence
ttacggattcaactcaaactaaaat

SEQ ID NO: 184243 - DNA, 25 bp, Probe sequence
atgcacagtcaatcgatgatgtaaa

SEQ ID NO: 184244 - DNA, 25 bp, Probe sequence
atggtgtagatacagcgaaagacgc

SEQ ID NO: 184245 - DNA, 25 bp, Probe sequence
agcaaatcaagccatttcagcagca

SEQ ID NO: 184246 - DNA, 25 bp, Probe sequence
agcgaaagctaatgcagaagcagca

SEQ ID NO: 184247 - DNA, 25 bp, Probe sequence
acagcagttaaatcgaatgcgaaaa

SEQ ID NO: 184248 - DNA, 25 bp, Probe sequence
acacaaacaaatacagaggttgctg

SEQ ID NO: 184249 - DNA, 25 bp, Probe sequence
aaatacagaggttgctgaattacaa

SEQ ID NO: 184250 - DNA, 25 bp, Probe sequence
aaatcaagccatttcagcagcaact

SEQ ID NO: 184251 - DNA, 25 bp, Probe sequence
aaatgcacagtcaatcgatgatgta

SEQ ID NO: 184252 - DNA, 25 bp, Probe sequence
aaagatatgcaaactaatgatacgc

SEQ ID NO: 184253 - DNA, 25 bp, Probe sequence
aagcaaatcaagccatttcagcagc

SEQ ID NO: 184254 - DNA, 25 bp, Probe sequence
aagcaaatgcaaaatcagaccaaca

SEQ ID NO: 184255 - DNA, 25 bp, Probe sequence
aatggtagtcatagtatgcatcaag

SEQ ID NO: 184256 - DNA, 25 bp, Probe sequence
aatgcaaaatcagaccaacaaggaa

SEQ ID NO: 184257 - DNA, 25 bp, Probe sequence
aatcgaatgcgaaaaatgaagttga

SEQ ID NO: 184258 - DNA, 25 bp, Probe sequence
aatcgatgatgtaaacactgcaaaa

SEQ ID NO: 184259 - DNA, 25 bp, Probe sequence
caagcggctaaagatgagattgatc

SEQ ID NO: 184260 - DNA, 25 bp, Probe sequence
caaatcaagccatttcagcagcaac

SEQ ID NO: 184261 - DNA, 25 bp, Probe sequence
catagtatgcatcaagatatgctta

SEQ ID NO: 184262 - DNA, 25 bp, Probe sequence
ccagcaacagcagttaaatcgaatg

SEQ ID NO: 184263 - DNA, 25 bp, Probe sequence
gctaatgcagaagcagcaattaatg

SEQ ID NO: 184264 - DNA, 25 bp, Probe sequence
gcacagtcaatcgatgatgtaaaca

SEQ ID NO: 184265 - DNA, 25 bp, Probe sequence
gcaaatgcaaaatcagaccaacaag

SEQ ID NO: 184266 - DNA, 25 bp, Probe sequence
gcaaatcaagccatttcagcagcaa

SEQ ID NO: 184267 - DNA, 25 bp, Probe sequence
gcaacagcagttaaatcgaatgcga

SEQ ID NO: 184268 - DNA, 25 bp, Probe sequence
gaaacaagcggctaaagatgagatt

SEQ ID NO: 184269 - DNA, 25 bp, Probe sequence
gaaagctaatgcagaagcagcaatt

SEQ ID NO: 184270 - DNA, 25 bp, Probe sequence
gatatgcaaactaatgatacgcaaa

SEQ ID NO: 184271 - DNA, 25 bp, Probe sequence
gttgatgaagcgaaagctaatgcag

SEQ ID NO: 184272 - DNA, 25 bp, Probe sequence
gtaaagcaaatcaagccatttcagc

SEQ ID NO: 184273 - DNA, 25 bp, Probe sequence
gtcaatcgatgatgtaaacactgca

SEQ ID NO: 184274 - DNA, 25 bp, Probe sequence
ggtagtcatagtatgcatcaagata

SEQ ID NO: 184275 - DNA, 25 bp, Probe sequence
tcaagcaattgacccaattcaagca

SEQ ID NO: 184276 - DNA, 25 bp, Probe sequence
ttcaagcaattgacccaattcaagc

SEQ ID NO: 184277 - DNA, 25 bp, Probe sequence
attcaagctacgccagatgcaacag

SEQ ID NO: 184278 - DNA, 25 bp, Probe sequence
atagagatttagcaccgaaagcaac

SEQ ID NO: 184279 - DNA, 25 bp, Probe sequence
atagtcattacacaacagcatcaat

SEQ ID NO: 184280 - DNA, 25 bp, Probe sequence
atgcgcaaccagaagttacactaac

SEQ ID NO: 184281 - DNA, 25 bp, Probe sequence
atgtagctgcattaggtcgtgtgaa

SEQ ID NO: 184282 - DNA, 25 bp, Probe sequence
atggtaattttggtgcttcattgaa

SEQ ID NO: 184283 - DNA, 25 bp, Probe sequence
acaccaacagttaaacctcaagcga

SEQ ID NO: 184284 - DNA, 25 bp, Probe sequence
acaacagctaaagcagcagctcttg

SEQ ID NO: 184285 - DNA, 25 bp, Probe sequence
aaaggttacagcagcacaacaaagt

SEQ ID NO: 184286 - DNA, 25 bp, Probe sequence
aaagttacatttacaagccaaggtg

SEQ ID NO: 184287 - DNA, 25 bp, Probe sequence
aagctcaaaatgctacagtttcaaa

SEQ ID NO: 184288 - DNA, 25 bp, Probe sequence
aagcaaggtttacatgacatccaag

SEQ ID NO: 184289 - DNA, 25 bp, Probe sequence
aattatcaactttactactatgcaa

SEQ ID NO: 184290 - DNA, 25 bp, Probe sequence
aattaacatatcgtactgcttcaga

SEQ ID NO: 184291 - DNA, 25 bp, Probe sequence
caattaatcaagttcaagctgccac

SEQ ID NO: 184292 - DNA, 25 bp, Probe sequence
caagcacctttaaatcctgatacaa

SEQ ID NO: 184293 - DNA, 25 bp, Probe sequence
caagcacaaattgatcaagcacctt

SEQ ID NO: 184294 - DNA, 25 bp, Probe sequence
cgcagccattacacctgatgcaaat

SEQ ID NO: 184295 - DNA, 25 bp, Probe sequence
gcagttgctgatgcttcaagaatta

SEQ ID NO: 184296 - DNA, 25 bp, Probe sequence
gcaaatcgtgcatctcaagcggata

SEQ ID NO: 184297 - DNA, 25 bp, Probe sequence
gaagtagcagaagctgatgcagcag

SEQ ID NO: 184298 - DNA, 25 bp, Probe sequence
gaagctacaatcgcagccattacac

SEQ ID NO: 184299 - DNA, 25 bp, Probe sequence
gaagcgacaacgactgcacaagatt

SEQ ID NO: 184300 - DNA, 25 bp, Probe sequence
gactggtactgcacacttatttaaa

SEQ ID NO: 184301 - DNA, 25 bp, Probe sequence
gatgaagttgcagcgcttgtgacta

SEQ ID NO: 184302 - DNA, 25 bp, Probe sequence
gatgcaaatgttaaacctcaagcga

SEQ ID NO: 184303 - DNA, 25 bp, Probe sequence
gatattatccaagcagttacaactc

SEQ ID NO: 184304 - DNA, 25 bp, Probe sequence
gattcattaactacaacattcccta

SEQ ID NO: 184305 - DNA, 25 bp, Probe sequence
gtaggtctattctcaggatcacatt

SEQ ID NO: 184306 - DNA, 25 bp, Probe sequence
gtagctaagactggtactgcacact

SEQ ID NO: 184307 - DNA, 25 bp, Probe sequence
gtaccaacagatgctgatcgtttag

SEQ ID NO: 184308 - DNA, 25 bp, Probe sequence
tacactaactgcagatccattttca

SEQ ID NO: 184309 - DNA, 25 bp, Probe sequence
tagcaacagcagttacagacgcgaa

SEQ ID NO: 184310 - DNA, 25 bp, Probe sequence
tattcctgacaatacagcagttgct

SEQ ID NO: 184311 - DNA, 25 bp, Probe sequence
atgccaatgcagatacgtcttcaac

SEQ ID NO: 184312 - DNA, 25 bp, Probe sequence
atgcgagcacaggtgcagcatcatc

SEQ ID NO: 184313 - DNA, 25 bp, Probe sequence
atgatgcggcaactggtggaacaac

SEQ ID NO: 184314 - DNA, 25 bp, Probe sequence
atggtgtggataatagtgatgttga

SEQ ID NO: 184315 - DNA, 25 bp, Probe sequence
agcgattgtacctcagaaggatcca

SEQ ID NO: 184316 - DNA, 25 bp, Probe sequence
accaaaagtaccttctaatacagag

SEQ ID NO: 184317 - DNA, 25 bp, Probe sequence
actggacaacctaatgtaactgagt

SEQ ID NO: 184318 - DNA, 25 bp, Probe sequence
actgcaacaaacgagaacgcaccaa

SEQ ID NO: 184319 - DNA, 25 bp, Probe sequence
aaaccatcaacatctaaaccgtcag

SEQ ID NO: 184320 - DNA, 25 bp, Probe sequence
aaacctaaagcaaaccaagcgattg

SEQ ID NO: 184321 - DNA, 25 bp, Probe sequence
aaaacggctgcattagcaacgatta

SEQ ID NO: 184322 - DNA, 25 bp, Probe sequence
aacagcaacggttccaacaacaaat

SEQ ID NO: 184323 - DNA, 25 bp, Probe sequence
aacagatgctggacaacttaagtct

SEQ ID NO: 184324 - DNA, 25 bp, Probe sequence
aaggacttgaggcgtttgataacat

SEQ ID NO: 184325 - DNA, 25 bp, Probe sequence
aaggcaacatcagcgcaacaaggta

SEQ ID NO: 184326 - DNA, 25 bp, Probe sequence
cagcaacatcaacagacaattcggc

SEQ ID NO: 184327 - DNA, 25 bp, Probe sequence
ctgagtcaacagataatgccaatgc

SEQ ID NO: 184328 - DNA, 25 bp, Probe sequence
ccaagcgattgatgctaaagcacag

SEQ ID NO: 184329 - DNA, 25 bp, Probe sequence
gcagatacgtcttcaacaacgacaa

SEQ ID NO: 184330 - DNA, 25 bp, Probe sequence
gcagcaattggtgcaactgcagatg

SEQ ID NO: 184331 - DNA, 25 bp, Probe sequence
gcaactggtggaacaacagcaacat

SEQ ID NO: 184332 - DNA, 25 bp, Probe sequence
gaaggcaacgttgatactgatgtat

SEQ ID NO: 184333 - DNA, 25 bp, Probe sequence
gaaggatccaaatgctaatgatact

SEQ ID NO: 184334 - DNA, 25 bp, Probe sequence
gacaattcggcaacgggtaatggta

SEQ ID NO: 184335 - DNA, 25 bp, Probe sequence
gacaaacaccaagctaaggcaacat

SEQ ID NO: 184336 - DNA, 25 bp, Probe sequence
gagtctatagaccaaagtgaccagt

SEQ ID NO: 184337 - DNA, 25 bp, Probe sequence
gataaagcgacttcgactgaggata

SEQ ID NO: 184338 - DNA, 25 bp, Probe sequence
gtaactaacactgacaaacaccaag

SEQ ID NO: 184339 - DNA, 25 bp, Probe sequence
gtaaagcgacaattgatgcagttca

SEQ ID NO: 184340 - DNA, 25 bp, Probe sequence
ggttccaacaacaaatgcgagcaca

SEQ ID NO: 184341 - DNA, 25 bp, Probe sequence
ggcacaactgataaatctgcaacag

SEQ ID NO: 184342 - DNA, 25 bp, Probe sequence
tcagcagacattacagaaccaaaag

SEQ ID NO: 184343 - DNA, 25 bp, Probe sequence
tcaacatctaaaccgtcagaagcaa

SEQ ID NO: 184344 - DNA, 25 bp, Probe sequence
tcaaaaggctgacatggcaacatca

SEQ ID NO: 184345 - DNA, 25 bp, Probe sequence
atgacatgattgtttctactgttat

SEQ ID NO: 184346 - DNA, 25 bp, Probe sequence
aggtcgcgatactagagtttcaggt

SEQ ID NO: 184347 - DNA, 25 bp, Probe sequence
aggtattatttcaacaccaggtgtt

SEQ ID NO: 184348 - DNA, 25 bp, Probe sequence
aggtgttgcatatttaacacgcgat

SEQ ID NO: 184349 - DNA, 25 bp, Probe sequence
acgcgatatgggtgcagagttaggt

SEQ ID NO: 184350 - DNA, 25 bp, Probe sequence
actggtattcaattagcttctgtaa

SEQ ID NO: 184351 - DNA, 25 bp, Probe sequence
aaatgcgtcgcggtaattataactt

SEQ ID NO: 184352 - DNA, 25 bp, Probe sequence
acaattggatgtagtcctgatggat

SEQ ID NO: 184353 - DNA, 25 bp, Probe sequence
aaattctttggatcagatggtttta

SEQ ID NO: 184354 - DNA, 25 bp, Probe sequence
aacgtacgcgtaacagataaatatc

SEQ ID NO: 184355 - DNA, 25 bp, Probe sequence
cccacgtgtacttgtaggtcgcgat

SEQ ID NO: 184356 - DNA, 25 bp, Probe sequence
ccacaatcattaattaacgtacgcg

SEQ ID NO: 184357 - DNA, 25 bp, Probe sequence
gctggtttgatttcaattggtgcag

SEQ ID NO: 184358 - DNA, 25 bp, Probe sequence
gaagtgatgcgattaggtattattt

SEQ ID NO: 184359 - DNA, 25 bp, Probe sequence
gaagatgctgaaagatttgcacaac

SEQ ID NO: 184360 - DNA, 25 bp, Probe sequence
gaactaacacctgaattggcattta

SEQ ID NO: 184361 - DNA, 25 bp, Probe sequence
gacggagtaagaggtgtcgcaaacc

SEQ ID NO: 184362 - DNA, 25 bp, Probe sequence
gacggtgaccaaattatgtttatta

SEQ ID NO: 184363 - DNA, 25 bp, Probe sequence
gagaaatgtggctctacacatcctg

SEQ ID NO: 184364 - DNA, 25 bp, Probe sequence
gtcaaatcgttgacggtgaccaaat

SEQ ID NO: 184365 - DNA, 25 bp, Probe sequence
gttcgtgtcatggttgaagcagcaa

SEQ ID NO: 184366 - DNA, 25 bp, Probe sequence
gtagtagaagaaatgcgtcgcggta

SEQ ID NO: 184367 - DNA, 25 bp, Probe sequence
gtcgaattttagtaagaccttctgg

SEQ ID NO: 184368 - DNA, 25 bp, Probe sequence
gtcgcaaaccaagaactaacacctg

SEQ ID NO: 184369 - DNA, 25 bp, Probe sequence
gtgattttgggttagcatttgacgg

SEQ ID NO: 184370 - DNA, 25 bp, Probe sequence
gtggctctacacatcctgaaaaatt

SEQ ID NO: 184371 - DNA, 25 bp, Probe sequence
ggtgaaaaacacccacgtgtacttg

SEQ ID NO: 184372 - DNA, 25 bp, Probe sequence
gggttagcatttgacggcgatggag

SEQ ID NO: 184373 - DNA, 25 bp, Probe sequence
ggtggctatgttctagcacataata

SEQ ID NO: 184374 - DNA, 25 bp, Probe sequence
ggtgatggtttattaactggtattc

SEQ ID NO: 184375 - DNA, 25 bp, Probe sequence
ggattacaatacaactggtgatggt

SEQ ID NO: 184376 - DNA, 25 bp, Probe sequence
ggaacagaaccattagttcgtgtca

SEQ ID NO: 184377 - DNA, 25 bp, Probe sequence
ggcgatggagacagaatcatagcag

SEQ ID NO: 184378 - DNA, 25 bp, Probe sequence
taggtttttacaaagcgcttgaaca

SEQ ID NO: 184379 - DNA, 25 bp, Probe sequence
atttcaggaccacaatcaaagataa

SEQ ID NO: 184380 - DNA, 25 bp, Probe sequence
atataagcgaagttgatgcagaagt

SEQ ID NO: 184381 - DNA, 25 bp, Probe sequence
ataacactaaagatttgcatttaac

SEQ ID NO: 184382 - DNA, 25 bp, Probe sequence
caagttaaagtagagccttttagca

SEQ ID NO: 184383 - DNA, 25 bp, Probe sequence
acagaaaggtagtttagcagatgat

SEQ ID NO: 184384 - DNA, 25 bp, Probe sequence
aaaaatcaatttaccagaacatgtc

SEQ ID NO: 184385 - DNA, 25 bp, Probe sequence
aaaagatgacagttcaacctgatgt

SEQ ID NO: 184386 - DNA, 25 bp, Probe sequence
aaccaagtgaaacgaaggcttatat

SEQ ID NO: 184387 - DNA, 25 bp, Probe sequence
aagcgcctgaaacagttaatgtgac

SEQ ID NO: 184388 - DNA, 25 bp, Probe sequence
aagggttagctgatgacattcatta

SEQ ID NO: 184389 - DNA, 25 bp, Probe sequence
aattaaatgtatcgattcaacctaa

SEQ ID NO: 184390 - DNA, 25 bp, Probe sequence
gcctttcttttggcattgtttttct

SEQ ID NO: 184391 - DNA, 25 bp, Probe sequence
gcaaatattacgcttgaaaacaaag

SEQ ID NO: 184392 - DNA, 25 bp, Probe sequence
gcaagaagtttcaccacaaacagtt

SEQ ID NO: 184393 - DNA, 25 bp, Probe sequence
gaagtatcaagttaaagggttagct

SEQ ID NO: 184394 - DNA, 25 bp, Probe sequence
gaacaattgaatgatatcgcttatt

SEQ ID NO: 184395 - DNA, 25 bp, Probe sequence
gaaatcttcggtagtcgagatgact

SEQ ID NO: 184396 - DNA, 25 bp, Probe sequence
gaaattgaaatcttcggtagtcgag

SEQ ID NO: 184397 - DNA, 25 bp, Probe sequence
gacattcattattctgtaaaaccta

SEQ ID NO: 184398 - DNA, 25 bp, Probe sequence
gatgtacccgttgaaattctttata

SEQ ID NO: 184399 - DNA, 25 bp, Probe sequence
gatgcagaagtagatttagatggta

SEQ ID NO: 184400 - DNA, 25 bp, Probe sequence
gatatcgcttatttaaaagccactt

SEQ ID NO: 184401 - DNA, 25 bp, Probe sequence
gatttattgcctttcttttggcatt

SEQ ID NO: 184402 - DNA, 25 bp, Probe sequence
gatttatcaaatgctaaagctggaa

SEQ ID NO: 184403 - DNA, 25 bp, Probe sequence
gttaatgtgactatttcaggaccac

SEQ ID NO: 184404 - DNA, 25 bp, Probe sequence
gtaaaacgattcaagatgtacccgt

SEQ ID NO: 184405 - DNA, 25 bp, Probe sequence
gtgactatttcaggaccacaatcaa

SEQ ID NO: 184406 - DNA, 25 bp, Probe sequence
gtgatattgatccactttataaaat

SEQ ID NO: 184407 - DNA, 25 bp, Probe sequence
ggtaatcttggtcaaaagtctagta

SEQ ID NO: 184408 - DNA, 25 bp, Probe sequence
ggaaatatctttaacactggtaatc

SEQ ID NO: 184409 - DNA, 25 bp, Probe sequence
tgcatttaacaaaagcgcctgaaac

SEQ ID NO: 184410 - DNA, 25 bp, Probe sequence
tacaaagcaagaagtttcaccacaa

SEQ ID NO: 184411 - DNA, 25 bp, Probe sequence
tttaacactggtaatcttggtcaaa

SEQ ID NO: 184412 - DNA, 25 bp, Probe sequence
ttagatggtatttcagaatcaactg

SEQ ID NO: 184413 - DNA, 25 bp, Probe sequence
atgtactttatcttctcatcacggt

SEQ ID NO: 184414 - DNA, 25 bp, Probe sequence
agggaactaaagcgatacaattact

SEQ ID NO: 184415 - DNA, 25 bp, Probe sequence
agtaattgttattggtcagcagata

SEQ ID NO: 184416 - DNA, 25 bp, Probe sequence
agacgtgcgttagaacaacttggta

SEQ ID NO: 184417 - DNA, 25 bp, Probe sequence
actggtgatatttcggtaacatttg

SEQ ID NO: 184418 - DNA, 25 bp, Probe sequence
acacctttacatgatggtgcaatga

SEQ ID NO: 184419 - DNA, 25 bp, Probe sequence
aaaacgctatacttctaatacgtat

SEQ ID NO: 184420 - DNA, 25 bp, Probe sequence
aagattgcagcagcagcaagttatt

SEQ ID NO: 184421 - DNA, 25 bp, Probe sequence
aaggctgtgcaatatatggctaaaa

SEQ ID NO: 184422 - DNA, 25 bp, Probe sequence
aattgtaacgagtatccttgattta

SEQ ID NO: 184423 - DNA, 25 bp, Probe sequence
ctcatcacggtctttaagggaacta

SEQ ID NO: 184424 - DNA, 25 bp, Probe sequence
gcggttggtatttcagaagtatctg

SEQ ID NO: 184425 - DNA, 25 bp, Probe sequence
gctttaatagtaatattccaaccag

SEQ ID NO: 184426 - DNA, 25 bp, Probe sequence
gcaagttatttgccattgtctgata

SEQ ID NO: 184427 - DNA, 25 bp, Probe sequence
gaagagttgcttgctgaacattggt

SEQ ID NO: 184428 - DNA, 25 bp, Probe sequence
gaacattggtttggcacacgctttc

SEQ ID NO: 184429 - DNA, 25 bp, Probe sequence
gaacaacttggtagaggtagctttt

SEQ ID NO: 184430 - DNA, 25 bp, Probe sequence
gaaacaggtattgcaatggattcaa

SEQ ID NO: 184431 - DNA, 25 bp, Probe sequence
gaaacaggtcttcaagattatattg

SEQ ID NO: 184432 - DNA, 25 bp, Probe sequence
gagtatccttgatttactgatagtt

SEQ ID NO: 184433 - DNA, 25 bp, Probe sequence
gatggtgcaatgattattcaaggca

SEQ ID NO: 184434 - DNA, 25 bp, Probe sequence
gatattgaacttgactgcaacatct

SEQ ID NO: 184435 - DNA, 25 bp, Probe sequence
gattcaatcggtttcaaaggctgtg

SEQ ID NO: 184436 - DNA, 25 bp, Probe sequence
gtttggtatgtactttatcttctca

SEQ ID NO: 184437 - DNA, 25 bp, Probe sequence
ggtttggcacacgctttcaaaagaa

SEQ ID NO: 184438 - DNA, 25 bp, Probe sequence
ggctaaaagacgtataggtgcatta

SEQ ID NO: 184439 - DNA, 25 bp, Probe sequence
tgactgcaacatctaaattattcga

SEQ ID NO: 184440 - DNA, 25 bp, Probe sequence
taggtgcattaattgtctttgaaaa

SEQ ID NO: 184441 - DNA, 25 bp, Probe sequence
tattcgatatcgttattcaatgggg

SEQ ID NO: 184442 - DNA, 25 bp, Probe sequence
tttgccattgtctgatagtcctaag

SEQ ID NO: 184443 - DNA, 25 bp, Probe sequence
tttaccgttattgtatctgaagaaa

SEQ ID NO: 184444 - DNA, 25 bp, Probe sequence
ttccaaccagaaattagacgtgcgt

SEQ ID NO: 184445 - DNA, 25 bp, Probe sequence
ttatcttctcatcacggtctttaag

SEQ ID NO: 184446 - DNA, 25 bp, Probe sequence
ttcaatggggggtattagctttaat

SEQ ID NO: 184447 - DNA, 25 bp, Probe sequence
attcatggtatgcctctaaggattt

SEQ ID NO: 184448 - DNA, 25 bp, Probe sequence
atttaggtgttatttggtatgatgc

SEQ ID NO: 184449 - DNA, 25 bp, Probe sequence
atttggtatgatgcacatggtgatt

SEQ ID NO: 184450 - DNA, 25 bp, Probe sequence
atattcatggtatgcctctaaggat

SEQ ID NO: 184451 - DNA, 25 bp, Probe sequence
atacctgaagagtcaccaagtggaa

SEQ ID NO: 184452 - DNA, 25 bp, Probe sequence
atgttgatggcgttcatttatcttt

SEQ ID NO: 184453 - DNA, 25 bp, Probe sequence
atggtatgcctctaaggattttgac

SEQ ID NO: 184454 - DNA, 25 bp, Probe sequence
acatttactatgtcagatattgata

SEQ ID NO: 184455 - DNA, 25 bp, Probe sequence
acagatttcctctagttcttggtgg

SEQ ID NO: 184456 - DNA, 25 bp, Probe sequence
acatcgtactaattggtatgagaga

SEQ ID NO: 184457 - DNA, 25 bp, Probe sequence
aaatagtaatgtaatcaagccagaa

SEQ ID NO: 184458 - DNA, 25 bp, Probe sequence
aaataacagatttcctctagttctt

SEQ ID NO: 184459 - DNA, 25 bp, Probe sequence
aagccagaaaacatcgtactaattg

SEQ ID NO: 184460 - DNA, 25 bp, Probe sequence
aagtcacgcaatgttgatggcgttc

SEQ ID NO: 184461 - DNA, 25 bp, Probe sequence
aatcaagccagaaaacatcgtacta

SEQ ID NO: 184462 - DNA, 25 bp, Probe sequence
aatatacctgaagagtcaccaagtg

SEQ ID NO: 184463 - DNA, 25 bp, Probe sequence
cacgcaatgttgatggcgttcattt

SEQ ID NO: 184464 - DNA, 25 bp, Probe sequence
gcacatggtgatttaaatatacctg

SEQ ID NO: 184465 - DNA, 25 bp, Probe sequence
gaatatttgaagtcacgcaatgttg

SEQ ID NO: 184466 - DNA, 25 bp, Probe sequence
gaagagtcaccaagtggaaatattc

SEQ ID NO: 184467 - DNA, 25 bp, Probe sequence
gaaaacatcgtactaattggtatga

SEQ ID NO: 184468 - DNA, 25 bp, Probe sequence
gaaagacaatttatcaaagatcata

SEQ ID NO: 184469 - DNA, 25 bp, Probe sequence
gaaatattcatggtatgcctctaag

SEQ ID NO: 184470 - DNA, 25 bp, Probe sequence
gatggcgttcatttatctttagatg

SEQ ID NO: 184471 - DNA, 25 bp, Probe sequence
gttgatggcgttcatttatctttag

SEQ ID NO: 184472 - DNA, 25 bp, Probe sequence
gtatgcctctaaggattttgacagg

SEQ ID NO: 184473 - DNA, 25 bp, Probe sequence
gtggaaatattcatggtatgcctct

SEQ ID NO: 184474 - DNA, 25 bp, Probe sequence
ggtgttatttggtatgatgcacatg

SEQ ID NO: 184475 - DNA, 25 bp, Probe sequence
ggtatgatgcacatggtgatttaaa

SEQ ID NO: 184476 - DNA, 25 bp, Probe sequence
ggcgttcatttatctttagatgttg

SEQ ID NO: 184477 - DNA, 25 bp, Probe sequence
taacagatttcctctagttcttggt

SEQ ID NO: 184478 - DNA, 25 bp, Probe sequence
taggttcagtatcagcaataagtaa

SEQ ID NO: 184479 - DNA, 25 bp, Probe sequence
tttgaagtcacgcaatgttgatggc

SEQ ID NO: 184480 - DNA, 25 bp, Probe sequence
ttcatttatctttagatgttgatgc

SEQ ID NO: 184481 - DNA, 25 bp, Probe sequence
attatctcaccttattatatttata

SEQ ID NO: 184482 - DNA, 25 bp, Probe sequence
atatttttatactcatcccactttt

SEQ ID NO: 184483 - DNA, 25 bp, Probe sequence
atagcgataatcacactgaggcaaa

SEQ ID NO: 184484 - DNA, 25 bp, Probe sequence
atcatctcaagcattggggttagtt

SEQ ID NO: 184485 - DNA, 25 bp, Probe sequence
atgtcatatacttctgtattgttta

SEQ ID NO: 184486 - DNA, 25 bp, Probe sequence
agttttataccttatgcaattttag

SEQ ID NO: 184487 - DNA, 25 bp, Probe sequence
agattctatgacttttttactctca

SEQ ID NO: 184488 - DNA, 25 bp, Probe sequence
aatggctgttgttgtaagtttatcc

SEQ ID NO: 184489 - DNA, 25 bp, Probe sequence
aatgttaccatttagtacttatatt

SEQ ID NO: 184490 - DNA, 25 bp, Probe sequence
aatatgttaagcatctttcaaattt

SEQ ID NO: 184491 - DNA, 25 bp, Probe sequence
gcaaacagttatatatacgctactc

SEQ ID NO: 184492 - DNA, 25 bp, Probe sequence
gaagatttggcgagcgcaaacagtt

SEQ ID NO: 184493 - DNA, 25 bp, Probe sequence
gaggtttcgataatcccaagtattg

SEQ ID NO: 184494 - DNA, 25 bp, Probe sequence
gttcattatctgcaagttttctctt

SEQ ID NO: 184495 - DNA, 25 bp, Probe sequence
gtttatccaatctaattatctcacc

SEQ ID NO: 184496 - DNA, 25 bp, Probe sequence
gtttctgcactaagttttatacctt

SEQ ID NO: 184497 - DNA, 25 bp, Probe sequence
ggggttagttttaggtatctcatca

SEQ ID NO: 184498 - DNA, 25 bp, Probe sequence
gggttgacatatatgacacaatcca

SEQ ID NO: 184499 - DNA, 25 bp, Probe sequence
ggtggattttatgcacttacgatca

SEQ ID NO: 184500 - DNA, 25 bp, Probe sequence
ggtgcgctaatcggttcattatctg

SEQ ID NO: 184501 - DNA, 25 bp, Probe sequence
ggtatctcatcattaggtgcgctaa

SEQ ID NO: 184502 - DNA, 25 bp, Probe sequence
ggaggtttactttatacatatatgg

SEQ ID NO: 184503 - DNA, 25 bp, Probe sequence
ggaagacatgaatcaatcatctcaa

SEQ ID NO: 184504 - DNA, 25 bp, Probe sequence
tgggcagtgcttttactacgtttgt

SEQ ID NO: 184505 - DNA, 25 bp, Probe sequence
tgggccctataattggaggtttact

SEQ ID NO: 184506 - DNA, 25 bp, Probe sequence
tgtagttgcaatcatttcaggtatt

SEQ ID NO: 184507 - DNA, 25 bp, Probe sequence
tcggaatttttgggccctataattg

SEQ ID NO: 184508 - DNA, 25 bp, Probe sequence
tcacagtatttctgaggtttcgata

SEQ ID NO: 184509 - DNA, 25 bp, Probe sequence
tactacgtttgtttttccattaatg

SEQ ID NO: 184510 - DNA, 25 bp, Probe sequence
tacgctactcaaaatgtttcggaat

SEQ ID NO: 184511 - DNA, 25 bp, Probe sequence
tactcatcccacttttagggttgac

SEQ ID NO: 184512 - DNA, 25 bp, Probe sequence
tagctttttctaacatgggcagtgc

SEQ ID NO: 184513 - DNA, 25 bp, Probe sequence
tttactctcatttttcagtttgata

SEQ ID NO: 184514 - DNA, 25 bp, Probe sequence
ttcaagttggcatagtttctgcact

SEQ ID NO: 184515 - DNA, 25 bp, Probe sequence
atagctcgattgcacaaaaagttat

SEQ ID NO: 184516 - DNA, 25 bp, Probe sequence
atcattctattcttggcgtaattga

SEQ ID NO: 184517 - DNA, 25 bp, Probe sequence
agagcaaccatcttggaatccaaaa

SEQ ID NO: 184518 - DNA, 25 bp, Probe sequence
acctggaacaggagatgtagcttta

SEQ ID NO: 184519 - DNA, 25 bp, Probe sequence
acctcatcctacagcagcatttgtt

SEQ ID NO: 184520 - DNA, 25 bp, Probe sequence
acgtcatggcgttaaagttatatca

SEQ ID NO: 184521 - DNA, 25 bp, Probe sequence
acagcagcatttgttgcagctcgcg

SEQ ID NO: 184522 - DNA, 25 bp, Probe sequence
aaggtggcggtactaagttagctga

SEQ ID NO: 184523 - DNA, 25 bp, Probe sequence
aatgttgacgaatttctttacagaa

SEQ ID NO: 184524 - DNA, 25 bp, Probe sequence
cagctcgcgcaggtgcgatggcaaa

SEQ ID NO: 184525 - DNA, 25 bp, Probe sequence
catacggatcattctattcttggcg

SEQ ID NO: 184526 - DNA, 25 bp, Probe sequence
gccgatatatatggatttagtgtac

SEQ ID NO: 184527 - DNA, 25 bp, Probe sequence
gcagtaaatttagccgttgccttag

SEQ ID NO: 184528 - DNA, 25 bp, Probe sequence
gcaccgtcaatatatcaatcagatg

SEQ ID NO: 184529 - DNA, 25 bp, Probe sequence
gaatccaaaagattttgcaccgtca

SEQ ID NO: 184530 - DNA, 25 bp, Probe sequence
gatgggtattgatgaaaagcctgga

SEQ ID NO: 184531 - DNA, 25 bp, Probe sequence
gatgtagctttagatgttcatacga

SEQ ID NO: 184532 - DNA, 25 bp, Probe sequence
gattttgcaccgtcaatatatcaat

SEQ ID NO: 184533 - DNA, 25 bp, Probe sequence
gttcatacgatgttaccttcaagta

SEQ ID NO: 184534 - DNA, 25 bp, Probe sequence
gttagctgatgaacttaatactcaa

SEQ ID NO: 184535 - DNA, 25 bp, Probe sequence
gtaattccagttgaacgtcatggcg

SEQ ID NO: 184536 - DNA, 25 bp, Probe sequence
gtctttggcaaaggtggcggtacta

SEQ ID NO: 184537 - DNA, 25 bp, Probe sequence
gtcggtaaatctactgttgcagtaa

SEQ ID NO: 184538 - DNA, 25 bp, Probe sequence
gggaattacctttagagcaaccatc

SEQ ID NO: 184539 - DNA, 25 bp, Probe sequence
ggtgcgatggcaaaacatacggatc

SEQ ID NO: 184540 - DNA, 25 bp, Probe sequence
ggtgcaccgcaattagatttacaga

SEQ ID NO: 184541 - DNA, 25 bp, Probe sequence
ggtaaaatttatagctcgattgcac

SEQ ID NO: 184542 - DNA, 25 bp, Probe sequence
ggattagtagatgccgatatatatg

SEQ ID NO: 184543 - DNA, 25 bp, Probe sequence
ggcacaattaggtggtgcaccgcaa

SEQ ID NO: 184544 - DNA, 25 bp, Probe sequence
tcaatcagatgatcgtctaggtaaa

SEQ ID NO: 184545 - DNA, 25 bp, Probe sequence
tactcgatcttccacctggaacagg

SEQ ID NO: 184546 - DNA, 25 bp, Probe sequence
tactcaattacttggggaattacct

SEQ ID NO: 184547 - DNA, 25 bp, Probe sequence
tatttaatactcgatcttccacctg

SEQ ID NO: 184548 - DNA, 25 bp, Probe sequence
ttattgtaacgacacctcatcctac

SEQ ID NO: 184549 - DNA, 25 bp, Probe sequence
attgctataggggtggatatctcat

SEQ ID NO: 184550 - DNA, 25 bp, Probe sequence
atctacatcgccatcgcatttaact

SEQ ID NO: 184551 - DNA, 25 bp, Probe sequence
atttgcattatgtacgattagttca

SEQ ID NO: 184552 - DNA, 25 bp, Probe sequence
atcgccatcgcatttaactgcaact

SEQ ID NO: 184553 - DNA, 25 bp, Probe sequence
atgttgtgtttcttgcatacagaca

SEQ ID NO: 184554 - DNA, 25 bp, Probe sequence
agttactgggtttatgcttgttaat

SEQ ID NO: 184555 - DNA, 25 bp, Probe sequence
acgtatttaatagtcgtatatgcaa

SEQ ID NO: 184556 - DNA, 25 bp, Probe sequence
acatcgcaatggctagttactgggt

SEQ ID NO: 184557 - DNA, 25 bp, Probe sequence
acattattaaatacagcgttaccta

SEQ ID NO: 184558 - DNA, 25 bp, Probe sequence
acagacacatcttatacgtatttaa

SEQ ID NO: 184559 - DNA, 25 bp, Probe sequence
aaatctcacatggcacggctattat

SEQ ID NO: 184560 - DNA, 25 bp, Probe sequence
catttgcttttgtagctgtgcttgt

SEQ ID NO: 184561 - DNA, 25 bp, Probe sequence
gccatcgcatttaactgcaactgaa

SEQ ID NO: 184562 - DNA, 25 bp, Probe sequence
ggcacggctattatgaactttggtc

SEQ ID NO: 184563 - DNA, 25 bp, Probe sequence
gcttgttaatggcgtcatgatacct

SEQ ID NO: 184564 - DNA, 25 bp, Probe sequence
gcttgttatggcagcttatgtgata

SEQ ID NO: 184565 - DNA, 25 bp, Probe sequence
gaatgttttcagtttctttactcat

SEQ ID NO: 184566 - DNA, 25 bp, Probe sequence
gaagaaatctcacatggcacggcta

SEQ ID NO: 184567 - DNA, 25 bp, Probe sequence
gaaagtacatcgcaatggctagtta

SEQ ID NO: 184568 - DNA, 25 bp, Probe sequence
gagacgaaacttcatagttgctgtt

SEQ ID NO: 184569 - DNA, 25 bp, Probe sequence
gatgccgataaatactacaggaatt

SEQ ID NO: 184570 - DNA, 25 bp, Probe sequence
gttgctgttatgttgattagtgcgt

SEQ ID NO: 184571 - DNA, 25 bp, Probe sequence
gtttctttactcatgatgccgataa

SEQ ID NO: 184572 - DNA, 25 bp, Probe sequence
gtttcttgcatacagacacatctta

SEQ ID NO: 184573 - DNA, 25 bp, Probe sequence
gtgcgtttgtagctattttaaatca

SEQ ID NO: 184574 - DNA, 25 bp, Probe sequence
gggtttatgcttgttaatggcgtca

SEQ ID NO: 184575 - DNA, 25 bp, Probe sequence
ggggtggatatctcatttgcttttg

SEQ ID NO: 184576 - DNA, 25 bp, Probe sequence
ggatatctcatttgcttttgtagct

SEQ ID NO: 184577 - DNA, 25 bp, Probe sequence
tgaactttggtcgtgtaatggctgg

SEQ ID NO: 184578 - DNA, 25 bp, Probe sequence
taacaacccggagacgaaacttcat

SEQ ID NO: 184579 - DNA, 25 bp, Probe sequence
tacagcgttacctagtataatgaga

SEQ ID NO: 184580 - DNA, 25 bp, Probe sequence
tttgtagctgtgcttgttatggcag

SEQ ID NO: 184581 - DNA, 25 bp, Probe sequence
tttatgataagtatggtcctagacc

SEQ ID NO: 184582 - DNA, 25 bp, Probe sequence
ttatgttgattagtgcgtttgtagc

SEQ ID NO: 184583 - DNA, 25 bp, Probe sequence
attggattgattatgtttgctttat

SEQ ID NO: 184584 - DNA, 25 bp, Probe sequence
atcttagctatcgttgtggcaatgt

SEQ ID NO: 184585 - DNA, 25 bp, Probe sequence
agcattgggcttattgttttatggg

SEQ ID NO: 184586 - DNA, 25 bp, Probe sequence
acagctatttgtttaatgggattca

SEQ ID NO: 184587 - DNA, 25 bp, Probe sequence
aaagaacagtcatctcaatcaaaag

SEQ ID NO: 184588 - DNA, 25 bp, Probe sequence
aatgtgttaagtgctgttgctgtaa

SEQ ID NO: 184589 - DNA, 25 bp, Probe sequence
aatttcttgagttttatcttagcta

SEQ ID NO: 184590 - DNA, 25 bp, Probe sequence
caggaatctttggtccaaacttaca

SEQ ID NO: 184591 - DNA, 25 bp, Probe sequence
ctcacgctattttatgtatttattg

SEQ ID NO: 184592 - DNA, 25 bp, Probe sequence
gctgttgctgtaattagcattgggc

SEQ ID NO: 184593 - DNA, 25 bp, Probe sequence
gaacaactaggattatctccattgc

SEQ ID NO: 184594 - DNA, 25 bp, Probe sequence
gaaaaacatgtttcttcaccatttt

SEQ ID NO: 184595 - DNA, 25 bp, Probe sequence
gaccttctaacagctatttgtttaa

SEQ ID NO: 184596 - DNA, 25 bp, Probe sequence
gagttttatcttagctatcgttgtg

SEQ ID NO: 184597 - DNA, 25 bp, Probe sequence
gaggaaactagcccattacaaatga

SEQ ID NO: 184598 - DNA, 25 bp, Probe sequence
gatacaatcaggaatctttggtcca

SEQ ID NO: 184599 - DNA, 25 bp, Probe sequence
gttatttacttactatcatttacat

SEQ ID NO: 184600 - DNA, 25 bp, Probe sequence
gtttcttcaccatttttacctgtgg

SEQ ID NO: 184601 - DNA, 25 bp, Probe sequence
gtagtattatcatttcatttggtat

SEQ ID NO: 184602 - DNA, 25 bp, Probe sequence
gtccaagaggaaactagcccattac

SEQ ID NO: 184603 - DNA, 25 bp, Probe sequence
gggatatctttatgcgatacaatca

SEQ ID NO: 184604 - DNA, 25 bp, Probe sequence
ggttcaacaataatgggatatcttt

SEQ ID NO: 184605 - DNA, 25 bp, Probe sequence
ggcaggattaagttttggatatatt

SEQ ID NO: 184606 - DNA, 25 bp, Probe sequence
tggtattaaattgccggtacttata

SEQ ID NO: 184607 - DNA, 25 bp, Probe sequence
tggggcatcaataggttcaacaata

SEQ ID NO: 184608 - DNA, 25 bp, Probe sequence
tggattggttatttttcctttatct

SEQ ID NO: 184609 - DNA, 25 bp, Probe sequence
tgtggttgaatttaatcgttcgatt

SEQ ID NO: 184610 - DNA, 25 bp, Probe sequence
tgtttgctttattaaaccaacagct

SEQ ID NO: 184611 - DNA, 25 bp, Probe sequence
tgatgtcattttatggattaactaa

SEQ ID NO: 184612 - DNA, 25 bp, Probe sequence
tgccggtacttatagcatttgtgtt

SEQ ID NO: 184613 - DNA, 25 bp, Probe sequence
tcgttgtggcaatgtgtttatttaa

SEQ ID NO: 184614 - DNA, 25 bp, Probe sequence
ttaactaaaaatcttggggcatcaa

SEQ ID NO: 184615 - DNA, 25 bp, Probe sequence
taggattatctccattgcaaagtgg

SEQ ID NO: 184616 - DNA, 25 bp, Probe sequence
ttcaccatttttacctgtggttgaa

SEQ ID NO: 184617 - DNA, 25 bp, Probe sequence
atcaccagcaacgatgacacgcttt

SEQ ID NO: 184618 - DNA, 25 bp, Probe sequence
atctgagtcaaacttatcaacatac

SEQ ID NO: 184619 - DNA, 25 bp, Probe sequence
aggtaatgttactaccgattcacat

SEQ ID NO: 184620 - DNA, 25 bp, Probe sequence
agtcgccaaatctcatggtgcatat

SEQ ID NO: 184621 - DNA, 25 bp, Probe sequence
agtacttttaacaacggatcaatcg

SEQ ID NO: 184622 - DNA, 25 bp, Probe sequence
agattgtgcagatttagtactttta

SEQ ID NO: 184623 - DNA, 25 bp, Probe sequence
accgaccatcaatttatcaacacac

SEQ ID NO: 184624 - DNA, 25 bp, Probe sequence
acatatactctttgctggactaggt

SEQ ID NO: 184625 - DNA, 25 bp, Probe sequence
acacacaaattgcgacactcttttt

SEQ ID NO: 184626 - DNA, 25 bp, Probe sequence
aactgataaacgcatcgtcaattat

SEQ ID NO: 184627 - DNA, 25 bp, Probe sequence
aatagcccaattattcaaagaattc

SEQ ID NO: 184628 - DNA, 25 bp, Probe sequence
caacaaatcattcaacaaactggtg

SEQ ID NO: 184629 - DNA, 25 bp, Probe sequence
cgatgacacgctttagtcataagct

SEQ ID NO: 184630 - DNA, 25 bp, Probe sequence
cccatgcgattggtacatcaccagc

SEQ ID NO: 184631 - DNA, 25 bp, Probe sequence
gcgacactctttttaatcgatatcg

SEQ ID NO: 184632 - DNA, 25 bp, Probe sequence
gcatatgtcgttgccatcacaaatt

SEQ ID NO: 184633 - DNA, 25 bp, Probe sequence
gcagcggaagtcgccaaatctcatg

SEQ ID NO: 184634 - DNA, 25 bp, Probe sequence
gagaatcgtgttcaacgttatcaac

SEQ ID NO: 184635 - DNA, 25 bp, Probe sequence
gagacagttattgaaaatagcccaa

SEQ ID NO: 184636 - DNA, 25 bp, Probe sequence
gatcaatcgcgtaataccgaccatc

SEQ ID NO: 184637 - DNA, 25 bp, Probe sequence
gttactaccgattcacatttaatga

SEQ ID NO: 184638 - DNA, 25 bp, Probe sequence
gtagctctggtttatcagcgactga

SEQ ID NO: 184639 - DNA, 25 bp, Probe sequence
gtcaaatagtggtaatacttcggaa

SEQ ID NO: 184640 - DNA, 25 bp, Probe sequence
tggactaggtagctctggtttatca

SEQ ID NO: 184641 - DNA, 25 bp, Probe sequence
tggtgcatatgtcgttgccatcaca

SEQ ID NO: 184642 - DNA, 25 bp, Probe sequence
tgaaaatatcggcatccctactatc

SEQ ID NO: 184643 - DNA, 25 bp, Probe sequence
tgccttttcaacgattaactcctta

SEQ ID NO: 184644 - DNA, 25 bp, Probe sequence
tcagcgactgaattttattatcgta

SEQ ID NO: 184645 - DNA, 25 bp, Probe sequence
tcaagtcgacatatactctttgctg

SEQ ID NO: 184646 - DNA, 25 bp, Probe sequence
tcaacatactaaatctattatccta

SEQ ID NO: 184647 - DNA, 25 bp, Probe sequence
taacgacattatccaaacctttatc

SEQ ID NO: 184648 - DNA, 25 bp, Probe sequence
tatagcgatgccttttcaacgatta

SEQ ID NO: 184649 - DNA, 25 bp, Probe sequence
ttatccaaacctttatcgacaaact

SEQ ID NO: 184650 - DNA, 25 bp, Probe sequence
ttatcgtatgattcgtatggggcta

SEQ ID NO: 184651 - DNA, 25 bp, Probe sequence
attttatataaatccatagctgtca

SEQ ID NO: 184652 - DNA, 25 bp, Probe sequence
atttcatctactatttatcattcta

SEQ ID NO: 184653 - DNA, 25 bp, Probe sequence
atatcatccctttatcatttggaga

SEQ ID NO: 184654 - DNA, 25 bp, Probe sequence
atctactatttatcattctatgcaa

SEQ ID NO: 184655 - DNA, 25 bp, Probe sequence
atgggctgggtaggtattatcttgt

SEQ ID NO: 184656 - DNA, 25 bp, Probe sequence
agttaagcttaattgtctatttagt

SEQ ID NO: 184657 - DNA, 25 bp, Probe sequence
acgcttgcgtctgtgagtatgtcta

SEQ ID NO: 184658 - DNA, 25 bp, Probe sequence
aagtaatgacacaatcgtagaaaca

SEQ ID NO: 184659 - DNA, 25 bp, Probe sequence
aaggatatcatccctttatcatttg

SEQ ID NO: 184660 - DNA, 25 bp, Probe sequence
aatccatagctgtcaaagttaacca

SEQ ID NO: 184661 - DNA, 25 bp, Probe sequence
catctcatggtgttgcagctttgtt

SEQ ID NO: 184662 - DNA, 25 bp, Probe sequence
ctcatggtgttgcagctttgttaac

SEQ ID NO: 184663 - DNA, 25 bp, Probe sequence
ccaattatttttattcgcacatcat

SEQ ID NO: 184664 - DNA, 25 bp, Probe sequence
gcgtctgtgagtatgtctatttatg

SEQ ID NO: 184665 - DNA, 25 bp, Probe sequence
gcttgcgtctgtgagtatgtctatt

SEQ ID NO: 184666 - DNA, 25 bp, Probe sequence
gcagctttgttaacattattagtgt

SEQ ID NO: 184667 - DNA, 25 bp, Probe sequence
gagtatgtctatttatgttatttct

SEQ ID NO: 184668 - DNA, 25 bp, Probe sequence
gtttatttcatctactatttatcat

SEQ ID NO: 184669 - DNA, 25 bp, Probe sequence
gtattatcttgttaccaattatttt

SEQ ID NO: 184670 - DNA, 25 bp, Probe sequence
gtagaaacatttaaggatatcatcc

SEQ ID NO: 184671 - DNA, 25 bp, Probe sequence
gtctatttatgttatttctatcttt

SEQ ID NO: 184672 - DNA, 25 bp, Probe sequence
ggctgggtaggtattatcttgttac

SEQ ID NO: 184673 - DNA, 25 bp, Probe sequence
ggtgttgcagctttgttaacattat

SEQ ID NO: 184674 - DNA, 25 bp, Probe sequence
ggtacgcttgcgtctgtgagtatgt

SEQ ID NO: 184675 - DNA, 25 bp, Probe sequence
ggatattcatattattcattttctt

SEQ ID NO: 184676 - DNA, 25 bp, Probe sequence
tcatccctttatcatttggagaaga

SEQ ID NO: 184677 - DNA, 25 bp, Probe sequence
taacattattagtgttaccctatgc

SEQ ID NO: 184678 - DNA, 25 bp, Probe sequence
tagctgtcaaagttaaccaaaagtt

SEQ ID NO: 184679 - DNA, 25 bp, Probe sequence
ttgtctatttagtgatgggctgggt

SEQ ID NO: 184680 - DNA, 25 bp, Probe sequence
tattcatattattcattttcttagg

SEQ ID NO: 184681 - DNA, 25 bp, Probe sequence
tattcgcacatcatggatattcata

SEQ ID NO: 184682 - DNA, 25 bp, Probe sequence
ttatttttattcgcacatcatggat

SEQ ID NO: 184683 - DNA, 25 bp, Probe sequence
ttatgttatttctatctttatgatg

SEQ ID NO: 184684 - DNA, 25 bp, Probe sequence
ttctatctttatgatgtttatttca

SEQ ID NO: 184685 - DNA, 25 bp, Probe sequence
atatcggtattcatgcatttaaact

SEQ ID NO: 184686 - DNA, 25 bp, Probe sequence
atggaactagttttgtcacgttaca

SEQ ID NO: 184687 - DNA, 25 bp, Probe sequence
atggcgttaagtatattttcttgaa

SEQ ID NO: 184688 - DNA, 25 bp, Probe sequence
agtgttggatccactatttgcagga

SEQ ID NO: 184689 - DNA, 25 bp, Probe sequence
acaatgctaatatcggtattcatgc

SEQ ID NO: 184690 - DNA, 25 bp, Probe sequence
aaatcaacagggtcgtattatggaa

SEQ ID NO: 184691 - DNA, 25 bp, Probe sequence
aagaaggtaaagatagtgttgcaac

SEQ ID NO: 184692 - DNA, 25 bp, Probe sequence
aatggtggcgtgtttaaatctttag

SEQ ID NO: 184693 - DNA, 25 bp, Probe sequence
aatctttagacaaggcaggatactt

SEQ ID NO: 184694 - DNA, 25 bp, Probe sequence
aattcgaattgttctattttgacat

SEQ ID NO: 184695 - DNA, 25 bp, Probe sequence
cattagatttagattttattgccaa

SEQ ID NO: 184696 - DNA, 25 bp, Probe sequence
gcaggatttacggtagaacatgatt

SEQ ID NO: 184697 - DNA, 25 bp, Probe sequence
gaaggacaatttgcagtacttttga

SEQ ID NO: 184698 - DNA, 25 bp, Probe sequence
gaagcacttgaagagaaggtagcgt

SEQ ID NO: 184699 - DNA, 25 bp, Probe sequence
ggaaacgccgaatggtaatggtggc

SEQ ID NO: 184700 - DNA, 25 bp, Probe sequence
gaacatgattacgatattacttcta

SEQ ID NO: 184701 - DNA, 25 bp, Probe sequence
gaaatgtctaataatggcgttaagt

SEQ ID NO: 184702 - DNA, 25 bp, Probe sequence
gagaaggtagcgtcattagatttag

SEQ ID NO: 184703 - DNA, 25 bp, Probe sequence
gagtattcagaattagatccagaag

SEQ ID NO: 184704 - DNA, 25 bp, Probe sequence
gagtgatgatgagattaagcgttta

SEQ ID NO: 184705 - DNA, 25 bp, Probe sequence
gaggaacaaggacttcaagctatta

SEQ ID NO: 184706 - DNA, 25 bp, Probe sequence
gatgatgtatctgcagtttctgaag

SEQ ID NO: 184707 - DNA, 25 bp, Probe sequence
gatccagaagttgcaaatcaattta

SEQ ID NO: 184708 - DNA, 25 bp, Probe sequence
gataatattgtggcgcttagtgaag

SEQ ID NO: 184709 - DNA, 25 bp, Probe sequence
gattcaaccaaaaccaggagaaagt

SEQ ID NO: 184710 - DNA, 25 bp, Probe sequence
gttctattttgacatatttacttat

SEQ ID NO: 184711 - DNA, 25 bp, Probe sequence
gtatctgcagtttctgaagtgaaat

SEQ ID NO: 184712 - DNA, 25 bp, Probe sequence
gtcacgttacaagttcctagagaag

SEQ ID NO: 184713 - DNA, 25 bp, Probe sequence
ggtcgtattatggaaacgccgaatg

SEQ ID NO: 184714 - DNA, 25 bp, Probe sequence
ggatccactatttgcaggatttacg

SEQ ID NO: 184715 - DNA, 25 bp, Probe sequence
tattacttctaaaacgattcaacca

SEQ ID NO: 184716 - DNA, 25 bp, Probe sequence
tattcatgcatttaaacttggtttt

SEQ ID NO: 184717 - DNA, 25 bp, Probe sequence
ttaccttatcatttagctattaaga

SEQ ID NO: 184718 - DNA, 25 bp, Probe sequence
ttgcagtacttttgatggcaggtgg

SEQ ID NO: 184719 - DNA, 25 bp, Probe sequence
attacccgatatatgtcacactcaa

SEQ ID NO: 184720 - DNA, 25 bp, Probe sequence
atttatcgcaatcatagcattttta

SEQ ID NO: 184721 - DNA, 25 bp, Probe sequence
atctttggacatcgaacctttacgc

SEQ ID NO: 184722 - DNA, 25 bp, Probe sequence
atcgaacctttacgcattcaatatt

SEQ ID NO: 184723 - DNA, 25 bp, Probe sequence
agtgtcacatgttatactagatatg

SEQ ID NO: 184724 - DNA, 25 bp, Probe sequence
agcaactggaatactaagtttttat

SEQ ID NO: 184725 - DNA, 25 bp, Probe sequence
acccgatatatgtcacactcaaagt

SEQ ID NO: 184726 - DNA, 25 bp, Probe sequence
acggttatcattctagcaactctag

SEQ ID NO: 184727 - DNA, 25 bp, Probe sequence
acagtttatgttttatttcagcctt

SEQ ID NO: 184728 - DNA, 25 bp, Probe sequence
aagacaccgattcaatttaaaacag

SEQ ID NO: 184729 - DNA, 25 bp, Probe sequence
caggtggacttgtagacttatcttt

SEQ ID NO: 184730 - DNA, 25 bp, Probe sequence
ctctagctagcttattacccgatat

SEQ ID NO: 184731 - DNA, 25 bp, Probe sequence
cgtcggttacggttatcattctagc

SEQ ID NO: 184732 - DNA, 25 bp, Probe sequence
gctagcttattacccgatatatgtc

SEQ ID NO: 184733 - DNA, 25 bp, Probe sequence
gcaactctagctagcttattacccg

SEQ ID NO: 184734 - DNA, 25 bp, Probe sequence
gattgatctttggacatcgaacctt

SEQ ID NO: 184735 - DNA, 25 bp, Probe sequence
gattggcagaaggtttaaggtaatt

SEQ ID NO: 184736 - DNA, 25 bp, Probe sequence
gttacggttatcattctagcaactc

SEQ ID NO: 184737 - DNA, 25 bp, Probe sequence
gttaccgtttaatgtgaagacaccg

SEQ ID NO: 184738 - DNA, 25 bp, Probe sequence
gttttatttcagcctttcatcaatg

SEQ ID NO: 184739 - DNA, 25 bp, Probe sequence
gtttatgttttatttcagcctttca

SEQ ID NO: 184740 - DNA, 25 bp, Probe sequence
gtcacactcaaagtaagattggcag

SEQ ID NO: 184741 - DNA, 25 bp, Probe sequence
ggagcgctaacaacacaatattttc

SEQ ID NO: 184742 - DNA, 25 bp, Probe sequence
ggacatcgaacctttacgcattcaa

SEQ ID NO: 184743 - DNA, 25 bp, Probe sequence
ggacttgtagacttatctttagcta

SEQ ID NO: 184744 - DNA, 25 bp, Probe sequence
ggcatgctcgttggagcgctaacaa

SEQ ID NO: 184745 - DNA, 25 bp, Probe sequence
tgctcgttggagcgctaacaacaca

SEQ ID NO: 184746 - DNA, 25 bp, Probe sequence
taacaacacaatattttcaaacgga

SEQ ID NO: 184747 - DNA, 25 bp, Probe sequence
tacgcattcaatattatttatcgca

SEQ ID NO: 184748 - DNA, 25 bp, Probe sequence
tatttcagcctttcatcaatgatat

SEQ ID NO: 184749 - DNA, 25 bp, Probe sequence
tattcagacgcctaattattatatg

SEQ ID NO: 184750 - DNA, 25 bp, Probe sequence
tattgcaaattattcagacgcctaa

SEQ ID NO: 184751 - DNA, 25 bp, Probe sequence
ttatccgttaccgtttaatgtgaag

SEQ ID NO: 184752 - DNA, 25 bp, Probe sequence
ttagtttttttgtgagattgatctt

SEQ ID NO: 184753 - DNA, 25 bp, Probe sequence
attttttgctttctatttatcagtg

SEQ ID NO: 184754 - DNA, 25 bp, Probe sequence
atacctgaagcggcacaggcttctc

SEQ ID NO: 184755 - DNA, 25 bp, Probe sequence
atcagtgatagtatcctgcctcgtt

SEQ ID NO: 184756 - DNA, 25 bp, Probe sequence
atgagacctttatttacattgccag

SEQ ID NO: 184757 - DNA, 25 bp, Probe sequence
atgaaacgggtggattattgttctc

SEQ ID NO: 184758 - DNA, 25 bp, Probe sequence
agagatgttgggtcctatttttaga

SEQ ID NO: 184759 - DNA, 25 bp, Probe sequence
agatgtattaggtggcgtaatgcca

SEQ ID NO: 184760 - DNA, 25 bp, Probe sequence
aagtgcgcgtactgaggcattgcca

SEQ ID NO: 184761 - DNA, 25 bp, Probe sequence
acttgtctgaagtaggtggcgtcat

SEQ ID NO: 184762 - DNA, 25 bp, Probe sequence
aaggaggtacctgaaagtgcgcgta

SEQ ID NO: 184763 - DNA, 25 bp, Probe sequence
aattatttctttgatggcacatctt

SEQ ID NO: 184764 - DNA, 25 bp, Probe sequence
ctcgttttgttattggggcacttag

SEQ ID NO: 184765 - DNA, 25 bp, Probe sequence
gcctcgttgcagcagtcattatgcc

SEQ ID NO: 184766 - DNA, 25 bp, Probe sequence
gcgtaatgccatttttaattgtgac

SEQ ID NO: 184767 - DNA, 25 bp, Probe sequence
gcatcatttattggagacggaactg

SEQ ID NO: 184768 - DNA, 25 bp, Probe sequence
gaacaatcattacactaccaattat

SEQ ID NO: 184769 - DNA, 25 bp, Probe sequence
gaaagacggcattgagacatggctt

SEQ ID NO: 184770 - DNA, 25 bp, Probe sequence
gacatggctttgatactgcaacaga

SEQ ID NO: 184771 - DNA, 25 bp, Probe sequence
gacgttcgacggtagataatttagc

SEQ ID NO: 184772 - DNA, 25 bp, Probe sequence
gagtattggtactattgctaccatt

SEQ ID NO: 184773 - DNA, 25 bp, Probe sequence
gtagtttctatcacctttgcaattg

SEQ ID NO: 184774 - DNA, 25 bp, Probe sequence
gggcacttagtatatcgcagttaat

SEQ ID NO: 184775 - DNA, 25 bp, Probe sequence
ggtgaaggatattattctcgtcgtg

SEQ ID NO: 184776 - DNA, 25 bp, Probe sequence
ggatgacatttttacgaattggttc

SEQ ID NO: 184777 - DNA, 25 bp, Probe sequence
ggcacaggcttctcaaacgattatt

SEQ ID NO: 184778 - DNA, 25 bp, Probe sequence
ggcaacagttatttcaacgacattt

SEQ ID NO: 184779 - DNA, 25 bp, Probe sequence
tgctaccattattgcgaactacacg

SEQ ID NO: 184780 - DNA, 25 bp, Probe sequence
tcctatttttagaccggttatgaga

SEQ ID NO: 184781 - DNA, 25 bp, Probe sequence
tctcgtcgtgaggcaacagttattt

SEQ ID NO: 184782 - DNA, 25 bp, Probe sequence
tacattgccaggacgttcgacggta

SEQ ID NO: 184783 - DNA, 25 bp, Probe sequence
taaaattcctgatgagtatgctaag

SEQ ID NO: 184784 - DNA, 25 bp, Probe sequence
tacttggttcgaagattcctgtaag

SEQ ID NO: 184785 - DNA, 25 bp, Probe sequence
taggtggcgtcatacttggttcgaa

SEQ ID NO: 184786 - DNA, 25 bp, Probe sequence
tttgccgatatgtttttaccttcta

SEQ ID NO: 184787 - DNA, 25 bp, Probe sequence
attggtgctatattgttaacatttg

SEQ ID NO: 184788 - DNA, 25 bp, Probe sequence
attcatccgccactggatattcctg

SEQ ID NO: 184789 - DNA, 25 bp, Probe sequence
atattagcaggatccgcaatttcag

SEQ ID NO: 184790 - DNA, 25 bp, Probe sequence
atggtttagcccgtggcattcatcc

SEQ ID NO: 184791 - DNA, 25 bp, Probe sequence
aggttcaaagcttgccttaattggt

SEQ ID NO: 184792 - DNA, 25 bp, Probe sequence
agctttttaggattaattgcacctc

SEQ ID NO: 184793 - DNA, 25 bp, Probe sequence
aaagcttgccttaattggtttagca

SEQ ID NO: 184794 - DNA, 25 bp, Probe sequence
aatccactggaagcaaacaaagcgc

SEQ ID NO: 184795 - DNA, 25 bp, Probe sequence
aatccttttaattgtgagtatattc

SEQ ID NO: 184796 - DNA, 25 bp, Probe sequence
caggtgcaattatacaagctgtaat

SEQ ID NO: 184797 - DNA, 25 bp, Probe sequence
cattacacgttattatcatgtcggg

SEQ ID NO: 184798 - DNA, 25 bp, Probe sequence
ctaaaggtgccagtttagctgctgt

SEQ ID NO: 184799 - DNA, 25 bp, Probe sequence
cgcaatttcagttgtcggtggtatt

SEQ ID NO: 184800 - DNA, 25 bp, Probe sequence
ccgttagcctcacctgatgttatag

SEQ ID NO: 184801 - DNA, 25 bp, Probe sequence
gctgtaataagaaacccgttagcct

SEQ ID NO: 184802 - DNA, 25 bp, Probe sequence
gctgttgcaaccgcactcggtttaa

SEQ ID NO: 184803 - DNA, 25 bp, Probe sequence
gcaattatcggtgcaccatacttct

SEQ ID NO: 184804 - DNA, 25 bp, Probe sequence
gttgtcggtggtattagctttttag

SEQ ID NO: 184805 - DNA, 25 bp, Probe sequence
gatgctattaagggaatctttacac

SEQ ID NO: 184806 - DNA, 25 bp, Probe sequence
gttatagtttaatcacaatcctttt

SEQ ID NO: 184807 - DNA, 25 bp, Probe sequence
gtagtctatatggacatgatatgtc

SEQ ID NO: 184808 - DNA, 25 bp, Probe sequence
gtacggcgattgtgcagttcttatt

SEQ ID NO: 184809 - DNA, 25 bp, Probe sequence
ggggttatcattgcaattatcggtg

SEQ ID NO: 184810 - DNA, 25 bp, Probe sequence
ggtgcaccatacttcttaatattat

SEQ ID NO: 184811 - DNA, 25 bp, Probe sequence
ggtgcctttgcagtaagtttatttt

SEQ ID NO: 184812 - DNA, 25 bp, Probe sequence
tcatgtcggggttaattggtgctat

SEQ ID NO: 184813 - DNA, 25 bp, Probe sequence
taattgcacctcatattgcgagaca

SEQ ID NO: 184814 - DNA, 25 bp, Probe sequence
taacgataccaatcatcattttatt

SEQ ID NO: 184815 - DNA, 25 bp, Probe sequence
tagcaataggcgcaatatgtacggc

SEQ ID NO: 184816 - DNA, 25 bp, Probe sequence
tatgtgtagggtctgtcatgattca

SEQ ID NO: 184817 - DNA, 25 bp, Probe sequence
taggtatttctaaaggtgccagttt

SEQ ID NO: 184818 - DNA, 25 bp, Probe sequence
taggtgatgctgttgcaaccgcact

SEQ ID NO: 184819 - DNA, 25 bp, Probe sequence
taggttcattcttaggtgcctttgc

SEQ ID NO: 184820 - DNA, 25 bp, Probe sequence
tatttatactatattaccttggttt

SEQ ID NO: 184821 - DNA, 25 bp, Probe sequence
atcaactaaagatactatttcggta

SEQ ID NO: 184822 - DNA, 25 bp, Probe sequence
actcatttgcagatgcattagcagc

SEQ ID NO: 184823 - DNA, 25 bp, Probe sequence
acaaaattgcaccaacattatcatt

SEQ ID NO: 184824 - DNA, 25 bp, Probe sequence
aaagctggtttattagcacatccaa

SEQ ID NO: 184825 - DNA, 25 bp, Probe sequence
aaacgtatcattaaaccagttagag

SEQ ID NO: 184826 - DNA, 25 bp, Probe sequence
aaaaagattctgctgaattcaagaa

SEQ ID NO: 184827 - DNA, 25 bp, Probe sequence
aaaaccggatttaattatcgctgat

SEQ ID NO: 184828 - DNA, 25 bp, Probe sequence
aacgtatcgttgtattagagtactc

SEQ ID NO: 184829 - DNA, 25 bp, Probe sequence
aagaaggcgaaaaacgtcttgctga

SEQ ID NO: 184830 - DNA, 25 bp, Probe sequence
gcttgtggtaatacggataattcaa

SEQ ID NO: 184831 - DNA, 25 bp, Probe sequence
gaaatggctaaagaacttgttgaat

SEQ ID NO: 184832 - DNA, 25 bp, Probe sequence
gaaatcaaaaagtgcttccagcagt

SEQ ID NO: 184833 - DNA, 25 bp, Probe sequence
gaccgtgatgtttgggcaagatctc

SEQ ID NO: 184834 - DNA, 25 bp, Probe sequence
gatgtttgggcaagatctcgtggct

SEQ ID NO: 184835 - DNA, 25 bp, Probe sequence
gatctcgtggcttaatttcttctga

SEQ ID NO: 184836 - DNA, 25 bp, Probe sequence
gatgcattagcagcattagacgtta

SEQ ID NO: 184837 - DNA, 25 bp, Probe sequence
gatattgttgaccgtgatgtttggg

SEQ ID NO: 184838 - DNA, 25 bp, Probe sequence
gttggtattgctgatgatggtaaga

SEQ ID NO: 184839 - DNA, 25 bp, Probe sequence
gttgcagcttgtggtaatacggata

SEQ ID NO: 184840 - DNA, 25 bp, Probe sequence
gtttattagcacatccaaactattc

SEQ ID NO: 184841 - DNA, 25 bp, Probe sequence
gtttgggcaagatctcgtggcttaa

SEQ ID NO: 184842 - DNA, 25 bp, Probe sequence
gtatattgggattaatagttgcctt

SEQ ID NO: 184843 - DNA, 25 bp, Probe sequence
gtacacgtaaacagccaaacttaga

SEQ ID NO: 184844 - DNA, 25 bp, Probe sequence
gggattatacttctgtaggtacacg

SEQ ID NO: 184845 - DNA, 25 bp, Probe sequence
gggcaagatctcgtggcttaatttc

SEQ ID NO: 184846 - DNA, 25 bp, Probe sequence
tgttgaccgtgatgtttgggcaaga

SEQ ID NO: 184847 - DNA, 25 bp, Probe sequence
tgaaaggaccttacttacaattaga

SEQ ID NO: 184848 - DNA, 25 bp, Probe sequence
tgcaccaacattatcattaaagagt

SEQ ID NO: 184849 - DNA, 25 bp, Probe sequence
tcgtggcttaatttcttctgaagaa

SEQ ID NO: 184850 - DNA, 25 bp, Probe sequence
taaaagtacctaaagatgcaaaacg

SEQ ID NO: 184851 - DNA, 25 bp, Probe sequence
tagagtactcatttgcagatgcatt

SEQ ID NO: 184852 - DNA, 25 bp, Probe sequence
taggtacacgtaaacagccaaactt

SEQ ID NO: 184853 - DNA, 25 bp, Probe sequence
ttttagttgcagcttgtggtaatac

SEQ ID NO: 184854 - DNA, 25 bp, Probe sequence
ttatcgctgatagcagtagacataa

SEQ ID NO: 184855 - DNA, 25 bp, Probe sequence
attcaaagattgatacgctacttca

SEQ ID NO: 184856 - DNA, 25 bp, Probe sequence
atttcaggtggtaattcgagcatgt

SEQ ID NO: 184857 - DNA, 25 bp, Probe sequence
atttcacctatggatcagcatatca

SEQ ID NO: 184858 - DNA, 25 bp, Probe sequence
atatcaatattttaggcgcttcgag

SEQ ID NO: 184859 - DNA, 25 bp, Probe sequence
ataacgccaaagtacttcaaacagt

SEQ ID NO: 184860 - DNA, 25 bp, Probe sequence
atcatgttgcagaatccagattgga

SEQ ID NO: 184861 - DNA, 25 bp, Probe sequence
atgcgattacattggaggctgagat

SEQ ID NO: 184862 - DNA, 25 bp, Probe sequence
aaattttgatgtgaaatctcctgct

SEQ ID NO: 184863 - DNA, 25 bp, Probe sequence
aaacagaattatctaccatacatca

SEQ ID NO: 184864 - DNA, 25 bp, Probe sequence
aacctcgagttaatacacaaacgca

SEQ ID NO: 184865 - DNA, 25 bp, Probe sequence
aagcgttaggtatcaatcatgttgc

SEQ ID NO: 184866 - DNA, 25 bp, Probe sequence
aagtcgataatatttcacctatgga

SEQ ID NO: 184867 - DNA, 25 bp, Probe sequence
aattcgagcatgttaccacaacttt

SEQ ID NO: 184868 - DNA, 25 bp, Probe sequence
aattgcgaataggtgaaacgttgtt

SEQ ID NO: 184869 - DNA, 25 bp, Probe sequence
gcatgttaccacaacttttatataa

SEQ ID NO: 184870 - DNA, 25 bp, Probe sequence
gcagatcaggatttaacatatacgt

SEQ ID NO: 184871 - DNA, 25 bp, Probe sequence
gaagcactttctcattcgatgtata

SEQ ID NO: 184872 - DNA, 25 bp, Probe sequence
gaaacgttgtttagaggtgttgata

SEQ ID NO: 184873 - DNA, 25 bp, Probe sequence
gagtatccaaacagaattatctacc

SEQ ID NO: 184874 - DNA, 25 bp, Probe sequence
gatggccgtgaaggtgttctgactt

SEQ ID NO: 184875 - DNA, 25 bp, Probe sequence
gatgatatctttatgattaatcgat

SEQ ID NO: 184876 - DNA, 25 bp, Probe sequence
gtacgcctgccaaaaaagagatttc

SEQ ID NO: 184877 - DNA, 25 bp, Probe sequence
ggtagattggaaagatggccgtgaa

SEQ ID NO: 184878 - DNA, 25 bp, Probe sequence
ggtgttctgacttatgatgttttag

SEQ ID NO: 184879 - DNA, 25 bp, Probe sequence
ggtttagcattcaattttatgtgtt

SEQ ID NO: 184880 - DNA, 25 bp, Probe sequence
ggcgcttcgagtgatcatttaatgc

SEQ ID NO: 184881 - DNA, 25 bp, Probe sequence
tgatacgctacttcaaaattttgat

SEQ ID NO: 184882 - DNA, 25 bp, Probe sequence
tcgattcgtctcagctgttgaaaga

SEQ ID NO: 184883 - DNA, 25 bp, Probe sequence
tatacgttattgcgtacgcctgcca

SEQ ID NO: 184884 - DNA, 25 bp, Probe sequence
taatacacaaacgcatgaatcattc

SEQ ID NO: 184885 - DNA, 25 bp, Probe sequence
taaatggtcaaggacactatcaagt

SEQ ID NO: 184886 - DNA, 25 bp, Probe sequence
tagctggtgaccgtacaattgtaga

SEQ ID NO: 184887 - DNA, 25 bp, Probe sequence
tattgcgtacgcctgccaaaaaaga

SEQ ID NO: 184888 - DNA, 25 bp, Probe sequence
ttaatcgattcgtctcagctgttga

SEQ ID NO: 184889 - DNA, 25 bp, Probe sequence
gtatttaccccgagcaaacatttat

SEQ ID NO: 184890 - DNA, 25 bp, Probe sequence
atatcgtgtaattaacgccattatt

SEQ ID NO: 184891 - DNA, 25 bp, Probe sequence
agtgccgttagaacagtctcaactg

SEQ ID NO: 184892 - DNA, 25 bp, Probe sequence
acgagcatatgcacctgagtttgaa

SEQ ID NO: 184893 - DNA, 25 bp, Probe sequence
actacaatcagattcgtgtgttttt

SEQ ID NO: 184894 - DNA, 25 bp, Probe sequence
acttggggccacattttgacattca

SEQ ID NO: 184895 - DNA, 25 bp, Probe sequence
acagtagtgaacttggggccacatt

SEQ ID NO: 184896 - DNA, 25 bp, Probe sequence
aaagttgctatggaaccgttcggtg

SEQ ID NO: 184897 - DNA, 25 bp, Probe sequence
aacagtagttagtgcaagtctagtt

SEQ ID NO: 184898 - DNA, 25 bp, Probe sequence
taccagaggggcatccaacacaccc

SEQ ID NO: 184899 - DNA, 25 bp, Probe sequence
aagcacacatgcaaaatacagtagt

SEQ ID NO: 184900 - DNA, 25 bp, Probe sequence
caattactgtcaaagcgttgttaaa

SEQ ID NO: 184901 - DNA, 25 bp, Probe sequence
catgttaagttgcccgtcgatgcac

SEQ ID NO: 184902 - DNA, 25 bp, Probe sequence
catccttggcaatatgatcatacga

SEQ ID NO: 184903 - DNA, 25 bp, Probe sequence
catataagcaaatgtctcacagaca

SEQ ID NO: 184904 - DNA, 25 bp, Probe sequence
gcgactacgcgaagagttaatacac

SEQ ID NO: 184905 - DNA, 25 bp, Probe sequence
gcaaaattccaacatgctgttattc

SEQ ID NO: 184906 - DNA, 25 bp, Probe sequence
gaatcatgactttgatatccctatt

SEQ ID NO: 184907 - DNA, 25 bp, Probe sequence
gaaccgttcggtgaatatgcaaatg

SEQ ID NO: 184908 - DNA, 25 bp, Probe sequence
gaaacattacaacatcgtgtatcag

SEQ ID NO: 184909 - DNA, 25 bp, Probe sequence
gaaatccctttgcaaattatgatga

SEQ ID NO: 184910 - DNA, 25 bp, Probe sequence
gagcgattttagtacatccttggca

SEQ ID NO: 184911 - DNA, 25 bp, Probe sequence
gttatcgtggatagttacttagagt

SEQ ID NO: 184912 - DNA, 25 bp, Probe sequence
gtattacgacatttattgaacgata

SEQ ID NO: 184913 - DNA, 25 bp, Probe sequence
gtatcatatgcatgtgttgactatt

SEQ ID NO: 184914 - DNA, 25 bp, Probe sequence
gtctcaactgtgactactgtagatg

SEQ ID NO: 184915 - DNA, 25 bp, Probe sequence
tggcagaattaatccatcattttaa

SEQ ID NO: 184916 - DNA, 25 bp, Probe sequence
tgcccgtcgatgcacaagcaacaag

SEQ ID NO: 184917 - DNA, 25 bp, Probe sequence
tccaacgccgtttacaatactttca

SEQ ID NO: 184918 - DNA, 25 bp, Probe sequence
tcccgcctttaattgcttttattca

SEQ ID NO: 184919 - DNA, 25 bp, Probe sequence
tcaagcattaatcccgcctttaatt

SEQ ID NO: 184920 - DNA, 25 bp, Probe sequence
tacacagtcgagatagtttagttga

SEQ ID NO: 184921 - DNA, 25 bp, Probe sequence
tagtacagcaagtagtagcgcatgc

SEQ ID NO: 184922 - DNA, 25 bp, Probe sequence
tatccctatttcagagcgactacgc

SEQ ID NO: 184923 - DNA, 25 bp, Probe sequence
attgtcaatcaaggcgttgaaggaa

SEQ ID NO: 184924 - DNA, 25 bp, Probe sequence
atttgcagaagttattgaaagaaag

SEQ ID NO: 184925 - DNA, 25 bp, Probe sequence
atcaaggcgttgaaggaagaaacga

SEQ ID NO: 184926 - DNA, 25 bp, Probe sequence
aggcgttgaaggaagaaacgagaag

SEQ ID NO: 184927 - DNA, 25 bp, Probe sequence
agaagttattgaaagaaagcgattg

SEQ ID NO: 184928 - DNA, 25 bp, Probe sequence
acgcttgactcatttgcagaagtta

SEQ ID NO: 184929 - DNA, 25 bp, Probe sequence
aatcaaggcgttgaaggaagaaacg

SEQ ID NO: 184930 - DNA, 25 bp, Probe sequence
actcatttgcagaagttattgaaag

SEQ ID NO: 184931 - DNA, 25 bp, Probe sequence
aaacgcttgactcatttgcagaagt

SEQ ID NO: 184932 - DNA, 25 bp, Probe sequence
aacgcttgactcatttgcagaagtt

SEQ ID NO: 184933 - DNA, 25 bp, Probe sequence
caatcaaggcgttgaaggaagaaac

SEQ ID NO: 184934 - DNA, 25 bp, Probe sequence
caaggcgttgaaggaagaaacgaga

SEQ ID NO: 184935 - DNA, 25 bp, Probe sequence
caaacgcttgactcatttgcagaag

SEQ ID NO: 184936 - DNA, 25 bp, Probe sequence
cagaagttattgaaagaaagcgatt

SEQ ID NO: 184937 - DNA, 25 bp, Probe sequence
catttgcagaagttattgaaagaaa

SEQ ID NO: 184938 - DNA, 25 bp, Probe sequence
cttgactcatttgcagaagttattg

SEQ ID NO: 184939 - DNA, 25 bp, Probe sequence
ctcatttgcagaagttattgaaaga

SEQ ID NO: 184940 - DNA, 25 bp, Probe sequence
cgcttgactcatttgcagaagttat

SEQ ID NO: 184941 - DNA, 25 bp, Probe sequence
gcttgactcatttgcagaagttatt

SEQ ID NO: 184942 - DNA, 25 bp, Probe sequence
gcagaagttattgaaagaaagcgat

SEQ ID NO: 184943 - DNA, 25 bp, Probe sequence
gaagttattgaaagaaagcgattgt

SEQ ID NO: 184944 - DNA, 25 bp, Probe sequence
gactcatttgcagaagttattgaaa

SEQ ID NO: 184945 - DNA, 25 bp, Probe sequence
gattgtcaatcaaggcgttgaagga

SEQ ID NO: 184946 - DNA, 25 bp, Probe sequence
gtcaatcaaggcgttgaaggaagaa

SEQ ID NO: 184947 - DNA, 25 bp, Probe sequence
tgtcaatcaaggcgttgaaggaaga

SEQ ID NO: 184948 - DNA, 25 bp, Probe sequence
tgactcatttgcagaagttattgaa

SEQ ID NO: 184949 - DNA, 25 bp, Probe sequence
tgcagaagttattgaaagaaagcga

SEQ ID NO: 184950 - DNA, 25 bp, Probe sequence
tcatttgcagaagttattgaaagaa

SEQ ID NO: 184951 - DNA, 25 bp, Probe sequence
tcaatcaaggcgttgaaggaagaaa

SEQ ID NO: 184952 - DNA, 25 bp, Probe sequence
tcaaggcgttgaaggaagaaacgag

SEQ ID NO: 184953 - DNA, 25 bp, Probe sequence
tttgcagaagttattgaaagaaagc

SEQ ID NO: 184954 - DNA, 25 bp, Probe sequence
ttgcagaagttattgaaagaaagcg

SEQ ID NO: 184955 - DNA, 25 bp, Probe sequence
ttgactcatttgcagaagttattga

SEQ ID NO: 184956 - DNA, 25 bp, Probe sequence
ttgtcaatcaaggcgttgaaggaag

SEQ ID NO: 184957 - DNA, 25 bp, Probe sequence
attagcagtctatcatgcgccaaca

SEQ ID NO: 184958 - DNA, 25 bp, Probe sequence
attactaagtgtgtgggcaggggca

SEQ ID NO: 184959 - DNA, 25 bp, Probe sequence
attattgcaacgctagttttaccta

SEQ ID NO: 184960 - DNA, 25 bp, Probe sequence
acgtatagtttcactgcaattccaa

SEQ ID NO: 184961 - DNA, 25 bp, Probe sequence
acacaagctgtatcatttcattcat

SEQ ID NO: 184962 - DNA, 25 bp, Probe sequence
catatacgacacttttaccagtttt

SEQ ID NO: 184963 - DNA, 25 bp, Probe sequence
gcctgccattgctggtgtcatatta

SEQ ID NO: 184964 - DNA, 25 bp, Probe sequence
gggcacgtacgacaaatcgcgttta

SEQ ID NO: 184965 - DNA, 25 bp, Probe sequence
gcagacttgtaccaatattattact

SEQ ID NO: 184966 - DNA, 25 bp, Probe sequence
gcaattccaattagcgtcattatta

SEQ ID NO: 184967 - DNA, 25 bp, Probe sequence
gaattacaatttcatcatcattttt

SEQ ID NO: 184968 - DNA, 25 bp, Probe sequence
gaaacacctttaagacaagcaatct

SEQ ID NO: 184969 - DNA, 25 bp, Probe sequence
gaaatatttggtatcgctatgacga

SEQ ID NO: 184970 - DNA, 25 bp, Probe sequence
gacaagcaatcttaccagatttatc

SEQ ID NO: 184971 - DNA, 25 bp, Probe sequence
gtgtgggcaggggcaattgccgata

SEQ ID NO: 184972 - DNA, 25 bp, Probe sequence
gatgtgtgccattggtggtattatt

SEQ ID NO: 184973 - DNA, 25 bp, Probe sequence
gataaaatatctactacacaagctg

SEQ ID NO: 184974 - DNA, 25 bp, Probe sequence
gatagaggtatgattccattgggaa

SEQ ID NO: 184975 - DNA, 25 bp, Probe sequence
gtattacattgattgggttatttag

SEQ ID NO: 184976 - DNA, 25 bp, Probe sequence
gtatcatttcattcattcatcatta

SEQ ID NO: 184977 - DNA, 25 bp, Probe sequence
gtgcagatgtgtttggcattgttag

SEQ ID NO: 184978 - DNA, 25 bp, Probe sequence
ggggattgtcaatttttgcagactt

SEQ ID NO: 184979 - DNA, 25 bp, Probe sequence
ggttatttagtcaatgggcacgtac

SEQ ID NO: 184980 - DNA, 25 bp, Probe sequence
tggcgacaggtttttcatatacgac

SEQ ID NO: 184981 - DNA, 25 bp, Probe sequence
tgtacttaccacttatcataacgca

SEQ ID NO: 184982 - DNA, 25 bp, Probe sequence
tgctttgttaggtgtggtatttcac

SEQ ID NO: 184983 - DNA, 25 bp, Probe sequence
tgcgccaacaacatttcttgcacag

SEQ ID NO: 184984 - DNA, 25 bp, Probe sequence
tcgctatgacgatgtgtgccattgg

SEQ ID NO: 184985 - DNA, 25 bp, Probe sequence
taacgcagtttatctggggattgtc

SEQ ID NO: 184986 - DNA, 25 bp, Probe sequence
taaagggcgattgctgagaattaca

SEQ ID NO: 184987 - DNA, 25 bp, Probe sequence
tagcagttcttttctactatttcta

SEQ ID NO: 184988 - DNA, 25 bp, Probe sequence
ttcatcattaatatttgtcgttcaa

SEQ ID NO: 184989 - DNA, 25 bp, Probe sequence
ttgtcgttcaatagggcctgccatt

SEQ ID NO: 184990 - DNA, 25 bp, Probe sequence
ttgtcatcatgttcatttgtattac

SEQ ID NO: 184991 - DNA, 25 bp, Probe sequence
attcgctcaatcataggtccactta

SEQ ID NO: 184992 - DNA, 25 bp, Probe sequence
attactgcatggctaccgccaatca

SEQ ID NO: 184993 - DNA, 25 bp, Probe sequence
atttgtcgtgactgcaattactgca

SEQ ID NO: 184994 - DNA, 25 bp, Probe sequence
atacctgtctggaaactcatcatca

SEQ ID NO: 184995 - DNA, 25 bp, Probe sequence
atcattctaatgcacaacaaccaag

SEQ ID NO: 184996 - DNA, 25 bp, Probe sequence
acaccattcattgattggcttggct

SEQ ID NO: 184997 - DNA, 25 bp, Probe sequence
aagtgcatggcgtttttttgtctat

SEQ ID NO: 184998 - DNA, 25 bp, Probe sequence
cagtaggtgcaattgcgctttcttt

SEQ ID NO: 184999 - DNA, 25 bp, Probe sequence
ctatccatttatttatattttccca

SEQ ID NO: 185000 - DNA, 25 bp, Probe sequence
cgagaagccacgattattgcgactg

SEQ ID NO: 185001 - DNA, 25 bp, Probe sequence
gccctatgttgcactgattatgatt

SEQ ID NO: 185002 - DNA, 25 bp, Probe sequence
gcgtatcagccattatctttttctc

SEQ ID NO: 185003 - DNA, 25 bp, Probe sequence
gcttcgtttgtcggcagttattcct

SEQ ID NO: 185004 - DNA, 25 bp, Probe sequence
gacttcaatcacaaacttggtcatt

SEQ ID NO: 185005 - DNA, 25 bp, Probe sequence
gagacgtacttttatgacttcaatc

SEQ ID NO: 185006 - DNA, 25 bp, Probe sequence
gtccacttatgccctatgttgcact

SEQ ID NO: 185007 - DNA, 25 bp, Probe sequence
gttcatctagccattcgctcaatca

SEQ ID NO: 185008 - DNA, 25 bp, Probe sequence
gtttctaccatctttgttagtaact

SEQ ID NO: 185009 - DNA, 25 bp, Probe sequence
gtagcgaactatacaccattcattg

SEQ ID NO: 185010 - DNA, 25 bp, Probe sequence
gggcatactatgtttctttattcct

SEQ ID NO: 185011 - DNA, 25 bp, Probe sequence
ggtaacaacactattttcgtcgatc

SEQ ID NO: 185012 - DNA, 25 bp, Probe sequence
tggagcctattatgagacctatttt

SEQ ID NO: 185013 - DNA, 25 bp, Probe sequence
tgtcggcagttattccttaggatta

SEQ ID NO: 185014 - DNA, 25 bp, Probe sequence
tgagtactaaatttgtcgtcggtgt

SEQ ID NO: 185015 - DNA, 25 bp, Probe sequence
tcatcatttggtttttacgcgtggc

SEQ ID NO: 185016 - DNA, 25 bp, Probe sequence
tcgtcggtgtagtaagcgtatcagc

SEQ ID NO: 185017 - DNA, 25 bp, Probe sequence
taagtatcttaattccagtaggtgc

SEQ ID NO: 185018 - DNA, 25 bp, Probe sequence
taactttagtcatcacatttgtcgt

SEQ ID NO: 185019 - DNA, 25 bp, Probe sequence
tagtgccatgtatactagcaactga

SEQ ID NO: 185020 - DNA, 25 bp, Probe sequence
tatgtttctttattccttttacgat

SEQ ID NO: 185021 - DNA, 25 bp, Probe sequence
tatctttttctcagcattagtgcca

SEQ ID NO: 185022 - DNA, 25 bp, Probe sequence
tattttcccaattgctgatcaggct

SEQ ID NO: 185023 - DNA, 25 bp, Probe sequence
ttcgtcgatcatgttcatctagcca

SEQ ID NO: 185024 - DNA, 25 bp, Probe sequence
ttgtcggtgtttatatggagcctat

SEQ ID NO: 185025 - DNA, 25 bp, Probe sequence
attgctggtatcgctgcacgtgaag

SEQ ID NO: 185026 - DNA, 25 bp, Probe sequence
atcttccgtaaagtaactgaattag

SEQ ID NO: 185027 - DNA, 25 bp, Probe sequence
atcgctgcacgtgaagttaaaggta

SEQ ID NO: 185028 - DNA, 25 bp, Probe sequence
aggtggcttaactgatacattcact

SEQ ID NO: 185029 - DNA, 25 bp, Probe sequence
agaaagagaagagcgtcaaaaacaa

SEQ ID NO: 185030 - DNA, 25 bp, Probe sequence
acgacaatcaaactggtgttaacga

SEQ ID NO: 185031 - DNA, 25 bp, Probe sequence
aaattgctggtatcgctgcacgtga

SEQ ID NO: 185032 - DNA, 25 bp, Probe sequence
aaaggtggcttaactgatacattca

SEQ ID NO: 185033 - DNA, 25 bp, Probe sequence
aaaaattgctggtatcgctgcacgt

SEQ ID NO: 185034 - DNA, 25 bp, Probe sequence
aacaagctgctgtagacttaaaagt

SEQ ID NO: 185035 - DNA, 25 bp, Probe sequence
aagctgctgtagacttaaaagtaat

SEQ ID NO: 185036 - DNA, 25 bp, Probe sequence
aaggtgtatctgttgaagttggtga

SEQ ID NO: 185037 - DNA, 25 bp, Probe sequence
aattgctggtatcgctgcacgtgaa

SEQ ID NO: 185038 - DNA, 25 bp, Probe sequence
caagcatacgacaatcaaactggtg

SEQ ID NO: 185039 - DNA, 25 bp, Probe sequence
cattcactaatgcattctcaagtgg

SEQ ID NO: 185040 - DNA, 25 bp, Probe sequence
ctggtatcgctgcacgtgaagttaa

SEQ ID NO: 185041 - DNA, 25 bp, Probe sequence
gctggtatcgctgcacgtgaagtta

SEQ ID NO: 185042 - DNA, 25 bp, Probe sequence
gctgcacgtgaagttaaaggtatct

SEQ ID NO: 185043 - DNA, 25 bp, Probe sequence
gcttaactgatacattcactaatgc

SEQ ID NO: 185044 - DNA, 25 bp, Probe sequence
gcatacgacaatcaaactggtgtta

SEQ ID NO: 185045 - DNA, 25 bp, Probe sequence
gcacgtgaagttaaaggtatcttag

SEQ ID NO: 185046 - DNA, 25 bp, Probe sequence
gcaaaacaagcatacgacaatcaaa

SEQ ID NO: 185047 - DNA, 25 bp, Probe sequence
gaagttggtgaaaaacaagctgctg

SEQ ID NO: 185048 - DNA, 25 bp, Probe sequence
gaagttgttgaaaaaattgctggta

SEQ ID NO: 185049 - DNA, 25 bp, Probe sequence
gaacaagttaaatatattactggtt

SEQ ID NO: 185050 - DNA, 25 bp, Probe sequence
gaaaaacaagctgctgtagacttaa

SEQ ID NO: 185051 - DNA, 25 bp, Probe sequence
gaaaacaataaccaagaaagacaag

SEQ ID NO: 185052 - DNA, 25 bp, Probe sequence
gacaatcaaactggtgttaacgaaa

SEQ ID NO: 185053 - DNA, 25 bp, Probe sequence
gatacattcactaatgcattctcaa

SEQ ID NO: 185054 - DNA, 25 bp, Probe sequence
gtggcttaactgatacattcactaa

SEQ ID NO: 185055 - DNA, 25 bp, Probe sequence
ggtgtatctgttgaagttggtgaaa

SEQ ID NO: 185056 - DNA, 25 bp, Probe sequence
ggtatcgctgcacgtgaagttaaag

SEQ ID NO: 185057 - DNA, 25 bp, Probe sequence
tacattcactaatgcattctcaagt

SEQ ID NO: 185058 - DNA, 25 bp, Probe sequence
ttgctggtatcgctgcacgtgaagt

SEQ ID NO: 185059 - DNA, 25 bp, Probe sequence
attaatcgcgatattattcttaacg

SEQ ID NO: 185060 - DNA, 25 bp, Probe sequence
atcataaccaaaacggacaagactc

SEQ ID NO: 185061 - DNA, 25 bp, Probe sequence
atcgcgatattattcttaacgttag

SEQ ID NO: 185062 - DNA, 25 bp, Probe sequence
agcgtttctattaatcgcgatatta

SEQ ID NO: 185063 - DNA, 25 bp, Probe sequence
accaaaacggacaagactctacaca

SEQ ID NO: 185064 - DNA, 25 bp, Probe sequence
acggacaagactctacacaacaagt

SEQ ID NO: 185065 - DNA, 25 bp, Probe sequence
aacggacaagactctacacaacaag

SEQ ID NO: 185066 - DNA, 25 bp, Probe sequence
aaacggacaagactctacacaacaa

SEQ ID NO: 185067 - DNA, 25 bp, Probe sequence
aaaacggacaagactctacacaaca

SEQ ID NO: 185068 - DNA, 25 bp, Probe sequence
aatcgcgatattattcttaacgtta

SEQ ID NO: 185069 - DNA, 25 bp, Probe sequence
aattggtgtaggtattgggtatatg

SEQ ID NO: 185070 - DNA, 25 bp, Probe sequence
caagactctacacaacaagtgatta

SEQ ID NO: 185071 - DNA, 25 bp, Probe sequence
caaaacggacaagactctacacaac

SEQ ID NO: 185072 - DNA, 25 bp, Probe sequence
catcgttttatgtttaattggtgta

SEQ ID NO: 185073 - DNA, 25 bp, Probe sequence
cggacaagactctacacaacaagtg

SEQ ID NO: 185074 - DNA, 25 bp, Probe sequence
gcgatattattcttaacgttaggtt

SEQ ID NO: 185075 - DNA, 25 bp, Probe sequence
gcgtttctattaatcgcgatattat

SEQ ID NO: 185076 - DNA, 25 bp, Probe sequence
gctaacaatcataaccaaaacggac

SEQ ID NO: 185077 - DNA, 25 bp, Probe sequence
gaaagaccgtaagcaagattttatg

SEQ ID NO: 185078 - DNA, 25 bp, Probe sequence
gacaagactctacacaacaagtgat

SEQ ID NO: 185079 - DNA, 25 bp, Probe sequence
gaccgtaagcaagattttatgaatt

SEQ ID NO: 185080 - DNA, 25 bp, Probe sequence
gtttctattaatcgcgatattattc

SEQ ID NO: 185081 - DNA, 25 bp, Probe sequence
gtatttaaatggagaatcgttggtt

SEQ ID NO: 185082 - DNA, 25 bp, Probe sequence
gtaagcaagattttatgaatttttt

SEQ ID NO: 185083 - DNA, 25 bp, Probe sequence
ggtattgggtatatgaaagaccgta

SEQ ID NO: 185084 - DNA, 25 bp, Probe sequence
ggacaagactctacacaacaagtga

SEQ ID NO: 185085 - DNA, 25 bp, Probe sequence
ggctaacaatcataaccaaaacgga

SEQ ID NO: 185086 - DNA, 25 bp, Probe sequence
tggtgtaggtattgggtatatgaaa

SEQ ID NO: 185087 - DNA, 25 bp, Probe sequence
tgaattttttaaatcgatggagtta

SEQ ID NO: 185088 - DNA, 25 bp, Probe sequence
tcgcgatattattcttaacgttagg

SEQ ID NO: 185089 - DNA, 25 bp, Probe sequence
taaccaaaacggacaagactctaca

SEQ ID NO: 185090 - DNA, 25 bp, Probe sequence
tagcgtttctattaatcgcgatatt

SEQ ID NO: 185091 - DNA, 25 bp, Probe sequence
tatcatcgttttatgtttaattggt

SEQ ID NO: 185092 - DNA, 25 bp, Probe sequence
ttttatgtttaattggtgtaggtat

SEQ ID NO: 185093 - DNA, 25 bp, Probe sequence
caaacctacgcatcgaaaacctgga

SEQ ID NO: 185094 - DNA, 25 bp, Probe sequence
atagtagtaatcgtggggttcctgt

SEQ ID NO: 185095 - DNA, 25 bp, Probe sequence
atatcaagactacttccttcaattt

SEQ ID NO: 185096 - DNA, 25 bp, Probe sequence
ataggtcttatattagtatttagta

SEQ ID NO: 185097 - DNA, 25 bp, Probe sequence
atccaagatggacgtataactgaat

SEQ ID NO: 185098 - DNA, 25 bp, Probe sequence
acctggattatacaaagacttcgat

SEQ ID NO: 185099 - DNA, 25 bp, Probe sequence
acctacgcatcgaaaacctggatta

SEQ ID NO: 185100 - DNA, 25 bp, Probe sequence
acgtatctcgtaaagctgttgaaaa

SEQ ID NO: 185101 - DNA, 25 bp, Probe sequence
actgaatatcaagactacttccttc

SEQ ID NO: 185102 - DNA, 25 bp, Probe sequence
acagaaatgccagtacgtaagttag

SEQ ID NO: 185103 - DNA, 25 bp, Probe sequence
aaataaatcttatatcgacattaaa

SEQ ID NO: 185104 - DNA, 25 bp, Probe sequence
aaatgccagtacgtaagttagaagt

SEQ ID NO: 185105 - DNA, 25 bp, Probe sequence
aacttctggtccacgagtgttgtaa

SEQ ID NO: 185106 - DNA, 25 bp, Probe sequence
aactttatccttggcttattaatag

SEQ ID NO: 185107 - DNA, 25 bp, Probe sequence
aaccattacttatttcacttgctgc

SEQ ID NO: 185108 - DNA, 25 bp, Probe sequence
aagactacttccttcaatttgaatg

SEQ ID NO: 185109 - DNA, 25 bp, Probe sequence
aagacttcgatgatggtcatgttta

SEQ ID NO: 185110 - DNA, 25 bp, Probe sequence
cacttgctgcactattgatattaat

SEQ ID NO: 185111 - DNA, 25 bp, Probe sequence
ccttcaatttgaatggttccaacca

SEQ ID NO: 185112 - DNA, 25 bp, Probe sequence
gaaaacttctggtccacgagtgttg

SEQ ID NO: 185113 - DNA, 25 bp, Probe sequence
gagatcagaaaacttctggtccacg

SEQ ID NO: 185114 - DNA, 25 bp, Probe sequence
gatggtcatgtttacgtatctcgta

SEQ ID NO: 185115 - DNA, 25 bp, Probe sequence
gtatttagtatcttcaaacctacgc

SEQ ID NO: 185116 - DNA, 25 bp, Probe sequence
gtatcttcaaacctacgcatcgaaa

SEQ ID NO: 185117 - DNA, 25 bp, Probe sequence
gtaatcgtggggttcctgttattca

SEQ ID NO: 185118 - DNA, 25 bp, Probe sequence
gtggggttcctgttattcatgtata

SEQ ID NO: 185119 - DNA, 25 bp, Probe sequence
gggttcctgttattcatgtatatcc

SEQ ID NO: 185120 - DNA, 25 bp, Probe sequence
ggttccaaccattacttatttcact

SEQ ID NO: 185121 - DNA, 25 bp, Probe sequence
tcctgttattcatgtatatccaaga

SEQ ID NO: 185122 - DNA, 25 bp, Probe sequence
tcgacattaaaactgactttttcgt

SEQ ID NO: 185123 - DNA, 25 bp, Probe sequence
tatccttggcttattaatagtagta

SEQ ID NO: 185124 - DNA, 25 bp, Probe sequence
tacttatttcacttgctgcactatt

SEQ ID NO: 185125 - DNA, 25 bp, Probe sequence
tagtatcttcaaacctacgcatcga

SEQ ID NO: 185126 - DNA, 25 bp, Probe sequence
tatttcacttgctgcactattgata

SEQ ID NO: 185127 - DNA, 25 bp, Probe sequence
attggacaatcttttactgggcatg

SEQ ID NO: 185128 - DNA, 25 bp, Probe sequence
atttacttggtcagcatggtcaggt

SEQ ID NO: 185129 - DNA, 25 bp, Probe sequence
atgcagttttcatttttccattggg

SEQ ID NO: 185130 - DNA, 25 bp, Probe sequence
aggtatatttattgcacgtgtgtca

SEQ ID NO: 185131 - DNA, 25 bp, Probe sequence
agttattttatttgtctgtgtgtat

SEQ ID NO: 185132 - DNA, 25 bp, Probe sequence
agaaaaactcacgcaaaacattact

SEQ ID NO: 185133 - DNA, 25 bp, Probe sequence
actgggcatggtggatatcttgggc

SEQ ID NO: 185134 - DNA, 25 bp, Probe sequence
aacattaggtttcggtgcattgcaa

SEQ ID NO: 185135 - DNA, 25 bp, Probe sequence
cagtaagtctagtgttttgggtatc

SEQ ID NO: 185136 - DNA, 25 bp, Probe sequence
cctattcataaagctggcacgcaat

SEQ ID NO: 185137 - DNA, 25 bp, Probe sequence
gccttcaaattaacgcctattcata

SEQ ID NO: 185138 - DNA, 25 bp, Probe sequence
gcgttgctgcaacattaggtttcgg

SEQ ID NO: 185139 - DNA, 25 bp, Probe sequence
gctacagtaacaggcgttgctgcaa

SEQ ID NO: 185140 - DNA, 25 bp, Probe sequence
gatatcttgggcaccatttgtaggt

SEQ ID NO: 185141 - DNA, 25 bp, Probe sequence
gtcagcgctacattgacgcctttat

SEQ ID NO: 185142 - DNA, 25 bp, Probe sequence
gtgtttgcatattttagctttcata

SEQ ID NO: 185143 - DNA, 25 bp, Probe sequence
gggggattcatgcatgggcagtcta

SEQ ID NO: 185144 - DNA, 25 bp, Probe sequence
ggggtatcattatggcattatttgc

SEQ ID NO: 185145 - DNA, 25 bp, Probe sequence
ggtattatttattgctcgttttagt

SEQ ID NO: 185146 - DNA, 25 bp, Probe sequence
ggacaacggcagaaccaatcagtca

SEQ ID NO: 185147 - DNA, 25 bp, Probe sequence
ggatatcctggcttagtcagcgcta

SEQ ID NO: 185148 - DNA, 25 bp, Probe sequence
ggacttgtgttctggacaacggcag

SEQ ID NO: 185149 - DNA, 25 bp, Probe sequence
tggtctttttattgttgggccaacg

SEQ ID NO: 185150 - DNA, 25 bp, Probe sequence
tgggcagtctatggtattgtcgcgc

SEQ ID NO: 185151 - DNA, 25 bp, Probe sequence
tgattttctttgttacatcagcgga

SEQ ID NO: 185152 - DNA, 25 bp, Probe sequence
tcggcgcgtcagcaatttacttaca

SEQ ID NO: 185153 - DNA, 25 bp, Probe sequence
tcaacatgttacttgcttttgtagt

SEQ ID NO: 185154 - DNA, 25 bp, Probe sequence
taagcttaattactttacttgttat

SEQ ID NO: 185155 - DNA, 25 bp, Probe sequence
tagtttgctttatattctttgcggt

SEQ ID NO: 185156 - DNA, 25 bp, Probe sequence
tattctaggtgtactttttgtcccg

SEQ ID NO: 185157 - DNA, 25 bp, Probe sequence
tattggcagtcatagctacagtaac

SEQ ID NO: 185158 - DNA, 25 bp, Probe sequence
tttattgcgctacatttttcttggt

SEQ ID NO: 185159 - DNA, 25 bp, Probe sequence
ttaggtggtgccattgatgtattgg

SEQ ID NO: 185160 - DNA, 25 bp, Probe sequence
ttctttgcggtattcggcgcgtcag

SEQ ID NO: 185161 - DNA, 25 bp, Probe sequence
attggtactgttgaagctatcggac

SEQ ID NO: 185162 - DNA, 25 bp, Probe sequence
accgctaactggtattacggcatat

SEQ ID NO: 185163 - DNA, 25 bp, Probe sequence
acgaacaaagaaagccaacgccaga

SEQ ID NO: 185164 - DNA, 25 bp, Probe sequence
acggcatatgaaacgttttttgata

SEQ ID NO: 185165 - DNA, 25 bp, Probe sequence
actatcgtagcttttaatgaagatc

SEQ ID NO: 185166 - DNA, 25 bp, Probe sequence
aagcacctcgtgtacttgggtttga

SEQ ID NO: 185167 - DNA, 25 bp, Probe sequence
aagaggatttagtgcgtcaatttaa

SEQ ID NO: 185168 - DNA, 25 bp, Probe sequence
caaccaacaacgacacaagtttttg

SEQ ID NO: 185169 - DNA, 25 bp, Probe sequence
catgaatttatgtttgcgcgtccaa

SEQ ID NO: 185170 - DNA, 25 bp, Probe sequence
cattaccaaccaacaacgacacaag

SEQ ID NO: 185171 - DNA, 25 bp, Probe sequence
cattagtagattatatattttgcac

SEQ ID NO: 185172 - DNA, 25 bp, Probe sequence
cctcgtgtacttgggtttgatgcta

SEQ ID NO: 185173 - DNA, 25 bp, Probe sequence
gccactcaaattgctaaacggtatg

SEQ ID NO: 185174 - DNA, 25 bp, Probe sequence
gcggttagtctaccgctaactggta

SEQ ID NO: 185175 - DNA, 25 bp, Probe sequence
gctggatcgccaaatagacaaggat

SEQ ID NO: 185176 - DNA, 25 bp, Probe sequence
gcatcacgacaagaaacaacagagt

SEQ ID NO: 185177 - DNA, 25 bp, Probe sequence
gaaggtttatcacctgaaaacttat

SEQ ID NO: 185178 - DNA, 25 bp, Probe sequence
gaacgcctgatatgattaaacaaca

SEQ ID NO: 185179 - DNA, 25 bp, Probe sequence
gaactgataaaaccattagggcata

SEQ ID NO: 185180 - DNA, 25 bp, Probe sequence
gacaaggatcaaatgcgacatatca

SEQ ID NO: 185181 - DNA, 25 bp, Probe sequence
gacacaagtttttgaaggtttatca

SEQ ID NO: 185182 - DNA, 25 bp, Probe sequence
gacgttgtattttatgctggatcgc

SEQ ID NO: 185183 - DNA, 25 bp, Probe sequence
gagtggtgtgaaaagatgggcgcag

SEQ ID NO: 185184 - DNA, 25 bp, Probe sequence
gatgggcgcagatatcgtattgaat

SEQ ID NO: 185185 - DNA, 25 bp, Probe sequence
gttacattatttagtccgggtgacg

SEQ ID NO: 185186 - DNA, 25 bp, Probe sequence
gtccgggtgacgttgtattttatgc

SEQ ID NO: 185187 - DNA, 25 bp, Probe sequence
gtccaattcatcgaacgcctgatat

SEQ ID NO: 185188 - DNA, 25 bp, Probe sequence
gggtttgatgctattggtactgttg

SEQ ID NO: 185189 - DNA, 25 bp, Probe sequence
ggtatggtttaactgtcattacaac

SEQ ID NO: 185190 - DNA, 25 bp, Probe sequence
tgcgcgtccaattcatcgaacgcct

SEQ ID NO: 185191 - DNA, 25 bp, Probe sequence
tcactcaagcacctcgtgtacttgg

SEQ ID NO: 185192 - DNA, 25 bp, Probe sequence
tcattacaacagcatcacgacaaga

SEQ ID NO: 185193 - DNA, 25 bp, Probe sequence
tcacctgaaaacttatatcaagcac

SEQ ID NO: 185194 - DNA, 25 bp, Probe sequence
tatgtttgcgcgtccaattcatcga

SEQ ID NO: 185195 - DNA, 25 bp, Probe sequence
agttccaacgacagatgtaccactt

SEQ ID NO: 185196 - DNA, 25 bp, Probe sequence
accagatggtattgatgtttatttt

SEQ ID NO: 185197 - DNA, 25 bp, Probe sequence
acactgggctttgacgctggtattg

SEQ ID NO: 185198 - DNA, 25 bp, Probe sequence
aaatcgttttgcacgtgtaccagta

SEQ ID NO: 185199 - DNA, 25 bp, Probe sequence
acaaaataccagaaggcatgcctca

SEQ ID NO: 185200 - DNA, 25 bp, Probe sequence
aaccgattgttagccatgtcgttgc

SEQ ID NO: 185201 - DNA, 25 bp, Probe sequence
ctgttgtggtttcagctgcatctgg

SEQ ID NO: 185202 - DNA, 25 bp, Probe sequence
cgctgtatatttcagtggatccata

SEQ ID NO: 185203 - DNA, 25 bp, Probe sequence
gcagattcgtatgtacagccttttg

SEQ ID NO: 185204 - DNA, 25 bp, Probe sequence
gaagatggttttgaaaatgcgccac

SEQ ID NO: 185205 - DNA, 25 bp, Probe sequence
gacacgcctaaacttgagagcgatg

SEQ ID NO: 185206 - DNA, 25 bp, Probe sequence
gtaaaattcagtcacaagtaaccat

SEQ ID NO: 185207 - DNA, 25 bp, Probe sequence
gagatgtcgttgtaggtatgttgcc

SEQ ID NO: 185208 - DNA, 25 bp, Probe sequence
gaggacgtatgactaaggcagattc

SEQ ID NO: 185209 - DNA, 25 bp, Probe sequence
gatgtaccacttgatttatatttaa

SEQ ID NO: 185210 - DNA, 25 bp, Probe sequence
gatatcggaccacgtattcaaggta

SEQ ID NO: 185211 - DNA, 25 bp, Probe sequence
gttagcacaagcagtaccagatggt

SEQ ID NO: 185212 - DNA, 25 bp, Probe sequence
gttagccatgtcgttgcaaaagtaa

SEQ ID NO: 185213 - DNA, 25 bp, Probe sequence
gtatgtacagccttttgaaattggt

SEQ ID NO: 185214 - DNA, 25 bp, Probe sequence
gtaggtattgcgggtggcgacaaaa

SEQ ID NO: 185215 - DNA, 25 bp, Probe sequence
gtacttgtacaaacgctgtatattt

SEQ ID NO: 185216 - DNA, 25 bp, Probe sequence
gtaattgattcgacactcgcagatt

SEQ ID NO: 185217 - DNA, 25 bp, Probe sequence
gtgatactgttgtggtttcagctgc

SEQ ID NO: 185218 - DNA, 25 bp, Probe sequence
ggtatgttgccttggcgaatcatta

SEQ ID NO: 185219 - DNA, 25 bp, Probe sequence
ggttcagttgtaggtcaaattgcta

SEQ ID NO: 185220 - DNA, 25 bp, Probe sequence
ggaccacgtattcaaggtacgctta

SEQ ID NO: 185221 - DNA, 25 bp, Probe sequence
ggcatgcctcaagaggatacattca

SEQ ID NO: 185222 - DNA, 25 bp, Probe sequence
ggctttgacgctggtattgattata

SEQ ID NO: 185223 - DNA, 25 bp, Probe sequence
ggcgaatcattaatcatgtccaagc

SEQ ID NO: 185224 - DNA, 25 bp, Probe sequence
ggcgcaatttcgtcatataatcatc

SEQ ID NO: 185225 - DNA, 25 bp, Probe sequence
tggtctgcttgatattggacaacct

SEQ ID NO: 185226 - DNA, 25 bp, Probe sequence
tgtccaagcggatcaaattactaaa

SEQ ID NO: 185227 - DNA, 25 bp, Probe sequence
tttcgtcatataatcatcctgaagc

SEQ ID NO: 185228 - DNA, 25 bp, Probe sequence
ttgctaagattaaaggttgccgtgt

SEQ ID NO: 185229 - DNA, 25 bp, Probe sequence
ataacagacaaggctatttggataa

SEQ ID NO: 185230 - DNA, 25 bp, Probe sequence
aggtaaaggtatcgaagtgctaaat

SEQ ID NO: 185231 - DNA, 25 bp, Probe sequence
aaagatgcagtgaatcctattgtga

SEQ ID NO: 185232 - DNA, 25 bp, Probe sequence
caactttgtcggtcactcaatgggg

SEQ ID NO: 185233 - DNA, 25 bp, Probe sequence
cactgccacagttaaacaaacaagt

SEQ ID NO: 185234 - DNA, 25 bp, Probe sequence
gcttacgtttcaaaggatggtgcag

SEQ ID NO: 185235 - DNA, 25 bp, Probe sequence
gcaattacgcgtgctaaaagatatt

SEQ ID NO: 185236 - DNA, 25 bp, Probe sequence
gaatcctattgtgaaaattgaactt

SEQ ID NO: 185237 - DNA, 25 bp, Probe sequence
gaatgctgcgtggtttaaaaatgta

SEQ ID NO: 185238 - DNA, 25 bp, Probe sequence
gacaagtcactgccacagttaaaca

SEQ ID NO: 185239 - DNA, 25 bp, Probe sequence
gacggcagagtgtctaatagttctt

SEQ ID NO: 185240 - DNA, 25 bp, Probe sequence
gaggggtaactaaagatatcatcac

SEQ ID NO: 185241 - DNA, 25 bp, Probe sequence
gagtgtctaatagttcttcgaaatc

SEQ ID NO: 185242 - DNA, 25 bp, Probe sequence
gatggtaaaccaagtcgaatgaatc

SEQ ID NO: 185243 - DNA, 25 bp, Probe sequence
gatggtacacattcagacggcagag

SEQ ID NO: 185244 - DNA, 25 bp, Probe sequence
gatatcatcactgcttacgtttcaa

SEQ ID NO: 185245 - DNA, 25 bp, Probe sequence
gttacaatctgaatacaatttcgat

SEQ ID NO: 185246 - DNA, 25 bp, Probe sequence
gttagcggtcgctattattataggc

SEQ ID NO: 185247 - DNA, 25 bp, Probe sequence
gtactgactaagttacaatctgaat

SEQ ID NO: 185248 - DNA, 25 bp, Probe sequence
gtcaacgacaggcacaaacatttaa

SEQ ID NO: 185249 - DNA, 25 bp, Probe sequence
gtcggtcactcaatggggaacttaa

SEQ ID NO: 185250 - DNA, 25 bp, Probe sequence
gtcgaatgaatcaaccttatcagca

SEQ ID NO: 185251 - DNA, 25 bp, Probe sequence
gtgtttagtcaacgacaggcacaaa

SEQ ID NO: 185252 - DNA, 25 bp, Probe sequence
ggggaacttaacatttgcacaatat

SEQ ID NO: 185253 - DNA, 25 bp, Probe sequence
ggtaacgacaagtcactgccacagt

SEQ ID NO: 185254 - DNA, 25 bp, Probe sequence
ggatggtgcagtgacatttaaaggg

SEQ ID NO: 185255 - DNA, 25 bp, Probe sequence
ggctatttggataagaatgctgcgt

SEQ ID NO: 185256 - DNA, 25 bp, Probe sequence
tcaaccttatcagcaattacgcgtg

SEQ ID NO: 185257 - DNA, 25 bp, Probe sequence
tcatcactgcttacgtttcaaagga

SEQ ID NO: 185258 - DNA, 25 bp, Probe sequence
tacgacattgttagcggtcgctatt

SEQ ID NO: 185259 - DNA, 25 bp, Probe sequence
taaattcaactttgtcggtcactca

SEQ ID NO: 185260 - DNA, 25 bp, Probe sequence
tagtccgaaaagttatcgagaatct

SEQ ID NO: 185261 - DNA, 25 bp, Probe sequence
tatgatgacatatggtaacgacaag

SEQ ID NO: 185262 - DNA, 25 bp, Probe sequence
ttacatggatttggtggtagtgcca

SEQ ID NO: 185263 - DNA, 25 bp, Probe sequence
atatcttatctgttaatggcggtaa

SEQ ID NO: 185264 - DNA, 25 bp, Probe sequence
atcgtaaaacgattgactactttgt

SEQ ID NO: 185265 - DNA, 25 bp, Probe sequence
atccgttcgatccatcaaatcctga

SEQ ID NO: 185266 - DNA, 25 bp, Probe sequence
atggtttattctatgtcgattttga

SEQ ID NO: 185267 - DNA, 25 bp, Probe sequence
aggttactttatttggtcattaatg

SEQ ID NO: 185268 - DNA, 25 bp, Probe sequence
aaacagttcatgatgatgcacgtat

SEQ ID NO: 185269 - DNA, 25 bp, Probe sequence
aacgacttcttaggtatcaattact

SEQ ID NO: 185270 - DNA, 25 bp, Probe sequence
aatcctgaagatgttcgtgcagcag

SEQ ID NO: 185271 - DNA, 25 bp, Probe sequence
ctcgtgaaacgatggaaggtgtgca

SEQ ID NO: 185272 - DNA, 25 bp, Probe sequence
ctgcagaaccagcgagtgattttta

SEQ ID NO: 185273 - DNA, 25 bp, Probe sequence
gcgacaggtgataaaggcggttcta

SEQ ID NO: 185274 - DNA, 25 bp, Probe sequence
gcattgccaacaaaatatccgttcg

SEQ ID NO: 185275 - DNA, 25 bp, Probe sequence
gcatcattttgatacaccagaagtg

SEQ ID NO: 185276 - DNA, 25 bp, Probe sequence
gcagccaaagatttaaacgacttct

SEQ ID NO: 185277 - DNA, 25 bp, Probe sequence
gaatttgatgtcgacgtacctcgca

SEQ ID NO: 185278 - DNA, 25 bp, Probe sequence
gaaggtgtgcaacatatcttatctg

SEQ ID NO: 185279 - DNA, 25 bp, Probe sequence
gaagattttatttttggtggagcaa

SEQ ID NO: 185280 - DNA, 25 bp, Probe sequence
gaaccatttgtaacattgcatcatt

SEQ ID NO: 185281 - DNA, 25 bp, Probe sequence
gactgggactggatgatctatcctc

SEQ ID NO: 185282 - DNA, 25 bp, Probe sequence
gactactttgtagattatgctgaat

SEQ ID NO: 185283 - DNA, 25 bp, Probe sequence
gatatggcgaagttaaccctaaagg

SEQ ID NO: 185284 - DNA, 25 bp, Probe sequence
gatgcacgtattgattatgtaagac

SEQ ID NO: 185285 - DNA, 25 bp, Probe sequence
gtatcttcccaaatggatatggcga

SEQ ID NO: 185286 - DNA, 25 bp, Probe sequence
gtacctcgcacagactgggactgga

SEQ ID NO: 185287 - DNA, 25 bp, Probe sequence
gtgttctcttggtcaaatggttatg

SEQ ID NO: 185288 - DNA, 25 bp, Probe sequence
gtgttacacaaagatggcgattttc

SEQ ID NO: 185289 - DNA, 25 bp, Probe sequence
gtgtcataaacgtcatgttgaacca

SEQ ID NO: 185290 - DNA, 25 bp, Probe sequence
gtggagcaacagcagcatatcaagc

SEQ ID NO: 185291 - DNA, 25 bp, Probe sequence
ggatgatctatcctcaaggtttata

SEQ ID NO: 185292 - DNA, 25 bp, Probe sequence
tcatgcgtgttgttaaagattatcc

SEQ ID NO: 185293 - DNA, 25 bp, Probe sequence
tagtaggtaaattccctccaggtat

SEQ ID NO: 185294 - DNA, 25 bp, Probe sequence
ttatgccattttagatgcagccaaa

SEQ ID NO: 185295 - DNA, 25 bp, Probe sequence
ttaatggatgtgttctcttggtcaa

SEQ ID NO: 185296 - DNA, 25 bp, Probe sequence
ttggtgttgtacacgcattgccaac

SEQ ID NO: 185297 - DNA, 25 bp, Probe sequence
atatatttaagagccatccgtgatg

SEQ ID NO: 185298 - DNA, 25 bp, Probe sequence
atacgatggggcttgtagcattttt

SEQ ID NO: 185299 - DNA, 25 bp, Probe sequence
agtaccgccgaatatttcacaagta

SEQ ID NO: 185300 - DNA, 25 bp, Probe sequence
agatttagtcattcgcaacagcttt

SEQ ID NO: 185301 - DNA, 25 bp, Probe sequence
accaattaatcattttagcgccaca

SEQ ID NO: 185302 - DNA, 25 bp, Probe sequence
aacagattcatttaaccgtaagcta

SEQ ID NO: 185303 - DNA, 25 bp, Probe sequence
aatgccgaaagaagtaccgccgaat

SEQ ID NO: 185304 - DNA, 25 bp, Probe sequence
aatgtcttagtactttgtgccggtg

SEQ ID NO: 185305 - DNA, 25 bp, Probe sequence
aatcctgtgttctttattccatttg

SEQ ID NO: 185306 - DNA, 25 bp, Probe sequence
cttattctcaagtatctttctatta

SEQ ID NO: 185307 - DNA, 25 bp, Probe sequence
ctgattcaattttagcggcaagtgg

SEQ ID NO: 185308 - DNA, 25 bp, Probe sequence
cgaacttcaagttgcttcaagctgg

SEQ ID NO: 185309 - DNA, 25 bp, Probe sequence
ccagcaattgcagccattacatatg

SEQ ID NO: 185310 - DNA, 25 bp, Probe sequence
ccaagcagcccttgatttcgttcaa

SEQ ID NO: 185311 - DNA, 25 bp, Probe sequence
gcttctgatccagccaaagatggtg

SEQ ID NO: 185312 - DNA, 25 bp, Probe sequence
gcagctgaagaatatcatgtgccag

SEQ ID NO: 185313 - DNA, 25 bp, Probe sequence
gcagctaaagcttcaaatatcacag

SEQ ID NO: 185314 - DNA, 25 bp, Probe sequence
gcaccactagtattgaatcctgtgt

SEQ ID NO: 185315 - DNA, 25 bp, Probe sequence
gcagcgatgtgtggattcttgttct

SEQ ID NO: 185316 - DNA, 25 bp, Probe sequence
gcaatgcctgtcatcttattctcaa

SEQ ID NO: 185317 - DNA, 25 bp, Probe sequence
ggacttaattccattttcagcggta

SEQ ID NO: 185318 - DNA, 25 bp, Probe sequence
gaaacaaagcgattggacgtgcatc

SEQ ID NO: 185319 - DNA, 25 bp, Probe sequence
gatggatttatttctgcaatgcctg

SEQ ID NO: 185320 - DNA, 25 bp, Probe sequence
gttgtaccaacattctttggtgtaa

SEQ ID NO: 185321 - DNA, 25 bp, Probe sequence
gtcacaattatctttggtgcctttg

SEQ ID NO: 185322 - DNA, 25 bp, Probe sequence
gtgccggtggtggtacaagtggatt

SEQ ID NO: 185323 - DNA, 25 bp, Probe sequence
gtggtgtatcagacgatgcagctaa

SEQ ID NO: 185324 - DNA, 25 bp, Probe sequence
ggtgcctttgcattattctggtttg

SEQ ID NO: 185325 - DNA, 25 bp, Probe sequence
ggaacgacagcgaaatctttaacag

SEQ ID NO: 185326 - DNA, 25 bp, Probe sequence
tagcgccacaagttgcgtctaacta

SEQ ID NO: 185327 - DNA, 25 bp, Probe sequence
tattattatttactacccattccta

SEQ ID NO: 185328 - DNA, 25 bp, Probe sequence
ttcttgttcttagcttctgatccag

SEQ ID NO: 185329 - DNA, 25 bp, Probe sequence
ttcagcggtaatcatcattctttat

SEQ ID NO: 185330 - DNA, 25 bp, Probe sequence
ttcgaaccattatttacagcagcag

SEQ ID NO: 185331 - DNA, 25 bp, Probe sequence
attgttgcatttgcaggggatgcac

SEQ ID NO: 185332 - DNA, 25 bp, Probe sequence
atttgcaggggatgcacgttctaag

SEQ ID NO: 185333 - DNA, 25 bp, Probe sequence
atgaagcatttattagaattttata

SEQ ID NO: 185334 - DNA, 25 bp, Probe sequence
aggttttgaaattgttgcatttgca

SEQ ID NO: 185335 - DNA, 25 bp, Probe sequence
agctggagattttgcaaaagcagat

SEQ ID NO: 185336 - DNA, 25 bp, Probe sequence
actgaaagatttaatgaagcattta

SEQ ID NO: 185337 - DNA, 25 bp, Probe sequence
aaattgttgcatttgcaggggatgc

SEQ ID NO: 185338 - DNA, 25 bp, Probe sequence
caagctggagattttgcaaaagcag

SEQ ID NO: 185339 - DNA, 25 bp, Probe sequence
cagctcaagctggagattttgcaaa

SEQ ID NO: 185340 - DNA, 25 bp, Probe sequence
caggggatgcacgttctaagttttt

SEQ ID NO: 185341 - DNA, 25 bp, Probe sequence
catttgcaggggatgcacgttctaa

SEQ ID NO: 185342 - DNA, 25 bp, Probe sequence
catttaatgacaacaattttactga

SEQ ID NO: 185343 - DNA, 25 bp, Probe sequence
ctggagattttgcaaaagcagatgc

SEQ ID NO: 185344 - DNA, 25 bp, Probe sequence
gctcaagctggagattttgcaaaag

SEQ ID NO: 185345 - DNA, 25 bp, Probe sequence
gcatttgcaggggatgcacgttcta

SEQ ID NO: 185346 - DNA, 25 bp, Probe sequence
gcaggggatgcacgttctaagtttt

SEQ ID NO: 185347 - DNA, 25 bp, Probe sequence
gcacgttctaagtttttagaagcat

SEQ ID NO: 185348 - DNA, 25 bp, Probe sequence
gcagctcaagctggagattttgcaa

SEQ ID NO: 185349 - DNA, 25 bp, Probe sequence
gaagaagtccaattattaggttttg

SEQ ID NO: 185350 - DNA, 25 bp, Probe sequence
gaaattgttgcatttgcaggggatg

SEQ ID NO: 185351 - DNA, 25 bp, Probe sequence
gagaagaagtccaattattaggttt

SEQ ID NO: 185352 - DNA, 25 bp, Probe sequence
gatgcacgttctaagtttttagaag

SEQ ID NO: 185353 - DNA, 25 bp, Probe sequence
gttgcatttgcaggggatgcacgtt

SEQ ID NO: 185354 - DNA, 25 bp, Probe sequence
gttttgaaattgttgcatttgcagg

SEQ ID NO: 185355 - DNA, 25 bp, Probe sequence
gggatgcacgttctaagtttttaga

SEQ ID NO: 185356 - DNA, 25 bp, Probe sequence
ggggatgcacgttctaagtttttag

SEQ ID NO: 185357 - DNA, 25 bp, Probe sequence
tgcaggggatgcacgttctaagttt

SEQ ID NO: 185358 - DNA, 25 bp, Probe sequence
tgacaacaattttactgaaagattt

SEQ ID NO: 185359 - DNA, 25 bp, Probe sequence
taatgacaacaattttactgaaaga

SEQ ID NO: 185360 - DNA, 25 bp, Probe sequence
tattaggttttgaaattgttgcatt

SEQ ID NO: 185361 - DNA, 25 bp, Probe sequence
tttgcaggggatgcacgttctaagt

SEQ ID NO: 185362 - DNA, 25 bp, Probe sequence
ttgcaggggatgcacgttctaagtt

SEQ ID NO: 185363 - DNA, 25 bp, Probe sequence
ttgcatttgcaggggatgcacgttc

SEQ ID NO: 185364 - DNA, 25 bp, Probe sequence
ttgaagaaggaaacaattgcattgc

SEQ ID NO: 185365 - DNA, 25 bp, Probe sequence
attgtcctcagctgcagaatcatta

SEQ ID NO: 185366 - DNA, 25 bp, Probe sequence
attaatggcactattcacagaatca

SEQ ID NO: 185367 - DNA, 25 bp, Probe sequence
atcaaacgtatattctgcaaatcag

SEQ ID NO: 185368 - DNA, 25 bp, Probe sequence
atgggaaccaagctatgttgataga

SEQ ID NO: 185369 - DNA, 25 bp, Probe sequence
atggaaacgtgtaagtgttgtcttg

SEQ ID NO: 185370 - DNA, 25 bp, Probe sequence
agcgtcacactaccaaagaagagta

SEQ ID NO: 185371 - DNA, 25 bp, Probe sequence
actcacacactaaggcatacacaca

SEQ ID NO: 185372 - DNA, 25 bp, Probe sequence
acatctggctttaaagtaacgacgc

SEQ ID NO: 185373 - DNA, 25 bp, Probe sequence
acaacttgccaaggaaatcctatgc

SEQ ID NO: 185374 - DNA, 25 bp, Probe sequence
aaacaaacgattgtcctcagctgca

SEQ ID NO: 185375 - DNA, 25 bp, Probe sequence
acaattatccaaacgaacacatatt

SEQ ID NO: 185376 - DNA, 25 bp, Probe sequence
aaagatgcaacaatgggaaccaagc

SEQ ID NO: 185377 - DNA, 25 bp, Probe sequence
aaagcgtcaacttggacatatgaaa

SEQ ID NO: 185378 - DNA, 25 bp, Probe sequence
aacatgcagtatagagctcgtattt

SEQ ID NO: 185379 - DNA, 25 bp, Probe sequence
aagttactactcacacactaaggca

SEQ ID NO: 185380 - DNA, 25 bp, Probe sequence
aaggaaatcctatgcaaggcagtag

SEQ ID NO: 185381 - DNA, 25 bp, Probe sequence
aatgtaatgctggatttggtcacaa

SEQ ID NO: 185382 - DNA, 25 bp, Probe sequence
aatcgccatcaattcaaggatagca

SEQ ID NO: 185383 - DNA, 25 bp, Probe sequence
gctggggctgtagaagttcaagctt

SEQ ID NO: 185384 - DNA, 25 bp, Probe sequence
gctctccaagttaaagatgttgacc

SEQ ID NO: 185385 - DNA, 25 bp, Probe sequence
gctcgtattttagttgctggggctg

SEQ ID NO: 185386 - DNA, 25 bp, Probe sequence
gagggtttatattcacaacttgcca

SEQ ID NO: 185387 - DNA, 25 bp, Probe sequence
gatactacgaagaccgcaggttcaa

SEQ ID NO: 185388 - DNA, 25 bp, Probe sequence
gatacgcgattttatactgaacgat

SEQ ID NO: 185389 - DNA, 25 bp, Probe sequence
gtatgcgcataggtgagttattagc

SEQ ID NO: 185390 - DNA, 25 bp, Probe sequence
gtacatgcaaacatttattaacgaa

SEQ ID NO: 185391 - DNA, 25 bp, Probe sequence
gtaacgacgcttgataatttgaaaa

SEQ ID NO: 185392 - DNA, 25 bp, Probe sequence
gtgagttattagctctccaagttaa

SEQ ID NO: 185393 - DNA, 25 bp, Probe sequence
ggatttggtcacaaagatactacga

SEQ ID NO: 185394 - DNA, 25 bp, Probe sequence
ggaacaggtaatacagatacgcgat

SEQ ID NO: 185395 - DNA, 25 bp, Probe sequence
ggcatacacacataagtttattggc

SEQ ID NO: 185396 - DNA, 25 bp, Probe sequence
tgcaaatcaggtaaagcgtcaactt

SEQ ID NO: 185397 - DNA, 25 bp, Probe sequence
tattaaatagcgtcacactaccaaa

SEQ ID NO: 185398 - DNA, 25 bp, Probe sequence
ttcaagctttaacaggtatgcgcat

SEQ ID NO: 185399 - DNA, 25 bp, Probe sequence
atgtagaaggctttgctgaaggtga

SEQ ID NO: 185400 - DNA, 25 bp, Probe sequence
acgaagctggtgctaaattcaacgg

SEQ ID NO: 185401 - DNA, 25 bp, Probe sequence
agcctagaaaggttaacgaagcaat

SEQ ID NO: 185402 - DNA, 25 bp, Probe sequence
acctgactgtttagtagagtggtct

SEQ ID NO: 185403 - DNA, 25 bp, Probe sequence
actatgatgttgatgatgctgaaga

SEQ ID NO: 185404 - DNA, 25 bp, Probe sequence
aacatacgatgacaacattcctgat

SEQ ID NO: 185405 - DNA, 25 bp, Probe sequence
aagaggaagcggcacaacactttaa

SEQ ID NO: 185406 - DNA, 25 bp, Probe sequence
aaggtatcatttctgcattagcatt

SEQ ID NO: 185407 - DNA, 25 bp, Probe sequence
aatttgctcacgaagctggtgctaa

SEQ ID NO: 185408 - DNA, 25 bp, Probe sequence
aattcttactttactatgatgttga

SEQ ID NO: 185409 - DNA, 25 bp, Probe sequence
caactcatttaccatacatttactt

SEQ ID NO: 185410 - DNA, 25 bp, Probe sequence
cattcctgataacggtagtgttgaa

SEQ ID NO: 185411 - DNA, 25 bp, Probe sequence
gctaaaggtcgtttacctgactgtt

SEQ ID NO: 185412 - DNA, 25 bp, Probe sequence
gctgctcgtgaatggttacgtacaa

SEQ ID NO: 185413 - DNA, 25 bp, Probe sequence
gctgaaggtgaagtggtttatacaa

SEQ ID NO: 185414 - DNA, 25 bp, Probe sequence
gcatttgaccaacgtggtgctttaa

SEQ ID NO: 185415 - DNA, 25 bp, Probe sequence
gcaaatgctgttaaattcttacttt

SEQ ID NO: 185416 - DNA, 25 bp, Probe sequence
gaatcggttcagaatgtgttgcaga

SEQ ID NO: 185417 - DNA, 25 bp, Probe sequence
gaagatgctgctcgtgaatggttac

SEQ ID NO: 185418 - DNA, 25 bp, Probe sequence
gaacaaggtgaagatgctgctcgtg

SEQ ID NO: 185419 - DNA, 25 bp, Probe sequence
gaaactttaaaatttgctcacgaag

SEQ ID NO: 185420 - DNA, 25 bp, Probe sequence
gaaagttgaagtaccagtaaacatg

SEQ ID NO: 185421 - DNA, 25 bp, Probe sequence
gacaacattcctgataacggtagtg

SEQ ID NO: 185422 - DNA, 25 bp, Probe sequence
gatgcacgtaacaaagattgtggat

SEQ ID NO: 185423 - DNA, 25 bp, Probe sequence
gatactgcgacatcttggaaacaaa

SEQ ID NO: 185424 - DNA, 25 bp, Probe sequence
gtagagtggtctgcaaaacgtttaa

SEQ ID NO: 185425 - DNA, 25 bp, Probe sequence
gtcgtttacctgactgtttagtaga

SEQ ID NO: 185426 - DNA, 25 bp, Probe sequence
ggtctggtgctgttcaagtatacat

SEQ ID NO: 185427 - DNA, 25 bp, Probe sequence
tggtgtttctgcggaattattccaa

SEQ ID NO: 185428 - DNA, 25 bp, Probe sequence
tgctacatggtctggtgctgttcaa

SEQ ID NO: 185429 - DNA, 25 bp, Probe sequence
tctgcattagcatttgaccaacgtg

SEQ ID NO: 185430 - DNA, 25 bp, Probe sequence
taagtgctggtgtttctgcggaatt

SEQ ID NO: 185431 - DNA, 25 bp, Probe sequence
tacgtacaactggtttcaaaaatat

SEQ ID NO: 185432 - DNA, 25 bp, Probe sequence
ttaccatacatttacttaagtgctg

SEQ ID NO: 185433 - DNA, 25 bp, Probe sequence
atccggttggttcaggtgattctac

SEQ ID NO: 185434 - DNA, 25 bp, Probe sequence
atcaagcatgcattttataacatta

SEQ ID NO: 185435 - DNA, 25 bp, Probe sequence
agtggattattgtgtctttaggtgc

SEQ ID NO: 185436 - DNA, 25 bp, Probe sequence
agccagtccttgcgagtggttttat

SEQ ID NO: 185437 - DNA, 25 bp, Probe sequence
actgcattgcaattttacatgaagg

SEQ ID NO: 185438 - DNA, 25 bp, Probe sequence
actttaacattaaatccatccgttg

SEQ ID NO: 185439 - DNA, 25 bp, Probe sequence
acagctggtggtaaaggtttaaatg

SEQ ID NO: 185440 - DNA, 25 bp, Probe sequence
aaaacaaaggtgtgcctgtgatatt

SEQ ID NO: 185441 - DNA, 25 bp, Probe sequence
aaccagccacttgatgaaagtttag

SEQ ID NO: 185442 - DNA, 25 bp, Probe sequence
cagttgctatttcaggtagcttacc

SEQ ID NO: 185443 - DNA, 25 bp, Probe sequence
cagtcattaaaccaaacatttctga

SEQ ID NO: 185444 - DNA, 25 bp, Probe sequence
gcgagtggttttattggcggtgaat

SEQ ID NO: 185445 - DNA, 25 bp, Probe sequence
gaagtaagtaaaacagctggtggta

SEQ ID NO: 185446 - DNA, 25 bp, Probe sequence
gaaattttagagcagggaccggaga

SEQ ID NO: 185447 - DNA, 25 bp, Probe sequence
gagcagggaccggagattgataatc

SEQ ID NO: 185448 - DNA, 25 bp, Probe sequence
gaggctgcaggatttattaaacatt

SEQ ID NO: 185449 - DNA, 25 bp, Probe sequence
gatgttaatcgtgttcaagaagtaa

SEQ ID NO: 185450 - DNA, 25 bp, Probe sequence
gatgccaaaacaaaggtgtgcctgt

SEQ ID NO: 185451 - DNA, 25 bp, Probe sequence
gattgataatcaagaggctgcagga

SEQ ID NO: 185452 - DNA, 25 bp, Probe sequence
gttgaagcagttgctatttcaggta

SEQ ID NO: 185453 - DNA, 25 bp, Probe sequence
gttgctggaattacttcagcaattc

SEQ ID NO: 185454 - DNA, 25 bp, Probe sequence
gttttattggcggtgaattaggtca

SEQ ID NO: 185455 - DNA, 25 bp, Probe sequence
gtattaaatccggttggttcaggtg

SEQ ID NO: 185456 - DNA, 25 bp, Probe sequence
gtaacaagagtacttgcgcaagtag

SEQ ID NO: 185457 - DNA, 25 bp, Probe sequence
gtccttgcgagtggttttattggcg

SEQ ID NO: 185458 - DNA, 25 bp, Probe sequence
gggtgaaacacgaaactgcattgca

SEQ ID NO: 185459 - DNA, 25 bp, Probe sequence
ggtgaattaggtcaatttattgcta

SEQ ID NO: 185460 - DNA, 25 bp, Probe sequence
tggttcaggtgattctacagttgct

SEQ ID NO: 185461 - DNA, 25 bp, Probe sequence
tcatgaaaacgaccacgatttacta

SEQ ID NO: 185462 - DNA, 25 bp, Probe sequence
taaatccatccgttgatatttcata

SEQ ID NO: 185463 - DNA, 25 bp, Probe sequence
taaatcaagattattatgcacaaat

SEQ ID NO: 185464 - DNA, 25 bp, Probe sequence
ttctacagttgctggaattacttca

SEQ ID NO: 185465 - DNA, 25 bp, Probe sequence
ttgtgtctttaggtgcacaaggtgc

SEQ ID NO: 185466 - DNA, 25 bp, Probe sequence
ttgcttaaccagccacttgatgaaa

SEQ ID NO: 185467 - DNA, 25 bp, Probe sequence
atttgtggaacaggtgttggtatta

SEQ ID NO: 185468 - DNA, 25 bp, Probe sequence
ataaagtacctggcgttcgttcagc

SEQ ID NO: 185469 - DNA, 25 bp, Probe sequence
actagtacgtgatatgacatcagcg

SEQ ID NO: 185470 - DNA, 25 bp, Probe sequence
aagaacacattatccaatttttggt

SEQ ID NO: 185471 - DNA, 25 bp, Probe sequence
aaggacatgaagtcattgacgtagg

SEQ ID NO: 185472 - DNA, 25 bp, Probe sequence
aatgtgcgatattatcgatgcattt

SEQ ID NO: 185473 - DNA, 25 bp, Probe sequence
aatgctgtaaataaagtacctggcg

SEQ ID NO: 185474 - DNA, 25 bp, Probe sequence
aattaaatgcgaacgttattggctt

SEQ ID NO: 185475 - DNA, 25 bp, Probe sequence
caagctgatccacatttctttgatg

SEQ ID NO: 185476 - DNA, 25 bp, Probe sequence
cacatttctttgatgaattcttaga

SEQ ID NO: 185477 - DNA, 25 bp, Probe sequence
gcgttcgttcagcactagtacgtga

SEQ ID NO: 185478 - DNA, 25 bp, Probe sequence
gcgaccatattgttacagatacaaa

SEQ ID NO: 185479 - DNA, 25 bp, Probe sequence
gcgtgtatctgaatttttaaaatca

SEQ ID NO: 185480 - DNA, 25 bp, Probe sequence
gcggtaatgcagacttaggtgtttg

SEQ ID NO: 185481 - DNA, 25 bp, Probe sequence
gctgatccacatttctttgatgaat

SEQ ID NO: 185482 - DNA, 25 bp, Probe sequence
gcattaggatgcgaccatattgtta

SEQ ID NO: 185483 - DNA, 25 bp, Probe sequence
gaagattgcattaggatgcgaccat

SEQ ID NO: 185484 - DNA, 25 bp, Probe sequence
gaacaagttgttagcggtaatgcag

SEQ ID NO: 185485 - DNA, 25 bp, Probe sequence
gaaacaagcaatgcagatcaagctg

SEQ ID NO: 185486 - DNA, 25 bp, Probe sequence
gatccacatttctttgatgaattct

SEQ ID NO: 185487 - DNA, 25 bp, Probe sequence
gatgcgaccatattgttacagatac

SEQ ID NO: 185488 - DNA, 25 bp, Probe sequence
gatcaagctgatccacatttctttg

SEQ ID NO: 185489 - DNA, 25 bp, Probe sequence
gttcgttcagcactagtacgtgata

SEQ ID NO: 185490 - DNA, 25 bp, Probe sequence
gttgttagcggtaatgcagacttag

SEQ ID NO: 185491 - DNA, 25 bp, Probe sequence
gttagcggtaatgcagacttaggtg

SEQ ID NO: 185492 - DNA, 25 bp, Probe sequence
gttcagcactagtacgtgatatgac

SEQ ID NO: 185493 - DNA, 25 bp, Probe sequence
gtcattgacgtaggaacatacgatt

SEQ ID NO: 185494 - DNA, 25 bp, Probe sequence
gggacagaggcgaataccacgatta

SEQ ID NO: 185495 - DNA, 25 bp, Probe sequence
ggtgagttattaatgtgcgatatta

SEQ ID NO: 185496 - DNA, 25 bp, Probe sequence
ggtgttggtattaacaatgctgtaa

SEQ ID NO: 185497 - DNA, 25 bp, Probe sequence
ggacagaggcgaataccacgattaa

SEQ ID NO: 185498 - DNA, 25 bp, Probe sequence
tggcgttcgttcagcactagtacgt

SEQ ID NO: 185499 - DNA, 25 bp, Probe sequence
taaagtacctggcgttcgttcagca

SEQ ID NO: 185500 - DNA, 25 bp, Probe sequence
taggatgcgaccatattgttacaga

SEQ ID NO: 185501 - DNA, 25 bp, Probe sequence
atggcgattattattggttcagatg

SEQ ID NO: 185502 - DNA, 25 bp, Probe sequence
agctttatggttgctacaaaaatca

SEQ ID NO: 185503 - DNA, 25 bp, Probe sequence
acgatggtggtagacaccaaatccg

SEQ ID NO: 185504 - DNA, 25 bp, Probe sequence
acttaggtattgttatcgatgcatt

SEQ ID NO: 185505 - DNA, 25 bp, Probe sequence
acaattcaagaatgatcactatggg

SEQ ID NO: 185506 - DNA, 25 bp, Probe sequence
aaatcaaaggcatgattgctgctga

SEQ ID NO: 185507 - DNA, 25 bp, Probe sequence
aagaagtcatcaaatcatacttatt

SEQ ID NO: 185508 - DNA, 25 bp, Probe sequence
cgctctggatatatgactagaggcc

SEQ ID NO: 185509 - DNA, 25 bp, Probe sequence
gctggcaaacgattaaaagaagtca

SEQ ID NO: 185510 - DNA, 25 bp, Probe sequence
gaaggtaacttaggtattgttatcg

SEQ ID NO: 185511 - DNA, 25 bp, Probe sequence
gaagtatcagatgaacgctctggat

SEQ ID NO: 185512 - DNA, 25 bp, Probe sequence
gacacattagcgaaaaatgtcgtta

SEQ ID NO: 185513 - DNA, 25 bp, Probe sequence
gaaattgttggagacacattagcga

SEQ ID NO: 185514 - DNA, 25 bp, Probe sequence
gacaggaagttgactttgttgatgc

SEQ ID NO: 185515 - DNA, 25 bp, Probe sequence
gactagaggccataacaattcaaga

SEQ ID NO: 185516 - DNA, 25 bp, Probe sequence
gatgttcaaagtcaagaaggtaact

SEQ ID NO: 185517 - DNA, 25 bp, Probe sequence
gatgaagctggcaaacgattaaaag

SEQ ID NO: 185518 - DNA, 25 bp, Probe sequence
gatgaacgctctggatatatgacta

SEQ ID NO: 185519 - DNA, 25 bp, Probe sequence
gatgcaactttggctgtagcaaaag

SEQ ID NO: 185520 - DNA, 25 bp, Probe sequence
gattgctgctgaagtatcagatgaa

SEQ ID NO: 185521 - DNA, 25 bp, Probe sequence
gttgacgtaacagaaggacaggaag

SEQ ID NO: 185522 - DNA, 25 bp, Probe sequence
gttgatgcaactttggctgtagcaa

SEQ ID NO: 185523 - DNA, 25 bp, Probe sequence
gttatcgatgcatttggtgcaggta

SEQ ID NO: 185524 - DNA, 25 bp, Probe sequence
gtattgttatcgatgcatttggtgc

SEQ ID NO: 185525 - DNA, 25 bp, Probe sequence
gtagatatgcttaataaaatgtgct

SEQ ID NO: 185526 - DNA, 25 bp, Probe sequence
ggtgcaggtagctttatggttgcta

SEQ ID NO: 185527 - DNA, 25 bp, Probe sequence
ggtaaatacgatggtggtagacacc

SEQ ID NO: 185528 - DNA, 25 bp, Probe sequence
ggttttgttgaaggtaaatacgatg

SEQ ID NO: 185529 - DNA, 25 bp, Probe sequence
ggttcagatgaagctggcaaacgat

SEQ ID NO: 185530 - DNA, 25 bp, Probe sequence
tggctgtagcaaaagatgttcaaag

SEQ ID NO: 185531 - DNA, 25 bp, Probe sequence
tgcatttggtgcaggtagctttatg

SEQ ID NO: 185532 - DNA, 25 bp, Probe sequence
tcatcaaatcatacttattagacaa

SEQ ID NO: 185533 - DNA, 25 bp, Probe sequence
tttggtgcaggtagctttatggttg

SEQ ID NO: 185534 - DNA, 25 bp, Probe sequence
ttgttgatgcaactttggctgtagc

SEQ ID NO: 185535 - DNA, 25 bp, Probe sequence
atgtgtctgatatgacagttcgaag

SEQ ID NO: 185536 - DNA, 25 bp, Probe sequence
acatcattttgtcagttaaacgaat

SEQ ID NO: 185537 - DNA, 25 bp, Probe sequence
aaagctgcatcattaattgaagatg

SEQ ID NO: 185538 - DNA, 25 bp, Probe sequence
aaacatatattgaagtagtcgacta

SEQ ID NO: 185539 - DNA, 25 bp, Probe sequence
aaaacaaacagcacattttcgtgtc

SEQ ID NO: 185540 - DNA, 25 bp, Probe sequence
aaaagggcacgataagaacgaatga

SEQ ID NO: 185541 - DNA, 25 bp, Probe sequence
aacgaagattcatggtggtgcacgc

SEQ ID NO: 185542 - DNA, 25 bp, Probe sequence
aacagcacattttcgtgtctattta

SEQ ID NO: 185543 - DNA, 25 bp, Probe sequence
aagatttagcaagatgttctttagt

SEQ ID NO: 185544 - DNA, 25 bp, Probe sequence
aagtcaatcatcatacgctcacaat

SEQ ID NO: 185545 - DNA, 25 bp, Probe sequence
aattggtggtgaaatgcgccatatt

SEQ ID NO: 185546 - DNA, 25 bp, Probe sequence
caatcatcatacgctcacaattatt

SEQ ID NO: 185547 - DNA, 25 bp, Probe sequence
gcagtaattcaacatttcagtataa

SEQ ID NO: 185548 - DNA, 25 bp, Probe sequence
gcacgcagtaattcaacatttcagt

SEQ ID NO: 185549 - DNA, 25 bp, Probe sequence
gcacattttcgtgtctatttaattg

SEQ ID NO: 185550 - DNA, 25 bp, Probe sequence
gaagatggggatactttgtttttcg

SEQ ID NO: 185551 - DNA, 25 bp, Probe sequence
gaagattttacatcattttgtcagt

SEQ ID NO: 185552 - DNA, 25 bp, Probe sequence
gaagaagtcaatcatcatacgctca

SEQ ID NO: 185553 - DNA, 25 bp, Probe sequence
gaacgaatgaaatcgtcgaaggttt

SEQ ID NO: 185554 - DNA, 25 bp, Probe sequence
gactgcagtggtcatggactatgaa

SEQ ID NO: 185555 - DNA, 25 bp, Probe sequence
gatgttctttagtagtaacgcagta

SEQ ID NO: 185556 - DNA, 25 bp, Probe sequence
gattcatggtggtgcacgcagtaat

SEQ ID NO: 185557 - DNA, 25 bp, Probe sequence
gttaaacgaattgactgcagtggtc

SEQ ID NO: 185558 - DNA, 25 bp, Probe sequence
gtgaaatgcgccatattacagaagc

SEQ ID NO: 185559 - DNA, 25 bp, Probe sequence
gtggtgcacgcagtaattcaacatt

SEQ ID NO: 185560 - DNA, 25 bp, Probe sequence
ggtgctgtgatgacatctacattag

SEQ ID NO: 185561 - DNA, 25 bp, Probe sequence
ggaggcaattttacattgaataaac

SEQ ID NO: 185562 - DNA, 25 bp, Probe sequence
tgacagttcgaagagatttaattga

SEQ ID NO: 185563 - DNA, 25 bp, Probe sequence
tgaacgtttggacgaaattgctaaa

SEQ ID NO: 185564 - DNA, 25 bp, Probe sequence
tcgtcgaaggtttaaatgtgtctga

SEQ ID NO: 185565 - DNA, 25 bp, Probe sequence
tcatacgctcacaattattacgaat

SEQ ID NO: 185566 - DNA, 25 bp, Probe sequence
taaaggtgctgtgatgacatctaca

SEQ ID NO: 185567 - DNA, 25 bp, Probe sequence
tttcgtgtctatttaattggtggtg

SEQ ID NO: 185568 - DNA, 25 bp, Probe sequence
ttggacgaaattgctaaactagtga

SEQ ID NO: 185569 - DNA, 25 bp, Probe sequence
attttgtgcgaggagttttcatata

SEQ ID NO: 185570 - DNA, 25 bp, Probe sequence
atttatatgatgatagaggtctatg

SEQ ID NO: 185571 - DNA, 25 bp, Probe sequence
atttggttcatgtagtatatgttta

SEQ ID NO: 185572 - DNA, 25 bp, Probe sequence
ataatattttgtgcgaggagttttc

SEQ ID NO: 185573 - DNA, 25 bp, Probe sequence
aaaatttacatcgttaacaatagat

SEQ ID NO: 185574 - DNA, 25 bp, Probe sequence
aacgcaattcatttaagtttaagtg

SEQ ID NO: 185575 - DNA, 25 bp, Probe sequence
aagctatatccaatcaagactttaa

SEQ ID NO: 185576 - DNA, 25 bp, Probe sequence
caataatacttattttttagctgta

SEQ ID NO: 185577 - DNA, 25 bp, Probe sequence
catttttgaagatttgttttcgcct

SEQ ID NO: 185578 - DNA, 25 bp, Probe sequence
gccttctgattctataaatttggtt

SEQ ID NO: 185579 - DNA, 25 bp, Probe sequence
gctatatccaatcaagactttaaag

SEQ ID NO: 185580 - DNA, 25 bp, Probe sequence
gaagatttgttttcgccttctgatt

SEQ ID NO: 185581 - DNA, 25 bp, Probe sequence
gaagattatgcaagatattctgaaa

SEQ ID NO: 185582 - DNA, 25 bp, Probe sequence
gagttttcatataagtgttccataa

SEQ ID NO: 185583 - DNA, 25 bp, Probe sequence
gatgaattgtattactttaaagaat

SEQ ID NO: 185584 - DNA, 25 bp, Probe sequence
gataaataccagtttttggaggacg

SEQ ID NO: 185585 - DNA, 25 bp, Probe sequence
gattctataaatttggttcatgtag

SEQ ID NO: 185586 - DNA, 25 bp, Probe sequence
gttttcgccttctgattctataaat

SEQ ID NO: 185587 - DNA, 25 bp, Probe sequence
gtttaagtggcgataaataccagtt

SEQ ID NO: 185588 - DNA, 25 bp, Probe sequence
gtgcgaggagttttcatataagtgt

SEQ ID NO: 185589 - DNA, 25 bp, Probe sequence
gtggcgataaataccagtttttgga

SEQ ID NO: 185590 - DNA, 25 bp, Probe sequence
gggttagttccaaatatcaatcaga

SEQ ID NO: 185591 - DNA, 25 bp, Probe sequence
ggaggacggtaaaactatcaataat

SEQ ID NO: 185592 - DNA, 25 bp, Probe sequence
ggatgataatattttgtgcgaggag

SEQ ID NO: 185593 - DNA, 25 bp, Probe sequence
tcgccttctgattctataaatttgg

SEQ ID NO: 185594 - DNA, 25 bp, Probe sequence
taaagggttagttccaaatatcaat

SEQ ID NO: 185595 - DNA, 25 bp, Probe sequence
tacttattttttagctgtatatgat

SEQ ID NO: 185596 - DNA, 25 bp, Probe sequence
tagttccaaatatcaatcagaatga

SEQ ID NO: 185597 - DNA, 25 bp, Probe sequence
tatccaatcaagactttaaagggtt

SEQ ID NO: 185598 - DNA, 25 bp, Probe sequence
tttcgccttctgattctataaattt

SEQ ID NO: 185599 - DNA, 25 bp, Probe sequence
tttagctgtatatgataatgcaata

SEQ ID NO: 185600 - DNA, 25 bp, Probe sequence
ttgaagatttgttttcgccttctga

SEQ ID NO: 185601 - DNA, 25 bp, Probe sequence
ttcatataagtgttccataaaagat

SEQ ID NO: 185602 - DNA, 25 bp, Probe sequence
ttgttttcgccttctgattctataa

SEQ ID NO: 185603 - DNA, 25 bp, Probe sequence
attgaagcttcaggtattgatagaa

SEQ ID NO: 185604 - DNA, 25 bp, Probe sequence
agtgaactattcattacgactaaag

SEQ ID NO: 185605 - DNA, 25 bp, Probe sequence
agcacttacaagcagagaattagat

SEQ ID NO: 185606 - DNA, 25 bp, Probe sequence
aaattcaaccacaagtgaaccaaat

SEQ ID NO: 185607 - DNA, 25 bp, Probe sequence
aatccattccatcaacaagaagaac

SEQ ID NO: 185608 - DNA, 25 bp, Probe sequence
aatccagaacgtatggctcaaaact

SEQ ID NO: 185609 - DNA, 25 bp, Probe sequence
aatcaattgcacaagttattttacg

SEQ ID NO: 185610 - DNA, 25 bp, Probe sequence
aatttttctcacatgctgatccaga

SEQ ID NO: 185611 - DNA, 25 bp, Probe sequence
aattgttgcaggccattgcagataa

SEQ ID NO: 185612 - DNA, 25 bp, Probe sequence
gcaatcggtgtatctaacttcggcg

SEQ ID NO: 185613 - DNA, 25 bp, Probe sequence
ctcacatgctgatccagagatgatt

SEQ ID NO: 185614 - DNA, 25 bp, Probe sequence
cgaacgatcattacaacgattaaat

SEQ ID NO: 185615 - DNA, 25 bp, Probe sequence
gccaatttttctcacatgctgatcc

SEQ ID NO: 185616 - DNA, 25 bp, Probe sequence
gcttgggcaccatttgcagaaggta

SEQ ID NO: 185617 - DNA, 25 bp, Probe sequence
gcagaagcggttaaagaagcaatta

SEQ ID NO: 185618 - DNA, 25 bp, Probe sequence
gaacgtatggctcaaaacttagata

SEQ ID NO: 185619 - DNA, 25 bp, Probe sequence
gaaaatgttgtggtagaagcttggg

SEQ ID NO: 185620 - DNA, 25 bp, Probe sequence
gaacaagttgcagcacttcaacaag

SEQ ID NO: 185621 - DNA, 25 bp, Probe sequence
gaaattaatccattccatcaacaag

SEQ ID NO: 185622 - DNA, 25 bp, Probe sequence
gataaacaacaaattgcgacattag

SEQ ID NO: 185623 - DNA, 25 bp, Probe sequence
gatactatcaaatcaatcgaacgat

SEQ ID NO: 185624 - DNA, 25 bp, Probe sequence
gatatatttgattttgaacttacag

SEQ ID NO: 185625 - DNA, 25 bp, Probe sequence
gtattcacaatcaaattcaaccaca

SEQ ID NO: 185626 - DNA, 25 bp, Probe sequence
gtatatggctcatggcgtgcattag

SEQ ID NO: 185627 - DNA, 25 bp, Probe sequence
gtaggtcaaggtattgaagcttcag

SEQ ID NO: 185628 - DNA, 25 bp, Probe sequence
gtagaagcttgggcaccatttgcag

SEQ ID NO: 185629 - DNA, 25 bp, Probe sequence
gtaatagccaatttttctcacatgc

SEQ ID NO: 185630 - DNA, 25 bp, Probe sequence
gtgtatctaacttcggcgttgatcg

SEQ ID NO: 185631 - DNA, 25 bp, Probe sequence
ggcgttgatcgaattgtagatttag

SEQ ID NO: 185632 - DNA, 25 bp, Probe sequence
ggctcatggcgtgcattagaagagt

SEQ ID NO: 185633 - DNA, 25 bp, Probe sequence
tcctcaagaacaaacagcagaagcg

SEQ ID NO: 185634 - DNA, 25 bp, Probe sequence
tccagagatgattaaagcacttaca

SEQ ID NO: 185635 - DNA, 25 bp, Probe sequence
ttcggagtatttcaaattcctcaag

SEQ ID NO: 185636 - DNA, 25 bp, Probe sequence
ttccaaaatcaattgttgcaggcca

SEQ ID NO: 185637 - DNA, 25 bp, Probe sequence
attgctaaaatcaatgctagtgata

SEQ ID NO: 185638 - DNA, 25 bp, Probe sequence
atgaaaaggttggtgtgattccacc

SEQ ID NO: 185639 - DNA, 25 bp, Probe sequence
atgcaggcgtcagtattgaatcgct

SEQ ID NO: 185640 - DNA, 25 bp, Probe sequence
agcgctcatgaatatatctcaagac

SEQ ID NO: 185641 - DNA, 25 bp, Probe sequence
aaatttgcgaaatgcaggcgtcagt

SEQ ID NO: 185642 - DNA, 25 bp, Probe sequence
aagaagtcgtagcgctcatgaatat

SEQ ID NO: 185643 - DNA, 25 bp, Probe sequence
aactaaagaagtcgtagcgctcatg

SEQ ID NO: 185644 - DNA, 25 bp, Probe sequence
aagacaattcatgatgcgagagatt

SEQ ID NO: 185645 - DNA, 25 bp, Probe sequence
aagtcgtagcgctcatgaatatatc

SEQ ID NO: 185646 - DNA, 25 bp, Probe sequence
aatgttgaacgtctttgggagagaa

SEQ ID NO: 185647 - DNA, 25 bp, Probe sequence
aatcatattgctaaaatcaatgcta

SEQ ID NO: 185648 - DNA, 25 bp, Probe sequence
aattcatgatgcgagagatttacta

SEQ ID NO: 185649 - DNA, 25 bp, Probe sequence
ctcaagacactttaagatattatga

SEQ ID NO: 185650 - DNA, 25 bp, Probe sequence
cgtcagtattgaatcgcttatcgaa

SEQ ID NO: 185651 - DNA, 25 bp, Probe sequence
gcgaaatgcaggcgtcagtattgaa

SEQ ID NO: 185652 - DNA, 25 bp, Probe sequence
gctcatgaatatatctcaagacact

SEQ ID NO: 185653 - DNA, 25 bp, Probe sequence
gcaggcgtcagtattgaatcgctta

SEQ ID NO: 185654 - DNA, 25 bp, Probe sequence
gcaaattttaaataagcaactcgaa

SEQ ID NO: 185655 - DNA, 25 bp, Probe sequence
gaatatatctcaagacactttaaga

SEQ ID NO: 185656 - DNA, 25 bp, Probe sequence
gaagtcgtagcgctcatgaatatat

SEQ ID NO: 185657 - DNA, 25 bp, Probe sequence
gaaaactaaagaagtcgtagcgctc

SEQ ID NO: 185658 - DNA, 25 bp, Probe sequence
gaaaaatttgcgaaatgcaggcgtc

SEQ ID NO: 185659 - DNA, 25 bp, Probe sequence
gaaatgcaggcgtcagtattgaatc

SEQ ID NO: 185660 - DNA, 25 bp, Probe sequence
gacaatgttgaacgtctttgggaga

SEQ ID NO: 185661 - DNA, 25 bp, Probe sequence
gatgacaatgttgaacgtctttggg

SEQ ID NO: 185662 - DNA, 25 bp, Probe sequence
gatattatgaaaaggttggtgtgat

SEQ ID NO: 185663 - DNA, 25 bp, Probe sequence
gttgaacgtctttgggagagaaagt

SEQ ID NO: 185664 - DNA, 25 bp, Probe sequence
gtattgaatcgcttatcgaattttg

SEQ ID NO: 185665 - DNA, 25 bp, Probe sequence
gtagcgctcatgaatatatctcaag

SEQ ID NO: 185666 - DNA, 25 bp, Probe sequence
gtcgtagcgctcatgaatatatctc

SEQ ID NO: 185667 - DNA, 25 bp, Probe sequence
ggcgtcagtattgaatcgcttatcg

SEQ ID NO: 185668 - DNA, 25 bp, Probe sequence
tcgtagcgctcatgaatatatctca

SEQ ID NO: 185669 - DNA, 25 bp, Probe sequence
taaagaagtcgtagcgctcatgaat

SEQ ID NO: 185670 - DNA, 25 bp, Probe sequence
ttgcgaaatgcaggcgtcagtattg

SEQ ID NO: 185671 - DNA, 25 bp, Probe sequence
ataaattctttccagccgattagta

SEQ ID NO: 185672 - DNA, 25 bp, Probe sequence
atattgcagattcctgatataagat

SEQ ID NO: 185673 - DNA, 25 bp, Probe sequence
ataataatatattgcagattcctga

SEQ ID NO: 185674 - DNA, 25 bp, Probe sequence
atgggagtattatttaagattgttt

SEQ ID NO: 185675 - DNA, 25 bp, Probe sequence
agaattcatcactaaagattatttt

SEQ ID NO: 185676 - DNA, 25 bp, Probe sequence
acgcttgcataaattctttccagcc

SEQ ID NO: 185677 - DNA, 25 bp, Probe sequence
acaacacagaattcatcactaaaga

SEQ ID NO: 185678 - DNA, 25 bp, Probe sequence
aaatgattctaatacggaagatata

SEQ ID NO: 185679 - DNA, 25 bp, Probe sequence
aaaatccagtaatagattcttcgga

SEQ ID NO: 185680 - DNA, 25 bp, Probe sequence
aaaacaacacagaattcatcactaa

SEQ ID NO: 185681 - DNA, 25 bp, Probe sequence
aaaaggtaatagttacgcttgcata

SEQ ID NO: 185682 - DNA, 25 bp, Probe sequence
aatgttattcccttatcttctaaag

SEQ ID NO: 185683 - DNA, 25 bp, Probe sequence
aattttctaattcacactttgcaat

SEQ ID NO: 185684 - DNA, 25 bp, Probe sequence
aattcacactttgcaatagtgatga

SEQ ID NO: 185685 - DNA, 25 bp, Probe sequence
aattctttccagccgattagtaagt

SEQ ID NO: 185686 - DNA, 25 bp, Probe sequence
cttgcataaattctttccagccgat

SEQ ID NO: 185687 - DNA, 25 bp, Probe sequence
gccgattagtaagtttcgcataaga

SEQ ID NO: 185688 - DNA, 25 bp, Probe sequence
gcataaattctttccagccgattag

SEQ ID NO: 185689 - DNA, 25 bp, Probe sequence
gaaacattaataacatagtatcagc

SEQ ID NO: 185690 - DNA, 25 bp, Probe sequence
gacgcataatatagaaaaacgcatt

SEQ ID NO: 185691 - DNA, 25 bp, Probe sequence
gatatagtaaatgttattcccttat

SEQ ID NO: 185692 - DNA, 25 bp, Probe sequence
gatattcactatttactcaagagat

SEQ ID NO: 185693 - DNA, 25 bp, Probe sequence
gattcagatattcactatttactca

SEQ ID NO: 185694 - DNA, 25 bp, Probe sequence
gattcttcggatattatgttactga

SEQ ID NO: 185695 - DNA, 25 bp, Probe sequence
gttacgcttgcataaattctttcca

SEQ ID NO: 185696 - DNA, 25 bp, Probe sequence
gtaaatgttattcccttatcttcta

SEQ ID NO: 185697 - DNA, 25 bp, Probe sequence
tgttattcccttatcttctaaagaa

SEQ ID NO: 185698 - DNA, 25 bp, Probe sequence
tagcgcgcaaaataattcagctata

SEQ ID NO: 185699 - DNA, 25 bp, Probe sequence
tattcactatttactcaagagattt

SEQ ID NO: 185700 - DNA, 25 bp, Probe sequence
tttctaattcacactttgcaatagt

SEQ ID NO: 185701 - DNA, 25 bp, Probe sequence
tttaaatttaattagcgcgcaaaat

SEQ ID NO: 185702 - DNA, 25 bp, Probe sequence
ttagtgaatttatatctgatagttt

SEQ ID NO: 185703 - DNA, 25 bp, Probe sequence
ttcttcggatattatgttactgata

SEQ ID NO: 185704 - DNA, 25 bp, Probe sequence
ttccagccgattagtaagtttcgca

SEQ ID NO: 185705 - DNA, 25 bp, Probe sequence
attgcgccagcaaatggtacagttg

SEQ ID NO: 185706 - DNA, 25 bp, Probe sequence
attctactgaacctcatatacattt

SEQ ID NO: 185707 - DNA, 25 bp, Probe sequence
agtgccgacaacagattgctatgag

SEQ ID NO: 185708 - DNA, 25 bp, Probe sequence
agtattatcggatttgttatgcgtc

SEQ ID NO: 185709 - DNA, 25 bp, Probe sequence
aagacaacagtattggaagtacgaa

SEQ ID NO: 185710 - DNA, 25 bp, Probe sequence
aaggtatgctattgatttagttatt

SEQ ID NO: 185711 - DNA, 25 bp, Probe sequence
aatacgcagtgccgacaacagattg

SEQ ID NO: 185712 - DNA, 25 bp, Probe sequence
aattctggcaattctactgaacctc

SEQ ID NO: 185713 - DNA, 25 bp, Probe sequence
gcgccagcaaatggtacagttgaaa

SEQ ID NO: 185714 - DNA, 25 bp, Probe sequence
gcagtgccgacaacagattgctatg

SEQ ID NO: 185715 - DNA, 25 bp, Probe sequence
gcacgcagaaaatgagtatagctta

SEQ ID NO: 185716 - DNA, 25 bp, Probe sequence
gaattatataattatcactatttat

SEQ ID NO: 185717 - DNA, 25 bp, Probe sequence
gaatcacagtttttaggaaattata

SEQ ID NO: 185718 - DNA, 25 bp, Probe sequence
gaatggggttcaagacaacagtatt

SEQ ID NO: 185719 - DNA, 25 bp, Probe sequence
gaagcgagagtttagttattggcag

SEQ ID NO: 185720 - DNA, 25 bp, Probe sequence
gaaacgactttaaaatacgcagtgc

SEQ ID NO: 185721 - DNA, 25 bp, Probe sequence
gactttaaaatacgcagtgccgaca

SEQ ID NO: 185722 - DNA, 25 bp, Probe sequence
gagtttagttattggcagtttagga

SEQ ID NO: 185723 - DNA, 25 bp, Probe sequence
gagtatagcttaatagctcatttac

SEQ ID NO: 185724 - DNA, 25 bp, Probe sequence
gatgcgattaagaatgaaacgactt

SEQ ID NO: 185725 - DNA, 25 bp, Probe sequence
gatcaaaatttgaagcgagagttta

SEQ ID NO: 185726 - DNA, 25 bp, Probe sequence
gatatcattgcgccagcaaatggta

SEQ ID NO: 185727 - DNA, 25 bp, Probe sequence
gtgaatgaggggcaaaatgttaaat

SEQ ID NO: 185728 - DNA, 25 bp, Probe sequence
gggaaggttgggaattctggcaatt

SEQ ID NO: 185729 - DNA, 25 bp, Probe sequence
ggggttcaagacaacagtattggaa

SEQ ID NO: 185730 - DNA, 25 bp, Probe sequence
ggaaaagatatcattgcgccagcaa

SEQ ID NO: 185731 - DNA, 25 bp, Probe sequence
ggcaattctactgaacctcatatac

SEQ ID NO: 185732 - DNA, 25 bp, Probe sequence
tcggatttgttatgcgtccgttaat

SEQ ID NO: 185733 - DNA, 25 bp, Probe sequence
tctggcaattctactgaacctcata

SEQ ID NO: 185734 - DNA, 25 bp, Probe sequence
tacgcagtgccgacaacagattgct

SEQ ID NO: 185735 - DNA, 25 bp, Probe sequence
taggaaacttttcaaatcttataca

SEQ ID NO: 185736 - DNA, 25 bp, Probe sequence
tatcggatttgttatgcgtccgtta

SEQ ID NO: 185737 - DNA, 25 bp, Probe sequence
ttttttggggtggagataatgaatt

SEQ ID NO: 185738 - DNA, 25 bp, Probe sequence
ttaaaagtgtgtactcaaaatgatg

SEQ ID NO: 185739 - DNA, 25 bp, Probe sequence
atttctgcgcaatataatgtcgaat

SEQ ID NO: 185740 - DNA, 25 bp, Probe sequence
atattaggttttggagatagcggca

SEQ ID NO: 185741 - DNA, 25 bp, Probe sequence
atgttcacttggaataatggcgaat

SEQ ID NO: 185742 - DNA, 25 bp, Probe sequence
atggatcaagttaatatgacgttta

SEQ ID NO: 185743 - DNA, 25 bp, Probe sequence
agaaagtcttgagcgaaccattttt

SEQ ID NO: 185744 - DNA, 25 bp, Probe sequence
acttgtcagatacgcaaatgaccaa

SEQ ID NO: 185745 - DNA, 25 bp, Probe sequence
aacacattataatttttattttcat

SEQ ID NO: 185746 - DNA, 25 bp, Probe sequence
aagcgtctattattgtttgattttg

SEQ ID NO: 185747 - DNA, 25 bp, Probe sequence
cactgcatgttaaagaatttgttga

SEQ ID NO: 185748 - DNA, 25 bp, Probe sequence
cttcacaccgtcaaatgctggaaaa

SEQ ID NO: 185749 - DNA, 25 bp, Probe sequence
gcgtatgatattgacttcacaccgt

SEQ ID NO: 185750 - DNA, 25 bp, Probe sequence
gctggtgatcctgaaaatgcgtatg

SEQ ID NO: 185751 - DNA, 25 bp, Probe sequence
gcatatttaagctatcttgaacatg

SEQ ID NO: 185752 - DNA, 25 bp, Probe sequence
gcaaatgaccaaaactatacagcga

SEQ ID NO: 185753 - DNA, 25 bp, Probe sequence
gcaatccattagctggtgatcctga

SEQ ID NO: 185754 - DNA, 25 bp, Probe sequence
gacttcacaccgtcaaatgctggaa

SEQ ID NO: 185755 - DNA, 25 bp, Probe sequence
gacgtttaaaccattacatatcttt

SEQ ID NO: 185756 - DNA, 25 bp, Probe sequence
gacgaagcatatttaagctatcttg

SEQ ID NO: 185757 - DNA, 25 bp, Probe sequence
gagttctaaaatgttcacttggaat

SEQ ID NO: 185758 - DNA, 25 bp, Probe sequence
gatgtcgaatagtagagatgaagca

SEQ ID NO: 185759 - DNA, 25 bp, Probe sequence
gtcttgagcgaaccatttttatttg

SEQ ID NO: 185760 - DNA, 25 bp, Probe sequence
gtctattattgtttgattttgatga

SEQ ID NO: 185761 - DNA, 25 bp, Probe sequence
gtcgaatttattccacaaagagcat

SEQ ID NO: 185762 - DNA, 25 bp, Probe sequence
ggagatagcggcaatgacgaagcat

SEQ ID NO: 185763 - DNA, 25 bp, Probe sequence
ggaagtacatttcaaagtgtcatgg

SEQ ID NO: 185764 - DNA, 25 bp, Probe sequence
tgagcgaaccatttttatttgaaga

SEQ ID NO: 185765 - DNA, 25 bp, Probe sequence
tcattcaacaggtaatcacaacaat

SEQ ID NO: 185766 - DNA, 25 bp, Probe sequence
taatggcgaatatgttgaatcagaa

SEQ ID NO: 185767 - DNA, 25 bp, Probe sequence
taaaccattacatatcttttctgat

SEQ ID NO: 185768 - DNA, 25 bp, Probe sequence
tagtcgaagcaatccattagctggt

SEQ ID NO: 185769 - DNA, 25 bp, Probe sequence
tatcttttctgatttgagttctaaa

SEQ ID NO: 185770 - DNA, 25 bp, Probe sequence
tatacagcgagatttagtcgaagca

SEQ ID NO: 185771 - DNA, 25 bp, Probe sequence
ttattttcattcaacaggtaatcac

SEQ ID NO: 185772 - DNA, 25 bp, Probe sequence
ttatcaagggataacactgcatgtt

SEQ ID NO: 185773 - DNA, 25 bp, Probe sequence
atatagcccctatgataaaacagaa

SEQ ID NO: 185774 - DNA, 25 bp, Probe sequence
atagcccctatgataaaacagaaat

SEQ ID NO: 185775 - DNA, 25 bp, Probe sequence
agtttaaccaatatgttgctcgctt

SEQ ID NO: 185776 - DNA, 25 bp, Probe sequence
accaatatgttgctcgcttcatacc

SEQ ID NO: 185777 - DNA, 25 bp, Probe sequence
accgtatattgcaacaaaaattccg

SEQ ID NO: 185778 - DNA, 25 bp, Probe sequence
aaaacagaaatccgatgctgaatta

SEQ ID NO: 185779 - DNA, 25 bp, Probe sequence
aacagaaatccgatgctgaattatt

SEQ ID NO: 185780 - DNA, 25 bp, Probe sequence
aaccaatatgttgctcgcttcatac

SEQ ID NO: 185781 - DNA, 25 bp, Probe sequence
aagaaaaatatagcccctatgataa

SEQ ID NO: 185782 - DNA, 25 bp, Probe sequence
aagtttaaccaatatgttgctcgct

SEQ ID NO: 185783 - DNA, 25 bp, Probe sequence
aatccgatgctgaattattaaaaaa

SEQ ID NO: 185784 - DNA, 25 bp, Probe sequence
caatatgttgctcgcttcataccgt

SEQ ID NO: 185785 - DNA, 25 bp, Probe sequence
cagaaatccgatgctgaattattaa

SEQ ID NO: 185786 - DNA, 25 bp, Probe sequence
cataccgtatattgcaacaaaaatt

SEQ ID NO: 185787 - DNA, 25 bp, Probe sequence
cttcataccgtatattgcaacaaaa

SEQ ID NO: 185788 - DNA, 25 bp, Probe sequence
ctcgcttcataccgtatattgcaac

SEQ ID NO: 185789 - DNA, 25 bp, Probe sequence
cgtatattgcaacaaaaattccgat

SEQ ID NO: 185790 - DNA, 25 bp, Probe sequence
cgcttcataccgtatattgcaacaa

SEQ ID NO: 185791 - DNA, 25 bp, Probe sequence
ccaatatgttgctcgcttcataccg

SEQ ID NO: 185792 - DNA, 25 bp, Probe sequence
gcccctatgataaaacagaaatccg

SEQ ID NO: 185793 - DNA, 25 bp, Probe sequence
gctcgcttcataccgtatattgcaa

SEQ ID NO: 185794 - DNA, 25 bp, Probe sequence
gcttcataccgtatattgcaacaaa

SEQ ID NO: 185795 - DNA, 25 bp, Probe sequence
gaaaaatatagcccctatgataaaa

SEQ ID NO: 185796 - DNA, 25 bp, Probe sequence
gaaatccgatgctgaattattaaaa

SEQ ID NO: 185797 - DNA, 25 bp, Probe sequence
gataaaacagaaatccgatgctgaa

SEQ ID NO: 185798 - DNA, 25 bp, Probe sequence
gtttaaccaatatgttgctcgcttc

SEQ ID NO: 185799 - DNA, 25 bp, Probe sequence
tgctcgcttcataccgtatattgca

SEQ ID NO: 185800 - DNA, 25 bp, Probe sequence
tcgcttcataccgtatattgcaaca

SEQ ID NO: 185801 - DNA, 25 bp, Probe sequence
taaccaatatgttgctcgcttcata

SEQ ID NO: 185802 - DNA, 25 bp, Probe sequence
tatagcccctatgataaaacagaaa

SEQ ID NO: 185803 - DNA, 25 bp, Probe sequence
tttaaccaatatgttgctcgcttca

SEQ ID NO: 185804 - DNA, 25 bp, Probe sequence
ttaaccaatatgttgctcgcttcat

SEQ ID NO: 185805 - DNA, 25 bp, Probe sequence
ttcataccgtatattgcaacaaaaa

SEQ ID NO: 185806 - DNA, 25 bp, Probe sequence
ttgctcgcttcataccgtatattgc

SEQ ID NO: 185807 - DNA, 25 bp, Probe sequence
attaaaaggaactgcatcaataaat

SEQ ID NO: 185808 - DNA, 25 bp, Probe sequence
aggtatcgctacactaacaggttca

SEQ ID NO: 185809 - DNA, 25 bp, Probe sequence
agcagatacaagctatgaaacgaaa

SEQ ID NO: 185810 - DNA, 25 bp, Probe sequence
acatttgaacagcattttccaattc

SEQ ID NO: 185811 - DNA, 25 bp, Probe sequence
acatggtacattaggcacattaatg

SEQ ID NO: 185812 - DNA, 25 bp, Probe sequence
aaatgcatgtacgtatgatgccggc

SEQ ID NO: 185813 - DNA, 25 bp, Probe sequence
aacaccatatgcaactgtaactaaa

SEQ ID NO: 185814 - DNA, 25 bp, Probe sequence
aacatttgaacagcattttccaatt

SEQ ID NO: 185815 - DNA, 25 bp, Probe sequence
aagatgttgagtgaaaatttatttt

SEQ ID NO: 185816 - DNA, 25 bp, Probe sequence
caccatatgcaactgtaactaaatt

SEQ ID NO: 185817 - DNA, 25 bp, Probe sequence
catttgaacagcattttccaattca

SEQ ID NO: 185818 - DNA, 25 bp, Probe sequence
gcagtaaaaatttcaggcttattta

SEQ ID NO: 185819 - DNA, 25 bp, Probe sequence
gaaacatttgaacagcattttccaa

SEQ ID NO: 185820 - DNA, 25 bp, Probe sequence
gacatgtcttagattttgaagtaga

SEQ ID NO: 185821 - DNA, 25 bp, Probe sequence
gagttaacaccatatgcaactgtaa

SEQ ID NO: 185822 - DNA, 25 bp, Probe sequence
gatacaagctatgaaacgaaagata

SEQ ID NO: 185823 - DNA, 25 bp, Probe sequence
gatttcactaaagcaaatattgact

SEQ ID NO: 185824 - DNA, 25 bp, Probe sequence
gttaacaccatatgcaactgtaact

SEQ ID NO: 185825 - DNA, 25 bp, Probe sequence
gtatcgctacactaacaggttcaaa

SEQ ID NO: 185826 - DNA, 25 bp, Probe sequence
gtagaaatccaaaatatagaaacat

SEQ ID NO: 185827 - DNA, 25 bp, Probe sequence
gtacattaggcacattaatggcagg

SEQ ID NO: 185828 - DNA, 25 bp, Probe sequence
ggtggacatgtcttagattttgaag

SEQ ID NO: 185829 - DNA, 25 bp, Probe sequence
ggtatcgctacactaacaggttcaa

SEQ ID NO: 185830 - DNA, 25 bp, Probe sequence
ggaactgcatcaataaatgaattat

SEQ ID NO: 185831 - DNA, 25 bp, Probe sequence
tggacatgtcttagattttgaagta

SEQ ID NO: 185832 - DNA, 25 bp, Probe sequence
tgaacagcattttccaattcaagat

SEQ ID NO: 185833 - DNA, 25 bp, Probe sequence
tcaggcttatttaaaaaaatgcatg

SEQ ID NO: 185834 - DNA, 25 bp, Probe sequence
taacaccatatgcaactgtaactaa

SEQ ID NO: 185835 - DNA, 25 bp, Probe sequence
taaatgaattattgcaacatggtga

SEQ ID NO: 185836 - DNA, 25 bp, Probe sequence
tagattttgaagtagaagatgttaa

SEQ ID NO: 185837 - DNA, 25 bp, Probe sequence
taggtatcgctacactaacaggttc

SEQ ID NO: 185838 - DNA, 25 bp, Probe sequence
tttggtggacatgtcttagattttg

SEQ ID NO: 185839 - DNA, 25 bp, Probe sequence
ttaacaccatatgcaactgtaacta

SEQ ID NO: 185840 - DNA, 25 bp, Probe sequence
ttcactaaagcaaatattgactata

SEQ ID NO: 185841 - DNA, 25 bp, Probe sequence
atatgtttttggtattccgggtgca

SEQ ID NO: 185842 - DNA, 25 bp, Probe sequence
atgatggtcctgaacttattgtcac

SEQ ID NO: 185843 - DNA, 25 bp, Probe sequence
atggcgcaagttttattagtattcc

SEQ ID NO: 185844 - DNA, 25 bp, Probe sequence
agtacaagatcctgaatcattatca

SEQ ID NO: 185845 - DNA, 25 bp, Probe sequence
agtcactatatttggatggcacgta

SEQ ID NO: 185846 - DNA, 25 bp, Probe sequence
agataatatcaaactttcaacaaat

SEQ ID NO: 185847 - DNA, 25 bp, Probe sequence
acactgcagccgatatggttattga

SEQ ID NO: 185848 - DNA, 25 bp, Probe sequence
aaattactaattatatgcaaccgaa

SEQ ID NO: 185849 - DNA, 25 bp, Probe sequence
aaactggtattaaagcgacgcatga

SEQ ID NO: 185850 - DNA, 25 bp, Probe sequence
aaaagtacactgcagccgatatggt

SEQ ID NO: 185851 - DNA, 25 bp, Probe sequence
aatgctttaattgatgatggtcctg

SEQ ID NO: 185852 - DNA, 25 bp, Probe sequence
caagttggtgatgaattattacgta

SEQ ID NO: 185853 - DNA, 25 bp, Probe sequence
caacaaatatgttacctgacgtatt

SEQ ID NO: 185854 - DNA, 25 bp, Probe sequence
cagaagttatgacaaatgcaattcg

SEQ ID NO: 185855 - DNA, 25 bp, Probe sequence
cttggtgtagcattaccgtgggcaa

SEQ ID NO: 185856 - DNA, 25 bp, Probe sequence
ccgggtgtagtacttgttacaagtg

SEQ ID NO: 185857 - DNA, 25 bp, Probe sequence
gccgatatggttattgatactttga

SEQ ID NO: 185858 - DNA, 25 bp, Probe sequence
gcattaccgtgggcaatttcagctg

SEQ ID NO: 185859 - DNA, 25 bp, Probe sequence
gcaagttttattagtattccgcaag

SEQ ID NO: 185860 - DNA, 25 bp, Probe sequence
gaatctatgcaaaaggtattaactg

SEQ ID NO: 185861 - DNA, 25 bp, Probe sequence
gaagttacaatccaagacatttatt

SEQ ID NO: 185862 - DNA, 25 bp, Probe sequence
gactatctatttaatgctttaattg

SEQ ID NO: 185863 - DNA, 25 bp, Probe sequence
gacgaagttcaagctgaaattacta

SEQ ID NO: 185864 - DNA, 25 bp, Probe sequence
gatttattacgattaacgcatcaaa

SEQ ID NO: 185865 - DNA, 25 bp, Probe sequence
gtgaagaagtacaagatcctgaatc

SEQ ID NO: 185866 - DNA, 25 bp, Probe sequence
tgattggtaatattgctaaaacgat

SEQ ID NO: 185867 - DNA, 25 bp, Probe sequence
ggtttacgagttactaatcaagaag

SEQ ID NO: 185868 - DNA, 25 bp, Probe sequence
ggatggcacgtaatttcagaagtta

SEQ ID NO: 185869 - DNA, 25 bp, Probe sequence
ggctttttattttcatcacaagatt

SEQ ID NO: 185870 - DNA, 25 bp, Probe sequence
ggccaagtgaaacgtaatgatttat

SEQ ID NO: 185871 - DNA, 25 bp, Probe sequence
taatggggtagaatatgtttttggt

SEQ ID NO: 185872 - DNA, 25 bp, Probe sequence
tagttgttacaatcggttatgatcc

SEQ ID NO: 185873 - DNA, 25 bp, Probe sequence
tatgttacctgacgtatttaactaa

SEQ ID NO: 185874 - DNA, 25 bp, Probe sequence
tttttggtattccgggtgcaaagat

SEQ ID NO: 185875 - DNA, 25 bp, Probe sequence
atacacaacagatcaaacgaatatt

SEQ ID NO: 185876 - DNA, 25 bp, Probe sequence
atgagtgacactataacaataaatg

SEQ ID NO: 185877 - DNA, 25 bp, Probe sequence
atggtcaagttactgcggaagcaca

SEQ ID NO: 185878 - DNA, 25 bp, Probe sequence
agttactgcggaagcacaaggcatt

SEQ ID NO: 185879 - DNA, 25 bp, Probe sequence
agcacaaggcattgctacggttaaa

SEQ ID NO: 185880 - DNA, 25 bp, Probe sequence
actgcggaagcacaaggcattgcta

SEQ ID NO: 185881 - DNA, 25 bp, Probe sequence
acagttggtaatatgagtgacacta

SEQ ID NO: 185882 - DNA, 25 bp, Probe sequence
acaaggcattgctacggttaaagca

SEQ ID NO: 185883 - DNA, 25 bp, Probe sequence
aagcacaaggcattgctacggttaa

SEQ ID NO: 185884 - DNA, 25 bp, Probe sequence
aagttactgcggaagcacaaggcat

SEQ ID NO: 185885 - DNA, 25 bp, Probe sequence
aaggcattgctacggttaaagcaac

SEQ ID NO: 185886 - DNA, 25 bp, Probe sequence
cacaaggcattgctacggttaaagc

SEQ ID NO: 185887 - DNA, 25 bp, Probe sequence
gctacggttaaagcaacagttggta

SEQ ID NO: 185888 - DNA, 25 bp, Probe sequence
ctgcggaagcacaaggcattgctac

SEQ ID NO: 185889 - DNA, 25 bp, Probe sequence
cggaagcacaaggcattgctacggt

SEQ ID NO: 185890 - DNA, 25 bp, Probe sequence
gcggaagcacaaggcattgctacgg

SEQ ID NO: 185891 - DNA, 25 bp, Probe sequence
gcacaaggcattgctacggttaaag

SEQ ID NO: 185892 - DNA, 25 bp, Probe sequence
gcaacagttggtaatatgagtgaca

SEQ ID NO: 185893 - DNA, 25 bp, Probe sequence
gaagcacaaggcattgctacggtta

SEQ ID NO: 185894 - DNA, 25 bp, Probe sequence
gaaatacacaacagatcaaacgaat

SEQ ID NO: 185895 - DNA, 25 bp, Probe sequence
gagtgacactataacaataaatgta

SEQ ID NO: 185896 - DNA, 25 bp, Probe sequence
gatggtcaagttactgcggaagcac

SEQ ID NO: 185897 - DNA, 25 bp, Probe sequence
gatcaaacgaatattgtatcaatca

SEQ ID NO: 185898 - DNA, 25 bp, Probe sequence
gttggtaatatgagtgacactataa

SEQ ID NO: 185899 - DNA, 25 bp, Probe sequence
gttactgcggaagcacaaggcattg

SEQ ID NO: 185900 - DNA, 25 bp, Probe sequence
ttactgcggaagcacaaggcattgc

SEQ ID NO: 185901 - DNA, 25 bp, Probe sequence
gtcaagttactgcggaagcacaagg

SEQ ID NO: 185902 - DNA, 25 bp, Probe sequence
ggtcaagttactgcggaagcacaag

SEQ ID NO: 185903 - DNA, 25 bp, Probe sequence
ggaagcacaaggcattgctacggtt

SEQ ID NO: 185904 - DNA, 25 bp, Probe sequence
ggcattgctacggttaaagcaacag

SEQ ID NO: 185905 - DNA, 25 bp, Probe sequence
tggtcaagttactgcggaagcacaa

SEQ ID NO: 185906 - DNA, 25 bp, Probe sequence
tgcggaagcacaaggcattgctacg

SEQ ID NO: 185907 - DNA, 25 bp, Probe sequence
tcaagttactgcggaagcacaaggc

SEQ ID NO: 185908 - DNA, 25 bp, Probe sequence
tactgcggaagcacaaggcattgct

SEQ ID NO: 185909 - DNA, 25 bp, Probe sequence
ataagtattttgagacgctaaaaag

SEQ ID NO: 185910 - DNA, 25 bp, Probe sequence
atcaaacctaaagctatgggcggtg

SEQ ID NO: 185911 - DNA, 25 bp, Probe sequence
agagcaataagacaagggcaaaata

SEQ ID NO: 185912 - DNA, 25 bp, Probe sequence
agccctcaaaagatacgggagcatt

SEQ ID NO: 185913 - DNA, 25 bp, Probe sequence
acctaaagctatgggcggtgttaat

SEQ ID NO: 185914 - DNA, 25 bp, Probe sequence
acaactaaagccctcaaaagatacg

SEQ ID NO: 185915 - DNA, 25 bp, Probe sequence
aaatcgtacatttaattgaatatgg

SEQ ID NO: 185916 - DNA, 25 bp, Probe sequence
aaagccctcaaaagatacgggagca

SEQ ID NO: 185917 - DNA, 25 bp, Probe sequence
aaaagatacgggagcattaattaat

SEQ ID NO: 185918 - DNA, 25 bp, Probe sequence
caaacctaaagctatgggcggtgtt

SEQ ID NO: 185919 - DNA, 25 bp, Probe sequence
aacgttttggcataaaagagatggt

SEQ ID NO: 185920 - DNA, 25 bp, Probe sequence
aagctatgggcggtgttaatagagc

SEQ ID NO: 185921 - DNA, 25 bp, Probe sequence
aagtgataggtgataaagcattaga

SEQ ID NO: 185922 - DNA, 25 bp, Probe sequence
caactaaagccctcaaaagatacgg

SEQ ID NO: 185923 - DNA, 25 bp, Probe sequence
catttaattgaatatggacacgttc

SEQ ID NO: 185924 - DNA, 25 bp, Probe sequence
cctaaagctatgggcggtgttaata

SEQ ID NO: 185925 - DNA, 25 bp, Probe sequence
gccctcaaaagatacgggagcatta

SEQ ID NO: 185926 - DNA, 25 bp, Probe sequence
gctggtgctaaggtaattgttgaag

SEQ ID NO: 185927 - DNA, 25 bp, Probe sequence
gaatatggacacgttcaaaaaggaa

SEQ ID NO: 185928 - DNA, 25 bp, Probe sequence
gatggtaaaagttcaagataaggcg

SEQ ID NO: 185929 - DNA, 25 bp, Probe sequence
gtaaatttatcaaacctaaagctat

SEQ ID NO: 185930 - DNA, 25 bp, Probe sequence
gggcggtgttaatagagcaataaga

SEQ ID NO: 185931 - DNA, 25 bp, Probe sequence
ggtgctaaggtaattgttgaagaag

SEQ ID NO: 185932 - DNA, 25 bp, Probe sequence
tggacacgttcaaaaaggaacaggt

SEQ ID NO: 185933 - DNA, 25 bp, Probe sequence
tggcgaggttctaaagaccgttata

SEQ ID NO: 185934 - DNA, 25 bp, Probe sequence
tgagtgtgaaagtgataggtgataa

SEQ ID NO: 185935 - DNA, 25 bp, Probe sequence
taagttttagtaaacctgaatggat

SEQ ID NO: 185936 - DNA, 25 bp, Probe sequence
taaagaccgttataaaatcgtacat

SEQ ID NO: 185937 - DNA, 25 bp, Probe sequence
tagctggtgctaaggtaattgttga

SEQ ID NO: 185938 - DNA, 25 bp, Probe sequence
tagtaaacctgaatggataaacgga

SEQ ID NO: 185939 - DNA, 25 bp, Probe sequence
tatgggcggtgttaatagagcaata

SEQ ID NO: 185940 - DNA, 25 bp, Probe sequence
ttatcaaacctaaagctatgggcgg

SEQ ID NO: 185941 - DNA, 25 bp, Probe sequence
ttggcgaggttctaaagaccgttat

SEQ ID NO: 185942 - DNA, 25 bp, Probe sequence
ttgagacgctaaaaagggagttgaa

SEQ ID NO: 185943 - DNA, 25 bp, Probe sequence
attgatacttatacgcgctagatat

SEQ ID NO: 185944 - DNA, 25 bp, Probe sequence
atacgcgctagatatgcttatcaag

SEQ ID NO: 185945 - DNA, 25 bp, Probe sequence
atcacttgaaaagattgaccataat

SEQ ID NO: 185946 - DNA, 25 bp, Probe sequence
agtgcggagtttttgaattagagaa

SEQ ID NO: 185947 - DNA, 25 bp, Probe sequence
acgcgctagatatgcttatcaagat

SEQ ID NO: 185948 - DNA, 25 bp, Probe sequence
acgagcgtataaaaaatcagtgcgg

SEQ ID NO: 185949 - DNA, 25 bp, Probe sequence
acttcaacgataattacagacctga

SEQ ID NO: 185950 - DNA, 25 bp, Probe sequence
acttatacgcgctagatatgcttat

SEQ ID NO: 185951 - DNA, 25 bp, Probe sequence
acacttcaacgataattacagacct

SEQ ID NO: 185952 - DNA, 25 bp, Probe sequence
aaatcagtgcggagtttttgaatta

SEQ ID NO: 185953 - DNA, 25 bp, Probe sequence
caagatttattagaacacttcaacg

SEQ ID NO: 185954 - DNA, 25 bp, Probe sequence
gctagatatgcttatcaagatttat

SEQ ID NO: 185955 - DNA, 25 bp, Probe sequence
gcttgtcaaatttaaatcacttgaa

SEQ ID NO: 185956 - DNA, 25 bp, Probe sequence
gcagttgttaaaaatgtcgtacgag

SEQ ID NO: 185957 - DNA, 25 bp, Probe sequence
gaattgatacttatacgcgctagat

SEQ ID NO: 185958 - DNA, 25 bp, Probe sequence
gacgattgatgatttgcttgtcaaa

SEQ ID NO: 185959 - DNA, 25 bp, Probe sequence
gaccataattcagaggatgagtact

SEQ ID NO: 185960 - DNA, 25 bp, Probe sequence
gacctgaaataatagatttttcgtt

SEQ ID NO: 185961 - DNA, 25 bp, Probe sequence
gatacttatacgcgctagatatgct

SEQ ID NO: 185962 - DNA, 25 bp, Probe sequence
gttgttaaaaatgtcgtacgagcgt

SEQ ID NO: 185963 - DNA, 25 bp, Probe sequence
gatttttcgttatctctaatggagg

SEQ ID NO: 185964 - DNA, 25 bp, Probe sequence
gatttattagaacacttcaacgata

SEQ ID NO: 185965 - DNA, 25 bp, Probe sequence
gattgaccataattcagaggatgag

SEQ ID NO: 185966 - DNA, 25 bp, Probe sequence
gttatctctaatggaggtatcagaa

SEQ ID NO: 185967 - DNA, 25 bp, Probe sequence
gttaaaaatgtcgtacgagcgtata

SEQ ID NO: 185968 - DNA, 25 bp, Probe sequence
ggtcaagaattgatacttatacgcg

SEQ ID NO: 185969 - DNA, 25 bp, Probe sequence
ggatgagtacttaaagcagttgtta

SEQ ID NO: 185970 - DNA, 25 bp, Probe sequence
tgcggagtttttgaattagagaatt

SEQ ID NO: 185971 - DNA, 25 bp, Probe sequence
tcagaggatgagtacttaaagcagt

SEQ ID NO: 185972 - DNA, 25 bp, Probe sequence
tcaacgataattacagacctgaaat

SEQ ID NO: 185973 - DNA, 25 bp, Probe sequence
tagaacacttcaacgataattacag

SEQ ID NO: 185974 - DNA, 25 bp, Probe sequence
tttcgttatctctaatggaggtatc

SEQ ID NO: 185975 - DNA, 25 bp, Probe sequence
tttgcttgtcaaatttaaatcactt

SEQ ID NO: 185976 - DNA, 25 bp, Probe sequence
ttatacgcgctagatatgcttatca

SEQ ID NO: 185977 - DNA, 25 bp, Probe sequence
attatcgctagaacatcatccggag

SEQ ID NO: 185978 - DNA, 25 bp, Probe sequence
atattatcgctagaacatcatccgg

SEQ ID NO: 185979 - DNA, 25 bp, Probe sequence
atatattatcgctagaacatcatcc

SEQ ID NO: 185980 - DNA, 25 bp, Probe sequence
atcatccggagtttgctcatgactt

SEQ ID NO: 185981 - DNA, 25 bp, Probe sequence
atcgctagaacatcatccggagttt

SEQ ID NO: 185982 - DNA, 25 bp, Probe sequence
atccggagtttgctcatgacttaaa

SEQ ID NO: 185983 - DNA, 25 bp, Probe sequence
agttaacgacatatgacaaaagcaa

SEQ ID NO: 185984 - DNA, 25 bp, Probe sequence
agaaacactgtgtattaaatgtcac

SEQ ID NO: 185985 - DNA, 25 bp, Probe sequence
agaacatcatccggagtttgctcat

SEQ ID NO: 185986 - DNA, 25 bp, Probe sequence
acatcatccggagtttgctcatgac

SEQ ID NO: 185987 - DNA, 25 bp, Probe sequence
aacatcatccggagtttgctcatga

SEQ ID NO: 185988 - DNA, 25 bp, Probe sequence
cactgtgtattaaatgtcacaacaa

SEQ ID NO: 185989 - DNA, 25 bp, Probe sequence
catcatccggagtttgctcatgact

SEQ ID NO: 185990 - DNA, 25 bp, Probe sequence
cggagtttgctcatgacttaaacaa

SEQ ID NO: 185991 - DNA, 25 bp, Probe sequence
cggcaagttaacgacatatgacaaa

SEQ ID NO: 185992 - DNA, 25 bp, Probe sequence
cgctagaacatcatccggagtttgc

SEQ ID NO: 185993 - DNA, 25 bp, Probe sequence
gctagaacatcatccggagtttgct

SEQ ID NO: 185994 - DNA, 25 bp, Probe sequence
gaacatcatccggagtttgctcatg

SEQ ID NO: 185995 - DNA, 25 bp, Probe sequence
gaaagagataattatgaatgtcaac

SEQ ID NO: 185996 - DNA, 25 bp, Probe sequence
gacggcaagttaacgacatatgaca

SEQ ID NO: 185997 - DNA, 25 bp, Probe sequence
gagagacggcaagttaacgacatat

SEQ ID NO: 185998 - DNA, 25 bp, Probe sequence
gagacggcaagttaacgacatatga

SEQ ID NO: 185999 - DNA, 25 bp, Probe sequence
gagtttgctcatgacttaaacaatt

SEQ ID NO: 186000 - DNA, 25 bp, Probe sequence
gatcatatattatcgctagaacatc

SEQ ID NO: 186001 - DNA, 25 bp, Probe sequence
gtagatcatatattatcgctagaac

SEQ ID NO: 186002 - DNA, 25 bp, Probe sequence
gtaagagagacggcaagttaacgac

SEQ ID NO: 186003 - DNA, 25 bp, Probe sequence
ggatgtagatcatatattatcgcta

SEQ ID NO: 186004 - DNA, 25 bp, Probe sequence
tccggagtttgctcatgacttaaac

SEQ ID NO: 186005 - DNA, 25 bp, Probe sequence
tcatccggagtttgctcatgactta

SEQ ID NO: 186006 - DNA, 25 bp, Probe sequence
tcaacaatgtaagagagacggcaag

SEQ ID NO: 186007 - DNA, 25 bp, Probe sequence
taagtcgttggatgtagatcatata

SEQ ID NO: 186008 - DNA, 25 bp, Probe sequence
tagaacatcatccggagtttgctca

SEQ ID NO: 186009 - DNA, 25 bp, Probe sequence
ttatcgctagaacatcatccggagt

SEQ ID NO: 186010 - DNA, 25 bp, Probe sequence
ttgctcatgacttaaacaatttaga

SEQ ID NO: 186011 - DNA, 25 bp, Probe sequence
attacaatgttttctatcaaatgtt

SEQ ID NO: 186012 - DNA, 25 bp, Probe sequence
ataataggtcaaacagacgctaaaa

SEQ ID NO: 186013 - DNA, 25 bp, Probe sequence
atcaccgcttcatggaattaatcag

SEQ ID NO: 186014 - DNA, 25 bp, Probe sequence
aggtattaccaatctattacaatgt

SEQ ID NO: 186015 - DNA, 25 bp, Probe sequence
agtgcgagcaagtgatacatttgga

SEQ ID NO: 186016 - DNA, 25 bp, Probe sequence
agtagatcgtgaaactaatgttgtt

SEQ ID NO: 186017 - DNA, 25 bp, Probe sequence
agatatcgataacattaggtattta

SEQ ID NO: 186018 - DNA, 25 bp, Probe sequence
agatgccaattataaagtagacgtt

SEQ ID NO: 186019 - DNA, 25 bp, Probe sequence
agaatacaattttctatgatgcaga

SEQ ID NO: 186020 - DNA, 25 bp, Probe sequence
actatggtccatcaggtgttggaaa

SEQ ID NO: 186021 - DNA, 25 bp, Probe sequence
acaactcatgttattactaatttta

SEQ ID NO: 186022 - DNA, 25 bp, Probe sequence
aagaatatcaccgcttcatggaatt

SEQ ID NO: 186023 - DNA, 25 bp, Probe sequence
aagagcagatggctggttctaaaat

SEQ ID NO: 186024 - DNA, 25 bp, Probe sequence
aatcttgtgatattttcaaacgact

SEQ ID NO: 186025 - DNA, 25 bp, Probe sequence
aattcatgtttatacgggaccgctt

SEQ ID NO: 186026 - DNA, 25 bp, Probe sequence
cactaaatagttttcacgattctga

SEQ ID NO: 186027 - DNA, 25 bp, Probe sequence
gaatcctccaaaaagagtatttcaa

SEQ ID NO: 186028 - DNA, 25 bp, Probe sequence
gaatcttttaattatatctttggag

SEQ ID NO: 186029 - DNA, 25 bp, Probe sequence
gaacatgccaaagtatcattgtcaa

SEQ ID NO: 186030 - DNA, 25 bp, Probe sequence
gaaaatctatattcagaatcctcca

SEQ ID NO: 186031 - DNA, 25 bp, Probe sequence
gaaatactatcatctctaaatgaaa

SEQ ID NO: 186032 - DNA, 25 bp, Probe sequence
gactttgcttctgtaacaactcatg

SEQ ID NO: 186033 - DNA, 25 bp, Probe sequence
gacgtttcaaattgtattttcattc

SEQ ID NO: 186034 - DNA, 25 bp, Probe sequence
gagaatacaatatcatagtgcgagc

SEQ ID NO: 186035 - DNA, 25 bp, Probe sequence
gatacatttggaactcatgatgttg

SEQ ID NO: 186036 - DNA, 25 bp, Probe sequence
gttaccgcatataacttgttagaga

SEQ ID NO: 186037 - DNA, 25 bp, Probe sequence
gtattttcattctaacatctaattt

SEQ ID NO: 186038 - DNA, 25 bp, Probe sequence
gtaatgctttactatggtccatcag

SEQ ID NO: 186039 - DNA, 25 bp, Probe sequence
ggtattttctagaatagattcctgt

SEQ ID NO: 186040 - DNA, 25 bp, Probe sequence
tcaaacgactttgcttctgtaacaa

SEQ ID NO: 186041 - DNA, 25 bp, Probe sequence
tacgggaccgctttgtggatttaat

SEQ ID NO: 186042 - DNA, 25 bp, Probe sequence
taaaccgaccgtaatgctttactat

SEQ ID NO: 186043 - DNA, 25 bp, Probe sequence
tatataaacatacttccttagaaaa

SEQ ID NO: 186044 - DNA, 25 bp, Probe sequence
tattggagaaccggtattttctaga

SEQ ID NO: 186045 - DNA, 25 bp, Probe sequence
atgattttttggatacagtagagtt

SEQ ID NO: 186046 - DNA, 25 bp, Probe sequence
atgtcagcgagtgcttcggctagtg

SEQ ID NO: 186047 - DNA, 25 bp, Probe sequence
aggtgccaaacctagtggaattgga

SEQ ID NO: 186048 - DNA, 25 bp, Probe sequence
agtgcaagtggtgaatctaaagtga

SEQ ID NO: 186049 - DNA, 25 bp, Probe sequence
agtgtatgatgttattcttgcagga

SEQ ID NO: 186050 - DNA, 25 bp, Probe sequence
agacgaggaggagctatcatttgat

SEQ ID NO: 186051 - DNA, 25 bp, Probe sequence
aaacagttcagttgatgcatgatga

SEQ ID NO: 186052 - DNA, 25 bp, Probe sequence
aaaaggtagtgcaagtggtgaatct

SEQ ID NO: 186053 - DNA, 25 bp, Probe sequence
aacactctactcagtacttgttggt

SEQ ID NO: 186054 - DNA, 25 bp, Probe sequence
aatttttgattctttacttgggatg

SEQ ID NO: 186055 - DNA, 25 bp, Probe sequence
cgactattacccccatagcaagtat

SEQ ID NO: 186056 - DNA, 25 bp, Probe sequence
gcttcggctagtgcaggtataaatg

SEQ ID NO: 186057 - DNA, 25 bp, Probe sequence
gcaaagcgctgtaaaacaaattttt

SEQ ID NO: 186058 - DNA, 25 bp, Probe sequence
gaatttaacactctactcagtactt

SEQ ID NO: 186059 - DNA, 25 bp, Probe sequence
gaaggatctaaacatctagacgagg

SEQ ID NO: 186060 - DNA, 25 bp, Probe sequence
gaagtattaaaggctattttgaatt

SEQ ID NO: 186061 - DNA, 25 bp, Probe sequence
gagcgagtagccaaaacaattttag

SEQ ID NO: 186062 - DNA, 25 bp, Probe sequence
gagtgcttcggctagtgcaggtata

SEQ ID NO: 186063 - DNA, 25 bp, Probe sequence
gaggagctatcatttgatgtttcaa

SEQ ID NO: 186064 - DNA, 25 bp, Probe sequence
gatgttattcttgcaggagtgaaat

SEQ ID NO: 186065 - DNA, 25 bp, Probe sequence
gatgaactatcagcaatggatttat

SEQ ID NO: 186066 - DNA, 25 bp, Probe sequence
gatacgatgacatatttcgcgacta

SEQ ID NO: 186067 - DNA, 25 bp, Probe sequence
gattctttacttgggatgtcagcga

SEQ ID NO: 186068 - DNA, 25 bp, Probe sequence
ggaatttggtaagcaaagcgctgta

SEQ ID NO: 186069 - DNA, 25 bp, Probe sequence
tgatatttcagaggggtttaaacta

SEQ ID NO: 186070 - DNA, 25 bp, Probe sequence
tgatctaaatcaaggtgccaaacct

SEQ ID NO: 186071 - DNA, 25 bp, Probe sequence
tgacatatttcgcgactattacccc

SEQ ID NO: 186072 - DNA, 25 bp, Probe sequence
tctactcagtacttgttggtgaaat

SEQ ID NO: 186073 - DNA, 25 bp, Probe sequence
tcagcgagtgcttcggctagtgcag

SEQ ID NO: 186074 - DNA, 25 bp, Probe sequence
taagggaattagatcagaagcaact

SEQ ID NO: 186075 - DNA, 25 bp, Probe sequence
taaccttactaaaacagttcagttg

SEQ ID NO: 186076 - DNA, 25 bp, Probe sequence
tataactggagagcgagtagccaaa

SEQ ID NO: 186077 - DNA, 25 bp, Probe sequence
ttgggatgtcagcgagtgcttcggc

SEQ ID NO: 186078 - DNA, 25 bp, Probe sequence
ttacccccatagcaagtatgtttga

SEQ ID NO: 186079 - DNA, 25 bp, Probe sequence
atttattggtaatggcaaaggcttt

SEQ ID NO: 186080 - DNA, 25 bp, Probe sequence
ataatggagaatactggacaggtga

SEQ ID NO: 186081 - DNA, 25 bp, Probe sequence
atgcaattttgcatcataaatatta

SEQ ID NO: 186082 - DNA, 25 bp, Probe sequence
aaatatttcaattaatccagagaga

SEQ ID NO: 186083 - DNA, 25 bp, Probe sequence
aactatgagaattatttaccaatgt

SEQ ID NO: 186084 - DNA, 25 bp, Probe sequence
aaggatgtatatggatttgttgaaa

SEQ ID NO: 186085 - DNA, 25 bp, Probe sequence
aatttatgcatagaccatttacaaa

SEQ ID NO: 186086 - DNA, 25 bp, Probe sequence
caactcaattgggatggtgtagaaa

SEQ ID NO: 186087 - DNA, 25 bp, Probe sequence
ttagttggacacgaggacttaccca

SEQ ID NO: 186088 - DNA, 25 bp, Probe sequence
gaattctcggctatgatcacggaca

SEQ ID NO: 186089 - DNA, 25 bp, Probe sequence
gatcaggaagtagagcaccgatagc

SEQ ID NO: 186090 - DNA, 25 bp, Probe sequence
gacattggtgaatatttaactagag

SEQ ID NO: 186091 - DNA, 25 bp, Probe sequence
gagcaccgatagctatatctatttt

SEQ ID NO: 186092 - DNA, 25 bp, Probe sequence
gatgaaacatttattagttggacac

SEQ ID NO: 186093 - DNA, 25 bp, Probe sequence
gatcacggacatattacctaatttc

SEQ ID NO: 186094 - DNA, 25 bp, Probe sequence
gatactttaatgaaacatcaatcaa

SEQ ID NO: 186095 - DNA, 25 bp, Probe sequence
gatagtttgaggcttgtagataata

SEQ ID NO: 186096 - DNA, 25 bp, Probe sequence
gatatctattataatgacattggtg

SEQ ID NO: 186097 - DNA, 25 bp, Probe sequence
gttgaaattggtagggagttagtgg

SEQ ID NO: 186098 - DNA, 25 bp, Probe sequence
gattggattaatcaacgagacataa

SEQ ID NO: 186099 - DNA, 25 bp, Probe sequence
gtagataatatttctaattctttta

SEQ ID NO: 186100 - DNA, 25 bp, Probe sequence
gtgatttgagtaaaggttttccgcg

SEQ ID NO: 186101 - DNA, 25 bp, Probe sequence
ggacaggtgatttatatacaaggac

SEQ ID NO: 186102 - DNA, 25 bp, Probe sequence
ggaaatgccaagtagatattataat

SEQ ID NO: 186103 - DNA, 25 bp, Probe sequence
ggcaaaggctttgctacatacaaag

SEQ ID NO: 186104 - DNA, 25 bp, Probe sequence
ggaagttacaatcacgatatctatt

SEQ ID NO: 186105 - DNA, 25 bp, Probe sequence
tggacacgaggacttacccaaaaat

SEQ ID NO: 186106 - DNA, 25 bp, Probe sequence
ggcgaccaacgaacacagggtgaaa

SEQ ID NO: 186107 - DNA, 25 bp, Probe sequence
tgagaggcgaccaacgaacacaggg

SEQ ID NO: 186108 - DNA, 25 bp, Probe sequence
tagggagttagtggaattacattta

SEQ ID NO: 186109 - DNA, 25 bp, Probe sequence
tattacctaatttccaatttattgg

SEQ ID NO: 186110 - DNA, 25 bp, Probe sequence
ttttccgcgaataccgatattaaag

SEQ ID NO: 186111 - DNA, 25 bp, Probe sequence
ttacccgataaaaacaatgattgga

SEQ ID NO: 186112 - DNA, 25 bp, Probe sequence
ttaccaatgtatgattccaaggata

SEQ ID NO: 186113 - DNA, 25 bp, Probe sequence
ataaccgtgacgtacgcgaatactt

SEQ ID NO: 186114 - DNA, 25 bp, Probe sequence
attcgaatcattaattttagactta

SEQ ID NO: 186115 - DNA, 25 bp, Probe sequence
atcgctcgtgcattattagaagcag

SEQ ID NO: 186116 - DNA, 25 bp, Probe sequence
atgactttggcacaagttgaatata

SEQ ID NO: 186117 - DNA, 25 bp, Probe sequence
agaggttctttaaaacgcgctggat

SEQ ID NO: 186118 - DNA, 25 bp, Probe sequence
agctcaagctatccgtcacggaatc

SEQ ID NO: 186119 - DNA, 25 bp, Probe sequence
accatttgatgtaactgaaactaaa

SEQ ID NO: 186120 - DNA, 25 bp, Probe sequence
acggaatcgctcgtgcattattaga

SEQ ID NO: 186121 - DNA, 25 bp, Probe sequence
acatcacagttaataaccgtgacgt

SEQ ID NO: 186122 - DNA, 25 bp, Probe sequence
aaacgcgctggattacttactcgtg

SEQ ID NO: 186123 - DNA, 25 bp, Probe sequence
aaaccaggtcttaaagcagctcgtc

SEQ ID NO: 186124 - DNA, 25 bp, Probe sequence
aaactcagtagcacgtgtacgttta

SEQ ID NO: 186125 - DNA, 25 bp, Probe sequence
aatacttaccattcgaatcattaat

SEQ ID NO: 186126 - DNA, 25 bp, Probe sequence
ctcgtgacccacgtatgaaagaacg

SEQ ID NO: 186127 - DNA, 25 bp, Probe sequence
catggtggtggtttcactggacaag

SEQ ID NO: 186128 - DNA, 25 bp, Probe sequence
ctatccgtcacggaatcgctcgtgc

SEQ ID NO: 186129 - DNA, 25 bp, Probe sequence
gctggattacttactcgtgacccac

SEQ ID NO: 186130 - DNA, 25 bp, Probe sequence
gattacttactcgtgacccacgtat

SEQ ID NO: 186131 - DNA, 25 bp, Probe sequence
gcagatcctgaatacagaggttctt

SEQ ID NO: 186132 - DNA, 25 bp, Probe sequence
gaatatagaggcacaggccgtcgta

SEQ ID NO: 186133 - DNA, 25 bp, Probe sequence
ggacaagctcaagctatccgtcacg

SEQ ID NO: 186134 - DNA, 25 bp, Probe sequence
gtcttaaagcagctcgtcgttcacc

SEQ ID NO: 186135 - DNA, 25 bp, Probe sequence
gtaccaggtgaaggtaacatcacag

SEQ ID NO: 186136 - DNA, 25 bp, Probe sequence
ggcacaggccgtcgtaaaaactcag

SEQ ID NO: 186137 - DNA, 25 bp, Probe sequence
gtcgttcacctcaattctcaaaacg

SEQ ID NO: 186138 - DNA, 25 bp, Probe sequence
gtgtacgtttagtaccaggtgaagg

SEQ ID NO: 186139 - DNA, 25 bp, Probe sequence
gtgacgtacgcgaatacttaccatt

SEQ ID NO: 186140 - DNA, 25 bp, Probe sequence
ggtttcactggacaagctcaagcta

SEQ ID NO: 186141 - DNA, 25 bp, Probe sequence
ggccgtcgtaaaaactcagtagcac

SEQ ID NO: 186142 - DNA, 25 bp, Probe sequence
tggtggtttcactggacaagctcaa

SEQ ID NO: 186143 - DNA, 25 bp, Probe sequence
tccgtcacggaatcgctcgtgcatt

SEQ ID NO: 186144 - DNA, 25 bp, Probe sequence
tacttactcgtgacccacgtatgaa

SEQ ID NO: 186145 - DNA, 25 bp, Probe sequence
tttagacttaaaccaaccatttgat

SEQ ID NO: 186146 - DNA, 25 bp, Probe sequence
ttcacctcaattctcaaaacgttaa

SEQ ID NO: 186147 - DNA, 25 bp, Probe sequence
attatttgtatatggtggcgctgaa

SEQ ID NO: 186148 - DNA, 25 bp, Probe sequence
atgcgtcaaacatttatggcaaatg

SEQ ID NO: 186149 - DNA, 25 bp, Probe sequence
aggtatgttaccaagcactcgttta

SEQ ID NO: 186150 - DNA, 25 bp, Probe sequence
acttacacaccacacgttgatactg

SEQ ID NO: 186151 - DNA, 25 bp, Probe sequence
acattaggtcgtttatcatcagaag

SEQ ID NO: 186152 - DNA, 25 bp, Probe sequence
aagtttactaccgtcactcaaatca

SEQ ID NO: 186153 - DNA, 25 bp, Probe sequence
aatcaatcactgctggtgaattaag

SEQ ID NO: 186154 - DNA, 25 bp, Probe sequence
gaagtagcatctatcttacgcggta

SEQ ID NO: 186155 - DNA, 25 bp, Probe sequence
caaccagaaaactacgaattacgtg

SEQ ID NO: 186156 - DNA, 25 bp, Probe sequence
caggtggtatcaaatcaatcactgc

SEQ ID NO: 186157 - DNA, 25 bp, Probe sequence
gtgaattaagaagaactaacccaga

SEQ ID NO: 186158 - DNA, 25 bp, Probe sequence
ccacacgttgatactggtgattatg

SEQ ID NO: 186159 - DNA, 25 bp, Probe sequence
gctgaaggccaaacattaggtcgtt

SEQ ID NO: 186160 - DNA, 25 bp, Probe sequence
gcatcaaaaatcgaatttactggta

SEQ ID NO: 186161 - DNA, 25 bp, Probe sequence
gcatctatcttacgcggtaaaaata

SEQ ID NO: 186162 - DNA, 25 bp, Probe sequence
gcactcgtttaggcgaaaaacaagg

SEQ ID NO: 186163 - DNA, 25 bp, Probe sequence
gcacaacaaccagaaaactacgaat

SEQ ID NO: 186164 - DNA, 25 bp, Probe sequence
gacaaagtttactaccgtcactcaa

SEQ ID NO: 186165 - DNA, 25 bp, Probe sequence
gagcgcaaatggtatgttatcgatg

SEQ ID NO: 186166 - DNA, 25 bp, Probe sequence
gatactggtgattatgtaatcgtta

SEQ ID NO: 186167 - DNA, 25 bp, Probe sequence
gttatcgatgctgaaggccaaacat

SEQ ID NO: 186168 - DNA, 25 bp, Probe sequence
gtagcatctatcttacgcggtaaaa

SEQ ID NO: 186169 - DNA, 25 bp, Probe sequence
gtaacttacacaccacacgttgata

SEQ ID NO: 186170 - DNA, 25 bp, Probe sequence
gtaatcgttattaatgcatcaaaaa

SEQ ID NO: 186171 - DNA, 25 bp, Probe sequence
ggtcgtttatcatcagaagtagcat

SEQ ID NO: 186172 - DNA, 25 bp, Probe sequence
ggtatcaaatcaatcactgctggtg

SEQ ID NO: 186173 - DNA, 25 bp, Probe sequence
ggtatgttatcgatgctgaaggcca

SEQ ID NO: 186174 - DNA, 25 bp, Probe sequence
ggcaaatgaatcaaacattgagcgc

SEQ ID NO: 186175 - DNA, 25 bp, Probe sequence
tgttaccaagcactcgtttaggcga

SEQ ID NO: 186176 - DNA, 25 bp, Probe sequence
taaagtaacttacacaccacacgtt

SEQ ID NO: 186177 - DNA, 25 bp, Probe sequence
taccaagcactcgtttaggcgaaaa

SEQ ID NO: 186178 - DNA, 25 bp, Probe sequence
tatggtggcgctgaacatccacacg

SEQ ID NO: 186179 - DNA, 25 bp, Probe sequence
ttactggtaacaaagaaactgacaa

SEQ ID NO: 186180 - DNA, 25 bp, Probe sequence
ttacacaccacacgttgatactggt

SEQ ID NO: 186181 - DNA, 25 bp, Probe sequence
attgcgtatcaaggaaataattttc

SEQ ID NO: 186182 - DNA, 25 bp, Probe sequence
attatattgtcactggatctggatt

SEQ ID NO: 186183 - DNA, 25 bp, Probe sequence
atattgtcactggatctggattttt

SEQ ID NO: 186184 - DNA, 25 bp, Probe sequence
atagaggtgtacatgcgatacagca

SEQ ID NO: 186185 - DNA, 25 bp, Probe sequence
ataacatggtgcgtgtcttagttgc

SEQ ID NO: 186186 - DNA, 25 bp, Probe sequence
atgcgtatattagtagaaattgcgt

SEQ ID NO: 186187 - DNA, 25 bp, Probe sequence
atgtgagaatccatccttcaagtag

SEQ ID NO: 186188 - DNA, 25 bp, Probe sequence
agacagatgatggctttgattatat

SEQ ID NO: 186189 - DNA, 25 bp, Probe sequence
acctatgtcacaatggcaatatgca

SEQ ID NO: 186190 - DNA, 25 bp, Probe sequence
acggtacagcaacaatttgaaaagc

SEQ ID NO: 186191 - DNA, 25 bp, Probe sequence
acatggtgcgtgtcttagttgcatt

SEQ ID NO: 186192 - DNA, 25 bp, Probe sequence
aacaattcataggtacacatgattt

SEQ ID NO: 186193 - DNA, 25 bp, Probe sequence
aagacatgtgagaatccatccttca

SEQ ID NO: 186194 - DNA, 25 bp, Probe sequence
aatgtagttacagtcgatgacgatt

SEQ ID NO: 186195 - DNA, 25 bp, Probe sequence
aatatgcaatgaaccgaacgttacc

SEQ ID NO: 186196 - DNA, 25 bp, Probe sequence
cagtcgatgacgattttcattgtcg

SEQ ID NO: 186197 - DNA, 25 bp, Probe sequence
cgcgatccatttcaaagtggtttga

SEQ ID NO: 186198 - DNA, 25 bp, Probe sequence
gctttgattatattgtcactggatc

SEQ ID NO: 186199 - DNA, 25 bp, Probe sequence
gaatccatccttcaagtaggactga

SEQ ID NO: 186200 - DNA, 25 bp, Probe sequence
gaatatacctatgtcacaatggcaa

SEQ ID NO: 186201 - DNA, 25 bp, Probe sequence
gacatgtgagaatccatccttcaag

SEQ ID NO: 186202 - DNA, 25 bp, Probe sequence
gagaatccatccttcaagtaggact

SEQ ID NO: 186203 - DNA, 25 bp, Probe sequence
gatctggatttttatataacatggt

SEQ ID NO: 186204 - DNA, 25 bp, Probe sequence
gttacagtcgatgacgattttcatt

SEQ ID NO: 186205 - DNA, 25 bp, Probe sequence
gttagaacattataccaaagtgaaa

SEQ ID NO: 186206 - DNA, 25 bp, Probe sequence
gtcactggatctggatttttatata

SEQ ID NO: 186207 - DNA, 25 bp, Probe sequence
gtggtttgaaaacatttattcctga

SEQ ID NO: 186208 - DNA, 25 bp, Probe sequence
ggtgcgtgtcttagttgcattttta

SEQ ID NO: 186209 - DNA, 25 bp, Probe sequence
ggactgatagaggtgtacatgcgat

SEQ ID NO: 186210 - DNA, 25 bp, Probe sequence
ggcaatatgcaatgaaccgaacgtt

SEQ ID NO: 186211 - DNA, 25 bp, Probe sequence
tccatccttcaagtaggactgatag

SEQ ID NO: 186212 - DNA, 25 bp, Probe sequence
tcgatgacgattttcattgtcgtta

SEQ ID NO: 186213 - DNA, 25 bp, Probe sequence
tcataggtacacatgattttacggg

SEQ ID NO: 186214 - DNA, 25 bp, Probe sequence
tttgttcgcaaaaaactgaagtaga

SEQ ID NO: 186215 - DNA, 25 bp, Probe sequence
attaattcttttgttcatcatcttg

SEQ ID NO: 186216 - DNA, 25 bp, Probe sequence
attaccagttcatcaattaagtatg

SEQ ID NO: 186217 - DNA, 25 bp, Probe sequence
agcggtcgcaatggaagttaggggt

SEQ ID NO: 186218 - DNA, 25 bp, Probe sequence
acgcgccgaagaattagcggtcgca

SEQ ID NO: 186219 - DNA, 25 bp, Probe sequence
aaagatgtttaaattaccagttcat

SEQ ID NO: 186220 - DNA, 25 bp, Probe sequence
aatcttcacattaatgatgcatata

SEQ ID NO: 186221 - DNA, 25 bp, Probe sequence
aatatttttctgtcattcaccatta

SEQ ID NO: 186222 - DNA, 25 bp, Probe sequence
aattcaattatggttcctaatcaaa

SEQ ID NO: 186223 - DNA, 25 bp, Probe sequence
caaaagtcgcgtggttctgaaataa

SEQ ID NO: 186224 - DNA, 25 bp, Probe sequence
cagatgcgtttgaaagattacttgc

SEQ ID NO: 186225 - DNA, 25 bp, Probe sequence
cccgacgttaatggatgagttagat

SEQ ID NO: 186226 - DNA, 25 bp, Probe sequence
gttacgattcatcccgacgttaatg

SEQ ID NO: 186227 - DNA, 25 bp, Probe sequence
gctttccaacgcgccgaagaattag

SEQ ID NO: 186228 - DNA, 25 bp, Probe sequence
gctacagacagcttaaatggcaatt

SEQ ID NO: 186229 - DNA, 25 bp, Probe sequence
gaagttaggggttatgatgccaatg

SEQ ID NO: 186230 - DNA, 25 bp, Probe sequence
gacactatctacaagtccaattgat

SEQ ID NO: 186231 - DNA, 25 bp, Probe sequence
gagcaaagttaatgtttgtttttct

SEQ ID NO: 186232 - DNA, 25 bp, Probe sequence
gataatgtccattgcgttacgattc

SEQ ID NO: 186233 - DNA, 25 bp, Probe sequence
gattatagggcgatatttaccaatt

SEQ ID NO: 186234 - DNA, 25 bp, Probe sequence
gttgaatggcatggcatcacgattg

SEQ ID NO: 186235 - DNA, 25 bp, Probe sequence
gttaagagaacgagctacagacagc

SEQ ID NO: 186236 - DNA, 25 bp, Probe sequence
gtcattcaccattaacatatctttg

SEQ ID NO: 186237 - DNA, 25 bp, Probe sequence
gtcgcgtggttctgaaataagttca

SEQ ID NO: 186238 - DNA, 25 bp, Probe sequence
gtccattgcgttacgattcatcccg

SEQ ID NO: 186239 - DNA, 25 bp, Probe sequence
gtccaattgatttaacagatgcgtt

SEQ ID NO: 186240 - DNA, 25 bp, Probe sequence
gggcgatatttaccaattaattctt

SEQ ID NO: 186241 - DNA, 25 bp, Probe sequence
ggggttatgatgccaatgttaagag

SEQ ID NO: 186242 - DNA, 25 bp, Probe sequence
ggtggatatgtattagttgaatggc

SEQ ID NO: 186243 - DNA, 25 bp, Probe sequence
ggcatggcatcacgattgaaactaa

SEQ ID NO: 186244 - DNA, 25 bp, Probe sequence
tgcaacacgtattaaatcatttatt

SEQ ID NO: 186245 - DNA, 25 bp, Probe sequence
tactagtgccactattcatctcagc

SEQ ID NO: 186246 - DNA, 25 bp, Probe sequence
tttgttcatcatcttgatccaagag

SEQ ID NO: 186247 - DNA, 25 bp, Probe sequence
ttttctttttaatcttcacattaat

SEQ ID NO: 186248 - DNA, 25 bp, Probe sequence
ttcagggaacattgcaacacgtatt

SEQ ID NO: 186249 - DNA, 25 bp, Probe sequence
attactattacacataagaccaaag

SEQ ID NO: 186250 - DNA, 25 bp, Probe sequence
attatttgaggacacagtagagcgt

SEQ ID NO: 186251 - DNA, 25 bp, Probe sequence
atacctatcaaaaagggacaccata

SEQ ID NO: 186252 - DNA, 25 bp, Probe sequence
atcaccatttcaaatgtcaggtgga

SEQ ID NO: 186253 - DNA, 25 bp, Probe sequence
atgcgtaaaatagcgattgtatcga

SEQ ID NO: 186254 - DNA, 25 bp, Probe sequence
agagatgtaatgtcacaatcaccat

SEQ ID NO: 186255 - DNA, 25 bp, Probe sequence
actactgggacagttacagttgatg

SEQ ID NO: 186256 - DNA, 25 bp, Probe sequence
acagcaggacttgatccacaaagta

SEQ ID NO: 186257 - DNA, 25 bp, Probe sequence
aaattggcggattggcatattggtt

SEQ ID NO: 186258 - DNA, 25 bp, Probe sequence
aatttcccgaatctcaattatttga

SEQ ID NO: 186259 - DNA, 25 bp, Probe sequence
aaaactatgcccatcgtctgttgat

SEQ ID NO: 186260 - DNA, 25 bp, Probe sequence
caattatcctaatttcacatgatat

SEQ ID NO: 186261 - DNA, 25 bp, Probe sequence
caagctattcatgatgttaatacag

SEQ ID NO: 186262 - DNA, 25 bp, Probe sequence
caaacatcaccaaaagagctcttca

SEQ ID NO: 186263 - DNA, 25 bp, Probe sequence
ctatgcccatcgtctgttgatggat

SEQ ID NO: 186264 - DNA, 25 bp, Probe sequence
gccatcgttggacaaacgggtagtg

SEQ ID NO: 186265 - DNA, 25 bp, Probe sequence
gccttaactgaagaagcatttgtaa

SEQ ID NO: 186266 - DNA, 25 bp, Probe sequence
gcgattgtatcgatattggcaatga

SEQ ID NO: 186267 - DNA, 25 bp, Probe sequence
gaatggtatttcaatttcccgaatc

SEQ ID NO: 186268 - DNA, 25 bp, Probe sequence
gaatcctgatattatcgtggttgat

SEQ ID NO: 186269 - DNA, 25 bp, Probe sequence
gaagccaaaaactatgcccatcgtc

SEQ ID NO: 186270 - DNA, 25 bp, Probe sequence
gacaatgtaagttatacctatcaaa

SEQ ID NO: 186271 - DNA, 25 bp, Probe sequence
gagcgtgaaatgatatttggaccta

SEQ ID NO: 186272 - DNA, 25 bp, Probe sequence
gtcaggtggacaaatgcgtaaaata

SEQ ID NO: 186273 - DNA, 25 bp, Probe sequence
gtaagcttgtataaggagtggcaac

SEQ ID NO: 186274 - DNA, 25 bp, Probe sequence
gtctgttgatggatttaggcttttc

SEQ ID NO: 186275 - DNA, 25 bp, Probe sequence
gtgtcgcaaacatcaccaaaagagc

SEQ ID NO: 186276 - DNA, 25 bp, Probe sequence
ggtatttcaatttcccgaatctcaa

SEQ ID NO: 186277 - DNA, 25 bp, Probe sequence
ggatttaggcttttcaagagatgta

SEQ ID NO: 186278 - DNA, 25 bp, Probe sequence
ggcaatgaatcctgatattatcgtg

SEQ ID NO: 186279 - DNA, 25 bp, Probe sequence
tggcggattggcatattggtttgcc

SEQ ID NO: 186280 - DNA, 25 bp, Probe sequence
tgtcacaatcaccatttcaaatgtc

SEQ ID NO: 186281 - DNA, 25 bp, Probe sequence
tgatccacaaagtaaacgacaagta

SEQ ID NO: 186282 - DNA, 25 bp, Probe sequence
tcagttacaatatgactttgaacaa

SEQ ID NO: 186283 - DNA, 25 bp, Probe sequence
atttctattacgcatgatttatctg

SEQ ID NO: 186284 - DNA, 25 bp, Probe sequence
atcaaagtgatgcatccttcacatt

SEQ ID NO: 186285 - DNA, 25 bp, Probe sequence
agtgtattagcacttaacccctctg

SEQ ID NO: 186286 - DNA, 25 bp, Probe sequence
acgcatgatttatctgaggcgatgg

SEQ ID NO: 186287 - DNA, 25 bp, Probe sequence
acttaacccctctgtcattatatta

SEQ ID NO: 186288 - DNA, 25 bp, Probe sequence
aaatctacaattgccaagttaatga

SEQ ID NO: 186289 - DNA, 25 bp, Probe sequence
aacccctctgtcattatattagatg

SEQ ID NO: 186290 - DNA, 25 bp, Probe sequence
aacccagtcaatgtcatatacagcg

SEQ ID NO: 186291 - DNA, 25 bp, Probe sequence
aataggtctagatttgccattccca

SEQ ID NO: 186292 - DNA, 25 bp, Probe sequence
cattcttaacttatgaagggctggt

SEQ ID NO: 186293 - DNA, 25 bp, Probe sequence
ctattgttggtcataacggttctgg

SEQ ID NO: 186294 - DNA, 25 bp, Probe sequence
gcattatcggggggacagaagcagc

SEQ ID NO: 186295 - DNA, 25 bp, Probe sequence
gcagcgtgtggctatagcaagtgta

SEQ ID NO: 186296 - DNA, 25 bp, Probe sequence
gaatccggataatcaatttgttggt

SEQ ID NO: 186297 - DNA, 25 bp, Probe sequence
gaacctaatgcattatcggggggac

SEQ ID NO: 186298 - DNA, 25 bp, Probe sequence
gaacgtgcagattatgaacctaatg

SEQ ID NO: 186299 - DNA, 25 bp, Probe sequence
gaggcgatggaagcagatcatgtta

SEQ ID NO: 186300 - DNA, 25 bp, Probe sequence
gatgaggcgacttctatgttagatc

SEQ ID NO: 186301 - DNA, 25 bp, Probe sequence
gatgcacgtcaaaatttattggatt

SEQ ID NO: 186302 - DNA, 25 bp, Probe sequence
gatgcatccttcacattgaaagatg

SEQ ID NO: 186303 - DNA, 25 bp, Probe sequence
gttagatcctgatgcacgtcaaaat

SEQ ID NO: 186304 - DNA, 25 bp, Probe sequence
gttatgaataaagggactgtctata

SEQ ID NO: 186305 - DNA, 25 bp, Probe sequence
gtcaatgtcatatacagcgatttat

SEQ ID NO: 186306 - DNA, 25 bp, Probe sequence
gtctagatttgccattcccaatcaa

SEQ ID NO: 186307 - DNA, 25 bp, Probe sequence
ggggggacagaagcagcgtgtggct

SEQ ID NO: 186308 - DNA, 25 bp, Probe sequence
ggtcagtggacatctattgttggtc

SEQ ID NO: 186309 - DNA, 25 bp, Probe sequence
ggaagcagatcatgttatcgttatg

SEQ ID NO: 186310 - DNA, 25 bp, Probe sequence
ggcgacttctatgttagatcctgat

SEQ ID NO: 186311 - DNA, 25 bp, Probe sequence
tgaagggctggtggatcaactatga

SEQ ID NO: 186312 - DNA, 25 bp, Probe sequence
tatacctaaaggtcagtggacatct

SEQ ID NO: 186313 - DNA, 25 bp, Probe sequence
tattacaatcatttctattacgcat

SEQ ID NO: 186314 - DNA, 25 bp, Probe sequence
ttgttggttcaattgtaaaatacga

SEQ ID NO: 186315 - DNA, 25 bp, Probe sequence
ttgccattcccaatcaaaataaatc

SEQ ID NO: 186316 - DNA, 25 bp, Probe sequence
ttggactcgaaaatcatgcggttcc

SEQ ID NO: 186317 - DNA, 25 bp, Probe sequence
attaggtcgtacttctgatcaacgt

SEQ ID NO: 186318 - DNA, 25 bp, Probe sequence
atcaacgtaaagctatgttacgtga

SEQ ID NO: 186319 - DNA, 25 bp, Probe sequence
aggtcgtacttctgatcaacgtaaa

SEQ ID NO: 186320 - DNA, 25 bp, Probe sequence
agaaaattaggtcgtacttctgatc

SEQ ID NO: 186321 - DNA, 25 bp, Probe sequence
acgtaaagctatgttacgtgactta

SEQ ID NO: 186322 - DNA, 25 bp, Probe sequence
acttctgatcaacgtaaagctatgt

SEQ ID NO: 186323 - DNA, 25 bp, Probe sequence
acagaaaattaggtcgtacttctga

SEQ ID NO: 186324 - DNA, 25 bp, Probe sequence
aaattaggtcgtacttctgatcaac

SEQ ID NO: 186325 - DNA, 25 bp, Probe sequence
aaaattaggtcgtacttctgatcaa

SEQ ID NO: 186326 - DNA, 25 bp, Probe sequence
aacgtaaagctatgttacgtgactt

SEQ ID NO: 186327 - DNA, 25 bp, Probe sequence
aattaggtcgtacttctgatcaacg

SEQ ID NO: 186328 - DNA, 25 bp, Probe sequence
caacgtaaagctatgttacgtgact

SEQ ID NO: 186329 - DNA, 25 bp, Probe sequence
cagaaaattaggtcgtacttctgat

SEQ ID NO: 186330 - DNA, 25 bp, Probe sequence
cttctgatcaacgtaaagctatgtt

SEQ ID NO: 186331 - DNA, 25 bp, Probe sequence
ctgatcaacgtaaagctatgttacg

SEQ ID NO: 186332 - DNA, 25 bp, Probe sequence
cgtacttctgatcaacgtaaagcta

SEQ ID NO: 186333 - DNA, 25 bp, Probe sequence
gaaaattaggtcgtacttctgatca

SEQ ID NO: 186334 - DNA, 25 bp, Probe sequence
gatcaacgtaaagctatgttacgtg

SEQ ID NO: 186335 - DNA, 25 bp, Probe sequence
gtacttctgatcaacgtaaagctat

SEQ ID NO: 186336 - DNA, 25 bp, Probe sequence
gtcgtacttctgatcaacgtaaagc

SEQ ID NO: 186337 - DNA, 25 bp, Probe sequence
ggtcgtacttctgatcaacgtaaag

SEQ ID NO: 186338 - DNA, 25 bp, Probe sequence
tgatcaacgtaaagctatgttacgt

SEQ ID NO: 186339 - DNA, 25 bp, Probe sequence
tcgtacttctgatcaacgtaaagct

SEQ ID NO: 186340 - DNA, 25 bp, Probe sequence
tctgatcaacgtaaagctatgttac

SEQ ID NO: 186341 - DNA, 25 bp, Probe sequence
tcaacgtaaagctatgttacgtgac

SEQ ID NO: 186342 - DNA, 25 bp, Probe sequence
tacagaaaattaggtcgtacttctg

SEQ ID NO: 186343 - DNA, 25 bp, Probe sequence
tacttctgatcaacgtaaagctatg

SEQ ID NO: 186344 - DNA, 25 bp, Probe sequence
taggtcgtacttctgatcaacgtaa

SEQ ID NO: 186345 - DNA, 25 bp, Probe sequence
ttaggtcgtacttctgatcaacgta

SEQ ID NO: 186346 - DNA, 25 bp, Probe sequence
ttacagaaaattaggtcgtacttct

SEQ ID NO: 186347 - DNA, 25 bp, Probe sequence
ttctgatcaacgtaaagctatgtta

SEQ ID NO: 186348 - DNA, 25 bp, Probe sequence
attgtattcacctgttgaacgtgtg

SEQ ID NO: 186349 - DNA, 25 bp, Probe sequence
atccctgttgattcattgtattcac

SEQ ID NO: 186350 - DNA, 25 bp, Probe sequence
aacgcgcaggaatcaattctgttca

SEQ ID NO: 186351 - DNA, 25 bp, Probe sequence
aatcacaccacaagaatcagtttca

SEQ ID NO: 186352 - DNA, 25 bp, Probe sequence
aattcgtctagttgctaacaagggt

SEQ ID NO: 186353 - DNA, 25 bp, Probe sequence
aattctgttcaagagttagctgaca

SEQ ID NO: 186354 - DNA, 25 bp, Probe sequence
gttcgttgttgaaccactagaacgt

SEQ ID NO: 186355 - DNA, 25 bp, Probe sequence
gctacggtactacactaggaaactc

SEQ ID NO: 186356 - DNA, 25 bp, Probe sequence
gctaaattcggtaagttcgttgttg

SEQ ID NO: 186357 - DNA, 25 bp, Probe sequence
gaattctcagcagtagacaatgtag

SEQ ID NO: 186358 - DNA, 25 bp, Probe sequence
gaattagacttatctgtacgttcat

SEQ ID NO: 186359 - DNA, 25 bp, Probe sequence
gaatcagtttcattagcagcaaaaa

SEQ ID NO: 186360 - DNA, 25 bp, Probe sequence
gaaggcgaagtaacagcaagcgaca

SEQ ID NO: 186361 - DNA, 25 bp, Probe sequence
gaacgtggctacggtactacactag

SEQ ID NO: 186362 - DNA, 25 bp, Probe sequence
gaacgtgtgaactatactgttgaaa

SEQ ID NO: 186363 - DNA, 25 bp, Probe sequence
gacaaatctgaagctgacatgatga

SEQ ID NO: 186364 - DNA, 25 bp, Probe sequence
gactgaacacttgaatatcttcgtt

SEQ ID NO: 186365 - DNA, 25 bp, Probe sequence
gttggtcttactgatgaagcgcaaa

SEQ ID NO: 186366 - DNA, 25 bp, Probe sequence
ggtggtcacttaaaaattcgtctag

SEQ ID NO: 186367 - DNA, 25 bp, Probe sequence
gggagttttacatgaattctcagca

SEQ ID NO: 186368 - DNA, 25 bp, Probe sequence
ggtagaggttacgcattagcagaac

SEQ ID NO: 186369 - DNA, 25 bp, Probe sequence
ggactaatggttcaatcacaccaca

SEQ ID NO: 186370 - DNA, 25 bp, Probe sequence
tgaaagtgcgtaatttaggtcgtaa

SEQ ID NO: 186371 - DNA, 25 bp, Probe sequence
tgcaacagtatctaaaggtggtcac

SEQ ID NO: 186372 - DNA, 25 bp, Probe sequence
tgaatatcttcgttggtcttactga

SEQ ID NO: 186373 - DNA, 25 bp, Probe sequence
tcattaccaggtgcagccgttaagt

SEQ ID NO: 186374 - DNA, 25 bp, Probe sequence
tctgtacgttcatataactgcttaa

SEQ ID NO: 186375 - DNA, 25 bp, Probe sequence
taacagcaagcgacattacacatga

SEQ ID NO: 186376 - DNA, 25 bp, Probe sequence
taggaaactccttacgtcgtatcct

SEQ ID NO: 186377 - DNA, 25 bp, Probe sequence
taaacccagagcttaaaattgcaac

SEQ ID NO: 186378 - DNA, 25 bp, Probe sequence
tacacgtgtaggtcaaagcagtgat

SEQ ID NO: 186379 - DNA, 25 bp, Probe sequence
tactatcttcattaccaggtgcagc

SEQ ID NO: 186380 - DNA, 25 bp, Probe sequence
tacgtcgtatcctactatcttcatt

SEQ ID NO: 186381 - DNA, 25 bp, Probe sequence
taccaattggtgtaatccctgttga

SEQ ID NO: 186382 - DNA, 25 bp, Probe sequence
attcgtgcattacaatctgcaggtt

SEQ ID NO: 186383 - DNA, 25 bp, Probe sequence
atggcacgtaaacaagtatctcgta

SEQ ID NO: 186384 - DNA, 25 bp, Probe sequence
agacgttactccagtacctcataac

SEQ ID NO: 186385 - DNA, 25 bp, Probe sequence
acctggtccaggtcgtgaatcagct

SEQ ID NO: 186386 - DNA, 25 bp, Probe sequence
actgcatctaaatcagctatggagc

SEQ ID NO: 186387 - DNA, 25 bp, Probe sequence
actgcgatcagagacgttactccag

SEQ ID NO: 186388 - DNA, 25 bp, Probe sequence
acaagtatctcgtaaacgtagagtg

SEQ ID NO: 186389 - DNA, 25 bp, Probe sequence
aaatcagctatggagcatggtttaa

SEQ ID NO: 186390 - DNA, 25 bp, Probe sequence
aaatggtgtagcacacatccgttca

SEQ ID NO: 186391 - DNA, 25 bp, Probe sequence
aaatggcttctgaaactgcatctaa

SEQ ID NO: 186392 - DNA, 25 bp, Probe sequence
aaaatcaacaccatttgcagcacaa

SEQ ID NO: 186393 - DNA, 25 bp, Probe sequence
aacactattgtaactatcactgatg

SEQ ID NO: 186394 - DNA, 25 bp, Probe sequence
catccgttcaacattcaacaacact

SEQ ID NO: 186395 - DNA, 25 bp, Probe sequence
gctggtgcattaggattcaaaggat

SEQ ID NO: 186396 - DNA, 25 bp, Probe sequence
gcattacaatctgcaggtttagaag

SEQ ID NO: 186397 - DNA, 25 bp, Probe sequence
gcacacatccgttcaacattcaaca

SEQ ID NO: 186398 - DNA, 25 bp, Probe sequence
gttactccagtacctcataacggtt

SEQ ID NO: 186399 - DNA, 25 bp, Probe sequence
gttcaacattcaacaacactattgt

SEQ ID NO: 186400 - DNA, 25 bp, Probe sequence
gtacctcataacggttgtcgtccac

SEQ ID NO: 186401 - DNA, 25 bp, Probe sequence
gtaacagttaaaggacctggtccag

SEQ ID NO: 186402 - DNA, 25 bp, Probe sequence
gtaactatcactgatgagttcggta

SEQ ID NO: 186403 - DNA, 25 bp, Probe sequence
gtcatcagctggtgcattaggattc

SEQ ID NO: 186404 - DNA, 25 bp, Probe sequence
ggtcgtgaatcagctattcgtgcat

SEQ ID NO: 186405 - DNA, 25 bp, Probe sequence
ggtccaggtcgtgaatcagctattc

SEQ ID NO: 186406 - DNA, 25 bp, Probe sequence
ggtaatgctttatcatggtcatcag

SEQ ID NO: 186407 - DNA, 25 bp, Probe sequence
ggtttagaagtaactgcgatcagag

SEQ ID NO: 186408 - DNA, 25 bp, Probe sequence
tggcttctgaaactgcatctaaatc

SEQ ID NO: 186409 - DNA, 25 bp, Probe sequence
tgtagcacacatccgttcaacattc

SEQ ID NO: 186410 - DNA, 25 bp, Probe sequence
tcataacggttgtcgtccaccaaaa

SEQ ID NO: 186411 - DNA, 25 bp, Probe sequence
tcactgatgagttcggtaatgcttt

SEQ ID NO: 186412 - DNA, 25 bp, Probe sequence
tcagagacgttactccagtacctca

SEQ ID NO: 186413 - DNA, 25 bp, Probe sequence
tcagctattcgtgcattacaatctg

SEQ ID NO: 186414 - DNA, 25 bp, Probe sequence
tatcatggtcatcagctggtgcatt

SEQ ID NO: 186415 - DNA, 25 bp, Probe sequence
tttgcagcacaaatggcttctgaaa

SEQ ID NO: 186416 - DNA, 25 bp, Probe sequence
atctcattaacttatatatacggta

SEQ ID NO: 186417 - DNA, 25 bp, Probe sequence
atcggtacgtcaactgctcaaaaaa

SEQ ID NO: 186418 - DNA, 25 bp, Probe sequence
atgacgaattaggtcgcatccgtga

SEQ ID NO: 186419 - DNA, 25 bp, Probe sequence
atggcacgtattgcaggagtagata

SEQ ID NO: 186420 - DNA, 25 bp, Probe sequence
agctgatactcgtgtgaaagattta

SEQ ID NO: 186421 - DNA, 25 bp, Probe sequence
acggtatcggtacgtcaactgctca

SEQ ID NO: 186422 - DNA, 25 bp, Probe sequence
actcgtgtgaaagatttaactgatg

SEQ ID NO: 186423 - DNA, 25 bp, Probe sequence
aacgcgtagttatctcattaactta

SEQ ID NO: 186424 - DNA, 25 bp, Probe sequence
aagaagctaacgtatcagctgatac

SEQ ID NO: 186425 - DNA, 25 bp, Probe sequence
aattcttgaagaagctaacgtatca

SEQ ID NO: 186426 - DNA, 25 bp, Probe sequence
caacgcgcgtactcgtaaaggacca

SEQ ID NO: 186427 - DNA, 25 bp, Probe sequence
tcaccgtcgtggtttaccagttcgt

SEQ ID NO: 186428 - DNA, 25 bp, Probe sequence
catcataccgtggtatccgtcaccg

SEQ ID NO: 186429 - DNA, 25 bp, Probe sequence
gcgcgtactcgtaaaggaccagtta

SEQ ID NO: 186430 - DNA, 25 bp, Probe sequence
gcatccgtgaagttgtagacggtta

SEQ ID NO: 186431 - DNA, 25 bp, Probe sequence
gaattaggtcgcatccgtgaagttg

SEQ ID NO: 186432 - DNA, 25 bp, Probe sequence
gaaggtgacttacgtcgtgaaacta

SEQ ID NO: 186433 - DNA, 25 bp, Probe sequence
gatattccacgtgaaaaacgcgtag

SEQ ID NO: 186434 - DNA, 25 bp, Probe sequence
gtagacggttataaagtcgaaggtg

SEQ ID NO: 186435 - DNA, 25 bp, Probe sequence
gtatcggtacgtcaactgctcaaaa

SEQ ID NO: 186436 - DNA, 25 bp, Probe sequence
gtatcagctgatactcgtgtgaaag

SEQ ID NO: 186437 - DNA, 25 bp, Probe sequence
gtacgtcaactgctcaaaaaattct

SEQ ID NO: 186438 - DNA, 25 bp, Probe sequence
gtcaactgctcaaaaaattcttgaa

SEQ ID NO: 186439 - DNA, 25 bp, Probe sequence
gtcgaaggtgacttacgtcgtgaaa

SEQ ID NO: 186440 - DNA, 25 bp, Probe sequence
gtgacttacgtcgtgaaactaactt

SEQ ID NO: 186441 - DNA, 25 bp, Probe sequence
gtgaaaaacgcgtagttatctcatt

SEQ ID NO: 186442 - DNA, 25 bp, Probe sequence
tcgtggtttaccagttcgtggtcaa

SEQ ID NO: 186443 - DNA, 25 bp, Probe sequence
ggtcgcatccgtgaagttgtagacg

SEQ ID NO: 186444 - DNA, 25 bp, Probe sequence
ggaaatttcatcataccgtggtatc

SEQ ID NO: 186445 - DNA, 25 bp, Probe sequence
tgcaggagtagatattccacgtgaa

SEQ ID NO: 186446 - DNA, 25 bp, Probe sequence
tacgtcgtgaaactaacttaaatat

SEQ ID NO: 186447 - DNA, 25 bp, Probe sequence
taggtcgcatccgtgaagttgtaga

SEQ ID NO: 186448 - DNA, 25 bp, Probe sequence
tatcaaacgtttaatggaaatttca

SEQ ID NO: 186449 - DNA, 25 bp, Probe sequence
tatacggtatcggtacgtcaactgc

SEQ ID NO: 186450 - DNA, 25 bp, Probe sequence
attctacctggcgacaaagtaactg

SEQ ID NO: 186451 - DNA, 25 bp, Probe sequence
attagatactttaccgaacgcaatg

SEQ ID NO: 186452 - DNA, 25 bp, Probe sequence
atggtcatgagattttagctcacgt

SEQ ID NO: 186453 - DNA, 25 bp, Probe sequence
acctggcgacaaagtaactgttgag

SEQ ID NO: 186454 - DNA, 25 bp, Probe sequence
actgttgagatgtctccgtacgatt

SEQ ID NO: 186455 - DNA, 25 bp, Probe sequence
acattcgtattctacctggcgacaa

SEQ ID NO: 186456 - DNA, 25 bp, Probe sequence
acacgcggaagaattacttatcgtt

SEQ ID NO: 186457 - DNA, 25 bp, Probe sequence
aatgaattacattcgtattctacct

SEQ ID NO: 186458 - DNA, 25 bp, Probe sequence
aattacattcgtattctacctggcg

SEQ ID NO: 186459 - DNA, 25 bp, Probe sequence
cattcgtattctacctggcgacaaa

SEQ ID NO: 186460 - DNA, 25 bp, Probe sequence
ctccgtacgatttaacacgcggaag

SEQ ID NO: 186461 - DNA, 25 bp, Probe sequence
ctcacgtaagtggtaaaatcagaat

SEQ ID NO: 186462 - DNA, 25 bp, Probe sequence
gcggaagaattacttatcgttataa

SEQ ID NO: 186463 - DNA, 25 bp, Probe sequence
gaaggtactgtattagatactttac

SEQ ID NO: 186464 - DNA, 25 bp, Probe sequence
gagattttagctcacgtaagtggta

SEQ ID NO: 186465 - DNA, 25 bp, Probe sequence
gagatgtctccgtacgatttaacac

SEQ ID NO: 186466 - DNA, 25 bp, Probe sequence
gatgtctccgtacgatttaacacgc

SEQ ID NO: 186467 - DNA, 25 bp, Probe sequence
gatactttaccgaacgcaatgttta

SEQ ID NO: 186468 - DNA, 25 bp, Probe sequence
gtattctacctggcgacaaagtaac

SEQ ID NO: 186469 - DNA, 25 bp, Probe sequence
gatttaacacgcggaagaattactt

SEQ ID NO: 186470 - DNA, 25 bp, Probe sequence
gattttagctcacgtaagtggtaaa

SEQ ID NO: 186471 - DNA, 25 bp, Probe sequence
gtattagatactttaccgaacgcaa

SEQ ID NO: 186472 - DNA, 25 bp, Probe sequence
gtacgatttaacacgcggaagaatt

SEQ ID NO: 186473 - DNA, 25 bp, Probe sequence
gtaactgttgagatgtctccgtacg

SEQ ID NO: 186474 - DNA, 25 bp, Probe sequence
tgtctccgtacgatttaacacgcgg

SEQ ID NO: 186475 - DNA, 25 bp, Probe sequence
gtctccgtacgatttaacacgcgga

SEQ ID NO: 186476 - DNA, 25 bp, Probe sequence
ggtcatgagattttagctcacgtaa

SEQ ID NO: 186477 - DNA, 25 bp, Probe sequence
tctacctggcgacaaagtaactgtt

SEQ ID NO: 186478 - DNA, 25 bp, Probe sequence
taccgaacgcaatgtttaaagtaga

SEQ ID NO: 186479 - DNA, 25 bp, Probe sequence
tagatactttaccgaacgcaatgtt

SEQ ID NO: 186480 - DNA, 25 bp, Probe sequence
tttagctcacgtaagtggtaaaatc

SEQ ID NO: 186481 - DNA, 25 bp, Probe sequence
ttacattcgtattctacctggcgac

SEQ ID NO: 186482 - DNA, 25 bp, Probe sequence
ttcgtattctacctggcgacaaagt

SEQ ID NO: 186483 - DNA, 25 bp, Probe sequence
ttgagatgtctccgtacgatttaac

SEQ ID NO: 186484 - DNA, 25 bp, Probe sequence
cccaataccccacatttcaactggt

SEQ ID NO: 186485 - DNA, 25 bp, Probe sequence
attagttcctgatgaagtgactgta

SEQ ID NO: 186486 - DNA, 25 bp, Probe sequence
atatcattttgatgggtttacctgg

SEQ ID NO: 186487 - DNA, 25 bp, Probe sequence
atcatcttgtatttaatcctccgaa

SEQ ID NO: 186488 - DNA, 25 bp, Probe sequence
accgtcttacaggtcgtcgaatctg

SEQ ID NO: 186489 - DNA, 25 bp, Probe sequence
aggctttttattagatggcttccca

SEQ ID NO: 186490 - DNA, 25 bp, Probe sequence
accccacatttcaactggtgacatg

SEQ ID NO: 186491 - DNA, 25 bp, Probe sequence
acgtatcatcttgtatttaatcctc

SEQ ID NO: 186492 - DNA, 25 bp, Probe sequence
aatgaaccgtcttacaggtcgtcga

SEQ ID NO: 186493 - DNA, 25 bp, Probe sequence
ctggcgcaggtaaaggaactcaagc

SEQ ID NO: 186494 - DNA, 25 bp, Probe sequence
gcgacgttaccaaagatgtcattga

SEQ ID NO: 186495 - DNA, 25 bp, Probe sequence
gctgtcatcaatatcgaagttccgg

SEQ ID NO: 186496 - DNA, 25 bp, Probe sequence
gctaagtcttatatggaccgtggcg

SEQ ID NO: 186497 - DNA, 25 bp, Probe sequence
gaaggtcgaaggtatttgtgatatc

SEQ ID NO: 186498 - DNA, 25 bp, Probe sequence
gaagtgactgtaggtatcgttaagg

SEQ ID NO: 186499 - DNA, 25 bp, Probe sequence
gaacaatcgagcaagctgaggcatt

SEQ ID NO: 186500 - DNA, 25 bp, Probe sequence
gaaagaatttctgaagacgatgcaa

SEQ ID NO: 186501 - DNA, 25 bp, Probe sequence
gaccgtggcgaattagttcctgatg

SEQ ID NO: 186502 - DNA, 25 bp, Probe sequence
gagcttgacagaaacattgatgctg

SEQ ID NO: 186503 - DNA, 25 bp, Probe sequence
gagcaagctgaggcattaaataata

SEQ ID NO: 186504 - DNA, 25 bp, Probe sequence
gagtcatgtggtacaacgtatcatc

SEQ ID NO: 186505 - DNA, 25 bp, Probe sequence
gatggcttcccaagaacaatcgagc

SEQ ID NO: 186506 - DNA, 25 bp, Probe sequence
gatggtggtaaattgtatcaacgag

SEQ ID NO: 186507 - DNA, 25 bp, Probe sequence
gataatcctgaaacggtagctaatc

SEQ ID NO: 186508 - DNA, 25 bp, Probe sequence
gttcaaaagatattagcgacgttac

SEQ ID NO: 186509 - DNA, 25 bp, Probe sequence
ggtcgtcgaatctgtgagtcatgtg

SEQ ID NO: 186510 - DNA, 25 bp, Probe sequence
ggtagctaatcgtttgagtgttaat

SEQ ID NO: 186511 - DNA, 25 bp, Probe sequence
ggtatttgtgatatcgatggtggta

SEQ ID NO: 186512 - DNA, 25 bp, Probe sequence
ggaactcaagcaagtgaaattgtca

SEQ ID NO: 186513 - DNA, 25 bp, Probe sequence
tggtgacatgttcagaaaagctata

SEQ ID NO: 186514 - DNA, 25 bp, Probe sequence
tgtcaagaaattcccaataccccac

SEQ ID NO: 186515 - DNA, 25 bp, Probe sequence
taatcctccgaaggtcgaaggtatt

SEQ ID NO: 186516 - DNA, 25 bp, Probe sequence
taaataatattatgtctgagcttga

SEQ ID NO: 186517 - DNA, 25 bp, Probe sequence
tttgatgggtttacctggcgcaggt

SEQ ID NO: 186518 - DNA, 25 bp, Probe sequence
attatactattcacatacttctatg

SEQ ID NO: 186519 - DNA, 25 bp, Probe sequence
atttatgtacttgaagccgttcgta

SEQ ID NO: 186520 - DNA, 25 bp, Probe sequence
agggacttatataccagctccagga

SEQ ID NO: 186521 - DNA, 25 bp, Probe sequence
agctccaggagtaaatcctgcagct

SEQ ID NO: 186522 - DNA, 25 bp, Probe sequence
accctacatcactgcatcaatcgta

SEQ ID NO: 186523 - DNA, 25 bp, Probe sequence
acattaacgttgttctatccagata

SEQ ID NO: 186524 - DNA, 25 bp, Probe sequence
acaagattttcttcacactagcaat

SEQ ID NO: 186525 - DNA, 25 bp, Probe sequence
aaatacttttggtggcggagccttg

SEQ ID NO: 186526 - DNA, 25 bp, Probe sequence
aacgattttctatttttgcaatggg

SEQ ID NO: 186527 - DNA, 25 bp, Probe sequence
taatccccaaggttctcaaggtgcc

SEQ ID NO: 186528 - DNA, 25 bp, Probe sequence
caatggcgttcttcttactgcctag

SEQ ID NO: 186529 - DNA, 25 bp, Probe sequence
caacgttgccagccagtctaattca

SEQ ID NO: 186530 - DNA, 25 bp, Probe sequence
gccgttcgtaaaattccgattcaat

SEQ ID NO: 186531 - DNA, 25 bp, Probe sequence
gcgaatgctgcaaatccttcaagta

SEQ ID NO: 186532 - DNA, 25 bp, Probe sequence
gcgggtattttatcaacgttgccag

SEQ ID NO: 186533 - DNA, 25 bp, Probe sequence
gaactcagccggtgttattcctgta

SEQ ID NO: 186534 - DNA, 25 bp, Probe sequence
gcaatttctttagcatttatccaat

SEQ ID NO: 186535 - DNA, 25 bp, Probe sequence
gttcggtgttggtaatggtatttct

SEQ ID NO: 186536 - DNA, 25 bp, Probe sequence
gttactcgttatttagcaatttctt

SEQ ID NO: 186537 - DNA, 25 bp, Probe sequence
gtattgtaccctacatcactgcatc

SEQ ID NO: 186538 - DNA, 25 bp, Probe sequence
gtatttctattatcatatttgcggg

SEQ ID NO: 186539 - DNA, 25 bp, Probe sequence
gtgatcaaatcactcagttcggtgt

SEQ ID NO: 186540 - DNA, 25 bp, Probe sequence
gtggcggagccttgaaacgattttc

SEQ ID NO: 186541 - DNA, 25 bp, Probe sequence
ggttctcaaggtgccactgagttat

SEQ ID NO: 186542 - DNA, 25 bp, Probe sequence
ggttcacaggcaacttatctacctt

SEQ ID NO: 186543 - DNA, 25 bp, Probe sequence
ggatattgtccctaaattctcagaa

SEQ ID NO: 186544 - DNA, 25 bp, Probe sequence
ggaactgctttcttaatatggcttg

SEQ ID NO: 186545 - DNA, 25 bp, Probe sequence
tccaatctataggtatggcattcca

SEQ ID NO: 186546 - DNA, 25 bp, Probe sequence
tcctgcagcttttgataatccccaa

SEQ ID NO: 186547 - DNA, 25 bp, Probe sequence
tcttagccgttatttcaattctacc

SEQ ID NO: 186548 - DNA, 25 bp, Probe sequence
tcaaacccttgtgaacttctttaga

SEQ ID NO: 186549 - DNA, 25 bp, Probe sequence
tatctcaaaggtgcgctgattatca

SEQ ID NO: 186550 - DNA, 25 bp, Probe sequence
ttgtaggttctatcttcttagccgt

SEQ ID NO: 186551 - DNA, 25 bp, Probe sequence
ttcctgtaatctttgcaatggcgtt

SEQ ID NO: 186552 - DNA, 25 bp, Probe sequence
attacatgagttaaaaccggcagaa

SEQ ID NO: 186553 - DNA, 25 bp, Probe sequence
aagctattgatgctaaaggtggagc

SEQ ID NO: 186554 - DNA, 25 bp, Probe sequence
aggtcaaaaagctcgttcaggcggt

SEQ ID NO: 186555 - DNA, 25 bp, Probe sequence
actaggtaatggttcacttgataag

SEQ ID NO: 186556 - DNA, 25 bp, Probe sequence
acaagtggtcgcggacacaaaggtc

SEQ ID NO: 186557 - DNA, 25 bp, Probe sequence
aaagctcgttcaggcggtggtgtaa

SEQ ID NO: 186558 - DNA, 25 bp, Probe sequence
aaaatctggtatcaaaatactaggt

SEQ ID NO: 186559 - DNA, 25 bp, Probe sequence
aactccagctttattagtagaatct

SEQ ID NO: 186560 - DNA, 25 bp, Probe sequence
aaggtggagcacacgaggtgatcta

SEQ ID NO: 186561 - DNA, 25 bp, Probe sequence
aatactaggtaatggttcacttgat

SEQ ID NO: 186562 - DNA, 25 bp, Probe sequence
caaaaagctcgttcaggcggtggtg

SEQ ID NO: 186563 - DNA, 25 bp, Probe sequence
caggcggtggtgtaagaccaggatt

SEQ ID NO: 186564 - DNA, 25 bp, Probe sequence
ctcataaattctcagcttcagcagc

SEQ ID NO: 186565 - DNA, 25 bp, Probe sequence
gctcgttcaggcggtggtgtaagac

SEQ ID NO: 186566 - DNA, 25 bp, Probe sequence
gctattgttaacttagaccaactta

SEQ ID NO: 186567 - DNA, 25 bp, Probe sequence
gaatatgctattgttaacttagacc

SEQ ID NO: 186568 - DNA, 25 bp, Probe sequence
gaaggttcacgtaaagaacgcaatc

SEQ ID NO: 186569 - DNA, 25 bp, Probe sequence
gaagtaactccagctttattagtag

SEQ ID NO: 186570 - DNA, 25 bp, Probe sequence
gaacgcaatcgtgttggacgtggtg

SEQ ID NO: 186571 - DNA, 25 bp, Probe sequence
gacacaaaggtcaaaaagctcgttc

SEQ ID NO: 186572 - DNA, 25 bp, Probe sequence
gacagtgaaagctcataaattctca

SEQ ID NO: 186573 - DNA, 25 bp, Probe sequence
gatggtactgaagtaactccagctt

SEQ ID NO: 186574 - DNA, 25 bp, Probe sequence
gtggtcgcggacacaaaggtcaaaa

SEQ ID NO: 186575 - DNA, 25 bp, Probe sequence
gtagaatctggtgttgttaagaatg

SEQ ID NO: 186576 - DNA, 25 bp, Probe sequence
gtactgaagtaactccagctttatt

SEQ ID NO: 186577 - DNA, 25 bp, Probe sequence
gtgttggacgtggtgttgcgacagg

SEQ ID NO: 186578 - DNA, 25 bp, Probe sequence
ggtaaaacaagtggtcgcggacaca

SEQ ID NO: 186579 - DNA, 25 bp, Probe sequence
ggttcacttgataagaaattgacag

SEQ ID NO: 186580 - DNA, 25 bp, Probe sequence
tggtcaattaccattattccgtcgt

SEQ ID NO: 186581 - DNA, 25 bp, Probe sequence
tcgtgttggacgtggtgttgcgaca

SEQ ID NO: 186582 - DNA, 25 bp, Probe sequence
tcagcagcagaagctattgatgcta

SEQ ID NO: 186583 - DNA, 25 bp, Probe sequence
tcaattaccattattccgtcgttta

SEQ ID NO: 186584 - DNA, 25 bp, Probe sequence
taaattctcagcttcagcagcagaa

SEQ ID NO: 186585 - DNA, 25 bp, Probe sequence
ttggacgtggtgttgcgacaggtaa

SEQ ID NO: 186586 - DNA, 25 bp, Probe sequence
attggtcgtcctgaaacacaacgta

SEQ ID NO: 186587 - DNA, 25 bp, Probe sequence
attacaaattaccctcactcgtagt

SEQ ID NO: 186588 - DNA, 25 bp, Probe sequence
agataaccctgctattcgtgggcaa

SEQ ID NO: 186589 - DNA, 25 bp, Probe sequence
accctcactcgtagtgttattggtc

SEQ ID NO: 186590 - DNA, 25 bp, Probe sequence
accctgctattcgtgggcaaatcaa

SEQ ID NO: 186591 - DNA, 25 bp, Probe sequence
acaaattaccctcactcgtagtgtt

SEQ ID NO: 186592 - DNA, 25 bp, Probe sequence
caaattaccctcactcgtagtgtta

SEQ ID NO: 186593 - DNA, 25 bp, Probe sequence
aaagactaacagttcagtagttgtt

SEQ ID NO: 186594 - DNA, 25 bp, Probe sequence
aacacaacgtaaaactgttgaagct

SEQ ID NO: 186595 - DNA, 25 bp, Probe sequence
aattaccctcactcgtagtgttatt

SEQ ID NO: 186596 - DNA, 25 bp, Probe sequence
aattacaaattaccctcactcgtag

SEQ ID NO: 186597 - DNA, 25 bp, Probe sequence
cactcgtagtgttattggtcgtcct

SEQ ID NO: 186598 - DNA, 25 bp, Probe sequence
ctcgtagtgttattggtcgtcctga

SEQ ID NO: 186599 - DNA, 25 bp, Probe sequence
cctgctattcgtgggcaaatcaaca

SEQ ID NO: 186600 - DNA, 25 bp, Probe sequence
gctattcgtgggcaaatcaacaaag

SEQ ID NO: 186601 - DNA, 25 bp, Probe sequence
gaagataaccctgctattcgtgggc

SEQ ID NO: 186602 - DNA, 25 bp, Probe sequence
gataaccctgctattcgtgggcaaa

SEQ ID NO: 186603 - DNA, 25 bp, Probe sequence
gttgttgaagataaccctgctattc

SEQ ID NO: 186604 - DNA, 25 bp, Probe sequence
gttgaagataaccctgctattcgtg

SEQ ID NO: 186605 - DNA, 25 bp, Probe sequence
gttattggtcgtcctgaaacacaac

SEQ ID NO: 186606 - DNA, 25 bp, Probe sequence
gtagttgttgaagataaccctgcta

SEQ ID NO: 186607 - DNA, 25 bp, Probe sequence
gtagtgttattggtcgtcctgaaac

SEQ ID NO: 186608 - DNA, 25 bp, Probe sequence
gtcctgaaacacaacgtaaaactgt

SEQ ID NO: 186609 - DNA, 25 bp, Probe sequence
ggcaaatcaacaaagttaagcactt

SEQ ID NO: 186610 - DNA, 25 bp, Probe sequence
ttcgtgggcaaatcaacaaagttaa

SEQ ID NO: 186611 - DNA, 25 bp, Probe sequence
tggtcgtcctgaaacacaacgtaaa

SEQ ID NO: 186612 - DNA, 25 bp, Probe sequence
tgttgaagctttaggtcttaaaaag

SEQ ID NO: 186613 - DNA, 25 bp, Probe sequence
tcgtagtgttattggtcgtcctgaa

SEQ ID NO: 186614 - DNA, 25 bp, Probe sequence
taaccctgctattcgtgggcaaatc

SEQ ID NO: 186615 - DNA, 25 bp, Probe sequence
tacaaattaccctcactcgtagtgt

SEQ ID NO: 186616 - DNA, 25 bp, Probe sequence
taaattacaaattaccctcactcgt

SEQ ID NO: 186617 - DNA, 25 bp, Probe sequence
ttaccctcactcgtagtgttattgg

SEQ ID NO: 186618 - DNA, 25 bp, Probe sequence
ttaagcacttagtaacagtagaaga

SEQ ID NO: 186619 - DNA, 25 bp, Probe sequence
ttgaagataaccctgctattcgtgg

SEQ ID NO: 186620 - DNA, 25 bp, Probe sequence
ctggccgttacggttcaggaagcgt

SEQ ID NO: 186621 - DNA, 25 bp, Probe sequence
atcaacatggttcgtgctacaatcg

SEQ ID NO: 186622 - DNA, 25 bp, Probe sequence
atgctgaagatgttgcgaaattacg

SEQ ID NO: 186623 - DNA, 25 bp, Probe sequence
aggagttatcgctggtggtcctgtt

SEQ ID NO: 186624 - DNA, 25 bp, Probe sequence
agttgttccacgtgttgaaggtaca

SEQ ID NO: 186625 - DNA, 25 bp, Probe sequence
agctcaagaggtaccagaagcaatc

SEQ ID NO: 186626 - DNA, 25 bp, Probe sequence
acacaccaatcaacatggttcgtgc

SEQ ID NO: 186627 - DNA, 25 bp, Probe sequence
aactccacacacaattactggccgt

SEQ ID NO: 186628 - DNA, 25 bp, Probe sequence
aaccggctgcacctggtacaggagt

SEQ ID NO: 186629 - DNA, 25 bp, Probe sequence
cacacaattactggccgttacggtt

SEQ ID NO: 186630 - DNA, 25 bp, Probe sequence
aatggtcgtgtaggtttcggtactg

SEQ ID NO: 186631 - DNA, 25 bp, Probe sequence
aatcattaggatcaaacacaccaat

SEQ ID NO: 186632 - DNA, 25 bp, Probe sequence
cactgcattagttgtagttggagac

SEQ ID NO: 186633 - DNA, 25 bp, Probe sequence
catggttcgtgctacaatcgatggt

SEQ ID NO: 186634 - DNA, 25 bp, Probe sequence
cgtttccgtttcactgcattagttg

SEQ ID NO: 186635 - DNA, 25 bp, Probe sequence
cgtgctacaatcgatggtttacaaa

SEQ ID NO: 186636 - DNA, 25 bp, Probe sequence
gcgaaattacgtggcaaaacagtag

SEQ ID NO: 186637 - DNA, 25 bp, Probe sequence
gcgtatttatgaaaccggctgcacc

SEQ ID NO: 186638 - DNA, 25 bp, Probe sequence
gaattagcaggtatcactgatatct

SEQ ID NO: 186639 - DNA, 25 bp, Probe sequence
gaacgcgttgttacaatcaaccgtg

SEQ ID NO: 186640 - DNA, 25 bp, Probe sequence
gaaagaatttgaagaacgcgttgtt

SEQ ID NO: 186641 - DNA, 25 bp, Probe sequence
gatttagtagttgttccacgtgttg

SEQ ID NO: 186642 - DNA, 25 bp, Probe sequence
gttgttacaatcaaccgtgtagcaa

SEQ ID NO: 186643 - DNA, 25 bp, Probe sequence
gttacggttcaggaagcgtatttat

SEQ ID NO: 186644 - DNA, 25 bp, Probe sequence
gtatcactgatatcttaagtaaatc

SEQ ID NO: 186645 - DNA, 25 bp, Probe sequence
gtacaggagttatcgctggtggtcc

SEQ ID NO: 186646 - DNA, 25 bp, Probe sequence
gtgccgtacttgaattagcaggtat

SEQ ID NO: 186647 - DNA, 25 bp, Probe sequence
ggtacaactccacacacaattactg

SEQ ID NO: 186648 - DNA, 25 bp, Probe sequence
tgaaggtacaactccacacacaatt

SEQ ID NO: 186649 - DNA, 25 bp, Probe sequence
tcctgttcgtgccgtacttgaatta

SEQ ID NO: 186650 - DNA, 25 bp, Probe sequence
tcggtactggtaaagctcaagaggt

SEQ ID NO: 186651 - DNA, 25 bp, Probe sequence
tccgtttcactgcattagttgtagt

SEQ ID NO: 186652 - DNA, 25 bp, Probe sequence
taggtttcggtactggtaaagctca

SEQ ID NO: 186653 - DNA, 25 bp, Probe sequence
ttatgaaaccggctgcacctggtac

SEQ ID NO: 186654 - DNA, 25 bp, Probe sequence
atcacggacgtgttaaagcattagc

SEQ ID NO: 186655 - DNA, 25 bp, Probe sequence
atctacgctcaaattattgatgata

SEQ ID NO: 186656 - DNA, 25 bp, Probe sequence
atgctcgtgttcgtactaacttatc

SEQ ID NO: 186657 - DNA, 25 bp, Probe sequence
agtgcgtttaaaaagacatgctcgt

SEQ ID NO: 186658 - DNA, 25 bp, Probe sequence
agaaatcgtatttgaccgtggagga

SEQ ID NO: 186659 - DNA, 25 bp, Probe sequence
agcatatctacgctcaaattattga

SEQ ID NO: 186660 - DNA, 25 bp, Probe sequence
acggacgtgttaaagcattagctga

SEQ ID NO: 186661 - DNA, 25 bp, Probe sequence
acaagcatatctacgctcaaattat

SEQ ID NO: 186662 - DNA, 25 bp, Probe sequence
aaagctgctgacaaaggcattaaag

SEQ ID NO: 186663 - DNA, 25 bp, Probe sequence
aaaaagacatgctcgtgttcgtact

SEQ ID NO: 186664 - DNA, 25 bp, Probe sequence
aacgtatatcgttcaaacaagcata

SEQ ID NO: 186665 - DNA, 25 bp, Probe sequence
aagcagcaagagaaagcggattaga

SEQ ID NO: 186666 - DNA, 25 bp, Probe sequence
aagacatgctcgtgttcgtactaac

SEQ ID NO: 186667 - DNA, 25 bp, Probe sequence
aagacagcgacattgctactacagc

SEQ ID NO: 186668 - DNA, 25 bp, Probe sequence
aaggcgtaacattagctcaagcttc

SEQ ID NO: 186669 - DNA, 25 bp, Probe sequence
aattagcaactaaagtcggtgaagc

SEQ ID NO: 186670 - DNA, 25 bp, Probe sequence
cagctgaaaagccacgtttaaacgt

SEQ ID NO: 186671 - DNA, 25 bp, Probe sequence
caggtacagctgaaaagccacgttt

SEQ ID NO: 186672 - DNA, 25 bp, Probe sequence
ctaaagtcggtgaagcaattgctaa

SEQ ID NO: 186673 - DNA, 25 bp, Probe sequence
cgtgttcgtactaacttatcaggta

SEQ ID NO: 186674 - DNA, 25 bp, Probe sequence
cgtactaacttatcaggtacagctg

SEQ ID NO: 186675 - DNA, 25 bp, Probe sequence
gccacgtttaaacgtatatcgttca

SEQ ID NO: 186676 - DNA, 25 bp, Probe sequence
gcgacattgctactacagcaactaa

SEQ ID NO: 186677 - DNA, 25 bp, Probe sequence
gctcgtgttcgtactaacttatcag

SEQ ID NO: 186678 - DNA, 25 bp, Probe sequence
gcaattgctaaaaaagctgctgaca

SEQ ID NO: 186679 - DNA, 25 bp, Probe sequence
gacatgctcgtgttcgtactaactt

SEQ ID NO: 186680 - DNA, 25 bp, Probe sequence
gttcaaacaagcatatctacgctca

SEQ ID NO: 186681 - DNA, 25 bp, Probe sequence
gtatttgaccgtggaggatatttat

SEQ ID NO: 186682 - DNA, 25 bp, Probe sequence
gtaacattagctcaagcttcttcaa

SEQ ID NO: 186683 - DNA, 25 bp, Probe sequence
gtgttaaagcattagctgaagcagc

SEQ ID NO: 186684 - DNA, 25 bp, Probe sequence
ggatatttatatcacggacgtgtta

SEQ ID NO: 186685 - DNA, 25 bp, Probe sequence
tgctactacagcaactaaagttgaa

SEQ ID NO: 186686 - DNA, 25 bp, Probe sequence
tcaagcttcttcaaaagacagcgac

SEQ ID NO: 186687 - DNA, 25 bp, Probe sequence
ttagctcaagcttcttcaaaagaca

SEQ ID NO: 186688 - DNA, 25 bp, Probe sequence
atggtacaactcgtgctttattaaa

SEQ ID NO: 186689 - DNA, 25 bp, Probe sequence
aggttaccgtgctcaaatgcaaggt

SEQ ID NO: 186690 - DNA, 25 bp, Probe sequence
agtacttgaacttgttggtgtaggt

SEQ ID NO: 186691 - DNA, 25 bp, Probe sequence
accatggtacaactcgtgctttatt

SEQ ID NO: 186692 - DNA, 25 bp, Probe sequence
accgtgctcaaatgcaaggtaaaga

SEQ ID NO: 186693 - DNA, 25 bp, Probe sequence
acaaaccatggtacaactcgtgctt

SEQ ID NO: 186694 - DNA, 25 bp, Probe sequence
acaaggtgtttctcaaggatacgta

SEQ ID NO: 186695 - DNA, 25 bp, Probe sequence
aacgttggttattctcacccagtag

SEQ ID NO: 186696 - DNA, 25 bp, Probe sequence
aatatggtacaaggtgtttctcaag

SEQ ID NO: 186697 - DNA, 25 bp, Probe sequence
caattgaagttgtaagaccatctga

SEQ ID NO: 186698 - DNA, 25 bp, Probe sequence
cattagcatctaacatccgttcagt

SEQ ID NO: 186699 - DNA, 25 bp, Probe sequence
gaagttgtaagaccatctgattcta

SEQ ID NO: 186700 - DNA, 25 bp, Probe sequence
gaagatagaacaaaccatggtacaa

SEQ ID NO: 186701 - DNA, 25 bp, Probe sequence
gaacaagttggagcattagcatcta

SEQ ID NO: 186702 - DNA, 25 bp, Probe sequence
gaaaacattactttctcagttgaga

SEQ ID NO: 186703 - DNA, 25 bp, Probe sequence
gacctccagagccttacaaaggtaa

SEQ ID NO: 186704 - DNA, 25 bp, Probe sequence
gagaaaaacacagtcgttaaagttg

SEQ ID NO: 186705 - DNA, 25 bp, Probe sequence
gttggttattctcacccagtagaaa

SEQ ID NO: 186706 - DNA, 25 bp, Probe sequence
gttggtgtaggttaccgtgctcaaa

SEQ ID NO: 186707 - DNA, 25 bp, Probe sequence
gttcagtaagacctccagagcctta

SEQ ID NO: 186708 - DNA, 25 bp, Probe sequence
gttaccaaggtgaatacgttcgccg

SEQ ID NO: 186709 - DNA, 25 bp, Probe sequence
gttattctcacccagtagaaattaa

SEQ ID NO: 186710 - DNA, 25 bp, Probe sequence
gtaagaccatctgattctaaagaag

SEQ ID NO: 186711 - DNA, 25 bp, Probe sequence
gtgtaggttaccgtgctcaaatgca

SEQ ID NO: 186712 - DNA, 25 bp, Probe sequence
ggtgtttctcaaggatacgtaaaag

SEQ ID NO: 186713 - DNA, 25 bp, Probe sequence
ggtgaatacgttcgccgtaaagaag

SEQ ID NO: 186714 - DNA, 25 bp, Probe sequence
ggagcattagcatctaacatccgtt

SEQ ID NO: 186715 - DNA, 25 bp, Probe sequence
taacatccgttcagtaagacctcca

SEQ ID NO: 186716 - DNA, 25 bp, Probe sequence
tgcaaggtaaagacttaatccttaa

SEQ ID NO: 186717 - DNA, 25 bp, Probe sequence
taatccttaacgttggttattctca

SEQ ID NO: 186718 - DNA, 25 bp, Probe sequence
taagacctccagagccttacaaagg

SEQ ID NO: 186719 - DNA, 25 bp, Probe sequence
taccaaggtgaatacgttcgccgta

SEQ ID NO: 186720 - DNA, 25 bp, Probe sequence
tagcatctaacatccgttcagtaag

SEQ ID NO: 186721 - DNA, 25 bp, Probe sequence
ttaacgttggttattctcacccagt

SEQ ID NO: 186722 - DNA, 25 bp, Probe sequence
atgacaatgacagatccaatcgcag

SEQ ID NO: 186723 - DNA, 25 bp, Probe sequence
agaaattatcgcatacgtttggtaa

SEQ ID NO: 186724 - DNA, 25 bp, Probe sequence
aaatatggtcaaaacgatgagcgtg

SEQ ID NO: 186725 - DNA, 25 bp, Probe sequence
aacgatgagcgtgttatcacaggat

SEQ ID NO: 186726 - DNA, 25 bp, Probe sequence
aagctagcgaaatgcctaaagtatt

SEQ ID NO: 186727 - DNA, 25 bp, Probe sequence
aatgttgaatacgtagaagatgata

SEQ ID NO: 186728 - DNA, 25 bp, Probe sequence
caatcgcagatatgcttactcgtgt

SEQ ID NO: 186729 - DNA, 25 bp, Probe sequence
ccaggtttacgtgtttatgcaaaag

SEQ ID NO: 186730 - DNA, 25 bp, Probe sequence
gcattagtatcaacttctgaaggtg

SEQ ID NO: 186731 - DNA, 25 bp, Probe sequence
gcaaacatggtgcgtcacgagaagt

SEQ ID NO: 186732 - DNA, 25 bp, Probe sequence
gaattacctgcatcaaatattaaaa

SEQ ID NO: 186733 - DNA, 25 bp, Probe sequence
gaaggtgtaatcactgacaaagaag

SEQ ID NO: 186734 - DNA, 25 bp, Probe sequence
gaaacgcaaacatggtgcgtcacga

SEQ ID NO: 186735 - DNA, 25 bp, Probe sequence
gaaatgcctaaagtattaaatggtt

SEQ ID NO: 186736 - DNA, 25 bp, Probe sequence
gaaattgctgaaatcttaaagagtg

SEQ ID NO: 186737 - DNA, 25 bp, Probe sequence
gacaatgacagatccaatcgcagat

SEQ ID NO: 186738 - DNA, 25 bp, Probe sequence
gacagatccaatcgcagatatgctt

SEQ ID NO: 186739 - DNA, 25 bp, Probe sequence
gagcgtgttatcacaggattaaaac

SEQ ID NO: 186740 - DNA, 25 bp, Probe sequence
gagaagttagaattacctgcatcaa

SEQ ID NO: 186741 - DNA, 25 bp, Probe sequence
gatgataaacaaggtgtacttcgtt

SEQ ID NO: 186742 - DNA, 25 bp, Probe sequence
gatccaatcgcagatatgcttactc

SEQ ID NO: 186743 - DNA, 25 bp, Probe sequence
gttagaattacctgcatcaaatatt

SEQ ID NO: 186744 - DNA, 25 bp, Probe sequence
gtacttcgtttattcttaaaatatg

SEQ ID NO: 186745 - DNA, 25 bp, Probe sequence
gtaatcactgacaaagaagcaagaa

SEQ ID NO: 186746 - DNA, 25 bp, Probe sequence
ggtattgcattagtatcaacttctg

SEQ ID NO: 186747 - DNA, 25 bp, Probe sequence
ggagaaattatcgcatacgtttggt

SEQ ID NO: 186748 - DNA, 25 bp, Probe sequence
tggtgcgtcacgagaagttagaatt

SEQ ID NO: 186749 - DNA, 25 bp, Probe sequence
tggtttaggtattgcattagtatca

SEQ ID NO: 186750 - DNA, 25 bp, Probe sequence
tcgcagatatgcttactcgtgtaag

SEQ ID NO: 186751 - DNA, 25 bp, Probe sequence
tcaacttctgaaggtgtaatcactg

SEQ ID NO: 186752 - DNA, 25 bp, Probe sequence
tcaaaaccaggtttacgtgtttatg

SEQ ID NO: 186753 - DNA, 25 bp, Probe sequence
tacgtgtttatgcaaaagctagcga

SEQ ID NO: 186754 - DNA, 25 bp, Probe sequence
tactcgtgtaagaaacgcaaacatg

SEQ ID NO: 186755 - DNA, 25 bp, Probe sequence
tatcacaggattaaaacgtatttca

SEQ ID NO: 186756 - DNA, 25 bp, Probe sequence
atttgtttccgtgaattagcttaca

SEQ ID NO: 186757 - DNA, 25 bp, Probe sequence
atatcgtaaatttaaattatgccgt

SEQ ID NO: 186758 - DNA, 25 bp, Probe sequence
atccctggcgttcgtaaagctagct

SEQ ID NO: 186759 - DNA, 25 bp, Probe sequence
atgccgtatttgtttccgtgaatta

SEQ ID NO: 186760 - DNA, 25 bp, Probe sequence
agttcgtgaatacactcgttgtgaa

SEQ ID NO: 186761 - DNA, 25 bp, Probe sequence
aaatccctggcgttcgtaaagctag

SEQ ID NO: 186762 - DNA, 25 bp, Probe sequence
aaatatgcagttcgtgaatacactc

SEQ ID NO: 186763 - DNA, 25 bp, Probe sequence
aaaacttcaatggttgctaagcaac

SEQ ID NO: 186764 - DNA, 25 bp, Probe sequence
aattatgccgtatttgtttccgtga

SEQ ID NO: 186765 - DNA, 25 bp, Probe sequence
caaaggccaaatccctggcgttcgt

SEQ ID NO: 186766 - DNA, 25 bp, Probe sequence
cactcgttgtgaacgttgtggccgt

SEQ ID NO: 186767 - DNA, 25 bp, Probe sequence
ccctggcgttcgtaaagctagctgg

SEQ ID NO: 186768 - DNA, 25 bp, Probe sequence
ctggcgttcgtaaagctagctggta

SEQ ID NO: 186769 - DNA, 25 bp, Probe sequence
cgttgtggccgtccacattctgtat

SEQ ID NO: 186770 - DNA, 25 bp, Probe sequence
tcgtgaatacactcgttgtgaacgt

SEQ ID NO: 186771 - DNA, 25 bp, Probe sequence
ccaaatccctggcgttcgtaaagct

SEQ ID NO: 186772 - DNA, 25 bp, Probe sequence
gccgtatttgtttccgtgaattagc

SEQ ID NO: 186773 - DNA, 25 bp, Probe sequence
gccgtccacattctgtatatcgtaa

SEQ ID NO: 186774 - DNA, 25 bp, Probe sequence
gcagttcgtgaatacactcgttgtg

SEQ ID NO: 186775 - DNA, 25 bp, Probe sequence
tgaacgttgtggccgtccacattct

SEQ ID NO: 186776 - DNA, 25 bp, Probe sequence
gtttccgtgaattagcttacaaagg

SEQ ID NO: 186777 - DNA, 25 bp, Probe sequence
gtccacattctgtatatcgtaaatt

SEQ ID NO: 186778 - DNA, 25 bp, Probe sequence
gtgaacgttgtggccgtccacattc

SEQ ID NO: 186779 - DNA, 25 bp, Probe sequence
gtggctaaaacttcaatggttgcta

SEQ ID NO: 186780 - DNA, 25 bp, Probe sequence
tggcgttcgtaaagctagctggtaa

SEQ ID NO: 186781 - DNA, 25 bp, Probe sequence
tacactcgttgtgaacgttgtggcc

SEQ ID NO: 186782 - DNA, 25 bp, Probe sequence
ggccaaatccctggcgttcgtaaag

SEQ ID NO: 186783 - DNA, 25 bp, Probe sequence
tcgttgtgaacgttgtggccgtcca

SEQ ID NO: 186784 - DNA, 25 bp, Probe sequence
tacaaaggccaaatccctggcgttc

SEQ ID NO: 186785 - DNA, 25 bp, Probe sequence
tagcttacaaaggccaaatccctgg

SEQ ID NO: 186786 - DNA, 25 bp, Probe sequence
tatgcagttcgtgaatacactcgtt

SEQ ID NO: 186787 - DNA, 25 bp, Probe sequence
ttatgccgtatttgtttccgtgaat

SEQ ID NO: 186788 - DNA, 25 bp, Probe sequence
ttgtggccgtccacattctgtatat

SEQ ID NO: 186789 - DNA, 25 bp, Probe sequence
ttgtgaacgttgtggccgtccacat

SEQ ID NO: 186790 - DNA, 25 bp, Probe sequence
atcgcgactttccgtttacgtgaag

SEQ ID NO: 186791 - DNA, 25 bp, Probe sequence
attaatttcagtatcattaccacgt

SEQ ID NO: 186792 - DNA, 25 bp, Probe sequence
attttcccagaaatcgactatgata

SEQ ID NO: 186793 - DNA, 25 bp, Probe sequence
atcaatcgcgactttccgtttacgt

SEQ ID NO: 186794 - DNA, 25 bp, Probe sequence
agcatttgacggacgcggtaactac

SEQ ID NO: 186795 - DNA, 25 bp, Probe sequence
acgtgaaggtatgccaatcggtgcg

SEQ ID NO: 186796 - DNA, 25 bp, Probe sequence
actgatgaagaagctcgtgaattgt

SEQ ID NO: 186797 - DNA, 25 bp, Probe sequence
aaatcgttgtgaacatgggtgtagg

SEQ ID NO: 186798 - DNA, 25 bp, Probe sequence
aaagtattagacaatgctgttgaag

SEQ ID NO: 186799 - DNA, 25 bp, Probe sequence
aacacttcgcggtgaaagaatgtat

SEQ ID NO: 186800 - DNA, 25 bp, Probe sequence
cttcggtatgccattccgtaaataa

SEQ ID NO: 186801 - DNA, 25 bp, Probe sequence
ccacgtgtacgtgacttccaaggtg

SEQ ID NO: 186802 - DNA, 25 bp, Probe sequence
gctaacttcggtatgccattccgta

SEQ ID NO: 186803 - DNA, 25 bp, Probe sequence
gctcgtgaattgttagctaacttcg

SEQ ID NO: 186804 - DNA, 25 bp, Probe sequence
gctaaaaaatcaatcgcgactttcc

SEQ ID NO: 186805 - DNA, 25 bp, Probe sequence
gaaggtatgccaatcggtgcgaaag

SEQ ID NO: 186806 - DNA, 25 bp, Probe sequence
gaagaattagaattgatcactggtc

SEQ ID NO: 186807 - DNA, 25 bp, Probe sequence
gaacatgggtgtaggtgacgcagta

SEQ ID NO: 186808 - DNA, 25 bp, Probe sequence
gaacaattaattttcccagaaatcg

SEQ ID NO: 186809 - DNA, 25 bp, Probe sequence
gactttccgtttacgtgaaggtatg

SEQ ID NO: 186810 - DNA, 25 bp, Probe sequence
gacgcggtaactacactttaggtgt

SEQ ID NO: 186811 - DNA, 25 bp, Probe sequence
gaggaatggatattgttatcgtaac

SEQ ID NO: 186812 - DNA, 25 bp, Probe sequence
gatcactggtcaaaaaccattagta

SEQ ID NO: 186813 - DNA, 25 bp, Probe sequence
gtaacgactgctaacactgatgaag

SEQ ID NO: 186814 - DNA, 25 bp, Probe sequence
gtgtacgtgacttccaaggtgtttc

SEQ ID NO: 186815 - DNA, 25 bp, Probe sequence
ggtgtttctaaaaaagcatttgacg

SEQ ID NO: 186816 - DNA, 25 bp, Probe sequence
ggtgacgcagtacaaaattctaaag

SEQ ID NO: 186817 - DNA, 25 bp, Probe sequence
ggtgcgaaagtaacacttcgcggtg

SEQ ID NO: 186818 - DNA, 25 bp, Probe sequence
tgacggacgcggtaactacacttta

SEQ ID NO: 186819 - DNA, 25 bp, Probe sequence
tgttagctaacttcggtatgccatt

SEQ ID NO: 186820 - DNA, 25 bp, Probe sequence
tcagtatcattaccacgtgtacgtg

SEQ ID NO: 186821 - DNA, 25 bp, Probe sequence
tacgtgacttccaaggtgtttctaa

SEQ ID NO: 186822 - DNA, 25 bp, Probe sequence
tatagttcagtaatggaagtaccaa

SEQ ID NO: 186823 - DNA, 25 bp, Probe sequence
ttatcgtaacgactgctaacactga

SEQ ID NO: 186824 - DNA, 25 bp, Probe sequence
agaccgtgtcgttgtggaaggtgtt

SEQ ID NO: 186825 - DNA, 25 bp, Probe sequence
agaggcagcaatccatgtttctaat

SEQ ID NO: 186826 - DNA, 25 bp, Probe sequence
accaactcaattaaatcctgaaggt

SEQ ID NO: 186827 - DNA, 25 bp, Probe sequence
acagaggcagcaatccatgtttcta

SEQ ID NO: 186828 - DNA, 25 bp, Probe sequence
caaaaaccaactcaattaaatcctg

SEQ ID NO: 186829 - DNA, 25 bp, Probe sequence
aaatctggcgaagaaattaaatcta

SEQ ID NO: 186830 - DNA, 25 bp, Probe sequence
aaatcctgaaggtggaatcttagaa

SEQ ID NO: 186831 - DNA, 25 bp, Probe sequence
aaagaccgtgtcgttgtggaaggtg

SEQ ID NO: 186832 - DNA, 25 bp, Probe sequence
aaaccaactcaattaaatcctgaag

SEQ ID NO: 186833 - DNA, 25 bp, Probe sequence
gaaccaactcgtgtaggttacaaat

SEQ ID NO: 186834 - DNA, 25 bp, Probe sequence
aagttcgtatcgctaaaaaatctgg

SEQ ID NO: 186835 - DNA, 25 bp, Probe sequence
aatccatgtttctaatgtacaatta

SEQ ID NO: 186836 - DNA, 25 bp, Probe sequence
caactcaattaaatcctgaaggtgg

SEQ ID NO: 186837 - DNA, 25 bp, Probe sequence
cagaggcagcaatccatgtttctaa

SEQ ID NO: 186838 - DNA, 25 bp, Probe sequence
gtgtcgttgtggaaggtgttaacat

SEQ ID NO: 186839 - DNA, 25 bp, Probe sequence
ccaactcgtgtaggttacaaatttg

SEQ ID NO: 186840 - DNA, 25 bp, Probe sequence
gctactctacctaaaaaagaccgtg

SEQ ID NO: 186841 - DNA, 25 bp, Probe sequence
gcagcaatccatgtttctaatgtac

SEQ ID NO: 186842 - DNA, 25 bp, Probe sequence
gcaatccatgtttctaatgtacaat

SEQ ID NO: 186843 - DNA, 25 bp, Probe sequence
gaccgtgtcgttgtggaaggtgtta

SEQ ID NO: 186844 - DNA, 25 bp, Probe sequence
gacaacgttaaagttatcgcaggta

SEQ ID NO: 186845 - DNA, 25 bp, Probe sequence
gaggcagcaatccatgtttctaatg

SEQ ID NO: 186846 - DNA, 25 bp, Probe sequence
gatggtaaaaaagttcgtatcgcta

SEQ ID NO: 186847 - DNA, 25 bp, Probe sequence
gttcgtatcgctaaaaaatctggcg

SEQ ID NO: 186848 - DNA, 25 bp, Probe sequence
gttatcgcaggtaaagacaaaggta

SEQ ID NO: 186849 - DNA, 25 bp, Probe sequence
gtaggttacaaatttgttgatggta

SEQ ID NO: 186850 - DNA, 25 bp, Probe sequence
gtcgttgtggaaggtgttaacatta

SEQ ID NO: 186851 - DNA, 25 bp, Probe sequence
gtggaatcttagaaacagaggcagc

SEQ ID NO: 186852 - DNA, 25 bp, Probe sequence
gtggaaggtgttaacattatgaaaa

SEQ ID NO: 186853 - DNA, 25 bp, Probe sequence
ggtgacaacgttaaagttatcgcag

SEQ ID NO: 186854 - DNA, 25 bp, Probe sequence
ggcagcaatccatgtttctaatgta

SEQ ID NO: 186855 - DNA, 25 bp, Probe sequence
tgtacaattattggaccctaaaaca

SEQ ID NO: 186856 - DNA, 25 bp, Probe sequence
tgcatatcaaaaaaggtgacaacgt

SEQ ID NO: 186857 - DNA, 25 bp, Probe sequence
tctaatgtacaattattggacccta

SEQ ID NO: 186858 - DNA, 25 bp, Probe sequence
atcatccgtgatgacaaaggcccac

SEQ ID NO: 186859 - DNA, 25 bp, Probe sequence
atgatccaacaagaaacacgcttga

SEQ ID NO: 186860 - DNA, 25 bp, Probe sequence
agctgtaatcgtacgtactaagtca

SEQ ID NO: 186861 - DNA, 25 bp, Probe sequence
actaagtcaggtgttcgtcgtaatg

SEQ ID NO: 186862 - DNA, 25 bp, Probe sequence
acatcggcgatgttatcgtatgtac

SEQ ID NO: 186863 - DNA, 25 bp, Probe sequence
aaatgcaacaccaggtggcgttgtt

SEQ ID NO: 186864 - DNA, 25 bp, Probe sequence
aaagtattaggtggatctggtcgta

SEQ ID NO: 186865 - DNA, 25 bp, Probe sequence
aatgcatgtgttatcatccgtgatg

SEQ ID NO: 186866 - DNA, 25 bp, Probe sequence
ctctggtgctcgtgaagttcttaca

SEQ ID NO: 186867 - DNA, 25 bp, Probe sequence
ccacgtggtactcgtatcttcggac

SEQ ID NO: 186868 - DNA, 25 bp, Probe sequence
gcgatgttatcgtatgtactgttaa

SEQ ID NO: 186869 - DNA, 25 bp, Probe sequence
gcagacaactctggtgctcgtgaag

SEQ ID NO: 186870 - DNA, 25 bp, Probe sequence
gcaacaccaggtggcgttgttaaaa

SEQ ID NO: 186871 - DNA, 25 bp, Probe sequence
gaaggtaacttcatgaaaatcgtat

SEQ ID NO: 186872 - DNA, 25 bp, Probe sequence
gaagttcttacaatcaaagtattag

SEQ ID NO: 186873 - DNA, 25 bp, Probe sequence
gaaaatcgtatcattagcaccagaa

SEQ ID NO: 186874 - DNA, 25 bp, Probe sequence
gaaaatgcatgtgttatcatccgtg

SEQ ID NO: 186875 - DNA, 25 bp, Probe sequence
gaaacacgcttgaaagtagcagaca

SEQ ID NO: 186876 - DNA, 25 bp, Probe sequence
gacaactctggtgctcgtgaagttc

SEQ ID NO: 186877 - DNA, 25 bp, Probe sequence
gttgctcgtgaattacgtgaaggta

SEQ ID NO: 186878 - DNA, 25 bp, Probe sequence
gtagcagacaactctggtgctcgtg

SEQ ID NO: 186879 - DNA, 25 bp, Probe sequence
gtacgtactaagtcaggtgttcgtc

SEQ ID NO: 186880 - DNA, 25 bp, Probe sequence
gtaaaacagcaaacatcggcgatgt

SEQ ID NO: 186881 - DNA, 25 bp, Probe sequence
gtcaaagctgtaatcgtacgtacta

SEQ ID NO: 186882 - DNA, 25 bp, Probe sequence
ggtgttcgtcgtaatgacggttcat

SEQ ID NO: 186883 - DNA, 25 bp, Probe sequence
ggtggatctggtcgtaaaacagcaa

SEQ ID NO: 186884 - DNA, 25 bp, Probe sequence
ggtgacgttgtcaaagctgtaatcg

SEQ ID NO: 186885 - DNA, 25 bp, Probe sequence
ggtgctcgtgaagttcttacaatca

SEQ ID NO: 186886 - DNA, 25 bp, Probe sequence
ggacctgttgctcgtgaattacgtg

SEQ ID NO: 186887 - DNA, 25 bp, Probe sequence
tgatgacaaaggcccacgtggtact

SEQ ID NO: 186888 - DNA, 25 bp, Probe sequence
tgacaaaggcccacgtggtactcgt

SEQ ID NO: 186889 - DNA, 25 bp, Probe sequence
tatcgtatgtactgttaaaaatgca

SEQ ID NO: 186890 - DNA, 25 bp, Probe sequence
tatcattagcaccagaagtacttta

SEQ ID NO: 186891 - DNA, 25 bp, Probe sequence
ttcggacctgttgctcgtgaattac

SEQ ID NO: 186892 - DNA, 25 bp, Probe sequence
attacagtacttgttgaaacttaca

SEQ ID NO: 186893 - DNA, 25 bp, Probe sequence
attcaagaaactcgtcctttatcag

SEQ ID NO: 186894 - DNA, 25 bp, Probe sequence
atgtaggtaaagttgtttcagacaa

SEQ ID NO: 186895 - DNA, 25 bp, Probe sequence
aggagacattgttaaaattcaagaa

SEQ ID NO: 186896 - DNA, 25 bp, Probe sequence
actcgtcctttatcagcaacaaaac

SEQ ID NO: 186897 - DNA, 25 bp, Probe sequence
aaactcgtcctttatcagcaacaaa

SEQ ID NO: 186898 - DNA, 25 bp, Probe sequence
aaaaaatacaaaactcatgatgaaa

SEQ ID NO: 186899 - DNA, 25 bp, Probe sequence
aactcgtcctttatcagcaacaaaa

SEQ ID NO: 186900 - DNA, 25 bp, Probe sequence
aactcatgatgaaaacaattcagct

SEQ ID NO: 186901 - DNA, 25 bp, Probe sequence
aagactattacagtacttgttgaaa

SEQ ID NO: 186902 - DNA, 25 bp, Probe sequence
aatggacaagactattacagtactt

SEQ ID NO: 186903 - DNA, 25 bp, Probe sequence
aattcaagaaactcgtcctttatca

SEQ ID NO: 186904 - DNA, 25 bp, Probe sequence
caagaaactcgtcctttatcagcaa

SEQ ID NO: 186905 - DNA, 25 bp, Probe sequence
cacacaaattatacggtaaacgagt

SEQ ID NO: 186906 - DNA, 25 bp, Probe sequence
cttacaaaacacacaaattatacgg

SEQ ID NO: 186907 - DNA, 25 bp, Probe sequence
ctcgtcctttatcagcaacaaaacg

SEQ ID NO: 186908 - DNA, 25 bp, Probe sequence
cgtcctttatcagcaacaaaacgtt

SEQ ID NO: 186909 - DNA, 25 bp, Probe sequence
gaaaacaattcagctaaattaggag

SEQ ID NO: 186910 - DNA, 25 bp, Probe sequence
gaaacttacaaaacacacaaattat

SEQ ID NO: 186911 - DNA, 25 bp, Probe sequence
gaaacgatcgtaaagtttatgtagg

SEQ ID NO: 186912 - DNA, 25 bp, Probe sequence
gactattacagtacttgttgaaact

SEQ ID NO: 186913 - DNA, 25 bp, Probe sequence
gattgttgaagagtcagtaattatt

SEQ ID NO: 186914 - DNA, 25 bp, Probe sequence
gtttcagacaaaatggacaagacta

SEQ ID NO: 186915 - DNA, 25 bp, Probe sequence
gtcctttatcagcaacaaaacgttt

SEQ ID NO: 186916 - DNA, 25 bp, Probe sequence
gtgagcgaaagaaacgatcgtaaag

SEQ ID NO: 186917 - DNA, 25 bp, Probe sequence
tcgtcctttatcagcaacaaaacgt

SEQ ID NO: 186918 - DNA, 25 bp, Probe sequence
ggacaagactattacagtacttgtt

SEQ ID NO: 186919 - DNA, 25 bp, Probe sequence
tcagctaaattaggagacattgtta

SEQ ID NO: 186920 - DNA, 25 bp, Probe sequence
tcaagaaactcgtcctttatcagca

SEQ ID NO: 186921 - DNA, 25 bp, Probe sequence
tacagtacttgttgaaacttacaaa

SEQ ID NO: 186922 - DNA, 25 bp, Probe sequence
tagtagagattgttgaagagtcagt

SEQ ID NO: 186923 - DNA, 25 bp, Probe sequence
tttatcagcaacaaaacgttttcgt

SEQ ID NO: 186924 - DNA, 25 bp, Probe sequence
ttatgtaggtaaagttgtttcagac

SEQ ID NO: 186925 - DNA, 25 bp, Probe sequence
ttcaagaaactcgtcctttatcagc

SEQ ID NO: 186926 - DNA, 25 bp, Probe sequence
attgcacgtctaaaaactgttgctc

SEQ ID NO: 186927 - DNA, 25 bp, Probe sequence
aggtcaattagaagaaactgcacgt

SEQ ID NO: 186928 - DNA, 25 bp, Probe sequence
agagctttttaacctacgctttcag

SEQ ID NO: 186929 - DNA, 25 bp, Probe sequence
agaacaaatcaaatcttcaaaagaa

SEQ ID NO: 186930 - DNA, 25 bp, Probe sequence
acctacgctttcagttagctacagg

SEQ ID NO: 186931 - DNA, 25 bp, Probe sequence
acgctttcagttagctacaggtcaa

SEQ ID NO: 186932 - DNA, 25 bp, Probe sequence
acgattgcacgtctaaaaactgttg

SEQ ID NO: 186933 - DNA, 25 bp, Probe sequence
acgtctaaaaactgttgctcgtgaa

SEQ ID NO: 186934 - DNA, 25 bp, Probe sequence
aactgcacgtattcgtacagtaaga

SEQ ID NO: 186935 - DNA, 25 bp, Probe sequence
aactgttgctcgtgaaagagaaatt

SEQ ID NO: 186936 - DNA, 25 bp, Probe sequence
aacctacgctttcagttagctacag

SEQ ID NO: 186937 - DNA, 25 bp, Probe sequence
aattagagacttaaccacttcagaa

SEQ ID NO: 186938 - DNA, 25 bp, Probe sequence
ctttcagttagctacaggtcaatta

SEQ ID NO: 186939 - DNA, 25 bp, Probe sequence
ctacgctttcagttagctacaggtc

SEQ ID NO: 186940 - DNA, 25 bp, Probe sequence
ctaaaaactgttgctcgtgaaagag

SEQ ID NO: 186941 - DNA, 25 bp, Probe sequence
ctgcacgtattcgtacagtaagaaa

SEQ ID NO: 186942 - DNA, 25 bp, Probe sequence
gaagaaactgcacgtattcgtacag

SEQ ID NO: 186943 - DNA, 25 bp, Probe sequence
gaaactgcacgtattcgtacagtaa

SEQ ID NO: 186944 - DNA, 25 bp, Probe sequence
gaaattgaacaaagtaaggctaatc

SEQ ID NO: 186945 - DNA, 25 bp, Probe sequence
gacttaaccacttcagaaatcgaag

SEQ ID NO: 186946 - DNA, 25 bp, Probe sequence
gagctttttaacctacgctttcagt

SEQ ID NO: 186947 - DNA, 25 bp, Probe sequence
gagacttaaccacttcagaaatcga

SEQ ID NO: 186948 - DNA, 25 bp, Probe sequence
gttagctacaggtcaattagaagaa

SEQ ID NO: 186949 - DNA, 25 bp, Probe sequence
gtacagtaagaaaaacgattgcacg

SEQ ID NO: 186950 - DNA, 25 bp, Probe sequence
gtctaaaaactgttgctcgtgaaag

SEQ ID NO: 186951 - DNA, 25 bp, Probe sequence
ggaaattagagacttaaccacttca

SEQ ID NO: 186952 - DNA, 25 bp, Probe sequence
tgcacgtctaaaaactgttgctcgt

SEQ ID NO: 186953 - DNA, 25 bp, Probe sequence
taaccacttcagaaatcgaagaaca

SEQ ID NO: 186954 - DNA, 25 bp, Probe sequence
taacctacgctttcagttagctaca

SEQ ID NO: 186955 - DNA, 25 bp, Probe sequence
tagaagaaactgcacgtattcgtac

SEQ ID NO: 186956 - DNA, 25 bp, Probe sequence
tagagacttaaccacttcagaaatc

SEQ ID NO: 186957 - DNA, 25 bp, Probe sequence
ttttaacctacgctttcagttagct

SEQ ID NO: 186958 - DNA, 25 bp, Probe sequence
ttaacctacgctttcagttagctac

SEQ ID NO: 186959 - DNA, 25 bp, Probe sequence
ttcagttagctacaggtcaattaga

SEQ ID NO: 186960 - DNA, 25 bp, Probe sequence
attcgaagttgctggcgtttctgaa

SEQ ID NO: 186961 - DNA, 25 bp, Probe sequence
atatcgtcgtcaacatcgtcctaaa

SEQ ID NO: 186962 - DNA, 25 bp, Probe sequence
atctcgtcaaatcgaatctgctcgt

SEQ ID NO: 186963 - DNA, 25 bp, Probe sequence
atgggtgctggtaaaggtgcggttg

SEQ ID NO: 186964 - DNA, 25 bp, Probe sequence
actacgtaacatttggtgagtttgg

SEQ ID NO: 186965 - DNA, 25 bp, Probe sequence
acatcgtcctaaaacaactggtcgt

SEQ ID NO: 186966 - DNA, 25 bp, Probe sequence
acaacgtcttggatcacatctcgtc

SEQ ID NO: 186967 - DNA, 25 bp, Probe sequence
aaaggtgcggttgaaggctggatcg

SEQ ID NO: 186968 - DNA, 25 bp, Probe sequence
aaaatatcgtcgtcaacatcgtcct

SEQ ID NO: 186969 - DNA, 25 bp, Probe sequence
aagctacaacaacgtcttggatcac

SEQ ID NO: 186970 - DNA, 25 bp, Probe sequence
aagttgctggcgtttctgaagaagt

SEQ ID NO: 186971 - DNA, 25 bp, Probe sequence
catacaccatatactaaaaaacctt

SEQ ID NO: 186972 - DNA, 25 bp, Probe sequence
tcgtcctaaaacaactggtcgttct

SEQ ID NO: 186973 - DNA, 25 bp, Probe sequence
cctttagaagtacgtatgggtgctg

SEQ ID NO: 186974 - DNA, 25 bp, Probe sequence
gaattttattcgaagttgctggcgt

SEQ ID NO: 186975 - DNA, 25 bp, Probe sequence
gaagttgcgcgtgaagcactacgtt

SEQ ID NO: 186976 - DNA, 25 bp, Probe sequence
gaagcactacgtttagcaagtcaca

SEQ ID NO: 186977 - DNA, 25 bp, Probe sequence
gattaaaatcttcccacatacacca

SEQ ID NO: 186978 - DNA, 25 bp, Probe sequence
gttacatgaaacgtggcgggaaagt

SEQ ID NO: 186979 - DNA, 25 bp, Probe sequence
gtatagcaatgacacgttacatgaa

SEQ ID NO: 186980 - DNA, 25 bp, Probe sequence
gtaaaacgtgaggaattgggtggtg

SEQ ID NO: 186981 - DNA, 25 bp, Probe sequence
gtcaaatcgaatctgctcgtatagc

SEQ ID NO: 186982 - DNA, 25 bp, Probe sequence
gtcttggatcacatctcgtcaaatc

SEQ ID NO: 186983 - DNA, 25 bp, Probe sequence
gtcgtcaacatcgtcctaaaacaac

SEQ ID NO: 186984 - DNA, 25 bp, Probe sequence
gtgagtttggtttacaagctacaac

SEQ ID NO: 186985 - DNA, 25 bp, Probe sequence
ggcggtaactacgtaacatttggtg

SEQ ID NO: 186986 - DNA, 25 bp, Probe sequence
ggatcgcagttgttaaaccaggtag

SEQ ID NO: 186987 - DNA, 25 bp, Probe sequence
ggttgaaggctggatcgcagttgtt

SEQ ID NO: 186988 - DNA, 25 bp, Probe sequence
ggatcacatctcgtcaaatcgaatc

SEQ ID NO: 186989 - DNA, 25 bp, Probe sequence
tgggtggtgaaacaaatgaaagcta

SEQ ID NO: 186990 - DNA, 25 bp, Probe sequence
tgctcgtatagcaatgacacgttac

SEQ ID NO: 186991 - DNA, 25 bp, Probe sequence
tgcgcgtgaagcactacgtttagca

SEQ ID NO: 186992 - DNA, 25 bp, Probe sequence
tcttcccacatacaccatatactaa

SEQ ID NO: 186993 - DNA, 25 bp, Probe sequence
ttagcaagtcacaaacttccagtaa

SEQ ID NO: 186994 - DNA, 25 bp, Probe sequence
attaatccaatcggacttcgtgttg

SEQ ID NO: 186995 - DNA, 25 bp, Probe sequence
atcaacattgcaattcatactggta

SEQ ID NO: 186996 - DNA, 25 bp, Probe sequence
atgcacacgctgaagctgacactac

SEQ ID NO: 186997 - DNA, 25 bp, Probe sequence
agtagctgaaaacatcgcacgtcaa

SEQ ID NO: 186998 - DNA, 25 bp, Probe sequence
acgtagagattgaacgtgctgcaaa

SEQ ID NO: 186999 - DNA, 25 bp, Probe sequence
acatcgctcgtgctgaacaatattc

SEQ ID NO: 187000 - DNA, 25 bp, Probe sequence
aaagttgatcttgacgctcgtttag

SEQ ID NO: 187001 - DNA, 25 bp, Probe sequence
aaaaagtacacatcaacgtaattga

SEQ ID NO: 187002 - DNA, 25 bp, Probe sequence
aagacttcgcttcacttttacacga

SEQ ID NO: 187003 - DNA, 25 bp, Probe sequence
aacatcgcacgtcaattagaaaacc

SEQ ID NO: 187004 - DNA, 25 bp, Probe sequence
aaggaactgttccacttcatacgtt

SEQ ID NO: 187005 - DNA, 25 bp, Probe sequence
catacgttacgtgctgacatcgatt

SEQ ID NO: 187006 - DNA, 25 bp, Probe sequence
cattccgtcgtgtacaaaaacaagc

SEQ ID NO: 187007 - DNA, 25 bp, Probe sequence
ctgacatcgctcgtgctgaacaata

SEQ ID NO: 187008 - DNA, 25 bp, Probe sequence
ctggtatggtaattggtaaaggcgg

SEQ ID NO: 187009 - DNA, 25 bp, Probe sequence
gctgaagctgacactacttacggta

SEQ ID NO: 187010 - DNA, 25 bp, Probe sequence
gctgacatcgattatgcacacgctg

SEQ ID NO: 187011 - DNA, 25 bp, Probe sequence
gcaatcactagagctatgaaacttg

SEQ ID NO: 187012 - DNA, 25 bp, Probe sequence
gaagcatcagtttctcacgtagaga

SEQ ID NO: 187013 - DNA, 25 bp, Probe sequence
gacactacttacggtaaattaggcg

SEQ ID NO: 187014 - DNA, 25 bp, Probe sequence
gacttcgtgttggtattatccgtga

SEQ ID NO: 187015 - DNA, 25 bp, Probe sequence
gttccacttcatacgttacgtgctg

SEQ ID NO: 187016 - DNA, 25 bp, Probe sequence
gtgcttcattccgtcgtgtacaaaa

SEQ ID NO: 187017 - DNA, 25 bp, Probe sequence
ggtatgctgaaaaagacttcgcttc

SEQ ID NO: 187018 - DNA, 25 bp, Probe sequence
ggtattatccgtgattgggaagcta

SEQ ID NO: 187019 - DNA, 25 bp, Probe sequence
tggtaaaggcggttcagaaatcgaa

SEQ ID NO: 187020 - DNA, 25 bp, Probe sequence
tgcaattcatactggtaaacctggt

SEQ ID NO: 187021 - DNA, 25 bp, Probe sequence
tcttcctactaagaacactagtgga

SEQ ID NO: 187022 - DNA, 25 bp, Probe sequence
tcttgacgctcgtttagtagctgaa

SEQ ID NO: 187023 - DNA, 25 bp, Probe sequence
tatcgtggagaagttcttcctacta

SEQ ID NO: 187024 - DNA, 25 bp, Probe sequence
tatctggtcgtttaggcggagctga

SEQ ID NO: 187025 - DNA, 25 bp, Probe sequence
ttaggcggagctgacatcgctcgtg

SEQ ID NO: 187026 - DNA, 25 bp, Probe sequence
ttagaaaaccgtgcttcattccgtc

SEQ ID NO: 187027 - DNA, 25 bp, Probe sequence
ttcgcttcacttttacacgaagatt

SEQ ID NO: 187028 - DNA, 25 bp, Probe sequence
attaatgtccgctttagctaatgct

SEQ ID NO: 187029 - DNA, 25 bp, Probe sequence
attaacaaacaaagcttcatcacca

SEQ ID NO: 187030 - DNA, 25 bp, Probe sequence
atgctaacgaaggaccaacattaaa

SEQ ID NO: 187031 - DNA, 25 bp, Probe sequence
atgtccgctttagctaatgctgaac

SEQ ID NO: 187032 - DNA, 25 bp, Probe sequence
agttcttgacttaatcagaggtaaa

SEQ ID NO: 187033 - DNA, 25 bp, Probe sequence
agaacaataagaatcgcacctcgta

SEQ ID NO: 187034 - DNA, 25 bp, Probe sequence
acgtgcgcaaggtcgtgcaagtgcg

SEQ ID NO: 187035 - DNA, 25 bp, Probe sequence
acaaagcttcatcaccagtaattga

SEQ ID NO: 187036 - DNA, 25 bp, Probe sequence
aataagaatcgcacctcgtaaagta

SEQ ID NO: 187037 - DNA, 25 bp, Probe sequence
aaacaaagcttcatcaccagtaatt

SEQ ID NO: 187038 - DNA, 25 bp, Probe sequence
aacaaacaaagcttcatcaccagta

SEQ ID NO: 187039 - DNA, 25 bp, Probe sequence
aagcttcatcaccagtaattgaaaa

SEQ ID NO: 187040 - DNA, 25 bp, Probe sequence
aagactagttcttgacttaatcaga

SEQ ID NO: 187041 - DNA, 25 bp, Probe sequence
aagtattaatgtccgctttagctaa

SEQ ID NO: 187042 - DNA, 25 bp, Probe sequence
aatgctgctgaagctattgcaattt

SEQ ID NO: 187043 - DNA, 25 bp, Probe sequence
caagccacattacaatcgtcgtaag

SEQ ID NO: 187044 - DNA, 25 bp, Probe sequence
gccacattacaatcgtcgtaagtga

SEQ ID NO: 187045 - DNA, 25 bp, Probe sequence
gctgaagctattgcaattttaaaat

SEQ ID NO: 187046 - DNA, 25 bp, Probe sequence
gctaatgctgaacataactatgaca

SEQ ID NO: 187047 - DNA, 25 bp, Probe sequence
gcaaggtcgtgcaagtgcgattaac

SEQ ID NO: 187048 - DNA, 25 bp, Probe sequence
gaatcgcacctcgtaaagtaagact

SEQ ID NO: 187049 - DNA, 25 bp, Probe sequence
gaagcatatgctaacgaaggaccaa

SEQ ID NO: 187050 - DNA, 25 bp, Probe sequence
gaacataactatgacatgaacacag

SEQ ID NO: 187051 - DNA, 25 bp, Probe sequence
gacatgaacacagatgaattagtag

SEQ ID NO: 187052 - DNA, 25 bp, Probe sequence
gaggtaaaaatgctgctgaagctat

SEQ ID NO: 187053 - DNA, 25 bp, Probe sequence
gattaacaaacgtacaagccacatt

SEQ ID NO: 187054 - DNA, 25 bp, Probe sequence
gtacaagccacattacaatcgtcgt

SEQ ID NO: 187055 - DNA, 25 bp, Probe sequence
gtccgctttagctaatgctgaacat

SEQ ID NO: 187056 - DNA, 25 bp, Probe sequence
gtgcgattaacaaacgtacaagcca

SEQ ID NO: 187057 - DNA, 25 bp, Probe sequence
ggtcgtgcaagtgcgattaacaaac

SEQ ID NO: 187058 - DNA, 25 bp, Probe sequence
ggaagcaaaagcggttgctagaaca

SEQ ID NO: 187059 - DNA, 25 bp, Probe sequence
tccacgtgcgcaaggtcgtgcaagt

SEQ ID NO: 187060 - DNA, 25 bp, Probe sequence
tcgcacctcgtaaagtaagactagt

SEQ ID NO: 187061 - DNA, 25 bp, Probe sequence
ttacaatcgtcgtaagtgacggtaa

SEQ ID NO: 187062 - DNA, 25 bp, Probe sequence
tacgacggacgtaaacacgtacctg

SEQ ID NO: 187063 - DNA, 25 bp, Probe sequence
gacggacgtaaacacgtacctgtat

SEQ ID NO: 187064 - DNA, 25 bp, Probe sequence
attaggtgagtttgctcctactcgt

SEQ ID NO: 187065 - DNA, 25 bp, Probe sequence
atcaaaacatggtcacgtcgttcta

SEQ ID NO: 187066 - DNA, 25 bp, Probe sequence
atggtcacgtcgttctacaattttc

SEQ ID NO: 187067 - DNA, 25 bp, Probe sequence
agtaatcaaaacatggtcacgtcgt

SEQ ID NO: 187068 - DNA, 25 bp, Probe sequence
agttgaagctcaagaaggaagcgaa

SEQ ID NO: 187069 - DNA, 25 bp, Probe sequence
acgtacctgtatatgtaactgaaga

SEQ ID NO: 187070 - DNA, 25 bp, Probe sequence
acttttgcagtatacgacggacgta

SEQ ID NO: 187071 - DNA, 25 bp, Probe sequence
aaaggacacgttgcagacgacaaga

SEQ ID NO: 187072 - DNA, 25 bp, Probe sequence
aaaacatggtcacgtcgttctacaa

SEQ ID NO: 187073 - DNA, 25 bp, Probe sequence
aaaaggacctttcgtcgatgagcat

SEQ ID NO: 187074 - DNA, 25 bp, Probe sequence
aacacgtacctgtatatgtaactga

SEQ ID NO: 187075 - DNA, 25 bp, Probe sequence
aacatggtcacgtcgttctacaatt

SEQ ID NO: 187076 - DNA, 25 bp, Probe sequence
aattttccctaatttcatcggacat

SEQ ID NO: 187077 - DNA, 25 bp, Probe sequence
ccctaatttcatcggacatactttt

SEQ ID NO: 187078 - DNA, 25 bp, Probe sequence
cattcaaaggacacgttgcagacga

SEQ ID NO: 187079 - DNA, 25 bp, Probe sequence
ctacaattttccctaatttcatcgg

SEQ ID NO: 187080 - DNA, 25 bp, Probe sequence
ctactcgtacattcaaaggacacgt

SEQ ID NO: 187081 - DNA, 25 bp, Probe sequence
ctaatttcatcggacatacttttgc

SEQ ID NO: 187082 - DNA, 25 bp, Probe sequence
gctcctactcgtacattcaaaggac

SEQ ID NO: 187083 - DNA, 25 bp, Probe sequence
gcagacgacaagaaaacaagaagat

SEQ ID NO: 187084 - DNA, 25 bp, Probe sequence
gacacgttgcagacgacaagaaaac

SEQ ID NO: 187085 - DNA, 25 bp, Probe sequence
gacgtaaacacgtacctgtatatgt

SEQ ID NO: 187086 - DNA, 25 bp, Probe sequence
gttctacaattttccctaatttcat

SEQ ID NO: 187087 - DNA, 25 bp, Probe sequence
gtacattcaaaggacacgttgcaga

SEQ ID NO: 187088 - DNA, 25 bp, Probe sequence
gtaaacacgtacctgtatatgtaac

SEQ ID NO: 187089 - DNA, 25 bp, Probe sequence
ggtaggtcataaattaggtgagttt

SEQ ID NO: 187090 - DNA, 25 bp, Probe sequence
ggacatacttttgcagtatacgacg

SEQ ID NO: 187091 - DNA, 25 bp, Probe sequence
tgtaactgaagatatggtaggtcat

SEQ ID NO: 187092 - DNA, 25 bp, Probe sequence
tttgctcctactcgtacattcaaag

SEQ ID NO: 187093 - DNA, 25 bp, Probe sequence
taggtgagtttgctcctactcgtac

SEQ ID NO: 187094 - DNA, 25 bp, Probe sequence
ttgctcctactcgtacattcaaagg

SEQ ID NO: 187095 - DNA, 25 bp, Probe sequence
tttccctaatttcatcggacatact

SEQ ID NO: 187096 - DNA, 25 bp, Probe sequence
attgactgtaagacaccatggtggt

SEQ ID NO: 187097 - DNA, 25 bp, Probe sequence
atatgacttcgttagatttcgcaga

SEQ ID NO: 187098 - DNA, 25 bp, Probe sequence
aggtggacaaatcgctcgttcagct

SEQ ID NO: 187099 - DNA, 25 bp, Probe sequence
agctggtgcaagtgctcaagtactt

SEQ ID NO: 187100 - DNA, 25 bp, Probe sequence
accgctcagcaaacatcgctttagt

SEQ ID NO: 187101 - DNA, 25 bp, Probe sequence
acggtggtggtgaaggtcgtgctcc

SEQ ID NO: 187102 - DNA, 25 bp, Probe sequence
ctcctatcggtagaccatctccaat

SEQ ID NO: 187103 - DNA, 25 bp, Probe sequence
aaacgtcaataccgtgttatcgatt

SEQ ID NO: 187104 - DNA, 25 bp, Probe sequence
aaaacattccagttggtacagtagt

SEQ ID NO: 187105 - DNA, 25 bp, Probe sequence
aactcgtcgtggtaaaaaatcatca

SEQ ID NO: 187106 - DNA, 25 bp, Probe sequence
aacgatcacccacacggtggtggtg

SEQ ID NO: 187107 - DNA, 25 bp, Probe sequence
aacgatatatcattgctcctaaagg

SEQ ID NO: 187108 - DNA, 25 bp, Probe sequence
aacgcattaccattacaaaacattc

SEQ ID NO: 187109 - DNA, 25 bp, Probe sequence
aatggtcgtcgtaatatgacttcgt

SEQ ID NO: 187110 - DNA, 25 bp, Probe sequence
caatcggtcaagttggtaacctaca

SEQ ID NO: 187111 - DNA, 25 bp, Probe sequence
cacaacatcgagcttaaacctggta

SEQ ID NO: 187112 - DNA, 25 bp, Probe sequence
cagacaaacttatcgttcgtggacg

SEQ ID NO: 187113 - DNA, 25 bp, Probe sequence
cgtccaacagttcgtggttctgtaa

SEQ ID NO: 187114 - DNA, 25 bp, Probe sequence
cgcttggtaagaaaactcgtcgtgg

SEQ ID NO: 187115 - DNA, 25 bp, Probe sequence
gctcgttcagctggtgcaagtgctc

SEQ ID NO: 187116 - DNA, 25 bp, Probe sequence
gctttagttgtatatgcagacggtg

SEQ ID NO: 187117 - DNA, 25 bp, Probe sequence
gaaatcacgaaaactacacctgaaa

SEQ ID NO: 187118 - DNA, 25 bp, Probe sequence
gtaatgaaccctaacgatcacccac

SEQ ID NO: 187119 - DNA, 25 bp, Probe sequence
gattaagatctggtgaagttcgtat

SEQ ID NO: 187120 - DNA, 25 bp, Probe sequence
gtatgatcttatctacttgccgtgc

SEQ ID NO: 187121 - DNA, 25 bp, Probe sequence
gtcaccatggggtaaacctacgctt

SEQ ID NO: 187122 - DNA, 25 bp, Probe sequence
gtacagtagtacacaacatcgagct

SEQ ID NO: 187123 - DNA, 25 bp, Probe sequence
ggtggtggacacaaacgtcaatacc

SEQ ID NO: 187124 - DNA, 25 bp, Probe sequence
ggtaaagccggacgttcaagatgga

SEQ ID NO: 187125 - DNA, 25 bp, Probe sequence
ggtagaccatctccaatgtcaccat

SEQ ID NO: 187126 - DNA, 25 bp, Probe sequence
tggtaacctacaacacgaattagtt

SEQ ID NO: 187127 - DNA, 25 bp, Probe sequence
tcgttgaaagtggtgctgaagctga

SEQ ID NO: 187128 - DNA, 25 bp, Probe sequence
tcaatatgatccaaaccgctcagca

SEQ ID NO: 187129 - DNA, 25 bp, Probe sequence
tacttgccgtgctacaatcggtcaa

SEQ ID NO: 187130 - DNA, 25 bp, Probe sequence
atgctgccgttccattagcagtaac

SEQ ID NO: 187131 - DNA, 25 bp, Probe sequence
atgagttcggcaaactctaatgctg

SEQ ID NO: 187132 - DNA, 25 bp, Probe sequence
agttcggcaaactctaatgctgccg

SEQ ID NO: 187133 - DNA, 25 bp, Probe sequence
agcagtaactaaatttcgatctttt

SEQ ID NO: 187134 - DNA, 25 bp, Probe sequence
actctaatgctgccgttccattagc

SEQ ID NO: 187135 - DNA, 25 bp, Probe sequence
aaagacaatttcactattgagctct

SEQ ID NO: 187136 - DNA, 25 bp, Probe sequence
aactctaatgctgccgttccattag

SEQ ID NO: 187137 - DNA, 25 bp, Probe sequence
aatgctgccgttccattagcagtaa

SEQ ID NO: 187138 - DNA, 25 bp, Probe sequence
aattcaacaaatttatgctttaaca

SEQ ID NO: 187139 - DNA, 25 bp, Probe sequence
caacaaatttatgctttaacaactt

SEQ ID NO: 187140 - DNA, 25 bp, Probe sequence
cggcaaactctaatgctgccgttcc

SEQ ID NO: 187141 - DNA, 25 bp, Probe sequence
ctgccgttccattagcagtaactaa

SEQ ID NO: 187142 - DNA, 25 bp, Probe sequence
ctctaatgctgccgttccattagca

SEQ ID NO: 187143 - DNA, 25 bp, Probe sequence
ctaaatttcgatctttttctgtaat

SEQ ID NO: 187144 - DNA, 25 bp, Probe sequence
ctaatgctgccgttccattagcagt

SEQ ID NO: 187145 - DNA, 25 bp, Probe sequence
gccgttccattagcagtaactaaat

SEQ ID NO: 187146 - DNA, 25 bp, Probe sequence
gctgccgttccattagcagtaacta

SEQ ID NO: 187147 - DNA, 25 bp, Probe sequence
gcagtaactaaatttcgatcttttt

SEQ ID NO: 187148 - DNA, 25 bp, Probe sequence
gagttcggcaaactctaatgctgcc

SEQ ID NO: 187149 - DNA, 25 bp, Probe sequence
gttccattagcagtaactaaatttc

SEQ ID NO: 187150 - DNA, 25 bp, Probe sequence
gttcggcaaactctaatgctgccgt

SEQ ID NO: 187151 - DNA, 25 bp, Probe sequence
ggcaaactctaatgctgccgttcca

SEQ ID NO: 187152 - DNA, 25 bp, Probe sequence
tgctgccgttccattagcagtaact

SEQ ID NO: 187153 - DNA, 25 bp, Probe sequence
tgccgttccattagcagtaactaaa

SEQ ID NO: 187154 - DNA, 25 bp, Probe sequence
tcggcaaactctaatgctgccgttc

SEQ ID NO: 187155 - DNA, 25 bp, Probe sequence
tctaatgctgccgttccattagcag

SEQ ID NO: 187156 - DNA, 25 bp, Probe sequence
taatgctgccgttccattagcagta

SEQ ID NO: 187157 - DNA, 25 bp, Probe sequence
taactaaatttcgatctttttctgt

SEQ ID NO: 187158 - DNA, 25 bp, Probe sequence
taaatttcgatctttttctgtaata

SEQ ID NO: 187159 - DNA, 25 bp, Probe sequence
tagcagtaactaaatttcgatcttt

SEQ ID NO: 187160 - DNA, 25 bp, Probe sequence
gtaactaaatttcgatctttttctg

SEQ ID NO: 187161 - DNA, 25 bp, Probe sequence
ttcggcaaactctaatgctgccgtt

SEQ ID NO: 187162 - DNA, 25 bp, Probe sequence
ttttctgtaataattcaacaaattt

SEQ ID NO: 187163 - DNA, 25 bp, Probe sequence
ttcaacaaatttatgctttaacaac

SEQ ID NO: 187164 - DNA, 25 bp, Probe sequence
attaaaggaggagtatcatgcttac

SEQ ID NO: 187165 - DNA, 25 bp, Probe sequence
atcatgcttacagaacaagagaaag

SEQ ID NO: 187166 - DNA, 25 bp, Probe sequence
atcgaaatttttagtagaataatca

SEQ ID NO: 187167 - DNA, 25 bp, Probe sequence
aggaggagtatcatgcttacagaac

SEQ ID NO: 187168 - DNA, 25 bp, Probe sequence
aggagtatcatgcttacagaacaag

SEQ ID NO: 187169 - DNA, 25 bp, Probe sequence
agtatcatgcttacagaacaagaga

SEQ ID NO: 187170 - DNA, 25 bp, Probe sequence
agacattatcaaacaaacggtgcct

SEQ ID NO: 187171 - DNA, 25 bp, Probe sequence
agaaagacattatcaaacaaacggt

SEQ ID NO: 187172 - DNA, 25 bp, Probe sequence
acattatcaaacaaacggtgccttt

SEQ ID NO: 187173 - DNA, 25 bp, Probe sequence
acaagagaaagacattatcaaacaa

SEQ ID NO: 187174 - DNA, 25 bp, Probe sequence
aaagacattatcaaacaaacggtgc

SEQ ID NO: 187175 - DNA, 25 bp, Probe sequence
aaaggaggagtatcatgcttacaga

SEQ ID NO: 187176 - DNA, 25 bp, Probe sequence
aagagaaagacattatcaaacaaac

SEQ ID NO: 187177 - DNA, 25 bp, Probe sequence
aagacattatcaaacaaacggtgcc

SEQ ID NO: 187178 - DNA, 25 bp, Probe sequence
aaggaggagtatcatgcttacagaa

SEQ ID NO: 187179 - DNA, 25 bp, Probe sequence
catgcttacagaacaagagaaagac

SEQ ID NO: 187180 - DNA, 25 bp, Probe sequence
cattatcaaacaaacggtgccttta

SEQ ID NO: 187181 - DNA, 25 bp, Probe sequence
gaatatcgaaatttttagtagaata

SEQ ID NO: 187182 - DNA, 25 bp, Probe sequence
gaacaagagaaagacattatcaaac

SEQ ID NO: 187183 - DNA, 25 bp, Probe sequence
gaaagacattatcaaacaaacggtg

SEQ ID NO: 187184 - DNA, 25 bp, Probe sequence
gacattatcaaacaaacggtgcctt

SEQ ID NO: 187185 - DNA, 25 bp, Probe sequence
gagaaagacattatcaaacaaacgg

SEQ ID NO: 187186 - DNA, 25 bp, Probe sequence
gagtatcatgcttacagaacaagag

SEQ ID NO: 187187 - DNA, 25 bp, Probe sequence
gaggagtatcatgcttacagaacaa

SEQ ID NO: 187188 - DNA, 25 bp, Probe sequence
gattaaaggaggagtatcatgctta

SEQ ID NO: 187189 - DNA, 25 bp, Probe sequence
gtatcatgcttacagaacaagagaa

SEQ ID NO: 187190 - DNA, 25 bp, Probe sequence
ggaggagtatcatgcttacagaaca

SEQ ID NO: 187191 - DNA, 25 bp, Probe sequence
ggagtatcatgcttacagaacaaga

SEQ ID NO: 187192 - DNA, 25 bp, Probe sequence
tcatgcttacagaacaagagaaaga

SEQ ID NO: 187193 - DNA, 25 bp, Probe sequence
taaaggaggagtatcatgcttacag

SEQ ID NO: 187194 - DNA, 25 bp, Probe sequence
tatcatgcttacagaacaagagaaa

SEQ ID NO: 187195 - DNA, 25 bp, Probe sequence
ttatcaaacaaacggtgcctttact

SEQ ID NO: 187196 - DNA, 25 bp, Probe sequence
ttaaaggaggagtatcatgcttaca

SEQ ID NO: 187197 - DNA, 25 bp, Probe sequence
ttgaatatcgaaatttttagtagaa

SEQ ID NO: 187198 - DNA, 25 bp, Probe sequence
atacacttatccttcattatacccg

SEQ ID NO: 187199 - DNA, 25 bp, Probe sequence
atacatacacttatccttcattata

SEQ ID NO: 187200 - DNA, 25 bp, Probe sequence
atgttatacatacacttatccttca

SEQ ID NO: 187201 - DNA, 25 bp, Probe sequence
acttatccttcattatacccgaact

SEQ ID NO: 187202 - DNA, 25 bp, Probe sequence
acatacacttatccttcattatacc

SEQ ID NO: 187203 - DNA, 25 bp, Probe sequence
acacttatccttcattatacccgaa

SEQ ID NO: 187204 - DNA, 25 bp, Probe sequence
aatgttatacatacacttatccttc

SEQ ID NO: 187205 - DNA, 25 bp, Probe sequence
cacttatccttcattatacccgaac

SEQ ID NO: 187206 - DNA, 25 bp, Probe sequence
catacacttatccttcattataccc

SEQ ID NO: 187207 - DNA, 25 bp, Probe sequence
cttatccttcattatacccgaactt

SEQ ID NO: 187208 - DNA, 25 bp, Probe sequence
cgtgttgcgctctgtaatgttatac

SEQ ID NO: 187209 - DNA, 25 bp, Probe sequence
gcgctctgtaatgttatacatacac

SEQ ID NO: 187210 - DNA, 25 bp, Probe sequence
gttgcgctctgtaatgttatacata

SEQ ID NO: 187211 - DNA, 25 bp, Probe sequence
gttatacatacacttatccttcatt

SEQ ID NO: 187212 - DNA, 25 bp, Probe sequence
gtctattatttttgtacggtacatt

SEQ ID NO: 187213 - DNA, 25 bp, Probe sequence
gtgttgcgctctgtaatgttataca

SEQ ID NO: 187214 - DNA, 25 bp, Probe sequence
ggatcaatttaaaaacgcctacata

SEQ ID NO: 187215 - DNA, 25 bp, Probe sequence
ggaaaatgcaattaattgtctatta

SEQ ID NO: 187216 - DNA, 25 bp, Probe sequence
tctattatttttgtacggtacattt

SEQ ID NO: 187217 - DNA, 25 bp, Probe sequence
tgttatacatacacttatccttcat

SEQ ID NO: 187218 - DNA, 25 bp, Probe sequence
tgttgcgctctgtaatgttatacat

SEQ ID NO: 187219 - DNA, 25 bp, Probe sequence
tgcgctctgtaatgttatacataca

SEQ ID NO: 187220 - DNA, 25 bp, Probe sequence
tcgtgttgcgctctgtaatgttata

SEQ ID NO: 187221 - DNA, 25 bp, Probe sequence
tcattatacccgaactttttatatt

SEQ ID NO: 187222 - DNA, 25 bp, Probe sequence
tcaatttaaaaacgcctacatatac

SEQ ID NO: 187223 - DNA, 25 bp, Probe sequence
taattgtctattatttttgtacggt

SEQ ID NO: 187224 - DNA, 25 bp, Probe sequence
tacatacacttatccttcattatac

SEQ ID NO: 187225 - DNA, 25 bp, Probe sequence
tacacttatccttcattatacccga

SEQ ID NO: 187226 - DNA, 25 bp, Probe sequence
tatccttcattatacccgaactttt

SEQ ID NO: 187227 - DNA, 25 bp, Probe sequence
ttatccttcattatacccgaacttt

SEQ ID NO: 187228 - DNA, 25 bp, Probe sequence
tatacatacacttatccttcattat

SEQ ID NO: 187229 - DNA, 25 bp, Probe sequence
ttatacatacacttatccttcatta

SEQ ID NO: 187230 - DNA, 25 bp, Probe sequence
ttcattatacccgaactttttatat

SEQ ID NO: 187231 - DNA, 25 bp, Probe sequence
ttgtctattatttttgtacggtaca

SEQ ID NO: 187232 - DNA, 25 bp, Probe sequence
attcagcagacggttatcgcaatga

SEQ ID NO: 187233 - DNA, 25 bp, Probe sequence
atctgctcaatgtggatgttgataa

SEQ ID NO: 187234 - DNA, 25 bp, Probe sequence
atcgaatgtatttaaacgcggctca

SEQ ID NO: 187235 - DNA, 25 bp, Probe sequence
atgtatttaaacgcggctcatatca

SEQ ID NO: 187236 - DNA, 25 bp, Probe sequence
atgtggatgttgataagcgtggtta

SEQ ID NO: 187237 - DNA, 25 bp, Probe sequence
acattcagcagacggttatcgcaat

SEQ ID NO: 187238 - DNA, 25 bp, Probe sequence
acacccacattcagcagacggttat

SEQ ID NO: 187239 - DNA, 25 bp, Probe sequence
cacccacattcagcagacggttatc

SEQ ID NO: 187240 - DNA, 25 bp, Probe sequence
aacacccacattcagcagacggtta

SEQ ID NO: 187241 - DNA, 25 bp, Probe sequence
cagcagacggttatcgcaatgacta

SEQ ID NO: 187242 - DNA, 25 bp, Probe sequence
caacacccacattcagcagacggtt

SEQ ID NO: 187243 - DNA, 25 bp, Probe sequence
cagacggttatcgcaatgactatcg

SEQ ID NO: 187244 - DNA, 25 bp, Probe sequence
ctcgctcacatctgctcaatgtgga

SEQ ID NO: 187245 - DNA, 25 bp, Probe sequence
cggttatcgcaatgactatcgaatg

SEQ ID NO: 187246 - DNA, 25 bp, Probe sequence
cccacattcagcagacggttatcgc

SEQ ID NO: 187247 - DNA, 25 bp, Probe sequence
ccacattcagcagacggttatcgca

SEQ ID NO: 187248 - DNA, 25 bp, Probe sequence
gctcacatctgctcaatgtggatgt

SEQ ID NO: 187249 - DNA, 25 bp, Probe sequence
gcagacggttatcgcaatgactatc

SEQ ID NO: 187250 - DNA, 25 bp, Probe sequence
gaatgtatttaaacgcggctcatat

SEQ ID NO: 187251 - DNA, 25 bp, Probe sequence
gacggttatcgcaatgactatcgaa

SEQ ID NO: 187252 - DNA, 25 bp, Probe sequence
gttgataagcgtggttatattaaga

SEQ ID NO: 187253 - DNA, 25 bp, Probe sequence
gtatttaaacgcggctcatatcatc

SEQ ID NO: 187254 - DNA, 25 bp, Probe sequence
ggatgttgataagcgtggttatatt

SEQ ID NO: 187255 - DNA, 25 bp, Probe sequence
tcgcaatgactatcgaatgtattta

SEQ ID NO: 187256 - DNA, 25 bp, Probe sequence
tcgctcacatctgctcaatgtggat

SEQ ID NO: 187257 - DNA, 25 bp, Probe sequence
tctcgctcacatctgctcaatgtgg

SEQ ID NO: 187258 - DNA, 25 bp, Probe sequence
tcagcagacggttatcgcaatgact

SEQ ID NO: 187259 - DNA, 25 bp, Probe sequence
tcaacacccacattcagcagacggt

SEQ ID NO: 187260 - DNA, 25 bp, Probe sequence
tcacatctgctcaatgtggatgttg

SEQ ID NO: 187261 - DNA, 25 bp, Probe sequence
taaacgcggctcatatcatcgccag

SEQ ID NO: 187262 - DNA, 25 bp, Probe sequence
tatcgcaatgactatcgaatgtatt

SEQ ID NO: 187263 - DNA, 25 bp, Probe sequence
tatttaaacgcggctcatatcatcg

SEQ ID NO: 187264 - DNA, 25 bp, Probe sequence
ttaaacgcggctcatatcatcgcca

SEQ ID NO: 187265 - DNA, 25 bp, Probe sequence
tttaaacgcggctcatatcatcgcc

SEQ ID NO: 187266 - DNA, 25 bp, Probe sequence
attaaaaaacgtcgatgtcatcatt

SEQ ID NO: 187267 - DNA, 25 bp, Probe sequence
attacagcttgcgtttataaaatcg

SEQ ID NO: 187268 - DNA, 25 bp, Probe sequence
atttttttatcatagtcaacatcat

SEQ ID NO: 187269 - DNA, 25 bp, Probe sequence
atttaaaattacagcttgcgtttat

SEQ ID NO: 187270 - DNA, 25 bp, Probe sequence
atcatagtcaacatcattttatcag

SEQ ID NO: 187271 - DNA, 25 bp, Probe sequence
aggtatttattactttcaatgtatt

SEQ ID NO: 187272 - DNA, 25 bp, Probe sequence
agtcaacatcattttatcagtatca

SEQ ID NO: 187273 - DNA, 25 bp, Probe sequence
accatttaaaattacagcttgcgtt

SEQ ID NO: 187274 - DNA, 25 bp, Probe sequence
acgtcgatgtcatcatttttttatc

SEQ ID NO: 187275 - DNA, 25 bp, Probe sequence
aaattacagcttgcgtttataaaat

SEQ ID NO: 187276 - DNA, 25 bp, Probe sequence
aaacgtcgatgtcatcattttttta

SEQ ID NO: 187277 - DNA, 25 bp, Probe sequence
aaaaacgtcgatgtcatcatttttt

SEQ ID NO: 187278 - DNA, 25 bp, Probe sequence
aaaacgtcgatgtcatcattttttt

SEQ ID NO: 187279 - DNA, 25 bp, Probe sequence
aacgtcgatgtcatcatttttttat

SEQ ID NO: 187280 - DNA, 25 bp, Probe sequence
catagtcaacatcattttatcagta

SEQ ID NO: 187281 - DNA, 25 bp, Probe sequence
catttttttatcatagtcaacatca

SEQ ID NO: 187282 - DNA, 25 bp, Probe sequence
cgtcgatgtcatcatttttttatca

SEQ ID NO: 187283 - DNA, 25 bp, Probe sequence
ccatttaaaattacagcttgcgttt

SEQ ID NO: 187284 - DNA, 25 bp, Probe sequence
gtatttattactttcaatgtattta

SEQ ID NO: 187285 - DNA, 25 bp, Probe sequence
gtcaacatcattttatcagtatcaa

SEQ ID NO: 187286 - DNA, 25 bp, Probe sequence
tgataacttaccatttaaaattaca

SEQ ID NO: 187287 - DNA, 25 bp, Probe sequence
tcattttatcagtatcaatgcaaaa

SEQ ID NO: 187288 - DNA, 25 bp, Probe sequence
tcatagtcaacatcattttatcagt

SEQ ID NO: 187289 - DNA, 25 bp, Probe sequence
tcaatgcaaaatgataacttaccat

SEQ ID NO: 187290 - DNA, 25 bp, Probe sequence
aaaaaacgtcgatgtcatcattttt

SEQ ID NO: 187291 - DNA, 25 bp, Probe sequence
tacagcttgcgtttataaaatcgtt

SEQ ID NO: 187292 - DNA, 25 bp, Probe sequence
taccatttaaaattacagcttgcgt

SEQ ID NO: 187293 - DNA, 25 bp, Probe sequence
tagtcaacatcattttatcagtatc

SEQ ID NO: 187294 - DNA, 25 bp, Probe sequence
tattactttcaatgtatttatttta

SEQ ID NO: 187295 - DNA, 25 bp, Probe sequence
ttttatcatagtcaacatcatttta

SEQ ID NO: 187296 - DNA, 25 bp, Probe sequence
ttttttatcatagtcaacatcattt

SEQ ID NO: 187297 - DNA, 25 bp, Probe sequence
ttatcatagtcaacatcattttatc

SEQ ID NO: 187298 - DNA, 25 bp, Probe sequence
ttactttcaatgtatttattttaca

SEQ ID NO: 187299 - DNA, 25 bp, Probe sequence
ttaaaattacagcttgcgtttataa

SEQ ID NO: 187300 - DNA, 25 bp, Probe sequence
attcgatagtcaactcattcttaag

SEQ ID NO: 187301 - DNA, 25 bp, Probe sequence
atttagcaaattcgatagtcaactc

SEQ ID NO: 187302 - DNA, 25 bp, Probe sequence
atttgggtagtatgctttgacacaa

SEQ ID NO: 187303 - DNA, 25 bp, Probe sequence
atagtcaactcattcttaagaccta

SEQ ID NO: 187304 - DNA, 25 bp, Probe sequence
agtcaactcattcttaagacctaaa

SEQ ID NO: 187305 - DNA, 25 bp, Probe sequence
agcaaattcgatagtcaactcattc

SEQ ID NO: 187306 - DNA, 25 bp, Probe sequence
actcattcttaagacctaaattaat

SEQ ID NO: 187307 - DNA, 25 bp, Probe sequence
aaattcgatagtcaactcattctta

SEQ ID NO: 187308 - DNA, 25 bp, Probe sequence
aaattatgttattcgtgctaatatt

SEQ ID NO: 187309 - DNA, 25 bp, Probe sequence
aattcgatagtcaactcattcttaa

SEQ ID NO: 187310 - DNA, 25 bp, Probe sequence
caactcattcttaagacctaaatta

SEQ ID NO: 187311 - DNA, 25 bp, Probe sequence
caaattcgatagtcaactcattctt

SEQ ID NO: 187312 - DNA, 25 bp, Probe sequence
cattcttaagacctaaattaatgtt

SEQ ID NO: 187313 - DNA, 25 bp, Probe sequence
gcaaattcgatagtcaactcattct

SEQ ID NO: 187314 - DNA, 25 bp, Probe sequence
gcaaaaattatgttattcgtgctaa

SEQ ID NO: 187315 - DNA, 25 bp, Probe sequence
gacacaacaaattttaatttagcaa

SEQ ID NO: 187316 - DNA, 25 bp, Probe sequence
gatagtcaactcattcttaagacct

SEQ ID NO: 187317 - DNA, 25 bp, Probe sequence
gatttgggtagtatgctttgacaca

SEQ ID NO: 187318 - DNA, 25 bp, Probe sequence
gtatgctttgacacaacaaatttta

SEQ ID NO: 187319 - DNA, 25 bp, Probe sequence
gtagtatgctttgacacaacaaatt

SEQ ID NO: 187320 - DNA, 25 bp, Probe sequence
gtcaactcattcttaagacctaaat

SEQ ID NO: 187321 - DNA, 25 bp, Probe sequence
gggtagtatgctttgacacaacaaa

SEQ ID NO: 187322 - DNA, 25 bp, Probe sequence
tgggtagtatgctttgacacaacaa

SEQ ID NO: 187323 - DNA, 25 bp, Probe sequence
tgatttgggtagtatgctttgacac

SEQ ID NO: 187324 - DNA, 25 bp, Probe sequence
tcgatagtcaactcattcttaagac

SEQ ID NO: 187325 - DNA, 25 bp, Probe sequence
tcaactcattcttaagacctaaatt

SEQ ID NO: 187326 - DNA, 25 bp, Probe sequence
tagcaaattcgatagtcaactcatt

SEQ ID NO: 187327 - DNA, 25 bp, Probe sequence
tagtcaactcattcttaagacctaa

SEQ ID NO: 187328 - DNA, 25 bp, Probe sequence
tttgggtagtatgctttgacacaac

SEQ ID NO: 187329 - DNA, 25 bp, Probe sequence
tttacaccaaattaatagcaaaaat

SEQ ID NO: 187330 - DNA, 25 bp, Probe sequence
ttatgttattcgtgctaatatttca

SEQ ID NO: 187331 - DNA, 25 bp, Probe sequence
ttagcaaattcgatagtcaactcat

SEQ ID NO: 187332 - DNA, 25 bp, Probe sequence
ttcgatagtcaactcattcttaaga

SEQ ID NO: 187333 - DNA, 25 bp, Probe sequence
ttgatttgggtagtatgctttgaca

SEQ ID NO: 187334 - DNA, 25 bp, Probe sequence
attagcaaccaactgtattcctttg

SEQ ID NO: 187335 - DNA, 25 bp, Probe sequence
attagcaaccaactacgttcaattt

SEQ ID NO: 187336 - DNA, 25 bp, Probe sequence
atgcagttggtgcgttagcatccaa

SEQ ID NO: 187337 - DNA, 25 bp, Probe sequence
agttggtgcgttagcatccaactgt

SEQ ID NO: 187338 - DNA, 25 bp, Probe sequence
agcaaccaactgtattcctttgtcc

SEQ ID NO: 187339 - DNA, 25 bp, Probe sequence
agcatccaactgtattcctttgtcc

SEQ ID NO: 187340 - DNA, 25 bp, Probe sequence
cagttggtgcgttagcatccaactg

SEQ ID NO: 187341 - DNA, 25 bp, Probe sequence
cttatgcagttggtgcgttagcatc

SEQ ID NO: 187342 - DNA, 25 bp, Probe sequence
cattagcaaccaactacgttcaatt

SEQ ID NO: 187343 - DNA, 25 bp, Probe sequence
cattagcaaccaactgtattccttt

SEQ ID NO: 187344 - DNA, 25 bp, Probe sequence
ctcttatgcagttggtgcgttagca

SEQ ID NO: 187345 - DNA, 25 bp, Probe sequence
cgttagcatccaactgtattccttt

SEQ ID NO: 187346 - DNA, 25 bp, Probe sequence
gcgttagcatccaactgtattcctt

SEQ ID NO: 187347 - DNA, 25 bp, Probe sequence
gcagttggtgcgttagcatccaact

SEQ ID NO: 187348 - DNA, 25 bp, Probe sequence
gttggtgcgttagcatccaactgta

SEQ ID NO: 187349 - DNA, 25 bp, Probe sequence
gttagcatccaactgtattcctttg

SEQ ID NO: 187350 - DNA, 25 bp, Probe sequence
gtgcgttagcatccaactgtattcc

SEQ ID NO: 187351 - DNA, 25 bp, Probe sequence
ggtgcgttagcatccaactgtattc

SEQ ID NO: 187352 - DNA, 25 bp, Probe sequence
tggtgcgttagcatccaactgtatt

SEQ ID NO: 187353 - DNA, 25 bp, Probe sequence
tgcgttagcatccaactgtattcct

SEQ ID NO: 187354 - DNA, 25 bp, Probe sequence
tcttatgcagttggtgcgttagcat

SEQ ID NO: 187355 - DNA, 25 bp, Probe sequence
tagcaaccaactgtattcctttgtc

SEQ ID NO: 187356 - DNA, 25 bp, Probe sequence
tagcatccaactgtattcctttgtc

SEQ ID NO: 187357 - DNA, 25 bp, Probe sequence
tatgcagttggtgcgttagcatcca

SEQ ID NO: 187358 - DNA, 25 bp, Probe sequence
ttatgcagttggtgcgttagcatcc

SEQ ID NO: 187359 - DNA, 25 bp, Probe sequence
ttagcatccaactgtattcctttgt

SEQ ID NO: 187360 - DNA, 25 bp, Probe sequence
ttagcaaccaactgtattcctttgt

SEQ ID NO: 187361 - DNA, 25 bp, Probe sequence
ttagcaaccaactacgttcaattta

SEQ ID NO: 187362 - DNA, 25 bp, Probe sequence
ttggtgcgttagcatccaactgtat

SEQ ID NO: 187363 - DNA, 25 bp, Probe sequence
attggatttccaatttctacaggca

SEQ ID NO: 187364 - DNA, 25 bp, Probe sequence
atttctacaggcaatgcaagttggg

SEQ ID NO: 187365 - DNA, 25 bp, Probe sequence
agtgaaattggctcctcccaatttc

SEQ ID NO: 187366 - DNA, 25 bp, Probe sequence
gagttggggtggggccccaacatag

SEQ ID NO: 187367 - DNA, 25 bp, Probe sequence
acatagtgaaattggctcctcccaa

SEQ ID NO: 187368 - DNA, 25 bp, Probe sequence
aaattggctcctcccaatttctaca

SEQ ID NO: 187369 - DNA, 25 bp, Probe sequence
aacatagtgaaattggctcctccca

SEQ ID NO: 187370 - DNA, 25 bp, Probe sequence
caatggaagttggggtgggacgacg

SEQ ID NO: 187371 - DNA, 25 bp, Probe sequence
caggcaatggaagttggggtgggac

SEQ ID NO: 187372 - DNA, 25 bp, Probe sequence
caggcaatgcaagttggggtggggc

SEQ ID NO: 187373 - DNA, 25 bp, Probe sequence
catagtgaaattggctcctcccaat

SEQ ID NO: 187374 - DNA, 25 bp, Probe sequence
ctcctcccaatttctacaggcaatg

SEQ ID NO: 187375 - DNA, 25 bp, Probe sequence
ctcccaatttctacaggcaatgcaa

SEQ ID NO: 187376 - DNA, 25 bp, Probe sequence
cctcccaatttctacaggcaatgca

SEQ ID NO: 187377 - DNA, 25 bp, Probe sequence
ccaatttctacaggcaatgcaagtt

SEQ ID NO: 187378 - DNA, 25 bp, Probe sequence
ccaatttctacaggcaatggaagtt

SEQ ID NO: 187379 - DNA, 25 bp, Probe sequence
gcaagttggggtggggccccaacat

SEQ ID NO: 187380 - DNA, 25 bp, Probe sequence
gcaatgcaagttggggtggggcccc

SEQ ID NO: 187381 - DNA, 25 bp, Probe sequence
gatttccaatttctacaggcaatgg

SEQ ID NO: 187382 - DNA, 25 bp, Probe sequence
gtgaaattggctcctcccaatttct

SEQ ID NO: 187383 - DNA, 25 bp, Probe sequence
gtggggccccaacatagtgaaattg

SEQ ID NO: 187384 - DNA, 25 bp, Probe sequence
gtggggccccaacatagagaaattg

SEQ ID NO: 187385 - DNA, 25 bp, Probe sequence
ggggccccaacatagtgaaattggc

SEQ ID NO: 187386 - DNA, 25 bp, Probe sequence
ggggccccaacatagagaaattgga

SEQ ID NO: 187387 - DNA, 25 bp, Probe sequence
ggatttccaatttctacaggcaatg

SEQ ID NO: 187388 - DNA, 25 bp, Probe sequence
ggcaatgcaagttggggtggggccc

SEQ ID NO: 187389 - DNA, 25 bp, Probe sequence
tgcgagttggggtggggccccaaca

SEQ ID NO: 187390 - DNA, 25 bp, Probe sequence
tggatttccaatttctacaggcaat

SEQ ID NO: 187391 - DNA, 25 bp, Probe sequence
tggggtggggccccaacatagtgaa

SEQ ID NO: 187392 - DNA, 25 bp, Probe sequence
tggggtggggccccaacatagagaa

SEQ ID NO: 187393 - DNA, 25 bp, Probe sequence
tcctcccaatttctacaggcaatgc

SEQ ID NO: 187394 - DNA, 25 bp, Probe sequence
tcccaatttctacaggcaatgcaag

SEQ ID NO: 187395 - DNA, 25 bp, Probe sequence
tctacaggcaatggaagttggggtg

SEQ ID NO: 187396 - DNA, 25 bp, Probe sequence
tacaggcaatgcaagttggggtggg

SEQ ID NO: 187397 - DNA, 25 bp, Probe sequence
atataccaaatggtgtgttatcatt

SEQ ID NO: 187398 - DNA, 25 bp, Probe sequence
ataccaaatggtgtgttatcatttt

SEQ ID NO: 187399 - DNA, 25 bp, Probe sequence
atggtgtgttatcattttgaaaacc

SEQ ID NO: 187400 - DNA, 25 bp, Probe sequence
accaaatggtgtgttatcattttga

SEQ ID NO: 187401 - DNA, 25 bp, Probe sequence
acccatgatgaaattgtaaaacgtc

SEQ ID NO: 187402 - DNA, 25 bp, Probe sequence
aaacccatgatgaaattgtaaaacg

SEQ ID NO: 187403 - DNA, 25 bp, Probe sequence
aacccatgatgaaattgtaaaacgt

SEQ ID NO: 187404 - DNA, 25 bp, Probe sequence
aatggtgtgttatcattttgaaaac

SEQ ID NO: 187405 - DNA, 25 bp, Probe sequence
aatataccaaatggtgtgttatcat

SEQ ID NO: 187406 - DNA, 25 bp, Probe sequence
cggccaatataccaaatggtgtgtt

SEQ ID NO: 187407 - DNA, 25 bp, Probe sequence
ccaaatggtgtgttatcattttgaa

SEQ ID NO: 187408 - DNA, 25 bp, Probe sequence
ccaatataccaaatggtgtgttatc

SEQ ID NO: 187409 - DNA, 25 bp, Probe sequence
gccaatataccaaatggtgtgttat

SEQ ID NO: 187410 - DNA, 25 bp, Probe sequence
gaaaacccatgatgaaattgtaaaa

SEQ ID NO: 187411 - DNA, 25 bp, Probe sequence
gttcggccaatataccaaatggtgt

SEQ ID NO: 187412 - DNA, 25 bp, Probe sequence
gttatcattttgaaaacccatgatg

SEQ ID NO: 187413 - DNA, 25 bp, Probe sequence
gtgttcggccaatataccaaatggt

SEQ ID NO: 187414 - DNA, 25 bp, Probe sequence
gtgttatcattttgaaaacccatga

SEQ ID NO: 187415 - DNA, 25 bp, Probe sequence
gtgtgttatcattttgaaaacccat

SEQ ID NO: 187416 - DNA, 25 bp, Probe sequence
ggtgtgttatcattttgaaaaccca

SEQ ID NO: 187417 - DNA, 25 bp, Probe sequence
ggccaatataccaaatggtgtgtta

SEQ ID NO: 187418 - DNA, 25 bp, Probe sequence
tggtgtgttatcattttgaaaaccc

SEQ ID NO: 187419 - DNA, 25 bp, Probe sequence
tgtgttatcattttgaaaacccatg

SEQ ID NO: 187420 - DNA, 25 bp, Probe sequence
tgttcggccaatataccaaatggtg

SEQ ID NO: 187421 - DNA, 25 bp, Probe sequence
tgttatcattttgaaaacccatgat

SEQ ID NO: 187422 - DNA, 25 bp, Probe sequence
tcggccaatataccaaatggtgtgt

SEQ ID NO: 187423 - DNA, 25 bp, Probe sequence
tcattttgaaaacccatgatgaaat

SEQ ID NO: 187424 - DNA, 25 bp, Probe sequence
taaaacgtcataagacttgccccct

SEQ ID NO: 187425 - DNA, 25 bp, Probe sequence
taccaaatggtgtgttatcattttg

SEQ ID NO: 187426 - DNA, 25 bp, Probe sequence
tatcattttgaaaacccatgatgaa

SEQ ID NO: 187427 - DNA, 25 bp, Probe sequence
ttttgaaaacccatgatgaaattgt

SEQ ID NO: 187428 - DNA, 25 bp, Probe sequence
ttatcattttgaaaacccatgatga

SEQ ID NO: 187429 - DNA, 25 bp, Probe sequence
ttcggccaatataccaaatggtgtg

SEQ ID NO: 187430 - DNA, 25 bp, Probe sequence
ttgaaaacccatgatgaaattgtaa

SEQ ID NO: 187431 - DNA, 25 bp, Probe sequence
atttcaaactggcgtcaaacactca

SEQ ID NO: 187432 - DNA, 25 bp, Probe sequence
atttatgtgacgtttcacacctatt

SEQ ID NO: 187433 - DNA, 25 bp, Probe sequence
atgtgacgtttcacacctatttttc

SEQ ID NO: 187434 - DNA, 25 bp, Probe sequence
actggcgtcaaacactcaaacattt

SEQ ID NO: 187435 - DNA, 25 bp, Probe sequence
aacatttcaaactggcgtcaaacac

SEQ ID NO: 187436 - DNA, 25 bp, Probe sequence
aaactggcgtcaaacactcaaacat

SEQ ID NO: 187437 - DNA, 25 bp, Probe sequence
aaacattttttatacaatttgcatg

SEQ ID NO: 187438 - DNA, 25 bp, Probe sequence
aacaaacatttcaaactggcgtcaa

SEQ ID NO: 187439 - DNA, 25 bp, Probe sequence
aacactcaaacattttttatacaat

SEQ ID NO: 187440 - DNA, 25 bp, Probe sequence
aactggcgtcaaacactcaaacatt

SEQ ID NO: 187441 - DNA, 25 bp, Probe sequence
aattgatatttatgtgacgtttcac

SEQ ID NO: 187442 - DNA, 25 bp, Probe sequence
caatttgcatgtttttttaaatact

SEQ ID NO: 187443 - DNA, 25 bp, Probe sequence
caaacatttcaaactggcgtcaaac

SEQ ID NO: 187444 - DNA, 25 bp, Probe sequence
caaacactcaaacattttttataca

SEQ ID NO: 187445 - DNA, 25 bp, Probe sequence
caaactggcgtcaaacactcaaaca

SEQ ID NO: 187446 - DNA, 25 bp, Probe sequence
cacacctatttttcaacaaacattt

SEQ ID NO: 187447 - DNA, 25 bp, Probe sequence
cacctatttttcaacaaacatttca

SEQ ID NO: 187448 - DNA, 25 bp, Probe sequence
catttcaaactggcgtcaaacactc

SEQ ID NO: 187449 - DNA, 25 bp, Probe sequence
ctggcgtcaaacactcaaacatttt

SEQ ID NO: 187450 - DNA, 25 bp, Probe sequence
gcgtcaaacactcaaacatttttta

SEQ ID NO: 187451 - DNA, 25 bp, Probe sequence
gacgtttcacacctatttttcaaca

SEQ ID NO: 187452 - DNA, 25 bp, Probe sequence
gatatttatgtgacgtttcacacct

SEQ ID NO: 187453 - DNA, 25 bp, Probe sequence
gtcaaacactcaaacattttttata

SEQ ID NO: 187454 - DNA, 25 bp, Probe sequence
gtgacgtttcacacctatttttcaa

SEQ ID NO: 187455 - DNA, 25 bp, Probe sequence
ggcgtcaaacactcaaacatttttt

SEQ ID NO: 187456 - DNA, 25 bp, Probe sequence
tgacgtttcacacctatttttcaac

SEQ ID NO: 187457 - DNA, 25 bp, Probe sequence
tcaaactggcgtcaaacactcaaac

SEQ ID NO: 187458 - DNA, 25 bp, Probe sequence
tcaacaaacatttcaaactggcgtc

SEQ ID NO: 187459 - DNA, 25 bp, Probe sequence
tttcaaactggcgtcaaacactcaa

SEQ ID NO: 187460 - DNA, 25 bp, Probe sequence
tttcacacctatttttcaacaaaca

SEQ ID NO: 187461 - DNA, 25 bp, Probe sequence
ttatacaatttgcatgtttttttaa

SEQ ID NO: 187462 - DNA, 25 bp, Probe sequence
ttatgtgacgtttcacacctatttt

SEQ ID NO: 187463 - DNA, 25 bp, Probe sequence
ttcaaactggcgtcaaacactcaaa

SEQ ID NO: 187464 - DNA, 25 bp, Probe sequence
ttcacacctatttttcaacaaacat

SEQ ID NO: 187465 - DNA, 25 bp, Probe sequence
gcgagttggggtgtgggccccaaca

SEQ ID NO: 187466 - DNA, 25 bp, Probe sequence
attggattcccaatttctacagaca

SEQ ID NO: 187467 - DNA, 25 bp, Probe sequence
attcccaatttctacagacaatgta

SEQ ID NO: 187468 - DNA, 25 bp, Probe sequence
aggcaatgcgagttggggtgtgggc

SEQ ID NO: 187469 - DNA, 25 bp, Probe sequence
aattctagtcaggggccccaacata

SEQ ID NO: 187470 - DNA, 25 bp, Probe sequence
caattctagtcaggggccccaacat

SEQ ID NO: 187471 - DNA, 25 bp, Probe sequence
aacaagcttttttcaattctagtca

SEQ ID NO: 187472 - DNA, 25 bp, Probe sequence
aagaaattctacaggcaatgcgagt

SEQ ID NO: 187473 - DNA, 25 bp, Probe sequence
aatgcgagttggggtgtgggcccca

SEQ ID NO: 187474 - DNA, 25 bp, Probe sequence
aattctacaggcaatgcgagttggg

SEQ ID NO: 187475 - DNA, 25 bp, Probe sequence
caatgtaagttggggtgggacgacg

SEQ ID NO: 187476 - DNA, 25 bp, Probe sequence
caagcttttttcaattctagtcagg

SEQ ID NO: 187477 - DNA, 25 bp, Probe sequence
cccaatttctacagacaatgtaagt

SEQ ID NO: 187478 - DNA, 25 bp, Probe sequence
gccccaacatagagaatttcgaaaa

SEQ ID NO: 187479 - DNA, 25 bp, Probe sequence
gcttttttcaattctagtcaggggc

SEQ ID NO: 187480 - DNA, 25 bp, Probe sequence
gcttgtaacaagcttttttcaattc

SEQ ID NO: 187481 - DNA, 25 bp, Probe sequence
gcaatgcgagttggggtgtgggccc

SEQ ID NO: 187482 - DNA, 25 bp, Probe sequence
gactgaacgaaaatgcgcttgtaac

SEQ ID NO: 187483 - DNA, 25 bp, Probe sequence
gattcccaatttctacagacaatgt

SEQ ID NO: 187484 - DNA, 25 bp, Probe sequence
gtaacaagcttttttcaattctagt

SEQ ID NO: 187485 - DNA, 25 bp, Probe sequence
gtcaggggccccaacatagagaatt

SEQ ID NO: 187486 - DNA, 25 bp, Probe sequence
gggccccaacatagagaatttcgaa

SEQ ID NO: 187487 - DNA, 25 bp, Probe sequence
ggtgtgggccccaacaaagagaaat

SEQ ID NO: 187488 - DNA, 25 bp, Probe sequence
ggggccccaacatagagaatttcga

SEQ ID NO: 187489 - DNA, 25 bp, Probe sequence
tggattcccaatttctacagacaat

SEQ ID NO: 187490 - DNA, 25 bp, Probe sequence
tgtgggccccaacaaagagaaattg

SEQ ID NO: 187491 - DNA, 25 bp, Probe sequence
tggggtgtgggccccaacaaagaga

SEQ ID NO: 187492 - DNA, 25 bp, Probe sequence
tgaacgaaaatgcgcttgtaacaag

SEQ ID NO: 187493 - DNA, 25 bp, Probe sequence
tcaggggccccaacatagagaattt

SEQ ID NO: 187494 - DNA, 25 bp, Probe sequence
tctagtcaggggccccaacatagag

SEQ ID NO: 187495 - DNA, 25 bp, Probe sequence
tacaggcaatgcgagttggggtgtg

SEQ ID NO: 187496 - DNA, 25 bp, Probe sequence
tagtcaggggccccaacatagagaa

SEQ ID NO: 187497 - DNA, 25 bp, Probe sequence
ttctagtcaggggccccaacataga

SEQ ID NO: 187498 - DNA, 25 bp, Probe sequence
ttgactgaacgaaaatgcgcttgta

SEQ ID NO: 187499 - DNA, 25 bp, Probe sequence
attttcattcggtcaactactacca

SEQ ID NO: 187500 - DNA, 25 bp, Probe sequence
attgaaaaatgcttgttacatgggc

SEQ ID NO: 187501 - DNA, 25 bp, Probe sequence
attgatttattatgtcttaggctct

SEQ ID NO: 187502 - DNA, 25 bp, Probe sequence
attatgtcttaggctctattccttc

SEQ ID NO: 187503 - DNA, 25 bp, Probe sequence
attattgtaagctgacttttcgtca

SEQ ID NO: 187504 - DNA, 25 bp, Probe sequence
atgtcttaggctctattccttcatt

SEQ ID NO: 187505 - DNA, 25 bp, Probe sequence
atgggcattttcattcggtcaacta

SEQ ID NO: 187506 - DNA, 25 bp, Probe sequence
aggctctattccttcatttaatgat

SEQ ID NO: 187507 - DNA, 25 bp, Probe sequence
agagcctaagacattgatttattat

SEQ ID NO: 187508 - DNA, 25 bp, Probe sequence
acttttcgtcagcttctgtgttggg

SEQ ID NO: 187509 - DNA, 25 bp, Probe sequence
acatgggcattttcattcggtcaac

SEQ ID NO: 187510 - DNA, 25 bp, Probe sequence
aatattgtagagcctaagacattga

SEQ ID NO: 187511 - DNA, 25 bp, Probe sequence
catgggcattttcattcggtcaact

SEQ ID NO: 187512 - DNA, 25 bp, Probe sequence
cttttcgtcagcttctgtgttgggg

SEQ ID NO: 187513 - DNA, 25 bp, Probe sequence
cttaggctctattccttcatttaat

SEQ ID NO: 187514 - DNA, 25 bp, Probe sequence
ctgacttttcgtcagcttctgtgtt

SEQ ID NO: 187515 - DNA, 25 bp, Probe sequence
gccccgcctataattgaaaaatgct

SEQ ID NO: 187516 - DNA, 25 bp, Probe sequence
gcttgttacatgggcattttcattc

SEQ ID NO: 187517 - DNA, 25 bp, Probe sequence
gcattttcattcggtcaactactac

SEQ ID NO: 187518 - DNA, 25 bp, Probe sequence
gatttattatgtcttaggctctatt

SEQ ID NO: 187519 - DNA, 25 bp, Probe sequence
gttacatgggcattttcattcggtc

SEQ ID NO: 187520 - DNA, 25 bp, Probe sequence
gtagagcctaagacattgatttatt

SEQ ID NO: 187521 - DNA, 25 bp, Probe sequence
gggccccgcctataattgaaaaatg

SEQ ID NO: 187522 - DNA, 25 bp, Probe sequence
gtcttaggctctattccttcattta

SEQ ID NO: 187523 - DNA, 25 bp, Probe sequence
tgtcttaggctctattccttcattt

SEQ ID NO: 187524 - DNA, 25 bp, Probe sequence
tcttaggctctattccttcatttaa

SEQ ID NO: 187525 - DNA, 25 bp, Probe sequence
tacatgggcattttcattcggtcaa

SEQ ID NO: 187526 - DNA, 25 bp, Probe sequence
taggctctattccttcatttaatga

SEQ ID NO: 187527 - DNA, 25 bp, Probe sequence
tatgtcttaggctctattccttcat

SEQ ID NO: 187528 - DNA, 25 bp, Probe sequence
tttcgtcagcttctgtgttggggcc

SEQ ID NO: 187529 - DNA, 25 bp, Probe sequence
ttttcgtcagcttctgtgttggggc

SEQ ID NO: 187530 - DNA, 25 bp, Probe sequence
tttattatgtcttaggctctattcc

SEQ ID NO: 187531 - DNA, 25 bp, Probe sequence
ttttcattcggtcaactactaccaa

SEQ ID NO: 187532 - DNA, 25 bp, Probe sequence
ttatgtcttaggctctattccttca

SEQ ID NO: 187533 - DNA, 25 bp, Probe sequence
atatcactccataaaagtgacctag

SEQ ID NO: 187534 - DNA, 25 bp, Probe sequence
ataaaagtgacctagatggctttat

SEQ ID NO: 187535 - DNA, 25 bp, Probe sequence
atcaactttacattaactaaacagc

SEQ ID NO: 187536 - DNA, 25 bp, Probe sequence
atcactccataaaagtgacctagat

SEQ ID NO: 187537 - DNA, 25 bp, Probe sequence
agccatctatatcactccataaaag

SEQ ID NO: 187538 - DNA, 25 bp, Probe sequence
actccataaaagtgacctagatggc

SEQ ID NO: 187539 - DNA, 25 bp, Probe sequence
acagcaaaaaaagccatctatatca

SEQ ID NO: 187540 - DNA, 25 bp, Probe sequence
aaagtgacctagatggctttattgt

SEQ ID NO: 187541 - DNA, 25 bp, Probe sequence
aaagccatctatatcactccataaa

SEQ ID NO: 187542 - DNA, 25 bp, Probe sequence
aaacaattacattatcaactttaca

SEQ ID NO: 187543 - DNA, 25 bp, Probe sequence
aaaaaaagccatctatatcactcca

SEQ ID NO: 187544 - DNA, 25 bp, Probe sequence
aaaaaagccatctatatcactccat

SEQ ID NO: 187545 - DNA, 25 bp, Probe sequence
aaaagccatctatatcactccataa

SEQ ID NO: 187546 - DNA, 25 bp, Probe sequence
aaaagtgacctagatggctttattg

SEQ ID NO: 187547 - DNA, 25 bp, Probe sequence
aacagcaaaaaaagccatctatatc

SEQ ID NO: 187548 - DNA, 25 bp, Probe sequence
aagccatctatatcactccataaaa

SEQ ID NO: 187549 - DNA, 25 bp, Probe sequence
aagtgacctagatggctttattgtt

SEQ ID NO: 187550 - DNA, 25 bp, Probe sequence
caactttacattaactaaacagcaa

SEQ ID NO: 187551 - DNA, 25 bp, Probe sequence
caaaaaaagccatctatatcactcc

SEQ ID NO: 187552 - DNA, 25 bp, Probe sequence
aaaaagccatctatatcactccata

SEQ ID NO: 187553 - DNA, 25 bp, Probe sequence
cactccataaaagtgacctagatgg

SEQ ID NO: 187554 - DNA, 25 bp, Probe sequence
cagcaaaaaaagccatctatatcac

SEQ ID NO: 187555 - DNA, 25 bp, Probe sequence
ccataaaagtgacctagatggcttt

SEQ ID NO: 187556 - DNA, 25 bp, Probe sequence
ccatctatatcactccataaaagtg

SEQ ID NO: 187557 - DNA, 25 bp, Probe sequence
gccatctatatcactccataaaagt

SEQ ID NO: 187558 - DNA, 25 bp, Probe sequence
gcaaaaaaagccatctatatcactc

SEQ ID NO: 187559 - DNA, 25 bp, Probe sequence
gagcaaacacgttatgaataaagaa

SEQ ID NO: 187560 - DNA, 25 bp, Probe sequence
tcaactttacattaactaaacagca

SEQ ID NO: 187561 - DNA, 25 bp, Probe sequence
taaaagtgacctagatggctttatt

SEQ ID NO: 187562 - DNA, 25 bp, Probe sequence
taaacagcaaaaaaagccatctata

SEQ ID NO: 187563 - DNA, 25 bp, Probe sequence
tatcactccataaaagtgacctaga

SEQ ID NO: 187564 - DNA, 25 bp, Probe sequence
tatatcactccataaaagtgaccta

SEQ ID NO: 187565 - DNA, 25 bp, Probe sequence
ttatcaactttacattaactaaaca

SEQ ID NO: 187566 - DNA, 25 bp, Probe sequence
ttgagcaaacacgttatgaataaag

SEQ ID NO: 187567 - DNA, 25 bp, Probe sequence
atacgtcatctctaacaagccaatt

SEQ ID NO: 187568 - DNA, 25 bp, Probe sequence
atctctaacaagccaattcaaatcc

SEQ ID NO: 187569 - DNA, 25 bp, Probe sequence
agttatacgtcatctctaacaagcc

SEQ ID NO: 187570 - DNA, 25 bp, Probe sequence
agccaattcaaatccagtttacttc

SEQ ID NO: 187571 - DNA, 25 bp, Probe sequence
acgtcatctctaacaagccaattca

SEQ ID NO: 187572 - DNA, 25 bp, Probe sequence
acaagccaattcaaatccagtttac

SEQ ID NO: 187573 - DNA, 25 bp, Probe sequence
aacagttaaagttatacgtcatctc

SEQ ID NO: 187574 - DNA, 25 bp, Probe sequence
aatgttattcatcatatttttcagt

SEQ ID NO: 187575 - DNA, 25 bp, Probe sequence
aatccagtttacttcacttttaatg

SEQ ID NO: 187576 - DNA, 25 bp, Probe sequence
aattcaaatccagtttacttcactt

SEQ ID NO: 187577 - DNA, 25 bp, Probe sequence
caagccaattcaaatccagtttact

SEQ ID NO: 187578 - DNA, 25 bp, Probe sequence
cagttaaagttatacgtcatctcta

SEQ ID NO: 187579 - DNA, 25 bp, Probe sequence
cagtttacttcacttttaatgttat

SEQ ID NO: 187580 - DNA, 25 bp, Probe sequence
catctctaacaagccaattcaaatc

SEQ ID NO: 187581 - DNA, 25 bp, Probe sequence
cgtcatctctaacaagccaattcaa

SEQ ID NO: 187582 - DNA, 25 bp, Probe sequence
ccaattcaaatccagtttacttcac

SEQ ID NO: 187583 - DNA, 25 bp, Probe sequence
gccaattcaaatccagtttacttca

SEQ ID NO: 187584 - DNA, 25 bp, Probe sequence
gcccgtatcatttaataattatatt

SEQ ID NO: 187585 - DNA, 25 bp, Probe sequence
gttaaagttatacgtcatctctaac

SEQ ID NO: 187586 - DNA, 25 bp, Probe sequence
gtcatctctaacaagccaattcaaa

SEQ ID NO: 187587 - DNA, 25 bp, Probe sequence
tccagtttacttcacttttaatgtt

SEQ ID NO: 187588 - DNA, 25 bp, Probe sequence
tctaacaagccaattcaaatccagt

SEQ ID NO: 187589 - DNA, 25 bp, Probe sequence
tctctaacaagccaattcaaatcca

SEQ ID NO: 187590 - DNA, 25 bp, Probe sequence
tcaaatccagtttacttcactttta

SEQ ID NO: 187591 - DNA, 25 bp, Probe sequence
taacaagccaattcaaatccagttt

SEQ ID NO: 187592 - DNA, 25 bp, Probe sequence
taaagttatacgtcatctctaacaa

SEQ ID NO: 187593 - DNA, 25 bp, Probe sequence
tacttcacttttaatgttattcatc

SEQ ID NO: 187594 - DNA, 25 bp, Probe sequence
tacgtcatctctaacaagccaattc

SEQ ID NO: 187595 - DNA, 25 bp, Probe sequence
tatacgtcatctctaacaagccaat

SEQ ID NO: 187596 - DNA, 25 bp, Probe sequence
tttacttcacttttaatgttattca

SEQ ID NO: 187597 - DNA, 25 bp, Probe sequence
ttatacgtcatctctaacaagccaa

SEQ ID NO: 187598 - DNA, 25 bp, Probe sequence
ttcaaatccagtttacttcactttt

SEQ ID NO: 187599 - DNA, 25 bp, Probe sequence
ttcacttttaatgttattcatcata

SEQ ID NO: 187600 - DNA, 25 bp, Probe sequence
ttgcccgtatcatttaataattata

SEQ ID NO: 187601 - DNA, 25 bp, Probe sequence
attattttttgtttgatacctactg

SEQ ID NO: 187602 - DNA, 25 bp, Probe sequence
attttttgtttgatacctactgcat

SEQ ID NO: 187603 - DNA, 25 bp, Probe sequence
atacctactgcatatcccatatgaa

SEQ ID NO: 187604 - DNA, 25 bp, Probe sequence
atgttatatgactaaatctcgtgaa

SEQ ID NO: 187605 - DNA, 25 bp, Probe sequence
aatcgttttagaggtgctaattatt

SEQ ID NO: 187606 - DNA, 25 bp, Probe sequence
gcattttttactaataaacacctct

SEQ ID NO: 187607 - DNA, 25 bp, Probe sequence
gattttaatcgttttagaggtgcta

SEQ ID NO: 187608 - DNA, 25 bp, Probe sequence
gatacctactgcatatcccatatga

SEQ ID NO: 187609 - DNA, 25 bp, Probe sequence
gattattttttgtttgatacctact

SEQ ID NO: 187610 - DNA, 25 bp, Probe sequence
gttatatgactaaatctcgtgaaaa

SEQ ID NO: 187611 - DNA, 25 bp, Probe sequence
gtttgatacctactgcatatcccat

SEQ ID NO: 187612 - DNA, 25 bp, Probe sequence
tgtttgatacctactgcatatccca

SEQ ID NO: 187613 - DNA, 25 bp, Probe sequence
tgttatatgactaaatctcgtgaaa

SEQ ID NO: 187614 - DNA, 25 bp, Probe sequence
tgattattttttgtttgatacctac

SEQ ID NO: 187615 - DNA, 25 bp, Probe sequence
tgattttaatcgttttagaggtgct

SEQ ID NO: 187616 - DNA, 25 bp, Probe sequence
tgatacctactgcatatcccatatg

SEQ ID NO: 187617 - DNA, 25 bp, Probe sequence
tgcattttttactaataaacacctc

SEQ ID NO: 187618 - DNA, 25 bp, Probe sequence
taaacacctctaaaactttaatgat

SEQ ID NO: 187619 - DNA, 25 bp, Probe sequence
tattttttgtttgatacctactgca

SEQ ID NO: 187620 - DNA, 25 bp, Probe sequence
tttgtttgatacctactgcatatcc

SEQ ID NO: 187621 - DNA, 25 bp, Probe sequence
tttgattattttttgtttgatacct

SEQ ID NO: 187622 - DNA, 25 bp, Probe sequence
tttgatacctactgcatatcccata

SEQ ID NO: 187623 - DNA, 25 bp, Probe sequence
ttttttgtttgatacctactgcata

SEQ ID NO: 187624 - DNA, 25 bp, Probe sequence
tttttgtttgatacctactgcatat

SEQ ID NO: 187625 - DNA, 25 bp, Probe sequence
tttatttgattattttttgtttgat

SEQ ID NO: 187626 - DNA, 25 bp, Probe sequence
ttttaatcgttttagaggtgctaat

SEQ ID NO: 187627 - DNA, 25 bp, Probe sequence
ttttgtttgatacctactgcatatc

SEQ ID NO: 187628 - DNA, 25 bp, Probe sequence
ttattttttgtttgatacctactgc

SEQ ID NO: 187629 - DNA, 25 bp, Probe sequence
ttatatgactaaatctcgtgaaaaa

SEQ ID NO: 187630 - DNA, 25 bp, Probe sequence
ttagaggtgctaattattttatttg

SEQ ID NO: 187631 - DNA, 25 bp, Probe sequence
ttaatcgttttagaggtgctaatta

SEQ ID NO: 187632 - DNA, 25 bp, Probe sequence
ttgatacctactgcatatcccatat

SEQ ID NO: 187633 - DNA, 25 bp, Probe sequence
ttgtttgatacctactgcatatccc

SEQ ID NO: 187634 - DNA, 25 bp, Probe sequence
ttgattattttttgtttgataccta

SEQ ID NO: 187635 - DNA, 25 bp, Probe sequence
attggaaacatatatcacgttacga

SEQ ID NO: 187636 - DNA, 25 bp, Probe sequence
attaccaattggaaacatatatcac

SEQ ID NO: 187637 - DNA, 25 bp, Probe sequence
attttttagcattaaagttatagat

SEQ ID NO: 187638 - DNA, 25 bp, Probe sequence
agcattaaagttatagatttgggta

SEQ ID NO: 187639 - DNA, 25 bp, Probe sequence
accaattggaaacatatatcacgtt

SEQ ID NO: 187640 - DNA, 25 bp, Probe sequence
acaattaccaattggaaacatatat

SEQ ID NO: 187641 - DNA, 25 bp, Probe sequence
aaacatatatcacgttacgatgggg

SEQ ID NO: 187642 - DNA, 25 bp, Probe sequence
aaacaattaccaattggaaacatat

SEQ ID NO: 187643 - DNA, 25 bp, Probe sequence
aacaattaccaattggaaacatata

SEQ ID NO: 187644 - DNA, 25 bp, Probe sequence
aattaccaattggaaacatatatca

SEQ ID NO: 187645 - DNA, 25 bp, Probe sequence
aattggaaacatatatcacgttacg

SEQ ID NO: 187646 - DNA, 25 bp, Probe sequence
caattaccaattggaaacatatatc

SEQ ID NO: 187647 - DNA, 25 bp, Probe sequence
caattggaaacatatatcacgttac

SEQ ID NO: 187648 - DNA, 25 bp, Probe sequence
ccaattggaaacatatatcacgtta

SEQ ID NO: 187649 - DNA, 25 bp, Probe sequence
gcattaaagttatagatttgggtaa

SEQ ID NO: 187650 - DNA, 25 bp, Probe sequence
gaaacatatatcacgttacgatggg

SEQ ID NO: 187651 - DNA, 25 bp, Probe sequence
gatttgggtaaacaattaccaattg

SEQ ID NO: 187652 - DNA, 25 bp, Probe sequence
gtaaacaattaccaattggaaacat

SEQ ID NO: 187653 - DNA, 25 bp, Probe sequence
ggaaacatatatcacgttacgatgg

SEQ ID NO: 187654 - DNA, 25 bp, Probe sequence
tggaaacatatatcacgttacgatg

SEQ ID NO: 187655 - DNA, 25 bp, Probe sequence
taaacaattaccaattggaaacata

SEQ ID NO: 187656 - DNA, 25 bp, Probe sequence
tagatttgggtaaacaattaccaat

SEQ ID NO: 187657 - DNA, 25 bp, Probe sequence
taccaattggaaacatatatcacgt

SEQ ID NO: 187658 - DNA, 25 bp, Probe sequence
tagcattaaagttatagatttgggt

SEQ ID NO: 187659 - DNA, 25 bp, Probe sequence
tttagcattaaagttatagatttgg

SEQ ID NO: 187660 - DNA, 25 bp, Probe sequence
ttttagcattaaagttatagatttg

SEQ ID NO: 187661 - DNA, 25 bp, Probe sequence
ttagcattaaagttatagatttggg

SEQ ID NO: 187662 - DNA, 25 bp, Probe sequence
ttaccaattggaaacatatatcacg

SEQ ID NO: 187663 - DNA, 25 bp, Probe sequence
ttggaaacatatatcacgttacgat

SEQ ID NO: 187664 - DNA, 25 bp, Probe sequence
attagttaccatgattttaagcaca

SEQ ID NO: 187665 - DNA, 25 bp, Probe sequence
atgtgaacaaattagttaccatgat

SEQ ID NO: 187666 - DNA, 25 bp, Probe sequence
agttaccatgattttaagcacaata

SEQ ID NO: 187667 - DNA, 25 bp, Probe sequence
accatgattttaagcacaataatgt

SEQ ID NO: 187668 - DNA, 25 bp, Probe sequence
acaaattagttaccatgattttaag

SEQ ID NO: 187669 - DNA, 25 bp, Probe sequence
aaaattgtgtctaaatataggtgtg

SEQ ID NO: 187670 - DNA, 25 bp, Probe sequence
aacatgtgaacaaattagttaccat

SEQ ID NO: 187671 - DNA, 25 bp, Probe sequence
aattagttaccatgattttaagcac

SEQ ID NO: 187672 - DNA, 25 bp, Probe sequence
aattgtgtctaaatataggtgtgat

SEQ ID NO: 187673 - DNA, 25 bp, Probe sequence
caaattagttaccatgattttaagc

SEQ ID NO: 187674 - DNA, 25 bp, Probe sequence
catgattttaagcacaataatgttt

SEQ ID NO: 187675 - DNA, 25 bp, Probe sequence
ccatgattttaagcacaataatgtt

SEQ ID NO: 187676 - DNA, 25 bp, Probe sequence
gaacaaattagttaccatgatttta

SEQ ID NO: 187677 - DNA, 25 bp, Probe sequence
gattttaagcacaataatgtttggt

SEQ ID NO: 187678 - DNA, 25 bp, Probe sequence
gttaccatgattttaagcacaataa

SEQ ID NO: 187679 - DNA, 25 bp, Probe sequence
gtatattgttaaaattgtgtctaaa

SEQ ID NO: 187680 - DNA, 25 bp, Probe sequence
gtctaaatataggtgtgattcagat

SEQ ID NO: 187681 - DNA, 25 bp, Probe sequence
gtgaacaaattagttaccatgattt

SEQ ID NO: 187682 - DNA, 25 bp, Probe sequence
gtgtctaaatataggtgtgattcag

SEQ ID NO: 187683 - DNA, 25 bp, Probe sequence
ggtatattgttaaaattgtgtctaa

SEQ ID NO: 187684 - DNA, 25 bp, Probe sequence
tgtgaacaaattagttaccatgatt

SEQ ID NO: 187685 - DNA, 25 bp, Probe sequence
tgtgtctaaatataggtgtgattca

SEQ ID NO: 187686 - DNA, 25 bp, Probe sequence
tgtctaaatataggtgtgattcaga

SEQ ID NO: 187687 - DNA, 25 bp, Probe sequence
tgaacaaattagttaccatgatttt

SEQ ID NO: 187688 - DNA, 25 bp, Probe sequence
taatgtttggtatattgttaaaatt

SEQ ID NO: 187689 - DNA, 25 bp, Probe sequence
taagcacaataatgtttggtatatt

SEQ ID NO: 187690 - DNA, 25 bp, Probe sequence
taccatgattttaagcacaataatg

SEQ ID NO: 187691 - DNA, 25 bp, Probe sequence
tagttaccatgattttaagcacaat

SEQ ID NO: 187692 - DNA, 25 bp, Probe sequence
tatattgttaaaattgtgtctaaat

SEQ ID NO: 187693 - DNA, 25 bp, Probe sequence
ttttaagcacaataatgtttggtat

SEQ ID NO: 187694 - DNA, 25 bp, Probe sequence
ttagttaccatgattttaagcacaa

SEQ ID NO: 187695 - DNA, 25 bp, Probe sequence
ttaccatgattttaagcacaataat

SEQ ID NO: 187696 - DNA, 25 bp, Probe sequence
ttaagcacaataatgtttggtatat

SEQ ID NO: 187697 - DNA, 25 bp, Probe sequence
ttgtgtctaaatataggtgtgattc

SEQ ID NO: 187698 - DNA, 25 bp, Probe sequence
attgttgattggttttatttatgta

SEQ ID NO: 187699 - DNA, 25 bp, Probe sequence
attgattttcaccaactcaattgtt

SEQ ID NO: 187700 - DNA, 25 bp, Probe sequence
attttcaccaactcaattgttgatt

SEQ ID NO: 187701 - DNA, 25 bp, Probe sequence
atttaatatgcatcaaagccaatca

SEQ ID NO: 187702 - DNA, 25 bp, Probe sequence
atatgcatcaaagccaatcaacgat

SEQ ID NO: 187703 - DNA, 25 bp, Probe sequence
atcaacgattgattttcaccaactc

SEQ ID NO: 187704 - DNA, 25 bp, Probe sequence
atgcatcaaagccaatcaacgattg

SEQ ID NO: 187705 - DNA, 25 bp, Probe sequence
atgaatgaacaactttttgacatca

SEQ ID NO: 187706 - DNA, 25 bp, Probe sequence
acgattgattttcaccaactcaatt

SEQ ID NO: 187707 - DNA, 25 bp, Probe sequence
acaactttttgacatcattaagaat

SEQ ID NO: 187708 - DNA, 25 bp, Probe sequence
aactcaattgttgattggttttatt

SEQ ID NO: 187709 - DNA, 25 bp, Probe sequence
aactttttgacatcattaagaatat

SEQ ID NO: 187710 - DNA, 25 bp, Probe sequence
aacgattgattttcaccaactcaat

SEQ ID NO: 187711 - DNA, 25 bp, Probe sequence
aatatgcatcaaagccaatcaacga

SEQ ID NO: 187712 - DNA, 25 bp, Probe sequence
caacgattgattttcaccaactcaa

SEQ ID NO: 187713 - DNA, 25 bp, Probe sequence
cattatttaatatgcatcaaagcca

SEQ ID NO: 187714 - DNA, 25 bp, Probe sequence
cgattgattttcaccaactcaattg

SEQ ID NO: 187715 - DNA, 25 bp, Probe sequence
ccaactcaattgttgattggtttta

SEQ ID NO: 187716 - DNA, 25 bp, Probe sequence
gaatgaacaactttttgacatcatt

SEQ ID NO: 187717 - DNA, 25 bp, Probe sequence
gaacaactttttgacatcattaaga

SEQ ID NO: 187718 - DNA, 25 bp, Probe sequence
gattttcaccaactcaattgttgat

SEQ ID NO: 187719 - DNA, 25 bp, Probe sequence
gattgattttcaccaactcaattgt

SEQ ID NO: 187720 - DNA, 25 bp, Probe sequence
gattggttttatttatgtatgaatg

SEQ ID NO: 187721 - DNA, 25 bp, Probe sequence
gttgattggttttatttatgtatga

SEQ ID NO: 187722 - DNA, 25 bp, Probe sequence
gtatgaatgaacaactttttgacat

SEQ ID NO: 187723 - DNA, 25 bp, Probe sequence
tgattttcaccaactcaattgttga

SEQ ID NO: 187724 - DNA, 25 bp, Probe sequence
tgaacaactttttgacatcattaag

SEQ ID NO: 187725 - DNA, 25 bp, Probe sequence
tgcatcaaagccaatcaacgattga

SEQ ID NO: 187726 - DNA, 25 bp, Probe sequence
tcaccaactcaattgttgattggtt

SEQ ID NO: 187727 - DNA, 25 bp, Probe sequence
tcaacgattgattttcaccaactca

SEQ ID NO: 187728 - DNA, 25 bp, Probe sequence
tatgcatcaaagccaatcaacgatt

SEQ ID NO: 187729 - DNA, 25 bp, Probe sequence
tttcaccaactcaattgttgattgg

SEQ ID NO: 187730 - DNA, 25 bp, Probe sequence
ttaatatgcatcaaagccaatcaac

SEQ ID NO: 187731 - DNA, 25 bp, Probe sequence
ttgattttcaccaactcaattgttg

SEQ ID NO: 187732 - DNA, 25 bp, Probe sequence
attagaccatttcaaaatcgcaagg

SEQ ID NO: 187733 - DNA, 25 bp, Probe sequence
atttcaaaatcgcaaggttctcatg

SEQ ID NO: 187734 - DNA, 25 bp, Probe sequence
atcgcaaggttctcatgttctgcta

SEQ ID NO: 187735 - DNA, 25 bp, Probe sequence
atgttctgctacagtttgcggtctt

SEQ ID NO: 187736 - DNA, 25 bp, Probe sequence
agaccatttcaaaatcgcaaggttc

SEQ ID NO: 187737 - DNA, 25 bp, Probe sequence
aaatcgcaaggttctcatgttctgc

SEQ ID NO: 187738 - DNA, 25 bp, Probe sequence
aaaatcgcaaggttctcatgttctg

SEQ ID NO: 187739 - DNA, 25 bp, Probe sequence
aaggttctcatgttctgctacagtt

SEQ ID NO: 187740 - DNA, 25 bp, Probe sequence
aatcgcaaggttctcatgttctgct

SEQ ID NO: 187741 - DNA, 25 bp, Probe sequence
caaaatcgcaaggttctcatgttct

SEQ ID NO: 187742 - DNA, 25 bp, Probe sequence
catgttctgctacagtttgcggtct

SEQ ID NO: 187743 - DNA, 25 bp, Probe sequence
ctacagtttgcggtctttggaagat

SEQ ID NO: 187744 - DNA, 25 bp, Probe sequence
ctcatgttctgctacagtttgcggt

SEQ ID NO: 187745 - DNA, 25 bp, Probe sequence
ctgctacagtttgcggtctttggaa

SEQ ID NO: 187746 - DNA, 25 bp, Probe sequence
cgcaaggttctcatgttctgctaca

SEQ ID NO: 187747 - DNA, 25 bp, Probe sequence
ccatttcaaaatcgcaaggttctca

SEQ ID NO: 187748 - DNA, 25 bp, Probe sequence
gctacagtttgcggtctttggaaga

SEQ ID NO: 187749 - DNA, 25 bp, Probe sequence
gcaaggttctcatgttctgctacag

SEQ ID NO: 187750 - DNA, 25 bp, Probe sequence
gatatttgatttattagaccatttc

SEQ ID NO: 187751 - DNA, 25 bp, Probe sequence
gatatatcatttactattattaaca

SEQ ID NO: 187752 - DNA, 25 bp, Probe sequence
gttctcatgttctgctacagtttgc

SEQ ID NO: 187753 - DNA, 25 bp, Probe sequence
gtttgcggtctttggaagatatatc

SEQ ID NO: 187754 - DNA, 25 bp, Probe sequence
ggtctttggaagatatatcatttac

SEQ ID NO: 187755 - DNA, 25 bp, Probe sequence
ggttctcatgttctgctacagtttg

SEQ ID NO: 187756 - DNA, 25 bp, Probe sequence
ggaagatatatcatttactattatt

SEQ ID NO: 187757 - DNA, 25 bp, Probe sequence
tgctacagtttgcggtctttggaag

SEQ ID NO: 187758 - DNA, 25 bp, Probe sequence
tgttctgctacagtttgcggtcttt

SEQ ID NO: 187759 - DNA, 25 bp, Probe sequence
tcgcaaggttctcatgttctgctac

SEQ ID NO: 187760 - DNA, 25 bp, Probe sequence
tctgctacagtttgcggtctttgga

SEQ ID NO: 187761 - DNA, 25 bp, Probe sequence
tctcatgttctgctacagtttgcgg

SEQ ID NO: 187762 - DNA, 25 bp, Probe sequence
tcatgttctgctacagtttgcggtc

SEQ ID NO: 187763 - DNA, 25 bp, Probe sequence
tacagtttgcggtctttggaagata

SEQ ID NO: 187764 - DNA, 25 bp, Probe sequence
ttcaaaatcgcaaggttctcatgtt

SEQ ID NO: 187765 - DNA, 25 bp, Probe sequence
ttctcatgttctgctacagtttgcg

SEQ ID NO: 187766 - DNA, 25 bp, Probe sequence
atccttggttgactctttattttat

SEQ ID NO: 187767 - DNA, 25 bp, Probe sequence
aggatggattcctattttaatcctt

SEQ ID NO: 187768 - DNA, 25 bp, Probe sequence
acgtataccgcagcatcgtgtaaaa

SEQ ID NO: 187769 - DNA, 25 bp, Probe sequence
aaacgtataccgcagcatcgtgtaa

SEQ ID NO: 187770 - DNA, 25 bp, Probe sequence
aacgtataccgcagcatcgtgtaaa

SEQ ID NO: 187771 - DNA, 25 bp, Probe sequence
aacgaaacgtataccgcagcatcgt

SEQ ID NO: 187772 - DNA, 25 bp, Probe sequence
caaccaaggatggattcctatttta

SEQ ID NO: 187773 - DNA, 25 bp, Probe sequence
ctattttaatccttggttgactctt

SEQ ID NO: 187774 - DNA, 25 bp, Probe sequence
cgtataccgcagcatcgtgtaaaaa

SEQ ID NO: 187775 - DNA, 25 bp, Probe sequence
cgaaacgtataccgcagcatcgtgt

SEQ ID NO: 187776 - DNA, 25 bp, Probe sequence
ccgcagcatcgtgtaaaaacaatac

SEQ ID NO: 187777 - DNA, 25 bp, Probe sequence
cctattttaatccttggttgactct

SEQ ID NO: 187778 - DNA, 25 bp, Probe sequence
gcttggacgagtggtaacgaaacgt

SEQ ID NO: 187779 - DNA, 25 bp, Probe sequence
gaaacgtataccgcagcatcgtgta

SEQ ID NO: 187780 - DNA, 25 bp, Probe sequence
gaaagtcaaccaaggatggattcct

SEQ ID NO: 187781 - DNA, 25 bp, Probe sequence
gagtggtaacgaaacgtataccgca

SEQ ID NO: 187782 - DNA, 25 bp, Probe sequence
gatggattcctattttaatccttgg

SEQ ID NO: 187783 - DNA, 25 bp, Probe sequence
gattcctattttaatccttggttga

SEQ ID NO: 187784 - DNA, 25 bp, Probe sequence
gtataccgcagcatcgtgtaaaaac

SEQ ID NO: 187785 - DNA, 25 bp, Probe sequence
gtcaaccaaggatggattcctattt

SEQ ID NO: 187786 - DNA, 25 bp, Probe sequence
gtaacgaaacgtataccgcagcatc

SEQ ID NO: 187787 - DNA, 25 bp, Probe sequence
gtggtaacgaaacgtataccgcagc

SEQ ID NO: 187788 - DNA, 25 bp, Probe sequence
tcctattttaatccttggttgactc

SEQ ID NO: 187789 - DNA, 25 bp, Probe sequence
tccttggttgactctttattttatt

SEQ ID NO: 187790 - DNA, 25 bp, Probe sequence
taatccttggttgactctttatttt

SEQ ID NO: 187791 - DNA, 25 bp, Probe sequence
taacgaaacgtataccgcagcatcg

SEQ ID NO: 187792 - DNA, 25 bp, Probe sequence
taccgcagcatcgtgtaaaaacaat

SEQ ID NO: 187793 - DNA, 25 bp, Probe sequence
ttgcttggacgagtggtaacgaaac

SEQ ID NO: 187794 - DNA, 25 bp, Probe sequence
tataccgcagcatcgtgtaaaaaca

SEQ ID NO: 187795 - DNA, 25 bp, Probe sequence
tattttaatccttggttgactcttt

SEQ ID NO: 187796 - DNA, 25 bp, Probe sequence
tttaatccttggttgactctttatt

SEQ ID NO: 187797 - DNA, 25 bp, Probe sequence
ttttaatccttggttgactctttat

SEQ ID NO: 187798 - DNA, 25 bp, Probe sequence
ttaatccttggttgactctttattt

SEQ ID NO: 187799 - DNA, 25 bp, Probe sequence
ttcctattttaatccttggttgact

SEQ ID NO: 187800 - DNA, 25 bp, Probe sequence
atttttatatagtgtggcacatttt

SEQ ID NO: 187801 - DNA, 25 bp, Probe sequence
atatagtgtggcacattttattcca

SEQ ID NO: 187802 - DNA, 25 bp, Probe sequence
atagtgtggcacattttattccaaa

SEQ ID NO: 187803 - DNA, 25 bp, Probe sequence
atcatttttatatagtgtggcacat

SEQ ID NO: 187804 - DNA, 25 bp, Probe sequence
agtgtggcacattttattccaaaag

SEQ ID NO: 187805 - DNA, 25 bp, Probe sequence
agatgtaataaaacttaacgcattt

SEQ ID NO: 187806 - DNA, 25 bp, Probe sequence
acgcatttttgctttttataaattg

SEQ ID NO: 187807 - DNA, 25 bp, Probe sequence
acattttattccaaaagatgtaata

SEQ ID NO: 187808 - DNA, 25 bp, Probe sequence
aaatcatttttatatagtgtggcac

SEQ ID NO: 187809 - DNA, 25 bp, Probe sequence
aaaagggagtggtaagtatgaatct

SEQ ID NO: 187810 - DNA, 25 bp, Probe sequence
aatcatttttatatagtgtggcaca

SEQ ID NO: 187811 - DNA, 25 bp, Probe sequence
catttttatatagtgtggcacattt

SEQ ID NO: 187812 - DNA, 25 bp, Probe sequence
catttttgctttttataaattgtca

SEQ ID NO: 187813 - DNA, 25 bp, Probe sequence
cgcatttttgctttttataaattgt

SEQ ID NO: 187814 - DNA, 25 bp, Probe sequence
gctttttataaattgtcagattatt

SEQ ID NO: 187815 - DNA, 25 bp, Probe sequence
gcatttttgctttttataaattgtc

SEQ ID NO: 187816 - DNA, 25 bp, Probe sequence
gcacattttattccaaaagatgtaa

SEQ ID NO: 187817 - DNA, 25 bp, Probe sequence
gaaatcatttttatatagtgtggca

SEQ ID NO: 187818 - DNA, 25 bp, Probe sequence
gtgtggcacattttattccaaaaga

SEQ ID NO: 187819 - DNA, 25 bp, Probe sequence
gtggcacattttattccaaaagatg

SEQ ID NO: 187820 - DNA, 25 bp, Probe sequence
ggcacattttattccaaaagatgta

SEQ ID NO: 187821 - DNA, 25 bp, Probe sequence
tggcacattttattccaaaagatgt

SEQ ID NO: 187822 - DNA, 25 bp, Probe sequence
tgtggcacattttattccaaaagat

SEQ ID NO: 187823 - DNA, 25 bp, Probe sequence
tcatttttatatagtgtggcacatt

SEQ ID NO: 187824 - DNA, 25 bp, Probe sequence
taataaaacttaacgcatttttgct

SEQ ID NO: 187825 - DNA, 25 bp, Probe sequence
taacgcatttttgctttttataaat

SEQ ID NO: 187826 - DNA, 25 bp, Probe sequence
taaattgtcagattattatgaaaaa

SEQ ID NO: 187827 - DNA, 25 bp, Probe sequence
tagtgtggcacattttattccaaaa

SEQ ID NO: 187828 - DNA, 25 bp, Probe sequence
tatagtgtggcacattttattccaa

SEQ ID NO: 187829 - DNA, 25 bp, Probe sequence
tatatagtgtggcacattttattcc

SEQ ID NO: 187830 - DNA, 25 bp, Probe sequence
tttgctttttataaattgtcagatt

SEQ ID NO: 187831 - DNA, 25 bp, Probe sequence
tttttgctttttataaattgtcaga

SEQ ID NO: 187832 - DNA, 25 bp, Probe sequence
ttttgctttttataaattgtcagat

SEQ ID NO: 187833 - DNA, 25 bp, Probe sequence
ttgctttttataaattgtcagatta

SEQ ID NO: 187834 - DNA, 25 bp, Probe sequence
attcaagcactttctgcttaattaa

SEQ ID NO: 187835 - DNA, 25 bp, Probe sequence
attataacatggtgtctttttagca

SEQ ID NO: 187836 - DNA, 25 bp, Probe sequence
atagatgaaaggcatcatgttgata

SEQ ID NO: 187837 - DNA, 25 bp, Probe sequence
ataacatggtgtctttttagcaatt

SEQ ID NO: 187838 - DNA, 25 bp, Probe sequence
atggtgtctttttagcaattcaagc

SEQ ID NO: 187839 - DNA, 25 bp, Probe sequence
agatgtacctttaggaagaataaat

SEQ ID NO: 187840 - DNA, 25 bp, Probe sequence
agcaattcaagcactttctgcttaa

SEQ ID NO: 187841 - DNA, 25 bp, Probe sequence
acatggtgtctttttagcaattcaa

SEQ ID NO: 187842 - DNA, 25 bp, Probe sequence
aacatggtgtctttttagcaattca

SEQ ID NO: 187843 - DNA, 25 bp, Probe sequence
aagcactttctgcttaattaaattt

SEQ ID NO: 187844 - DNA, 25 bp, Probe sequence
aattataacatggtgtctttttagc

SEQ ID NO: 187845 - DNA, 25 bp, Probe sequence
aattcaagcactttctgcttaatta

SEQ ID NO: 187846 - DNA, 25 bp, Probe sequence
caattcaagcactttctgcttaatt

SEQ ID NO: 187847 - DNA, 25 bp, Probe sequence
catggtgtctttttagcaattcaag

SEQ ID NO: 187848 - DNA, 25 bp, Probe sequence
ctttttagcaattcaagcactttct

SEQ ID NO: 187849 - DNA, 25 bp, Probe sequence
gcaattcaagcactttctgcttaat

SEQ ID NO: 187850 - DNA, 25 bp, Probe sequence
gaaaggcatcatgttgataaaatta

SEQ ID NO: 187851 - DNA, 25 bp, Probe sequence
gatgaaaggcatcatgttgataaaa

SEQ ID NO: 187852 - DNA, 25 bp, Probe sequence
gtctttttagcaattcaagcacttt

SEQ ID NO: 187853 - DNA, 25 bp, Probe sequence
gtgtctttttagcaattcaagcact

SEQ ID NO: 187854 - DNA, 25 bp, Probe sequence
ggtgtctttttagcaattcaagcac

SEQ ID NO: 187855 - DNA, 25 bp, Probe sequence
tggtgtctttttagcaattcaagca

SEQ ID NO: 187856 - DNA, 25 bp, Probe sequence
tgtctttttagcaattcaagcactt

SEQ ID NO: 187857 - DNA, 25 bp, Probe sequence
tttttagcaattcaagcactttctg

SEQ ID NO: 187858 - DNA, 25 bp, Probe sequence
tctttttagcaattcaagcactttc

SEQ ID NO: 187859 - DNA, 25 bp, Probe sequence
tcaagcactttctgcttaattaaat

SEQ ID NO: 187860 - DNA, 25 bp, Probe sequence
taacatggtgtctttttagcaattc

SEQ ID NO: 187861 - DNA, 25 bp, Probe sequence
tagcaattcaagcactttctgctta

SEQ ID NO: 187862 - DNA, 25 bp, Probe sequence
tttagcaattcaagcactttctgct

SEQ ID NO: 187863 - DNA, 25 bp, Probe sequence
ttttagatgtacctttaggaagaat

SEQ ID NO: 187864 - DNA, 25 bp, Probe sequence
ttttagcaattcaagcactttctgc

SEQ ID NO: 187865 - DNA, 25 bp, Probe sequence
ttataacatggtgtctttttagcaa

SEQ ID NO: 187866 - DNA, 25 bp, Probe sequence
ttagcaattcaagcactttctgctt

SEQ ID NO: 187867 - DNA, 25 bp, Probe sequence
ttctgcttaattaaatttttagatg

SEQ ID NO: 187868 - DNA, 25 bp, Probe sequence
attgaaagccttttctcaagatttt

SEQ ID NO: 187869 - DNA, 25 bp, Probe sequence
atatgtcacattttaagaaaggtat

SEQ ID NO: 187870 - DNA, 25 bp, Probe sequence
ataacctacaaataaatatgtcaca

SEQ ID NO: 187871 - DNA, 25 bp, Probe sequence
atcaaattgaaagccttttctcaag

SEQ ID NO: 187872 - DNA, 25 bp, Probe sequence
atgtcacattttaagaaaggtattt

SEQ ID NO: 187873 - DNA, 25 bp, Probe sequence
agattttcataacctacaaataaat

SEQ ID NO: 187874 - DNA, 25 bp, Probe sequence
agccttttctcaagattttcataac

SEQ ID NO: 187875 - DNA, 25 bp, Probe sequence
aaattgaaagccttttctcaagatt

SEQ ID NO: 187876 - DNA, 25 bp, Probe sequence
aaagccttttctcaagattttcata

SEQ ID NO: 187877 - DNA, 25 bp, Probe sequence
aacctacaaataaatatgtcacatt

SEQ ID NO: 187878 - DNA, 25 bp, Probe sequence
aagccttttctcaagattttcataa

SEQ ID NO: 187879 - DNA, 25 bp, Probe sequence
aatcaaattgaaagccttttctcaa

SEQ ID NO: 187880 - DNA, 25 bp, Probe sequence
aatatgtcacattttaagaaaggta

SEQ ID NO: 187881 - DNA, 25 bp, Probe sequence
aattgaaagccttttctcaagattt

SEQ ID NO: 187882 - DNA, 25 bp, Probe sequence
caagattttcataacctacaaataa

SEQ ID NO: 187883 - DNA, 25 bp, Probe sequence
caaattgaaagccttttctcaagat

SEQ ID NO: 187884 - DNA, 25 bp, Probe sequence
cttttctcaagattttcataaccta

SEQ ID NO: 187885 - DNA, 25 bp, Probe sequence
ctcaagattttcataacctacaaat

SEQ ID NO: 187886 - DNA, 25 bp, Probe sequence
cctacaaataaatatgtcacatttt

SEQ ID NO: 187887 - DNA, 25 bp, Probe sequence
ccttttctcaagattttcataacct

SEQ ID NO: 187888 - DNA, 25 bp, Probe sequence
gccttttctcaagattttcataacc

SEQ ID NO: 187889 - DNA, 25 bp, Probe sequence
gaaagccttttctcaagattttcat

SEQ ID NO: 187890 - DNA, 25 bp, Probe sequence
gattttcataacctacaaataaata

SEQ ID NO: 187891 - DNA, 25 bp, Probe sequence
gtaatcaaattgaaagccttttctc

SEQ ID NO: 187892 - DNA, 25 bp, Probe sequence
gtcacattttaagaaaggtatttca

SEQ ID NO: 187893 - DNA, 25 bp, Probe sequence
tgaaagccttttctcaagattttca

SEQ ID NO: 187894 - DNA, 25 bp, Probe sequence
tctcaagattttcataacctacaaa

SEQ ID NO: 187895 - DNA, 25 bp, Probe sequence
tcaaattgaaagccttttctcaaga

SEQ ID NO: 187896 - DNA, 25 bp, Probe sequence
tcaagattttcataacctacaaata

SEQ ID NO: 187897 - DNA, 25 bp, Probe sequence
taatcaaattgaaagccttttctca

SEQ ID NO: 187898 - DNA, 25 bp, Probe sequence
tttctcaagattttcataacctaca

SEQ ID NO: 187899 - DNA, 25 bp, Probe sequence
ttttctcaagattttcataacctac

SEQ ID NO: 187900 - DNA, 25 bp, Probe sequence
ttctcaagattttcataacctacaa

SEQ ID NO: 187901 - DNA, 25 bp, Probe sequence
ttgaaagccttttctcaagattttc

SEQ ID NO: 187902 - DNA, 25 bp, Probe sequence
attatttaatcgtgatgacttaatt

SEQ ID NO: 187903 - DNA, 25 bp, Probe sequence
atttaatcgtgatgacttaattaaa

SEQ ID NO: 187904 - DNA, 25 bp, Probe sequence
atattatttaatcgtgatgacttaa

SEQ ID NO: 187905 - DNA, 25 bp, Probe sequence
atatattatttaatcgtgatgactt

SEQ ID NO: 187906 - DNA, 25 bp, Probe sequence
atcgtgatgacttaattaaaatgaa

SEQ ID NO: 187907 - DNA, 25 bp, Probe sequence
atgacaagcacaatggaaagaatcg

SEQ ID NO: 187908 - DNA, 25 bp, Probe sequence
atggaaagaatcgttaatatattat

SEQ ID NO: 187909 - DNA, 25 bp, Probe sequence
agcacaatggaaagaatcgttaata

SEQ ID NO: 187910 - DNA, 25 bp, Probe sequence
acaagcacaatggaaagaatcgtta

SEQ ID NO: 187911 - DNA, 25 bp, Probe sequence
acaatggaaagaatcgttaatatat

SEQ ID NO: 187912 - DNA, 25 bp, Probe sequence
aagcacaatggaaagaatcgttaat

SEQ ID NO: 187913 - DNA, 25 bp, Probe sequence
aagaatcgttaatatattatttaat

SEQ ID NO: 187914 - DNA, 25 bp, Probe sequence
aatggaaagaatcgttaatatatta

SEQ ID NO: 187915 - DNA, 25 bp, Probe sequence
aatcgtgatgacttaattaaaatga

SEQ ID NO: 187916 - DNA, 25 bp, Probe sequence
aatatattatttaatcgtgatgact

SEQ ID NO: 187917 - DNA, 25 bp, Probe sequence
caatggaaagaatcgttaatatatt

SEQ ID NO: 187918 - DNA, 25 bp, Probe sequence
caagcacaatggaaagaatcgttaa

SEQ ID NO: 187919 - DNA, 25 bp, Probe sequence
cacaatggaaagaatcgttaatata

SEQ ID NO: 187920 - DNA, 25 bp, Probe sequence
gcacaatggaaagaatcgttaatat

SEQ ID NO: 187921 - DNA, 25 bp, Probe sequence
gaaagaatcgttaatatattattta

SEQ ID NO: 187922 - DNA, 25 bp, Probe sequence
gacaagcacaatggaaagaatcgtt

SEQ ID NO: 187923 - DNA, 25 bp, Probe sequence
ggaaagaatcgttaatatattattt

SEQ ID NO: 187924 - DNA, 25 bp, Probe sequence
tggaaagaatcgttaatatattatt

SEQ ID NO: 187925 - DNA, 25 bp, Probe sequence
tgtgaaaaagataagtataacccgt

SEQ ID NO: 187926 - DNA, 25 bp, Probe sequence
tgacaagcacaatggaaagaatcgt

SEQ ID NO: 187927 - DNA, 25 bp, Probe sequence
tcgtgatgacttaattaaaatgaaa

SEQ ID NO: 187928 - DNA, 25 bp, Probe sequence
taatatattatttaatcgtgatgac

SEQ ID NO: 187929 - DNA, 25 bp, Probe sequence
taatcgtgatgacttaattaaaatg

SEQ ID NO: 187930 - DNA, 25 bp, Probe sequence
tatttaatcgtgatgacttaattaa

SEQ ID NO: 187931 - DNA, 25 bp, Probe sequence
tatattatttaatcgtgatgactta

SEQ ID NO: 187932 - DNA, 25 bp, Probe sequence
tattatttaatcgtgatgacttaat

SEQ ID NO: 187933 - DNA, 25 bp, Probe sequence
ttatttaatcgtgatgacttaatta

SEQ ID NO: 187934 - DNA, 25 bp, Probe sequence
ttaatcgtgatgacttaattaaaat

SEQ ID NO: 187935 - DNA, 25 bp, Probe sequence
attctacagacaatgcaagttgggg

SEQ ID NO: 187936 - DNA, 25 bp, Probe sequence
aggtgacgaaaagtcagcatacaat

SEQ ID NO: 187937 - DNA, 25 bp, Probe sequence
agtcagcatacaataatgtgcaagt

SEQ ID NO: 187938 - DNA, 25 bp, Probe sequence
agttggcggggccccaacatagaga

SEQ ID NO: 187939 - DNA, 25 bp, Probe sequence
acagacaatgcaagttggggaacgg

SEQ ID NO: 187940 - DNA, 25 bp, Probe sequence
acagaaggtgacgaaaagtcagcat

SEQ ID NO: 187941 - DNA, 25 bp, Probe sequence
acaataatgtgcaagttggcggggc

SEQ ID NO: 187942 - DNA, 25 bp, Probe sequence
aagaaattctacagacaatgcaagt

SEQ ID NO: 187943 - DNA, 25 bp, Probe sequence
aagttggcggggccccaacatagag

SEQ ID NO: 187944 - DNA, 25 bp, Probe sequence
caagttggcggggccccaacataga

SEQ ID NO: 187945 - DNA, 25 bp, Probe sequence
aataatgtgcaagttggcggggccc

SEQ ID NO: 187946 - DNA, 25 bp, Probe sequence
aattctacagacaatgcaagttggg

SEQ ID NO: 187947 - DNA, 25 bp, Probe sequence
caataatgtgcaagttggcggggcc

SEQ ID NO: 187948 - DNA, 25 bp, Probe sequence
cagacaatgcaagttggggaacggg

SEQ ID NO: 187949 - DNA, 25 bp, Probe sequence
ccccaacacagaaggtgacgaaaag

SEQ ID NO: 187950 - DNA, 25 bp, Probe sequence
gccccaacatagagaatttcaaaaa

SEQ ID NO: 187951 - DNA, 25 bp, Probe sequence
gccccaacacagaaggtgacgaaaa

SEQ ID NO: 187952 - DNA, 25 bp, Probe sequence
gcatacaataatgtgcaagttggcg

SEQ ID NO: 187953 - DNA, 25 bp, Probe sequence
gaaggtgacgaaaagtcagcataca

SEQ ID NO: 187954 - DNA, 25 bp, Probe sequence
gaaaagtcagcatacaataatgtgc

SEQ ID NO: 187955 - DNA, 25 bp, Probe sequence
gacaatgcaagttggggaacggggc

SEQ ID NO: 187956 - DNA, 25 bp, Probe sequence
gaaattctacagacaatgcaagttg

SEQ ID NO: 187957 - DNA, 25 bp, Probe sequence
gacgaaaagtcagcatacaataatg

SEQ ID NO: 187958 - DNA, 25 bp, Probe sequence
gttggcggggccccaacatagagaa

SEQ ID NO: 187959 - DNA, 25 bp, Probe sequence
gggccccaacacagaaggtgacgaa

SEQ ID NO: 187960 - DNA, 25 bp, Probe sequence
gggccccaacatagagaatttcaaa

SEQ ID NO: 187961 - DNA, 25 bp, Probe sequence
ggggccccaacatagagaatttcaa

SEQ ID NO: 187962 - DNA, 25 bp, Probe sequence
ggccccaacacagaaggtgacgaaa

SEQ ID NO: 187963 - DNA, 25 bp, Probe sequence
ggccccaacatagagaatttcaaaa

SEQ ID NO: 187964 - DNA, 25 bp, Probe sequence
tctacagacaatgcaagttggggaa

SEQ ID NO: 187965 - DNA, 25 bp, Probe sequence
tcagcatacaataatgtgcaagttg

SEQ ID NO: 187966 - DNA, 25 bp, Probe sequence
tacagacaatgcaagttggggaacg

SEQ ID NO: 187967 - DNA, 25 bp, Probe sequence
ttctacagacaatgcaagttgggga

SEQ ID NO: 187968 - DNA, 25 bp, Probe sequence
ttggcggggccccaacatagagaat

SEQ ID NO: 187969 - DNA, 25 bp, Probe sequence
agacacaccctaatcacgttaaatg

SEQ ID NO: 187970 - DNA, 25 bp, Probe sequence
accctaatcacgttaaatgtgaata

SEQ ID NO: 187971 - DNA, 25 bp, Probe sequence
acagtttgcaaatgcagtatttata

SEQ ID NO: 187972 - DNA, 25 bp, Probe sequence
acaccctaatcacgttaaatgtgaa

SEQ ID NO: 187973 - DNA, 25 bp, Probe sequence
acacaccctaatcacgttaaatgtg

SEQ ID NO: 187974 - DNA, 25 bp, Probe sequence
aaatgcagtatttatattacataaa

SEQ ID NO: 187975 - DNA, 25 bp, Probe sequence
aaatgtgaataaagtgtgtctaaaa

SEQ ID NO: 187976 - DNA, 25 bp, Probe sequence
aacagtttgcaaatgcagtatttat

SEQ ID NO: 187977 - DNA, 25 bp, Probe sequence
aagacacaccctaatcacgttaaat

SEQ ID NO: 187978 - DNA, 25 bp, Probe sequence
aagtgtgtctaaaaaacaatacatt

SEQ ID NO: 187979 - DNA, 25 bp, Probe sequence
aatgtgaataaagtgtgtctaaaaa

SEQ ID NO: 187980 - DNA, 25 bp, Probe sequence
cacaccctaatcacgttaaatgtga

SEQ ID NO: 187981 - DNA, 25 bp, Probe sequence
caacagtttgcaaatgcagtattta

SEQ ID NO: 187982 - DNA, 25 bp, Probe sequence
caaatgcagtatttatattacataa

SEQ ID NO: 187983 - DNA, 25 bp, Probe sequence
caccctaatcacgttaaatgtgaat

SEQ ID NO: 187984 - DNA, 25 bp, Probe sequence
cagtttgcaaatgcagtatttatat

SEQ ID NO: 187985 - DNA, 25 bp, Probe sequence
ccctaatcacgttaaatgtgaataa

SEQ ID NO: 187986 - DNA, 25 bp, Probe sequence
gcaaatgcagtatttatattacata

SEQ ID NO: 187987 - DNA, 25 bp, Probe sequence
gcaacagtttgcaaatgcagtattt

SEQ ID NO: 187988 - DNA, 25 bp, Probe sequence
gacacaccctaatcacgttaaatgt

SEQ ID NO: 187989 - DNA, 25 bp, Probe sequence
gttaaatgtgaataaagtgtgtcta

SEQ ID NO: 187990 - DNA, 25 bp, Probe sequence
gtttgcaaatgcagtatttatatta

SEQ ID NO: 187991 - DNA, 25 bp, Probe sequence
gtgcaacagtttgcaaatgcagtat

SEQ ID NO: 187992 - DNA, 25 bp, Probe sequence
gtgtgtctaaaaaacaatacattgc

SEQ ID NO: 187993 - DNA, 25 bp, Probe sequence
gtgtctaaaaaacaatacattgcaa

SEQ ID NO: 187994 - DNA, 25 bp, Probe sequence
tgtgaataaagtgtgtctaaaaaac

SEQ ID NO: 187995 - DNA, 25 bp, Probe sequence
tgcaacagtttgcaaatgcagtatt

SEQ ID NO: 187996 - DNA, 25 bp, Probe sequence
tgcaaatgcagtatttatattacat

SEQ ID NO: 187997 - DNA, 25 bp, Probe sequence
taaaaagacacaccctaatcacgtt

SEQ ID NO: 187998 - DNA, 25 bp, Probe sequence
taaatgtgaataaagtgtgtctaaa

SEQ ID NO: 187999 - DNA, 25 bp, Probe sequence
ttaaaaagacacaccctaatcacgt

SEQ ID NO: 188000 - DNA, 25 bp, Probe sequence
tttaaaaagacacaccctaatcacg

SEQ ID NO: 188001 - DNA, 25 bp, Probe sequence
tttgcaaatgcagtatttatattac

SEQ ID NO: 188002 - DNA, 25 bp, Probe sequence
ttgcaaatgcagtatttatattaca

SEQ ID NO: 188003 - DNA, 25 bp, Probe sequence
gttggaattccgttacaggcttggg

SEQ ID NO: 188004 - DNA, 25 bp, Probe sequence
atgagtaaagcataccggttataca

SEQ ID NO: 188005 - DNA, 25 bp, Probe sequence
atggctcatgctgttggttgttttt

SEQ ID NO: 188006 - DNA, 25 bp, Probe sequence
aggtgtgtctgtcatgggcaacact

SEQ ID NO: 188007 - DNA, 25 bp, Probe sequence
accggttatacaacaacatacaaga

SEQ ID NO: 188008 - DNA, 25 bp, Probe sequence
acgaaacaaccaatggctcatgctg

SEQ ID NO: 188009 - DNA, 25 bp, Probe sequence
aaagcataccggttatacaacaaca

SEQ ID NO: 188010 - DNA, 25 bp, Probe sequence
aacaaccaatggctcatgctgttgg

SEQ ID NO: 188011 - DNA, 25 bp, Probe sequence
aatggctcatgctgttggttgtttt

SEQ ID NO: 188012 - DNA, 25 bp, Probe sequence
catgggcaacactttgacgttggaa

SEQ ID NO: 188013 - DNA, 25 bp, Probe sequence
catgctgttggttgtttttttaggt

SEQ ID NO: 188014 - DNA, 25 bp, Probe sequence
ctttgacgttggaattccgttacag

SEQ ID NO: 188015 - DNA, 25 bp, Probe sequence
gtcatgggcaacactttgacgttgg

SEQ ID NO: 188016 - DNA, 25 bp, Probe sequence
gctgttggttgtttttttaggtgtg

SEQ ID NO: 188017 - DNA, 25 bp, Probe sequence
gctcatgctgttggttgttttttta

SEQ ID NO: 188018 - DNA, 25 bp, Probe sequence
gcataccggttatacaacaacatac

SEQ ID NO: 188019 - DNA, 25 bp, Probe sequence
gaaacaaccaatggctcatgctgtt

SEQ ID NO: 188020 - DNA, 25 bp, Probe sequence
gacacgaaacaaccaatggctcatg

SEQ ID NO: 188021 - DNA, 25 bp, Probe sequence
gacgttggaattccgttacaggctt

SEQ ID NO: 188022 - DNA, 25 bp, Probe sequence
gagtaaagcataccggttatacaac

SEQ ID NO: 188023 - DNA, 25 bp, Probe sequence
gatgacacgaaacaaccaatggctc

SEQ ID NO: 188024 - DNA, 25 bp, Probe sequence
gttgtttttttaggtgtgtctgtca

SEQ ID NO: 188025 - DNA, 25 bp, Probe sequence
gtttttttaggtgtgtctgtcatgg

SEQ ID NO: 188026 - DNA, 25 bp, Probe sequence
gtctgtcatgggcaacactttgacg

SEQ ID NO: 188027 - DNA, 25 bp, Probe sequence
gtgtgtctgtcatgggcaacacttt

SEQ ID NO: 188028 - DNA, 25 bp, Probe sequence
gtgtctgtcatgggcaacactttga

SEQ ID NO: 188029 - DNA, 25 bp, Probe sequence
ggcaacactttgacgttggaattcc

SEQ ID NO: 188030 - DNA, 25 bp, Probe sequence
tggaattccgttacaggcttgggag

SEQ ID NO: 188031 - DNA, 25 bp, Probe sequence
ggctcatgctgttggttgttttttt

SEQ ID NO: 188032 - DNA, 25 bp, Probe sequence
tacaacaacatacaagatgacacga

SEQ ID NO: 188033 - DNA, 25 bp, Probe sequence
tttaggtgtgtctgtcatgggcaac

SEQ ID NO: 188034 - DNA, 25 bp, Probe sequence
tttttaggtgtgtctgtcatgggca

SEQ ID NO: 188035 - DNA, 25 bp, Probe sequence
ttaggtgtgtctgtcatgggcaaca

SEQ ID NO: 188036 - DNA, 25 bp, Probe sequence
ttggttgtttttttaggtgtgtctg

SEQ ID NO: 188037 - DNA, 25 bp, Probe sequence
atatgcgacaattatacgcttatta

SEQ ID NO: 188038 - DNA, 25 bp, Probe sequence
atagtcaaatgcattttttgtaaga

SEQ ID NO: 188039 - DNA, 25 bp, Probe sequence
ataataatagtcaaatgcatttttt

SEQ ID NO: 188040 - DNA, 25 bp, Probe sequence
ataatatgcgacaattatacgctta

SEQ ID NO: 188041 - DNA, 25 bp, Probe sequence
ataatagtcaaatgcattttttgta

SEQ ID NO: 188042 - DNA, 25 bp, Probe sequence
atgcgacaattatacgcttattata

SEQ ID NO: 188043 - DNA, 25 bp, Probe sequence
atgcattttttgtaagaacgcaaaa

SEQ ID NO: 188044 - DNA, 25 bp, Probe sequence
agtcaaatgcattttttgtaagaac

SEQ ID NO: 188045 - DNA, 25 bp, Probe sequence
agaacgcaaaagcatttgtaaaatt

SEQ ID NO: 188046 - DNA, 25 bp, Probe sequence
acaaaatggaagtgatgactatgag

SEQ ID NO: 188047 - DNA, 25 bp, Probe sequence
aaatgcattttttgtaagaacgcaa

SEQ ID NO: 188048 - DNA, 25 bp, Probe sequence
aaaacaaaatggaagtgatgactat

SEQ ID NO: 188049 - DNA, 25 bp, Probe sequence
aagaacgcaaaagcatttgtaaaat

SEQ ID NO: 188050 - DNA, 25 bp, Probe sequence
aatgcattttttgtaagaacgcaaa

SEQ ID NO: 188051 - DNA, 25 bp, Probe sequence
aataatatgcgacaattatacgctt

SEQ ID NO: 188052 - DNA, 25 bp, Probe sequence
aataatagtcaaatgcattttttgt

SEQ ID NO: 188053 - DNA, 25 bp, Probe sequence
aatagtcaaatgcattttttgtaag

SEQ ID NO: 188054 - DNA, 25 bp, Probe sequence
aatatgcgacaattatacgcttatt

SEQ ID NO: 188055 - DNA, 25 bp, Probe sequence
caaatgcattttttgtaagaacgca

SEQ ID NO: 188056 - DNA, 25 bp, Probe sequence
gcgacaattatacgcttattataat

SEQ ID NO: 188057 - DNA, 25 bp, Probe sequence
gcattttttgtaagaacgcaaaagc

SEQ ID NO: 188058 - DNA, 25 bp, Probe sequence
gaacgcaaaagcatttgtaaaatta

SEQ ID NO: 188059 - DNA, 25 bp, Probe sequence
gacaattatacgcttattataataa

SEQ ID NO: 188060 - DNA, 25 bp, Probe sequence
gtaagaacgcaaaagcatttgtaaa

SEQ ID NO: 188061 - DNA, 25 bp, Probe sequence
gtcaaatgcattttttgtaagaacg

SEQ ID NO: 188062 - DNA, 25 bp, Probe sequence
tgcgacaattatacgcttattataa

SEQ ID NO: 188063 - DNA, 25 bp, Probe sequence
tcaaatgcattttttgtaagaacgc

SEQ ID NO: 188064 - DNA, 25 bp, Probe sequence
taatatgcgacaattatacgcttat

SEQ ID NO: 188065 - DNA, 25 bp, Probe sequence
taatagtcaaatgcattttttgtaa

SEQ ID NO: 188066 - DNA, 25 bp, Probe sequence
taagaacgcaaaagcatttgtaaaa

SEQ ID NO: 188067 - DNA, 25 bp, Probe sequence
tagtcaaatgcattttttgtaagaa

SEQ ID NO: 188068 - DNA, 25 bp, Probe sequence
tatgcgacaattatacgcttattat

SEQ ID NO: 188069 - DNA, 25 bp, Probe sequence
ttaggatatataatacaatgtgtat

SEQ ID NO: 188070 - DNA, 25 bp, Probe sequence
ttgtaagaacgcaaaagcatttgta

SEQ ID NO: 188071 - DNA, 25 bp, Probe sequence
attttaatcgctattgttaatttct

SEQ ID NO: 188072 - DNA, 25 bp, Probe sequence
atatttgtgcgtttttattgttgga

SEQ ID NO: 188073 - DNA, 25 bp, Probe sequence
atacagctgcctcaataaaaatatt

SEQ ID NO: 188074 - DNA, 25 bp, Probe sequence
atcgctattgttaatttctgtaatg

SEQ ID NO: 188075 - DNA, 25 bp, Probe sequence
atgcacagatatttttacaatgaga

SEQ ID NO: 188076 - DNA, 25 bp, Probe sequence
atgagaagcgatacagctgcctcaa

SEQ ID NO: 188077 - DNA, 25 bp, Probe sequence
agaagcgatacagctgcctcaataa

SEQ ID NO: 188078 - DNA, 25 bp, Probe sequence
agcgatacagctgcctcaataaaaa

SEQ ID NO: 188079 - DNA, 25 bp, Probe sequence
aagcgatacagctgcctcaataaaa

SEQ ID NO: 188080 - DNA, 25 bp, Probe sequence
aatgagaagcgatacagctgcctca

SEQ ID NO: 188081 - DNA, 25 bp, Probe sequence
aatcgctattgttaatttctgtaat

SEQ ID NO: 188082 - DNA, 25 bp, Probe sequence
caatgagaagcgatacagctgcctc

SEQ ID NO: 188083 - DNA, 25 bp, Probe sequence
cagctgcctcaataaaaatatttgt

SEQ ID NO: 188084 - DNA, 25 bp, Probe sequence
cgatacagctgcctcaataaaaata

SEQ ID NO: 188085 - DNA, 25 bp, Probe sequence
cgctattgttaatttctgtaatgta

SEQ ID NO: 188086 - DNA, 25 bp, Probe sequence
gcgatacagctgcctcaataaaaat

SEQ ID NO: 188087 - DNA, 25 bp, Probe sequence
gctgcctcaataaaaatatttgtgc

SEQ ID NO: 188088 - DNA, 25 bp, Probe sequence
gctattgttaatttctgtaatgtaa

SEQ ID NO: 188089 - DNA, 25 bp, Probe sequence
gcacagatatttttacaatgagaag

SEQ ID NO: 188090 - DNA, 25 bp, Probe sequence
gaagcgatacagctgcctcaataaa

SEQ ID NO: 188091 - DNA, 25 bp, Probe sequence
gagaagcgatacagctgcctcaata

SEQ ID NO: 188092 - DNA, 25 bp, Probe sequence
gatacagctgcctcaataaaaatat

SEQ ID NO: 188093 - DNA, 25 bp, Probe sequence
gttaatttctgtaatgtaaaacaag

SEQ ID NO: 188094 - DNA, 25 bp, Probe sequence
tgtgcgtttttattgttggaaaata

SEQ ID NO: 188095 - DNA, 25 bp, Probe sequence
tgagaagcgatacagctgcctcaat

SEQ ID NO: 188096 - DNA, 25 bp, Probe sequence
tcgctattgttaatttctgtaatgt

SEQ ID NO: 188097 - DNA, 25 bp, Probe sequence
taatcgctattgttaatttctgtaa

SEQ ID NO: 188098 - DNA, 25 bp, Probe sequence
taaaattttaatcgctattgttaat

SEQ ID NO: 188099 - DNA, 25 bp, Probe sequence
tacagctgcctcaataaaaatattt

SEQ ID NO: 188100 - DNA, 25 bp, Probe sequence
tatttgtgcgtttttattgttggaa

SEQ ID NO: 188101 - DNA, 25 bp, Probe sequence
tattgttaatttctgtaatgtaaaa

SEQ ID NO: 188102 - DNA, 25 bp, Probe sequence
tttaatcgctattgttaatttctgt

SEQ ID NO: 188103 - DNA, 25 bp, Probe sequence
ttaatcgctattgttaatttctgta

SEQ ID NO: 188104 - DNA, 25 bp, Probe sequence
ttgtgcgtttttattgttggaaaat

SEQ ID NO: 188105 - DNA, 25 bp, Probe sequence
attacacatatattacactaggttt

SEQ ID NO: 188106 - DNA, 25 bp, Probe sequence
atatattacactaggtttattgaaa

SEQ ID NO: 188107 - DNA, 25 bp, Probe sequence
atatgtcgtggtatttatattttta

SEQ ID NO: 188108 - DNA, 25 bp, Probe sequence
atcttttagaattacacatatatta

SEQ ID NO: 188109 - DNA, 25 bp, Probe sequence
atgttaaagcaatatgtcgtggtat

SEQ ID NO: 188110 - DNA, 25 bp, Probe sequence
agaagaatcttttagaattacacat

SEQ ID NO: 188111 - DNA, 25 bp, Probe sequence
agaattacacatatattacactagg

SEQ ID NO: 188112 - DNA, 25 bp, Probe sequence
agcaatatgtcgtggtatttatatt

SEQ ID NO: 188113 - DNA, 25 bp, Probe sequence
acatatattacactaggtttattga

SEQ ID NO: 188114 - DNA, 25 bp, Probe sequence
acacatatattacactaggtttatt

SEQ ID NO: 188115 - DNA, 25 bp, Probe sequence
aaatgttaaagcaatatgtcgtggt

SEQ ID NO: 188116 - DNA, 25 bp, Probe sequence
aaagcaatatgtcgtggtatttata

SEQ ID NO: 188117 - DNA, 25 bp, Probe sequence
aagcaatatgtcgtggtatttatat

SEQ ID NO: 188118 - DNA, 25 bp, Probe sequence
aagaatcttttagaattacacatat

SEQ ID NO: 188119 - DNA, 25 bp, Probe sequence
aatgttaaagcaatatgtcgtggta

SEQ ID NO: 188120 - DNA, 25 bp, Probe sequence
aatcttttagaattacacatatatt

SEQ ID NO: 188121 - DNA, 25 bp, Probe sequence
aattacacatatattacactaggtt

SEQ ID NO: 188122 - DNA, 25 bp, Probe sequence
cacatatattacactaggtttattg

SEQ ID NO: 188123 - DNA, 25 bp, Probe sequence
catatattacactaggtttattgaa

SEQ ID NO: 188124 - DNA, 25 bp, Probe sequence
gcaatatgtcgtggtatttatattt

SEQ ID NO: 188125 - DNA, 25 bp, Probe sequence
gaattacacatatattacactaggt

SEQ ID NO: 188126 - DNA, 25 bp, Probe sequence
gaatcttttagaattacacatatat

SEQ ID NO: 188127 - DNA, 25 bp, Probe sequence
gaagaatcttttagaattacacata

SEQ ID NO: 188128 - DNA, 25 bp, Probe sequence
gaaaatgttaaagcaatatgtcgtg

SEQ ID NO: 188129 - DNA, 25 bp, Probe sequence
gttaaagcaatatgtcgtggtattt

SEQ ID NO: 188130 - DNA, 25 bp, Probe sequence
tgtcgtggtatttatatttttaaag

SEQ ID NO: 188131 - DNA, 25 bp, Probe sequence
taaagcaatatgtcgtggtatttat

SEQ ID NO: 188132 - DNA, 25 bp, Probe sequence
tacacatatattacactaggtttat

SEQ ID NO: 188133 - DNA, 25 bp, Probe sequence
tagaattacacatatattacactag

SEQ ID NO: 188134 - DNA, 25 bp, Probe sequence
tatgtcgtggtatttatatttttaa

SEQ ID NO: 188135 - DNA, 25 bp, Probe sequence
tatattacactaggtttattgaaaa

SEQ ID NO: 188136 - DNA, 25 bp, Probe sequence
ttagaattacacatatattacacta

SEQ ID NO: 188137 - DNA, 25 bp, Probe sequence
ttacacatatattacactaggttta

SEQ ID NO: 188138 - DNA, 25 bp, Probe sequence
ttaaagcaatatgtcgtggtattta

SEQ ID NO: 188139 - DNA, 25 bp, Probe sequence
attaatcggatcattatttagaatt

SEQ ID NO: 188140 - DNA, 25 bp, Probe sequence
atcggatcattatttagaattctaa

SEQ ID NO: 188141 - DNA, 25 bp, Probe sequence
atgactgcagacttctttcaattaa

SEQ ID NO: 188142 - DNA, 25 bp, Probe sequence
agacttctttcaattaatcggatca

SEQ ID NO: 188143 - DNA, 25 bp, Probe sequence
actgcagacttctttcaattaatcg

SEQ ID NO: 188144 - DNA, 25 bp, Probe sequence
acttctttcaattaatcggatcatt

SEQ ID NO: 188145 - DNA, 25 bp, Probe sequence
aatcggatcattatttagaattcta

SEQ ID NO: 188146 - DNA, 25 bp, Probe sequence
aattaatcggatcattatttagaat

SEQ ID NO: 188147 - DNA, 25 bp, Probe sequence
caattaatcggatcattatttagaa

SEQ ID NO: 188148 - DNA, 25 bp, Probe sequence
cagacttctttcaattaatcggatc

SEQ ID NO: 188149 - DNA, 25 bp, Probe sequence
cttctttcaattaatcggatcatta

SEQ ID NO: 188150 - DNA, 25 bp, Probe sequence
ctttcaattaatcggatcattattt

SEQ ID NO: 188151 - DNA, 25 bp, Probe sequence
ctgcagacttctttcaattaatcgg

SEQ ID NO: 188152 - DNA, 25 bp, Probe sequence
cggatcattatttagaattctaaaa

SEQ ID NO: 188153 - DNA, 25 bp, Probe sequence
gcagacttctttcaattaatcggat

SEQ ID NO: 188154 - DNA, 25 bp, Probe sequence
gacttctttcaattaatcggatcat

SEQ ID NO: 188155 - DNA, 25 bp, Probe sequence
gactgcagacttctttcaattaatc

SEQ ID NO: 188156 - DNA, 25 bp, Probe sequence
tgactgcagacttctttcaattaat

SEQ ID NO: 188157 - DNA, 25 bp, Probe sequence
tgcagacttctttcaattaatcgga

SEQ ID NO: 188158 - DNA, 25 bp, Probe sequence
tcggatcattatttagaattctaaa

SEQ ID NO: 188159 - DNA, 25 bp, Probe sequence
tctttcaattaatcggatcattatt

SEQ ID NO: 188160 - DNA, 25 bp, Probe sequence
tcaattaatcggatcattatttaga

SEQ ID NO: 188161 - DNA, 25 bp, Probe sequence
taatcggatcattatttagaattct

SEQ ID NO: 188162 - DNA, 25 bp, Probe sequence
tttcaattaatcggatcattattta

SEQ ID NO: 188163 - DNA, 25 bp, Probe sequence
ttaatcggatcattatttagaattc

SEQ ID NO: 188164 - DNA, 25 bp, Probe sequence
ttcaattaatcggatcattatttag

SEQ ID NO: 188165 - DNA, 25 bp, Probe sequence
ttctttcaattaatcggatcattat

SEQ ID NO: 188166 - DNA, 25 bp, Probe sequence
attattttatgttgtcttttgacga

SEQ ID NO: 188167 - DNA, 25 bp, Probe sequence
ataggatcaattgtagctttaggtg

SEQ ID NO: 188168 - DNA, 25 bp, Probe sequence
atagtatcaagtagtctttctgaag

SEQ ID NO: 188169 - DNA, 25 bp, Probe sequence
atagtgttatttttcctggaaccat

SEQ ID NO: 188170 - DNA, 25 bp, Probe sequence
atgagtgttattgtttttggttatt

SEQ ID NO: 188171 - DNA, 25 bp, Probe sequence
aggagtaggatctgctgcattccct

SEQ ID NO: 188172 - DNA, 25 bp, Probe sequence
agtaatattcttgtagccatggcta

SEQ ID NO: 188173 - DNA, 25 bp, Probe sequence
agctggttttatatcaatggtgcct

SEQ ID NO: 188174 - DNA, 25 bp, Probe sequence
actgcatatatgttaactttttcga

SEQ ID NO: 188175 - DNA, 25 bp, Probe sequence
aaatgtttctttacctgatattgca

SEQ ID NO: 188176 - DNA, 25 bp, Probe sequence
aatcattttaatactactcctggaa

SEQ ID NO: 188177 - DNA, 25 bp, Probe sequence
aacattccgtttatgcttggtttgt

SEQ ID NO: 188178 - DNA, 25 bp, Probe sequence
caatagtaactataccttttcttat

SEQ ID NO: 188179 - DNA, 25 bp, Probe sequence
caaactgggtaaacactgcatatat

SEQ ID NO: 188180 - DNA, 25 bp, Probe sequence
catatttcaagagtttctaaccctt

SEQ ID NO: 188181 - DNA, 25 bp, Probe sequence
ctactcctggaattacaaactgggt

SEQ ID NO: 188182 - DNA, 25 bp, Probe sequence
ctgcattcccttcactgattatggt

SEQ ID NO: 188183 - DNA, 25 bp, Probe sequence
gcgttttattttggctttgtattct

SEQ ID NO: 188184 - DNA, 25 bp, Probe sequence
gcacattatattcattggtcttacc

SEQ ID NO: 188185 - DNA, 25 bp, Probe sequence
gaagttgcttctggaatgagtttgc

SEQ ID NO: 188186 - DNA, 25 bp, Probe sequence
gttatgggcggattatcttttacta

SEQ ID NO: 188187 - DNA, 25 bp, Probe sequence
gtttgagctgtcttggttcattgat

SEQ ID NO: 188188 - DNA, 25 bp, Probe sequence
gtagccatggctatccttattattt

SEQ ID NO: 188189 - DNA, 25 bp, Probe sequence
gtggttgactacttttatgtttata

SEQ ID NO: 188190 - DNA, 25 bp, Probe sequence
ggttcattgattgcttttattggtc

SEQ ID NO: 188191 - DNA, 25 bp, Probe sequence
ggcaaagcctttggttttataggat

SEQ ID NO: 188192 - DNA, 25 bp, Probe sequence
ggctttgtattctttcattttttag

SEQ ID NO: 188193 - DNA, 25 bp, Probe sequence
tggacttttttaatactcttcacaa

SEQ ID NO: 188194 - DNA, 25 bp, Probe sequence
tcttacctacttatacttcctatga

SEQ ID NO: 188195 - DNA, 25 bp, Probe sequence
tatgcttggtttgttttctggtggg

SEQ ID NO: 188196 - DNA, 25 bp, Probe sequence
tattggtcacaatcacttttttatt

SEQ ID NO: 188197 - DNA, 25 bp, Probe sequence
ttaggatcattgtctatctctataa

SEQ ID NO: 188198 - DNA, 25 bp, Probe sequence
ttaatactcttcacaatcttttttg

SEQ ID NO: 188199 - DNA, 25 bp, Probe sequence
ttctggtgggctaatattttctata

SEQ ID NO: 188200 - DNA, 25 bp, Probe sequence
attgccttaaattctctatctatgc

SEQ ID NO: 188201 - DNA, 25 bp, Probe sequence
attctctatctatgccaaaattccc

SEQ ID NO: 188202 - DNA, 25 bp, Probe sequence
attccatacttatattgactctata

SEQ ID NO: 188203 - DNA, 25 bp, Probe sequence
attcccattagttgacgcatttgac

SEQ ID NO: 188204 - DNA, 25 bp, Probe sequence
atacctaacatattccatacttata

SEQ ID NO: 188205 - DNA, 25 bp, Probe sequence
atctatgccaaaattcccattagtt

SEQ ID NO: 188206 - DNA, 25 bp, Probe sequence
acctaacatattccatacttatatt

SEQ ID NO: 188207 - DNA, 25 bp, Probe sequence
acatattccatacttatattgactc

SEQ ID NO: 188208 - DNA, 25 bp, Probe sequence
aattcccattagttgacgcatttga

SEQ ID NO: 188209 - DNA, 25 bp, Probe sequence
caaaattcccattagttgacgcatt

SEQ ID NO: 188210 - DNA, 25 bp, Probe sequence
ctgtttgatgcctttttaattgcct

SEQ ID NO: 188211 - DNA, 25 bp, Probe sequence
ctatctatgccaaaattcccattag

SEQ ID NO: 188212 - DNA, 25 bp, Probe sequence
ctctatctatgccaaaattcccatt

SEQ ID NO: 188213 - DNA, 25 bp, Probe sequence
cgcatttgactatatacctaacata

SEQ ID NO: 188214 - DNA, 25 bp, Probe sequence
cccattagttgacgcatttgactat

SEQ ID NO: 188215 - DNA, 25 bp, Probe sequence
ccttaaattctctatctatgccaaa

SEQ ID NO: 188216 - DNA, 25 bp, Probe sequence
ccatacttatattgactctataaac

SEQ ID NO: 188217 - DNA, 25 bp, Probe sequence
gccaaaattcccattagttgacgca

SEQ ID NO: 188218 - DNA, 25 bp, Probe sequence
gccttaaattctctatctatgccaa

SEQ ID NO: 188219 - DNA, 25 bp, Probe sequence
gactatatacctaacatattccata

SEQ ID NO: 188220 - DNA, 25 bp, Probe sequence
gacgcatttgactatatacctaaca

SEQ ID NO: 188221 - DNA, 25 bp, Probe sequence
gatgcctttttaattgccttaaatt

SEQ ID NO: 188222 - DNA, 25 bp, Probe sequence
gttgacgcatttgactatataccta

SEQ ID NO: 188223 - DNA, 25 bp, Probe sequence
gtttgatgcctttttaattgcctta

SEQ ID NO: 188224 - DNA, 25 bp, Probe sequence
tgacgcatttgactatatacctaac

SEQ ID NO: 188225 - DNA, 25 bp, Probe sequence
tgccttaaattctctatctatgcca

SEQ ID NO: 188226 - DNA, 25 bp, Probe sequence
tatgccaaaattcccattagttgac

SEQ ID NO: 188227 - DNA, 25 bp, Probe sequence
tatacctaacatattccatacttat

SEQ ID NO: 188228 - DNA, 25 bp, Probe sequence
tattccatacttatattgactctat

SEQ ID NO: 188229 - DNA, 25 bp, Probe sequence
tttgatgcctttttaattgccttaa

SEQ ID NO: 188230 - DNA, 25 bp, Probe sequence
ttgccttaaattctctatctatgcc

SEQ ID NO: 188231 - DNA, 25 bp, Probe sequence
ttaaattctctatctatgccaaaat

SEQ ID NO: 188232 - DNA, 25 bp, Probe sequence
ttctctatctatgccaaaattccca

SEQ ID NO: 188233 - DNA, 25 bp, Probe sequence
ttcccattagttgacgcatttgact

SEQ ID NO: 188234 - DNA, 25 bp, Probe sequence
atatagatggattagacgcactgtt

SEQ ID NO: 188235 - DNA, 25 bp, Probe sequence
atatacagacacgaaacgtcatatt

SEQ ID NO: 188236 - DNA, 25 bp, Probe sequence
atatcgaagaggtcaattgatgaat

SEQ ID NO: 188237 - DNA, 25 bp, Probe sequence
atagatggattagacgcactgttaa

SEQ ID NO: 188238 - DNA, 25 bp, Probe sequence
atacagacacgaaacgtcatattat

SEQ ID NO: 188239 - DNA, 25 bp, Probe sequence
atacaaggatatacagacacgaaac

SEQ ID NO: 188240 - DNA, 25 bp, Probe sequence
atggattagacgcactgttaaacca

SEQ ID NO: 188241 - DNA, 25 bp, Probe sequence
aggtcaattgatgaatatagatgga

SEQ ID NO: 188242 - DNA, 25 bp, Probe sequence
agatggattagacgcactgttaaac

SEQ ID NO: 188243 - DNA, 25 bp, Probe sequence
agacgcactgttaaaccaatttcac

SEQ ID NO: 188244 - DNA, 25 bp, Probe sequence
acgcactgttaaaccaatttcacga

SEQ ID NO: 188245 - DNA, 25 bp, Probe sequence
acaaggatatacagacacgaaacgt

SEQ ID NO: 188246 - DNA, 25 bp, Probe sequence
aatttcacgatatgaaaaccaacat

SEQ ID NO: 188247 - DNA, 25 bp, Probe sequence
cacgaaacgtcatattatatcgaag

SEQ ID NO: 188248 - DNA, 25 bp, Probe sequence
cactgttaaaccaatttcacgatat

SEQ ID NO: 188249 - DNA, 25 bp, Probe sequence
cagacacgaaacgtcatattatatc

SEQ ID NO: 188250 - DNA, 25 bp, Probe sequence
ctgttaaaccaatttcacgatatga

SEQ ID NO: 188251 - DNA, 25 bp, Probe sequence
cgtcatattatatcgaagaggtcaa

SEQ ID NO: 188252 - DNA, 25 bp, Probe sequence
cgcactgttaaaccaatttcacgat

SEQ ID NO: 188253 - DNA, 25 bp, Probe sequence
gcactgttaaaccaatttcacgata

SEQ ID NO: 188254 - DNA, 25 bp, Probe sequence
gaagaggtcaattgatgaatataga

SEQ ID NO: 188255 - DNA, 25 bp, Probe sequence
gaaacgtcatattatatcgaagagg

SEQ ID NO: 188256 - DNA, 25 bp, Probe sequence
gacacgaaacgtcatattatatcga

SEQ ID NO: 188257 - DNA, 25 bp, Probe sequence
gacgcactgttaaaccaatttcacg

SEQ ID NO: 188258 - DNA, 25 bp, Probe sequence
gatggattagacgcactgttaaacc

SEQ ID NO: 188259 - DNA, 25 bp, Probe sequence
gattagacgcactgttaaaccaatt

SEQ ID NO: 188260 - DNA, 25 bp, Probe sequence
ggatatacagacacgaaacgtcata

SEQ ID NO: 188261 - DNA, 25 bp, Probe sequence
ggattagacgcactgttaaaccaat

SEQ ID NO: 188262 - DNA, 25 bp, Probe sequence
tggattagacgcactgttaaaccaa

SEQ ID NO: 188263 - DNA, 25 bp, Probe sequence
tgttaaaccaatttcacgatatgaa

SEQ ID NO: 188264 - DNA, 25 bp, Probe sequence
tagacgcactgttaaaccaatttca

SEQ ID NO: 188265 - DNA, 25 bp, Probe sequence
tatagatggattagacgcactgtta

SEQ ID NO: 188266 - DNA, 25 bp, Probe sequence
ttagacgcactgttaaaccaatttc

SEQ ID NO: 188267 - DNA, 25 bp, Probe sequence
ttgatacaaggatatacagacacga

SEQ ID NO: 188268 - DNA, 25 bp, Probe sequence
atttctgatagaactgctcatagaa

SEQ ID NO: 188269 - DNA, 25 bp, Probe sequence
atacgaagaggtaaaatccttgagt

SEQ ID NO: 188270 - DNA, 25 bp, Probe sequence
ataatgacaccgtggattccaacag

SEQ ID NO: 188271 - DNA, 25 bp, Probe sequence
atcgaaaacagaaatggcagtaact

SEQ ID NO: 188272 - DNA, 25 bp, Probe sequence
atggcagtaactaattatctttgta

SEQ ID NO: 188273 - DNA, 25 bp, Probe sequence
agtgaaataatgacaccgtggattc

SEQ ID NO: 188274 - DNA, 25 bp, Probe sequence
agaactgctcatagaatcaaaagaa

SEQ ID NO: 188275 - DNA, 25 bp, Probe sequence
acggattaaaattatcaacagttcg

SEQ ID NO: 188276 - DNA, 25 bp, Probe sequence
acacatttctgatagaactgctcat

SEQ ID NO: 188277 - DNA, 25 bp, Probe sequence
aatccttgagtttaagagcgctatt

SEQ ID NO: 188278 - DNA, 25 bp, Probe sequence
aattatcaacagttcgaaagttaga

SEQ ID NO: 188279 - DNA, 25 bp, Probe sequence
ctaattatctttgtagtatacgaag

SEQ ID NO: 188280 - DNA, 25 bp, Probe sequence
ccaacagatacaaatataggcgggg

SEQ ID NO: 188281 - DNA, 25 bp, Probe sequence
ccgtggattccaacagatacaaata

SEQ ID NO: 188282 - DNA, 25 bp, Probe sequence
gcaggaaagaacgcgaattcattca

SEQ ID NO: 188283 - DNA, 25 bp, Probe sequence
gaattcattcaagagtattatttta

SEQ ID NO: 188284 - DNA, 25 bp, Probe sequence
gaacgcgaattcattcaagagtatt

SEQ ID NO: 188285 - DNA, 25 bp, Probe sequence
gaacgtataatcaacacatcaagca

SEQ ID NO: 188286 - DNA, 25 bp, Probe sequence
gaaaaatcatatctagattggcgga

SEQ ID NO: 188287 - DNA, 25 bp, Probe sequence
gacaccgtggattccaacagataca

SEQ ID NO: 188288 - DNA, 25 bp, Probe sequence
gagttgtgtgattatcctaattatc

SEQ ID NO: 188289 - DNA, 25 bp, Probe sequence
gagtttaagagcgctattgaacgta

SEQ ID NO: 188290 - DNA, 25 bp, Probe sequence
gagtttgtaccgtctaatacatcga

SEQ ID NO: 188291 - DNA, 25 bp, Probe sequence
gatgagttgtgtgattatcctaatt

SEQ ID NO: 188292 - DNA, 25 bp, Probe sequence
gattatcctaattatcataaacaac

SEQ ID NO: 188293 - DNA, 25 bp, Probe sequence
gattggcggaagagttaggggaaga

SEQ ID NO: 188294 - DNA, 25 bp, Probe sequence
gttgacatacacatttctgatagaa

SEQ ID NO: 188295 - DNA, 25 bp, Probe sequence
gtttgtgttgacatacacatttctg

SEQ ID NO: 188296 - DNA, 25 bp, Probe sequence
gtaccgtctaatacatcgaaaacag

SEQ ID NO: 188297 - DNA, 25 bp, Probe sequence
ggggagtttgtaccgtctaatacat

SEQ ID NO: 188298 - DNA, 25 bp, Probe sequence
ggaattagtgaaagtttgtgttgac

SEQ ID NO: 188299 - DNA, 25 bp, Probe sequence
tataggcggggagtttgtaccgtct

SEQ ID NO: 188300 - DNA, 25 bp, Probe sequence
taatcaacacatcaagcaggaaaga

SEQ ID NO: 188301 - DNA, 25 bp, Probe sequence
taagagcgctattgaacgtataatc

SEQ ID NO: 188302 - DNA, 25 bp, Probe sequence
attagtcttaatcgttatagtagat

SEQ ID NO: 188303 - DNA, 25 bp, Probe sequence
attagatttatttacatgcagaatt

SEQ ID NO: 188304 - DNA, 25 bp, Probe sequence
atcattacattagttccaatacttg

SEQ ID NO: 188305 - DNA, 25 bp, Probe sequence
atgttggctacattgagtgttgtac

SEQ ID NO: 188306 - DNA, 25 bp, Probe sequence
agttacatcattacattagttccaa

SEQ ID NO: 188307 - DNA, 25 bp, Probe sequence
acttaacagatatatggttttgtac

SEQ ID NO: 188308 - DNA, 25 bp, Probe sequence
acattgagtgttgtactaatacttt

SEQ ID NO: 188309 - DNA, 25 bp, Probe sequence
acattagttccaatacttgtattca

SEQ ID NO: 188310 - DNA, 25 bp, Probe sequence
acatcattacattagttccaatact

SEQ ID NO: 188311 - DNA, 25 bp, Probe sequence
aaatatgttggctacattgagtgtt

SEQ ID NO: 188312 - DNA, 25 bp, Probe sequence
aacttagaatcattcaaaggagtga

SEQ ID NO: 188313 - DNA, 25 bp, Probe sequence
aatacttgtattcatagtaatattt

SEQ ID NO: 188314 - DNA, 25 bp, Probe sequence
cagatatatggttttgtacaaagaa

SEQ ID NO: 188315 - DNA, 25 bp, Probe sequence
gcagaattggaatgttattagtctt

SEQ ID NO: 188316 - DNA, 25 bp, Probe sequence
gaattggaatgttattagtcttaat

SEQ ID NO: 188317 - DNA, 25 bp, Probe sequence
gagttacatcattacattagttcca

SEQ ID NO: 188318 - DNA, 25 bp, Probe sequence
gagtgttgtactaatacttttattc

SEQ ID NO: 188319 - DNA, 25 bp, Probe sequence
gatttatttacatgcagaattggaa

SEQ ID NO: 188320 - DNA, 25 bp, Probe sequence
gttggctacattgagtgttgtacta

SEQ ID NO: 188321 - DNA, 25 bp, Probe sequence
gttgtactaatacttttattcgtag

SEQ ID NO: 188322 - DNA, 25 bp, Probe sequence
gttccaatacttgtattcatagtaa

SEQ ID NO: 188323 - DNA, 25 bp, Probe sequence
gttacatcattacattagttccaat

SEQ ID NO: 188324 - DNA, 25 bp, Probe sequence
gttatagtagattttgcaaagcaaa

SEQ ID NO: 188325 - DNA, 25 bp, Probe sequence
gttattagtcttaatcgttatagta

SEQ ID NO: 188326 - DNA, 25 bp, Probe sequence
gtagaaaaacttagaatcattcaaa

SEQ ID NO: 188327 - DNA, 25 bp, Probe sequence
gtgttgtactaatacttttattcgt

SEQ ID NO: 188328 - DNA, 25 bp, Probe sequence
ggaatgttattagtcttaatcgtta

SEQ ID NO: 188329 - DNA, 25 bp, Probe sequence
ggctacattgagtgttgtactaata

SEQ ID NO: 188330 - DNA, 25 bp, Probe sequence
tgtactaatacttttattcgtagaa

SEQ ID NO: 188331 - DNA, 25 bp, Probe sequence
tgagttacatcattacattagttcc

SEQ ID NO: 188332 - DNA, 25 bp, Probe sequence
tcgttatagtagattttgcaaagca

SEQ ID NO: 188333 - DNA, 25 bp, Probe sequence
tcattacattagttccaatacttgt

SEQ ID NO: 188334 - DNA, 25 bp, Probe sequence
tacatcattacattagttccaatac

SEQ ID NO: 188335 - DNA, 25 bp, Probe sequence
tagttccaatacttgtattcatagt

SEQ ID NO: 188336 - DNA, 25 bp, Probe sequence
atacaaacacaaccaattcgtccca

SEQ ID NO: 188337 - DNA, 25 bp, Probe sequence
atcactggtagaacacaatacattc

SEQ ID NO: 188338 - DNA, 25 bp, Probe sequence
atgaaaatcactggtagaacacaat

SEQ ID NO: 188339 - DNA, 25 bp, Probe sequence
agacgatgaagtagttaataaacca

SEQ ID NO: 188340 - DNA, 25 bp, Probe sequence
accagatttaacttttgacacagat

SEQ ID NO: 188341 - DNA, 25 bp, Probe sequence
acagatacttcacgattgtttttga

SEQ ID NO: 188342 - DNA, 25 bp, Probe sequence
aaagttgcaaatgtcgagtttaacg

SEQ ID NO: 188343 - DNA, 25 bp, Probe sequence
aaaacaatatatcgagttacttagt

SEQ ID NO: 188344 - DNA, 25 bp, Probe sequence
aagactctcatatgtaaaagtttgg

SEQ ID NO: 188345 - DNA, 25 bp, Probe sequence
aatatatcgagttacttagtagatt

SEQ ID NO: 188346 - DNA, 25 bp, Probe sequence
cagtaaaagttgcaaatgtcgagtt

SEQ ID NO: 188347 - DNA, 25 bp, Probe sequence
cttaccagatttaacttttgacaca

SEQ ID NO: 188348 - DNA, 25 bp, Probe sequence
gcaagtattttgtaagactctcata

SEQ ID NO: 188349 - DNA, 25 bp, Probe sequence
gaacctaaaactgatgagatgaaac

SEQ ID NO: 188350 - DNA, 25 bp, Probe sequence
gaacacaatacattcaagaaactaa

SEQ ID NO: 188351 - DNA, 25 bp, Probe sequence
gaaactaatcaagaggcattcatga

SEQ ID NO: 188352 - DNA, 25 bp, Probe sequence
gacacagatcaattaattaacaaaa

SEQ ID NO: 188353 - DNA, 25 bp, Probe sequence
gagaaaacagatacttcacgattgt

SEQ ID NO: 188354 - DNA, 25 bp, Probe sequence
gaggcattcatgaaaggtggggact

SEQ ID NO: 188355 - DNA, 25 bp, Probe sequence
gatacttcacgattgtttttgaaaa

SEQ ID NO: 188356 - DNA, 25 bp, Probe sequence
gatttaacttttgacacagatcaat

SEQ ID NO: 188357 - DNA, 25 bp, Probe sequence
gtattttgtaagactctcatatgta

SEQ ID NO: 188358 - DNA, 25 bp, Probe sequence
gtcgagtttaacgacagagaaaaca

SEQ ID NO: 188359 - DNA, 25 bp, Probe sequence
gtcccaccattccaacaagattatc

SEQ ID NO: 188360 - DNA, 25 bp, Probe sequence
ggtggggactttttaggagctggag

SEQ ID NO: 188361 - DNA, 25 bp, Probe sequence
ggggactttttaggagctggagaat

SEQ ID NO: 188362 - DNA, 25 bp, Probe sequence
ggagctggagaatttacagtaaaag

SEQ ID NO: 188363 - DNA, 25 bp, Probe sequence
ggactttttaggagctggagaattt

SEQ ID NO: 188364 - DNA, 25 bp, Probe sequence
ggaattaaattgaacttaccagatt

SEQ ID NO: 188365 - DNA, 25 bp, Probe sequence
tgaacttaccagatttaacttttga

SEQ ID NO: 188366 - DNA, 25 bp, Probe sequence
taacgaggaacaaggcaagtatttt

SEQ ID NO: 188367 - DNA, 25 bp, Probe sequence
taacaaaatcggaactattgtactt

SEQ ID NO: 188368 - DNA, 25 bp, Probe sequence
taaaccagaacctaaaactgatgag

SEQ ID NO: 188369 - DNA, 25 bp, Probe sequence
tacaaacacaaccaattcgtcccac

SEQ ID NO: 188370 - DNA, 25 bp, Probe sequence
attatctattcgccatcacattatg

SEQ ID NO: 188371 - DNA, 25 bp, Probe sequence
ataagggcaaacatgcgtggaaaac

SEQ ID NO: 188372 - DNA, 25 bp, Probe sequence
atgccaaaaccgttgatatgacaag

SEQ ID NO: 188373 - DNA, 25 bp, Probe sequence
accgttgatatgacaaggtttttat

SEQ ID NO: 188374 - DNA, 25 bp, Probe sequence
acgacgaattatctattcgccatca

SEQ ID NO: 188375 - DNA, 25 bp, Probe sequence
acgaattatctattcgccatcacat

SEQ ID NO: 188376 - DNA, 25 bp, Probe sequence
acaacgacgaattatctattcgcca

SEQ ID NO: 188377 - DNA, 25 bp, Probe sequence
aaatgccaaaaccgttgatatgaca

SEQ ID NO: 188378 - DNA, 25 bp, Probe sequence
aaaatgccaaaaccgttgatatgac

SEQ ID NO: 188379 - DNA, 25 bp, Probe sequence
aacatgcgtggaaaacacagaggtt

SEQ ID NO: 188380 - DNA, 25 bp, Probe sequence
aacgacgaattatctattcgccatc

SEQ ID NO: 188381 - DNA, 25 bp, Probe sequence
aagggcaaacatgcgtggaaaacac

SEQ ID NO: 188382 - DNA, 25 bp, Probe sequence
aatgccaaaaccgttgatatgacaa

SEQ ID NO: 188383 - DNA, 25 bp, Probe sequence
aattatctattcgccatcacattat

SEQ ID NO: 188384 - DNA, 25 bp, Probe sequence
caacgacgaattatctattcgccat

SEQ ID NO: 188385 - DNA, 25 bp, Probe sequence
catgcgtggaaaacacagaggttta

SEQ ID NO: 188386 - DNA, 25 bp, Probe sequence
cgacgaattatctattcgccatcac

SEQ ID NO: 188387 - DNA, 25 bp, Probe sequence
gccaaaaccgttgatatgacaaggt

SEQ ID NO: 188388 - DNA, 25 bp, Probe sequence
gcaaacatgcgtggaaaacacagag

SEQ ID NO: 188389 - DNA, 25 bp, Probe sequence
gaattatctattcgccatcacatta

SEQ ID NO: 188390 - DNA, 25 bp, Probe sequence
gacgaattatctattcgccatcaca

SEQ ID NO: 188391 - DNA, 25 bp, Probe sequence
gatatgacaaggtttttatacgttt

SEQ ID NO: 188392 - DNA, 25 bp, Probe sequence
gttgatatgacaaggtttttatacg

SEQ ID NO: 188393 - DNA, 25 bp, Probe sequence
gtttgtatacaacgacgaattatct

SEQ ID NO: 188394 - DNA, 25 bp, Probe sequence
gtatacaacgacgaattatctattc

SEQ ID NO: 188395 - DNA, 25 bp, Probe sequence
gggcaaacatgcgtggaaaacacag

SEQ ID NO: 188396 - DNA, 25 bp, Probe sequence
tgcgtggaaaacacagaggtttaaa

SEQ ID NO: 188397 - DNA, 25 bp, Probe sequence
tgacaaggtttttatacgtttgtat

SEQ ID NO: 188398 - DNA, 25 bp, Probe sequence
taaaaatgccaaaaccgttgatatg

SEQ ID NO: 188399 - DNA, 25 bp, Probe sequence
taaataagggcaaacatgcgtggaa

SEQ ID NO: 188400 - DNA, 25 bp, Probe sequence
tatctattcgccatcacattatgac

SEQ ID NO: 188401 - DNA, 25 bp, Probe sequence
tatacgtttgtatacaacgacgaat

SEQ ID NO: 188402 - DNA, 25 bp, Probe sequence
ttatctattcgccatcacattatga

SEQ ID NO: 188403 - DNA, 25 bp, Probe sequence
ttgtatacaacgacgaattatctat

SEQ ID NO: 188404 - DNA, 25 bp, Probe sequence
attttgcttcgtactttcaagaacg

SEQ ID NO: 188405 - DNA, 25 bp, Probe sequence
atatcatctattttatctggtggga

SEQ ID NO: 188406 - DNA, 25 bp, Probe sequence
atacataccgataatatcatctatt

SEQ ID NO: 188407 - DNA, 25 bp, Probe sequence
ataacatagcagatagtaatacggt

SEQ ID NO: 188408 - DNA, 25 bp, Probe sequence
atcagtcgttgcatcaaatctattt

SEQ ID NO: 188409 - DNA, 25 bp, Probe sequence
atgaaacccatatatattgcatgaa

SEQ ID NO: 188410 - DNA, 25 bp, Probe sequence
acggtttatcagtcgttgcatcaaa

SEQ ID NO: 188411 - DNA, 25 bp, Probe sequence
aaaggagttttgatataggggagat

SEQ ID NO: 188412 - DNA, 25 bp, Probe sequence
aaaaacaatattgagtctttacatt

SEQ ID NO: 188413 - DNA, 25 bp, Probe sequence
aacagtggactttttcgacaggtga

SEQ ID NO: 188414 - DNA, 25 bp, Probe sequence
aagtaatgacgtattgcaaggtata

SEQ ID NO: 188415 - DNA, 25 bp, Probe sequence
aaggtataaatacactcattaagaa

SEQ ID NO: 188416 - DNA, 25 bp, Probe sequence
aaggctgttgaaatggcagacgagt

SEQ ID NO: 188417 - DNA, 25 bp, Probe sequence
aatggcagacgagttttcaaaatta

SEQ ID NO: 188418 - DNA, 25 bp, Probe sequence
cacgaactaagaacagtctttactg

SEQ ID NO: 188419 - DNA, 25 bp, Probe sequence
ctgggtggttgtttttgttcgccat

SEQ ID NO: 188420 - DNA, 25 bp, Probe sequence
gctgcaacggtggttcataaattta

SEQ ID NO: 188421 - DNA, 25 bp, Probe sequence
gcattttaccaataacatagcagat

SEQ ID NO: 188422 - DNA, 25 bp, Probe sequence
gaatatttttctatgcattttacca

SEQ ID NO: 188423 - DNA, 25 bp, Probe sequence
gaagagtgtttacgggctataattt

SEQ ID NO: 188424 - DNA, 25 bp, Probe sequence
gagataaacagtggactttttcgac

SEQ ID NO: 188425 - DNA, 25 bp, Probe sequence
gaaaggtgatatatacataccgata

SEQ ID NO: 188426 - DNA, 25 bp, Probe sequence
gagattgcaaaatatcacacttata

SEQ ID NO: 188427 - DNA, 25 bp, Probe sequence
gagtctttacattgatatctcatca

SEQ ID NO: 188428 - DNA, 25 bp, Probe sequence
gtaatacggtttatcagtcgttgca

SEQ ID NO: 188429 - DNA, 25 bp, Probe sequence
gtattatgctgcaacggtggttcat

SEQ ID NO: 188430 - DNA, 25 bp, Probe sequence
gtatcataatacttaattgtgttaa

SEQ ID NO: 188431 - DNA, 25 bp, Probe sequence
gtctacatctttttgcgcaagttgt

SEQ ID NO: 188432 - DNA, 25 bp, Probe sequence
ggtgggatatcgtattatgctgcaa

SEQ ID NO: 188433 - DNA, 25 bp, Probe sequence
ggttgtttttgttcgccattatgtt

SEQ ID NO: 188434 - DNA, 25 bp, Probe sequence
tgttctgtctacatctttttgcgca

SEQ ID NO: 188435 - DNA, 25 bp, Probe sequence
tgttcgccattatgttctgtctaca

SEQ ID NO: 188436 - DNA, 25 bp, Probe sequence
tataaaaaagtcaccaataccgaat

SEQ ID NO: 188437 - DNA, 25 bp, Probe sequence
ttgcgcaagttgtgtatcataatac

SEQ ID NO: 188438 - DNA, 25 bp, Probe sequence
atatgtgcatagacaatttgaaaat

SEQ ID NO: 188439 - DNA, 25 bp, Probe sequence
atgggtcgcacctggaacaagaggt

SEQ ID NO: 188440 - DNA, 25 bp, Probe sequence
acttttatcagaatggtaggtggaa

SEQ ID NO: 188441 - DNA, 25 bp, Probe sequence
aaatgggtcgcacctggaacaagag

SEQ ID NO: 188442 - DNA, 25 bp, Probe sequence
aaagtatatgtgttatggaataaag

SEQ ID NO: 188443 - DNA, 25 bp, Probe sequence
aaaatgggtcgcacctggaacaaga

SEQ ID NO: 188444 - DNA, 25 bp, Probe sequence
aacaagaggtgtgccagatagaatt

SEQ ID NO: 188445 - DNA, 25 bp, Probe sequence
aagaggtgtgccagatagaattatt

SEQ ID NO: 188446 - DNA, 25 bp, Probe sequence
aagttgcatcctttacaaaaatatg

SEQ ID NO: 188447 - DNA, 25 bp, Probe sequence
aatggtaggtggaacatttggcgat

SEQ ID NO: 188448 - DNA, 25 bp, Probe sequence
aatgggtcgcacctggaacaagagg

SEQ ID NO: 188449 - DNA, 25 bp, Probe sequence
gccagaaggaaaaacatattttgta

SEQ ID NO: 188450 - DNA, 25 bp, Probe sequence
gccagatagaattattattatgcca

SEQ ID NO: 188451 - DNA, 25 bp, Probe sequence
gcatcctttacaaaaatatgtgcat

SEQ ID NO: 188452 - DNA, 25 bp, Probe sequence
gcacctggaacaagaggtgtgccag

SEQ ID NO: 188453 - DNA, 25 bp, Probe sequence
gaattattattatgccagaaggaaa

SEQ ID NO: 188454 - DNA, 25 bp, Probe sequence
gaatggtaggtggaacatttggcga

SEQ ID NO: 188455 - DNA, 25 bp, Probe sequence
gagataacaaagctaaacggtttat

SEQ ID NO: 188456 - DNA, 25 bp, Probe sequence
gaggtgtgccagatagaattattat

SEQ ID NO: 188457 - DNA, 25 bp, Probe sequence
gataacaaagctaaacggtttatgt

SEQ ID NO: 188458 - DNA, 25 bp, Probe sequence
gatagaattattattatgccagaag

SEQ ID NO: 188459 - DNA, 25 bp, Probe sequence
gttgcatcctttacaaaaatatgtg

SEQ ID NO: 188460 - DNA, 25 bp, Probe sequence
gtaaatacttttatcagaatggtag

SEQ ID NO: 188461 - DNA, 25 bp, Probe sequence
gtcgcacctggaacaagaggtgtgc

SEQ ID NO: 188462 - DNA, 25 bp, Probe sequence
gggtcgcacctggaacaagaggtgt

SEQ ID NO: 188463 - DNA, 25 bp, Probe sequence
ggtgtgccagatagaattattatta

SEQ ID NO: 188464 - DNA, 25 bp, Probe sequence
ggaaagttgcatcctttacaaaaat

SEQ ID NO: 188465 - DNA, 25 bp, Probe sequence
ggaacaagaggtgtgccagatagaa

SEQ ID NO: 188466 - DNA, 25 bp, Probe sequence
taaaatgggtcgcacctggaacaag

SEQ ID NO: 188467 - DNA, 25 bp, Probe sequence
tgtttaaaatgggtcgcacctggaa

SEQ ID NO: 188468 - DNA, 25 bp, Probe sequence
tatgtttaaaatgggtcgcacctgg

SEQ ID NO: 188469 - DNA, 25 bp, Probe sequence
tttaaaatgggtcgcacctggaaca

SEQ ID NO: 188470 - DNA, 25 bp, Probe sequence
tttatgtttaaaatgggtcgcacct

SEQ ID NO: 188471 - DNA, 25 bp, Probe sequence
ttaaaatgggtcgcacctggaacaa

SEQ ID NO: 188472 - DNA, 25 bp, Probe sequence
agtcaactttgaacctgatgttttt

SEQ ID NO: 188473 - DNA, 25 bp, Probe sequence
agtagtcaactttgaacctgatgtt

SEQ ID NO: 188474 - DNA, 25 bp, Probe sequence
agttctcagagcagtatcgtttaat

SEQ ID NO: 188475 - DNA, 25 bp, Probe sequence
agagtagtcaactttgaacctgatg

SEQ ID NO: 188476 - DNA, 25 bp, Probe sequence
agagcagtatcgtttaatgttttta

SEQ ID NO: 188477 - DNA, 25 bp, Probe sequence
agcaagttctcagagcagtatcgtt

SEQ ID NO: 188478 - DNA, 25 bp, Probe sequence
aaagcaagttctcagagcagtatcg

SEQ ID NO: 188479 - DNA, 25 bp, Probe sequence
aaaagcaagttctcagagcagtatc

SEQ ID NO: 188480 - DNA, 25 bp, Probe sequence
aagcaagttctcagagcagtatcgt

SEQ ID NO: 188481 - DNA, 25 bp, Probe sequence
aagagtagtcaactttgaacctgat

SEQ ID NO: 188482 - DNA, 25 bp, Probe sequence
aagttctcagagcagtatcgtttaa

SEQ ID NO: 188483 - DNA, 25 bp, Probe sequence
caagttctcagagcagtatcgttta

SEQ ID NO: 188484 - DNA, 25 bp, Probe sequence
caactttgaacctgatgtttttata

SEQ ID NO: 188485 - DNA, 25 bp, Probe sequence
cagagcagtatcgtttaatgttttt

SEQ ID NO: 188486 - DNA, 25 bp, Probe sequence
ctcagagcagtatcgtttaatgttt

SEQ ID NO: 188487 - DNA, 25 bp, Probe sequence
gcagtatcgtttaatgtttttaatt

SEQ ID NO: 188488 - DNA, 25 bp, Probe sequence
gcaagttctcagagcagtatcgttt

SEQ ID NO: 188489 - DNA, 25 bp, Probe sequence
gagcagtatcgtttaatgtttttaa

SEQ ID NO: 188490 - DNA, 25 bp, Probe sequence
gagtagtcaactttgaacctgatgt

SEQ ID NO: 188491 - DNA, 25 bp, Probe sequence
gttctcagagcagtatcgtttaatg

SEQ ID NO: 188492 - DNA, 25 bp, Probe sequence
gtttaaaagcaagttctcagagcag

SEQ ID NO: 188493 - DNA, 25 bp, Probe sequence
gtagtcaactttgaacctgatgttt

SEQ ID NO: 188494 - DNA, 25 bp, Probe sequence
gtcaactttgaacctgatgttttta

SEQ ID NO: 188495 - DNA, 25 bp, Probe sequence
tctcagagcagtatcgtttaatgtt

SEQ ID NO: 188496 - DNA, 25 bp, Probe sequence
tcagagcagtatcgtttaatgtttt

SEQ ID NO: 188497 - DNA, 25 bp, Probe sequence
tcaactttgaacctgatgtttttat

SEQ ID NO: 188498 - DNA, 25 bp, Probe sequence
taattcttatttttatattattaag

SEQ ID NO: 188499 - DNA, 25 bp, Probe sequence
taagagtagtcaactttgaacctga

SEQ ID NO: 188500 - DNA, 25 bp, Probe sequence
tagtcaactttgaacctgatgtttt

SEQ ID NO: 188501 - DNA, 25 bp, Probe sequence
tattaagagtagtcaactttgaacc

SEQ ID NO: 188502 - DNA, 25 bp, Probe sequence
tttaaaagcaagttctcagagcagt

SEQ ID NO: 188503 - DNA, 25 bp, Probe sequence
ttaagagtagtcaactttgaacctg

SEQ ID NO: 188504 - DNA, 25 bp, Probe sequence
ttaaaagcaagttctcagagcagta

SEQ ID NO: 188505 - DNA, 25 bp, Probe sequence
ttctcagagcagtatcgtttaatgt

SEQ ID NO: 188506 - DNA, 25 bp, Probe sequence
attgccaatttatttatctaaaaat

SEQ ID NO: 188507 - DNA, 25 bp, Probe sequence
attcagaattttgtgatatactatt

SEQ ID NO: 188508 - DNA, 25 bp, Probe sequence
attttgtgatatactatttttcata

SEQ ID NO: 188509 - DNA, 25 bp, Probe sequence
atttatttatctaaaaattcagaat

SEQ ID NO: 188510 - DNA, 25 bp, Probe sequence
atatactatttttcatagtcttgag

SEQ ID NO: 188511 - DNA, 25 bp, Probe sequence
atatgtttgaaaaattgccaattta

SEQ ID NO: 188512 - DNA, 25 bp, Probe sequence
atactatttttcatagtcttgagtt

SEQ ID NO: 188513 - DNA, 25 bp, Probe sequence
agaattttgtgatatactatttttc

SEQ ID NO: 188514 - DNA, 25 bp, Probe sequence
actatttttcatagtcttgagttat

SEQ ID NO: 188515 - DNA, 25 bp, Probe sequence
acaatatgtttgaaaaattgccaat

SEQ ID NO: 188516 - DNA, 25 bp, Probe sequence
aaattcagaattttgtgatatacta

SEQ ID NO: 188517 - DNA, 25 bp, Probe sequence
aacaatatgtttgaaaaattgccaa

SEQ ID NO: 188518 - DNA, 25 bp, Probe sequence
aatatgtttgaaaaattgccaattt

SEQ ID NO: 188519 - DNA, 25 bp, Probe sequence
aattttgtgatatactatttttcat

SEQ ID NO: 188520 - DNA, 25 bp, Probe sequence
aattcagaattttgtgatatactat

SEQ ID NO: 188521 - DNA, 25 bp, Probe sequence
caatatgtttgaaaaattgccaatt

SEQ ID NO: 188522 - DNA, 25 bp, Probe sequence
cagaattttgtgatatactattttt

SEQ ID NO: 188523 - DNA, 25 bp, Probe sequence
ctatttttcatagtcttgagttata

SEQ ID NO: 188524 - DNA, 25 bp, Probe sequence
gaattttgtgatatactatttttca

SEQ ID NO: 188525 - DNA, 25 bp, Probe sequence
gaaaaattgccaatttatttatcta

SEQ ID NO: 188526 - DNA, 25 bp, Probe sequence
gatatactatttttcatagtcttga

SEQ ID NO: 188527 - DNA, 25 bp, Probe sequence
gtaacaatatgtttgaaaaattgcc

SEQ ID NO: 188528 - DNA, 25 bp, Probe sequence
gtgatatactatttttcatagtctt

SEQ ID NO: 188529 - DNA, 25 bp, Probe sequence
tgtgatatactatttttcatagtct

SEQ ID NO: 188530 - DNA, 25 bp, Probe sequence
tgatatactatttttcatagtcttg

SEQ ID NO: 188531 - DNA, 25 bp, Probe sequence
tcagaattttgtgatatactatttt

SEQ ID NO: 188532 - DNA, 25 bp, Probe sequence
taacaatatgtttgaaaaattgcca

SEQ ID NO: 188533 - DNA, 25 bp, Probe sequence
tactatttttcatagtcttgagtta

SEQ ID NO: 188534 - DNA, 25 bp, Probe sequence
tatgtttgaaaaattgccaatttat

SEQ ID NO: 188535 - DNA, 25 bp, Probe sequence
tatactatttttcatagtcttgagt

SEQ ID NO: 188536 - DNA, 25 bp, Probe sequence
tttgtgatatactatttttcatagt

SEQ ID NO: 188537 - DNA, 25 bp, Probe sequence
ttttgtgatatactatttttcatag

SEQ ID NO: 188538 - DNA, 25 bp, Probe sequence
ttcagaattttgtgatatactattt

SEQ ID NO: 188539 - DNA, 25 bp, Probe sequence
ttgtgatatactatttttcatagtc

SEQ ID NO: 188540 - DNA, 25 bp, Probe sequence
atcctacagatgaacgtatcaaagc

SEQ ID NO: 188541 - DNA, 25 bp, Probe sequence
atgaacgtatcaaagctttagctag

SEQ ID NO: 188542 - DNA, 25 bp, Probe sequence
agtgttgctggcttacaagttgatg

SEQ ID NO: 188543 - DNA, 25 bp, Probe sequence
agcaagtgttgctggcttacaagtt

SEQ ID NO: 188544 - DNA, 25 bp, Probe sequence
agctgaaattatcaatgcttttgag

SEQ ID NO: 188545 - DNA, 25 bp, Probe sequence
acgtatcaaagctttagctagtgtt

SEQ ID NO: 188546 - DNA, 25 bp, Probe sequence
aagctttagctagtgttgaaaataa

SEQ ID NO: 188547 - DNA, 25 bp, Probe sequence
aagtgttgctggcttacaagttgat

SEQ ID NO: 188548 - DNA, 25 bp, Probe sequence
aatagcaagtgttgctggcttacaa

SEQ ID NO: 188549 - DNA, 25 bp, Probe sequence
aattatcaatgcttttgagtcacta

SEQ ID NO: 188550 - DNA, 25 bp, Probe sequence
caatgcttttgagtcactagagtag

SEQ ID NO: 188551 - DNA, 25 bp, Probe sequence
caagtgttgctggcttacaagttga

SEQ ID NO: 188552 - DNA, 25 bp, Probe sequence
caaaaaagaacttgtcgaaatagca

SEQ ID NO: 188553 - DNA, 25 bp, Probe sequence
caaagctttagctagtgttgaaaat

SEQ ID NO: 188554 - DNA, 25 bp, Probe sequence
cagatgaacgtatcaaagctttagc

SEQ ID NO: 188555 - DNA, 25 bp, Probe sequence
cctacagatgaacgtatcaaagctt

SEQ ID NO: 188556 - DNA, 25 bp, Probe sequence
gctggcttacaagttgatgaaaaac

SEQ ID NO: 188557 - DNA, 25 bp, Probe sequence
gcaagtgttgctggcttacaagttg

SEQ ID NO: 188558 - DNA, 25 bp, Probe sequence
gaacgtatcaaagctttagctagtg

SEQ ID NO: 188559 - DNA, 25 bp, Probe sequence
gaaatagcaagtgttgctggcttac

SEQ ID NO: 188560 - DNA, 25 bp, Probe sequence
gaaattatcaatgcttttgagtcac

SEQ ID NO: 188561 - DNA, 25 bp, Probe sequence
gatgaacgtatcaaagctttagcta

SEQ ID NO: 188562 - DNA, 25 bp, Probe sequence
gttgctggcttacaagttgatgaaa

SEQ ID NO: 188563 - DNA, 25 bp, Probe sequence
gtatcaaagctttagctagtgttga

SEQ ID NO: 188564 - DNA, 25 bp, Probe sequence
gtgttgctggcttacaagttgatga

SEQ ID NO: 188565 - DNA, 25 bp, Probe sequence
tgttgctggcttacaagttgatgaa

SEQ ID NO: 188566 - DNA, 25 bp, Probe sequence
tgaacgtatcaaagctttagctagt

SEQ ID NO: 188567 - DNA, 25 bp, Probe sequence
tcaatgcttttgagtcactagagta

SEQ ID NO: 188568 - DNA, 25 bp, Probe sequence
tacagatgaacgtatcaaagcttta

SEQ ID NO: 188569 - DNA, 25 bp, Probe sequence
tagctagtgttgaaaataaacgcaa

SEQ ID NO: 188570 - DNA, 25 bp, Probe sequence
tagcaagtgttgctggcttacaagt

SEQ ID NO: 188571 - DNA, 25 bp, Probe sequence
tatcaatgcttttgagtcactagag

SEQ ID NO: 188572 - DNA, 25 bp, Probe sequence
ttatcaatgcttttgagtcactaga

SEQ ID NO: 188573 - DNA, 25 bp, Probe sequence
ttgctggcttacaagttgatgaaaa

SEQ ID NO: 188574 - DNA, 25 bp, Probe sequence
attggcagatgctctaggtgttaat

SEQ ID NO: 188575 - DNA, 25 bp, Probe sequence
atttactagaaatcacaacacgcac

SEQ ID NO: 188576 - DNA, 25 bp, Probe sequence
ataaattggcagatgctctaggtgt

SEQ ID NO: 188577 - DNA, 25 bp, Probe sequence
atcacaacacgcacaaattagagga

SEQ ID NO: 188578 - DNA, 25 bp, Probe sequence
aggtgttaatgtaagtgaactattt

SEQ ID NO: 188579 - DNA, 25 bp, Probe sequence
agataaattggcagatgctctaggt

SEQ ID NO: 188580 - DNA, 25 bp, Probe sequence
agaaatcacaacacgcacaaattag

SEQ ID NO: 188581 - DNA, 25 bp, Probe sequence
actagaaatcacaacacgcacaaat

SEQ ID NO: 188582 - DNA, 25 bp, Probe sequence
acacgcacaaattagaggattggat

SEQ ID NO: 188583 - DNA, 25 bp, Probe sequence
acaacacgcacaaattagaggattg

SEQ ID NO: 188584 - DNA, 25 bp, Probe sequence
aaattggcagatgctctaggtgtta

SEQ ID NO: 188585 - DNA, 25 bp, Probe sequence
aaatcacaacacgcacaaattagag

SEQ ID NO: 188586 - DNA, 25 bp, Probe sequence
aacacgcacaaattagaggattgga

SEQ ID NO: 188587 - DNA, 25 bp, Probe sequence
aatcacaacacgcacaaattagagg

SEQ ID NO: 188588 - DNA, 25 bp, Probe sequence
aattggcagatgctctaggtgttaa

SEQ ID NO: 188589 - DNA, 25 bp, Probe sequence
caacacgcacaaattagaggattgg

SEQ ID NO: 188590 - DNA, 25 bp, Probe sequence
cacaacacgcacaaattagaggatt

SEQ ID NO: 188591 - DNA, 25 bp, Probe sequence
cacgcacaaattagaggattggatt

SEQ ID NO: 188592 - DNA, 25 bp, Probe sequence
ctagaaatcacaacacgcacaaatt

SEQ ID NO: 188593 - DNA, 25 bp, Probe sequence
cgcacaaattagaggattggattaa

SEQ ID NO: 188594 - DNA, 25 bp, Probe sequence
gcagatgctctaggtgttaatgtaa

SEQ ID NO: 188595 - DNA, 25 bp, Probe sequence
gaaatcacaacacgcacaaattaga

SEQ ID NO: 188596 - DNA, 25 bp, Probe sequence
gataaattggcagatgctctaggtg

SEQ ID NO: 188597 - DNA, 25 bp, Probe sequence
gtattagataaattggcagatgctc

SEQ ID NO: 188598 - DNA, 25 bp, Probe sequence
ggcagatgctctaggtgttaatgta

SEQ ID NO: 188599 - DNA, 25 bp, Probe sequence
tggcagatgctctaggtgttaatgt

SEQ ID NO: 188600 - DNA, 25 bp, Probe sequence
tgaactatttactagaaatcacaac

SEQ ID NO: 188601 - DNA, 25 bp, Probe sequence
tcacaacacgcacaaattagaggat

SEQ ID NO: 188602 - DNA, 25 bp, Probe sequence
taaattggcagatgctctaggtgtt

SEQ ID NO: 188603 - DNA, 25 bp, Probe sequence
tactagaaatcacaacacgcacaaa

SEQ ID NO: 188604 - DNA, 25 bp, Probe sequence
tagaaatcacaacacgcacaaatta

SEQ ID NO: 188605 - DNA, 25 bp, Probe sequence
tttactagaaatcacaacacgcaca

SEQ ID NO: 188606 - DNA, 25 bp, Probe sequence
ttactagaaatcacaacacgcacaa

SEQ ID NO: 188607 - DNA, 25 bp, Probe sequence
ttggcagatgctctaggtgttaatg

SEQ ID NO: 188608 - DNA, 25 bp, Probe sequence
attagacagcttagctatttcgtca

SEQ ID NO: 188609 - DNA, 25 bp, Probe sequence
attagttttaacgaatgaagacatt

SEQ ID NO: 188610 - DNA, 25 bp, Probe sequence
atatacattagacagcttagctatt

SEQ ID NO: 188611 - DNA, 25 bp, Probe sequence
atccgattttgcttactgtttatta

SEQ ID NO: 188612 - DNA, 25 bp, Probe sequence
atgtcttagaagatgcagtcagtgt

SEQ ID NO: 188613 - DNA, 25 bp, Probe sequence
agagacttatatacattagacagct

SEQ ID NO: 188614 - DNA, 25 bp, Probe sequence
agacagcttagctatttcgtcaaat

SEQ ID NO: 188615 - DNA, 25 bp, Probe sequence
agaatccgattttgcttactgttta

SEQ ID NO: 188616 - DNA, 25 bp, Probe sequence
agcttagctatttcgtcaaataatg

SEQ ID NO: 188617 - DNA, 25 bp, Probe sequence
acattagacagcttagctatttcgt

SEQ ID NO: 188618 - DNA, 25 bp, Probe sequence
acagcttagctatttcgtcaaataa

SEQ ID NO: 188619 - DNA, 25 bp, Probe sequence
aagaatccgattttgcttactgttt

SEQ ID NO: 188620 - DNA, 25 bp, Probe sequence
aatccgattttgcttactgtttatt

SEQ ID NO: 188621 - DNA, 25 bp, Probe sequence
cagtgtttatgatgaatattcggta

SEQ ID NO: 188622 - DNA, 25 bp, Probe sequence
cttatatacattagacagcttagct

SEQ ID NO: 188623 - DNA, 25 bp, Probe sequence
gcttactgtttattaagagacttat

SEQ ID NO: 188624 - DNA, 25 bp, Probe sequence
gcagtcagtgtttatgatgaatatt

SEQ ID NO: 188625 - DNA, 25 bp, Probe sequence
gaatccgattttgcttactgtttat

SEQ ID NO: 188626 - DNA, 25 bp, Probe sequence
gaagatgcagtcagtgtttatgatg

SEQ ID NO: 188627 - DNA, 25 bp, Probe sequence
gaagaatccgattttgcttactgtt

SEQ ID NO: 188628 - DNA, 25 bp, Probe sequence
gacagcttagctatttcgtcaaata

SEQ ID NO: 188629 - DNA, 25 bp, Probe sequence
gacatttaaaaacaatcataatttc

SEQ ID NO: 188630 - DNA, 25 bp, Probe sequence
gacttatatacattagacagcttag

SEQ ID NO: 188631 - DNA, 25 bp, Probe sequence
gagacttatatacattagacagctt

SEQ ID NO: 188632 - DNA, 25 bp, Probe sequence
gatgaatattcggtatgtaatgaag

SEQ ID NO: 188633 - DNA, 25 bp, Probe sequence
gatgcagtcagtgtttatgatgaat

SEQ ID NO: 188634 - DNA, 25 bp, Probe sequence
gattttgcttactgtttattaagag

SEQ ID NO: 188635 - DNA, 25 bp, Probe sequence
gtttatgatgaatattcggtatgta

SEQ ID NO: 188636 - DNA, 25 bp, Probe sequence
gtcttagaagatgcagtcagtgttt

SEQ ID NO: 188637 - DNA, 25 bp, Probe sequence
ggtatgtaatgaagaatccgatttt

SEQ ID NO: 188638 - DNA, 25 bp, Probe sequence
tccgattttgcttactgtttattaa

SEQ ID NO: 188639 - DNA, 25 bp, Probe sequence
tagctatttcgtcaaataatgtttg

SEQ ID NO: 188640 - DNA, 25 bp, Probe sequence
ttagaagatgcagtcagtgtttatg

SEQ ID NO: 188641 - DNA, 25 bp, Probe sequence
ttagacagcttagctatttcgtcaa

SEQ ID NO: 188642 - DNA, 25 bp, Probe sequence
attgttcaagattcttattccggag

SEQ ID NO: 188643 - DNA, 25 bp, Probe sequence
atattgttcaagattcttattccgg

SEQ ID NO: 188644 - DNA, 25 bp, Probe sequence
atataacttttagcaatgtaactga

SEQ ID NO: 188645 - DNA, 25 bp, Probe sequence
atgaggagctattggaggttatgag

SEQ ID NO: 188646 - DNA, 25 bp, Probe sequence
acggtgtggagatttatgaggggga

SEQ ID NO: 188647 - DNA, 25 bp, Probe sequence
aacttttagcaatgtaactgaatta

SEQ ID NO: 188648 - DNA, 25 bp, Probe sequence
aagattcttattccggagaagtaag

SEQ ID NO: 188649 - DNA, 25 bp, Probe sequence
aagtgaaaatgacgatattattgaa

SEQ ID NO: 188650 - DNA, 25 bp, Probe sequence
caagattcttattccggagaagtaa

SEQ ID NO: 188651 - DNA, 25 bp, Probe sequence
cttttagcaatgtaactgaattaat

SEQ ID NO: 188652 - DNA, 25 bp, Probe sequence
gccttttatataacttttagcaatg

SEQ ID NO: 188653 - DNA, 25 bp, Probe sequence
gcacggtgtggagatttatgagggg

SEQ ID NO: 188654 - DNA, 25 bp, Probe sequence
gaaaatgaggagctattggaggtta

SEQ ID NO: 188655 - DNA, 25 bp, Probe sequence
gacgatattattgaaattattggaa

SEQ ID NO: 188656 - DNA, 25 bp, Probe sequence
gagccttttatataacttttagcaa

SEQ ID NO: 188657 - DNA, 25 bp, Probe sequence
gagggggatattgttcaagattctt

SEQ ID NO: 188658 - DNA, 25 bp, Probe sequence
gagatttatgagggggatattgttc

SEQ ID NO: 188659 - DNA, 25 bp, Probe sequence
gaggagctattggaggttatgagat

SEQ ID NO: 188660 - DNA, 25 bp, Probe sequence
gattcttattccggagaagtaagtt

SEQ ID NO: 188661 - DNA, 25 bp, Probe sequence
gttcaagattcttattccggagaag

SEQ ID NO: 188662 - DNA, 25 bp, Probe sequence
gtgcacggtgtggagatttatgagg

SEQ ID NO: 188663 - DNA, 25 bp, Probe sequence
gggatattgttcaagattcttattc

SEQ ID NO: 188664 - DNA, 25 bp, Probe sequence
gggggatattgttcaagattcttat

SEQ ID NO: 188665 - DNA, 25 bp, Probe sequence
ggtgtggagatttatgagggggata

SEQ ID NO: 188666 - DNA, 25 bp, Probe sequence
ggagccttttatataacttttagca

SEQ ID NO: 188667 - DNA, 25 bp, Probe sequence
ggagctattggaggttatgagatga

SEQ ID NO: 188668 - DNA, 25 bp, Probe sequence
tgttcaagattcttattccggagaa

SEQ ID NO: 188669 - DNA, 25 bp, Probe sequence
tccggagaagtaagttttatcgagt

SEQ ID NO: 188670 - DNA, 25 bp, Probe sequence
tcaagattcttattccggagaagta

SEQ ID NO: 188671 - DNA, 25 bp, Probe sequence
tattccggagaagtaagttttatcg

SEQ ID NO: 188672 - DNA, 25 bp, Probe sequence
tattgttcaagattcttattccgga

SEQ ID NO: 188673 - DNA, 25 bp, Probe sequence
ttatcgagtttaaagaaggagcctt

SEQ ID NO: 188674 - DNA, 25 bp, Probe sequence
ttcaagattcttattccggagaagt

SEQ ID NO: 188675 - DNA, 25 bp, Probe sequence
ttgttcaagattcttattccggaga

SEQ ID NO: 188676 - DNA, 25 bp, Probe sequence
atatgtgcatagacaatttgaaaat

SEQ ID NO: 188677 - DNA, 25 bp, Probe sequence
atacttttatcagaatggtaggtgg

SEQ ID NO: 188678 - DNA, 25 bp, Probe sequence
atcctttacaaaaatatgtgcatag

SEQ ID NO: 188679 - DNA, 25 bp, Probe sequence
atgtgcatagacaatttgaaaatag

SEQ ID NO: 188680 - DNA, 25 bp, Probe sequence
atggtaggtggaacatttggcgatt

SEQ ID NO: 188681 - DNA, 25 bp, Probe sequence
agaatggtaggtggaacatttggcg

SEQ ID NO: 188682 - DNA, 25 bp, Probe sequence
agttgcatcctttacaaaaatatgt

SEQ ID NO: 188683 - DNA, 25 bp, Probe sequence
agagatcataaagtatatgtgttat

SEQ ID NO: 188684 - DNA, 25 bp, Probe sequence
acttttatcagaatggtaggtggaa

SEQ ID NO: 188685 - DNA, 25 bp, Probe sequence
acaagtaaatacttttatcagaatg

SEQ ID NO: 188686 - DNA, 25 bp, Probe sequence
aaatacttttatcagaatggtaggt

SEQ ID NO: 188687 - DNA, 25 bp, Probe sequence
aaatatgtgcatagacaatttgaaa

SEQ ID NO: 188688 - DNA, 25 bp, Probe sequence
aaagttgcatcctttacaaaaatat

SEQ ID NO: 188689 - DNA, 25 bp, Probe sequence
aaagtatatgtgttatggaataaag

SEQ ID NO: 188690 - DNA, 25 bp, Probe sequence
aatacttttatcagaatggtaggtg

SEQ ID NO: 188691 - DNA, 25 bp, Probe sequence
aagtaaatacttttatcagaatggt

SEQ ID NO: 188692 - DNA, 25 bp, Probe sequence
aagttgcatcctttacaaaaatatg

SEQ ID NO: 188693 - DNA, 25 bp, Probe sequence
aatggtaggtggaacatttggcgat

SEQ ID NO: 188694 - DNA, 25 bp, Probe sequence
cagaatggtaggtggaacatttggc

SEQ ID NO: 188695 - DNA, 25 bp, Probe sequence
catcctttacaaaaatatgtgcata

SEQ ID NO: 188696 - DNA, 25 bp, Probe sequence
cttttatcagaatggtaggtggaac

SEQ ID NO: 188697 - DNA, 25 bp, Probe sequence
gcatcctttacaaaaatatgtgcat

SEQ ID NO: 188698 - DNA, 25 bp, Probe sequence
gaatggtaggtggaacatttggcga

SEQ ID NO: 188699 - DNA, 25 bp, Probe sequence
gaaagttgcatcctttacaaaaata

SEQ ID NO: 188700 - DNA, 25 bp, Probe sequence
gttgcatcctttacaaaaatatgtg

SEQ ID NO: 188701 - DNA, 25 bp, Probe sequence
gtaaatacttttatcagaatggtag

SEQ ID NO: 188702 - DNA, 25 bp, Probe sequence
ggtaggtggaacatttggcgattga

SEQ ID NO: 188703 - DNA, 25 bp, Probe sequence
ggaaagttgcatcctttacaaaaat

SEQ ID NO: 188704 - DNA, 25 bp, Probe sequence
tggtaggtggaacatttggcgattg

SEQ ID NO: 188705 - DNA, 25 bp, Probe sequence
tcctttacaaaaatatgtgcataga

SEQ ID NO: 188706 - DNA, 25 bp, Probe sequence
tacttttatcagaatggtaggtgga

SEQ ID NO: 188707 - DNA, 25 bp, Probe sequence
tttatcagaatggtaggtggaacat

SEQ ID NO: 188708 - DNA, 25 bp, Probe sequence
ttttatcagaatggtaggtggaaca

SEQ ID NO: 188709 - DNA, 25 bp, Probe sequence
ttgcatcctttacaaaaatatgtgc

SEQ ID NO: 188710 - DNA, 25 bp, Probe sequence
attgttggaaatatttttgaaaatg

SEQ ID NO: 188711 - DNA, 25 bp, Probe sequence
attgttcaagattgttattcgagag

SEQ ID NO: 188712 - DNA, 25 bp, Probe sequence
atattgttcaagattgttattcgag

SEQ ID NO: 188713 - DNA, 25 bp, Probe sequence
atataacttttagcaatgtaactga

SEQ ID NO: 188714 - DNA, 25 bp, Probe sequence
ataacttttagcaatgtaactgaat

SEQ ID NO: 188715 - DNA, 25 bp, Probe sequence
atgagatgctattggaggttatgag

SEQ ID NO: 188716 - DNA, 25 bp, Probe sequence
atgacgatattattgaaattgttgg

SEQ ID NO: 188717 - DNA, 25 bp, Probe sequence
aggggatattgttcaagattgttat

SEQ ID NO: 188718 - DNA, 25 bp, Probe sequence
agccttttatataacttttagcaat

SEQ ID NO: 188719 - DNA, 25 bp, Probe sequence
acggtgtggagatttatgaagggga

SEQ ID NO: 188720 - DNA, 25 bp, Probe sequence
aaatgagatgctattggaggttatg

SEQ ID NO: 188721 - DNA, 25 bp, Probe sequence
aacttttagcaatgtaactgaatta

SEQ ID NO: 188722 - DNA, 25 bp, Probe sequence
gccttttatataacttttagcaatg

SEQ ID NO: 188723 - DNA, 25 bp, Probe sequence
gcacggtgtggagatttatgaaggg

SEQ ID NO: 188724 - DNA, 25 bp, Probe sequence
gcaatgtaactgaattactaagtga

SEQ ID NO: 188725 - DNA, 25 bp, Probe sequence
gaattactaagtgaaaatgacgata

SEQ ID NO: 188726 - DNA, 25 bp, Probe sequence
gaaggggatattgttcaagattgtt

SEQ ID NO: 188727 - DNA, 25 bp, Probe sequence
gaaaatgagatgctattggaggtta

SEQ ID NO: 188728 - DNA, 25 bp, Probe sequence
gacgatattattgaaattgttggaa

SEQ ID NO: 188729 - DNA, 25 bp, Probe sequence
gagccttttatataacttttagcaa

SEQ ID NO: 188730 - DNA, 25 bp, Probe sequence
gagagaagtaagttttatcgagttt

SEQ ID NO: 188731 - DNA, 25 bp, Probe sequence
gagatgctattggaggttatgagat

SEQ ID NO: 188732 - DNA, 25 bp, Probe sequence
gatgctattggaggttatgagatga

SEQ ID NO: 188733 - DNA, 25 bp, Probe sequence
gattgttattcgagagaagtaagtt

SEQ ID NO: 188734 - DNA, 25 bp, Probe sequence
gttcaagattgttattcgagagaag

SEQ ID NO: 188735 - DNA, 25 bp, Probe sequence
gtgcacggtgtggagatttatgaag

SEQ ID NO: 188736 - DNA, 25 bp, Probe sequence
gggatattgttcaagattgttattc

SEQ ID NO: 188737 - DNA, 25 bp, Probe sequence
ggtgtggagatttatgaaggggata

SEQ ID NO: 188738 - DNA, 25 bp, Probe sequence
ggagccttttatataacttttagca

SEQ ID NO: 188739 - DNA, 25 bp, Probe sequence
tgcacggtgtggagatttatgaagg

SEQ ID NO: 188740 - DNA, 25 bp, Probe sequence
tcaagattgttattcgagagaagta

SEQ ID NO: 188741 - DNA, 25 bp, Probe sequence
tattgttcaagattgttattcgaga

SEQ ID NO: 188742 - DNA, 25 bp, Probe sequence
ttatcgagtttaaagaaggagcctt

SEQ ID NO: 188743 - DNA, 25 bp, Probe sequence
ttgttcaagattgttattcgagaga

SEQ ID NO: 188744 - DNA, 25 bp, Probe sequence
atcaccagcagaggcttttgcaatc

SEQ ID NO: 188745 - DNA, 25 bp, Probe sequence
atgagtgccacaatagttaaaattg

SEQ ID NO: 188746 - DNA, 25 bp, Probe sequence
agtgatgatgccattaactaccatt

SEQ ID NO: 188747 - DNA, 25 bp, Probe sequence
accagcagaggcttttgcaatcacg

SEQ ID NO: 188748 - DNA, 25 bp, Probe sequence
accggctaatggtgcaagaatagtg

SEQ ID NO: 188749 - DNA, 25 bp, Probe sequence
acgccatgttgctacggataaagct

SEQ ID NO: 188750 - DNA, 25 bp, Probe sequence
aaaaatttagcgagtgcgttgccac

SEQ ID NO: 188751 - DNA, 25 bp, Probe sequence
aatccaccggctaatggtgcaagaa

SEQ ID NO: 188752 - DNA, 25 bp, Probe sequence
aatagaacgccatgttgctacggat

SEQ ID NO: 188753 - DNA, 25 bp, Probe sequence
aatttagcgagtgcgttgccactaa

SEQ ID NO: 188754 - DNA, 25 bp, Probe sequence
aattgtgaaaatagaacgccatgtt

SEQ ID NO: 188755 - DNA, 25 bp, Probe sequence
cagaggcttttgcaatcacgatgac

SEQ ID NO: 188756 - DNA, 25 bp, Probe sequence
gccactaaatttatcaccagcagag

SEQ ID NO: 188757 - DNA, 25 bp, Probe sequence
gccattaactaccattaaagatgct

SEQ ID NO: 188758 - DNA, 25 bp, Probe sequence
gcgagtgcgttgccactaaatttat

SEQ ID NO: 188759 - DNA, 25 bp, Probe sequence
gcgttgccactaaatttatcaccag

SEQ ID NO: 188760 - DNA, 25 bp, Probe sequence
gctaatccaccggctaatggtgcaa

SEQ ID NO: 188761 - DNA, 25 bp, Probe sequence
gcttttgcaatcacgatgacgccac

SEQ ID NO: 188762 - DNA, 25 bp, Probe sequence
gaacgccatgttgctacggataaag

SEQ ID NO: 188763 - DNA, 25 bp, Probe sequence
gaaaatagaacgccatgttgctacg

SEQ ID NO: 188764 - DNA, 25 bp, Probe sequence
gaggcttttgcaatcacgatgacgc

SEQ ID NO: 188765 - DNA, 25 bp, Probe sequence
gatgatgccattaactaccattaaa

SEQ ID NO: 188766 - DNA, 25 bp, Probe sequence
gatgccattaactaccattaaagat

SEQ ID NO: 188767 - DNA, 25 bp, Probe sequence
gataaagctaatccaccggctaatg

SEQ ID NO: 188768 - DNA, 25 bp, Probe sequence
gttgccactaaatttatcaccagca

SEQ ID NO: 188769 - DNA, 25 bp, Probe sequence
gtgcgttgccactaaatttatcacc

SEQ ID NO: 188770 - DNA, 25 bp, Probe sequence
ggtgcaagaatagtgatgatgccat

SEQ ID NO: 188771 - DNA, 25 bp, Probe sequence
taaagctaatccaccggctaatggt

SEQ ID NO: 188772 - DNA, 25 bp, Probe sequence
taaatttatcaccagcagaggcttt

SEQ ID NO: 188773 - DNA, 25 bp, Probe sequence
tacggataaagctaatccaccggct

SEQ ID NO: 188774 - DNA, 25 bp, Probe sequence
tagaacgccatgttgctacggataa

SEQ ID NO: 188775 - DNA, 25 bp, Probe sequence
ttttgcaatcacgatgacgccacca

SEQ ID NO: 188776 - DNA, 25 bp, Probe sequence
ttatcaccagcagaggcttttgcaa

SEQ ID NO: 188777 - DNA, 25 bp, Probe sequence
ttagcgagtgcgttgccactaaatt

SEQ ID NO: 188778 - DNA, 25 bp, Probe sequence
attatctttgtgattttaaaaatga

SEQ ID NO: 188779 - DNA, 25 bp, Probe sequence
atttattatttaatgcgttcattga

SEQ ID NO: 188780 - DNA, 25 bp, Probe sequence
ataacgtatcatcatttaagttaca

SEQ ID NO: 188781 - DNA, 25 bp, Probe sequence
atcatcatttaagttacaaattatc

SEQ ID NO: 188782 - DNA, 25 bp, Probe sequence
atcatttaagttacaaattatcttt

SEQ ID NO: 188783 - DNA, 25 bp, Probe sequence
atcgtgtttttaaataacgtatcat

SEQ ID NO: 188784 - DNA, 25 bp, Probe sequence
atgcgttcattgaaacgaagtatcg

SEQ ID NO: 188785 - DNA, 25 bp, Probe sequence
acgtatcatcatttaagttacaaat

SEQ ID NO: 188786 - DNA, 25 bp, Probe sequence
aacgtatcatcatttaagttacaaa

SEQ ID NO: 188787 - DNA, 25 bp, Probe sequence
aagttacaaattatctttgtgattt

SEQ ID NO: 188788 - DNA, 25 bp, Probe sequence
aatgcgttcattgaaacgaagtatc

SEQ ID NO: 188789 - DNA, 25 bp, Probe sequence
aataacgtatcatcatttaagttac

SEQ ID NO: 188790 - DNA, 25 bp, Probe sequence
cattgaaacgaagtatcgtgttttt

SEQ ID NO: 188791 - DNA, 25 bp, Probe sequence
cgtatcatcatttaagttacaaatt

SEQ ID NO: 188792 - DNA, 25 bp, Probe sequence
gcgttcattgaaacgaagtatcgtg

SEQ ID NO: 188793 - DNA, 25 bp, Probe sequence
gagtgaaactaaaatgctaatgtgt

SEQ ID NO: 188794 - DNA, 25 bp, Probe sequence
gttcattgaaacgaagtatcgtgtt

SEQ ID NO: 188795 - DNA, 25 bp, Probe sequence
gttacaaattatctttgtgatttta

SEQ ID NO: 188796 - DNA, 25 bp, Probe sequence
gtttttaaataacgtatcatcattt

SEQ ID NO: 188797 - DNA, 25 bp, Probe sequence
gtatcatcatttaagttacaaatta

SEQ ID NO: 188798 - DNA, 25 bp, Probe sequence
gtgaaactaaaatgctaatgtgtac

SEQ ID NO: 188799 - DNA, 25 bp, Probe sequence
gtgtttttaaataacgtatcatcat

SEQ ID NO: 188800 - DNA, 25 bp, Probe sequence
tgaaactaaaatgctaatgtgtact

SEQ ID NO: 188801 - DNA, 25 bp, Probe sequence
tgcgttcattgaaacgaagtatcgt

SEQ ID NO: 188802 - DNA, 25 bp, Probe sequence
tcgtgtttttaaataacgtatcatc

SEQ ID NO: 188803 - DNA, 25 bp, Probe sequence
taacgtatcatcatttaagttacaa

SEQ ID NO: 188804 - DNA, 25 bp, Probe sequence
tatcgtgtttttaaataacgtatca

SEQ ID NO: 188805 - DNA, 25 bp, Probe sequence
tatttattatttaatgcgttcattg

SEQ ID NO: 188806 - DNA, 25 bp, Probe sequence
tatttaatgcgttcattgaaacgaa

SEQ ID NO: 188807 - DNA, 25 bp, Probe sequence
tattatttaatgcgttcattgaaac

SEQ ID NO: 188808 - DNA, 25 bp, Probe sequence
tttaatgcgttcattgaaacgaagt

SEQ ID NO: 188809 - DNA, 25 bp, Probe sequence
tttattatttaatgcgttcattgaa

SEQ ID NO: 188810 - DNA, 25 bp, Probe sequence
ttatttaatgcgttcattgaaacga

SEQ ID NO: 188811 - DNA, 25 bp, Probe sequence
ttaatgcgttcattgaaacgaagta

SEQ ID NO: 188812 - DNA, 25 bp, Probe sequence
atatcgatgcatacttctgcccatc

SEQ ID NO: 188813 - DNA, 25 bp, Probe sequence
ataaacatatcgatgcatacttctg

SEQ ID NO: 188814 - DNA, 25 bp, Probe sequence
atcaccttatgatagggagttattt

SEQ ID NO: 188815 - DNA, 25 bp, Probe sequence
atgatagggagttattttttgtcgg

SEQ ID NO: 188816 - DNA, 25 bp, Probe sequence
acatatcgatgcatacttctgccca

SEQ ID NO: 188817 - DNA, 25 bp, Probe sequence
aaattccgcaaattattaattatat

SEQ ID NO: 188818 - DNA, 25 bp, Probe sequence
aaacatatcgatgcatacttctgcc

SEQ ID NO: 188819 - DNA, 25 bp, Probe sequence
aacatatcgatgcatacttctgccc

SEQ ID NO: 188820 - DNA, 25 bp, Probe sequence
aataaacatatcgatgcatacttct

SEQ ID NO: 188821 - DNA, 25 bp, Probe sequence
aattccgcaaattattaattatatc

SEQ ID NO: 188822 - DNA, 25 bp, Probe sequence
caaaattccgcaaattattaattat

SEQ ID NO: 188823 - DNA, 25 bp, Probe sequence
caccttatgatagggagttattttt

SEQ ID NO: 188824 - DNA, 25 bp, Probe sequence
catcaccttatgatagggagttatt

SEQ ID NO: 188825 - DNA, 25 bp, Probe sequence
catatcgatgcatacttctgcccat

SEQ ID NO: 188826 - DNA, 25 bp, Probe sequence
cttatgatagggagttattttttgt

SEQ ID NO: 188827 - DNA, 25 bp, Probe sequence
ctgcccatcaccttatgatagggag

SEQ ID NO: 188828 - DNA, 25 bp, Probe sequence
cccatcaccttatgatagggagtta

SEQ ID NO: 188829 - DNA, 25 bp, Probe sequence
ccttatgatagggagttattttttg

SEQ ID NO: 188830 - DNA, 25 bp, Probe sequence
ccatcaccttatgatagggagttat

SEQ ID NO: 188831 - DNA, 25 bp, Probe sequence
gcccatcaccttatgatagggagtt

SEQ ID NO: 188832 - DNA, 25 bp, Probe sequence
gaataaacatatcgatgcatacttc

SEQ ID NO: 188833 - DNA, 25 bp, Probe sequence
gagttattttttgtcggaatagtca

SEQ ID NO: 188834 - DNA, 25 bp, Probe sequence
tgatagggagttattttttgtcgga

SEQ ID NO: 188835 - DNA, 25 bp, Probe sequence
tgcccatcaccttatgatagggagt

SEQ ID NO: 188836 - DNA, 25 bp, Probe sequence
tctgcccatcaccttatgataggga

SEQ ID NO: 188837 - DNA, 25 bp, Probe sequence
tcaccttatgatagggagttatttt

SEQ ID NO: 188838 - DNA, 25 bp, Probe sequence
taaacatatcgatgcatacttctgc

SEQ ID NO: 188839 - DNA, 25 bp, Probe sequence
tatcgatgcatacttctgcccatca

SEQ ID NO: 188840 - DNA, 25 bp, Probe sequence
tagaaacaaaattccgcaaattatt

SEQ ID NO: 188841 - DNA, 25 bp, Probe sequence
tatgatagggagttattttttgtcg

SEQ ID NO: 188842 - DNA, 25 bp, Probe sequence
tattttttgtcggaatagtcaaaat

SEQ ID NO: 188843 - DNA, 25 bp, Probe sequence
ttagaaacaaaattccgcaaattat

SEQ ID NO: 188844 - DNA, 25 bp, Probe sequence
ttatgatagggagttattttttgtc

SEQ ID NO: 188845 - DNA, 25 bp, Probe sequence
ttctgcccatcaccttatgataggg

SEQ ID NO: 188846 - DNA, 25 bp, Probe sequence
attgtattatctcaaatatatttgt

SEQ ID NO: 188847 - DNA, 25 bp, Probe sequence
atatcgctagaaagaccattgtatt

SEQ ID NO: 188848 - DNA, 25 bp, Probe sequence
atagtagtgatatcgctagaaagac

SEQ ID NO: 188849 - DNA, 25 bp, Probe sequence
atcgctagaaagaccattgtattat

SEQ ID NO: 188850 - DNA, 25 bp, Probe sequence
atgccgacacctatacataatccta

SEQ ID NO: 188851 - DNA, 25 bp, Probe sequence
atgaatagtagtgatatcgctagaa

SEQ ID NO: 188852 - DNA, 25 bp, Probe sequence
agtgatatcgctagaaagaccattg

SEQ ID NO: 188853 - DNA, 25 bp, Probe sequence
agtagtgatatcgctagaaagacca

SEQ ID NO: 188854 - DNA, 25 bp, Probe sequence
agaccattgtattatctcaaatata

SEQ ID NO: 188855 - DNA, 25 bp, Probe sequence
agaaagaccattgtattatctcaaa

SEQ ID NO: 188856 - DNA, 25 bp, Probe sequence
accattgtattatctcaaatatatt

SEQ ID NO: 188857 - DNA, 25 bp, Probe sequence
acctatacataatcctaaaatgaat

SEQ ID NO: 188858 - DNA, 25 bp, Probe sequence
acacctatacataatcctaaaatga

SEQ ID NO: 188859 - DNA, 25 bp, Probe sequence
aaagaccattgtattatctcaaata

SEQ ID NO: 188860 - DNA, 25 bp, Probe sequence
aagaccattgtattatctcaaatat

SEQ ID NO: 188861 - DNA, 25 bp, Probe sequence
ctagaaagaccattgtattatctca

SEQ ID NO: 188862 - DNA, 25 bp, Probe sequence
cgacacctatacataatcctaaaat

SEQ ID NO: 188863 - DNA, 25 bp, Probe sequence
ccgacacctatacataatcctaaaa

SEQ ID NO: 188864 - DNA, 25 bp, Probe sequence
gccgacacctatacataatcctaaa

SEQ ID NO: 188865 - DNA, 25 bp, Probe sequence
gctagaaagaccattgtattatctc

SEQ ID NO: 188866 - DNA, 25 bp, Probe sequence
gaatagtagtgatatcgctagaaag

SEQ ID NO: 188867 - DNA, 25 bp, Probe sequence
gaaagaccattgtattatctcaaat

SEQ ID NO: 188868 - DNA, 25 bp, Probe sequence
gacacctatacataatcctaaaatg

SEQ ID NO: 188869 - DNA, 25 bp, Probe sequence
gaccattgtattatctcaaatatat

SEQ ID NO: 188870 - DNA, 25 bp, Probe sequence
gatatcgctagaaagaccattgtat

SEQ ID NO: 188871 - DNA, 25 bp, Probe sequence
gtatatgcaaacaatgagtctagaa

SEQ ID NO: 188872 - DNA, 25 bp, Probe sequence
gtagtgatatcgctagaaagaccat

SEQ ID NO: 188873 - DNA, 25 bp, Probe sequence
gtgatatcgctagaaagaccattgt

SEQ ID NO: 188874 - DNA, 25 bp, Probe sequence
tgatatcgctagaaagaccattgta

SEQ ID NO: 188875 - DNA, 25 bp, Probe sequence
tgccgacacctatacataatcctaa

SEQ ID NO: 188876 - DNA, 25 bp, Probe sequence
tcgctagaaagaccattgtattatc

SEQ ID NO: 188877 - DNA, 25 bp, Probe sequence
tagaaagaccattgtattatctcaa

SEQ ID NO: 188878 - DNA, 25 bp, Probe sequence
tagtgatatcgctagaaagaccatt

SEQ ID NO: 188879 - DNA, 25 bp, Probe sequence
tatcgctagaaagaccattgtatta

SEQ ID NO: 188880 - DNA, 25 bp, Probe sequence
atttcttggttgctaatttggttag

SEQ ID NO: 188881 - DNA, 25 bp, Probe sequence
atataggacttttatgcattggtat

SEQ ID NO: 188882 - DNA, 25 bp, Probe sequence
actgattgttatttcgttgatttta

SEQ ID NO: 188883 - DNA, 25 bp, Probe sequence
acactgattgttatttcgttgattt

SEQ ID NO: 188884 - DNA, 25 bp, Probe sequence
aaatataggacttttatgcattggt

SEQ ID NO: 188885 - DNA, 25 bp, Probe sequence
aaaggtggtgacaaaatggacttga

SEQ ID NO: 188886 - DNA, 25 bp, Probe sequence
cactgattgttatttcgttgatttt

SEQ ID NO: 188887 - DNA, 25 bp, Probe sequence
ctgtgtataaagcattcggtcaaaa

SEQ ID NO: 188888 - DNA, 25 bp, Probe sequence
gctaatttggttagcatcctttttt

SEQ ID NO: 188889 - DNA, 25 bp, Probe sequence
gcattcggtcaaaatataggacttt

SEQ ID NO: 188890 - DNA, 25 bp, Probe sequence
gtttgtttgtggttaatgtttctgt

SEQ ID NO: 188891 - DNA, 25 bp, Probe sequence
gtttctgtgtataaagcattcggtc

SEQ ID NO: 188892 - DNA, 25 bp, Probe sequence
gtttgtggttaatgtttctgtgtat

SEQ ID NO: 188893 - DNA, 25 bp, Probe sequence
gtgtataaagcattcggtcaaaata

SEQ ID NO: 188894 - DNA, 25 bp, Probe sequence
ggtggtgacaaaatggacttgaata

SEQ ID NO: 188895 - DNA, 25 bp, Probe sequence
ggtttgtttgtggttaatgtttctg

SEQ ID NO: 188896 - DNA, 25 bp, Probe sequence
ggttaatgtttctgtgtataaagca

SEQ ID NO: 188897 - DNA, 25 bp, Probe sequence
ggttgctaatttggttagcatcctt

SEQ ID NO: 188898 - DNA, 25 bp, Probe sequence
ggacttttatgcattggtataacac

SEQ ID NO: 188899 - DNA, 25 bp, Probe sequence
tggttagcatcctttttttattagg

SEQ ID NO: 188900 - DNA, 25 bp, Probe sequence
tgtggttaatgtttctgtgtataaa

SEQ ID NO: 188901 - DNA, 25 bp, Probe sequence
tgtcttttttaatttcttggttgct

SEQ ID NO: 188902 - DNA, 25 bp, Probe sequence
tgattgttatttcgttgattttaaa

SEQ ID NO: 188903 - DNA, 25 bp, Probe sequence
tgaaagcaatcaagaaaggagttag

SEQ ID NO: 188904 - DNA, 25 bp, Probe sequence
taatttcttggttgctaatttggtt

SEQ ID NO: 188905 - DNA, 25 bp, Probe sequence
taaagcattcggtcaaaatatagga

SEQ ID NO: 188906 - DNA, 25 bp, Probe sequence
tagcatcctttttttattaggtttg

SEQ ID NO: 188907 - DNA, 25 bp, Probe sequence
taggacttttatgcattggtataac

SEQ ID NO: 188908 - DNA, 25 bp, Probe sequence
tatgcattggtataacactgattgt

SEQ ID NO: 188909 - DNA, 25 bp, Probe sequence
tttgtggttaatgtttctgtgtata

SEQ ID NO: 188910 - DNA, 25 bp, Probe sequence
ttctgtgtataaagcattcggtcaa

SEQ ID NO: 188911 - DNA, 25 bp, Probe sequence
ttgttatttcgttgattttaaatca

SEQ ID NO: 188912 - DNA, 25 bp, Probe sequence
ttggttagcatcctttttttattag

SEQ ID NO: 188913 - DNA, 25 bp, Probe sequence
ttgtttgtggttaatgtttctgtgt

SEQ ID NO: 188914 - DNA, 25 bp, Probe sequence
atatcgtggttttatgtttattatc

SEQ ID NO: 188915 - DNA, 25 bp, Probe sequence
atcgtggttttatgtttattatcaa

SEQ ID NO: 188916 - DNA, 25 bp, Probe sequence
atgattaaaaagttgttatggtcaa

SEQ ID NO: 188917 - DNA, 25 bp, Probe sequence
atggtcaactatatcgtggttttat

SEQ ID NO: 188918 - DNA, 25 bp, Probe sequence
agttgttatggtcaactatatcgtg

SEQ ID NO: 188919 - DNA, 25 bp, Probe sequence
actatatcgtggttttatgtttatt

SEQ ID NO: 188920 - DNA, 25 bp, Probe sequence
aaagttgttatggtcaactatatcg

SEQ ID NO: 188921 - DNA, 25 bp, Probe sequence
aaaagttgttatggtcaactatatc

SEQ ID NO: 188922 - DNA, 25 bp, Probe sequence
aactatatcgtggttttatgtttat

SEQ ID NO: 188923 - DNA, 25 bp, Probe sequence
aagttgttatggtcaactatatcgt

SEQ ID NO: 188924 - DNA, 25 bp, Probe sequence
caactatatcgtggttttatgttta

SEQ ID NO: 188925 - DNA, 25 bp, Probe sequence
ctatatcgtggttttatgtttatta

SEQ ID NO: 188926 - DNA, 25 bp, Probe sequence
cgtggttttatgtttattatcaatc

SEQ ID NO: 188927 - DNA, 25 bp, Probe sequence
gttgttatggtcaactatatcgtgg

SEQ ID NO: 188928 - DNA, 25 bp, Probe sequence
gttatggtcaactatatcgtggttt

SEQ ID NO: 188929 - DNA, 25 bp, Probe sequence
gttttatgtttattatcaatcaaaa

SEQ ID NO: 188930 - DNA, 25 bp, Probe sequence
gtcaactatatcgtggttttatgtt

SEQ ID NO: 188931 - DNA, 25 bp, Probe sequence
gtggttttatgtttattatcaatca

SEQ ID NO: 188932 - DNA, 25 bp, Probe sequence
ggtcaactatatcgtggttttatgt

SEQ ID NO: 188933 - DNA, 25 bp, Probe sequence
ggttttatgtttattatcaatcaaa

SEQ ID NO: 188934 - DNA, 25 bp, Probe sequence
tggtcaactatatcgtggttttatg

SEQ ID NO: 188935 - DNA, 25 bp, Probe sequence
tggttttatgtttattatcaatcaa

SEQ ID NO: 188936 - DNA, 25 bp, Probe sequence
tgttatggtcaactatatcgtggtt

SEQ ID NO: 188937 - DNA, 25 bp, Probe sequence
tcgtggttttatgtttattatcaat

SEQ ID NO: 188938 - DNA, 25 bp, Probe sequence
tcaactatatcgtggttttatgttt

SEQ ID NO: 188939 - DNA, 25 bp, Probe sequence
tatggtcaactatatcgtggtttta

SEQ ID NO: 188940 - DNA, 25 bp, Probe sequence
tatgtttattatcaatcaaaatata

SEQ ID NO: 188941 - DNA, 25 bp, Probe sequence
tatcgtggttttatgtttattatca

SEQ ID NO: 188942 - DNA, 25 bp, Probe sequence
tatatcgtggttttatgtttattat

SEQ ID NO: 188943 - DNA, 25 bp, Probe sequence
tttatgtttattatcaatcaaaata

SEQ ID NO: 188944 - DNA, 25 bp, Probe sequence
ttttatgtttattatcaatcaaaat

SEQ ID NO: 188945 - DNA, 25 bp, Probe sequence
ttatggtcaactatatcgtggtttt

SEQ ID NO: 188946 - DNA, 25 bp, Probe sequence
ttatgtttattatcaatcaaaatat

SEQ ID NO: 188947 - DNA, 25 bp, Probe sequence
ttgttatggtcaactatatcgtggt

SEQ ID NO: 188948 - DNA, 25 bp, Probe sequence
atttgatcgttttgctgtttgcttt

SEQ ID NO: 188949 - DNA, 25 bp, Probe sequence
ataaaattatagattccttttcaga

SEQ ID NO: 188950 - DNA, 25 bp, Probe sequence
atcgttttgctgtttgctttcttaa

SEQ ID NO: 188951 - DNA, 25 bp, Probe sequence
atgatttgatcgttttgctgtttgc

SEQ ID NO: 188952 - DNA, 25 bp, Probe sequence
aatgcattaggaatttttggtatgt

SEQ ID NO: 188953 - DNA, 25 bp, Probe sequence
aatatccatatatattattgatgat

SEQ ID NO: 188954 - DNA, 25 bp, Probe sequence
aattatagattccttttcagaaaat

SEQ ID NO: 188955 - DNA, 25 bp, Probe sequence
ctgtttgctttcttaatatccatat

SEQ ID NO: 188956 - DNA, 25 bp, Probe sequence
cgttttgctgtttgctttcttaata

SEQ ID NO: 188957 - DNA, 25 bp, Probe sequence
gctgtttgctttcttaatatccata

SEQ ID NO: 188958 - DNA, 25 bp, Probe sequence
gcattaggaatttttggtatgtata

SEQ ID NO: 188959 - DNA, 25 bp, Probe sequence
gatggagtgataataaatgcattag

SEQ ID NO: 188960 - DNA, 25 bp, Probe sequence
gatcgttttgctgtttgctttctta

SEQ ID NO: 188961 - DNA, 25 bp, Probe sequence
gatttgatcgttttgctgtttgctt

SEQ ID NO: 188962 - DNA, 25 bp, Probe sequence
gttttgctgtttgctttcttaatat

SEQ ID NO: 188963 - DNA, 25 bp, Probe sequence
gtttgctttcttaatatccatatat

SEQ ID NO: 188964 - DNA, 25 bp, Probe sequence
tgtttgctttcttaatatccatata

SEQ ID NO: 188965 - DNA, 25 bp, Probe sequence
tgatttgatcgttttgctgtttgct

SEQ ID NO: 188966 - DNA, 25 bp, Probe sequence
tgatcgttttgctgtttgctttctt

SEQ ID NO: 188967 - DNA, 25 bp, Probe sequence
tgctgtttgctttcttaatatccat

SEQ ID NO: 188968 - DNA, 25 bp, Probe sequence
tcgttttgctgtttgctttcttaat

SEQ ID NO: 188969 - DNA, 25 bp, Probe sequence
tagattccttttcagaaaatattat

SEQ ID NO: 188970 - DNA, 25 bp, Probe sequence
tatgatttgatcgttttgctgtttg

SEQ ID NO: 188971 - DNA, 25 bp, Probe sequence
tatttatgatttgatcgttttgctg

SEQ ID NO: 188972 - DNA, 25 bp, Probe sequence
tttgatcgttttgctgtttgctttc

SEQ ID NO: 188973 - DNA, 25 bp, Probe sequence
tttgctgtttgctttcttaatatcc

SEQ ID NO: 188974 - DNA, 25 bp, Probe sequence
tttgctttcttaatatccatatata

SEQ ID NO: 188975 - DNA, 25 bp, Probe sequence
tttatgatttgatcgttttgctgtt

SEQ ID NO: 188976 - DNA, 25 bp, Probe sequence
ttttgctgtttgctttcttaatatc

SEQ ID NO: 188977 - DNA, 25 bp, Probe sequence
ttatagattccttttcagaaaatat

SEQ ID NO: 188978 - DNA, 25 bp, Probe sequence
ttgctttcttaatatccatatatat

SEQ ID NO: 188979 - DNA, 25 bp, Probe sequence
ttgatgatggagtgataataaatgc

SEQ ID NO: 188980 - DNA, 25 bp, Probe sequence
ttgctgtttgctttcttaatatcca

SEQ ID NO: 188981 - DNA, 25 bp, Probe sequence
ttgatcgttttgctgtttgctttct

SEQ ID NO: 188982 - DNA, 25 bp, Probe sequence
attgtataagtctgccaactctatt

SEQ ID NO: 188983 - DNA, 25 bp, Probe sequence
atttcttttatatatccttcttctc

SEQ ID NO: 188984 - DNA, 25 bp, Probe sequence
atacctaatttctatctcattcaaa

SEQ ID NO: 188985 - DNA, 25 bp, Probe sequence
ataagtctgccaactctattccatt

SEQ ID NO: 188986 - DNA, 25 bp, Probe sequence
atcttcctactatttcttttatata

SEQ ID NO: 188987 - DNA, 25 bp, Probe sequence
acctgtgggagttagtgtgttatac

SEQ ID NO: 188988 - DNA, 25 bp, Probe sequence
actatttcttttatatatccttctt

SEQ ID NO: 188989 - DNA, 25 bp, Probe sequence
aaatattcttctggcaatcttccta

SEQ ID NO: 188990 - DNA, 25 bp, Probe sequence
aagctctttgtttttaatattgtat

SEQ ID NO: 188991 - DNA, 25 bp, Probe sequence
aatattgtataagtctgccaactct

SEQ ID NO: 188992 - DNA, 25 bp, Probe sequence
caatcttcctactatttcttttata

SEQ ID NO: 188993 - DNA, 25 bp, Probe sequence
cttcctactatttcttttatatatc

SEQ ID NO: 188994 - DNA, 25 bp, Probe sequence
ctctattccatttccttttactata

SEQ ID NO: 188995 - DNA, 25 bp, Probe sequence
ctgtgggagttagtgtgttatacct

SEQ ID NO: 188996 - DNA, 25 bp, Probe sequence
cctactatttcttttatatatcctt

SEQ ID NO: 188997 - DNA, 25 bp, Probe sequence
cctaatttctatctcattcaaatga

SEQ ID NO: 188998 - DNA, 25 bp, Probe sequence
gcaatcttcctactatttcttttat

SEQ ID NO: 188999 - DNA, 25 bp, Probe sequence
gttatacctaatttctatctcattc

SEQ ID NO: 189000 - DNA, 25 bp, Probe sequence
gtataagtctgccaactctattcca

SEQ ID NO: 189001 - DNA, 25 bp, Probe sequence
gtaacattaaatattcttctggcaa

SEQ ID NO: 189002 - DNA, 25 bp, Probe sequence
gtgaaaagctctttgtttttaatat

SEQ ID NO: 189003 - DNA, 25 bp, Probe sequence
gtgttatacctaatttctatctcat

SEQ ID NO: 189004 - DNA, 25 bp, Probe sequence
gtgtgttatacctaatttctatctc

SEQ ID NO: 189005 - DNA, 25 bp, Probe sequence
tgtataagtctgccaactctattcc

SEQ ID NO: 189006 - DNA, 25 bp, Probe sequence
tctttaaatactaaacctgtgggag

SEQ ID NO: 189007 - DNA, 25 bp, Probe sequence
tctattccatttccttttactataa

SEQ ID NO: 189008 - DNA, 25 bp, Probe sequence
taagtctgccaactctattccattt

SEQ ID NO: 189009 - DNA, 25 bp, Probe sequence
taaacctgtgggagttagtgtgtta

SEQ ID NO: 189010 - DNA, 25 bp, Probe sequence
taaatattcttctggcaatcttcct

SEQ ID NO: 189011 - DNA, 25 bp, Probe sequence
tataagtctgccaactctattccat

SEQ ID NO: 189012 - DNA, 25 bp, Probe sequence
tatacctaatttctatctcattcaa

SEQ ID NO: 189013 - DNA, 25 bp, Probe sequence
tttcttttatatatccttcttctcc

SEQ ID NO: 189014 - DNA, 25 bp, Probe sequence
ttatgaattttttatgtaacattaa

SEQ ID NO: 189015 - DNA, 25 bp, Probe sequence
ttcttatttattggttttatgaatt

SEQ ID NO: 189016 - DNA, 25 bp, Probe sequence
ataccagatactaaaccgatgatac

SEQ ID NO: 189017 - DNA, 25 bp, Probe sequence
atactaaaccgatgataccacctat

SEQ ID NO: 189018 - DNA, 25 bp, Probe sequence
atgaatgcaattacaatactatttg

SEQ ID NO: 189019 - DNA, 25 bp, Probe sequence
agatactaaaccgatgataccacct

SEQ ID NO: 189020 - DNA, 25 bp, Probe sequence
agctcctacaataccagatactaaa

SEQ ID NO: 189021 - DNA, 25 bp, Probe sequence
accagctcctacaataccagatact

SEQ ID NO: 189022 - DNA, 25 bp, Probe sequence
accagatactaaaccgatgatacca

SEQ ID NO: 189023 - DNA, 25 bp, Probe sequence
accgatgataccacctattgtaatt

SEQ ID NO: 189024 - DNA, 25 bp, Probe sequence
actaaaccgatgataccacctattg

SEQ ID NO: 189025 - DNA, 25 bp, Probe sequence
acaataccagatactaaaccgatga

SEQ ID NO: 189026 - DNA, 25 bp, Probe sequence
aaaccgatgataccacctattgtaa

SEQ ID NO: 189027 - DNA, 25 bp, Probe sequence
aaccgatgataccacctattgtaat

SEQ ID NO: 189028 - DNA, 25 bp, Probe sequence
aagtacgcgattaaacttaatatga

SEQ ID NO: 189029 - DNA, 25 bp, Probe sequence
aataataatgaatgctccaccagct

SEQ ID NO: 189030 - DNA, 25 bp, Probe sequence
aatactatttgtaacaaccatattc

SEQ ID NO: 189031 - DNA, 25 bp, Probe sequence
caagtagtactggaataataatgaa

SEQ ID NO: 189032 - DNA, 25 bp, Probe sequence
cacctattgtaattaaaagtacgcg

SEQ ID NO: 189033 - DNA, 25 bp, Probe sequence
cagctcctacaataccagatactaa

SEQ ID NO: 189034 - DNA, 25 bp, Probe sequence
cagatactaaaccgatgataccacc

SEQ ID NO: 189035 - DNA, 25 bp, Probe sequence
cctacaataccagatactaaaccga

SEQ ID NO: 189036 - DNA, 25 bp, Probe sequence
ctatttgtaacaaccatattcattg

SEQ ID NO: 189037 - DNA, 25 bp, Probe sequence
ctaaaccgatgataccacctattgt

SEQ ID NO: 189038 - DNA, 25 bp, Probe sequence
ctcctacaataccagatactaaacc

SEQ ID NO: 189039 - DNA, 25 bp, Probe sequence
ccgatgataccacctattgtaatta

SEQ ID NO: 189040 - DNA, 25 bp, Probe sequence
ccagctcctacaataccagatacta

SEQ ID NO: 189041 - DNA, 25 bp, Probe sequence
gctcctacaataccagatactaaac

SEQ ID NO: 189042 - DNA, 25 bp, Probe sequence
gaataataatgaatgctccaccagc

SEQ ID NO: 189043 - DNA, 25 bp, Probe sequence
gatgataccacctattgtaattaaa

SEQ ID NO: 189044 - DNA, 25 bp, Probe sequence
gatactaaaccgatgataccaccta

SEQ ID NO: 189045 - DNA, 25 bp, Probe sequence
gataccacctattgtaattaaaagt

SEQ ID NO: 189046 - DNA, 25 bp, Probe sequence
gtaacaaccatattcattggtaatt

SEQ ID NO: 189047 - DNA, 25 bp, Probe sequence
taataatgaatgctccaccagctcc

SEQ ID NO: 189048 - DNA, 25 bp, Probe sequence
taaaccgatgataccacctattgta

SEQ ID NO: 189049 - DNA, 25 bp, Probe sequence
tactaaaccgatgataccacctatt

SEQ ID NO: 189050 - DNA, 25 bp, Probe sequence
ataacgcccaacaccagcaggtgtt

SEQ ID NO: 189051 - DNA, 25 bp, Probe sequence
ataaattcgttcataaatatatatt

SEQ ID NO: 189052 - DNA, 25 bp, Probe sequence
atcgaggcattagccaaaaaacata

SEQ ID NO: 189053 - DNA, 25 bp, Probe sequence
atgctgatgactaataataacgccc

SEQ ID NO: 189054 - DNA, 25 bp, Probe sequence
aggtgttgggctcatctataaattc

SEQ ID NO: 189055 - DNA, 25 bp, Probe sequence
accagcaggtgttgggctcatctat

SEQ ID NO: 189056 - DNA, 25 bp, Probe sequence
accatcgaggcattagccaaaaaac

SEQ ID NO: 189057 - DNA, 25 bp, Probe sequence
acaccagcaggtgttgggctcatct

SEQ ID NO: 189058 - DNA, 25 bp, Probe sequence
aacaaaccatcgaggcattagccaa

SEQ ID NO: 189059 - DNA, 25 bp, Probe sequence
aatatatattatcactttggaagga

SEQ ID NO: 189060 - DNA, 25 bp, Probe sequence
caaaccatcgaggcattagccaaaa

SEQ ID NO: 189061 - DNA, 25 bp, Probe sequence
caccagcaggtgttgggctcatcta

SEQ ID NO: 189062 - DNA, 25 bp, Probe sequence
cagcaggtgttgggctcatctataa

SEQ ID NO: 189063 - DNA, 25 bp, Probe sequence
caggtgttgggctcatctataaatt

SEQ ID NO: 189064 - DNA, 25 bp, Probe sequence
ctaataataacgcccaacaccagca

SEQ ID NO: 189065 - DNA, 25 bp, Probe sequence
ccagcaggtgttgggctcatctata

SEQ ID NO: 189066 - DNA, 25 bp, Probe sequence
gctgatgactaataataacgcccaa

SEQ ID NO: 189067 - DNA, 25 bp, Probe sequence
gctcatctataaattcgttcataaa

SEQ ID NO: 189068 - DNA, 25 bp, Probe sequence
gcaggtgttgggctcatctataaat

SEQ ID NO: 189069 - DNA, 25 bp, Probe sequence
gaaattaatcatgctgatgactaat

SEQ ID NO: 189070 - DNA, 25 bp, Probe sequence
gactaataataacgcccaacaccag

SEQ ID NO: 189071 - DNA, 25 bp, Probe sequence
gaggaaatacgatgaaacaagcaat

SEQ ID NO: 189072 - DNA, 25 bp, Probe sequence
gatgactaataataacgcccaacac

SEQ ID NO: 189073 - DNA, 25 bp, Probe sequence
gttgggctcatctataaattcgttc

SEQ ID NO: 189074 - DNA, 25 bp, Probe sequence
gtgttgggctcatctataaattcgt

SEQ ID NO: 189075 - DNA, 25 bp, Probe sequence
gggctcatctataaattcgttcata

SEQ ID NO: 189076 - DNA, 25 bp, Probe sequence
ggtgttgggctcatctataaattcg

SEQ ID NO: 189077 - DNA, 25 bp, Probe sequence
ggctcatctataaattcgttcataa

SEQ ID NO: 189078 - DNA, 25 bp, Probe sequence
tgggctcatctataaattcgttcat

SEQ ID NO: 189079 - DNA, 25 bp, Probe sequence
tgactaataataacgcccaacacca

SEQ ID NO: 189080 - DNA, 25 bp, Probe sequence
tgttgggctcatctataaattcgtt

SEQ ID NO: 189081 - DNA, 25 bp, Probe sequence
tcatctataaattcgttcataaata

SEQ ID NO: 189082 - DNA, 25 bp, Probe sequence
taataataacgcccaacaccagcag

SEQ ID NO: 189083 - DNA, 25 bp, Probe sequence
tatcactttggaaggaggaaatacg

SEQ ID NO: 189084 - DNA, 25 bp, Probe sequence
ggaactttactatagttcccagtag

SEQ ID NO: 189085 - DNA, 25 bp, Probe sequence
atataccaaataatatccatccttt

SEQ ID NO: 189086 - DNA, 25 bp, Probe sequence
atatcacttatctttgaccatcctt

SEQ ID NO: 189087 - DNA, 25 bp, Probe sequence
atatccatcctttgtttcttttgtt

SEQ ID NO: 189088 - DNA, 25 bp, Probe sequence
atcacttatctttgaccatccttga

SEQ ID NO: 189089 - DNA, 25 bp, Probe sequence
atcccgcggaaacatatcacttatc

SEQ ID NO: 189090 - DNA, 25 bp, Probe sequence
atccatcctttgtttcttttgttat

SEQ ID NO: 189091 - DNA, 25 bp, Probe sequence
atgctctttgttttgcagcattttt

SEQ ID NO: 189092 - DNA, 25 bp, Probe sequence
agataagtatatgccttctccttcc

SEQ ID NO: 189093 - DNA, 25 bp, Probe sequence
acatatcacttatctttgaccatcc

SEQ ID NO: 189094 - DNA, 25 bp, Probe sequence
aataatatccatcctttgtttcttt

SEQ ID NO: 189095 - DNA, 25 bp, Probe sequence
cacttatctttgaccatccttgatt

SEQ ID NO: 189096 - DNA, 25 bp, Probe sequence
cttatctttgaccatccttgattca

SEQ ID NO: 189097 - DNA, 25 bp, Probe sequence
gcagcatttttatcccgcggaaaca

SEQ ID NO: 189098 - DNA, 25 bp, Probe sequence
cgcggaaacatatcacttatctttg

SEQ ID NO: 189099 - DNA, 25 bp, Probe sequence
cccgcggaaacatatcacttatctt

SEQ ID NO: 189100 - DNA, 25 bp, Probe sequence
ccatcctttgtttcttttgttatat

SEQ ID NO: 189101 - DNA, 25 bp, Probe sequence
gccttctccttccggatgaaaaaga

SEQ ID NO: 189102 - DNA, 25 bp, Probe sequence
gcatttttatcccgcggaaacatat

SEQ ID NO: 189103 - DNA, 25 bp, Probe sequence
gaaacatatcacttatctttgacca

SEQ ID NO: 189104 - DNA, 25 bp, Probe sequence
gaaatccaaggaactttactatagt

SEQ ID NO: 189105 - DNA, 25 bp, Probe sequence
gtttcttttgttatattctcatcat

SEQ ID NO: 189106 - DNA, 25 bp, Probe sequence
tgttttgcagcatttttatcccgcg

SEQ ID NO: 189107 - DNA, 25 bp, Probe sequence
tgccttctccttccggatgaaaaag

SEQ ID NO: 189108 - DNA, 25 bp, Probe sequence
tcctttgtttcttttgttatattct

SEQ ID NO: 189109 - DNA, 25 bp, Probe sequence
taatatccatcctttgtttcttttg

SEQ ID NO: 189110 - DNA, 25 bp, Probe sequence
tatctttgaccatccttgattcaaa

SEQ ID NO: 189111 - DNA, 25 bp, Probe sequence
tattctcatcatatattgaaatcca

SEQ ID NO: 189112 - DNA, 25 bp, Probe sequence
tttgcagcatttttatcccgcggaa

SEQ ID NO: 189113 - DNA, 25 bp, Probe sequence
ttatcccgcggaaacatatcactta

SEQ ID NO: 189114 - DNA, 25 bp, Probe sequence
ttttgcagcatttttatcccgcgga

SEQ ID NO: 189115 - DNA, 25 bp, Probe sequence
ttctccttccggatgaaaaagatat

SEQ ID NO: 189116 - DNA, 25 bp, Probe sequence
ttgaccatccttgattcaaagataa

SEQ ID NO: 189117 - DNA, 25 bp, Probe sequence
ttgtttcttttgttatattctcatc

SEQ ID NO: 189118 - DNA, 25 bp, Probe sequence
attcgttactacttttgagatgcaa

SEQ ID NO: 189119 - DNA, 25 bp, Probe sequence
atttgctacaacacctatttaaagg

SEQ ID NO: 189120 - DNA, 25 bp, Probe sequence
atatcgaattcgttactacttttga

SEQ ID NO: 189121 - DNA, 25 bp, Probe sequence
ataaatttgctacaacacctattta

SEQ ID NO: 189122 - DNA, 25 bp, Probe sequence
atcaaacctacgtccattgttgcat

SEQ ID NO: 189123 - DNA, 25 bp, Probe sequence
atcgaattcgttactacttttgaga

SEQ ID NO: 189124 - DNA, 25 bp, Probe sequence
atgctgtaaacaagaaggtcgtcaa

SEQ ID NO: 189125 - DNA, 25 bp, Probe sequence
agcacacccctagatactgtgaagg

SEQ ID NO: 189126 - DNA, 25 bp, Probe sequence
acacccctagatactgtgaaggaat

SEQ ID NO: 189127 - DNA, 25 bp, Probe sequence
acagtagcactagctcacgaaattg

SEQ ID NO: 189128 - DNA, 25 bp, Probe sequence
aaatttgctcaaagaagaatatcga

SEQ ID NO: 189129 - DNA, 25 bp, Probe sequence
aaatgacattttggagaaagtaatc

SEQ ID NO: 189130 - DNA, 25 bp, Probe sequence
aaaggtgttgtagcacaaatattaa

SEQ ID NO: 189131 - DNA, 25 bp, Probe sequence
aacctacgtccattgttgcatatgg

SEQ ID NO: 189132 - DNA, 25 bp, Probe sequence
aagtaacacttacactgaggagtac

SEQ ID NO: 189133 - DNA, 25 bp, Probe sequence
aatggaggaattgtactatgaatac

SEQ ID NO: 189134 - DNA, 25 bp, Probe sequence
caaacctacgtccattgttgcatat

SEQ ID NO: 189135 - DNA, 25 bp, Probe sequence
cttacactgaggagtacaagttaat

SEQ ID NO: 189136 - DNA, 25 bp, Probe sequence
ctacgtccattgttgcatatggaga

SEQ ID NO: 189137 - DNA, 25 bp, Probe sequence
ctatgaatacagtagcactagctca

SEQ ID NO: 189138 - DNA, 25 bp, Probe sequence
gcactagctcacgaaattgaagatg

SEQ ID NO: 189139 - DNA, 25 bp, Probe sequence
gaattcgttactacttttgagatgc

SEQ ID NO: 189140 - DNA, 25 bp, Probe sequence
gaatacttagaaagcacacccctag

SEQ ID NO: 189141 - DNA, 25 bp, Probe sequence
gaatacagtagcactagctcacgaa

SEQ ID NO: 189142 - DNA, 25 bp, Probe sequence
gaaggtcgtcaaataagtaacactt

SEQ ID NO: 189143 - DNA, 25 bp, Probe sequence
gaaagtaatcaaacctacgtccatt

SEQ ID NO: 189144 - DNA, 25 bp, Probe sequence
gaaagcacacccctagatactgtga

SEQ ID NO: 189145 - DNA, 25 bp, Probe sequence
gatactgtgaaggaatgctgtaaac

SEQ ID NO: 189146 - DNA, 25 bp, Probe sequence
gttactacttttgagatgcaactaa

SEQ ID NO: 189147 - DNA, 25 bp, Probe sequence
gtagcactagctcacgaaattgaag

SEQ ID NO: 189148 - DNA, 25 bp, Probe sequence
gtaacacttacactgaggagtacaa

SEQ ID NO: 189149 - DNA, 25 bp, Probe sequence
gtaatcaaacctacgtccattgttg

SEQ ID NO: 189150 - DNA, 25 bp, Probe sequence
tacttagaaagcacacccctagata

SEQ ID NO: 189151 - DNA, 25 bp, Probe sequence
tagaaagcacacccctagatactgt

SEQ ID NO: 189152 - DNA, 25 bp, Probe sequence
atatatcagacttggtccgcttacc

SEQ ID NO: 189153 - DNA, 25 bp, Probe sequence
atatcagacttggtccgcttaccaa

SEQ ID NO: 189154 - DNA, 25 bp, Probe sequence
atacgtatacttactactctgacac

SEQ ID NO: 189155 - DNA, 25 bp, Probe sequence
atcagacttggtccgcttaccaaca

SEQ ID NO: 189156 - DNA, 25 bp, Probe sequence
atgggaatgtgaatctatcgaggaa

SEQ ID NO: 189157 - DNA, 25 bp, Probe sequence
cagacttggtccgcttaccaacaaa

SEQ ID NO: 189158 - DNA, 25 bp, Probe sequence
accaacaaaatccttcatacgtata

SEQ ID NO: 189159 - DNA, 25 bp, Probe sequence
acgtatacttactactctgacacac

SEQ ID NO: 189160 - DNA, 25 bp, Probe sequence
actctgacacacttcatgaaaggca

SEQ ID NO: 189161 - DNA, 25 bp, Probe sequence
actactctgacacacttcatgaaag

SEQ ID NO: 189162 - DNA, 25 bp, Probe sequence
aaatccttcatacgtatacttacta

SEQ ID NO: 189163 - DNA, 25 bp, Probe sequence
aacaaaatccttcatacgtatactt

SEQ ID NO: 189164 - DNA, 25 bp, Probe sequence
aagacacttacttgaaaaggagaat

SEQ ID NO: 189165 - DNA, 25 bp, Probe sequence
aatatccttcctgatcaatatatca

SEQ ID NO: 189166 - DNA, 25 bp, Probe sequence
cttactactctgacacacttcatga

SEQ ID NO: 189167 - DNA, 25 bp, Probe sequence
ctactagatcaaagacacttacttg

SEQ ID NO: 189168 - DNA, 25 bp, Probe sequence
gccactactagatcaaagacactta

SEQ ID NO: 189169 - DNA, 25 bp, Probe sequence
gcttaccaacaaaatccttcatacg

SEQ ID NO: 189170 - DNA, 25 bp, Probe sequence
gaagtggcagataatatccttcctg

SEQ ID NO: 189171 - DNA, 25 bp, Probe sequence
gacacacttcatgaaaggcatatat

SEQ ID NO: 189172 - DNA, 25 bp, Probe sequence
gacactagaaaaacaactcaaagag

SEQ ID NO: 189173 - DNA, 25 bp, Probe sequence
gacttggtccgcttaccaacaaaat

SEQ ID NO: 189174 - DNA, 25 bp, Probe sequence
gatcaatatatcagacttggtccgc

SEQ ID NO: 189175 - DNA, 25 bp, Probe sequence
gataatatccttcctgatcaatata

SEQ ID NO: 189176 - DNA, 25 bp, Probe sequence
gtggcagataatatccttcctgatc

SEQ ID NO: 189177 - DNA, 25 bp, Probe sequence
ggcagataatatccttcctgatcaa

SEQ ID NO: 189178 - DNA, 25 bp, Probe sequence
tggtccgcttaccaacaaaatcctt

SEQ ID NO: 189179 - DNA, 25 bp, Probe sequence
tgtgaatctatcgaggaagtggcag

SEQ ID NO: 189180 - DNA, 25 bp, Probe sequence
tccgcttaccaacaaaatccttcat

SEQ ID NO: 189181 - DNA, 25 bp, Probe sequence
tccttcatacgtatacttactactc

SEQ ID NO: 189182 - DNA, 25 bp, Probe sequence
tcatacgtatacttactactctgac

SEQ ID NO: 189183 - DNA, 25 bp, Probe sequence
tacttactactctgacacacttcat

SEQ ID NO: 189184 - DNA, 25 bp, Probe sequence
tatacttactactctgacacacttc

SEQ ID NO: 189185 - DNA, 25 bp, Probe sequence
ttatgccactactagatcaaagaca

SEQ ID NO: 189186 - DNA, 25 bp, Probe sequence
attgctatgctattgttcactaccg

SEQ ID NO: 189187 - DNA, 25 bp, Probe sequence
attacaccaattccaaatccaacta

SEQ ID NO: 189188 - DNA, 25 bp, Probe sequence
atatgaccacataatattttcagaa

SEQ ID NO: 189189 - DNA, 25 bp, Probe sequence
accaattccaaatccaactataata

SEQ ID NO: 189190 - DNA, 25 bp, Probe sequence
aaatgcccctactgaagatataaaa

SEQ ID NO: 189191 - DNA, 25 bp, Probe sequence
aaatgatcatcattcaattatcaaa

SEQ ID NO: 189192 - DNA, 25 bp, Probe sequence
aaagcaagtatggcgattattacat

SEQ ID NO: 189193 - DNA, 25 bp, Probe sequence
aaagctggttgttttcttgcattta

SEQ ID NO: 189194 - DNA, 25 bp, Probe sequence
aaaaaattgcactttctactggtat

SEQ ID NO: 189195 - DNA, 25 bp, Probe sequence
aacatgcttccaatcaacatacccc

SEQ ID NO: 189196 - DNA, 25 bp, Probe sequence
aactagctaaaattgcccctaacat

SEQ ID NO: 189197 - DNA, 25 bp, Probe sequence
cacaattcccgaaattacaccaatt

SEQ ID NO: 189198 - DNA, 25 bp, Probe sequence
ctactggtatatatccttgcattaa

SEQ ID NO: 189199 - DNA, 25 bp, Probe sequence
cccctaacatgcttccaatcaacat

SEQ ID NO: 189200 - DNA, 25 bp, Probe sequence
gctatgctattgttcactaccgtat

SEQ ID NO: 189201 - DNA, 25 bp, Probe sequence
gcatttaatgatccactaagtgtac

SEQ ID NO: 189202 - DNA, 25 bp, Probe sequence
gcactttctactggtatatatcctt

SEQ ID NO: 189203 - DNA, 25 bp, Probe sequence
gcaaaggtttagatttcgtctcttg

SEQ ID NO: 189204 - DNA, 25 bp, Probe sequence
gaatgatgataaatgctccacctgc

SEQ ID NO: 189205 - DNA, 25 bp, Probe sequence
gatgggcattatattatatgaccac

SEQ ID NO: 189206 - DNA, 25 bp, Probe sequence
gatttcgtctcttgtgtagtaggtt

SEQ ID NO: 189207 - DNA, 25 bp, Probe sequence
gttcactaccgtattcattggtaat

SEQ ID NO: 189208 - DNA, 25 bp, Probe sequence
ggtatatatccttgcattaatttta

SEQ ID NO: 189209 - DNA, 25 bp, Probe sequence
ggtttagatttcgtctcttgtgtag

SEQ ID NO: 189210 - DNA, 25 bp, Probe sequence
ggttgttttcttgcatttaatgatc

SEQ ID NO: 189211 - DNA, 25 bp, Probe sequence
ggcgattattacatataccgtattt

SEQ ID NO: 189212 - DNA, 25 bp, Probe sequence
tgatgataaatgctccacctgcacc

SEQ ID NO: 189213 - DNA, 25 bp, Probe sequence
tgcacccacaattcccgaaattaca

SEQ ID NO: 189214 - DNA, 25 bp, Probe sequence
tgctattgttcactaccgtattcat

SEQ ID NO: 189215 - DNA, 25 bp, Probe sequence
tcgtctcttgtgtagtaggtttaac

SEQ ID NO: 189216 - DNA, 25 bp, Probe sequence
taaaattgcccctaacatgcttcca

SEQ ID NO: 189217 - DNA, 25 bp, Probe sequence
taccccctcccatatatataacaag

SEQ ID NO: 189218 - DNA, 25 bp, Probe sequence
taccgtatttacaaaagtagcatta

SEQ ID NO: 189219 - DNA, 25 bp, Probe sequence
tttataaaaaatgcccctactgaag

SEQ ID NO: 189220 - DNA, 25 bp, Probe sequence
attggataatttcttcttctgtaat

SEQ ID NO: 189221 - DNA, 25 bp, Probe sequence
atttcttcttctgtaatatgaaggc

SEQ ID NO: 189222 - DNA, 25 bp, Probe sequence
atatgaaggctttttgttttgaatg

SEQ ID NO: 189223 - DNA, 25 bp, Probe sequence
ataatttcttcttctgtaatatgaa

SEQ ID NO: 189224 - DNA, 25 bp, Probe sequence
atcgtatttcatatatgtctctctt

SEQ ID NO: 189225 - DNA, 25 bp, Probe sequence
atgaaggctttttgttttgaatgtt

SEQ ID NO: 189226 - DNA, 25 bp, Probe sequence
atgtttctcctactataaaatcatc

SEQ ID NO: 189227 - DNA, 25 bp, Probe sequence
aatgtttctcctactataaaatcat

SEQ ID NO: 189228 - DNA, 25 bp, Probe sequence
aatcatcgtatttcatatatgtctc

SEQ ID NO: 189229 - DNA, 25 bp, Probe sequence
aattggataatttcttcttctgtaa

SEQ ID NO: 189230 - DNA, 25 bp, Probe sequence
catcgtatttcatatatgtctctct

SEQ ID NO: 189231 - DNA, 25 bp, Probe sequence
cgtatttcatatatgtctctctttc

SEQ ID NO: 189232 - DNA, 25 bp, Probe sequence
gctttttgttttgaatgtttctcct

SEQ ID NO: 189233 - DNA, 25 bp, Probe sequence
gaatgtttctcctactataaaatca

SEQ ID NO: 189234 - DNA, 25 bp, Probe sequence
gataatttcttcttctgtaatatga

SEQ ID NO: 189235 - DNA, 25 bp, Probe sequence
gttttgaatgtttctcctactataa

SEQ ID NO: 189236 - DNA, 25 bp, Probe sequence
gtttctcctactataaaatcatcgt

SEQ ID NO: 189237 - DNA, 25 bp, Probe sequence
ggataatttcttcttctgtaatatg

SEQ ID NO: 189238 - DNA, 25 bp, Probe sequence
ggatcaaaagttgttgcaaattgga

SEQ ID NO: 189239 - DNA, 25 bp, Probe sequence
tggataatttcttcttctgtaatat

SEQ ID NO: 189240 - DNA, 25 bp, Probe sequence
tgtttctcctactataaaatcatcg

SEQ ID NO: 189241 - DNA, 25 bp, Probe sequence
tgttttgaatgtttctcctactata

SEQ ID NO: 189242 - DNA, 25 bp, Probe sequence
tgaaggctttttgttttgaatgttt

SEQ ID NO: 189243 - DNA, 25 bp, Probe sequence
tgaatgtttctcctactataaaatc

SEQ ID NO: 189244 - DNA, 25 bp, Probe sequence
tcgtatttcatatatgtctctcttt

SEQ ID NO: 189245 - DNA, 25 bp, Probe sequence
tctcctactataaaatcatcgtatt

SEQ ID NO: 189246 - DNA, 25 bp, Probe sequence
tcatcgtatttcatatatgtctctc

SEQ ID NO: 189247 - DNA, 25 bp, Probe sequence
tttgaatgtttctcctactataaaa

SEQ ID NO: 189248 - DNA, 25 bp, Probe sequence
tttgttttgaatgtttctcctacta

SEQ ID NO: 189249 - DNA, 25 bp, Probe sequence
tttctcctactataaaatcatcgta

SEQ ID NO: 189250 - DNA, 25 bp, Probe sequence
ttttgaatgtttctcctactataaa

SEQ ID NO: 189251 - DNA, 25 bp, Probe sequence
ttttgttttgaatgtttctcctact

SEQ ID NO: 189252 - DNA, 25 bp, Probe sequence
ttgttttgaatgtttctcctactat

SEQ ID NO: 189253 - DNA, 25 bp, Probe sequence
ttggataatttcttcttctgtaata

SEQ ID NO: 189254 - DNA, 25 bp, Probe sequence
accaaattgaagagcttgtcggttc

SEQ ID NO: 189255 - DNA, 25 bp, Probe sequence
attcgtgcgtatttcaaaatcagaa

SEQ ID NO: 189256 - DNA, 25 bp, Probe sequence
attattccacgctgttcaaaaaggt

SEQ ID NO: 189257 - DNA, 25 bp, Probe sequence
attacattgatcacttgaagttaga

SEQ ID NO: 189258 - DNA, 25 bp, Probe sequence
atattcgtgcgtatttcaaaatcag

SEQ ID NO: 189259 - DNA, 25 bp, Probe sequence
acaaatggaatggtccatctcacta

SEQ ID NO: 189260 - DNA, 25 bp, Probe sequence
aaattattccacgctgttcaaaaag

SEQ ID NO: 189261 - DNA, 25 bp, Probe sequence
aaaaaggtgcgttcactggtcttat

SEQ ID NO: 189262 - DNA, 25 bp, Probe sequence
aactttatcagcgactttaccaaat

SEQ ID NO: 189263 - DNA, 25 bp, Probe sequence
aagctttaaaactttatcagcgact

SEQ ID NO: 189264 - DNA, 25 bp, Probe sequence
aaggtgcgttcactggtcttatgat

SEQ ID NO: 189265 - DNA, 25 bp, Probe sequence
aatctaaattacattgatcacttga

SEQ ID NO: 189266 - DNA, 25 bp, Probe sequence
cactggtcttatgatttctgtcatt

SEQ ID NO: 189267 - DNA, 25 bp, Probe sequence
cattacttcacttatttttttcaag

SEQ ID NO: 189268 - DNA, 25 bp, Probe sequence
gcgactttaccaaattgaagagctt

SEQ ID NO: 189269 - DNA, 25 bp, Probe sequence
gcgttcactggtcttatgatttctg

SEQ ID NO: 189270 - DNA, 25 bp, Probe sequence
gctgttcaaaaaggtgcgttcactg

SEQ ID NO: 189271 - DNA, 25 bp, Probe sequence
gcttgtcggttcaatattcgtgcgt

SEQ ID NO: 189272 - DNA, 25 bp, Probe sequence
gaatggtccatctcactatgaaaaa

SEQ ID NO: 189273 - DNA, 25 bp, Probe sequence
gaagagcttgtcggttcaatattcg

SEQ ID NO: 189274 - DNA, 25 bp, Probe sequence
gaaaaaattattccacgctgttcaa

SEQ ID NO: 189275 - DNA, 25 bp, Probe sequence
gagcttgtcggttcaatattcgtgc

SEQ ID NO: 189276 - DNA, 25 bp, Probe sequence
gatttctgtcattacttcacttatt

SEQ ID NO: 189277 - DNA, 25 bp, Probe sequence
gttcactggtcttatgatttctgtc

SEQ ID NO: 189278 - DNA, 25 bp, Probe sequence
gtcattacttcacttatttttttca

SEQ ID NO: 189279 - DNA, 25 bp, Probe sequence
gtcggttcaatattcgtgcgtattt

SEQ ID NO: 189280 - DNA, 25 bp, Probe sequence
gtgcgttcactggtcttatgatttc

SEQ ID NO: 189281 - DNA, 25 bp, Probe sequence
ggtccatctcactatgaaaaaatta

SEQ ID NO: 189282 - DNA, 25 bp, Probe sequence
ggtcttatgatttctgtcattactt

SEQ ID NO: 189283 - DNA, 25 bp, Probe sequence
ggttcaatattcgtgcgtatttcaa

SEQ ID NO: 189284 - DNA, 25 bp, Probe sequence
tggaatggtccatctcactatgaaa

SEQ ID NO: 189285 - DNA, 25 bp, Probe sequence
ttatcagcgactttaccaaattgaa

SEQ ID NO: 189286 - DNA, 25 bp, Probe sequence
ttctgtcattacttcacttattttt

SEQ ID NO: 189287 - DNA, 25 bp, Probe sequence
ttgtcggttcaatattcgtgcgtat

SEQ ID NO: 189288 - DNA, 25 bp, Probe sequence
attgtagtgtatatcacgatgtggt

SEQ ID NO: 189289 - DNA, 25 bp, Probe sequence
attctagcaggttggttccatctga

SEQ ID NO: 189290 - DNA, 25 bp, Probe sequence
atcacgatgtggtttgggacatatc

SEQ ID NO: 189291 - DNA, 25 bp, Probe sequence
atgtgtagcactatgggcattgatt

SEQ ID NO: 189292 - DNA, 25 bp, Probe sequence
acagactgtagttcactttatattg

SEQ ID NO: 189293 - DNA, 25 bp, Probe sequence
aaagataattcatgaggcaaataat

SEQ ID NO: 189294 - DNA, 25 bp, Probe sequence
aatatgtgtagcactatgggcattg

SEQ ID NO: 189295 - DNA, 25 bp, Probe sequence
aatttgatatttacagataccgatt

SEQ ID NO: 189296 - DNA, 25 bp, Probe sequence
caaaacagactgtagttcactttat

SEQ ID NO: 189297 - DNA, 25 bp, Probe sequence
cactcgctattctagcaggttggtt

SEQ ID NO: 189298 - DNA, 25 bp, Probe sequence
cccactcgctattctagcaggttgg

SEQ ID NO: 189299 - DNA, 25 bp, Probe sequence
gctattctagcaggttggttccatc

SEQ ID NO: 189300 - DNA, 25 bp, Probe sequence
gcaggttggttccatctgaactttg

SEQ ID NO: 189301 - DNA, 25 bp, Probe sequence
gcactatgggcattgattggaattt

SEQ ID NO: 189302 - DNA, 25 bp, Probe sequence
gaagcggttattatgctaatatgtg

SEQ ID NO: 189303 - DNA, 25 bp, Probe sequence
gactgtagttcactttatattgatg

SEQ ID NO: 189304 - DNA, 25 bp, Probe sequence
gatgtggtttgggacatatcaaaga

SEQ ID NO: 189305 - DNA, 25 bp, Probe sequence
gatatttacagataccgattggagt

SEQ ID NO: 189306 - DNA, 25 bp, Probe sequence
gattggaattttgtttacttatggt

SEQ ID NO: 189307 - DNA, 25 bp, Probe sequence
gttccatctgaactttgagaatatt

SEQ ID NO: 189308 - DNA, 25 bp, Probe sequence
gtttcatcataatatttattgtagt

SEQ ID NO: 189309 - DNA, 25 bp, Probe sequence
gtatatcacgatgtggtttgggaca

SEQ ID NO: 189310 - DNA, 25 bp, Probe sequence
gtagttcactttatattgatgataa

SEQ ID NO: 189311 - DNA, 25 bp, Probe sequence
gtagcactatgggcattgattggaa

SEQ ID NO: 189312 - DNA, 25 bp, Probe sequence
gggcattgattggaattttgtttac

SEQ ID NO: 189313 - DNA, 25 bp, Probe sequence
ggttggttccatctgaactttgaga

SEQ ID NO: 189314 - DNA, 25 bp, Probe sequence
tgatgataatcctattcttcccact

SEQ ID NO: 189315 - DNA, 25 bp, Probe sequence
tgagaatattattagtttcatcata

SEQ ID NO: 189316 - DNA, 25 bp, Probe sequence
tgaaaactttaatgaagcggttatt

SEQ ID NO: 189317 - DNA, 25 bp, Probe sequence
tctagcaggttggttccatctgaac

SEQ ID NO: 189318 - DNA, 25 bp, Probe sequence
tacagataccgattggagtataaca

SEQ ID NO: 189319 - DNA, 25 bp, Probe sequence
tagcaggttggttccatctgaactt

SEQ ID NO: 189320 - DNA, 25 bp, Probe sequence
ttcccactcgctattctagcaggtt

SEQ ID NO: 189321 - DNA, 25 bp, Probe sequence
ttgatgataatcctattcttcccac

SEQ ID NO: 189322 - DNA, 25 bp, Probe sequence
atagcgggccatggaaacgcacgat

SEQ ID NO: 189323 - DNA, 25 bp, Probe sequence
atcgaactacaggtgaggcatcagc

SEQ ID NO: 189324 - DNA, 25 bp, Probe sequence
atgacattgtaactggcaaacgtga

SEQ ID NO: 189325 - DNA, 25 bp, Probe sequence
atgagacgattaatttggtacaata

SEQ ID NO: 189326 - DNA, 25 bp, Probe sequence
atgatgcgattgccgcttttgatgg

SEQ ID NO: 189327 - DNA, 25 bp, Probe sequence
accatcgattataaagtgcccgtac

SEQ ID NO: 189328 - DNA, 25 bp, Probe sequence
accttgatttccttaagcagaccat

SEQ ID NO: 189329 - DNA, 25 bp, Probe sequence
actgccgaacagtttaccaaatatc

SEQ ID NO: 189330 - DNA, 25 bp, Probe sequence
aacatctccttatacagaaggtttt

SEQ ID NO: 189331 - DNA, 25 bp, Probe sequence
aaggagcaaaagctttctacgccca

SEQ ID NO: 189332 - DNA, 25 bp, Probe sequence
aatacggcagaccttggcgttacat

SEQ ID NO: 189333 - DNA, 25 bp, Probe sequence
ctacgcccaaactgccgaacagttt

SEQ ID NO: 189334 - DNA, 25 bp, Probe sequence
cagcaaagtgtcatgaggaagcgat

SEQ ID NO: 189335 - DNA, 25 bp, Probe sequence
cagaaggttttctttttccaatgca

SEQ ID NO: 189336 - DNA, 25 bp, Probe sequence
cctcaccttgatttccttaagcaga

SEQ ID NO: 189337 - DNA, 25 bp, Probe sequence
ccaaatatcatataacatctcctta

SEQ ID NO: 189338 - DNA, 25 bp, Probe sequence
gccgcttttgatggaagtgtctact

SEQ ID NO: 189339 - DNA, 25 bp, Probe sequence
gcgattgccgcttttgatggaagtg

SEQ ID NO: 189340 - DNA, 25 bp, Probe sequence
gcaaacgtgatgttcaaggagcaaa

SEQ ID NO: 189341 - DNA, 25 bp, Probe sequence
gcaatataatacggcagaccttggc

SEQ ID NO: 189342 - DNA, 25 bp, Probe sequence
gaccttggcgttacatattttaaat

SEQ ID NO: 189343 - DNA, 25 bp, Probe sequence
gatttccttaagcagaccatcgatt

SEQ ID NO: 189344 - DNA, 25 bp, Probe sequence
gtatataaggatccagtccctcata

SEQ ID NO: 189345 - DNA, 25 bp, Probe sequence
gtgtctacttagatcgaactacagg

SEQ ID NO: 189346 - DNA, 25 bp, Probe sequence
gtgcccgtacacttatatgatgcga

SEQ ID NO: 189347 - DNA, 25 bp, Probe sequence
gggccatggaaacgcacgatagtat

SEQ ID NO: 189348 - DNA, 25 bp, Probe sequence
ggtgaggcatcagcaaagtgtcatg

SEQ ID NO: 189349 - DNA, 25 bp, Probe sequence
ggtacaatagcgggccatggaaacg

SEQ ID NO: 189350 - DNA, 25 bp, Probe sequence
aggttttctttttccaatgcaatat

SEQ ID NO: 189351 - DNA, 25 bp, Probe sequence
ggcagaccttggcgttacatatttt

SEQ ID NO: 189352 - DNA, 25 bp, Probe sequence
ggaaacgcacgatagtatataagga

SEQ ID NO: 189353 - DNA, 25 bp, Probe sequence
ggaagcgatgaattttttatcttta

SEQ ID NO: 189354 - DNA, 25 bp, Probe sequence
taaggatccagtccctcataacttc

SEQ ID NO: 189355 - DNA, 25 bp, Probe sequence
tacacttatatgatgcgattgccgc

SEQ ID NO: 189356 - DNA, 25 bp, Probe sequence
attatctgttgagtcgggcggtatt

SEQ ID NO: 189357 - DNA, 25 bp, Probe sequence
atgatatgacacaagccgtagctga

SEQ ID NO: 189358 - DNA, 25 bp, Probe sequence
aaaccgggtggattgattgtcgatt

SEQ ID NO: 189359 - DNA, 25 bp, Probe sequence
agaactcattcaactcgctaaagat

SEQ ID NO: 189360 - DNA, 25 bp, Probe sequence
aacactaggtcttgaacaacccgat

SEQ ID NO: 189361 - DNA, 25 bp, Probe sequence
aacaacccgatttatcaatcctatc

SEQ ID NO: 189362 - DNA, 25 bp, Probe sequence
aacctcgtgtagaagctttagccaa

SEQ ID NO: 189363 - DNA, 25 bp, Probe sequence
aacctacagcccaagaactcaatga

SEQ ID NO: 189364 - DNA, 25 bp, Probe sequence
aagcttttgcgctttgtgcgactga

SEQ ID NO: 189365 - DNA, 25 bp, Probe sequence
aatgcaagcgattgctcgtgtcaat

SEQ ID NO: 189366 - DNA, 25 bp, Probe sequence
caatcctatcagatgacttcctaaa

SEQ ID NO: 189367 - DNA, 25 bp, Probe sequence
cacgcccgtagcttcaacggataaa

SEQ ID NO: 189368 - DNA, 25 bp, Probe sequence
ctttgcaacagaaccctcaagggtc

SEQ ID NO: 189369 - DNA, 25 bp, Probe sequence
ccttagcaggcgcaaaacctcgtgt

SEQ ID NO: 189370 - DNA, 25 bp, Probe sequence
gcgcgtagctgttagacgattgctt

SEQ ID NO: 189371 - DNA, 25 bp, Probe sequence
gcgacagtatctaagcgtttctctg

SEQ ID NO: 189372 - DNA, 25 bp, Probe sequence
gaatctgatcaagcacaaacggcga

SEQ ID NO: 189373 - DNA, 25 bp, Probe sequence
gaagcgcatcgtacacaatatggtt

SEQ ID NO: 189374 - DNA, 25 bp, Probe sequence
gaactacgtgcgattgctcatgagc

SEQ ID NO: 189375 - DNA, 25 bp, Probe sequence
gaaacgaccatgtctgctctaacag

SEQ ID NO: 189376 - DNA, 25 bp, Probe sequence
gagatgctttaccgaatgcgacgtt

SEQ ID NO: 189377 - DNA, 25 bp, Probe sequence
gagtcgtcgaattgctgttgattta

SEQ ID NO: 189378 - DNA, 25 bp, Probe sequence
ggtcacgaattgaagccttagcagg

SEQ ID NO: 189379 - DNA, 25 bp, Probe sequence
tgattggtctaaacgcgatagcgca

SEQ ID NO: 189380 - DNA, 25 bp, Probe sequence
tgtggctcacaggatttgatgtacc

SEQ ID NO: 189381 - DNA, 25 bp, Probe sequence
tgactggctcatctagtgacccaac

SEQ ID NO: 189382 - DNA, 25 bp, Probe sequence
tgacccaacttctttccaaagacat

SEQ ID NO: 189383 - DNA, 25 bp, Probe sequence
tgcgttttacgatgctttagcttca

SEQ ID NO: 189384 - DNA, 25 bp, Probe sequence
taatcctaccttagttgtcgtaaca

SEQ ID NO: 189385 - DNA, 25 bp, Probe sequence
ttgtaggatttacgggcacgcccgt

SEQ ID NO: 189386 - DNA, 25 bp, Probe sequence
ttagccaaagacatcatccaacatt

SEQ ID NO: 189387 - DNA, 25 bp, Probe sequence
ttaaccatggtctttttctctggaa

SEQ ID NO: 189388 - DNA, 25 bp, Probe sequence
ttgatgtaccttccatgcataccat

SEQ ID NO: 189389 - DNA, 25 bp, Probe sequence
ttgtgcgactgaacctacagcccaa

SEQ ID NO: 189390 - DNA, 25 bp, Probe sequence
attctcctgttcgcttatcaatagt

SEQ ID NO: 189391 - DNA, 25 bp, Probe sequence
ataggtggaaactcatcttttactt

SEQ ID NO: 189392 - DNA, 25 bp, Probe sequence
ataaccttctgcatcttgagaagta

SEQ ID NO: 189393 - DNA, 25 bp, Probe sequence
atcagttctagtagtatctatacga

SEQ ID NO: 189394 - DNA, 25 bp, Probe sequence
atcgcttctatcatcaatataatca

SEQ ID NO: 189395 - DNA, 25 bp, Probe sequence
atgttggacatgacgctctttatct

SEQ ID NO: 189396 - DNA, 25 bp, Probe sequence
agcatcgtatggacctttataaaga

SEQ ID NO: 189397 - DNA, 25 bp, Probe sequence
acatgacgctctttatcttcatcgc

SEQ ID NO: 189398 - DNA, 25 bp, Probe sequence
aatcaataaattctcctgttcgctt

SEQ ID NO: 189399 - DNA, 25 bp, Probe sequence
aataaattctcctgttcgcttatca

SEQ ID NO: 189400 - DNA, 25 bp, Probe sequence
catcttttactttttgaatagcttc

SEQ ID NO: 189401 - DNA, 25 bp, Probe sequence
ctcctgttcgcttatcaatagtgac

SEQ ID NO: 189402 - DNA, 25 bp, Probe sequence
cgatagtcatttcctgttcgtatag

SEQ ID NO: 189403 - DNA, 25 bp, Probe sequence
cgtacacattattatcagttctagt

SEQ ID NO: 189404 - DNA, 25 bp, Probe sequence
gcagctttcataggataaccttctg

SEQ ID NO: 189405 - DNA, 25 bp, Probe sequence
gaatagcttcattttctgttattag

SEQ ID NO: 189406 - DNA, 25 bp, Probe sequence
gaaactcatcttttactttttgaat

SEQ ID NO: 189407 - DNA, 25 bp, Probe sequence
gacagcagctttcataggataacct

SEQ ID NO: 189408 - DNA, 25 bp, Probe sequence
gactaaaatcttttctgaaagcatc

SEQ ID NO: 189409 - DNA, 25 bp, Probe sequence
gagtactttctttagcatgttggac

SEQ ID NO: 189410 - DNA, 25 bp, Probe sequence
gtactttctttagcatgttggacat

SEQ ID NO: 189411 - DNA, 25 bp, Probe sequence
gtaaatttgatagcgtacacattat

SEQ ID NO: 189412 - DNA, 25 bp, Probe sequence
gtcatttcctgttcgtataggtgga

SEQ ID NO: 189413 - DNA, 25 bp, Probe sequence
gtggaaactcatcttttactttttg

SEQ ID NO: 189414 - DNA, 25 bp, Probe sequence
ggacatgacgctctttatcttcatc

SEQ ID NO: 189415 - DNA, 25 bp, Probe sequence
tggacctttataaagagtactttct

SEQ ID NO: 189416 - DNA, 25 bp, Probe sequence
tctatacgatagtcatttcctgttc

SEQ ID NO: 189417 - DNA, 25 bp, Probe sequence
tcttcatcgcttctatcatcaatat

SEQ ID NO: 189418 - DNA, 25 bp, Probe sequence
tcataggataaccttctgcatcttg

SEQ ID NO: 189419 - DNA, 25 bp, Probe sequence
tagcgtacacattattatcagttct

SEQ ID NO: 189420 - DNA, 25 bp, Probe sequence
taggataaccttctgcatcttgaga

SEQ ID NO: 189421 - DNA, 25 bp, Probe sequence
tatcaatagtgacagcagctttcat

SEQ ID NO: 189422 - DNA, 25 bp, Probe sequence
tttctgaaagcatcgtatggacctt

SEQ ID NO: 189423 - DNA, 25 bp, Probe sequence
ttggacatgacgctctttatcttca

SEQ ID NO: 189424 - DNA, 25 bp, Probe sequence
attaggtgtttttgtctctccaata

SEQ ID NO: 189425 - DNA, 25 bp, Probe sequence
atattaggtgtttttgtctctccaa

SEQ ID NO: 189426 - DNA, 25 bp, Probe sequence
atatacttccacctgaagtcaaagc

SEQ ID NO: 189427 - DNA, 25 bp, Probe sequence
atacttccacctgaagtcaaagcaa

SEQ ID NO: 189428 - DNA, 25 bp, Probe sequence
atcaaatatcactgttagaccaatg

SEQ ID NO: 189429 - DNA, 25 bp, Probe sequence
atgatattaggtgtttttgtctctc

SEQ ID NO: 189430 - DNA, 25 bp, Probe sequence
atggctaatatacttccacctgaag

SEQ ID NO: 189431 - DNA, 25 bp, Probe sequence
aggtgtttttgtctctccaataata

SEQ ID NO: 189432 - DNA, 25 bp, Probe sequence
agcaattagccatcctaacgcaact

SEQ ID NO: 189433 - DNA, 25 bp, Probe sequence
aaaggttttttatcaaatatcactg

SEQ ID NO: 189434 - DNA, 25 bp, Probe sequence
aagcaattagccatcctaacgcaac

SEQ ID NO: 189435 - DNA, 25 bp, Probe sequence
aagtcaaagcaattagccatcctaa

SEQ ID NO: 189436 - DNA, 25 bp, Probe sequence
caattagccatcctaacgcaacttt

SEQ ID NO: 189437 - DNA, 25 bp, Probe sequence
aattagccatcctaacgcaactttc

SEQ ID NO: 189438 - DNA, 25 bp, Probe sequence
caaagcaattagccatcctaacgca

SEQ ID NO: 189439 - DNA, 25 bp, Probe sequence
caaatatcactgttagaccaatgat

SEQ ID NO: 189440 - DNA, 25 bp, Probe sequence
cacctgaagtcaaagcaattagcca

SEQ ID NO: 189441 - DNA, 25 bp, Probe sequence
cttccacctgaagtcaaagcaatta

SEQ ID NO: 189442 - DNA, 25 bp, Probe sequence
ctaatatacttccacctgaagtcaa

SEQ ID NO: 189443 - DNA, 25 bp, Probe sequence
gcaattagccatcctaacgcaactt

SEQ ID NO: 189444 - DNA, 25 bp, Probe sequence
gaagtcaaagcaattagccatccta

SEQ ID NO: 189445 - DNA, 25 bp, Probe sequence
gatattaggtgtttttgtctctcca

SEQ ID NO: 189446 - DNA, 25 bp, Probe sequence
gtttttgtctctccaataataatta

SEQ ID NO: 189447 - DNA, 25 bp, Probe sequence
gtcaaagcaattagccatcctaacg

SEQ ID NO: 189448 - DNA, 25 bp, Probe sequence
gtgtttttgtctctccaataataat

SEQ ID NO: 189449 - DNA, 25 bp, Probe sequence
ggtgtttttgtctctccaataataa

SEQ ID NO: 189450 - DNA, 25 bp, Probe sequence
ggttttttatcaaatatcactgtta

SEQ ID NO: 189451 - DNA, 25 bp, Probe sequence
ggctaatatacttccacctgaagtc

SEQ ID NO: 189452 - DNA, 25 bp, Probe sequence
tcactgttagaccaatgatattagg

SEQ ID NO: 189453 - DNA, 25 bp, Probe sequence
taggtgtttttgtctctccaataat

SEQ ID NO: 189454 - DNA, 25 bp, Probe sequence
tattaggtgtttttgtctctccaat

SEQ ID NO: 189455 - DNA, 25 bp, Probe sequence
ttaggtgtttttgtctctccaataa

SEQ ID NO: 189456 - DNA, 25 bp, Probe sequence
ttatcaaatatcactgttagaccaa

SEQ ID NO: 189457 - DNA, 25 bp, Probe sequence
ttgtctctccaataataattaaata

SEQ ID NO: 189458 - DNA, 25 bp, Probe sequence
attttctttgattggtgtactactt

SEQ ID NO: 189459 - DNA, 25 bp, Probe sequence
atgtgtaggctttgtcctctatcat

SEQ ID NO: 189460 - DNA, 25 bp, Probe sequence
acctgagaaatctgtttggatcaca

SEQ ID NO: 189461 - DNA, 25 bp, Probe sequence
acgtagctacatatatattattttc

SEQ ID NO: 189462 - DNA, 25 bp, Probe sequence
actgtcacatgtgcaaattcaccat

SEQ ID NO: 189463 - DNA, 25 bp, Probe sequence
actggttagccgtatctttcattaa

SEQ ID NO: 189464 - DNA, 25 bp, Probe sequence
acaactggttagccgtatctttcat

SEQ ID NO: 189465 - DNA, 25 bp, Probe sequence
aactggttagccgtatctttcatta

SEQ ID NO: 189466 - DNA, 25 bp, Probe sequence
cacatgtgcaaattcaccattgaac

SEQ ID NO: 189467 - DNA, 25 bp, Probe sequence
ctttgtcctctatcattattcatga

SEQ ID NO: 189468 - DNA, 25 bp, Probe sequence
cctatttcttccactgtcacatgtg

SEQ ID NO: 189469 - DNA, 25 bp, Probe sequence
gctttgtcctctatcattattcatg

SEQ ID NO: 189470 - DNA, 25 bp, Probe sequence
gaattggtgctttatttcacctgag

SEQ ID NO: 189471 - DNA, 25 bp, Probe sequence
gaacaactggttagccgtatctttc

SEQ ID NO: 189472 - DNA, 25 bp, Probe sequence
gattggtgtactacttgggatgtgt

SEQ ID NO: 189473 - DNA, 25 bp, Probe sequence
gtaggctttgtcctctatcattatt

SEQ ID NO: 189474 - DNA, 25 bp, Probe sequence
gtcacatgtgcaaattcaccattga

SEQ ID NO: 189475 - DNA, 25 bp, Probe sequence
gtgcaaattcaccattgaacaactg

SEQ ID NO: 189476 - DNA, 25 bp, Probe sequence
gtgtaggctttgtcctctatcatta

SEQ ID NO: 189477 - DNA, 25 bp, Probe sequence
ggtgctttatttcacctgagaaatc

SEQ ID NO: 189478 - DNA, 25 bp, Probe sequence
ggatcacagaatgtaacgtagctac

SEQ ID NO: 189479 - DNA, 25 bp, Probe sequence
ggatgtgtaggctttgtcctctatc

SEQ ID NO: 189480 - DNA, 25 bp, Probe sequence
tgggatgtgtaggctttgtcctcta

SEQ ID NO: 189481 - DNA, 25 bp, Probe sequence
tccactgtcacatgtgcaaattcac

SEQ ID NO: 189482 - DNA, 25 bp, Probe sequence
tcttccactgtcacatgtgcaaatt

SEQ ID NO: 189483 - DNA, 25 bp, Probe sequence
tcattattcatgatctacgcctcct

SEQ ID NO: 189484 - DNA, 25 bp, Probe sequence
taggctttgtcctctatcattattc

SEQ ID NO: 189485 - DNA, 25 bp, Probe sequence
tatttcttccactgtcacatgtgca

SEQ ID NO: 189486 - DNA, 25 bp, Probe sequence
tattattttctttgattggtgtact

SEQ ID NO: 189487 - DNA, 25 bp, Probe sequence
tttcttccactgtcacatgtgcaaa

SEQ ID NO: 189488 - DNA, 25 bp, Probe sequence
ttcacctgagaaatctgtttggatc

SEQ ID NO: 189489 - DNA, 25 bp, Probe sequence
ttctttgattggtgtactacttggg

SEQ ID NO: 189490 - DNA, 25 bp, Probe sequence
ttcatacgtgaattggtgctttatt

SEQ ID NO: 189491 - DNA, 25 bp, Probe sequence
ttgttcacttcaatttcatacgtga

SEQ ID NO: 189492 - DNA, 25 bp, Probe sequence
attcagcttgaatttaggatttttg

SEQ ID NO: 189493 - DNA, 25 bp, Probe sequence
atataactcgctacagtttgtacgt

SEQ ID NO: 189494 - DNA, 25 bp, Probe sequence
atccaaccattgtacttcacttaca

SEQ ID NO: 189495 - DNA, 25 bp, Probe sequence
accttgaaatgcgctcatatcatgc

SEQ ID NO: 189496 - DNA, 25 bp, Probe sequence
actgctaccttgaaatgcgctcata

SEQ ID NO: 189497 - DNA, 25 bp, Probe sequence
actcttttcaacgtgcttcttaagt

SEQ ID NO: 189498 - DNA, 25 bp, Probe sequence
aactcgctacagtttgtacgtagat

SEQ ID NO: 189499 - DNA, 25 bp, Probe sequence
aacgtgcttcttaagttcaatgact

SEQ ID NO: 189500 - DNA, 25 bp, Probe sequence
aaccattgtacttcacttacatatt

SEQ ID NO: 189501 - DNA, 25 bp, Probe sequence
aatgcgctcatatcatgctcaatac

SEQ ID NO: 189502 - DNA, 25 bp, Probe sequence
aatactgctaccttgaaatgcgctc

SEQ ID NO: 189503 - DNA, 25 bp, Probe sequence
aattactcttttcaacgtgcttctt

SEQ ID NO: 189504 - DNA, 25 bp, Probe sequence
cagtttgtacgtagattgccataat

SEQ ID NO: 189505 - DNA, 25 bp, Probe sequence
catatcatgctcaatactataaggc

SEQ ID NO: 189506 - DNA, 25 bp, Probe sequence
gcgctcatatcatgctcaatactat

SEQ ID NO: 189507 - DNA, 25 bp, Probe sequence
gctaccttgaaatgcgctcatatca

SEQ ID NO: 189508 - DNA, 25 bp, Probe sequence
gcttgaaaatataactcgctacagt

SEQ ID NO: 189509 - DNA, 25 bp, Probe sequence
gcttcttaagttcaatgacttttgt

SEQ ID NO: 189510 - DNA, 25 bp, Probe sequence
gcatccaaccattgtacttcactta

SEQ ID NO: 189511 - DNA, 25 bp, Probe sequence
gaaatgcgctcatatcatgctcaat

SEQ ID NO: 189512 - DNA, 25 bp, Probe sequence
gacttttgtaaattggctgaccgca

SEQ ID NO: 189513 - DNA, 25 bp, Probe sequence
gatttttgaagttacctccaaatag

SEQ ID NO: 189514 - DNA, 25 bp, Probe sequence
gattgccataatactgctaccttga

SEQ ID NO: 189515 - DNA, 25 bp, Probe sequence
gtacttcacttacatattgattcag

SEQ ID NO: 189516 - DNA, 25 bp, Probe sequence
gtaaattggctgaccgcatccaacc

SEQ ID NO: 189517 - DNA, 25 bp, Probe sequence
ggaattactcttttcaacgtgcttc

SEQ ID NO: 189518 - DNA, 25 bp, Probe sequence
ggcataggcatggaattactctttt

SEQ ID NO: 189519 - DNA, 25 bp, Probe sequence
ggcatggaattactcttttcaacgt

SEQ ID NO: 189520 - DNA, 25 bp, Probe sequence
tgctcaatactataaggcataggca

SEQ ID NO: 189521 - DNA, 25 bp, Probe sequence
tcacttacatattgattcagcttga

SEQ ID NO: 189522 - DNA, 25 bp, Probe sequence
taaattggctgaccgcatccaacca

SEQ ID NO: 189523 - DNA, 25 bp, Probe sequence
ttttcaacgtgcttcttaagttcaa

SEQ ID NO: 189524 - DNA, 25 bp, Probe sequence
ttactcttttcaacgtgcttcttaa

SEQ ID NO: 189525 - DNA, 25 bp, Probe sequence
ttgccataatactgctaccttgaaa

SEQ ID NO: 189526 - DNA, 25 bp, Probe sequence
attaaccaaacagtgattcatccca

SEQ ID NO: 189527 - DNA, 25 bp, Probe sequence
atgaacctacacacattcaaatact

SEQ ID NO: 189528 - DNA, 25 bp, Probe sequence
agtaacgccaacagtattatgctcg

SEQ ID NO: 189529 - DNA, 25 bp, Probe sequence
agcaatactcagtaacgccaacagt

SEQ ID NO: 189530 - DNA, 25 bp, Probe sequence
accaaacagtgattcatcccagaga

SEQ ID NO: 189531 - DNA, 25 bp, Probe sequence
acctacacacattcaaatactatcg

SEQ ID NO: 189532 - DNA, 25 bp, Probe sequence
acgccaacagtattatgctcggtca

SEQ ID NO: 189533 - DNA, 25 bp, Probe sequence
actcagtaacgccaacagtattatg

SEQ ID NO: 189534 - DNA, 25 bp, Probe sequence
acattcaaatactatcgattggatc

SEQ ID NO: 189535 - DNA, 25 bp, Probe sequence
acagcaatactcagtaacgccaaca

SEQ ID NO: 189536 - DNA, 25 bp, Probe sequence
aaatgaacctacacacattcaaata

SEQ ID NO: 189537 - DNA, 25 bp, Probe sequence
aaacagcaatactcagtaacgccaa

SEQ ID NO: 189538 - DNA, 25 bp, Probe sequence
aaccaaacagtgattcatcccagag

SEQ ID NO: 189539 - DNA, 25 bp, Probe sequence
aacagtgattcatcccagagaaata

SEQ ID NO: 189540 - DNA, 25 bp, Probe sequence
aacgccaacagtattatgctcggtc

SEQ ID NO: 189541 - DNA, 25 bp, Probe sequence
caagtggggatatattaaccatagt

SEQ ID NO: 189542 - DNA, 25 bp, Probe sequence
caacagtattatgctcggtcataat

SEQ ID NO: 189543 - DNA, 25 bp, Probe sequence
caaacagtgattcatcccagagaaa

SEQ ID NO: 189544 - DNA, 25 bp, Probe sequence
cacacattcaaatactatcgattgg

SEQ ID NO: 189545 - DNA, 25 bp, Probe sequence
cagtaacgccaacagtattatgctc

SEQ ID NO: 189546 - DNA, 25 bp, Probe sequence
cagtgattcatcccagagaaatatt

SEQ ID NO: 189547 - DNA, 25 bp, Probe sequence
ctcagtaacgccaacagtattatgc

SEQ ID NO: 189548 - DNA, 25 bp, Probe sequence
cgccaacagtattatgctcggtcat

SEQ ID NO: 189549 - DNA, 25 bp, Probe sequence
cctacacacattcaaatactatcga

SEQ ID NO: 189550 - DNA, 25 bp, Probe sequence
ccaaacagtgattcatcccagagaa

SEQ ID NO: 189551 - DNA, 25 bp, Probe sequence
gccaacagtattatgctcggtcata

SEQ ID NO: 189552 - DNA, 25 bp, Probe sequence
gcaatactcagtaacgccaacagta

SEQ ID NO: 189553 - DNA, 25 bp, Probe sequence
gaacctacacacattcaaatactat

SEQ ID NO: 189554 - DNA, 25 bp, Probe sequence
gattcatcccagagaaatattcaaa

SEQ ID NO: 189555 - DNA, 25 bp, Probe sequence
gtaacgccaacagtattatgctcgg

SEQ ID NO: 189556 - DNA, 25 bp, Probe sequence
taatcatccaagtggggatatatta

SEQ ID NO: 189557 - DNA, 25 bp, Probe sequence
taaccaaacagtgattcatcccaga

SEQ ID NO: 189558 - DNA, 25 bp, Probe sequence
taacgccaacagtattatgctcggt

SEQ ID NO: 189559 - DNA, 25 bp, Probe sequence
tacacacattcaaatactatcgatt

SEQ ID NO: 189560 - DNA, 25 bp, Probe sequence
atttaaaaaccagcgtcaactcata

SEQ ID NO: 189561 - DNA, 25 bp, Probe sequence
atggtgtagactttcataaggtagt

SEQ ID NO: 189562 - DNA, 25 bp, Probe sequence
agtgtgactgctggtcatctttcac

SEQ ID NO: 189563 - DNA, 25 bp, Probe sequence
accagcgtcaactcataggcaagcg

SEQ ID NO: 189564 - DNA, 25 bp, Probe sequence
catctttcacgtatcgagaatggta

SEQ ID NO: 189565 - DNA, 25 bp, Probe sequence
aaaaccagcgtcaactcataggcaa

SEQ ID NO: 189566 - DNA, 25 bp, Probe sequence
aactcataggcaagcgacaagaaga

SEQ ID NO: 189567 - DNA, 25 bp, Probe sequence
aacctagaatagcattacatacatt

SEQ ID NO: 189568 - DNA, 25 bp, Probe sequence
aaccagcgtcaactcataggcaagc

SEQ ID NO: 189569 - DNA, 25 bp, Probe sequence
aagaagttgcatttgatttgagtgt

SEQ ID NO: 189570 - DNA, 25 bp, Probe sequence
gaataccgtatacaaaaactatata

SEQ ID NO: 189571 - DNA, 25 bp, Probe sequence
cagcgtcaactcataggcaagcgac

SEQ ID NO: 189572 - DNA, 25 bp, Probe sequence
cataggcaagcgacaagaagaagtt

SEQ ID NO: 189573 - DNA, 25 bp, Probe sequence
ctttcacgtatcgagaatggtaaaa

SEQ ID NO: 189574 - DNA, 25 bp, Probe sequence
ctggtcatctttcacgtatcgagaa

SEQ ID NO: 189575 - DNA, 25 bp, Probe sequence
ccagcgtcaactcataggcaagcga

SEQ ID NO: 189576 - DNA, 25 bp, Probe sequence
gcgtcaactcataggcaagcgacaa

SEQ ID NO: 189577 - DNA, 25 bp, Probe sequence
gaatttaaaaaccagcgtcaactca

SEQ ID NO: 189578 - DNA, 25 bp, Probe sequence
gaatactatggtgtagactttcata

SEQ ID NO: 189579 - DNA, 25 bp, Probe sequence
gaatagcattacatacatttttagt

SEQ ID NO: 189580 - DNA, 25 bp, Probe sequence
gagtgtgactgctggtcatctttca

SEQ ID NO: 189581 - DNA, 25 bp, Probe sequence
gatttgagtgtgactgctggtcatc

SEQ ID NO: 189582 - DNA, 25 bp, Probe sequence
gttgcatttgatttgagtgtgactg

SEQ ID NO: 189583 - DNA, 25 bp, Probe sequence
gtaatgtctgaatactatggtgtag

SEQ ID NO: 189584 - DNA, 25 bp, Probe sequence
gtcaactcataggcaagcgacaaga

SEQ ID NO: 189585 - DNA, 25 bp, Probe sequence
gtcatctttcacgtatcgagaatgg

SEQ ID NO: 189586 - DNA, 25 bp, Probe sequence
gtgtagactttcataaggtagttaa

SEQ ID NO: 189587 - DNA, 25 bp, Probe sequence
tggtcatctttcacgtatcgagaat

SEQ ID NO: 189588 - DNA, 25 bp, Probe sequence
tgtgactgctggtcatctttcacgt

SEQ ID NO: 189589 - DNA, 25 bp, Probe sequence
taaaaaccagcgtcaactcataggc

SEQ ID NO: 189590 - DNA, 25 bp, Probe sequence
tacatacatttttagtaatgtctga

SEQ ID NO: 189591 - DNA, 25 bp, Probe sequence
tagatacatttgtttagaatttaaa

SEQ ID NO: 189592 - DNA, 25 bp, Probe sequence
ttgagtgtgactgctggtcatcttt

SEQ ID NO: 189593 - DNA, 25 bp, Probe sequence
ttgatttgagtgtgactgctggtca

SEQ ID NO: 189594 - DNA, 25 bp, Probe sequence
atacccatggtgtacctatcgtcat

SEQ ID NO: 189595 - DNA, 25 bp, Probe sequence
atcactttaccatttttaataacag

SEQ ID NO: 189596 - DNA, 25 bp, Probe sequence
agtatgcctcttttgtctattattg

SEQ ID NO: 189597 - DNA, 25 bp, Probe sequence
aaaacacaatacaagcccatttctt

SEQ ID NO: 189598 - DNA, 25 bp, Probe sequence
aagcccatttcttatttacctctat

SEQ ID NO: 189599 - DNA, 25 bp, Probe sequence
ctctcccctatttggagttctctcg

SEQ ID NO: 189600 - DNA, 25 bp, Probe sequence
ctcgcgggtcttatatctggaatat

SEQ ID NO: 189601 - DNA, 25 bp, Probe sequence
cccctatttggagttctctcgcggg

SEQ ID NO: 189602 - DNA, 25 bp, Probe sequence
gcctcttttgtctattattggatta

SEQ ID NO: 189603 - DNA, 25 bp, Probe sequence
gctggtctatgtgttgctatttttt

SEQ ID NO: 189604 - DNA, 25 bp, Probe sequence
gctacaggtaacgtatggacagaca

SEQ ID NO: 189605 - DNA, 25 bp, Probe sequence
gctatttttttaatcctatacggct

SEQ ID NO: 189606 - DNA, 25 bp, Probe sequence
gctattttttataccatttcaggat

SEQ ID NO: 189607 - DNA, 25 bp, Probe sequence
gcagcataattggcatacccatcgg

SEQ ID NO: 189608 - DNA, 25 bp, Probe sequence
gaagctttagtaagtatgcctcttt

SEQ ID NO: 189609 - DNA, 25 bp, Probe sequence
tacttcggttttggagaagctttag

SEQ ID NO: 189610 - DNA, 25 bp, Probe sequence
gagcattagttagaagttacttcgg

SEQ ID NO: 189611 - DNA, 25 bp, Probe sequence
gattagatttcaatagttctatatc

SEQ ID NO: 189612 - DNA, 25 bp, Probe sequence
gttctatatctattgttggactagc

SEQ ID NO: 189613 - DNA, 25 bp, Probe sequence
gtttttaatttacatactcttagct

SEQ ID NO: 189614 - DNA, 25 bp, Probe sequence
gtcgttttaggacaagctacaggta

SEQ ID NO: 189615 - DNA, 25 bp, Probe sequence
gtgttgctattttttataccatttc

SEQ ID NO: 189616 - DNA, 25 bp, Probe sequence
gtgtacctatcgtcatatatgcaac

SEQ ID NO: 189617 - DNA, 25 bp, Probe sequence
ggtatttttattcttcacaactttg

SEQ ID NO: 189618 - DNA, 25 bp, Probe sequence
ggacagacaaaaccattccgatttt

SEQ ID NO: 189619 - DNA, 25 bp, Probe sequence
tcgtcatatatgcaactttaagtaa

SEQ ID NO: 189620 - DNA, 25 bp, Probe sequence
tctctcgcgggtcttatatctggaa

SEQ ID NO: 189621 - DNA, 25 bp, Probe sequence
taatcctatacggctttctaaaatt

SEQ ID NO: 189622 - DNA, 25 bp, Probe sequence
tacatactcttagctatttttttag

SEQ ID NO: 189623 - DNA, 25 bp, Probe sequence
tacccatcggtatttttattcttca

SEQ ID NO: 189624 - DNA, 25 bp, Probe sequence
taggcagtttatataatacccatgg

SEQ ID NO: 189625 - DNA, 25 bp, Probe sequence
tatttacctctatatttgtcgtttt

SEQ ID NO: 189626 - DNA, 25 bp, Probe sequence
tattcttcacaactttgatacaaac

SEQ ID NO: 189627 - DNA, 25 bp, Probe sequence
ttggactagctggtctatgtgttgc

SEQ ID NO: 189628 - DNA, 25 bp, Probe sequence
attactcgaagaattaccacaaaat

SEQ ID NO: 189629 - DNA, 25 bp, Probe sequence
attttaggccctaatgatactgatt

SEQ ID NO: 189630 - DNA, 25 bp, Probe sequence
atgaaagtctccaaaatatactaga

SEQ ID NO: 189631 - DNA, 25 bp, Probe sequence
aaaatcctatgagaccgatgatatc

SEQ ID NO: 189632 - DNA, 25 bp, Probe sequence
aagcctaaccttttatatttgcatg

SEQ ID NO: 189633 - DNA, 25 bp, Probe sequence
aagaactgcaagaagtagggttact

SEQ ID NO: 189634 - DNA, 25 bp, Probe sequence
aagacttcttttaacaattcgattg

SEQ ID NO: 189635 - DNA, 25 bp, Probe sequence
aatgatacggatgattcgcatgata

SEQ ID NO: 189636 - DNA, 25 bp, Probe sequence
caaaatttgggactccagaatcccg

SEQ ID NO: 189637 - DNA, 25 bp, Probe sequence
caaattcgtacaggctttaataagc

SEQ ID NO: 189638 - DNA, 25 bp, Probe sequence
cattcaaatcactacaattcaaact

SEQ ID NO: 189639 - DNA, 25 bp, Probe sequence
gcaaggttatcttatgacatctctc

SEQ ID NO: 189640 - DNA, 25 bp, Probe sequence
gaattttgggactccagaatcctaa

SEQ ID NO: 189641 - DNA, 25 bp, Probe sequence
gaattcgcagagatgcatacactta

SEQ ID NO: 189642 - DNA, 25 bp, Probe sequence
gaatcccaaattttaggccctaatg

SEQ ID NO: 189643 - DNA, 25 bp, Probe sequence
gaatcctaaaatttgggactccaga

SEQ ID NO: 189644 - DNA, 25 bp, Probe sequence
gaaagcgtccaagcaatgcaaggtt

SEQ ID NO: 189645 - DNA, 25 bp, Probe sequence
gacatctctcaaatctgaattcgca

SEQ ID NO: 189646 - DNA, 25 bp, Probe sequence
gactccagaatcccaaattttaggc

SEQ ID NO: 189647 - DNA, 25 bp, Probe sequence
gaccgatgatatcaaggagtcccaa

SEQ ID NO: 189648 - DNA, 25 bp, Probe sequence
gaggctttaaaattccaattactcg

SEQ ID NO: 189649 - DNA, 25 bp, Probe sequence
gatgcatacacttaataaacgacgt

SEQ ID NO: 189650 - DNA, 25 bp, Probe sequence
gatagagtgagtttatccattaaaa

SEQ ID NO: 189651 - DNA, 25 bp, Probe sequence
gattatcaaatctgtactcttaaaa

SEQ ID NO: 189652 - DNA, 25 bp, Probe sequence
gtactcttaaaagccaagacttctt

SEQ ID NO: 189653 - DNA, 25 bp, Probe sequence
gtcacttatgcaattctcaatgata

SEQ ID NO: 189654 - DNA, 25 bp, Probe sequence
gtgatagtgccaaagtcacttatgc

SEQ ID NO: 189655 - DNA, 25 bp, Probe sequence
gggttacttgaacaaattcgtacag

SEQ ID NO: 189656 - DNA, 25 bp, Probe sequence
ggactccagaatcccgaattttggg

SEQ ID NO: 189657 - DNA, 25 bp, Probe sequence
tcgattgattcatattacttattgg

SEQ ID NO: 189658 - DNA, 25 bp, Probe sequence
taataatcatacacatcattcaaat

SEQ ID NO: 189659 - DNA, 25 bp, Probe sequence
tatttaaacaacttttctgtacttg

SEQ ID NO: 189660 - DNA, 25 bp, Probe sequence
ttaaacgttttaaagctatgcttat

SEQ ID NO: 189661 - DNA, 25 bp, Probe sequence
ttcaaactttaatgatgaggcttta

SEQ ID NO: 189662 - DNA, 25 bp, Probe sequence
attggataatctactccgtacagaa

SEQ ID NO: 189663 - DNA, 25 bp, Probe sequence
attggcggagtgttattatggatat

SEQ ID NO: 189664 - DNA, 25 bp, Probe sequence
atttaatgactgctaattctgaaca

SEQ ID NO: 189665 - DNA, 25 bp, Probe sequence
atagcctatttgtttggaagagaat

SEQ ID NO: 189666 - DNA, 25 bp, Probe sequence
atgcggacgaaagtaccgactccta

SEQ ID NO: 189667 - DNA, 25 bp, Probe sequence
atgttcccacaattgttttaaccat

SEQ ID NO: 189668 - DNA, 25 bp, Probe sequence
atggtggttgtagcttcttttatta

SEQ ID NO: 189669 - DNA, 25 bp, Probe sequence
atggttgctaactttaatgctaggt

SEQ ID NO: 189670 - DNA, 25 bp, Probe sequence
agatcatatatgtttctaataagta

SEQ ID NO: 189671 - DNA, 25 bp, Probe sequence
agaagtcagtttatatcatatgcta

SEQ ID NO: 189672 - DNA, 25 bp, Probe sequence
accaataattattttgtcgatatat

SEQ ID NO: 189673 - DNA, 25 bp, Probe sequence
aacttattaattatacctatatcta

SEQ ID NO: 189674 - DNA, 25 bp, Probe sequence
aagccagagtttaataattgattca

SEQ ID NO: 189675 - DNA, 25 bp, Probe sequence
aatctactccgtacagaatttatta

SEQ ID NO: 189676 - DNA, 25 bp, Probe sequence
cactatctgttattgcatggttgct

SEQ ID NO: 189677 - DNA, 25 bp, Probe sequence
cttgtggattcaaacactatctgtt

SEQ ID NO: 189678 - DNA, 25 bp, Probe sequence
ctttacatttgttattggcggagtg

SEQ ID NO: 189679 - DNA, 25 bp, Probe sequence
gcgtagcaccttttatggtggttgt

SEQ ID NO: 189680 - DNA, 25 bp, Probe sequence
gcttcttttattagtatgcggacga

SEQ ID NO: 189681 - DNA, 25 bp, Probe sequence
gcattttcaagggttaagccagagt

SEQ ID NO: 189682 - DNA, 25 bp, Probe sequence
gaacatagaggattatttccttggg

SEQ ID NO: 189683 - DNA, 25 bp, Probe sequence
gacgaaagtaccgactcctaatatt

SEQ ID NO: 189684 - DNA, 25 bp, Probe sequence
gactgctaattctgaacatagagga

SEQ ID NO: 189685 - DNA, 25 bp, Probe sequence
gtattttaggtacatgcgtagcacc

SEQ ID NO: 189686 - DNA, 25 bp, Probe sequence
gtaccgactcctaatattgtattta

SEQ ID NO: 189687 - DNA, 25 bp, Probe sequence
ggtacatgcgtagcaccttttatgg

SEQ ID NO: 189688 - DNA, 25 bp, Probe sequence
ggacctcctctatatggggttataa

SEQ ID NO: 189689 - DNA, 25 bp, Probe sequence
tgctaggtatgctattgcattttca

SEQ ID NO: 189690 - DNA, 25 bp, Probe sequence
taatattattattcttgtggattca

SEQ ID NO: 189691 - DNA, 25 bp, Probe sequence
taaaaattatgttcccacaattgtt

SEQ ID NO: 189692 - DNA, 25 bp, Probe sequence
tatggatattatctccaccaataat

SEQ ID NO: 189693 - DNA, 25 bp, Probe sequence
tatgctaattattggacctcctcta

SEQ ID NO: 189694 - DNA, 25 bp, Probe sequence
tattggacctcctctatatggggtt

SEQ ID NO: 189695 - DNA, 25 bp, Probe sequence
ttgattcattctttacatttgttat

SEQ ID NO: 189696 - DNA, 25 bp, Probe sequence
atttattcacatattgatagacaac

SEQ ID NO: 189697 - DNA, 25 bp, Probe sequence
atattggtgctatggttgaaacgcc

SEQ ID NO: 189698 - DNA, 25 bp, Probe sequence
atagtaggactagcttctgaaaaag

SEQ ID NO: 189699 - DNA, 25 bp, Probe sequence
atggtgcaggcaaaacaactactat

SEQ ID NO: 189700 - DNA, 25 bp, Probe sequence
aggtatgaagcaacgtttagggatt

SEQ ID NO: 189701 - DNA, 25 bp, Probe sequence
agagcagttagtagacaaggtgggt

SEQ ID NO: 189702 - DNA, 25 bp, Probe sequence
agagaacttaactataaatgctaaa

SEQ ID NO: 189703 - DNA, 25 bp, Probe sequence
actactataagaatgcttttaggct

SEQ ID NO: 189704 - DNA, 25 bp, Probe sequence
aacgtttagggattgcgagagcttt

SEQ ID NO: 189705 - DNA, 25 bp, Probe sequence
aactaacttcggaatttatgactat

SEQ ID NO: 189706 - DNA, 25 bp, Probe sequence
aaccattttaatttcaagtcatata

SEQ ID NO: 189707 - DNA, 25 bp, Probe sequence
caatattgatgttttccagatgaga

SEQ ID NO: 189708 - DNA, 25 bp, Probe sequence
gccaggtttttatagtaatttgaca

SEQ ID NO: 189709 - DNA, 25 bp, Probe sequence
gcgagagctttattgcacaatcccg

SEQ ID NO: 189710 - DNA, 25 bp, Probe sequence
gctatggttgaaacgccaggttttt

SEQ ID NO: 189711 - DNA, 25 bp, Probe sequence
gcatgtttgttggaaactaacttcg

SEQ ID NO: 189712 - DNA, 25 bp, Probe sequence
gcacaatcccgaattattgatactt

SEQ ID NO: 189713 - DNA, 25 bp, Probe sequence
gaagattatctagaaacttatttcg

SEQ ID NO: 189714 - DNA, 25 bp, Probe sequence
gaaaaagttgcatgtttgttggaaa

SEQ ID NO: 189715 - DNA, 25 bp, Probe sequence
gaaacttatttcgaagacttagtag

SEQ ID NO: 189716 - DNA, 25 bp, Probe sequence
gaaagttgattaaggatctggctca

SEQ ID NO: 189717 - DNA, 25 bp, Probe sequence
gacaaggtgggtattattcataacg

SEQ ID NO: 189718 - DNA, 25 bp, Probe sequence
gacttagtaggaggtggcacaattg

SEQ ID NO: 189719 - DNA, 25 bp, Probe sequence
gagctttattgcacaatcccgaatt

SEQ ID NO: 189720 - DNA, 25 bp, Probe sequence
gatgttttccagatgagagtgatag

SEQ ID NO: 189721 - DNA, 25 bp, Probe sequence
gattagatcctattggcataaaaga

SEQ ID NO: 189722 - DNA, 25 bp, Probe sequence
gtattattcataacggagttttgtt

SEQ ID NO: 189723 - DNA, 25 bp, Probe sequence
gtaatttgacagctaaagagaactt

SEQ ID NO: 189724 - DNA, 25 bp, Probe sequence
ggaagtcagatagcagttaataatt

SEQ ID NO: 189725 - DNA, 25 bp, Probe sequence
ggctcaatctagaaatataaccatt

SEQ ID NO: 189726 - DNA, 25 bp, Probe sequence
tgagccgacgaatggattagatcct

SEQ ID NO: 189727 - DNA, 25 bp, Probe sequence
tgaaagtggacaaatttatggtttt

SEQ ID NO: 189728 - DNA, 25 bp, Probe sequence
taaggatctggctcaatctagaaat

SEQ ID NO: 189729 - DNA, 25 bp, Probe sequence
ttgatacttgatgagccgacgaatg

SEQ ID NO: 189730 - DNA, 25 bp, Probe sequence
attatacttatatgaatatcctgat

SEQ ID NO: 189731 - DNA, 25 bp, Probe sequence
atacccagctatattctacacagaa

SEQ ID NO: 189732 - DNA, 25 bp, Probe sequence
agttacgcttggttcctaaccatca

SEQ ID NO: 189733 - DNA, 25 bp, Probe sequence
agtcaaaacaccatttcaaatcacg

SEQ ID NO: 189734 - DNA, 25 bp, Probe sequence
accaacacattacggcacaattatt

SEQ ID NO: 189735 - DNA, 25 bp, Probe sequence
acgcttggttcctaaccatcattat

SEQ ID NO: 189736 - DNA, 25 bp, Probe sequence
acggcacaattattaaaactcttag

SEQ ID NO: 189737 - DNA, 25 bp, Probe sequence
aaattacgagactttagcaaatact

SEQ ID NO: 189738 - DNA, 25 bp, Probe sequence
aaaggttatagtccaacattaaatg

SEQ ID NO: 189739 - DNA, 25 bp, Probe sequence
aaagcctattataatgacggcgaca

SEQ ID NO: 189740 - DNA, 25 bp, Probe sequence
aacaaatcctttccactgatacaga

SEQ ID NO: 189741 - DNA, 25 bp, Probe sequence
aaggtttaggtatacccagctatat

SEQ ID NO: 189742 - DNA, 25 bp, Probe sequence
aatcctttccactgatacagaaaaa

SEQ ID NO: 189743 - DNA, 25 bp, Probe sequence
caccatttcaaatcacgagaacggc

SEQ ID NO: 189744 - DNA, 25 bp, Probe sequence
caggatttagtcaaaacaccatttc

SEQ ID NO: 189745 - DNA, 25 bp, Probe sequence
gaattaccaacacattacggcacaa

SEQ ID NO: 189746 - DNA, 25 bp, Probe sequence
gaatatcctgatagactagaacatc

SEQ ID NO: 189747 - DNA, 25 bp, Probe sequence
gaagaatccatttatttaggtgaaa

SEQ ID NO: 189748 - DNA, 25 bp, Probe sequence
gaacggcaacagaaacattggagta

SEQ ID NO: 189749 - DNA, 25 bp, Probe sequence
gacatttattattcatcatacgatt

SEQ ID NO: 189750 - DNA, 25 bp, Probe sequence
gactttagcaaatactcgaaaatca

SEQ ID NO: 189751 - DNA, 25 bp, Probe sequence
gacggcgacatttattattcatcat

SEQ ID NO: 189752 - DNA, 25 bp, Probe sequence
gatgctattaaaggtaagccaatgt

SEQ ID NO: 189753 - DNA, 25 bp, Probe sequence
gattatgattacgtacttaagttgt

SEQ ID NO: 189754 - DNA, 25 bp, Probe sequence
ggtatacccagctatattctacaca

SEQ ID NO: 189755 - DNA, 25 bp, Probe sequence
ggttcctaaccatcattatgatgct

SEQ ID NO: 189756 - DNA, 25 bp, Probe sequence
ggcagaattaccaacacattacggc

SEQ ID NO: 189757 - DNA, 25 bp, Probe sequence
ggaaggagctggtcaaatggcagaa

SEQ ID NO: 189758 - DNA, 25 bp, Probe sequence
tgtacaaacaaatcctttccactga

SEQ ID NO: 189759 - DNA, 25 bp, Probe sequence
tgaaattgaaatctacggtaaaggt

SEQ ID NO: 189760 - DNA, 25 bp, Probe sequence
tcacgagaacggcaacagaaacatt

SEQ ID NO: 189761 - DNA, 25 bp, Probe sequence
tcaccaacttagaaactcataacga

SEQ ID NO: 189762 - DNA, 25 bp, Probe sequence
taaaactattattcaccaacttaga

SEQ ID NO: 189763 - DNA, 25 bp, Probe sequence
ttctacacagaatatcagatgagtt

SEQ ID NO: 189764 - DNA, 25 bp, Probe sequence
attgctgaggcaaaacttcaaacag

SEQ ID NO: 189765 - DNA, 25 bp, Probe sequence
atatggtcacaatacctctgataaa

SEQ ID NO: 189766 - DNA, 25 bp, Probe sequence
atgagttgtggcttgaacagtatca

SEQ ID NO: 189767 - DNA, 25 bp, Probe sequence
atgtgtttaaatatgccgtaagcct

SEQ ID NO: 189768 - DNA, 25 bp, Probe sequence
agaacatttccaagatgtacctatt

SEQ ID NO: 189769 - DNA, 25 bp, Probe sequence
aactatggatatttacgctcacgta

SEQ ID NO: 189770 - DNA, 25 bp, Probe sequence
cacactcattgttctcttttgttcg

SEQ ID NO: 189771 - DNA, 25 bp, Probe sequence
gcctaaaacaaaatcatctcacaga

SEQ ID NO: 189772 - DNA, 25 bp, Probe sequence
gccgtaagccttaagataatcgttg

SEQ ID NO: 189773 - DNA, 25 bp, Probe sequence
gcttttactggctttagacgtggag

SEQ ID NO: 189774 - DNA, 25 bp, Probe sequence
gaagcgcaacaagacgcatctacaa

SEQ ID NO: 189775 - DNA, 25 bp, Probe sequence
gaaccactagacgaggctttaagac

SEQ ID NO: 189776 - DNA, 25 bp, Probe sequence
gaaaaacaacgtgatcaggtggctg

SEQ ID NO: 189777 - DNA, 25 bp, Probe sequence
gaaagcacatatcaacgtgttttaa

SEQ ID NO: 189778 - DNA, 25 bp, Probe sequence
gaaagacggttcgactgcctatatg

SEQ ID NO: 189779 - DNA, 25 bp, Probe sequence
gaaatcatggcgcactcatcaaaga

SEQ ID NO: 189780 - DNA, 25 bp, Probe sequence
gacagattaggtcacggggacatca

SEQ ID NO: 189781 - DNA, 25 bp, Probe sequence
gactgcctatatgtttgtcgcatat

SEQ ID NO: 189782 - DNA, 25 bp, Probe sequence
gagtggagtcccttaaatatggtca

SEQ ID NO: 189783 - DNA, 25 bp, Probe sequence
gatgacccattatattatgctattt

SEQ ID NO: 189784 - DNA, 25 bp, Probe sequence
gttcatggttttagacacactcatt

SEQ ID NO: 189785 - DNA, 25 bp, Probe sequence
gtcaaaatggctttctaaacaacga

SEQ ID NO: 189786 - DNA, 25 bp, Probe sequence
ggtcacggggacatcaagacaacta

SEQ ID NO: 189787 - DNA, 25 bp, Probe sequence
ggtactgatccaattactggtaagc

SEQ ID NO: 189788 - DNA, 25 bp, Probe sequence
tcgaggctggcctttctattcaaga

SEQ ID NO: 189789 - DNA, 25 bp, Probe sequence
tcgttgataatccgtttgcacatac

SEQ ID NO: 189790 - DNA, 25 bp, Probe sequence
tcaggtggctgataaattcgcaaaa

SEQ ID NO: 189791 - DNA, 25 bp, Probe sequence
tcaacatgttttcactactgtacgt

SEQ ID NO: 189792 - DNA, 25 bp, Probe sequence
taacttttgttgaagatgacccatt

SEQ ID NO: 189793 - DNA, 25 bp, Probe sequence
taaccgttccatattgccaaaaagt

SEQ ID NO: 189794 - DNA, 25 bp, Probe sequence
taaaccactatatcccgagcattgc

SEQ ID NO: 189795 - DNA, 25 bp, Probe sequence
tatttttcgaacattagcttttact

SEQ ID NO: 189796 - DNA, 25 bp, Probe sequence
ttgttctcttttgttcgaggctggc

SEQ ID NO: 189797 - DNA, 25 bp, Probe sequence
ttgtcgcatatttaggtactgatcc

SEQ ID NO: 189798 - DNA, 25 bp, Probe sequence
ctcgacgaccaagatgttgaggtta

SEQ ID NO: 189799 - DNA, 25 bp, Probe sequence
agaaagcaattcacacctgcacagt

SEQ ID NO: 189800 - DNA, 25 bp, Probe sequence
agctacgactcgacgaccaagatgt

SEQ ID NO: 189801 - DNA, 25 bp, Probe sequence
acctgcacagtggcacgaaatcaac

SEQ ID NO: 189802 - DNA, 25 bp, Probe sequence
acgactcgacgaccaagatgttgag

SEQ ID NO: 189803 - DNA, 25 bp, Probe sequence
acagtggcacgaaatcaacagaatt

SEQ ID NO: 189804 - DNA, 25 bp, Probe sequence
acacctgcacagtggcacgaaatca

SEQ ID NO: 189805 - DNA, 25 bp, Probe sequence
aaagcaattcacacctgcacagtgg

SEQ ID NO: 189806 - DNA, 25 bp, Probe sequence
aaaaaagccgccgagctacgactcg

SEQ ID NO: 189807 - DNA, 25 bp, Probe sequence
aaaatattattactcaacaaaagat

SEQ ID NO: 189808 - DNA, 25 bp, Probe sequence
aagcaattcacacctgcacagtggc

SEQ ID NO: 189809 - DNA, 25 bp, Probe sequence
caattcacacctgcacagtggcacg

SEQ ID NO: 189810 - DNA, 25 bp, Probe sequence
aattcacacctgcacagtggcacga

SEQ ID NO: 189811 - DNA, 25 bp, Probe sequence
cacacctgcacagtggcacgaaatc

SEQ ID NO: 189812 - DNA, 25 bp, Probe sequence
ctacgactcgacgaccaagatgttg

SEQ ID NO: 189813 - DNA, 25 bp, Probe sequence
cgagctacgactcgacgaccaagat

SEQ ID NO: 189814 - DNA, 25 bp, Probe sequence
ccgagctacgactcgacgaccaaga

SEQ ID NO: 189815 - DNA, 25 bp, Probe sequence
cctgcacagtggcacgaaatcaaca

SEQ ID NO: 189816 - DNA, 25 bp, Probe sequence
gctacgactcgacgaccaagatgtt

SEQ ID NO: 189817 - DNA, 25 bp, Probe sequence
gcacagtggcacgaaatcaacagaa

SEQ ID NO: 189818 - DNA, 25 bp, Probe sequence
gaattattgacggacaatttagtaa

SEQ ID NO: 189819 - DNA, 25 bp, Probe sequence
gaagaaacaatcaaacattttttag

SEQ ID NO: 189820 - DNA, 25 bp, Probe sequence
gaaagcaattcacacctgcacagtg

SEQ ID NO: 189821 - DNA, 25 bp, Probe sequence
gaaatcaacagaattattgacggac

SEQ ID NO: 189822 - DNA, 25 bp, Probe sequence
gactcgacgaccaagatgttgaggt

SEQ ID NO: 189823 - DNA, 25 bp, Probe sequence
gacgaccaagatgttgaggttatta

SEQ ID NO: 189824 - DNA, 25 bp, Probe sequence
gtaaaaaagccgccgagctacgact

SEQ ID NO: 189825 - DNA, 25 bp, Probe sequence
gtggcacgaaatcaacagaattatt

SEQ ID NO: 189826 - DNA, 25 bp, Probe sequence
tcacacctgcacagtggcacgaaat

SEQ ID NO: 189827 - DNA, 25 bp, Probe sequence
taaaaaagccgccgagctacgactc

SEQ ID NO: 189828 - DNA, 25 bp, Probe sequence
tagaaagcaattcacacctgcacag

SEQ ID NO: 189829 - DNA, 25 bp, Probe sequence
ttagtaaaaaagccgccgagctacg

SEQ ID NO: 189830 - DNA, 25 bp, Probe sequence
tttagaaagcaattcacacctgcac

SEQ ID NO: 189831 - DNA, 25 bp, Probe sequence
ttcacacctgcacagtggcacgaaa

SEQ ID NO: 189832 - DNA, 25 bp, Probe sequence
atatgcgatgcactacaagttgata

SEQ ID NO: 189833 - DNA, 25 bp, Probe sequence
atcaactagcgaagctaacggaatt

SEQ ID NO: 189834 - DNA, 25 bp, Probe sequence
atgcgatgcactacaagttgatatc

SEQ ID NO: 189835 - DNA, 25 bp, Probe sequence
atgcactacaagttgatatcgctaa

SEQ ID NO: 189836 - DNA, 25 bp, Probe sequence
aggggataacacgctatcaactagc

SEQ ID NO: 189837 - DNA, 25 bp, Probe sequence
acaaaactcgacaattcgatctatc

SEQ ID NO: 189838 - DNA, 25 bp, Probe sequence
aaatatgcgatgcactacaagttga

SEQ ID NO: 189839 - DNA, 25 bp, Probe sequence
aaaggggataacacgctatcaacta

SEQ ID NO: 189840 - DNA, 25 bp, Probe sequence
aaactcgacaattcgatctatcgaa

SEQ ID NO: 189841 - DNA, 25 bp, Probe sequence
aacacgctatcaactagcgaagcta

SEQ ID NO: 189842 - DNA, 25 bp, Probe sequence
aaaaatatgcgatgcactacaagtt

SEQ ID NO: 189843 - DNA, 25 bp, Probe sequence
aaaactcgacaattcgatctatcga

SEQ ID NO: 189844 - DNA, 25 bp, Probe sequence
aactcgacaattcgatctatcgaaa

SEQ ID NO: 189845 - DNA, 25 bp, Probe sequence
caagttgatatcgctaatgtaaagg

SEQ ID NO: 189846 - DNA, 25 bp, Probe sequence
cactacaagttgatatcgctaatgt

SEQ ID NO: 189847 - DNA, 25 bp, Probe sequence
cacgctatcaactagcgaagctaac

SEQ ID NO: 189848 - DNA, 25 bp, Probe sequence
ctagcgaagctaacggaattacaaa

SEQ ID NO: 189849 - DNA, 25 bp, Probe sequence
gctatcaactagcgaagctaacgga

SEQ ID NO: 189850 - DNA, 25 bp, Probe sequence
gctaacggaattacaaaactcgaca

SEQ ID NO: 189851 - DNA, 25 bp, Probe sequence
gcactacaagttgatatcgctaatg

SEQ ID NO: 189852 - DNA, 25 bp, Probe sequence
gaagctaacggaattacaaaactcg

SEQ ID NO: 189853 - DNA, 25 bp, Probe sequence
gaaaaggggataacacgctatcaac

SEQ ID NO: 189854 - DNA, 25 bp, Probe sequence
gagagaagaaaaggggataacacgc

SEQ ID NO: 189855 - DNA, 25 bp, Probe sequence
gatgcactacaagttgatatcgcta

SEQ ID NO: 189856 - DNA, 25 bp, Probe sequence
gataacacgctatcaactagcgaag

SEQ ID NO: 189857 - DNA, 25 bp, Probe sequence
gatatcgctaatgtaaaggagaaat

SEQ ID NO: 189858 - DNA, 25 bp, Probe sequence
gttgatatcgctaatgtaaaggaga

SEQ ID NO: 189859 - DNA, 25 bp, Probe sequence
gtttcctcacagtaaaaaaaatatg

SEQ ID NO: 189860 - DNA, 25 bp, Probe sequence
gggataacacgctatcaactagcga

SEQ ID NO: 189861 - DNA, 25 bp, Probe sequence
tgcactacaagttgatatcgctaat

SEQ ID NO: 189862 - DNA, 25 bp, Probe sequence
tcgacaattcgatctatcgaaacag

SEQ ID NO: 189863 - DNA, 25 bp, Probe sequence
tcgatctatcgaaacagaggttaaa

SEQ ID NO: 189864 - DNA, 25 bp, Probe sequence
taacggaattacaaaactcgacaat

SEQ ID NO: 189865 - DNA, 25 bp, Probe sequence
tatgcgatgcactacaagttgatat

SEQ ID NO: 189866 - DNA, 25 bp, Probe sequence
ataacggggcacaacaacaaacatc

SEQ ID NO: 189867 - DNA, 25 bp, Probe sequence
atcaatgtctcaacaaagcaatcca

SEQ ID NO: 189868 - DNA, 25 bp, Probe sequence
atgcaatacattacaagataccaga

SEQ ID NO: 189869 - DNA, 25 bp, Probe sequence
aggacgtggtttaaatgcaatacat

SEQ ID NO: 189870 - DNA, 25 bp, Probe sequence
acctattccgaagacagataagcaa

SEQ ID NO: 189871 - DNA, 25 bp, Probe sequence
acggggcacaacaacaaacatcaat

SEQ ID NO: 189872 - DNA, 25 bp, Probe sequence
aaaagggcgatgatgttgttaacaa

SEQ ID NO: 189873 - DNA, 25 bp, Probe sequence
aacaaacctattccgaagacagata

SEQ ID NO: 189874 - DNA, 25 bp, Probe sequence
aagctgaagaaaataacggggcaca

SEQ ID NO: 189875 - DNA, 25 bp, Probe sequence
cgttctaggacgtggtttaaatgca

SEQ ID NO: 189876 - DNA, 25 bp, Probe sequence
ccgtcgttgctactggtgttgaact

SEQ ID NO: 189877 - DNA, 25 bp, Probe sequence
gcacaacaacaaacatcaatgtctc

SEQ ID NO: 189878 - DNA, 25 bp, Probe sequence
gcaatccatttgaaagcagtggcca

SEQ ID NO: 189879 - DNA, 25 bp, Probe sequence
gaacttgaacaaagtcacattgact

SEQ ID NO: 189880 - DNA, 25 bp, Probe sequence
gaacaaagtcacattgacttactag

SEQ ID NO: 189881 - DNA, 25 bp, Probe sequence
gaaagacaatgacggtacttattcc

SEQ ID NO: 189882 - DNA, 25 bp, Probe sequence
gacgaccatgatttaccgttctagg

SEQ ID NO: 189883 - DNA, 25 bp, Probe sequence
gacggtacttattccgtcgttgcta

SEQ ID NO: 189884 - DNA, 25 bp, Probe sequence
gaccatgatttaccgttctaggacg

SEQ ID NO: 189885 - DNA, 25 bp, Probe sequence
gatgttgttaacaaacctattccga

SEQ ID NO: 189886 - DNA, 25 bp, Probe sequence
gatgaaggtaagtattttacggatt

SEQ ID NO: 189887 - DNA, 25 bp, Probe sequence
gatatgacgaccatgatttaccgtt

SEQ ID NO: 189888 - DNA, 25 bp, Probe sequence
gttgctactggtgttgaacttgaac

SEQ ID NO: 189889 - DNA, 25 bp, Probe sequence
gttaacaaacctattccgaagacag

SEQ ID NO: 189890 - DNA, 25 bp, Probe sequence
gtctcaacaaagcaatccatttgaa

SEQ ID NO: 189891 - DNA, 25 bp, Probe sequence
gtcgttgctactggtgttgaacttg

SEQ ID NO: 189892 - DNA, 25 bp, Probe sequence
gtggccaatttggatatgacgacca

SEQ ID NO: 189893 - DNA, 25 bp, Probe sequence
tggatatgacgaccatgatttaccg

SEQ ID NO: 189894 - DNA, 25 bp, Probe sequence
tgatttaccgttctaggacgtggtt

SEQ ID NO: 189895 - DNA, 25 bp, Probe sequence
tacttattccgtcgttgctactggt

SEQ ID NO: 189896 - DNA, 25 bp, Probe sequence
tacattacaagataccagaaagaca

SEQ ID NO: 189897 - DNA, 25 bp, Probe sequence
tatgacgaccatgatttaccgttct

SEQ ID NO: 189898 - DNA, 25 bp, Probe sequence
ttccgtcgttgctactggtgttgaa

SEQ ID NO: 189899 - DNA, 25 bp, Probe sequence
ttgaaagcagtggccaatttggata

SEQ ID NO: 189900 - DNA, 25 bp, Probe sequence
actaggtacgacagaggggcgaggg

SEQ ID NO: 189901 - DNA, 25 bp, Probe sequence
attgatgcacctttcggcatgaagc

SEQ ID NO: 189902 - DNA, 25 bp, Probe sequence
aggactcacgcccgaaatagttaga

SEQ ID NO: 189903 - DNA, 25 bp, Probe sequence
aggactacttaattacaggatagca

SEQ ID NO: 189904 - DNA, 25 bp, Probe sequence
agagttgcgaagggttgggagttgt

SEQ ID NO: 189905 - DNA, 25 bp, Probe sequence
aaagattaaacaagcgagactcgaa

SEQ ID NO: 189906 - DNA, 25 bp, Probe sequence
aacgggcgatgcgcttattgcgcca

SEQ ID NO: 189907 - DNA, 25 bp, Probe sequence
aagcgagactcgaacgtgaattgga

SEQ ID NO: 189908 - DNA, 25 bp, Probe sequence
gaaagtaaaggttgacggcaaattg

SEQ ID NO: 189909 - DNA, 25 bp, Probe sequence
aatacgacatcaaagtatcgacact

SEQ ID NO: 189910 - DNA, 25 bp, Probe sequence
caaaagggttaacgggcgatgcgct

SEQ ID NO: 189911 - DNA, 25 bp, Probe sequence
ctcacgcccgaaatagttagaaaca

SEQ ID NO: 189912 - DNA, 25 bp, Probe sequence
ggttaacgggcgatgcgcttattgc

SEQ ID NO: 189913 - DNA, 25 bp, Probe sequence
ccccccttctaaatacactgaatat

SEQ ID NO: 189914 - DNA, 25 bp, Probe sequence
gcacctttcggcatgaagctaaacg

SEQ ID NO: 189915 - DNA, 25 bp, Probe sequence
gaatagacggtaagatgatgatgct

SEQ ID NO: 189916 - DNA, 25 bp, Probe sequence
gaagggttgggagttgtcagaagca

SEQ ID NO: 189917 - DNA, 25 bp, Probe sequence
gacagaggggcgagggggaaagact

SEQ ID NO: 189918 - DNA, 25 bp, Probe sequence
gaagcaattgatgcacctttcggca

SEQ ID NO: 189919 - DNA, 25 bp, Probe sequence
gaaaggactcacgcccgaaatagtt

SEQ ID NO: 189920 - DNA, 25 bp, Probe sequence
gaaagaggctgagttgaatatgtga

SEQ ID NO: 189921 - DNA, 25 bp, Probe sequence
gacggcaaattgatgactgttagcg

SEQ ID NO: 189922 - DNA, 25 bp, Probe sequence
gagactcgaacgtgaattggaaaga

SEQ ID NO: 189923 - DNA, 25 bp, Probe sequence
gatgactgttagcgaaatggttaaa

SEQ ID NO: 189924 - DNA, 25 bp, Probe sequence
gatgatgcttattgatgcatctgat

SEQ ID NO: 189925 - DNA, 25 bp, Probe sequence
gtatcgacactaattactaggtacg

SEQ ID NO: 189926 - DNA, 25 bp, Probe sequence
gtacaacctaagcaaaggactactt

SEQ ID NO: 189927 - DNA, 25 bp, Probe sequence
ggttgggagttgtcagaagcaattg

SEQ ID NO: 189928 - DNA, 25 bp, Probe sequence
ggcatgaagctaaacgactatagag

SEQ ID NO: 189929 - DNA, 25 bp, Probe sequence
tggcgggcataaaaacgaaagtgag

SEQ ID NO: 189930 - DNA, 25 bp, Probe sequence
tgaaaaagaaaggactcacgcccga

SEQ ID NO: 189931 - DNA, 25 bp, Probe sequence
tgcgcttattgcgccaccacaagaa

SEQ ID NO: 189932 - DNA, 25 bp, Probe sequence
ttattgcgccaccacaagaaaaccc

SEQ ID NO: 189933 - DNA, 25 bp, Probe sequence
ttgatgcatctgataaatacgacat

SEQ ID NO: 189934 - DNA, 25 bp, Probe sequence
atcgcaacagagattgggacacgtt

SEQ ID NO: 189935 - DNA, 25 bp, Probe sequence
agagattgggacacgttgacttttg

SEQ ID NO: 189936 - DNA, 25 bp, Probe sequence
agaaaagatttatctactacagtga

SEQ ID NO: 189937 - DNA, 25 bp, Probe sequence
acttcttagcacgccgtgatgagtt

SEQ ID NO: 189938 - DNA, 25 bp, Probe sequence
acagaaacaacttcttagcacgccg

SEQ ID NO: 189939 - DNA, 25 bp, Probe sequence
acaacttcttagcacgccgtgatga

SEQ ID NO: 189940 - DNA, 25 bp, Probe sequence
aaaggtatgctcagatgttaaaaga

SEQ ID NO: 189941 - DNA, 25 bp, Probe sequence
aaagttgaagatgttgttgtgaggc

SEQ ID NO: 189942 - DNA, 25 bp, Probe sequence
aaacaacttcttagcacgccgtgat

SEQ ID NO: 189943 - DNA, 25 bp, Probe sequence
aagcaacgttgccgaaaccacaagg

SEQ ID NO: 189944 - DNA, 25 bp, Probe sequence
aattgttaatatgataggcacacat

SEQ ID NO: 189945 - DNA, 25 bp, Probe sequence
cacgttgacttttgtttcttagagt

SEQ ID NO: 189946 - DNA, 25 bp, Probe sequence
cagtatggcatacaagcaacgttgc

SEQ ID NO: 189947 - DNA, 25 bp, Probe sequence
gcatacaagcaacgttgccgaaacc

SEQ ID NO: 189948 - DNA, 25 bp, Probe sequence
gcacgccgtgatgagttggcagaaa

SEQ ID NO: 189949 - DNA, 25 bp, Probe sequence
gcaattcaattgcacagtatggcat

SEQ ID NO: 189950 - DNA, 25 bp, Probe sequence
gaagtgtaatgtattagctgatgta

SEQ ID NO: 189951 - DNA, 25 bp, Probe sequence
gaagatgcctaactctaaattaaac

SEQ ID NO: 189952 - DNA, 25 bp, Probe sequence
gaaaggttataacagggatgcgatt

SEQ ID NO: 189953 - DNA, 25 bp, Probe sequence
gacttttgtttcttagagttattga

SEQ ID NO: 189954 - DNA, 25 bp, Probe sequence
gagttggcagaaaagatttatctac

SEQ ID NO: 189955 - DNA, 25 bp, Probe sequence
gagtttataaatcaatcgcaacaga

SEQ ID NO: 189956 - DNA, 25 bp, Probe sequence
gaggttgagtttataaatcaatcgc

SEQ ID NO: 189957 - DNA, 25 bp, Probe sequence
gatgttgttgtgaggcttgagagag

SEQ ID NO: 189958 - DNA, 25 bp, Probe sequence
gatgcctaactctaaattaaacaga

SEQ ID NO: 189959 - DNA, 25 bp, Probe sequence
gttgtgaggcttgagagagcaaata

SEQ ID NO: 189960 - DNA, 25 bp, Probe sequence
gattgggacacgttgacttttgttt

SEQ ID NO: 189961 - DNA, 25 bp, Probe sequence
gtaataccggaatatgatagcaatt

SEQ ID NO: 189962 - DNA, 25 bp, Probe sequence
gggatgcgattatcaagaagatgcc

SEQ ID NO: 189963 - DNA, 25 bp, Probe sequence
ggacacgttgacttttgtttcttag

SEQ ID NO: 189964 - DNA, 25 bp, Probe sequence
tgggacacgttgacttttgtttctt

SEQ ID NO: 189965 - DNA, 25 bp, Probe sequence
ttatcaagaagatgcctaactctaa

SEQ ID NO: 189966 - DNA, 25 bp, Probe sequence
ttagcacgccgtgatgagttggcag

SEQ ID NO: 189967 - DNA, 25 bp, Probe sequence
ttagctgatgtaataccggaatatg

SEQ ID NO: 189968 - DNA, 25 bp, Probe sequence
attcctcgctagtttggacggcatg

SEQ ID NO: 189969 - DNA, 25 bp, Probe sequence
ataattcacaagaagcagaagttgc

SEQ ID NO: 189970 - DNA, 25 bp, Probe sequence
atgcaagcgagcacggtagctaaaa

SEQ ID NO: 189971 - DNA, 25 bp, Probe sequence
aggcttttgaagagtatgagtggct

SEQ ID NO: 189972 - DNA, 25 bp, Probe sequence
agttgctaaagcacttattaagtta

SEQ ID NO: 189973 - DNA, 25 bp, Probe sequence
agcacttattaagttagcgggtgtt

SEQ ID NO: 189974 - DNA, 25 bp, Probe sequence
agcgacagctgatgcattcctcgct

SEQ ID NO: 189975 - DNA, 25 bp, Probe sequence
agcgagcacggtagctaaaaataat

SEQ ID NO: 189976 - DNA, 25 bp, Probe sequence
aaatcgatcaaatggataaatcaga

SEQ ID NO: 189977 - DNA, 25 bp, Probe sequence
aagcgacagctgatgcattcctcgc

SEQ ID NO: 189978 - DNA, 25 bp, Probe sequence
aagttagcgggtgttaatgatgatt

SEQ ID NO: 189979 - DNA, 25 bp, Probe sequence
aatggacacgccaaaaggcttttga

SEQ ID NO: 189980 - DNA, 25 bp, Probe sequence
aatgacgttaggcaatgaagttctg

SEQ ID NO: 189981 - DNA, 25 bp, Probe sequence
cattcctcgctagtttggacggcat

SEQ ID NO: 189982 - DNA, 25 bp, Probe sequence
ctgatgcattcctcgctagtttgga

SEQ ID NO: 189983 - DNA, 25 bp, Probe sequence
ctcgctagtttggacggcatgaata

SEQ ID NO: 189984 - DNA, 25 bp, Probe sequence
tcctcgctagtttggacggcatgaa

SEQ ID NO: 189985 - DNA, 25 bp, Probe sequence
gctgagcaatcaaaatggacacgcc

SEQ ID NO: 189986 - DNA, 25 bp, Probe sequence
gctagtttggacggcatgaatagaa

SEQ ID NO: 189987 - DNA, 25 bp, Probe sequence
gcaagcgagcacggtagctaaaaat

SEQ ID NO: 189988 - DNA, 25 bp, Probe sequence
gaagcagaagttgctaaagcactta

SEQ ID NO: 189989 - DNA, 25 bp, Probe sequence
gaaagcgacagctgatgcattcctc

SEQ ID NO: 189990 - DNA, 25 bp, Probe sequence
gacgttaggcaatgaagttctgact

SEQ ID NO: 189991 - DNA, 25 bp, Probe sequence
gagtggctaaagaatacagcgaaga

SEQ ID NO: 189992 - DNA, 25 bp, Probe sequence
gagggagtgaagaaagcgacagctg

SEQ ID NO: 189993 - DNA, 25 bp, Probe sequence
ggacggcatgaatagaatgacgtta

SEQ ID NO: 189994 - DNA, 25 bp, Probe sequence
tgatgcattcctcgctagtttggac

SEQ ID NO: 189995 - DNA, 25 bp, Probe sequence
tgagcaatcaaaatggacacgccaa

SEQ ID NO: 189996 - DNA, 25 bp, Probe sequence
tgaaactgaaatcaagatgcttgag

SEQ ID NO: 189997 - DNA, 25 bp, Probe sequence
tgcattcctcgctagtttggacggc

SEQ ID NO: 189998 - DNA, 25 bp, Probe sequence
taaggtacgaagaacttcgtcaaga

SEQ ID NO: 189999 - DNA, 25 bp, Probe sequence
tacagcgaagaacgatattgaaata

SEQ ID NO: 190000 - DNA, 25 bp, Probe sequence
taggcaatgaagttctgactaataa

SEQ ID NO: 190001 - DNA, 25 bp, Probe sequence
ttcgtcaagaagtagctgagcaatc

SEQ ID NO: 190002 - DNA, 25 bp, Probe sequence
atcgattatcgcaagtacaccaaca

SEQ ID NO: 190003 - DNA, 25 bp, Probe sequence
aggggcttaacttcattatcggagg

SEQ ID NO: 190004 - DNA, 25 bp, Probe sequence
agatatgcagtttatacagctaata

SEQ ID NO: 190005 - DNA, 25 bp, Probe sequence
agcacgtggttttacttcagcaggt

SEQ ID NO: 190006 - DNA, 25 bp, Probe sequence
agcattccaatttactttgtttgac

SEQ ID NO: 190007 - DNA, 25 bp, Probe sequence
aaagtgtatgtattcgacggacaaa

SEQ ID NO: 190008 - DNA, 25 bp, Probe sequence
aaacgaggggacagcattacacaat

SEQ ID NO: 190009 - DNA, 25 bp, Probe sequence
aacatatgtatttatcctgcttttt

SEQ ID NO: 190010 - DNA, 25 bp, Probe sequence
aagtctggaactgcttcataaacga

SEQ ID NO: 190011 - DNA, 25 bp, Probe sequence
caacaggaatgttcacagatcgtga

SEQ ID NO: 190012 - DNA, 25 bp, Probe sequence
ccgaaaacccgatgcatccagttaa

SEQ ID NO: 190013 - DNA, 25 bp, Probe sequence
gcgagtggtgcgaagagggcaggta

SEQ ID NO: 190014 - DNA, 25 bp, Probe sequence
gctggcattgaagttatttctaggt

SEQ ID NO: 190015 - DNA, 25 bp, Probe sequence
gcatctatcagacgtaacatactag

SEQ ID NO: 190016 - DNA, 25 bp, Probe sequence
gaagaacacgcacacagacataaag

SEQ ID NO: 190017 - DNA, 25 bp, Probe sequence
gacaaagccgttattgctggcattg

SEQ ID NO: 190018 - DNA, 25 bp, Probe sequence
gacacttgataaatctaacgcagtc

SEQ ID NO: 190019 - DNA, 25 bp, Probe sequence
gacggacaaaactcggatgcatgga

SEQ ID NO: 190020 - DNA, 25 bp, Probe sequence
gagcattatggttctattatggttg

SEQ ID NO: 190021 - DNA, 25 bp, Probe sequence
gagtggtcaacggttatcgaatgga

SEQ ID NO: 190022 - DNA, 25 bp, Probe sequence
gaggagcgacacaagcatctatcag

SEQ ID NO: 190023 - DNA, 25 bp, Probe sequence
gaggtattctcacgttgtagttaca

SEQ ID NO: 190024 - DNA, 25 bp, Probe sequence
ggatattaattgataccaaccccga

SEQ ID NO: 190025 - DNA, 25 bp, Probe sequence
gtagttacaaaggcgcgaggatatt

SEQ ID NO: 190026 - DNA, 25 bp, Probe sequence
gtgggtttctgctgaaggtgttgta

SEQ ID NO: 190027 - DNA, 25 bp, Probe sequence
gtgatacagctagacctgaacatat

SEQ ID NO: 190028 - DNA, 25 bp, Probe sequence
ggttgtagcggaagactttgacgga

SEQ ID NO: 190029 - DNA, 25 bp, Probe sequence
ggaaatatgcaggcgtcgactgggg

SEQ ID NO: 190030 - DNA, 25 bp, Probe sequence
ggcatggcgatattcttttttattg

SEQ ID NO: 190031 - DNA, 25 bp, Probe sequence
ggcgtcgactggggatatgagcatt

SEQ ID NO: 190032 - DNA, 25 bp, Probe sequence
tcagcaggtgcttttttaaacgagg

SEQ ID NO: 190033 - DNA, 25 bp, Probe sequence
tagatgactgggtagctattgctaa

SEQ ID NO: 190034 - DNA, 25 bp, Probe sequence
tatcctgctttttttaatgcacata

SEQ ID NO: 190035 - DNA, 25 bp, Probe sequence
ttatggtaagtgggtttctgctgaa

SEQ ID NO: 190036 - DNA, 25 bp, Probe sequence
atcacccgtttgtcgaagatttgca

SEQ ID NO: 190037 - DNA, 25 bp, Probe sequence
aggagttgctttggtttgtgtttga

SEQ ID NO: 190038 - DNA, 25 bp, Probe sequence
agatgacggaggtgctgacggtgcc

SEQ ID NO: 190039 - DNA, 25 bp, Probe sequence
acttccatgctaacctagtagatca

SEQ ID NO: 190040 - DNA, 25 bp, Probe sequence
aaaacacattttagtacagggtcat

SEQ ID NO: 190041 - DNA, 25 bp, Probe sequence
aacaggcgattatccgatttatcca

SEQ ID NO: 190042 - DNA, 25 bp, Probe sequence
aagcggttgactttagttctgacaa

SEQ ID NO: 190043 - DNA, 25 bp, Probe sequence
aagcctatcgcttttaaacatacag

SEQ ID NO: 190044 - DNA, 25 bp, Probe sequence
aagcagataagttagcgcgcaaagc

SEQ ID NO: 190045 - DNA, 25 bp, Probe sequence
aagatgtcgatattagtttcaacta

SEQ ID NO: 190046 - DNA, 25 bp, Probe sequence
gtatcggataacgggggtgtcgaca

SEQ ID NO: 190047 - DNA, 25 bp, Probe sequence
gaaaacggctcgcttattccggatt

SEQ ID NO: 190048 - DNA, 25 bp, Probe sequence
gctacaggagcagttgacccattga

SEQ ID NO: 190049 - DNA, 25 bp, Probe sequence
gcttattccggattactctaacaat

SEQ ID NO: 190050 - DNA, 25 bp, Probe sequence
gaattagaggcgtttatcaggatgt

SEQ ID NO: 190051 - DNA, 25 bp, Probe sequence
gaatgattaccaacttccatgctaa

SEQ ID NO: 190052 - DNA, 25 bp, Probe sequence
gagttgccagaattcaaacggttac

SEQ ID NO: 190053 - DNA, 25 bp, Probe sequence
gatttgcaagcagaactcgaacgaa

SEQ ID NO: 190054 - DNA, 25 bp, Probe sequence
gttgacccattgaaaccagatgaca

SEQ ID NO: 190055 - DNA, 25 bp, Probe sequence
gttctgacaaattcggttcggctcc

SEQ ID NO: 190056 - DNA, 25 bp, Probe sequence
gtttgtgtttgagcacttcgatatc

SEQ ID NO: 190057 - DNA, 25 bp, Probe sequence
gtacaaacagctcaacaatctatgg

SEQ ID NO: 190058 - DNA, 25 bp, Probe sequence
gggtaagattccatttattccattc

SEQ ID NO: 190059 - DNA, 25 bp, Probe sequence
ggggtgtcgacacaatacaggtaga

SEQ ID NO: 190060 - DNA, 25 bp, Probe sequence
ggaacccaagccggttgatgctaca

SEQ ID NO: 190061 - DNA, 25 bp, Probe sequence
tggggttgcgttggagtttttatat

SEQ ID NO: 190062 - DNA, 25 bp, Probe sequence
tggagtacaacaagcaactgcctaa

SEQ ID NO: 190063 - DNA, 25 bp, Probe sequence
ttcggctccaagtggggttgcgttg

SEQ ID NO: 190064 - DNA, 25 bp, Probe sequence
tgaatggttgcatccttaccttgat

SEQ ID NO: 190065 - DNA, 25 bp, Probe sequence
taatgttgtttggtcaagcggttga

SEQ ID NO: 190066 - DNA, 25 bp, Probe sequence
taagctatttagagtaccggcggaa

SEQ ID NO: 190067 - DNA, 25 bp, Probe sequence
taccggcggaacaaggtattcctat

SEQ ID NO: 190068 - DNA, 25 bp, Probe sequence
tatgagcaacgccctgatattgtta

SEQ ID NO: 190069 - DNA, 25 bp, Probe sequence
tattttgtaccctagccaaccaaca

SEQ ID NO: 190070 - DNA, 25 bp, Probe sequence
agacgaaccgttcaagtcgagtggt

SEQ ID NO: 190071 - DNA, 25 bp, Probe sequence
atcacacaaggcattatgagcggag

SEQ ID NO: 190072 - DNA, 25 bp, Probe sequence
atctatgcaatttgatgttcctagc

SEQ ID NO: 190073 - DNA, 25 bp, Probe sequence
agtaataccacaaatgacttatcgt

SEQ ID NO: 190074 - DNA, 25 bp, Probe sequence
agttccttatgagcctttatttata

SEQ ID NO: 190075 - DNA, 25 bp, Probe sequence
agagcgatgtctcaagctggacttg

SEQ ID NO: 190076 - DNA, 25 bp, Probe sequence
agctgagaagcctatagaacaacta

SEQ ID NO: 190077 - DNA, 25 bp, Probe sequence
acacgtacaagagacacacacaggc

SEQ ID NO: 190078 - DNA, 25 bp, Probe sequence
acacacaggcatctagacggtgcta

SEQ ID NO: 190079 - DNA, 25 bp, Probe sequence
aacaacctattgagttcattcgatt

SEQ ID NO: 190080 - DNA, 25 bp, Probe sequence
caactgtcgttgtaagcttatgtat

SEQ ID NO: 190081 - DNA, 25 bp, Probe sequence
ctcaatcgttgcgtgtagctcgtac

SEQ ID NO: 190082 - DNA, 25 bp, Probe sequence
gcgtgtagctcgtacagaagcgggt

SEQ ID NO: 190083 - DNA, 25 bp, Probe sequence
gagttcattcgattagtgccgacgt

SEQ ID NO: 190084 - DNA, 25 bp, Probe sequence
gaagtcgcaggaagacgcttatata

SEQ ID NO: 190085 - DNA, 25 bp, Probe sequence
gaagttatcacatcagctattgaac

SEQ ID NO: 190086 - DNA, 25 bp, Probe sequence
gaagcgggtagagcgatgtctcaag

SEQ ID NO: 190087 - DNA, 25 bp, Probe sequence
gaacaactatttgccaatcgactta

SEQ ID NO: 190088 - DNA, 25 bp, Probe sequence
ggacaagcgcccaagttattcgttg

SEQ ID NO: 190089 - DNA, 25 bp, Probe sequence
gacggcgagtcaaacatctatgcaa

SEQ ID NO: 190090 - DNA, 25 bp, Probe sequence
gagcggagagggctactctaagata

SEQ ID NO: 190091 - DNA, 25 bp, Probe sequence
gagtggttgcgttggacaagcgccc

SEQ ID NO: 190092 - DNA, 25 bp, Probe sequence
gatggcacaaccgaagtaataccac

SEQ ID NO: 190093 - DNA, 25 bp, Probe sequence
gatgtataagtattggcatgccact

SEQ ID NO: 190094 - DNA, 25 bp, Probe sequence
gatacgcttacacatcacacaaggc

SEQ ID NO: 190095 - DNA, 25 bp, Probe sequence
gatagcgaaagcaatccgtgatgat

SEQ ID NO: 190096 - DNA, 25 bp, Probe sequence
gtgccgacgttacagaagcatcgtg

SEQ ID NO: 190097 - DNA, 25 bp, Probe sequence
ggtatgtctaaagctcaatcgttgc

SEQ ID NO: 190098 - DNA, 25 bp, Probe sequence
ggagttaactcgtataggcacaatg

SEQ ID NO: 190099 - DNA, 25 bp, Probe sequence
ggacttgatagtgcattagtagctc

SEQ ID NO: 190100 - DNA, 25 bp, Probe sequence
ggcatgccactaaagatacacgtac

SEQ ID NO: 190101 - DNA, 25 bp, Probe sequence
ggcacaatgttgactgatgactata

SEQ ID NO: 190102 - DNA, 25 bp, Probe sequence
tgacgaagatgatttgcctagtaca

SEQ ID NO: 190103 - DNA, 25 bp, Probe sequence
tatcgacagtctaatctctaaagct

SEQ ID NO: 190104 - DNA, 25 bp, Probe sequence
attgaacgacaagaataccgaaatc

SEQ ID NO: 190105 - DNA, 25 bp, Probe sequence
atttatttgcgtcgtctaagcctgt

SEQ ID NO: 190106 - DNA, 25 bp, Probe sequence
gacgacggcactgtaaaaggtttag

SEQ ID NO: 190107 - DNA, 25 bp, Probe sequence
aacaccacaaggcggaggtaatcca

SEQ ID NO: 190108 - DNA, 25 bp, Probe sequence
aacatgagtgtcgctgaacgtaacg

SEQ ID NO: 190109 - DNA, 25 bp, Probe sequence
aacgcagttaagttagcggttgcta

SEQ ID NO: 190110 - DNA, 25 bp, Probe sequence
aagcctgtaggtaaaacaccacaag

SEQ ID NO: 190111 - DNA, 25 bp, Probe sequence
aagacggagaaatcgacaagcagaa

SEQ ID NO: 190112 - DNA, 25 bp, Probe sequence
aagtttgacaacatgagtgtcgctg

SEQ ID NO: 190113 - DNA, 25 bp, Probe sequence
aattgtcaaattgcaagactctgtt

SEQ ID NO: 190114 - DNA, 25 bp, Probe sequence
gcaaatgacgctaacgacattctag

SEQ ID NO: 190115 - DNA, 25 bp, Probe sequence
gcaagactctgttaaagatgatagc

SEQ ID NO: 190116 - DNA, 25 bp, Probe sequence
gaattgtatttgaacgatcgtgaga

SEQ ID NO: 190117 - DNA, 25 bp, Probe sequence
gaatcaaaattcagagtgggagaca

SEQ ID NO: 190118 - DNA, 25 bp, Probe sequence
gaatggtaccacgttcaagattgaa

SEQ ID NO: 190119 - DNA, 25 bp, Probe sequence
gaagagatttctaaacgtgatgaac

SEQ ID NO: 190120 - DNA, 25 bp, Probe sequence
gaacgatcgtgagacattcgaaaaa

SEQ ID NO: 190121 - DNA, 25 bp, Probe sequence
gaaacacaacttaataacgcagtta

SEQ ID NO: 190122 - DNA, 25 bp, Probe sequence
gaaagtaattgatgcgattgacgaa

SEQ ID NO: 190123 - DNA, 25 bp, Probe sequence
gaaatcgggaatggtaccacgttca

SEQ ID NO: 190124 - DNA, 25 bp, Probe sequence
gacattctagcattcatcaataaag

SEQ ID NO: 190125 - DNA, 25 bp, Probe sequence
gacgctaacgacattctagcattca

SEQ ID NO: 190126 - DNA, 25 bp, Probe sequence
gagtctaaaccttatttatttgcgt

SEQ ID NO: 190127 - DNA, 25 bp, Probe sequence
gatgcgattgacgaatcgaaatcgg

SEQ ID NO: 190128 - DNA, 25 bp, Probe sequence
gtgtcgctgaacgtaacgaattgta

SEQ ID NO: 190129 - DNA, 25 bp, Probe sequence
ggtaatccagactcaggtgtaacga

SEQ ID NO: 190130 - DNA, 25 bp, Probe sequence
ggatttatacacgttgttaggacaa

SEQ ID NO: 190131 - DNA, 25 bp, Probe sequence
ggaattagtagacgacggcactgta

SEQ ID NO: 190132 - DNA, 25 bp, Probe sequence
ggcggaggtaatccagactcaggtg

SEQ ID NO: 190133 - DNA, 25 bp, Probe sequence
tgcgtcgtctaagcctgtaggtaaa

SEQ ID NO: 190134 - DNA, 25 bp, Probe sequence
tccagactcaggtgtaacgaaagaa

SEQ ID NO: 190135 - DNA, 25 bp, Probe sequence
taaaccttatttatttgcgtcgtct

SEQ ID NO: 190136 - DNA, 25 bp, Probe sequence
taacgacattctagcattcatcaat

SEQ ID NO: 190137 - DNA, 25 bp, Probe sequence
tatttgcgtcgtctaagcctgtagg

SEQ ID NO: 190138 - DNA, 25 bp, Probe sequence
attgctaaaggtacatctatcacag

SEQ ID NO: 190139 - DNA, 25 bp, Probe sequence
attaaacggcttacaatcagcaatc

SEQ ID NO: 190140 - DNA, 25 bp, Probe sequence
atagcggagatgcacaagtagttgc

SEQ ID NO: 190141 - DNA, 25 bp, Probe sequence
atcattccagaagtattagcgccta

SEQ ID NO: 190142 - DNA, 25 bp, Probe sequence
atcccaactgatatcttagaaacta

SEQ ID NO: 190143 - DNA, 25 bp, Probe sequence
aaggtgcgtttggcgaagctctagg

SEQ ID NO: 190144 - DNA, 25 bp, Probe sequence
agcactatgtagcttatttatatga

SEQ ID NO: 190145 - DNA, 25 bp, Probe sequence
acttactgttaatgcggacatcact

SEQ ID NO: 190146 - DNA, 25 bp, Probe sequence
aaaatcactaaaggttctggaagct

SEQ ID NO: 190147 - DNA, 25 bp, Probe sequence
caactaactttacacgcgcaactga

SEQ ID NO: 190148 - DNA, 25 bp, Probe sequence
cgtcaacacggtttagcacacgcta

SEQ ID NO: 190149 - DNA, 25 bp, Probe sequence
gcctatgatgcaagcgcaactcgaa

SEQ ID NO: 190150 - DNA, 25 bp, Probe sequence
gcgctatcattgtgcgttctaataa

SEQ ID NO: 190151 - DNA, 25 bp, Probe sequence
gcggacatcactaaattaaacggct

SEQ ID NO: 190152 - DNA, 25 bp, Probe sequence
gaagtagctcgtgacgcatcaacaa

SEQ ID NO: 190153 - DNA, 25 bp, Probe sequence
gaagctctaggcgctatcattgtgc

SEQ ID NO: 190154 - DNA, 25 bp, Probe sequence
gaagctggcacggctattttagcta

SEQ ID NO: 190155 - DNA, 25 bp, Probe sequence
gaaccaatggttttatttatcaatc

SEQ ID NO: 190156 - DNA, 25 bp, Probe sequence
gaaattgcgtttcgcttcatttgca

SEQ ID NO: 190157 - DNA, 25 bp, Probe sequence
gacattcccagcattcgtttatagc

SEQ ID NO: 190158 - DNA, 25 bp, Probe sequence
gatgacatcatcgttaaaggtgcgt

SEQ ID NO: 190159 - DNA, 25 bp, Probe sequence
gatgaggctttattaagtggttacg

SEQ ID NO: 190160 - DNA, 25 bp, Probe sequence
gatgctggtaaattgcgtggagatg

SEQ ID NO: 190161 - DNA, 25 bp, Probe sequence
gatagcacattacaaggacaaccgg

SEQ ID NO: 190162 - DNA, 25 bp, Probe sequence
gggagacactttgacattcccagca

SEQ ID NO: 190163 - DNA, 25 bp, Probe sequence
ggacaaccgggagacactttgacat

SEQ ID NO: 190164 - DNA, 25 bp, Probe sequence
ggagatgcatcaactaactttacac

SEQ ID NO: 190165 - DNA, 25 bp, Probe sequence
tggttacggagaccctcaaggcgaa

SEQ ID NO: 190166 - DNA, 25 bp, Probe sequence
tcttgaaacgtgatttcttcttaga

SEQ ID NO: 190167 - DNA, 25 bp, Probe sequence
tcttcttagaagtagctcgtgacgc

SEQ ID NO: 190168 - DNA, 25 bp, Probe sequence
tcaaggcgaacaagtgcgtcaacac

SEQ ID NO: 190169 - DNA, 25 bp, Probe sequence
tacacgcgcaactgaattaggagat

SEQ ID NO: 190170 - DNA, 25 bp, Probe sequence
ttatcaatccacttgatgctggtaa

SEQ ID NO: 190171 - DNA, 25 bp, Probe sequence
ttaatgggagctaaacttactgtta

SEQ ID NO: 190172 - DNA, 25 bp, Probe sequence
attatctacaacaaacaaccgccgt

SEQ ID NO: 190173 - DNA, 25 bp, Probe sequence
atcgctatcaaacttgttgaagaca

SEQ ID NO: 190174 - DNA, 25 bp, Probe sequence
accgccgtaatttaatcgctatcaa

SEQ ID NO: 190175 - DNA, 25 bp, Probe sequence
acaaccgccgtaatttaatcgctat

SEQ ID NO: 190176 - DNA, 25 bp, Probe sequence
aagaacttgctaaaaagcgtgaaat

SEQ ID NO: 190177 - DNA, 25 bp, Probe sequence
aagacaacggacatgaatatcaagt

SEQ ID NO: 190178 - DNA, 25 bp, Probe sequence
aatttaatcgctatcaaacttgttg

SEQ ID NO: 190179 - DNA, 25 bp, Probe sequence
caaccgccgtaatttaatcgctatc

SEQ ID NO: 190180 - DNA, 25 bp, Probe sequence
caagcaagtagaacagtctgaggcg

SEQ ID NO: 190181 - DNA, 25 bp, Probe sequence
cagtctgaggcgaacgctgacgagc

SEQ ID NO: 190182 - DNA, 25 bp, Probe sequence
cgattcactgaattatctacaacaa

SEQ ID NO: 190183 - DNA, 25 bp, Probe sequence
cccacgtgatgggttagaagtatca

SEQ ID NO: 190184 - DNA, 25 bp, Probe sequence
gccgtaatttaatcgctatcaaact

SEQ ID NO: 190185 - DNA, 25 bp, Probe sequence
gcgtgaaattaaaggctatagtgat

SEQ ID NO: 190186 - DNA, 25 bp, Probe sequence
gcttatcaaagctttagagggtgtt

SEQ ID NO: 190187 - DNA, 25 bp, Probe sequence
gcacaagacaacggacatgaatatc

SEQ ID NO: 190188 - DNA, 25 bp, Probe sequence
gaattatctacaacaaacaaccgcc

SEQ ID NO: 190189 - DNA, 25 bp, Probe sequence
gaagtatcagaagaacgattcactg

SEQ ID NO: 190190 - DNA, 25 bp, Probe sequence
gaagatgcacaagacaacggacatg

SEQ ID NO: 190191 - DNA, 25 bp, Probe sequence
gaacagtctgaggcgaacgctgacg

SEQ ID NO: 190192 - DNA, 25 bp, Probe sequence
gaacgttttgaagatgcacaagaca

SEQ ID NO: 190193 - DNA, 25 bp, Probe sequence
gacatatacccacgtgatgggttag

SEQ ID NO: 190194 - DNA, 25 bp, Probe sequence
gacgagcaaaaaagtttatctgata

SEQ ID NO: 190195 - DNA, 25 bp, Probe sequence
gtctgaggcgaacgctgacgagcaa

SEQ ID NO: 190196 - DNA, 25 bp, Probe sequence
gtagaacagtctgaggcgaacgctg

SEQ ID NO: 190197 - DNA, 25 bp, Probe sequence
gtaatcgaacgttttgaagatgcac

SEQ ID NO: 190198 - DNA, 25 bp, Probe sequence
gggggacatatacccacgtgatggg

SEQ ID NO: 190199 - DNA, 25 bp, Probe sequence
ggacatgaatatcaagtgggggaca

SEQ ID NO: 190200 - DNA, 25 bp, Probe sequence
ggcgaacgctgacgagcaaaaaagt

SEQ ID NO: 190201 - DNA, 25 bp, Probe sequence
tgtataaagtaatcgaacgttttga

SEQ ID NO: 190202 - DNA, 25 bp, Probe sequence
tgaggcgaacgctgacgagcaaaaa

SEQ ID NO: 190203 - DNA, 25 bp, Probe sequence
tcaaagctttagagggtgttaagta

SEQ ID NO: 190204 - DNA, 25 bp, Probe sequence
tctacaacaaacaaccgccgtaatt

SEQ ID NO: 190205 - DNA, 25 bp, Probe sequence
tatctacaacaaacaaccgccgtaa

SEQ ID NO: 190206 - DNA, 25 bp, Probe sequence
atgacaaagaagtgccgtcgggtgt

SEQ ID NO: 190207 - DNA, 25 bp, Probe sequence
atcgtaagttaagttggggcaagcg

SEQ ID NO: 190208 - DNA, 25 bp, Probe sequence
atgggcactgtgagttatacctatg

SEQ ID NO: 190209 - DNA, 25 bp, Probe sequence
atggacgcaaaagacgtcaaaatga

SEQ ID NO: 190210 - DNA, 25 bp, Probe sequence
agtgcttatgcatatttattgcctt

SEQ ID NO: 190211 - DNA, 25 bp, Probe sequence
agtttattgctgaatgtatcaagtt

SEQ ID NO: 190212 - DNA, 25 bp, Probe sequence
acaactggcaatatctcagcgcgca

SEQ ID NO: 190213 - DNA, 25 bp, Probe sequence
aaaagtgttgcagaagattattgta

SEQ ID NO: 190214 - DNA, 25 bp, Probe sequence
aaccgacatacctagtagtgcttat

SEQ ID NO: 190215 - DNA, 25 bp, Probe sequence
aagttggggcaagcgatatgtttaa

SEQ ID NO: 190216 - DNA, 25 bp, Probe sequence
aatggactttcactcaatgattcgt

SEQ ID NO: 190217 - DNA, 25 bp, Probe sequence
aatgattaatggactttcactcaat

SEQ ID NO: 190218 - DNA, 25 bp, Probe sequence
cactcaatgattcgtctgacgatga

SEQ ID NO: 190219 - DNA, 25 bp, Probe sequence
caaagaagtgccgtcgggtgttaag

SEQ ID NO: 190220 - DNA, 25 bp, Probe sequence
ctttcactcaatgattcgtctgacg

SEQ ID NO: 190221 - DNA, 25 bp, Probe sequence
cgcgcacgatgggcactgtgagtta

SEQ ID NO: 190222 - DNA, 25 bp, Probe sequence
gcatatttattgccttatcgtaagt

SEQ ID NO: 190223 - DNA, 25 bp, Probe sequence
gcacgatgggcactgtgagttatac

SEQ ID NO: 190224 - DNA, 25 bp, Probe sequence
gaagtgccgtcgggtgttaagaagt

SEQ ID NO: 190225 - DNA, 25 bp, Probe sequence
gaacagatcgaatatcttattgaag

SEQ ID NO: 190226 - DNA, 25 bp, Probe sequence
gacatacctagtagtgcttatgcat

SEQ ID NO: 190227 - DNA, 25 bp, Probe sequence
gattaatggactttcactcaatgat

SEQ ID NO: 190228 - DNA, 25 bp, Probe sequence
gattcgtctgacgatgaacagatcg

SEQ ID NO: 190229 - DNA, 25 bp, Probe sequence
gtatcaagtttggtacaactggcaa

SEQ ID NO: 190230 - DNA, 25 bp, Probe sequence
gtaaccgacatacctagtagtgctt

SEQ ID NO: 190231 - DNA, 25 bp, Probe sequence
gtgagttatacctatgtaaccgaca

SEQ ID NO: 190232 - DNA, 25 bp, Probe sequence
gggtgttaagaagtttattgctgaa

SEQ ID NO: 190233 - DNA, 25 bp, Probe sequence
ggtacaactggcaatatctcagcgc

SEQ ID NO: 190234 - DNA, 25 bp, Probe sequence
ggactttcactcaatgattcgtctg

SEQ ID NO: 190235 - DNA, 25 bp, Probe sequence
ggcactgtgagttatacctatgtaa

SEQ ID NO: 190236 - DNA, 25 bp, Probe sequence
tgccgtcgggtgttaagaagtttat

SEQ ID NO: 190237 - DNA, 25 bp, Probe sequence
tatgcatatttattgccttatcgta

SEQ ID NO: 190238 - DNA, 25 bp, Probe sequence
tatacctatgtaaccgacataccta

SEQ ID NO: 190239 - DNA, 25 bp, Probe sequence
ttcactcaatgattcgtctgacgat

SEQ ID NO: 190240 - DNA, 25 bp, Probe sequence
accggtcgaccaaggcggacaacat

SEQ ID NO: 190241 - DNA, 25 bp, Probe sequence
acgcctacatcaagtgagacactca

SEQ ID NO: 190242 - DNA, 25 bp, Probe sequence
acatcccaaagaatacgagcgtttt

SEQ ID NO: 190243 - DNA, 25 bp, Probe sequence
aagggtttatggacacgcctacatc

SEQ ID NO: 190244 - DNA, 25 bp, Probe sequence
aaggcggacaacatgaaatcaattt

SEQ ID NO: 190245 - DNA, 25 bp, Probe sequence
aatccgtttgatgagtttccacaca

SEQ ID NO: 190246 - DNA, 25 bp, Probe sequence
aatttaactagattgagggtgcgat

SEQ ID NO: 190247 - DNA, 25 bp, Probe sequence
gccgtaccacataccaataacaaac

SEQ ID NO: 190248 - DNA, 25 bp, Probe sequence
gaagtcgtaggaacacatcccaaag

SEQ ID NO: 190249 - DNA, 25 bp, Probe sequence
gaaacctatatacgccgtaccacat

SEQ ID NO: 190250 - DNA, 25 bp, Probe sequence
gaaattggagaggttgaagtcgtag

SEQ ID NO: 190251 - DNA, 25 bp, Probe sequence
gacactcaaatttcatcagatgagc

SEQ ID NO: 190252 - DNA, 25 bp, Probe sequence
gacacgcctacatcaagtgagacac

SEQ ID NO: 190253 - DNA, 25 bp, Probe sequence
gaccaaggcggacaacatgaaatca

SEQ ID NO: 190254 - DNA, 25 bp, Probe sequence
gagtttccacacacaattgaaattg

SEQ ID NO: 190255 - DNA, 25 bp, Probe sequence
gagggtgcgatctattggcaaaggt

SEQ ID NO: 190256 - DNA, 25 bp, Probe sequence
gatgagcaaagatttcgaccgaaac

SEQ ID NO: 190257 - DNA, 25 bp, Probe sequence
gattgagggtgcgatctattggcaa

SEQ ID NO: 190258 - DNA, 25 bp, Probe sequence
gtttaatccgtttgatgagtttcca

SEQ ID NO: 190259 - DNA, 25 bp, Probe sequence
gtttatggacacgcctacatcaagt

SEQ ID NO: 190260 - DNA, 25 bp, Probe sequence
gtaccacataccaataacaaacaaa

SEQ ID NO: 190261 - DNA, 25 bp, Probe sequence
gtgagacactcaaatttcatcagat

SEQ ID NO: 190262 - DNA, 25 bp, Probe sequence
ggtcgaccaaggcggacaacatgaa

SEQ ID NO: 190263 - DNA, 25 bp, Probe sequence
ggtgcgatctattggcaaaggttaa

SEQ ID NO: 190264 - DNA, 25 bp, Probe sequence
ggttgaagtcgtaggaacacatccc

SEQ ID NO: 190265 - DNA, 25 bp, Probe sequence
ggaacacatcccaaagaatacgagc

SEQ ID NO: 190266 - DNA, 25 bp, Probe sequence
ttgtaggcgaaccggtcgaccaagg

SEQ ID NO: 190267 - DNA, 25 bp, Probe sequence
tgatgagtttccacacacaattgaa

SEQ ID NO: 190268 - DNA, 25 bp, Probe sequence
tccgtttgatgagtttccacacaca

SEQ ID NO: 190269 - DNA, 25 bp, Probe sequence
tcgaccgaaacctatatacgccgta

SEQ ID NO: 190270 - DNA, 25 bp, Probe sequence
tacgccgtaccacataccaataaca

SEQ ID NO: 190271 - DNA, 25 bp, Probe sequence
tacgaagttgtaggcgaaccggtcg

SEQ ID NO: 190272 - DNA, 25 bp, Probe sequence
tatggacacgcctacatcaagtgag

SEQ ID NO: 190273 - DNA, 25 bp, Probe sequence
tatatacgccgtaccacataccaat

SEQ ID NO: 190274 - DNA, 25 bp, Probe sequence
attaatgccagttgataccggatat

SEQ ID NO: 190275 - DNA, 25 bp, Probe sequence
atatgcaacaggtgctggaggtagt

SEQ ID NO: 190276 - DNA, 25 bp, Probe sequence
atatgtcaattatggtactggtata

SEQ ID NO: 190277 - DNA, 25 bp, Probe sequence
atggagcgatgggtcaaacgaggta

SEQ ID NO: 190278 - DNA, 25 bp, Probe sequence
aggacaacatgctcaacctttttgg

SEQ ID NO: 190279 - DNA, 25 bp, Probe sequence
aggtgctggaggtagtagagcgaaa

SEQ ID NO: 190280 - DNA, 25 bp, Probe sequence
agattcacaatacaatcatttcatt

SEQ ID NO: 190281 - DNA, 25 bp, Probe sequence
agatgcgaacggtaagtggcacact

SEQ ID NO: 190282 - DNA, 25 bp, Probe sequence
acatgctcaacctttttgggaaccg

SEQ ID NO: 190283 - DNA, 25 bp, Probe sequence
acaatcatttcattaatgccagttg

SEQ ID NO: 190284 - DNA, 25 bp, Probe sequence
aaagacaactgctaagattcacaat

SEQ ID NO: 190285 - DNA, 25 bp, Probe sequence
aaacgaggtatagcaaagacaactg

SEQ ID NO: 190286 - DNA, 25 bp, Probe sequence
taacaatggactttaaagacggcgg

SEQ ID NO: 190287 - DNA, 25 bp, Probe sequence
gcgaacggtaagtggcacactacta

SEQ ID NO: 190288 - DNA, 25 bp, Probe sequence
ccgtggtcgtacaaagatgcgaacg

SEQ ID NO: 190289 - DNA, 25 bp, Probe sequence
gccagttgataccggatatcttaga

SEQ ID NO: 190290 - DNA, 25 bp, Probe sequence
gcgatgggtcaaacgaggtatagca

SEQ ID NO: 190291 - DNA, 25 bp, Probe sequence
gcggttttactggagttattaacat

SEQ ID NO: 190292 - DNA, 25 bp, Probe sequence
gctggacgagcattctttaataagt

SEQ ID NO: 190293 - DNA, 25 bp, Probe sequence
gaaccggcaatagacgctggacgag

SEQ ID NO: 190294 - DNA, 25 bp, Probe sequence
gataccgtggtcgtacaaagatgcg

SEQ ID NO: 190295 - DNA, 25 bp, Probe sequence
gacaacatgctcaacctttttggga

SEQ ID NO: 190296 - DNA, 25 bp, Probe sequence
gacaactgctaagattcacaataca

SEQ ID NO: 190297 - DNA, 25 bp, Probe sequence
gagcgaaaaagataccgtggtcgta

SEQ ID NO: 190298 - DNA, 25 bp, Probe sequence
gagcattctttaataagtatttttc

SEQ ID NO: 190299 - DNA, 25 bp, Probe sequence
gataccggatatcttagagaaagtg

SEQ ID NO: 190300 - DNA, 25 bp, Probe sequence
gtgaatacgcaatatatgtcaatta

SEQ ID NO: 190301 - DNA, 25 bp, Probe sequence
gggaaccggcaatagacgctggacg

SEQ ID NO: 190302 - DNA, 25 bp, Probe sequence
gtggcacactactaaaggacaacat

SEQ ID NO: 190303 - DNA, 25 bp, Probe sequence
ggtactggtatatatgcaacaggtg

SEQ ID NO: 190304 - DNA, 25 bp, Probe sequence
ggagttattaacattggtagtgaat

SEQ ID NO: 190305 - DNA, 25 bp, Probe sequence
ggcaatagacgctggacgagcattc

SEQ ID NO: 190306 - DNA, 25 bp, Probe sequence
tgctcaacctttttgggaaccggca

SEQ ID NO: 190307 - DNA, 25 bp, Probe sequence
tagacgctggacgagcattctttaa

SEQ ID NO: 190308 - DNA, 25 bp, Probe sequence
atgtgggtatcagtcgaacggtact

SEQ ID NO: 190309 - DNA, 25 bp, Probe sequence
agggtttttgattgcgttcagaaag

SEQ ID NO: 190310 - DNA, 25 bp, Probe sequence
agatgtcggcatcacgttgcatgtt

SEQ ID NO: 190311 - DNA, 25 bp, Probe sequence
actaaacacggtatcattcggcttg

SEQ ID NO: 190312 - DNA, 25 bp, Probe sequence
cactaacaaagaaacgaccacgagc

SEQ ID NO: 190313 - DNA, 25 bp, Probe sequence
aaaggagtgtaacgaatggcgcagg

SEQ ID NO: 190314 - DNA, 25 bp, Probe sequence
aacaaagaaacgaccacgagcatgg

SEQ ID NO: 190315 - DNA, 25 bp, Probe sequence
aagcacgtaatagagatgaggcatc

SEQ ID NO: 190316 - DNA, 25 bp, Probe sequence
aagtcgaattgatacacaagaagtg

SEQ ID NO: 190317 - DNA, 25 bp, Probe sequence
aatacagacataacacattacaaag

SEQ ID NO: 190318 - DNA, 25 bp, Probe sequence
aattgattattattcattcattaaa

SEQ ID NO: 190319 - DNA, 25 bp, Probe sequence
caagaagtgattactgacatagatc

SEQ ID NO: 190320 - DNA, 25 bp, Probe sequence
caaataattcaatttttaggcttcg

SEQ ID NO: 190321 - DNA, 25 bp, Probe sequence
cacggtatcattcggcttgttttta

SEQ ID NO: 190322 - DNA, 25 bp, Probe sequence
cgctgtttacccatatatcgttgtg

SEQ ID NO: 190323 - DNA, 25 bp, Probe sequence
ccacgagcatggtcgaagatgtcgg

SEQ ID NO: 190324 - DNA, 25 bp, Probe sequence
gcatcacgttgcatgtttatagtca

SEQ ID NO: 190325 - DNA, 25 bp, Probe sequence
gcatgtttatagtcaagcacgtaat

SEQ ID NO: 190326 - DNA, 25 bp, Probe sequence
gaaagacgctgtttacccatatatc

SEQ ID NO: 190327 - DNA, 25 bp, Probe sequence
gacatagatcagtacactaaacacg

SEQ ID NO: 190328 - DNA, 25 bp, Probe sequence
gagcatggtcgaagatgtcggcatc

SEQ ID NO: 190329 - DNA, 25 bp, Probe sequence
gagtgtaacgaatggcgcaggataa

SEQ ID NO: 190330 - DNA, 25 bp, Probe sequence
gatgaggcatcacaaataattcaat

SEQ ID NO: 190331 - DNA, 25 bp, Probe sequence
gttcagaaagacgctgtttacccat

SEQ ID NO: 190332 - DNA, 25 bp, Probe sequence
gtttacccatatatcgttgtgggtg

SEQ ID NO: 190333 - DNA, 25 bp, Probe sequence
gtatcattcggcttgtttttaaata

SEQ ID NO: 190334 - DNA, 25 bp, Probe sequence
gtcggcatcacgttgcatgtttata

SEQ ID NO: 190335 - DNA, 25 bp, Probe sequence
gtcgaagatgtcggcatcacgttgc

SEQ ID NO: 190336 - DNA, 25 bp, Probe sequence
gggtatcagtcgaacggtacttatt

SEQ ID NO: 190337 - DNA, 25 bp, Probe sequence
gtggtagggtttttgattgcgttca

SEQ ID NO: 190338 - DNA, 25 bp, Probe sequence
gtgggtgaaacaaacgtcactaaca

SEQ ID NO: 190339 - DNA, 25 bp, Probe sequence
tgggtggtagggtttttgattgcgt

SEQ ID NO: 190340 - DNA, 25 bp, Probe sequence
tcagtcgaacggtacttatttaaca

SEQ ID NO: 190341 - DNA, 25 bp, Probe sequence
ttcggcttgtttttaaatacagaca

SEQ ID NO: 190342 - DNA, 25 bp, Probe sequence
agttaagttcaatagtgcagacggt

SEQ ID NO: 190343 - DNA, 25 bp, Probe sequence
agcagagggtggacacactatcagt

SEQ ID NO: 190344 - DNA, 25 bp, Probe sequence
agctaagaagctaactatcgaagaa

SEQ ID NO: 190345 - DNA, 25 bp, Probe sequence
aactgctggcagtagcgatttaagt

SEQ ID NO: 190346 - DNA, 25 bp, Probe sequence
aacgcgatggcaaacatcacggtgt

SEQ ID NO: 190347 - DNA, 25 bp, Probe sequence
aagaatggcttaaccctagcgcatt

SEQ ID NO: 190348 - DNA, 25 bp, Probe sequence
aagttgacgcttgatgtcgttccgg

SEQ ID NO: 190349 - DNA, 25 bp, Probe sequence
aatatattgtcgctctccaaatcgc

SEQ ID NO: 190350 - DNA, 25 bp, Probe sequence
ctagcgcattggctccagttgttga

SEQ ID NO: 190351 - DNA, 25 bp, Probe sequence
cgcttgatgtcgttccgggagataa

SEQ ID NO: 190352 - DNA, 25 bp, Probe sequence
gcattggctccagttgttgaattcg

SEQ ID NO: 190353 - DNA, 25 bp, Probe sequence
gcaggataaatatattgtcgctctc

SEQ ID NO: 190354 - DNA, 25 bp, Probe sequence
gaattcgaagacatgaacgcttacg

SEQ ID NO: 190355 - DNA, 25 bp, Probe sequence
gaatggtcattcgatgatgaagata

SEQ ID NO: 190356 - DNA, 25 bp, Probe sequence
gaagcaacgcttttaggtagtttag

SEQ ID NO: 190357 - DNA, 25 bp, Probe sequence
gaactaaaaaaacaactgctggcag

SEQ ID NO: 190358 - DNA, 25 bp, Probe sequence
gaaatcacagcgaaagttaagttca

SEQ ID NO: 190359 - DNA, 25 bp, Probe sequence
gacacactatcagtaatgaccttgc

SEQ ID NO: 190360 - DNA, 25 bp, Probe sequence
gacatgaacgcttacgaagatagtt

SEQ ID NO: 190361 - DNA, 25 bp, Probe sequence
gattatagccgtaattctgtcgaag

SEQ ID NO: 190362 - DNA, 25 bp, Probe sequence
gttaaacaattcaaacagttacgtg

SEQ ID NO: 190363 - DNA, 25 bp, Probe sequence
gtcgttccgggagataaaggtcaat

SEQ ID NO: 190364 - DNA, 25 bp, Probe sequence
gtaatgaccttgctgaaatcattca

SEQ ID NO: 190365 - DNA, 25 bp, Probe sequence
ggtgtattcgcatatgtagttatcg

SEQ ID NO: 190366 - DNA, 25 bp, Probe sequence
ggtagtttagcagagggtggacaca

SEQ ID NO: 190367 - DNA, 25 bp, Probe sequence
ggcaaacatcacggtgtattcgcat

SEQ ID NO: 190368 - DNA, 25 bp, Probe sequence
ggctccagttgttgaattcgaagac

SEQ ID NO: 190369 - DNA, 25 bp, Probe sequence
tggcagtagcgatttaagtatgtaa

SEQ ID NO: 190370 - DNA, 25 bp, Probe sequence
tgggaaactaaaaaacgcgatggca

SEQ ID NO: 190371 - DNA, 25 bp, Probe sequence
tgctgaaatcattcaaggcggtaag

SEQ ID NO: 190372 - DNA, 25 bp, Probe sequence
tcgctctccaaatcgctgataagga

SEQ ID NO: 190373 - DNA, 25 bp, Probe sequence
taactatcgaagaagcaacgctttt

SEQ ID NO: 190374 - DNA, 25 bp, Probe sequence
tagtgcagacggtacaatcaatgat

SEQ ID NO: 190375 - DNA, 25 bp, Probe sequence
tatcgaagagcacgaatggtcattc

SEQ ID NO: 190376 - DNA, 25 bp, Probe sequence
atctattacagggtgcgttggacgt

SEQ ID NO: 190377 - DNA, 25 bp, Probe sequence
atgtgcaacggcttatctaggtaaa

SEQ ID NO: 190378 - DNA, 25 bp, Probe sequence
agacgagaaagagggcgcgaaagct

SEQ ID NO: 190379 - DNA, 25 bp, Probe sequence
agaaatcatgaccgtagcaccttat

SEQ ID NO: 190380 - DNA, 25 bp, Probe sequence
agcaccatcgttagccaaagaagac

SEQ ID NO: 190381 - DNA, 25 bp, Probe sequence
acggcttatctaggtaaaagtgcac

SEQ ID NO: 190382 - DNA, 25 bp, Probe sequence
acaaacgatttcaggatttactaat

SEQ ID NO: 190383 - DNA, 25 bp, Probe sequence
acaatgctttattagaacgtgacac

SEQ ID NO: 190384 - DNA, 25 bp, Probe sequence
aaagtgcacctaaaagagaagatat

SEQ ID NO: 190385 - DNA, 25 bp, Probe sequence
aaagtttgcaactgaacaagaagat

SEQ ID NO: 190386 - DNA, 25 bp, Probe sequence
aatcatgaccgtagcaccttattag

SEQ ID NO: 190387 - DNA, 25 bp, Probe sequence
caacttttaatccaattacatcatt

SEQ ID NO: 190388 - DNA, 25 bp, Probe sequence
cgacacgctaaatctattacagggt

SEQ ID NO: 190389 - DNA, 25 bp, Probe sequence
ccaagcaccatcgttagccaaagaa

SEQ ID NO: 190390 - DNA, 25 bp, Probe sequence
gacttttgggaatgtgcaacggctt

SEQ ID NO: 190391 - DNA, 25 bp, Probe sequence
gaagcggaaatcatggaaatcatcg

SEQ ID NO: 190392 - DNA, 25 bp, Probe sequence
gaacgtgacacagtggcaattgtag

SEQ ID NO: 190393 - DNA, 25 bp, Probe sequence
gaacaactacaaagaaatcatgacc

SEQ ID NO: 190394 - DNA, 25 bp, Probe sequence
gaaaacgacacgctaaatctattac

SEQ ID NO: 190395 - DNA, 25 bp, Probe sequence
gaaagctggtatcgagatgatgaag

SEQ ID NO: 190396 - DNA, 25 bp, Probe sequence
gaaagcaaaagcaacatttatgttc

SEQ ID NO: 190397 - DNA, 25 bp, Probe sequence
gaaatcacgtctattctggacacag

SEQ ID NO: 190398 - DNA, 25 bp, Probe sequence
gagggcgcgaaagctggtatcgaga

SEQ ID NO: 190399 - DNA, 25 bp, Probe sequence
gatttactaatgtttacaatgcttt

SEQ ID NO: 190400 - DNA, 25 bp, Probe sequence
gtggcaattgtagacttttgggaat

SEQ ID NO: 190401 - DNA, 25 bp, Probe sequence
gggaatgtgcaacggcttatctagg

SEQ ID NO: 190402 - DNA, 25 bp, Probe sequence
ggacgtaatgaataatagcggtttt

SEQ ID NO: 190403 - DNA, 25 bp, Probe sequence
tgaaccaagcaccatcgttagccaa

SEQ ID NO: 190404 - DNA, 25 bp, Probe sequence
tgaaacaacttttaatccaattaca

SEQ ID NO: 190405 - DNA, 25 bp, Probe sequence
tctggacacagatgaaccaagcacc

SEQ ID NO: 190406 - DNA, 25 bp, Probe sequence
taatagcggttttttcaagcagaaa

SEQ ID NO: 190407 - DNA, 25 bp, Probe sequence
tacagggtgcgttggacgtaatgaa

SEQ ID NO: 190408 - DNA, 25 bp, Probe sequence
tatgttcgataaaaccgctaaaaag

SEQ ID NO: 190409 - DNA, 25 bp, Probe sequence
tttcaagcagaaatcacgtctattc

SEQ ID NO: 190410 - DNA, 25 bp, Probe sequence
atataatgcggttgctcaagctggt

SEQ ID NO: 190411 - DNA, 25 bp, Probe sequence
atcactaaaacgttttgttaggcag

SEQ ID NO: 190412 - DNA, 25 bp, Probe sequence
atgactggattattggcgctagaca

SEQ ID NO: 190413 - DNA, 25 bp, Probe sequence
agggactcgcaagttccttaacagc

SEQ ID NO: 190414 - DNA, 25 bp, Probe sequence
aggttatatgagtaatgacgagcta

SEQ ID NO: 190415 - DNA, 25 bp, Probe sequence
agcatgctacctgccgaatggaatg

SEQ ID NO: 190416 - DNA, 25 bp, Probe sequence
acctgccgaatggaatgactggatt

SEQ ID NO: 190417 - DNA, 25 bp, Probe sequence
acattattcgtggtcaagaagatga

SEQ ID NO: 190418 - DNA, 25 bp, Probe sequence
aacattacattattcgtggtcaaga

SEQ ID NO: 190419 - DNA, 25 bp, Probe sequence
caagctggtaaatcactaaaacgtt

SEQ ID NO: 190420 - DNA, 25 bp, Probe sequence
cattgcgttgtacggcgctcaatat

SEQ ID NO: 190421 - DNA, 25 bp, Probe sequence
gcgttgtacggcgctcaatataatg

SEQ ID NO: 190422 - DNA, 25 bp, Probe sequence
gctacctgccgaatggaatgactgg

SEQ ID NO: 190423 - DNA, 25 bp, Probe sequence
gctagacaagcattgattgaccaaa

SEQ ID NO: 190424 - DNA, 25 bp, Probe sequence
gaaatacaaaaacaagggactcgca

SEQ ID NO: 190425 - DNA, 25 bp, Probe sequence
gaaacagcgtgagctagctaaaaac

SEQ ID NO: 190426 - DNA, 25 bp, Probe sequence
gaaagaatgaaacagcgtgagctag

SEQ ID NO: 190427 - DNA, 25 bp, Probe sequence
gactcgcaagttccttaacagctta

SEQ ID NO: 190428 - DNA, 25 bp, Probe sequence
gacgagctaatgagcatgctacctg

SEQ ID NO: 190429 - DNA, 25 bp, Probe sequence
gagacattgcgttgtacggcgctca

SEQ ID NO: 190430 - DNA, 25 bp, Probe sequence
gagctaatgagcatgctacctgccg

SEQ ID NO: 190431 - DNA, 25 bp, Probe sequence
gagaacattacattattcgtggtca

SEQ ID NO: 190432 - DNA, 25 bp, Probe sequence
gattgaccaaagagacattgcgttg

SEQ ID NO: 190433 - DNA, 25 bp, Probe sequence
gtgagctagctaaaaacaaacgtaa

SEQ ID NO: 190434 - DNA, 25 bp, Probe sequence
ggttgctcaagctggtaaatcacta

SEQ ID NO: 190435 - DNA, 25 bp, Probe sequence
ggattattggcgctagacaagcatt

SEQ ID NO: 190436 - DNA, 25 bp, Probe sequence
ggaatgactggattattggcgctag

SEQ ID NO: 190437 - DNA, 25 bp, Probe sequence
ggcgctagacaagcattgattgacc

SEQ ID NO: 190438 - DNA, 25 bp, Probe sequence
ggcgctcaatataatgcggttgctc

SEQ ID NO: 190439 - DNA, 25 bp, Probe sequence
tgacaagtcgttacataggttatat

SEQ ID NO: 190440 - DNA, 25 bp, Probe sequence
tcgcaagttccttaacagcttaaaa

SEQ ID NO: 190441 - DNA, 25 bp, Probe sequence
taatgcggttgctcaagctggtaaa

SEQ ID NO: 190442 - DNA, 25 bp, Probe sequence
taatgagcatgctacctgccgaatg

SEQ ID NO: 190443 - DNA, 25 bp, Probe sequence
taggcagaacgaaagagaacattac

SEQ ID NO: 190444 - DNA, 25 bp, Probe sequence
agcgtttattgactacactaccact

SEQ ID NO: 190445 - DNA, 25 bp, Probe sequence
aagtgcggtaggcgatgcgatttca

SEQ ID NO: 190446 - DNA, 25 bp, Probe sequence
aagttgctggcgttatgggtatttt

SEQ ID NO: 190447 - DNA, 25 bp, Probe sequence
aatcgatggctcaacgttggcgaga

SEQ ID NO: 190448 - DNA, 25 bp, Probe sequence
caagcctagttactggagctatgca

SEQ ID NO: 190449 - DNA, 25 bp, Probe sequence
cactaccactaacctacctaagatt

SEQ ID NO: 190450 - DNA, 25 bp, Probe sequence
gctgcaggacgatttggcgacggat

SEQ ID NO: 190451 - DNA, 25 bp, Probe sequence
gcgttctctgtagctggtgttggag

SEQ ID NO: 190452 - DNA, 25 bp, Probe sequence
gctggttgaagcaaacgcacgcgag

SEQ ID NO: 190453 - DNA, 25 bp, Probe sequence
gcataggtggcgcaatcttcggaga

SEQ ID NO: 190454 - DNA, 25 bp, Probe sequence
gaagaattttctggctcgtgttaca

SEQ ID NO: 190455 - DNA, 25 bp, Probe sequence
gaacagtgatatccgtagcagtcca

SEQ ID NO: 190456 - DNA, 25 bp, Probe sequence
gacacacccagctatagcacaagtt

SEQ ID NO: 190457 - DNA, 25 bp, Probe sequence
gagagctaacgcgagccaaatcgat

SEQ ID NO: 190458 - DNA, 25 bp, Probe sequence
gacggcatgaaaaacgcgcttgata

SEQ ID NO: 190459 - DNA, 25 bp, Probe sequence
gaggcgttacaagtgcgatgtctca

SEQ ID NO: 190460 - DNA, 25 bp, Probe sequence
gataatcggctttttaactggcgta

SEQ ID NO: 190461 - DNA, 25 bp, Probe sequence
gatttcagcgcctattttagcagtt

SEQ ID NO: 190462 - DNA, 25 bp, Probe sequence
gattggtgcattcattggtgtccta

SEQ ID NO: 190463 - DNA, 25 bp, Probe sequence
gttagctggttggcgcaaacacact

SEQ ID NO: 190464 - DNA, 25 bp, Probe sequence
gtaggtttattcactgctttaattc

SEQ ID NO: 190465 - DNA, 25 bp, Probe sequence
gtagctaacgccgcgcacaaagtag

SEQ ID NO: 190466 - DNA, 25 bp, Probe sequence
ggtgttttcggttcgatttcagcgc

SEQ ID NO: 190467 - DNA, 25 bp, Probe sequence
ggcttcggtgcaatggctattactg

SEQ ID NO: 190468 - DNA, 25 bp, Probe sequence
ggcaaaatccaatctaccttacaac

SEQ ID NO: 190469 - DNA, 25 bp, Probe sequence
ggcactgcaatggcacctatagcta

SEQ ID NO: 190470 - DNA, 25 bp, Probe sequence
tggcgacttatcaggtgcttgggag

SEQ ID NO: 190471 - DNA, 25 bp, Probe sequence
tgttattgggcttgctggtgcgttc

SEQ ID NO: 190472 - DNA, 25 bp, Probe sequence
tgcgatttcatcagcttgggactca

SEQ ID NO: 190473 - DNA, 25 bp, Probe sequence
taaaacggcggtttctggtgcgatt

SEQ ID NO: 190474 - DNA, 25 bp, Probe sequence
taaactattcgagacacacccagct

SEQ ID NO: 190475 - DNA, 25 bp, Probe sequence
tagaactttcggtactatcttcgcg

SEQ ID NO: 190476 - DNA, 25 bp, Probe sequence
tagtcgtgttgcttcgagtgtggcc

SEQ ID NO: 190477 - DNA, 25 bp, Probe sequence
ttacaattgcgttccaagccatagg

SEQ ID NO: 190478 - DNA, 25 bp, Probe sequence
atatcgatctatacaacaagacgtt

SEQ ID NO: 190479 - DNA, 25 bp, Probe sequence
atcctcacacctacaaacacttaag

SEQ ID NO: 190480 - DNA, 25 bp, Probe sequence
atgcctcacatcttaaatcagacat

SEQ ID NO: 190481 - DNA, 25 bp, Probe sequence
atgttatcggttctggttacaaaag

SEQ ID NO: 190482 - DNA, 25 bp, Probe sequence
acctaagagaattggcaacgccgga

SEQ ID NO: 190483 - DNA, 25 bp, Probe sequence
aaattgcttatgcctcacatcttaa

SEQ ID NO: 190484 - DNA, 25 bp, Probe sequence
aacacagttcaaccaattcaatgta

SEQ ID NO: 190485 - DNA, 25 bp, Probe sequence
aagtatcggctatagcactgattta

SEQ ID NO: 190486 - DNA, 25 bp, Probe sequence
caagacgttagaacaaccggtgttg

SEQ ID NO: 190487 - DNA, 25 bp, Probe sequence
gaattattcgcctttagatggtgtt

SEQ ID NO: 190488 - DNA, 25 bp, Probe sequence
gaaatcacgttgacctttgagacaa

SEQ ID NO: 190489 - DNA, 25 bp, Probe sequence
gaaattgaattagccgaagatgtta

SEQ ID NO: 190490 - DNA, 25 bp, Probe sequence
gacatcaggagaaatcacgttgacc

SEQ ID NO: 190491 - DNA, 25 bp, Probe sequence
gacattctataatacgagttctgga

SEQ ID NO: 190492 - DNA, 25 bp, Probe sequence
gacggtagacaactattcgttggat

SEQ ID NO: 190493 - DNA, 25 bp, Probe sequence
gacgggcgttttcacaattatgcta

SEQ ID NO: 190494 - DNA, 25 bp, Probe sequence
gagacaacagaattgcctttctttg

SEQ ID NO: 190495 - DNA, 25 bp, Probe sequence
gagtcagtgacaatcctcacaccta

SEQ ID NO: 190496 - DNA, 25 bp, Probe sequence
gagttctggagatgtttattacaac

SEQ ID NO: 190497 - DNA, 25 bp, Probe sequence
gagtgcttgattacaatgttatcgg

SEQ ID NO: 190498 - DNA, 25 bp, Probe sequence
gatggtgttgacgggcgttttcaca

SEQ ID NO: 190499 - DNA, 25 bp, Probe sequence
gatgtagcattaacacagttcaacc

SEQ ID NO: 190500 - DNA, 25 bp, Probe sequence
gataacaagcacacatatagaggca

SEQ ID NO: 190501 - DNA, 25 bp, Probe sequence
gataaagacggtttcactttctata

SEQ ID NO: 190502 - DNA, 25 bp, Probe sequence
gatatgttcgaaccattagagcaag

SEQ ID NO: 190503 - DNA, 25 bp, Probe sequence
gttagcgaagtatctttcgacacga

SEQ ID NO: 190504 - DNA, 25 bp, Probe sequence
gtacctaaaattgcttatgcctcac

SEQ ID NO: 190505 - DNA, 25 bp, Probe sequence
ggtcagttccggacagaatagcact

SEQ ID NO: 190506 - DNA, 25 bp, Probe sequence
ggtgttgtatcccggttggaatcat

SEQ ID NO: 190507 - DNA, 25 bp, Probe sequence
ggaatcattttaaagccaacagact

SEQ ID NO: 190508 - DNA, 25 bp, Probe sequence
tggtgtgaagtatcgagtcagtgac

SEQ ID NO: 190509 - DNA, 25 bp, Probe sequence
ttggcaacgccggataacactatca

SEQ ID NO: 190510 - DNA, 25 bp, Probe sequence
tatggtcgtttttacctaagagaat

SEQ ID NO: 190511 - DNA, 25 bp, Probe sequence
tttcgacacgactaagacatcagga

SEQ ID NO: 190512 - DNA, 25 bp, Probe sequence
attactttaagccatacaatccagc

SEQ ID NO: 190513 - DNA, 25 bp, Probe sequence
atttctttggacttcgtagcacagc

SEQ ID NO: 190514 - DNA, 25 bp, Probe sequence
acaaggcactgatgatgactggtta

SEQ ID NO: 190515 - DNA, 25 bp, Probe sequence
aagggaagcgcctccgttaatagat

SEQ ID NO: 190516 - DNA, 25 bp, Probe sequence
aagtttacaaggcgtcggtcatgcg

SEQ ID NO: 190517 - DNA, 25 bp, Probe sequence
aagtgtcactgcttctatttctttg

SEQ ID NO: 190518 - DNA, 25 bp, Probe sequence
gagcattttccagaggctaacccta

SEQ ID NO: 190519 - DNA, 25 bp, Probe sequence
cgagcatggaggacggcttacaccc

SEQ ID NO: 190520 - DNA, 25 bp, Probe sequence
gcgatgtcgcaagagttggcgaacc

SEQ ID NO: 190521 - DNA, 25 bp, Probe sequence
gtacgtattgcacactaaggttgac

SEQ ID NO: 190522 - DNA, 25 bp, Probe sequence
gctatccatgaagctacgaactatg

SEQ ID NO: 190523 - DNA, 25 bp, Probe sequence
gaagatgcttctaaatgctacacat

SEQ ID NO: 190524 - DNA, 25 bp, Probe sequence
gacggccaacaaacttttacagagg

SEQ ID NO: 190525 - DNA, 25 bp, Probe sequence
gacgcatatcacacagattacttta

SEQ ID NO: 190526 - DNA, 25 bp, Probe sequence
gacgcaatcggcgctattacaaaga

SEQ ID NO: 190527 - DNA, 25 bp, Probe sequence
gagtggcacaacgatacgccgtaaa

SEQ ID NO: 190528 - DNA, 25 bp, Probe sequence
gatgtgccagtgtttgacgcatatc

SEQ ID NO: 190529 - DNA, 25 bp, Probe sequence
gatgacagctacaaggcaatgccca

SEQ ID NO: 190530 - DNA, 25 bp, Probe sequence
gttgacgcatcaaagttcgagggat

SEQ ID NO: 190531 - DNA, 25 bp, Probe sequence
gtagcacagcctgagcattttccag

SEQ ID NO: 190532 - DNA, 25 bp, Probe sequence
gtcagacccagctaagtacttgaga

SEQ ID NO: 190533 - DNA, 25 bp, Probe sequence
ggttatggcgactttgacggccaac

SEQ ID NO: 190534 - DNA, 25 bp, Probe sequence
ggtcgcacgcaaaaactaatttcac

SEQ ID NO: 190535 - DNA, 25 bp, Probe sequence
ggacttgaacgctatcatctcgaat

SEQ ID NO: 190536 - DNA, 25 bp, Probe sequence
ggcaatgcccaatgagtggcacaac

SEQ ID NO: 190537 - DNA, 25 bp, Probe sequence
ggctaaccctagaattggcgatgtc

SEQ ID NO: 190538 - DNA, 25 bp, Probe sequence
ggcgtcggtcatgcgatttatgtta

SEQ ID NO: 190539 - DNA, 25 bp, Probe sequence
tggcgaaccaactataggctataac

SEQ ID NO: 190540 - DNA, 25 bp, Probe sequence
tgccagcactttcgacgcaatcggc

SEQ ID NO: 190541 - DNA, 25 bp, Probe sequence
tctgtagctagagggtcgcacgcaa

SEQ ID NO: 190542 - DNA, 25 bp, Probe sequence
tacaattcgaattcacacacccatt

SEQ ID NO: 190543 - DNA, 25 bp, Probe sequence
tacgatcatgtacgactttactagt

SEQ ID NO: 190544 - DNA, 25 bp, Probe sequence
taggcgattttacaatgcgtgacag

SEQ ID NO: 190545 - DNA, 25 bp, Probe sequence
ttcacacacccattagcacaactga

SEQ ID NO: 190546 - DNA, 25 bp, Probe sequence
agaaacatcaaacaacgctttaaat

SEQ ID NO: 190547 - DNA, 25 bp, Probe sequence
acaaatggtcgattagactcacaat

SEQ ID NO: 190548 - DNA, 25 bp, Probe sequence
acaacaaatcaatggtgcagaccta

SEQ ID NO: 190549 - DNA, 25 bp, Probe sequence
aaatcaggcgtgttagttgtctatg

SEQ ID NO: 190550 - DNA, 25 bp, Probe sequence
aacaaagttggtttatatcaaatca

SEQ ID NO: 190551 - DNA, 25 bp, Probe sequence
aatgacggcgatttaactaaggaat

SEQ ID NO: 190552 - DNA, 25 bp, Probe sequence
aagatataggtactgtcgatacacc

SEQ ID NO: 190553 - DNA, 25 bp, Probe sequence
aatacactggtcgagtacatgcgca

SEQ ID NO: 190554 - DNA, 25 bp, Probe sequence
ttccggtagctcctaacactttagg

SEQ ID NO: 190555 - DNA, 25 bp, Probe sequence
cactggtcgagtacatgcgcaagca

SEQ ID NO: 190556 - DNA, 25 bp, Probe sequence
ctaacactttaggaaaatcaggcgt

SEQ ID NO: 190557 - DNA, 25 bp, Probe sequence
gcgacagatgcgccctcatttaaag

SEQ ID NO: 190558 - DNA, 25 bp, Probe sequence
gcgtgttagttgtctatgttgttga

SEQ ID NO: 190559 - DNA, 25 bp, Probe sequence
gcaatcgaatcgtctgagcagtcca

SEQ ID NO: 190560 - DNA, 25 bp, Probe sequence
gatgattcaaacgacgaatatacaa

SEQ ID NO: 190561 - DNA, 25 bp, Probe sequence
gatggcgttgacgatggttcagata

SEQ ID NO: 190562 - DNA, 25 bp, Probe sequence
gatgcgccctcatttaaagatatag

SEQ ID NO: 190563 - DNA, 25 bp, Probe sequence
gatttaattagtaacttcgacggca

SEQ ID NO: 190564 - DNA, 25 bp, Probe sequence
gttgttgatgatagtacggcacgtg

SEQ ID NO: 190565 - DNA, 25 bp, Probe sequence
gtacggcacgtgcaacatggtatcc

SEQ ID NO: 190566 - DNA, 25 bp, Probe sequence
ggtactgtcgatacacctaaagaag

SEQ ID NO: 190567 - DNA, 25 bp, Probe sequence
ggattattcatatcactagcgcgac

SEQ ID NO: 190568 - DNA, 25 bp, Probe sequence
ggaattcgtcgaagaaacatcaaac

SEQ ID NO: 190569 - DNA, 25 bp, Probe sequence
ggcacgtgcaacatggtatccagat

SEQ ID NO: 190570 - DNA, 25 bp, Probe sequence
ggcgatttaactaaggaattcgtcg

SEQ ID NO: 190571 - DNA, 25 bp, Probe sequence
tggttcagatattccggtagctcct

SEQ ID NO: 190572 - DNA, 25 bp, Probe sequence
tcactagcgcgacagatgcgccctc

SEQ ID NO: 190573 - DNA, 25 bp, Probe sequence
tcgaatcgtctgagcagtccataga

SEQ ID NO: 190574 - DNA, 25 bp, Probe sequence
tcagatattccggtagctcctaaca

SEQ ID NO: 190575 - DNA, 25 bp, Probe sequence
taaaattagtggcacatggtacccg

SEQ ID NO: 190576 - DNA, 25 bp, Probe sequence
tcaatggtgcagacctaatcaaagg

SEQ ID NO: 190577 - DNA, 25 bp, Probe sequence
tacacctaaagaagatggcgttgac

SEQ ID NO: 190578 - DNA, 25 bp, Probe sequence
tacggtaaagcaatcgaatcgtctg

SEQ ID NO: 190579 - DNA, 25 bp, Probe sequence
tagtaacttcgacggcaaaacaaag

SEQ ID NO: 190580 - DNA, 25 bp, Probe sequence
taggttcggacggacacaccgcaat

SEQ ID NO: 190581 - DNA, 25 bp, Probe sequence
attggtgcattcgacaacgaccctg

SEQ ID NO: 190582 - DNA, 25 bp, Probe sequence
atttgatcgcgcacgctttcttaga

SEQ ID NO: 190583 - DNA, 25 bp, Probe sequence
agacatagcagtttggcaccctggc

SEQ ID NO: 190584 - DNA, 25 bp, Probe sequence
acggggtgtatggttgttgtcagga

SEQ ID NO: 190585 - DNA, 25 bp, Probe sequence
aaatctcatacatggggctgggcta

SEQ ID NO: 190586 - DNA, 25 bp, Probe sequence
aaggcgtttcagttagtgcgcttaa

SEQ ID NO: 190587 - DNA, 25 bp, Probe sequence
caccgcaatagtagtaggaccatct

SEQ ID NO: 190588 - DNA, 25 bp, Probe sequence
tccggaacccggagacatagcagtt

SEQ ID NO: 190589 - DNA, 25 bp, Probe sequence
ccgttcacgttccagcaagcactgg

SEQ ID NO: 190590 - DNA, 25 bp, Probe sequence
gcgtcaccctaattggctagttatt

SEQ ID NO: 190591 - DNA, 25 bp, Probe sequence
gatatcctaagggtttccgattcta

SEQ ID NO: 190592 - DNA, 25 bp, Probe sequence
gcaaggtataccggatgacgcaaag

SEQ ID NO: 190593 - DNA, 25 bp, Probe sequence
gaatcaatgcatatgcgttctgtag

SEQ ID NO: 190594 - DNA, 25 bp, Probe sequence
gaatcctaaaaatccagctacacat

SEQ ID NO: 190595 - DNA, 25 bp, Probe sequence
gaaagcctacagctagtgaagtggt

SEQ ID NO: 190596 - DNA, 25 bp, Probe sequence
gacaacgaccctgattatgcaatga

SEQ ID NO: 190597 - DNA, 25 bp, Probe sequence
gactcaacaattactggcgaagcga

SEQ ID NO: 190598 - DNA, 25 bp, Probe sequence
gaccaaccaattttgatgacccgcg

SEQ ID NO: 190599 - DNA, 25 bp, Probe sequence
gagaggctacatggcttgctagacc

SEQ ID NO: 190600 - DNA, 25 bp, Probe sequence
gatacggtgcatataattacttcgg

SEQ ID NO: 190601 - DNA, 25 bp, Probe sequence
ggcaccctggcaacggaataggttc

SEQ ID NO: 190602 - DNA, 25 bp, Probe sequence
gtaacttcgctagtggtagatacgg

SEQ ID NO: 190603 - DNA, 25 bp, Probe sequence
gtgcgtcaacaagaggacccactgc

SEQ ID NO: 190604 - DNA, 25 bp, Probe sequence
gtgttacaggctttgtcagacctcc

SEQ ID NO: 190605 - DNA, 25 bp, Probe sequence
ggggcagtcaatgttgggatacacc

SEQ ID NO: 190606 - DNA, 25 bp, Probe sequence
ggtagaccctaatatttggcgtagt

SEQ ID NO: 190607 - DNA, 25 bp, Probe sequence
ggacccactgcatcagacgaaaaac

SEQ ID NO: 190608 - DNA, 25 bp, Probe sequence
ggaacgctagacggacaaggcaaag

SEQ ID NO: 190609 - DNA, 25 bp, Probe sequence
ggctttgtcagacctccatattcaa

SEQ ID NO: 190610 - DNA, 25 bp, Probe sequence
ggctgggctaatgcaacacgagcac

SEQ ID NO: 190611 - DNA, 25 bp, Probe sequence
tccgattctatcgttattcatctgg

SEQ ID NO: 190612 - DNA, 25 bp, Probe sequence
tcatctggatttgttccggaacccg

SEQ ID NO: 190613 - DNA, 25 bp, Probe sequence
taaaacatcggttgacagtgcgtca

SEQ ID NO: 190614 - DNA, 25 bp, Probe sequence
atttctccaatcccagttgacgaag

SEQ ID NO: 190615 - DNA, 25 bp, Probe sequence
atatttctccaatcccagttgacga

SEQ ID NO: 190616 - DNA, 25 bp, Probe sequence
ataacaactttactcacgcatctaa

SEQ ID NO: 190617 - DNA, 25 bp, Probe sequence
agatgataacaatgccgtcggttag

SEQ ID NO: 190618 - DNA, 25 bp, Probe sequence
acaactttactcacgcatctaaaaa

SEQ ID NO: 190619 - DNA, 25 bp, Probe sequence
aaatctatgaagtaaaagctggtat

SEQ ID NO: 190620 - DNA, 25 bp, Probe sequence
aaagctggtattcagtcaactggtg

SEQ ID NO: 190621 - DNA, 25 bp, Probe sequence
aacatatttctccaatcccagttga

SEQ ID NO: 190622 - DNA, 25 bp, Probe sequence
aagcacagtcgttactgggattgtt

SEQ ID NO: 190623 - DNA, 25 bp, Probe sequence
aagtgtttataagcacagtcgttac

SEQ ID NO: 190624 - DNA, 25 bp, Probe sequence
caatcccagttgacgaagtgtttat

SEQ ID NO: 190625 - DNA, 25 bp, Probe sequence
cagtcgttactgggattgtttcaat

SEQ ID NO: 190626 - DNA, 25 bp, Probe sequence
ctggtggcgcacctaaagtgaacgg

SEQ ID NO: 190627 - DNA, 25 bp, Probe sequence
gcacctaaagtgaacggagatgata

SEQ ID NO: 190628 - DNA, 25 bp, Probe sequence
gcaatcaaacatatttctccaatcc

SEQ ID NO: 190629 - DNA, 25 bp, Probe sequence
gaataacaactttactcacgcatct

SEQ ID NO: 190630 - DNA, 25 bp, Probe sequence
gaacaattttattaatagtcgcatg

SEQ ID NO: 190631 - DNA, 25 bp, Probe sequence
gtttcaatttggacgtggtggaaga

SEQ ID NO: 190632 - DNA, 25 bp, Probe sequence
gtattcagtcaactggtggcgcacc

SEQ ID NO: 190633 - DNA, 25 bp, Probe sequence
gtcaactggtggcgcacctaaagtg

SEQ ID NO: 190634 - DNA, 25 bp, Probe sequence
gtcgttactgggattgtttcaattt

SEQ ID NO: 190635 - DNA, 25 bp, Probe sequence
gtcgcatggatcaatcagtttttag

SEQ ID NO: 190636 - DNA, 25 bp, Probe sequence
gtggcgcacctaaagtgaacggaga

SEQ ID NO: 190637 - DNA, 25 bp, Probe sequence
ggtacaatcgtaagaacaattttat

SEQ ID NO: 190638 - DNA, 25 bp, Probe sequence
ggattgtttcaatttggacgtggtg

SEQ ID NO: 190639 - DNA, 25 bp, Probe sequence
ggatatcggtacaatcgtaagaaca

SEQ ID NO: 190640 - DNA, 25 bp, Probe sequence
ggatcaatcagtttttagcaatcaa

SEQ ID NO: 190641 - DNA, 25 bp, Probe sequence
ggagatgataacaatgccgtcggtt

SEQ ID NO: 190642 - DNA, 25 bp, Probe sequence
tggacgtggtggaagaataacaact

SEQ ID NO: 190643 - DNA, 25 bp, Probe sequence
tctccaatcccagttgacgaagtgt

SEQ ID NO: 190644 - DNA, 25 bp, Probe sequence
tcaaacatatttctccaatcccagt

SEQ ID NO: 190645 - DNA, 25 bp, Probe sequence
taatagtcgcatggatcaatcagtt

SEQ ID NO: 190646 - DNA, 25 bp, Probe sequence
tactcacgcatctaaaaaaggacaa

SEQ ID NO: 190647 - DNA, 25 bp, Probe sequence
ttcagtcaactggtggcgcacctaa

SEQ ID NO: 190648 - DNA, 25 bp, Probe sequence
atactgtgtcgtttcaagcattgcc

SEQ ID NO: 190649 - DNA, 25 bp, Probe sequence
atgccgtcggttagaacatacagtc

SEQ ID NO: 190650 - DNA, 25 bp, Probe sequence
atggcggtggttatggtcatgtagg

SEQ ID NO: 190651 - DNA, 25 bp, Probe sequence
aggtgtattttatcctaatccagaa

SEQ ID NO: 190652 - DNA, 25 bp, Probe sequence
agaactggctaggcggtgcttactg

SEQ ID NO: 190653 - DNA, 25 bp, Probe sequence
acccaggtgccgttgcgaatggaga

SEQ ID NO: 190654 - DNA, 25 bp, Probe sequence
acggcagacaaattgatgcgccaag

SEQ ID NO: 190655 - DNA, 25 bp, Probe sequence
aaaggtgtgggcgctgcggacattc

SEQ ID NO: 190656 - DNA, 25 bp, Probe sequence
aagcgaagtcaaaccggatgcaatc

SEQ ID NO: 190657 - DNA, 25 bp, Probe sequence
aatcattagcgatcgtttcccagct

SEQ ID NO: 190658 - DNA, 25 bp, Probe sequence
cgcacacacggctatgattttccta

SEQ ID NO: 190659 - DNA, 25 bp, Probe sequence
gcggattgctgaagccattaacggc

SEQ ID NO: 190660 - DNA, 25 bp, Probe sequence
gcgccaagtagtaagccaagcactg

SEQ ID NO: 190661 - DNA, 25 bp, Probe sequence
gcgtggaatccagacaatgcatttg

SEQ ID NO: 190662 - DNA, 25 bp, Probe sequence
gctaagaagcgcagtaacaccagtt

SEQ ID NO: 190663 - DNA, 25 bp, Probe sequence
gctagcccacaagcaagtggcgggc

SEQ ID NO: 190664 - DNA, 25 bp, Probe sequence
gctaacgtgtctgctgatcttaatc

SEQ ID NO: 190665 - DNA, 25 bp, Probe sequence
gcttcgatactgccaaccaatattg

SEQ ID NO: 190666 - DNA, 25 bp, Probe sequence
gaggggatttattgaacgctaacgt

SEQ ID NO: 190667 - DNA, 25 bp, Probe sequence
gatacattgtacggtcaacgtgttg

SEQ ID NO: 190668 - DNA, 25 bp, Probe sequence
gattttcctatgtggttcattcgtc

SEQ ID NO: 190669 - DNA, 25 bp, Probe sequence
gttactacaagacgcacacacggct

SEQ ID NO: 190670 - DNA, 25 bp, Probe sequence
gtttcaagcattgccgggcgacgtc

SEQ ID NO: 190671 - DNA, 25 bp, Probe sequence
gtgagggctctagtactaacgattt

SEQ ID NO: 190672 - DNA, 25 bp, Probe sequence
gtggcgggcatgtaatcattagcga

SEQ ID NO: 190673 - DNA, 25 bp, Probe sequence
ggattaaccggcactgtcgttgaag

SEQ ID NO: 190674 - DNA, 25 bp, Probe sequence
ggttcattcgtccattctatgcaaa

SEQ ID NO: 190675 - DNA, 25 bp, Probe sequence
ggatgtcaatgcttcgatactgcca

SEQ ID NO: 190676 - DNA, 25 bp, Probe sequence
tggagcccaccagaagttactacaa

SEQ ID NO: 190677 - DNA, 25 bp, Probe sequence
tgtagctggtcatggtattggcgca

SEQ ID NO: 190678 - DNA, 25 bp, Probe sequence
tcgtttcccagctgatgacattgac

SEQ ID NO: 190679 - DNA, 25 bp, Probe sequence
tatacggtggcaactcgatgaatca

SEQ ID NO: 190680 - DNA, 25 bp, Probe sequence
tattggcgcatactctaacgaccca

SEQ ID NO: 190681 - DNA, 25 bp, Probe sequence
ttcatttagattctgctagcccaca

SEQ ID NO: 190682 - DNA, 25 bp, Probe sequence
atcactttgtacaaaacgactgcta

SEQ ID NO: 190683 - DNA, 25 bp, Probe sequence
atcaaaatttcttaccaacacatca

SEQ ID NO: 190684 - DNA, 25 bp, Probe sequence
agtcaaatcatcagtcgctacatca

SEQ ID NO: 190685 - DNA, 25 bp, Probe sequence
agagagcaacacacacatcaattta

SEQ ID NO: 190686 - DNA, 25 bp, Probe sequence
agctcggagtccaaagattctgtaa

SEQ ID NO: 190687 - DNA, 25 bp, Probe sequence
agctcgaatgctaatcaaaatttct

SEQ ID NO: 190688 - DNA, 25 bp, Probe sequence
acgactgctacatcagattctgaca

SEQ ID NO: 190689 - DNA, 25 bp, Probe sequence
acatatcacacctgtcagcgagaaa

SEQ ID NO: 190690 - DNA, 25 bp, Probe sequence
aaatttttggaacaacttgcactgg

SEQ ID NO: 190691 - DNA, 25 bp, Probe sequence
aaattagtagcttcgcaatctagcg

SEQ ID NO: 190692 - DNA, 25 bp, Probe sequence
aaaagctgccggaaacatttactca

SEQ ID NO: 190693 - DNA, 25 bp, Probe sequence
aagcgtactttctcacaaacaaaag

SEQ ID NO: 190694 - DNA, 25 bp, Probe sequence
aatgtttttgttagctcggagtcca

SEQ ID NO: 190695 - DNA, 25 bp, Probe sequence
aatgcccatattagcacgtggtaat

SEQ ID NO: 190696 - DNA, 25 bp, Probe sequence
aatattgttgactacgcgcctaaaa

SEQ ID NO: 190697 - DNA, 25 bp, Probe sequence
aattcacaattttattggggagcta

SEQ ID NO: 190698 - DNA, 25 bp, Probe sequence
cacacggttaaattagtagcttcgc

SEQ ID NO: 190699 - DNA, 25 bp, Probe sequence
cagtcgctacatcaattacattaat

SEQ ID NO: 190700 - DNA, 25 bp, Probe sequence
catttactcaggctatacccaaccc

SEQ ID NO: 190701 - DNA, 25 bp, Probe sequence
cttaccaacacatcaaatgcccata

SEQ ID NO: 190702 - DNA, 25 bp, Probe sequence
ccaacccacttctgatagtagtata

SEQ ID NO: 190703 - DNA, 25 bp, Probe sequence
gcacgtggtaatttcaatccagaat

SEQ ID NO: 190704 - DNA, 25 bp, Probe sequence
gaaacgaactatttttaggtggcag

SEQ ID NO: 190705 - DNA, 25 bp, Probe sequence
gacacattaatactaaaagctgccg

SEQ ID NO: 190706 - DNA, 25 bp, Probe sequence
gattaactggtggattgaatgggtc

SEQ ID NO: 190707 - DNA, 25 bp, Probe sequence
ggggagctaagtataatgtttttgt

SEQ ID NO: 190708 - DNA, 25 bp, Probe sequence
ggggtgtcgaggcacataaaatcat

SEQ ID NO: 190709 - DNA, 25 bp, Probe sequence
ggaacaacttgcactggataggtta

SEQ ID NO: 190710 - DNA, 25 bp, Probe sequence
tggcagagatagtagtgattcatta

SEQ ID NO: 190711 - DNA, 25 bp, Probe sequence
tgactacgcgcctaaaaatcaaaat

SEQ ID NO: 190712 - DNA, 25 bp, Probe sequence
tcaatcggctggggtgtcgaggcac

SEQ ID NO: 190713 - DNA, 25 bp, Probe sequence
taggtggcagacagagtagctcgaa

SEQ ID NO: 190714 - DNA, 25 bp, Probe sequence
tatacccaacccacttctgatagta

SEQ ID NO: 190715 - DNA, 25 bp, Probe sequence
ttaatcatgctatcaaatacagttg

SEQ ID NO: 190716 - DNA, 25 bp, Probe sequence
atattttgcgaataaatttgatgat

SEQ ID NO: 190717 - DNA, 25 bp, Probe sequence
atatgttgaacacggtgcaatcaag

SEQ ID NO: 190718 - DNA, 25 bp, Probe sequence
ataggcacatatttaaatcaatttg

SEQ ID NO: 190719 - DNA, 25 bp, Probe sequence
atcaatttgaccaaagtttcttgtt

SEQ ID NO: 190720 - DNA, 25 bp, Probe sequence
atccaatatatgttgaacacggtgc

SEQ ID NO: 190721 - DNA, 25 bp, Probe sequence
atgttgaacacggtgcaatcaagta

SEQ ID NO: 190722 - DNA, 25 bp, Probe sequence
acatacccttcaaacaattatccaa

SEQ ID NO: 190723 - DNA, 25 bp, Probe sequence
acacggtgcaatcaagtatataggc

SEQ ID NO: 190724 - DNA, 25 bp, Probe sequence
acaaacaacatacccttcaaacaat

SEQ ID NO: 190725 - DNA, 25 bp, Probe sequence
acaacatacccttcaaacaattatc

SEQ ID NO: 190726 - DNA, 25 bp, Probe sequence
aaatcaatttgaccaaagtttcttg

SEQ ID NO: 190727 - DNA, 25 bp, Probe sequence
aacaacatacccttcaaacaattat

SEQ ID NO: 190728 - DNA, 25 bp, Probe sequence
aacacggtgcaatcaagtatatagg

SEQ ID NO: 190729 - DNA, 25 bp, Probe sequence
aacatacccttcaaacaattatcca

SEQ ID NO: 190730 - DNA, 25 bp, Probe sequence
aatatatgttgaacacggtgcaatc

SEQ ID NO: 190731 - DNA, 25 bp, Probe sequence
caacatacccttcaaacaattatcc

SEQ ID NO: 190732 - DNA, 25 bp, Probe sequence
caaacaacatacccttcaaacaatt

SEQ ID NO: 190733 - DNA, 25 bp, Probe sequence
caaagtttcttgttaattgatgaat

SEQ ID NO: 190734 - DNA, 25 bp, Probe sequence
cacggtgcaatcaagtatataggca

SEQ ID NO: 190735 - DNA, 25 bp, Probe sequence
catacccttcaaacaattatccaat

SEQ ID NO: 190736 - DNA, 25 bp, Probe sequence
cttcaaacaattatccaatatatgt

SEQ ID NO: 190737 - DNA, 25 bp, Probe sequence
gcaatcaagtatataggcacatatt

SEQ ID NO: 190738 - DNA, 25 bp, Probe sequence
gaacacggtgcaatcaagtatatag

SEQ ID NO: 190739 - DNA, 25 bp, Probe sequence
gaaattacaaacaacatacccttca

SEQ ID NO: 190740 - DNA, 25 bp, Probe sequence
gaccaaagtttcttgttaattgatg

SEQ ID NO: 190741 - DNA, 25 bp, Probe sequence
gttgaacacggtgcaatcaagtata

SEQ ID NO: 190742 - DNA, 25 bp, Probe sequence
gtttcttgttaattgatgaatatgt

SEQ ID NO: 190743 - DNA, 25 bp, Probe sequence
ggcacatatttaaatcaatttgacc

SEQ ID NO: 190744 - DNA, 25 bp, Probe sequence
tcaatttgaccaaagtttcttgtta

SEQ ID NO: 190745 - DNA, 25 bp, Probe sequence
tacaaacaacatacccttcaaacaa

SEQ ID NO: 190746 - DNA, 25 bp, Probe sequence
tttgaccaaagtttcttgttaattg

SEQ ID NO: 190747 - DNA, 25 bp, Probe sequence
ttatccaatatatgttgaacacggt

SEQ ID NO: 190748 - DNA, 25 bp, Probe sequence
ttacaaacaacatacccttcaaaca

SEQ ID NO: 190749 - DNA, 25 bp, Probe sequence
ttgaccaaagtttcttgttaattga

SEQ ID NO: 190750 - DNA, 25 bp, Probe sequence
attgggctcaacaaatatccatctc

SEQ ID NO: 190751 - DNA, 25 bp, Probe sequence
attttcttcaaatacacgttctatt

SEQ ID NO: 190752 - DNA, 25 bp, Probe sequence
atacacgttctatttctacaaatga

SEQ ID NO: 190753 - DNA, 25 bp, Probe sequence
ataatcaaagttattttcttcaaat

SEQ ID NO: 190754 - DNA, 25 bp, Probe sequence
atctcaataacgtctgtctttttta

SEQ ID NO: 190755 - DNA, 25 bp, Probe sequence
atccatctcaataacgtctgtcttt

SEQ ID NO: 190756 - DNA, 25 bp, Probe sequence
acctttaccatcaaccatataaaca

SEQ ID NO: 190757 - DNA, 25 bp, Probe sequence
acgtctgtcttttttaagttcagcg

SEQ ID NO: 190758 - DNA, 25 bp, Probe sequence
aacattgggatgttgaccacttgta

SEQ ID NO: 190759 - DNA, 25 bp, Probe sequence
aatatccatctcaataacgtctgtc

SEQ ID NO: 190760 - DNA, 25 bp, Probe sequence
catcaaacgcttcttgattccaccc

SEQ ID NO: 190761 - DNA, 25 bp, Probe sequence
cttcttgattccacccaatccaaaa

SEQ ID NO: 190762 - DNA, 25 bp, Probe sequence
ccatctcaataacgtctgtcttttt

SEQ ID NO: 190763 - DNA, 25 bp, Probe sequence
ccaaacctttaccatcaaccatata

SEQ ID NO: 190764 - DNA, 25 bp, Probe sequence
gccgtcacctttataatcaaagtta

SEQ ID NO: 190765 - DNA, 25 bp, Probe sequence
gcaaatccaaacctttaccatcaac

SEQ ID NO: 190766 - DNA, 25 bp, Probe sequence
gatgttgaccacttgtatatgcgcc

SEQ ID NO: 190767 - DNA, 25 bp, Probe sequence
gatctgttttaatgtttttcgacct

SEQ ID NO: 190768 - DNA, 25 bp, Probe sequence
gttcagcgataacatcaaacgcttc

SEQ ID NO: 190769 - DNA, 25 bp, Probe sequence
gtcttttttaagttcagcgataaca

SEQ ID NO: 190770 - DNA, 25 bp, Probe sequence
gtctgtcttttttaagttcagcgat

SEQ ID NO: 190771 - DNA, 25 bp, Probe sequence
gggctcaacaaatatccatctcaat

SEQ ID NO: 190772 - DNA, 25 bp, Probe sequence
gggatgttgaccacttgtatatgcg

SEQ ID NO: 190773 - DNA, 25 bp, Probe sequence
tgttgaccacttgtatatgcgccgt

SEQ ID NO: 190774 - DNA, 25 bp, Probe sequence
tgattccacccaatccaaaacacaa

SEQ ID NO: 190775 - DNA, 25 bp, Probe sequence
tgaccacttgtatatgcgccgtcac

SEQ ID NO: 190776 - DNA, 25 bp, Probe sequence
tgcgccgtcacctttataatcaaag

SEQ ID NO: 190777 - DNA, 25 bp, Probe sequence
tccacccaatccaaaacacaacatt

SEQ ID NO: 190778 - DNA, 25 bp, Probe sequence
tcttgattccacccaatccaaaaca

SEQ ID NO: 190779 - DNA, 25 bp, Probe sequence
tcaaccatataaacaattgggctca

SEQ ID NO: 190780 - DNA, 25 bp, Probe sequence
tcaataacgtctgtcttttttaagt

SEQ ID NO: 190781 - DNA, 25 bp, Probe sequence
taatgtttttcgaccttacaatagg

SEQ ID NO: 190782 - DNA, 25 bp, Probe sequence
taggcaaatccaaacctttaccatc

SEQ ID NO: 190783 - DNA, 25 bp, Probe sequence
tttcgaccttacaataggcaaatcc

SEQ ID NO: 190784 - DNA, 25 bp, Probe sequence
cttactccctcaagggcttcactta

SEQ ID NO: 190785 - DNA, 25 bp, Probe sequence
attgcgggtgtcttaaacttgtctt

SEQ ID NO: 190786 - DNA, 25 bp, Probe sequence
ataagtgtcttactgtcctaaaaat

SEQ ID NO: 190787 - DNA, 25 bp, Probe sequence
agggattgcgggtgtcttaaacttg

SEQ ID NO: 190788 - DNA, 25 bp, Probe sequence
agtgtcttactgtcctaaaaataag

SEQ ID NO: 190789 - DNA, 25 bp, Probe sequence
accaagacacttatagcgtggcata

SEQ ID NO: 190790 - DNA, 25 bp, Probe sequence
accatcaagacaccaagacacttat

SEQ ID NO: 190791 - DNA, 25 bp, Probe sequence
actgtctcactgtttacgacctaca

SEQ ID NO: 190792 - DNA, 25 bp, Probe sequence
actgccacaagggattgcgggtgtc

SEQ ID NO: 190793 - DNA, 25 bp, Probe sequence
actccctcaagggcttcacttaatc

SEQ ID NO: 190794 - DNA, 25 bp, Probe sequence
aaaaccatcaagacaccaagacact

SEQ ID NO: 190795 - DNA, 25 bp, Probe sequence
aagacacttatagcgtggcatatac

SEQ ID NO: 190796 - DNA, 25 bp, Probe sequence
caagggcttcacttaatctgtctca

SEQ ID NO: 190797 - DNA, 25 bp, Probe sequence
cacttatagcgtggcatatactgcc

SEQ ID NO: 190798 - DNA, 25 bp, Probe sequence
cactgtttacgacctacatttatat

SEQ ID NO: 190799 - DNA, 25 bp, Probe sequence
ctcactgtttacgacctacatttat

SEQ ID NO: 190800 - DNA, 25 bp, Probe sequence
cctcaagggcttcacttaatctgtc

SEQ ID NO: 190801 - DNA, 25 bp, Probe sequence
gccacaagggattgcgggtgtctta

SEQ ID NO: 190802 - DNA, 25 bp, Probe sequence
gcgggtgtcttaaacttgtcttata

SEQ ID NO: 190803 - DNA, 25 bp, Probe sequence
gacaccaagacacttatagcgtggc

SEQ ID NO: 190804 - DNA, 25 bp, Probe sequence
gatgtttaaactttaagattcttat

SEQ ID NO: 190805 - DNA, 25 bp, Probe sequence
gtttacgacctacatttatatattt

SEQ ID NO: 190806 - DNA, 25 bp, Probe sequence
gtctcactgtctcactgtttacgac

SEQ ID NO: 190807 - DNA, 25 bp, Probe sequence
gtcttataagtgtcttactgtccta

SEQ ID NO: 190808 - DNA, 25 bp, Probe sequence
gtctcactgtttacgacctacattt

SEQ ID NO: 190809 - DNA, 25 bp, Probe sequence
gggtgtcttaaacttgtcttataag

SEQ ID NO: 190810 - DNA, 25 bp, Probe sequence
ggattgcgggtgtcttaaacttgtc

SEQ ID NO: 190811 - DNA, 25 bp, Probe sequence
ggcatatactgccacaagggattgc

SEQ ID NO: 190812 - DNA, 25 bp, Probe sequence
tccctcaagggcttcacttaatctg

SEQ ID NO: 190813 - DNA, 25 bp, Probe sequence
tctcactgtctcactgtttacgacc

SEQ ID NO: 190814 - DNA, 25 bp, Probe sequence
tcactgtctcactgtttacgaccta

SEQ ID NO: 190815 - DNA, 25 bp, Probe sequence
tacgacctacatttatatattttgt

SEQ ID NO: 190816 - DNA, 25 bp, Probe sequence
taccctaaaaaccatcaagacacca

SEQ ID NO: 190817 - DNA, 25 bp, Probe sequence
tatactgccacaagggattgcgggt

SEQ ID NO: 190818 - DNA, 25 bp, Probe sequence
atagttacttagatgaaattctcat

SEQ ID NO: 190819 - DNA, 25 bp, Probe sequence
ataaactcatctaatagtactatta

SEQ ID NO: 190820 - DNA, 25 bp, Probe sequence
atgggcagtgaaagcccgttttatg

SEQ ID NO: 190821 - DNA, 25 bp, Probe sequence
agatatgtattattacaacgtttta

SEQ ID NO: 190822 - DNA, 25 bp, Probe sequence
agagacgccttatataaaattttat

SEQ ID NO: 190823 - DNA, 25 bp, Probe sequence
aagcccgttttatgaaatcaataat

SEQ ID NO: 190824 - DNA, 25 bp, Probe sequence
aatgaatatgaagtgttttttgaca

SEQ ID NO: 190825 - DNA, 25 bp, Probe sequence
aattctcataatgtttataaactca

SEQ ID NO: 190826 - DNA, 25 bp, Probe sequence
aattggctacttactcaaaatgaat

SEQ ID NO: 190827 - DNA, 25 bp, Probe sequence
caatgaatattatgatgttacaatt

SEQ ID NO: 190828 - DNA, 25 bp, Probe sequence
gccttattttgacttaaattggcta

SEQ ID NO: 190829 - DNA, 25 bp, Probe sequence
gcgatagagaccccaatgaacttat

SEQ ID NO: 190830 - DNA, 25 bp, Probe sequence
gcagtgaaagcccgttttatgaaat

SEQ ID NO: 190831 - DNA, 25 bp, Probe sequence
gaagctttctcttagataataattt

SEQ ID NO: 190832 - DNA, 25 bp, Probe sequence
gaacttattacacaattcaatgaat

SEQ ID NO: 190833 - DNA, 25 bp, Probe sequence
gaaagcccgttttatgaaatcaata

SEQ ID NO: 190834 - DNA, 25 bp, Probe sequence
gacttaaattggctacttactcaaa

SEQ ID NO: 190835 - DNA, 25 bp, Probe sequence
gacagaagctttctcttagataata

SEQ ID NO: 190836 - DNA, 25 bp, Probe sequence
gaccccaatgaacttattacacaat

SEQ ID NO: 190837 - DNA, 25 bp, Probe sequence
gagaccccaatgaacttattacaca

SEQ ID NO: 190838 - DNA, 25 bp, Probe sequence
gatagagaccccaatgaacttatta

SEQ ID NO: 190839 - DNA, 25 bp, Probe sequence
gttttttgacagaagctttctctta

SEQ ID NO: 190840 - DNA, 25 bp, Probe sequence
gtattattacaacgttttaaatgat

SEQ ID NO: 190841 - DNA, 25 bp, Probe sequence
gtgttttttgacagaagctttctct

SEQ ID NO: 190842 - DNA, 25 bp, Probe sequence
ggatgatttttttaatatctttaca

SEQ ID NO: 190843 - DNA, 25 bp, Probe sequence
ggctacttactcaaaatgaatatga

SEQ ID NO: 190844 - DNA, 25 bp, Probe sequence
taaaactaaaagagacgccttatat

SEQ ID NO: 190845 - DNA, 25 bp, Probe sequence
tacaaactcggaagatgataaaact

SEQ ID NO: 190846 - DNA, 25 bp, Probe sequence
tagcgatagagaccccaatgaactt

SEQ ID NO: 190847 - DNA, 25 bp, Probe sequence
tatagaaaagccttattttgactta

SEQ ID NO: 190848 - DNA, 25 bp, Probe sequence
tattagcgatagagaccccaatgaa

SEQ ID NO: 190849 - DNA, 25 bp, Probe sequence
tttgacagaagctttctcttagata

SEQ ID NO: 190850 - DNA, 25 bp, Probe sequence
tttaatatctttacaaactcggaag

SEQ ID NO: 190851 - DNA, 25 bp, Probe sequence
ttgacttaaattggctacttactca

SEQ ID NO: 190852 - DNA, 25 bp, Probe sequence
attgctctcgagggttcaagaacta

SEQ ID NO: 190853 - DNA, 25 bp, Probe sequence
atttagtttctgaatttgcttatca

SEQ ID NO: 190854 - DNA, 25 bp, Probe sequence
atattatttgctttagatcatttca

SEQ ID NO: 190855 - DNA, 25 bp, Probe sequence
atgatttcttggtatattggcttta

SEQ ID NO: 190856 - DNA, 25 bp, Probe sequence
atggaattattcccacctgatttag

SEQ ID NO: 190857 - DNA, 25 bp, Probe sequence
aagaattcaatatgcttttagctac

SEQ ID NO: 190858 - DNA, 25 bp, Probe sequence
aatcttttaagctttgttgtgaatt

SEQ ID NO: 190859 - DNA, 25 bp, Probe sequence
gagttttggagtgtctcaacgtatg

SEQ ID NO: 190860 - DNA, 25 bp, Probe sequence
gaacgagaattttatgattgctgta

SEQ ID NO: 190861 - DNA, 25 bp, Probe sequence
gaaattgttccagatgactcaaatt

SEQ ID NO: 190862 - DNA, 25 bp, Probe sequence
gacataccaatcttttaagctttgt

SEQ ID NO: 190863 - DNA, 25 bp, Probe sequence
gatattgagtatttcacacatgaag

SEQ ID NO: 190864 - DNA, 25 bp, Probe sequence
gatttagattatggttacagttata

SEQ ID NO: 190865 - DNA, 25 bp, Probe sequence
gattttgcttttttcgtatcagata

SEQ ID NO: 190866 - DNA, 25 bp, Probe sequence
gattatgattttgcttttttcgtat

SEQ ID NO: 190867 - DNA, 25 bp, Probe sequence
gattgctgtaatgagttttggagtg

SEQ ID NO: 190868 - DNA, 25 bp, Probe sequence
gttccagatgactcaaattattggt

SEQ ID NO: 190869 - DNA, 25 bp, Probe sequence
gttattttagtgattctgatggtct

SEQ ID NO: 190870 - DNA, 25 bp, Probe sequence
gtttctgaatttgcttatcaacgaa

SEQ ID NO: 190871 - DNA, 25 bp, Probe sequence
gtagcaaagggtgtttttagaagag

SEQ ID NO: 190872 - DNA, 25 bp, Probe sequence
gtaaaaattattgctctcgagggtt

SEQ ID NO: 190873 - DNA, 25 bp, Probe sequence
gtaactcaagaaattgttccagatg

SEQ ID NO: 190874 - DNA, 25 bp, Probe sequence
gtgtctcaacgtatgtagcaaaggg

SEQ ID NO: 190875 - DNA, 25 bp, Probe sequence
ggaaattataactatccaaattacg

SEQ ID NO: 190876 - DNA, 25 bp, Probe sequence
tggagtgtctcaacgtatgtagcaa

SEQ ID NO: 190877 - DNA, 25 bp, Probe sequence
tcaataatattttacgtcctgaatt

SEQ ID NO: 190878 - DNA, 25 bp, Probe sequence
tagctacttttgagatgaatggata

SEQ ID NO: 190879 - DNA, 25 bp, Probe sequence
tagtgattctgatggtcttgtaaaa

SEQ ID NO: 190880 - DNA, 25 bp, Probe sequence
tatgcttttagctacttttgagatg

SEQ ID NO: 190881 - DNA, 25 bp, Probe sequence
tattggctttaataggggttttgat

SEQ ID NO: 190882 - DNA, 25 bp, Probe sequence
tttggagaattattgtttatacaga

SEQ ID NO: 190883 - DNA, 25 bp, Probe sequence
tttacgtcctgaattattaagaatg

SEQ ID NO: 190884 - DNA, 25 bp, Probe sequence
ttattcccacctgatttagattatg

SEQ ID NO: 190885 - DNA, 25 bp, Probe sequence
ttgcttttttcgtatcagatattga

SEQ ID NO: 190886 - DNA, 25 bp, Probe sequence
attcccagaaaatcacgtcgactta

SEQ ID NO: 190887 - DNA, 25 bp, Probe sequence
atttaaatacttctatcggatataa

SEQ ID NO: 190888 - DNA, 25 bp, Probe sequence
atatatctttctatggagacatgaa

SEQ ID NO: 190889 - DNA, 25 bp, Probe sequence
atagtatagtttcaacatgggatgt

SEQ ID NO: 190890 - DNA, 25 bp, Probe sequence
atagtttcaacatgggatgtttata

SEQ ID NO: 190891 - DNA, 25 bp, Probe sequence
atactactaatgatataatttgcag

SEQ ID NO: 190892 - DNA, 25 bp, Probe sequence
atcacgtcgacttaattcttaattt

SEQ ID NO: 190893 - DNA, 25 bp, Probe sequence
aggtggtattttaattatagatttg

SEQ ID NO: 190894 - DNA, 25 bp, Probe sequence
agcaaagacctttcaagagaattaa

SEQ ID NO: 190895 - DNA, 25 bp, Probe sequence
actttatccaatatatctttctatg

SEQ ID NO: 190896 - DNA, 25 bp, Probe sequence
aaatcacgtcgacttaattcttaat

SEQ ID NO: 190897 - DNA, 25 bp, Probe sequence
aaatgattttcaacttcaaagatta

SEQ ID NO: 190898 - DNA, 25 bp, Probe sequence
aactttactttatccaatatatctt

SEQ ID NO: 190899 - DNA, 25 bp, Probe sequence
aacgaatatagcaaagacctttcaa

SEQ ID NO: 190900 - DNA, 25 bp, Probe sequence
aagaacaaatgattttcaacttcaa

SEQ ID NO: 190901 - DNA, 25 bp, Probe sequence
aatgatataatttgcagtagtttgt

SEQ ID NO: 190902 - DNA, 25 bp, Probe sequence
aatcacgtcgacttaattcttaatt

SEQ ID NO: 190903 - DNA, 25 bp, Probe sequence
aatttcatgaaaattcaccaagact

SEQ ID NO: 190904 - DNA, 25 bp, Probe sequence
aatttgcagtagtttgtattataac

SEQ ID NO: 190905 - DNA, 25 bp, Probe sequence
aattatagatttgatgaaccccgcc

SEQ ID NO: 190906 - DNA, 25 bp, Probe sequence
aattcccagaaaatcacgtcgactt

SEQ ID NO: 190907 - DNA, 25 bp, Probe sequence
ccagaaaatcacgtcgacttaattc

SEQ ID NO: 190908 - DNA, 25 bp, Probe sequence
ccaatatatctttctatggagacat

SEQ ID NO: 190909 - DNA, 25 bp, Probe sequence
gaattcccagaaaatcacgtcgact

SEQ ID NO: 190910 - DNA, 25 bp, Probe sequence
gaatatagcaaagacctttcaagag

SEQ ID NO: 190911 - DNA, 25 bp, Probe sequence
gaaaatcacgtcgacttaattctta

SEQ ID NO: 190912 - DNA, 25 bp, Probe sequence
gattttcaacttcaaagattacgaa

SEQ ID NO: 190913 - DNA, 25 bp, Probe sequence
gtattataactttactttatccaat

SEQ ID NO: 190914 - DNA, 25 bp, Probe sequence
tgttaagaaatagttatacctcctt

SEQ ID NO: 190915 - DNA, 25 bp, Probe sequence
tatagatttgatgaaccccgccttt

SEQ ID NO: 190916 - DNA, 25 bp, Probe sequence
ttatagatttgatgaaccccgcctt

SEQ ID NO: 190917 - DNA, 25 bp, Probe sequence
ttcccagaaaatcacgtcgacttaa

SEQ ID NO: 190918 - DNA, 25 bp, Probe sequence
ttcttaatttaaatacttctatcgg

SEQ ID NO: 190919 - DNA, 25 bp, Probe sequence
ttactttatccaatatatctttcta

SEQ ID NO: 190920 - DNA, 25 bp, Probe sequence
attcttttttactgttagagttcat

SEQ ID NO: 190921 - DNA, 25 bp, Probe sequence
atttcctattgcagggggatatgtg

SEQ ID NO: 190922 - DNA, 25 bp, Probe sequence
actgataaaaatattcctgttcctc

SEQ ID NO: 190923 - DNA, 25 bp, Probe sequence
aaattcactaaatctatttggcttt

SEQ ID NO: 190924 - DNA, 25 bp, Probe sequence
aaatatttcctattgcagggggata

SEQ ID NO: 190925 - DNA, 25 bp, Probe sequence
aaatctatttggctttagtcataat

SEQ ID NO: 190926 - DNA, 25 bp, Probe sequence
aaagctacaacctaatactaaatca

SEQ ID NO: 190927 - DNA, 25 bp, Probe sequence
aaaatattcctgttcctcaaattat

SEQ ID NO: 190928 - DNA, 25 bp, Probe sequence
aatggccatgcttatcctgaaagct

SEQ ID NO: 190929 - DNA, 25 bp, Probe sequence
cttatcctgaaagctatagaaaact

SEQ ID NO: 190930 - DNA, 25 bp, Probe sequence
cttttttactgttagagttcattga

SEQ ID NO: 190931 - DNA, 25 bp, Probe sequence
ctatttggctttagtcataatttca

SEQ ID NO: 190932 - DNA, 25 bp, Probe sequence
gccatgcttatcctgaaagctatag

SEQ ID NO: 190933 - DNA, 25 bp, Probe sequence
gctacaacctaatactaaatcaaat

SEQ ID NO: 190934 - DNA, 25 bp, Probe sequence
gcagggggatatgtgaatctatctt

SEQ ID NO: 190935 - DNA, 25 bp, Probe sequence
gaatctatctttttcagttgatgct

SEQ ID NO: 190936 - DNA, 25 bp, Probe sequence
gaaaatggccatgcttatcctgaaa

SEQ ID NO: 190937 - DNA, 25 bp, Probe sequence
gacaataattcttttttactgttag

SEQ ID NO: 190938 - DNA, 25 bp, Probe sequence
gagttcattgaaaatggccatgctt

SEQ ID NO: 190939 - DNA, 25 bp, Probe sequence
gatgcttccaacaaaaaatattttt

SEQ ID NO: 190940 - DNA, 25 bp, Probe sequence
gataaaaatattcctgttcctcaaa

SEQ ID NO: 190941 - DNA, 25 bp, Probe sequence
gtcataatttcaatggaggaacgat

SEQ ID NO: 190942 - DNA, 25 bp, Probe sequence
gggatatgtgaatctatctttttca

SEQ ID NO: 190943 - DNA, 25 bp, Probe sequence
ggctttagtcataatttcaatggag

SEQ ID NO: 190944 - DNA, 25 bp, Probe sequence
tggccatgcttatcctgaaagctat

SEQ ID NO: 190945 - DNA, 25 bp, Probe sequence
tgagttatccagtttaaaagaatta

SEQ ID NO: 190946 - DNA, 25 bp, Probe sequence
tctatctttttcagttgatgcttcc

SEQ ID NO: 190947 - DNA, 25 bp, Probe sequence
tctttttcagttgatgcttccaaca

SEQ ID NO: 190948 - DNA, 25 bp, Probe sequence
taggtaaaatagttgcaaacatgca

SEQ ID NO: 190949 - DNA, 25 bp, Probe sequence
tatctttttcagttgatgcttccaa

SEQ ID NO: 190950 - DNA, 25 bp, Probe sequence
tttgattatgagttatccagtttaa

SEQ ID NO: 190951 - DNA, 25 bp, Probe sequence
ttttgattattctaaattaccaatt

SEQ ID NO: 190952 - DNA, 25 bp, Probe sequence
ttcctattgcagggggatatgtgaa

SEQ ID NO: 190953 - DNA, 25 bp, Probe sequence
ttgaaaatggccatgcttatcctga

SEQ ID NO: 190954 - DNA, 25 bp, Probe sequence
atattttcatcttttattcttagta

SEQ ID NO: 190955 - DNA, 25 bp, Probe sequence
atgacgtcaatttcttggtttatat

SEQ ID NO: 190956 - DNA, 25 bp, Probe sequence
atgtttatgaatttgtccttcattt

SEQ ID NO: 190957 - DNA, 25 bp, Probe sequence
aggtatcattacacataggcgcact

SEQ ID NO: 190958 - DNA, 25 bp, Probe sequence
actccacaacaataacaggccgaag

SEQ ID NO: 190959 - DNA, 25 bp, Probe sequence
aataacaggccgaagcttatacgtt

SEQ ID NO: 190960 - DNA, 25 bp, Probe sequence
cactgttgctttttttcctttgata

SEQ ID NO: 190961 - DNA, 25 bp, Probe sequence
caggccgaagcttatacgttagtac

SEQ ID NO: 190962 - DNA, 25 bp, Probe sequence
cattacacataggcgcacttgtctc

SEQ ID NO: 190963 - DNA, 25 bp, Probe sequence
ctaaggtatcattacacataggcgc

SEQ ID NO: 190964 - DNA, 25 bp, Probe sequence
ctgttgctttttttcctttgataat

SEQ ID NO: 190965 - DNA, 25 bp, Probe sequence
ccttcatttttaactccacaacaat

SEQ ID NO: 190966 - DNA, 25 bp, Probe sequence
ccacaacaataacaggccgaagctt

SEQ ID NO: 190967 - DNA, 25 bp, Probe sequence
gcattaaccactgttgctttttttc

SEQ ID NO: 190968 - DNA, 25 bp, Probe sequence
gctttttttcctttgataatgacgt

SEQ ID NO: 190969 - DNA, 25 bp, Probe sequence
gcacttgtctcctttagtttgggtt

SEQ ID NO: 190970 - DNA, 25 bp, Probe sequence
gcaattgcgctttttgtgtattaaa

SEQ ID NO: 190971 - DNA, 25 bp, Probe sequence
gaagcttatacgttagtacagcatt

SEQ ID NO: 190972 - DNA, 25 bp, Probe sequence
gaggcaattgcgctttttgtgtatt

SEQ ID NO: 190973 - DNA, 25 bp, Probe sequence
gataatgacgtcaatttcttggttt

SEQ ID NO: 190974 - DNA, 25 bp, Probe sequence
gttgctttttttcctttgataatga

SEQ ID NO: 190975 - DNA, 25 bp, Probe sequence
gtatcattacacataggcgcacttg

SEQ ID NO: 190976 - DNA, 25 bp, Probe sequence
gtacagcattaaccactgttgcttt

SEQ ID NO: 190977 - DNA, 25 bp, Probe sequence
gtcaatttcttggtttatatatttt

SEQ ID NO: 190978 - DNA, 25 bp, Probe sequence
gtccttcatttttaactccacaaca

SEQ ID NO: 190979 - DNA, 25 bp, Probe sequence
ggtcactttaaattatagaggcaat

SEQ ID NO: 190980 - DNA, 25 bp, Probe sequence
ggccgaagcttatacgttagtacag

SEQ ID NO: 190981 - DNA, 25 bp, Probe sequence
tgggtttggtcactttaaattatag

SEQ ID NO: 190982 - DNA, 25 bp, Probe sequence
tcatcttttattcttagtaattcta

SEQ ID NO: 190983 - DNA, 25 bp, Probe sequence
tagaggcaattgcgctttttgtgta

SEQ ID NO: 190984 - DNA, 25 bp, Probe sequence
tttgtccttcatttttaactccaca

SEQ ID NO: 190985 - DNA, 25 bp, Probe sequence
ttttatattttcatcttttattctt

SEQ ID NO: 190986 - DNA, 25 bp, Probe sequence
ttacacataggcgcacttgtctcct

SEQ ID NO: 190987 - DNA, 25 bp, Probe sequence
ttaactccacaacaataacaggccg

SEQ ID NO: 190988 - DNA, 25 bp, Probe sequence
attgatgcacttactcattatggaa

SEQ ID NO: 190989 - DNA, 25 bp, Probe sequence
atgatttttggctatgctcgagtga

SEQ ID NO: 190990 - DNA, 25 bp, Probe sequence
agtttacaaattgatgcacttactc

SEQ ID NO: 190991 - DNA, 25 bp, Probe sequence
actaactctggtcttaaggcagcca

SEQ ID NO: 190992 - DNA, 25 bp, Probe sequence
aacgtagatacttcaacgtctatgg

SEQ ID NO: 190993 - DNA, 25 bp, Probe sequence
aagaccgaccgcaattagaagaaat

SEQ ID NO: 190994 - DNA, 25 bp, Probe sequence
aaggcagccagagtccgaggaaaaa

SEQ ID NO: 190995 - DNA, 25 bp, Probe sequence
caacgtctatgggaagattcttttt

SEQ ID NO: 190996 - DNA, 25 bp, Probe sequence
ctggtgcgaaaaaagaccgaccgca

SEQ ID NO: 190997 - DNA, 25 bp, Probe sequence
gcctctaaattaagcaaaacaacct

SEQ ID NO: 190998 - DNA, 25 bp, Probe sequence
gaatttcacgatcaactaaacattt

SEQ ID NO: 190999 - DNA, 25 bp, Probe sequence
gaaggagattctgttgtcatttaca

SEQ ID NO: 191000 - DNA, 25 bp, Probe sequence
gaagattctttttccgagttatggc

SEQ ID NO: 191001 - DNA, 25 bp, Probe sequence
gaagaacttagtgtcaattttatat

SEQ ID NO: 191002 - DNA, 25 bp, Probe sequence
gaagaaatgatcaacctactacgtg

SEQ ID NO: 191003 - DNA, 25 bp, Probe sequence
gacagcaaagagtattctattcgtc

SEQ ID NO: 191004 - DNA, 25 bp, Probe sequence
gagattctgttgtcatttacaagtt

SEQ ID NO: 191005 - DNA, 25 bp, Probe sequence
gagtattctattcgtcaaattcttg

SEQ ID NO: 191006 - DNA, 25 bp, Probe sequence
gatcaacctactacgtgaaggagat

SEQ ID NO: 191007 - DNA, 25 bp, Probe sequence
gattgaactttctgaattatttgaa

SEQ ID NO: 191008 - DNA, 25 bp, Probe sequence
ggccgtccaagtaaaggtaagctat

SEQ ID NO: 191009 - DNA, 25 bp, Probe sequence
gtaaaggtaagctatcaattgattt

SEQ ID NO: 191010 - DNA, 25 bp, Probe sequence
gtcaaattcttgatgcctctaaatt

SEQ ID NO: 191011 - DNA, 25 bp, Probe sequence
ggtcttaaggcagccagagtccgag

SEQ ID NO: 191012 - DNA, 25 bp, Probe sequence
gtgtcaattttatatctattcaaga

SEQ ID NO: 191013 - DNA, 25 bp, Probe sequence
ggatgatcaaaatcttagtttacaa

SEQ ID NO: 191014 - DNA, 25 bp, Probe sequence
ggaacgggatattattattgaacga

SEQ ID NO: 191015 - DNA, 25 bp, Probe sequence
ggctatgctcgagtgagtacggatg

SEQ ID NO: 191016 - DNA, 25 bp, Probe sequence
tgctcgagtgagtacggatgatcaa

SEQ ID NO: 191017 - DNA, 25 bp, Probe sequence
taaacatttgattgaactttctgaa

SEQ ID NO: 191018 - DNA, 25 bp, Probe sequence
tattgaacgaactaactctggtctt

SEQ ID NO: 191019 - DNA, 25 bp, Probe sequence
tttacaagttagatcgaatttcacg

SEQ ID NO: 191020 - DNA, 25 bp, Probe sequence
ttttccgagttatggctagtttagc

SEQ ID NO: 191021 - DNA, 25 bp, Probe sequence
ttagcagaactggaacgggatatta

SEQ ID NO: 191022 - DNA, 25 bp, Probe sequence
cttacaacaatgtgccggttggggt

SEQ ID NO: 191023 - DNA, 25 bp, Probe sequence
atagtcagcttacaacaatgtgccg

SEQ ID NO: 191024 - DNA, 25 bp, Probe sequence
atatagtcagcttacaacaatgtgc

SEQ ID NO: 191025 - DNA, 25 bp, Probe sequence
agggacccgtcatcaaaaattctat

SEQ ID NO: 191026 - DNA, 25 bp, Probe sequence
agcttacaacaatgtgccggttggg

SEQ ID NO: 191027 - DNA, 25 bp, Probe sequence
agtcagcttacaacaatgtgccggt

SEQ ID NO: 191028 - DNA, 25 bp, Probe sequence
caccctaggaagggacccgtcatca

SEQ ID NO: 191029 - DNA, 25 bp, Probe sequence
acatatagtcagcttacaacaatgt

SEQ ID NO: 191030 - DNA, 25 bp, Probe sequence
acacagaagctgacatatagtcagc

SEQ ID NO: 191031 - DNA, 25 bp, Probe sequence
acaacaatgtgccggttggggtggc

SEQ ID NO: 191032 - DNA, 25 bp, Probe sequence
acaatgtgccggttggggtggctga

SEQ ID NO: 191033 - DNA, 25 bp, Probe sequence
aacaatgtgccggttggggtggctg

SEQ ID NO: 191034 - DNA, 25 bp, Probe sequence
caatgtgccggttggggtggctgag

SEQ ID NO: 191035 - DNA, 25 bp, Probe sequence
caacaatgtgccggttggggtggct

SEQ ID NO: 191036 - DNA, 25 bp, Probe sequence
cagcttacaacaatgtgccggttgg

SEQ ID NO: 191037 - DNA, 25 bp, Probe sequence
catatagtcagcttacaacaatgtg

SEQ ID NO: 191038 - DNA, 25 bp, Probe sequence
gaagggacccgtcatcaaaaattct

SEQ ID NO: 191039 - DNA, 25 bp, Probe sequence
gcttacaacaatgtgccggttgggg

SEQ ID NO: 191040 - DNA, 25 bp, Probe sequence
gcaccctaggaagggacccgtcatc

SEQ ID NO: 191041 - DNA, 25 bp, Probe sequence
gacatatagtcagcttacaacaatg

SEQ ID NO: 191042 - DNA, 25 bp, Probe sequence
gtcagcttacaacaatgtgccggtt

SEQ ID NO: 191043 - DNA, 25 bp, Probe sequence
taggaagggacccgtcatcaaaaat

SEQ ID NO: 191044 - DNA, 25 bp, Probe sequence
tgacatatagtcagcttacaacaat

SEQ ID NO: 191045 - DNA, 25 bp, Probe sequence
tcagcttacaacaatgtgccggttg

SEQ ID NO: 191046 - DNA, 25 bp, Probe sequence
tacaacaatgtgccggttggggtgg

SEQ ID NO: 191047 - DNA, 25 bp, Probe sequence
tagtcagcttacaacaatgtgccgg

SEQ ID NO: 191048 - DNA, 25 bp, Probe sequence
tatagtcagcttacaacaatgtgcc

SEQ ID NO: 191049 - DNA, 25 bp, Probe sequence
ttacaacaatgtgccggttggggtg

SEQ ID NO: 191050 - DNA, 25 bp, Probe sequence
ttctatttatagaattttacagtaa

SEQ ID NO: 191051 - DNA, 25 bp, Probe sequence
attttctgttataaccgttgtcaat

SEQ ID NO: 191052 - DNA, 25 bp, Probe sequence
aggtcaatttgtgttcgggagaaag

SEQ ID NO: 191053 - DNA, 25 bp, Probe sequence
aggatcatacacagcttgttggcag

SEQ ID NO: 191054 - DNA, 25 bp, Probe sequence
agcgagcaagcgaagagttacgtct

SEQ ID NO: 191055 - DNA, 25 bp, Probe sequence
acgtctcaaagaatccacagtaaga

SEQ ID NO: 191056 - DNA, 25 bp, Probe sequence
actatcgtcgtaaagtccgacaaca

SEQ ID NO: 191057 - DNA, 25 bp, Probe sequence
acacagcttgttggcagacgagttg

SEQ ID NO: 191058 - DNA, 25 bp, Probe sequence
aagaatccacagtaagagactacat

SEQ ID NO: 191059 - DNA, 25 bp, Probe sequence
cagcttgttggcagacgagttgttg

SEQ ID NO: 191060 - DNA, 25 bp, Probe sequence
cttggaactatcgtcgtaaagtccg

SEQ ID NO: 191061 - DNA, 25 bp, Probe sequence
gcttgttggcagacgagttgttgaa

SEQ ID NO: 191062 - DNA, 25 bp, Probe sequence
gcaagcgaagagttacgtctcaaag

SEQ ID NO: 191063 - DNA, 25 bp, Probe sequence
gaaggctagtcataaggatcataca

SEQ ID NO: 191064 - DNA, 25 bp, Probe sequence
gagcaagcgaagagttacgtctcaa

SEQ ID NO: 191065 - DNA, 25 bp, Probe sequence
gagttacgtctcaaagaatccacag

SEQ ID NO: 191066 - DNA, 25 bp, Probe sequence
gatcatacacagcttgttggcagac

SEQ ID NO: 191067 - DNA, 25 bp, Probe sequence
gttggcagacgagttgttgaattag

SEQ ID NO: 191068 - DNA, 25 bp, Probe sequence
gttacgtctcaaagaatccacagta

SEQ ID NO: 191069 - DNA, 25 bp, Probe sequence
gttataaccgttgtcaattgggcga

SEQ ID NO: 191070 - DNA, 25 bp, Probe sequence
gtaaagtccgacaacaaattttctg

SEQ ID NO: 191071 - DNA, 25 bp, Probe sequence
gtaagagactacataaagcttttag

SEQ ID NO: 191072 - DNA, 25 bp, Probe sequence
gtcataaggatcatacacagcttgt

SEQ ID NO: 191073 - DNA, 25 bp, Probe sequence
gtccgacaacaaattttctgttata

SEQ ID NO: 191074 - DNA, 25 bp, Probe sequence
gtgttcgggagaaagcgagcaagcg

SEQ ID NO: 191075 - DNA, 25 bp, Probe sequence
ggaactatcgtcgtaaagtccgaca

SEQ ID NO: 191076 - DNA, 25 bp, Probe sequence
ggcagacgagttgttgaattagaaa

SEQ ID NO: 191077 - DNA, 25 bp, Probe sequence
ggctagtcataaggatcatacacag

SEQ ID NO: 191078 - DNA, 25 bp, Probe sequence
tcatacacagcttgttggcagacga

SEQ ID NO: 191079 - DNA, 25 bp, Probe sequence
taaggatcatacacagcttgttggc

SEQ ID NO: 191080 - DNA, 25 bp, Probe sequence
tagaaaaccttggaactatcgtcgt

SEQ ID NO: 191081 - DNA, 25 bp, Probe sequence
tacataaagcttttagaaaaccttg

SEQ ID NO: 191082 - DNA, 25 bp, Probe sequence
tacacagcttgttggcagacgagtt

SEQ ID NO: 191083 - DNA, 25 bp, Probe sequence
tagaaaaaggtcaatttgtgttcgg

SEQ ID NO: 191084 - DNA, 25 bp, Probe sequence
tttctgttataaccgttgtcaattg

SEQ ID NO: 191085 - DNA, 25 bp, Probe sequence
ataaacgcagtcttagaccccgttg

SEQ ID NO: 191086 - DNA, 25 bp, Probe sequence
gataaacgcagtcttagaccccgtt

SEQ ID NO: 191087 - DNA, 25 bp, Probe sequence
atagcaaaataccacatgcaaggac

SEQ ID NO: 191088 - DNA, 25 bp, Probe sequence
ataccacatgcaaggaccttgaata

SEQ ID NO: 191089 - DNA, 25 bp, Probe sequence
atgataaacgcagtcttagaccccg

SEQ ID NO: 191090 - DNA, 25 bp, Probe sequence
atggctaagacgattaatatgataa

SEQ ID NO: 191091 - DNA, 25 bp, Probe sequence
agaccatagcaaaataccacatgca

SEQ ID NO: 191092 - DNA, 25 bp, Probe sequence
agcaaaataccacatgcaaggacct

SEQ ID NO: 191093 - DNA, 25 bp, Probe sequence
accacatgcaaggaccttgaatatg

SEQ ID NO: 191094 - DNA, 25 bp, Probe sequence
accatagcaaaataccacatgcaag

SEQ ID NO: 191095 - DNA, 25 bp, Probe sequence
aaataccacatgcaaggaccttgaa

SEQ ID NO: 191096 - DNA, 25 bp, Probe sequence
aaagaccatagcaaaataccacatg

SEQ ID NO: 191097 - DNA, 25 bp, Probe sequence
aaaataccacatgcaaggaccttga

SEQ ID NO: 191098 - DNA, 25 bp, Probe sequence
aagaccatagcaaaataccacatgc

SEQ ID NO: 191099 - DNA, 25 bp, Probe sequence
aataccacatgcaaggaccttgaat

SEQ ID NO: 191100 - DNA, 25 bp, Probe sequence
caaaataccacatgcaaggaccttg

SEQ ID NO: 191101 - DNA, 25 bp, Probe sequence
catagcaaaataccacatgcaagga

SEQ ID NO: 191102 - DNA, 25 bp, Probe sequence
cgttgtagttaaagaccatagcaaa

SEQ ID NO: 191103 - DNA, 25 bp, Probe sequence
cccgttgtagttaaagaccatagca

SEQ ID NO: 191104 - DNA, 25 bp, Probe sequence
ccgttgtagttaaagaccatagcaa

SEQ ID NO: 191105 - DNA, 25 bp, Probe sequence
ccatagcaaaataccacatgcaagg

SEQ ID NO: 191106 - DNA, 25 bp, Probe sequence
gcaaaataccacatgcaaggacctt

SEQ ID NO: 191107 - DNA, 25 bp, Probe sequence
gaccatagcaaaataccacatgcaa

SEQ ID NO: 191108 - DNA, 25 bp, Probe sequence
gttgtagttaaagaccatagcaaaa

SEQ ID NO: 191109 - DNA, 25 bp, Probe sequence
gttaaagaccatagcaaaataccac

SEQ ID NO: 191110 - DNA, 25 bp, Probe sequence
ggctaagacgattaatatgataaac

SEQ ID NO: 191111 - DNA, 25 bp, Probe sequence
tgataaacgcagtcttagaccccgt

SEQ ID NO: 191112 - DNA, 25 bp, Probe sequence
tgtagttaaagaccatagcaaaata

SEQ ID NO: 191113 - DNA, 25 bp, Probe sequence
taaagaccatagcaaaataccacat

SEQ ID NO: 191114 - DNA, 25 bp, Probe sequence
taaacgcagtcttagaccccgttgt

SEQ ID NO: 191115 - DNA, 25 bp, Probe sequence
tagcaaaataccacatgcaaggacc

SEQ ID NO: 191116 - DNA, 25 bp, Probe sequence
taccacatgcaaggaccttgaatat

SEQ ID NO: 191117 - DNA, 25 bp, Probe sequence
tatgataaacgcagtcttagacccc

SEQ ID NO: 191118 - DNA, 25 bp, Probe sequence
ttaaagaccatagcaaaataccaca

SEQ ID NO: 191119 - DNA, 25 bp, Probe sequence
attagcactatatgactatatatta

SEQ ID NO: 191120 - DNA, 25 bp, Probe sequence
atatgactatatattattccaaatg

SEQ ID NO: 191121 - DNA, 25 bp, Probe sequence
ataatgcctcaaaaaaattagcact

SEQ ID NO: 191122 - DNA, 25 bp, Probe sequence
atcttgcatataatgcctcaaaaaa

SEQ ID NO: 191123 - DNA, 25 bp, Probe sequence
atgcctcaaaaaaattagcactata

SEQ ID NO: 191124 - DNA, 25 bp, Probe sequence
atgcatcttgcatataatgcctcaa

SEQ ID NO: 191125 - DNA, 25 bp, Probe sequence
atgactatatattattccaaatgag

SEQ ID NO: 191126 - DNA, 25 bp, Probe sequence
agcactatatgactatatattattc

SEQ ID NO: 191127 - DNA, 25 bp, Probe sequence
actatatgactatatattattccaa

SEQ ID NO: 191128 - DNA, 25 bp, Probe sequence
actatatattattccaaatgagtga

SEQ ID NO: 191129 - DNA, 25 bp, Probe sequence
aaattagcactatatgactatatat

SEQ ID NO: 191130 - DNA, 25 bp, Probe sequence
aaaaattagcactatatgactatat

SEQ ID NO: 191131 - DNA, 25 bp, Probe sequence
aaaattagcactatatgactatata

SEQ ID NO: 191132 - DNA, 25 bp, Probe sequence
aatgcctcaaaaaaattagcactat

SEQ ID NO: 191133 - DNA, 25 bp, Probe sequence
aattagcactatatgactatatatt

SEQ ID NO: 191134 - DNA, 25 bp, Probe sequence
cactatatgactatatattattcca

SEQ ID NO: 191135 - DNA, 25 bp, Probe sequence
catcttgcatataatgcctcaaaaa

SEQ ID NO: 191136 - DNA, 25 bp, Probe sequence
ctatatattattccaaatgagtgaa

SEQ ID NO: 191137 - DNA, 25 bp, Probe sequence
gcctcaaaaaaattagcactatatg

SEQ ID NO: 191138 - DNA, 25 bp, Probe sequence
gcatcttgcatataatgcctcaaaa

SEQ ID NO: 191139 - DNA, 25 bp, Probe sequence
gcactatatgactatatattattcc

SEQ ID NO: 191140 - DNA, 25 bp, Probe sequence
gactatatattattccaaatgagtg

SEQ ID NO: 191141 - DNA, 25 bp, Probe sequence
tgactatatattattccaaatgagt

SEQ ID NO: 191142 - DNA, 25 bp, Probe sequence
tgcatcttgcatataatgcctcaaa

SEQ ID NO: 191143 - DNA, 25 bp, Probe sequence
tccaaatgagtgaaatttatcaaca

SEQ ID NO: 191144 - DNA, 25 bp, Probe sequence
tcttgcatataatgcctcaaaaaaa

SEQ ID NO: 191145 - DNA, 25 bp, Probe sequence
taatgcctcaaaaaaattagcacta

SEQ ID NO: 191146 - DNA, 25 bp, Probe sequence
tatgactatatattattccaaatga

SEQ ID NO: 191147 - DNA, 25 bp, Probe sequence
tatatgactatatattattccaaat

SEQ ID NO: 191148 - DNA, 25 bp, Probe sequence
tatatattattccaaatgagtgaaa

SEQ ID NO: 191149 - DNA, 25 bp, Probe sequence
tatattattccaaatgagtgaaatt

SEQ ID NO: 191150 - DNA, 25 bp, Probe sequence
tattccaaatgagtgaaatttatca

SEQ ID NO: 191151 - DNA, 25 bp, Probe sequence
ttagcactatatgactatatattat

SEQ ID NO: 191152 - DNA, 25 bp, Probe sequence
ttgcatataatgcctcaaaaaaatt

SEQ ID NO: 191153 - DNA, 25 bp, Probe sequence
attcagttggaacaggctgggacat

SEQ ID NO: 191154 - DNA, 25 bp, Probe sequence
ataaatcaatgttctatgctctacg

SEQ ID NO: 191155 - DNA, 25 bp, Probe sequence
ataacgattggattgattattttat

SEQ ID NO: 191156 - DNA, 25 bp, Probe sequence
atcaatgttctatgctctacgaagt

SEQ ID NO: 191157 - DNA, 25 bp, Probe sequence
atgctctacgaagttatattggcag

SEQ ID NO: 191158 - DNA, 25 bp, Probe sequence
atgacaattcagttggaacaggctg

SEQ ID NO: 191159 - DNA, 25 bp, Probe sequence
atgttctatgctctacgaagttata

SEQ ID NO: 191160 - DNA, 25 bp, Probe sequence
atgtgttttcacatttatgaattag

SEQ ID NO: 191161 - DNA, 25 bp, Probe sequence
acataaatcaatgttctatgctcta

SEQ ID NO: 191162 - DNA, 25 bp, Probe sequence
acaattcagttggaacaggctggga

SEQ ID NO: 191163 - DNA, 25 bp, Probe sequence
aaatgacaattcagttggaacaggc

SEQ ID NO: 191164 - DNA, 25 bp, Probe sequence
aaatcaatgttctatgctctacgaa

SEQ ID NO: 191165 - DNA, 25 bp, Probe sequence
aatgttctatgctctacgaagttat

SEQ ID NO: 191166 - DNA, 25 bp, Probe sequence
aatgacaattcagttggaacaggct

SEQ ID NO: 191167 - DNA, 25 bp, Probe sequence
aatcaatgttctatgctctacgaag

SEQ ID NO: 191168 - DNA, 25 bp, Probe sequence
aattcagttggaacaggctgggaca

SEQ ID NO: 191169 - DNA, 25 bp, Probe sequence
caattcagttggaacaggctgggac

SEQ ID NO: 191170 - DNA, 25 bp, Probe sequence
caatgttctatgctctacgaagtta

SEQ ID NO: 191171 - DNA, 25 bp, Probe sequence
cataaatcaatgttctatgctctac

SEQ ID NO: 191172 - DNA, 25 bp, Probe sequence
ctatgctctacgaagttatattggc

SEQ ID NO: 191173 - DNA, 25 bp, Probe sequence
gaattagataacgattggattgatt

SEQ ID NO: 191174 - DNA, 25 bp, Probe sequence
gacaattcagttggaacaggctggg

SEQ ID NO: 191175 - DNA, 25 bp, Probe sequence
gacataaatcaatgttctatgctct

SEQ ID NO: 191176 - DNA, 25 bp, Probe sequence
gataacgattggattgattatttta

SEQ ID NO: 191177 - DNA, 25 bp, Probe sequence
gttctatgctctacgaagttatatt

SEQ ID NO: 191178 - DNA, 25 bp, Probe sequence
gtgttttcacatttatgaattagat

SEQ ID NO: 191179 - DNA, 25 bp, Probe sequence
tgttctatgctctacgaagttatat

SEQ ID NO: 191180 - DNA, 25 bp, Probe sequence
tgacaattcagttggaacaggctgg

SEQ ID NO: 191181 - DNA, 25 bp, Probe sequence
tctatgctctacgaagttatattgg

SEQ ID NO: 191182 - DNA, 25 bp, Probe sequence
tcaatgttctatgctctacgaagtt

SEQ ID NO: 191183 - DNA, 25 bp, Probe sequence
taaatcaatgttctatgctctacga

SEQ ID NO: 191184 - DNA, 25 bp, Probe sequence
tacaaaatgacaattcagttggaac

SEQ ID NO: 191185 - DNA, 25 bp, Probe sequence
tatgctctacgaagttatattggca

SEQ ID NO: 191186 - DNA, 25 bp, Probe sequence
ttctatgctctacgaagttatattg

SEQ ID NO: 191187 - DNA, 25 bp, Probe sequence
atcaatactgcaatactcacaatgc

SEQ ID NO: 191188 - DNA, 25 bp, Probe sequence
atgacttatcgtcgcaatgacctta

SEQ ID NO: 191189 - DNA, 25 bp, Probe sequence
atgttcatcgttaaattcaccagtc

SEQ ID NO: 191190 - DNA, 25 bp, Probe sequence
agtcgaaatgacttatcgtcgcaat

SEQ ID NO: 191191 - DNA, 25 bp, Probe sequence
accagtcgaaatgacttatcgtcgc

SEQ ID NO: 191192 - DNA, 25 bp, Probe sequence
accttatacgaatcaatactgcaat

SEQ ID NO: 191193 - DNA, 25 bp, Probe sequence
actgcaatactcacaatgcaacaac

SEQ ID NO: 191194 - DNA, 25 bp, Probe sequence
aatgacttatcgtcgcaatgacctt

SEQ ID NO: 191195 - DNA, 25 bp, Probe sequence
aatgcaacaacatcacaatagccaa

SEQ ID NO: 191196 - DNA, 25 bp, Probe sequence
aatactcacaatgcaacaacatcac

SEQ ID NO: 191197 - DNA, 25 bp, Probe sequence
aatactgcaatactcacaatgcaac

SEQ ID NO: 191198 - DNA, 25 bp, Probe sequence
aattcaccagtcgaaatgacttatc

SEQ ID NO: 191199 - DNA, 25 bp, Probe sequence
catcgttaaattcaccagtcgaaat

SEQ ID NO: 191200 - DNA, 25 bp, Probe sequence
cagtatgttcatcgttaaattcacc

SEQ ID NO: 191201 - DNA, 25 bp, Probe sequence
cttatcgtcgcaatgaccttatacg

SEQ ID NO: 191202 - DNA, 25 bp, Probe sequence
ctcacaatgcaacaacatcacaata

SEQ ID NO: 191203 - DNA, 25 bp, Probe sequence
gcaatactcacaatgcaacaacatc

SEQ ID NO: 191204 - DNA, 25 bp, Probe sequence
gcaatgaccttatacgaatcaatac

SEQ ID NO: 191205 - DNA, 25 bp, Probe sequence
gaatcaatactgcaatactcacaat

SEQ ID NO: 191206 - DNA, 25 bp, Probe sequence
gaaatgacttatcgtcgcaatgacc

SEQ ID NO: 191207 - DNA, 25 bp, Probe sequence
gacttatcgtcgcaatgaccttata

SEQ ID NO: 191208 - DNA, 25 bp, Probe sequence
gagttcagtatgttcatcgttaaat

SEQ ID NO: 191209 - DNA, 25 bp, Probe sequence
gttaaattcaccagtcgaaatgact

SEQ ID NO: 191210 - DNA, 25 bp, Probe sequence
gtatgttcatcgttaaattcaccag

SEQ ID NO: 191211 - DNA, 25 bp, Probe sequence
gtcgcaatgaccttatacgaatcaa

SEQ ID NO: 191212 - DNA, 25 bp, Probe sequence
gtcgaaatgacttatcgtcgcaatg

SEQ ID NO: 191213 - DNA, 25 bp, Probe sequence
tgttcatcgttaaattcaccagtcg

SEQ ID NO: 191214 - DNA, 25 bp, Probe sequence
tgaccttatacgaatcaatactgca

SEQ ID NO: 191215 - DNA, 25 bp, Probe sequence
tcgtcgcaatgaccttatacgaatc

SEQ ID NO: 191216 - DNA, 25 bp, Probe sequence
tactcacaatgcaacaacatcacaa

SEQ ID NO: 191217 - DNA, 25 bp, Probe sequence
tacgaatcaatactgcaatactcac

SEQ ID NO: 191218 - DNA, 25 bp, Probe sequence
tatcgtcgcaatgaccttatacgaa

SEQ ID NO: 191219 - DNA, 25 bp, Probe sequence
ttcatcgttaaattcaccagtcgaa

SEQ ID NO: 191220 - DNA, 25 bp, Probe sequence
ttgagttcagtatgttcatcgttaa

SEQ ID NO: 191221 - DNA, 25 bp, Probe sequence
atatgccgtatttgaattattcact

SEQ ID NO: 191222 - DNA, 25 bp, Probe sequence
atactaggtgacatcattgattgta

SEQ ID NO: 191223 - DNA, 25 bp, Probe sequence
agaaccgtgccactatatgccgtat

SEQ ID NO: 191224 - DNA, 25 bp, Probe sequence
acatcggctattttcatggattcaa

SEQ ID NO: 191225 - DNA, 25 bp, Probe sequence
aaattcagcgaattacacgctttat

SEQ ID NO: 191226 - DNA, 25 bp, Probe sequence
aaatgctatagctcacaatggtgta

SEQ ID NO: 191227 - DNA, 25 bp, Probe sequence
aaactctggctttgatttagatagt

SEQ ID NO: 191228 - DNA, 25 bp, Probe sequence
aaaccagttacgaaacatcggctat

SEQ ID NO: 191229 - DNA, 25 bp, Probe sequence
aaaccttacatttatcattacatac

SEQ ID NO: 191230 - DNA, 25 bp, Probe sequence
aatggtgtactttatgactgtagat

SEQ ID NO: 191231 - DNA, 25 bp, Probe sequence
aatctggtatttttcactcgttgca

SEQ ID NO: 191232 - DNA, 25 bp, Probe sequence
aattctaatttgttctggtctctct

SEQ ID NO: 191233 - DNA, 25 bp, Probe sequence
caactaaaattatactccccagcat

SEQ ID NO: 191234 - DNA, 25 bp, Probe sequence
cgtgccactatatgccgtatttgaa

SEQ ID NO: 191235 - DNA, 25 bp, Probe sequence
cgatcaaagataagcgagtcgactt

SEQ ID NO: 191236 - DNA, 25 bp, Probe sequence
gaattattcactttaggaaatctgg

SEQ ID NO: 191237 - DNA, 25 bp, Probe sequence
gaaaaacacctaaaactactgatgg

SEQ ID NO: 191238 - DNA, 25 bp, Probe sequence
gacatgatccatgaacattgtaatt

SEQ ID NO: 191239 - DNA, 25 bp, Probe sequence
gagatatttacgacatgatccatga

SEQ ID NO: 191240 - DNA, 25 bp, Probe sequence
gattatctcattttattaattctaa

SEQ ID NO: 191241 - DNA, 25 bp, Probe sequence
gttatgttctgtgaaacggctatta

SEQ ID NO: 191242 - DNA, 25 bp, Probe sequence
gtttgtgtaaactctggctttgatt

SEQ ID NO: 191243 - DNA, 25 bp, Probe sequence
ggatatacacaatttagatttcgac

SEQ ID NO: 191244 - DNA, 25 bp, Probe sequence
ggcaattcgaacaaaaccttgattt

SEQ ID NO: 191245 - DNA, 25 bp, Probe sequence
ggcgttcgagcaagacctaaattaa

SEQ ID NO: 191246 - DNA, 25 bp, Probe sequence
tggtctctcttattctaaagcagaa

SEQ ID NO: 191247 - DNA, 25 bp, Probe sequence
tgataaaattataggcgttcgagca

SEQ ID NO: 191248 - DNA, 25 bp, Probe sequence
tgttctggtctctcttattctaaag

SEQ ID NO: 191249 - DNA, 25 bp, Probe sequence
tcaataaccttgatttttatctaaa

SEQ ID NO: 191250 - DNA, 25 bp, Probe sequence
tacatcaagatagaaccgtgccact

SEQ ID NO: 191251 - DNA, 25 bp, Probe sequence
tacacgctttatacagttttgatac

SEQ ID NO: 191252 - DNA, 25 bp, Probe sequence
tttcactcgttgcatgtcccaaaat

SEQ ID NO: 191253 - DNA, 25 bp, Probe sequence
ttatagtcccggtagttcaaaatat

SEQ ID NO: 191254 - DNA, 25 bp, Probe sequence
ttatactccccagcatttgatcaaa

SEQ ID NO: 191255 - DNA, 25 bp, Probe sequence
atataaagaaccaacttccaacgat

SEQ ID NO: 191256 - DNA, 25 bp, Probe sequence
atatatggcagcaacaaaattgatt

SEQ ID NO: 191257 - DNA, 25 bp, Probe sequence
ataaagaaccaacttccaacgatat

SEQ ID NO: 191258 - DNA, 25 bp, Probe sequence
atggcagcaacaaaattgattgtga

SEQ ID NO: 191259 - DNA, 25 bp, Probe sequence
agattctaatttatctgattatata

SEQ ID NO: 191260 - DNA, 25 bp, Probe sequence
agaaccaacttccaacgatatggag

SEQ ID NO: 191261 - DNA, 25 bp, Probe sequence
agacacattacttgaagattctaat

SEQ ID NO: 191262 - DNA, 25 bp, Probe sequence
accaacttccaacgatatggagaga

SEQ ID NO: 191263 - DNA, 25 bp, Probe sequence
acttcaaatattagagttgatttag

SEQ ID NO: 191264 - DNA, 25 bp, Probe sequence
acttgaagattctaatttatctgat

SEQ ID NO: 191265 - DNA, 25 bp, Probe sequence
acacattacttgaagattctaattt

SEQ ID NO: 191266 - DNA, 25 bp, Probe sequence
aaattgattgtgaaactatttatga

SEQ ID NO: 191267 - DNA, 25 bp, Probe sequence
aaagaaccaacttccaacgatatgg

SEQ ID NO: 191268 - DNA, 25 bp, Probe sequence
aaagacacattacttgaagattcta

SEQ ID NO: 191269 - DNA, 25 bp, Probe sequence
aaccaacttccaacgatatggagag

SEQ ID NO: 191270 - DNA, 25 bp, Probe sequence
aagaaccaacttccaacgatatgga

SEQ ID NO: 191271 - DNA, 25 bp, Probe sequence
aagacacattacttgaagattctaa

SEQ ID NO: 191272 - DNA, 25 bp, Probe sequence
aattttctaacttcaaatattagag

SEQ ID NO: 191273 - DNA, 25 bp, Probe sequence
cattacttgaagattctaatttatc

SEQ ID NO: 191274 - DNA, 25 bp, Probe sequence
ccaacttccaacgatatggagagac

SEQ ID NO: 191275 - DNA, 25 bp, Probe sequence
gcagcaacaaaattgattgtgaaac

SEQ ID NO: 191276 - DNA, 25 bp, Probe sequence
gaagattctaatttatctgattata

SEQ ID NO: 191277 - DNA, 25 bp, Probe sequence
gaaccaacttccaacgatatggaga

SEQ ID NO: 191278 - DNA, 25 bp, Probe sequence
gaactttttaaagacacattacttg

SEQ ID NO: 191279 - DNA, 25 bp, Probe sequence
gaaactgaactttttaaagacacat

SEQ ID NO: 191280 - DNA, 25 bp, Probe sequence
gacacattacttgaagattctaatt

SEQ ID NO: 191281 - DNA, 25 bp, Probe sequence
gattatataaagaaccaacttccaa

SEQ ID NO: 191282 - DNA, 25 bp, Probe sequence
gtatatatatggcagcaacaaaatt

SEQ ID NO: 191283 - DNA, 25 bp, Probe sequence
gtgtatatatatggcagcaacaaaa

SEQ ID NO: 191284 - DNA, 25 bp, Probe sequence
taaagacacattacttgaagattct

SEQ ID NO: 191285 - DNA, 25 bp, Probe sequence
taaagaaccaacttccaacgatatg

SEQ ID NO: 191286 - DNA, 25 bp, Probe sequence
tataaagaaccaacttccaacgata

SEQ ID NO: 191287 - DNA, 25 bp, Probe sequence
tatataaagaaccaacttccaacga

SEQ ID NO: 191288 - DNA, 25 bp, Probe sequence
ttatataaagaaccaacttccaacg

SEQ ID NO: 191289 - DNA, 25 bp, Probe sequence
attcaaaggtacgggtgtcaatgca

SEQ ID NO: 191290 - DNA, 25 bp, Probe sequence
atttaacacagttcttattcaaagg

SEQ ID NO: 191291 - DNA, 25 bp, Probe sequence
atgcacattttatcgttaagccgct

SEQ ID NO: 191292 - DNA, 25 bp, Probe sequence
aggtacgggtgtcaatgcacatttt

SEQ ID NO: 191293 - DNA, 25 bp, Probe sequence
acgggtgtcaatgcacattttatcg

SEQ ID NO: 191294 - DNA, 25 bp, Probe sequence
cagttcttattcaaaggtacgggtg

SEQ ID NO: 191295 - DNA, 25 bp, Probe sequence
acacagttcttattcaaaggtacgg

SEQ ID NO: 191296 - DNA, 25 bp, Probe sequence
aaaggtacgggtgtcaatgcacatt

SEQ ID NO: 191297 - DNA, 25 bp, Probe sequence
aacacagttcttattcaaaggtacg

SEQ ID NO: 191298 - DNA, 25 bp, Probe sequence
aaggtacgggtgtcaatgcacattt

SEQ ID NO: 191299 - DNA, 25 bp, Probe sequence
aatgcacattttatcgttaagccgc

SEQ ID NO: 191300 - DNA, 25 bp, Probe sequence
caatgcacattttatcgttaagccg

SEQ ID NO: 191301 - DNA, 25 bp, Probe sequence
caaaggtacgggtgtcaatgcacat

SEQ ID NO: 191302 - DNA, 25 bp, Probe sequence
cacattttatcgttaagccgctttt

SEQ ID NO: 191303 - DNA, 25 bp, Probe sequence
cacagttcttattcaaaggtacggg

SEQ ID NO: 191304 - DNA, 25 bp, Probe sequence
cttattcaaaggtacgggtgtcaat

SEQ ID NO: 191305 - DNA, 25 bp, Probe sequence
cgggtgtcaatgcacattttatcgt

SEQ ID NO: 191306 - DNA, 25 bp, Probe sequence
gcacattttatcgttaagccgcttt

SEQ ID NO: 191307 - DNA, 25 bp, Probe sequence
gtacgggtgtcaatgcacattttat

SEQ ID NO: 191308 - DNA, 25 bp, Probe sequence
gtcaatgcacattttatcgttaagc

SEQ ID NO: 191309 - DNA, 25 bp, Probe sequence
gtgtcaatgcacattttatcgttaa

SEQ ID NO: 191310 - DNA, 25 bp, Probe sequence
gggtgtcaatgcacattttatcgtt

SEQ ID NO: 191311 - DNA, 25 bp, Probe sequence
ggtgtcaatgcacattttatcgtta

SEQ ID NO: 191312 - DNA, 25 bp, Probe sequence
ggtacgggtgtcaatgcacatttta

SEQ ID NO: 191313 - DNA, 25 bp, Probe sequence
tgcacattttatcgttaagccgctt

SEQ ID NO: 191314 - DNA, 25 bp, Probe sequence
tcttattcaaaggtacgggtgtcaa

SEQ ID NO: 191315 - DNA, 25 bp, Probe sequence
tcaaaggtacgggtgtcaatgcaca

SEQ ID NO: 191316 - DNA, 25 bp, Probe sequence
tcaatgcacattttatcgttaagcc

SEQ ID NO: 191317 - DNA, 25 bp, Probe sequence
tacgggtgtcaatgcacattttatc

SEQ ID NO: 191318 - DNA, 25 bp, Probe sequence
tattcaaaggtacgggtgtcaatgc

SEQ ID NO: 191319 - DNA, 25 bp, Probe sequence
tatttaacacagttcttattcaaag

SEQ ID NO: 191320 - DNA, 25 bp, Probe sequence
ttcaaaggtacgggtgtcaatgcac

SEQ ID NO: 191321 - DNA, 25 bp, Probe sequence
ttttaattttttatactatcatctt

SEQ ID NO: 191322 - DNA, 25 bp, Probe sequence
ttaacacagttcttattcaaaggta

SEQ ID NO: 191323 - DNA, 25 bp, Probe sequence
attaaagccattgcaaattcaatta

SEQ ID NO: 191324 - DNA, 25 bp, Probe sequence
attacatgtacttttgaatcagaaa

SEQ ID NO: 191325 - DNA, 25 bp, Probe sequence
agaacgacaacattaaagccattgc

SEQ ID NO: 191326 - DNA, 25 bp, Probe sequence
agcctttaaattacatgtacttttg

SEQ ID NO: 191327 - DNA, 25 bp, Probe sequence
acgacaacattaaagccattgcaaa

SEQ ID NO: 191328 - DNA, 25 bp, Probe sequence
acattaaagccattgcaaattcaat

SEQ ID NO: 191329 - DNA, 25 bp, Probe sequence
acaacattaaagccattgcaaattc

SEQ ID NO: 191330 - DNA, 25 bp, Probe sequence
aaattacatgtacttttgaatcaga

SEQ ID NO: 191331 - DNA, 25 bp, Probe sequence
aaatcatttaagaacgacaacatta

SEQ ID NO: 191332 - DNA, 25 bp, Probe sequence
aaagccattgcaaattcaattagaa

SEQ ID NO: 191333 - DNA, 25 bp, Probe sequence
aaaaatcatttaagaacgacaacat

SEQ ID NO: 191334 - DNA, 25 bp, Probe sequence
aacattaaagccattgcaaattcaa

SEQ ID NO: 191335 - DNA, 25 bp, Probe sequence
aacgacaacattaaagccattgcaa

SEQ ID NO: 191336 - DNA, 25 bp, Probe sequence
aagccattgcaaattcaattagaaa

SEQ ID NO: 191337 - DNA, 25 bp, Probe sequence
aagaacgacaacattaaagccattg

SEQ ID NO: 191338 - DNA, 25 bp, Probe sequence
aattacatgtacttttgaatcagaa

SEQ ID NO: 191339 - DNA, 25 bp, Probe sequence
caacattaaagccattgcaaattca

SEQ ID NO: 191340 - DNA, 25 bp, Probe sequence
catgtacttttgaatcagaaattga

SEQ ID NO: 191341 - DNA, 25 bp, Probe sequence
cgacaacattaaagccattgcaaat

SEQ ID NO: 191342 - DNA, 25 bp, Probe sequence
gcctttaaattacatgtacttttga

SEQ ID NO: 191343 - DNA, 25 bp, Probe sequence
gccattgcaaattcaattagaaata

SEQ ID NO: 191344 - DNA, 25 bp, Probe sequence
gaacgacaacattaaagccattgca

SEQ ID NO: 191345 - DNA, 25 bp, Probe sequence
gacaacattaaagccattgcaaatt

SEQ ID NO: 191346 - DNA, 25 bp, Probe sequence
gttagcctttaaattacatgtactt

SEQ ID NO: 191347 - DNA, 25 bp, Probe sequence
tgtacttttgaatcagaaattgaaa

SEQ ID NO: 191348 - DNA, 25 bp, Probe sequence
tgttagcctttaaattacatgtact

SEQ ID NO: 191349 - DNA, 25 bp, Probe sequence
taagaacgacaacattaaagccatt

SEQ ID NO: 191350 - DNA, 25 bp, Probe sequence
taaagccattgcaaattcaattaga

SEQ ID NO: 191351 - DNA, 25 bp, Probe sequence
tacatgtacttttgaatcagaaatt

SEQ ID NO: 191352 - DNA, 25 bp, Probe sequence
tagcctttaaattacatgtactttt

SEQ ID NO: 191353 - DNA, 25 bp, Probe sequence
ttagcctttaaattacatgtacttt

SEQ ID NO: 191354 - DNA, 25 bp, Probe sequence
ttaaattacatgtacttttgaatca

SEQ ID NO: 191355 - DNA, 25 bp, Probe sequence
ttacatgtacttttgaatcagaaat

SEQ ID NO: 191356 - DNA, 25 bp, Probe sequence
ttgttagcctttaaattacatgtac

SEQ ID NO: 191357 - DNA, 25 bp, Probe sequence
atatgacggaatgcaagaacagctc

SEQ ID NO: 191358 - DNA, 25 bp, Probe sequence
atgagtgattttaagctaaatgaca

SEQ ID NO: 191359 - DNA, 25 bp, Probe sequence
agctaaatgacaaagaactcaccga

SEQ ID NO: 191360 - DNA, 25 bp, Probe sequence
agctcaaaacacttcatcaaaacca

SEQ ID NO: 191361 - DNA, 25 bp, Probe sequence
accataagttattcgttgtttctag

SEQ ID NO: 191362 - DNA, 25 bp, Probe sequence
accgaactaatgacattgtttagag

SEQ ID NO: 191363 - DNA, 25 bp, Probe sequence
actcaccgaactaatgacattgttt

SEQ ID NO: 191364 - DNA, 25 bp, Probe sequence
acagctcaaaacacttcatcaaaac

SEQ ID NO: 191365 - DNA, 25 bp, Probe sequence
aaatgacaaagaactcaccgaacta

SEQ ID NO: 191366 - DNA, 25 bp, Probe sequence
aaacacttcatcaaaaccataagtt

SEQ ID NO: 191367 - DNA, 25 bp, Probe sequence
aaaatcttttaatttaatgagtgat

SEQ ID NO: 191368 - DNA, 25 bp, Probe sequence
aagaactcaccgaactaatgacatt

SEQ ID NO: 191369 - DNA, 25 bp, Probe sequence
aagaacagctcaaaacacttcatca

SEQ ID NO: 191370 - DNA, 25 bp, Probe sequence
aagaggtttgaatatacctagcgat

SEQ ID NO: 191371 - DNA, 25 bp, Probe sequence
cataagttattcgttgtttctagta

SEQ ID NO: 191372 - DNA, 25 bp, Probe sequence
ctgtgtttttggtgtacatggccac

SEQ ID NO: 191373 - DNA, 25 bp, Probe sequence
gctcaaaacacttcatcaaaaccat

SEQ ID NO: 191374 - DNA, 25 bp, Probe sequence
gcaagaacagctcaaaacacttcat

SEQ ID NO: 191375 - DNA, 25 bp, Probe sequence
gaatgcaagaacagctcaaaacact

SEQ ID NO: 191376 - DNA, 25 bp, Probe sequence
gaactcaccgaactaatgacattgt

SEQ ID NO: 191377 - DNA, 25 bp, Probe sequence
gaacagctcaaaacacttcatcaaa

SEQ ID NO: 191378 - DNA, 25 bp, Probe sequence
gaaatctttctaaattaggtgttga

SEQ ID NO: 191379 - DNA, 25 bp, Probe sequence
gacaaagaactcaccgaactaatga

SEQ ID NO: 191380 - DNA, 25 bp, Probe sequence
gacggaatgcaagaacagctcaaaa

SEQ ID NO: 191381 - DNA, 25 bp, Probe sequence
gtttttggtgtacatggccacaaaa

SEQ ID NO: 191382 - DNA, 25 bp, Probe sequence
gtacatggccacaaaaaagaggttt

SEQ ID NO: 191383 - DNA, 25 bp, Probe sequence
gtgtttttggtgtacatggccacaa

SEQ ID NO: 191384 - DNA, 25 bp, Probe sequence
ggtttgaatatacctagcgatgaac

SEQ ID NO: 191385 - DNA, 25 bp, Probe sequence
tgggtattccgattgaaaaatcttt

SEQ ID NO: 191386 - DNA, 25 bp, Probe sequence
tgaatatacctagcgatgaacaaat

SEQ ID NO: 191387 - DNA, 25 bp, Probe sequence
tcaaaacacttcatcaaaaccataa

SEQ ID NO: 191388 - DNA, 25 bp, Probe sequence
tatacctagcgatgaacaaatagaa

SEQ ID NO: 191389 - DNA, 25 bp, Probe sequence
tattatatgggtattccgattgaaa

SEQ ID NO: 191390 - DNA, 25 bp, Probe sequence
ttggtgtacatggccacaaaaaaga

SEQ ID NO: 191391 - DNA, 25 bp, Probe sequence
attgtttttatcgggattggctata

SEQ ID NO: 191392 - DNA, 25 bp, Probe sequence
attgccattttcaggaatgtaattg

SEQ ID NO: 191393 - DNA, 25 bp, Probe sequence
atcgggattggctatattattattc

SEQ ID NO: 191394 - DNA, 25 bp, Probe sequence
atgtaattgtttttatcgggattgg

SEQ ID NO: 191395 - DNA, 25 bp, Probe sequence
agacattgccattttcaggaatgta

SEQ ID NO: 191396 - DNA, 25 bp, Probe sequence
aaatcatgatttatatttttataga

SEQ ID NO: 191397 - DNA, 25 bp, Probe sequence
aaagacattgccattttcaggaatg

SEQ ID NO: 191398 - DNA, 25 bp, Probe sequence
aaaaagacattgccattttcaggaa

SEQ ID NO: 191399 - DNA, 25 bp, Probe sequence
aaaaaagacattgccattttcagga

SEQ ID NO: 191400 - DNA, 25 bp, Probe sequence
aaaagacattgccattttcaggaat

SEQ ID NO: 191401 - DNA, 25 bp, Probe sequence
aagacattgccattttcaggaatgt

SEQ ID NO: 191402 - DNA, 25 bp, Probe sequence
aatgtaattgtttttatcgggattg

SEQ ID NO: 191403 - DNA, 25 bp, Probe sequence
aattgtttttatcgggattggctat

SEQ ID NO: 191404 - DNA, 25 bp, Probe sequence
caggaatgtaattgtttttatcggg

SEQ ID NO: 191405 - DNA, 25 bp, Probe sequence
cattgccattttcaggaatgtaatt

SEQ ID NO: 191406 - DNA, 25 bp, Probe sequence
cgggattggctatattattattctt

SEQ ID NO: 191407 - DNA, 25 bp, Probe sequence
gccattttcaggaatgtaattgttt

SEQ ID NO: 191408 - DNA, 25 bp, Probe sequence
gaatgtaattgtttttatcgggatt

SEQ ID NO: 191409 - DNA, 25 bp, Probe sequence
gaaattcagaaaattgttattgata

SEQ ID NO: 191410 - DNA, 25 bp, Probe sequence
gacattgccattttcaggaatgtaa

SEQ ID NO: 191411 - DNA, 25 bp, Probe sequence
gataaaaaagacattgccattttca

SEQ ID NO: 191412 - DNA, 25 bp, Probe sequence
gattgacaatcattttaaaatcatg

SEQ ID NO: 191413 - DNA, 25 bp, Probe sequence
gtttttatcgggattggctatatta

SEQ ID NO: 191414 - DNA, 25 bp, Probe sequence
gtaattgtttttatcgggattggct

SEQ ID NO: 191415 - DNA, 25 bp, Probe sequence
ggaatgtaattgtttttatcgggat

SEQ ID NO: 191416 - DNA, 25 bp, Probe sequence
tgtaattgtttttatcgggattggc

SEQ ID NO: 191417 - DNA, 25 bp, Probe sequence
tgtttttatcgggattggctatatt

SEQ ID NO: 191418 - DNA, 25 bp, Probe sequence
tcgggattggctatattattattct

SEQ ID NO: 191419 - DNA, 25 bp, Probe sequence
taattgtttttatcgggattggcta

SEQ ID NO: 191420 - DNA, 25 bp, Probe sequence
taaaaaagacattgccattttcagg

SEQ ID NO: 191421 - DNA, 25 bp, Probe sequence
tttatcgggattggctatattatta

SEQ ID NO: 191422 - DNA, 25 bp, Probe sequence
ttttatcgggattggctatattatt

SEQ ID NO: 191423 - DNA, 25 bp, Probe sequence
ttatcgggattggctatattattat

SEQ ID NO: 191424 - DNA, 25 bp, Probe sequence
ttgtttttatcgggattggctatat

SEQ ID NO: 191425 - DNA, 25 bp, Probe sequence
atttggttattggctccataaacgt

SEQ ID NO: 191426 - DNA, 25 bp, Probe sequence
atcagtggttgtctcgttacgttat

SEQ ID NO: 191427 - DNA, 25 bp, Probe sequence
atcatgacaacggcaatcagtggtt

SEQ ID NO: 191428 - DNA, 25 bp, Probe sequence
atgaaattcttgttcacatcatgac

SEQ ID NO: 191429 - DNA, 25 bp, Probe sequence
acggcaatcagtggttgtctcgtta

SEQ ID NO: 191430 - DNA, 25 bp, Probe sequence
acatcatgacaacggcaatcagtgg

SEQ ID NO: 191431 - DNA, 25 bp, Probe sequence
aatcagtggttgtctcgttacgtta

SEQ ID NO: 191432 - DNA, 25 bp, Probe sequence
aattcttgttcacatcatgacaacg

SEQ ID NO: 191433 - DNA, 25 bp, Probe sequence
caatcagtggttgtctcgttacgtt

SEQ ID NO: 191434 - DNA, 25 bp, Probe sequence
caacggcaatcagtggttgtctcgt

SEQ ID NO: 191435 - DNA, 25 bp, Probe sequence
cagtggttgtctcgttacgttattt

SEQ ID NO: 191436 - DNA, 25 bp, Probe sequence
cggcaatcagtggttgtctcgttac

SEQ ID NO: 191437 - DNA, 25 bp, Probe sequence
tcttgttcacatcatgacaacggca

SEQ ID NO: 191438 - DNA, 25 bp, Probe sequence
gcaatcagtggttgtctcgttacgt

SEQ ID NO: 191439 - DNA, 25 bp, Probe sequence
gaatgaaattcttgttcacatcatg

SEQ ID NO: 191440 - DNA, 25 bp, Probe sequence
gaaattcttgttcacatcatgacaa

SEQ ID NO: 191441 - DNA, 25 bp, Probe sequence
gtggttgtctcgttacgttatttgg

SEQ ID NO: 191442 - DNA, 25 bp, Probe sequence
gttcacatcatgacaacggcaatca

SEQ ID NO: 191443 - DNA, 25 bp, Probe sequence
gttatttggttattggctccataaa

SEQ ID NO: 191444 - DNA, 25 bp, Probe sequence
gtctcgttacgttatttggttattg

SEQ ID NO: 191445 - DNA, 25 bp, Probe sequence
gtgcgatttatgaatgaaattcttg

SEQ ID NO: 191446 - DNA, 25 bp, Probe sequence
ggttattggctccataaacgtgata

SEQ ID NO: 191447 - DNA, 25 bp, Probe sequence
ggcaatcagtggttgtctcgttacg

SEQ ID NO: 191448 - DNA, 25 bp, Probe sequence
tggttgtctcgttacgttatttggt

SEQ ID NO: 191449 - DNA, 25 bp, Probe sequence
tgttcacatcatgacaacggcaatc

SEQ ID NO: 191450 - DNA, 25 bp, Probe sequence
tcagtggttgtctcgttacgttatt

SEQ ID NO: 191451 - DNA, 25 bp, Probe sequence
tcgttacgttatttggttattggct

SEQ ID NO: 191452 - DNA, 25 bp, Probe sequence
tcacatcatgacaacggcaatcagt

SEQ ID NO: 191453 - DNA, 25 bp, Probe sequence
tacgttatttggttattggctccat

SEQ ID NO: 191454 - DNA, 25 bp, Probe sequence
tattggctccataaacgtgataaaa

SEQ ID NO: 191455 - DNA, 25 bp, Probe sequence
ttcttgttcacatcatgacaacggc

SEQ ID NO: 191456 - DNA, 25 bp, Probe sequence
ttgtctcgttacgttatttggttat

SEQ ID NO: 191457 - DNA, 25 bp, Probe sequence
ttggttattggctccataaacgtga

SEQ ID NO: 191458 - DNA, 25 bp, Probe sequence
ttggctccataaacgtgataaaaaa

SEQ ID NO: 191459 - DNA, 25 bp, Probe sequence
atacggttactagccgttcaagtgc

SEQ ID NO: 191460 - DNA, 25 bp, Probe sequence
cggttactagccgttcaagtgcgaa

SEQ ID NO: 191461 - DNA, 25 bp, Probe sequence
attgccaagcctaatgcatgtggac

SEQ ID NO: 191462 - DNA, 25 bp, Probe sequence
atgattaaaccattatgtgcgccta

SEQ ID NO: 191463 - DNA, 25 bp, Probe sequence
aggtattgccaagcctaatgcatgt

SEQ ID NO: 191464 - DNA, 25 bp, Probe sequence
agcctaatgcatgtggacaagcaat

SEQ ID NO: 191465 - DNA, 25 bp, Probe sequence
accattatgtgcgcctatagaggta

SEQ ID NO: 191466 - DNA, 25 bp, Probe sequence
aaaggtattgccaagcctaatgcat

SEQ ID NO: 191467 - DNA, 25 bp, Probe sequence
aactaaaggtattgccaagcctaat

SEQ ID NO: 191468 - DNA, 25 bp, Probe sequence
aaccattatgtgcgcctatagaggt

SEQ ID NO: 191469 - DNA, 25 bp, Probe sequence
aatgcatgtggacaagcaatgacta

SEQ ID NO: 191470 - DNA, 25 bp, Probe sequence
cattatgtgcgcctatagaggtaga

SEQ ID NO: 191471 - DNA, 25 bp, Probe sequence
ctagccgttcaagtgcgaaatcgac

SEQ ID NO: 191472 - DNA, 25 bp, Probe sequence
ccaagcctaatgcatgtggacaagc

SEQ ID NO: 191473 - DNA, 25 bp, Probe sequence
gccgttcaagtgcgaaatcgacgtt

SEQ ID NO: 191474 - DNA, 25 bp, Probe sequence
gcgcctatagaggtagaacgtgctg

SEQ ID NO: 191475 - DNA, 25 bp, Probe sequence
gcaatgactaatacggttactagcc

SEQ ID NO: 191476 - DNA, 25 bp, Probe sequence
gaacgtgctgtaactaaaggtattg

SEQ ID NO: 191477 - DNA, 25 bp, Probe sequence
gactaatacggttactagccgttca

SEQ ID NO: 191478 - DNA, 25 bp, Probe sequence
gacaagcaatgactaatacggttac

SEQ ID NO: 191479 - DNA, 25 bp, Probe sequence
gaggtagaacgtgctgtaactaaag

SEQ ID NO: 191480 - DNA, 25 bp, Probe sequence
gattaaaccattatgtgcgcctata

SEQ ID NO: 191481 - DNA, 25 bp, Probe sequence
gttcaagtgcgaaatcgacgttgtt

SEQ ID NO: 191482 - DNA, 25 bp, Probe sequence
gttactagccgttcaagtgcgaaat

SEQ ID NO: 191483 - DNA, 25 bp, Probe sequence
gtattgccaagcctaatgcatgtgg

SEQ ID NO: 191484 - DNA, 25 bp, Probe sequence
gtgcgcctatagaggtagaacgtgc

SEQ ID NO: 191485 - DNA, 25 bp, Probe sequence
gtggacaagcaatgactaatacggt

SEQ ID NO: 191486 - DNA, 25 bp, Probe sequence
ggttactagccgttcaagtgcgaaa

SEQ ID NO: 191487 - DNA, 25 bp, Probe sequence
tgccaagcctaatgcatgtggacaa

SEQ ID NO: 191488 - DNA, 25 bp, Probe sequence
tactagccgttcaagtgcgaaatcg

SEQ ID NO: 191489 - DNA, 25 bp, Probe sequence
taatacggttactagccgttcaagt

SEQ ID NO: 191490 - DNA, 25 bp, Probe sequence
taaaccattatgtgcgcctatagag

SEQ ID NO: 191491 - DNA, 25 bp, Probe sequence
tatagaggtagaacgtgctgtaact

SEQ ID NO: 191492 - DNA, 25 bp, Probe sequence
ttcaagtgcgaaatcgacgttgttt

SEQ ID NO: 191493 - DNA, 25 bp, Probe sequence
attagcttcatcttcagaacctgta

SEQ ID NO: 191494 - DNA, 25 bp, Probe sequence
atcactatctgagtcggaatcgctg

SEQ ID NO: 191495 - DNA, 25 bp, Probe sequence
atctgagtctgagtcactatctgaa

SEQ ID NO: 191496 - DNA, 25 bp, Probe sequence
atctgaatcggaatcactcgctgaa

SEQ ID NO: 191497 - DNA, 25 bp, Probe sequence
atcgcttgctgaatcggaatcactc

SEQ ID NO: 191498 - DNA, 25 bp, Probe sequence
aggcactgtctgagtcggaatcgct

SEQ ID NO: 191499 - DNA, 25 bp, Probe sequence
actgtcggaatctgaatcgctatct

SEQ ID NO: 191500 - DNA, 25 bp, Probe sequence
actgtctgagtctgattcactatcc

SEQ ID NO: 191501 - DNA, 25 bp, Probe sequence
actatctgaatctgaggcactgtct

SEQ ID NO: 191502 - DNA, 25 bp, Probe sequence
aaatgctacttcattatcccatgac

SEQ ID NO: 191503 - DNA, 25 bp, Probe sequence
aatcgctgccagaatctgaaccact

SEQ ID NO: 191504 - DNA, 25 bp, Probe sequence
cgctgtcggaatctgagtcgctatc

SEQ ID NO: 191505 - DNA, 25 bp, Probe sequence
ccggctcatcaggttgttcaggaac

SEQ ID NO: 191506 - DNA, 25 bp, Probe sequence
cccgaatctgaaccgctatctgaat

SEQ ID NO: 191507 - DNA, 25 bp, Probe sequence
gaattaggcggcactacattattgt

SEQ ID NO: 191508 - DNA, 25 bp, Probe sequence
gaatcgctattcgaatcactttctg

SEQ ID NO: 191509 - DNA, 25 bp, Probe sequence
gagtctgagtcgttatctgatcctg

SEQ ID NO: 191510 - DNA, 25 bp, Probe sequence
gatcctgtgtcactcgttgaatctg

SEQ ID NO: 191511 - DNA, 25 bp, Probe sequence
gattctgaatcgctatccgagtcgg

SEQ ID NO: 191512 - DNA, 25 bp, Probe sequence
gattctgaatcgctgtctgagtctg

SEQ ID NO: 191513 - DNA, 25 bp, Probe sequence
gtagaatcactacccgaatctgaac

SEQ ID NO: 191514 - DNA, 25 bp, Probe sequence
gtcaccagaacctgatccgttatta

SEQ ID NO: 191515 - DNA, 25 bp, Probe sequence
gtctgaatcgctatctgaatctgag

SEQ ID NO: 191516 - DNA, 25 bp, Probe sequence
ggtttatcgataccgtcaccagaac

SEQ ID NO: 191517 - DNA, 25 bp, Probe sequence
ggaattggttcaatttcacccggct

SEQ ID NO: 191518 - DNA, 25 bp, Probe sequence
ggaatccgagtcactgtctgagtcg

SEQ ID NO: 191519 - DNA, 25 bp, Probe sequence
ggcactatctgagtcggaatcgcta

SEQ ID NO: 191520 - DNA, 25 bp, Probe sequence
tgtctgagtcgctgtctgaatctga

SEQ ID NO: 191521 - DNA, 25 bp, Probe sequence
tgaaccactatctgaacctgggtca

SEQ ID NO: 191522 - DNA, 25 bp, Probe sequence
tgaatcgctcgctgaatctgaacca

SEQ ID NO: 191523 - DNA, 25 bp, Probe sequence
tcgctttctgagtctgagtcgctat

SEQ ID NO: 191524 - DNA, 25 bp, Probe sequence
tcgctgaatccgagtcactatctga

SEQ ID NO: 191525 - DNA, 25 bp, Probe sequence
tatcccatgacattgatcgccaaat

SEQ ID NO: 191526 - DNA, 25 bp, Probe sequence
ttctttactttctttagcctcattt

SEQ ID NO: 191527 - DNA, 25 bp, Probe sequence
attattcattttcttgcatcatttg

SEQ ID NO: 191528 - DNA, 25 bp, Probe sequence
atgttaattattcattttcttgcat

SEQ ID NO: 191529 - DNA, 25 bp, Probe sequence
agctaagcaactttcatcgctcagc

SEQ ID NO: 191530 - DNA, 25 bp, Probe sequence
agcttctcttttattatgttaatta

SEQ ID NO: 191531 - DNA, 25 bp, Probe sequence
actttttcaaatattatatgccaaa

SEQ ID NO: 191532 - DNA, 25 bp, Probe sequence
acactttttcaaatattatatgcca

SEQ ID NO: 191533 - DNA, 25 bp, Probe sequence
aacaggaactgatagcattaaaaca

SEQ ID NO: 191534 - DNA, 25 bp, Probe sequence
aagctaagcaactttcatcgctcag

SEQ ID NO: 191535 - DNA, 25 bp, Probe sequence
aagtaacaggaactgatagcattaa

SEQ ID NO: 191536 - DNA, 25 bp, Probe sequence
aattattcattttcttgcatcattt

SEQ ID NO: 191537 - DNA, 25 bp, Probe sequence
cactttttcaaatattatatgccaa

SEQ ID NO: 191538 - DNA, 25 bp, Probe sequence
cagcttctcttttattatgttaatt

SEQ ID NO: 191539 - DNA, 25 bp, Probe sequence
cttctcttttattatgttaattatt

SEQ ID NO: 191540 - DNA, 25 bp, Probe sequence
ctttttcaaatattatatgccaaaa

SEQ ID NO: 191541 - DNA, 25 bp, Probe sequence
ctaagcaactttcatcgctcagctt

SEQ ID NO: 191542 - DNA, 25 bp, Probe sequence
ctcagcttctcttttattatgttaa

SEQ ID NO: 191543 - DNA, 25 bp, Probe sequence
cgctcagcttctcttttattatgtt

SEQ ID NO: 191544 - DNA, 25 bp, Probe sequence
gctaagcaactttcatcgctcagct

SEQ ID NO: 191545 - DNA, 25 bp, Probe sequence
gctcagcttctcttttattatgtta

SEQ ID NO: 191546 - DNA, 25 bp, Probe sequence
gcttctcttttattatgttaattat

SEQ ID NO: 191547 - DNA, 25 bp, Probe sequence
gaagctaagcaactttcatcgctca

SEQ ID NO: 191548 - DNA, 25 bp, Probe sequence
gaaagtaacaggaactgatagcatt

SEQ ID NO: 191549 - DNA, 25 bp, Probe sequence
gttaattattcattttcttgcatca

SEQ ID NO: 191550 - DNA, 25 bp, Probe sequence
tgttaattattcattttcttgcatc

SEQ ID NO: 191551 - DNA, 25 bp, Probe sequence
tcagcttctcttttattatgttaat

SEQ ID NO: 191552 - DNA, 25 bp, Probe sequence
taattattcattttcttgcatcatt

SEQ ID NO: 191553 - DNA, 25 bp, Probe sequence
taagcaactttcatcgctcagcttc

SEQ ID NO: 191554 - DNA, 25 bp, Probe sequence
taacaggaactgatagcattaaaac

SEQ ID NO: 191555 - DNA, 25 bp, Probe sequence
tatgttaattattcattttcttgca

SEQ ID NO: 191556 - DNA, 25 bp, Probe sequence
tattcattttcttgcatcatttgtt

SEQ ID NO: 191557 - DNA, 25 bp, Probe sequence
ttatatgccaaaagagaagctaagc

SEQ ID NO: 191558 - DNA, 25 bp, Probe sequence
ttattcattttcttgcatcatttgt

SEQ ID NO: 191559 - DNA, 25 bp, Probe sequence
ttaattattcattttcttgcatcat

SEQ ID NO: 191560 - DNA, 25 bp, Probe sequence
ttctcttttattatgttaattattc

SEQ ID NO: 191561 - DNA, 25 bp, Probe sequence
atcaaatacttctgtagtagttaca

SEQ ID NO: 191562 - DNA, 25 bp, Probe sequence
atctagtgggactttaactggtaca

SEQ ID NO: 191563 - DNA, 25 bp, Probe sequence
aggcattgtatacgttccagtaatg

SEQ ID NO: 191564 - DNA, 25 bp, Probe sequence
agtgggactttaactggtacaagag

SEQ ID NO: 191565 - DNA, 25 bp, Probe sequence
agtagttacatctagtgggacttta

SEQ ID NO: 191566 - DNA, 25 bp, Probe sequence
acccttctaaatcaaatacttctgt

SEQ ID NO: 191567 - DNA, 25 bp, Probe sequence
acaaggcattgtatacgttccagta

SEQ ID NO: 191568 - DNA, 25 bp, Probe sequence
acttctgtagtagttacatctagtg

SEQ ID NO: 191569 - DNA, 25 bp, Probe sequence
acatctagtgggactttaactggta

SEQ ID NO: 191570 - DNA, 25 bp, Probe sequence
acaagagtacgtgcacaaggcattg

SEQ ID NO: 191571 - DNA, 25 bp, Probe sequence
aactggtacaagagtacgtgcacaa

SEQ ID NO: 191572 - DNA, 25 bp, Probe sequence
aagagtacgtgcacaaggcattgta

SEQ ID NO: 191573 - DNA, 25 bp, Probe sequence
aaggcattgtatacgttccagtaat

SEQ ID NO: 191574 - DNA, 25 bp, Probe sequence
caaggcattgtatacgttccagtaa

SEQ ID NO: 191575 - DNA, 25 bp, Probe sequence
cacaaggcattgtatacgttccagt

SEQ ID NO: 191576 - DNA, 25 bp, Probe sequence
ctagtgggactttaactggtacaag

SEQ ID NO: 191577 - DNA, 25 bp, Probe sequence
cccttctaaatcaaatacttctgta

SEQ ID NO: 191578 - DNA, 25 bp, Probe sequence
gcacaaggcattgtatacgttccag

SEQ ID NO: 191579 - DNA, 25 bp, Probe sequence
gagtacgtgcacaaggcattgtata

SEQ ID NO: 191580 - DNA, 25 bp, Probe sequence
gttacatctagtgggactttaactg

SEQ ID NO: 191581 - DNA, 25 bp, Probe sequence
gtagttacatctagtgggactttaa

SEQ ID NO: 191582 - DNA, 25 bp, Probe sequence
gtagtagttacatctagtgggactt

SEQ ID NO: 191583 - DNA, 25 bp, Probe sequence
gtacgtgcacaaggcattgtatacg

SEQ ID NO: 191584 - DNA, 25 bp, Probe sequence
gtacccttctaaatcaaatacttct

SEQ ID NO: 191585 - DNA, 25 bp, Probe sequence
gtacaagagtacgtgcacaaggcat

SEQ ID NO: 191586 - DNA, 25 bp, Probe sequence
gtgcacaaggcattgtatacgttcc

SEQ ID NO: 191587 - DNA, 25 bp, Probe sequence
gtgggactttaactggtacaagagt

SEQ ID NO: 191588 - DNA, 25 bp, Probe sequence
ggtacaagagtacgtgcacaaggca

SEQ ID NO: 191589 - DNA, 25 bp, Probe sequence
ggactttaactggtacaagagtacg

SEQ ID NO: 191590 - DNA, 25 bp, Probe sequence
tgcacaaggcattgtatacgttcca

SEQ ID NO: 191591 - DNA, 25 bp, Probe sequence
tacatctagtgggactttaactggt

SEQ ID NO: 191592 - DNA, 25 bp, Probe sequence
tacccttctaaatcaaatacttctg

SEQ ID NO: 191593 - DNA, 25 bp, Probe sequence
ttctaaatcaaatacttctgtagta

SEQ ID NO: 191594 - DNA, 25 bp, Probe sequence
ttgtacccttctaaatcaaatactt

SEQ ID NO: 191595 - DNA, 25 bp, Probe sequence
atttaaaggtaattctatcatgtta

SEQ ID NO: 191596 - DNA, 25 bp, Probe sequence
atcatgttaatgcggaatatcaatt

SEQ ID NO: 191597 - DNA, 25 bp, Probe sequence
atgtttttcaagcattttttcataa

SEQ ID NO: 191598 - DNA, 25 bp, Probe sequence
aggtaattctatcatgttaatgcgg

SEQ ID NO: 191599 - DNA, 25 bp, Probe sequence
agcaaatgtttttcaagcatttttt

SEQ ID NO: 191600 - DNA, 25 bp, Probe sequence
aaatgtttttcaagcattttttcat

SEQ ID NO: 191601 - DNA, 25 bp, Probe sequence
aaaggtaattctatcatgttaatgc

SEQ ID NO: 191602 - DNA, 25 bp, Probe sequence
aaagcaaatgtttttcaagcatttt

SEQ ID NO: 191603 - DNA, 25 bp, Probe sequence
aagcaaatgtttttcaagcattttt

SEQ ID NO: 191604 - DNA, 25 bp, Probe sequence
aaggtaattctatcatgttaatgcg

SEQ ID NO: 191605 - DNA, 25 bp, Probe sequence
aatgtttttcaagcattttttcata

SEQ ID NO: 191606 - DNA, 25 bp, Probe sequence
aattctatcatgttaatgcggaata

SEQ ID NO: 191607 - DNA, 25 bp, Probe sequence
caaatgtttttcaagcattttttca

SEQ ID NO: 191608 - DNA, 25 bp, Probe sequence
catgttaatgcggaatatcaatttg

SEQ ID NO: 191609 - DNA, 25 bp, Probe sequence
ctatcatgttaatgcggaatatcaa

SEQ ID NO: 191610 - DNA, 25 bp, Probe sequence
ctaaagcaaatgtttttcaagcatt

SEQ ID NO: 191611 - DNA, 25 bp, Probe sequence
gcaaatgtttttcaagcattttttc

SEQ ID NO: 191612 - DNA, 25 bp, Probe sequence
gtttttcaagcattttttcataaat

SEQ ID NO: 191613 - DNA, 25 bp, Probe sequence
gtctaaagcaaatgtttttcaagca

SEQ ID NO: 191614 - DNA, 25 bp, Probe sequence
gtaattctatcatgttaatgcggaa

SEQ ID NO: 191615 - DNA, 25 bp, Probe sequence
gtgtctaaagcaaatgtttttcaag

SEQ ID NO: 191616 - DNA, 25 bp, Probe sequence
ggtaattctatcatgttaatgcgga

SEQ ID NO: 191617 - DNA, 25 bp, Probe sequence
tgtctaaagcaaatgtttttcaagc

SEQ ID NO: 191618 - DNA, 25 bp, Probe sequence
tgtttttcaagcattttttcataaa

SEQ ID NO: 191619 - DNA, 25 bp, Probe sequence
tctaaagcaaatgtttttcaagcat

SEQ ID NO: 191620 - DNA, 25 bp, Probe sequence
tctatcatgttaatgcggaatatca

SEQ ID NO: 191621 - DNA, 25 bp, Probe sequence
tcatgttaatgcggaatatcaattt

SEQ ID NO: 191622 - DNA, 25 bp, Probe sequence
taattctatcatgttaatgcggaat

SEQ ID NO: 191623 - DNA, 25 bp, Probe sequence
taaaggtaattctatcatgttaatg

SEQ ID NO: 191624 - DNA, 25 bp, Probe sequence
tttcaagcattttttcataaattta

SEQ ID NO: 191625 - DNA, 25 bp, Probe sequence
tttttcaagcattttttcataaatt

SEQ ID NO: 191626 - DNA, 25 bp, Probe sequence
ttttcaagcattttttcataaattt

SEQ ID NO: 191627 - DNA, 25 bp, Probe sequence
ttcaagcattttttcataaatttaa

SEQ ID NO: 191628 - DNA, 25 bp, Probe sequence
ttctatcatgttaatgcggaatatc

SEQ ID NO: 191629 - DNA, 25 bp, Probe sequence
attaggatatacagctatggccatt

SEQ ID NO: 191630 - DNA, 25 bp, Probe sequence
atatacagctatggccatttttaaa

SEQ ID NO: 191631 - DNA, 25 bp, Probe sequence
atacagctatggccatttttaaata

SEQ ID NO: 191632 - DNA, 25 bp, Probe sequence
atcaaagctagattcatttaaagaa

SEQ ID NO: 191633 - DNA, 25 bp, Probe sequence
atggccatttttaaatatatggaga

SEQ ID NO: 191634 - DNA, 25 bp, Probe sequence
aggatatacagctatggccattttt

SEQ ID NO: 191635 - DNA, 25 bp, Probe sequence
agaaagcatcaaagctagattcatt

SEQ ID NO: 191636 - DNA, 25 bp, Probe sequence
agcatcaaagctagattcatttaaa

SEQ ID NO: 191637 - DNA, 25 bp, Probe sequence
agctatggccatttttaaatatatg

SEQ ID NO: 191638 - DNA, 25 bp, Probe sequence
acagctatggccatttttaaatata

SEQ ID NO: 191639 - DNA, 25 bp, Probe sequence
aaagcatcaaagctagattcattta

SEQ ID NO: 191640 - DNA, 25 bp, Probe sequence
aaagctagattcatttaaagaaatt

SEQ ID NO: 191641 - DNA, 25 bp, Probe sequence
aagctagattcatttaaagaaatta

SEQ ID NO: 191642 - DNA, 25 bp, Probe sequence
aagcatcaaagctagattcatttaa

SEQ ID NO: 191643 - DNA, 25 bp, Probe sequence
aagaaagcatcaaagctagattcat

SEQ ID NO: 191644 - DNA, 25 bp, Probe sequence
aagacaacaaaataagaaagcatca

SEQ ID NO: 191645 - DNA, 25 bp, Probe sequence
aattaggatatacagctatggccat

SEQ ID NO: 191646 - DNA, 25 bp, Probe sequence
cagctatggccatttttaaatatat

SEQ ID NO: 191647 - DNA, 25 bp, Probe sequence
catcaaagctagattcatttaaaga

SEQ ID NO: 191648 - DNA, 25 bp, Probe sequence
ctatggccatttttaaatatatgga

SEQ ID NO: 191649 - DNA, 25 bp, Probe sequence
gctatggccatttttaaatatatgg

SEQ ID NO: 191650 - DNA, 25 bp, Probe sequence
gcatcaaagctagattcatttaaag

SEQ ID NO: 191651 - DNA, 25 bp, Probe sequence
gaattaggatatacagctatggcca

SEQ ID NO: 191652 - DNA, 25 bp, Probe sequence
gaaagcatcaaagctagattcattt

SEQ ID NO: 191653 - DNA, 25 bp, Probe sequence
gatatacagctatggccatttttaa

SEQ ID NO: 191654 - DNA, 25 bp, Probe sequence
ggatatacagctatggccattttta

SEQ ID NO: 191655 - DNA, 25 bp, Probe sequence
tgaattaggatatacagctatggcc

SEQ ID NO: 191656 - DNA, 25 bp, Probe sequence
tcaaagctagattcatttaaagaaa

SEQ ID NO: 191657 - DNA, 25 bp, Probe sequence
tacagctatggccatttttaaatat

SEQ ID NO: 191658 - DNA, 25 bp, Probe sequence
tatggagaaaaagggttatgaaggt

SEQ ID NO: 191659 - DNA, 25 bp, Probe sequence
taggatatacagctatggccatttt

SEQ ID NO: 191660 - DNA, 25 bp, Probe sequence
tatggccatttttaaatatatggag

SEQ ID NO: 191661 - DNA, 25 bp, Probe sequence
tatacagctatggccatttttaaat

SEQ ID NO: 191662 - DNA, 25 bp, Probe sequence
ttaggatatacagctatggccattt

SEQ ID NO: 191663 - DNA, 25 bp, Probe sequence
ataacttgatgtctgtttgtcatgc

SEQ ID NO: 191664 - DNA, 25 bp, Probe sequence
atctagacaatgactttaataaagc

SEQ ID NO: 191665 - DNA, 25 bp, Probe sequence
atgtctgtttgtcatgcttgtcaca

SEQ ID NO: 191666 - DNA, 25 bp, Probe sequence
acgcaaacgacaacaaaaaagcagt

SEQ ID NO: 191667 - DNA, 25 bp, Probe sequence
acgctaagattgtgcaccatatagt

SEQ ID NO: 191668 - DNA, 25 bp, Probe sequence
acggacgctaagattgtgcaccata

SEQ ID NO: 191669 - DNA, 25 bp, Probe sequence
acttgatgtctgtttgtcatgcttg

SEQ ID NO: 191670 - DNA, 25 bp, Probe sequence
aacttgatgtctgtttgtcatgctt

SEQ ID NO: 191671 - DNA, 25 bp, Probe sequence
ctaagattgtgcaccatatagttta

SEQ ID NO: 191672 - DNA, 25 bp, Probe sequence
cggacgctaagattgtgcaccatat

SEQ ID NO: 191673 - DNA, 25 bp, Probe sequence
ctgtttgtcatgcttgtcacaataa

SEQ ID NO: 191674 - DNA, 25 bp, Probe sequence
gcaggggaagataacggacgctaag

SEQ ID NO: 191675 - DNA, 25 bp, Probe sequence
gcaccatatagtttatctagacaat

SEQ ID NO: 191676 - DNA, 25 bp, Probe sequence
gaataacttgatgtctgtttgtcat

SEQ ID NO: 191677 - DNA, 25 bp, Probe sequence
gatgtctgtttgtcatgcttgtcac

SEQ ID NO: 191678 - DNA, 25 bp, Probe sequence
gataacggacgctaagattgtgcac

SEQ ID NO: 191679 - DNA, 25 bp, Probe sequence
gatagagataattatctttgtcaaa

SEQ ID NO: 191680 - DNA, 25 bp, Probe sequence
gattgtgcaccatatagtttatcta

SEQ ID NO: 191681 - DNA, 25 bp, Probe sequence
gtttgtcatgcttgtcacaataaaa

SEQ ID NO: 191682 - DNA, 25 bp, Probe sequence
gtcaaatgtgcttggagcaggggaa

SEQ ID NO: 191683 - DNA, 25 bp, Probe sequence
gtcacaataaaattcacgcaaacga

SEQ ID NO: 191684 - DNA, 25 bp, Probe sequence
gtctgtttgtcatgcttgtcacaat

SEQ ID NO: 191685 - DNA, 25 bp, Probe sequence
ggggaagataacggacgctaagatt

SEQ ID NO: 191686 - DNA, 25 bp, Probe sequence
ggacgctaagattgtgcaccatata

SEQ ID NO: 191687 - DNA, 25 bp, Probe sequence
tgtgcttggagcaggggaagataac

SEQ ID NO: 191688 - DNA, 25 bp, Probe sequence
tgtgcaccatatagtttatctagac

SEQ ID NO: 191689 - DNA, 25 bp, Probe sequence
tgatgtctgtttgtcatgcttgtca

SEQ ID NO: 191690 - DNA, 25 bp, Probe sequence
tctttgtcaaatgtgcttggagcag

SEQ ID NO: 191691 - DNA, 25 bp, Probe sequence
taacggacgctaagattgtgcacca

SEQ ID NO: 191692 - DNA, 25 bp, Probe sequence
taaaattcacgcaaacgacaacaaa

SEQ ID NO: 191693 - DNA, 25 bp, Probe sequence
ttggagcaggggaagataacggacg

SEQ ID NO: 191694 - DNA, 25 bp, Probe sequence
tagtttatctagacaatgactttaa

SEQ ID NO: 191695 - DNA, 25 bp, Probe sequence
tatatttgaataacttgatgtctgt

SEQ ID NO: 191696 - DNA, 25 bp, Probe sequence
ttgatgtctgtttgtcatgcttgtc

SEQ ID NO: 191697 - DNA, 25 bp, Probe sequence
attttacagccctatgttagccagt

SEQ ID NO: 191698 - DNA, 25 bp, Probe sequence
atgttgagacaggtactttttttga

SEQ ID NO: 191699 - DNA, 25 bp, Probe sequence
agccctatgttagccagtctaaatg

SEQ ID NO: 191700 - DNA, 25 bp, Probe sequence
accagaaaagcacaccgaggtattt

SEQ ID NO: 191701 - DNA, 25 bp, Probe sequence
acagccctatgttagccagtctaaa

SEQ ID NO: 191702 - DNA, 25 bp, Probe sequence
aaatggaacgccagaagaaaaagct

SEQ ID NO: 191703 - DNA, 25 bp, Probe sequence
aaaagctgagattgaaggctgtttt

SEQ ID NO: 191704 - DNA, 25 bp, Probe sequence
aagcacaccgaggtatttaagacgt

SEQ ID NO: 191705 - DNA, 25 bp, Probe sequence
aatacacctaaaatgaaattaccag

SEQ ID NO: 191706 - DNA, 25 bp, Probe sequence
aattttacagccctatgttagccag

SEQ ID NO: 191707 - DNA, 25 bp, Probe sequence
cacaccgaggtatttaagacgtata

SEQ ID NO: 191708 - DNA, 25 bp, Probe sequence
cagccctatgttagccagtctaaat

SEQ ID NO: 191709 - DNA, 25 bp, Probe sequence
cagttaaagagtatgttgagacagg

SEQ ID NO: 191710 - DNA, 25 bp, Probe sequence
gccagtctaaatgaacaacagttaa

SEQ ID NO: 191711 - DNA, 25 bp, Probe sequence
gccctatgttagccagtctaaatga

SEQ ID NO: 191712 - DNA, 25 bp, Probe sequence
gctgagattgaaggctgttttatta

SEQ ID NO: 191713 - DNA, 25 bp, Probe sequence
gcacaccgaggtatttaagacgtat

SEQ ID NO: 191714 - DNA, 25 bp, Probe sequence
gaattttacagccctatgttagcca

SEQ ID NO: 191715 - DNA, 25 bp, Probe sequence
gaagatagtgaattttacagcccta

SEQ ID NO: 191716 - DNA, 25 bp, Probe sequence
gaaaagcacaccgaggtatttaaga

SEQ ID NO: 191717 - DNA, 25 bp, Probe sequence
gaaattaccagaaaagcacaccgag

SEQ ID NO: 191718 - DNA, 25 bp, Probe sequence
gacgtataaaaatggaacgccagaa

SEQ ID NO: 191719 - DNA, 25 bp, Probe sequence
gagattgaaggctgttttattaaaa

SEQ ID NO: 191720 - DNA, 25 bp, Probe sequence
gatagtgaattttacagccctatgt

SEQ ID NO: 191721 - DNA, 25 bp, Probe sequence
gttgagacaggtactttttttgatt

SEQ ID NO: 191722 - DNA, 25 bp, Probe sequence
gtatgttgagacaggtacttttttt

SEQ ID NO: 191723 - DNA, 25 bp, Probe sequence
gtgaattttacagccctatgttagc

SEQ ID NO: 191724 - DNA, 25 bp, Probe sequence
tacagccctatgttagccagtctaa

SEQ ID NO: 191725 - DNA, 25 bp, Probe sequence
tactttttttgattgatacaggaga

SEQ ID NO: 191726 - DNA, 25 bp, Probe sequence
tagccagtctaaatgaacaacagtt

SEQ ID NO: 191727 - DNA, 25 bp, Probe sequence
tagtgaattttacagccctatgtta

SEQ ID NO: 191728 - DNA, 25 bp, Probe sequence
tttacagccctatgttagccagtct

SEQ ID NO: 191729 - DNA, 25 bp, Probe sequence
ttttacagccctatgttagccagtc

SEQ ID NO: 191730 - DNA, 25 bp, Probe sequence
ttacagccctatgttagccagtcta

SEQ ID NO: 191731 - DNA, 25 bp, Probe sequence
atcaagttctttgcatctaaatgtg

SEQ ID NO: 191732 - DNA, 25 bp, Probe sequence
atgtctttgtatcaagttctttgca

SEQ ID NO: 191733 - DNA, 25 bp, Probe sequence
agaagtcgaaaaagtggaggcaata

SEQ ID NO: 191734 - DNA, 25 bp, Probe sequence
agctcccgttcgaaactgcaagcat

SEQ ID NO: 191735 - DNA, 25 bp, Probe sequence
aaagctcccgttcgaaactgcaagc

SEQ ID NO: 191736 - DNA, 25 bp, Probe sequence
aacatggtattaaaactgattcgta

SEQ ID NO: 191737 - DNA, 25 bp, Probe sequence
aagccacgaacatggtattaaaact

SEQ ID NO: 191738 - DNA, 25 bp, Probe sequence
aagttctttgcatctaaatgtgatt

SEQ ID NO: 191739 - DNA, 25 bp, Probe sequence
aagtatgtctttgtatcaagttctt

SEQ ID NO: 191740 - DNA, 25 bp, Probe sequence
ctgattcgtaaaaagctcccgttcg

SEQ ID NO: 191741 - DNA, 25 bp, Probe sequence
ctttgtatcaagttctttgcatcta

SEQ ID NO: 191742 - DNA, 25 bp, Probe sequence
ctcccgttcgaaactgcaagcatag

SEQ ID NO: 191743 - DNA, 25 bp, Probe sequence
cccgttcgaaactgcaagcatagaa

SEQ ID NO: 191744 - DNA, 25 bp, Probe sequence
gctcccgttcgaaactgcaagcata

SEQ ID NO: 191745 - DNA, 25 bp, Probe sequence
gaaaaagccacgaacatggtattaa

SEQ ID NO: 191746 - DNA, 25 bp, Probe sequence
gaaacattatttcgtgaaaagtacg

SEQ ID NO: 191747 - DNA, 25 bp, Probe sequence
gaaactgcaagcatagaagtcgaaa

SEQ ID NO: 191748 - DNA, 25 bp, Probe sequence
gagttggtagtatgatgcaaaccta

SEQ ID NO: 191749 - DNA, 25 bp, Probe sequence
gaggaaaaagccacgaacatggtat

SEQ ID NO: 191750 - DNA, 25 bp, Probe sequence
gatgcaaacctataaagtatgtctt

SEQ ID NO: 191751 - DNA, 25 bp, Probe sequence
gttggtagtatgatgcaaacctata

SEQ ID NO: 191752 - DNA, 25 bp, Probe sequence
gttcgaaactgcaagcatagaagtc

SEQ ID NO: 191753 - DNA, 25 bp, Probe sequence
gttctttgcatctaaatgtgattat

SEQ ID NO: 191754 - DNA, 25 bp, Probe sequence
gtatcaagttctttgcatctaaatg

SEQ ID NO: 191755 - DNA, 25 bp, Probe sequence
gtatgtctttgtatcaagttctttg

SEQ ID NO: 191756 - DNA, 25 bp, Probe sequence
gtacgaatgaggaaaaagccacgaa

SEQ ID NO: 191757 - DNA, 25 bp, Probe sequence
gtctttgtatcaagttctttgcatc

SEQ ID NO: 191758 - DNA, 25 bp, Probe sequence
ggtagtatgatgcaaacctataaag

SEQ ID NO: 191759 - DNA, 25 bp, Probe sequence
tgattcgtaaaaagctcccgttcga

SEQ ID NO: 191760 - DNA, 25 bp, Probe sequence
tcccgttcgaaactgcaagcataga

SEQ ID NO: 191761 - DNA, 25 bp, Probe sequence
tctttgcatctaaatgtgattataa

SEQ ID NO: 191762 - DNA, 25 bp, Probe sequence
taaaaagctcccgttcgaaactgca

SEQ ID NO: 191763 - DNA, 25 bp, Probe sequence
tttgtatcaagttctttgcatctaa

SEQ ID NO: 191764 - DNA, 25 bp, Probe sequence
ttgtatcaagttctttgcatctaaa

SEQ ID NO: 191765 - DNA, 25 bp, Probe sequence
aggaggaactacaaatgaaactact

SEQ ID NO: 191766 - DNA, 25 bp, Probe sequence
acgtgtggcatggaaatcaatggtt

SEQ ID NO: 191767 - DNA, 25 bp, Probe sequence
actactaagaaggctattcaataaa

SEQ ID NO: 191768 - DNA, 25 bp, Probe sequence
acttaattgacgtgtggcatggaaa

SEQ ID NO: 191769 - DNA, 25 bp, Probe sequence
aaatataaagtggtctcggatagag

SEQ ID NO: 191770 - DNA, 25 bp, Probe sequence
aaatgaaactactaagaaggctatt

SEQ ID NO: 191771 - DNA, 25 bp, Probe sequence
aaacttaattgacgtgtggcatgga

SEQ ID NO: 191772 - DNA, 25 bp, Probe sequence
aaactactaagaaggctattcaata

SEQ ID NO: 191773 - DNA, 25 bp, Probe sequence
aaaaatataaagtggtctcggatag

SEQ ID NO: 191774 - DNA, 25 bp, Probe sequence
aaaacttaattgacgtgtggcatgg

SEQ ID NO: 191775 - DNA, 25 bp, Probe sequence
aacttaattgacgtgtggcatggaa

SEQ ID NO: 191776 - DNA, 25 bp, Probe sequence
aactacaaatgaaactactaagaag

SEQ ID NO: 191777 - DNA, 25 bp, Probe sequence
aagtggtctcggatagagaaggtaa

SEQ ID NO: 191778 - DNA, 25 bp, Probe sequence
aatataaagtggtctcggatagaga

SEQ ID NO: 191779 - DNA, 25 bp, Probe sequence
aattgacgtgtggcatggaaatcaa

SEQ ID NO: 191780 - DNA, 25 bp, Probe sequence
cttaattgacgtgtggcatggaaat

SEQ ID NO: 191781 - DNA, 25 bp, Probe sequence
cgtgtggcatggaaatcaatggtta

SEQ ID NO: 191782 - DNA, 25 bp, Probe sequence
cgaaaacttaattgacgtgtggcat

SEQ ID NO: 191783 - DNA, 25 bp, Probe sequence
gaaggaggaactacaaatgaaacta

SEQ ID NO: 191784 - DNA, 25 bp, Probe sequence
gaaggctattcaataaaaaacacga

SEQ ID NO: 191785 - DNA, 25 bp, Probe sequence
gaaaacttaattgacgtgtggcatg

SEQ ID NO: 191786 - DNA, 25 bp, Probe sequence
gaaactactaagaaggctattcaat

SEQ ID NO: 191787 - DNA, 25 bp, Probe sequence
gacgtgtggcatggaaatcaatggt

SEQ ID NO: 191788 - DNA, 25 bp, Probe sequence
gaggaactacaaatgaaactactaa

SEQ ID NO: 191789 - DNA, 25 bp, Probe sequence
gtgtggcatggaaatcaatggttaa

SEQ ID NO: 191790 - DNA, 25 bp, Probe sequence
gtggtctcggatagagaaggtaaga

SEQ ID NO: 191791 - DNA, 25 bp, Probe sequence
gtggcatggaaatcaatggttaaaa

SEQ ID NO: 191792 - DNA, 25 bp, Probe sequence
ggaggaactacaaatgaaactacta

SEQ ID NO: 191793 - DNA, 25 bp, Probe sequence
ggaactacaaatgaaactactaaga

SEQ ID NO: 191794 - DNA, 25 bp, Probe sequence
ggcatggaaatcaatggttaaaagt

SEQ ID NO: 191795 - DNA, 25 bp, Probe sequence
tgacgtgtggcatggaaatcaatgg

SEQ ID NO: 191796 - DNA, 25 bp, Probe sequence
taattgacgtgtggcatggaaatca

SEQ ID NO: 191797 - DNA, 25 bp, Probe sequence
taaagtggtctcggatagagaaggt

SEQ ID NO: 191798 - DNA, 25 bp, Probe sequence
ttaattgacgtgtggcatggaaatc

SEQ ID NO: 191799 - DNA, 25 bp, Probe sequence
atctttcgagaaatatgagttgttt

SEQ ID NO: 191800 - DNA, 25 bp, Probe sequence
atcgtaatggtagttgcttgttttt

SEQ ID NO: 191801 - DNA, 25 bp, Probe sequence
agagaatctttcgagaaatatgagt

SEQ ID NO: 191802 - DNA, 25 bp, Probe sequence
agaaatatgagttgtttaaattaca

SEQ ID NO: 191803 - DNA, 25 bp, Probe sequence
agaatctttcgagaaatatgagttg

SEQ ID NO: 191804 - DNA, 25 bp, Probe sequence
agcactatcgtaatggtagttgctt

SEQ ID NO: 191805 - DNA, 25 bp, Probe sequence
actatcgtaatggtagttgcttgtt

SEQ ID NO: 191806 - DNA, 25 bp, Probe sequence
acaagcactatcgtaatggtagttg

SEQ ID NO: 191807 - DNA, 25 bp, Probe sequence
aaatcaaagagaatctttcgagaaa

SEQ ID NO: 191808 - DNA, 25 bp, Probe sequence
aaagagaatctttcgagaaatatga

SEQ ID NO: 191809 - DNA, 25 bp, Probe sequence
aaacaagcactatcgtaatggtagt

SEQ ID NO: 191810 - DNA, 25 bp, Probe sequence
aaaacaagcactatcgtaatggtag

SEQ ID NO: 191811 - DNA, 25 bp, Probe sequence
aacaagcactatcgtaatggtagtt

SEQ ID NO: 191812 - DNA, 25 bp, Probe sequence
aagcactatcgtaatggtagttgct

SEQ ID NO: 191813 - DNA, 25 bp, Probe sequence
aagagaatctttcgagaaatatgag

SEQ ID NO: 191814 - DNA, 25 bp, Probe sequence
aatcaaagagaatctttcgagaaat

SEQ ID NO: 191815 - DNA, 25 bp, Probe sequence
caagcactatcgtaatggtagttgc

SEQ ID NO: 191816 - DNA, 25 bp, Probe sequence
caaagagaatctttcgagaaatatg

SEQ ID NO: 191817 - DNA, 25 bp, Probe sequence
cactatcgtaatggtagttgcttgt

SEQ ID NO: 191818 - DNA, 25 bp, Probe sequence
ctttcgagaaatatgagttgtttaa

SEQ ID NO: 191819 - DNA, 25 bp, Probe sequence
ctatcgtaatggtagttgcttgttt

SEQ ID NO: 191820 - DNA, 25 bp, Probe sequence
gcactatcgtaatggtagttgcttg

SEQ ID NO: 191821 - DNA, 25 bp, Probe sequence
gaatctttcgagaaatatgagttgt

SEQ ID NO: 191822 - DNA, 25 bp, Probe sequence
gaaaatcaaagagaatctttcgaga

SEQ ID NO: 191823 - DNA, 25 bp, Probe sequence
gaaaacaagcactatcgtaatggta

SEQ ID NO: 191824 - DNA, 25 bp, Probe sequence
gagaatctttcgagaaatatgagtt

SEQ ID NO: 191825 - DNA, 25 bp, Probe sequence
gagaaatatgagttgtttaaattac

SEQ ID NO: 191826 - DNA, 25 bp, Probe sequence
tgaaaacaagcactatcgtaatggt

SEQ ID NO: 191827 - DNA, 25 bp, Probe sequence
tcgtaatggtagttgcttgtttttt

SEQ ID NO: 191828 - DNA, 25 bp, Probe sequence
tctttcgagaaatatgagttgttta

SEQ ID NO: 191829 - DNA, 25 bp, Probe sequence
tatcgtaatggtagttgcttgtttt

SEQ ID NO: 191830 - DNA, 25 bp, Probe sequence
tttcgagaaatatgagttgtttaaa

SEQ ID NO: 191831 - DNA, 25 bp, Probe sequence
ttcgagaaatatgagttgtttaaat

SEQ ID NO: 191832 - DNA, 25 bp, Probe sequence
ttgaaaacaagcactatcgtaatgg

SEQ ID NO: 191833 - DNA, 25 bp, Probe sequence
attgtttatgactgtaccgtcaatt

SEQ ID NO: 191834 - DNA, 25 bp, Probe sequence
ataaattgtttatgactgtaccgtc

SEQ ID NO: 191835 - DNA, 25 bp, Probe sequence
atccaatgtcttcttggcattttga

SEQ ID NO: 191836 - DNA, 25 bp, Probe sequence
atgtcttcttggcattttgaattta

SEQ ID NO: 191837 - DNA, 25 bp, Probe sequence
atggaagtaatccaatgtcttcttg

SEQ ID NO: 191838 - DNA, 25 bp, Probe sequence
agtaatccaatgtcttcttggcatt

SEQ ID NO: 191839 - DNA, 25 bp, Probe sequence
aaattgtttatgactgtaccgtcaa

SEQ ID NO: 191840 - DNA, 25 bp, Probe sequence
aaaaatgccaagaagcaatggaagt

SEQ ID NO: 191841 - DNA, 25 bp, Probe sequence
aagtaatccaatgtcttcttggcat

SEQ ID NO: 191842 - DNA, 25 bp, Probe sequence
aatggaagtaatccaatgtcttctt

SEQ ID NO: 191843 - DNA, 25 bp, Probe sequence
aatgtcttcttggcattttgaattt

SEQ ID NO: 191844 - DNA, 25 bp, Probe sequence
aatccaatgtcttcttggcattttg

SEQ ID NO: 191845 - DNA, 25 bp, Probe sequence
aattgtttatgactgtaccgtcaat

SEQ ID NO: 191846 - DNA, 25 bp, Probe sequence
caatgtcttcttggcattttgaatt

SEQ ID NO: 191847 - DNA, 25 bp, Probe sequence
cttcttggcattttgaatttatata

SEQ ID NO: 191848 - DNA, 25 bp, Probe sequence
ccaatgtcttcttggcattttgaat

SEQ ID NO: 191849 - DNA, 25 bp, Probe sequence
gcaatggaagtaatccaatgtcttc

SEQ ID NO: 191850 - DNA, 25 bp, Probe sequence
gaagtaatccaatgtcttcttggca

SEQ ID NO: 191851 - DNA, 25 bp, Probe sequence
gtttatgactgtaccgtcaattcag

SEQ ID NO: 191852 - DNA, 25 bp, Probe sequence
gtaatccaatgtcttcttggcattt

SEQ ID NO: 191853 - DNA, 25 bp, Probe sequence
gtcttcttggcattttgaatttata

SEQ ID NO: 191854 - DNA, 25 bp, Probe sequence
ggaagtaatccaatgtcttcttggc

SEQ ID NO: 191855 - DNA, 25 bp, Probe sequence
tggaagtaatccaatgtcttcttgg

SEQ ID NO: 191856 - DNA, 25 bp, Probe sequence
tgtcttcttggcattttgaatttat

SEQ ID NO: 191857 - DNA, 25 bp, Probe sequence
tgtttatgactgtaccgtcaattca

SEQ ID NO: 191858 - DNA, 25 bp, Probe sequence
tccaatgtcttcttggcattttgaa

SEQ ID NO: 191859 - DNA, 25 bp, Probe sequence
tcttcttggcattttgaatttatat

SEQ ID NO: 191860 - DNA, 25 bp, Probe sequence
tcttggcattttgaatttatataaa

SEQ ID NO: 191861 - DNA, 25 bp, Probe sequence
taatccaatgtcttcttggcatttt

SEQ ID NO: 191862 - DNA, 25 bp, Probe sequence
taaattgtttatgactgtaccgtca

SEQ ID NO: 191863 - DNA, 25 bp, Probe sequence
tatgactgtaccgtcaattcagttg

SEQ ID NO: 191864 - DNA, 25 bp, Probe sequence
tttatgactgtaccgtcaattcagt

SEQ ID NO: 191865 - DNA, 25 bp, Probe sequence
ttatgactgtaccgtcaattcagtt

SEQ ID NO: 191866 - DNA, 25 bp, Probe sequence
ttgtttatgactgtaccgtcaattc

SEQ ID NO: 191867 - DNA, 25 bp, Probe sequence
atctttaaaacgaatcataattatg

SEQ ID NO: 191868 - DNA, 25 bp, Probe sequence
atgaagtaatgaagtatgacaatgg

SEQ ID NO: 191869 - DNA, 25 bp, Probe sequence
atgaacatctttaaaacgaatcata

SEQ ID NO: 191870 - DNA, 25 bp, Probe sequence
atgatgaagtaatgaagtatgacaa

SEQ ID NO: 191871 - DNA, 25 bp, Probe sequence
atggtgaattcataaaatatggcaa

SEQ ID NO: 191872 - DNA, 25 bp, Probe sequence
agtaatgaagtatgacaatggtgaa

SEQ ID NO: 191873 - DNA, 25 bp, Probe sequence
acatctttaaaacgaatcataatta

SEQ ID NO: 191874 - DNA, 25 bp, Probe sequence
acaatggtgaattcataaaatatgg

SEQ ID NO: 191875 - DNA, 25 bp, Probe sequence
aacatctttaaaacgaatcataatt

SEQ ID NO: 191876 - DNA, 25 bp, Probe sequence
aagtaatgaagtatgacaatggtga

SEQ ID NO: 191877 - DNA, 25 bp, Probe sequence
aatggtgaattcataaaatatggca

SEQ ID NO: 191878 - DNA, 25 bp, Probe sequence
caatggtgaattcataaaatatggc

SEQ ID NO: 191879 - DNA, 25 bp, Probe sequence
catctttaaaacgaatcataattat

SEQ ID NO: 191880 - DNA, 25 bp, Probe sequence
gaattcataaaatatggcaaattgt

SEQ ID NO: 191881 - DNA, 25 bp, Probe sequence
gaagtaatgaagtatgacaatggtg

SEQ ID NO: 191882 - DNA, 25 bp, Probe sequence
gaacatctttaaaacgaatcataat

SEQ ID NO: 191883 - DNA, 25 bp, Probe sequence
gacaatggtgaattcataaaatatg

SEQ ID NO: 191884 - DNA, 25 bp, Probe sequence
gatgaagtaatgaagtatgacaatg

SEQ ID NO: 191885 - DNA, 25 bp, Probe sequence
gtaatgaagtatgacaatggtgaat

SEQ ID NO: 191886 - DNA, 25 bp, Probe sequence
gtgaattcataaaatatggcaaatt

SEQ ID NO: 191887 - DNA, 25 bp, Probe sequence
ggtgaattcataaaatatggcaaat

SEQ ID NO: 191888 - DNA, 25 bp, Probe sequence
tggtgaattcataaaatatggcaaa

SEQ ID NO: 191889 - DNA, 25 bp, Probe sequence
tgatgaagtaatgaagtatgacaat

SEQ ID NO: 191890 - DNA, 25 bp, Probe sequence
tgaacatctttaaaacgaatcataa

SEQ ID NO: 191891 - DNA, 25 bp, Probe sequence
tgaagtaatgaagtatgacaatggt

SEQ ID NO: 191892 - DNA, 25 bp, Probe sequence
tctttaaaacgaatcataattatga

SEQ ID NO: 191893 - DNA, 25 bp, Probe sequence
tcataaaatatggcaaattgttaaa

SEQ ID NO: 191894 - DNA, 25 bp, Probe sequence
tatgatgaagtaatgaagtatgaca

SEQ ID NO: 191895 - DNA, 25 bp, Probe sequence
ttcataaaatatggcaaattgttaa

SEQ ID NO: 191896 - DNA, 25 bp, Probe sequence
attatcctcacaatcattaaaggac

SEQ ID NO: 191897 - DNA, 25 bp, Probe sequence
atttgcgcaatcgaatattattatg

SEQ ID NO: 191898 - DNA, 25 bp, Probe sequence
atcatttgcgcaatcgaatattatt

SEQ ID NO: 191899 - DNA, 25 bp, Probe sequence
atcctcacaatcattaaaggacaag

SEQ ID NO: 191900 - DNA, 25 bp, Probe sequence
agttacaatcatttgcgcaatcgaa

SEQ ID NO: 191901 - DNA, 25 bp, Probe sequence
acaatcatttgcgcaatcgaatatt

SEQ ID NO: 191902 - DNA, 25 bp, Probe sequence
aaattattattatcctcacaatcat

SEQ ID NO: 191903 - DNA, 25 bp, Probe sequence
aaaaatcattacataacatacaaat

SEQ ID NO: 191904 - DNA, 25 bp, Probe sequence
aaaaattattattatcctcacaatc

SEQ ID NO: 191905 - DNA, 25 bp, Probe sequence
aaaattattattatcctcacaatca

SEQ ID NO: 191906 - DNA, 25 bp, Probe sequence
aacatacaaattttggttatggaag

SEQ ID NO: 191907 - DNA, 25 bp, Probe sequence
aagttacaatcatttgcgcaatcga

SEQ ID NO: 191908 - DNA, 25 bp, Probe sequence
aatcattacataacatacaaatttt

SEQ ID NO: 191909 - DNA, 25 bp, Probe sequence
aatcatttgcgcaatcgaatattat

SEQ ID NO: 191910 - DNA, 25 bp, Probe sequence
aattattattatcctcacaatcatt

SEQ ID NO: 191911 - DNA, 25 bp, Probe sequence
caatcatttgcgcaatcgaatatta

SEQ ID NO: 191912 - DNA, 25 bp, Probe sequence
cacaatcattaaaggacaagagtat

SEQ ID NO: 191913 - DNA, 25 bp, Probe sequence
catttgcgcaatcgaatattattat

SEQ ID NO: 191914 - DNA, 25 bp, Probe sequence
cattacataacatacaaattttggt

SEQ ID NO: 191915 - DNA, 25 bp, Probe sequence
gaagttacaatcatttgcgcaatcg

SEQ ID NO: 191916 - DNA, 25 bp, Probe sequence
gttacaatcatttgcgcaatcgaat

SEQ ID NO: 191917 - DNA, 25 bp, Probe sequence
ggaagttacaatcatttgcgcaatc

SEQ ID NO: 191918 - DNA, 25 bp, Probe sequence
tggaagttacaatcatttgcgcaat

SEQ ID NO: 191919 - DNA, 25 bp, Probe sequence
tcatttgcgcaatcgaatattatta

SEQ ID NO: 191920 - DNA, 25 bp, Probe sequence
tacaatcatttgcgcaatcgaatat

SEQ ID NO: 191921 - DNA, 25 bp, Probe sequence
tatcctcacaatcattaaaggacaa

SEQ ID NO: 191922 - DNA, 25 bp, Probe sequence
tattattatcctcacaatcattaaa

SEQ ID NO: 191923 - DNA, 25 bp, Probe sequence
tattatcctcacaatcattaaagga

SEQ ID NO: 191924 - DNA, 25 bp, Probe sequence
tttgcgcaatcgaatattattatgt

SEQ ID NO: 191925 - DNA, 25 bp, Probe sequence
ttattatcctcacaatcattaaagg

SEQ ID NO: 191926 - DNA, 25 bp, Probe sequence
ttattattatcctcacaatcattaa

SEQ ID NO: 191927 - DNA, 25 bp, Probe sequence
ttatcctcacaatcattaaaggaca

SEQ ID NO: 191928 - DNA, 25 bp, Probe sequence
ttacaatcatttgcgcaatcgaata

SEQ ID NO: 191929 - DNA, 25 bp, Probe sequence
ttgcgcaatcgaatattattatgtt

SEQ ID NO: 191930 - DNA, 25 bp, Probe sequence
attggtaatcaaacattcattcgag

SEQ ID NO: 191931 - DNA, 25 bp, Probe sequence
attcattcgagccataaaaaagaga

SEQ ID NO: 191932 - DNA, 25 bp, Probe sequence
atcaaacattcattcgagccataaa

SEQ ID NO: 191933 - DNA, 25 bp, Probe sequence
atcactacaaacaacgtcttactgt

SEQ ID NO: 191934 - DNA, 25 bp, Probe sequence
atcctaagcaatattttcaatcaat

SEQ ID NO: 191935 - DNA, 25 bp, Probe sequence
acgtcttactgtaattggtaatcaa

SEQ ID NO: 191936 - DNA, 25 bp, Probe sequence
actacaaacaacgtcttactgtaat

SEQ ID NO: 191937 - DNA, 25 bp, Probe sequence
acattcattcgagccataaaaaaga

SEQ ID NO: 191938 - DNA, 25 bp, Probe sequence
acaaacaacgtcttactgtaattgg

SEQ ID NO: 191939 - DNA, 25 bp, Probe sequence
acaacgtcttactgtaattggtaat

SEQ ID NO: 191940 - DNA, 25 bp, Probe sequence
aaacattcattcgagccataaaaaa

SEQ ID NO: 191941 - DNA, 25 bp, Probe sequence
aacattcattcgagccataaaaaag

SEQ ID NO: 191942 - DNA, 25 bp, Probe sequence
aacgtcttactgtaattggtaatca

SEQ ID NO: 191943 - DNA, 25 bp, Probe sequence
aagcaatattttcaatcaattcata

SEQ ID NO: 191944 - DNA, 25 bp, Probe sequence
taagggaaaatcactacaaacaacg

SEQ ID NO: 191945 - DNA, 25 bp, Probe sequence
aatcactacaaacaacgtcttactg

SEQ ID NO: 191946 - DNA, 25 bp, Probe sequence
aatcctaagcaatattttcaatcaa

SEQ ID NO: 191947 - DNA, 25 bp, Probe sequence
caacgtcttactgtaattggtaatc

SEQ ID NO: 191948 - DNA, 25 bp, Probe sequence
aatcaaacattcattcgagccataa

SEQ ID NO: 191949 - DNA, 25 bp, Probe sequence
caaacaacgtcttactgtaattggt

SEQ ID NO: 191950 - DNA, 25 bp, Probe sequence
caaacattcattcgagccataaaaa

SEQ ID NO: 191951 - DNA, 25 bp, Probe sequence
cactacaaacaacgtcttactgtaa

SEQ ID NO: 191952 - DNA, 25 bp, Probe sequence
ctacaaacaacgtcttactgtaatt

SEQ ID NO: 191953 - DNA, 25 bp, Probe sequence
cctaagcaatattttcaatcaattc

SEQ ID NO: 191954 - DNA, 25 bp, Probe sequence
gcaatattttcaatcaattcataaa

SEQ ID NO: 191955 - DNA, 25 bp, Probe sequence
gaatcctaagcaatattttcaatca

SEQ ID NO: 191956 - DNA, 25 bp, Probe sequence
gtaatcaaacattcattcgagccat

SEQ ID NO: 191957 - DNA, 25 bp, Probe sequence
gtcttactgtaattggtaatcaaac

SEQ ID NO: 191958 - DNA, 25 bp, Probe sequence
ggtaatcaaacattcattcgagcca

SEQ ID NO: 191959 - DNA, 25 bp, Probe sequence
tggtaatcaaacattcattcgagcc

SEQ ID NO: 191960 - DNA, 25 bp, Probe sequence
tcactacaaacaacgtcttactgta

SEQ ID NO: 191961 - DNA, 25 bp, Probe sequence
tcaaacattcattcgagccataaaa

SEQ ID NO: 191962 - DNA, 25 bp, Probe sequence
taatcaaacattcattcgagccata

SEQ ID NO: 191963 - DNA, 25 bp, Probe sequence
taagcaatattttcaatcaattcat

SEQ ID NO: 191964 - DNA, 25 bp, Probe sequence
atgaaaaaactgctacttgcgccaa

SEQ ID NO: 191965 - DNA, 25 bp, Probe sequence
agtaacagtgacaaacgattaacaa

SEQ ID NO: 191966 - DNA, 25 bp, Probe sequence
acttgcgccaacaagtaacagtgac

SEQ ID NO: 191967 - DNA, 25 bp, Probe sequence
actgctacttgcgccaacaagtaac

SEQ ID NO: 191968 - DNA, 25 bp, Probe sequence
acagtgacaaacgattaacaaaatt

SEQ ID NO: 191969 - DNA, 25 bp, Probe sequence
acaagtaacagtgacaaacgattaa

SEQ ID NO: 191970 - DNA, 25 bp, Probe sequence
aaactgctacttgcgccaacaagta

SEQ ID NO: 191971 - DNA, 25 bp, Probe sequence
aaaaaactgctacttgcgccaacaa

SEQ ID NO: 191972 - DNA, 25 bp, Probe sequence
aaaaactgctacttgcgccaacaag

SEQ ID NO: 191973 - DNA, 25 bp, Probe sequence
aacaagtaacagtgacaaacgatta

SEQ ID NO: 191974 - DNA, 25 bp, Probe sequence
aaaactgctacttgcgccaacaagt

SEQ ID NO: 191975 - DNA, 25 bp, Probe sequence
aacaaaattaattcattttcaatat

SEQ ID NO: 191976 - DNA, 25 bp, Probe sequence
aacagtgacaaacgattaacaaaat

SEQ ID NO: 191977 - DNA, 25 bp, Probe sequence
aactgctacttgcgccaacaagtaa

SEQ ID NO: 191978 - DNA, 25 bp, Probe sequence
aagtaacagtgacaaacgattaaca

SEQ ID NO: 191979 - DNA, 25 bp, Probe sequence
caagtaacagtgacaaacgattaac

SEQ ID NO: 191980 - DNA, 25 bp, Probe sequence
caacaagtaacagtgacaaacgatt

SEQ ID NO: 191981 - DNA, 25 bp, Probe sequence
cttgcgccaacaagtaacagtgaca

SEQ ID NO: 191982 - DNA, 25 bp, Probe sequence
ctacttgcgccaacaagtaacagtg

SEQ ID NO: 191983 - DNA, 25 bp, Probe sequence
ctgctacttgcgccaacaagtaaca

SEQ ID NO: 191984 - DNA, 25 bp, Probe sequence
cgccaacaagtaacagtgacaaacg

SEQ ID NO: 191985 - DNA, 25 bp, Probe sequence
ccaacaagtaacagtgacaaacgat

SEQ ID NO: 191986 - DNA, 25 bp, Probe sequence
gccaacaagtaacagtgacaaacga

SEQ ID NO: 191987 - DNA, 25 bp, Probe sequence
gcgccaacaagtaacagtgacaaac

SEQ ID NO: 191988 - DNA, 25 bp, Probe sequence
gctacttgcgccaacaagtaacagt

SEQ ID NO: 191989 - DNA, 25 bp, Probe sequence
gaaaaaactgctacttgcgccaaca

SEQ ID NO: 191990 - DNA, 25 bp, Probe sequence
gtaacagtgacaaacgattaacaaa

SEQ ID NO: 191991 - DNA, 25 bp, Probe sequence
tgaaaaaactgctacttgcgccaac

SEQ ID NO: 191992 - DNA, 25 bp, Probe sequence
tgctacttgcgccaacaagtaacag

SEQ ID NO: 191993 - DNA, 25 bp, Probe sequence
tgcgccaacaagtaacagtgacaaa

SEQ ID NO: 191994 - DNA, 25 bp, Probe sequence
taattcattttcaatataaaacgaa

SEQ ID NO: 191995 - DNA, 25 bp, Probe sequence
taacagtgacaaacgattaacaaaa

SEQ ID NO: 191996 - DNA, 25 bp, Probe sequence
tacttgcgccaacaagtaacagtga

SEQ ID NO: 191997 - DNA, 25 bp, Probe sequence
ttgcgccaacaagtaacagtgacaa

SEQ ID NO: 191998 - DNA, 25 bp, Probe sequence
attgttaggtgcatatgaggcatgt

SEQ ID NO: 191999 - DNA, 25 bp, Probe sequence
atattgttaggtgcatatgaggcat

SEQ ID NO: 192000 - DNA, 25 bp, Probe sequence
atatcagtttaaagttagtcaattc

SEQ ID NO: 192001 - DNA, 25 bp, Probe sequence
atatgaggcatgtagaggtatagtg

SEQ ID NO: 192002 - DNA, 25 bp, Probe sequence
atcagtttaaagttagtcaattcaa

SEQ ID NO: 192003 - DNA, 25 bp, Probe sequence
atgaggcatgtagaggtatagtgga

SEQ ID NO: 192004 - DNA, 25 bp, Probe sequence
atgagatatcagtttaaagttagtc

SEQ ID NO: 192005 - DNA, 25 bp, Probe sequence
aggcatgtagaggtatagtggaagt

SEQ ID NO: 192006 - DNA, 25 bp, Probe sequence
aggtgcatatgaggcatgtagaggt

SEQ ID NO: 192007 - DNA, 25 bp, Probe sequence
aaatgaaaacgatgagatatcagtt

SEQ ID NO: 192008 - DNA, 25 bp, Probe sequence
aacgatgagatatcagtttaaagtt

SEQ ID NO: 192009 - DNA, 25 bp, Probe sequence
cagtttaaagttagtcaattcaaat

SEQ ID NO: 192010 - DNA, 25 bp, Probe sequence
catgtagaggtatagtggaagttaa

SEQ ID NO: 192011 - DNA, 25 bp, Probe sequence
gcatatgaggcatgtagaggtatag

SEQ ID NO: 192012 - DNA, 25 bp, Probe sequence
gcatgtagaggtatagtggaagtta

SEQ ID NO: 192013 - DNA, 25 bp, Probe sequence
gagatatcagtttaaagttagtcaa

SEQ ID NO: 192014 - DNA, 25 bp, Probe sequence
gaggtatagtggaagttaaagaaat

SEQ ID NO: 192015 - DNA, 25 bp, Probe sequence
gaggcatgtagaggtatagtggaag

SEQ ID NO: 192016 - DNA, 25 bp, Probe sequence
gatgagatatcagtttaaagttagt

SEQ ID NO: 192017 - DNA, 25 bp, Probe sequence
gatatcagtttaaagttagtcaatt

SEQ ID NO: 192018 - DNA, 25 bp, Probe sequence
gatattgttaggtgcatatgaggca

SEQ ID NO: 192019 - DNA, 25 bp, Probe sequence
gttaggtgcatatgaggcatgtaga

SEQ ID NO: 192020 - DNA, 25 bp, Probe sequence
gtagaggtatagtggaagttaaaga

SEQ ID NO: 192021 - DNA, 25 bp, Probe sequence
gtgcatatgaggcatgtagaggtat

SEQ ID NO: 192022 - DNA, 25 bp, Probe sequence
ggtgcatatgaggcatgtagaggta

SEQ ID NO: 192023 - DNA, 25 bp, Probe sequence
ggcatgtagaggtatagtggaagtt

SEQ ID NO: 192024 - DNA, 25 bp, Probe sequence
tgaggcatgtagaggtatagtggaa

SEQ ID NO: 192025 - DNA, 25 bp, Probe sequence
tgttaggtgcatatgaggcatgtag

SEQ ID NO: 192026 - DNA, 25 bp, Probe sequence
tgcatatgaggcatgtagaggtata

SEQ ID NO: 192027 - DNA, 25 bp, Probe sequence
taggtgcatatgaggcatgtagagg

SEQ ID NO: 192028 - DNA, 25 bp, Probe sequence
tatcagtttaaagttagtcaattca

SEQ ID NO: 192029 - DNA, 25 bp, Probe sequence
tattgttaggtgcatatgaggcatg

SEQ ID NO: 192030 - DNA, 25 bp, Probe sequence
ttaggtgcatatgaggcatgtagag

SEQ ID NO: 192031 - DNA, 25 bp, Probe sequence
ttgttaggtgcatatgaggcatgta

SEQ ID NO: 192032 - DNA, 25 bp, Probe sequence
attcatcttttcaacaattgaggtt

SEQ ID NO: 192033 - DNA, 25 bp, Probe sequence
attttcattcatcttttcaacaatt

SEQ ID NO: 192034 - DNA, 25 bp, Probe sequence
atcttttcaacaattgaggttaacg

SEQ ID NO: 192035 - DNA, 25 bp, Probe sequence
atcattttcattcatcttttcaaca

SEQ ID NO: 192036 - DNA, 25 bp, Probe sequence
acaatcaaaagtatacattattaaa

SEQ ID NO: 192037 - DNA, 25 bp, Probe sequence
aaagtatacattattaaattatcat

SEQ ID NO: 192038 - DNA, 25 bp, Probe sequence
aaacaatcaaaagtatacattatta

SEQ ID NO: 192039 - DNA, 25 bp, Probe sequence
aaaagtatacattattaaattatca

SEQ ID NO: 192040 - DNA, 25 bp, Probe sequence
aacaatcaaaagtatacattattaa

SEQ ID NO: 192041 - DNA, 25 bp, Probe sequence
aatcaaaagtatacattattaaatt

SEQ ID NO: 192042 - DNA, 25 bp, Probe sequence
caatcaaaagtatacattattaaat

SEQ ID NO: 192043 - DNA, 25 bp, Probe sequence
caaaagtatacattattaaattatc

SEQ ID NO: 192044 - DNA, 25 bp, Probe sequence
catcttttcaacaattgaggttaac

SEQ ID NO: 192045 - DNA, 25 bp, Probe sequence
cattcatcttttcaacaattgaggt

SEQ ID NO: 192046 - DNA, 25 bp, Probe sequence
cattttcattcatcttttcaacaat

SEQ ID NO: 192047 - DNA, 25 bp, Probe sequence
gtttaaacaatcaaaagtatacatt

SEQ ID NO: 192048 - DNA, 25 bp, Probe sequence
tcttttcaacaattgaggttaacgt

SEQ ID NO: 192049 - DNA, 25 bp, Probe sequence
tcatcttttcaacaattgaggttaa

SEQ ID NO: 192050 - DNA, 25 bp, Probe sequence
tcattcatcttttcaacaattgagg

SEQ ID NO: 192051 - DNA, 25 bp, Probe sequence
tcattttcattcatcttttcaacaa

SEQ ID NO: 192052 - DNA, 25 bp, Probe sequence
tcaacaattgaggttaacgtagtaa

SEQ ID NO: 192053 - DNA, 25 bp, Probe sequence
taaacaatcaaaagtatacattatt

SEQ ID NO: 192054 - DNA, 25 bp, Probe sequence
ttttcaacaattgaggttaacgtag

SEQ ID NO: 192055 - DNA, 25 bp, Probe sequence
tttcaacaattgaggttaacgtagt

SEQ ID NO: 192056 - DNA, 25 bp, Probe sequence
tttcattcatcttttcaacaattga

SEQ ID NO: 192057 - DNA, 25 bp, Probe sequence
ttttcattcatcttttcaacaattg

SEQ ID NO: 192058 - DNA, 25 bp, Probe sequence
ttcaacaattgaggttaacgtagta

SEQ ID NO: 192059 - DNA, 25 bp, Probe sequence
ttcatcttttcaacaattgaggtta

SEQ ID NO: 192060 - DNA, 25 bp, Probe sequence
ttcattcatcttttcaacaattgag

SEQ ID NO: 192061 - DNA, 25 bp, Probe sequence
atatactaaattcatttgagacaat

SEQ ID NO: 192062 - DNA, 25 bp, Probe sequence
atcactttcagaattgttaacaggt

SEQ ID NO: 192063 - DNA, 25 bp, Probe sequence
agtaatatcactttcagaattgtta

SEQ ID NO: 192064 - DNA, 25 bp, Probe sequence
agttggctattttacaattagcaat

SEQ ID NO: 192065 - DNA, 25 bp, Probe sequence
agaactcatttagttttttcacaat

SEQ ID NO: 192066 - DNA, 25 bp, Probe sequence
acctgtctagaactcatttagtttt

SEQ ID NO: 192067 - DNA, 25 bp, Probe sequence
actcatttagttttttcacaattca

SEQ ID NO: 192068 - DNA, 25 bp, Probe sequence
acaaaacctgtctagaactcattta

SEQ ID NO: 192069 - DNA, 25 bp, Probe sequence
aaacctgtctagaactcatttagtt

SEQ ID NO: 192070 - DNA, 25 bp, Probe sequence
aaacaaacaaatactagttggctat

SEQ ID NO: 192071 - DNA, 25 bp, Probe sequence
aaaacctgtctagaactcatttagt

SEQ ID NO: 192072 - DNA, 25 bp, Probe sequence
aagtgaatcagcacacgatgttgat

SEQ ID NO: 192073 - DNA, 25 bp, Probe sequence
aatactagttggctattttacaatt

SEQ ID NO: 192074 - DNA, 25 bp, Probe sequence
cacacgatgttgatttatttttgaa

SEQ ID NO: 192075 - DNA, 25 bp, Probe sequence
cactttcagaattgttaacaggtga

SEQ ID NO: 192076 - DNA, 25 bp, Probe sequence
cacgatgttgatttatttttgaaaa

SEQ ID NO: 192077 - DNA, 25 bp, Probe sequence
gcacacgatgttgatttatttttga

SEQ ID NO: 192078 - DNA, 25 bp, Probe sequence
gaattgttaacaggtgataagcaag

SEQ ID NO: 192079 - DNA, 25 bp, Probe sequence
gaatcagcacacgatgttgatttat

SEQ ID NO: 192080 - DNA, 25 bp, Probe sequence
gaaaaataagtctatagcatttgat

SEQ ID NO: 192081 - DNA, 25 bp, Probe sequence
gacaaaacctgtctagaactcattt

SEQ ID NO: 192082 - DNA, 25 bp, Probe sequence
gagacaatatcaatttcaggaagtg

SEQ ID NO: 192083 - DNA, 25 bp, Probe sequence
gtctagaactcatttagttttttca

SEQ ID NO: 192084 - DNA, 25 bp, Probe sequence
gtgaatcagcacacgatgttgattt

SEQ ID NO: 192085 - DNA, 25 bp, Probe sequence
ggtgataagcaagaggttaagcgaa

SEQ ID NO: 192086 - DNA, 25 bp, Probe sequence
ggttaagcgaaagataccttcagtt

SEQ ID NO: 192087 - DNA, 25 bp, Probe sequence
ggaagtgaatcagcacacgatgttg

SEQ ID NO: 192088 - DNA, 25 bp, Probe sequence
tcatttagttttttcacaattcaaa

SEQ ID NO: 192089 - DNA, 25 bp, Probe sequence
tcagcacacgatgttgatttatttt

SEQ ID NO: 192090 - DNA, 25 bp, Probe sequence
taagcgaaagataccttcagtttta

SEQ ID NO: 192091 - DNA, 25 bp, Probe sequence
tacaattagcaataaacccttagtt

SEQ ID NO: 192092 - DNA, 25 bp, Probe sequence
tactagttggctattttacaattag

SEQ ID NO: 192093 - DNA, 25 bp, Probe sequence
tagcatttgatagacaaaacctgtc

SEQ ID NO: 192094 - DNA, 25 bp, Probe sequence
ttcaggaagtgaatcagcacacgat

SEQ ID NO: 192095 - DNA, 25 bp, Probe sequence
attactactgattataaattcacaa

SEQ ID NO: 192096 - DNA, 25 bp, Probe sequence
atagatgcaatggagattaacgaaa

SEQ ID NO: 192097 - DNA, 25 bp, Probe sequence
atctattgaaggattatcgaagtaa

SEQ ID NO: 192098 - DNA, 25 bp, Probe sequence
atcagcgcaaaaactaatagatgca

SEQ ID NO: 192099 - DNA, 25 bp, Probe sequence
atggctacaataagtattactactg

SEQ ID NO: 192100 - DNA, 25 bp, Probe sequence
agcgactaaaataaaatcaacttgt

SEQ ID NO: 192101 - DNA, 25 bp, Probe sequence
aaattcacaaaaaaatcagcgcaaa

SEQ ID NO: 192102 - DNA, 25 bp, Probe sequence
aaatcagcgcaaaaactaatagatg

SEQ ID NO: 192103 - DNA, 25 bp, Probe sequence
aaaaatcagcgcaaaaactaataga

SEQ ID NO: 192104 - DNA, 25 bp, Probe sequence
aagtattactactgattataaattc

SEQ ID NO: 192105 - DNA, 25 bp, Probe sequence
aatcaacttgtgagattgaaaatct

SEQ ID NO: 192106 - DNA, 25 bp, Probe sequence
aatagatgcaatggagattaacgaa

SEQ ID NO: 192107 - DNA, 25 bp, Probe sequence
aattcacaaaaaaatcagcgcaaaa

SEQ ID NO: 192108 - DNA, 25 bp, Probe sequence
cagcgcaaaaactaatagatgcaat

SEQ ID NO: 192109 - DNA, 25 bp, Probe sequence
gcgcaaaaactaatagatgcaatgg

SEQ ID NO: 192110 - DNA, 25 bp, Probe sequence
gcgactaaaataaaatcaacttgtg

SEQ ID NO: 192111 - DNA, 25 bp, Probe sequence
gctacaataagtattactactgatt

SEQ ID NO: 192112 - DNA, 25 bp, Probe sequence
gaacaaaacaaacataaaagcgact

SEQ ID NO: 192113 - DNA, 25 bp, Probe sequence
gaaaatctattgaaggattatcgaa

SEQ ID NO: 192114 - DNA, 25 bp, Probe sequence
gactaaaataaaatcaacttgtgag

SEQ ID NO: 192115 - DNA, 25 bp, Probe sequence
gatgcaatggagattaacgaaaata

SEQ ID NO: 192116 - DNA, 25 bp, Probe sequence
gtattactactgattataaattcac

SEQ ID NO: 192117 - DNA, 25 bp, Probe sequence
gtagtatggctacaataagtattac

SEQ ID NO: 192118 - DNA, 25 bp, Probe sequence
gtatggctacaataagtattactac

SEQ ID NO: 192119 - DNA, 25 bp, Probe sequence
gtgagtagtatggctacaataagta

SEQ ID NO: 192120 - DNA, 25 bp, Probe sequence
ggctacaataagtattactactgat

SEQ ID NO: 192121 - DNA, 25 bp, Probe sequence
tggctacaataagtattactactga

SEQ ID NO: 192122 - DNA, 25 bp, Probe sequence
taaattcacaaaaaaatcagcgcaa

SEQ ID NO: 192123 - DNA, 25 bp, Probe sequence
tacaataagtattactactgattat

SEQ ID NO: 192124 - DNA, 25 bp, Probe sequence
tactactgattataaattcacaaaa

SEQ ID NO: 192125 - DNA, 25 bp, Probe sequence
tatggctacaataagtattactact

SEQ ID NO: 192126 - DNA, 25 bp, Probe sequence
tattactactgattataaattcaca

SEQ ID NO: 192127 - DNA, 25 bp, Probe sequence
ttactactgattataaattcacaaa

SEQ ID NO: 192128 - DNA, 25 bp, Probe sequence
ttcacaaaaaaatcagcgcaaaaac

SEQ ID NO: 192129 - DNA, 25 bp, Probe sequence
attgttcatgtacaatatcgatata

SEQ ID NO: 192130 - DNA, 25 bp, Probe sequence
ataaagcgattatgttttgaaaaag

SEQ ID NO: 192131 - DNA, 25 bp, Probe sequence
ataattgttcatgtacaatatcgat

SEQ ID NO: 192132 - DNA, 25 bp, Probe sequence
atgtacaatatcgatataattatga

SEQ ID NO: 192133 - DNA, 25 bp, Probe sequence
atggctgtatataaatatgcaagac

SEQ ID NO: 192134 - DNA, 25 bp, Probe sequence
agcgattatgttttgaaaaaggtgg

SEQ ID NO: 192135 - DNA, 25 bp, Probe sequence
aaataattgttcatgtacaatatcg

SEQ ID NO: 192136 - DNA, 25 bp, Probe sequence
aaaagacatttatgaatatttgaaa

SEQ ID NO: 192137 - DNA, 25 bp, Probe sequence
aagcgattatgttttgaaaaaggtg

SEQ ID NO: 192138 - DNA, 25 bp, Probe sequence
aagacatttatgaatatttgaaata

SEQ ID NO: 192139 - DNA, 25 bp, Probe sequence
aataattgttcatgtacaatatcga

SEQ ID NO: 192140 - DNA, 25 bp, Probe sequence
aattgttcatgtacaatatcgatat

SEQ ID NO: 192141 - DNA, 25 bp, Probe sequence
catgtacaatatcgatataattatg

SEQ ID NO: 192142 - DNA, 25 bp, Probe sequence
gcgattatgttttgaaaaaggtgga

SEQ ID NO: 192143 - DNA, 25 bp, Probe sequence
gctgtatataaatatgcaagacaaa

SEQ ID NO: 192144 - DNA, 25 bp, Probe sequence
gaaaaagacatttatgaatatttga

SEQ ID NO: 192145 - DNA, 25 bp, Probe sequence
gacatttatgaatatttgaaatatg

SEQ ID NO: 192146 - DNA, 25 bp, Probe sequence
gtacaatatcgatataattatgaaa

SEQ ID NO: 192147 - DNA, 25 bp, Probe sequence
ggctgtatataaatatgcaagacaa

SEQ ID NO: 192148 - DNA, 25 bp, Probe sequence
tggctgtatataaatatgcaagaca

SEQ ID NO: 192149 - DNA, 25 bp, Probe sequence
tgttttgaaaaaggtggaactctca

SEQ ID NO: 192150 - DNA, 25 bp, Probe sequence
tgtacaatatcgatataattatgaa

SEQ ID NO: 192151 - DNA, 25 bp, Probe sequence
tgttcatgtacaatatcgatataat

SEQ ID NO: 192152 - DNA, 25 bp, Probe sequence
tgaaaaaggtggaactctcaatgta

SEQ ID NO: 192153 - DNA, 25 bp, Probe sequence
tcatgtacaatatcgatataattat

SEQ ID NO: 192154 - DNA, 25 bp, Probe sequence
taattgttcatgtacaatatcgata

SEQ ID NO: 192155 - DNA, 25 bp, Probe sequence
taataaagcgattatgttttgaaaa

SEQ ID NO: 192156 - DNA, 25 bp, Probe sequence
taaagcgattatgttttgaaaaagg

SEQ ID NO: 192157 - DNA, 25 bp, Probe sequence
ttttgaaaaaggtggaactctcaat

SEQ ID NO: 192158 - DNA, 25 bp, Probe sequence
tttgaaaaaggtggaactctcaatg

SEQ ID NO: 192159 - DNA, 25 bp, Probe sequence
tttataaaataattgttcatgtaca

SEQ ID NO: 192160 - DNA, 25 bp, Probe sequence
ttcatgtacaatatcgatataatta

SEQ ID NO: 192161 - DNA, 25 bp, Probe sequence
ttgaaaaaggtggaactctcaatgt

SEQ ID NO: 192162 - DNA, 25 bp, Probe sequence
ttgttcatgtacaatatcgatataa

SEQ ID NO: 192163 - DNA, 25 bp, Probe sequence
attgtaagcgtatcgcaattaatgt

SEQ ID NO: 192164 - DNA, 25 bp, Probe sequence
attgtatttcaacattgtaagcgta

SEQ ID NO: 192165 - DNA, 25 bp, Probe sequence
attattaacaaatttgatgccattg

SEQ ID NO: 192166 - DNA, 25 bp, Probe sequence
atttcaacattgtaagcgtatcgca

SEQ ID NO: 192167 - DNA, 25 bp, Probe sequence
atttgatgccattgtatttcaacat

SEQ ID NO: 192168 - DNA, 25 bp, Probe sequence
atgccattgtatttcaacattgtaa

SEQ ID NO: 192169 - DNA, 25 bp, Probe sequence
agcgtatcgcaattaatgtattaca

SEQ ID NO: 192170 - DNA, 25 bp, Probe sequence
acattgtaagcgtatcgcaattaat

SEQ ID NO: 192171 - DNA, 25 bp, Probe sequence
acaaatttgatgccattgtatttca

SEQ ID NO: 192172 - DNA, 25 bp, Probe sequence
aaatttgatgccattgtatttcaac

SEQ ID NO: 192173 - DNA, 25 bp, Probe sequence
aacaaatttgatgccattgtatttc

SEQ ID NO: 192174 - DNA, 25 bp, Probe sequence
aacattgtaagcgtatcgcaattaa

SEQ ID NO: 192175 - DNA, 25 bp, Probe sequence
aagcgtatcgcaattaatgtattac

SEQ ID NO: 192176 - DNA, 25 bp, Probe sequence
aatttgatgccattgtatttcaaca

SEQ ID NO: 192177 - DNA, 25 bp, Probe sequence
caacattgtaagcgtatcgcaatta

SEQ ID NO: 192178 - DNA, 25 bp, Probe sequence
cattgtaagcgtatcgcaattaatg

SEQ ID NO: 192179 - DNA, 25 bp, Probe sequence
cattgtatttcaacattgtaagcgt

SEQ ID NO: 192180 - DNA, 25 bp, Probe sequence
ccattgtatttcaacattgtaagcg

SEQ ID NO: 192181 - DNA, 25 bp, Probe sequence
gccattgtatttcaacattgtaagc

SEQ ID NO: 192182 - DNA, 25 bp, Probe sequence
gcgtatcgcaattaatgtattacaa

SEQ ID NO: 192183 - DNA, 25 bp, Probe sequence
gatgccattgtatttcaacattgta

SEQ ID NO: 192184 - DNA, 25 bp, Probe sequence
gtatttcaacattgtaagcgtatcg

SEQ ID NO: 192185 - DNA, 25 bp, Probe sequence
gtatcgcaattaatgtattacaaac

SEQ ID NO: 192186 - DNA, 25 bp, Probe sequence
tgtatttcaacattgtaagcgtatc

SEQ ID NO: 192187 - DNA, 25 bp, Probe sequence
tgatgccattgtatttcaacattgt

SEQ ID NO: 192188 - DNA, 25 bp, Probe sequence
tgccattgtatttcaacattgtaag

SEQ ID NO: 192189 - DNA, 25 bp, Probe sequence
tcaacattgtaagcgtatcgcaatt

SEQ ID NO: 192190 - DNA, 25 bp, Probe sequence
taagcgtatcgcaattaatgtatta

SEQ ID NO: 192191 - DNA, 25 bp, Probe sequence
tatcgcaattaatgtattacaaacg

SEQ ID NO: 192192 - DNA, 25 bp, Probe sequence
tatttcaacattgtaagcgtatcgc

SEQ ID NO: 192193 - DNA, 25 bp, Probe sequence
tttgatgccattgtatttcaacatt

SEQ ID NO: 192194 - DNA, 25 bp, Probe sequence
tttcaacattgtaagcgtatcgcaa

SEQ ID NO: 192195 - DNA, 25 bp, Probe sequence
ttcaacattgtaagcgtatcgcaat

SEQ ID NO: 192196 - DNA, 25 bp, Probe sequence
ttgatgccattgtatttcaacattg

SEQ ID NO: 192197 - DNA, 25 bp, Probe sequence
atattatatatttttactacgcttt

SEQ ID NO: 192198 - DNA, 25 bp, Probe sequence
atatatttttactacgcttttatct

SEQ ID NO: 192199 - DNA, 25 bp, Probe sequence
atgtgtaccaaataaagttgttaga

SEQ ID NO: 192200 - DNA, 25 bp, Probe sequence
agttgttagatttattttgcgtaca

SEQ ID NO: 192201 - DNA, 25 bp, Probe sequence
acgcttttatcttcaattactgtta

SEQ ID NO: 192202 - DNA, 25 bp, Probe sequence
actacgcttttatcttcaattactg

SEQ ID NO: 192203 - DNA, 25 bp, Probe sequence
caattactgttacttcgaaatgtgt

SEQ ID NO: 192204 - DNA, 25 bp, Probe sequence
gcgtacagtcgtaggctacggtata

SEQ ID NO: 192205 - DNA, 25 bp, Probe sequence
gcttttatcttcaattactgttact

SEQ ID NO: 192206 - DNA, 25 bp, Probe sequence
gaagggtgattcgatggcacaacgt

SEQ ID NO: 192207 - DNA, 25 bp, Probe sequence
gatggcacaacgttacattaaagta

SEQ ID NO: 192208 - DNA, 25 bp, Probe sequence
gatttattttgcgtacagtcgtagg

SEQ ID NO: 192209 - DNA, 25 bp, Probe sequence
gattcgatggcacaacgttacatta

SEQ ID NO: 192210 - DNA, 25 bp, Probe sequence
gttacttcgaaatgtgtaccaaata

SEQ ID NO: 192211 - DNA, 25 bp, Probe sequence
gttagatttattttgcgtacagtcg

SEQ ID NO: 192212 - DNA, 25 bp, Probe sequence
gtaggctacggtatatttgcatatg

SEQ ID NO: 192213 - DNA, 25 bp, Probe sequence
gtcgtaggctacggtatatttgcat

SEQ ID NO: 192214 - DNA, 25 bp, Probe sequence
gtgattcgatggcacaacgttacat

SEQ ID NO: 192215 - DNA, 25 bp, Probe sequence
gggtgattcgatggcacaacgttac

SEQ ID NO: 192216 - DNA, 25 bp, Probe sequence
ggcacaacgttacattaaagtatta

SEQ ID NO: 192217 - DNA, 25 bp, Probe sequence
ggctacggtatatttgcatatggtt

SEQ ID NO: 192218 - DNA, 25 bp, Probe sequence
tcttcaattactgttacttcgaaat

SEQ ID NO: 192219 - DNA, 25 bp, Probe sequence
tactgttacttcgaaatgtgtacca

SEQ ID NO: 192220 - DNA, 25 bp, Probe sequence
tactacgcttttatcttcaattact

SEQ ID NO: 192221 - DNA, 25 bp, Probe sequence
tacgcttttatcttcaattactgtt

SEQ ID NO: 192222 - DNA, 25 bp, Probe sequence
tatttttactacgcttttatcttca

SEQ ID NO: 192223 - DNA, 25 bp, Probe sequence
tattttgcgtacagtcgtaggctac

SEQ ID NO: 192224 - DNA, 25 bp, Probe sequence
ttttgcgtacagtcgtaggctacgg

SEQ ID NO: 192225 - DNA, 25 bp, Probe sequence
tttactacgcttttatcttcaatta

SEQ ID NO: 192226 - DNA, 25 bp, Probe sequence
tttttactacgcttttatcttcaat

SEQ ID NO: 192227 - DNA, 25 bp, Probe sequence
ttatcttcaattactgttacttcga

SEQ ID NO: 192228 - DNA, 25 bp, Probe sequence
ttactacgcttttatcttcaattac

SEQ ID NO: 192229 - DNA, 25 bp, Probe sequence
ttgcgtacagtcgtaggctacggta

SEQ ID NO: 192230 - DNA, 25 bp, Probe sequence
ttcgatggcacaacgttacattaaa

SEQ ID NO: 192231 - DNA, 25 bp, Probe sequence
attttgtacactcatcaagcaagta

SEQ ID NO: 192232 - DNA, 25 bp, Probe sequence
atcatttggaagtcttacgtgaatt

SEQ ID NO: 192233 - DNA, 25 bp, Probe sequence
agtcttacgtgaattttgtacactc

SEQ ID NO: 192234 - DNA, 25 bp, Probe sequence
agacagtttttacgacgacactttg

SEQ ID NO: 192235 - DNA, 25 bp, Probe sequence
acgtgaattttgtacactcatcaag

SEQ ID NO: 192236 - DNA, 25 bp, Probe sequence
aaatcatttggaagtcttacgtgaa

SEQ ID NO: 192237 - DNA, 25 bp, Probe sequence
aattttgtacactcatcaagcaagt

SEQ ID NO: 192238 - DNA, 25 bp, Probe sequence
cactcatcaagcaagtaattatatt

SEQ ID NO: 192239 - DNA, 25 bp, Probe sequence
catttggaagtcttacgtgaatttt

SEQ ID NO: 192240 - DNA, 25 bp, Probe sequence
cttacgtgaattttgtacactcatc

SEQ ID NO: 192241 - DNA, 25 bp, Probe sequence
ctagacagtttttacgacgacactt

SEQ ID NO: 192242 - DNA, 25 bp, Probe sequence
cgtgaattttgtacactcatcaagc

SEQ ID NO: 192243 - DNA, 25 bp, Probe sequence
gctagacagtttttacgacgacact

SEQ ID NO: 192244 - DNA, 25 bp, Probe sequence
gcaaatcatttggaagtcttacgtg

SEQ ID NO: 192245 - DNA, 25 bp, Probe sequence
gaattttgtacactcatcaagcaag

SEQ ID NO: 192246 - DNA, 25 bp, Probe sequence
gaagtcttacgtgaattttgtacac

SEQ ID NO: 192247 - DNA, 25 bp, Probe sequence
gacagtttttacgacgacactttga

SEQ ID NO: 192248 - DNA, 25 bp, Probe sequence
gacgacactttgaaaaaaattgagg

SEQ ID NO: 192249 - DNA, 25 bp, Probe sequence
gtacactcatcaagcaagtaattat

SEQ ID NO: 192250 - DNA, 25 bp, Probe sequence
gtcttacgtgaattttgtacactca

SEQ ID NO: 192251 - DNA, 25 bp, Probe sequence
gtgaattttgtacactcatcaagca

SEQ ID NO: 192252 - DNA, 25 bp, Probe sequence
ggaagtcttacgtgaattttgtaca

SEQ ID NO: 192253 - DNA, 25 bp, Probe sequence
ggcaaatcatttggaagtcttacgt

SEQ ID NO: 192254 - DNA, 25 bp, Probe sequence
tgaattttgtacactcatcaagcaa

SEQ ID NO: 192255 - DNA, 25 bp, Probe sequence
tgctagacagtttttacgacgacac

SEQ ID NO: 192256 - DNA, 25 bp, Probe sequence
tacgtgaattttgtacactcatcaa

SEQ ID NO: 192257 - DNA, 25 bp, Probe sequence
tacgacgacactttgaaaaaaattg

SEQ ID NO: 192258 - DNA, 25 bp, Probe sequence
tagacagtttttacgacgacacttt

SEQ ID NO: 192259 - DNA, 25 bp, Probe sequence
tttggaagtcttacgtgaattttgt

SEQ ID NO: 192260 - DNA, 25 bp, Probe sequence
tttgtacactcatcaagcaagtaat

SEQ ID NO: 192261 - DNA, 25 bp, Probe sequence
ttgctagacagtttttacgacgaca

SEQ ID NO: 192262 - DNA, 25 bp, Probe sequence
ttgtacactcatcaagcaagtaatt

SEQ ID NO: 192263 - DNA, 25 bp, Probe sequence
ttttgtacactcatcaagcaagtaa

SEQ ID NO: 192264 - DNA, 25 bp, Probe sequence
ttacgtgaattttgtacactcatca

SEQ ID NO: 192265 - DNA, 25 bp, Probe sequence
atctttttatatttcatttttatct

SEQ ID NO: 192266 - DNA, 25 bp, Probe sequence
atctgctgagaaaaggactgcaaaa

SEQ ID NO: 192267 - DNA, 25 bp, Probe sequence
atgaaatctgctgagaaaaggactg

SEQ ID NO: 192268 - DNA, 25 bp, Probe sequence
aggactgcaaaagcaattagtaaac

SEQ ID NO: 192269 - DNA, 25 bp, Probe sequence
agaaaaggactgcaaaagcaattag

SEQ ID NO: 192270 - DNA, 25 bp, Probe sequence
actgcaaaagcaattagtaaacgaa

SEQ ID NO: 192271 - DNA, 25 bp, Probe sequence
aaatctgctgagaaaaggactgcaa

SEQ ID NO: 192272 - DNA, 25 bp, Probe sequence
aaaggactgcaaaagcaattagtaa

SEQ ID NO: 192273 - DNA, 25 bp, Probe sequence
aaaaggactgcaaaagcaattagta

SEQ ID NO: 192274 - DNA, 25 bp, Probe sequence
aaggactgcaaaagcaattagtaaa

SEQ ID NO: 192275 - DNA, 25 bp, Probe sequence
aatctgctgagaaaaggactgcaaa

SEQ ID NO: 192276 - DNA, 25 bp, Probe sequence
ctgctgagaaaaggactgcaaaagc

SEQ ID NO: 192277 - DNA, 25 bp, Probe sequence
ctgcaaaagcaattagtaaacgaaa

SEQ ID NO: 192278 - DNA, 25 bp, Probe sequence
ctgagaaaaggactgcaaaagcaat

SEQ ID NO: 192279 - DNA, 25 bp, Probe sequence
gctgagaaaaggactgcaaaagcaa

SEQ ID NO: 192280 - DNA, 25 bp, Probe sequence
gcaattagtaaacgaaaaagtatct

SEQ ID NO: 192281 - DNA, 25 bp, Probe sequence
gaaaaggactgcaaaagcaattagt

SEQ ID NO: 192282 - DNA, 25 bp, Probe sequence
gaaatctgctgagaaaaggactgca

SEQ ID NO: 192283 - DNA, 25 bp, Probe sequence
gactgcaaaagcaattagtaaacga

SEQ ID NO: 192284 - DNA, 25 bp, Probe sequence
gagaaaaggactgcaaaagcaatta

SEQ ID NO: 192285 - DNA, 25 bp, Probe sequence
gtatctttttatatttcatttttat

SEQ ID NO: 192286 - DNA, 25 bp, Probe sequence
ggactgcaaaagcaattagtaaacg

SEQ ID NO: 192287 - DNA, 25 bp, Probe sequence
tgaaatctgctgagaaaaggactgc

SEQ ID NO: 192288 - DNA, 25 bp, Probe sequence
tgagaaaaggactgcaaaagcaatt

SEQ ID NO: 192289 - DNA, 25 bp, Probe sequence
tgcaaaagcaattagtaaacgaaaa

SEQ ID NO: 192290 - DNA, 25 bp, Probe sequence
tgctgagaaaaggactgcaaaagca

SEQ ID NO: 192291 - DNA, 25 bp, Probe sequence
tctgctgagaaaaggactgcaaaag

SEQ ID NO: 192292 - DNA, 25 bp, Probe sequence
tctttttatatttcatttttatctc

SEQ ID NO: 192293 - DNA, 25 bp, Probe sequence
tatctttttatatttcatttttatc

SEQ ID NO: 192294 - DNA, 25 bp, Probe sequence
tatatttcatttttatctcccaagt

SEQ ID NO: 192295 - DNA, 25 bp, Probe sequence
tttatatttcatttttatctcccaa

SEQ ID NO: 192296 - DNA, 25 bp, Probe sequence
ttttatatttcatttttatctccca

SEQ ID NO: 192297 - DNA, 25 bp, Probe sequence
ttatatttcatttttatctcccaag

SEQ ID NO: 192298 - DNA, 25 bp, Probe sequence
attgcgagctacaattttaagggtt

SEQ ID NO: 192299 - DNA, 25 bp, Probe sequence
atttgaagtgggggtttttgcatgg

SEQ ID NO: 192300 - DNA, 25 bp, Probe sequence
atttttgcaatgtcacaaattttac

SEQ ID NO: 192301 - DNA, 25 bp, Probe sequence
ataaagtattgcgagctacaatttt

SEQ ID NO: 192302 - DNA, 25 bp, Probe sequence
atgacatttgaagtgggggtttttg

SEQ ID NO: 192303 - DNA, 25 bp, Probe sequence
agtgggggtttttgcatggaagcga

SEQ ID NO: 192304 - DNA, 25 bp, Probe sequence
acatttgaagtgggggtttttgcat

SEQ ID NO: 192305 - DNA, 25 bp, Probe sequence
aaagtattgcgagctacaattttaa

SEQ ID NO: 192306 - DNA, 25 bp, Probe sequence
aaacatttttgcaatgtcacaaatt

SEQ ID NO: 192307 - DNA, 25 bp, Probe sequence
aagtgggggtttttgcatggaagcg

SEQ ID NO: 192308 - DNA, 25 bp, Probe sequence
gcgagctacaattttaagggttatg

SEQ ID NO: 192309 - DNA, 25 bp, Probe sequence
gctacaattttaagggttatgattt

SEQ ID NO: 192310 - DNA, 25 bp, Probe sequence
gcaatgtcacaaattttacatgaaa

SEQ ID NO: 192311 - DNA, 25 bp, Probe sequence
gaagtgggggtttttgcatggaagc

SEQ ID NO: 192312 - DNA, 25 bp, Probe sequence
gacatttgaagtgggggtttttgca

SEQ ID NO: 192313 - DNA, 25 bp, Probe sequence
gagctacaattttaagggttatgat

SEQ ID NO: 192314 - DNA, 25 bp, Probe sequence
gtttttgcatggaagcgattataca

SEQ ID NO: 192315 - DNA, 25 bp, Probe sequence
gtattgcgagctacaattttaaggg

SEQ ID NO: 192316 - DNA, 25 bp, Probe sequence
gtgggggtttttgcatggaagcgat

SEQ ID NO: 192317 - DNA, 25 bp, Probe sequence
ggggtttttgcatggaagcgattat

SEQ ID NO: 192318 - DNA, 25 bp, Probe sequence
gggtttttgcatggaagcgattata

SEQ ID NO: 192319 - DNA, 25 bp, Probe sequence
gggggtttttgcatggaagcgatta

SEQ ID NO: 192320 - DNA, 25 bp, Probe sequence
ggtttttgcatggaagcgattatac

SEQ ID NO: 192321 - DNA, 25 bp, Probe sequence
ggaagcgattatacaaaacattttt

SEQ ID NO: 192322 - DNA, 25 bp, Probe sequence
tgggggtttttgcatggaagcgatt

SEQ ID NO: 192323 - DNA, 25 bp, Probe sequence
tgacatttgaagtgggggtttttgc

SEQ ID NO: 192324 - DNA, 25 bp, Probe sequence
tgaagtgggggtttttgcatggaag

SEQ ID NO: 192325 - DNA, 25 bp, Probe sequence
tgcatggaagcgattatacaaaaca

SEQ ID NO: 192326 - DNA, 25 bp, Probe sequence
tgcgagctacaattttaagggttat

SEQ ID NO: 192327 - DNA, 25 bp, Probe sequence
tacaaaacatttttgcaatgtcaca

SEQ ID NO: 192328 - DNA, 25 bp, Probe sequence
tttgaagtgggggtttttgcatgga

SEQ ID NO: 192329 - DNA, 25 bp, Probe sequence
tttgcaatgtcacaaattttacatg

SEQ ID NO: 192330 - DNA, 25 bp, Probe sequence
tttttgcatggaagcgattatacaa

SEQ ID NO: 192331 - DNA, 25 bp, Probe sequence
ttgaagtgggggtttttgcatggaa

SEQ ID NO: 192332 - DNA, 25 bp, Probe sequence
atacctttaaacgcattcatatcac

SEQ ID NO: 192333 - DNA, 25 bp, Probe sequence
atgtcaaacaacatggtcatccata

SEQ ID NO: 192334 - DNA, 25 bp, Probe sequence
atggtcatccatagcaacatgaatg

SEQ ID NO: 192335 - DNA, 25 bp, Probe sequence
acctttaaacgcattcatatcacct

SEQ ID NO: 192336 - DNA, 25 bp, Probe sequence
acatggtcatccatagcaacatgaa

SEQ ID NO: 192337 - DNA, 25 bp, Probe sequence
acaacatggtcatccatagcaacat

SEQ ID NO: 192338 - DNA, 25 bp, Probe sequence
acaatacctttaaacgcattcatat

SEQ ID NO: 192339 - DNA, 25 bp, Probe sequence
aaacgcattcatatcacctcagagt

SEQ ID NO: 192340 - DNA, 25 bp, Probe sequence
aacaatacctttaaacgcattcata

SEQ ID NO: 192341 - DNA, 25 bp, Probe sequence
aacaacatggtcatccatagcaaca

SEQ ID NO: 192342 - DNA, 25 bp, Probe sequence
aacatggtcatccatagcaacatga

SEQ ID NO: 192343 - DNA, 25 bp, Probe sequence
aacgcattcatatcacctcagagtc

SEQ ID NO: 192344 - DNA, 25 bp, Probe sequence
aatggaacaatacctttaaacgcat

SEQ ID NO: 192345 - DNA, 25 bp, Probe sequence
aatagcagcaatgaaatggaacaat

SEQ ID NO: 192346 - DNA, 25 bp, Probe sequence
aatacctttaaacgcattcatatca

SEQ ID NO: 192347 - DNA, 25 bp, Probe sequence
caatacctttaaacgcattcatatc

SEQ ID NO: 192348 - DNA, 25 bp, Probe sequence
caacatggtcatccatagcaacatg

SEQ ID NO: 192349 - DNA, 25 bp, Probe sequence
caaacaacatggtcatccatagcaa

SEQ ID NO: 192350 - DNA, 25 bp, Probe sequence
catggtcatccatagcaacatgaat

SEQ ID NO: 192351 - DNA, 25 bp, Probe sequence
catccatagcaacatgaatgatatg

SEQ ID NO: 192352 - DNA, 25 bp, Probe sequence
ctttaaacgcattcatatcacctca

SEQ ID NO: 192353 - DNA, 25 bp, Probe sequence
cctttaaacgcattcatatcacctc

SEQ ID NO: 192354 - DNA, 25 bp, Probe sequence
gcaatgaaatggaacaataccttta

SEQ ID NO: 192355 - DNA, 25 bp, Probe sequence
gaacaatacctttaaacgcattcat

SEQ ID NO: 192356 - DNA, 25 bp, Probe sequence
gtcaaacaacatggtcatccatagc

SEQ ID NO: 192357 - DNA, 25 bp, Probe sequence
gtcatccatagcaacatgaatgata

SEQ ID NO: 192358 - DNA, 25 bp, Probe sequence
ggtcatccatagcaacatgaatgat

SEQ ID NO: 192359 - DNA, 25 bp, Probe sequence
ggaacaatacctttaaacgcattca

SEQ ID NO: 192360 - DNA, 25 bp, Probe sequence
tggaacaatacctttaaacgcattc

SEQ ID NO: 192361 - DNA, 25 bp, Probe sequence
tgaaatggaacaatacctttaaacg

SEQ ID NO: 192362 - DNA, 25 bp, Probe sequence
taaacgcattcatatcacctcagag

SEQ ID NO: 192363 - DNA, 25 bp, Probe sequence
tacctttaaacgcattcatatcacc

SEQ ID NO: 192364 - DNA, 25 bp, Probe sequence
tttaaacgcattcatatcacctcag

SEQ ID NO: 192365 - DNA, 25 bp, Probe sequence
ttaaacgcattcatatcacctcaga

SEQ ID NO: 192366 - DNA, 25 bp, Probe sequence
ataacacgaccatgccgtatataac

SEQ ID NO: 192367 - DNA, 25 bp, Probe sequence
ataacattatttttcttagcgccgg

SEQ ID NO: 192368 - DNA, 25 bp, Probe sequence
atgatatttgctaatgcaccaagct

SEQ ID NO: 192369 - DNA, 25 bp, Probe sequence
aggtatacaaccacatataagtaat

SEQ ID NO: 192370 - DNA, 25 bp, Probe sequence
agtaataacacgaccatgccgtata

SEQ ID NO: 192371 - DNA, 25 bp, Probe sequence
accaagcttaggtatacaaccacat

SEQ ID NO: 192372 - DNA, 25 bp, Probe sequence
acgaccatgccgtatataacattat

SEQ ID NO: 192373 - DNA, 25 bp, Probe sequence
acattatttttcttagcgccggata

SEQ ID NO: 192374 - DNA, 25 bp, Probe sequence
acacgaccatgccgtatataacatt

SEQ ID NO: 192375 - DNA, 25 bp, Probe sequence
aaacaagtcctacattttgcgaata

SEQ ID NO: 192376 - DNA, 25 bp, Probe sequence
aagaaacaagtcctacattttgcga

SEQ ID NO: 192377 - DNA, 25 bp, Probe sequence
aacaagtcctacattttgcgaatag

SEQ ID NO: 192378 - DNA, 25 bp, Probe sequence
aacacgaccatgccgtatataacat

SEQ ID NO: 192379 - DNA, 25 bp, Probe sequence
aacattatttttcttagcgccggat

SEQ ID NO: 192380 - DNA, 25 bp, Probe sequence
aagcttaggtatacaaccacatata

SEQ ID NO: 192381 - DNA, 25 bp, Probe sequence
aagtaataacacgaccatgccgtat

SEQ ID NO: 192382 - DNA, 25 bp, Probe sequence
aatgcaccaagcttaggtatacaac

SEQ ID NO: 192383 - DNA, 25 bp, Probe sequence
cattatttttcttagcgccggataa

SEQ ID NO: 192384 - DNA, 25 bp, Probe sequence
gctaatgcaccaagcttaggtatac

SEQ ID NO: 192385 - DNA, 25 bp, Probe sequence
gcttaggtatacaaccacatataag

SEQ ID NO: 192386 - DNA, 25 bp, Probe sequence
gcaccaagcttaggtatacaaccac

SEQ ID NO: 192387 - DNA, 25 bp, Probe sequence
gaaacaagtcctacattttgcgaat

SEQ ID NO: 192388 - DNA, 25 bp, Probe sequence
gaccatgccgtatataacattattt

SEQ ID NO: 192389 - DNA, 25 bp, Probe sequence
gatatttgctaatgcaccaagctta

SEQ ID NO: 192390 - DNA, 25 bp, Probe sequence
gtaataacacgaccatgccgtatat

SEQ ID NO: 192391 - DNA, 25 bp, Probe sequence
taataacacgaccatgccgtatata

SEQ ID NO: 192392 - DNA, 25 bp, Probe sequence
taacacgaccatgccgtatataaca

SEQ ID NO: 192393 - DNA, 25 bp, Probe sequence
taacattatttttcttagcgccgga

SEQ ID NO: 192394 - DNA, 25 bp, Probe sequence
tataagtaataacacgaccatgccg

SEQ ID NO: 192395 - DNA, 25 bp, Probe sequence
tatttgctaatgcaccaagcttagg

SEQ ID NO: 192396 - DNA, 25 bp, Probe sequence
tatttttcttagcgccggataaaga

SEQ ID NO: 192397 - DNA, 25 bp, Probe sequence
tttgctaatgcaccaagcttaggta

SEQ ID NO: 192398 - DNA, 25 bp, Probe sequence
ttatttttcttagcgccggataaag

SEQ ID NO: 192399 - DNA, 25 bp, Probe sequence
ttagcgccggataaagaaacaagtc

SEQ ID NO: 192400 - DNA, 25 bp, Probe sequence
attggcctagtgcaagaccaatcat

SEQ ID NO: 192401 - DNA, 25 bp, Probe sequence
ataaattggcctagtgcaagaccaa

SEQ ID NO: 192402 - DNA, 25 bp, Probe sequence
atccgtttgcgaccaaaagcatcgg

SEQ ID NO: 192403 - DNA, 25 bp, Probe sequence
accaaaagcatcggataaaggtcca

SEQ ID NO: 192404 - DNA, 25 bp, Probe sequence
agataaattggcctagtgcaagacc

SEQ ID NO: 192405 - DNA, 25 bp, Probe sequence
agcaatccgtttgcgaccaaaagca

SEQ ID NO: 192406 - DNA, 25 bp, Probe sequence
agcatcggataaaggtccaaagata

SEQ ID NO: 192407 - DNA, 25 bp, Probe sequence
acagcaatccgtttgcgaccaaaag

SEQ ID NO: 192408 - DNA, 25 bp, Probe sequence
aaattggcctagtgcaagaccaatc

SEQ ID NO: 192409 - DNA, 25 bp, Probe sequence
aaaagcatcggataaaggtccaaag

SEQ ID NO: 192410 - DNA, 25 bp, Probe sequence
aaagataaattggcctagtgcaaga

SEQ ID NO: 192411 - DNA, 25 bp, Probe sequence
aaagcatcggataaaggtccaaaga

SEQ ID NO: 192412 - DNA, 25 bp, Probe sequence
aagcatcggataaaggtccaaagat

SEQ ID NO: 192413 - DNA, 25 bp, Probe sequence
aagataaattggcctagtgcaagac

SEQ ID NO: 192414 - DNA, 25 bp, Probe sequence
aaggtccaaagataaattggcctag

SEQ ID NO: 192415 - DNA, 25 bp, Probe sequence
aatccgtttgcgaccaaaagcatcg

SEQ ID NO: 192416 - DNA, 25 bp, Probe sequence
caatccgtttgcgaccaaaagcatc

SEQ ID NO: 192417 - DNA, 25 bp, Probe sequence
aattggcctagtgcaagaccaatca

SEQ ID NO: 192418 - DNA, 25 bp, Probe sequence
caaagataaattggcctagtgcaag

SEQ ID NO: 192419 - DNA, 25 bp, Probe sequence
cagcaatccgtttgcgaccaaaagc

SEQ ID NO: 192420 - DNA, 25 bp, Probe sequence
cgtttgcgaccaaaagcatcggata

SEQ ID NO: 192421 - DNA, 25 bp, Probe sequence
ccgtttgcgaccaaaagcatcggat

SEQ ID NO: 192422 - DNA, 25 bp, Probe sequence
gcgaccaaaagcatcggataaaggt

SEQ ID NO: 192423 - DNA, 25 bp, Probe sequence
gcaatccgtttgcgaccaaaagcat

SEQ ID NO: 192424 - DNA, 25 bp, Probe sequence
gatcaaaatggatacagcaatccgt

SEQ ID NO: 192425 - DNA, 25 bp, Probe sequence
gataaattggcctagtgcaagacca

SEQ ID NO: 192426 - DNA, 25 bp, Probe sequence
ggtccaaagataaattggcctagtg

SEQ ID NO: 192427 - DNA, 25 bp, Probe sequence
gtttgcgaccaaaagcatcggataa

SEQ ID NO: 192428 - DNA, 25 bp, Probe sequence
gtccaaagataaattggcctagtgc

SEQ ID NO: 192429 - DNA, 25 bp, Probe sequence
tccgtttgcgaccaaaagcatcgga

SEQ ID NO: 192430 - DNA, 25 bp, Probe sequence
ttgcgaccaaaagcatcggataaag

SEQ ID NO: 192431 - DNA, 25 bp, Probe sequence
taaattggcctagtgcaagaccaat

SEQ ID NO: 192432 - DNA, 25 bp, Probe sequence
tacagcaatccgtttgcgaccaaaa

SEQ ID NO: 192433 - DNA, 25 bp, Probe sequence
tttgcgaccaaaagcatcggataaa

SEQ ID NO: 192434 - DNA, 25 bp, Probe sequence
attccccaataggccaaagccatgg

SEQ ID NO: 192435 - DNA, 25 bp, Probe sequence
ataggccaaagccatggtttaggaa

SEQ ID NO: 192436 - DNA, 25 bp, Probe sequence
aggccaaagccatggtttaggaata

SEQ ID NO: 192437 - DNA, 25 bp, Probe sequence
ataatgttttaaatgtagaccaaga

SEQ ID NO: 192438 - DNA, 25 bp, Probe sequence
atgtattccccaataggccaaagcc

SEQ ID NO: 192439 - DNA, 25 bp, Probe sequence
atgttttaaatgtagaccaagaatc

SEQ ID NO: 192440 - DNA, 25 bp, Probe sequence
agccatggtttaggaataggtgaaa

SEQ ID NO: 192441 - DNA, 25 bp, Probe sequence
aaagccatggtttaggaataggtga

SEQ ID NO: 192442 - DNA, 25 bp, Probe sequence
aagccatggtttaggaataggtgaa

SEQ ID NO: 192443 - DNA, 25 bp, Probe sequence
aatgttttaaatgtagaccaagaat

SEQ ID NO: 192444 - DNA, 25 bp, Probe sequence
aataggccaaagccatggtttagga

SEQ ID NO: 192445 - DNA, 25 bp, Probe sequence
aataatgttttaaatgtagaccaag

SEQ ID NO: 192446 - DNA, 25 bp, Probe sequence
caataggccaaagccatggtttagg

SEQ ID NO: 192447 - DNA, 25 bp, Probe sequence
caaagccatggtttaggaataggtg

SEQ ID NO: 192448 - DNA, 25 bp, Probe sequence
ccccaataggccaaagccatggttt

SEQ ID NO: 192449 - DNA, 25 bp, Probe sequence
cccaataggccaaagccatggttta

SEQ ID NO: 192450 - DNA, 25 bp, Probe sequence
ccaaagccatggtttaggaataggt

SEQ ID NO: 192451 - DNA, 25 bp, Probe sequence
gccaaagccatggtttaggaatagg

SEQ ID NO: 192452 - DNA, 25 bp, Probe sequence
ccaataggccaaagccatggtttag

SEQ ID NO: 192453 - DNA, 25 bp, Probe sequence
gccatggtttaggaataggtgaaaa

SEQ ID NO: 192454 - DNA, 25 bp, Probe sequence
gaataggtgaaaaggccgacccttg

SEQ ID NO: 192455 - DNA, 25 bp, Probe sequence
ggccaaagccatggtttaggaatag

SEQ ID NO: 192456 - DNA, 25 bp, Probe sequence
tgtattccccaataggccaaagcca

SEQ ID NO: 192457 - DNA, 25 bp, Probe sequence
tgttttaaatgtagaccaagaatcc

SEQ ID NO: 192458 - DNA, 25 bp, Probe sequence
tgaaaaggccgacccttggttggtg

SEQ ID NO: 192459 - DNA, 25 bp, Probe sequence
tccccaataggccaaagccatggtt

SEQ ID NO: 192460 - DNA, 25 bp, Probe sequence
taatgttttaaatgtagaccaagaa

SEQ ID NO: 192461 - DNA, 25 bp, Probe sequence
taaatgtagaccaagaatccctccc

SEQ ID NO: 192462 - DNA, 25 bp, Probe sequence
ttaaatgtagaccaagaatccctcc

SEQ ID NO: 192463 - DNA, 25 bp, Probe sequence
taggccaaagccatggtttaggaat

SEQ ID NO: 192464 - DNA, 25 bp, Probe sequence
tattccccaataggccaaagccatg

SEQ ID NO: 192465 - DNA, 25 bp, Probe sequence
tttaaatgtagaccaagaatccctc

SEQ ID NO: 192466 - DNA, 25 bp, Probe sequence
ttttaaatgtagaccaagaatccct

SEQ ID NO: 192467 - DNA, 25 bp, Probe sequence
ttccccaataggccaaagccatggt

SEQ ID NO: 192468 - DNA, 25 bp, Probe sequence
attatttgcaattgtttttgagcaa

SEQ ID NO: 192469 - DNA, 25 bp, Probe sequence
atttatgtctttttgtattatttgc

SEQ ID NO: 192470 - DNA, 25 bp, Probe sequence
atccatatttaaaaacaggttgtga

SEQ ID NO: 192471 - DNA, 25 bp, Probe sequence
atgtctttttgtattatttgcaatt

SEQ ID NO: 192472 - DNA, 25 bp, Probe sequence
agatttatgtctttttgtattattt

SEQ ID NO: 192473 - DNA, 25 bp, Probe sequence
agcaaaattcaatcgcaaatgtcaa

SEQ ID NO: 192474 - DNA, 25 bp, Probe sequence
acaggttgtgaggataattttgata

SEQ ID NO: 192475 - DNA, 25 bp, Probe sequence
acagatttatgtctttttgtattat

SEQ ID NO: 192476 - DNA, 25 bp, Probe sequence
aaattcaatcgcaaatgtcaaatta

SEQ ID NO: 192477 - DNA, 25 bp, Probe sequence
aacaggttgtgaggataattttgat

SEQ ID NO: 192478 - DNA, 25 bp, Probe sequence
aattttgatacagatttatgtcttt

SEQ ID NO: 192479 - DNA, 25 bp, Probe sequence
caaaattcaatcgcaaatgtcaaat

SEQ ID NO: 192480 - DNA, 25 bp, Probe sequence
caggttgtgaggataattttgatac

SEQ ID NO: 192481 - DNA, 25 bp, Probe sequence
gcaaaattcaatcgcaaatgtcaaa

SEQ ID NO: 192482 - DNA, 25 bp, Probe sequence
gagcaaaattcaatcgcaaatgtca

SEQ ID NO: 192483 - DNA, 25 bp, Probe sequence
gatttatgtctttttgtattatttg

SEQ ID NO: 192484 - DNA, 25 bp, Probe sequence
gtttttgagcaaaattcaatcgcaa

SEQ ID NO: 192485 - DNA, 25 bp, Probe sequence
gtattatttgcaattgtttttgagc

SEQ ID NO: 192486 - DNA, 25 bp, Probe sequence
gtatccatatttaaaaacaggttgt

SEQ ID NO: 192487 - DNA, 25 bp, Probe sequence
gtctttttgtattatttgcaattgt

SEQ ID NO: 192488 - DNA, 25 bp, Probe sequence
gtgaggataattttgatacagattt

SEQ ID NO: 192489 - DNA, 25 bp, Probe sequence
ggttgtgaggataattttgatacag

SEQ ID NO: 192490 - DNA, 25 bp, Probe sequence
tgtctttttgtattatttgcaattg

SEQ ID NO: 192491 - DNA, 25 bp, Probe sequence
tgagcaaaattcaatcgcaaatgtc

SEQ ID NO: 192492 - DNA, 25 bp, Probe sequence
tctttttgtattatttgcaattgtt

SEQ ID NO: 192493 - DNA, 25 bp, Probe sequence
tacagatttatgtctttttgtatta

SEQ ID NO: 192494 - DNA, 25 bp, Probe sequence
tatgtctttttgtattatttgcaat

SEQ ID NO: 192495 - DNA, 25 bp, Probe sequence
tttgtattatttgcaattgtttttg

SEQ ID NO: 192496 - DNA, 25 bp, Probe sequence
tttgatacagatttatgtctttttg

SEQ ID NO: 192497 - DNA, 25 bp, Probe sequence
tttatgtctttttgtattatttgca

SEQ ID NO: 192498 - DNA, 25 bp, Probe sequence
ttttgatacagatttatgtcttttt

SEQ ID NO: 192499 - DNA, 25 bp, Probe sequence
ttttgtattatttgcaattgttttt

SEQ ID NO: 192500 - DNA, 25 bp, Probe sequence
ttatgtctttttgtattatttgcaa

SEQ ID NO: 192501 - DNA, 25 bp, Probe sequence
ttgatacagatttatgtctttttgt

SEQ ID NO: 192502 - DNA, 25 bp, Probe sequence
atacttgcgaatcccgcaattgacc

SEQ ID NO: 192503 - DNA, 25 bp, Probe sequence
atcccgcaattgaccatgctgtagt

SEQ ID NO: 192504 - DNA, 25 bp, Probe sequence
atgttgctatacttgcgaatcccgc

SEQ ID NO: 192505 - DNA, 25 bp, Probe sequence
actgtgaagcataatactgctatta

SEQ ID NO: 192506 - DNA, 25 bp, Probe sequence
acttgcgaatcccgcaattgaccat

SEQ ID NO: 192507 - DNA, 25 bp, Probe sequence
aaacaaattgctaagactgtgaagc

SEQ ID NO: 192508 - DNA, 25 bp, Probe sequence
aatcccgcaattgaccatgctgtag

SEQ ID NO: 192509 - DNA, 25 bp, Probe sequence
aattgaccatgctgtagtgaagtac

SEQ ID NO: 192510 - DNA, 25 bp, Probe sequence
caattgaccatgctgtagtgaagta

SEQ ID NO: 192511 - DNA, 25 bp, Probe sequence
cttgcgaatcccgcaattgaccatg

SEQ ID NO: 192512 - DNA, 25 bp, Probe sequence
ctatacttgcgaatcccgcaattga

SEQ ID NO: 192513 - DNA, 25 bp, Probe sequence
ctaagactgtgaagcataatactgc

SEQ ID NO: 192514 - DNA, 25 bp, Probe sequence
cgcaattgaccatgctgtagtgaag

SEQ ID NO: 192515 - DNA, 25 bp, Probe sequence
cgaatcccgcaattgaccatgctgt

SEQ ID NO: 192516 - DNA, 25 bp, Probe sequence
cccgcaattgaccatgctgtagtga

SEQ ID NO: 192517 - DNA, 25 bp, Probe sequence
ccgcaattgaccatgctgtagtgaa

SEQ ID NO: 192518 - DNA, 25 bp, Probe sequence
gctatacttgcgaatcccgcaattg

SEQ ID NO: 192519 - DNA, 25 bp, Probe sequence
gaatcccgcaattgaccatgctgta

SEQ ID NO: 192520 - DNA, 25 bp, Probe sequence
gaagtacaaaagtggcattaaacaa

SEQ ID NO: 192521 - DNA, 25 bp, Probe sequence
gaccatgctgtagtgaagtacaaaa

SEQ ID NO: 192522 - DNA, 25 bp, Probe sequence
gttgctatacttgcgaatcccgcaa

SEQ ID NO: 192523 - DNA, 25 bp, Probe sequence
gtagtgaagtacaaaagtggcatta

SEQ ID NO: 192524 - DNA, 25 bp, Probe sequence
gcattaaacaaattgctaagactgt

SEQ ID NO: 192525 - DNA, 25 bp, Probe sequence
gtgaagtacaaaagtggcattaaac

SEQ ID NO: 192526 - DNA, 25 bp, Probe sequence
gtggcattaaacaaattgctaagac

SEQ ID NO: 192527 - DNA, 25 bp, Probe sequence
tgtgaagcataatactgctattaag

SEQ ID NO: 192528 - DNA, 25 bp, Probe sequence
tgttgctatacttgcgaatcccgca

SEQ ID NO: 192529 - DNA, 25 bp, Probe sequence
tgctatacttgcgaatcccgcaatt

SEQ ID NO: 192530 - DNA, 25 bp, Probe sequence
tgcgaatcccgcaattgaccatgct

SEQ ID NO: 192531 - DNA, 25 bp, Probe sequence
tcccgcaattgaccatgctgtagtg

SEQ ID NO: 192532 - DNA, 25 bp, Probe sequence
tacttgcgaatcccgcaattgacca

SEQ ID NO: 192533 - DNA, 25 bp, Probe sequence
tatacttgcgaatcccgcaattgac

SEQ ID NO: 192534 - DNA, 25 bp, Probe sequence
ttgctatacttgcgaatcccgcaat

SEQ ID NO: 192535 - DNA, 25 bp, Probe sequence
ttgaccatgctgtagtgaagtacaa

SEQ ID NO: 192536 - DNA, 25 bp, Probe sequence
atttttgaaaatattaccaatgata

SEQ ID NO: 192537 - DNA, 25 bp, Probe sequence
atgcattcatcaaattgttaattcc

SEQ ID NO: 192538 - DNA, 25 bp, Probe sequence
atgataggtaagtttgtttttgtgt

SEQ ID NO: 192539 - DNA, 25 bp, Probe sequence
agttatcgaattttctccagctgca

SEQ ID NO: 192540 - DNA, 25 bp, Probe sequence
agctgcactattagcccagttagag

SEQ ID NO: 192541 - DNA, 25 bp, Probe sequence
acgagttatcgaattttctccagct

SEQ ID NO: 192542 - DNA, 25 bp, Probe sequence
actattagcccagttagagaaagat

SEQ ID NO: 192543 - DNA, 25 bp, Probe sequence
aaacgagttatcgaattttctccag

SEQ ID NO: 192544 - DNA, 25 bp, Probe sequence
aacgagttatcgaattttctccagc

SEQ ID NO: 192545 - DNA, 25 bp, Probe sequence
aatgataggtaagtttgtttttgtg

SEQ ID NO: 192546 - DNA, 25 bp, Probe sequence
aattttctccagctgcactattagc

SEQ ID NO: 192547 - DNA, 25 bp, Probe sequence
cactattagcccagttagagaaaga

SEQ ID NO: 192548 - DNA, 25 bp, Probe sequence
cagctgcactattagcccagttaga

SEQ ID NO: 192549 - DNA, 25 bp, Probe sequence
catcaaattgttaattccaacgaaa

SEQ ID NO: 192550 - DNA, 25 bp, Probe sequence
cattcatcaaattgttaattccaac

SEQ ID NO: 192551 - DNA, 25 bp, Probe sequence
ctgcactattagcccagttagagaa

SEQ ID NO: 192552 - DNA, 25 bp, Probe sequence
ctgaatgcattcatcaaattgttaa

SEQ ID NO: 192553 - DNA, 25 bp, Probe sequence
cgagttatcgaattttctccagctg

SEQ ID NO: 192554 - DNA, 25 bp, Probe sequence
ccagctgcactattagcccagttag

SEQ ID NO: 192555 - DNA, 25 bp, Probe sequence
gctgcactattagcccagttagaga

SEQ ID NO: 192556 - DNA, 25 bp, Probe sequence
gcattcatcaaattgttaattccaa

SEQ ID NO: 192557 - DNA, 25 bp, Probe sequence
gcactattagcccagttagagaaag

SEQ ID NO: 192558 - DNA, 25 bp, Probe sequence
gaatgcattcatcaaattgttaatt

SEQ ID NO: 192559 - DNA, 25 bp, Probe sequence
gagttatcgaattttctccagctgc

SEQ ID NO: 192560 - DNA, 25 bp, Probe sequence
gataggtaagtttgtttttgtgtat

SEQ ID NO: 192561 - DNA, 25 bp, Probe sequence
gttatcgaattttctccagctgcac

SEQ ID NO: 192562 - DNA, 25 bp, Probe sequence
gtaagtttgtttttgtgtattcaat

SEQ ID NO: 192563 - DNA, 25 bp, Probe sequence
gtgtattcaataaaacgagttatcg

SEQ ID NO: 192564 - DNA, 25 bp, Probe sequence
tgataggtaagtttgtttttgtgta

SEQ ID NO: 192565 - DNA, 25 bp, Probe sequence
tgcactattagcccagttagagaaa

SEQ ID NO: 192566 - DNA, 25 bp, Probe sequence
tgcattcatcaaattgttaattcca

SEQ ID NO: 192567 - DNA, 25 bp, Probe sequence
tccagctgcactattagcccagtta

SEQ ID NO: 192568 - DNA, 25 bp, Probe sequence
taagtttgtttttgtgtattcaata

SEQ ID NO: 192569 - DNA, 25 bp, Probe sequence
ttcatcaaattgttaattccaacga

SEQ ID NO: 192570 - DNA, 25 bp, Probe sequence
attaatggtaaacatctgacaactg

SEQ ID NO: 192571 - DNA, 25 bp, Probe sequence
atatctaaataagttcacagcaaat

SEQ ID NO: 192572 - DNA, 25 bp, Probe sequence
ataccaccttcttgtatgacatatc

SEQ ID NO: 192573 - DNA, 25 bp, Probe sequence
atctgacaactggttttcgttcttt

SEQ ID NO: 192574 - DNA, 25 bp, Probe sequence
agaaataccaccttcttgtatgaca

SEQ ID NO: 192575 - DNA, 25 bp, Probe sequence
accaccttcttgtatgacatatcta

SEQ ID NO: 192576 - DNA, 25 bp, Probe sequence
accttcttgtatgacatatctaaat

SEQ ID NO: 192577 - DNA, 25 bp, Probe sequence
acatctgacaactggttttcgttct

SEQ ID NO: 192578 - DNA, 25 bp, Probe sequence
acattattatagaaaagttacacac

SEQ ID NO: 192579 - DNA, 25 bp, Probe sequence
aaataccaccttcttgtatgacata

SEQ ID NO: 192580 - DNA, 25 bp, Probe sequence
aaagttacacactagatatgtacta

SEQ ID NO: 192581 - DNA, 25 bp, Probe sequence
aaagaaataccaccttcttgtatga

SEQ ID NO: 192582 - DNA, 25 bp, Probe sequence
aaacatctgacaactggttttcgtt

SEQ ID NO: 192583 - DNA, 25 bp, Probe sequence
aaaagaaataccaccttcttgtatg

SEQ ID NO: 192584 - DNA, 25 bp, Probe sequence
aacacgaaaagaataaccacattat

SEQ ID NO: 192585 - DNA, 25 bp, Probe sequence
aacatctgacaactggttttcgttc

SEQ ID NO: 192586 - DNA, 25 bp, Probe sequence
aagaacacgaaaagaataaccacat

SEQ ID NO: 192587 - DNA, 25 bp, Probe sequence
aagaaataccaccttcttgtatgac

SEQ ID NO: 192588 - DNA, 25 bp, Probe sequence
aatggtaaacatctgacaactggtt

SEQ ID NO: 192589 - DNA, 25 bp, Probe sequence
aataccaccttcttgtatgacatat

SEQ ID NO: 192590 - DNA, 25 bp, Probe sequence
caccttcttgtatgacatatctaaa

SEQ ID NO: 192591 - DNA, 25 bp, Probe sequence
catctgacaactggttttcgttctt

SEQ ID NO: 192592 - DNA, 25 bp, Probe sequence
ccaccttcttgtatgacatatctaa

SEQ ID NO: 192593 - DNA, 25 bp, Probe sequence
gaaataccaccttcttgtatgacat

SEQ ID NO: 192594 - DNA, 25 bp, Probe sequence
gacatatctaaataagttcacagca

SEQ ID NO: 192595 - DNA, 25 bp, Probe sequence
gttacacactagatatgtactaaaa

SEQ ID NO: 192596 - DNA, 25 bp, Probe sequence
gtaaacatctgacaactggttttcg

SEQ ID NO: 192597 - DNA, 25 bp, Probe sequence
ggtaaacatctgacaactggttttc

SEQ ID NO: 192598 - DNA, 25 bp, Probe sequence
tgtactaaaagaaataccaccttct

SEQ ID NO: 192599 - DNA, 25 bp, Probe sequence
tctaaataagttcacagcaaattca

SEQ ID NO: 192600 - DNA, 25 bp, Probe sequence
tctgacaactggttttcgttctttt

SEQ ID NO: 192601 - DNA, 25 bp, Probe sequence
taatggtaaacatctgacaactggt

SEQ ID NO: 192602 - DNA, 25 bp, Probe sequence
taaacatctgacaactggttttcgt

SEQ ID NO: 192603 - DNA, 25 bp, Probe sequence
taccaccttcttgtatgacatatct

SEQ ID NO: 192604 - DNA, 25 bp, Probe sequence
attgtattgaatcgtcatcgtttta

SEQ ID NO: 192605 - DNA, 25 bp, Probe sequence
attgaatcgtcatcgttttaaattt

SEQ ID NO: 192606 - DNA, 25 bp, Probe sequence
attcacaacacaacagagacataac

SEQ ID NO: 192607 - DNA, 25 bp, Probe sequence
atacattcacaacacaacagagaca

SEQ ID NO: 192608 - DNA, 25 bp, Probe sequence
atgtgtttcaatactttttggatag

SEQ ID NO: 192609 - DNA, 25 bp, Probe sequence
agtaaatacattcacaacacaacag

SEQ ID NO: 192610 - DNA, 25 bp, Probe sequence
acattcacaacacaacagagacata

SEQ ID NO: 192611 - DNA, 25 bp, Probe sequence
acaacagagacataacaacaagata

SEQ ID NO: 192612 - DNA, 25 bp, Probe sequence
acaacacaacagagacataacaaca

SEQ ID NO: 192613 - DNA, 25 bp, Probe sequence
aaattgtattgaatcgtcatcgttt

SEQ ID NO: 192614 - DNA, 25 bp, Probe sequence
aaatacattcacaacacaacagaga

SEQ ID NO: 192615 - DNA, 25 bp, Probe sequence
aaagtaaatacattcacaacacaac

SEQ ID NO: 192616 - DNA, 25 bp, Probe sequence
aacacaacagagacataacaacaag

SEQ ID NO: 192617 - DNA, 25 bp, Probe sequence
aatactttttggatagattgcgaaa

SEQ ID NO: 192618 - DNA, 25 bp, Probe sequence
aatacattcacaacacaacagagac

SEQ ID NO: 192619 - DNA, 25 bp, Probe sequence
aattgtattgaatcgtcatcgtttt

SEQ ID NO: 192620 - DNA, 25 bp, Probe sequence
cacaacacaacagagacataacaac

SEQ ID NO: 192621 - DNA, 25 bp, Probe sequence
gcattacaatatacaagcaatcaaa

SEQ ID NO: 192622 - DNA, 25 bp, Probe sequence
gaatgagcattacaatatacaagca

SEQ ID NO: 192623 - DNA, 25 bp, Probe sequence
gagcattacaatatacaagcaatca

SEQ ID NO: 192624 - DNA, 25 bp, Probe sequence
gagacataacaacaagataaggagt

SEQ ID NO: 192625 - DNA, 25 bp, Probe sequence
gtattgaatcgtcatcgttttaaat

SEQ ID NO: 192626 - DNA, 25 bp, Probe sequence
gtaaatacattcacaacacaacaga

SEQ ID NO: 192627 - DNA, 25 bp, Probe sequence
gtgtttcaatactttttggatagat

SEQ ID NO: 192628 - DNA, 25 bp, Probe sequence
ggatagattgcgaaattgtattgaa

SEQ ID NO: 192629 - DNA, 25 bp, Probe sequence
ggaatgagcattacaatatacaagc

SEQ ID NO: 192630 - DNA, 25 bp, Probe sequence
tgtattgaatcgtcatcgttttaaa

SEQ ID NO: 192631 - DNA, 25 bp, Probe sequence
tgtttcaatactttttggatagatt

SEQ ID NO: 192632 - DNA, 25 bp, Probe sequence
tgaatcgtcatcgttttaaattttt

SEQ ID NO: 192633 - DNA, 25 bp, Probe sequence
tacattcacaacacaacagagacat

SEQ ID NO: 192634 - DNA, 25 bp, Probe sequence
tactttttggatagattgcgaaatt

SEQ ID NO: 192635 - DNA, 25 bp, Probe sequence
tattgaatcgtcatcgttttaaatt

SEQ ID NO: 192636 - DNA, 25 bp, Probe sequence
ttgaatcgtcatcgttttaaatttt

SEQ ID NO: 192637 - DNA, 25 bp, Probe sequence
ttgtattgaatcgtcatcgttttaa

SEQ ID NO: 192638 - DNA, 25 bp, Probe sequence
attgctaagtttttttgtgcttatt

SEQ ID NO: 192639 - DNA, 25 bp, Probe sequence
attttattgtagtggtacgaatcat

SEQ ID NO: 192640 - DNA, 25 bp, Probe sequence
atattattttattgtagtggtacga

SEQ ID NO: 192641 - DNA, 25 bp, Probe sequence
ataaagttataatcccaatttcaat

SEQ ID NO: 192642 - DNA, 25 bp, Probe sequence
atcataaagttataatcccaatttc

SEQ ID NO: 192643 - DNA, 25 bp, Probe sequence
atggtagattattcattatattatt

SEQ ID NO: 192644 - DNA, 25 bp, Probe sequence
agtggtacgaatcataaagttataa

SEQ ID NO: 192645 - DNA, 25 bp, Probe sequence
agttataatcccaatttcaattgat

SEQ ID NO: 192646 - DNA, 25 bp, Probe sequence
aaagttataatcccaatttcaattg

SEQ ID NO: 192647 - DNA, 25 bp, Probe sequence
aagttataatcccaatttcaattga

SEQ ID NO: 192648 - DNA, 25 bp, Probe sequence
aatcccaatttcaattgatttaatt

SEQ ID NO: 192649 - DNA, 25 bp, Probe sequence
cataaagttataatcccaatttcaa

SEQ ID NO: 192650 - DNA, 25 bp, Probe sequence
gcttatttttctaatggtagattat

SEQ ID NO: 192651 - DNA, 25 bp, Probe sequence
gaatcataaagttataatcccaatt

SEQ ID NO: 192652 - DNA, 25 bp, Probe sequence
gattgctaagtttttttgtgcttat

SEQ ID NO: 192653 - DNA, 25 bp, Probe sequence
gtagtggtacgaatcataaagttat

SEQ ID NO: 192654 - DNA, 25 bp, Probe sequence
gtacgaatcataaagttataatccc

SEQ ID NO: 192655 - DNA, 25 bp, Probe sequence
gtgcttatttttctaatggtagatt

SEQ ID NO: 192656 - DNA, 25 bp, Probe sequence
gtgattgctaagtttttttgtgctt

SEQ ID NO: 192657 - DNA, 25 bp, Probe sequence
tgtgcttatttttctaatggtagat

SEQ ID NO: 192658 - DNA, 25 bp, Probe sequence
tgattgctaagtttttttgtgctta

SEQ ID NO: 192659 - DNA, 25 bp, Probe sequence
tgctaagtttttttgtgcttatttt

SEQ ID NO: 192660 - DNA, 25 bp, Probe sequence
taaagttataatcccaatttcaatt

SEQ ID NO: 192661 - DNA, 25 bp, Probe sequence
tataatcccaatttcaattgattta

SEQ ID NO: 192662 - DNA, 25 bp, Probe sequence
tttgtgcttatttttctaatggtag

SEQ ID NO: 192663 - DNA, 25 bp, Probe sequence
tttattgtagtggtacgaatcataa

SEQ ID NO: 192664 - DNA, 25 bp, Probe sequence
tttttgtgcttatttttctaatggt

SEQ ID NO: 192665 - DNA, 25 bp, Probe sequence
ttttttgtgcttatttttctaatgg

SEQ ID NO: 192666 - DNA, 25 bp, Probe sequence
tttttttgtgcttatttttctaatg

SEQ ID NO: 192667 - DNA, 25 bp, Probe sequence
ttttgtgcttatttttctaatggta

SEQ ID NO: 192668 - DNA, 25 bp, Probe sequence
ttattcattatattattttattgta

SEQ ID NO: 192669 - DNA, 25 bp, Probe sequence
ttgtagtggtacgaatcataaagtt

SEQ ID NO: 192670 - DNA, 25 bp, Probe sequence
ttgctaagtttttttgtgcttattt

SEQ ID NO: 192671 - DNA, 25 bp, Probe sequence
ttgtgcttatttttctaatggtaga

SEQ ID NO: 192672 - DNA, 25 bp, Probe sequence
ataaacatcataatagtctaaaatc

SEQ ID NO: 192673 - DNA, 25 bp, Probe sequence
atgctttataaacatcataatagtc

SEQ ID NO: 192674 - DNA, 25 bp, Probe sequence
aggagatcatattataccatggagt

SEQ ID NO: 192675 - DNA, 25 bp, Probe sequence
agatcatattataccatggagtaaa

SEQ ID NO: 192676 - DNA, 25 bp, Probe sequence
agagcgtggaaacttacagatgctt

SEQ ID NO: 192677 - DNA, 25 bp, Probe sequence
agcgtggaaacttacagatgcttta

SEQ ID NO: 192678 - DNA, 25 bp, Probe sequence
acatcataatagtctaaaatccaat

SEQ ID NO: 192679 - DNA, 25 bp, Probe sequence
acagagcgtggaaacttacagatgc

SEQ ID NO: 192680 - DNA, 25 bp, Probe sequence
acagatgctttataaacatcataat

SEQ ID NO: 192681 - DNA, 25 bp, Probe sequence
aaaaacagagcgtggaaacttacag

SEQ ID NO: 192682 - DNA, 25 bp, Probe sequence
aaacttacagatgctttataaacat

SEQ ID NO: 192683 - DNA, 25 bp, Probe sequence
aaacagagcgtggaaacttacagat

SEQ ID NO: 192684 - DNA, 25 bp, Probe sequence
aaaacagagcgtggaaacttacaga

SEQ ID NO: 192685 - DNA, 25 bp, Probe sequence
aacagagcgtggaaacttacagatg

SEQ ID NO: 192686 - DNA, 25 bp, Probe sequence
cagagcgtggaaacttacagatgct

SEQ ID NO: 192687 - DNA, 25 bp, Probe sequence
cttacagatgctttataaacatcat

SEQ ID NO: 192688 - DNA, 25 bp, Probe sequence
cgtggaaacttacagatgctttata

SEQ ID NO: 192689 - DNA, 25 bp, Probe sequence
gcgtggaaacttacagatgctttat

SEQ ID NO: 192690 - DNA, 25 bp, Probe sequence
gaaaaacagagcgtggaaacttaca

SEQ ID NO: 192691 - DNA, 25 bp, Probe sequence
gaaacttacagatgctttataaaca

SEQ ID NO: 192692 - DNA, 25 bp, Probe sequence
gagcgtggaaacttacagatgcttt

SEQ ID NO: 192693 - DNA, 25 bp, Probe sequence
gagatcatattataccatggagtaa

SEQ ID NO: 192694 - DNA, 25 bp, Probe sequence
gatcatattataccatggagtaaag

SEQ ID NO: 192695 - DNA, 25 bp, Probe sequence
gtaaaggtggaaaaacagagcgtgg

SEQ ID NO: 192696 - DNA, 25 bp, Probe sequence
gtaggagatcatattataccatgga

SEQ ID NO: 192697 - DNA, 25 bp, Probe sequence
gtggaaacttacagatgctttataa

SEQ ID NO: 192698 - DNA, 25 bp, Probe sequence
gtggaaaaacagagcgtggaaactt

SEQ ID NO: 192699 - DNA, 25 bp, Probe sequence
ggtggaaaaacagagcgtggaaact

SEQ ID NO: 192700 - DNA, 25 bp, Probe sequence
ggagatcatattataccatggagta

SEQ ID NO: 192701 - DNA, 25 bp, Probe sequence
ggaaacttacagatgctttataaac

SEQ ID NO: 192702 - DNA, 25 bp, Probe sequence
tggaaacttacagatgctttataaa

SEQ ID NO: 192703 - DNA, 25 bp, Probe sequence
tcataatagtctaaaatccaattac

SEQ ID NO: 192704 - DNA, 25 bp, Probe sequence
taggagatcatattataccatggag

SEQ ID NO: 192705 - DNA, 25 bp, Probe sequence
tattataccatggagtaaaggtgga

SEQ ID NO: 192706 - DNA, 25 bp, Probe sequence
attcaacgaattataagcgcttaaa

SEQ ID NO: 192707 - DNA, 25 bp, Probe sequence
attaaccatcttgatgatgttatcg

SEQ ID NO: 192708 - DNA, 25 bp, Probe sequence
attttataaacacaacctgtcattc

SEQ ID NO: 192709 - DNA, 25 bp, Probe sequence
atcagatgattaaccatcttgatga

SEQ ID NO: 192710 - DNA, 25 bp, Probe sequence
atcttgatgatgttatcgattttat

SEQ ID NO: 192711 - DNA, 25 bp, Probe sequence
atcgattttataaacacaacctgtc

SEQ ID NO: 192712 - DNA, 25 bp, Probe sequence
atgcgattggatagttttatgatga

SEQ ID NO: 192713 - DNA, 25 bp, Probe sequence
atgattaaccatcttgatgatgtta

SEQ ID NO: 192714 - DNA, 25 bp, Probe sequence
accatcttgatgatgttatcgattt

SEQ ID NO: 192715 - DNA, 25 bp, Probe sequence
aacgaattataagcgcttaaaagca

SEQ ID NO: 192716 - DNA, 25 bp, Probe sequence
aaccatcttgatgatgttatcgatt

SEQ ID NO: 192717 - DNA, 25 bp, Probe sequence
aattcaacgaattataagcgcttaa

SEQ ID NO: 192718 - DNA, 25 bp, Probe sequence
catcttgatgatgttatcgatttta

SEQ ID NO: 192719 - DNA, 25 bp, Probe sequence
cttgatgatgttatcgattttataa

SEQ ID NO: 192720 - DNA, 25 bp, Probe sequence
cgattttataaacacaacctgtcat

SEQ ID NO: 192721 - DNA, 25 bp, Probe sequence
cgaattataagcgcttaaaagcaaa

SEQ ID NO: 192722 - DNA, 25 bp, Probe sequence
gcgattggatagttttatgatgaat

SEQ ID NO: 192723 - DNA, 25 bp, Probe sequence
gaatcagatgattaaccatcttgat

SEQ ID NO: 192724 - DNA, 25 bp, Probe sequence
gatgattaaccatcttgatgatgtt

SEQ ID NO: 192725 - DNA, 25 bp, Probe sequence
gatagttttatgatgaataattcaa

SEQ ID NO: 192726 - DNA, 25 bp, Probe sequence
gattaaccatcttgatgatgttatc

SEQ ID NO: 192727 - DNA, 25 bp, Probe sequence
gattggatagttttatgatgaataa

SEQ ID NO: 192728 - DNA, 25 bp, Probe sequence
gttatcgattttataaacacaacct

SEQ ID NO: 192729 - DNA, 25 bp, Probe sequence
tgattaaccatcttgatgatgttat

SEQ ID NO: 192730 - DNA, 25 bp, Probe sequence
tgatgatgttatcgattttataaac

SEQ ID NO: 192731 - DNA, 25 bp, Probe sequence
tgatgttatcgattttataaacaca

SEQ ID NO: 192732 - DNA, 25 bp, Probe sequence
tgcgattggatagttttatgatgaa

SEQ ID NO: 192733 - DNA, 25 bp, Probe sequence
tcgattttataaacacaacctgtca

SEQ ID NO: 192734 - DNA, 25 bp, Probe sequence
tcttgatgatgttatcgattttata

SEQ ID NO: 192735 - DNA, 25 bp, Probe sequence
taaccatcttgatgatgttatcgat

SEQ ID NO: 192736 - DNA, 25 bp, Probe sequence
tatcgattttataaacacaacctgt

SEQ ID NO: 192737 - DNA, 25 bp, Probe sequence
ttttataaacacaacctgtcattca

SEQ ID NO: 192738 - DNA, 25 bp, Probe sequence
ttaaccatcttgatgatgttatcga

SEQ ID NO: 192739 - DNA, 25 bp, Probe sequence
ttcaacgaattataagcgcttaaaa

SEQ ID NO: 192740 - DNA, 25 bp, Probe sequence
ataatctgtcatctagttctcttaa

SEQ ID NO: 192741 - DNA, 25 bp, Probe sequence
atctagttctcttaattaagttctt

SEQ ID NO: 192742 - DNA, 25 bp, Probe sequence
atctgtcatctagttctcttaatta

SEQ ID NO: 192743 - DNA, 25 bp, Probe sequence
atgaccatcaatgtggttttgcaga

SEQ ID NO: 192744 - DNA, 25 bp, Probe sequence
agataatctgtcatctagttctctt

SEQ ID NO: 192745 - DNA, 25 bp, Probe sequence
acctgtactggatagatatgaccat

SEQ ID NO: 192746 - DNA, 25 bp, Probe sequence
actggatagatatgaccatcaatgt

SEQ ID NO: 192747 - DNA, 25 bp, Probe sequence
acttatccacctgtactggatagat

SEQ ID NO: 192748 - DNA, 25 bp, Probe sequence
aaacttatccacctgtactggatag

SEQ ID NO: 192749 - DNA, 25 bp, Probe sequence
aaaaacttatccacctgtactggat

SEQ ID NO: 192750 - DNA, 25 bp, Probe sequence
aaaacttatccacctgtactggata

SEQ ID NO: 192751 - DNA, 25 bp, Probe sequence
aacttatccacctgtactggataga

SEQ ID NO: 192752 - DNA, 25 bp, Probe sequence
aagataatctgtcatctagttctct

SEQ ID NO: 192753 - DNA, 25 bp, Probe sequence
aatctgtcatctagttctcttaatt

SEQ ID NO: 192754 - DNA, 25 bp, Probe sequence
caaaaaaacttatccacctgtactg

SEQ ID NO: 192755 - DNA, 25 bp, Probe sequence
cttatccacctgtactggatagata

SEQ ID NO: 192756 - DNA, 25 bp, Probe sequence
ctgtcatctagttctcttaattaag

SEQ ID NO: 192757 - DNA, 25 bp, Probe sequence
ccacctgtactggatagatatgacc

SEQ ID NO: 192758 - DNA, 25 bp, Probe sequence
gaaagataatctgtcatctagttct

SEQ ID NO: 192759 - DNA, 25 bp, Probe sequence
gataatctgtcatctagttctctta

SEQ ID NO: 192760 - DNA, 25 bp, Probe sequence
gatatgaccatcaatgtggttttgc

SEQ ID NO: 192761 - DNA, 25 bp, Probe sequence
gttctcttaattaagttcttatcaa

SEQ ID NO: 192762 - DNA, 25 bp, Probe sequence
gtactggatagatatgaccatcaat

SEQ ID NO: 192763 - DNA, 25 bp, Probe sequence
gtcatctagttctcttaattaagtt

SEQ ID NO: 192764 - DNA, 25 bp, Probe sequence
tggatagatatgaccatcaatgtgg

SEQ ID NO: 192765 - DNA, 25 bp, Probe sequence
tgtcatctagttctcttaattaagt

SEQ ID NO: 192766 - DNA, 25 bp, Probe sequence
tctgtcatctagttctcttaattaa

SEQ ID NO: 192767 - DNA, 25 bp, Probe sequence
tcttatcaaaaaaacttatccacct

SEQ ID NO: 192768 - DNA, 25 bp, Probe sequence
tcatctagttctcttaattaagttc

SEQ ID NO: 192769 - DNA, 25 bp, Probe sequence
tcaaaaaaacttatccacctgtact

SEQ ID NO: 192770 - DNA, 25 bp, Probe sequence
taatctgtcatctagttctcttaat

SEQ ID NO: 192771 - DNA, 25 bp, Probe sequence
tagttctcttaattaagttcttatc

SEQ ID NO: 192772 - DNA, 25 bp, Probe sequence
tatgaccatcaatgtggttttgcag

SEQ ID NO: 192773 - DNA, 25 bp, Probe sequence
tatcaaaaaaacttatccacctgta

SEQ ID NO: 192774 - DNA, 25 bp, Probe sequence
agttaattagtctgtcctgttcgtc

SEQ ID NO: 192775 - DNA, 25 bp, Probe sequence
atatctaagtcattctcatctacga

SEQ ID NO: 192776 - DNA, 25 bp, Probe sequence
ataagtctgatgccatatctaagtc

SEQ ID NO: 192777 - DNA, 25 bp, Probe sequence
atctaagtcattctcatctacgaca

SEQ ID NO: 192778 - DNA, 25 bp, Probe sequence
atccattcatctattgcttggttga

SEQ ID NO: 192779 - DNA, 25 bp, Probe sequence
atgccatatctaagtcattctcatc

SEQ ID NO: 192780 - DNA, 25 bp, Probe sequence
aagttaattagtctgtcctgttcgt

SEQ ID NO: 192781 - DNA, 25 bp, Probe sequence
aagtctgatgccatatctaagtcat

SEQ ID NO: 192782 - DNA, 25 bp, Probe sequence
aatccattcatctattgcttggttg

SEQ ID NO: 192783 - DNA, 25 bp, Probe sequence
catatctaagtcattctcatctacg

SEQ ID NO: 192784 - DNA, 25 bp, Probe sequence
cttcaatccattcatctattgcttg

SEQ ID NO: 192785 - DNA, 25 bp, Probe sequence
ctaagtcattctcatctacgacata

SEQ ID NO: 192786 - DNA, 25 bp, Probe sequence
ctcttcaatccattcatctattgct

SEQ ID NO: 192787 - DNA, 25 bp, Probe sequence
ctcctaccatctcatgactaagtta

SEQ ID NO: 192788 - DNA, 25 bp, Probe sequence
ctgatgccatatctaagtcattctc

SEQ ID NO: 192789 - DNA, 25 bp, Probe sequence
cctaccatctcatgactaagttaat

SEQ ID NO: 192790 - DNA, 25 bp, Probe sequence
cctcctaccatctcatgactaagtt

SEQ ID NO: 192791 - DNA, 25 bp, Probe sequence
ccatatctaagtcattctcatctac

SEQ ID NO: 192792 - DNA, 25 bp, Probe sequence
gccatatctaagtcattctcatcta

SEQ ID NO: 192793 - DNA, 25 bp, Probe sequence
gaataagtctgatgccatatctaag

SEQ ID NO: 192794 - DNA, 25 bp, Probe sequence
gatgccatatctaagtcattctcat

SEQ ID NO: 192795 - DNA, 25 bp, Probe sequence
gttgaataagtctgatgccatatct

SEQ ID NO: 192796 - DNA, 25 bp, Probe sequence
gttaattagtctgtcctgttcgtct

SEQ ID NO: 192797 - DNA, 25 bp, Probe sequence
gtctgatgccatatctaagtcattc

SEQ ID NO: 192798 - DNA, 25 bp, Probe sequence
ggttgaataagtctgatgccatatc

SEQ ID NO: 192799 - DNA, 25 bp, Probe sequence
tgcttggttgaataagtctgatgcc

SEQ ID NO: 192800 - DNA, 25 bp, Probe sequence
tgccatatctaagtcattctcatct

SEQ ID NO: 192801 - DNA, 25 bp, Probe sequence
tccattcatctattgcttggttgaa

SEQ ID NO: 192802 - DNA, 25 bp, Probe sequence
tctaagtcattctcatctacgacat

SEQ ID NO: 192803 - DNA, 25 bp, Probe sequence
tcatctattgcttggttgaataagt

SEQ ID NO: 192804 - DNA, 25 bp, Probe sequence
tcaatccattcatctattgcttggt

SEQ ID NO: 192805 - DNA, 25 bp, Probe sequence
taagtcattctcatctacgacataa

SEQ ID NO: 192806 - DNA, 25 bp, Probe sequence
taccatctcatgactaagttaatta

SEQ ID NO: 192807 - DNA, 25 bp, Probe sequence
ttctcttcaatccattcatctattg

SEQ ID NO: 192808 - DNA, 25 bp, Probe sequence
attcgtaagccattatgcacgggtt

SEQ ID NO: 192809 - DNA, 25 bp, Probe sequence
ataattcgtaagccattatgcacgg

SEQ ID NO: 192810 - DNA, 25 bp, Probe sequence
agccattatgcacgggttcttcact

SEQ ID NO: 192811 - DNA, 25 bp, Probe sequence
actgttgttaaagaggtatgattga

SEQ ID NO: 192812 - DNA, 25 bp, Probe sequence
actataattcgtaagccattatgca

SEQ ID NO: 192813 - DNA, 25 bp, Probe sequence
acaaactataattcgtaagccatta

SEQ ID NO: 192814 - DNA, 25 bp, Probe sequence
aaactataattcgtaagccattatg

SEQ ID NO: 192815 - DNA, 25 bp, Probe sequence
aagccattatgcacgggttcttcac

SEQ ID NO: 192816 - DNA, 25 bp, Probe sequence
aactataattcgtaagccattatgc

SEQ ID NO: 192817 - DNA, 25 bp, Probe sequence
cacgggttcttcactgttgttaaag

SEQ ID NO: 192818 - DNA, 25 bp, Probe sequence
aattcgtaagccattatgcacgggt

SEQ ID NO: 192819 - DNA, 25 bp, Probe sequence
caaactataattcgtaagccattat

SEQ ID NO: 192820 - DNA, 25 bp, Probe sequence
cactgttgttaaagaggtatgattg

SEQ ID NO: 192821 - DNA, 25 bp, Probe sequence
cgggttcttcactgttgttaaagag

SEQ ID NO: 192822 - DNA, 25 bp, Probe sequence
cttttatgcatgtgctcggcgcatg

SEQ ID NO: 192823 - DNA, 25 bp, Probe sequence
cttcactgttgttaaagaggtatga

SEQ ID NO: 192824 - DNA, 25 bp, Probe sequence
ctataattcgtaagccattatgcac

SEQ ID NO: 192825 - DNA, 25 bp, Probe sequence
ctacaaactataattcgtaagccat

SEQ ID NO: 192826 - DNA, 25 bp, Probe sequence
cgtaagccattatgcacgggttctt

SEQ ID NO: 192827 - DNA, 25 bp, Probe sequence
cctacaaactataattcgtaagcca

SEQ ID NO: 192828 - DNA, 25 bp, Probe sequence
gttcttcactgttgttaaagaggta

SEQ ID NO: 192829 - DNA, 25 bp, Probe sequence
gtaagccattatgcacgggttcttc

SEQ ID NO: 192830 - DNA, 25 bp, Probe sequence
gggttcttcactgttgttaaagagg

SEQ ID NO: 192831 - DNA, 25 bp, Probe sequence
ggttcttcactgttgttaaagaggt

SEQ ID NO: 192832 - DNA, 25 bp, Probe sequence
tcgtaagccattatgcacgggttct

SEQ ID NO: 192833 - DNA, 25 bp, Probe sequence
tcttcactgttgttaaagaggtatg

SEQ ID NO: 192834 - DNA, 25 bp, Probe sequence
taattcgtaagccattatgcacggg

SEQ ID NO: 192835 - DNA, 25 bp, Probe sequence
taagccattatgcacgggttcttca

SEQ ID NO: 192836 - DNA, 25 bp, Probe sequence
tacaaactataattcgtaagccatt

SEQ ID NO: 192837 - DNA, 25 bp, Probe sequence
taccctacaaactataattcgtaag

SEQ ID NO: 192838 - DNA, 25 bp, Probe sequence
tataattcgtaagccattatgcacg

SEQ ID NO: 192839 - DNA, 25 bp, Probe sequence
ttcttcactgttgttaaagaggtat

SEQ ID NO: 192840 - DNA, 25 bp, Probe sequence
ttcgtaagccattatgcacgggttc

SEQ ID NO: 192841 - DNA, 25 bp, Probe sequence
ttcactgttgttaaagaggtatgat

SEQ ID NO: 192842 - DNA, 25 bp, Probe sequence
attttacgtgctcatcgtcaagact

SEQ ID NO: 192843 - DNA, 25 bp, Probe sequence
ataattttacgtgctcatcgtcaag

SEQ ID NO: 192844 - DNA, 25 bp, Probe sequence
atcgatatgagtttctggatatttt

SEQ ID NO: 192845 - DNA, 25 bp, Probe sequence
acgtgctcatcgtcaagactattta

SEQ ID NO: 192846 - DNA, 25 bp, Probe sequence
acatcgatatgagtttctggatatt

SEQ ID NO: 192847 - DNA, 25 bp, Probe sequence
aataattttacgtgctcatcgtcaa

SEQ ID NO: 192848 - DNA, 25 bp, Probe sequence
aattttacgtgctcatcgtcaagac

SEQ ID NO: 192849 - DNA, 25 bp, Probe sequence
catcgtcaagactatttaaatcaag

SEQ ID NO: 192850 - DNA, 25 bp, Probe sequence
catttacatcgatatgagtttctgg

SEQ ID NO: 192851 - DNA, 25 bp, Probe sequence
cgtgctcatcgtcaagactatttaa

SEQ ID NO: 192852 - DNA, 25 bp, Probe sequence
gctcatcgtcaagactatttaaatc

SEQ ID NO: 192853 - DNA, 25 bp, Probe sequence
gagtttctggatattttaattcatt

SEQ ID NO: 192854 - DNA, 25 bp, Probe sequence
gatatgagtttctggatattttaat

SEQ ID NO: 192855 - DNA, 25 bp, Probe sequence
gttttttattcatttacatcgatat

SEQ ID NO: 192856 - DNA, 25 bp, Probe sequence
gtgctcatcgtcaagactatttaaa

SEQ ID NO: 192857 - DNA, 25 bp, Probe sequence
tgctcatcgtcaagactatttaaat

SEQ ID NO: 192858 - DNA, 25 bp, Probe sequence
tcgtcaagactatttaaatcaagtt

SEQ ID NO: 192859 - DNA, 25 bp, Probe sequence
gtttctggatattttaattcattta

SEQ ID NO: 192860 - DNA, 25 bp, Probe sequence
taattttacgtgctcatcgtcaaga

SEQ ID NO: 192861 - DNA, 25 bp, Probe sequence
taataattttacgtgctcatcgtca

SEQ ID NO: 192862 - DNA, 25 bp, Probe sequence
tacgtgctcatcgtcaagactattt

SEQ ID NO: 192863 - DNA, 25 bp, Probe sequence
tatgagtttctggatattttaattc

SEQ ID NO: 192864 - DNA, 25 bp, Probe sequence
tattaataattttacgtgctcatcg

SEQ ID NO: 192865 - DNA, 25 bp, Probe sequence
tttacgtgctcatcgtcaagactat

SEQ ID NO: 192866 - DNA, 25 bp, Probe sequence
tttacatcgatatgagtttctggat

SEQ ID NO: 192867 - DNA, 25 bp, Probe sequence
ttttacgtgctcatcgtcaagacta

SEQ ID NO: 192868 - DNA, 25 bp, Probe sequence
ttttttattcatttacatcgatatg

SEQ ID NO: 192869 - DNA, 25 bp, Probe sequence
ttttattcatttacatcgatatgag

SEQ ID NO: 192870 - DNA, 25 bp, Probe sequence
ttattaataattttacgtgctcatc

SEQ ID NO: 192871 - DNA, 25 bp, Probe sequence
ttacgtgctcatcgtcaagactatt

SEQ ID NO: 192872 - DNA, 25 bp, Probe sequence
ttacatcgatatgagtttctggata

SEQ ID NO: 192873 - DNA, 25 bp, Probe sequence
ttaataattttacgtgctcatcgtc

SEQ ID NO: 192874 - DNA, 25 bp, Probe sequence
ttctggatattttaattcatttatt

SEQ ID NO: 192875 - DNA, 25 bp, Probe sequence
ttgttttttattcatttacatcgat

SEQ ID NO: 192876 - DNA, 25 bp, Probe sequence
atttgcattcatttatgggttattt

SEQ ID NO: 192877 - DNA, 25 bp, Probe sequence
agttttactacaatttcagacgaat

SEQ ID NO: 192878 - DNA, 25 bp, Probe sequence
actacaatttcagacgaatacctaa

SEQ ID NO: 192879 - DNA, 25 bp, Probe sequence
acatcgacaaagttttactacaatt

SEQ ID NO: 192880 - DNA, 25 bp, Probe sequence
acaatttcagacgaatacctaatta

SEQ ID NO: 192881 - DNA, 25 bp, Probe sequence
aacatcgacaaagttttactacaat

SEQ ID NO: 192882 - DNA, 25 bp, Probe sequence
aatttgcattcatttatgggttatt

SEQ ID NO: 192883 - DNA, 25 bp, Probe sequence
caatttcagacgaatacctaattaa

SEQ ID NO: 192884 - DNA, 25 bp, Probe sequence
caaagttttactacaatttcagacg

SEQ ID NO: 192885 - DNA, 25 bp, Probe sequence
catcgacaaagttttactacaattt

SEQ ID NO: 192886 - DNA, 25 bp, Probe sequence
ctacaatttcagacgaatacctaat

SEQ ID NO: 192887 - DNA, 25 bp, Probe sequence
cgacaaagttttactacaatttcag

SEQ ID NO: 192888 - DNA, 25 bp, Probe sequence
gcaaatttatgtaaacgggaacatc

SEQ ID NO: 192889 - DNA, 25 bp, Probe sequence
gaatttgcattcatttatgggttat

SEQ ID NO: 192890 - DNA, 25 bp, Probe sequence
gaatgtgaatttgcattcatttatg

SEQ ID NO: 192891 - DNA, 25 bp, Probe sequence
gaacatcgacaaagttttactacaa

SEQ ID NO: 192892 - DNA, 25 bp, Probe sequence
gacaaagttttactacaatttcaga

SEQ ID NO: 192893 - DNA, 25 bp, Probe sequence
gttttactacaatttcagacgaata

SEQ ID NO: 192894 - DNA, 25 bp, Probe sequence
ggaacatcgacaaagttttactaca

SEQ ID NO: 192895 - DNA, 25 bp, Probe sequence
tgtaaacgggaacatcgacaaagtt

SEQ ID NO: 192896 - DNA, 25 bp, Probe sequence
tgggttatttttttgcaaatttatg

SEQ ID NO: 192897 - DNA, 25 bp, Probe sequence
tgcattcatttatgggttatttttt

SEQ ID NO: 192898 - DNA, 25 bp, Probe sequence
tcgacaaagttttactacaatttca

SEQ ID NO: 192899 - DNA, 25 bp, Probe sequence
tcatttatgggttatttttttgcaa

SEQ ID NO: 192900 - DNA, 25 bp, Probe sequence
tcagacgaatacctaattaaaacaa

SEQ ID NO: 192901 - DNA, 25 bp, Probe sequence
tacaatttcagacgaatacctaatt

SEQ ID NO: 192902 - DNA, 25 bp, Probe sequence
tactacaatttcagacgaataccta

SEQ ID NO: 192903 - DNA, 25 bp, Probe sequence
tttgcattcatttatgggttatttt

SEQ ID NO: 192904 - DNA, 25 bp, Probe sequence
tttactacaatttcagacgaatacc

SEQ ID NO: 192905 - DNA, 25 bp, Probe sequence
ttatgtaaacgggaacatcgacaaa

SEQ ID NO: 192906 - DNA, 25 bp, Probe sequence
ttactacaatttcagacgaatacct

SEQ ID NO: 192907 - DNA, 25 bp, Probe sequence
ttcagacgaatacctaattaaaaca

SEQ ID NO: 192908 - DNA, 25 bp, Probe sequence
ttcatttatgggttatttttttgca

SEQ ID NO: 192909 - DNA, 25 bp, Probe sequence
ttgcattcatttatgggttattttt

SEQ ID NO: 192910 - DNA, 25 bp, Probe sequence
attacacagctcaaaagacaggaag

SEQ ID NO: 192911 - DNA, 25 bp, Probe sequence
atactgcaagtgaagttgggaagtg

SEQ ID NO: 192912 - DNA, 25 bp, Probe sequence
ataccaagtaagtaagatatctgaa

SEQ ID NO: 192913 - DNA, 25 bp, Probe sequence
atggtattacacagctcaaaagaca

SEQ ID NO: 192914 - DNA, 25 bp, Probe sequence
agtgaagttgggaagtgttgtcaat

SEQ ID NO: 192915 - DNA, 25 bp, Probe sequence
agacaggaagcatactgcaagtgaa

SEQ ID NO: 192916 - DNA, 25 bp, Probe sequence
agcatactgcaagtgaagttgggaa

SEQ ID NO: 192917 - DNA, 25 bp, Probe sequence
actgcaagtgaagttgggaagtgtt

SEQ ID NO: 192918 - DNA, 25 bp, Probe sequence
aaaagacaggaagcatactgcaagt

SEQ ID NO: 192919 - DNA, 25 bp, Probe sequence
aagacaggaagcatactgcaagtga

SEQ ID NO: 192920 - DNA, 25 bp, Probe sequence
aagttgggaagtgttgtcaatacca

SEQ ID NO: 192921 - DNA, 25 bp, Probe sequence
aagtgttgtcaataccaagtaagta

SEQ ID NO: 192922 - DNA, 25 bp, Probe sequence
cacagctcaaaagacaggaagcata

SEQ ID NO: 192923 - DNA, 25 bp, Probe sequence
caggaagcatactgcaagtgaagtt

SEQ ID NO: 192924 - DNA, 25 bp, Probe sequence
gctcaaaagacaggaagcatactgc

SEQ ID NO: 192925 - DNA, 25 bp, Probe sequence
gcatactgcaagtgaagttgggaag

SEQ ID NO: 192926 - DNA, 25 bp, Probe sequence
gaagttgggaagtgttgtcaatacc

SEQ ID NO: 192927 - DNA, 25 bp, Probe sequence
gcaagtgaagttgggaagtgttgtc

SEQ ID NO: 192928 - DNA, 25 bp, Probe sequence
gaagtgttgtcaataccaagtaagt

SEQ ID NO: 192929 - DNA, 25 bp, Probe sequence
gaagcatactgcaagtgaagttggg

SEQ ID NO: 192930 - DNA, 25 bp, Probe sequence
gacaggaagcatactgcaagtgaag

SEQ ID NO: 192931 - DNA, 25 bp, Probe sequence
gttgtcaataccaagtaagtaagat

SEQ ID NO: 192932 - DNA, 25 bp, Probe sequence
gttgggaagtgttgtcaataccaag

SEQ ID NO: 192933 - DNA, 25 bp, Probe sequence
gtattacacagctcaaaagacagga

SEQ ID NO: 192934 - DNA, 25 bp, Probe sequence
gtaagatatctgaaatgtataatag

SEQ ID NO: 192935 - DNA, 25 bp, Probe sequence
gtgttgtcaataccaagtaagtaag

SEQ ID NO: 192936 - DNA, 25 bp, Probe sequence
gggaagtgttgtcaataccaagtaa

SEQ ID NO: 192937 - DNA, 25 bp, Probe sequence
ggtattacacagctcaaaagacagg

SEQ ID NO: 192938 - DNA, 25 bp, Probe sequence
ggaagcatactgcaagtgaagttgg

SEQ ID NO: 192939 - DNA, 25 bp, Probe sequence
ggaagtgttgtcaataccaagtaag

SEQ ID NO: 192940 - DNA, 25 bp, Probe sequence
tggtattacacagctcaaaagacag

SEQ ID NO: 192941 - DNA, 25 bp, Probe sequence
tgggaagtgttgtcaataccaagta

SEQ ID NO: 192942 - DNA, 25 bp, Probe sequence
tacacagctcaaaagacaggaagca

SEQ ID NO: 192943 - DNA, 25 bp, Probe sequence
tattacacagctcaaaagacaggaa

SEQ ID NO: 192944 - DNA, 25 bp, Probe sequence
attgtcttatctcgaaaccgatcaa

SEQ ID NO: 192945 - DNA, 25 bp, Probe sequence
atgctcattgtcttatctcgaaacc

SEQ ID NO: 192946 - DNA, 25 bp, Probe sequence
atggaattcaacagttactcccgct

SEQ ID NO: 192947 - DNA, 25 bp, Probe sequence
accgatcaagtgatccgactgtcgt

SEQ ID NO: 192948 - DNA, 25 bp, Probe sequence
actgcatacttcggtgtatctcctt

SEQ ID NO: 192949 - DNA, 25 bp, Probe sequence
acacctttaagatacatagaccatg

SEQ ID NO: 192950 - DNA, 25 bp, Probe sequence
aaatcactaaagtctgtttcaagaa

SEQ ID NO: 192951 - DNA, 25 bp, Probe sequence
aagtgatccgactgtcgtatgtgta

SEQ ID NO: 192952 - DNA, 25 bp, Probe sequence
aattggtactgcatacttcggtgta

SEQ ID NO: 192953 - DNA, 25 bp, Probe sequence
ctgtcgtatgtgtagatggtaaatc

SEQ ID NO: 192954 - DNA, 25 bp, Probe sequence
ccgactgtcgtatgtgtagatggta

SEQ ID NO: 192955 - DNA, 25 bp, Probe sequence
ccgcttctgttaatgctcattgtct

SEQ ID NO: 192956 - DNA, 25 bp, Probe sequence
gctcattgtcttatctcgaaaccga

SEQ ID NO: 192957 - DNA, 25 bp, Probe sequence
gcttctgttaatgctcattgtctta

SEQ ID NO: 192958 - DNA, 25 bp, Probe sequence
gaaaccgatcaagtgatccgactgt

SEQ ID NO: 192959 - DNA, 25 bp, Probe sequence
gaattggtactgcatacttcggtgt

SEQ ID NO: 192960 - DNA, 25 bp, Probe sequence
gatccgactgtcgtatgtgtagatg

SEQ ID NO: 192961 - DNA, 25 bp, Probe sequence
gatcaagtgatccgactgtcgtatg

SEQ ID NO: 192962 - DNA, 25 bp, Probe sequence
gttaatgctcattgtcttatctcga

SEQ ID NO: 192963 - DNA, 25 bp, Probe sequence
gtatctccttcaacacctttaagat

SEQ ID NO: 192964 - DNA, 25 bp, Probe sequence
gtactgcatacttcggtgtatctcc

SEQ ID NO: 192965 - DNA, 25 bp, Probe sequence
gtcttatctcgaaaccgatcaagtg

SEQ ID NO: 192966 - DNA, 25 bp, Probe sequence
gtctgtttcaagaattggtactgca

SEQ ID NO: 192967 - DNA, 25 bp, Probe sequence
gtgtatctccttcaacacctttaag

SEQ ID NO: 192968 - DNA, 25 bp, Probe sequence
ggtaaatcactaaagtctgtttcaa

SEQ ID NO: 192969 - DNA, 25 bp, Probe sequence
ggtactgcatacttcggtgtatctc

SEQ ID NO: 192970 - DNA, 25 bp, Probe sequence
tggaattcaacagttactcccgctt

SEQ ID NO: 192971 - DNA, 25 bp, Probe sequence
tctccttcaacacctttaagataca

SEQ ID NO: 192972 - DNA, 25 bp, Probe sequence
tcattgtcttatctcgaaaccgatc

SEQ ID NO: 192973 - DNA, 25 bp, Probe sequence
tatctcgaaaccgatcaagtgatcc

SEQ ID NO: 192974 - DNA, 25 bp, Probe sequence
tacttcggtgtatctccttcaacac

SEQ ID NO: 192975 - DNA, 25 bp, Probe sequence
taatgctcattgtcttatctcgaaa

SEQ ID NO: 192976 - DNA, 25 bp, Probe sequence
tttaagatacatagaccatgcaaac

SEQ ID NO: 192977 - DNA, 25 bp, Probe sequence
ttcggtgtatctccttcaacacctt

SEQ ID NO: 192978 - DNA, 25 bp, Probe sequence
attgcagaagcacgagcactactag

SEQ ID NO: 192979 - DNA, 25 bp, Probe sequence
atcaattgcagaagcacgagcacta

SEQ ID NO: 192980 - DNA, 25 bp, Probe sequence
agaagcacgagcactactagatgaa

SEQ ID NO: 192981 - DNA, 25 bp, Probe sequence
agcacgagcactactagatgaattt

SEQ ID NO: 192982 - DNA, 25 bp, Probe sequence
agcactactagatgaatttgaagcc

SEQ ID NO: 192983 - DNA, 25 bp, Probe sequence
acgagcactactagatgaatttgaa

SEQ ID NO: 192984 - DNA, 25 bp, Probe sequence
aaaacaggacttgaacttgcagaaa

SEQ ID NO: 192985 - DNA, 25 bp, Probe sequence
aaaatatggcattgatgaacacaca

SEQ ID NO: 192986 - DNA, 25 bp, Probe sequence
aacaggacttgaacttgcagaaaaa

SEQ ID NO: 192987 - DNA, 25 bp, Probe sequence
aagcacgagcactactagatgaatt

SEQ ID NO: 192988 - DNA, 25 bp, Probe sequence
aatcaattgcagaagcacgagcact

SEQ ID NO: 192989 - DNA, 25 bp, Probe sequence
aattgcagaagcacgagcactacta

SEQ ID NO: 192990 - DNA, 25 bp, Probe sequence
caattgcagaagcacgagcactact

SEQ ID NO: 192991 - DNA, 25 bp, Probe sequence
cactactagatgaatttgaagccca

SEQ ID NO: 192992 - DNA, 25 bp, Probe sequence
cacgagcactactagatgaatttga

SEQ ID NO: 192993 - DNA, 25 bp, Probe sequence
cagaagcacgagcactactagatga

SEQ ID NO: 192994 - DNA, 25 bp, Probe sequence
caggacttgaacttgcagaaaaata

SEQ ID NO: 192995 - DNA, 25 bp, Probe sequence
ctactagatgaatttgaagcccaaa

SEQ ID NO: 192996 - DNA, 25 bp, Probe sequence
gcagaagcacgagcactactagatg

SEQ ID NO: 192997 - DNA, 25 bp, Probe sequence
gcacgagcactactagatgaatttg

SEQ ID NO: 192998 - DNA, 25 bp, Probe sequence
gaagcacgagcactactagatgaat

SEQ ID NO: 192999 - DNA, 25 bp, Probe sequence
gaagcccaaatggacgaagacgtta

SEQ ID NO: 193000 - DNA, 25 bp, Probe sequence
gaacacacaatcaattgcagaagca

SEQ ID NO: 193001 - DNA, 25 bp, Probe sequence
gaaaaacaggacttgaacttgcaga

SEQ ID NO: 193002 - DNA, 25 bp, Probe sequence
gacttgaacttgcagaaaaatatgg

SEQ ID NO: 193003 - DNA, 25 bp, Probe sequence
gagcactactagatgaatttgaagc

SEQ ID NO: 193004 - DNA, 25 bp, Probe sequence
gatgaatttgaagcccaaatggacg

SEQ ID NO: 193005 - DNA, 25 bp, Probe sequence
gatgaacacacaatcaattgcagaa

SEQ ID NO: 193006 - DNA, 25 bp, Probe sequence
gtgatattcccgatagaaaaacagg

SEQ ID NO: 193007 - DNA, 25 bp, Probe sequence
tgcagaagcacgagcactactagat

SEQ ID NO: 193008 - DNA, 25 bp, Probe sequence
tcaattgcagaagcacgagcactac

SEQ ID NO: 193009 - DNA, 25 bp, Probe sequence
tatggcattgatgaacacacaatca

SEQ ID NO: 193010 - DNA, 25 bp, Probe sequence
tttgaagcccaaatggacgaagacg

SEQ ID NO: 193011 - DNA, 25 bp, Probe sequence
ttgcagaagcacgagcactactaga

SEQ ID NO: 193012 - DNA, 25 bp, Probe sequence
attcgttatattcttgataagatga

SEQ ID NO: 193013 - DNA, 25 bp, Probe sequence
atttaacaaatgagccttttctaat

SEQ ID NO: 193014 - DNA, 25 bp, Probe sequence
atattttcagataaaatgtctctat

SEQ ID NO: 193015 - DNA, 25 bp, Probe sequence
ataaaatgtctctattaattaataa

SEQ ID NO: 193016 - DNA, 25 bp, Probe sequence
atgaatttaacaaatgagccttttc

SEQ ID NO: 193017 - DNA, 25 bp, Probe sequence
aggaacattcgttatattcttgata

SEQ ID NO: 193018 - DNA, 25 bp, Probe sequence
agataaaatgtctctattaattaat

SEQ ID NO: 193019 - DNA, 25 bp, Probe sequence
agatgaatttaacaaatgagccttt

SEQ ID NO: 193020 - DNA, 25 bp, Probe sequence
acattcgttatattcttgataagat

SEQ ID NO: 193021 - DNA, 25 bp, Probe sequence
acaaggaacattcgttatattcttg

SEQ ID NO: 193022 - DNA, 25 bp, Probe sequence
aaacaaggaacattcgttatattct

SEQ ID NO: 193023 - DNA, 25 bp, Probe sequence
aaaatgtctctattaattaataagt

SEQ ID NO: 193024 - DNA, 25 bp, Probe sequence
aacaaggaacattcgttatattctt

SEQ ID NO: 193025 - DNA, 25 bp, Probe sequence
aacaaatgagccttttctaatgaaa

SEQ ID NO: 193026 - DNA, 25 bp, Probe sequence
aacattcgttatattcttgataaga

SEQ ID NO: 193027 - DNA, 25 bp, Probe sequence
aaggaacattcgttatattcttgat

SEQ ID NO: 193028 - DNA, 25 bp, Probe sequence
caaggaacattcgttatattcttga

SEQ ID NO: 193029 - DNA, 25 bp, Probe sequence
cagataaaatgtctctattaattaa

SEQ ID NO: 193030 - DNA, 25 bp, Probe sequence
cattcgttatattcttgataagatg

SEQ ID NO: 193031 - DNA, 25 bp, Probe sequence
gaatttaacaaatgagccttttcta

SEQ ID NO: 193032 - DNA, 25 bp, Probe sequence
gaacattcgttatattcttgataag

SEQ ID NO: 193033 - DNA, 25 bp, Probe sequence
gatgaatttaacaaatgagcctttt

SEQ ID NO: 193034 - DNA, 25 bp, Probe sequence
gataaaatgtctctattaattaata

SEQ ID NO: 193035 - DNA, 25 bp, Probe sequence
gatattttcagataaaatgtctcta

SEQ ID NO: 193036 - DNA, 25 bp, Probe sequence
ggaacattcgttatattcttgataa

SEQ ID NO: 193037 - DNA, 25 bp, Probe sequence
tgaatttaacaaatgagccttttct

SEQ ID NO: 193038 - DNA, 25 bp, Probe sequence
tcagataaaatgtctctattaatta

SEQ ID NO: 193039 - DNA, 25 bp, Probe sequence
taacaaatgagccttttctaatgaa

SEQ ID NO: 193040 - DNA, 25 bp, Probe sequence
tttcagataaaatgtctctattaat

SEQ ID NO: 193041 - DNA, 25 bp, Probe sequence
tttaacaaatgagccttttctaatg

SEQ ID NO: 193042 - DNA, 25 bp, Probe sequence
ttttcagataaaatgtctctattaa

SEQ ID NO: 193043 - DNA, 25 bp, Probe sequence
ttaacaaatgagccttttctaatga

SEQ ID NO: 193044 - DNA, 25 bp, Probe sequence
ttcagataaaatgtctctattaatt

SEQ ID NO: 193045 - DNA, 25 bp, Probe sequence
ttcgttatattcttgataagatgaa

SEQ ID NO: 193046 - DNA, 25 bp, Probe sequence
agtgccagtcgaagacaggggcccc

SEQ ID NO: 193047 - DNA, 25 bp, Probe sequence
attaatggcaagactcctgagggag

SEQ ID NO: 193048 - DNA, 25 bp, Probe sequence
atgtgcaagttggggtggctgagac

SEQ ID NO: 193049 - DNA, 25 bp, Probe sequence
atggcaagactcctgagggagcagt

SEQ ID NO: 193050 - DNA, 25 bp, Probe sequence
agggagcagtgccagtcgaagacag

SEQ ID NO: 193051 - DNA, 25 bp, Probe sequence
agttggggtggctgagacggcaccc

SEQ ID NO: 193052 - DNA, 25 bp, Probe sequence
agtattaatggcaagactcctgagg

SEQ ID NO: 193053 - DNA, 25 bp, Probe sequence
actcctgagggagcagtgccagtcg

SEQ ID NO: 193054 - DNA, 25 bp, Probe sequence
acgtagtattaatggcaagactcct

SEQ ID NO: 193055 - DNA, 25 bp, Probe sequence
aaaagtcagcttacaataatgtgca

SEQ ID NO: 193056 - DNA, 25 bp, Probe sequence
aagactcctgagggagcagtgccag

SEQ ID NO: 193057 - DNA, 25 bp, Probe sequence
caagttggggtggctgagacggcac

SEQ ID NO: 193058 - DNA, 25 bp, Probe sequence
ctgagggagcagtgccagtcgaaga

SEQ ID NO: 193059 - DNA, 25 bp, Probe sequence
ctcctgagggagcagtgccagtcga

SEQ ID NO: 193060 - DNA, 25 bp, Probe sequence
ccaacacagaagctgacgaaaagtc

SEQ ID NO: 193061 - DNA, 25 bp, Probe sequence
gccccaacacagaagctgacgaaaa

SEQ ID NO: 193062 - DNA, 25 bp, Probe sequence
gcagtgccagtcgaagacaggggcc

SEQ ID NO: 193063 - DNA, 25 bp, Probe sequence
gcaagttggggtggctgagacggca

SEQ ID NO: 193064 - DNA, 25 bp, Probe sequence
gcaagactcctgagggagcagtgcc

SEQ ID NO: 193065 - DNA, 25 bp, Probe sequence
gactcctgagggagcagtgccagtc

SEQ ID NO: 193066 - DNA, 25 bp, Probe sequence
gacgaaaagtcagcttacaataatg

SEQ ID NO: 193067 - DNA, 25 bp, Probe sequence
gagcagtgccagtcgaagacagggg

SEQ ID NO: 193068 - DNA, 25 bp, Probe sequence
gagggagcagtgccagtcgaagaca

SEQ ID NO: 193069 - DNA, 25 bp, Probe sequence
gtattaatggcaagactcctgaggg

SEQ ID NO: 193070 - DNA, 25 bp, Probe sequence
gtagtattaatggcaagactcctga

SEQ ID NO: 193071 - DNA, 25 bp, Probe sequence
gtcagcttacaataatgtgcaagtt

SEQ ID NO: 193072 - DNA, 25 bp, Probe sequence
gtgcaagttggggtggctgagacgg

SEQ ID NO: 193073 - DNA, 25 bp, Probe sequence
ggagcagtgccagtcgaagacaggg

SEQ ID NO: 193074 - DNA, 25 bp, Probe sequence
ggccccaacacagaagctgacgaaa

SEQ ID NO: 193075 - DNA, 25 bp, Probe sequence
tgcaagttggggtggctgagacggc

SEQ ID NO: 193076 - DNA, 25 bp, Probe sequence
tgccagtcgaagacaggggccccaa

SEQ ID NO: 193077 - DNA, 25 bp, Probe sequence
tcctgagggagcagtgccagtcgaa

SEQ ID NO: 193078 - DNA, 25 bp, Probe sequence
tattaatggcaagactcctgaggga

SEQ ID NO: 193079 - DNA, 25 bp, Probe sequence
ttaatggcaagactcctgagggagc

SEQ ID NO: 193080 - DNA, 25 bp, Probe sequence
attagttactggctacacaactgga

SEQ ID NO: 193081 - DNA, 25 bp, Probe sequence
attttgcttatataatggaatcttt

SEQ ID NO: 193082 - DNA, 25 bp, Probe sequence
agggcaaatgttacttgctgtagca

SEQ ID NO: 193083 - DNA, 25 bp, Probe sequence
actggctacacaactggaattttga

SEQ ID NO: 193084 - DNA, 25 bp, Probe sequence
acttgtattagcttggacttctttc

SEQ ID NO: 193085 - DNA, 25 bp, Probe sequence
acaaacagtcacttcattagtactt

SEQ ID NO: 193086 - DNA, 25 bp, Probe sequence
aaatttattagttactggctacaca

SEQ ID NO: 193087 - DNA, 25 bp, Probe sequence
aacagtcacttcattagtactttta

SEQ ID NO: 193088 - DNA, 25 bp, Probe sequence
aattgtgttaagtggcattttctat

SEQ ID NO: 193089 - DNA, 25 bp, Probe sequence
cagtcacttcattagtacttttaat

SEQ ID NO: 193090 - DNA, 25 bp, Probe sequence
cttgctgtagcaattttttcactaa

SEQ ID NO: 193091 - DNA, 25 bp, Probe sequence
gctgtagcaattttttcactaacta

SEQ ID NO: 193092 - DNA, 25 bp, Probe sequence
gcttggacttctttcatagttacat

SEQ ID NO: 193093 - DNA, 25 bp, Probe sequence
gcaattttttcactaactatttatt

SEQ ID NO: 193094 - DNA, 25 bp, Probe sequence
gaaaatcatagggcaaatgttactt

SEQ ID NO: 193095 - DNA, 25 bp, Probe sequence
gttcttacaaacagtcacttcatta

SEQ ID NO: 193096 - DNA, 25 bp, Probe sequence
gttcacttgtattagcttggacttc

SEQ ID NO: 193097 - DNA, 25 bp, Probe sequence
gttacattacttttaataattgtgt

SEQ ID NO: 193098 - DNA, 25 bp, Probe sequence
gttactggctacacaactggaattt

SEQ ID NO: 193099 - DNA, 25 bp, Probe sequence
gtattagcttggacttctttcatag

SEQ ID NO: 193100 - DNA, 25 bp, Probe sequence
gtagcaattttttcactaactattt

SEQ ID NO: 193101 - DNA, 25 bp, Probe sequence
gtgttaagtggcattttctattttg

SEQ ID NO: 193102 - DNA, 25 bp, Probe sequence
gggttcttacaaacagtcacttcat

SEQ ID NO: 193103 - DNA, 25 bp, Probe sequence
ggacttctttcatagttacattact

SEQ ID NO: 193104 - DNA, 25 bp, Probe sequence
ggcattttctattttggtgaaaacg

SEQ ID NO: 193105 - DNA, 25 bp, Probe sequence
ggctacacaactggaattttgaaaa

SEQ ID NO: 193106 - DNA, 25 bp, Probe sequence
taagtggcattttctattttggtga

SEQ ID NO: 193107 - DNA, 25 bp, Probe sequence
tagtacttttaatatgttcacttgt

SEQ ID NO: 193108 - DNA, 25 bp, Probe sequence
tatgttcacttgtattagcttggac

SEQ ID NO: 193109 - DNA, 25 bp, Probe sequence
tataatggaatctttactttttggg

SEQ ID NO: 193110 - DNA, 25 bp, Probe sequence
ttagcttggacttctttcatagtta

SEQ ID NO: 193111 - DNA, 25 bp, Probe sequence
ttcactaactatttattttgcttat

SEQ ID NO: 193112 - DNA, 25 bp, Probe sequence
ttctttcatagttacattactttta

SEQ ID NO: 193113 - DNA, 25 bp, Probe sequence
ttgggttcttacaaacagtcacttc

SEQ ID NO: 193114 - DNA, 25 bp, Probe sequence
atttcattgaactttatttcttatt

SEQ ID NO: 193115 - DNA, 25 bp, Probe sequence
atatgatggtgaaacatctgaaata

SEQ ID NO: 193116 - DNA, 25 bp, Probe sequence
atggtgaaacatctgaaataaacaa

SEQ ID NO: 193117 - DNA, 25 bp, Probe sequence
agttacgcaatatgatggtgaaaca

SEQ ID NO: 193118 - DNA, 25 bp, Probe sequence
acgcaatatgatggtgaaacatctg

SEQ ID NO: 193119 - DNA, 25 bp, Probe sequence
aaagttacgcaatatgatggtgaaa

SEQ ID NO: 193120 - DNA, 25 bp, Probe sequence
aaaagttacgcaatatgatggtgaa

SEQ ID NO: 193121 - DNA, 25 bp, Probe sequence
aagttacgcaatatgatggtgaaac

SEQ ID NO: 193122 - DNA, 25 bp, Probe sequence
aatatgatggtgaaacatctgaaat

SEQ ID NO: 193123 - DNA, 25 bp, Probe sequence
cattgaactttatttcttatttgta

SEQ ID NO: 193124 - DNA, 25 bp, Probe sequence
cgtttttgatttcattgaactttat

SEQ ID NO: 193125 - DNA, 25 bp, Probe sequence
cgcaatatgatggtgaaacatctga

SEQ ID NO: 193126 - DNA, 25 bp, Probe sequence
gcaatatgatggtgaaacatctgaa

SEQ ID NO: 193127 - DNA, 25 bp, Probe sequence
gatttcattgaactttatttcttat

SEQ ID NO: 193128 - DNA, 25 bp, Probe sequence
gttcgtttttgatttcattgaactt

SEQ ID NO: 193129 - DNA, 25 bp, Probe sequence
gttacgcaatatgatggtgaaacat

SEQ ID NO: 193130 - DNA, 25 bp, Probe sequence
gtttttgatttcattgaactttatt

SEQ ID NO: 193131 - DNA, 25 bp, Probe sequence
gtaaaagttacgcaatatgatggtg

SEQ ID NO: 193132 - DNA, 25 bp, Probe sequence
tggtgaaacatctgaaataaacaaa

SEQ ID NO: 193133 - DNA, 25 bp, Probe sequence
tgtaaaagttacgcaatatgatggt

SEQ ID NO: 193134 - DNA, 25 bp, Probe sequence
tgatttcattgaactttatttctta

SEQ ID NO: 193135 - DNA, 25 bp, Probe sequence
tcgtttttgatttcattgaacttta

SEQ ID NO: 193136 - DNA, 25 bp, Probe sequence
tcattgaactttatttcttatttgt

SEQ ID NO: 193137 - DNA, 25 bp, Probe sequence
taaaagttacgcaatatgatggtga

SEQ ID NO: 193138 - DNA, 25 bp, Probe sequence
tacgcaatatgatggtgaaacatct

SEQ ID NO: 193139 - DNA, 25 bp, Probe sequence
tatgatggtgaaacatctgaaataa

SEQ ID NO: 193140 - DNA, 25 bp, Probe sequence
tttgatttcattgaactttatttct

SEQ ID NO: 193141 - DNA, 25 bp, Probe sequence
tttcattgaactttatttcttattt

SEQ ID NO: 193142 - DNA, 25 bp, Probe sequence
tttttgatttcattgaactttattt

SEQ ID NO: 193143 - DNA, 25 bp, Probe sequence
ttttgatttcattgaactttatttc

SEQ ID NO: 193144 - DNA, 25 bp, Probe sequence
ttacgcaatatgatggtgaaacatc

SEQ ID NO: 193145 - DNA, 25 bp, Probe sequence
ttcattgaactttatttcttatttg

SEQ ID NO: 193146 - DNA, 25 bp, Probe sequence
ttcgtttttgatttcattgaacttt

SEQ ID NO: 193147 - DNA, 25 bp, Probe sequence
ttgatttcattgaactttatttctt

SEQ ID NO: 193148 - DNA, 25 bp, Probe sequence
atatgacacaactacagctagatca

SEQ ID NO: 193149 - DNA, 25 bp, Probe sequence
atgacacaactacagctagatcatt

SEQ ID NO: 193150 - DNA, 25 bp, Probe sequence
atggccaaccgataagtcgtttaat

SEQ ID NO: 193151 - DNA, 25 bp, Probe sequence
atggcacctttagaatatgacacaa

SEQ ID NO: 193152 - DNA, 25 bp, Probe sequence
agaaatggccaaccgataagtcgtt

SEQ ID NO: 193153 - DNA, 25 bp, Probe sequence
agaatatgacacaactacagctaga

SEQ ID NO: 193154 - DNA, 25 bp, Probe sequence
agctcacatctcctttaaagcgtta

SEQ ID NO: 193155 - DNA, 25 bp, Probe sequence
actacagctagatcattattaagca

SEQ ID NO: 193156 - DNA, 25 bp, Probe sequence
acttagctcacatctcctttaaagc

SEQ ID NO: 193157 - DNA, 25 bp, Probe sequence
acagctagatcattattaagcaaat

SEQ ID NO: 193158 - DNA, 25 bp, Probe sequence
aagaaatggccaaccgataagtcgt

SEQ ID NO: 193159 - DNA, 25 bp, Probe sequence
aagcaaattattagttcgagcaact

SEQ ID NO: 193160 - DNA, 25 bp, Probe sequence
aataatcacttagctcacatctcct

SEQ ID NO: 193161 - DNA, 25 bp, Probe sequence
caactacagctagatcattattaag

SEQ ID NO: 193162 - DNA, 25 bp, Probe sequence
cacaactacagctagatcattatta

SEQ ID NO: 193163 - DNA, 25 bp, Probe sequence
taaagcgttaaagcgtctacgtgtt

SEQ ID NO: 193164 - DNA, 25 bp, Probe sequence
cttagctcacatctcctttaaagcg

SEQ ID NO: 193165 - DNA, 25 bp, Probe sequence
ctcacatctcctttaaagcgttaaa

SEQ ID NO: 193166 - DNA, 25 bp, Probe sequence
gccaaccgataagtcgtttaataat

SEQ ID NO: 193167 - DNA, 25 bp, Probe sequence
gctcacatctcctttaaagcgttaa

SEQ ID NO: 193168 - DNA, 25 bp, Probe sequence
gcaactaagaaatggccaaccgata

SEQ ID NO: 193169 - DNA, 25 bp, Probe sequence
gaatatgacacaactacagctagat

SEQ ID NO: 193170 - DNA, 25 bp, Probe sequence
gaaatggccaaccgataagtcgttt

SEQ ID NO: 193171 - DNA, 25 bp, Probe sequence
gacacaactacagctagatcattat

SEQ ID NO: 193172 - DNA, 25 bp, Probe sequence
gagcaactaagaaatggccaaccga

SEQ ID NO: 193173 - DNA, 25 bp, Probe sequence
gtcgtttaataatcacttagctcac

SEQ ID NO: 193174 - DNA, 25 bp, Probe sequence
ggcacctttagaatatgacacaact

SEQ ID NO: 193175 - DNA, 25 bp, Probe sequence
tggcacctttagaatatgacacaac

SEQ ID NO: 193176 - DNA, 25 bp, Probe sequence
tggccaaccgataagtcgtttaata

SEQ ID NO: 193177 - DNA, 25 bp, Probe sequence
tcgagcaactaagaaatggccaacc

SEQ ID NO: 193178 - DNA, 25 bp, Probe sequence
taataatcacttagctcacatctcc

SEQ ID NO: 193179 - DNA, 25 bp, Probe sequence
taagcaaattattagttcgagcaac

SEQ ID NO: 193180 - DNA, 25 bp, Probe sequence
tagctcacatctcctttaaagcgtt

SEQ ID NO: 193181 - DNA, 25 bp, Probe sequence
ttagctcacatctcctttaaagcgt

SEQ ID NO: 193182 - DNA, 25 bp, Probe sequence
acttatcccgtccatggaacataca

SEQ ID NO: 193183 - DNA, 25 bp, Probe sequence
acatacaatagcggtcattctgggt

SEQ ID NO: 193184 - DNA, 25 bp, Probe sequence
acaatagcggtcattctgggtagtt

SEQ ID NO: 193185 - DNA, 25 bp, Probe sequence
cacttatcccgtccatggaacatac

SEQ ID NO: 193186 - DNA, 25 bp, Probe sequence
aatagcggtcattctgggtagtttt

SEQ ID NO: 193187 - DNA, 25 bp, Probe sequence
cccgtccatggaacatacaatagcg

SEQ ID NO: 193188 - DNA, 25 bp, Probe sequence
cattctgggtagttttgaccccatt

SEQ ID NO: 193189 - DNA, 25 bp, Probe sequence
cttatcccgtccatggaacatacaa

SEQ ID NO: 193190 - DNA, 25 bp, Probe sequence
cgtttagtttagaagagcgtatgga

SEQ ID NO: 193191 - DNA, 25 bp, Probe sequence
ccattacttatggtcatttagacat

SEQ ID NO: 193192 - DNA, 25 bp, Probe sequence
gaagtacagatagatttgatgggat

SEQ ID NO: 193193 - DNA, 25 bp, Probe sequence
gaagagcgtatggatttaattgaac

SEQ ID NO: 193194 - DNA, 25 bp, Probe sequence
gaccccattacttatggtcatttag

SEQ ID NO: 193195 - DNA, 25 bp, Probe sequence
gatgggattcatgtctgtgttctta

SEQ ID NO: 193196 - DNA, 25 bp, Probe sequence
gatttgatgggattcatgtctgtgt

SEQ ID NO: 193197 - DNA, 25 bp, Probe sequence
gttttgaccccattacttatggtca

SEQ ID NO: 193198 - DNA, 25 bp, Probe sequence
taattgaacgtctgttaaacctaat

SEQ ID NO: 193199 - DNA, 25 bp, Probe sequence
gtagttttgaccccattacttatgg

SEQ ID NO: 193200 - DNA, 25 bp, Probe sequence
gtatggatttaattgaacgtctgtt

SEQ ID NO: 193201 - DNA, 25 bp, Probe sequence
gtcattctgggtagttttgacccca

SEQ ID NO: 193202 - DNA, 25 bp, Probe sequence
ggtagttttgaccccattacttatg

SEQ ID NO: 193203 - DNA, 25 bp, Probe sequence
ggattcatgtctgtgttcttaagaa

SEQ ID NO: 193204 - DNA, 25 bp, Probe sequence
ggaacatacaatagcggtcattctg

SEQ ID NO: 193205 - DNA, 25 bp, Probe sequence
tgggattcatgtctgtgttcttaag

SEQ ID NO: 193206 - DNA, 25 bp, Probe sequence
tgaacgtctgttaaacctaattagt

SEQ ID NO: 193207 - DNA, 25 bp, Probe sequence
tccatggaacatacaatagcggtca

SEQ ID NO: 193208 - DNA, 25 bp, Probe sequence
tctgggtagttttgaccccattact

SEQ ID NO: 193209 - DNA, 25 bp, Probe sequence
tagcggtcattctgggtagttttga

SEQ ID NO: 193210 - DNA, 25 bp, Probe sequence
tagacattattgagagaagtacaga

SEQ ID NO: 193211 - DNA, 25 bp, Probe sequence
tatggtcatttagacattattgaga

SEQ ID NO: 193212 - DNA, 25 bp, Probe sequence
tatcccgtccatggaacatacaata

SEQ ID NO: 193213 - DNA, 25 bp, Probe sequence
tttgaccccattacttatggtcatt

SEQ ID NO: 193214 - DNA, 25 bp, Probe sequence
ttatcccgtccatggaacatacaat

SEQ ID NO: 193215 - DNA, 25 bp, Probe sequence
ttcatgtctgtgttcttaagaatag

SEQ ID NO: 193216 - DNA, 25 bp, Probe sequence
atcccgcaattgaccatgctgtagt

SEQ ID NO: 193217 - DNA, 25 bp, Probe sequence
atgcttgcgaatcccgcaattgacc

SEQ ID NO: 193218 - DNA, 25 bp, Probe sequence
atgaatgtcactatgcttgcgaatc

SEQ ID NO: 193219 - DNA, 25 bp, Probe sequence
acggcatgagtacaattgctaagac

SEQ ID NO: 193220 - DNA, 25 bp, Probe sequence
actgtgaagcacagtactgctatta

SEQ ID NO: 193221 - DNA, 25 bp, Probe sequence
actatgcttgcgaatcccgcaattg

SEQ ID NO: 193222 - DNA, 25 bp, Probe sequence
acaattgctaagactgtgaagcaca

SEQ ID NO: 193223 - DNA, 25 bp, Probe sequence
aatgtcactatgcttgcgaatcccg

SEQ ID NO: 193224 - DNA, 25 bp, Probe sequence
aatcccgcaattgaccatgctgtag

SEQ ID NO: 193225 - DNA, 25 bp, Probe sequence
aattgaccatgctgtagtgaagtat

SEQ ID NO: 193226 - DNA, 25 bp, Probe sequence
cactatgcttgcgaatcccgcaatt

SEQ ID NO: 193227 - DNA, 25 bp, Probe sequence
ctatgcttgcgaatcccgcaattga

SEQ ID NO: 193228 - DNA, 25 bp, Probe sequence
cgaatcccgcaattgaccatgctgt

SEQ ID NO: 193229 - DNA, 25 bp, Probe sequence
cccgcaattgaccatgctgtagtga

SEQ ID NO: 193230 - DNA, 25 bp, Probe sequence
ccgcaattgaccatgctgtagtgaa

SEQ ID NO: 193231 - DNA, 25 bp, Probe sequence
gctgtagtgaagtatagaaacggca

SEQ ID NO: 193232 - DNA, 25 bp, Probe sequence
gcttgcgaatcccgcaattgaccat

SEQ ID NO: 193233 - DNA, 25 bp, Probe sequence
gcatgagtacaattgctaagactgt

SEQ ID NO: 193234 - DNA, 25 bp, Probe sequence
gcaattgaccatgctgtagtgaagt

SEQ ID NO: 193235 - DNA, 25 bp, Probe sequence
gaatcccgcaattgaccatgctgta

SEQ ID NO: 193236 - DNA, 25 bp, Probe sequence
gaatgtcactatgcttgcgaatccc

SEQ ID NO: 193237 - DNA, 25 bp, Probe sequence
gaaacggcatgagtacaattgctaa

SEQ ID NO: 193238 - DNA, 25 bp, Probe sequence
gaccatgctgtagtgaagtatagaa

SEQ ID NO: 193239 - DNA, 25 bp, Probe sequence
gagtacaattgctaagactgtgaag

SEQ ID NO: 193240 - DNA, 25 bp, Probe sequence
gtcactatgcttgcgaatcccgcaa

SEQ ID NO: 193241 - DNA, 25 bp, Probe sequence
gtgaagtatagaaacggcatgagta

SEQ ID NO: 193242 - DNA, 25 bp, Probe sequence
tgtgaagcacagtactgctattaag

SEQ ID NO: 193243 - DNA, 25 bp, Probe sequence
tgaatgtcactatgcttgcgaatcc

SEQ ID NO: 193244 - DNA, 25 bp, Probe sequence
tgcttgcgaatcccgcaattgacca

SEQ ID NO: 193245 - DNA, 25 bp, Probe sequence
tgcgaatcccgcaattgaccatgct

SEQ ID NO: 193246 - DNA, 25 bp, Probe sequence
tcccgcaattgaccatgctgtagtg

SEQ ID NO: 193247 - DNA, 25 bp, Probe sequence
tcactatgcttgcgaatcccgcaat

SEQ ID NO: 193248 - DNA, 25 bp, Probe sequence
tatgcttgcgaatcccgcaattgac

SEQ ID NO: 193249 - DNA, 25 bp, Probe sequence
ttgaccatgctgtagtgaagtatag

SEQ ID NO: 193250 - DNA, 25 bp, Probe sequence
gtaacgaaggttattccgcctgctt

SEQ ID NO: 193251 - DNA, 25 bp, Probe sequence
attgtaacgaaggttattccgcctg

SEQ ID NO: 193252 - DNA, 25 bp, Probe sequence
atacgtatgcacatgtatacattaa

SEQ ID NO: 193253 - DNA, 25 bp, Probe sequence
acgatttacatcttcatacgccggt

SEQ ID NO: 193254 - DNA, 25 bp, Probe sequence
acgaattaatacgtatgcacatgta

SEQ ID NO: 193255 - DNA, 25 bp, Probe sequence
acatcttcatacgccggtttatttt

SEQ ID NO: 193256 - DNA, 25 bp, Probe sequence
aaacgatttacatcttcatacgccg

SEQ ID NO: 193257 - DNA, 25 bp, Probe sequence
aaaatgatgtacaatatgccaaata

SEQ ID NO: 193258 - DNA, 25 bp, Probe sequence
aacgatttacatcttcatacgccgg

SEQ ID NO: 193259 - DNA, 25 bp, Probe sequence
catcttcatacgccggtttattttt

SEQ ID NO: 193260 - DNA, 25 bp, Probe sequence
cttgtgttgctgattatgccacgcg

SEQ ID NO: 193261 - DNA, 25 bp, Probe sequence
ctaaacgatttacatcttcatacgc

SEQ ID NO: 193262 - DNA, 25 bp, Probe sequence
ctgcttgtgttgctgattatgccac

SEQ ID NO: 193263 - DNA, 25 bp, Probe sequence
cgcctgcttgtgttgctgattatgc

SEQ ID NO: 193264 - DNA, 25 bp, Probe sequence
ccgcctgcttgtgttgctgattatg

SEQ ID NO: 193265 - DNA, 25 bp, Probe sequence
cctgcttgtgttgctgattatgcca

SEQ ID NO: 193266 - DNA, 25 bp, Probe sequence
gcctgcttgtgttgctgattatgcc

SEQ ID NO: 193267 - DNA, 25 bp, Probe sequence
gctaaacgatttacatcttcatacg

SEQ ID NO: 193268 - DNA, 25 bp, Probe sequence
gcttgtgttgctgattatgccacgc

SEQ ID NO: 193269 - DNA, 25 bp, Probe sequence
gatgtacaatatgccaaataaaatt

SEQ ID NO: 193270 - DNA, 25 bp, Probe sequence
gtatgcacatgtatacattaaaatg

SEQ ID NO: 193271 - DNA, 25 bp, Probe sequence
ggctaaacgatttacatcttcatac

SEQ ID NO: 193272 - DNA, 25 bp, Probe sequence
tgtgttgctgattatgccacgcgca

SEQ ID NO: 193273 - DNA, 25 bp, Probe sequence
tgtaacgaaggttattccgcctgct

SEQ ID NO: 193274 - DNA, 25 bp, Probe sequence
tgttgctgattatgccacgcgcata

SEQ ID NO: 193275 - DNA, 25 bp, Probe sequence
tgcttgtgttgctgattatgccacg

SEQ ID NO: 193276 - DNA, 25 bp, Probe sequence
taatacgtatgcacatgtatacatt

SEQ ID NO: 193277 - DNA, 25 bp, Probe sequence
taacgaaggttattccgcctgcttg

SEQ ID NO: 193278 - DNA, 25 bp, Probe sequence
taaacgatttacatcttcatacgcc

SEQ ID NO: 193279 - DNA, 25 bp, Probe sequence
tacatcttcatacgccggtttattt

SEQ ID NO: 193280 - DNA, 25 bp, Probe sequence
ttgtaacgaaggttattccgcctgc

SEQ ID NO: 193281 - DNA, 25 bp, Probe sequence
ttacatcttcatacgccggtttatt

SEQ ID NO: 193282 - DNA, 25 bp, Probe sequence
ttggctaaacgatttacatcttcat

SEQ ID NO: 193283 - DNA, 25 bp, Probe sequence
ttgtgttgctgattatgccacgcgc

SEQ ID NO: 193284 - DNA, 25 bp, Probe sequence
attcatgcctctactttttcgaatt

SEQ ID NO: 193285 - DNA, 25 bp, Probe sequence
atcagcacttatacactagtcaaaa

SEQ ID NO: 193286 - DNA, 25 bp, Probe sequence
atgcctctactttttcgaatttcaa

SEQ ID NO: 193287 - DNA, 25 bp, Probe sequence
agtcaaaaaattcatgcctctactt

SEQ ID NO: 193288 - DNA, 25 bp, Probe sequence
agcacttatacactagtcaaaaaat

SEQ ID NO: 193289 - DNA, 25 bp, Probe sequence
accacacaacaaaaaagacaccatt

SEQ ID NO: 193290 - DNA, 25 bp, Probe sequence
actagtcaaaaaattcatgcctcta

SEQ ID NO: 193291 - DNA, 25 bp, Probe sequence
acactagtcaaaaaattcatgcctc

SEQ ID NO: 193292 - DNA, 25 bp, Probe sequence
aaattcatgcctctactttttcgaa

SEQ ID NO: 193293 - DNA, 25 bp, Probe sequence
aaagacaccatttgaatgttggtgt

SEQ ID NO: 193294 - DNA, 25 bp, Probe sequence
aaaaattcatgcctctactttttcg

SEQ ID NO: 193295 - DNA, 25 bp, Probe sequence
aaaaagacaccatttgaatgttggt

SEQ ID NO: 193296 - DNA, 25 bp, Probe sequence
aaaattcatgcctctactttttcga

SEQ ID NO: 193297 - DNA, 25 bp, Probe sequence
aaccacacaacaaaaaagacaccat

SEQ ID NO: 193298 - DNA, 25 bp, Probe sequence
aattcatgcctctactttttcgaat

SEQ ID NO: 193299 - DNA, 25 bp, Probe sequence
caaaaaattcatgcctctacttttt

SEQ ID NO: 193300 - DNA, 25 bp, Probe sequence
cactagtcaaaaaattcatgcctct

SEQ ID NO: 193301 - DNA, 25 bp, Probe sequence
cagcacttatacactagtcaaaaaa

SEQ ID NO: 193302 - DNA, 25 bp, Probe sequence
catgcctctactttttcgaatttca

SEQ ID NO: 193303 - DNA, 25 bp, Probe sequence
catcagcacttatacactagtcaaa

SEQ ID NO: 193304 - DNA, 25 bp, Probe sequence
ctagtcaaaaaattcatgcctctac

SEQ ID NO: 193305 - DNA, 25 bp, Probe sequence
ctcatcagcacttatacactagtca

SEQ ID NO: 193306 - DNA, 25 bp, Probe sequence
gtcaaaaaattcatgcctctacttt

SEQ ID NO: 193307 - DNA, 25 bp, Probe sequence
gtctcatcagcacttatacactagt

SEQ ID NO: 193308 - DNA, 25 bp, Probe sequence
gtgtctcatcagcacttatacacta

SEQ ID NO: 193309 - DNA, 25 bp, Probe sequence
tgtctcatcagcacttatacactag

SEQ ID NO: 193310 - DNA, 25 bp, Probe sequence
tgcctctactttttcgaatttcaaa

SEQ ID NO: 193311 - DNA, 25 bp, Probe sequence
tctcatcagcacttatacactagtc

SEQ ID NO: 193312 - DNA, 25 bp, Probe sequence
tcatgcctctactttttcgaatttc

SEQ ID NO: 193313 - DNA, 25 bp, Probe sequence
tcatcagcacttatacactagtcaa

SEQ ID NO: 193314 - DNA, 25 bp, Probe sequence
tcagcacttatacactagtcaaaaa

SEQ ID NO: 193315 - DNA, 25 bp, Probe sequence
tcaaaaaattcatgcctctactttt

SEQ ID NO: 193316 - DNA, 25 bp, Probe sequence
tagtcaaaaaattcatgcctctact

SEQ ID NO: 193317 - DNA, 25 bp, Probe sequence
ttcatgcctctactttttcgaattt

SEQ ID NO: 193318 - DNA, 25 bp, Probe sequence
ataggtggcgcattcacacctggta

SEQ ID NO: 193319 - DNA, 25 bp, Probe sequence
atgtggcactgtggtacttctacac

SEQ ID NO: 193320 - DNA, 25 bp, Probe sequence
accaattgccaacatgtggcactgt

SEQ ID NO: 193321 - DNA, 25 bp, Probe sequence
acttctacaccaaggatgcataggt

SEQ ID NO: 193322 - DNA, 25 bp, Probe sequence
actgtggtacttctacaccaaggat

SEQ ID NO: 193323 - DNA, 25 bp, Probe sequence
actttaaatactttgccgttgagcg

SEQ ID NO: 193324 - DNA, 25 bp, Probe sequence
aacatgtggcactgtggtacttcta

SEQ ID NO: 193325 - DNA, 25 bp, Probe sequence
aaggatgcataggtggcgcattcac

SEQ ID NO: 193326 - DNA, 25 bp, Probe sequence
cacacctggtatcatatctttaact

SEQ ID NO: 193327 - DNA, 25 bp, Probe sequence
cacctggtatcatatctttaacttt

SEQ ID NO: 193328 - DNA, 25 bp, Probe sequence
catgtggcactgtggtacttctaca

SEQ ID NO: 193329 - DNA, 25 bp, Probe sequence
cattcacacctggtatcatatcttt

SEQ ID NO: 193330 - DNA, 25 bp, Probe sequence
ctcaccaattgccaacatgtggcac

SEQ ID NO: 193331 - DNA, 25 bp, Probe sequence
cctggtatcatatctttaactttaa

SEQ ID NO: 193332 - DNA, 25 bp, Probe sequence
ccaacatgtggcactgtggtacttc

SEQ ID NO: 193333 - DNA, 25 bp, Probe sequence
gccaacatgtggcactgtggtactt

SEQ ID NO: 193334 - DNA, 25 bp, Probe sequence
gcgcattcacacctggtatcatatc

SEQ ID NO: 193335 - DNA, 25 bp, Probe sequence
gcataggtggcgcattcacacctgg

SEQ ID NO: 193336 - DNA, 25 bp, Probe sequence
gcattcacacctggtatcatatctt

SEQ ID NO: 193337 - DNA, 25 bp, Probe sequence
gcactgtggtacttctacaccaagg

SEQ ID NO: 193338 - DNA, 25 bp, Probe sequence
gatgcataggtggcgcattcacacc

SEQ ID NO: 193339 - DNA, 25 bp, Probe sequence
gtacttctacaccaaggatgcatag

SEQ ID NO: 193340 - DNA, 25 bp, Probe sequence
gtctcaccaattgccaacatgtggc

SEQ ID NO: 193341 - DNA, 25 bp, Probe sequence
gtggcactgtggtacttctacacca

SEQ ID NO: 193342 - DNA, 25 bp, Probe sequence
gtggtacttctacaccaaggatgca

SEQ ID NO: 193343 - DNA, 25 bp, Probe sequence
ggtacttctacaccaaggatgcata

SEQ ID NO: 193344 - DNA, 25 bp, Probe sequence
ggatgcataggtggcgcattcacac

SEQ ID NO: 193345 - DNA, 25 bp, Probe sequence
tggcactgtggtacttctacaccaa

SEQ ID NO: 193346 - DNA, 25 bp, Probe sequence
tggtatcatatctttaactttaaat

SEQ ID NO: 193347 - DNA, 25 bp, Probe sequence
tgtggcactgtggtacttctacacc

SEQ ID NO: 193348 - DNA, 25 bp, Probe sequence
taggtggcgcattcacacctggtat

SEQ ID NO: 193349 - DNA, 25 bp, Probe sequence
tttaaatactttgccgttgagcgaa

SEQ ID NO: 193350 - DNA, 25 bp, Probe sequence
ttcacacctggtatcatatctttaa

SEQ ID NO: 193351 - DNA, 25 bp, Probe sequence
ttgtctcaccaattgccaacatgtg

SEQ ID NO: 193352 - DNA, 25 bp, Probe sequence
aggcaatgcaagttggggtgggaca

SEQ ID NO: 193353 - DNA, 25 bp, Probe sequence
agaaattctacaggcaatgcaagtt

SEQ ID NO: 193354 - DNA, 25 bp, Probe sequence
acaggcaatgcaagttggggtggga

SEQ ID NO: 193355 - DNA, 25 bp, Probe sequence
aagaaattctacaggcaatgcaagt

SEQ ID NO: 193356 - DNA, 25 bp, Probe sequence
aatgcaagttggggtgggacaacga

SEQ ID NO: 193357 - DNA, 25 bp, Probe sequence
aattctacaggcaatgcaagttggg

SEQ ID NO: 193358 - DNA, 25 bp, Probe sequence
caggcaatgcaagttggggtgggac

SEQ ID NO: 193359 - DNA, 25 bp, Probe sequence
cgaaaatatcatttctgtcccactc

SEQ ID NO: 193360 - DNA, 25 bp, Probe sequence
gccccaacatagagaatttcgaaaa

SEQ ID NO: 193361 - DNA, 25 bp, Probe sequence
gcgaaaatatcatttctgtcccact

SEQ ID NO: 193362 - DNA, 25 bp, Probe sequence
gcaagttggggtggggccccaacat

SEQ ID NO: 193363 - DNA, 25 bp, Probe sequence
gcaagttggggtgggacaacgaaat

SEQ ID NO: 193364 - DNA, 25 bp, Probe sequence
gcaatgcaagttggggtgggacaac

SEQ ID NO: 193365 - DNA, 25 bp, Probe sequence
gaaaatatcatttctgtcccactcc

SEQ ID NO: 193366 - DNA, 25 bp, Probe sequence
gaaaagaaattctacaggcaatgca

SEQ ID NO: 193367 - DNA, 25 bp, Probe sequence
gaaattctacaggcaatgcaagttg

SEQ ID NO: 193368 - DNA, 25 bp, Probe sequence
gttggggtggggccccaacatagag

SEQ ID NO: 193369 - DNA, 25 bp, Probe sequence
gtgggacaacgaaataaattttgcg

SEQ ID NO: 193370 - DNA, 25 bp, Probe sequence
gtggggccccaacatagagaatttc

SEQ ID NO: 193371 - DNA, 25 bp, Probe sequence
gggccccaacatagagaatttcgaa

SEQ ID NO: 193372 - DNA, 25 bp, Probe sequence
ggggtggggccccaacatagagaat

SEQ ID NO: 193373 - DNA, 25 bp, Probe sequence
ggggccccaacatagagaatttcga

SEQ ID NO: 193374 - DNA, 25 bp, Probe sequence
ggcaatgcaagttggggtgggacaa

SEQ ID NO: 193375 - DNA, 25 bp, Probe sequence
ggccccaacatagagaatttcgaaa

SEQ ID NO: 193376 - DNA, 25 bp, Probe sequence
tgcaagttggggtggggccccaaca

SEQ ID NO: 193377 - DNA, 25 bp, Probe sequence
tggggccccaacatagagaatttcg

SEQ ID NO: 193378 - DNA, 25 bp, Probe sequence
tggggtggggccccaacatagagaa

SEQ ID NO: 193379 - DNA, 25 bp, Probe sequence
tgcgaaaatatcatttctgtcccac

SEQ ID NO: 193380 - DNA, 25 bp, Probe sequence
tctacaggcaatgcaagttggggtg

SEQ ID NO: 193381 - DNA, 25 bp, Probe sequence
tacaggcaatgcaagttggggtggg

SEQ ID NO: 193382 - DNA, 25 bp, Probe sequence
tttgcgaaaatatcatttctgtccc

SEQ ID NO: 193383 - DNA, 25 bp, Probe sequence
ttctacaggcaatgcaagttggggt

SEQ ID NO: 193384 - DNA, 25 bp, Probe sequence
ttgcgaaaatatcatttctgtccca

SEQ ID NO: 193385 - DNA, 25 bp, Probe sequence
ttggggtggggccccaacatagaga

SEQ ID NO: 193386 - DNA, 25 bp, Probe sequence
attcactgttatgagttcaaaaata

SEQ ID NO: 193387 - DNA, 25 bp, Probe sequence
attagaagcatcgaattcactgtta

SEQ ID NO: 193388 - DNA, 25 bp, Probe sequence
atacttgtcgttgtagtgattaaaa

SEQ ID NO: 193389 - DNA, 25 bp, Probe sequence
atcatgatacttgtcgttgtagtga

SEQ ID NO: 193390 - DNA, 25 bp, Probe sequence
atcgaattcactgttatgagttcaa

SEQ ID NO: 193391 - DNA, 25 bp, Probe sequence
atgatacttgtcgttgtagtgatta

SEQ ID NO: 193392 - DNA, 25 bp, Probe sequence
agaagcatcgaattcactgttatga

SEQ ID NO: 193393 - DNA, 25 bp, Probe sequence
agcatcgaattcactgttatgagtt

SEQ ID NO: 193394 - DNA, 25 bp, Probe sequence
acttgtcgttgtagtgattaaaatg

SEQ ID NO: 193395 - DNA, 25 bp, Probe sequence
aaattagaagcatcgaattcactgt

SEQ ID NO: 193396 - DNA, 25 bp, Probe sequence
aaatcatgatacttgtcgttgtagt

SEQ ID NO: 193397 - DNA, 25 bp, Probe sequence
aaaatcatgatacttgtcgttgtag

SEQ ID NO: 193398 - DNA, 25 bp, Probe sequence
aagcatcgaattcactgttatgagt

SEQ ID NO: 193399 - DNA, 25 bp, Probe sequence
aatgaaaatcatgatacttgtcgtt

SEQ ID NO: 193400 - DNA, 25 bp, Probe sequence
aatcatgatacttgtcgttgtagtg

SEQ ID NO: 193401 - DNA, 25 bp, Probe sequence
aattatttatgataccaagttattg

SEQ ID NO: 193402 - DNA, 25 bp, Probe sequence
catgatacttgtcgttgtagtgatt

SEQ ID NO: 193403 - DNA, 25 bp, Probe sequence
catcgaattcactgttatgagttca

SEQ ID NO: 193404 - DNA, 25 bp, Probe sequence
cgaattcactgttatgagttcaaaa

SEQ ID NO: 193405 - DNA, 25 bp, Probe sequence
gcatcgaattcactgttatgagttc

SEQ ID NO: 193406 - DNA, 25 bp, Probe sequence
gaattcactgttatgagttcaaaaa

SEQ ID NO: 193407 - DNA, 25 bp, Probe sequence
gaagcatcgaattcactgttatgag

SEQ ID NO: 193408 - DNA, 25 bp, Probe sequence
gaaaatcatgatacttgtcgttgta

SEQ ID NO: 193409 - DNA, 25 bp, Probe sequence
gacaaattagaagcatcgaattcac

SEQ ID NO: 193410 - DNA, 25 bp, Probe sequence
gatacttgtcgttgtagtgattaaa

SEQ ID NO: 193411 - DNA, 25 bp, Probe sequence
gataccaagttattgaaagagcttt

SEQ ID NO: 193412 - DNA, 25 bp, Probe sequence
tgatacttgtcgttgtagtgattaa

SEQ ID NO: 193413 - DNA, 25 bp, Probe sequence
tgaaaatcatgatacttgtcgttgt

SEQ ID NO: 193414 - DNA, 25 bp, Probe sequence
tcgaattcactgttatgagttcaaa

SEQ ID NO: 193415 - DNA, 25 bp, Probe sequence
tcatgatacttgtcgttgtagtgat

SEQ ID NO: 193416 - DNA, 25 bp, Probe sequence
taccaagttattgaaagagcttttt

SEQ ID NO: 193417 - DNA, 25 bp, Probe sequence
tagaagcatcgaattcactgttatg

SEQ ID NO: 193418 - DNA, 25 bp, Probe sequence
ttatttatgataccaagttattgaa

SEQ ID NO: 193419 - DNA, 25 bp, Probe sequence
ttagaagcatcgaattcactgttat

SEQ ID NO: 193420 - DNA, 25 bp, Probe sequence
atagcactacatcaagtcgcatcgt

SEQ ID NO: 193421 - DNA, 25 bp, Probe sequence
atcatagcactacatcaagtcgcat

SEQ ID NO: 193422 - DNA, 25 bp, Probe sequence
atcgtagcaccagcacatcaaagta

SEQ ID NO: 193423 - DNA, 25 bp, Probe sequence
atgccacatcatagcactacatcaa

SEQ ID NO: 193424 - DNA, 25 bp, Probe sequence
agcacatcaaagtaacatggcatca

SEQ ID NO: 193425 - DNA, 25 bp, Probe sequence
agcaccagcacatcaaagtaacatg

SEQ ID NO: 193426 - DNA, 25 bp, Probe sequence
agcactacatcaagtcgcatcgtag

SEQ ID NO: 193427 - DNA, 25 bp, Probe sequence
actacatcaagtcgcatcgtagcac

SEQ ID NO: 193428 - DNA, 25 bp, Probe sequence
acatcaagtcgcatcgtagcaccag

SEQ ID NO: 193429 - DNA, 25 bp, Probe sequence
acatcatagcactacatcaagtcgc

SEQ ID NO: 193430 - DNA, 25 bp, Probe sequence
acatggcatcaacaccaagcttcca

SEQ ID NO: 193431 - DNA, 25 bp, Probe sequence
aacatggcatcaacaccaagcttcc

SEQ ID NO: 193432 - DNA, 25 bp, Probe sequence
aagcttccacaacaacacatcaaag

SEQ ID NO: 193433 - DNA, 25 bp, Probe sequence
cacatcatagcactacatcaagtcg

SEQ ID NO: 193434 - DNA, 25 bp, Probe sequence
cactacatcaagtcgcatcgtagca

SEQ ID NO: 193435 - DNA, 25 bp, Probe sequence
catcgtagcaccagcacatcaaagt

SEQ ID NO: 193436 - DNA, 25 bp, Probe sequence
catcatagcactacatcaagtcgca

SEQ ID NO: 193437 - DNA, 25 bp, Probe sequence
catagcactacatcaagtcgcatcg

SEQ ID NO: 193438 - DNA, 25 bp, Probe sequence
ctacatcaagtcgcatcgtagcacc

SEQ ID NO: 193439 - DNA, 25 bp, Probe sequence
cgtagcaccagcacatcaaagtaac

SEQ ID NO: 193440 - DNA, 25 bp, Probe sequence
ccagcacatcaaagtaacatggcat

SEQ ID NO: 193441 - DNA, 25 bp, Probe sequence
ccacatcatagcactacatcaagtc

SEQ ID NO: 193442 - DNA, 25 bp, Probe sequence
gccacatcatagcactacatcaagt

SEQ ID NO: 193443 - DNA, 25 bp, Probe sequence
gcatcgtagcaccagcacatcaaag

SEQ ID NO: 193444 - DNA, 25 bp, Probe sequence
gcaccagcacatcaaagtaacatgg

SEQ ID NO: 193445 - DNA, 25 bp, Probe sequence
gcactacatcaagtcgcatcgtagc

SEQ ID NO: 193446 - DNA, 25 bp, Probe sequence
gtagcaccagcacatcaaagtaaca

SEQ ID NO: 193447 - DNA, 25 bp, Probe sequence
tgccacatcatagcactacatcaag

SEQ ID NO: 193448 - DNA, 25 bp, Probe sequence
tcgtagcaccagcacatcaaagtaa

SEQ ID NO: 193449 - DNA, 25 bp, Probe sequence
tcatagcactacatcaagtcgcatc

SEQ ID NO: 193450 - DNA, 25 bp, Probe sequence
taacatggcatcaacaccaagcttc

SEQ ID NO: 193451 - DNA, 25 bp, Probe sequence
tacatcaagtcgcatcgtagcacca

SEQ ID NO: 193452 - DNA, 25 bp, Probe sequence
tagcactacatcaagtcgcatcgta

SEQ ID NO: 193453 - DNA, 25 bp, Probe sequence
tagcaccagcacatcaaagtaacat

SEQ ID NO: 193454 - DNA, 25 bp, Probe sequence
attatgccaatcgtatattatgatg

SEQ ID NO: 193455 - DNA, 25 bp, Probe sequence
atattgttataactatgtcatttgg

SEQ ID NO: 193456 - DNA, 25 bp, Probe sequence
atatattgttataactatgtcattt

SEQ ID NO: 193457 - DNA, 25 bp, Probe sequence
ataaattatgccaatcgtatattat

SEQ ID NO: 193458 - DNA, 25 bp, Probe sequence
atgccaatcgtatattatgatggaa

SEQ ID NO: 193459 - DNA, 25 bp, Probe sequence
aggagcgaataaattatgccaatcg

SEQ ID NO: 193460 - DNA, 25 bp, Probe sequence
agcgaataaattatgccaatcgtat

SEQ ID NO: 193461 - DNA, 25 bp, Probe sequence
aaattatgccaatcgtatattatga

SEQ ID NO: 193462 - DNA, 25 bp, Probe sequence
aactgtatatattgttataactatg

SEQ ID NO: 193463 - DNA, 25 bp, Probe sequence
aatcgtatattatgatggaaactgt

SEQ ID NO: 193464 - DNA, 25 bp, Probe sequence
aataaattatgccaatcgtatatta

SEQ ID NO: 193465 - DNA, 25 bp, Probe sequence
aattatgccaatcgtatattatgat

SEQ ID NO: 193466 - DNA, 25 bp, Probe sequence
caatcgtatattatgatggaaactg

SEQ ID NO: 193467 - DNA, 25 bp, Probe sequence
cgaataaattatgccaatcgtatat

SEQ ID NO: 193468 - DNA, 25 bp, Probe sequence
gccaatcgtatattatgatggaaac

SEQ ID NO: 193469 - DNA, 25 bp, Probe sequence
gcgaataaattatgccaatcgtata

SEQ ID NO: 193470 - DNA, 25 bp, Probe sequence
gaataaattatgccaatcgtatatt

SEQ ID NO: 193471 - DNA, 25 bp, Probe sequence
gaaactgtatatattgttataacta

SEQ ID NO: 193472 - DNA, 25 bp, Probe sequence
gactataagtactattaaaggagcg

SEQ ID NO: 193473 - DNA, 25 bp, Probe sequence
gagcgaataaattatgccaatcgta

SEQ ID NO: 193474 - DNA, 25 bp, Probe sequence
gatggaaactgtatatattgttata

SEQ ID NO: 193475 - DNA, 25 bp, Probe sequence
gtatatattgttataactatgtcat

SEQ ID NO: 193476 - DNA, 25 bp, Probe sequence
ggagcgaataaattatgccaatcgt

SEQ ID NO: 193477 - DNA, 25 bp, Probe sequence
ggaaactgtatatattgttataact

SEQ ID NO: 193478 - DNA, 25 bp, Probe sequence
tgatggaaactgtatatattgttat

SEQ ID NO: 193479 - DNA, 25 bp, Probe sequence
tgccaatcgtatattatgatggaaa

SEQ ID NO: 193480 - DNA, 25 bp, Probe sequence
tcgtatattatgatggaaactgtat

SEQ ID NO: 193481 - DNA, 25 bp, Probe sequence
taaattatgccaatcgtatattatg

SEQ ID NO: 193482 - DNA, 25 bp, Probe sequence
tatgccaatcgtatattatgatgga

SEQ ID NO: 193483 - DNA, 25 bp, Probe sequence
tataagtactattaaaggagcgaat

SEQ ID NO: 193484 - DNA, 25 bp, Probe sequence
tatattgttataactatgtcatttg

SEQ ID NO: 193485 - DNA, 25 bp, Probe sequence
tattgttataactatgtcatttggt

SEQ ID NO: 193486 - DNA, 25 bp, Probe sequence
ttatgccaatcgtatattatgatgg

SEQ ID NO: 193487 - DNA, 25 bp, Probe sequence
ttatgatggaaactgtatatattgt

SEQ ID NO: 193488 - DNA, 25 bp, Probe sequence
attgtatttttgattgatgatgcag

SEQ ID NO: 193489 - DNA, 25 bp, Probe sequence
attgagaatcagcggttctttttaa

SEQ ID NO: 193490 - DNA, 25 bp, Probe sequence
attcgattgagaatcagcggttctt

SEQ ID NO: 193491 - DNA, 25 bp, Probe sequence
atttttgattgatgatgcagtttct

SEQ ID NO: 193492 - DNA, 25 bp, Probe sequence
atttttgattgattatttccagaat

SEQ ID NO: 193493 - DNA, 25 bp, Probe sequence
atatttttgattgattatttccaga

SEQ ID NO: 193494 - DNA, 25 bp, Probe sequence
atcagcggttctttttaatcacggt

SEQ ID NO: 193495 - DNA, 25 bp, Probe sequence
ataatccagttattgtatttttgat

SEQ ID NO: 193496 - DNA, 25 bp, Probe sequence
agaatgagttaaataatccagttat

SEQ ID NO: 193497 - DNA, 25 bp, Probe sequence
agaatcagcggttctttttaatcac

SEQ ID NO: 193498 - DNA, 25 bp, Probe sequence
aaagaaccgtagattcgattgagaa

SEQ ID NO: 193499 - DNA, 25 bp, Probe sequence
aaaagaaccgtagattcgattgaga

SEQ ID NO: 193500 - DNA, 25 bp, Probe sequence
aagaaccgtagattcgattgagaat

SEQ ID NO: 193501 - DNA, 25 bp, Probe sequence
aatcagcggttctttttaatcacgg

SEQ ID NO: 193502 - DNA, 25 bp, Probe sequence
cagttattgtatttttgattgatga

SEQ ID NO: 193503 - DNA, 25 bp, Probe sequence
cgattgagaatcagcggttcttttt

SEQ ID NO: 193504 - DNA, 25 bp, Probe sequence
ccagttattgtatttttgattgatg

SEQ ID NO: 193505 - DNA, 25 bp, Probe sequence
gaatcagcggttctttttaatcacg

SEQ ID NO: 193506 - DNA, 25 bp, Probe sequence
gaaccgtagattcgattgagaatca

SEQ ID NO: 193507 - DNA, 25 bp, Probe sequence
gagaatcagcggttctttttaatca

SEQ ID NO: 193508 - DNA, 25 bp, Probe sequence
gattgagaatcagcggttcttttta

SEQ ID NO: 193509 - DNA, 25 bp, Probe sequence
gattgattatttccagaatgagtta

SEQ ID NO: 193510 - DNA, 25 bp, Probe sequence
gttattgtatttttgattgatgatg

SEQ ID NO: 193511 - DNA, 25 bp, Probe sequence
gtatttttgattgatgatgcagttt

SEQ ID NO: 193512 - DNA, 25 bp, Probe sequence
tgagaatcagcggttctttttaatc

SEQ ID NO: 193513 - DNA, 25 bp, Probe sequence
tccagttattgtatttttgattgat

SEQ ID NO: 193514 - DNA, 25 bp, Probe sequence
tcgattgagaatcagcggttctttt

SEQ ID NO: 193515 - DNA, 25 bp, Probe sequence
tcagcggttctttttaatcacggtt

SEQ ID NO: 193516 - DNA, 25 bp, Probe sequence
tatttttgattgattatttccagaa

SEQ ID NO: 193517 - DNA, 25 bp, Probe sequence
tttgattgattatttccagaatgag

SEQ ID NO: 193518 - DNA, 25 bp, Probe sequence
ttttgattgattatttccagaatga

SEQ ID NO: 193519 - DNA, 25 bp, Probe sequence
ttcgattgagaatcagcggttcttt

SEQ ID NO: 193520 - DNA, 25 bp, Probe sequence
ttgagaatcagcggttctttttaat

SEQ ID NO: 193521 - DNA, 25 bp, Probe sequence
ttgattatttccagaatgagttaaa

SEQ ID NO: 193522 - DNA, 25 bp, Probe sequence
attgttactttatggtgttattatc

SEQ ID NO: 193523 - DNA, 25 bp, Probe sequence
attacttttaatttcatcaatatca

SEQ ID NO: 193524 - DNA, 25 bp, Probe sequence
atttcatcaatatcattgttacttt

SEQ ID NO: 193525 - DNA, 25 bp, Probe sequence
atatcattgttactttatggtgtta

SEQ ID NO: 193526 - DNA, 25 bp, Probe sequence
atcaatatcattgttactttatggt

SEQ ID NO: 193527 - DNA, 25 bp, Probe sequence
atcattgttactttatggtgttatt

SEQ ID NO: 193528 - DNA, 25 bp, Probe sequence
agttttagttgcagttggagcactt

SEQ ID NO: 193529 - DNA, 25 bp, Probe sequence
agatattttatctagtgtattactt

SEQ ID NO: 193530 - DNA, 25 bp, Probe sequence
aatatcattgttactttatggtgtt

SEQ ID NO: 193531 - DNA, 25 bp, Probe sequence
aatttcatcaatatcattgttactt

SEQ ID NO: 193532 - DNA, 25 bp, Probe sequence
caatactagttttagttgcagttgg

SEQ ID NO: 193533 - DNA, 25 bp, Probe sequence
caatatcattgttactttatggtgt

SEQ ID NO: 193534 - DNA, 25 bp, Probe sequence
ctagttttagttgcagttggagcac

SEQ ID NO: 193535 - DNA, 25 bp, Probe sequence
cttttaatttcatcaatatcattgt

SEQ ID NO: 193536 - DNA, 25 bp, Probe sequence
gatattttatctagtgtattacttt

SEQ ID NO: 193537 - DNA, 25 bp, Probe sequence
gttactttatggtgttattatcaat

SEQ ID NO: 193538 - DNA, 25 bp, Probe sequence
gttttagttgcagttggagcacttt

SEQ ID NO: 193539 - DNA, 25 bp, Probe sequence
gtacaatactagttttagttgcagt

SEQ ID NO: 193540 - DNA, 25 bp, Probe sequence
ggagcacttttgacaaatagaataa

SEQ ID NO: 193541 - DNA, 25 bp, Probe sequence
tgtattacttttaatttcatcaata

SEQ ID NO: 193542 - DNA, 25 bp, Probe sequence
tgtttattttggctatttatatttt

SEQ ID NO: 193543 - DNA, 25 bp, Probe sequence
tacttttaatttcatcaatatcatt

SEQ ID NO: 193544 - DNA, 25 bp, Probe sequence
tactagttttagttgcagttggagc

SEQ ID NO: 193545 - DNA, 25 bp, Probe sequence
tagttttagttgcagttggagcact

SEQ ID NO: 193546 - DNA, 25 bp, Probe sequence
tatcattgttactttatggtgttat

SEQ ID NO: 193547 - DNA, 25 bp, Probe sequence
tatattttttgtacaatactagttt

SEQ ID NO: 193548 - DNA, 25 bp, Probe sequence
tattttatctagtgtattactttta

SEQ ID NO: 193549 - DNA, 25 bp, Probe sequence
tattttggctatttatattttttgt

SEQ ID NO: 193550 - DNA, 25 bp, Probe sequence
ttagttgcagttggagcacttttga

SEQ ID NO: 193551 - DNA, 25 bp, Probe sequence
tttagttgcagttggagcacttttg

SEQ ID NO: 193552 - DNA, 25 bp, Probe sequence
ttttagttgcagttggagcactttt

SEQ ID NO: 193553 - DNA, 25 bp, Probe sequence
ttcatcaatatcattgttactttat

SEQ ID NO: 193554 - DNA, 25 bp, Probe sequence
ttgttactttatggtgttattatca

SEQ ID NO: 193555 - DNA, 25 bp, Probe sequence
ttgtttattttggctatttatattt

SEQ ID NO: 193556 - DNA, 25 bp, Probe sequence
attttctgtgatgttacgcaatgat

SEQ ID NO: 193557 - DNA, 25 bp, Probe sequence
atcaacgaagcgcgtttatacagaa

SEQ ID NO: 193558 - DNA, 25 bp, Probe sequence
atgttaatcaacgaagcgcgtttat

SEQ ID NO: 193559 - DNA, 25 bp, Probe sequence
atgagggcatacgtaatgttaatca

SEQ ID NO: 193560 - DNA, 25 bp, Probe sequence
atgtattttctgtgatgttacgcaa

SEQ ID NO: 193561 - DNA, 25 bp, Probe sequence
agggcatacgtaatgttaatcaacg

SEQ ID NO: 193562 - DNA, 25 bp, Probe sequence
acgtaatgttaatcaacgaagcgcg

SEQ ID NO: 193563 - DNA, 25 bp, Probe sequence
acgaagcgcgtttatacagaaatgt

SEQ ID NO: 193564 - DNA, 25 bp, Probe sequence
aaatgtattttctgtgatgttacgc

SEQ ID NO: 193565 - DNA, 25 bp, Probe sequence
aacgaagcgcgtttatacagaaatg

SEQ ID NO: 193566 - DNA, 25 bp, Probe sequence
aatgttaatcaacgaagcgcgttta

SEQ ID NO: 193567 - DNA, 25 bp, Probe sequence
aatgtattttctgtgatgttacgca

SEQ ID NO: 193568 - DNA, 25 bp, Probe sequence
aatcaacgaagcgcgtttatacaga

SEQ ID NO: 193569 - DNA, 25 bp, Probe sequence
ctgtgatgttacgcaatgatttaaa

SEQ ID NO: 193570 - DNA, 25 bp, Probe sequence
cgaagcgcgtttatacagaaatgta

SEQ ID NO: 193571 - DNA, 25 bp, Probe sequence
gcaatgatttaaagcgttatataga

SEQ ID NO: 193572 - DNA, 25 bp, Probe sequence
gaagcgcgtttatacagaaatgtat

SEQ ID NO: 193573 - DNA, 25 bp, Probe sequence
gaaatgtattttctgtgatgttacg

SEQ ID NO: 193574 - DNA, 25 bp, Probe sequence
gagggcatacgtaatgttaatcaac

SEQ ID NO: 193575 - DNA, 25 bp, Probe sequence
gttaatcaacgaagcgcgtttatac

SEQ ID NO: 193576 - DNA, 25 bp, Probe sequence
gtattttctgtgatgttacgcaatg

SEQ ID NO: 193577 - DNA, 25 bp, Probe sequence
gtaatgttaatcaacgaagcgcgtt

SEQ ID NO: 193578 - DNA, 25 bp, Probe sequence
gggcatacgtaatgttaatcaacga

SEQ ID NO: 193579 - DNA, 25 bp, Probe sequence
ggcatacgtaatgttaatcaacgaa

SEQ ID NO: 193580 - DNA, 25 bp, Probe sequence
tgtattttctgtgatgttacgcaat

SEQ ID NO: 193581 - DNA, 25 bp, Probe sequence
tgatttaaagcgttatatagatttt

SEQ ID NO: 193582 - DNA, 25 bp, Probe sequence
tctgtgatgttacgcaatgatttaa

SEQ ID NO: 193583 - DNA, 25 bp, Probe sequence
tcaacgaagcgcgtttatacagaaa

SEQ ID NO: 193584 - DNA, 25 bp, Probe sequence
taatcaacgaagcgcgtttatacag

SEQ ID NO: 193585 - DNA, 25 bp, Probe sequence
tattttctgtgatgttacgcaatga

SEQ ID NO: 193586 - DNA, 25 bp, Probe sequence
tttctgtgatgttacgcaatgattt

SEQ ID NO: 193587 - DNA, 25 bp, Probe sequence
ttttctgtgatgttacgcaatgatt

SEQ ID NO: 193588 - DNA, 25 bp, Probe sequence
ttaatcaacgaagcgcgtttataca

SEQ ID NO: 193589 - DNA, 25 bp, Probe sequence
ttctgtgatgttacgcaatgattta

SEQ ID NO: 193590 - DNA, 25 bp, Probe sequence
atggaagttgttgaaccagggccca

SEQ ID NO: 193591 - DNA, 25 bp, Probe sequence
attctggtggtaagccaccggtaat

SEQ ID NO: 193592 - DNA, 25 bp, Probe sequence
atttccaggtagccaatatgttgag

SEQ ID NO: 193593 - DNA, 25 bp, Probe sequence
accagggcccatgcaaaaccaattt

SEQ ID NO: 193594 - DNA, 25 bp, Probe sequence
atccccttgccaatggaagttgttg

SEQ ID NO: 193595 - DNA, 25 bp, Probe sequence
caccggtaatttcaccaccattaag

SEQ ID NO: 193596 - DNA, 25 bp, Probe sequence
aaccagggcccatgcaaaaccaatt

SEQ ID NO: 193597 - DNA, 25 bp, Probe sequence
aatccccttgccaatggaagttgtt

SEQ ID NO: 193598 - DNA, 25 bp, Probe sequence
taatccccttgccaatggaagttgt

SEQ ID NO: 193599 - DNA, 25 bp, Probe sequence
cagggcccatgcaaaaccaattttt

SEQ ID NO: 193600 - DNA, 25 bp, Probe sequence
ccagggcccatgcaaaaccaatttt

SEQ ID NO: 193601 - DNA, 25 bp, Probe sequence
ccaggtagccaatatgttgaggatt

SEQ ID NO: 193602 - DNA, 25 bp, Probe sequence
ccttgccaatggaagttgttgaacc

SEQ ID NO: 193603 - DNA, 25 bp, Probe sequence
gcaaaaccaatttttgcctttcaat

SEQ ID NO: 193604 - DNA, 25 bp, Probe sequence
gaggattattattctggtggtaagc

SEQ ID NO: 193605 - DNA, 25 bp, Probe sequence
gattattattctggtggtaagccac

SEQ ID NO: 193606 - DNA, 25 bp, Probe sequence
gttgaggattattattctggtggta

SEQ ID NO: 193607 - DNA, 25 bp, Probe sequence
ggtaatttcaccaccattaagggag

SEQ ID NO: 193608 - DNA, 25 bp, Probe sequence
gtttttatttccaggtagccaatat

SEQ ID NO: 193609 - DNA, 25 bp, Probe sequence
gttttaatccccttgccaatggaag

SEQ ID NO: 193610 - DNA, 25 bp, Probe sequence
tggaagttgttgaaccagggcccat

SEQ ID NO: 193611 - DNA, 25 bp, Probe sequence
ggcccatgcaaaaccaatttttgcc

SEQ ID NO: 193612 - DNA, 25 bp, Probe sequence
tggtaagccaccggtaatttcacca

SEQ ID NO: 193613 - DNA, 25 bp, Probe sequence
tgttgaaccagggcccatgcaaaac

SEQ ID NO: 193614 - DNA, 25 bp, Probe sequence
tgaaccagggcccatgcaaaaccaa

SEQ ID NO: 193615 - DNA, 25 bp, Probe sequence
tccccttgccaatggaagttgttga

SEQ ID NO: 193616 - DNA, 25 bp, Probe sequence
tttaatccccttgccaatggaagtt

SEQ ID NO: 193617 - DNA, 25 bp, Probe sequence
taatttcaccaccattaagggaggt

SEQ ID NO: 193618 - DNA, 25 bp, Probe sequence
taagccaccggtaatttcaccacca

SEQ ID NO: 193619 - DNA, 25 bp, Probe sequence
ttattctggtggtaagccaccggta

SEQ ID NO: 193620 - DNA, 25 bp, Probe sequence
tttatttccaggtagccaatatgtt

SEQ ID NO: 193621 - DNA, 25 bp, Probe sequence
ttaatccccttgccaatggaagttg

SEQ ID NO: 193622 - DNA, 25 bp, Probe sequence
ttgaaccagggcccatgcaaaacca

SEQ ID NO: 193623 - DNA, 25 bp, Probe sequence
ttgttgaaccagggcccatgcaaaa

SEQ ID NO: 193624 - DNA, 25 bp, Probe sequence
atggctccaaaatccaataaaattt

SEQ ID NO: 193625 - DNA, 25 bp, Probe sequence
atggccccaatggtcttaattcaac

SEQ ID NO: 193626 - DNA, 25 bp, Probe sequence
aggtaaaatggctccaaaatccaat

SEQ ID NO: 193627 - DNA, 25 bp, Probe sequence
aaatggctccaaaatccaataaaat

SEQ ID NO: 193628 - DNA, 25 bp, Probe sequence
aatggccccaatggtcttaattcaa

SEQ ID NO: 193629 - DNA, 25 bp, Probe sequence
aatggctccaaaatccaataaaatt

SEQ ID NO: 193630 - DNA, 25 bp, Probe sequence
aatggtcttaattcaacaaagggtg

SEQ ID NO: 193631 - DNA, 25 bp, Probe sequence
caaggtaaaatggctccaaaatcca

SEQ ID NO: 193632 - DNA, 25 bp, Probe sequence
caatggtcttaattcaacaaagggt

SEQ ID NO: 193633 - DNA, 25 bp, Probe sequence
cacctttaatggccccaatggtctt

SEQ ID NO: 193634 - DNA, 25 bp, Probe sequence
ctttaatggccccaatggtcttaat

SEQ ID NO: 193635 - DNA, 25 bp, Probe sequence
cccaatggtcttaattcaacaaagg

SEQ ID NO: 193636 - DNA, 25 bp, Probe sequence
ccccaatggtcttaattcaacaaag

SEQ ID NO: 193637 - DNA, 25 bp, Probe sequence
ccacctttaatggccccaatggtct

SEQ ID NO: 193638 - DNA, 25 bp, Probe sequence
gcccaaggtaaaatggctccaaaat

SEQ ID NO: 193639 - DNA, 25 bp, Probe sequence
ccaatggtcttaattcaacaaaggg

SEQ ID NO: 193640 - DNA, 25 bp, Probe sequence
gccccaatggtcttaattcaacaaa

SEQ ID NO: 193641 - DNA, 25 bp, Probe sequence
gattctttcccatcggctaaaaagg

SEQ ID NO: 193642 - DNA, 25 bp, Probe sequence
gtaaaatggctccaaaatccaataa

SEQ ID NO: 193643 - DNA, 25 bp, Probe sequence
gtggcccaaggtaaaatggctccaa

SEQ ID NO: 193644 - DNA, 25 bp, Probe sequence
ggtggcccaaggtaaaatggctcca

SEQ ID NO: 193645 - DNA, 25 bp, Probe sequence
ggtaaaatggctccaaaatccaata

SEQ ID NO: 193646 - DNA, 25 bp, Probe sequence
ggattctttcccatcggctaaaaag

SEQ ID NO: 193647 - DNA, 25 bp, Probe sequence
tggccccaatggtcttaattcaaca

SEQ ID NO: 193648 - DNA, 25 bp, Probe sequence
ggccccaatggtcttaattcaacaa

SEQ ID NO: 193649 - DNA, 25 bp, Probe sequence
tggtcttaattcaacaaagggtggc

SEQ ID NO: 193650 - DNA, 25 bp, Probe sequence
tggcccaaggtaaaatggctccaaa

SEQ ID NO: 193651 - DNA, 25 bp, Probe sequence
ttaattcaacaaagggtggcccaag

SEQ ID NO: 193652 - DNA, 25 bp, Probe sequence
tcttaattcaacaaagggtggccca

SEQ ID NO: 193653 - DNA, 25 bp, Probe sequence
taattcaacaaagggtggcccaagg

SEQ ID NO: 193654 - DNA, 25 bp, Probe sequence
taatggccccaatggtcttaattca

SEQ ID NO: 193655 - DNA, 25 bp, Probe sequence
taaaatggctccaaaatccaataaa

SEQ ID NO: 193656 - DNA, 25 bp, Probe sequence
tttaatggccccaatggtcttaatt

SEQ ID NO: 193657 - DNA, 25 bp, Probe sequence
ttaatggccccaatggtcttaattc

SEQ ID NO: 193658 - DNA, 25 bp, Probe sequence
attaatggtccaaaaggcgcaagaa

SEQ ID NO: 193659 - DNA, 25 bp, Probe sequence
atccaaaacctgtccaagatgttcg

SEQ ID NO: 193660 - DNA, 25 bp, Probe sequence
aggctttggatccaaaacctgtcca

SEQ ID NO: 193661 - DNA, 25 bp, Probe sequence
agaagttgtcctttcttattccaag

SEQ ID NO: 193662 - DNA, 25 bp, Probe sequence
acctgtccaagatgttcgtaaatta

SEQ ID NO: 193663 - DNA, 25 bp, Probe sequence
aaacctgtccaagatgttcgtaaat

SEQ ID NO: 193664 - DNA, 25 bp, Probe sequence
aaggcgcaagaagttgtcctttctt

SEQ ID NO: 193665 - DNA, 25 bp, Probe sequence
aatggtccaaaaggcgcaagaagtt

SEQ ID NO: 193666 - DNA, 25 bp, Probe sequence
caagaagttgtcctttcttattcca

SEQ ID NO: 193667 - DNA, 25 bp, Probe sequence
caaaacctgtccaagatgttcgtaa

SEQ ID NO: 193668 - DNA, 25 bp, Probe sequence
ctttcttattccaagccatatttta

SEQ ID NO: 193669 - DNA, 25 bp, Probe sequence
ctgtccaagatgttcgtaaattaat

SEQ ID NO: 193670 - DNA, 25 bp, Probe sequence
cctttcttattccaagccatatttt

SEQ ID NO: 193671 - DNA, 25 bp, Probe sequence
ccaaaacctgtccaagatgttcgta

SEQ ID NO: 193672 - DNA, 25 bp, Probe sequence
gcgcaagaagttgtcctttcttatt

SEQ ID NO: 193673 - DNA, 25 bp, Probe sequence
gctttggatccaaaacctgtccaag

SEQ ID NO: 193674 - DNA, 25 bp, Probe sequence
gcaagaagttgtcctttcttattcc

SEQ ID NO: 193675 - DNA, 25 bp, Probe sequence
gaaggctttggatccaaaacctgtc

SEQ ID NO: 193676 - DNA, 25 bp, Probe sequence
gacccaatgaaggctttggatccaa

SEQ ID NO: 193677 - DNA, 25 bp, Probe sequence
ggtccaaaaggcgcaagaagttgtc

SEQ ID NO: 193678 - DNA, 25 bp, Probe sequence
gatgttcgtaaattaatggtccaaa

SEQ ID NO: 193679 - DNA, 25 bp, Probe sequence
gatccaaaacctgtccaagatgttc

SEQ ID NO: 193680 - DNA, 25 bp, Probe sequence
gattgacccaatgaaggctttggat

SEQ ID NO: 193681 - DNA, 25 bp, Probe sequence
gtcctttcttattccaagccatatt

SEQ ID NO: 193682 - DNA, 25 bp, Probe sequence
ggatccaaaacctgtccaagatgtt

SEQ ID NO: 193683 - DNA, 25 bp, Probe sequence
ggctttggatccaaaacctgtccaa

SEQ ID NO: 193684 - DNA, 25 bp, Probe sequence
ggcgcaagaagttgtcctttcttat

SEQ ID NO: 193685 - DNA, 25 bp, Probe sequence
tccaaaacctgtccaagatgttcgt

SEQ ID NO: 193686 - DNA, 25 bp, Probe sequence
tcctttcttattccaagccatattt

SEQ ID NO: 193687 - DNA, 25 bp, Probe sequence
tttcttattccaagccatattttaa

SEQ ID NO: 193688 - DNA, 25 bp, Probe sequence
ttcttattccaagccatattttaag

SEQ ID NO: 193689 - DNA, 25 bp, Probe sequence
ttgattgacccaatgaaggctttgg

SEQ ID NO: 193690 - DNA, 25 bp, Probe sequence
ttgacccaatgaaggctttggatcc

SEQ ID NO: 193691 - DNA, 25 bp, Probe sequence
ttgtcctttcttattccaagccata

SEQ ID NO: 193692 - DNA, 25 bp, Probe sequence
attgttggtaaatccagcatgtccc

SEQ ID NO: 193693 - DNA, 25 bp, Probe sequence
aggcgcacgcattgttggtaaatcc

SEQ ID NO: 193694 - DNA, 25 bp, Probe sequence
atggtacttggtcaacaaggcgcac

SEQ ID NO: 193695 - DNA, 25 bp, Probe sequence
agctgctaccataaaaattgaaaac

SEQ ID NO: 193696 - DNA, 25 bp, Probe sequence
acgcattgttggtaaatccagcatg

SEQ ID NO: 193697 - DNA, 25 bp, Probe sequence
acttggtcaacaaggcgcacgcatt

SEQ ID NO: 193698 - DNA, 25 bp, Probe sequence
acatggtacttggtcaacaaggcgc

SEQ ID NO: 193699 - DNA, 25 bp, Probe sequence
acaaggcgcacgcattgttggtaaa

SEQ ID NO: 193700 - DNA, 25 bp, Probe sequence
aacaaggcgcacgcattgttggtaa

SEQ ID NO: 193701 - DNA, 25 bp, Probe sequence
caaggcgcacgcattgttggtaaat

SEQ ID NO: 193702 - DNA, 25 bp, Probe sequence
aaggcgcacgcattgttggtaaatc

SEQ ID NO: 193703 - DNA, 25 bp, Probe sequence
cgcacgcattgttggtaaatccagc

SEQ ID NO: 193704 - DNA, 25 bp, Probe sequence
gcgcacgcattgttggtaaatccag

SEQ ID NO: 193705 - DNA, 25 bp, Probe sequence
gcattgttggtaaatccagcatgtc

SEQ ID NO: 193706 - DNA, 25 bp, Probe sequence
gcagctgctaccataaaaattgaaa

SEQ ID NO: 193707 - DNA, 25 bp, Probe sequence
gcacgcattgttggtaaatccagca

SEQ ID NO: 193708 - DNA, 25 bp, Probe sequence
gaaaacatggtacttggtcaacaag

SEQ ID NO: 193709 - DNA, 25 bp, Probe sequence
gttggtaaatccagcatgtcccggt

SEQ ID NO: 193710 - DNA, 25 bp, Probe sequence
tgttggtaaatccagcatgtcccgg

SEQ ID NO: 193711 - DNA, 25 bp, Probe sequence
gtacttggtcaacaaggcgcacgca

SEQ ID NO: 193712 - DNA, 25 bp, Probe sequence
ggtacttggtcaacaaggcgcacgc

SEQ ID NO: 193713 - DNA, 25 bp, Probe sequence
ggtcaacaaggcgcacgcattgttg

SEQ ID NO: 193714 - DNA, 25 bp, Probe sequence
ggcagctgctaccataaaaattgaa

SEQ ID NO: 193715 - DNA, 25 bp, Probe sequence
ggcgcacgcattgttggtaaatcca

SEQ ID NO: 193716 - DNA, 25 bp, Probe sequence
tggtacttggtcaacaaggcgcacg

SEQ ID NO: 193717 - DNA, 25 bp, Probe sequence
tggtcaacaaggcgcacgcattgtt

SEQ ID NO: 193718 - DNA, 25 bp, Probe sequence
tgaaaacatggtacttggtcaacaa

SEQ ID NO: 193719 - DNA, 25 bp, Probe sequence
taaatccagcatgtcccggttgatt

SEQ ID NO: 193720 - DNA, 25 bp, Probe sequence
tcaacaaggcgcacgcattgttggt

SEQ ID NO: 193721 - DNA, 25 bp, Probe sequence
tacttggtcaacaaggcgcacgcat

SEQ ID NO: 193722 - DNA, 25 bp, Probe sequence
ttggtaaatccagcatgtcccggtt

SEQ ID NO: 193723 - DNA, 25 bp, Probe sequence
ttggcagctgctaccataaaaattg

SEQ ID NO: 193724 - DNA, 25 bp, Probe sequence
ttgttggtaaatccagcatgtcccg

SEQ ID NO: 193725 - DNA, 25 bp, Probe sequence
ttggtcaacaaggcgcacgcattgt

SEQ ID NO: 193726 - DNA, 25 bp, Probe sequence
attgtactcatgccgtttctatact

SEQ ID NO: 193727 - DNA, 25 bp, Probe sequence
atacttcactacagcatggtcaatc

SEQ ID NO: 193728 - DNA, 25 bp, Probe sequence
atggtcaatcgcgggattcgcaagt

SEQ ID NO: 193729 - DNA, 25 bp, Probe sequence
acctattagcagtactatgcttcac

SEQ ID NO: 193730 - DNA, 25 bp, Probe sequence
actacagcatggtcaatcgcgggat

SEQ ID NO: 193731 - DNA, 25 bp, Probe sequence
actatgcttcacagtcttagcgatt

SEQ ID NO: 193732 - DNA, 25 bp, Probe sequence
acttcactacagcatggtcaatcgc

SEQ ID NO: 193733 - DNA, 25 bp, Probe sequence
aagctacctattagcagtactatgc

SEQ ID NO: 193734 - DNA, 25 bp, Probe sequence
aatcgcgggattcgcaagtatagcg

SEQ ID NO: 193735 - DNA, 25 bp, Probe sequence
cagcatggtcaatcgcgggattcgc

SEQ ID NO: 193736 - DNA, 25 bp, Probe sequence
cagtcttagcgattgtactcatgcc

SEQ ID NO: 193737 - DNA, 25 bp, Probe sequence
ccgtttctatacttcactacagcat

SEQ ID NO: 193738 - DNA, 25 bp, Probe sequence
gcgacacatataaaagctacctatt

SEQ ID NO: 193739 - DNA, 25 bp, Probe sequence
gcttcacagtcttagcgattgtact

SEQ ID NO: 193740 - DNA, 25 bp, Probe sequence
gcatggtcaatcgcgggattcgcaa

SEQ ID NO: 193741 - DNA, 25 bp, Probe sequence
gcagtactatgcttcacagtcttag

SEQ ID NO: 193742 - DNA, 25 bp, Probe sequence
gcaagtatagcgacattcatatttt

SEQ ID NO: 193743 - DNA, 25 bp, Probe sequence
gattgtactcatgccgtttctatac

SEQ ID NO: 193744 - DNA, 25 bp, Probe sequence
gtttctatacttcactacagcatgg

SEQ ID NO: 193745 - DNA, 25 bp, Probe sequence
gtactatgcttcacagtcttagcga

SEQ ID NO: 193746 - DNA, 25 bp, Probe sequence
gtcaatcgcgggattcgcaagtata

SEQ ID NO: 193747 - DNA, 25 bp, Probe sequence
gtcttagcgattgtactcatgccgt

SEQ ID NO: 193748 - DNA, 25 bp, Probe sequence
gggattcgcaagtatagcgacattc

SEQ ID NO: 193749 - DNA, 25 bp, Probe sequence
tgtactcatgccgtttctatacttc

SEQ ID NO: 193750 - DNA, 25 bp, Probe sequence
tcactacagcatggtcaatcgcggg

SEQ ID NO: 193751 - DNA, 25 bp, Probe sequence
tctatacttcactacagcatggtca

SEQ ID NO: 193752 - DNA, 25 bp, Probe sequence
tcatgccgtttctatacttcactac

SEQ ID NO: 193753 - DNA, 25 bp, Probe sequence
tacagcatggtcaatcgcgggattc

SEQ ID NO: 193754 - DNA, 25 bp, Probe sequence
taaggaatacttttatggagaataa

SEQ ID NO: 193755 - DNA, 25 bp, Probe sequence
tactcatgccgtttctatacttcac

SEQ ID NO: 193756 - DNA, 25 bp, Probe sequence
tagcgacattcatattttataagga

SEQ ID NO: 193757 - DNA, 25 bp, Probe sequence
tatgcttcacagtcttagcgattgt

SEQ ID NO: 193758 - DNA, 25 bp, Probe sequence
ttagcgattgtactcatgccgtttc

SEQ ID NO: 193759 - DNA, 25 bp, Probe sequence
ttcacagtcttagcgattgtactca

SEQ ID NO: 193760 - DNA, 25 bp, Probe sequence
atacttgagggtttacctaatgcta

SEQ ID NO: 193761 - DNA, 25 bp, Probe sequence
ataacggcaatgacacagagggatt

SEQ ID NO: 193762 - DNA, 25 bp, Probe sequence
atgacggggcaagtggtctataaat

SEQ ID NO: 193763 - DNA, 25 bp, Probe sequence
agtgctagtgcgtataacggcaatg

SEQ ID NO: 193764 - DNA, 25 bp, Probe sequence
agcagtagggattatgacggggcaa

SEQ ID NO: 193765 - DNA, 25 bp, Probe sequence
agcacaagcgtttgatgaaatactt

SEQ ID NO: 193766 - DNA, 25 bp, Probe sequence
acggggcaagtggtctataaatatg

SEQ ID NO: 193767 - DNA, 25 bp, Probe sequence
acaatcagtgatcagtgctagtgcg

SEQ ID NO: 193768 - DNA, 25 bp, Probe sequence
aaccgcgaacaaattgaacaatcag

SEQ ID NO: 193769 - DNA, 25 bp, Probe sequence
aatgctatgcaagatgcactcaaag

SEQ ID NO: 193770 - DNA, 25 bp, Probe sequence
aatcagtgatcagtgctagtgcgta

SEQ ID NO: 193771 - DNA, 25 bp, Probe sequence
gcgtataacggcaatgacacagagg

SEQ ID NO: 193772 - DNA, 25 bp, Probe sequence
gctaaaagagattgaggacgtgtat

SEQ ID NO: 193773 - DNA, 25 bp, Probe sequence
gctagtgcgtataacggcaatgaca

SEQ ID NO: 193774 - DNA, 25 bp, Probe sequence
gaataaccgcgaacaaattgaacaa

SEQ ID NO: 193775 - DNA, 25 bp, Probe sequence
gaagcagtagggattatgacggggc

SEQ ID NO: 193776 - DNA, 25 bp, Probe sequence
gacacagagggattgctaaaagaga

SEQ ID NO: 193777 - DNA, 25 bp, Probe sequence
gatgaaatacttgagggtttaccta

SEQ ID NO: 193778 - DNA, 25 bp, Probe sequence
gagggtttacctaatgctatgcaag

SEQ ID NO: 193779 - DNA, 25 bp, Probe sequence
gatgcactcaaagaagatattggtc

SEQ ID NO: 193780 - DNA, 25 bp, Probe sequence
gatcagtgctagtgcgtataacggc

SEQ ID NO: 193781 - DNA, 25 bp, Probe sequence
gatattggtcttgatgaagcagtag

SEQ ID NO: 193782 - DNA, 25 bp, Probe sequence
gattatgacggggcaagtggtctat

SEQ ID NO: 193783 - DNA, 25 bp, Probe sequence
gtataagaaagcacaagcgtttgat

SEQ ID NO: 193784 - DNA, 25 bp, Probe sequence
gtgatcagtgctagtgcgtataacg

SEQ ID NO: 193785 - DNA, 25 bp, Probe sequence
gtggtctataaatatgaggaggagc

SEQ ID NO: 193786 - DNA, 25 bp, Probe sequence
gggattatgacggggcaagtggtct

SEQ ID NO: 193787 - DNA, 25 bp, Probe sequence
gggtttacctaatgctatgcaagat

SEQ ID NO: 193788 - DNA, 25 bp, Probe sequence
ggggcaagtggtctataaatatgag

SEQ ID NO: 193789 - DNA, 25 bp, Probe sequence
ggacgtgtataagaaagcacaagcg

SEQ ID NO: 193790 - DNA, 25 bp, Probe sequence
tgaggaggagcaggaaagtgactaa

SEQ ID NO: 193791 - DNA, 25 bp, Probe sequence
tcagtgatcagtgctagtgcgtata

SEQ ID NO: 193792 - DNA, 25 bp, Probe sequence
tacctaatgctatgcaagatgcact

SEQ ID NO: 193793 - DNA, 25 bp, Probe sequence
ttatgacggggcaagtggtctataa

SEQ ID NO: 193794 - DNA, 25 bp, Probe sequence
attacgtctttcgagcggaggtgag

SEQ ID NO: 193795 - DNA, 25 bp, Probe sequence
agtgattacgtctttcgagcggagg

SEQ ID NO: 193796 - DNA, 25 bp, Probe sequence
acgtctttcgagcggaggtgagtga

SEQ ID NO: 193797 - DNA, 25 bp, Probe sequence
aatgatgatgtagaggcgccgagtg

SEQ ID NO: 193798 - DNA, 25 bp, Probe sequence
ctttcgagcggaggtgagtgaataa

SEQ ID NO: 193799 - DNA, 25 bp, Probe sequence
cgccgagtgattacgtctttcgagc

SEQ ID NO: 193800 - DNA, 25 bp, Probe sequence
ccgagtgattacgtctttcgagcgg

SEQ ID NO: 193801 - DNA, 25 bp, Probe sequence
gccgagtgattacgtctttcgagcg

SEQ ID NO: 193802 - DNA, 25 bp, Probe sequence
gcgccgagtgattacgtctttcgag

SEQ ID NO: 193803 - DNA, 25 bp, Probe sequence
gcaagtatatattatgatgacggct

SEQ ID NO: 193804 - DNA, 25 bp, Probe sequence
gaaattttgagactattattcttac

SEQ ID NO: 193805 - DNA, 25 bp, Probe sequence
gactattattcttactagcgatgta

SEQ ID NO: 193806 - DNA, 25 bp, Probe sequence
gagactattattcttactagcgatg

SEQ ID NO: 193807 - DNA, 25 bp, Probe sequence
gagtgattacgtctttcgagcggag

SEQ ID NO: 193808 - DNA, 25 bp, Probe sequence
gatgtagaggcgccgagtgattacg

SEQ ID NO: 193809 - DNA, 25 bp, Probe sequence
gatgatgtagaggcgccgagtgatt

SEQ ID NO: 193810 - DNA, 25 bp, Probe sequence
gattacgtctttcgagcggaggtga

SEQ ID NO: 193811 - DNA, 25 bp, Probe sequence
gtctttcgagcggaggtgagtgaat

SEQ ID NO: 193812 - DNA, 25 bp, Probe sequence
gtatgtaactgagcaagtatatatt

SEQ ID NO: 193813 - DNA, 25 bp, Probe sequence
gtagaggcgccgagtgattacgtct

SEQ ID NO: 193814 - DNA, 25 bp, Probe sequence
gtgattacgtctttcgagcggaggt

SEQ ID NO: 193815 - DNA, 25 bp, Probe sequence
tgtagaggcgccgagtgattacgtc

SEQ ID NO: 193816 - DNA, 25 bp, Probe sequence
tgattacgtctttcgagcggaggtg

SEQ ID NO: 193817 - DNA, 25 bp, Probe sequence
tcttactagcgatgtatgagttagg

SEQ ID NO: 193818 - DNA, 25 bp, Probe sequence
ttacgtctttcgagcggaggtgagt

SEQ ID NO: 193819 - DNA, 25 bp, Probe sequence
tacgtctttcgagcggaggtgagtg

SEQ ID NO: 193820 - DNA, 25 bp, Probe sequence
tagcgatgtatgagttaggtaagta

SEQ ID NO: 193821 - DNA, 25 bp, Probe sequence
tagaggcgccgagtgattacgtctt

SEQ ID NO: 193822 - DNA, 25 bp, Probe sequence
taggtaagtatgtaactgagcaagt

SEQ ID NO: 193823 - DNA, 25 bp, Probe sequence
tagtggtggttaaagaaattttgag

SEQ ID NO: 193824 - DNA, 25 bp, Probe sequence
tatgatgacggctaatgatgatgta

SEQ ID NO: 193825 - DNA, 25 bp, Probe sequence
tattattcttactagcgatgtatga

SEQ ID NO: 193826 - DNA, 25 bp, Probe sequence
tattcttactagcgatgtatgagtt

SEQ ID NO: 193827 - DNA, 25 bp, Probe sequence
ttgagactattattcttactagcga

SEQ ID NO: 193828 - DNA, 25 bp, Probe sequence
attgtactcatgccgtttctatact

SEQ ID NO: 193829 - DNA, 25 bp, Probe sequence
attagcagtgctatgcttcacagtc

SEQ ID NO: 193830 - DNA, 25 bp, Probe sequence
atacttcaccacagcgtggtcaatt

SEQ ID NO: 193831 - DNA, 25 bp, Probe sequence
agcatagcgacattcatattttata

SEQ ID NO: 193832 - DNA, 25 bp, Probe sequence
agcagtgctatgcttcacagtctta

SEQ ID NO: 193833 - DNA, 25 bp, Probe sequence
agcgtggtcaattgcaggattcgca

SEQ ID NO: 193834 - DNA, 25 bp, Probe sequence
acttcaccacagcgtggtcaattgc

SEQ ID NO: 193835 - DNA, 25 bp, Probe sequence
aaagctacctattagcagtgctatg

SEQ ID NO: 193836 - DNA, 25 bp, Probe sequence
cacagcgtggtcaattgcaggattc

SEQ ID NO: 193837 - DNA, 25 bp, Probe sequence
caccacagcgtggtcaattgcagga

SEQ ID NO: 193838 - DNA, 25 bp, Probe sequence
cagtgctatgcttcacagtcttagc

SEQ ID NO: 193839 - DNA, 25 bp, Probe sequence
cagtcttagcgattgtactcatgcc

SEQ ID NO: 193840 - DNA, 25 bp, Probe sequence
caggattcgcaagcatagcgacatt

SEQ ID NO: 193841 - DNA, 25 bp, Probe sequence
ctatacttcaccacagcgtggtcaa

SEQ ID NO: 193842 - DNA, 25 bp, Probe sequence
gctacctattagcagtgctatgctt

SEQ ID NO: 193843 - DNA, 25 bp, Probe sequence
gctatgcttcacagtcttagcgatt

SEQ ID NO: 193844 - DNA, 25 bp, Probe sequence
gcttcacagtcttagcgattgtact

SEQ ID NO: 193845 - DNA, 25 bp, Probe sequence
gcaagcatagcgacattcatatttt

SEQ ID NO: 193846 - DNA, 25 bp, Probe sequence
gattcgcaagcatagcgacattcat

SEQ ID NO: 193847 - DNA, 25 bp, Probe sequence
gattgtactcatgccgtttctatac

SEQ ID NO: 193848 - DNA, 25 bp, Probe sequence
gtcttagcgattgtactcatgccgt

SEQ ID NO: 193849 - DNA, 25 bp, Probe sequence
gtgctatgcttcacagtcttagcga

SEQ ID NO: 193850 - DNA, 25 bp, Probe sequence
gtggtcaattgcaggattcgcaagc

SEQ ID NO: 193851 - DNA, 25 bp, Probe sequence
tgtactcatgccgtttctatacttc

SEQ ID NO: 193852 - DNA, 25 bp, Probe sequence
tgagtaaaacttataaaagctacct

SEQ ID NO: 193853 - DNA, 25 bp, Probe sequence
tgcaggattcgcaagcatagcgaca

SEQ ID NO: 193854 - DNA, 25 bp, Probe sequence
tactcatgccgtttctatacttcac

SEQ ID NO: 193855 - DNA, 25 bp, Probe sequence
tagcgacattcatattttataagga

SEQ ID NO: 193856 - DNA, 25 bp, Probe sequence
tatgcttcacagtcttagcgattgt

SEQ ID NO: 193857 - DNA, 25 bp, Probe sequence
tttctatacttcaccacagcgtggt

SEQ ID NO: 193858 - DNA, 25 bp, Probe sequence
ttagcgattgtactcatgccgtttc

SEQ ID NO: 193859 - DNA, 25 bp, Probe sequence
ttcaccacagcgtggtcaattgcag

SEQ ID NO: 193860 - DNA, 25 bp, Probe sequence
ttcacagtcttagcgattgtactca

SEQ ID NO: 193861 - DNA, 25 bp, Probe sequence
ttctatacttcaccacagcgtggtc

SEQ ID NO: 193862 - DNA, 25 bp, Probe sequence
ataacggcaatgacgacagatgttt

SEQ ID NO: 193863 - DNA, 25 bp, Probe sequence
atcttaaacgacgacttaactatga

SEQ ID NO: 193864 - DNA, 25 bp, Probe sequence
atgacgacagatgtttccctatcaa

SEQ ID NO: 193865 - DNA, 25 bp, Probe sequence
atgtttccctatcaaaggattctac

SEQ ID NO: 193866 - DNA, 25 bp, Probe sequence
agatgtttccctatcaaaggattct

SEQ ID NO: 193867 - DNA, 25 bp, Probe sequence
aacggcaatgacgacagatgtttcc

SEQ ID NO: 193868 - DNA, 25 bp, Probe sequence
acgacagatgtttccctatcaaagg

SEQ ID NO: 193869 - DNA, 25 bp, Probe sequence
acggcaatgacgacagatgtttccc

SEQ ID NO: 193870 - DNA, 25 bp, Probe sequence
acatcttaaacgacgacttaactat

SEQ ID NO: 193871 - DNA, 25 bp, Probe sequence
acagatgtttccctatcaaaggatt

SEQ ID NO: 193872 - DNA, 25 bp, Probe sequence
aatgacgacagatgtttccctatca

SEQ ID NO: 193873 - DNA, 25 bp, Probe sequence
caatgacgacagatgtttccctatc

SEQ ID NO: 193874 - DNA, 25 bp, Probe sequence
cagatgtttccctatcaaaggattc

SEQ ID NO: 193875 - DNA, 25 bp, Probe sequence
cttaaacgacgacttaactatgacg

SEQ ID NO: 193876 - DNA, 25 bp, Probe sequence
ctatcaaaggattctacatcttaaa

SEQ ID NO: 193877 - DNA, 25 bp, Probe sequence
ctacatcttaaacgacgacttaact

SEQ ID NO: 193878 - DNA, 25 bp, Probe sequence
cggcaatgacgacagatgtttccct

SEQ ID NO: 193879 - DNA, 25 bp, Probe sequence
cgacagatgtttccctatcaaagga

SEQ ID NO: 193880 - DNA, 25 bp, Probe sequence
ccctatcaaaggattctacatctta

SEQ ID NO: 193881 - DNA, 25 bp, Probe sequence
cctatcaaaggattctacatcttaa

SEQ ID NO: 193882 - DNA, 25 bp, Probe sequence
gcaatgacgacagatgtttccctat

SEQ ID NO: 193883 - DNA, 25 bp, Probe sequence
gacagatgtttccctatcaaaggat

SEQ ID NO: 193884 - DNA, 25 bp, Probe sequence
gacgacagatgtttccctatcaaag

SEQ ID NO: 193885 - DNA, 25 bp, Probe sequence
gatgtttccctatcaaaggattcta

SEQ ID NO: 193886 - DNA, 25 bp, Probe sequence
gtttccctatcaaaggattctacat

SEQ ID NO: 193887 - DNA, 25 bp, Probe sequence
ggcaatgacgacagatgtttcccta

SEQ ID NO: 193888 - DNA, 25 bp, Probe sequence
tgtttccctatcaaaggattctaca

SEQ ID NO: 193889 - DNA, 25 bp, Probe sequence
tgacgacagatgtttccctatcaaa

SEQ ID NO: 193890 - DNA, 25 bp, Probe sequence
tccctatcaaaggattctacatctt

SEQ ID NO: 193891 - DNA, 25 bp, Probe sequence
taaacgacgacttaactatgacgtt

SEQ ID NO: 193892 - DNA, 25 bp, Probe sequence
tacatcttaaacgacgacttaacta

SEQ ID NO: 193893 - DNA, 25 bp, Probe sequence
tataacggcaatgacgacagatgtt

SEQ ID NO: 193894 - DNA, 25 bp, Probe sequence
tttccctatcaaaggattctacatc

SEQ ID NO: 193895 - DNA, 25 bp, Probe sequence
ttccctatcaaaggattctacatct

SEQ ID NO: 193896 - DNA, 25 bp, Probe sequence
atgattaagcaaatactaagattat

SEQ ID NO: 193897 - DNA, 25 bp, Probe sequence
atgtagaggcgccgagtgacttcgc

SEQ ID NO: 193898 - DNA, 25 bp, Probe sequence
agattattattcttactagcgatgt

SEQ ID NO: 193899 - DNA, 25 bp, Probe sequence
aaagttgagcgatcagtctgatttg

SEQ ID NO: 193900 - DNA, 25 bp, Probe sequence
aatgatgatgtagaggcgccgagtg

SEQ ID NO: 193901 - DNA, 25 bp, Probe sequence
cagtctgatttgatgagggcggagg

SEQ ID NO: 193902 - DNA, 25 bp, Probe sequence
ctgatttgatgagggcggaggtgtc

SEQ ID NO: 193903 - DNA, 25 bp, Probe sequence
ccgagtgacttcgcaaagttgagcg

SEQ ID NO: 193904 - DNA, 25 bp, Probe sequence
gccgagtgacttcgcaaagttgagc

SEQ ID NO: 193905 - DNA, 25 bp, Probe sequence
gcgccgagtgacttcgcaaagttga

SEQ ID NO: 193906 - DNA, 25 bp, Probe sequence
gcgatcagtctgatttgatgagggc

SEQ ID NO: 193907 - DNA, 25 bp, Probe sequence
gcaaagttgagcgatcagtctgatt

SEQ ID NO: 193908 - DNA, 25 bp, Probe sequence
gcaagtatatattatgatgacggct

SEQ ID NO: 193909 - DNA, 25 bp, Probe sequence
gacttcgcaaagttgagcgatcagt

SEQ ID NO: 193910 - DNA, 25 bp, Probe sequence
gagtgacttcgcaaagttgagcgat

SEQ ID NO: 193911 - DNA, 25 bp, Probe sequence
gatgtagaggcgccgagtgacttcg

SEQ ID NO: 193912 - DNA, 25 bp, Probe sequence
gatgatgtagaggcgccgagtgact

SEQ ID NO: 193913 - DNA, 25 bp, Probe sequence
gatgagggcggaggtgtcagagtag

SEQ ID NO: 193914 - DNA, 25 bp, Probe sequence
gatcagtctgatttgatgagggcgg

SEQ ID NO: 193915 - DNA, 25 bp, Probe sequence
gatttgatgagggcggaggtgtcag

SEQ ID NO: 193916 - DNA, 25 bp, Probe sequence
gttgagcgatcagtctgatttgatg

SEQ ID NO: 193917 - DNA, 25 bp, Probe sequence
gtctgatttgatgagggcggaggtg

SEQ ID NO: 193918 - DNA, 25 bp, Probe sequence
gtatgtaactgagcaagtatatatt

SEQ ID NO: 193919 - DNA, 25 bp, Probe sequence
gtgacttcgcaaagttgagcgatca

SEQ ID NO: 193920 - DNA, 25 bp, Probe sequence
tgtagaggcgccgagtgacttcgca

SEQ ID NO: 193921 - DNA, 25 bp, Probe sequence
tgatgtagaggcgccgagtgacttc

SEQ ID NO: 193922 - DNA, 25 bp, Probe sequence
tcttactagcgatgtatgagttagg

SEQ ID NO: 193923 - DNA, 25 bp, Probe sequence
tagcgatgtatgagttaggtaagta

SEQ ID NO: 193924 - DNA, 25 bp, Probe sequence
tagaggcgccgagtgacttcgcaaa

SEQ ID NO: 193925 - DNA, 25 bp, Probe sequence
taggtaagtatgtaactgagcaagt

SEQ ID NO: 193926 - DNA, 25 bp, Probe sequence
tatgatgacggctaatgatgatgta

SEQ ID NO: 193927 - DNA, 25 bp, Probe sequence
tattattcttactagcgatgtatga

SEQ ID NO: 193928 - DNA, 25 bp, Probe sequence
tattcttactagcgatgtatgagtt

SEQ ID NO: 193929 - DNA, 25 bp, Probe sequence
ttgatgagggcggaggtgtcagagt

SEQ ID NO: 193930 - DNA, 25 bp, Probe sequence
attcttcttcaaattataatggtat

SEQ ID NO: 193931 - DNA, 25 bp, Probe sequence
attaataacgttgaaaaagctgagc

SEQ ID NO: 193932 - DNA, 25 bp, Probe sequence
ataccatagaaggaacagttaattt

SEQ ID NO: 193933 - DNA, 25 bp, Probe sequence
atgaaaatgtcaaggttacgtataa

SEQ ID NO: 193934 - DNA, 25 bp, Probe sequence
aggttttcattcttcttcaaattat

SEQ ID NO: 193935 - DNA, 25 bp, Probe sequence
acgacagataacgcattgtggaaaa

SEQ ID NO: 193936 - DNA, 25 bp, Probe sequence
actaccctaatattgatgctaataa

SEQ ID NO: 193937 - DNA, 25 bp, Probe sequence
acagtaggttcaggttttcattctt

SEQ ID NO: 193938 - DNA, 25 bp, Probe sequence
acaacggcgacaatgtttcaatctt

SEQ ID NO: 193939 - DNA, 25 bp, Probe sequence
aaatattagtacttcaaacaatcct

SEQ ID NO: 193940 - DNA, 25 bp, Probe sequence
aaatccgaactaccctaatattgat

SEQ ID NO: 193941 - DNA, 25 bp, Probe sequence
aacaacagtaggttcaggttttcat

SEQ ID NO: 193942 - DNA, 25 bp, Probe sequence
aagctgagcaaacgacagataacgc

SEQ ID NO: 193943 - DNA, 25 bp, Probe sequence
aatatagtggaacaacggcgacaat

SEQ ID NO: 193944 - DNA, 25 bp, Probe sequence
caaaaacattgatagcaagtgcttt

SEQ ID NO: 193945 - DNA, 25 bp, Probe sequence
cggcgacaatgtttcaatcttaagt

SEQ ID NO: 193946 - DNA, 25 bp, Probe sequence
gcgacaatgtttcaatcttaagtac

SEQ ID NO: 193947 - DNA, 25 bp, Probe sequence
gcaaacgacagataacgcattgtgg

SEQ ID NO: 193948 - DNA, 25 bp, Probe sequence
gcaagtgctttagttttaacaacag

SEQ ID NO: 193949 - DNA, 25 bp, Probe sequence
gacgctttaaaagacgcgaatatta

SEQ ID NO: 193950 - DNA, 25 bp, Probe sequence
gaactaccctaatattgatgctaat

SEQ ID NO: 193951 - DNA, 25 bp, Probe sequence
gacgcgaatattatcgataaaacag

SEQ ID NO: 193952 - DNA, 25 bp, Probe sequence
gatagcaagtgctttagttttaaca

SEQ ID NO: 193953 - DNA, 25 bp, Probe sequence
gttcaggttttcattcttcttcaaa

SEQ ID NO: 193954 - DNA, 25 bp, Probe sequence
gttttcattcttcttcaaattataa

SEQ ID NO: 193955 - DNA, 25 bp, Probe sequence
gtttcaatcttaagtacagacccta

SEQ ID NO: 193956 - DNA, 25 bp, Probe sequence
gtaggttcaggttttcattcttctt

SEQ ID NO: 193957 - DNA, 25 bp, Probe sequence
gtaagagacgctttaaaagacgcga

SEQ ID NO: 193958 - DNA, 25 bp, Probe sequence
gtgctttagttttaacaacagtagg

SEQ ID NO: 193959 - DNA, 25 bp, Probe sequence
gtggaacaacggcgacaatgtttca

SEQ ID NO: 193960 - DNA, 25 bp, Probe sequence
tccgaactaccctaatattgatgct

SEQ ID NO: 193961 - DNA, 25 bp, Probe sequence
tcaggttttcattcttcttcaaatt

SEQ ID NO: 193962 - DNA, 25 bp, Probe sequence
tagtacttcaaacaatcctaaaata

SEQ ID NO: 193963 - DNA, 25 bp, Probe sequence
taggttcaggttttcattcttcttc

SEQ ID NO: 193964 - DNA, 25 bp, Probe sequence
tattcaccgaacgcgaaagatcccc

SEQ ID NO: 193965 - DNA, 25 bp, Probe sequence
atttatgaaagacctaatcattcaa

SEQ ID NO: 193966 - DNA, 25 bp, Probe sequence
atcatcgcttgatcaaaatttagaa

SEQ ID NO: 193967 - DNA, 25 bp, Probe sequence
agcttgcctatgatgaacgaggtta

SEQ ID NO: 193968 - DNA, 25 bp, Probe sequence
acgtgttatctatcatcgagttgtc

SEQ ID NO: 193969 - DNA, 25 bp, Probe sequence
aaatagaccgatacttcaaaaagca

SEQ ID NO: 193970 - DNA, 25 bp, Probe sequence
aagcacttaactttgtgagaatggg

SEQ ID NO: 193971 - DNA, 25 bp, Probe sequence
aattgatgattactagcttgcctat

SEQ ID NO: 193972 - DNA, 25 bp, Probe sequence
ctttgctttattcaccgaacgcgaa

SEQ ID NO: 193973 - DNA, 25 bp, Probe sequence
gacctttgctttattcaccgaacgc

SEQ ID NO: 193974 - DNA, 25 bp, Probe sequence
gcgagagtatcatcgcttgatcaaa

SEQ ID NO: 193975 - DNA, 25 bp, Probe sequence
gcaatggtttcggaacaagaacgaa

SEQ ID NO: 193976 - DNA, 25 bp, Probe sequence
gaagttcaattgatgattactagct

SEQ ID NO: 193977 - DNA, 25 bp, Probe sequence
gaacgaggttattggcaatccatta

SEQ ID NO: 193978 - DNA, 25 bp, Probe sequence
gaccgatacttcaaaaagcacttaa

SEQ ID NO: 193979 - DNA, 25 bp, Probe sequence
gatccccaaaaacgtgttatctatc

SEQ ID NO: 193980 - DNA, 25 bp, Probe sequence
gagaatgggagatcggtttatagtg

SEQ ID NO: 193981 - DNA, 25 bp, Probe sequence
gagtatcatcgcttgatcaaaattt

SEQ ID NO: 193982 - DNA, 25 bp, Probe sequence
gatgattactagcttgcctatgatg

SEQ ID NO: 193983 - DNA, 25 bp, Probe sequence
gatgaacgaggttattggcaatcca

SEQ ID NO: 193984 - DNA, 25 bp, Probe sequence
gatcggtttatagtggaatccatcg

SEQ ID NO: 193985 - DNA, 25 bp, Probe sequence
gattactagcttgcctatgatgaac

SEQ ID NO: 193986 - DNA, 25 bp, Probe sequence
gtgttatctatcatcgagttgtcga

SEQ ID NO: 193987 - DNA, 25 bp, Probe sequence
gtggaatccatcgatcgtttaggtc

SEQ ID NO: 193988 - DNA, 25 bp, Probe sequence
ggtcgtaattacaatgaagtgattc

SEQ ID NO: 193989 - DNA, 25 bp, Probe sequence
ggaatccatcgatcgtttaggtcgt

SEQ ID NO: 193990 - DNA, 25 bp, Probe sequence
ggcaatccattactagataaattta

SEQ ID NO: 193991 - DNA, 25 bp, Probe sequence
ggcgtatataaaggacgacctttgc

SEQ ID NO: 193992 - DNA, 25 bp, Probe sequence
tgaagtgattcatactgttaattat

SEQ ID NO: 193993 - DNA, 25 bp, Probe sequence
tccatcgatcgtttaggtcgtaatt

SEQ ID NO: 193994 - DNA, 25 bp, Probe sequence
tcgagttgtcgaaatgttagaagaa

SEQ ID NO: 193995 - DNA, 25 bp, Probe sequence
tactagcttgcctatgatgaacgag

SEQ ID NO: 193996 - DNA, 25 bp, Probe sequence
tttgctttattcaccgaacgcgaaa

SEQ ID NO: 193997 - DNA, 25 bp, Probe sequence
ttcaccgaacgcgaaagatccccaa

SEQ ID NO: 193998 - DNA, 25 bp, Probe sequence
attacatcattcgcatatatctaca

SEQ ID NO: 193999 - DNA, 25 bp, Probe sequence
atatatctacacttgctcaattagg

SEQ ID NO: 194000 - DNA, 25 bp, Probe sequence
atctacacttgctcaattaggaatt

SEQ ID NO: 194001 - DNA, 25 bp, Probe sequence
atgcaagagcatgtaggtcattcag

SEQ ID NO: 194002 - DNA, 25 bp, Probe sequence
ctggtggtcctatcgatttaaacaa

SEQ ID NO: 194003 - DNA, 25 bp, Probe sequence
agagcatgtaggtcattcagattat

SEQ ID NO: 194004 - DNA, 25 bp, Probe sequence
agctggtggtcctatcgatttaaac

SEQ ID NO: 194005 - DNA, 25 bp, Probe sequence
acatcattcgcatatatctacactt

SEQ ID NO: 194006 - DNA, 25 bp, Probe sequence
aaatgcagctggtggtcctatcgat

SEQ ID NO: 194007 - DNA, 25 bp, Probe sequence
acacttgctcaattaggaattaact

SEQ ID NO: 194008 - DNA, 25 bp, Probe sequence
acaaatgcagctggtggtcctatcg

SEQ ID NO: 194009 - DNA, 25 bp, Probe sequence
aaacctgcaacgacgcatacattac

SEQ ID NO: 194010 - DNA, 25 bp, Probe sequence
aagaaacctgcaacgacgcatacat

SEQ ID NO: 194011 - DNA, 25 bp, Probe sequence
caacgacgcatacattacatcattc

SEQ ID NO: 194012 - DNA, 25 bp, Probe sequence
cagctggtggtcctatcgatttaaa

SEQ ID NO: 194013 - DNA, 25 bp, Probe sequence
catgtaggtcattcagattataaaa

SEQ ID NO: 194014 - DNA, 25 bp, Probe sequence
cattcgcatatatctacacttgctc

SEQ ID NO: 194015 - DNA, 25 bp, Probe sequence
cgcatatatctacacttgctcaatt

SEQ ID NO: 194016 - DNA, 25 bp, Probe sequence
gctggtggtcctatcgatttaaaca

SEQ ID NO: 194017 - DNA, 25 bp, Probe sequence
gcatacattacatcattcgcatata

SEQ ID NO: 194018 - DNA, 25 bp, Probe sequence
gcagctggtggtcctatcgatttaa

SEQ ID NO: 194019 - DNA, 25 bp, Probe sequence
gacgcatacattacatcattcgcat

SEQ ID NO: 194020 - DNA, 25 bp, Probe sequence
gagacaactgagattagttctatta

SEQ ID NO: 194021 - DNA, 25 bp, Probe sequence
gataagtttattaatatagggtaca

SEQ ID NO: 194022 - DNA, 25 bp, Probe sequence
gttctattaagaaacctgcaacgac

SEQ ID NO: 194023 - DNA, 25 bp, Probe sequence
gtggtcctatcgatttaaacaaaat

SEQ ID NO: 194024 - DNA, 25 bp, Probe sequence
gggtacatattcacaaatgcagctg

SEQ ID NO: 194025 - DNA, 25 bp, Probe sequence
gggggggctatcaaagagacaactg

SEQ ID NO: 194026 - DNA, 25 bp, Probe sequence
ggaattaacttaaaagcaatgcaag

SEQ ID NO: 194027 - DNA, 25 bp, Probe sequence
tggtggtcctatcgatttaaacaaa

SEQ ID NO: 194028 - DNA, 25 bp, Probe sequence
tgcaacgacgcatacattacatcat

SEQ ID NO: 194029 - DNA, 25 bp, Probe sequence
taaagggggggctatcaaagagaca

SEQ ID NO: 194030 - DNA, 25 bp, Probe sequence
tacattacatcattcgcatatatct

SEQ ID NO: 194031 - DNA, 25 bp, Probe sequence
ttcgcatatatctacacttgctcaa

SEQ ID NO: 194032 - DNA, 25 bp, Probe sequence
attcaaacatagaacatgccgtcat

SEQ ID NO: 194033 - DNA, 25 bp, Probe sequence
atgattcaaacatagaacatgccgt

SEQ ID NO: 194034 - DNA, 25 bp, Probe sequence
atgtgtaaagtcctgataatactaa

SEQ ID NO: 194035 - DNA, 25 bp, Probe sequence
agtagcgctgattatggggcaaaaa

SEQ ID NO: 194036 - DNA, 25 bp, Probe sequence
agcaagtagcgctgattatggggca

SEQ ID NO: 194037 - DNA, 25 bp, Probe sequence
agcgctgattatggggcaaaaatag

SEQ ID NO: 194038 - DNA, 25 bp, Probe sequence
acatagaacatgccgtcataaatat

SEQ ID NO: 194039 - DNA, 25 bp, Probe sequence
aaagcaagtagcgctgattatgggg

SEQ ID NO: 194040 - DNA, 25 bp, Probe sequence
aaacatagaacatgccgtcataaat

SEQ ID NO: 194041 - DNA, 25 bp, Probe sequence
aacatagaacatgccgtcataaata

SEQ ID NO: 194042 - DNA, 25 bp, Probe sequence
aagcaagtagcgctgattatggggc

SEQ ID NO: 194043 - DNA, 25 bp, Probe sequence
aagtagcgctgattatggggcaaaa

SEQ ID NO: 194044 - DNA, 25 bp, Probe sequence
aagtcctgataatactaagaagtac

SEQ ID NO: 194045 - DNA, 25 bp, Probe sequence
caagtagcgctgattatggggcaaa

SEQ ID NO: 194046 - DNA, 25 bp, Probe sequence
aatgtgtaaagtcctgataatacta

SEQ ID NO: 194047 - DNA, 25 bp, Probe sequence
caaacatagaacatgccgtcataaa

SEQ ID NO: 194048 - DNA, 25 bp, Probe sequence
cgctgattatggggcaaaaatagaa

SEQ ID NO: 194049 - DNA, 25 bp, Probe sequence
gcgctgattatggggcaaaaataga

SEQ ID NO: 194050 - DNA, 25 bp, Probe sequence
gcaagtagcgctgattatggggcaa

SEQ ID NO: 194051 - DNA, 25 bp, Probe sequence
gatgattcaaacatagaacatgccg

SEQ ID NO: 194052 - DNA, 25 bp, Probe sequence
gattcaaacatagaacatgccgtca

SEQ ID NO: 194053 - DNA, 25 bp, Probe sequence
gtagcgctgattatggggcaaaaat

SEQ ID NO: 194054 - DNA, 25 bp, Probe sequence
gtaaagtcctgataatactaagaag

SEQ ID NO: 194055 - DNA, 25 bp, Probe sequence
gtgtaaagtcctgataatactaaga

SEQ ID NO: 194056 - DNA, 25 bp, Probe sequence
ggcggttataaaatgtaggaaaatg

SEQ ID NO: 194057 - DNA, 25 bp, Probe sequence
tggggcaaaaatagaagtcattcaa

SEQ ID NO: 194058 - DNA, 25 bp, Probe sequence
tgtgtaaagtcctgataatactaag

SEQ ID NO: 194059 - DNA, 25 bp, Probe sequence
tgattcaaacatagaacatgccgtc

SEQ ID NO: 194060 - DNA, 25 bp, Probe sequence
tcaaacatagaacatgccgtcataa

SEQ ID NO: 194061 - DNA, 25 bp, Probe sequence
taaagcaagtagcgctgattatggg

SEQ ID NO: 194062 - DNA, 25 bp, Probe sequence
taaagtcctgataatactaagaagt

SEQ ID NO: 194063 - DNA, 25 bp, Probe sequence
tagcgctgattatggggcaaaaata

SEQ ID NO: 194064 - DNA, 25 bp, Probe sequence
ttaaagcaagtagcgctgattatgg

SEQ ID NO: 194065 - DNA, 25 bp, Probe sequence
ttcaaacatagaacatgccgtcata

SEQ ID NO: 194066 - DNA, 25 bp, Probe sequence
atgtacaagttgaggatgggcccca

SEQ ID NO: 194067 - DNA, 25 bp, Probe sequence
atgatgcacaacaatttaagttcaa

SEQ ID NO: 194068 - DNA, 25 bp, Probe sequence
agacaatgcaagtcagcgagtcccc

SEQ ID NO: 194069 - DNA, 25 bp, Probe sequence
actgtcgaataaagttatatttgat

SEQ ID NO: 194070 - DNA, 25 bp, Probe sequence
aatgtacaagttgaggatgggcccc

SEQ ID NO: 194071 - DNA, 25 bp, Probe sequence
acaatttaagttcaaactgtcgaat

SEQ ID NO: 194072 - DNA, 25 bp, Probe sequence
acagaagctgtgactaatgataaaa

SEQ ID NO: 194073 - DNA, 25 bp, Probe sequence
acagacaatgcaagtcagcgagtcc

SEQ ID NO: 194074 - DNA, 25 bp, Probe sequence
aagttgaggatgggccccaacacag

SEQ ID NO: 194075 - DNA, 25 bp, Probe sequence
caagttgaggatgggccccaacaca

SEQ ID NO: 194076 - DNA, 25 bp, Probe sequence
caacaatttaagttcaaactgtcga

SEQ ID NO: 194077 - DNA, 25 bp, Probe sequence
cagacaatgcaagtcagcgagtccc

SEQ ID NO: 194078 - DNA, 25 bp, Probe sequence
ctcccttttcttattgttatgatgc

SEQ ID NO: 194079 - DNA, 25 bp, Probe sequence
cccttttcttattgttatgatgcac

SEQ ID NO: 194080 - DNA, 25 bp, Probe sequence
cctcccttttcttattgttatgatg

SEQ ID NO: 194081 - DNA, 25 bp, Probe sequence
ccttttcttattgttatgatgcaca

SEQ ID NO: 194082 - DNA, 25 bp, Probe sequence
ccaacacagaagctgtgactaatga

SEQ ID NO: 194083 - DNA, 25 bp, Probe sequence
gcctcccttttcttattgttatgat

SEQ ID NO: 194084 - DNA, 25 bp, Probe sequence
gcacaacaatttaagttcaaactgt

SEQ ID NO: 194085 - DNA, 25 bp, Probe sequence
gaagctgtgactaatgataaaatac

SEQ ID NO: 194086 - DNA, 25 bp, Probe sequence
gacaatgcaagtcagcgagtcccca

SEQ ID NO: 194087 - DNA, 25 bp, Probe sequence
gatgcacaacaatttaagttcaaac

SEQ ID NO: 194088 - DNA, 25 bp, Probe sequence
gataaaatactactacataataaat

SEQ ID NO: 194089 - DNA, 25 bp, Probe sequence
gttatgatgcacaacaatttaagtt

SEQ ID NO: 194090 - DNA, 25 bp, Probe sequence
gttatatttgatttcaaattatccc

SEQ ID NO: 194091 - DNA, 25 bp, Probe sequence
gtacaagttgaggatgggccccaac

SEQ ID NO: 194092 - DNA, 25 bp, Probe sequence
gtgactaatgataaaatactactac

SEQ ID NO: 194093 - DNA, 25 bp, Probe sequence
tgtacaagttgaggatgggccccaa

SEQ ID NO: 194094 - DNA, 25 bp, Probe sequence
tgcctcccttttcttattgttatga

SEQ ID NO: 194095 - DNA, 25 bp, Probe sequence
tcccttttcttattgttatgatgca

SEQ ID NO: 194096 - DNA, 25 bp, Probe sequence
tacaagttgaggatgggccccaaca

SEQ ID NO: 194097 - DNA, 25 bp, Probe sequence
tttcttattgttatgatgcacaaca

SEQ ID NO: 194098 - DNA, 25 bp, Probe sequence
ttttcttattgttatgatgcacaac

SEQ ID NO: 194099 - DNA, 25 bp, Probe sequence
ttaagttcaaactgtcgaataaagt

SEQ ID NO: 194100 - DNA, 25 bp, Probe sequence
attgtcttatttctattcattatat

SEQ ID NO: 194101 - DNA, 25 bp, Probe sequence
attcattatatttggcatcgtggca

SEQ ID NO: 194102 - DNA, 25 bp, Probe sequence
atttctattcattatatttggcatc

SEQ ID NO: 194103 - DNA, 25 bp, Probe sequence
aggttgtttaaaaagcgccgccatg

SEQ ID NO: 194104 - DNA, 25 bp, Probe sequence
atcgtggcatgttcgacacacgtta

SEQ ID NO: 194105 - DNA, 25 bp, Probe sequence
atgcttattgtcttatttctattca

SEQ ID NO: 194106 - DNA, 25 bp, Probe sequence
agaccacaaagcatcttgaagatta

SEQ ID NO: 194107 - DNA, 25 bp, Probe sequence
aaaaagcgccgccatgcttattgtc

SEQ ID NO: 194108 - DNA, 25 bp, Probe sequence
aaaagaccacaaagcatcttgaaga

SEQ ID NO: 194109 - DNA, 25 bp, Probe sequence
catgttcgacacacgttaacttttt

SEQ ID NO: 194110 - DNA, 25 bp, Probe sequence
catgcttattgtcttatttctattc

SEQ ID NO: 194111 - DNA, 25 bp, Probe sequence
cattatatttggcatcgtggcatgt

SEQ ID NO: 194112 - DNA, 25 bp, Probe sequence
ctattcattatatttggcatcgtgg

SEQ ID NO: 194113 - DNA, 25 bp, Probe sequence
cgccatgcttattgtcttatttcta

SEQ ID NO: 194114 - DNA, 25 bp, Probe sequence
ccgccatgcttattgtcttatttct

SEQ ID NO: 194115 - DNA, 25 bp, Probe sequence
gccatgcttattgtcttatttctat

SEQ ID NO: 194116 - DNA, 25 bp, Probe sequence
gcttattgtcttatttctattcatt

SEQ ID NO: 194117 - DNA, 25 bp, Probe sequence
gcatgttcgacacacgttaactttt

SEQ ID NO: 194118 - DNA, 25 bp, Probe sequence
gcatcgtggcatgttcgacacacgt

SEQ ID NO: 194119 - DNA, 25 bp, Probe sequence
gaggttgtttaaaaagcgccgccat

SEQ ID NO: 194120 - DNA, 25 bp, Probe sequence
gttgtttaaaaagcgccgccatgct

SEQ ID NO: 194121 - DNA, 25 bp, Probe sequence
gtttaaaaagcgccgccatgcttat

SEQ ID NO: 194122 - DNA, 25 bp, Probe sequence
gtcttatttctattcattatatttg

SEQ ID NO: 194123 - DNA, 25 bp, Probe sequence
gtggcatgttcgacacacgttaact

SEQ ID NO: 194124 - DNA, 25 bp, Probe sequence
ggcatcgtggcatgttcgacacacg

SEQ ID NO: 194125 - DNA, 25 bp, Probe sequence
ggcatgttcgacacacgttaacttt

SEQ ID NO: 194126 - DNA, 25 bp, Probe sequence
tggcatcgtggcatgttcgacacac

SEQ ID NO: 194127 - DNA, 25 bp, Probe sequence
tgttcgacacacgttaactttttct

SEQ ID NO: 194128 - DNA, 25 bp, Probe sequence
tatttggcatcgtggcatgttcgac

SEQ ID NO: 194129 - DNA, 25 bp, Probe sequence
tatatttggcatcgtggcatgttcg

SEQ ID NO: 194130 - DNA, 25 bp, Probe sequence
tttggcatcgtggcatgttcgacac

SEQ ID NO: 194131 - DNA, 25 bp, Probe sequence
ttattgtcttatttctattcattat

SEQ ID NO: 194132 - DNA, 25 bp, Probe sequence
ttaaaaagcgccgccatgcttattg

SEQ ID NO: 194133 - DNA, 25 bp, Probe sequence
ttggcatcgtggcatgttcgacaca

SEQ ID NO: 194134 - DNA, 25 bp, Probe sequence
ataaaaatagcaccgctttctcttt

SEQ ID NO: 194135 - DNA, 25 bp, Probe sequence
atgtgtcttgtatccttagttgtta

SEQ ID NO: 194136 - DNA, 25 bp, Probe sequence
aggtatgtgtcttgtatccttagtt

SEQ ID NO: 194137 - DNA, 25 bp, Probe sequence
agtgtataaaaatagcaccgctttc

SEQ ID NO: 194138 - DNA, 25 bp, Probe sequence
aaatagcaccgctttctctttatct

SEQ ID NO: 194139 - DNA, 25 bp, Probe sequence
aaaaatagcaccgctttctctttat

SEQ ID NO: 194140 - DNA, 25 bp, Probe sequence
aaaatagcaccgctttctctttatc

SEQ ID NO: 194141 - DNA, 25 bp, Probe sequence
aagtgtataaaaatagcaccgcttt

SEQ ID NO: 194142 - DNA, 25 bp, Probe sequence
aaggtatgtgtcttgtatccttagt

SEQ ID NO: 194143 - DNA, 25 bp, Probe sequence
aattgagcttaggaaatcgataggt

SEQ ID NO: 194144 - DNA, 25 bp, Probe sequence
gaaggtatgtgtcttgtatccttag

SEQ ID NO: 194145 - DNA, 25 bp, Probe sequence
gagcttaggaaatcgataggtttag

SEQ ID NO: 194146 - DNA, 25 bp, Probe sequence
gaggatattgttgaaggtatgtgtc

SEQ ID NO: 194147 - DNA, 25 bp, Probe sequence
gatgaggatattgttgaaggtatgt

SEQ ID NO: 194148 - DNA, 25 bp, Probe sequence
gatattgttgaaggtatgtgtcttg

SEQ ID NO: 194149 - DNA, 25 bp, Probe sequence
gttgaaggtatgtgtcttgtatcct

SEQ ID NO: 194150 - DNA, 25 bp, Probe sequence
gtataaaaatagcaccgctttctct

SEQ ID NO: 194151 - DNA, 25 bp, Probe sequence
gtatgtgtcttgtatccttagttgt

SEQ ID NO: 194152 - DNA, 25 bp, Probe sequence
gtgtttaaaattgagcttaggaaat

SEQ ID NO: 194153 - DNA, 25 bp, Probe sequence
gtgtcttgtatccttagttgttaaa

SEQ ID NO: 194154 - DNA, 25 bp, Probe sequence
gtgtataaaaatagcaccgctttct

SEQ ID NO: 194155 - DNA, 25 bp, Probe sequence
ggtatgtgtcttgtatccttagttg

SEQ ID NO: 194156 - DNA, 25 bp, Probe sequence
ggtttagatgaggatattgttgaag

SEQ ID NO: 194157 - DNA, 25 bp, Probe sequence
ggaaatcgataggtttagatgagga

SEQ ID NO: 194158 - DNA, 25 bp, Probe sequence
tgtatccttagttgttaaaaaagtg

SEQ ID NO: 194159 - DNA, 25 bp, Probe sequence
tgtgtcttgtatccttagttgttaa

SEQ ID NO: 194160 - DNA, 25 bp, Probe sequence
tgtcttgtatccttagttgttaaaa

SEQ ID NO: 194161 - DNA, 25 bp, Probe sequence
tgtataaaaatagcaccgctttctc

SEQ ID NO: 194162 - DNA, 25 bp, Probe sequence
tgttgaaggtatgtgtcttgtatcc

SEQ ID NO: 194163 - DNA, 25 bp, Probe sequence
tgaaggtatgtgtcttgtatcctta

SEQ ID NO: 194164 - DNA, 25 bp, Probe sequence
taaaaatagcaccgctttctcttta

SEQ ID NO: 194165 - DNA, 25 bp, Probe sequence
tatgtgtcttgtatccttagttgtt

SEQ ID NO: 194166 - DNA, 25 bp, Probe sequence
taggtttagatgaggatattgttga

SEQ ID NO: 194167 - DNA, 25 bp, Probe sequence
tataaaaatagcaccgctttctctt

SEQ ID NO: 194168 - DNA, 25 bp, Probe sequence
gcaggttggggtgtaggccccaaca

SEQ ID NO: 194169 - DNA, 25 bp, Probe sequence
attggatctacaatttctacaggca

SEQ ID NO: 194170 - DNA, 25 bp, Probe sequence
aggcaatgcaggttggggtgtaggc

SEQ ID NO: 194171 - DNA, 25 bp, Probe sequence
aggcaatgcaagttggggtgtgggc

SEQ ID NO: 194172 - DNA, 25 bp, Probe sequence
acgataatgtgcaggttggcggggc

SEQ ID NO: 194173 - DNA, 25 bp, Probe sequence
acaatttctacaggcaatgcaagtt

SEQ ID NO: 194174 - DNA, 25 bp, Probe sequence
aagaaattctacaggcaatgcaggt

SEQ ID NO: 194175 - DNA, 25 bp, Probe sequence
aagtcagcttacgataatgtgcagg

SEQ ID NO: 194176 - DNA, 25 bp, Probe sequence
aatgcaggttggggtgtaggcccca

SEQ ID NO: 194177 - DNA, 25 bp, Probe sequence
caacacagagaaattggaacaccaa

SEQ ID NO: 194178 - DNA, 25 bp, Probe sequence
caggcaatgcaggttggggtgtagg

SEQ ID NO: 194179 - DNA, 25 bp, Probe sequence
gccccaacacagagaatttcgaaaa

SEQ ID NO: 194180 - DNA, 25 bp, Probe sequence
gcggggccccaacatagagaaattg

SEQ ID NO: 194181 - DNA, 25 bp, Probe sequence
gcaatgcaggttggggtgtaggccc

SEQ ID NO: 194182 - DNA, 25 bp, Probe sequence
gcaatgcaagttggggtgtgggccc

SEQ ID NO: 194183 - DNA, 25 bp, Probe sequence
gatctacaatttctacaggcaatgc

SEQ ID NO: 194184 - DNA, 25 bp, Probe sequence
gataatgtgcaggttggcggggccc

SEQ ID NO: 194185 - DNA, 25 bp, Probe sequence
gttggcggggccccaacatagagaa

SEQ ID NO: 194186 - DNA, 25 bp, Probe sequence
gtcagcttacgataatgtgcaggtt

SEQ ID NO: 194187 - DNA, 25 bp, Probe sequence
gtgtgggccccaacacagagaattt

SEQ ID NO: 194188 - DNA, 25 bp, Probe sequence
gggccccaacacagagaatttcgaa

SEQ ID NO: 194189 - DNA, 25 bp, Probe sequence
ggtgtaggccccaacacagagaaat

SEQ ID NO: 194190 - DNA, 25 bp, Probe sequence
ggggccccaacatagagaaattgga

SEQ ID NO: 194191 - DNA, 25 bp, Probe sequence
tggcggggccccaacatagagaaat

SEQ ID NO: 194192 - DNA, 25 bp, Probe sequence
ggccccaacacagagaaattggaac

SEQ ID NO: 194193 - DNA, 25 bp, Probe sequence
tggatctacaatttctacaggcaat

SEQ ID NO: 194194 - DNA, 25 bp, Probe sequence
tgtaggccccaacacagagaaattg

SEQ ID NO: 194195 - DNA, 25 bp, Probe sequence
tgggccccaacacagagaatttcga

SEQ ID NO: 194196 - DNA, 25 bp, Probe sequence
tggggtgtgggccccaacacagaga

SEQ ID NO: 194197 - DNA, 25 bp, Probe sequence
tggggtgtaggccccaacacagaga

SEQ ID NO: 194198 - DNA, 25 bp, Probe sequence
tgacgaaaagtcagcttacgataat

SEQ ID NO: 194199 - DNA, 25 bp, Probe sequence
tctacaatttctacaggcaatgcaa

SEQ ID NO: 194200 - DNA, 25 bp, Probe sequence
tacaggcaatgcaagttggggtgtg

SEQ ID NO: 194201 - DNA, 25 bp, Probe sequence
ttacgataatgtgcaggttggcggg

SEQ ID NO: 194202 - DNA, 25 bp, Probe sequence
attactgcatcaattactgcgttat

SEQ ID NO: 194203 - DNA, 25 bp, Probe sequence
atcaattactgcgttattaccttaa

SEQ ID NO: 194204 - DNA, 25 bp, Probe sequence
agtcattactgcatcaattactgcg

SEQ ID NO: 194205 - DNA, 25 bp, Probe sequence
agttgggcaagatggttgtcatgtt

SEQ ID NO: 194206 - DNA, 25 bp, Probe sequence
actgcatcaattactgcgttattac

SEQ ID NO: 194207 - DNA, 25 bp, Probe sequence
aagatggttgtcatgttatttgtat

SEQ ID NO: 194208 - DNA, 25 bp, Probe sequence
aatgagttgggcaagatggttgtca

SEQ ID NO: 194209 - DNA, 25 bp, Probe sequence
caattactgcgttattaccttaagg

SEQ ID NO: 194210 - DNA, 25 bp, Probe sequence
catcaattactgcgttattacctta

SEQ ID NO: 194211 - DNA, 25 bp, Probe sequence
cattactgcatcaattactgcgtta

SEQ ID NO: 194212 - DNA, 25 bp, Probe sequence
ctgcatcaattactgcgttattacc

SEQ ID NO: 194213 - DNA, 25 bp, Probe sequence
gcatcaattactgcgttattacctt

SEQ ID NO: 194214 - DNA, 25 bp, Probe sequence
gcagtcattactgcatcaattactg

SEQ ID NO: 194215 - DNA, 25 bp, Probe sequence
gcaagatggttgtcatgttatttgt

SEQ ID NO: 194216 - DNA, 25 bp, Probe sequence
gagttgggcaagatggttgtcatgt

SEQ ID NO: 194217 - DNA, 25 bp, Probe sequence
gaggtggacaaaatgagttgggcaa

SEQ ID NO: 194218 - DNA, 25 bp, Probe sequence
gatggttgtcatgttatttgtatgg

SEQ ID NO: 194219 - DNA, 25 bp, Probe sequence
gttgggcaagatggttgtcatgtta

SEQ ID NO: 194220 - DNA, 25 bp, Probe sequence
gtcattactgcatcaattactgcgt

SEQ ID NO: 194221 - DNA, 25 bp, Probe sequence
gggcaagatggttgtcatgttattt

SEQ ID NO: 194222 - DNA, 25 bp, Probe sequence
gggaggtggacaaaatgagttgggc

SEQ ID NO: 194223 - DNA, 25 bp, Probe sequence
ggtggacaaaatgagttgggcaaga

SEQ ID NO: 194224 - DNA, 25 bp, Probe sequence
ggttgtcatgttatttgtatggtcg

SEQ ID NO: 194225 - DNA, 25 bp, Probe sequence
ggcaagatggttgtcatgttatttg

SEQ ID NO: 194226 - DNA, 25 bp, Probe sequence
tgcgttattaccttaagggaggtgg

SEQ ID NO: 194227 - DNA, 25 bp, Probe sequence
tgggcaagatggttgtcatgttatt

SEQ ID NO: 194228 - DNA, 25 bp, Probe sequence
tgagttgggcaagatggttgtcatg

SEQ ID NO: 194229 - DNA, 25 bp, Probe sequence
tgcatcaattactgcgttattacct

SEQ ID NO: 194230 - DNA, 25 bp, Probe sequence
tcattactgcatcaattactgcgtt

SEQ ID NO: 194231 - DNA, 25 bp, Probe sequence
tcaattactgcgttattaccttaag

SEQ ID NO: 194232 - DNA, 25 bp, Probe sequence
tactgcgttattaccttaagggagg

SEQ ID NO: 194233 - DNA, 25 bp, Probe sequence
tactgcatcaattactgcgttatta

SEQ ID NO: 194234 - DNA, 25 bp, Probe sequence
ttactgcgttattaccttaagggag

SEQ ID NO: 194235 - DNA, 25 bp, Probe sequence
ttactgcatcaattactgcgttatt

SEQ ID NO: 194236 - DNA, 25 bp, Probe sequence
attgtgcttatgccattgctgtact

SEQ ID NO: 194237 - DNA, 25 bp, Probe sequence
aggattcgcaagtatcgcaacattc

SEQ ID NO: 194238 - DNA, 25 bp, Probe sequence
agtactgtgcttcacagtcttagcg

SEQ ID NO: 194239 - DNA, 25 bp, Probe sequence
agcagtactgtgcttcacagtctta

SEQ ID NO: 194240 - DNA, 25 bp, Probe sequence
agcatggtcaattgcaggattcgca

SEQ ID NO: 194241 - DNA, 25 bp, Probe sequence
acctattagcagtactgtgcttcac

SEQ ID NO: 194242 - DNA, 25 bp, Probe sequence
acttcactacagcatggtcaattgc

SEQ ID NO: 194243 - DNA, 25 bp, Probe sequence
aaagctacctattagcagtactgtg

SEQ ID NO: 194244 - DNA, 25 bp, Probe sequence
aagtatcgcaacattcatattctat

SEQ ID NO: 194245 - DNA, 25 bp, Probe sequence
cactacagcatggtcaattgcagga

SEQ ID NO: 194246 - DNA, 25 bp, Probe sequence
cagtcttagcgattgtgcttatgcc

SEQ ID NO: 194247 - DNA, 25 bp, Probe sequence
ctattagcagtactgtgcttcacag

SEQ ID NO: 194248 - DNA, 25 bp, Probe sequence
ctgtgcttcacagtcttagcgattg

SEQ ID NO: 194249 - DNA, 25 bp, Probe sequence
cgattgtgcttatgccattgctgta

SEQ ID NO: 194250 - DNA, 25 bp, Probe sequence
gctacctattagcagtactgtgctt

SEQ ID NO: 194251 - DNA, 25 bp, Probe sequence
gcttatgccattgctgtacttcact

SEQ ID NO: 194252 - DNA, 25 bp, Probe sequence
gcttcacagtcttagcgattgtgct

SEQ ID NO: 194253 - DNA, 25 bp, Probe sequence
gcaacatttataaaagctacctatt

SEQ ID NO: 194254 - DNA, 25 bp, Probe sequence
gcaagtatcgcaacattcatattct

SEQ ID NO: 194255 - DNA, 25 bp, Probe sequence
gattcgcaagtatcgcaacattcat

SEQ ID NO: 194256 - DNA, 25 bp, Probe sequence
gattgtgcttatgccattgctgtac

SEQ ID NO: 194257 - DNA, 25 bp, Probe sequence
gtatcgcaacattcatattctataa

SEQ ID NO: 194258 - DNA, 25 bp, Probe sequence
gtacttcactacagcatggtcaatt

SEQ ID NO: 194259 - DNA, 25 bp, Probe sequence
tgtgcttatgccattgctgtacttc

SEQ ID NO: 194260 - DNA, 25 bp, Probe sequence
tgtgcttcacagtcttagcgattgt

SEQ ID NO: 194261 - DNA, 25 bp, Probe sequence
tgcaggattcgcaagtatcgcaaca

SEQ ID NO: 194262 - DNA, 25 bp, Probe sequence
tgcttatgccattgctgtacttcac

SEQ ID NO: 194263 - DNA, 25 bp, Probe sequence
tgccattgctgtacttcactacagc

SEQ ID NO: 194264 - DNA, 25 bp, Probe sequence
tcgcaacattcatattctataagga

SEQ ID NO: 194265 - DNA, 25 bp, Probe sequence
tagcgattgtgcttatgccattgct

SEQ ID NO: 194266 - DNA, 25 bp, Probe sequence
tatgccattgctgtacttcactaca

SEQ ID NO: 194267 - DNA, 25 bp, Probe sequence
ttatgccattgctgtacttcactac

SEQ ID NO: 194268 - DNA, 25 bp, Probe sequence
ttagcgattgtgcttatgccattgc

SEQ ID NO: 194269 - DNA, 25 bp, Probe sequence
ttcgcaagtatcgcaacattcatat

SEQ ID NO: 194270 - DNA, 25 bp, Probe sequence
atttggctactttatcgtatttgca

SEQ ID NO: 194271 - DNA, 25 bp, Probe sequence
atctttgtgctttctggtgcgatat

SEQ ID NO: 194272 - DNA, 25 bp, Probe sequence
atctcttatatggttgcaacaacgt

SEQ ID NO: 194273 - DNA, 25 bp, Probe sequence
aaaaatgttacctgaaaatgcttat

SEQ ID NO: 194274 - DNA, 25 bp, Probe sequence
aacaattattgttctctttatcttt

SEQ ID NO: 194275 - DNA, 25 bp, Probe sequence
catggttattataggctttttatat

SEQ ID NO: 194276 - DNA, 25 bp, Probe sequence
ctttatctttgtgctttctggtgcg

SEQ ID NO: 194277 - DNA, 25 bp, Probe sequence
ctggtgcgatattcttaacgttttt

SEQ ID NO: 194278 - DNA, 25 bp, Probe sequence
gctttctggtgcgatattcttaacg

SEQ ID NO: 194279 - DNA, 25 bp, Probe sequence
gcttattttagaggtgcaacttttc

SEQ ID NO: 194280 - DNA, 25 bp, Probe sequence
gcagttgaacatttgatggattatt

SEQ ID NO: 194281 - DNA, 25 bp, Probe sequence
gcaacttttcatttaatctcttata

SEQ ID NO: 194282 - DNA, 25 bp, Probe sequence
gaagtatgtacgacaatttgctata

SEQ ID NO: 194283 - DNA, 25 bp, Probe sequence
gacaatttgctatattatggtagtt

SEQ ID NO: 194284 - DNA, 25 bp, Probe sequence
gtttgtaagctgcagttttaccctg

SEQ ID NO: 194285 - DNA, 25 bp, Probe sequence
gttatattatatttggctactttat

SEQ ID NO: 194286 - DNA, 25 bp, Probe sequence
gggttcggactatatggattaagta

SEQ ID NO: 194287 - DNA, 25 bp, Probe sequence
ggtgcaacttttcatttaatctctt

SEQ ID NO: 194288 - DNA, 25 bp, Probe sequence
ggttaggtgacttcacatataacag

SEQ ID NO: 194289 - DNA, 25 bp, Probe sequence
ggaggacaatagttatgaattatct

SEQ ID NO: 194290 - DNA, 25 bp, Probe sequence
ggctactttatcgtatttgcagttg

SEQ ID NO: 194291 - DNA, 25 bp, Probe sequence
tgtgctttctggtgcgatattctta

SEQ ID NO: 194292 - DNA, 25 bp, Probe sequence
tgcgatattcttaacgtttttaggg

SEQ ID NO: 194293 - DNA, 25 bp, Probe sequence
tcatctgaactatgtgtatatcaac

SEQ ID NO: 194294 - DNA, 25 bp, Probe sequence
taagctgcagttttaccctgaaagt

SEQ ID NO: 194295 - DNA, 25 bp, Probe sequence
tatcgtatttgcagttgaacatttg

SEQ ID NO: 194296 - DNA, 25 bp, Probe sequence
tataggctttttatatgtttgtaag

SEQ ID NO: 194297 - DNA, 25 bp, Probe sequence
tattttaggttaggtgacttcacat

SEQ ID NO: 194298 - DNA, 25 bp, Probe sequence
tattgttctctttatctttgtgctt

SEQ ID NO: 194299 - DNA, 25 bp, Probe sequence
tttaatctcttatatggttgcaaca

SEQ ID NO: 194300 - DNA, 25 bp, Probe sequence
tttttagggttcggactatatggat

SEQ ID NO: 194301 - DNA, 25 bp, Probe sequence
ttttattttattattcatctgaact

SEQ ID NO: 194302 - DNA, 25 bp, Probe sequence
ttctctttatctttgtgctttctgg

SEQ ID NO: 194303 - DNA, 25 bp, Probe sequence
ttgttctctttatctttgtgctttc

SEQ ID NO: 194304 - DNA, 25 bp, Probe sequence
attattcatgacgattatttttaca

SEQ ID NO: 194305 - DNA, 25 bp, Probe sequence
atatgacaatgtactttgtaaaatt

SEQ ID NO: 194306 - DNA, 25 bp, Probe sequence
atgccattattcatgacgattattt

SEQ ID NO: 194307 - DNA, 25 bp, Probe sequence
atgacaatgtactttgtaaaatttg

SEQ ID NO: 194308 - DNA, 25 bp, Probe sequence
atgacatatatacccttttctatta

SEQ ID NO: 194309 - DNA, 25 bp, Probe sequence
atgtcggaaaatgccattattcatg

SEQ ID NO: 194310 - DNA, 25 bp, Probe sequence
aaatgccattattcatgacgattat

SEQ ID NO: 194311 - DNA, 25 bp, Probe sequence
aaaatgccattattcatgacgatta

SEQ ID NO: 194312 - DNA, 25 bp, Probe sequence
aatgtcggaaaatgccattattcat

SEQ ID NO: 194313 - DNA, 25 bp, Probe sequence
aatgccattattcatgacgattatt

SEQ ID NO: 194314 - DNA, 25 bp, Probe sequence
catatgacaatgtactttgtaaaat

SEQ ID NO: 194315 - DNA, 25 bp, Probe sequence
cattattcatgacgattatttttac

SEQ ID NO: 194316 - DNA, 25 bp, Probe sequence
cggaaaatgccattattcatgacga

SEQ ID NO: 194317 - DNA, 25 bp, Probe sequence
ccattattcatgacgattattttta

SEQ ID NO: 194318 - DNA, 25 bp, Probe sequence
gccattattcatgacgattattttt

SEQ ID NO: 194319 - DNA, 25 bp, Probe sequence
gcatatgacaatgtactttgtaaaa

SEQ ID NO: 194320 - DNA, 25 bp, Probe sequence
gaatgtcggaaaatgccattattca

SEQ ID NO: 194321 - DNA, 25 bp, Probe sequence
gaaaatgccattattcatgacgatt

SEQ ID NO: 194322 - DNA, 25 bp, Probe sequence
gacaatgtactttgtaaaatttgaa

SEQ ID NO: 194323 - DNA, 25 bp, Probe sequence
gtactttgtaaaatttgaatgtcgg

SEQ ID NO: 194324 - DNA, 25 bp, Probe sequence
gtcggaaaatgccattattcatgac

SEQ ID NO: 194325 - DNA, 25 bp, Probe sequence
ggaaaatgccattattcatgacgat

SEQ ID NO: 194326 - DNA, 25 bp, Probe sequence
tgtcggaaaatgccattattcatga

SEQ ID NO: 194327 - DNA, 25 bp, Probe sequence
tgtactttgtaaaatttgaatgtcg

SEQ ID NO: 194328 - DNA, 25 bp, Probe sequence
tgacaatgtactttgtaaaatttga

SEQ ID NO: 194329 - DNA, 25 bp, Probe sequence
tgaatgtcggaaaatgccattattc

SEQ ID NO: 194330 - DNA, 25 bp, Probe sequence
tgcatatgacaatgtactttgtaaa

SEQ ID NO: 194331 - DNA, 25 bp, Probe sequence
tgccattattcatgacgattatttt

SEQ ID NO: 194332 - DNA, 25 bp, Probe sequence
tcggaaaatgccattattcatgacg

SEQ ID NO: 194333 - DNA, 25 bp, Probe sequence
tactttgtaaaatttgaatgtcgga

SEQ ID NO: 194334 - DNA, 25 bp, Probe sequence
tattcatgacgattatttttacaat

SEQ ID NO: 194335 - DNA, 25 bp, Probe sequence
tttgaatgtcggaaaatgccattat

SEQ ID NO: 194336 - DNA, 25 bp, Probe sequence
ttattcatgacgattatttttacaa

SEQ ID NO: 194337 - DNA, 25 bp, Probe sequence
ttgaatgtcggaaaatgccattatt

SEQ ID NO: 194338 - DNA, 25 bp, Probe sequence
atatacttaatgattatcttcttaa

SEQ ID NO: 194339 - DNA, 25 bp, Probe sequence
atagattctgtattttggaagaaag

SEQ ID NO: 194340 - DNA, 25 bp, Probe sequence
atacttaatgattatcttcttaatg

SEQ ID NO: 194341 - DNA, 25 bp, Probe sequence
ataacttttctatatacttaatgat

SEQ ID NO: 194342 - DNA, 25 bp, Probe sequence
atgattatcttcttaatgtgtttag

SEQ ID NO: 194343 - DNA, 25 bp, Probe sequence
atgtgtttaggaactgcatctatca

SEQ ID NO: 194344 - DNA, 25 bp, Probe sequence
acttaatgattatcttcttaatgtg

SEQ ID NO: 194345 - DNA, 25 bp, Probe sequence
acttttctatatacttaatgattat

SEQ ID NO: 194346 - DNA, 25 bp, Probe sequence
aaataacttttctatatacttaatg

SEQ ID NO: 194347 - DNA, 25 bp, Probe sequence
aacttttctatatacttaatgatta

SEQ ID NO: 194348 - DNA, 25 bp, Probe sequence
aatgtgtttaggaactgcatctatc

SEQ ID NO: 194349 - DNA, 25 bp, Probe sequence
aatgattatcttcttaatgtgttta

SEQ ID NO: 194350 - DNA, 25 bp, Probe sequence
aataacttttctatatacttaatga

SEQ ID NO: 194351 - DNA, 25 bp, Probe sequence
caaataacttttctatatacttaat

SEQ ID NO: 194352 - DNA, 25 bp, Probe sequence
cttaatgattatcttcttaatgtgt

SEQ ID NO: 194353 - DNA, 25 bp, Probe sequence
cttaatgtgtttaggaactgcatct

SEQ ID NO: 194354 - DNA, 25 bp, Probe sequence
cttttctatatacttaatgattatc

SEQ ID NO: 194355 - DNA, 25 bp, Probe sequence
ctatatacttaatgattatcttctt

SEQ ID NO: 194356 - DNA, 25 bp, Probe sequence
gatagattctgtattttggaagaaa

SEQ ID NO: 194357 - DNA, 25 bp, Probe sequence
tgatagattctgtattttggaagaa

SEQ ID NO: 194358 - DNA, 25 bp, Probe sequence
tcttaatgtgtttaggaactgcatc

SEQ ID NO: 194359 - DNA, 25 bp, Probe sequence
tctatatacttaatgattatcttct

SEQ ID NO: 194360 - DNA, 25 bp, Probe sequence
taatgattatcttcttaatgtgttt

SEQ ID NO: 194361 - DNA, 25 bp, Probe sequence
taatgtgtttaggaactgcatctat

SEQ ID NO: 194362 - DNA, 25 bp, Probe sequence
taacttttctatatacttaatgatt

SEQ ID NO: 194363 - DNA, 25 bp, Probe sequence
tacttaatgattatcttcttaatgt

SEQ ID NO: 194364 - DNA, 25 bp, Probe sequence
tatacttaatgattatcttcttaat

SEQ ID NO: 194365 - DNA, 25 bp, Probe sequence
tatatacttaatgattatcttctta

SEQ ID NO: 194366 - DNA, 25 bp, Probe sequence
tttctatatacttaatgattatctt

SEQ ID NO: 194367 - DNA, 25 bp, Probe sequence
ttttctatatacttaatgattatct

SEQ ID NO: 194368 - DNA, 25 bp, Probe sequence
ttaatgattatcttcttaatgtgtt

SEQ ID NO: 194369 - DNA, 25 bp, Probe sequence
ttaatgtgtttaggaactgcatcta

SEQ ID NO: 194370 - DNA, 25 bp, Probe sequence
ttctatatacttaatgattatcttc

SEQ ID NO: 194371 - DNA, 25 bp, Probe sequence
ttgatagattctgtattttggaaga

SEQ ID NO: 194372 - DNA, 25 bp, Probe sequence
attagtgtgaattactttgaaggga

SEQ ID NO: 194373 - DNA, 25 bp, Probe sequence
atacaaacaacatcctttcaaagta

SEQ ID NO: 194374 - DNA, 25 bp, Probe sequence
atcctttcaaagtatttacaattag

SEQ ID NO: 194375 - DNA, 25 bp, Probe sequence
atggaatacaaacaacatcctttca

SEQ ID NO: 194376 - DNA, 25 bp, Probe sequence
agtgtgaattactttgaagggattg

SEQ ID NO: 194377 - DNA, 25 bp, Probe sequence
acatcctttcaaagtatttacaatt

SEQ ID NO: 194378 - DNA, 25 bp, Probe sequence
acaacatcctttcaaagtatttaca

SEQ ID NO: 194379 - DNA, 25 bp, Probe sequence
acaaacaacatcctttcaaagtatt

SEQ ID NO: 194380 - DNA, 25 bp, Probe sequence
acaattagtgtgaattactttgaag

SEQ ID NO: 194381 - DNA, 25 bp, Probe sequence
aacatcctttcaaagtatttacaat

SEQ ID NO: 194382 - DNA, 25 bp, Probe sequence
aatacaaacaacatcctttcaaagt

SEQ ID NO: 194383 - DNA, 25 bp, Probe sequence
aattagtgtgaattactttgaaggg

SEQ ID NO: 194384 - DNA, 25 bp, Probe sequence
caattagtgtgaattactttgaagg

SEQ ID NO: 194385 - DNA, 25 bp, Probe sequence
caacatcctttcaaagtatttacaa

SEQ ID NO: 194386 - DNA, 25 bp, Probe sequence
caaagtatttacaattagtgtgaat

SEQ ID NO: 194387 - DNA, 25 bp, Probe sequence
caaacaacatcctttcaaagtattt

SEQ ID NO: 194388 - DNA, 25 bp, Probe sequence
catcctttcaaagtatttacaatta

SEQ ID NO: 194389 - DNA, 25 bp, Probe sequence
cctttcaaagtatttacaattagtg

SEQ ID NO: 194390 - DNA, 25 bp, Probe sequence
gaatacaaacaacatcctttcaaag

SEQ ID NO: 194391 - DNA, 25 bp, Probe sequence
gtatttacaattagtgtgaattact

SEQ ID NO: 194392 - DNA, 25 bp, Probe sequence
gtgaattactttgaagggattgttt

SEQ ID NO: 194393 - DNA, 25 bp, Probe sequence
gtgtgaattactttgaagggattgt

SEQ ID NO: 194394 - DNA, 25 bp, Probe sequence
ggaatacaaacaacatcctttcaaa

SEQ ID NO: 194395 - DNA, 25 bp, Probe sequence
tggaatacaaacaacatcctttcaa

SEQ ID NO: 194396 - DNA, 25 bp, Probe sequence
tgtgaattactttgaagggattgtt

SEQ ID NO: 194397 - DNA, 25 bp, Probe sequence
tgaattactttgaagggattgtttt

SEQ ID NO: 194398 - DNA, 25 bp, Probe sequence
tcctttcaaagtatttacaattagt

SEQ ID NO: 194399 - DNA, 25 bp, Probe sequence
tacaaacaacatcctttcaaagtat

SEQ ID NO: 194400 - DNA, 25 bp, Probe sequence
tacaattagtgtgaattactttgaa

SEQ ID NO: 194401 - DNA, 25 bp, Probe sequence
tactttgaagggattgttttttgtg

SEQ ID NO: 194402 - DNA, 25 bp, Probe sequence
tagtgtgaattactttgaagggatt

SEQ ID NO: 194403 - DNA, 25 bp, Probe sequence
ttagtgtgaattactttgaagggat

SEQ ID NO: 194404 - DNA, 25 bp, Probe sequence
ttacaattagtgtgaattactttga

SEQ ID NO: 194405 - DNA, 25 bp, Probe sequence
ttcaaagtatttacaattagtgtga

SEQ ID NO: 194406 - DNA, 25 bp, Probe sequence
attggtggtcaatattacttgcaaa

SEQ ID NO: 194407 - DNA, 25 bp, Probe sequence
attacttgcaaatacgaatgttaag

SEQ ID NO: 194408 - DNA, 25 bp, Probe sequence
atattacttgcaaatacgaatgtta

SEQ ID NO: 194409 - DNA, 25 bp, Probe sequence
atacttataaagtgtctaaatattg

SEQ ID NO: 194410 - DNA, 25 bp, Probe sequence
ataaagtgtctaaatattggtggtc

SEQ ID NO: 194411 - DNA, 25 bp, Probe sequence
ataatgaatggcatacttataaagt

SEQ ID NO: 194412 - DNA, 25 bp, Probe sequence
atgaatggcatacttataaagtgtc

SEQ ID NO: 194413 - DNA, 25 bp, Probe sequence
atggcatacttataaagtgtctaaa

SEQ ID NO: 194414 - DNA, 25 bp, Probe sequence
agtgtctaaatattggtggtcaata

SEQ ID NO: 194415 - DNA, 25 bp, Probe sequence
aaataatgaatggcatacttataaa

SEQ ID NO: 194416 - DNA, 25 bp, Probe sequence
aaagtgtctaaatattggtggtcaa

SEQ ID NO: 194417 - DNA, 25 bp, Probe sequence
aaaaataatgaatggcatacttata

SEQ ID NO: 194418 - DNA, 25 bp, Probe sequence
aagtgtctaaatattggtggtcaat

SEQ ID NO: 194419 - DNA, 25 bp, Probe sequence
aatggcatacttataaagtgtctaa

SEQ ID NO: 194420 - DNA, 25 bp, Probe sequence
aatgaatggcatacttataaagtgt

SEQ ID NO: 194421 - DNA, 25 bp, Probe sequence
aataatgaatggcatacttataaag

SEQ ID NO: 194422 - DNA, 25 bp, Probe sequence
aatattacttgcaaatacgaatgtt

SEQ ID NO: 194423 - DNA, 25 bp, Probe sequence
caatattacttgcaaatacgaatgt

SEQ ID NO: 194424 - DNA, 25 bp, Probe sequence
gcatacttataaagtgtctaaatat

SEQ ID NO: 194425 - DNA, 25 bp, Probe sequence
gaatggcatacttataaagtgtcta

SEQ ID NO: 194426 - DNA, 25 bp, Probe sequence
gtcaatattacttgcaaatacgaat

SEQ ID NO: 194427 - DNA, 25 bp, Probe sequence
gtggtcaatattacttgcaaatacg

SEQ ID NO: 194428 - DNA, 25 bp, Probe sequence
ggtggtcaatattacttgcaaatac

SEQ ID NO: 194429 - DNA, 25 bp, Probe sequence
ggtcaatattacttgcaaatacgaa

SEQ ID NO: 194430 - DNA, 25 bp, Probe sequence
ggcatacttataaagtgtctaaata

SEQ ID NO: 194431 - DNA, 25 bp, Probe sequence
tggcatacttataaagtgtctaaat

SEQ ID NO: 194432 - DNA, 25 bp, Probe sequence
tggtcaatattacttgcaaatacga

SEQ ID NO: 194433 - DNA, 25 bp, Probe sequence
tggtggtcaatattacttgcaaata

SEQ ID NO: 194434 - DNA, 25 bp, Probe sequence
tgaatggcatacttataaagtgtct

SEQ ID NO: 194435 - DNA, 25 bp, Probe sequence
tcaatattacttgcaaatacgaatg

SEQ ID NO: 194436 - DNA, 25 bp, Probe sequence
taatgaatggcatacttataaagtg

SEQ ID NO: 194437 - DNA, 25 bp, Probe sequence
taaagtgtctaaatattggtggtca

SEQ ID NO: 194438 - DNA, 25 bp, Probe sequence
tattacttgcaaatacgaatgttaa

SEQ ID NO: 194439 - DNA, 25 bp, Probe sequence
ttggtggtcaatattacttgcaaat

SEQ ID NO: 194440 - DNA, 25 bp, Probe sequence
attgtacttatgccttttctgtact

SEQ ID NO: 194441 - DNA, 25 bp, Probe sequence
agtatcgcaatactcatatttttta

SEQ ID NO: 194442 - DNA, 25 bp, Probe sequence
agcaattgtacttatgccttttctg

SEQ ID NO: 194443 - DNA, 25 bp, Probe sequence
actgtgctttacagtcttagcaatt

SEQ ID NO: 194444 - DNA, 25 bp, Probe sequence
aagtatcgcaatactcatatttttt

SEQ ID NO: 194445 - DNA, 25 bp, Probe sequence
aattgtacttatgccttttctgtac

SEQ ID NO: 194446 - DNA, 25 bp, Probe sequence
caattgtacttatgccttttctgta

SEQ ID NO: 194447 - DNA, 25 bp, Probe sequence
cttagcaattgtacttatgcctttt

SEQ ID NO: 194448 - DNA, 25 bp, Probe sequence
ctttacagtcttagcaattgtactt

SEQ ID NO: 194449 - DNA, 25 bp, Probe sequence
ctgtgctttacagtcttagcaattg

SEQ ID NO: 194450 - DNA, 25 bp, Probe sequence
gctttacagtcttagcaattgtact

SEQ ID NO: 194451 - DNA, 25 bp, Probe sequence
gcaattgtacttatgccttttctgt

SEQ ID NO: 194452 - DNA, 25 bp, Probe sequence
gtatcgcaatactcatattttttaa

SEQ ID NO: 194453 - DNA, 25 bp, Probe sequence
gtactgtgctttacagtcttagcaa

SEQ ID NO: 194454 - DNA, 25 bp, Probe sequence
gtacttatgccttttctgtacttca

SEQ ID NO: 194455 - DNA, 25 bp, Probe sequence
gtgctttacagtcttagcaattgta

SEQ ID NO: 194456 - DNA, 25 bp, Probe sequence
tgtgctttacagtcttagcaattgt

SEQ ID NO: 194457 - DNA, 25 bp, Probe sequence
tgtacttatgccttttctgtacttc

SEQ ID NO: 194458 - DNA, 25 bp, Probe sequence
tgctttacagtcttagcaattgtac

SEQ ID NO: 194459 - DNA, 25 bp, Probe sequence
tcgcaagtatcgcaatactcatatt

SEQ ID NO: 194460 - DNA, 25 bp, Probe sequence
tcttagcaattgtacttatgccttt

SEQ ID NO: 194461 - DNA, 25 bp, Probe sequence
tacttatgccttttctgtacttcac

SEQ ID NO: 194462 - DNA, 25 bp, Probe sequence
tactgtgctttacagtcttagcaat

SEQ ID NO: 194463 - DNA, 25 bp, Probe sequence
tagcaattgtacttatgccttttct

SEQ ID NO: 194464 - DNA, 25 bp, Probe sequence
tttacagtcttagcaattgtactta

SEQ ID NO: 194465 - DNA, 25 bp, Probe sequence
ttagcaattgtacttatgccttttc

SEQ ID NO: 194466 - DNA, 25 bp, Probe sequence
ttacagtcttagcaattgtacttat

SEQ ID NO: 194467 - DNA, 25 bp, Probe sequence
ttgtacttatgccttttctgtactt

SEQ ID NO: 194468 - DNA, 25 bp, Probe sequence
agtcaggggccccaacacagagaaa

SEQ ID NO: 194469 - DNA, 25 bp, Probe sequence
attggatttccaatttctacagaca

SEQ ID NO: 194470 - DNA, 25 bp, Probe sequence
atttccaatttctacagacaatgca

SEQ ID NO: 194471 - DNA, 25 bp, Probe sequence
agacaatgcaagttggggtgtgggc

SEQ ID NO: 194472 - DNA, 25 bp, Probe sequence
agaaattctacaggcaatgcgagtt

SEQ ID NO: 194473 - DNA, 25 bp, Probe sequence
agcttacgataagtcagcttacgat

SEQ ID NO: 194474 - DNA, 25 bp, Probe sequence
gcttttttcaactctagtcaggggc

SEQ ID NO: 194475 - DNA, 25 bp, Probe sequence
aagaaattctacaggcaatgcgagt

SEQ ID NO: 194476 - DNA, 25 bp, Probe sequence
caagcttttttcaactctagtcagg

SEQ ID NO: 194477 - DNA, 25 bp, Probe sequence
ctacagacaatgcaagttggggtgt

SEQ ID NO: 194478 - DNA, 25 bp, Probe sequence
cccaacacagaagcttacgataagt

SEQ ID NO: 194479 - DNA, 25 bp, Probe sequence
gccccaacacagagaatttcgaaaa

SEQ ID NO: 194480 - DNA, 25 bp, Probe sequence
gcttgcaacaagcttttttcaactc

SEQ ID NO: 194481 - DNA, 25 bp, Probe sequence
gcaacaagcttttttcaactctagt

SEQ ID NO: 194482 - DNA, 25 bp, Probe sequence
gcaatgcgagttggggtgtgggccc

SEQ ID NO: 194483 - DNA, 25 bp, Probe sequence
gaaaatgcgcttgcaacaagctttt

SEQ ID NO: 194484 - DNA, 25 bp, Probe sequence
gacaatgcaagttggggtgtgggcc

SEQ ID NO: 194485 - DNA, 25 bp, Probe sequence
gatttccaatttctacagacaatgc

SEQ ID NO: 194486 - DNA, 25 bp, Probe sequence
gttggggtgtgggccccaacacaga

SEQ ID NO: 194487 - DNA, 25 bp, Probe sequence
gtcagcttacgataatgtgcaagtt

SEQ ID NO: 194488 - DNA, 25 bp, Probe sequence
gtgggccccaacacagagaaattgg

SEQ ID NO: 194489 - DNA, 25 bp, Probe sequence
gggtgtgggccccaacacagagaaa

SEQ ID NO: 194490 - DNA, 25 bp, Probe sequence
ggtgtgggccccaacaaagagaatt

SEQ ID NO: 194491 - DNA, 25 bp, Probe sequence
ggggccccaacacagagaaattgga

SEQ ID NO: 194492 - DNA, 25 bp, Probe sequence
ggcaatgcgagttggggtgtgggcc

SEQ ID NO: 194493 - DNA, 25 bp, Probe sequence
tgggccccaacacagagaaattgga

SEQ ID NO: 194494 - DNA, 25 bp, Probe sequence
tgggccccaacaaagagaatttcga

SEQ ID NO: 194495 - DNA, 25 bp, Probe sequence
tgggccccaacacagagaatttcga

SEQ ID NO: 194496 - DNA, 25 bp, Probe sequence
tggggtgtgggccccaacacagaag

SEQ ID NO: 194497 - DNA, 25 bp, Probe sequence
tggggtgtgggccccaacacagaga

SEQ ID NO: 194498 - DNA, 25 bp, Probe sequence
tctagtcaggggccccaacacagag

SEQ ID NO: 194499 - DNA, 25 bp, Probe sequence
taatgtgcaagttggggtggtacaa

SEQ ID NO: 194500 - DNA, 25 bp, Probe sequence
tttccaatttctacagacaatgcaa

SEQ ID NO: 194501 - DNA, 25 bp, Probe sequence
ttggatttccaatttctacagacaa

SEQ ID NO: 194502 - DNA, 25 bp, Probe sequence
atacgcgagtatgatttaacacctt

SEQ ID NO: 194503 - DNA, 25 bp, Probe sequence
ataaaaatggtaagcctaggaatga

SEQ ID NO: 194504 - DNA, 25 bp, Probe sequence
atggtaagcctaggaatgaaattat

SEQ ID NO: 194505 - DNA, 25 bp, Probe sequence
aggaatgaaattatacgcgagtatg

SEQ ID NO: 194506 - DNA, 25 bp, Probe sequence
agtatgatttaacaccttccgcgtt

SEQ ID NO: 194507 - DNA, 25 bp, Probe sequence
agcctaggaatgaaattatacgcga

SEQ ID NO: 194508 - DNA, 25 bp, Probe sequence
acgcgagtatgatttaacaccttcc

SEQ ID NO: 194509 - DNA, 25 bp, Probe sequence
aaatggtaagcctaggaatgaaatt

SEQ ID NO: 194510 - DNA, 25 bp, Probe sequence
aagcctaggaatgaaattatacgcg

SEQ ID NO: 194511 - DNA, 25 bp, Probe sequence
aatggataaagcaacatcaaaacac

SEQ ID NO: 194512 - DNA, 25 bp, Probe sequence
aatggtaagcctaggaatgaaatta

SEQ ID NO: 194513 - DNA, 25 bp, Probe sequence
caccttccgcgttagggaaatggat

SEQ ID NO: 194514 - DNA, 25 bp, Probe sequence
ctaggaatgaaattatacgcgagta

SEQ ID NO: 194515 - DNA, 25 bp, Probe sequence
cgagtatgatttaacaccttccgcg

SEQ ID NO: 194516 - DNA, 25 bp, Probe sequence
cgcgttagggaaatggataaagcaa

SEQ ID NO: 194517 - DNA, 25 bp, Probe sequence
cgcgagtatgatttaacaccttccg

SEQ ID NO: 194518 - DNA, 25 bp, Probe sequence
ccgcgttagggaaatggataaagca

SEQ ID NO: 194519 - DNA, 25 bp, Probe sequence
cctaggaatgaaattatacgcgagt

SEQ ID NO: 194520 - DNA, 25 bp, Probe sequence
gcctaggaatgaaattatacgcgag

SEQ ID NO: 194521 - DNA, 25 bp, Probe sequence
gcgttagggaaatggataaagcaac

SEQ ID NO: 194522 - DNA, 25 bp, Probe sequence
gcgagtatgatttaacaccttccgc

SEQ ID NO: 194523 - DNA, 25 bp, Probe sequence
gagtatgatttaacaccttccgcgt

SEQ ID NO: 194524 - DNA, 25 bp, Probe sequence
gataaagcaacatcaaaacacaggt

SEQ ID NO: 194525 - DNA, 25 bp, Probe sequence
gtaagcctaggaatgaaattatacg

SEQ ID NO: 194526 - DNA, 25 bp, Probe sequence
gggaaatggataaagcaacatcaaa

SEQ ID NO: 194527 - DNA, 25 bp, Probe sequence
ggtaagcctaggaatgaaattatac

SEQ ID NO: 194528 - DNA, 25 bp, Probe sequence
ggataaagcaacatcaaaacacagg

SEQ ID NO: 194529 - DNA, 25 bp, Probe sequence
ggaatgaaattatacgcgagtatga

SEQ ID NO: 194530 - DNA, 25 bp, Probe sequence
taacaccttccgcgttagggaaatg

SEQ ID NO: 194531 - DNA, 25 bp, Probe sequence
tccgcgttagggaaatggataaagc

SEQ ID NO: 194532 - DNA, 25 bp, Probe sequence
taagcctaggaatgaaattatacgc

SEQ ID NO: 194533 - DNA, 25 bp, Probe sequence
tacgcgagtatgatttaacaccttc

SEQ ID NO: 194534 - DNA, 25 bp, Probe sequence
taggaatgaaattatacgcgagtat

SEQ ID NO: 194535 - DNA, 25 bp, Probe sequence
tatacgcgagtatgatttaacacct

SEQ ID NO: 194536 - DNA, 25 bp, Probe sequence
attagaaatggcgagtccggaagtg

SEQ ID NO: 194537 - DNA, 25 bp, Probe sequence
attaactagcggtcaagttgaaagt

SEQ ID NO: 194538 - DNA, 25 bp, Probe sequence
aattagaaatggcgagtccggaagt

SEQ ID NO: 194539 - DNA, 25 bp, Probe sequence
atggtggtgagaacgtgagcgagaa

SEQ ID NO: 194540 - DNA, 25 bp, Probe sequence
atggcgagtccggaagtgatcaaaa

SEQ ID NO: 194541 - DNA, 25 bp, Probe sequence
agaaattagaaatggcgagtccgga

SEQ ID NO: 194542 - DNA, 25 bp, Probe sequence
agaaatggcgagtccggaagtgatc

SEQ ID NO: 194543 - DNA, 25 bp, Probe sequence
acgtgagcgagaataaaggagaaat

SEQ ID NO: 194544 - DNA, 25 bp, Probe sequence
aaattagaaatggcgagtccggaag

SEQ ID NO: 194545 - DNA, 25 bp, Probe sequence
aaatggcgagtccggaagtgatcaa

SEQ ID NO: 194546 - DNA, 25 bp, Probe sequence
aatggtggtgagaacgtgagcgaga

SEQ ID NO: 194547 - DNA, 25 bp, Probe sequence
aatggcgagtccggaagtgatcaaa

SEQ ID NO: 194548 - DNA, 25 bp, Probe sequence
caaaaattaactagcggtcaagttg

SEQ ID NO: 194549 - DNA, 25 bp, Probe sequence
cgagtccggaagtgatcaaaaatta

SEQ ID NO: 194550 - DNA, 25 bp, Probe sequence
gcgagtccggaagtgatcaaaaatt

SEQ ID NO: 194551 - DNA, 25 bp, Probe sequence
gcggtcaagttgaaagtttaatcca

SEQ ID NO: 194552 - DNA, 25 bp, Probe sequence
gaatggtggtgagaacgtgagcgag

SEQ ID NO: 194553 - DNA, 25 bp, Probe sequence
gaacgtgagcgagaataaaggagaa

SEQ ID NO: 194554 - DNA, 25 bp, Probe sequence
gaaattagaaatggcgagtccggaa

SEQ ID NO: 194555 - DNA, 25 bp, Probe sequence
gaaatggcgagtccggaagtgatca

SEQ ID NO: 194556 - DNA, 25 bp, Probe sequence
gagtccggaagtgatcaaaaattaa

SEQ ID NO: 194557 - DNA, 25 bp, Probe sequence
gagaaattagaaatggcgagtccgg

SEQ ID NO: 194558 - DNA, 25 bp, Probe sequence
gatcaaaaattaactagcggtcaag

SEQ ID NO: 194559 - DNA, 25 bp, Probe sequence
gtggtgagaacgtgagcgagaataa

SEQ ID NO: 194560 - DNA, 25 bp, Probe sequence
ggtggtgagaacgtgagcgagaata

SEQ ID NO: 194561 - DNA, 25 bp, Probe sequence
ggtgagaacgtgagcgagaataaag

SEQ ID NO: 194562 - DNA, 25 bp, Probe sequence
ggtcaagttgaaagtttaatccaag

SEQ ID NO: 194563 - DNA, 25 bp, Probe sequence
ggcgagtccggaagtgatcaaaaat

SEQ ID NO: 194564 - DNA, 25 bp, Probe sequence
tggcgagtccggaagtgatcaaaaa

SEQ ID NO: 194565 - DNA, 25 bp, Probe sequence
tggtggtgagaacgtgagcgagaat

SEQ ID NO: 194566 - DNA, 25 bp, Probe sequence
tgaaagtttaatccaagaacctaag

SEQ ID NO: 194567 - DNA, 25 bp, Probe sequence
taactagcggtcaagttgaaagttt

SEQ ID NO: 194568 - DNA, 25 bp, Probe sequence
tagaaatggcgagtccggaagtgat

SEQ ID NO: 194569 - DNA, 25 bp, Probe sequence
ttagaaatggcgagtccggaagtga

SEQ ID NO: 194570 - DNA, 25 bp, Probe sequence
aaccttacagcgagaagggaaagag

SEQ ID NO: 194571 - DNA, 25 bp, Probe sequence
accttacagcgagaagggaaagagg

SEQ ID NO: 194572 - DNA, 25 bp, Probe sequence
attgaaccttacagcgagaagggaa

SEQ ID NO: 194573 - DNA, 25 bp, Probe sequence
aggattgaaccttacagcgagaagg

SEQ ID NO: 194574 - DNA, 25 bp, Probe sequence
acaggattgaaccttacagcgagaa

SEQ ID NO: 194575 - DNA, 25 bp, Probe sequence
acagcgagaagggaaagaggtgttg

SEQ ID NO: 194576 - DNA, 25 bp, Probe sequence
acaaacaggattgaaccttacagcg

SEQ ID NO: 194577 - DNA, 25 bp, Probe sequence
aaacaggattgaaccttacagcgag

SEQ ID NO: 194578 - DNA, 25 bp, Probe sequence
aaacaaacaggattgaaccttacag

SEQ ID NO: 194579 - DNA, 25 bp, Probe sequence
aacaaacaggattgaaccttacagc

SEQ ID NO: 194580 - DNA, 25 bp, Probe sequence
aacaggattgaaccttacagcgaga

SEQ ID NO: 194581 - DNA, 25 bp, Probe sequence
caaacaggattgaaccttacagcga

SEQ ID NO: 194582 - DNA, 25 bp, Probe sequence
cttacagcgagaagggaaagaggtg

SEQ ID NO: 194583 - DNA, 25 bp, Probe sequence
cagcgagaagggaaagaggtgttgt

SEQ ID NO: 194584 - DNA, 25 bp, Probe sequence
caggattgaaccttacagcgagaag

SEQ ID NO: 194585 - DNA, 25 bp, Probe sequence
gaaccttacagcgagaagggaaaga

SEQ ID NO: 194586 - DNA, 25 bp, Probe sequence
gaaacaaacaggattgaaccttaca

SEQ ID NO: 194587 - DNA, 25 bp, Probe sequence
gattgaaccttacagcgagaaggga

SEQ ID NO: 194588 - DNA, 25 bp, Probe sequence
ggattgaaccttacagcgagaaggg

SEQ ID NO: 194589 - DNA, 25 bp, Probe sequence
tggaaacaaacaggattgaacctta

SEQ ID NO: 194590 - DNA, 25 bp, Probe sequence
tgaaccttacagcgagaagggaaag

SEQ ID NO: 194591 - DNA, 25 bp, Probe sequence
tacagcgagaagggaaagaggtgtt

SEQ ID NO: 194592 - DNA, 25 bp, Probe sequence
ttacagcgagaagggaaagaggtgt

SEQ ID NO: 194593 - DNA, 25 bp, Probe sequence
ttggaaacaaacaggattgaacctt

SEQ ID NO: 194594 - DNA, 25 bp, Probe sequence
ttgaaccttacagcgagaagggaaa

SEQ ID NO: 194595 - DNA, 25 bp, Probe sequence
attagtgtgaattactttgaaggga

SEQ ID NO: 194596 - DNA, 25 bp, Probe sequence
atatcattttataccttttataagt

SEQ ID NO: 194597 - DNA, 25 bp, Probe sequence
atacaaacaacatcctttcaaagta

SEQ ID NO: 194598 - DNA, 25 bp, Probe sequence
atcattttataccttttataagttg

SEQ ID NO: 194599 - DNA, 25 bp, Probe sequence
atggaatacaaacaacatcctttca

SEQ ID NO: 194600 - DNA, 25 bp, Probe sequence
agtgctgaggtttatatcattttat

SEQ ID NO: 194601 - DNA, 25 bp, Probe sequence
acaacatcctttcaaagtatttaca

SEQ ID NO: 194602 - DNA, 25 bp, Probe sequence
acaaacaacatcctttcaaagtatt

SEQ ID NO: 194603 - DNA, 25 bp, Probe sequence
aaatttatgaagtgctgaggtttat

SEQ ID NO: 194604 - DNA, 25 bp, Probe sequence
aaaatttatgaagtgctgaggttta

SEQ ID NO: 194605 - DNA, 25 bp, Probe sequence
aacatcctttcaaagtatttacaat

SEQ ID NO: 194606 - DNA, 25 bp, Probe sequence
aagtgctgaggtttatatcatttta

SEQ ID NO: 194607 - DNA, 25 bp, Probe sequence
aatacaaacaacatcctttcaaagt

SEQ ID NO: 194608 - DNA, 25 bp, Probe sequence
aatttatgaagtgctgaggtttata

SEQ ID NO: 194609 - DNA, 25 bp, Probe sequence
caaacaacatcctttcaaagtattt

SEQ ID NO: 194610 - DNA, 25 bp, Probe sequence
catcctttcaaagtatttacaatta

SEQ ID NO: 194611 - DNA, 25 bp, Probe sequence
gctgaggtttatatcattttatacc

SEQ ID NO: 194612 - DNA, 25 bp, Probe sequence
gaatacaaacaacatcctttcaaag

SEQ ID NO: 194613 - DNA, 25 bp, Probe sequence
gaagtgctgaggtttatatcatttt

SEQ ID NO: 194614 - DNA, 25 bp, Probe sequence
gaggtttatatcattttataccttt

SEQ ID NO: 194615 - DNA, 25 bp, Probe sequence
gtttatatcattttataccttttat

SEQ ID NO: 194616 - DNA, 25 bp, Probe sequence
gtatttacaattagtgtgaattact

SEQ ID NO: 194617 - DNA, 25 bp, Probe sequence
gtgctgaggtttatatcattttata

SEQ ID NO: 194618 - DNA, 25 bp, Probe sequence
gtgtgaattactttgaagggattgt

SEQ ID NO: 194619 - DNA, 25 bp, Probe sequence
gtggaaaaatttatgaagtgctgag

SEQ ID NO: 194620 - DNA, 25 bp, Probe sequence
ggaatacaaacaacatcctttcaaa

SEQ ID NO: 194621 - DNA, 25 bp, Probe sequence
ggaaaaatttatgaagtgctgaggt

SEQ ID NO: 194622 - DNA, 25 bp, Probe sequence
tggaatacaaacaacatcctttcaa

SEQ ID NO: 194623 - DNA, 25 bp, Probe sequence
tgaagtgctgaggtttatatcattt

SEQ ID NO: 194624 - DNA, 25 bp, Probe sequence
tacaaacaacatcctttcaaagtat

SEQ ID NO: 194625 - DNA, 25 bp, Probe sequence
tactttgaagggattgttttttgtg

SEQ ID NO: 194626 - DNA, 25 bp, Probe sequence
tttatgaagtgctgaggtttatatc

SEQ ID NO: 194627 - DNA, 25 bp, Probe sequence
ttatatcattttataccttttataa

SEQ ID NO: 194628 - DNA, 25 bp, Probe sequence
ttatgaagtgctgaggtttatatca

SEQ ID NO: 194629 - DNA, 25 bp, Probe sequence
atcactttatctttatctgtgtaga

SEQ ID NO: 194630 - DNA, 25 bp, Probe sequence
atctttatctgtgtagaaaggatgc

SEQ ID NO: 194631 - DNA, 25 bp, Probe sequence
atccttagttgttataaaagcgcaa

SEQ ID NO: 194632 - DNA, 25 bp, Probe sequence
atggcatcactttatctttatctgt

SEQ ID NO: 194633 - DNA, 25 bp, Probe sequence
agatgaagattttgttgaaggtatg

SEQ ID NO: 194634 - DNA, 25 bp, Probe sequence
actttatctttatctgtgtagaaag

SEQ ID NO: 194635 - DNA, 25 bp, Probe sequence
aaatggcatcactttatctttatct

SEQ ID NO: 194636 - DNA, 25 bp, Probe sequence
aaagcgcaaaaaatggcatcacttt

SEQ ID NO: 194637 - DNA, 25 bp, Probe sequence
aaaaatggcatcactttatctttat

SEQ ID NO: 194638 - DNA, 25 bp, Probe sequence
aaaaaatggcatcactttatcttta

SEQ ID NO: 194639 - DNA, 25 bp, Probe sequence
aaaagcgcaaaaaatggcatcactt

SEQ ID NO: 194640 - DNA, 25 bp, Probe sequence
aaaatggcatcactttatctttatc

SEQ ID NO: 194641 - DNA, 25 bp, Probe sequence
aagcgcaaaaaatggcatcacttta

SEQ ID NO: 194642 - DNA, 25 bp, Probe sequence
aatggcatcactttatctttatctg

SEQ ID NO: 194643 - DNA, 25 bp, Probe sequence
caaaaaatggcatcactttatcttt

SEQ ID NO: 194644 - DNA, 25 bp, Probe sequence
cactttatctttatctgtgtagaaa

SEQ ID NO: 194645 - DNA, 25 bp, Probe sequence
catcactttatctttatctgtgtag

SEQ ID NO: 194646 - DNA, 25 bp, Probe sequence
ctttatctttatctgtgtagaaagg

SEQ ID NO: 194647 - DNA, 25 bp, Probe sequence
gcatcactttatctttatctgtgta

SEQ ID NO: 194648 - DNA, 25 bp, Probe sequence
gatgaagattttgttgaaggtatgt

SEQ ID NO: 194649 - DNA, 25 bp, Probe sequence
gataggtttagatgaagattttgtt

SEQ ID NO: 194650 - DNA, 25 bp, Probe sequence
gtttagatgaagattttgttgaagg

SEQ ID NO: 194651 - DNA, 25 bp, Probe sequence
ggtttagatgaagattttgttgaag

SEQ ID NO: 194652 - DNA, 25 bp, Probe sequence
ggcatcactttatctttatctgtgt

SEQ ID NO: 194653 - DNA, 25 bp, Probe sequence
tggcatcactttatctttatctgtg

SEQ ID NO: 194654 - DNA, 25 bp, Probe sequence
tccttagttgttataaaagcgcaaa

SEQ ID NO: 194655 - DNA, 25 bp, Probe sequence
tcactttatctttatctgtgtagaa

SEQ ID NO: 194656 - DNA, 25 bp, Probe sequence
tagatgaagattttgttgaaggtat

SEQ ID NO: 194657 - DNA, 25 bp, Probe sequence
taggtttagatgaagattttgttga

SEQ ID NO: 194658 - DNA, 25 bp, Probe sequence
tatccttagttgttataaaagcgca

SEQ ID NO: 194659 - DNA, 25 bp, Probe sequence
tttagatgaagattttgttgaaggt

SEQ ID NO: 194660 - DNA, 25 bp, Probe sequence
tttatctgtgtagaaaggatgctat

SEQ ID NO: 194661 - DNA, 25 bp, Probe sequence
ttatctgtgtagaaaggatgctatt

SEQ ID NO: 194662 - DNA, 25 bp, Probe sequence
ttatctttatctgtgtagaaaggat

SEQ ID NO: 194663 - DNA, 25 bp, Probe sequence
attggaaaaccgtcgatcaaataat

SEQ ID NO: 194664 - DNA, 25 bp, Probe sequence
attatgaagcagaaccaccgttgtt

SEQ ID NO: 194665 - DNA, 25 bp, Probe sequence
atagaatttttcatagccatttttt

SEQ ID NO: 194666 - DNA, 25 bp, Probe sequence
atagccatttttttaaaagagcaag

SEQ ID NO: 194667 - DNA, 25 bp, Probe sequence
atgaagcagaaccaccgttgttcct

SEQ ID NO: 194668 - DNA, 25 bp, Probe sequence
aggatagaatttttcatagccattt

SEQ ID NO: 194669 - DNA, 25 bp, Probe sequence
agtgattatgaagcagaaccaccgt

SEQ ID NO: 194670 - DNA, 25 bp, Probe sequence
accgtcgatcaaataattaaaaatg

SEQ ID NO: 194671 - DNA, 25 bp, Probe sequence
aaagtgattatgaagcagaaccacc

SEQ ID NO: 194672 - DNA, 25 bp, Probe sequence
aagtgattatgaagcagaaccaccg

SEQ ID NO: 194673 - DNA, 25 bp, Probe sequence
catagccatttttttaaaagagcaa

SEQ ID NO: 194674 - DNA, 25 bp, Probe sequence
gccatttttttaaaagagcaagaag

SEQ ID NO: 194675 - DNA, 25 bp, Probe sequence
gaggatagaatttttcatagccatt

SEQ ID NO: 194676 - DNA, 25 bp, Probe sequence
gatagaatttttcatagccattttt

SEQ ID NO: 194677 - DNA, 25 bp, Probe sequence
gattatgaagcagaaccaccgttgt

SEQ ID NO: 194678 - DNA, 25 bp, Probe sequence
gttcctcttttcgggatcgttggat

SEQ ID NO: 194679 - DNA, 25 bp, Probe sequence
gtgattatgaagcagaaccaccgtt

SEQ ID NO: 194680 - DNA, 25 bp, Probe sequence
ggatagaatttttcatagccatttt

SEQ ID NO: 194681 - DNA, 25 bp, Probe sequence
ggctatgaagaaatctatgaggata

SEQ ID NO: 194682 - DNA, 25 bp, Probe sequence
tggaaaaccgtcgatcaaataatta

SEQ ID NO: 194683 - DNA, 25 bp, Probe sequence
tgattatgaagcagaaccaccgttg

SEQ ID NO: 194684 - DNA, 25 bp, Probe sequence
tgttcctcttttcgggatcgttgga

SEQ ID NO: 194685 - DNA, 25 bp, Probe sequence
tgaggatagaatttttcatagccat

SEQ ID NO: 194686 - DNA, 25 bp, Probe sequence
tgaagcagaaccaccgttgttcctc

SEQ ID NO: 194687 - DNA, 25 bp, Probe sequence
tcatagccatttttttaaaagagca

SEQ ID NO: 194688 - DNA, 25 bp, Probe sequence
taaaagtgattatgaagcagaacca

SEQ ID NO: 194689 - DNA, 25 bp, Probe sequence
tagccatttttttaaaagagcaaga

SEQ ID NO: 194690 - DNA, 25 bp, Probe sequence
tagaatttttcatagccattttttt

SEQ ID NO: 194691 - DNA, 25 bp, Probe sequence
ttatgaagcagaaccaccgttgttc

SEQ ID NO: 194692 - DNA, 25 bp, Probe sequence
tatgaagcagaaccaccgttgttcc

SEQ ID NO: 194693 - DNA, 25 bp, Probe sequence
tttcatagccatttttttaaaagag

SEQ ID NO: 194694 - DNA, 25 bp, Probe sequence
ttcatagccatttttttaaaagagc

SEQ ID NO: 194695 - DNA, 25 bp, Probe sequence
ttggaaaaccgtcgatcaaataatt

SEQ ID NO: 194696 - DNA, 25 bp, Probe sequence
ttggctatgaagaaatctatgagga

SEQ ID NO: 194697 - DNA, 25 bp, Probe sequence
attgtgcaacgagactacgattagt

SEQ ID NO: 194698 - DNA, 25 bp, Probe sequence
attataagcaatccgcagaagaaat

SEQ ID NO: 194699 - DNA, 25 bp, Probe sequence
ataagcaatccgcagaagaaatttt

SEQ ID NO: 194700 - DNA, 25 bp, Probe sequence
atgaattataagcaatccgcagaag

SEQ ID NO: 194701 - DNA, 25 bp, Probe sequence
atgcaatggcacattgtgcaacgag

SEQ ID NO: 194702 - DNA, 25 bp, Probe sequence
acgcgataggcggagaagagaattt

SEQ ID NO: 194703 - DNA, 25 bp, Probe sequence
acgagactacgattagttttaaatg

SEQ ID NO: 194704 - DNA, 25 bp, Probe sequence
acattgtgcaacgagactacgatta

SEQ ID NO: 194705 - DNA, 25 bp, Probe sequence
aagcaatccgcagaagaaattttga

SEQ ID NO: 194706 - DNA, 25 bp, Probe sequence
aagaaattttgaacgcgataggcgg

SEQ ID NO: 194707 - DNA, 25 bp, Probe sequence
aatccgcagaagaaattttgaacgc

SEQ ID NO: 194708 - DNA, 25 bp, Probe sequence
aattttgaacgcgataggcggagaa

SEQ ID NO: 194709 - DNA, 25 bp, Probe sequence
cacattgtgcaacgagactacgatt

SEQ ID NO: 194710 - DNA, 25 bp, Probe sequence
cattgtgcaacgagactacgattag

SEQ ID NO: 194711 - DNA, 25 bp, Probe sequence
gcgataggcggagaagagaatttag

SEQ ID NO: 194712 - DNA, 25 bp, Probe sequence
gcacattgtgcaacgagactacgat

SEQ ID NO: 194713 - DNA, 25 bp, Probe sequence
gcaacgagactacgattagttttaa

SEQ ID NO: 194714 - DNA, 25 bp, Probe sequence
gcaatggcacattgtgcaacgagac

SEQ ID NO: 194715 - DNA, 25 bp, Probe sequence
gcaatccgcagaagaaattttgaac

SEQ ID NO: 194716 - DNA, 25 bp, Probe sequence
gaattataagcaatccgcagaagaa

SEQ ID NO: 194717 - DNA, 25 bp, Probe sequence
gaatttagatgcaatggcacattgt

SEQ ID NO: 194718 - DNA, 25 bp, Probe sequence
gaagaaattttgaacgcgataggcg

SEQ ID NO: 194719 - DNA, 25 bp, Probe sequence
gaagagaatttagatgcaatggcac

SEQ ID NO: 194720 - DNA, 25 bp, Probe sequence
gaaattttgaacgcgataggcggag

SEQ ID NO: 194721 - DNA, 25 bp, Probe sequence
gactacgattagttttaaatgatga

SEQ ID NO: 194722 - DNA, 25 bp, Probe sequence
gagaatttagatgcaatggcacatt

SEQ ID NO: 194723 - DNA, 25 bp, Probe sequence
gatgcaatggcacattgtgcaacga

SEQ ID NO: 194724 - DNA, 25 bp, Probe sequence
gtgcaacgagactacgattagtttt

SEQ ID NO: 194725 - DNA, 25 bp, Probe sequence
ggcacattgtgcaacgagactacga

SEQ ID NO: 194726 - DNA, 25 bp, Probe sequence
ggcggagaagagaatttagatgcaa

SEQ ID NO: 194727 - DNA, 25 bp, Probe sequence
tggcacattgtgcaacgagactacg

SEQ ID NO: 194728 - DNA, 25 bp, Probe sequence
tagatgcaatggcacattgtgcaac

SEQ ID NO: 194729 - DNA, 25 bp, Probe sequence
ttttgaacgcgataggcggagaaga

SEQ ID NO: 194730 - DNA, 25 bp, Probe sequence
ttgtgcaacgagactacgattagtt

SEQ ID NO: 194731 - DNA, 25 bp, Probe sequence
attgttattatttatcgggagaaag

SEQ ID NO: 194732 - DNA, 25 bp, Probe sequence
attgtttttattaagcctaccattg

SEQ ID NO: 194733 - DNA, 25 bp, Probe sequence
attaagcctaccattgttattattt

SEQ ID NO: 194734 - DNA, 25 bp, Probe sequence
atttatcgggagaaagacacatttt

SEQ ID NO: 194735 - DNA, 25 bp, Probe sequence
attatttatcgggagaaagacacat

SEQ ID NO: 194736 - DNA, 25 bp, Probe sequence
atattgtttttattaagcctaccat

SEQ ID NO: 194737 - DNA, 25 bp, Probe sequence
atcgggagaaagacacatttttatt

SEQ ID NO: 194738 - DNA, 25 bp, Probe sequence
agcctaccattgttattatttatcg

SEQ ID NO: 194739 - DNA, 25 bp, Probe sequence
accattgttattatttatcgggaga

SEQ ID NO: 194740 - DNA, 25 bp, Probe sequence
aaagacacatttttattgtttagat

SEQ ID NO: 194741 - DNA, 25 bp, Probe sequence
aagcctaccattgttattatttatc

SEQ ID NO: 194742 - DNA, 25 bp, Probe sequence
aagacacatttttattgtttagata

SEQ ID NO: 194743 - DNA, 25 bp, Probe sequence
ctaccattgttattatttatcggga

SEQ ID NO: 194744 - DNA, 25 bp, Probe sequence
cctaccattgttattatttatcggg

SEQ ID NO: 194745 - DNA, 25 bp, Probe sequence
ccattgttattatttatcgggagaa

SEQ ID NO: 194746 - DNA, 25 bp, Probe sequence
gcctaccattgttattatttatcgg

SEQ ID NO: 194747 - DNA, 25 bp, Probe sequence
gaaagacacatttttattgtttaga

SEQ ID NO: 194748 - DNA, 25 bp, Probe sequence
gacacatttttattgtttagataaa

SEQ ID NO: 194749 - DNA, 25 bp, Probe sequence
gacagaacaaatgtatttaatattg

SEQ ID NO: 194750 - DNA, 25 bp, Probe sequence
gagaaagacacatttttattgttta

SEQ ID NO: 194751 - DNA, 25 bp, Probe sequence
gggagaaagacacatttttattgtt

SEQ ID NO: 194752 - DNA, 25 bp, Probe sequence
tgtttttattaagcctaccattgtt

SEQ ID NO: 194753 - DNA, 25 bp, Probe sequence
tcgggagaaagacacatttttattg

SEQ ID NO: 194754 - DNA, 25 bp, Probe sequence
taagcctaccattgttattatttat

SEQ ID NO: 194755 - DNA, 25 bp, Probe sequence
taccattgttattatttatcgggag

SEQ ID NO: 194756 - DNA, 25 bp, Probe sequence
tattgtttttattaagcctaccatt

SEQ ID NO: 194757 - DNA, 25 bp, Probe sequence
tattaagcctaccattgttattatt

SEQ ID NO: 194758 - DNA, 25 bp, Probe sequence
tttattaagcctaccattgttatta

SEQ ID NO: 194759 - DNA, 25 bp, Probe sequence
tttttattaagcctaccattgttat

SEQ ID NO: 194760 - DNA, 25 bp, Probe sequence
ttttattaagcctaccattgttatt

SEQ ID NO: 194761 - DNA, 25 bp, Probe sequence
ttgtttttattaagcctaccattgt

SEQ ID NO: 194762 - DNA, 25 bp, Probe sequence
ttattaagcctaccattgttattat

SEQ ID NO: 194763 - DNA, 25 bp, Probe sequence
ttatcgggagaaagacacattttta

SEQ ID NO: 194764 - DNA, 25 bp, Probe sequence
ttaagcctaccattgttattattta

SEQ ID NO: 194765 - DNA, 25 bp, Probe sequence
attaaagcgcgacaaggtagaagat

SEQ ID NO: 194766 - DNA, 25 bp, Probe sequence
atagggactatcttcagtacgattg

SEQ ID NO: 194767 - DNA, 25 bp, Probe sequence
atgtggattctaggtttgataggga

SEQ ID NO: 194768 - DNA, 25 bp, Probe sequence
agggactatcttcagtacgattgtc

SEQ ID NO: 194769 - DNA, 25 bp, Probe sequence
agaattaaagcgcgacaaggtagaa

SEQ ID NO: 194770 - DNA, 25 bp, Probe sequence
agcgcgacaaggtagaagatgaaaa

SEQ ID NO: 194771 - DNA, 25 bp, Probe sequence
actatcttcagtacgattgtcatag

SEQ ID NO: 194772 - DNA, 25 bp, Probe sequence
aaagcgcgacaaggtagaagatgaa

SEQ ID NO: 194773 - DNA, 25 bp, Probe sequence
aaaaatgtggattctaggtttgata

SEQ ID NO: 194774 - DNA, 25 bp, Probe sequence
cagtacgattgtcatagctttacta

SEQ ID NO: 194775 - DNA, 25 bp, Probe sequence
catagctttactaagaactgttttt

SEQ ID NO: 194776 - DNA, 25 bp, Probe sequence
cttcagtacgattgtcatagcttta

SEQ ID NO: 194777 - DNA, 25 bp, Probe sequence
gaatagaagatagtcttagagcgca

SEQ ID NO: 194778 - DNA, 25 bp, Probe sequence
gaatgccaagaatattagagacata

SEQ ID NO: 194779 - DNA, 25 bp, Probe sequence
gaagatagtcttagagcgcaagaaa

SEQ ID NO: 194780 - DNA, 25 bp, Probe sequence
gaagaattaaagcgcgacaaggtag

SEQ ID NO: 194781 - DNA, 25 bp, Probe sequence
gactatcttcagtacgattgtcata

SEQ ID NO: 194782 - DNA, 25 bp, Probe sequence
gatagggactatcttcagtacgatt

SEQ ID NO: 194783 - DNA, 25 bp, Probe sequence
gatagtcttagagcgcaagaaaaga

SEQ ID NO: 194784 - DNA, 25 bp, Probe sequence
gattctaggtttgatagggactatc

SEQ ID NO: 194785 - DNA, 25 bp, Probe sequence
gattgtcatagctttactaagaact

SEQ ID NO: 194786 - DNA, 25 bp, Probe sequence
gtacgattgtcatagctttactaag

SEQ ID NO: 194787 - DNA, 25 bp, Probe sequence
gtcatagctttactaagaactgttt

SEQ ID NO: 194788 - DNA, 25 bp, Probe sequence
gggactatcttcagtacgattgtca

SEQ ID NO: 194789 - DNA, 25 bp, Probe sequence
ggactatcttcagtacgattgtcat

SEQ ID NO: 194790 - DNA, 25 bp, Probe sequence
tggattctaggtttgatagggacta

SEQ ID NO: 194791 - DNA, 25 bp, Probe sequence
tcttcagtacgattgtcatagcttt

SEQ ID NO: 194792 - DNA, 25 bp, Probe sequence
tagctttactaagaactgtttttgg

SEQ ID NO: 194793 - DNA, 25 bp, Probe sequence
tacgattgtcatagctttactaaga

SEQ ID NO: 194794 - DNA, 25 bp, Probe sequence
tagagcgcaagaaaagatttatgac

SEQ ID NO: 194795 - DNA, 25 bp, Probe sequence
tagggactatcttcagtacgattgt

SEQ ID NO: 194796 - DNA, 25 bp, Probe sequence
tatcttcagtacgattgtcatagct

SEQ ID NO: 194797 - DNA, 25 bp, Probe sequence
ttcagtacgattgtcatagctttac

SEQ ID NO: 194798 - DNA, 25 bp, Probe sequence
ttgtcatagctttactaagaactgt

SEQ ID NO: 194799 - DNA, 25 bp, Probe sequence
atgactacgctagctgatgtaaaaa

SEQ ID NO: 194800 - DNA, 25 bp, Probe sequence
aggattggtgctgaaggtatgacat

SEQ ID NO: 194801 - DNA, 25 bp, Probe sequence
agttgcagttaaacgctacaacagg

SEQ ID NO: 194802 - DNA, 25 bp, Probe sequence
agccagttgttatcaatgttaccta

SEQ ID NO: 194803 - DNA, 25 bp, Probe sequence
acgctacaacaggattggtgctgaa

SEQ ID NO: 194804 - DNA, 25 bp, Probe sequence
acaacaggattggtgctgaaggtat

SEQ ID NO: 194805 - DNA, 25 bp, Probe sequence
aaagttgtgaaagccagttgttatc

SEQ ID NO: 194806 - DNA, 25 bp, Probe sequence
aaagccagttgttatcaatgttacc

SEQ ID NO: 194807 - DNA, 25 bp, Probe sequence
aaaagttgtgaaagccagttgttat

SEQ ID NO: 194808 - DNA, 25 bp, Probe sequence
aacgctacaacaggattggtgctga

SEQ ID NO: 194809 - DNA, 25 bp, Probe sequence
aagccagttgttatcaatgttacct

SEQ ID NO: 194810 - DNA, 25 bp, Probe sequence
aagaagttgcagttaaacgctacaa

SEQ ID NO: 194811 - DNA, 25 bp, Probe sequence
caatgttacctattgaagttgaaca

SEQ ID NO: 194812 - DNA, 25 bp, Probe sequence
ccagttgttatcaatgttacctatt

SEQ ID NO: 194813 - DNA, 25 bp, Probe sequence
gccagttgttatcaatgttacctat

SEQ ID NO: 194814 - DNA, 25 bp, Probe sequence
gctgatgtaaaaaaacgtattggtc

SEQ ID NO: 194815 - DNA, 25 bp, Probe sequence
gctacaacaggattggtgctgaagg

SEQ ID NO: 194816 - DNA, 25 bp, Probe sequence
gcagttaaacgctacaacaggattg

SEQ ID NO: 194817 - DNA, 25 bp, Probe sequence
gaagttgcagttaaacgctacaaca

SEQ ID NO: 194818 - DNA, 25 bp, Probe sequence
gaaaagcaagatgaacaattagaag

SEQ ID NO: 194819 - DNA, 25 bp, Probe sequence
gaaagccagttgttatcaatgttac

SEQ ID NO: 194820 - DNA, 25 bp, Probe sequence
gactacgctagctgatgtaaaaaaa

SEQ ID NO: 194821 - DNA, 25 bp, Probe sequence
gattggtgctgaaggtatgacatca

SEQ ID NO: 194822 - DNA, 25 bp, Probe sequence
gttgtgaaagccagttgttatcaat

SEQ ID NO: 194823 - DNA, 25 bp, Probe sequence
gttgttatcaatgttacctattgaa

SEQ ID NO: 194824 - DNA, 25 bp, Probe sequence
gttaaacgctacaacaggattggtg

SEQ ID NO: 194825 - DNA, 25 bp, Probe sequence
gttacatgattaaagaagttgcagt

SEQ ID NO: 194826 - DNA, 25 bp, Probe sequence
gttacctattgaagttgaacaaata

SEQ ID NO: 194827 - DNA, 25 bp, Probe sequence
gtattggtcttaaagatgaaaagca

SEQ ID NO: 194828 - DNA, 25 bp, Probe sequence
gtgaaagccagttgttatcaatgtt

SEQ ID NO: 194829 - DNA, 25 bp, Probe sequence
tgaagttgaacaaataccggaaagg

SEQ ID NO: 194830 - DNA, 25 bp, Probe sequence
taaacgctacaacaggattggtgct

SEQ ID NO: 194831 - DNA, 25 bp, Probe sequence
taccggaaaggtttagttacatgat

SEQ ID NO: 194832 - DNA, 25 bp, Probe sequence
ttgcagttaaacgctacaacaggat

SEQ ID NO: 194833 - DNA, 25 bp, Probe sequence
agtacggagattttgcaggcgttac

SEQ ID NO: 194834 - DNA, 25 bp, Probe sequence
acgtgttcacgcacaatcaagcatt

SEQ ID NO: 194835 - DNA, 25 bp, Probe sequence
acagcttatcgtgtgttcagtgatc

SEQ ID NO: 194836 - DNA, 25 bp, Probe sequence
aaaagaccgcagcaattaaatcatt

SEQ ID NO: 194837 - DNA, 25 bp, Probe sequence
aacagctcaaacagaattatcgatg

SEQ ID NO: 194838 - DNA, 25 bp, Probe sequence
aatcattgctttatacggaatcggc

SEQ ID NO: 194839 - DNA, 25 bp, Probe sequence
aatttcatggtgtcgtttggtcaga

SEQ ID NO: 194840 - DNA, 25 bp, Probe sequence
caatcgttgatacacaatttcatgg

SEQ ID NO: 194841 - DNA, 25 bp, Probe sequence
caagcgggtattttaggtgaaggtg

SEQ ID NO: 194842 - DNA, 25 bp, Probe sequence
cgcacaatcaagcattgacagcatg

SEQ ID NO: 194843 - DNA, 25 bp, Probe sequence
gcgcaagcacttaaataaattcgaa

SEQ ID NO: 194844 - DNA, 25 bp, Probe sequence
gcaggcgttacattacaagaagcac

SEQ ID NO: 194845 - DNA, 25 bp, Probe sequence
gcacgacaaaagaccgcagcaatta

SEQ ID NO: 194846 - DNA, 25 bp, Probe sequence
gaatattgggaagaacgcggacgca

SEQ ID NO: 194847 - DNA, 25 bp, Probe sequence
gaatatttcgaatcaacagcttatc

SEQ ID NO: 194848 - DNA, 25 bp, Probe sequence
gaatcggcacgtgttcacgcacaat

SEQ ID NO: 194849 - DNA, 25 bp, Probe sequence
gaacgcggacgcaaagcaatcgaga

SEQ ID NO: 194850 - DNA, 25 bp, Probe sequence
gaaatttcaccggaaggatattata

SEQ ID NO: 194851 - DNA, 25 bp, Probe sequence
gagcgattatggactaataccgaag

SEQ ID NO: 194852 - DNA, 25 bp, Probe sequence
gagttcgatgtaaaagcgtttcaag

SEQ ID NO: 194853 - DNA, 25 bp, Probe sequence
gaggtcgacatcctaatgaatatgt

SEQ ID NO: 194854 - DNA, 25 bp, Probe sequence
gtagttattagaggtcgacatccta

SEQ ID NO: 194855 - DNA, 25 bp, Probe sequence
gtgttcagtgatcaagcgggtattt

SEQ ID NO: 194856 - DNA, 25 bp, Probe sequence
ggtgtcgtttggtcagagcgattat

SEQ ID NO: 194857 - DNA, 25 bp, Probe sequence
ggtgaaggtgtacaagtagctaaag

SEQ ID NO: 194858 - DNA, 25 bp, Probe sequence
ggactaataccgaagcaatgaaaca

SEQ ID NO: 194859 - DNA, 25 bp, Probe sequence
ggcacagcacgacaaaagaccgcag

SEQ ID NO: 194860 - DNA, 25 bp, Probe sequence
tgcctaacaaaaacactcaagaata

SEQ ID NO: 194861 - DNA, 25 bp, Probe sequence
tcgagaatgagttgaagcgtgataa

SEQ ID NO: 194862 - DNA, 25 bp, Probe sequence
taaattcgaaggcacagcacgacaa

SEQ ID NO: 194863 - DNA, 25 bp, Probe sequence
tagaattcttaattgcttatgcaac

SEQ ID NO: 194864 - DNA, 25 bp, Probe sequence
tatgttaaagatatgcgcaagcact

SEQ ID NO: 194865 - DNA, 25 bp, Probe sequence
tatacggaatcggcacgtgttcacg

SEQ ID NO: 194866 - DNA, 25 bp, Probe sequence
ttgcttatgcaacagctcaaacaga

SEQ ID NO: 194867 - DNA, 25 bp, Probe sequence
atgttacaagcggaacagttaaaag

SEQ ID NO: 194868 - DNA, 25 bp, Probe sequence
atgtaaaagttaaagagcgagagat

SEQ ID NO: 194869 - DNA, 25 bp, Probe sequence
aggtgatgtaaaagttaaagagcga

SEQ ID NO: 194870 - DNA, 25 bp, Probe sequence
agcggaacagttaaaaggtgatgta

SEQ ID NO: 194871 - DNA, 25 bp, Probe sequence
acaagcggaacagttaaaaggtgat

SEQ ID NO: 194872 - DNA, 25 bp, Probe sequence
aagcggaacagttaaaaggtgatgt

SEQ ID NO: 194873 - DNA, 25 bp, Probe sequence
aagtagattgagacactttgaagat

SEQ ID NO: 194874 - DNA, 25 bp, Probe sequence
aaggtgatgtaaaagttaaagagcg

SEQ ID NO: 194875 - DNA, 25 bp, Probe sequence
caagcggaacagttaaaaggtgatg

SEQ ID NO: 194876 - DNA, 25 bp, Probe sequence
gcggaacagttaaaaggtgatgtaa

SEQ ID NO: 194877 - DNA, 25 bp, Probe sequence
gaacagttaaaaggtgatgtaaaag

SEQ ID NO: 194878 - DNA, 25 bp, Probe sequence
gatgttacaagcggaacagttaaaa

SEQ ID NO: 194879 - DNA, 25 bp, Probe sequence
gatgtaaaagttaaagagcgagaga

SEQ ID NO: 194880 - DNA, 25 bp, Probe sequence
gtttggtgtgatgttacaagcggaa

SEQ ID NO: 194881 - DNA, 25 bp, Probe sequence
gtaaaagttaaagagcgagagatag

SEQ ID NO: 194882 - DNA, 25 bp, Probe sequence
gtgatgtaaaagttaaagagcgaga

SEQ ID NO: 194883 - DNA, 25 bp, Probe sequence
gtgatgttacaagcggaacagttaa

SEQ ID NO: 194884 - DNA, 25 bp, Probe sequence
gtgtgatgttacaagcggaacagtt

SEQ ID NO: 194885 - DNA, 25 bp, Probe sequence
ggtgtgatgttacaagcggaacagt

SEQ ID NO: 194886 - DNA, 25 bp, Probe sequence
ggtgatgtaaaagttaaagagcgag

SEQ ID NO: 194887 - DNA, 25 bp, Probe sequence
tggtgtgatgttacaagcggaacag

SEQ ID NO: 194888 - DNA, 25 bp, Probe sequence
tgtgatgttacaagcggaacagtta

SEQ ID NO: 194889 - DNA, 25 bp, Probe sequence
tgtaaaagttaaagagcgagagata

SEQ ID NO: 194890 - DNA, 25 bp, Probe sequence
tgttacaagcggaacagttaaaagg

SEQ ID NO: 194891 - DNA, 25 bp, Probe sequence
tgatgttacaagcggaacagttaaa

SEQ ID NO: 194892 - DNA, 25 bp, Probe sequence
tgatgtaaaagttaaagagcgagag

SEQ ID NO: 194893 - DNA, 25 bp, Probe sequence
tacaagcggaacagttaaaaggtga

SEQ ID NO: 194894 - DNA, 25 bp, Probe sequence
ttacaagcggaacagttaaaaggtg

SEQ ID NO: 194895 - DNA, 25 bp, Probe sequence
tttggtgtgatgttacaagcggaac

SEQ ID NO: 194896 - DNA, 25 bp, Probe sequence
ttggtgtgatgttacaagcggaaca

SEQ ID NO: 194897 - DNA, 25 bp, Probe sequence
ataacggtaatgacacagagggatt

SEQ ID NO: 194898 - DNA, 25 bp, Probe sequence
atcagtgctagtgcgtataacggta

SEQ ID NO: 194899 - DNA, 25 bp, Probe sequence
atgctattcaacattcagttaaaga

SEQ ID NO: 194900 - DNA, 25 bp, Probe sequence
agcgtttgatgaaatacttgaggga

SEQ ID NO: 194901 - DNA, 25 bp, Probe sequence
acaatcagtgatcagtgctagtgcg

SEQ ID NO: 194902 - DNA, 25 bp, Probe sequence
aaaagagattgaggacgtgtataag

SEQ ID NO: 194903 - DNA, 25 bp, Probe sequence
aaccgcgaacaaattgaacaatcag

SEQ ID NO: 194904 - DNA, 25 bp, Probe sequence
aagagagcacaagcgtttgatgaaa

SEQ ID NO: 194905 - DNA, 25 bp, Probe sequence
aagttgtctataaatatgaggagga

SEQ ID NO: 194906 - DNA, 25 bp, Probe sequence
aatcagtgatcagtgctagtgcgta

SEQ ID NO: 194907 - DNA, 25 bp, Probe sequence
gcagtagggattatggcaggtcaag

SEQ ID NO: 194908 - DNA, 25 bp, Probe sequence
gaataaccgcgaacaaattgaacaa

SEQ ID NO: 194909 - DNA, 25 bp, Probe sequence
gaaggtattgaacttgatgaagcag

SEQ ID NO: 194910 - DNA, 25 bp, Probe sequence
gaagcagtagggattatggcaggtc

SEQ ID NO: 194911 - DNA, 25 bp, Probe sequence
gacaaatgctattcaacattcagtt

SEQ ID NO: 194912 - DNA, 25 bp, Probe sequence
gacacagagggattactaaaagaga

SEQ ID NO: 194913 - DNA, 25 bp, Probe sequence
gagcacaagcgtttgatgaaatact

SEQ ID NO: 194914 - DNA, 25 bp, Probe sequence
gagggaatgacaaatgctattcaac

SEQ ID NO: 194915 - DNA, 25 bp, Probe sequence
gatcagtgctagtgcgtataacggt

SEQ ID NO: 194916 - DNA, 25 bp, Probe sequence
gattatggcaggtcaagttgtctat

SEQ ID NO: 194917 - DNA, 25 bp, Probe sequence
gattgaggacgtgtataagagagca

SEQ ID NO: 194918 - DNA, 25 bp, Probe sequence
gtataagagagcacaagcgtttgat

SEQ ID NO: 194919 - DNA, 25 bp, Probe sequence
gtagggattatggcaggtcaagttg

SEQ ID NO: 194920 - DNA, 25 bp, Probe sequence
gtgctagtgcgtataacggtaatga

SEQ ID NO: 194921 - DNA, 25 bp, Probe sequence
gtgatcagtgctagtgcgtataacg

SEQ ID NO: 194922 - DNA, 25 bp, Probe sequence
gggattatggcaggtcaagttgtct

SEQ ID NO: 194923 - DNA, 25 bp, Probe sequence
ggtattgaacttgatgaagcagtag

SEQ ID NO: 194924 - DNA, 25 bp, Probe sequence
ggacgtgtataagagagcacaagcg

SEQ ID NO: 194925 - DNA, 25 bp, Probe sequence
ggaaatgatgaataaccgcgaacaa

SEQ ID NO: 194926 - DNA, 25 bp, Probe sequence
ggcaggtcaagttgtctataaatat

SEQ ID NO: 194927 - DNA, 25 bp, Probe sequence
tgatgaaatacttgagggaatgaca

SEQ ID NO: 194928 - DNA, 25 bp, Probe sequence
tgcgtataacggtaatgacacagag

SEQ ID NO: 194929 - DNA, 25 bp, Probe sequence
tcagtgatcagtgctagtgcgtata

SEQ ID NO: 194930 - DNA, 25 bp, Probe sequence
tatggcaggtcaagttgtctataaa

SEQ ID NO: 194931 - DNA, 25 bp, Probe sequence
ataatgttccacttaaatcgtttca

SEQ ID NO: 194932 - DNA, 25 bp, Probe sequence
ataacacagatgaacaggacaaact

SEQ ID NO: 194933 - DNA, 25 bp, Probe sequence
atcgtttcatgtcatagatttaagc

SEQ ID NO: 194934 - DNA, 25 bp, Probe sequence
atgtattacaaaattggtgagataa

SEQ ID NO: 194935 - DNA, 25 bp, Probe sequence
acttaaatcgtttcatgtcatagat

SEQ ID NO: 194936 - DNA, 25 bp, Probe sequence
aagcgaactatatattgcgacggat

SEQ ID NO: 194937 - DNA, 25 bp, Probe sequence
aagagacatgacggtatcagtatac

SEQ ID NO: 194938 - DNA, 25 bp, Probe sequence
aatgttccacttaaatcgtttcatg

SEQ ID NO: 194939 - DNA, 25 bp, Probe sequence
cgggtttgaatttaaagtgtctgtg

SEQ ID NO: 194940 - DNA, 25 bp, Probe sequence
ccacttaaatcgtttcatgtcatag

SEQ ID NO: 194941 - DNA, 25 bp, Probe sequence
gcgacggatgcaatgcgtgacgtta

SEQ ID NO: 194942 - DNA, 25 bp, Probe sequence
gcgaactatatattgcgacggatgc

SEQ ID NO: 194943 - DNA, 25 bp, Probe sequence
gcgtgacgttataaacgaatggatt

SEQ ID NO: 194944 - DNA, 25 bp, Probe sequence
gaatttaaagtgtctgtgatgaaga

SEQ ID NO: 194945 - DNA, 25 bp, Probe sequence
gaataatgttccacttaaatcgttt

SEQ ID NO: 194946 - DNA, 25 bp, Probe sequence
gaatggattgaaaataacacagatg

SEQ ID NO: 194947 - DNA, 25 bp, Probe sequence
gacatgacggtatcagtatacaaat

SEQ ID NO: 194948 - DNA, 25 bp, Probe sequence
gacggtatcagtatacaaatcaagg

SEQ ID NO: 194949 - DNA, 25 bp, Probe sequence
gacggatgcaatgcgtgacgttata

SEQ ID NO: 194950 - DNA, 25 bp, Probe sequence
gagacatgacggtatcagtatacaa

SEQ ID NO: 194951 - DNA, 25 bp, Probe sequence
gatgaagagacatgacggtatcagt

SEQ ID NO: 194952 - DNA, 25 bp, Probe sequence
gttccacttaaatcgtttcatgtca

SEQ ID NO: 194953 - DNA, 25 bp, Probe sequence
gtttcatgtcatagatttaagcgaa

SEQ ID NO: 194954 - DNA, 25 bp, Probe sequence
ggatatgaataatgttccacttaaa

SEQ ID NO: 194955 - DNA, 25 bp, Probe sequence
ggatgcaatgcgtgacgttataaac

SEQ ID NO: 194956 - DNA, 25 bp, Probe sequence
ggacaaactaattaacttagtcatg

SEQ ID NO: 194957 - DNA, 25 bp, Probe sequence
tgttccacttaaatcgtttcatgtc

SEQ ID NO: 194958 - DNA, 25 bp, Probe sequence
tgaacaggacaaactaattaactta

SEQ ID NO: 194959 - DNA, 25 bp, Probe sequence
tgcaatgcgtgacgttataaacgaa

SEQ ID NO: 194960 - DNA, 25 bp, Probe sequence
tgcgacggatgcaatgcgtgacgtt

SEQ ID NO: 194961 - DNA, 25 bp, Probe sequence
tccacttaaatcgtttcatgtcata

SEQ ID NO: 194962 - DNA, 25 bp, Probe sequence
tcatgtcatagatttaagcgaacta

SEQ ID NO: 194963 - DNA, 25 bp, Probe sequence
ttaagcgaactatatattgcgacgg

SEQ ID NO: 194964 - DNA, 25 bp, Probe sequence
ttccacttaaatcgtttcatgtcat

SEQ ID NO: 194965 - DNA, 25 bp, Probe sequence
ataacggcaatgacacagagggatt

SEQ ID NO: 194966 - DNA, 25 bp, Probe sequence
atccgttataagtgctagtgcgtat

SEQ ID NO: 194967 - DNA, 25 bp, Probe sequence
atgctattcaacattcagttaaaga

SEQ ID NO: 194968 - DNA, 25 bp, Probe sequence
agtgcgtataacggcaatgacacag

SEQ ID NO: 194969 - DNA, 25 bp, Probe sequence
agcgtttgatgaaatacttgaggga

SEQ ID NO: 194970 - DNA, 25 bp, Probe sequence
agcgcaagcgtttgatgaaatactt

SEQ ID NO: 194971 - DNA, 25 bp, Probe sequence
accgtgaacaaatagaacaatccgt

SEQ ID NO: 194972 - DNA, 25 bp, Probe sequence
acggcaatgacacagagggattact

SEQ ID NO: 194973 - DNA, 25 bp, Probe sequence
aaagcgcaagcgtttgatgaaatac

SEQ ID NO: 194974 - DNA, 25 bp, Probe sequence
aaaagagattgaggacgtatataag

SEQ ID NO: 194975 - DNA, 25 bp, Probe sequence
aacaatccgttataagtgctagtgc

SEQ ID NO: 194976 - DNA, 25 bp, Probe sequence
aagtgctagtgcgtataacggcaat

SEQ ID NO: 194977 - DNA, 25 bp, Probe sequence
caatccgttataagtgctagtgcgt

SEQ ID NO: 194978 - DNA, 25 bp, Probe sequence
gcgtataacggcaatgacacagagg

SEQ ID NO: 194979 - DNA, 25 bp, Probe sequence
gctattcaacattcagttaaagaag

SEQ ID NO: 194980 - DNA, 25 bp, Probe sequence
gctagtgcgtataacggcaatgaca

SEQ ID NO: 194981 - DNA, 25 bp, Probe sequence
gaatacaaggaggaactggagaatg

SEQ ID NO: 194982 - DNA, 25 bp, Probe sequence
gaataaccgtgaacaaatagaacaa

SEQ ID NO: 194983 - DNA, 25 bp, Probe sequence
gaaggtattgaacttgatgaagcaa

SEQ ID NO: 194984 - DNA, 25 bp, Probe sequence
gaagcaatagggattatggtaagtc

SEQ ID NO: 194985 - DNA, 25 bp, Probe sequence
gaacaatccgttataagtgctagtg

SEQ ID NO: 194986 - DNA, 25 bp, Probe sequence
gacaaatgctattcaacattcagtt

SEQ ID NO: 194987 - DNA, 25 bp, Probe sequence
gacacagagggattactaaaagaga

SEQ ID NO: 194988 - DNA, 25 bp, Probe sequence
gagggaatgacaaatgctattcaac

SEQ ID NO: 194989 - DNA, 25 bp, Probe sequence
gtataacggcaatgacacagaggga

SEQ ID NO: 194990 - DNA, 25 bp, Probe sequence
gtatataagaaagcgcaagcgtttg

SEQ ID NO: 194991 - DNA, 25 bp, Probe sequence
gtcaagttatctatgaatacaagga

SEQ ID NO: 194992 - DNA, 25 bp, Probe sequence
gtgctagtgcgtataacggcaatga

SEQ ID NO: 194993 - DNA, 25 bp, Probe sequence
gggattatggtaagtcaagttatct

SEQ ID NO: 194994 - DNA, 25 bp, Probe sequence
ggtaagtcaagttatctatgaatac

SEQ ID NO: 194995 - DNA, 25 bp, Probe sequence
ggacgtatataagaaagcgcaagcg

SEQ ID NO: 194996 - DNA, 25 bp, Probe sequence
ggcaatgacacagagggattactaa

SEQ ID NO: 194997 - DNA, 25 bp, Probe sequence
tgatgaaatacttgagggaatgaca

SEQ ID NO: 194998 - DNA, 25 bp, Probe sequence
tataagtgctagtgcgtataacggc

SEQ ID NO: 194999 - DNA, 25 bp, Probe sequence
atgggaaaggcatcatacgatatta

SEQ ID NO: 195000 - DNA, 25 bp, Probe sequence
atggcaacaaggttattgactaata

SEQ ID NO: 195001 - DNA, 25 bp, Probe sequence
agcggtagcgtatcatgcaggtatc

SEQ ID NO: 195002 - DNA, 25 bp, Probe sequence
actaacattgtgtatggaccgttgc

SEQ ID NO: 195003 - DNA, 25 bp, Probe sequence
aaagcggtagcgtatcatgcaggta

SEQ ID NO: 195004 - DNA, 25 bp, Probe sequence
aacattgtgtatggaccgttgcaaa

SEQ ID NO: 195005 - DNA, 25 bp, Probe sequence
aacccaacgaaagagctagacacta

SEQ ID NO: 195006 - DNA, 25 bp, Probe sequence
aagccaggtacatttaaatatattg

SEQ ID NO: 195007 - DNA, 25 bp, Probe sequence
catgcatcgtaatacagttactact

SEQ ID NO: 195008 - DNA, 25 bp, Probe sequence
cattgtgtatggaccgttgcaaaaa

SEQ ID NO: 195009 - DNA, 25 bp, Probe sequence
gcatcatacgatattaagccaggta

SEQ ID NO: 195010 - DNA, 25 bp, Probe sequence
gcatgtcacatgcatcgtaatacag

SEQ ID NO: 195011 - DNA, 25 bp, Probe sequence
gcaaataggagatgcatgtcacatg

SEQ ID NO: 195012 - DNA, 25 bp, Probe sequence
gaatacttaaagttacctgaagatc

SEQ ID NO: 195013 - DNA, 25 bp, Probe sequence
gaactttgttaaagcggtagcgtat

SEQ ID NO: 195014 - DNA, 25 bp, Probe sequence
gaacaactgaactaatggcaacaag

SEQ ID NO: 195015 - DNA, 25 bp, Probe sequence
gaaacctagaagaaatggtcgaagc

SEQ ID NO: 195016 - DNA, 25 bp, Probe sequence
gagatacttaacccaacgaaagagc

SEQ ID NO: 195017 - DNA, 25 bp, Probe sequence
gaaagagctagacactaacattgtg

SEQ ID NO: 195018 - DNA, 25 bp, Probe sequence
gaaatggtcgaagcagttgaaagtg

SEQ ID NO: 195019 - DNA, 25 bp, Probe sequence
gactaataagatgttacgaaaccta

SEQ ID NO: 195020 - DNA, 25 bp, Probe sequence
gagaatggagatacttaacccaacg

SEQ ID NO: 195021 - DNA, 25 bp, Probe sequence
gagtcagagatatataacctacaag

SEQ ID NO: 195022 - DNA, 25 bp, Probe sequence
gatatataacctacaagagaacaag

SEQ ID NO: 195023 - DNA, 25 bp, Probe sequence
gtaattaggctaaagtattggaata

SEQ ID NO: 195024 - DNA, 25 bp, Probe sequence
gtaatacagttactactatacgaaa

SEQ ID NO: 195025 - DNA, 25 bp, Probe sequence
gtcacatgcatcgtaatacagttac

SEQ ID NO: 195026 - DNA, 25 bp, Probe sequence
ggaccgttgcaaaaaggtgaaccag

SEQ ID NO: 195027 - DNA, 25 bp, Probe sequence
ggtgaaccagttagaacaactgaac

SEQ ID NO: 195028 - DNA, 25 bp, Probe sequence
ggtcgaagcagttgaaagtgaatac

SEQ ID NO: 195029 - DNA, 25 bp, Probe sequence
ggtagcgtatcatgcaggtatcaaa

SEQ ID NO: 195030 - DNA, 25 bp, Probe sequence
taaagttacctgaagatcataagaa

SEQ ID NO: 195031 - DNA, 25 bp, Probe sequence
tactactatacgaaagaactttgtt

SEQ ID NO: 195032 - DNA, 25 bp, Probe sequence
tacgatattaagccaggtacattta

SEQ ID NO: 195033 - DNA, 25 bp, Probe sequence
attagtgctagtgcgtataacggta

SEQ ID NO: 195034 - DNA, 25 bp, Probe sequence
atcgcgaaaaaatcgaacagtccgt

SEQ ID NO: 195035 - DNA, 25 bp, Probe sequence
atcgaacagtccgttattagtgcta

SEQ ID NO: 195036 - DNA, 25 bp, Probe sequence
atgctattcaacattcagttaaaga

SEQ ID NO: 195037 - DNA, 25 bp, Probe sequence
atgacacaaatgaataatcgcgaaa

SEQ ID NO: 195038 - DNA, 25 bp, Probe sequence
acggtaatgacacagaggggttgct

SEQ ID NO: 195039 - DNA, 25 bp, Probe sequence
agcgtttgatgaaatacttgaggga

SEQ ID NO: 195040 - DNA, 25 bp, Probe sequence
aaatcgaacagtccgttattagtgc

SEQ ID NO: 195041 - DNA, 25 bp, Probe sequence
aacagtccgttattagtgctagtgc

SEQ ID NO: 195042 - DNA, 25 bp, Probe sequence
aagcgcaagcgtttgatgaaatact

SEQ ID NO: 195043 - DNA, 25 bp, Probe sequence
aagttgtctataaatatgaggagga

SEQ ID NO: 195044 - DNA, 25 bp, Probe sequence
cagtccgttattagtgctagtgcgt

SEQ ID NO: 195045 - DNA, 25 bp, Probe sequence
gctaaaagagattgaggacgtgtat

SEQ ID NO: 195046 - DNA, 25 bp, Probe sequence
gcagtagggattatggcaggtcaag

SEQ ID NO: 195047 - DNA, 25 bp, Probe sequence
gaaggtattgaacttgatgaagcag

SEQ ID NO: 195048 - DNA, 25 bp, Probe sequence
gaagcagtagggattatggcaggtc

SEQ ID NO: 195049 - DNA, 25 bp, Probe sequence
gaacagtccgttattagtgctagtg

SEQ ID NO: 195050 - DNA, 25 bp, Probe sequence
gacaaatgctattcaacattcagtt

SEQ ID NO: 195051 - DNA, 25 bp, Probe sequence
gacacagaggggttgctaaaagaga

SEQ ID NO: 195052 - DNA, 25 bp, Probe sequence
gaggggttgctaaaagagattgagg

SEQ ID NO: 195053 - DNA, 25 bp, Probe sequence
gagggaatgacaaatgctattcaac

SEQ ID NO: 195054 - DNA, 25 bp, Probe sequence
gattatggcaggtcaagttgtctat

SEQ ID NO: 195055 - DNA, 25 bp, Probe sequence
gtagggattatggcaggtcaagttg

SEQ ID NO: 195056 - DNA, 25 bp, Probe sequence
gtaatgacacagaggggttgctaaa

SEQ ID NO: 195057 - DNA, 25 bp, Probe sequence
gtccgttattagtgctagtgcgtat

SEQ ID NO: 195058 - DNA, 25 bp, Probe sequence
gtgctagtgcgtataacggtaatga

SEQ ID NO: 195059 - DNA, 25 bp, Probe sequence
gtgtataagaaagcgcaagcgtttg

SEQ ID NO: 195060 - DNA, 25 bp, Probe sequence
gggattatggcaggtcaagttgtct

SEQ ID NO: 195061 - DNA, 25 bp, Probe sequence
ggtattgaacttgatgaagcagtag

SEQ ID NO: 195062 - DNA, 25 bp, Probe sequence
ggacgtgtataagaaagcgcaagcg

SEQ ID NO: 195063 - DNA, 25 bp, Probe sequence
ggcaggtcaagttgtctataaatat

SEQ ID NO: 195064 - DNA, 25 bp, Probe sequence
tgatgaaatacttgagggaatgaca

SEQ ID NO: 195065 - DNA, 25 bp, Probe sequence
tgcgtataacggtaatgacacagag

SEQ ID NO: 195066 - DNA, 25 bp, Probe sequence
tatggcaggtcaagttgtctataaa

SEQ ID NO: 195067 - DNA, 25 bp, Probe sequence
atatttttttcaacaggatttagtg

SEQ ID NO: 195068 - DNA, 25 bp, Probe sequence
aaatccggatctatcacaaggaaaa

SEQ ID NO: 195069 - DNA, 25 bp, Probe sequence
aactatgacgttaatctggaaagat

SEQ ID NO: 195070 - DNA, 25 bp, Probe sequence
aactctacactatatgagaacacta

SEQ ID NO: 195071 - DNA, 25 bp, Probe sequence
aatgggcgcgagaaaatccggatct

SEQ ID NO: 195072 - DNA, 25 bp, Probe sequence
aatacaaataagtgttcgacgtcaa

SEQ ID NO: 195073 - DNA, 25 bp, Probe sequence
aattgatatccccttcatagttgat

SEQ ID NO: 195074 - DNA, 25 bp, Probe sequence
caaagcattctacatcttaaacgat

SEQ ID NO: 195075 - DNA, 25 bp, Probe sequence
cttaaacgatgacctaactatgacg

SEQ ID NO: 195076 - DNA, 25 bp, Probe sequence
ctggaaagatggggagttgctagta

SEQ ID NO: 195077 - DNA, 25 bp, Probe sequence
gcctaccaaagcattctacatctta

SEQ ID NO: 195078 - DNA, 25 bp, Probe sequence
gcagatgtgtgcctaccaaagcatt

SEQ ID NO: 195079 - DNA, 25 bp, Probe sequence
gaatgtttatatggcagatgtgtgc

SEQ ID NO: 195080 - DNA, 25 bp, Probe sequence
gaaggagactataactctacactat

SEQ ID NO: 195081 - DNA, 25 bp, Probe sequence
gagactaaggttgataggttgattg

SEQ ID NO: 195082 - DNA, 25 bp, Probe sequence
gagaaaatccggatctatcacaagg

SEQ ID NO: 195083 - DNA, 25 bp, Probe sequence
gagactataactctacactatatga

SEQ ID NO: 195084 - DNA, 25 bp, Probe sequence
gatgacctaactatgacgttaatct

SEQ ID NO: 195085 - DNA, 25 bp, Probe sequence
gatgaattaattaaatgggcgcgag

SEQ ID NO: 195086 - DNA, 25 bp, Probe sequence
gataggttgattgaattattcgaga

SEQ ID NO: 195087 - DNA, 25 bp, Probe sequence
gattcgttcgttttcatccaaatac

SEQ ID NO: 195088 - DNA, 25 bp, Probe sequence
gttcgttttcatccaaatacaaata

SEQ ID NO: 195089 - DNA, 25 bp, Probe sequence
gttttattccaattgatatcccctt

SEQ ID NO: 195090 - DNA, 25 bp, Probe sequence
gtaacggaagagactaaggttgata

SEQ ID NO: 195091 - DNA, 25 bp, Probe sequence
gtgatggattcgttcgttttcatcc

SEQ ID NO: 195092 - DNA, 25 bp, Probe sequence
gtgttcgacgtcaagttttattcca

SEQ ID NO: 195093 - DNA, 25 bp, Probe sequence
gtgtgcctaccaaagcattctacat

SEQ ID NO: 195094 - DNA, 25 bp, Probe sequence
gggcgcgagaaaatccggatctatc

SEQ ID NO: 195095 - DNA, 25 bp, Probe sequence
ggatttagtgatggattcgttcgtt

SEQ ID NO: 195096 - DNA, 25 bp, Probe sequence
tccaattgatatccccttcatagtt

SEQ ID NO: 195097 - DNA, 25 bp, Probe sequence
tatccccttcatagttgatattgaa

SEQ ID NO: 195098 - DNA, 25 bp, Probe sequence
tattccaattgatatccccttcata

SEQ ID NO: 195099 - DNA, 25 bp, Probe sequence
tattcgagattcaagaaggagacta

SEQ ID NO: 195100 - DNA, 25 bp, Probe sequence
ttcgacgtcaagttttattccaatt

SEQ ID NO: 195101 - DNA, 25 bp, Probe sequence
attgtactcatgccattgctgtact

SEQ ID NO: 195102 - DNA, 25 bp, Probe sequence
attagcagtgttgtgcttcacggtc

SEQ ID NO: 195103 - DNA, 25 bp, Probe sequence
atgccattgctgtacttcactacag

SEQ ID NO: 195104 - DNA, 25 bp, Probe sequence
agcagtgttgtgcttcacggtctta

SEQ ID NO: 195105 - DNA, 25 bp, Probe sequence
agcatggtcaattgcaggattcgca

SEQ ID NO: 195106 - DNA, 25 bp, Probe sequence
agcgattgtactcatgccattgctg

SEQ ID NO: 195107 - DNA, 25 bp, Probe sequence
actcatgccattgctgtacttcact

SEQ ID NO: 195108 - DNA, 25 bp, Probe sequence
actacagcatggtcaattgcaggat

SEQ ID NO: 195109 - DNA, 25 bp, Probe sequence
aaagctacctattagcagtgttgtg

SEQ ID NO: 195110 - DNA, 25 bp, Probe sequence
cacggtcttagcgattgtactcatg

SEQ ID NO: 195111 - DNA, 25 bp, Probe sequence
cggtcttagcgattgtactcatgcc

SEQ ID NO: 195112 - DNA, 25 bp, Probe sequence
gccattgctgtacttcactacagca

SEQ ID NO: 195113 - DNA, 25 bp, Probe sequence
gcgacacatataaaagctacctatt

SEQ ID NO: 195114 - DNA, 25 bp, Probe sequence
gcttcacggtcttagcgattgtact

SEQ ID NO: 195115 - DNA, 25 bp, Probe sequence
gcaggattcgcaagtatagtgacat

SEQ ID NO: 195116 - DNA, 25 bp, Probe sequence
gcaagtatagtgacattcatatttt

SEQ ID NO: 195117 - DNA, 25 bp, Probe sequence
gagcgacacatataaaagctaccta

SEQ ID NO: 195118 - DNA, 25 bp, Probe sequence
gattcgcaagtatagtgacattcat

SEQ ID NO: 195119 - DNA, 25 bp, Probe sequence
gattgtactcatgccattgctgtac

SEQ ID NO: 195120 - DNA, 25 bp, Probe sequence
gtacttcactacagcatggtcaatt

SEQ ID NO: 195121 - DNA, 25 bp, Probe sequence
gtgcttcacggtcttagcgattgta

SEQ ID NO: 195122 - DNA, 25 bp, Probe sequence
ggtcttagcgattgtactcatgcca

SEQ ID NO: 195123 - DNA, 25 bp, Probe sequence
ggtcaattgcaggattcgcaagtat

SEQ ID NO: 195124 - DNA, 25 bp, Probe sequence
tgtactcatgccattgctgtacttc

SEQ ID NO: 195125 - DNA, 25 bp, Probe sequence
tcttagcgattgtactcatgccatt

SEQ ID NO: 195126 - DNA, 25 bp, Probe sequence
tacttcactacagcatggtcaattg

SEQ ID NO: 195127 - DNA, 25 bp, Probe sequence
tactcatgccattgctgtacttcac

SEQ ID NO: 195128 - DNA, 25 bp, Probe sequence
tagcagtgttgtgcttcacggtctt

SEQ ID NO: 195129 - DNA, 25 bp, Probe sequence
tagtgacattcatattttataagga

SEQ ID NO: 195130 - DNA, 25 bp, Probe sequence
ttgtgcttcacggtcttagcgattg

SEQ ID NO: 195131 - DNA, 25 bp, Probe sequence
ttagcagtgttgtgcttcacggtct

SEQ ID NO: 195132 - DNA, 25 bp, Probe sequence
ttagcgattgtactcatgccattgc

SEQ ID NO: 195133 - DNA, 25 bp, Probe sequence
ttcactacagcatggtcaattgcag

SEQ ID NO: 195134 - DNA, 25 bp, Probe sequence
ttcacggtcttagcgattgtactca

SEQ ID NO: 195135 - DNA, 25 bp, Probe sequence
atgttaagtaatgtagacaatgctg

SEQ ID NO: 195136 - DNA, 25 bp, Probe sequence
atgtagacaatgctgaaaaaacaat

SEQ ID NO: 195137 - DNA, 25 bp, Probe sequence
agtaatgtagacaatgctgaaaaaa

SEQ ID NO: 195138 - DNA, 25 bp, Probe sequence
agacaatgctgaaaaaacaataagt

SEQ ID NO: 195139 - DNA, 25 bp, Probe sequence
acgaatgttaagtaatgtagacaat

SEQ ID NO: 195140 - DNA, 25 bp, Probe sequence
acacgaatgttaagtaatgtagaca

SEQ ID NO: 195141 - DNA, 25 bp, Probe sequence
acaatgctgaaaaaacaataagtag

SEQ ID NO: 195142 - DNA, 25 bp, Probe sequence
aacacgaatgttaagtaatgtagac

SEQ ID NO: 195143 - DNA, 25 bp, Probe sequence
aagtaatgtagacaatgctgaaaaa

SEQ ID NO: 195144 - DNA, 25 bp, Probe sequence
aatgtagacaatgctgaaaaaacaa

SEQ ID NO: 195145 - DNA, 25 bp, Probe sequence
aatgttaagtaatgtagacaatgct

SEQ ID NO: 195146 - DNA, 25 bp, Probe sequence
caatgctgaaaaaacaataagtaga

SEQ ID NO: 195147 - DNA, 25 bp, Probe sequence
cacgaatgttaagtaatgtagacaa

SEQ ID NO: 195148 - DNA, 25 bp, Probe sequence
cgaatgttaagtaatgtagacaatg

SEQ ID NO: 195149 - DNA, 25 bp, Probe sequence
gaatgttaagtaatgtagacaatgc

SEQ ID NO: 195150 - DNA, 25 bp, Probe sequence
gacaatgctgaaaaaacaataagta

SEQ ID NO: 195151 - DNA, 25 bp, Probe sequence
gttaagtaatgtagacaatgctgaa

SEQ ID NO: 195152 - DNA, 25 bp, Probe sequence
gtagacaatgctgaaaaaacaataa

SEQ ID NO: 195153 - DNA, 25 bp, Probe sequence
gtaatgtagacaatgctgaaaaaac

SEQ ID NO: 195154 - DNA, 25 bp, Probe sequence
tgtagacaatgctgaaaaaacaata

SEQ ID NO: 195155 - DNA, 25 bp, Probe sequence
tgttaagtaatgtagacaatgctga

SEQ ID NO: 195156 - DNA, 25 bp, Probe sequence
taatgtagacaatgctgaaaaaaca

SEQ ID NO: 195157 - DNA, 25 bp, Probe sequence
taagtaatgtagacaatgctgaaaa

SEQ ID NO: 195158 - DNA, 25 bp, Probe sequence
tagacaatgctgaaaaaacaataag

SEQ ID NO: 195159 - DNA, 25 bp, Probe sequence
ttaagtaatgtagacaatgctgaaa

SEQ ID NO: 195160 - DNA, 25 bp, Probe sequence
atcagaagcggttgacggacgtagc

SEQ ID NO: 195161 - DNA, 25 bp, Probe sequence
atgcgtatgaattgaacgatttcaa

SEQ ID NO: 195162 - DNA, 25 bp, Probe sequence
atgacatcagaagcggttgacggac

SEQ ID NO: 195163 - DNA, 25 bp, Probe sequence
aagcggttgacggacgtagcaatgc

SEQ ID NO: 195164 - DNA, 25 bp, Probe sequence
agaagcggttgacggacgtagcaat

SEQ ID NO: 195165 - DNA, 25 bp, Probe sequence
agcggttgacggacgtagcaatgcg

SEQ ID NO: 195166 - DNA, 25 bp, Probe sequence
acatcagaagcggttgacggacgta

SEQ ID NO: 195167 - DNA, 25 bp, Probe sequence
acggacgtagcaatgcgtatgaatt

SEQ ID NO: 195168 - DNA, 25 bp, Probe sequence
actttaatgctagaacgagaactaa

SEQ ID NO: 195169 - DNA, 25 bp, Probe sequence
aaggagtatgaagctattattgata

SEQ ID NO: 195170 - DNA, 25 bp, Probe sequence
aattactttaatgctagaacgagaa

SEQ ID NO: 195171 - DNA, 25 bp, Probe sequence
cagaagcggttgacggacgtagcaa

SEQ ID NO: 195172 - DNA, 25 bp, Probe sequence
catcagaagcggttgacggacgtag

SEQ ID NO: 195173 - DNA, 25 bp, Probe sequence
cggacgtagcaatgcgtatgaattg

SEQ ID NO: 195174 - DNA, 25 bp, Probe sequence
cggttgacggacgtagcaatgcgta

SEQ ID NO: 195175 - DNA, 25 bp, Probe sequence
gcggttgacggacgtagcaatgcgt

SEQ ID NO: 195176 - DNA, 25 bp, Probe sequence
gcaatgcgtatgaattgaacgattt

SEQ ID NO: 195177 - DNA, 25 bp, Probe sequence
gaagcggttgacggacgtagcaatg

SEQ ID NO: 195178 - DNA, 25 bp, Probe sequence
gaagctattattgataattacttta

SEQ ID NO: 195179 - DNA, 25 bp, Probe sequence
gaacgatttcaaggagtatgaagct

SEQ ID NO: 195180 - DNA, 25 bp, Probe sequence
gacatcagaagcggttgacggacgt

SEQ ID NO: 195181 - DNA, 25 bp, Probe sequence
gacggacgtagcaatgcgtatgaat

SEQ ID NO: 195182 - DNA, 25 bp, Probe sequence
gacgtagcaatgcgtatgaattgaa

SEQ ID NO: 195183 - DNA, 25 bp, Probe sequence
gagaactaaaaaaggaagggctgtg

SEQ ID NO: 195184 - DNA, 25 bp, Probe sequence
gataattactttaatgctagaacga

SEQ ID NO: 195185 - DNA, 25 bp, Probe sequence
gttgacggacgtagcaatgcgtatg

SEQ ID NO: 195186 - DNA, 25 bp, Probe sequence
gtagcaatgcgtatgaattgaacga

SEQ ID NO: 195187 - DNA, 25 bp, Probe sequence
ggttgacggacgtagcaatgcgtat

SEQ ID NO: 195188 - DNA, 25 bp, Probe sequence
ggagtatgaagctattattgataat

SEQ ID NO: 195189 - DNA, 25 bp, Probe sequence
tgacggacgtagcaatgcgtatgaa

SEQ ID NO: 195190 - DNA, 25 bp, Probe sequence
tgacatcagaagcggttgacggacg

SEQ ID NO: 195191 - DNA, 25 bp, Probe sequence
tcagaagcggttgacggacgtagca

SEQ ID NO: 195192 - DNA, 25 bp, Probe sequence
ttactttaatgctagaacgagaact

SEQ ID NO: 195193 - DNA, 25 bp, Probe sequence
ttgacggacgtagcaatgcgtatga

SEQ ID NO: 195194 - DNA, 25 bp, Probe sequence
cggagggaaagtgaaaagcggtgat

SEQ ID NO: 195195 - DNA, 25 bp, Probe sequence
attgtcgttcagattgcgctttact

SEQ ID NO: 195196 - DNA, 25 bp, Probe sequence
atttctatcctatgcatatcaattg

SEQ ID NO: 195197 - DNA, 25 bp, Probe sequence
atcaattgtcgttcagattgcgctt

SEQ ID NO: 195198 - DNA, 25 bp, Probe sequence
atctatgtggccgaaaaaaccaagc

SEQ ID NO: 195199 - DNA, 25 bp, Probe sequence
atcctatgcatatcaattgtcgttc

SEQ ID NO: 195200 - DNA, 25 bp, Probe sequence
atgtggccgaaaaaaccaagcaaga

SEQ ID NO: 195201 - DNA, 25 bp, Probe sequence
actacctaaatctatgtggccgaaa

SEQ ID NO: 195202 - DNA, 25 bp, Probe sequence
aagtatgcaaagggcttaatggaga

SEQ ID NO: 195203 - DNA, 25 bp, Probe sequence
aagggcttaatggagaaatattcaa

SEQ ID NO: 195204 - DNA, 25 bp, Probe sequence
aattgtcgttcagattgcgctttac

SEQ ID NO: 195205 - DNA, 25 bp, Probe sequence
cagattgcgctttactacctaaatc

SEQ ID NO: 195206 - DNA, 25 bp, Probe sequence
ctatcctatgcatatcaattgtcgt

SEQ ID NO: 195207 - DNA, 25 bp, Probe sequence
cctatgcatatcaattgtcgttcag

SEQ ID NO: 195208 - DNA, 25 bp, Probe sequence
gcgctttactacctaaatctatgtg

SEQ ID NO: 195209 - DNA, 25 bp, Probe sequence
gcatatcaattgtcgttcagattgc

SEQ ID NO: 195210 - DNA, 25 bp, Probe sequence
gcaaaaatcgataatagaacaacta

SEQ ID NO: 195211 - DNA, 25 bp, Probe sequence
gaacaactaaagtatgcaaagggct

SEQ ID NO: 195212 - DNA, 25 bp, Probe sequence
gaaatattcaaagttaaagacgcta

SEQ ID NO: 195213 - DNA, 25 bp, Probe sequence
gattgcgctttactacctaaatcta

SEQ ID NO: 195214 - DNA, 25 bp, Probe sequence
gttaatttctatcctatgcatatca

SEQ ID NO: 195215 - DNA, 25 bp, Probe sequence
ggtgttaatttctatcctatgcata

SEQ ID NO: 195216 - DNA, 25 bp, Probe sequence
tgtcgttcagattgcgctttactac

SEQ ID NO: 195217 - DNA, 25 bp, Probe sequence
taatttctatcctatgcatatcaat

SEQ ID NO: 195218 - DNA, 25 bp, Probe sequence
taaagacgctaaaattggtgttaat

SEQ ID NO: 195219 - DNA, 25 bp, Probe sequence
tactacctaaatctatgtggccgaa

SEQ ID NO: 195220 - DNA, 25 bp, Probe sequence
tacctaaatctatgtggccgaaaaa

SEQ ID NO: 195221 - DNA, 25 bp, Probe sequence
tatgcatatcaattgtcgttcagat

SEQ ID NO: 195222 - DNA, 25 bp, Probe sequence
tttactacctaaatctatgtggccg

SEQ ID NO: 195223 - DNA, 25 bp, Probe sequence
ttctatcctatgcatatcaattgtc

SEQ ID NO: 195224 - DNA, 25 bp, Probe sequence
ttcagattgcgctttactacctaaa

SEQ ID NO: 195225 - DNA, 25 bp, Probe sequence
ttgcgctttactacctaaatctatg

SEQ ID NO: 195226 - DNA, 25 bp, Probe sequence
ttggtgttaatttctatcctatgca

SEQ ID NO: 195227 - DNA, 25 bp, Probe sequence
ttgtcgttcagattgcgctttacta

SEQ ID NO: 195228 - DNA, 25 bp, Probe sequence
ataatgttccacttaaatcgtttca

SEQ ID NO: 195229 - DNA, 25 bp, Probe sequence
ataacacagatgaacaggacaaact

SEQ ID NO: 195230 - DNA, 25 bp, Probe sequence
atcgtttcatgtcatagatttaagc

SEQ ID NO: 195231 - DNA, 25 bp, Probe sequence
atgaataatgttccacttaaatcgt

SEQ ID NO: 195232 - DNA, 25 bp, Probe sequence
atgaagagacatgacggtatcagta

SEQ ID NO: 195233 - DNA, 25 bp, Probe sequence
acttaaatcgtttcatgtcatagat

SEQ ID NO: 195234 - DNA, 25 bp, Probe sequence
aagcgaactatatattgcgacggat

SEQ ID NO: 195235 - DNA, 25 bp, Probe sequence
aagagacatgacggtatcagtatac

SEQ ID NO: 195236 - DNA, 25 bp, Probe sequence
aatgttccacttaaatcgtttcatg

SEQ ID NO: 195237 - DNA, 25 bp, Probe sequence
cgacggatgcaatgcgtgacgttat

SEQ ID NO: 195238 - DNA, 25 bp, Probe sequence
ccacttaaatcgtttcatgtcatag

SEQ ID NO: 195239 - DNA, 25 bp, Probe sequence
gcgacggatgcaatgcgtgacgtta

SEQ ID NO: 195240 - DNA, 25 bp, Probe sequence
gcgaactatatattgcgacggatgc

SEQ ID NO: 195241 - DNA, 25 bp, Probe sequence
gcgtgacgttataaacgaatggatt

SEQ ID NO: 195242 - DNA, 25 bp, Probe sequence
gaataatgttccacttaaatcgttt

SEQ ID NO: 195243 - DNA, 25 bp, Probe sequence
gaatggattgaaaataacacagatg

SEQ ID NO: 195244 - DNA, 25 bp, Probe sequence
gacatgacggtatcagtatacaaat

SEQ ID NO: 195245 - DNA, 25 bp, Probe sequence
gacggtatcagtatacaaatcaagg

SEQ ID NO: 195246 - DNA, 25 bp, Probe sequence
gacggatgcaatgcgtgacgttata

SEQ ID NO: 195247 - DNA, 25 bp, Probe sequence
gagacatgacggtatcagtatacaa

SEQ ID NO: 195248 - DNA, 25 bp, Probe sequence
gttccacttaaatcgtttcatgtca

SEQ ID NO: 195249 - DNA, 25 bp, Probe sequence
gtttcatgtcatagatttaagcgaa

SEQ ID NO: 195250 - DNA, 25 bp, Probe sequence
ggatatgaataatgttccacttaaa

SEQ ID NO: 195251 - DNA, 25 bp, Probe sequence
ggatgcaatgcgtgacgttataaac

SEQ ID NO: 195252 - DNA, 25 bp, Probe sequence
ggacaaactaattaacttagtcatg

SEQ ID NO: 195253 - DNA, 25 bp, Probe sequence
tgttccacttaaatcgtttcatgtc

SEQ ID NO: 195254 - DNA, 25 bp, Probe sequence
tgaacaggacaaactaattaactta

SEQ ID NO: 195255 - DNA, 25 bp, Probe sequence
tgcaatgcgtgacgttataaacgaa

SEQ ID NO: 195256 - DNA, 25 bp, Probe sequence
tgcgacggatgcaatgcgtgacgtt

SEQ ID NO: 195257 - DNA, 25 bp, Probe sequence
tccacttaaatcgtttcatgtcata

SEQ ID NO: 195258 - DNA, 25 bp, Probe sequence
tcatgtcatagatttaagcgaacta

SEQ ID NO: 195259 - DNA, 25 bp, Probe sequence
taattaacttagtcatgaaatggta

SEQ ID NO: 195260 - DNA, 25 bp, Probe sequence
ttaagcgaactatatattgcgacgg

SEQ ID NO: 195261 - DNA, 25 bp, Probe sequence
ttccacttaaatcgtttcatgtcat

SEQ ID NO: 195262 - DNA, 25 bp, Probe sequence
attatggtaagtcaagttatctatg

SEQ ID NO: 195263 - DNA, 25 bp, Probe sequence
atacaaggaggaactggagaatgaa

SEQ ID NO: 195264 - DNA, 25 bp, Probe sequence
atctatgaatacaaggaggaactgg

SEQ ID NO: 195265 - DNA, 25 bp, Probe sequence
atgctattcaacattcagttaaaga

SEQ ID NO: 195266 - DNA, 25 bp, Probe sequence
atgacaaatgctattcaacattcag

SEQ ID NO: 195267 - DNA, 25 bp, Probe sequence
atggtaagtcaagttatctatgaat

SEQ ID NO: 195268 - DNA, 25 bp, Probe sequence
acaaatgctattcaacattcagtta

SEQ ID NO: 195269 - DNA, 25 bp, Probe sequence
acaaggaggaactggagaatgaaaa

SEQ ID NO: 195270 - DNA, 25 bp, Probe sequence
aaatgctattcaacattcagttaaa

SEQ ID NO: 195271 - DNA, 25 bp, Probe sequence
aagaaggtattgaacttgatgaagc

SEQ ID NO: 195272 - DNA, 25 bp, Probe sequence
aagttatctatgaatacaaggagga

SEQ ID NO: 195273 - DNA, 25 bp, Probe sequence
aagtcaagttatctatgaatacaag

SEQ ID NO: 195274 - DNA, 25 bp, Probe sequence
aatgctattcaacattcagttaaag

SEQ ID NO: 195275 - DNA, 25 bp, Probe sequence
aatagggattatggtaagtcaagtt

SEQ ID NO: 195276 - DNA, 25 bp, Probe sequence
caaatgctattcaacattcagttaa

SEQ ID NO: 195277 - DNA, 25 bp, Probe sequence
gctattcaacattcagttaaagaag

SEQ ID NO: 195278 - DNA, 25 bp, Probe sequence
gcaatagggattatggtaagtcaag

SEQ ID NO: 195279 - DNA, 25 bp, Probe sequence
gaatacaaggaggaactggagaatg

SEQ ID NO: 195280 - DNA, 25 bp, Probe sequence
gaaggtattgaacttgatgaagcaa

SEQ ID NO: 195281 - DNA, 25 bp, Probe sequence
gaagcaatagggattatggtaagtc

SEQ ID NO: 195282 - DNA, 25 bp, Probe sequence
gaacttgatgaagcaatagggatta

SEQ ID NO: 195283 - DNA, 25 bp, Probe sequence
gacaaatgctattcaacattcagtt

SEQ ID NO: 195284 - DNA, 25 bp, Probe sequence
gattatggtaagtcaagttatctat

SEQ ID NO: 195285 - DNA, 25 bp, Probe sequence
gttatctatgaatacaaggaggaac

SEQ ID NO: 195286 - DNA, 25 bp, Probe sequence
gtaagtcaagttatctatgaataca

SEQ ID NO: 195287 - DNA, 25 bp, Probe sequence
gtcaagttatctatgaatacaagga

SEQ ID NO: 195288 - DNA, 25 bp, Probe sequence
gggattatggtaagtcaagttatct

SEQ ID NO: 195289 - DNA, 25 bp, Probe sequence
ggtaagtcaagttatctatgaatac

SEQ ID NO: 195290 - DNA, 25 bp, Probe sequence
ggattatggtaagtcaagttatcta

SEQ ID NO: 195291 - DNA, 25 bp, Probe sequence
tgacaaatgctattcaacattcagt

SEQ ID NO: 195292 - DNA, 25 bp, Probe sequence
tgctattcaacattcagttaaagaa

SEQ ID NO: 195293 - DNA, 25 bp, Probe sequence
tagggattatggtaagtcaagttat

SEQ ID NO: 195294 - DNA, 25 bp, Probe sequence
ttatggtaagtcaagttatctatga

SEQ ID NO: 195295 - DNA, 25 bp, Probe sequence
ttcaacattcagttaaagaaggtat

SEQ ID NO: 195296 - DNA, 25 bp, Probe sequence
atgttacgaaacctagaagaaatgg

SEQ ID NO: 195297 - DNA, 25 bp, Probe sequence
atgtcacatgcatcgtaatacagtt

SEQ ID NO: 195298 - DNA, 25 bp, Probe sequence
agcggtagcgtatcatgcaggtatc

SEQ ID NO: 195299 - DNA, 25 bp, Probe sequence
agcgtatcatgcaggtatcaaataa

SEQ ID NO: 195300 - DNA, 25 bp, Probe sequence
actttgttaaagcggtagcgtatca

SEQ ID NO: 195301 - DNA, 25 bp, Probe sequence
acttaaagttacctgaagatcataa

SEQ ID NO: 195302 - DNA, 25 bp, Probe sequence
aaagcggtagcgtatcatgcaggta

SEQ ID NO: 195303 - DNA, 25 bp, Probe sequence
aagcggtagcgtatcatgcaggtat

SEQ ID NO: 195304 - DNA, 25 bp, Probe sequence
aatggtcgaagcagttgaaagtgaa

SEQ ID NO: 195305 - DNA, 25 bp, Probe sequence
caaataggagatgcatgtcacatgc

SEQ ID NO: 195306 - DNA, 25 bp, Probe sequence
catgcatcgtaatacagttactact

SEQ ID NO: 195307 - DNA, 25 bp, Probe sequence
catgtcacatgcatcgtaatacagt

SEQ ID NO: 195308 - DNA, 25 bp, Probe sequence
cggtagcgtatcatgcaggtatcaa

SEQ ID NO: 195309 - DNA, 25 bp, Probe sequence
cgaagcagttgaaagtgaatactta

SEQ ID NO: 195310 - DNA, 25 bp, Probe sequence
gcggtagcgtatcatgcaggtatca

SEQ ID NO: 195311 - DNA, 25 bp, Probe sequence
gcatcgtaatacagttactactata

SEQ ID NO: 195312 - DNA, 25 bp, Probe sequence
gcatgtcacatgcatcgtaatacag

SEQ ID NO: 195313 - DNA, 25 bp, Probe sequence
gaatacttaaagttacctgaagatc

SEQ ID NO: 195314 - DNA, 25 bp, Probe sequence
gaagaaatggtcgaagcagttgaaa

SEQ ID NO: 195315 - DNA, 25 bp, Probe sequence
gaactttgttaaagcggtagcgtat

SEQ ID NO: 195316 - DNA, 25 bp, Probe sequence
gaaatggtcgaagcagttgaaagtg

SEQ ID NO: 195317 - DNA, 25 bp, Probe sequence
gagcaaataggagatgcatgtcaca

SEQ ID NO: 195318 - DNA, 25 bp, Probe sequence
gttaaagcggtagcgtatcatgcag

SEQ ID NO: 195319 - DNA, 25 bp, Probe sequence
gttacctgaagatcataagaaagta

SEQ ID NO: 195320 - DNA, 25 bp, Probe sequence
gtagcgtatcatgcaggtatcaaat

SEQ ID NO: 195321 - DNA, 25 bp, Probe sequence
gtaattaggctaaagtattggaata

SEQ ID NO: 195322 - DNA, 25 bp, Probe sequence
gtaatacagttactactatacgaaa

SEQ ID NO: 195323 - DNA, 25 bp, Probe sequence
gtcacatgcatcgtaatacagttac

SEQ ID NO: 195324 - DNA, 25 bp, Probe sequence
ggtcgaagcagttgaaagtgaatac

SEQ ID NO: 195325 - DNA, 25 bp, Probe sequence
ggtagcgtatcatgcaggtatcaaa

SEQ ID NO: 195326 - DNA, 25 bp, Probe sequence
taaagcggtagcgtatcatgcaggt

SEQ ID NO: 195327 - DNA, 25 bp, Probe sequence
tacagttactactatacgaaagaac

SEQ ID NO: 195328 - DNA, 25 bp, Probe sequence
tactactatacgaaagaactttgtt

SEQ ID NO: 195329 - DNA, 25 bp, Probe sequence
ttgttaaagcggtagcgtatcatgc

SEQ ID NO: 195330 - DNA, 25 bp, Probe sequence
attgttatgattgcagtcattactg

SEQ ID NO: 195331 - DNA, 25 bp, Probe sequence
attactgcatcaattactgcgttat

SEQ ID NO: 195332 - DNA, 25 bp, Probe sequence
atcaattactgcgttattaccttaa

SEQ ID NO: 195333 - DNA, 25 bp, Probe sequence
atgggcgcttgtaacaattgttatg

SEQ ID NO: 195334 - DNA, 25 bp, Probe sequence
aggtgccatatgggcgcttgtaaca

SEQ ID NO: 195335 - DNA, 25 bp, Probe sequence
caattactgcgttattaccttaagg

SEQ ID NO: 195336 - DNA, 25 bp, Probe sequence
catgctatttgtatggtcgtaaatg

SEQ ID NO: 195337 - DNA, 25 bp, Probe sequence
gccatatgggcgcttgtaacaattg

SEQ ID NO: 195338 - DNA, 25 bp, Probe sequence
gctcgtaggtgccatatgggcgctt

SEQ ID NO: 195339 - DNA, 25 bp, Probe sequence
gcatcaattactgcgttattacctt

SEQ ID NO: 195340 - DNA, 25 bp, Probe sequence
gcagtcattactgcatcaattactg

SEQ ID NO: 195341 - DNA, 25 bp, Probe sequence
gcaagatggttgtcatgctatttgt

SEQ ID NO: 195342 - DNA, 25 bp, Probe sequence
gagttgggcaagatggttgtcatgc

SEQ ID NO: 195343 - DNA, 25 bp, Probe sequence
gatggttgtcatgctatttgtatgg

SEQ ID NO: 195344 - DNA, 25 bp, Probe sequence
gttgggcaagatggttgtcatgcta

SEQ ID NO: 195345 - DNA, 25 bp, Probe sequence
gtaggtgccatatgggcgcttgtaa

SEQ ID NO: 195346 - DNA, 25 bp, Probe sequence
gtcatgctatttgtatggtcgtaaa

SEQ ID NO: 195347 - DNA, 25 bp, Probe sequence
gtcattactgcatcaattactgcgt

SEQ ID NO: 195348 - DNA, 25 bp, Probe sequence
gggcgcttgtaacaattgttatgat

SEQ ID NO: 195349 - DNA, 25 bp, Probe sequence
ggtgccatatgggcgcttgtaacaa

SEQ ID NO: 195350 - DNA, 25 bp, Probe sequence
ggttgtcatgctatttgtatggtcg

SEQ ID NO: 195351 - DNA, 25 bp, Probe sequence
ggaggtggacaaaatgagttgggca

SEQ ID NO: 195352 - DNA, 25 bp, Probe sequence
ggctcgtaggtgccatatgggcgct

SEQ ID NO: 195353 - DNA, 25 bp, Probe sequence
tgcgttattaccttaagggaggtgg

SEQ ID NO: 195354 - DNA, 25 bp, Probe sequence
tgggcaagatggttgtcatgctatt

SEQ ID NO: 195355 - DNA, 25 bp, Probe sequence
tgtcatgctatttgtatggtcgtaa

SEQ ID NO: 195356 - DNA, 25 bp, Probe sequence
tgcatcaattactgcgttattacct

SEQ ID NO: 195357 - DNA, 25 bp, Probe sequence
tgctatttgtatggtcgtaaatgta

SEQ ID NO: 195358 - DNA, 25 bp, Probe sequence
tgccatatgggcgcttgtaacaatt

SEQ ID NO: 195359 - DNA, 25 bp, Probe sequence
tcgtaggtgccatatgggcgcttgt

SEQ ID NO: 195360 - DNA, 25 bp, Probe sequence
tactgcgttattaccttaagggagg

SEQ ID NO: 195361 - DNA, 25 bp, Probe sequence
tactgcatcaattactgcgttatta

SEQ ID NO: 195362 - DNA, 25 bp, Probe sequence
ttactgcgttattaccttaagggag

SEQ ID NO: 195363 - DNA, 25 bp, Probe sequence
tttgtatggtcgtaaatgtaaataa

SEQ ID NO: 195364 - DNA, 25 bp, Probe sequence
atagaacgtgtatcacaggtgatgg

SEQ ID NO: 195365 - DNA, 25 bp, Probe sequence
atggtgtgttatcactcgatcttac

SEQ ID NO: 195366 - DNA, 25 bp, Probe sequence
atggcgcctatgctaagcgaccagt

SEQ ID NO: 195367 - DNA, 25 bp, Probe sequence
actcgatcttactactgttcttatt

SEQ ID NO: 195368 - DNA, 25 bp, Probe sequence
actactgttcttattcttaaccaat

SEQ ID NO: 195369 - DNA, 25 bp, Probe sequence
aaagcgcgtcaaaaatggacattga

SEQ ID NO: 195370 - DNA, 25 bp, Probe sequence
aaaaagctcataaatccagcaacaa

SEQ ID NO: 195371 - DNA, 25 bp, Probe sequence
aagctcataaatccagcaacaaatg

SEQ ID NO: 195372 - DNA, 25 bp, Probe sequence
aagagccttatgacaaacacacaga

SEQ ID NO: 195373 - DNA, 25 bp, Probe sequence
aagtacaatacacacagaagccata

SEQ ID NO: 195374 - DNA, 25 bp, Probe sequence
caaagagccttatgacaaacacaca

SEQ ID NO: 195375 - DNA, 25 bp, Probe sequence
cactcaatcctaaagcgcgtcaaaa

SEQ ID NO: 195376 - DNA, 25 bp, Probe sequence
cattcacttgatgaagacgattagt

SEQ ID NO: 195377 - DNA, 25 bp, Probe sequence
cttatggcgcctatgctaagcgacc

SEQ ID NO: 195378 - DNA, 25 bp, Probe sequence
gcgaccagttgttatagaacgtgta

SEQ ID NO: 195379 - DNA, 25 bp, Probe sequence
gcgatgacaaacagcaccgctattt

SEQ ID NO: 195380 - DNA, 25 bp, Probe sequence
gaaccttaaacatatcaaagagcct

SEQ ID NO: 195381 - DNA, 25 bp, Probe sequence
gacaaacacacagacattcacttga

SEQ ID NO: 195382 - DNA, 25 bp, Probe sequence
gatcttactactgttcttattctta

SEQ ID NO: 195383 - DNA, 25 bp, Probe sequence
gattctagcttatggcgcctatgct

SEQ ID NO: 195384 - DNA, 25 bp, Probe sequence
gttgttatagaacgtgtatcacagg

SEQ ID NO: 195385 - DNA, 25 bp, Probe sequence
gttcttattcttaaccaattagcga

SEQ ID NO: 195386 - DNA, 25 bp, Probe sequence
gtgttatcactcgatcttactactg

SEQ ID NO: 195387 - DNA, 25 bp, Probe sequence
gtgtgttatcactcgatcttactac

SEQ ID NO: 195388 - DNA, 25 bp, Probe sequence
tgtacccccatttagatggtgtgtt

SEQ ID NO: 195389 - DNA, 25 bp, Probe sequence
tgacaaacagcaccgctatttactc

SEQ ID NO: 195390 - DNA, 25 bp, Probe sequence
tctagcttatggcgcctatgctaag

SEQ ID NO: 195391 - DNA, 25 bp, Probe sequence
tcactcgatcttactactgttctta

SEQ ID NO: 195392 - DNA, 25 bp, Probe sequence
tcaatcctaaagcgcgtcaaaaatg

SEQ ID NO: 195393 - DNA, 25 bp, Probe sequence
tatgcatccactcaatcctaaagcg

SEQ ID NO: 195394 - DNA, 25 bp, Probe sequence
tatttagcgatgacaaacagcaccg

SEQ ID NO: 195395 - DNA, 25 bp, Probe sequence
ttcttaaccaattagcgaattctga

SEQ ID NO: 195396 - DNA, 25 bp, Probe sequence
ttatcactcgatcttactactgttc

SEQ ID NO: 195397 - DNA, 25 bp, Probe sequence
ttagcgaattctgaacaatatggtg

SEQ ID NO: 195398 - DNA, 25 bp, Probe sequence
attagtaaacaactatctctagacc

SEQ ID NO: 195399 - DNA, 25 bp, Probe sequence
atacatcacaaaaggcattagtaaa

SEQ ID NO: 195400 - DNA, 25 bp, Probe sequence
atcacaaaaggcattagtaaacaac

SEQ ID NO: 195401 - DNA, 25 bp, Probe sequence
atcgatacatcacaaaaggcattag

SEQ ID NO: 195402 - DNA, 25 bp, Probe sequence
atcgagacaatcaacttaatacaga

SEQ ID NO: 195403 - DNA, 25 bp, Probe sequence
aggcattagtaaacaactatctcta

SEQ ID NO: 195404 - DNA, 25 bp, Probe sequence
agatcgagacaatcaacttaataca

SEQ ID NO: 195405 - DNA, 25 bp, Probe sequence
acatcacaaaaggcattagtaaaca

SEQ ID NO: 195406 - DNA, 25 bp, Probe sequence
acaatcaacttaatacagattacct

SEQ ID NO: 195407 - DNA, 25 bp, Probe sequence
aaaggcattagtaaacaactatctc

SEQ ID NO: 195408 - DNA, 25 bp, Probe sequence
aaagatcgagacaatcaacttaata

SEQ ID NO: 195409 - DNA, 25 bp, Probe sequence
aaaagatcgagacaatcaacttaat

SEQ ID NO: 195410 - DNA, 25 bp, Probe sequence
aagatcgagacaatcaacttaatac

SEQ ID NO: 195411 - DNA, 25 bp, Probe sequence
aaggcattagtaaacaactatctct

SEQ ID NO: 195412 - DNA, 25 bp, Probe sequence
aatcaacttaatacagattacctac

SEQ ID NO: 195413 - DNA, 25 bp, Probe sequence
caatcaacttaatacagattaccta

SEQ ID NO: 195414 - DNA, 25 bp, Probe sequence
cattagtaaacaactatctctagac

SEQ ID NO: 195415 - DNA, 25 bp, Probe sequence
cgatacatcacaaaaggcattagta

SEQ ID NO: 195416 - DNA, 25 bp, Probe sequence
cgagacaatcaacttaatacagatt

SEQ ID NO: 195417 - DNA, 25 bp, Probe sequence
gcattagtaaacaactatctctaga

SEQ ID NO: 195418 - DNA, 25 bp, Probe sequence
gaatatggtaaaagatcgagacaat

SEQ ID NO: 195419 - DNA, 25 bp, Probe sequence
gacaatcaacttaatacagattacc

SEQ ID NO: 195420 - DNA, 25 bp, Probe sequence
gagacaatcaacttaatacagatta

SEQ ID NO: 195421 - DNA, 25 bp, Probe sequence
gatcgagacaatcaacttaatacag

SEQ ID NO: 195422 - DNA, 25 bp, Probe sequence
gatacatcacaaaaggcattagtaa

SEQ ID NO: 195423 - DNA, 25 bp, Probe sequence
gtaaaagatcgagacaatcaactta

SEQ ID NO: 195424 - DNA, 25 bp, Probe sequence
ggtaaaagatcgagacaatcaactt

SEQ ID NO: 195425 - DNA, 25 bp, Probe sequence
ggcattagtaaacaactatctctag

SEQ ID NO: 195426 - DNA, 25 bp, Probe sequence
tcgagacaatcaacttaatacagat

SEQ ID NO: 195427 - DNA, 25 bp, Probe sequence
tcgatacatcacaaaaggcattagt

SEQ ID NO: 195428 - DNA, 25 bp, Probe sequence
taaaagatcgagacaatcaacttaa

SEQ ID NO: 195429 - DNA, 25 bp, Probe sequence
tacaagaagatgaaaatatactctc

SEQ ID NO: 195430 - DNA, 25 bp, Probe sequence
tagtaaacaactatctctagacctt

SEQ ID NO: 195431 - DNA, 25 bp, Probe sequence
ttagtaaacaactatctctagacct

SEQ ID NO: 195432 - DNA, 25 bp, Probe sequence
attttgttaaaaatgcgccaagtgt

SEQ ID NO: 195433 - DNA, 25 bp, Probe sequence
atccaaatgacttacgagcaagaag

SEQ ID NO: 195434 - DNA, 25 bp, Probe sequence
atgacttacgagcaagaagatgatt

SEQ ID NO: 195435 - DNA, 25 bp, Probe sequence
atgactaatatacaaaggatgatcc

SEQ ID NO: 195436 - DNA, 25 bp, Probe sequence
atgatccaaatgacttacgagcaag

SEQ ID NO: 195437 - DNA, 25 bp, Probe sequence
aggatgatccaaatgacttacgagc

SEQ ID NO: 195438 - DNA, 25 bp, Probe sequence
agggacaagtatttactttccatga

SEQ ID NO: 195439 - DNA, 25 bp, Probe sequence
aaatgacttacgagcaagaagatga

SEQ ID NO: 195440 - DNA, 25 bp, Probe sequence
aaaggatgatccaaatgacttacga

SEQ ID NO: 195441 - DNA, 25 bp, Probe sequence
aaggatgatccaaatgacttacgag

SEQ ID NO: 195442 - DNA, 25 bp, Probe sequence
aatgacttacgagcaagaagatgat

SEQ ID NO: 195443 - DNA, 25 bp, Probe sequence
caaatgacttacgagcaagaagatg

SEQ ID NO: 195444 - DNA, 25 bp, Probe sequence
ctaatccactccaagatagcaaccc

SEQ ID NO: 195445 - DNA, 25 bp, Probe sequence
ccaaatgacttacgagcaagaagat

SEQ ID NO: 195446 - DNA, 25 bp, Probe sequence
gaagatgattttaaactgttgaaaa

SEQ ID NO: 195447 - DNA, 25 bp, Probe sequence
gaagaattttaggaattggattcgt

SEQ ID NO: 195448 - DNA, 25 bp, Probe sequence
gactaatatacaaaggatgatccaa

SEQ ID NO: 195449 - DNA, 25 bp, Probe sequence
gagggacaagtatttactttccatg

SEQ ID NO: 195450 - DNA, 25 bp, Probe sequence
gatgattttaaactgttgaaaagaa

SEQ ID NO: 195451 - DNA, 25 bp, Probe sequence
gatgatccaaatgacttacgagcaa

SEQ ID NO: 195452 - DNA, 25 bp, Probe sequence
gatccaaatgacttacgagcaagaa

SEQ ID NO: 195453 - DNA, 25 bp, Probe sequence
gttaaaaatgcgccaagtgttccat

SEQ ID NO: 195454 - DNA, 25 bp, Probe sequence
ggagggacaagtatttactttccat

SEQ ID NO: 195455 - DNA, 25 bp, Probe sequence
ggatgatccaaatgacttacgagca

SEQ ID NO: 195456 - DNA, 25 bp, Probe sequence
ggacctaatccactccaagatagca

SEQ ID NO: 195457 - DNA, 25 bp, Probe sequence
tgttaaaaatgcgccaagtgttcca

SEQ ID NO: 195458 - DNA, 25 bp, Probe sequence
tgatccaaatgacttacgagcaaga

SEQ ID NO: 195459 - DNA, 25 bp, Probe sequence
tgatgactaatatacaaaggatgat

SEQ ID NO: 195460 - DNA, 25 bp, Probe sequence
tccaaatgacttacgagcaagaaga

SEQ ID NO: 195461 - DNA, 25 bp, Probe sequence
taaaaatgcgccaagtgttccattt

SEQ ID NO: 195462 - DNA, 25 bp, Probe sequence
tttgttaaaaatgcgccaagtgttc

SEQ ID NO: 195463 - DNA, 25 bp, Probe sequence
ttgttaaaaatgcgccaagtgttcc

SEQ ID NO: 195464 - DNA, 25 bp, Probe sequence
ttttgttaaaaatgcgccaagtgtt

SEQ ID NO: 195465 - DNA, 25 bp, Probe sequence
ttaaaaatgcgccaagtgttccatt

SEQ ID NO: 195466 - DNA, 25 bp, Probe sequence
attagtaagtgatttgacatatgta

SEQ ID NO: 195467 - DNA, 25 bp, Probe sequence
atcatttgatagatgaagtcctaga

SEQ ID NO: 195468 - DNA, 25 bp, Probe sequence
atcgcgcttttaatagagaacaacc

SEQ ID NO: 195469 - DNA, 25 bp, Probe sequence
atgataacgcagttgcggaagcaac

SEQ ID NO: 195470 - DNA, 25 bp, Probe sequence
atggcattacatatgtttatttata

SEQ ID NO: 195471 - DNA, 25 bp, Probe sequence
agaccacattcttcattacagtatt

SEQ ID NO: 195472 - DNA, 25 bp, Probe sequence
accacattcttcattacagtatttg

SEQ ID NO: 195473 - DNA, 25 bp, Probe sequence
acagtatttgacgccagtggcattt

SEQ ID NO: 195474 - DNA, 25 bp, Probe sequence
acagtgcaggtaaaaataaggacgc

SEQ ID NO: 195475 - DNA, 25 bp, Probe sequence
aaatcatttgaatcgcgcttttaat

SEQ ID NO: 195476 - DNA, 25 bp, Probe sequence
aaaaatcatttgaatcgcgctttta

SEQ ID NO: 195477 - DNA, 25 bp, Probe sequence
aacaattttagaccacattcttcat

SEQ ID NO: 195478 - DNA, 25 bp, Probe sequence
aacgcagttgcggaagcaacgatga

SEQ ID NO: 195479 - DNA, 25 bp, Probe sequence
aatggagacattagtaagtgatttg

SEQ ID NO: 195480 - DNA, 25 bp, Probe sequence
aattttagaccacattcttcattac

SEQ ID NO: 195481 - DNA, 25 bp, Probe sequence
cattacagtatttgacgccagtggc

SEQ ID NO: 195482 - DNA, 25 bp, Probe sequence
gcgcttttaatagagaacaaccaat

SEQ ID NO: 195483 - DNA, 25 bp, Probe sequence
gcggaagcaacgatgaaagcaatga

SEQ ID NO: 195484 - DNA, 25 bp, Probe sequence
gcaatcagcagaataaatcataatc

SEQ ID NO: 195485 - DNA, 25 bp, Probe sequence
gaaattgttggttacagtgcaggta

SEQ ID NO: 195486 - DNA, 25 bp, Probe sequence
gagaacaaccaatggagacattagt

SEQ ID NO: 195487 - DNA, 25 bp, Probe sequence
gttgtccttatgataacgcagttgc

SEQ ID NO: 195488 - DNA, 25 bp, Probe sequence
gtatttgacgccagtggcatttaaa

SEQ ID NO: 195489 - DNA, 25 bp, Probe sequence
gtatcaaaagcaatcagcagaataa

SEQ ID NO: 195490 - DNA, 25 bp, Probe sequence
gtacaacaattttagaccacattct

SEQ ID NO: 195491 - DNA, 25 bp, Probe sequence
gtccttatgataacgcagttgcgga

SEQ ID NO: 195492 - DNA, 25 bp, Probe sequence
ggaacatggcattacatatgtttat

SEQ ID NO: 195493 - DNA, 25 bp, Probe sequence
tgaatcgcgcttttaatagagaaca

SEQ ID NO: 195494 - DNA, 25 bp, Probe sequence
tcttcattacagtatttgacgccag

SEQ ID NO: 195495 - DNA, 25 bp, Probe sequence
tcatttgaatcgcgcttttaataga

SEQ ID NO: 195496 - DNA, 25 bp, Probe sequence
taaatcataatcttgaacaaatcaa

SEQ ID NO: 195497 - DNA, 25 bp, Probe sequence
tttgacgccagtggcatttaaaaat

SEQ ID NO: 195498 - DNA, 25 bp, Probe sequence
tttagaccacattcttcattacagt

SEQ ID NO: 195499 - DNA, 25 bp, Probe sequence
ttacagtatttgacgccagtggcat

SEQ ID NO: 195500 - DNA, 25 bp, Probe sequence
attaggtgaactcaatgtatcagat

SEQ ID NO: 195501 - DNA, 25 bp, Probe sequence
atcaagcgagtccaaatgctaagac

SEQ ID NO: 195502 - DNA, 25 bp, Probe sequence
atggtgcaattcgaggacgtcaagt

SEQ ID NO: 195503 - DNA, 25 bp, Probe sequence
aggtgaactcaatgtatcagattta

SEQ ID NO: 195504 - DNA, 25 bp, Probe sequence
agtctattgggcgtattgaaagatg

SEQ ID NO: 195505 - DNA, 25 bp, Probe sequence
agatgctttaaatggtgcaattcga

SEQ ID NO: 195506 - DNA, 25 bp, Probe sequence
agaagtctattgggcgtattgaaag

SEQ ID NO: 195507 - DNA, 25 bp, Probe sequence
aaatggtgcaattcgaggacgtcaa

SEQ ID NO: 195508 - DNA, 25 bp, Probe sequence
aatggtgcaattcgaggacgtcaag

SEQ ID NO: 195509 - DNA, 25 bp, Probe sequence
caatcaagcgagtccaaatgctaag

SEQ ID NO: 195510 - DNA, 25 bp, Probe sequence
aattcgaggacgtcaagtcatcata

SEQ ID NO: 195511 - DNA, 25 bp, Probe sequence
caagcgagtccaaatgctaagacaa

SEQ ID NO: 195512 - DNA, 25 bp, Probe sequence
catacatgcttaatatgctaaaagg

SEQ ID NO: 195513 - DNA, 25 bp, Probe sequence
cgaggacgtcaagtcatcataaata

SEQ ID NO: 195514 - DNA, 25 bp, Probe sequence
gctttaaatggtgcaattcgaggac

SEQ ID NO: 195515 - DNA, 25 bp, Probe sequence
gcaattcgaggacgtcaagtcatca

SEQ ID NO: 195516 - DNA, 25 bp, Probe sequence
gacaactataagaagtctattgggc

SEQ ID NO: 195517 - DNA, 25 bp, Probe sequence
gaggcaattgcagcgaataaagata

SEQ ID NO: 195518 - DNA, 25 bp, Probe sequence
gatttaagcgacttcctaaataaag

SEQ ID NO: 195519 - DNA, 25 bp, Probe sequence
gtgcaattcgaggacgtcaagtcat

SEQ ID NO: 195520 - DNA, 25 bp, Probe sequence
gggcgtattgaaagatgacgacatg

SEQ ID NO: 195521 - DNA, 25 bp, Probe sequence
ggtgcaattcgaggacgtcaagtca

SEQ ID NO: 195522 - DNA, 25 bp, Probe sequence
ggtatttttattaggtgaactcaat

SEQ ID NO: 195523 - DNA, 25 bp, Probe sequence
ggacgtcaagtcatcataaataaat

SEQ ID NO: 195524 - DNA, 25 bp, Probe sequence
ggcaattgcagcgaataaagatagt

SEQ ID NO: 195525 - DNA, 25 bp, Probe sequence
tggtgcaattcgaggacgtcaagtc

SEQ ID NO: 195526 - DNA, 25 bp, Probe sequence
tcagatttaagcgacttcctaaata

SEQ ID NO: 195527 - DNA, 25 bp, Probe sequence
taataaaggattacacgttgccaat

SEQ ID NO: 195528 - DNA, 25 bp, Probe sequence
taagaagtctattgggcgtattgaa

SEQ ID NO: 195529 - DNA, 25 bp, Probe sequence
taacatacatgcttaatatgctaaa

SEQ ID NO: 195530 - DNA, 25 bp, Probe sequence
taaatggtgcaattcgaggacgtca

SEQ ID NO: 195531 - DNA, 25 bp, Probe sequence
taaataaatttgcagttgaacttaa

SEQ ID NO: 195532 - DNA, 25 bp, Probe sequence
tacagaggcaattgcagcgaataaa

SEQ ID NO: 195533 - DNA, 25 bp, Probe sequence
ttcgaggacgtcaagtcatcataaa

SEQ ID NO: 195534 - DNA, 25 bp, Probe sequence
attggaaaagcaactgctgcaagct

SEQ ID NO: 195535 - DNA, 25 bp, Probe sequence
atagcaagtcctgcatctggacaaa

SEQ ID NO: 195536 - DNA, 25 bp, Probe sequence
atggcgaaacgaaagatatggatct

SEQ ID NO: 195537 - DNA, 25 bp, Probe sequence
acccaatcgcttatgcatacaattt

SEQ ID NO: 195538 - DNA, 25 bp, Probe sequence
acaagctatgtaacaactgataatg

SEQ ID NO: 195539 - DNA, 25 bp, Probe sequence
aacaacaagctatgtaacaactgat

SEQ ID NO: 195540 - DNA, 25 bp, Probe sequence
aagctggtaacccaatcgcttatgc

SEQ ID NO: 195541 - DNA, 25 bp, Probe sequence
aagcaactgctgcaagcttttcatt

SEQ ID NO: 195542 - DNA, 25 bp, Probe sequence
aatcactctagaatcagaaccgtct

SEQ ID NO: 195543 - DNA, 25 bp, Probe sequence
caatcgcttatgcatacaatttaga

SEQ ID NO: 195544 - DNA, 25 bp, Probe sequence
cactctagaatcagaaccgtctaaa

SEQ ID NO: 195545 - DNA, 25 bp, Probe sequence
cctgcatctggacaaattaaatcac

SEQ ID NO: 195546 - DNA, 25 bp, Probe sequence
gcatctggacaaattaaatcactta

SEQ ID NO: 195547 - DNA, 25 bp, Probe sequence
gcaagctggtaacccaatcgcttat

SEQ ID NO: 195548 - DNA, 25 bp, Probe sequence
gcaactgctgcaagcttttcattaa

SEQ ID NO: 195549 - DNA, 25 bp, Probe sequence
gcaagtcctgcatctggacaaatta

SEQ ID NO: 195550 - DNA, 25 bp, Probe sequence
gatggtaactacactaaagtttctc

SEQ ID NO: 195551 - DNA, 25 bp, Probe sequence
gatggtatggaaggttcaatggtgc

SEQ ID NO: 195552 - DNA, 25 bp, Probe sequence
gatatggatcttaaaatgcctcaaa

SEQ ID NO: 195553 - DNA, 25 bp, Probe sequence
gttcaatggtgcaagctggtaaccc

SEQ ID NO: 195554 - DNA, 25 bp, Probe sequence
gtaacccaatcgcttatgcatacaa

SEQ ID NO: 195555 - DNA, 25 bp, Probe sequence
gtaatacctgttaaaatcactctag

SEQ ID NO: 195556 - DNA, 25 bp, Probe sequence
gtgcaagctggtaacccaatcgctt

SEQ ID NO: 195557 - DNA, 25 bp, Probe sequence
gtgacaaactcgataaaggtgacaa

SEQ ID NO: 195558 - DNA, 25 bp, Probe sequence
ggtacaattgccaaattagatggta

SEQ ID NO: 195559 - DNA, 25 bp, Probe sequence
ggatcttaaaatgcctcaaaaaggt

SEQ ID NO: 195560 - DNA, 25 bp, Probe sequence
ggaaggttcaatggtgcaagctggt

SEQ ID NO: 195561 - DNA, 25 bp, Probe sequence
tggtgcaagctggtaacccaatcgc

SEQ ID NO: 195562 - DNA, 25 bp, Probe sequence
tggtaacccaatcgcttatgcatac

SEQ ID NO: 195563 - DNA, 25 bp, Probe sequence
tgctgcaagcttttcattaatgcca

SEQ ID NO: 195564 - DNA, 25 bp, Probe sequence
taaacaaggtgacaaactcgataaa

SEQ ID NO: 195565 - DNA, 25 bp, Probe sequence
taaaatagcaagtcctgcatctgga

SEQ ID NO: 195566 - DNA, 25 bp, Probe sequence
taaagtttctcaagtaatacctgtt

SEQ ID NO: 195567 - DNA, 25 bp, Probe sequence
tacctgttaaaatcactctagaatc

SEQ ID NO: 195568 - DNA, 25 bp, Probe sequence
attgcagactacccagcggataaat

SEQ ID NO: 195569 - DNA, 25 bp, Probe sequence
attaaaggtgtggctgttgagagta

SEQ ID NO: 195570 - DNA, 25 bp, Probe sequence
atatattaaaggtgtggctgttgag

SEQ ID NO: 195571 - DNA, 25 bp, Probe sequence
atattaaaggtgtggctgttgagag

SEQ ID NO: 195572 - DNA, 25 bp, Probe sequence
agtctgattgcagactacccagcgg

SEQ ID NO: 195573 - DNA, 25 bp, Probe sequence
aggtgtggctgttgagagtacatac

SEQ ID NO: 195574 - DNA, 25 bp, Probe sequence
acggcagtctaattatggagcatat

SEQ ID NO: 195575 - DNA, 25 bp, Probe sequence
actacccagcggataaattatatac

SEQ ID NO: 195576 - DNA, 25 bp, Probe sequence
aaaggtgtggctgttgagagtacat

SEQ ID NO: 195577 - DNA, 25 bp, Probe sequence
aaggtgtggctgttgagagtacata

SEQ ID NO: 195578 - DNA, 25 bp, Probe sequence
ctgattgcagactacccagcggata

SEQ ID NO: 195579 - DNA, 25 bp, Probe sequence
cggcagtctaattatggagcatatt

SEQ ID NO: 195580 - DNA, 25 bp, Probe sequence
gctgttgagagtacatacgttagtc

SEQ ID NO: 195581 - DNA, 25 bp, Probe sequence
gcaatatattaaaggtgtggctgtt

SEQ ID NO: 195582 - DNA, 25 bp, Probe sequence
gattgcagactacccagcggataaa

SEQ ID NO: 195583 - DNA, 25 bp, Probe sequence
gttgagagtacatacgttagtctga

SEQ ID NO: 195584 - DNA, 25 bp, Probe sequence
gttagtctgattgcagactacccag

SEQ ID NO: 195585 - DNA, 25 bp, Probe sequence
gtctaattatggagcatattatgca

SEQ ID NO: 195586 - DNA, 25 bp, Probe sequence
gtgtggctgttgagagtacatacgt

SEQ ID NO: 195587 - DNA, 25 bp, Probe sequence
gtggctgttgagagtacatacgtta

SEQ ID NO: 195588 - DNA, 25 bp, Probe sequence
ggtgtggctgttgagagtacatacg

SEQ ID NO: 195589 - DNA, 25 bp, Probe sequence
ggcagtctaattatggagcatatta

SEQ ID NO: 195590 - DNA, 25 bp, Probe sequence
ggctgttgagagtacatacgttagt

SEQ ID NO: 195591 - DNA, 25 bp, Probe sequence
tggctgttgagagtacatacgttag

SEQ ID NO: 195592 - DNA, 25 bp, Probe sequence
tgtggctgttgagagtacatacgtt

SEQ ID NO: 195593 - DNA, 25 bp, Probe sequence
tgttgagagtacatacgttagtctg

SEQ ID NO: 195594 - DNA, 25 bp, Probe sequence
tgattgcagactacccagcggataa

SEQ ID NO: 195595 - DNA, 25 bp, Probe sequence
tctgattgcagactacccagcggat

SEQ ID NO: 195596 - DNA, 25 bp, Probe sequence
tacggcagtctaattatggagcata

SEQ ID NO: 195597 - DNA, 25 bp, Probe sequence
tacccagcggataaattatatacaa

SEQ ID NO: 195598 - DNA, 25 bp, Probe sequence
ttagtctgattgcagactacccagc

SEQ ID NO: 195599 - DNA, 25 bp, Probe sequence
ttaaaggtgtggctgttgagagtac

SEQ ID NO: 195600 - DNA, 25 bp, Probe sequence
ttacggcagtctaattatggagcat

SEQ ID NO: 195601 - DNA, 25 bp, Probe sequence
ttgcagactacccagcggataaatt

SEQ ID NO: 195602 - DNA, 25 bp, Probe sequence
attggcgctatcgttggatcaggta

SEQ ID NO: 195603 - DNA, 25 bp, Probe sequence
attacttggtattacagaaccggct

SEQ ID NO: 195604 - DNA, 25 bp, Probe sequence
atttcaatcaatccagtacatgcag

SEQ ID NO: 195605 - DNA, 25 bp, Probe sequence
atcactcgacaattaggttactggt

SEQ ID NO: 195606 - DNA, 25 bp, Probe sequence
atgtttttgcgaatgcaccatttac

SEQ ID NO: 195607 - DNA, 25 bp, Probe sequence
atggctttatgaatttggtggtgca

SEQ ID NO: 195608 - DNA, 25 bp, Probe sequence
agtgcagcaaaacgctttggtggca

SEQ ID NO: 195609 - DNA, 25 bp, Probe sequence
agcaatcgcattaggaactgctgga

SEQ ID NO: 195610 - DNA, 25 bp, Probe sequence
agccatcgttgctggtggtttatta

SEQ ID NO: 195611 - DNA, 25 bp, Probe sequence
aaaaggtgtggcatctgccgcaggt

SEQ ID NO: 195612 - DNA, 25 bp, Probe sequence
aacaccattgttatctatttttata

SEQ ID NO: 195613 - DNA, 25 bp, Probe sequence
aacagcatttctaacattttcattt

SEQ ID NO: 195614 - DNA, 25 bp, Probe sequence
aacgacattaattgcagatgccact

SEQ ID NO: 195615 - DNA, 25 bp, Probe sequence
aatgctttcagatatctttgttccg

SEQ ID NO: 195616 - DNA, 25 bp, Probe sequence
gaaccggctatgtttggtgttaact

SEQ ID NO: 195617 - DNA, 25 bp, Probe sequence
catgcaggatggttacactactttg

SEQ ID NO: 195618 - DNA, 25 bp, Probe sequence
gccgcaggtatttcagcattacttg

SEQ ID NO: 195619 - DNA, 25 bp, Probe sequence
gcatatattgctttcttcaaggtta

SEQ ID NO: 195620 - DNA, 25 bp, Probe sequence
gcaggtaaggctattccatattggg

SEQ ID NO: 195621 - DNA, 25 bp, Probe sequence
gcaccatttacattattaccaattt

SEQ ID NO: 195622 - DNA, 25 bp, Probe sequence
gaagcatcaaccacttcggaagtca

SEQ ID NO: 195623 - DNA, 25 bp, Probe sequence
gatatccatttattggcgctatcgt

SEQ ID NO: 195624 - DNA, 25 bp, Probe sequence
gattattgtatgctccgattgttat

SEQ ID NO: 195625 - DNA, 25 bp, Probe sequence
gttacgcaaagttattccaacggtg

SEQ ID NO: 195626 - DNA, 25 bp, Probe sequence
gttcatccatcgctaatgagcgcat

SEQ ID NO: 195627 - DNA, 25 bp, Probe sequence
gtagcagcttatatcttagcctcaa

SEQ ID NO: 195628 - DNA, 25 bp, Probe sequence
gtggtgcagcaattgcagcgttctt

SEQ ID NO: 195629 - DNA, 25 bp, Probe sequence
ggtatgcatcatagctttatagctg

SEQ ID NO: 195630 - DNA, 25 bp, Probe sequence
ggttacactactttgttggtatgac

SEQ ID NO: 195631 - DNA, 25 bp, Probe sequence
ggatcaggtattggttcagcatata

SEQ ID NO: 195632 - DNA, 25 bp, Probe sequence
tgagcgcatacgatttcccaaaagc

SEQ ID NO: 195633 - DNA, 25 bp, Probe sequence
tctttgttccgattataccagccat

SEQ ID NO: 195634 - DNA, 25 bp, Probe sequence
ttcatttgtaggtccaatcactcga

SEQ ID NO: 195635 - DNA, 25 bp, Probe sequence
ttgcgacaatgtctaatgttgcaca

SEQ ID NO: 195636 - DNA, 25 bp, Probe sequence
aggaccattgtctgaagggacagtg

SEQ ID NO: 195637 - DNA, 25 bp, Probe sequence
attcatgcgattcacaatatctgtc

SEQ ID NO: 195638 - DNA, 25 bp, Probe sequence
attcacaatatctgtccacacaaac

SEQ ID NO: 195639 - DNA, 25 bp, Probe sequence
atatctgtccacacaaacaaggacc

SEQ ID NO: 195640 - DNA, 25 bp, Probe sequence
atctgtccacacaaacaaggaccat

SEQ ID NO: 195641 - DNA, 25 bp, Probe sequence
atgcgattcacaatatctgtccaca

SEQ ID NO: 195642 - DNA, 25 bp, Probe sequence
aggtattgttcaagaacctgatgaa

SEQ ID NO: 195643 - DNA, 25 bp, Probe sequence
agtggcaaaattcatgcgattcaca

SEQ ID NO: 195644 - DNA, 25 bp, Probe sequence
acaaggaccattgtctgaagggaca

SEQ ID NO: 195645 - DNA, 25 bp, Probe sequence
acaatatctgtccacacaaacaagg

SEQ ID NO: 195646 - DNA, 25 bp, Probe sequence
aaattcatgcgattcacaatatctg

SEQ ID NO: 195647 - DNA, 25 bp, Probe sequence
catgcgattcacaatatctgtccac

SEQ ID NO: 195648 - DNA, 25 bp, Probe sequence
ctgtccacacaaacaaggaccattg

SEQ ID NO: 195649 - DNA, 25 bp, Probe sequence
cgattcacaatatctgtccacacaa

SEQ ID NO: 195650 - DNA, 25 bp, Probe sequence
cccgctccacgatcaaaaaattgat

SEQ ID NO: 195651 - DNA, 25 bp, Probe sequence
gcccgctccacgatcaaaaaattga

SEQ ID NO: 195652 - DNA, 25 bp, Probe sequence
gcgattcacaatatctgtccacaca

SEQ ID NO: 195653 - DNA, 25 bp, Probe sequence
gcaaaattcatgcgattcacaatat

SEQ ID NO: 195654 - DNA, 25 bp, Probe sequence
gaagggacagtgagtggggaatatg

SEQ ID NO: 195655 - DNA, 25 bp, Probe sequence
gaaagtggcaaaattcatgcgattc

SEQ ID NO: 195656 - DNA, 25 bp, Probe sequence
gaccattgtctgaagggacagtgag

SEQ ID NO: 195657 - DNA, 25 bp, Probe sequence
gattcacaatatctgtccacacaaa

SEQ ID NO: 195658 - DNA, 25 bp, Probe sequence
gggaatatgtattttgcccgctcca

SEQ ID NO: 195659 - DNA, 25 bp, Probe sequence
gtggggaatatgtattttgcccgct

SEQ ID NO: 195660 - DNA, 25 bp, Probe sequence
tggcaaaattcatgcgattcacaat

SEQ ID NO: 195661 - DNA, 25 bp, Probe sequence
tggggaatatgtattttgcccgctc

SEQ ID NO: 195662 - DNA, 25 bp, Probe sequence
tgcccgctccacgatcaaaaaattg

SEQ ID NO: 195663 - DNA, 25 bp, Probe sequence
tgcgattcacaatatctgtccacac

SEQ ID NO: 195664 - DNA, 25 bp, Probe sequence
tcatgcgattcacaatatctgtcca

SEQ ID NO: 195665 - DNA, 25 bp, Probe sequence
tcacaatatctgtccacacaaacaa

SEQ ID NO: 195666 - DNA, 25 bp, Probe sequence
taaatacaggtattgttcaagaacc

SEQ ID NO: 195667 - DNA, 25 bp, Probe sequence
tttgcccgctccacgatcaaaaaat

SEQ ID NO: 195668 - DNA, 25 bp, Probe sequence
ttcacaatatctgtccacacaaaca

SEQ ID NO: 195669 - DNA, 25 bp, Probe sequence
ttgcccgctccacgatcaaaaaatt

SEQ ID NO: 195670 - DNA, 25 bp, Probe sequence
atttttactctcaatcgttactgta

SEQ ID NO: 195671 - DNA, 25 bp, Probe sequence
atttgcgcatgtcatgacacctgaa

SEQ ID NO: 195672 - DNA, 25 bp, Probe sequence
atatgcaggtatggtattctttaac

SEQ ID NO: 195673 - DNA, 25 bp, Probe sequence
atcgttactgtatttatgttcggaa

SEQ ID NO: 195674 - DNA, 25 bp, Probe sequence
atgcttaaagcaatgatggccggat

SEQ ID NO: 195675 - DNA, 25 bp, Probe sequence
agatacatattcaacaggcgcaatt

SEQ ID NO: 195676 - DNA, 25 bp, Probe sequence
agctttaacagctttagttcagaaa

SEQ ID NO: 195677 - DNA, 25 bp, Probe sequence
accttgatgcagtttcatggttaca

SEQ ID NO: 195678 - DNA, 25 bp, Probe sequence
aacacctggccgatatatgcttaaa

SEQ ID NO: 195679 - DNA, 25 bp, Probe sequence
aaggcggcttaacaaaggcattctt

SEQ ID NO: 195680 - DNA, 25 bp, Probe sequence
aatattggtattttcatctctatgc

SEQ ID NO: 195681 - DNA, 25 bp, Probe sequence
caggcgcaattgttgattcaatatc

SEQ ID NO: 195682 - DNA, 25 bp, Probe sequence
cttcatgtactttacagtaggctgg

SEQ ID NO: 195683 - DNA, 25 bp, Probe sequence
ctggtattataaagtcgtttctgtt

SEQ ID NO: 195684 - DNA, 25 bp, Probe sequence
gaagatgacttggattttattatat

SEQ ID NO: 195685 - DNA, 25 bp, Probe sequence
gacacctgaaatgacacaagcttta

SEQ ID NO: 195686 - DNA, 25 bp, Probe sequence
gagcacgttgtgttcaatgcaggtc

SEQ ID NO: 195687 - DNA, 25 bp, Probe sequence
gatggccggatttttactctcaatc

SEQ ID NO: 195688 - DNA, 25 bp, Probe sequence
gttcggaataaagacgcagtttgcg

SEQ ID NO: 195689 - DNA, 25 bp, Probe sequence
gattcaatatcatcttcagtacaaa

SEQ ID NO: 195690 - DNA, 25 bp, Probe sequence
gttgtgttcaatgcaggtctatatg

SEQ ID NO: 195691 - DNA, 25 bp, Probe sequence
gttgtattaactaactctgaattat

SEQ ID NO: 195692 - DNA, 25 bp, Probe sequence
gtattctttaaccttgatgcagttt

SEQ ID NO: 195693 - DNA, 25 bp, Probe sequence
gtattttcatctctatgcaattcaa

SEQ ID NO: 195694 - DNA, 25 bp, Probe sequence
gtacagcaaacacctggccgatata

SEQ ID NO: 195695 - DNA, 25 bp, Probe sequence
gtctcgtttatgctttcttaaatgg

SEQ ID NO: 195696 - DNA, 25 bp, Probe sequence
gtggtgtcgtggtctttgtatacat

SEQ ID NO: 195697 - DNA, 25 bp, Probe sequence
ggtatttttgtaggtctcgtttatg

SEQ ID NO: 195698 - DNA, 25 bp, Probe sequence
ggacttatcaatttaatgggagcca

SEQ ID NO: 195699 - DNA, 25 bp, Probe sequence
tggtaagcgtaatcgtttagagcaa

SEQ ID NO: 195700 - DNA, 25 bp, Probe sequence
tgggtttgtgttatttttcttaatg

SEQ ID NO: 195701 - DNA, 25 bp, Probe sequence
tgtaggtctcgtttatgctttctta

SEQ ID NO: 195702 - DNA, 25 bp, Probe sequence
taggtaactttgtcggtggcggtat

SEQ ID NO: 195703 - DNA, 25 bp, Probe sequence
tttgctttcttaggtaactttgtcg

SEQ ID NO: 195704 - DNA, 25 bp, Probe sequence
attgttgatattgctgtttcgaaaa

SEQ ID NO: 195705 - DNA, 25 bp, Probe sequence
attgctgtttcgaaaagttatcaag

SEQ ID NO: 195706 - DNA, 25 bp, Probe sequence
attaaaaatgtatctgtcgaaagtg

SEQ ID NO: 195707 - DNA, 25 bp, Probe sequence
atattgctgtttcgaaaagttatca

SEQ ID NO: 195708 - DNA, 25 bp, Probe sequence
atctgtcgaaagtgcatacgttagt

SEQ ID NO: 195709 - DNA, 25 bp, Probe sequence
atgtatctgtcgaaagtgcatacgt

SEQ ID NO: 195710 - DNA, 25 bp, Probe sequence
aaatgtatctgtcgaaagtgcatac

SEQ ID NO: 195711 - DNA, 25 bp, Probe sequence
aaaaatgtatctgtcgaaagtgcat

SEQ ID NO: 195712 - DNA, 25 bp, Probe sequence
aaaatgtatctgtcgaaagtgcata

SEQ ID NO: 195713 - DNA, 25 bp, Probe sequence
aatgtatctgtcgaaagtgcatacg

SEQ ID NO: 195714 - DNA, 25 bp, Probe sequence
aattgttgatattgctgtttcgaaa

SEQ ID NO: 195715 - DNA, 25 bp, Probe sequence
ctgtcgaaagtgcatacgttagtct

SEQ ID NO: 195716 - DNA, 25 bp, Probe sequence
ctgtttcgaaaagttatcaaggtca

SEQ ID NO: 195717 - DNA, 25 bp, Probe sequence
gctgtttcgaaaagttatcaaggtc

SEQ ID NO: 195718 - DNA, 25 bp, Probe sequence
gatattgctgtttcgaaaagttatc

SEQ ID NO: 195719 - DNA, 25 bp, Probe sequence
gttgatattgctgtttcgaaaagtt

SEQ ID NO: 195720 - DNA, 25 bp, Probe sequence
gtttcgaaaagttatcaaggtcaag

SEQ ID NO: 195721 - DNA, 25 bp, Probe sequence
gtatctgtcgaaagtgcatacgtta

SEQ ID NO: 195722 - DNA, 25 bp, Probe sequence
gtcgaaagtgcatacgttagtctga

SEQ ID NO: 195723 - DNA, 25 bp, Probe sequence
tgtttcgaaaagttatcaaggtcaa

SEQ ID NO: 195724 - DNA, 25 bp, Probe sequence
tgtcgaaagtgcatacgttagtctg

SEQ ID NO: 195725 - DNA, 25 bp, Probe sequence
tgtatctgtcgaaagtgcatacgtt

SEQ ID NO: 195726 - DNA, 25 bp, Probe sequence
tgttgatattgctgtttcgaaaagt

SEQ ID NO: 195727 - DNA, 25 bp, Probe sequence
tgctgtttcgaaaagttatcaaggt

SEQ ID NO: 195728 - DNA, 25 bp, Probe sequence
tctgtcgaaagtgcatacgttagtc

SEQ ID NO: 195729 - DNA, 25 bp, Probe sequence
taaaaatgtatctgtcgaaagtgca

SEQ ID NO: 195730 - DNA, 25 bp, Probe sequence
tatctgtcgaaagtgcatacgttag

SEQ ID NO: 195731 - DNA, 25 bp, Probe sequence
tattgctgtttcgaaaagttatcaa

SEQ ID NO: 195732 - DNA, 25 bp, Probe sequence
ttaaaaatgtatctgtcgaaagtgc

SEQ ID NO: 195733 - DNA, 25 bp, Probe sequence
ttgatattgctgtttcgaaaagtta

SEQ ID NO: 195734 - DNA, 25 bp, Probe sequence
ttgctgtttcgaaaagttatcaagg

SEQ ID NO: 195735 - DNA, 25 bp, Probe sequence
ttgttgatattgctgtttcgaaaag

SEQ ID NO: 195736 - DNA, 25 bp, Probe sequence
attggtgtcattttatgtatatgta

SEQ ID NO: 195737 - DNA, 25 bp, Probe sequence
atgccgtaattgaaggttacatcaa

SEQ ID NO: 195738 - DNA, 25 bp, Probe sequence
atgtatagttgcatccgtcatttat

SEQ ID NO: 195739 - DNA, 25 bp, Probe sequence
agtgagttactaaaaccagcaaatc

SEQ ID NO: 195740 - DNA, 25 bp, Probe sequence
agcaaatcaattaaaatctcctgaa

SEQ ID NO: 195741 - DNA, 25 bp, Probe sequence
agcgtattacactctatctcaagca

SEQ ID NO: 195742 - DNA, 25 bp, Probe sequence
accagcaaatcaattaaaatctcct

SEQ ID NO: 195743 - DNA, 25 bp, Probe sequence
actctatctcaagcataataccaaa

SEQ ID NO: 195744 - DNA, 25 bp, Probe sequence
acaggagcgtattacactctatctc

SEQ ID NO: 195745 - DNA, 25 bp, Probe sequence
acacgattaaatctgtgcatttcac

SEQ ID NO: 195746 - DNA, 25 bp, Probe sequence
aaatctgtgcatttcacaagtttaa

SEQ ID NO: 195747 - DNA, 25 bp, Probe sequence
aaagaggacctatgggcgatgccgt

SEQ ID NO: 195748 - DNA, 25 bp, Probe sequence
aagctgattttgttgcatatgggtc

SEQ ID NO: 195749 - DNA, 25 bp, Probe sequence
aagcactttactacaaagaacaaca

SEQ ID NO: 195750 - DNA, 25 bp, Probe sequence
aagaacaacaggagcgtattacact

SEQ ID NO: 195751 - DNA, 25 bp, Probe sequence
aattatcagtttggtggtactatga

SEQ ID NO: 195752 - DNA, 25 bp, Probe sequence
cagtttggtggtactatgatagaaa

SEQ ID NO: 195753 - DNA, 25 bp, Probe sequence
catggttttataattattggtgtca

SEQ ID NO: 195754 - DNA, 25 bp, Probe sequence
gcataataccaaagaaccaaacacg

SEQ ID NO: 195755 - DNA, 25 bp, Probe sequence
gaaccaaacacgattaaatctgtgc

SEQ ID NO: 195756 - DNA, 25 bp, Probe sequence
gaaagtgaaagattaagtgagttac

SEQ ID NO: 195757 - DNA, 25 bp, Probe sequence
gacctatgggcgatgccgtaattga

SEQ ID NO: 195758 - DNA, 25 bp, Probe sequence
gaggacctatgggcgatgccgtaat

SEQ ID NO: 195759 - DNA, 25 bp, Probe sequence
gattttgttgcatatgggtctccag

SEQ ID NO: 195760 - DNA, 25 bp, Probe sequence
gttgcatatgggtctccagaacata

SEQ ID NO: 195761 - DNA, 25 bp, Probe sequence
gtattacactctatctcaagcataa

SEQ ID NO: 195762 - DNA, 25 bp, Probe sequence
gtatatgtatagttgcatccgtcat

SEQ ID NO: 195763 - DNA, 25 bp, Probe sequence
gtatagttgcatccgtcatttattt

SEQ ID NO: 195764 - DNA, 25 bp, Probe sequence
gggtctccagaacataattatcagt

SEQ ID NO: 195765 - DNA, 25 bp, Probe sequence
tgtgcatttcacaagtttaaaaaga

SEQ ID NO: 195766 - DNA, 25 bp, Probe sequence
tgggcgatgccgtaattgaaggtta

SEQ ID NO: 195767 - DNA, 25 bp, Probe sequence
tacactctatctcaagcataatacc

SEQ ID NO: 195768 - DNA, 25 bp, Probe sequence
tagttgcatccgtcatttatttaaa

SEQ ID NO: 195769 - DNA, 25 bp, Probe sequence
ttgcatccgtcatttatttaaaaat

SEQ ID NO: 195770 - DNA, 25 bp, Probe sequence
atatgtatagttgttacggccatac

SEQ ID NO: 195771 - DNA, 25 bp, Probe sequence
atagttgttacggccatacatttta

SEQ ID NO: 195772 - DNA, 25 bp, Probe sequence
ataccaaggagccaaacacaatcaa

SEQ ID NO: 195773 - DNA, 25 bp, Probe sequence
ataataccaaggagccaaacacaat

SEQ ID NO: 195774 - DNA, 25 bp, Probe sequence
atgtatagttgttacggccatacat

SEQ ID NO: 195775 - DNA, 25 bp, Probe sequence
aggagccaaacacaatcaaaactgt

SEQ ID NO: 195776 - DNA, 25 bp, Probe sequence
agccaaacacaatcaaaactgtaca

SEQ ID NO: 195777 - DNA, 25 bp, Probe sequence
accaaggagccaaacacaatcaaaa

SEQ ID NO: 195778 - DNA, 25 bp, Probe sequence
aagcataataccaaggagccaaaca

SEQ ID NO: 195779 - DNA, 25 bp, Probe sequence
aaggagccaaacacaatcaaaactg

SEQ ID NO: 195780 - DNA, 25 bp, Probe sequence
aataccaaggagccaaacacaatca

SEQ ID NO: 195781 - DNA, 25 bp, Probe sequence
caaggagccaaacacaatcaaaact

SEQ ID NO: 195782 - DNA, 25 bp, Probe sequence
caagcataataccaaggagccaaac

SEQ ID NO: 195783 - DNA, 25 bp, Probe sequence
cataataccaaggagccaaacacaa

SEQ ID NO: 195784 - DNA, 25 bp, Probe sequence
ccaaggagccaaacacaatcaaaac

SEQ ID NO: 195785 - DNA, 25 bp, Probe sequence
gccaaacacaatcaaaactgtacat

SEQ ID NO: 195786 - DNA, 25 bp, Probe sequence
gagccaaacacaatcaaaactgtac

SEQ ID NO: 195787 - DNA, 25 bp, Probe sequence
gtatatgtatagttgttacggccat

SEQ ID NO: 195788 - DNA, 25 bp, Probe sequence
gtatagttgttacggccatacattt

SEQ ID NO: 195789 - DNA, 25 bp, Probe sequence
ggagccaaacacaatcaaaactgta

SEQ ID NO: 195790 - DNA, 25 bp, Probe sequence
tgtatagttgttacggccatacatt

SEQ ID NO: 195791 - DNA, 25 bp, Probe sequence
taataccaaggagccaaacacaatc

SEQ ID NO: 195792 - DNA, 25 bp, Probe sequence
taccaaggagccaaacacaatcaaa

SEQ ID NO: 195793 - DNA, 25 bp, Probe sequence
tagttgttacggccatacattttaa

SEQ ID NO: 195794 - DNA, 25 bp, Probe sequence
tatgtatagttgttacggccataca

SEQ ID NO: 195795 - DNA, 25 bp, Probe sequence
tatagttgttacggccatacatttt

SEQ ID NO: 195796 - DNA, 25 bp, Probe sequence
tatatgtatagttgttacggccata

SEQ ID NO: 195797 - DNA, 25 bp, Probe sequence
atgccgtaattgaaggttacatcaa

SEQ ID NO: 195798 - DNA, 25 bp, Probe sequence
aggagcgtattacactttatctcaa

SEQ ID NO: 195799 - DNA, 25 bp, Probe sequence
agcacgttattaaaaccagcacatc

SEQ ID NO: 195800 - DNA, 25 bp, Probe sequence
accagcacatcaaaccaaaacgcct

SEQ ID NO: 195801 - DNA, 25 bp, Probe sequence
acactttatctcaagcataatacta

SEQ ID NO: 195802 - DNA, 25 bp, Probe sequence
acacgattaaatctgtgcatttcac

SEQ ID NO: 195803 - DNA, 25 bp, Probe sequence
aaatctgtgcatttcacaagtttaa

SEQ ID NO: 195804 - DNA, 25 bp, Probe sequence
aaagaggacctatgggcgatgccgt

SEQ ID NO: 195805 - DNA, 25 bp, Probe sequence
aaaaccagcacatcaaaccaaaacg

SEQ ID NO: 195806 - DNA, 25 bp, Probe sequence
aagctgattttgttgcatatgggtc

SEQ ID NO: 195807 - DNA, 25 bp, Probe sequence
aattattggtgtcatattatgtata

SEQ ID NO: 195808 - DNA, 25 bp, Probe sequence
caaaccaaaacgcctgatgatataa

SEQ ID NO: 195809 - DNA, 25 bp, Probe sequence
catgtttttgtaattattggtgtca

SEQ ID NO: 195810 - DNA, 25 bp, Probe sequence
ccacattttaggagttactttaatg

SEQ ID NO: 195811 - DNA, 25 bp, Probe sequence
gcgtattacactttatctcaagcat

SEQ ID NO: 195812 - DNA, 25 bp, Probe sequence
gcataatactaaagaaccaaacacg

SEQ ID NO: 195813 - DNA, 25 bp, Probe sequence
gcacatcaaaccaaaacgcctgatg

SEQ ID NO: 195814 - DNA, 25 bp, Probe sequence
gaaccaaacacgattaaatctgtgc

SEQ ID NO: 195815 - DNA, 25 bp, Probe sequence
gaacaacaggagcgtattacacttt

SEQ ID NO: 195816 - DNA, 25 bp, Probe sequence
gacctatgggcgatgccgtaattga

SEQ ID NO: 195817 - DNA, 25 bp, Probe sequence
gaggacctatgggcgatgccgtaat

SEQ ID NO: 195818 - DNA, 25 bp, Probe sequence
gattttgttgcatatgggtctccag

SEQ ID NO: 195819 - DNA, 25 bp, Probe sequence
gttgcatatgggtctccagaacata

SEQ ID NO: 195820 - DNA, 25 bp, Probe sequence
gttgctacagtcatttatttaaaag

SEQ ID NO: 195821 - DNA, 25 bp, Probe sequence
gtatatgtatagttgctacagtcat

SEQ ID NO: 195822 - DNA, 25 bp, Probe sequence
gtatagttgctacagtcatttattt

SEQ ID NO: 195823 - DNA, 25 bp, Probe sequence
gggtctccagaacataattatcaat

SEQ ID NO: 195824 - DNA, 25 bp, Probe sequence
tgtgcatttcacaagtttaaaaaga

SEQ ID NO: 195825 - DNA, 25 bp, Probe sequence
tgggcgatgccgtaattgaaggtta

SEQ ID NO: 195826 - DNA, 25 bp, Probe sequence
tcattttccaccacattttaggagt

SEQ ID NO: 195827 - DNA, 25 bp, Probe sequence
tagattctaaaaagaacgaccgcta

SEQ ID NO: 195828 - DNA, 25 bp, Probe sequence
tttccaccacattttaggagttact

SEQ ID NO: 195829 - DNA, 25 bp, Probe sequence
ttttcattttccaccacattttagg

SEQ ID NO: 195830 - DNA, 25 bp, Probe sequence
ttatcaatttggtggaagtttaatc

SEQ ID NO: 195831 - DNA, 25 bp, Probe sequence
attcggttgaatttactccaagcga

SEQ ID NO: 195832 - DNA, 25 bp, Probe sequence
atatctattttacagattcggttga

SEQ ID NO: 195833 - DNA, 25 bp, Probe sequence
aggttcatccataggctctaaagac

SEQ ID NO: 195834 - DNA, 25 bp, Probe sequence
aggatattttatagtaggtgagata

SEQ ID NO: 195835 - DNA, 25 bp, Probe sequence
agcaccagaactattgttgaaaggt

SEQ ID NO: 195836 - DNA, 25 bp, Probe sequence
actattgttgaaaggtgatggcgat

SEQ ID NO: 195837 - DNA, 25 bp, Probe sequence
aaaggttcatccataggctctaaag

SEQ ID NO: 195838 - DNA, 25 bp, Probe sequence
aaaaaagcaccagaactattgttga

SEQ ID NO: 195839 - DNA, 25 bp, Probe sequence
aaaaggttcatccataggctctaaa

SEQ ID NO: 195840 - DNA, 25 bp, Probe sequence
aaggttcatccataggctctaaaga

SEQ ID NO: 195841 - DNA, 25 bp, Probe sequence
caaaagcaaatggtcaaaacgccca

SEQ ID NO: 195842 - DNA, 25 bp, Probe sequence
catccataggctctaaagacttaga

SEQ ID NO: 195843 - DNA, 25 bp, Probe sequence
cgtaccaagttattcggcaaaatat

SEQ ID NO: 195844 - DNA, 25 bp, Probe sequence
gcgaggatacaagttatgagtcaaa

SEQ ID NO: 195845 - DNA, 25 bp, Probe sequence
gaatttactccaagcgaggatacaa

SEQ ID NO: 195846 - DNA, 25 bp, Probe sequence
gaactattgttgaaaggtgatggcg

SEQ ID NO: 195847 - DNA, 25 bp, Probe sequence
gaacaacgaaaggatattttatagt

SEQ ID NO: 195848 - DNA, 25 bp, Probe sequence
gatagttaattctggaatgaacatc

SEQ ID NO: 195849 - DNA, 25 bp, Probe sequence
gatataccgactaaaaaagcaccag

SEQ ID NO: 195850 - DNA, 25 bp, Probe sequence
gattcggttgaatttactccaagcg

SEQ ID NO: 195851 - DNA, 25 bp, Probe sequence
gttcatccataggctctaaagactt

SEQ ID NO: 195852 - DNA, 25 bp, Probe sequence
ggttgaatttactccaagcgaggat

SEQ ID NO: 195853 - DNA, 25 bp, Probe sequence
ggttcatccataggctctaaagact

SEQ ID NO: 195854 - DNA, 25 bp, Probe sequence
tccaagcgaggatacaagttatgag

SEQ ID NO: 195855 - DNA, 25 bp, Probe sequence
tcggttgaatttactccaagcgagg

SEQ ID NO: 195856 - DNA, 25 bp, Probe sequence
tctaaagacttagaatttacctttg

SEQ ID NO: 195857 - DNA, 25 bp, Probe sequence
tctattttacagattcggttgaatt

SEQ ID NO: 195858 - DNA, 25 bp, Probe sequence
tcatccataggctctaaagacttag

SEQ ID NO: 195859 - DNA, 25 bp, Probe sequence
taaaatcataccaacaaaacctata

SEQ ID NO: 195860 - DNA, 25 bp, Probe sequence
taccgactaaaaaagcaccagaact

SEQ ID NO: 195861 - DNA, 25 bp, Probe sequence
taccaagttattcggcaaaatatca

SEQ ID NO: 195862 - DNA, 25 bp, Probe sequence
tttactccaagcgaggatacaagtt

SEQ ID NO: 195863 - DNA, 25 bp, Probe sequence
ttaaaaggttcatccataggctcta

SEQ ID NO: 195864 - DNA, 25 bp, Probe sequence
ttgttgaaaggtgatggcgatttaa

SEQ ID NO: 195865 - DNA, 25 bp, Probe sequence
attgatgaacaaggcgctcaacgta

SEQ ID NO: 195866 - DNA, 25 bp, Probe sequence
attacaattaatggattgtttcaca

SEQ ID NO: 195867 - DNA, 25 bp, Probe sequence
attatagcattgatgaacaaggcgc

SEQ ID NO: 195868 - DNA, 25 bp, Probe sequence
atagcattgatgaacaaggcgctca

SEQ ID NO: 195869 - DNA, 25 bp, Probe sequence
atgaacaaggcgctcaacgtaatat

SEQ ID NO: 195870 - DNA, 25 bp, Probe sequence
aggcgctcaacgtaatattacaatt

SEQ ID NO: 195871 - DNA, 25 bp, Probe sequence
agcattgatgaacaaggcgctcaac

SEQ ID NO: 195872 - DNA, 25 bp, Probe sequence
acaaggcgctcaacgtaatattaca

SEQ ID NO: 195873 - DNA, 25 bp, Probe sequence
aacaaggcgctcaacgtaatattac

SEQ ID NO: 195874 - DNA, 25 bp, Probe sequence
aacgtaatattacaattaatggatt

SEQ ID NO: 195875 - DNA, 25 bp, Probe sequence
aaggcgctcaacgtaatattacaat

SEQ ID NO: 195876 - DNA, 25 bp, Probe sequence
caaggcgctcaacgtaatattacaa

SEQ ID NO: 195877 - DNA, 25 bp, Probe sequence
caacgtaatattacaattaatggat

SEQ ID NO: 195878 - DNA, 25 bp, Probe sequence
cattgatgaacaaggcgctcaacgt

SEQ ID NO: 195879 - DNA, 25 bp, Probe sequence
ctcaacgtaatattacaattaatgg

SEQ ID NO: 195880 - DNA, 25 bp, Probe sequence
cgctcaacgtaatattacaattaat

SEQ ID NO: 195881 - DNA, 25 bp, Probe sequence
gcgctcaacgtaatattacaattaa

SEQ ID NO: 195882 - DNA, 25 bp, Probe sequence
gctcaacgtaatattacaattaatg

SEQ ID NO: 195883 - DNA, 25 bp, Probe sequence
gcattgatgaacaaggcgctcaacg

SEQ ID NO: 195884 - DNA, 25 bp, Probe sequence
gaacaaggcgctcaacgtaatatta

SEQ ID NO: 195885 - DNA, 25 bp, Probe sequence
gatgaacaaggcgctcaacgtaata

SEQ ID NO: 195886 - DNA, 25 bp, Probe sequence
ggcgctcaacgtaatattacaatta

SEQ ID NO: 195887 - DNA, 25 bp, Probe sequence
tgatgaacaaggcgctcaacgtaat

SEQ ID NO: 195888 - DNA, 25 bp, Probe sequence
tgaacaaggcgctcaacgtaatatt

SEQ ID NO: 195889 - DNA, 25 bp, Probe sequence
tcaacgtaatattacaattaatgga

SEQ ID NO: 195890 - DNA, 25 bp, Probe sequence
tagcattgatgaacaaggcgctcaa

SEQ ID NO: 195891 - DNA, 25 bp, Probe sequence
tatagcattgatgaacaaggcgctc

SEQ ID NO: 195892 - DNA, 25 bp, Probe sequence
ttatagcattgatgaacaaggcgct

SEQ ID NO: 195893 - DNA, 25 bp, Probe sequence
ttacaattaatggattgtttcacaa

SEQ ID NO: 195894 - DNA, 25 bp, Probe sequence
ttgatgaacaaggcgctcaacgtaa

SEQ ID NO: 195895 - DNA, 25 bp, Probe sequence
attgcagaacagtggcatgtttcac

SEQ ID NO: 195896 - DNA, 25 bp, Probe sequence
aatttaaatttacaggaggatcgat

SEQ ID NO: 195897 - DNA, 25 bp, Probe sequence
atttaatgaccatatgagtggttca

SEQ ID NO: 195898 - DNA, 25 bp, Probe sequence
aggccgatatggaggcagaccagaa

SEQ ID NO: 195899 - DNA, 25 bp, Probe sequence
aggaggatcgattaaatacatatgg

SEQ ID NO: 195900 - DNA, 25 bp, Probe sequence
agaggccgatatggaggcagaccag

SEQ ID NO: 195901 - DNA, 25 bp, Probe sequence
agatatttaatgaccatatgagtgg

SEQ ID NO: 195902 - DNA, 25 bp, Probe sequence
agatagattgggacgtaatatggag

SEQ ID NO: 195903 - DNA, 25 bp, Probe sequence
agcacgtgctagaggccgatatgga

SEQ ID NO: 195904 - DNA, 25 bp, Probe sequence
acaattgcagaacagtggcatgttt

SEQ ID NO: 195905 - DNA, 25 bp, Probe sequence
aaatcaagttcaactggacaattat

SEQ ID NO: 195906 - DNA, 25 bp, Probe sequence
aagttcaactggacaattattattt

SEQ ID NO: 195907 - DNA, 25 bp, Probe sequence
aattgcagaacagtggcatgtttca

SEQ ID NO: 195908 - DNA, 25 bp, Probe sequence
caagttcaactggacaattattatt

SEQ ID NO: 195909 - DNA, 25 bp, Probe sequence
cagaacagtggcatgtttcacgtac

SEQ ID NO: 195910 - DNA, 25 bp, Probe sequence
ctagaggccgatatggaggcagacc

SEQ ID NO: 195911 - DNA, 25 bp, Probe sequence
cgtgctagaggccgatatggaggca

SEQ ID NO: 195912 - DNA, 25 bp, Probe sequence
gccgatatggaggcagaccagaaaa

SEQ ID NO: 195913 - DNA, 25 bp, Probe sequence
gctagaggccgatatggaggcagac

SEQ ID NO: 195914 - DNA, 25 bp, Probe sequence
gcagaacagtggcatgtttcacgta

SEQ ID NO: 195915 - DNA, 25 bp, Probe sequence
gcacgtgctagaggccgatatggag

SEQ ID NO: 195916 - DNA, 25 bp, Probe sequence
gaggccgatatggaggcagaccaga

SEQ ID NO: 195917 - DNA, 25 bp, Probe sequence
gaggcagaccagaaaaattaaatca

SEQ ID NO: 195918 - DNA, 25 bp, Probe sequence
gatatggaggcagaccagaaaaatt

SEQ ID NO: 195919 - DNA, 25 bp, Probe sequence
gtgctagaggccgatatggaggcag

SEQ ID NO: 195920 - DNA, 25 bp, Probe sequence
ggaggcagaccagaaaaattaaatc

SEQ ID NO: 195921 - DNA, 25 bp, Probe sequence
ggataaatcaagttcaactggacaa

SEQ ID NO: 195922 - DNA, 25 bp, Probe sequence
ggccgatatggaggcagaccagaaa

SEQ ID NO: 195923 - DNA, 25 bp, Probe sequence
tggagattagatagattgggacgta

SEQ ID NO: 195924 - DNA, 25 bp, Probe sequence
tgcagaacagtggcatgtttcacgt

SEQ ID NO: 195925 - DNA, 25 bp, Probe sequence
tgctagaggccgatatggaggcaga

SEQ ID NO: 195926 - DNA, 25 bp, Probe sequence
tacaggaggatcgattaaatacata

SEQ ID NO: 195927 - DNA, 25 bp, Probe sequence
tagaggccgatatggaggcagacca

SEQ ID NO: 195928 - DNA, 25 bp, Probe sequence
ttgcagaacagtggcatgtttcacg

SEQ ID NO: 195929 - DNA, 25 bp, Probe sequence
attgtgtatatgtacagtttctacg

SEQ ID NO: 195930 - DNA, 25 bp, Probe sequence
atatgtacagtttctacggtcatgc

SEQ ID NO: 195931 - DNA, 25 bp, Probe sequence
atgtacagtttctacggtcatgcat

SEQ ID NO: 195932 - DNA, 25 bp, Probe sequence
agtgaaggagtagataaattattaa

SEQ ID NO: 195933 - DNA, 25 bp, Probe sequence
agtttctacggtcatgcattttaaa

SEQ ID NO: 195934 - DNA, 25 bp, Probe sequence
agcacatgaaagaaaatcaccagaa

SEQ ID NO: 195935 - DNA, 25 bp, Probe sequence
accagcacatgaaagaaaatcacca

SEQ ID NO: 195936 - DNA, 25 bp, Probe sequence
acagtttctacggtcatgcatttta

SEQ ID NO: 195937 - DNA, 25 bp, Probe sequence
aaagaagatgattttactgcttatg

SEQ ID NO: 195938 - DNA, 25 bp, Probe sequence
aaccagcacatgaaagaaaatcacc

SEQ ID NO: 195939 - DNA, 25 bp, Probe sequence
cagtttctacggtcatgcattttaa

SEQ ID NO: 195940 - DNA, 25 bp, Probe sequence
cataatactaaagaaacgaacacga

SEQ ID NO: 195941 - DNA, 25 bp, Probe sequence
ccagcacatgaaagaaaatcaccag

SEQ ID NO: 195942 - DNA, 25 bp, Probe sequence
gcgctatgataaaaagtgaaggagt

SEQ ID NO: 195943 - DNA, 25 bp, Probe sequence
gcacatgaaagaaaatcaccagaaa

SEQ ID NO: 195944 - DNA, 25 bp, Probe sequence
gaaaatcaccagaaaaaatcaaaga

SEQ ID NO: 195945 - DNA, 25 bp, Probe sequence
gtttctacggtcatgcattttaaaa

SEQ ID NO: 195946 - DNA, 25 bp, Probe sequence
gtatatgtacagtttctacggtcat

SEQ ID NO: 195947 - DNA, 25 bp, Probe sequence
gtacagtttctacggtcatgcattt

SEQ ID NO: 195948 - DNA, 25 bp, Probe sequence
gtgtatatgtacagtttctacggtc

SEQ ID NO: 195949 - DNA, 25 bp, Probe sequence
gtgtcatattgtgtatatgtacagt

SEQ ID NO: 195950 - DNA, 25 bp, Probe sequence
ggtgtcatattgtgtatatgtacag

SEQ ID NO: 195951 - DNA, 25 bp, Probe sequence
tgtgtatatgtacagtttctacggt

SEQ ID NO: 195952 - DNA, 25 bp, Probe sequence
tgtatatgtacagtttctacggtca

SEQ ID NO: 195953 - DNA, 25 bp, Probe sequence
tgtacagtttctacggtcatgcatt

SEQ ID NO: 195954 - DNA, 25 bp, Probe sequence
taaagaaacgaacacgattaaatct

SEQ ID NO: 195955 - DNA, 25 bp, Probe sequence
taaaaccagcacatgaaagaaaatc

SEQ ID NO: 195956 - DNA, 25 bp, Probe sequence
tacaaagaacaacaagaacgtatta

SEQ ID NO: 195957 - DNA, 25 bp, Probe sequence
tacagtttctacggtcatgcatttt

SEQ ID NO: 195958 - DNA, 25 bp, Probe sequence
tatgtacagtttctacggtcatgca

SEQ ID NO: 195959 - DNA, 25 bp, Probe sequence
tatatgtacagtttctacggtcatg

SEQ ID NO: 195960 - DNA, 25 bp, Probe sequence
tattgtgtatatgtacagtttctac

SEQ ID NO: 195961 - DNA, 25 bp, Probe sequence
tttctacggtcatgcattttaaaat

SEQ ID NO: 195962 - DNA, 25 bp, Probe sequence
ttgtgtatatgtacagtttctacgg

SEQ ID NO: 195963 - DNA, 25 bp, Probe sequence
attaagcgagttactaaagccagcc

SEQ ID NO: 195964 - DNA, 25 bp, Probe sequence
agttactaaagccagccaatcagtt

SEQ ID NO: 195965 - DNA, 25 bp, Probe sequence
agcgagttactaaagccagccaatc

SEQ ID NO: 195966 - DNA, 25 bp, Probe sequence
agccagccaatcagttaaaatcacc

SEQ ID NO: 195967 - DNA, 25 bp, Probe sequence
agccaatcagttaaaatcaccagat

SEQ ID NO: 195968 - DNA, 25 bp, Probe sequence
actaaagccagccaatcagttaaaa

SEQ ID NO: 195969 - DNA, 25 bp, Probe sequence
aaattaagcgagttactaaagccag

SEQ ID NO: 195970 - DNA, 25 bp, Probe sequence
aaagccagccaatcagttaaaatca

SEQ ID NO: 195971 - DNA, 25 bp, Probe sequence
aagccagccaatcagttaaaatcac

SEQ ID NO: 195972 - DNA, 25 bp, Probe sequence
aagcgagttactaaagccagccaat

SEQ ID NO: 195973 - DNA, 25 bp, Probe sequence
aattaagcgagttactaaagccagc

SEQ ID NO: 195974 - DNA, 25 bp, Probe sequence
cagccaatcagttaaaatcaccaga

SEQ ID NO: 195975 - DNA, 25 bp, Probe sequence
ctaaagccagccaatcagttaaaat

SEQ ID NO: 195976 - DNA, 25 bp, Probe sequence
cgagttactaaagccagccaatcag

SEQ ID NO: 195977 - DNA, 25 bp, Probe sequence
ccagccaatcagttaaaatcaccag

SEQ ID NO: 195978 - DNA, 25 bp, Probe sequence
gccagccaatcagttaaaatcacca

SEQ ID NO: 195979 - DNA, 25 bp, Probe sequence
gcgagttactaaagccagccaatca

SEQ ID NO: 195980 - DNA, 25 bp, Probe sequence
gagttactaaagccagccaatcagt

SEQ ID NO: 195981 - DNA, 25 bp, Probe sequence
gttactaaagccagccaatcagtta

SEQ ID NO: 195982 - DNA, 25 bp, Probe sequence
tgcaggtatctatttaaaagtgaaa

SEQ ID NO: 195983 - DNA, 25 bp, Probe sequence
taagcgagttactaaagccagccaa

SEQ ID NO: 195984 - DNA, 25 bp, Probe sequence
taaagccagccaatcagttaaaatc

SEQ ID NO: 195985 - DNA, 25 bp, Probe sequence
tactaaagccagccaatcagttaaa

SEQ ID NO: 195986 - DNA, 25 bp, Probe sequence
tagaaagtgaaaaattaagcgagtt

SEQ ID NO: 195987 - DNA, 25 bp, Probe sequence
ttactaaagccagccaatcagttaa

SEQ ID NO: 195988 - DNA, 25 bp, Probe sequence
ttaagcgagttactaaagccagcca

SEQ ID NO: 195989 - DNA, 25 bp, Probe sequence
attggtgtcattttatgtatatgta

SEQ ID NO: 195990 - DNA, 25 bp, Probe sequence
attttgttgcatatgggtctccaga

SEQ ID NO: 195991 - DNA, 25 bp, Probe sequence
ataccatcaaaactgtacatttcac

SEQ ID NO: 195992 - DNA, 25 bp, Probe sequence
atcaaaccaaatcacctgatgagat

SEQ ID NO: 195993 - DNA, 25 bp, Probe sequence
aggagcgtattacactctatcttaa

SEQ ID NO: 195994 - DNA, 25 bp, Probe sequence
agtacatcaaaccaaatcacctgat

SEQ ID NO: 195995 - DNA, 25 bp, Probe sequence
agcacgttattaaaaccagtacatc

SEQ ID NO: 195996 - DNA, 25 bp, Probe sequence
accagtacatcaaaccaaatcacct

SEQ ID NO: 195997 - DNA, 25 bp, Probe sequence
acaggagcgtattacactctatctt

SEQ ID NO: 195998 - DNA, 25 bp, Probe sequence
aaagaggacctatgggcgatgcagt

SEQ ID NO: 195999 - DNA, 25 bp, Probe sequence
aaaccaaatcacctgatgagataaa

SEQ ID NO: 196000 - DNA, 25 bp, Probe sequence
aaacatgtttttataattattggtg

SEQ ID NO: 196001 - DNA, 25 bp, Probe sequence
aagaacccaataccatcaaaactgt

SEQ ID NO: 196002 - DNA, 25 bp, Probe sequence
aagaacaacaggagcgtattacact

SEQ ID NO: 196003 - DNA, 25 bp, Probe sequence
aatactaaagaacccaataccatca

SEQ ID NO: 196004 - DNA, 25 bp, Probe sequence
catcaaaactgtacatttcacaagt

SEQ ID NO: 196005 - DNA, 25 bp, Probe sequence
gcatatgggtctccagaacataatt

SEQ ID NO: 196006 - DNA, 25 bp, Probe sequence
gaacccaataccatcaaaactgtac

SEQ ID NO: 196007 - DNA, 25 bp, Probe sequence
gacctatgggcgatgcagtaattga

SEQ ID NO: 196008 - DNA, 25 bp, Probe sequence
gaggacctatgggcgatgcagtaat

SEQ ID NO: 196009 - DNA, 25 bp, Probe sequence
gttgcatatgggtctccagaacata

SEQ ID NO: 196010 - DNA, 25 bp, Probe sequence
gttgcatcagtcatttatttaaaag

SEQ ID NO: 196011 - DNA, 25 bp, Probe sequence
gtatatgtatagttgcatcagtcat

SEQ ID NO: 196012 - DNA, 25 bp, Probe sequence
gtatagttgcatcagtcatttattt

SEQ ID NO: 196013 - DNA, 25 bp, Probe sequence
gtctccagaacataattatcaattt

SEQ ID NO: 196014 - DNA, 25 bp, Probe sequence
gggtctccagaacataattatcaat

SEQ ID NO: 196015 - DNA, 25 bp, Probe sequence
tgggcgatgcagtaattgaaggtta

SEQ ID NO: 196016 - DNA, 25 bp, Probe sequence
tgtacatttcacaagtttaaaaaga

SEQ ID NO: 196017 - DNA, 25 bp, Probe sequence
tgattttgttgcatatgggtctcca

SEQ ID NO: 196018 - DNA, 25 bp, Probe sequence
taattattggtgtcattttatgtat

SEQ ID NO: 196019 - DNA, 25 bp, Probe sequence
tagagtctaaaaagaacgaccgcta

SEQ ID NO: 196020 - DNA, 25 bp, Probe sequence
tagttgcatcagtcatttatttaaa

SEQ ID NO: 196021 - DNA, 25 bp, Probe sequence
tttgttgcatatgggtctccagaac

SEQ ID NO: 196022 - DNA, 25 bp, Probe sequence
ttatcaatttggtggaagtttaatc

SEQ ID NO: 196023 - DNA, 25 bp, Probe sequence
attgccaccgctttaaaatcattca

SEQ ID NO: 196024 - DNA, 25 bp, Probe sequence
atacggtcattgttccagttggtgg

SEQ ID NO: 196025 - DNA, 25 bp, Probe sequence
atcgcggatacaagtaagggtgtgg

SEQ ID NO: 196026 - DNA, 25 bp, Probe sequence
atgttaatacggtcattgttccagt

SEQ ID NO: 196027 - DNA, 25 bp, Probe sequence
atgtcgttgcattagtttcaggagg

SEQ ID NO: 196028 - DNA, 25 bp, Probe sequence
atggtatgacaattgttcatccata

SEQ ID NO: 196029 - DNA, 25 bp, Probe sequence
accaattgctaaacagaatgctacc

SEQ ID NO: 196030 - DNA, 25 bp, Probe sequence
acccatcaattcatataatcggcgt

SEQ ID NO: 196031 - DNA, 25 bp, Probe sequence
aaatcattcaacccatcaattcata

SEQ ID NO: 196032 - DNA, 25 bp, Probe sequence
aagatagcacaattgcagatggttg

SEQ ID NO: 196033 - DNA, 25 bp, Probe sequence
aatcattacagaaggtgcaggagct

SEQ ID NO: 196034 - DNA, 25 bp, Probe sequence
aatatgcagtttacaggttcattta

SEQ ID NO: 196035 - DNA, 25 bp, Probe sequence
cagccggaaatcatgcacaaggtgt

SEQ ID NO: 196036 - DNA, 25 bp, Probe sequence
caggaggaaacgttgacttaactag

SEQ ID NO: 196037 - DNA, 25 bp, Probe sequence
catataatcggcgttcaagctgaaa

SEQ ID NO: 196038 - DNA, 25 bp, Probe sequence
ctaaaggtattattggcgcatcagc

SEQ ID NO: 196039 - DNA, 25 bp, Probe sequence
cgtcgaacaccactaattaaatcta

SEQ ID NO: 196040 - DNA, 25 bp, Probe sequence
cctacagcagctattttaagtggga

SEQ ID NO: 196041 - DNA, 25 bp, Probe sequence
gcagagtcattctataagagagctt

SEQ ID NO: 196042 - DNA, 25 bp, Probe sequence
gaacatggcttaaatatcgcggata

SEQ ID NO: 196043 - DNA, 25 bp, Probe sequence
gagagctttaactgaacatcgtgaa

SEQ ID NO: 196044 - DNA, 25 bp, Probe sequence
gatgccagaaacagcaccaattgct

SEQ ID NO: 196045 - DNA, 25 bp, Probe sequence
gataagtttgtcatggctggtcaag

SEQ ID NO: 196046 - DNA, 25 bp, Probe sequence
gttccagttggtggaggtggcctaa

SEQ ID NO: 196047 - DNA, 25 bp, Probe sequence
gttcaagctgaaaatgtgcatggca

SEQ ID NO: 196048 - DNA, 25 bp, Probe sequence
gtcatggctggtcaaggaacaatag

SEQ ID NO: 196049 - DNA, 25 bp, Probe sequence
gtgcaggagctttacctacagcagc

SEQ ID NO: 196050 - DNA, 25 bp, Probe sequence
gtgcatggcatggcagagtcattct

SEQ ID NO: 196051 - DNA, 25 bp, Probe sequence
ggctagagggtaaaaatgtcgttgc

SEQ ID NO: 196052 - DNA, 25 bp, Probe sequence
ggaggtggcctaattgcaggtattg

SEQ ID NO: 196053 - DNA, 25 bp, Probe sequence
ggcgcatcagccggaaatcatgcac

SEQ ID NO: 196054 - DNA, 25 bp, Probe sequence
tgcacaaggtgtagctttgacagca

SEQ ID NO: 196055 - DNA, 25 bp, Probe sequence
tgcaacgtgccaaaatcattacaga

SEQ ID NO: 196056 - DNA, 25 bp, Probe sequence
ttgatgcaacgattgtgatgccaga

SEQ ID NO: 196057 - DNA, 25 bp, Probe sequence
accaacgaagccactaccgaatgac

SEQ ID NO: 196058 - DNA, 25 bp, Probe sequence
ataccaacgaagccactaccgaatg

SEQ ID NO: 196059 - DNA, 25 bp, Probe sequence
atcataccaacgaagccactaccga

SEQ ID NO: 196060 - DNA, 25 bp, Probe sequence
atgacagatgacagtaacggcagac

SEQ ID NO: 196061 - DNA, 25 bp, Probe sequence
acgaagccactaccgaatgacaagt

SEQ ID NO: 196062 - DNA, 25 bp, Probe sequence
acggcagaccaaaggatgatgaaaa

SEQ ID NO: 196063 - DNA, 25 bp, Probe sequence
aaaatcataccaacgaagccactac

SEQ ID NO: 196064 - DNA, 25 bp, Probe sequence
aacgaagccactaccgaatgacaag

SEQ ID NO: 196065 - DNA, 25 bp, Probe sequence
aagccactaccgaatgacaagttaa

SEQ ID NO: 196066 - DNA, 25 bp, Probe sequence
aatcgagccaaaaggtaaggatatg

SEQ ID NO: 196067 - DNA, 25 bp, Probe sequence
aatcataccaacgaagccactaccg

SEQ ID NO: 196068 - DNA, 25 bp, Probe sequence
aattctgaaatggtaatcgagccaa

SEQ ID NO: 196069 - DNA, 25 bp, Probe sequence
caacgaagccactaccgaatgacaa

SEQ ID NO: 196070 - DNA, 25 bp, Probe sequence
cagtaacggcagaccaaaggatgat

SEQ ID NO: 196071 - DNA, 25 bp, Probe sequence
cagatgacagtaacggcagaccaaa

SEQ ID NO: 196072 - DNA, 25 bp, Probe sequence
cataccaacgaagccactaccgaat

SEQ ID NO: 196073 - DNA, 25 bp, Probe sequence
cgaagccactaccgaatgacaagtt

SEQ ID NO: 196074 - DNA, 25 bp, Probe sequence
ccaacgaagccactaccgaatgaca

SEQ ID NO: 196075 - DNA, 25 bp, Probe sequence
gaagccactaccgaatgacaagtta

SEQ ID NO: 196076 - DNA, 25 bp, Probe sequence
gaaatggtaatcgagccaaaaggta

SEQ ID NO: 196077 - DNA, 25 bp, Probe sequence
gaaatgacagatgacagtaacggca

SEQ ID NO: 196078 - DNA, 25 bp, Probe sequence
gacagtaacggcagaccaaaggatg

SEQ ID NO: 196079 - DNA, 25 bp, Probe sequence
gacagatgacagtaacggcagacca

SEQ ID NO: 196080 - DNA, 25 bp, Probe sequence
gatgatgaaaaaaggtatccggtaa

SEQ ID NO: 196081 - DNA, 25 bp, Probe sequence
gatgacagtaacggcagaccaaagg

SEQ ID NO: 196082 - DNA, 25 bp, Probe sequence
gttaattctgaaatggtaatcgagc

SEQ ID NO: 196083 - DNA, 25 bp, Probe sequence
gtatccggtaaaaatggaacataat

SEQ ID NO: 196084 - DNA, 25 bp, Probe sequence
gtaacggcagaccaaaggatgatga

SEQ ID NO: 196085 - DNA, 25 bp, Probe sequence
gtaaggatatggaaacgagaggaat

SEQ ID NO: 196086 - DNA, 25 bp, Probe sequence
ggtaatcgagccaaaaggtaaggat

SEQ ID NO: 196087 - DNA, 25 bp, Probe sequence
tcgcaatactagaaccacaaaaggg

SEQ ID NO: 196088 - DNA, 25 bp, Probe sequence
tcataccaacgaagccactaccgaa

SEQ ID NO: 196089 - DNA, 25 bp, Probe sequence
tactagaaccacaaaagggtattat

SEQ ID NO: 196090 - DNA, 25 bp, Probe sequence
taccaacgaagccactaccgaatga

SEQ ID NO: 196091 - DNA, 25 bp, Probe sequence
attgtcaccgaaataactgaagata

SEQ ID NO: 196092 - DNA, 25 bp, Probe sequence
attccaacaaagcctataccggatg

SEQ ID NO: 196093 - DNA, 25 bp, Probe sequence
attattccaacaaagcctataccgg

SEQ ID NO: 196094 - DNA, 25 bp, Probe sequence
atatctatttttcagattcggtcga

SEQ ID NO: 196095 - DNA, 25 bp, Probe sequence
atcatattccaaccaaacaagcgcc

SEQ ID NO: 196096 - DNA, 25 bp, Probe sequence
atcgaattattccaacaaagcctat

SEQ ID NO: 196097 - DNA, 25 bp, Probe sequence
aggatccggcaatttaaaaggctca

SEQ ID NO: 196098 - DNA, 25 bp, Probe sequence
acaaagcctataccggatgacaagt

SEQ ID NO: 196099 - DNA, 25 bp, Probe sequence
aaaaatatcctgtcaagatggaaaa

SEQ ID NO: 196100 - DNA, 25 bp, Probe sequence
aacgatatcatattccaaccaaaca

SEQ ID NO: 196101 - DNA, 25 bp, Probe sequence
aagcctataccggatgacaagttaa

SEQ ID NO: 196102 - DNA, 25 bp, Probe sequence
aatgttcaacagttaagaaaacgat

SEQ ID NO: 196103 - DNA, 25 bp, Probe sequence
aattttattgtcaccgaaataactg

SEQ ID NO: 196104 - DNA, 25 bp, Probe sequence
caaacaagcgcccgaattaaaattg

SEQ ID NO: 196105 - DNA, 25 bp, Probe sequence
cacctagcgaggatgataaatcatg

SEQ ID NO: 196106 - DNA, 25 bp, Probe sequence
ccaacaaagcctataccggatgaca

SEQ ID NO: 196107 - DNA, 25 bp, Probe sequence
gcctataccggatgacaagttaaaa

SEQ ID NO: 196108 - DNA, 25 bp, Probe sequence
gaattaaaattgaaaggatccggca

SEQ ID NO: 196109 - DNA, 25 bp, Probe sequence
gaatttacacctagcgaggatgata

SEQ ID NO: 196110 - DNA, 25 bp, Probe sequence
gaattattccaacaaagcctatacc

SEQ ID NO: 196111 - DNA, 25 bp, Probe sequence
gaaaacgatatcatattccaaccaa

SEQ ID NO: 196112 - DNA, 25 bp, Probe sequence
gggacttggattatttattctgaaa

SEQ ID NO: 196113 - DNA, 25 bp, Probe sequence
gatagtaaaggatattcacgtagta

SEQ ID NO: 196114 - DNA, 25 bp, Probe sequence
gattcggtcgaatttacacctagcg

SEQ ID NO: 196115 - DNA, 25 bp, Probe sequence
gtgccaagttattctgcaaagtatc

SEQ ID NO: 196116 - DNA, 25 bp, Probe sequence
ggtcgaatttacacctagcgaggat

SEQ ID NO: 196117 - DNA, 25 bp, Probe sequence
ggctcatccgtaggatctaaggatc

SEQ ID NO: 196118 - DNA, 25 bp, Probe sequence
tgatgactataatgttcaacagtta

SEQ ID NO: 196119 - DNA, 25 bp, Probe sequence
ttcggtcgaatttacacctagcgag

SEQ ID NO: 196120 - DNA, 25 bp, Probe sequence
tcgaaacgctcaaattaaagaaaat

SEQ ID NO: 196121 - DNA, 25 bp, Probe sequence
tctatttttcagattcggtcgaatt

SEQ ID NO: 196122 - DNA, 25 bp, Probe sequence
tcatccgtaggatctaaggatctag

SEQ ID NO: 196123 - DNA, 25 bp, Probe sequence
taaggatctagaatttacgtttgta

SEQ ID NO: 196124 - DNA, 25 bp, Probe sequence
ttctgaaatggttatcgaaccaaaa

SEQ ID NO: 196125 - DNA, 25 bp, Probe sequence
ataattcactctaaaatgacaatag

SEQ ID NO: 196126 - DNA, 25 bp, Probe sequence
atcatctataggacacaaaaattta

SEQ ID NO: 196127 - DNA, 25 bp, Probe sequence
atgtagaccgcaataccagaacgac

SEQ ID NO: 196128 - DNA, 25 bp, Probe sequence
aggatcatctataggacacaaaaat

SEQ ID NO: 196129 - DNA, 25 bp, Probe sequence
agaccgcaataccagaacgacaaaa

SEQ ID NO: 196130 - DNA, 25 bp, Probe sequence
acttggataattcactctaaaatga

SEQ ID NO: 196131 - DNA, 25 bp, Probe sequence
acatctattttacggatagtattaa

SEQ ID NO: 196132 - DNA, 25 bp, Probe sequence
aaaggatcatctataggacacaaaa

SEQ ID NO: 196133 - DNA, 25 bp, Probe sequence
aaaaggatcatctataggacacaaa

SEQ ID NO: 196134 - DNA, 25 bp, Probe sequence
aaggatcatctataggacacaaaaa

SEQ ID NO: 196135 - DNA, 25 bp, Probe sequence
aatgtgaagcaacttagaaagaggt

SEQ ID NO: 196136 - DNA, 25 bp, Probe sequence
cagaacgacaaaaggtgaatttatt

SEQ ID NO: 196137 - DNA, 25 bp, Probe sequence
cttggataattcactctaaaatgac

SEQ ID NO: 196138 - DNA, 25 bp, Probe sequence
ctgtatgtagaccgcaataccagaa

SEQ ID NO: 196139 - DNA, 25 bp, Probe sequence
cctgtatgtagaccgcaataccaga

SEQ ID NO: 196140 - DNA, 25 bp, Probe sequence
gaagcaacttagaaagaggtatgat

SEQ ID NO: 196141 - DNA, 25 bp, Probe sequence
gaaaacatctattttacggatagta

SEQ ID NO: 196142 - DNA, 25 bp, Probe sequence
gaccgcaataccagaacgacaaaag

SEQ ID NO: 196143 - DNA, 25 bp, Probe sequence
gataaaaaaggatactcacgtagta

SEQ ID NO: 196144 - DNA, 25 bp, Probe sequence
gtatgtagaccgcaataccagaacg

SEQ ID NO: 196145 - DNA, 25 bp, Probe sequence
gtagaccgcaataccagaacgacaa

SEQ ID NO: 196146 - DNA, 25 bp, Probe sequence
gtcctgtatgtagaccgcaatacca

SEQ ID NO: 196147 - DNA, 25 bp, Probe sequence
ggtcctgtatgtagaccgcaatacc

SEQ ID NO: 196148 - DNA, 25 bp, Probe sequence
ggtatgatataccaactaagaaagc

SEQ ID NO: 196149 - DNA, 25 bp, Probe sequence
ggataattcactctaaaatgacaat

SEQ ID NO: 196150 - DNA, 25 bp, Probe sequence
ggatcatctataggacacaaaaatt

SEQ ID NO: 196151 - DNA, 25 bp, Probe sequence
tggtcctgtatgtagaccgcaatac

SEQ ID NO: 196152 - DNA, 25 bp, Probe sequence
tgtagaccgcaataccagaacgaca

SEQ ID NO: 196153 - DNA, 25 bp, Probe sequence
tgtatgtagaccgcaataccagaac

SEQ ID NO: 196154 - DNA, 25 bp, Probe sequence
tcctgtatgtagaccgcaataccag

SEQ ID NO: 196155 - DNA, 25 bp, Probe sequence
tagaccgcaataccagaacgacaaa

SEQ ID NO: 196156 - DNA, 25 bp, Probe sequence
tatgtagaccgcaataccagaacga

SEQ ID NO: 196157 - DNA, 25 bp, Probe sequence
tataggacacaaaaatttagagttt

SEQ ID NO: 196158 - DNA, 25 bp, Probe sequence
ttggtcctgtatgtagaccgcaata

SEQ ID NO: 196159 - DNA, 25 bp, Probe sequence
atatcaaggtgttcaagagctttgt

SEQ ID NO: 196160 - DNA, 25 bp, Probe sequence
atacaagcctgttatatcaaggtgt

SEQ ID NO: 196161 - DNA, 25 bp, Probe sequence
atcaaggtgttcaagagctttgtat

SEQ ID NO: 196162 - DNA, 25 bp, Probe sequence
aggtgttcaagagctttgtatgcaa

SEQ ID NO: 196163 - DNA, 25 bp, Probe sequence
agcctgttatatcaaggtgttcaag

SEQ ID NO: 196164 - DNA, 25 bp, Probe sequence
acaagcctgttatatcaaggtgttc

SEQ ID NO: 196165 - DNA, 25 bp, Probe sequence
aaatacaagcctgttatatcaaggt

SEQ ID NO: 196166 - DNA, 25 bp, Probe sequence
aaaaatacaagcctgttatatcaag

SEQ ID NO: 196167 - DNA, 25 bp, Probe sequence
aaaaaatacaagcctgttatatcaa

SEQ ID NO: 196168 - DNA, 25 bp, Probe sequence
aaaatacaagcctgttatatcaagg

SEQ ID NO: 196169 - DNA, 25 bp, Probe sequence
aagcctgttatatcaaggtgttcaa

SEQ ID NO: 196170 - DNA, 25 bp, Probe sequence
aagagctttgtatgcaatatatatg

SEQ ID NO: 196171 - DNA, 25 bp, Probe sequence
aaggtgttcaagagctttgtatgca

SEQ ID NO: 196172 - DNA, 25 bp, Probe sequence
aatacaagcctgttatatcaaggtg

SEQ ID NO: 196173 - DNA, 25 bp, Probe sequence
caaggtgttcaagagctttgtatgc

SEQ ID NO: 196174 - DNA, 25 bp, Probe sequence
caagcctgttatatcaaggtgttca

SEQ ID NO: 196175 - DNA, 25 bp, Probe sequence
caagagctttgtatgcaatatatat

SEQ ID NO: 196176 - DNA, 25 bp, Probe sequence
ctgttatatcaaggtgttcaagagc

SEQ ID NO: 196177 - DNA, 25 bp, Probe sequence
cctgttatatcaaggtgttcaagag

SEQ ID NO: 196178 - DNA, 25 bp, Probe sequence
gcctgttatatcaaggtgttcaaga

SEQ ID NO: 196179 - DNA, 25 bp, Probe sequence
gttcaagagctttgtatgcaatata

SEQ ID NO: 196180 - DNA, 25 bp, Probe sequence
gttatatcaaggtgttcaagagctt

SEQ ID NO: 196181 - DNA, 25 bp, Probe sequence
gtgttcaagagctttgtatgcaata

SEQ ID NO: 196182 - DNA, 25 bp, Probe sequence
ggtgttcaagagctttgtatgcaat

SEQ ID NO: 196183 - DNA, 25 bp, Probe sequence
tgttatatcaaggtgttcaagagct

SEQ ID NO: 196184 - DNA, 25 bp, Probe sequence
tgttcaagagctttgtatgcaatat

SEQ ID NO: 196185 - DNA, 25 bp, Probe sequence
tcaaggtgttcaagagctttgtatg

SEQ ID NO: 196186 - DNA, 25 bp, Probe sequence
tcaagagctttgtatgcaatatata

SEQ ID NO: 196187 - DNA, 25 bp, Probe sequence
tacaagcctgttatatcaaggtgtt

SEQ ID NO: 196188 - DNA, 25 bp, Probe sequence
tatcaaggtgttcaagagctttgta

SEQ ID NO: 196189 - DNA, 25 bp, Probe sequence
tatatcaaggtgttcaagagctttg

SEQ ID NO: 196190 - DNA, 25 bp, Probe sequence
ttatatcaaggtgttcaagagcttt

SEQ ID NO: 196191 - DNA, 25 bp, Probe sequence
ttcaagagctttgtatgcaatatat

SEQ ID NO: 196192 - DNA, 25 bp, Probe sequence
atttttatgcagaaaatcgtctgaa

SEQ ID NO: 196193 - DNA, 25 bp, Probe sequence
atattgccttgaaacacgtttattt

SEQ ID NO: 196194 - DNA, 25 bp, Probe sequence
atatattgccttgaaacacgtttat

SEQ ID NO: 196195 - DNA, 25 bp, Probe sequence
atcgtctgaaatactcagaatccga

SEQ ID NO: 196196 - DNA, 25 bp, Probe sequence
agggtttctgatgacttgaatacaa

SEQ ID NO: 196197 - DNA, 25 bp, Probe sequence
aaatactcagaatccgaacgatata

SEQ ID NO: 196198 - DNA, 25 bp, Probe sequence
aaatcgtctgaaatactcagaatcc

SEQ ID NO: 196199 - DNA, 25 bp, Probe sequence
aagggtttctgatgacttgaataca

SEQ ID NO: 196200 - DNA, 25 bp, Probe sequence
aatactcagaatccgaacgatataa

SEQ ID NO: 196201 - DNA, 25 bp, Probe sequence
aatatattgccttgaaacacgttta

SEQ ID NO: 196202 - DNA, 25 bp, Probe sequence
aattatgaaacgtttagtatattgt

SEQ ID NO: 196203 - DNA, 25 bp, Probe sequence
gcagaaaatcgtctgaaatactcag

SEQ ID NO: 196204 - DNA, 25 bp, Probe sequence
gcaatatattgccttgaaacacgtt

SEQ ID NO: 196205 - DNA, 25 bp, Probe sequence
gaatccgaacgatataaaaagtata

SEQ ID NO: 196206 - DNA, 25 bp, Probe sequence
gaaacacgtttatttttatgcagaa

SEQ ID NO: 196207 - DNA, 25 bp, Probe sequence
gacaagggtttctgatgacttgaat

SEQ ID NO: 196208 - DNA, 25 bp, Probe sequence
gaaatactcagaatccgaacgatat

SEQ ID NO: 196209 - DNA, 25 bp, Probe sequence
gatgacttgaatacaatttataggt

SEQ ID NO: 196210 - DNA, 25 bp, Probe sequence
gataattatgaaacgtttagtatat

SEQ ID NO: 196211 - DNA, 25 bp, Probe sequence
gtttctgatgacttgaatacaattt

SEQ ID NO: 196212 - DNA, 25 bp, Probe sequence
gtatattgggtattttagagtaatg

SEQ ID NO: 196213 - DNA, 25 bp, Probe sequence
gtgacaagggtttctgatgacttga

SEQ ID NO: 196214 - DNA, 25 bp, Probe sequence
gtgtgacaagggtttctgatgactt

SEQ ID NO: 196215 - DNA, 25 bp, Probe sequence
gggtttctgatgacttgaatacaat

SEQ ID NO: 196216 - DNA, 25 bp, Probe sequence
ggtattttagagtaatgaaaggcgt

SEQ ID NO: 196217 - DNA, 25 bp, Probe sequence
tgaaatactcagaatccgaacgata

SEQ ID NO: 196218 - DNA, 25 bp, Probe sequence
tgaaacacgtttatttttatgcaga

SEQ ID NO: 196219 - DNA, 25 bp, Probe sequence
tgcaatatattgccttgaaacacgt

SEQ ID NO: 196220 - DNA, 25 bp, Probe sequence
tgccttgaaacacgtttatttttat

SEQ ID NO: 196221 - DNA, 25 bp, Probe sequence
tactcagaatccgaacgatataaaa

SEQ ID NO: 196222 - DNA, 25 bp, Probe sequence
tatattgccttgaaacacgtttatt

SEQ ID NO: 196223 - DNA, 25 bp, Probe sequence
tattgccttgaaacacgtttatttt

SEQ ID NO: 196224 - DNA, 25 bp, Probe sequence
ttctgatgacttgaatacaatttat

SEQ ID NO: 196225 - DNA, 25 bp, Probe sequence
ttgaaacacgtttatttttatgcag

SEQ ID NO: 196226 - DNA, 25 bp, Probe sequence
attaatttaccagaaggacaaacat

SEQ ID NO: 196227 - DNA, 25 bp, Probe sequence
atttactttccatgacttgaaccgt

SEQ ID NO: 196228 - DNA, 25 bp, Probe sequence
atgaaagtcggacctaatccactca

SEQ ID NO: 196229 - DNA, 25 bp, Probe sequence
atgtcttacaagcaagaagatgatt

SEQ ID NO: 196230 - DNA, 25 bp, Probe sequence
accgtcgtgcaaatgtacaatgctc

SEQ ID NO: 196231 - DNA, 25 bp, Probe sequence
actttccatgacttgaaccgtcgtg

SEQ ID NO: 196232 - DNA, 25 bp, Probe sequence
acaaaatgttggacgttggttcgca

SEQ ID NO: 196233 - DNA, 25 bp, Probe sequence
acaatgctcaaaagctgtacaacaa

SEQ ID NO: 196234 - DNA, 25 bp, Probe sequence
aaataccaatggtcatttagtatat

SEQ ID NO: 196235 - DNA, 25 bp, Probe sequence
aaacatttactttccatgacttgaa

SEQ ID NO: 196236 - DNA, 25 bp, Probe sequence
aaaacaagcgccacgtgttccattt

SEQ ID NO: 196237 - DNA, 25 bp, Probe sequence
aagtcggacctaatccactcaatga

SEQ ID NO: 196238 - DNA, 25 bp, Probe sequence
aaggacaaacatttactttccatga

SEQ ID NO: 196239 - DNA, 25 bp, Probe sequence
aatgttggacgttggttcgcatatt

SEQ ID NO: 196240 - DNA, 25 bp, Probe sequence
caatgatagcaacccttcgaaagga

SEQ ID NO: 196241 - DNA, 25 bp, Probe sequence
cactcaatgatagcaacccttcgaa

SEQ ID NO: 196242 - DNA, 25 bp, Probe sequence
catgacttgaaccgtcgtgcaaatg

SEQ ID NO: 196243 - DNA, 25 bp, Probe sequence
ctaatccactcaatgatagcaaccc

SEQ ID NO: 196244 - DNA, 25 bp, Probe sequence
gccacgtgttccatttattattatc

SEQ ID NO: 196245 - DNA, 25 bp, Probe sequence
gcaacccttcgaaaggaggtgttcg

SEQ ID NO: 196246 - DNA, 25 bp, Probe sequence
gaaagtcggacctaatccactcaat

SEQ ID NO: 196247 - DNA, 25 bp, Probe sequence
gacaaacatttactttccatgactt

SEQ ID NO: 196248 - DNA, 25 bp, Probe sequence
gacttgaaccgtcgtgcaaatgtac

SEQ ID NO: 196249 - DNA, 25 bp, Probe sequence
gttggacgttggttcgcatattttg

SEQ ID NO: 196250 - DNA, 25 bp, Probe sequence
gttggttcgcatattttgtaaaaca

SEQ ID NO: 196251 - DNA, 25 bp, Probe sequence
gtatttcaattaatttaccagaagg

SEQ ID NO: 196252 - DNA, 25 bp, Probe sequence
tgaaccgtcgtgcaaatgtacaatg

SEQ ID NO: 196253 - DNA, 25 bp, Probe sequence
gtaaaacaagcgccacgtgttccat

SEQ ID NO: 196254 - DNA, 25 bp, Probe sequence
gtcgtgcaaatgtacaatgctcaaa

SEQ ID NO: 196255 - DNA, 25 bp, Probe sequence
gtgttccatttattattatcggtaa

SEQ ID NO: 196256 - DNA, 25 bp, Probe sequence
ggacctaatccactcaatgatagca

SEQ ID NO: 196257 - DNA, 25 bp, Probe sequence
ggacgttggttcgcatattttgtaa

SEQ ID NO: 196258 - DNA, 25 bp, Probe sequence
tccactcaatgatagcaacccttcg

SEQ ID NO: 196259 - DNA, 25 bp, Probe sequence
ttccatgacttgaaccgtcgtgcaa

SEQ ID NO: 196260 - DNA, 25 bp, Probe sequence
atcaatattcagtaccagcaatgtg

SEQ ID NO: 196261 - DNA, 25 bp, Probe sequence
atctggacaaaagataggtcgatta

SEQ ID NO: 196262 - DNA, 25 bp, Probe sequence
atgcacatcaatattcagtaccagc

SEQ ID NO: 196263 - DNA, 25 bp, Probe sequence
atgacaagggtctcactgtatctgg

SEQ ID NO: 196264 - DNA, 25 bp, Probe sequence
agggtctcactgtatctggacaaaa

SEQ ID NO: 196265 - DNA, 25 bp, Probe sequence
accagcaatgtgtaaagtcctaaaa

SEQ ID NO: 196266 - DNA, 25 bp, Probe sequence
acgtagaacgtgccgccataaatat

SEQ ID NO: 196267 - DNA, 25 bp, Probe sequence
acgtgccgccataaatatttttaat

SEQ ID NO: 196268 - DNA, 25 bp, Probe sequence
acaagggtctcactgtatctggaca

SEQ ID NO: 196269 - DNA, 25 bp, Probe sequence
aaatgacaagggtctcactgtatct

SEQ ID NO: 196270 - DNA, 25 bp, Probe sequence
aaacgtagaacgtgccgccataaat

SEQ ID NO: 196271 - DNA, 25 bp, Probe sequence
aacgtagaacgtgccgccataaata

SEQ ID NO: 196272 - DNA, 25 bp, Probe sequence
aagggtctcactgtatctggacaaa

SEQ ID NO: 196273 - DNA, 25 bp, Probe sequence
aataccaagaagtacctattatgat

SEQ ID NO: 196274 - DNA, 25 bp, Probe sequence
aatattcagtaccagcaatgtgtaa

SEQ ID NO: 196275 - DNA, 25 bp, Probe sequence
caagggtctcactgtatctggacaa

SEQ ID NO: 196276 - DNA, 25 bp, Probe sequence
cagtaccagcaatgtgtaaagtcct

SEQ ID NO: 196277 - DNA, 25 bp, Probe sequence
gccgccataaatatttttaattcta

SEQ ID NO: 196278 - DNA, 25 bp, Probe sequence
gtagaacgtgccgccataaatattt

SEQ ID NO: 196279 - DNA, 25 bp, Probe sequence
gcacatcaatattcagtaccagcaa

SEQ ID NO: 196280 - DNA, 25 bp, Probe sequence
gaagtacctattatgattctataaa

SEQ ID NO: 196281 - DNA, 25 bp, Probe sequence
gaagtcattcaaaagaatgcacatc

SEQ ID NO: 196282 - DNA, 25 bp, Probe sequence
gaacgtgccgccataaatattttta

SEQ ID NO: 196283 - DNA, 25 bp, Probe sequence
gaaaagtctttagtacaagacgaat

SEQ ID NO: 196284 - DNA, 25 bp, Probe sequence
gacaagggtctcactgtatctggac

SEQ ID NO: 196285 - DNA, 25 bp, Probe sequence
gattcaaacgtagaacgtgccgcca

SEQ ID NO: 196286 - DNA, 25 bp, Probe sequence
gtaccagcaatgtgtaaagtcctaa

SEQ ID NO: 196287 - DNA, 25 bp, Probe sequence
gtacaagacgaattaaaaatcattt

SEQ ID NO: 196288 - DNA, 25 bp, Probe sequence
gtgccgccataaatatttttaattc

SEQ ID NO: 196289 - DNA, 25 bp, Probe sequence
ggtctcactgtatctggacaaaaga

SEQ ID NO: 196290 - DNA, 25 bp, Probe sequence
tgtgtaaagtcctaaaaataccaag

SEQ ID NO: 196291 - DNA, 25 bp, Probe sequence
tgacaagggtctcactgtatctgga

SEQ ID NO: 196292 - DNA, 25 bp, Probe sequence
tcactaaagatgattcaaacgtaga

SEQ ID NO: 196293 - DNA, 25 bp, Probe sequence
ttcaaacgtagaacgtgccgccata

SEQ ID NO: 196294 - DNA, 25 bp, Probe sequence
atacttagtcacaacattcaaagat

SEQ ID NO: 196295 - DNA, 25 bp, Probe sequence
atcagacgtttacagttgttgaggc

SEQ ID NO: 196296 - DNA, 25 bp, Probe sequence
aggacaaccacatgaacattttact

SEQ ID NO: 196297 - DNA, 25 bp, Probe sequence
agaggtgcagttattaaattagggc

SEQ ID NO: 196298 - DNA, 25 bp, Probe sequence
acttagtcacaacattcaaagattc

SEQ ID NO: 196299 - DNA, 25 bp, Probe sequence
acaggacaaccacatgaacatttta

SEQ ID NO: 196300 - DNA, 25 bp, Probe sequence
acacaatacttagtcacaacattca

SEQ ID NO: 196301 - DNA, 25 bp, Probe sequence
acaacattcaaagattcaacaggac

SEQ ID NO: 196302 - DNA, 25 bp, Probe sequence
acaatacttagtcacaacattcaaa

SEQ ID NO: 196303 - DNA, 25 bp, Probe sequence
aaagattcaacaggacaaccacatg

SEQ ID NO: 196304 - DNA, 25 bp, Probe sequence
aaaagaggtgcagttattaaattag

SEQ ID NO: 196305 - DNA, 25 bp, Probe sequence
aacaggacaaccacatgaacatttt

SEQ ID NO: 196306 - DNA, 25 bp, Probe sequence
aacattcaaagattcaacaggacaa

SEQ ID NO: 196307 - DNA, 25 bp, Probe sequence
aagattcaacaggacaaccacatga

SEQ ID NO: 196308 - DNA, 25 bp, Probe sequence
aattagggcagttgtttgaaaatat

SEQ ID NO: 196309 - DNA, 25 bp, Probe sequence
caatacttagtcacaacattcaaag

SEQ ID NO: 196310 - DNA, 25 bp, Probe sequence
caacaggacaaccacatgaacattt

SEQ ID NO: 196311 - DNA, 25 bp, Probe sequence
caggacaaccacatgaacattttac

SEQ ID NO: 196312 - DNA, 25 bp, Probe sequence
cattcaaagattcaacaggacaacc

SEQ ID NO: 196313 - DNA, 25 bp, Probe sequence
gcagttattaaattagggcagttgt

SEQ ID NO: 196314 - DNA, 25 bp, Probe sequence
gacacaatacttagtcacaacattc

SEQ ID NO: 196315 - DNA, 25 bp, Probe sequence
gagataatcagacgtttacagttgt

SEQ ID NO: 196316 - DNA, 25 bp, Probe sequence
gataatcagacgtttacagttgttg

SEQ ID NO: 196317 - DNA, 25 bp, Probe sequence
gattcaacaggacaaccacatgaac

SEQ ID NO: 196318 - DNA, 25 bp, Probe sequence
gttattaaattagggcagttgtttg

SEQ ID NO: 196319 - DNA, 25 bp, Probe sequence
gtcacaacattcaaagattcaacag

SEQ ID NO: 196320 - DNA, 25 bp, Probe sequence
gggcagttgtttgaaaatataaggg

SEQ ID NO: 196321 - DNA, 25 bp, Probe sequence
tgaaaatataagggagtgtgggaaa

SEQ ID NO: 196322 - DNA, 25 bp, Probe sequence
tcaaagattcaacaggacaaccaca

SEQ ID NO: 196323 - DNA, 25 bp, Probe sequence
tcaacaggacaaccacatgaacatt

SEQ ID NO: 196324 - DNA, 25 bp, Probe sequence
taatcagacgtttacagttgttgag

SEQ ID NO: 196325 - DNA, 25 bp, Probe sequence
tagagataatcagacgtttacagtt

SEQ ID NO: 196326 - DNA, 25 bp, Probe sequence
tagtcacaacattcaaagattcaac

SEQ ID NO: 196327 - DNA, 25 bp, Probe sequence
ttcaaagattcaacaggacaaccac

SEQ ID NO: 196328 - DNA, 25 bp, Probe sequence
atcagttatcagtgctagcgcgtat

SEQ ID NO: 196329 - DNA, 25 bp, Probe sequence
atgcgcaatgggttgagtatccaga

SEQ ID NO: 196330 - DNA, 25 bp, Probe sequence
atgggttgagtatccagaagactgg

SEQ ID NO: 196331 - DNA, 25 bp, Probe sequence
agagagcttgaatatgaggaggaac

SEQ ID NO: 196332 - DNA, 25 bp, Probe sequence
agctattaatgcgcaatgggttgag

SEQ ID NO: 196333 - DNA, 25 bp, Probe sequence
agcgtttgatgaaattcgcgaagct

SEQ ID NO: 196334 - DNA, 25 bp, Probe sequence
acaatcagttatcagtgctagcgcg

SEQ ID NO: 196335 - DNA, 25 bp, Probe sequence
aagactgggcgtcagaggttttgag

SEQ ID NO: 196336 - DNA, 25 bp, Probe sequence
aatcagttatcagtgctagcgcgta

SEQ ID NO: 196337 - DNA, 25 bp, Probe sequence
aatcgaacaatcagttatcagtgct

SEQ ID NO: 196338 - DNA, 25 bp, Probe sequence
aattcgcgaagctattaatgcgcaa

SEQ ID NO: 196339 - DNA, 25 bp, Probe sequence
caatcagttatcagtgctagcgcgt

SEQ ID NO: 196340 - DNA, 25 bp, Probe sequence
cagaagactgggcgtcagaggtttt

SEQ ID NO: 196341 - DNA, 25 bp, Probe sequence
cagttatcagtgctagcgcgtataa

SEQ ID NO: 196342 - DNA, 25 bp, Probe sequence
ctgggcgtcagaggttttgagagaa

SEQ ID NO: 196343 - DNA, 25 bp, Probe sequence
cgcgaacaaatcgaacaatcagtta

SEQ ID NO: 196344 - DNA, 25 bp, Probe sequence
gcgcaatgggttgagtatccagaag

SEQ ID NO: 196345 - DNA, 25 bp, Probe sequence
gcaatgggttgagtatccagaagac

SEQ ID NO: 196346 - DNA, 25 bp, Probe sequence
gaagactgggcgtcagaggttttga

SEQ ID NO: 196347 - DNA, 25 bp, Probe sequence
gaagctattaatgcgcaatgggttg

SEQ ID NO: 196348 - DNA, 25 bp, Probe sequence
gaacaatcagttatcagtgctagcg

SEQ ID NO: 196349 - DNA, 25 bp, Probe sequence
gaaattcgcgaagctattaatgcgc

SEQ ID NO: 196350 - DNA, 25 bp, Probe sequence
gactgggcgtcagaggttttgagag

SEQ ID NO: 196351 - DNA, 25 bp, Probe sequence
gagtatccagaagactgggcgtcag

SEQ ID NO: 196352 - DNA, 25 bp, Probe sequence
gaggttttgagagaagtaagagagc

SEQ ID NO: 196353 - DNA, 25 bp, Probe sequence
gatgaaattcgcgaagctattaatg

SEQ ID NO: 196354 - DNA, 25 bp, Probe sequence
gtttgatgaaattcgcgaagctatt

SEQ ID NO: 196355 - DNA, 25 bp, Probe sequence
gtatccagaagactgggcgtcagag

SEQ ID NO: 196356 - DNA, 25 bp, Probe sequence
gggcgtcagaggttttgagagaagt

SEQ ID NO: 196357 - DNA, 25 bp, Probe sequence
tccagaagactgggcgtcagaggtt

SEQ ID NO: 196358 - DNA, 25 bp, Probe sequence
tcagttatcagtgctagcgcgtata

SEQ ID NO: 196359 - DNA, 25 bp, Probe sequence
ttatcagtgctagcgcgtataacgg

SEQ ID NO: 196360 - DNA, 25 bp, Probe sequence
ttaatgcgcaatgggttgagtatcc

SEQ ID NO: 196361 - DNA, 25 bp, Probe sequence
ttcgcgaagctattaatgcgcaatg

SEQ ID NO: 196362 - DNA, 25 bp, Probe sequence
atatcgtaccaggttggcaaggcgt

SEQ ID NO: 196363 - DNA, 25 bp, Probe sequence
atcgtaccaggttggcaaggcgtga

SEQ ID NO: 196364 - DNA, 25 bp, Probe sequence
aggttggcaaggcgtgaaaaagaca

SEQ ID NO: 196365 - DNA, 25 bp, Probe sequence
aggatttggaatatgaggaacagaa

SEQ ID NO: 196366 - DNA, 25 bp, Probe sequence
agctgaagagcttgaaacatatata

SEQ ID NO: 196367 - DNA, 25 bp, Probe sequence
accaggttggcaaggcgtgaaaaag

SEQ ID NO: 196368 - DNA, 25 bp, Probe sequence
acaggatttggaatatgaggaacag

SEQ ID NO: 196369 - DNA, 25 bp, Probe sequence
aaacatatataaagcaacaggattt

SEQ ID NO: 196370 - DNA, 25 bp, Probe sequence
aacaggatttggaatatgaggaaca

SEQ ID NO: 196371 - DNA, 25 bp, Probe sequence
aacatatataaagcaacaggatttg

SEQ ID NO: 196372 - DNA, 25 bp, Probe sequence
aagagcttgaaacatatataaagca

SEQ ID NO: 196373 - DNA, 25 bp, Probe sequence
caacaggatttggaatatgaggaac

SEQ ID NO: 196374 - DNA, 25 bp, Probe sequence
caggttggcaaggcgtgaaaaagac

SEQ ID NO: 196375 - DNA, 25 bp, Probe sequence
caggatttggaatatgaggaacaga

SEQ ID NO: 196376 - DNA, 25 bp, Probe sequence
ctgaagagcttgaaacatatataaa

SEQ ID NO: 196377 - DNA, 25 bp, Probe sequence
cgtaccaggttggcaaggcgtgaaa

SEQ ID NO: 196378 - DNA, 25 bp, Probe sequence
ccaggttggcaaggcgtgaaaaaga

SEQ ID NO: 196379 - DNA, 25 bp, Probe sequence
gctgaagagcttgaaacatatataa

SEQ ID NO: 196380 - DNA, 25 bp, Probe sequence
gcaacaggatttggaatatgaggaa

SEQ ID NO: 196381 - DNA, 25 bp, Probe sequence
gaagagcttgaaacatatataaagc

SEQ ID NO: 196382 - DNA, 25 bp, Probe sequence
gaaacatatataaagcaacaggatt

SEQ ID NO: 196383 - DNA, 25 bp, Probe sequence
gagcttgaaacatatataaagcaac

SEQ ID NO: 196384 - DNA, 25 bp, Probe sequence
gttggcaaggcgtgaaaaagacatt

SEQ ID NO: 196385 - DNA, 25 bp, Probe sequence
gtaccaggttggcaaggcgtgaaaa

SEQ ID NO: 196386 - DNA, 25 bp, Probe sequence
ggttggcaaggcgtgaaaaagacat

SEQ ID NO: 196387 - DNA, 25 bp, Probe sequence
tggcaaggcgtgaaaaagacatttg

SEQ ID NO: 196388 - DNA, 25 bp, Probe sequence
tgaaacatatataaagcaacaggat

SEQ ID NO: 196389 - DNA, 25 bp, Probe sequence
tgaagagcttgaaacatatataaag

SEQ ID NO: 196390 - DNA, 25 bp, Probe sequence
tcgtaccaggttggcaaggcgtgaa

SEQ ID NO: 196391 - DNA, 25 bp, Probe sequence
taccaggttggcaaggcgtgaaaaa

SEQ ID NO: 196392 - DNA, 25 bp, Probe sequence
tatcgtaccaggttggcaaggcgtg

SEQ ID NO: 196393 - DNA, 25 bp, Probe sequence
ttggcaaggcgtgaaaaagacattt

SEQ ID NO: 196394 - DNA, 25 bp, Probe sequence
agacggtacaagaggtatctaacgc

SEQ ID NO: 196395 - DNA, 25 bp, Probe sequence
attggtgaatgggatggcgatgatg

SEQ ID NO: 196396 - DNA, 25 bp, Probe sequence
ataacgaacatgttgaactggtaga

SEQ ID NO: 196397 - DNA, 25 bp, Probe sequence
atgggatggcgatgatgaagattta

SEQ ID NO: 196398 - DNA, 25 bp, Probe sequence
agttgtggtcaaacgtggagaatat

SEQ ID NO: 196399 - DNA, 25 bp, Probe sequence
agaagttgtggtcaaacgtggagaa

SEQ ID NO: 196400 - DNA, 25 bp, Probe sequence
acgaacatgttgaactggtagaggt

SEQ ID NO: 196401 - DNA, 25 bp, Probe sequence
acggtacaagaggtatctaacgcta

SEQ ID NO: 196402 - DNA, 25 bp, Probe sequence
aacgaacatgttgaactggtagagg

SEQ ID NO: 196403 - DNA, 25 bp, Probe sequence
aagacggtacaagaggtatctaacg

SEQ ID NO: 196404 - DNA, 25 bp, Probe sequence
aagttgtggtcaaacgtggagaata

SEQ ID NO: 196405 - DNA, 25 bp, Probe sequence
cggtacaagaggtatctaacgctaa

SEQ ID NO: 196406 - DNA, 25 bp, Probe sequence
gaatgggatggcgatgatgaagatt

SEQ ID NO: 196407 - DNA, 25 bp, Probe sequence
gaagttgtggtcaaacgtggagaat

SEQ ID NO: 196408 - DNA, 25 bp, Probe sequence
gaagatttagataagacggtacaag

SEQ ID NO: 196409 - DNA, 25 bp, Probe sequence
gacggtacaagaggtatctaacgct

SEQ ID NO: 196410 - DNA, 25 bp, Probe sequence
gatggcgatgatgaagatttagata

SEQ ID NO: 196411 - DNA, 25 bp, Probe sequence
gatttagataagacggtacaagagg

SEQ ID NO: 196412 - DNA, 25 bp, Probe sequence
gttgtggtcaaacgtggagaatata

SEQ ID NO: 196413 - DNA, 25 bp, Probe sequence
gtgaatgggatggcgatgatgaaga

SEQ ID NO: 196414 - DNA, 25 bp, Probe sequence
gggatggcgatgatgaagatttaga

SEQ ID NO: 196415 - DNA, 25 bp, Probe sequence
ggtgaatgggatggcgatgatgaag

SEQ ID NO: 196416 - DNA, 25 bp, Probe sequence
ggtacaagaggtatctaacgctaat

SEQ ID NO: 196417 - DNA, 25 bp, Probe sequence
ggatggcgatgatgaagatttagat

SEQ ID NO: 196418 - DNA, 25 bp, Probe sequence
ggcgatgatgaagatttagataaga

SEQ ID NO: 196419 - DNA, 25 bp, Probe sequence
tgggatggcgatgatgaagatttag

SEQ ID NO: 196420 - DNA, 25 bp, Probe sequence
tggtgaatgggatggcgatgatgaa

SEQ ID NO: 196421 - DNA, 25 bp, Probe sequence
tgtggtcaaacgtggagaatataaa

SEQ ID NO: 196422 - DNA, 25 bp, Probe sequence
tgaatgggatggcgatgatgaagat

SEQ ID NO: 196423 - DNA, 25 bp, Probe sequence
tctataacgaacatgttgaactggt

SEQ ID NO: 196424 - DNA, 25 bp, Probe sequence
taagacggtacaagaggtatctaac

SEQ ID NO: 196425 - DNA, 25 bp, Probe sequence
taacgaacatgttgaactggtagag

SEQ ID NO: 196426 - DNA, 25 bp, Probe sequence
tattggtgaatgggatggcgatgat

SEQ ID NO: 196427 - DNA, 25 bp, Probe sequence
ttggtgaatgggatggcgatgatga

SEQ ID NO: 196428 - DNA, 25 bp, Probe sequence
attatcataagcgaactataagtga

SEQ ID NO: 196429 - DNA, 25 bp, Probe sequence
atattagcaatgtcttagagtgttc

SEQ ID NO: 196430 - DNA, 25 bp, Probe sequence
ataagtgatgtgttgatagatgatg

SEQ ID NO: 196431 - DNA, 25 bp, Probe sequence
ataagcgaactataagtgatgtgtt

SEQ ID NO: 196432 - DNA, 25 bp, Probe sequence
atcataagcgaactataagtgatgt

SEQ ID NO: 196433 - DNA, 25 bp, Probe sequence
atgtgttgatagatgatgaaataaa

SEQ ID NO: 196434 - DNA, 25 bp, Probe sequence
agtgatgtgttgatagatgatgaaa

SEQ ID NO: 196435 - DNA, 25 bp, Probe sequence
agcgaactataagtgatgtgttgat

SEQ ID NO: 196436 - DNA, 25 bp, Probe sequence
actataagtgatgtgttgatagatg

SEQ ID NO: 196437 - DNA, 25 bp, Probe sequence
aaagatattagcaatgtcttagagt

SEQ ID NO: 196438 - DNA, 25 bp, Probe sequence
aactataagtgatgtgttgatagat

SEQ ID NO: 196439 - DNA, 25 bp, Probe sequence
aagcgaactataagtgatgtgttga

SEQ ID NO: 196440 - DNA, 25 bp, Probe sequence
aagtgatgtgttgatagatgatgaa

SEQ ID NO: 196441 - DNA, 25 bp, Probe sequence
aataggtgatgaaaattctaatgaa

SEQ ID NO: 196442 - DNA, 25 bp, Probe sequence
caataggtgatgaaaattctaatga

SEQ ID NO: 196443 - DNA, 25 bp, Probe sequence
cataagcgaactataagtgatgtgt

SEQ ID NO: 196444 - DNA, 25 bp, Probe sequence
cgaactataagtgatgtgttgatag

SEQ ID NO: 196445 - DNA, 25 bp, Probe sequence
gcgaactataagtgatgtgttgata

SEQ ID NO: 196446 - DNA, 25 bp, Probe sequence
gaactataagtgatgtgttgataga

SEQ ID NO: 196447 - DNA, 25 bp, Probe sequence
gatgtgttgatagatgatgaaataa

SEQ ID NO: 196448 - DNA, 25 bp, Probe sequence
gattatcataagcgaactataagtg

SEQ ID NO: 196449 - DNA, 25 bp, Probe sequence
gtgatgtgttgatagatgatgaaat

SEQ ID NO: 196450 - DNA, 25 bp, Probe sequence
gtgattatcataagcgaactataag

SEQ ID NO: 196451 - DNA, 25 bp, Probe sequence
tgattatcataagcgaactataagt

SEQ ID NO: 196452 - DNA, 25 bp, Probe sequence
tgatgtgttgatagatgatgaaata

SEQ ID NO: 196453 - DNA, 25 bp, Probe sequence
tcataagcgaactataagtgatgtg

SEQ ID NO: 196454 - DNA, 25 bp, Probe sequence
tcaataggtgatgaaaattctaatg

SEQ ID NO: 196455 - DNA, 25 bp, Probe sequence
taagcgaactataagtgatgtgttg

SEQ ID NO: 196456 - DNA, 25 bp, Probe sequence
taagtgatgtgttgatagatgatga

SEQ ID NO: 196457 - DNA, 25 bp, Probe sequence
tatcataagcgaactataagtgatg

SEQ ID NO: 196458 - DNA, 25 bp, Probe sequence
tataagtgatgtgttgatagatgat

SEQ ID NO: 196459 - DNA, 25 bp, Probe sequence
ttatcataagcgaactataagtgat

SEQ ID NO: 196460 - DNA, 25 bp, Probe sequence
atatatgcgttcaaatggacgatat

SEQ ID NO: 196461 - DNA, 25 bp, Probe sequence
atcaccaatcttcatatgtaaaagt

SEQ ID NO: 196462 - DNA, 25 bp, Probe sequence
atgagtgcgtcgaccacaacatgtg

SEQ ID NO: 196463 - DNA, 25 bp, Probe sequence
acgtcattgaacgcttacaagttga

SEQ ID NO: 196464 - DNA, 25 bp, Probe sequence
aaataatgggggtcgtgtctgtctc

SEQ ID NO: 196465 - DNA, 25 bp, Probe sequence
aaatgcatatcaccaatcttcatat

SEQ ID NO: 196466 - DNA, 25 bp, Probe sequence
aaaggtactaaatcattatacagaa

SEQ ID NO: 196467 - DNA, 25 bp, Probe sequence
aaaacagtaagattgcacgagtaaa

SEQ ID NO: 196468 - DNA, 25 bp, Probe sequence
aaaagagcagaagcaagttgtaaaa

SEQ ID NO: 196469 - DNA, 25 bp, Probe sequence
aactatctgagtatcaactattaac

SEQ ID NO: 196470 - DNA, 25 bp, Probe sequence
aagccctacaacgtcattgaacgct

SEQ ID NO: 196471 - DNA, 25 bp, Probe sequence
aatggacgatataagccctacaacg

SEQ ID NO: 196472 - DNA, 25 bp, Probe sequence
aatggcgacaataaactatctgagt

SEQ ID NO: 196473 - DNA, 25 bp, Probe sequence
caagcaagtattaaacaacgttcag

SEQ ID NO: 196474 - DNA, 25 bp, Probe sequence
cacgagtaaatgcatatcaccaatc

SEQ ID NO: 196475 - DNA, 25 bp, Probe sequence
cctacaacgtcattgaacgcttaca

SEQ ID NO: 196476 - DNA, 25 bp, Probe sequence
gcatatcaccaatcttcatatgtaa

SEQ ID NO: 196477 - DNA, 25 bp, Probe sequence
gcaatttaacccagcatttattaat

SEQ ID NO: 196478 - DNA, 25 bp, Probe sequence
gaattccaaattgaaagtatgtacc

SEQ ID NO: 196479 - DNA, 25 bp, Probe sequence
gaacgcttacaagttgatttgtatc

SEQ ID NO: 196480 - DNA, 25 bp, Probe sequence
gaaactgcttaaaacgaagaattgt

SEQ ID NO: 196481 - DNA, 25 bp, Probe sequence
gagtaaatgcatatcaccaatcttc

SEQ ID NO: 196482 - DNA, 25 bp, Probe sequence
gagtatcaactattaacgcaattta

SEQ ID NO: 196483 - DNA, 25 bp, Probe sequence
gatctataaataatatggcgttgtt

SEQ ID NO: 196484 - DNA, 25 bp, Probe sequence
gatataagccctacaacgtcattga

SEQ ID NO: 196485 - DNA, 25 bp, Probe sequence
gtttatattatcgtaatggcgacaa

SEQ ID NO: 196486 - DNA, 25 bp, Probe sequence
gtatgtaccatatgagtgcgtcgac

SEQ ID NO: 196487 - DNA, 25 bp, Probe sequence
gtaccatatgagtgcgtcgaccaca

SEQ ID NO: 196488 - DNA, 25 bp, Probe sequence
gtctgtctcatatccgattgaaaaa

SEQ ID NO: 196489 - DNA, 25 bp, Probe sequence
gtgcgtcgaccacaacatgtgatga

SEQ ID NO: 196490 - DNA, 25 bp, Probe sequence
tcgtgtctgtctcatatccgattga

SEQ ID NO: 196491 - DNA, 25 bp, Probe sequence
taacgcaatttaacccagcatttat

SEQ ID NO: 196492 - DNA, 25 bp, Probe sequence
tatggcgttgttgaaaaaggtacta

SEQ ID NO: 196493 - DNA, 25 bp, Probe sequence
ttaagatgtgtgaattccaaattga

SEQ ID NO: 196494 - DNA, 25 bp, Probe sequence
atttcaagtgagttacaacaatcag

SEQ ID NO: 196495 - DNA, 25 bp, Probe sequence
atttggtttaaatgaagcagataca

SEQ ID NO: 196496 - DNA, 25 bp, Probe sequence
atatgcaggagatttcaagtgagtt

SEQ ID NO: 196497 - DNA, 25 bp, Probe sequence
atactaaaaaggtcgcaaatgcatt

SEQ ID NO: 196498 - DNA, 25 bp, Probe sequence
atgaagcagatacaaatctattaat

SEQ ID NO: 196499 - DNA, 25 bp, Probe sequence
acaacaatcagaacagtctaagcaa

SEQ ID NO: 196500 - DNA, 25 bp, Probe sequence
acaacgctacaaaatttagctaagc

SEQ ID NO: 196501 - DNA, 25 bp, Probe sequence
aaagcaatatggtacaacgctacaa

SEQ ID NO: 196502 - DNA, 25 bp, Probe sequence
aaaaggtcgcaaatgcatttggttt

SEQ ID NO: 196503 - DNA, 25 bp, Probe sequence
aacaatatgcaggagatttcaagtg

SEQ ID NO: 196504 - DNA, 25 bp, Probe sequence
aacgctacaaaatttagctaagcaa

SEQ ID NO: 196505 - DNA, 25 bp, Probe sequence
aagcaatatggtacaacgctacaaa

SEQ ID NO: 196506 - DNA, 25 bp, Probe sequence
aagcaaaagcaatatggtacaacgc

SEQ ID NO: 196507 - DNA, 25 bp, Probe sequence
aaggtcgcaaatgcatttggtttaa

SEQ ID NO: 196508 - DNA, 25 bp, Probe sequence
aatgcagttgatttggatattaaaa

SEQ ID NO: 196509 - DNA, 25 bp, Probe sequence
aataaatgcagttgatttggatatt

SEQ ID NO: 196510 - DNA, 25 bp, Probe sequence
aatatggtacaacgctacaaaattt

SEQ ID NO: 196511 - DNA, 25 bp, Probe sequence
caatcagaacagtctaagcaaaagc

SEQ ID NO: 196512 - DNA, 25 bp, Probe sequence
gcaggagatttcaagtgagttacaa

SEQ ID NO: 196513 - DNA, 25 bp, Probe sequence
gcaatatggtacaacgctacaaaat

SEQ ID NO: 196514 - DNA, 25 bp, Probe sequence
gaacagtctaagcaaaagcaatatg

SEQ ID NO: 196515 - DNA, 25 bp, Probe sequence
gagttacaacaatcagaacagtcta

SEQ ID NO: 196516 - DNA, 25 bp, Probe sequence
gatacaaatctattaataaatgcag

SEQ ID NO: 196517 - DNA, 25 bp, Probe sequence
gttacaacaatcagaacagtctaag

SEQ ID NO: 196518 - DNA, 25 bp, Probe sequence
gtctaagcaaaagcaatatggtaca

SEQ ID NO: 196519 - DNA, 25 bp, Probe sequence
gtgagttacaacaatcagaacagtc

SEQ ID NO: 196520 - DNA, 25 bp, Probe sequence
ggtcgcaaatgcatttggtttaaat

SEQ ID NO: 196521 - DNA, 25 bp, Probe sequence
ggtacaacgctacaaaatttagcta

SEQ ID NO: 196522 - DNA, 25 bp, Probe sequence
ggagatttcaagtgagttacaacaa

SEQ ID NO: 196523 - DNA, 25 bp, Probe sequence
tcagaacagtctaagcaaaagcaat

SEQ ID NO: 196524 - DNA, 25 bp, Probe sequence
tcaagtgagttacaacaatcagaac

SEQ ID NO: 196525 - DNA, 25 bp, Probe sequence
tatgcaggagatttcaagtgagtta

SEQ ID NO: 196526 - DNA, 25 bp, Probe sequence
tatggtacaacgctacaaaatttag

SEQ ID NO: 196527 - DNA, 25 bp, Probe sequence
ttagctaagcaaaacaggattatta

SEQ ID NO: 196528 - DNA, 25 bp, Probe sequence
atgagcatcagcaatatgcgagtat

SEQ ID NO: 196529 - DNA, 25 bp, Probe sequence
atgatgataaagaggctagggaagc

SEQ ID NO: 196530 - DNA, 25 bp, Probe sequence
agataagtccacatataaacagtta

SEQ ID NO: 196531 - DNA, 25 bp, Probe sequence
agcgagttgtcatcattatacgaat

SEQ ID NO: 196532 - DNA, 25 bp, Probe sequence
actgaatcgtactttaaagaataca

SEQ ID NO: 196533 - DNA, 25 bp, Probe sequence
acaaccaatttgtaatagatcaaca

SEQ ID NO: 196534 - DNA, 25 bp, Probe sequence
aaagcgagttgtcatcattatacga

SEQ ID NO: 196535 - DNA, 25 bp, Probe sequence
aaaaaagtagtcgatgcatataatg

SEQ ID NO: 196536 - DNA, 25 bp, Probe sequence
aaaagtagtcgatgcatataatgag

SEQ ID NO: 196537 - DNA, 25 bp, Probe sequence
aagcgagttgtcatcattatacgaa

SEQ ID NO: 196538 - DNA, 25 bp, Probe sequence
aagcaatcagctttaggtaaattaa

SEQ ID NO: 196539 - DNA, 25 bp, Probe sequence
aagtccacatataaacagttaatca

SEQ ID NO: 196540 - DNA, 25 bp, Probe sequence
caaagcgagttgtcatcattatacg

SEQ ID NO: 196541 - DNA, 25 bp, Probe sequence
cagcaatatgcgagtatttatagtc

SEQ ID NO: 196542 - DNA, 25 bp, Probe sequence
catcaaagcgagttgtcatcattat

SEQ ID NO: 196543 - DNA, 25 bp, Probe sequence
ccacatataaacagttaatcatgga

SEQ ID NO: 196544 - DNA, 25 bp, Probe sequence
gcgagttgtcatcattatacgaatc

SEQ ID NO: 196545 - DNA, 25 bp, Probe sequence
gcgtaatgcattggagagtaaaata

SEQ ID NO: 196546 - DNA, 25 bp, Probe sequence
gctagggaagcattgaatggctact

SEQ ID NO: 196547 - DNA, 25 bp, Probe sequence
gcattgaatggctactttagagaaa

SEQ ID NO: 196548 - DNA, 25 bp, Probe sequence
gcatcagcaatatgcgagtatttat

SEQ ID NO: 196549 - DNA, 25 bp, Probe sequence
gaatggctactttagagaaaatata

SEQ ID NO: 196550 - DNA, 25 bp, Probe sequence
gaagcattgaatggctactttagag

SEQ ID NO: 196551 - DNA, 25 bp, Probe sequence
gagcatcagcaatatgcgagtattt

SEQ ID NO: 196552 - DNA, 25 bp, Probe sequence
gagttgtcatcattatacgaatcag

SEQ ID NO: 196553 - DNA, 25 bp, Probe sequence
gaggctagggaagcattgaatggct

SEQ ID NO: 196554 - DNA, 25 bp, Probe sequence
gttgtcatcattatacgaatcagaa

SEQ ID NO: 196555 - DNA, 25 bp, Probe sequence
gtcatcattatacgaatcagaaaag

SEQ ID NO: 196556 - DNA, 25 bp, Probe sequence
gtgtgtcgaaagaagttaaatatca

SEQ ID NO: 196557 - DNA, 25 bp, Probe sequence
gggaagcattgaatggctactttag

SEQ ID NO: 196558 - DNA, 25 bp, Probe sequence
tgcgagtatttatagtcaagaacaa

SEQ ID NO: 196559 - DNA, 25 bp, Probe sequence
tcgtactttaaagaatacaaccaat

SEQ ID NO: 196560 - DNA, 25 bp, Probe sequence
tagatcaacaaaaggctatacaaga

SEQ ID NO: 196561 - DNA, 25 bp, Probe sequence
ttaaaacatcaaagcgagttgtcat

SEQ ID NO: 196562 - DNA, 25 bp, Probe sequence
attacatgacggtaaacatctttct

SEQ ID NO: 196563 - DNA, 25 bp, Probe sequence
atctttctattagtgatatgatggc

SEQ ID NO: 196564 - DNA, 25 bp, Probe sequence
aggtactacacaggattattagaac

SEQ ID NO: 196565 - DNA, 25 bp, Probe sequence
agtgatatgatggctagtcatttgt

SEQ ID NO: 196566 - DNA, 25 bp, Probe sequence
agtgcaaccgtgttgctttaagtta

SEQ ID NO: 196567 - DNA, 25 bp, Probe sequence
agtaaagtgcaaccgtgttgcttta

SEQ ID NO: 196568 - DNA, 25 bp, Probe sequence
agaacatagtaaagtgcaaccgtgt

SEQ ID NO: 196569 - DNA, 25 bp, Probe sequence
actaaggtactacacaggattatta

SEQ ID NO: 196570 - DNA, 25 bp, Probe sequence
actacacaggattattagaacatag

SEQ ID NO: 196571 - DNA, 25 bp, Probe sequence
acatagtaaagtgcaaccgtgttgc

SEQ ID NO: 196572 - DNA, 25 bp, Probe sequence
acatgacggtaaacatctttctatt

SEQ ID NO: 196573 - DNA, 25 bp, Probe sequence
aaagtgcaaccgtgttgctttaagt

SEQ ID NO: 196574 - DNA, 25 bp, Probe sequence
aacatctttctattagtgatatgat

SEQ ID NO: 196575 - DNA, 25 bp, Probe sequence
aagtgcaaccgtgttgctttaagtt

SEQ ID NO: 196576 - DNA, 25 bp, Probe sequence
catagtaaagtgcaaccgtgttgct

SEQ ID NO: 196577 - DNA, 25 bp, Probe sequence
ctaaggtactacacaggattattag

SEQ ID NO: 196578 - DNA, 25 bp, Probe sequence
ccatttgatatggtatacgtgatga

SEQ ID NO: 196579 - DNA, 25 bp, Probe sequence
gaattacatgacggtaaacatcttt

SEQ ID NO: 196580 - DNA, 25 bp, Probe sequence
gaacatagtaaagtgcaaccgtgtt

SEQ ID NO: 196581 - DNA, 25 bp, Probe sequence
gatatgatggctagtcatttgtttg

SEQ ID NO: 196582 - DNA, 25 bp, Probe sequence
gtaaagtgcaaccgtgttgctttaa

SEQ ID NO: 196583 - DNA, 25 bp, Probe sequence
gtgatatgatggctagtcatttgtt

SEQ ID NO: 196584 - DNA, 25 bp, Probe sequence
ggtactacacaggattattagaaca

SEQ ID NO: 196585 - DNA, 25 bp, Probe sequence
tgatatgatggctagtcatttgttt

SEQ ID NO: 196586 - DNA, 25 bp, Probe sequence
tgaacttagaaactatcgtaaacca

SEQ ID NO: 196587 - DNA, 25 bp, Probe sequence
taaagtgcaaccgtgttgctttaag

SEQ ID NO: 196588 - DNA, 25 bp, Probe sequence
tacatgacggtaaacatctttctat

SEQ ID NO: 196589 - DNA, 25 bp, Probe sequence
tagaaactatcgtaaaccaatttga

SEQ ID NO: 196590 - DNA, 25 bp, Probe sequence
tagtaaagtgcaaccgtgttgcttt

SEQ ID NO: 196591 - DNA, 25 bp, Probe sequence
tatggtatacgtgatgatgaacagc

SEQ ID NO: 196592 - DNA, 25 bp, Probe sequence
tttgatatggtatacgtgatgatga

SEQ ID NO: 196593 - DNA, 25 bp, Probe sequence
ttagaaactatcgtaaaccaatttg

SEQ ID NO: 196594 - DNA, 25 bp, Probe sequence
ttacatgacggtaaacatctttcta

SEQ ID NO: 196595 - DNA, 25 bp, Probe sequence
ttgatatggtatacgtgatgatgaa

SEQ ID NO: 196596 - DNA, 25 bp, Probe sequence
atttggaaagttatgaacacacaga

SEQ ID NO: 196597 - DNA, 25 bp, Probe sequence
atagaacacgtggtttatcaacttg

SEQ ID NO: 196598 - DNA, 25 bp, Probe sequence
atgttaatggtattgaagtggtttc

SEQ ID NO: 196599 - DNA, 25 bp, Probe sequence
agtggtttcagagatcagtcgtgaa

SEQ ID NO: 196600 - DNA, 25 bp, Probe sequence
agaacacgtggtttatcaacttgag

SEQ ID NO: 196601 - DNA, 25 bp, Probe sequence
acgtggtttatcaacttgagttaag

SEQ ID NO: 196602 - DNA, 25 bp, Probe sequence
acttgagttaagtgtcgtgaataat

SEQ ID NO: 196603 - DNA, 25 bp, Probe sequence
acacgtggtttatcaacttgagtta

SEQ ID NO: 196604 - DNA, 25 bp, Probe sequence
aacacgtggtttatcaacttgagtt

SEQ ID NO: 196605 - DNA, 25 bp, Probe sequence
aagtgtcgtgaataatttggaaagt

SEQ ID NO: 196606 - DNA, 25 bp, Probe sequence
aagtggtttcagagatcagtcgtga

SEQ ID NO: 196607 - DNA, 25 bp, Probe sequence
aatggtgcgcacaagaattaaagaa

SEQ ID NO: 196608 - DNA, 25 bp, Probe sequence
aatgaaatggtgcgcacaagaatta

SEQ ID NO: 196609 - DNA, 25 bp, Probe sequence
aatagaacacgtggtttatcaactt

SEQ ID NO: 196610 - DNA, 25 bp, Probe sequence
cagtcgtgaaaagcacttagaattg

SEQ ID NO: 196611 - DNA, 25 bp, Probe sequence
gaattgataatgaaatggtgcgcac

SEQ ID NO: 196612 - DNA, 25 bp, Probe sequence
gaagtggtttcagagatcagtcgtg

SEQ ID NO: 196613 - DNA, 25 bp, Probe sequence
gaagtaatagaacacgtggtttatc

SEQ ID NO: 196614 - DNA, 25 bp, Probe sequence
gaacacacagaatatgttaatggta

SEQ ID NO: 196615 - DNA, 25 bp, Probe sequence
gaacacgtggtttatcaacttgagt

SEQ ID NO: 196616 - DNA, 25 bp, Probe sequence
gaaaagcacttagaattgataatga

SEQ ID NO: 196617 - DNA, 25 bp, Probe sequence
gaaagttatgaacacacagaatatg

SEQ ID NO: 196618 - DNA, 25 bp, Probe sequence
gagatcagtcgtgaaaagcacttag

SEQ ID NO: 196619 - DNA, 25 bp, Probe sequence
gagttaagtgtcgtgaataatttgg

SEQ ID NO: 196620 - DNA, 25 bp, Probe sequence
gatcagtcgtgaaaagcacttagaa

SEQ ID NO: 196621 - DNA, 25 bp, Probe sequence
gtaatagaacacgtggtttatcaac

SEQ ID NO: 196622 - DNA, 25 bp, Probe sequence
gtggtttcagagatcagtcgtgaaa

SEQ ID NO: 196623 - DNA, 25 bp, Probe sequence
ggtgcgcacaagaattaaagaataa

SEQ ID NO: 196624 - DNA, 25 bp, Probe sequence
ggtttatcaacttgagttaagtgtc

SEQ ID NO: 196625 - DNA, 25 bp, Probe sequence
tgataatgaaatggtgcgcacaaga

SEQ ID NO: 196626 - DNA, 25 bp, Probe sequence
tcagagatcagtcgtgaaaagcact

SEQ ID NO: 196627 - DNA, 25 bp, Probe sequence
tcaacttgagttaagtgtcgtgaat

SEQ ID NO: 196628 - DNA, 25 bp, Probe sequence
tagaacacgtggtttatcaacttga

SEQ ID NO: 196629 - DNA, 25 bp, Probe sequence
tatcaacttgagttaagtgtcgtga

SEQ ID NO: 196630 - DNA, 25 bp, Probe sequence
attgatagagagtacatattcacaa

SEQ ID NO: 196631 - DNA, 25 bp, Probe sequence
actacccaaagcatcgacttactaa

SEQ ID NO: 196632 - DNA, 25 bp, Probe sequence
attattaaaggggggcgctgatatt

SEQ ID NO: 196633 - DNA, 25 bp, Probe sequence
aaaggggggcgctgatattagttct

SEQ ID NO: 196634 - DNA, 25 bp, Probe sequence
aggggggcgctgatattagttctat

SEQ ID NO: 196635 - DNA, 25 bp, Probe sequence
agaacacttatgcttggaatgataa

SEQ ID NO: 196636 - DNA, 25 bp, Probe sequence
acaaatacgtctggtagccctatcg

SEQ ID NO: 196637 - DNA, 25 bp, Probe sequence
aaatacgtctggtagccctatcgac

SEQ ID NO: 196638 - DNA, 25 bp, Probe sequence
aagcatcgacttactaagaacactt

SEQ ID NO: 196639 - DNA, 25 bp, Probe sequence
cacatgttactaatcagatggcgaa

SEQ ID NO: 196640 - DNA, 25 bp, Probe sequence
caaatacgtctggtagccctatcga

SEQ ID NO: 196641 - DNA, 25 bp, Probe sequence
cactacccaaagcatcgacttacta

SEQ ID NO: 196642 - DNA, 25 bp, Probe sequence
cacaaatacgtctggtagccctatc

SEQ ID NO: 196643 - DNA, 25 bp, Probe sequence
cacacatgttactaatcagatggcg

SEQ ID NO: 196644 - DNA, 25 bp, Probe sequence
ctaagaacacttatgcttggaatga

SEQ ID NO: 196645 - DNA, 25 bp, Probe sequence
cccaaagcatcgacttactaagaac

SEQ ID NO: 196646 - DNA, 25 bp, Probe sequence
gctcactacccaaagcatcgactta

SEQ ID NO: 196647 - DNA, 25 bp, Probe sequence
gctataaggccacagggctcactac

SEQ ID NO: 196648 - DNA, 25 bp, Probe sequence
gcatcgacttactaagaacacttat

SEQ ID NO: 196649 - DNA, 25 bp, Probe sequence
gaataaatttgaacgattggggagt

SEQ ID NO: 196650 - DNA, 25 bp, Probe sequence
gaagtaatagctataaggccacagg

SEQ ID NO: 196651 - DNA, 25 bp, Probe sequence
gacttactaagaacacttatgcttg

SEQ ID NO: 196652 - DNA, 25 bp, Probe sequence
gagcattcggagtaaaggagacaac

SEQ ID NO: 196653 - DNA, 25 bp, Probe sequence
gttactaatcagatggcgaaagata

SEQ ID NO: 196654 - DNA, 25 bp, Probe sequence
gggcgctgatattagttctattaag

SEQ ID NO: 196655 - DNA, 25 bp, Probe sequence
gggggcgctgatattagttctatta

SEQ ID NO: 196656 - DNA, 25 bp, Probe sequence
tcactacccaaagcatcgacttact

SEQ ID NO: 196657 - DNA, 25 bp, Probe sequence
taatagctataaggccacagggctc

SEQ ID NO: 196658 - DNA, 25 bp, Probe sequence
tacatattcacaaatacgtctggta

SEQ ID NO: 196659 - DNA, 25 bp, Probe sequence
tacccaaagcatcgacttactaaga

SEQ ID NO: 196660 - DNA, 25 bp, Probe sequence
tagctataaggccacagggctcact

SEQ ID NO: 196661 - DNA, 25 bp, Probe sequence
tataaggccacagggctcactaccc

SEQ ID NO: 196662 - DNA, 25 bp, Probe sequence
tattcacaaatacgtctggtagccc

SEQ ID NO: 196663 - DNA, 25 bp, Probe sequence
ttcacaaatacgtctggtagcccta

SEQ ID NO: 196664 - DNA, 25 bp, Probe sequence
attcacgcgattcacaatatttgtc

SEQ ID NO: 196665 - DNA, 25 bp, Probe sequence
atttgtccgcataaacaaggaccat

SEQ ID NO: 196666 - DNA, 25 bp, Probe sequence
atatgtattctgtccacttcatgat

SEQ ID NO: 196667 - DNA, 25 bp, Probe sequence
atactgggattgtacaagaacctga

SEQ ID NO: 196668 - DNA, 25 bp, Probe sequence
atgtattctgtccacttcatgatca

SEQ ID NO: 196669 - DNA, 25 bp, Probe sequence
aggttattgtcaaaggcaaagaggt

SEQ ID NO: 196670 - DNA, 25 bp, Probe sequence
agtggtacaattcacgcgattcaca

SEQ ID NO: 196671 - DNA, 25 bp, Probe sequence
agattgatttaaatactgggattgt

SEQ ID NO: 196672 - DNA, 25 bp, Probe sequence
acgggaacgtatatatatgtctgta

SEQ ID NO: 196673 - DNA, 25 bp, Probe sequence
acaattcacgcgattcacaatattt

SEQ ID NO: 196674 - DNA, 25 bp, Probe sequence
aacaaggaccattgtcagagggaac

SEQ ID NO: 196675 - DNA, 25 bp, Probe sequence
caactatagatgaattaacacccct

SEQ ID NO: 196676 - DNA, 25 bp, Probe sequence
cacgcgattcacaatatttgtccgc

SEQ ID NO: 196677 - DNA, 25 bp, Probe sequence
cctgatgaaggttgtgtagatgttt

SEQ ID NO: 196678 - DNA, 25 bp, Probe sequence
gcgattcacaatatttgtccgcata

SEQ ID NO: 196679 - DNA, 25 bp, Probe sequence
gaatatgtattctgtccacttcatg

SEQ ID NO: 196680 - DNA, 25 bp, Probe sequence
gaaggttgtgtagatgtttatgagg

SEQ ID NO: 196681 - DNA, 25 bp, Probe sequence
gaaagtggtacaattcacgcgattc

SEQ ID NO: 196682 - DNA, 25 bp, Probe sequence
gagggaacagtgagtggtgaatatg

SEQ ID NO: 196683 - DNA, 25 bp, Probe sequence
gaggtagaagttacagacgggaacg

SEQ ID NO: 196684 - DNA, 25 bp, Probe sequence
gatgaattaacacccctaattggaa

SEQ ID NO: 196685 - DNA, 25 bp, Probe sequence
gttgtgtagatgtttatgaggtaga

SEQ ID NO: 196686 - DNA, 25 bp, Probe sequence
gtattctgtccacttcatgatcaaa

SEQ ID NO: 196687 - DNA, 25 bp, Probe sequence
gtaggattgtttttaactgaaagtg

SEQ ID NO: 196688 - DNA, 25 bp, Probe sequence
gtagaagttacagacgggaacgtat

SEQ ID NO: 196689 - DNA, 25 bp, Probe sequence
gtccacttcatgatcaaaagattga

SEQ ID NO: 196690 - DNA, 25 bp, Probe sequence
gtgaatatgtattctgtccacttca

SEQ ID NO: 196691 - DNA, 25 bp, Probe sequence
gggattgtacaagaacctgatgaag

SEQ ID NO: 196692 - DNA, 25 bp, Probe sequence
ggtacaattcacgcgattcacaata

SEQ ID NO: 196693 - DNA, 25 bp, Probe sequence
ggaccattgtcagagggaacagtga

SEQ ID NO: 196694 - DNA, 25 bp, Probe sequence
tccgcataaacaaggaccattgtca

SEQ ID NO: 196695 - DNA, 25 bp, Probe sequence
tattctgtccacttcatgatcaaaa

SEQ ID NO: 196696 - DNA, 25 bp, Probe sequence
ttcacaatatttgtccgcataaaca

SEQ ID NO: 196697 - DNA, 25 bp, Probe sequence
ttctgtccacttcatgatcaaaaga

SEQ ID NO: 196698 - DNA, 25 bp, Probe sequence
aggacccatgggcgatgccgtaatt

SEQ ID NO: 196699 - DNA, 25 bp, Probe sequence
attggtgtcattttatgtatatgta

SEQ ID NO: 196700 - DNA, 25 bp, Probe sequence
atgccgtaattgaaggctacatcaa

SEQ ID NO: 196701 - DNA, 25 bp, Probe sequence
agtgagttactaaaaccagcgcatc

SEQ ID NO: 196702 - DNA, 25 bp, Probe sequence
agttactaaaaccagcgcatcaatt

SEQ ID NO: 196703 - DNA, 25 bp, Probe sequence
actctatctccagcataataccaaa

SEQ ID NO: 196704 - DNA, 25 bp, Probe sequence
acaggagcgtattacactctatctc

SEQ ID NO: 196705 - DNA, 25 bp, Probe sequence
aaatcacctgacgaaatcaaagaag

SEQ ID NO: 196706 - DNA, 25 bp, Probe sequence
aaatctgtgcatttcacaagtttaa

SEQ ID NO: 196707 - DNA, 25 bp, Probe sequence
aaagaggacccatgggcgatgccgt

SEQ ID NO: 196708 - DNA, 25 bp, Probe sequence
aaccagcgcatcaattaaaatcacc

SEQ ID NO: 196709 - DNA, 25 bp, Probe sequence
aagaacaacaggagcgtattacact

SEQ ID NO: 196710 - DNA, 25 bp, Probe sequence
aataccaaagaacccaataccatca

SEQ ID NO: 196711 - DNA, 25 bp, Probe sequence
caataccatcaaatctgtgcatttc

SEQ ID NO: 196712 - DNA, 25 bp, Probe sequence
cagtttggtggtgctatgatagaaa

SEQ ID NO: 196713 - DNA, 25 bp, Probe sequence
catgtttttgtaattattggtgtca

SEQ ID NO: 196714 - DNA, 25 bp, Probe sequence
ctccagcataataccaaagaaccca

SEQ ID NO: 196715 - DNA, 25 bp, Probe sequence
cccaataccatcaaatctgtgcatt

SEQ ID NO: 196716 - DNA, 25 bp, Probe sequence
gcgcatcaattaaaatcacctgacg

SEQ ID NO: 196717 - DNA, 25 bp, Probe sequence
gctacaccagaacataattatcagt

SEQ ID NO: 196718 - DNA, 25 bp, Probe sequence
gaaggctacatcaatgaaaacaaaa

SEQ ID NO: 196719 - DNA, 25 bp, Probe sequence
gacccatgggcgatgccgtaattga

SEQ ID NO: 196720 - DNA, 25 bp, Probe sequence
gttgcatcagtcatttatttaaaag

SEQ ID NO: 196721 - DNA, 25 bp, Probe sequence
gtatatgtatagttgcatcagtcat

SEQ ID NO: 196722 - DNA, 25 bp, Probe sequence
gtatagttgcatcagtcatttattt

SEQ ID NO: 196723 - DNA, 25 bp, Probe sequence
gtaattattggtgtcattttatgta

SEQ ID NO: 196724 - DNA, 25 bp, Probe sequence
gggcgatgccgtaattgaaggctac

SEQ ID NO: 196725 - DNA, 25 bp, Probe sequence
ggagcgtattacactctatctccag

SEQ ID NO: 196726 - DNA, 25 bp, Probe sequence
taattttactgcttatgctacacca

SEQ ID NO: 196727 - DNA, 25 bp, Probe sequence
taattatcagtttggtggtgctatg

SEQ ID NO: 196728 - DNA, 25 bp, Probe sequence
tacactctatctccagcataatacc

SEQ ID NO: 196729 - DNA, 25 bp, Probe sequence
tactgcttatgctacaccagaacat

SEQ ID NO: 196730 - DNA, 25 bp, Probe sequence
taccatcaaatctgtgcatttcaca

SEQ ID NO: 196731 - DNA, 25 bp, Probe sequence
tattacactctatctccagcataat

SEQ ID NO: 196732 - DNA, 25 bp, Probe sequence
atttactatacacagcgataataaa

SEQ ID NO: 196733 - DNA, 25 bp, Probe sequence
atacacagcgataataaatacagat

SEQ ID NO: 196734 - DNA, 25 bp, Probe sequence
agcgataataaatacagattacaat

SEQ ID NO: 196735 - DNA, 25 bp, Probe sequence
actatacacagcgataataaataca

SEQ ID NO: 196736 - DNA, 25 bp, Probe sequence
acattaataacatatacgtatttac

SEQ ID NO: 196737 - DNA, 25 bp, Probe sequence
acagcgataataaatacagattaca

SEQ ID NO: 196738 - DNA, 25 bp, Probe sequence
acacagcgataataaatacagatta

SEQ ID NO: 196739 - DNA, 25 bp, Probe sequence
aacattaataacatatacgtattta

SEQ ID NO: 196740 - DNA, 25 bp, Probe sequence
cacagcgataataaatacagattac

SEQ ID NO: 196741 - DNA, 25 bp, Probe sequence
cagcgataataaatacagattacaa

SEQ ID NO: 196742 - DNA, 25 bp, Probe sequence
ctatacacagcgataataaatacag

SEQ ID NO: 196743 - DNA, 25 bp, Probe sequence
gcgataataaatacagattacaatt

SEQ ID NO: 196744 - DNA, 25 bp, Probe sequence
gtatttactatacacagcgataata

SEQ ID NO: 196745 - DNA, 25 bp, Probe sequence
taataaatacagattacaatttttt

SEQ ID NO: 196746 - DNA, 25 bp, Probe sequence
taataacatatacgtatttactata

SEQ ID NO: 196747 - DNA, 25 bp, Probe sequence
tacacagcgataataaatacagatt

SEQ ID NO: 196748 - DNA, 25 bp, Probe sequence
tactatacacagcgataataaatac

SEQ ID NO: 196749 - DNA, 25 bp, Probe sequence
tatacacagcgataataaatacaga

SEQ ID NO: 196750 - DNA, 25 bp, Probe sequence
tatttactatacacagcgataataa

SEQ ID NO: 196751 - DNA, 25 bp, Probe sequence
tttcaacattaataacatatacgta

SEQ ID NO: 196752 - DNA, 25 bp, Probe sequence
tttactatacacagcgataataaat

SEQ ID NO: 196753 - DNA, 25 bp, Probe sequence
ttactatacacagcgataataaata

SEQ ID NO: 196754 - DNA, 25 bp, Probe sequence
ttaataacatatacgtatttactat

SEQ ID NO: 196755 - DNA, 25 bp, Probe sequence
ttcaacattaataacatatacgtat

SEQ ID NO: 196756 - DNA, 25 bp, Probe sequence
attggcattgcatttattctactaa

SEQ ID NO: 196757 - DNA, 25 bp, Probe sequence
attgcatttattctactaagtgttt

SEQ ID NO: 196758 - DNA, 25 bp, Probe sequence
attttagttttatatgtcattggca

SEQ ID NO: 196759 - DNA, 25 bp, Probe sequence
atatacaattggtagtgccattata

SEQ ID NO: 196760 - DNA, 25 bp, Probe sequence
atatgtcattggcattgcatttatt

SEQ ID NO: 196761 - DNA, 25 bp, Probe sequence
atacaattggtagtgccattataac

SEQ ID NO: 196762 - DNA, 25 bp, Probe sequence
atgtcattggcattgcatttattct

SEQ ID NO: 196763 - DNA, 25 bp, Probe sequence
agttttatatgtcattggcattgca

SEQ ID NO: 196764 - DNA, 25 bp, Probe sequence
acatactttatatacaattggtagt

SEQ ID NO: 196765 - DNA, 25 bp, Probe sequence
acaattggtagtgccattataacga

SEQ ID NO: 196766 - DNA, 25 bp, Probe sequence
aattggtagtgccattataacgatt

SEQ ID NO: 196767 - DNA, 25 bp, Probe sequence
tctaagacggaaggtttatctacga

SEQ ID NO: 196768 - DNA, 25 bp, Probe sequence
cattgcatttattctactaagtgtt

SEQ ID NO: 196769 - DNA, 25 bp, Probe sequence
cattggcattgcatttattctacta

SEQ ID NO: 196770 - DNA, 25 bp, Probe sequence
ctttatatacaattggtagtgccat

SEQ ID NO: 196771 - DNA, 25 bp, Probe sequence
gcattgcatttattctactaagtgt

SEQ ID NO: 196772 - DNA, 25 bp, Probe sequence
gacggaaggtttatctacgaaacat

SEQ ID NO: 196773 - DNA, 25 bp, Probe sequence
gttttatatgtcattggcattgcat

SEQ ID NO: 196774 - DNA, 25 bp, Probe sequence
gtcattggcattgcatttattctac

SEQ ID NO: 196775 - DNA, 25 bp, Probe sequence
ggcattgcatttattctactaagtg

SEQ ID NO: 196776 - DNA, 25 bp, Probe sequence
tggttctaagacggaaggtttatct

SEQ ID NO: 196777 - DNA, 25 bp, Probe sequence
tggcattgcatttattctactaagt

SEQ ID NO: 196778 - DNA, 25 bp, Probe sequence
tggtagtgccattataacgattgct

SEQ ID NO: 196779 - DNA, 25 bp, Probe sequence
tgtcattggcattgcatttattcta

SEQ ID NO: 196780 - DNA, 25 bp, Probe sequence
tctactaagtgtttttggttctaag

SEQ ID NO: 196781 - DNA, 25 bp, Probe sequence
tagttttatatgtcattggcattgc

SEQ ID NO: 196782 - DNA, 25 bp, Probe sequence
tatgtcattggcattgcatttattc

SEQ ID NO: 196783 - DNA, 25 bp, Probe sequence
tatatgtcattggcattgcatttat

SEQ ID NO: 196784 - DNA, 25 bp, Probe sequence
tttatatgtcattggcattgcattt

SEQ ID NO: 196785 - DNA, 25 bp, Probe sequence
tttagttttatatgtcattggcatt

SEQ ID NO: 196786 - DNA, 25 bp, Probe sequence
ttttatatgtcattggcattgcatt

SEQ ID NO: 196787 - DNA, 25 bp, Probe sequence
ttatatgtcattggcattgcattta

SEQ ID NO: 196788 - DNA, 25 bp, Probe sequence
ttggtagtgccattataacgattgc

SEQ ID NO: 196789 - DNA, 25 bp, Probe sequence
ttggcattgcatttattctactaag

SEQ ID NO: 196790 - DNA, 25 bp, Probe sequence
attgatgctcaaactggcgaaattt

SEQ ID NO: 196791 - DNA, 25 bp, Probe sequence
ataaaccagctaattctgatattaa

SEQ ID NO: 196792 - DNA, 25 bp, Probe sequence
agaattgcctaaatccgaaaatgta

SEQ ID NO: 196793 - DNA, 25 bp, Probe sequence
aacaggtcaagcaacattgattact

SEQ ID NO: 196794 - DNA, 25 bp, Probe sequence
aacgcatgttaataactacggtggt

SEQ ID NO: 196795 - DNA, 25 bp, Probe sequence
aaccgagtgttgatggtgttcatgc

SEQ ID NO: 196796 - DNA, 25 bp, Probe sequence
aagtttatcgggtgcaaatgacgta

SEQ ID NO: 196797 - DNA, 25 bp, Probe sequence
caaccaaggtagtccaattgtttca

SEQ ID NO: 196798 - DNA, 25 bp, Probe sequence
caccagcagcattagcgattgattc

SEQ ID NO: 196799 - DNA, 25 bp, Probe sequence
gcatggaatgaagtaggcgtggagt

SEQ ID NO: 196800 - DNA, 25 bp, Probe sequence
gcaaacagctgaacaggtgtatgaa

SEQ ID NO: 196801 - DNA, 25 bp, Probe sequence
gaagatgtctacacacctggaaaag

SEQ ID NO: 196802 - DNA, 25 bp, Probe sequence
gaaagtacacgcagacaaatcagga

SEQ ID NO: 196803 - DNA, 25 bp, Probe sequence
gacacatttggtcgtgaatcatatg

SEQ ID NO: 196804 - DNA, 25 bp, Probe sequence
gacgcagccgacaaagcatttaaag

SEQ ID NO: 196805 - DNA, 25 bp, Probe sequence
gatgacgaggatttcttaatgggtg

SEQ ID NO: 196806 - DNA, 25 bp, Probe sequence
gataacagaaataatgccgcatgga

SEQ ID NO: 196807 - DNA, 25 bp, Probe sequence
gtattgacggtggatttagcctaga

SEQ ID NO: 196808 - DNA, 25 bp, Probe sequence
gtagatgcaaattattacgctaaac

SEQ ID NO: 196809 - DNA, 25 bp, Probe sequence
gtaaagatgacgcagccgacaaagc

SEQ ID NO: 196810 - DNA, 25 bp, Probe sequence
gtcaggcgctctaaatgaaagcttt

SEQ ID NO: 196811 - DNA, 25 bp, Probe sequence
gtcgttttaatcaatggggatactg

SEQ ID NO: 196812 - DNA, 25 bp, Probe sequence
gtgttcatgcacctgacaaagaagt

SEQ ID NO: 196813 - DNA, 25 bp, Probe sequence
gtccaattgtttcattaacgcatgt

SEQ ID NO: 196814 - DNA, 25 bp, Probe sequence
ggtggcgtacatacgaattctggaa

SEQ ID NO: 196815 - DNA, 25 bp, Probe sequence
ggtgatggtgatggtcgcacattca

SEQ ID NO: 196816 - DNA, 25 bp, Probe sequence
ggtcgcacattcacaagtttatcgg

SEQ ID NO: 196817 - DNA, 25 bp, Probe sequence
ggaaaaggtgtacttggcgatacaa

SEQ ID NO: 196818 - DNA, 25 bp, Probe sequence
tgttgagcactttatcaccagcagc

SEQ ID NO: 196819 - DNA, 25 bp, Probe sequence
tcaagattacgctgttactgatgta

SEQ ID NO: 196820 - DNA, 25 bp, Probe sequence
taaggaccagtcaggcgctctaaat

SEQ ID NO: 196821 - DNA, 25 bp, Probe sequence
taacacacggtgtgacacaagagac

SEQ ID NO: 196822 - DNA, 25 bp, Probe sequence
taactacggtggtcaagataacaga

SEQ ID NO: 196823 - DNA, 25 bp, Probe sequence
tagcctagaagatttaacgcatcaa

SEQ ID NO: 196824 - DNA, 25 bp, Probe sequence
attgtattcccaatttctacagaca

SEQ ID NO: 196825 - DNA, 25 bp, Probe sequence
attcccaatttctacagacaatgca

SEQ ID NO: 196826 - DNA, 25 bp, Probe sequence
caattctagtcaggggccccaacac

SEQ ID NO: 196827 - DNA, 25 bp, Probe sequence
aaaagtcagcttacaataatgtgca

SEQ ID NO: 196828 - DNA, 25 bp, Probe sequence
aacaagcttttttcaattctagtca

SEQ ID NO: 196829 - DNA, 25 bp, Probe sequence
aagcttttttcaattctagtcaggg

SEQ ID NO: 196830 - DNA, 25 bp, Probe sequence
aatgtgcaagttggggatggacccc

SEQ ID NO: 196831 - DNA, 25 bp, Probe sequence
aatgcaagttggggtgggacgacga

SEQ ID NO: 196832 - DNA, 25 bp, Probe sequence
caatttctacagacaatgcaagttg

SEQ ID NO: 196833 - DNA, 25 bp, Probe sequence
caagcttttttcaattctagtcagg

SEQ ID NO: 196834 - DNA, 25 bp, Probe sequence
ctagtcaggggccccaacacagaag

SEQ ID NO: 196835 - DNA, 25 bp, Probe sequence
ctgaacgaaaatgcgcttgtaacaa

SEQ ID NO: 196836 - DNA, 25 bp, Probe sequence
ccaacacagaagctgacgaaaagtc

SEQ ID NO: 196837 - DNA, 25 bp, Probe sequence
gccccaacacagaagctgacgaaaa

SEQ ID NO: 196838 - DNA, 25 bp, Probe sequence
gcttttttcaattctagtcaggggc

SEQ ID NO: 196839 - DNA, 25 bp, Probe sequence
gcttgtaacaagcttttttcaattc

SEQ ID NO: 196840 - DNA, 25 bp, Probe sequence
gaacgaaaatgcgcttgtaacaagc

SEQ ID NO: 196841 - DNA, 25 bp, Probe sequence
gacaatgcaagttggggtgggacga

SEQ ID NO: 196842 - DNA, 25 bp, Probe sequence
gactgaacgaaaatgcgcttgtaac

SEQ ID NO: 196843 - DNA, 25 bp, Probe sequence
gacgaaaagtcagcttacaataatg

SEQ ID NO: 196844 - DNA, 25 bp, Probe sequence
gtattcccaatttctacagacaatg

SEQ ID NO: 196845 - DNA, 25 bp, Probe sequence
gtaacaagcttttttcaattctagt

SEQ ID NO: 196846 - DNA, 25 bp, Probe sequence
gtcagcttacaataatgtgcaagtt

SEQ ID NO: 196847 - DNA, 25 bp, Probe sequence
ggatggaccccaacaaagagaaatt

SEQ ID NO: 196848 - DNA, 25 bp, Probe sequence
ggaccccaacaaagagaaattgtat

SEQ ID NO: 196849 - DNA, 25 bp, Probe sequence
ggccccaacacagaagctgacgaaa

SEQ ID NO: 196850 - DNA, 25 bp, Probe sequence
tgcaagttggggtgggacgacgaaa

SEQ ID NO: 196851 - DNA, 25 bp, Probe sequence
tcccaatttctacagacaatgcaag

SEQ ID NO: 196852 - DNA, 25 bp, Probe sequence
tctagtcaggggccccaacacagaa

SEQ ID NO: 196853 - DNA, 25 bp, Probe sequence
tctacagacaatgcaagttggggtg

SEQ ID NO: 196854 - DNA, 25 bp, Probe sequence
taatgtgcaagttggggatggaccc

SEQ ID NO: 196855 - DNA, 25 bp, Probe sequence
tagtcaggggccccaacacagaagc

SEQ ID NO: 196856 - DNA, 25 bp, Probe sequence
ttctagtcaggggccccaacacaga

SEQ ID NO: 196857 - DNA, 25 bp, Probe sequence
ttgactgaacgaaaatgcgcttgta

SEQ ID NO: 196858 - DNA, 25 bp, Probe sequence
attatacgcgagtatgatttaacac

SEQ ID NO: 196859 - DNA, 25 bp, Probe sequence
atacgcgagtatgatttaacacctt

SEQ ID NO: 196860 - DNA, 25 bp, Probe sequence
atgaaattatacgcgagtatgattt

SEQ ID NO: 196861 - DNA, 25 bp, Probe sequence
atgatttaacacctttgacgttagg

SEQ ID NO: 196862 - DNA, 25 bp, Probe sequence
atggtaagccaagaaatgaaattat

SEQ ID NO: 196863 - DNA, 25 bp, Probe sequence
agtatgatttaacacctttgacgtt

SEQ ID NO: 196864 - DNA, 25 bp, Probe sequence
agaaatgaaattatacgcgagtatg

SEQ ID NO: 196865 - DNA, 25 bp, Probe sequence
agccaagaaatgaaattatacgcga

SEQ ID NO: 196866 - DNA, 25 bp, Probe sequence
acgcgagtatgatttaacacctttg

SEQ ID NO: 196867 - DNA, 25 bp, Probe sequence
aaattatacgcgagtatgatttaac

SEQ ID NO: 196868 - DNA, 25 bp, Probe sequence
aagccaagaaatgaaattatacgcg

SEQ ID NO: 196869 - DNA, 25 bp, Probe sequence
aagaaatgaaattatacgcgagtat

SEQ ID NO: 196870 - DNA, 25 bp, Probe sequence
aatggtaagccaagaaatgaaatta

SEQ ID NO: 196871 - DNA, 25 bp, Probe sequence
aatgaaattatacgcgagtatgatt

SEQ ID NO: 196872 - DNA, 25 bp, Probe sequence
aattatacgcgagtatgatttaaca

SEQ ID NO: 196873 - DNA, 25 bp, Probe sequence
cacctttgacgttaggaaaatggat

SEQ ID NO: 196874 - DNA, 25 bp, Probe sequence
cgagtatgatttaacacctttgacg

SEQ ID NO: 196875 - DNA, 25 bp, Probe sequence
cgcgagtatgatttaacacctttga

SEQ ID NO: 196876 - DNA, 25 bp, Probe sequence
ccaagaaatgaaattatacgcgagt

SEQ ID NO: 196877 - DNA, 25 bp, Probe sequence
gccaagaaatgaaattatacgcgag

SEQ ID NO: 196878 - DNA, 25 bp, Probe sequence
gcgagtatgatttaacacctttgac

SEQ ID NO: 196879 - DNA, 25 bp, Probe sequence
gaaatgaaattatacgcgagtatga

SEQ ID NO: 196880 - DNA, 25 bp, Probe sequence
gaaattatacgcgagtatgatttaa

SEQ ID NO: 196881 - DNA, 25 bp, Probe sequence
gagtatgatttaacacctttgacgt

SEQ ID NO: 196882 - DNA, 25 bp, Probe sequence
gattatatgaaaatggtaagccaag

SEQ ID NO: 196883 - DNA, 25 bp, Probe sequence
gtatgatttaacacctttgacgtta

SEQ ID NO: 196884 - DNA, 25 bp, Probe sequence
tgatttaacacctttgacgttagga

SEQ ID NO: 196885 - DNA, 25 bp, Probe sequence
tgaaattatacgcgagtatgattta

SEQ ID NO: 196886 - DNA, 25 bp, Probe sequence
taacacctttgacgttaggaaaatg

SEQ ID NO: 196887 - DNA, 25 bp, Probe sequence
tacgcgagtatgatttaacaccttt

SEQ ID NO: 196888 - DNA, 25 bp, Probe sequence
tatgatttaacacctttgacgttag

SEQ ID NO: 196889 - DNA, 25 bp, Probe sequence
tatacgcgagtatgatttaacacct

SEQ ID NO: 196890 - DNA, 25 bp, Probe sequence
tttgacgttaggaaaatggataaag

SEQ ID NO: 196891 - DNA, 25 bp, Probe sequence
ttatacgcgagtatgatttaacacc

SEQ ID NO: 196892 - DNA, 25 bp, Probe sequence
attggcagtgctattataacgattg

SEQ ID NO: 196893 - DNA, 25 bp, Probe sequence
atataccattggcagtgctattata

SEQ ID NO: 196894 - DNA, 25 bp, Probe sequence
ataccattggcagtgctattataac

SEQ ID NO: 196895 - DNA, 25 bp, Probe sequence
atactttatataccattggcagtgc

SEQ ID NO: 196896 - DNA, 25 bp, Probe sequence
agtgtttttggttcaaagactgaag

SEQ ID NO: 196897 - DNA, 25 bp, Probe sequence
agactgaaggattatctacgaaaca

SEQ ID NO: 196898 - DNA, 25 bp, Probe sequence
accattggcagtgctattataacga

SEQ ID NO: 196899 - DNA, 25 bp, Probe sequence
actcagtgtttttggttcaaagact

SEQ ID NO: 196900 - DNA, 25 bp, Probe sequence
actttatataccattggcagtgcta

SEQ ID NO: 196901 - DNA, 25 bp, Probe sequence
acatactttatataccattggcagt

SEQ ID NO: 196902 - DNA, 25 bp, Probe sequence
aagactgaaggattatctacgaaac

SEQ ID NO: 196903 - DNA, 25 bp, Probe sequence
caaagactgaaggattatctacgaa

SEQ ID NO: 196904 - DNA, 25 bp, Probe sequence
cagtgtttttggttcaaagactgaa

SEQ ID NO: 196905 - DNA, 25 bp, Probe sequence
catactttatataccattggcagtg

SEQ ID NO: 196906 - DNA, 25 bp, Probe sequence
cattggcagtgctattataacgatt

SEQ ID NO: 196907 - DNA, 25 bp, Probe sequence
ctttatataccattggcagtgctat

SEQ ID NO: 196908 - DNA, 25 bp, Probe sequence
ctactcagtgtttttggttcaaaga

SEQ ID NO: 196909 - DNA, 25 bp, Probe sequence
ctcagtgtttttggttcaaagactg

SEQ ID NO: 196910 - DNA, 25 bp, Probe sequence
ccattggcagtgctattataacgat

SEQ ID NO: 196911 - DNA, 25 bp, Probe sequence
gactgaaggattatctacgaaacat

SEQ ID NO: 196912 - DNA, 25 bp, Probe sequence
gtgtttttggttcaaagactgaagg

SEQ ID NO: 196913 - DNA, 25 bp, Probe sequence
gtttttggttcaaagactgaaggat

SEQ ID NO: 196914 - DNA, 25 bp, Probe sequence
tggcagtgctattataacgattgct

SEQ ID NO: 196915 - DNA, 25 bp, Probe sequence
tctactcagtgtttttggttcaaag

SEQ ID NO: 196916 - DNA, 25 bp, Probe sequence
tcaaagactgaaggattatctacga

SEQ ID NO: 196917 - DNA, 25 bp, Probe sequence
tactttatataccattggcagtgct

SEQ ID NO: 196918 - DNA, 25 bp, Probe sequence
tactcagtgtttttggttcaaagac

SEQ ID NO: 196919 - DNA, 25 bp, Probe sequence
taccattggcagtgctattataacg

SEQ ID NO: 196920 - DNA, 25 bp, Probe sequence
tatataccattggcagtgctattat

SEQ ID NO: 196921 - DNA, 25 bp, Probe sequence
tataccattggcagtgctattataa

SEQ ID NO: 196922 - DNA, 25 bp, Probe sequence
tttatataccattggcagtgctatt

SEQ ID NO: 196923 - DNA, 25 bp, Probe sequence
ttatataccattggcagtgctatta

SEQ ID NO: 196924 - DNA, 25 bp, Probe sequence
ttctactcagtgtttttggttcaaa

SEQ ID NO: 196925 - DNA, 25 bp, Probe sequence
ttggcagtgctattataacgattgc

SEQ ID NO: 196926 - DNA, 25 bp, Probe sequence
attaagaaacctgtaacgacgcata

SEQ ID NO: 196927 - DNA, 25 bp, Probe sequence
attcacaaatgcagctggtggccct

SEQ ID NO: 196928 - DNA, 25 bp, Probe sequence
attacatcattcgcatatatctaca

SEQ ID NO: 196929 - DNA, 25 bp, Probe sequence
atatatctacacttgctcaattagg

SEQ ID NO: 196930 - DNA, 25 bp, Probe sequence
atctacacttgctcaattaggaatt

SEQ ID NO: 196931 - DNA, 25 bp, Probe sequence
atcgactcgaacaaaattagcaaca

SEQ ID NO: 196932 - DNA, 25 bp, Probe sequence
atgcaagagcatgtaggtcattcag

SEQ ID NO: 196933 - DNA, 25 bp, Probe sequence
agagcatgtaggtcattcagattat

SEQ ID NO: 196934 - DNA, 25 bp, Probe sequence
agcaacattattaaagggggcacta

SEQ ID NO: 196935 - DNA, 25 bp, Probe sequence
acgcatacattacatcattcgcata

SEQ ID NO: 196936 - DNA, 25 bp, Probe sequence
acacttgctcaattaggaattaact

SEQ ID NO: 196937 - DNA, 25 bp, Probe sequence
aaatctagagatatacacacatgtt

SEQ ID NO: 196938 - DNA, 25 bp, Probe sequence
aagggggcactatcaaagagacaac

SEQ ID NO: 196939 - DNA, 25 bp, Probe sequence
catgtaggtcattcagattataaaa

SEQ ID NO: 196940 - DNA, 25 bp, Probe sequence
catcattcgcatatatctacacttg

SEQ ID NO: 196941 - DNA, 25 bp, Probe sequence
cattcgcatatatctacacttgctc

SEQ ID NO: 196942 - DNA, 25 bp, Probe sequence
cgcatatatctacacttgctcaatt

SEQ ID NO: 196943 - DNA, 25 bp, Probe sequence
gcatacattacatcattcgcatata

SEQ ID NO: 196944 - DNA, 25 bp, Probe sequence
gaaacctgtaacgacgcatacatta

SEQ ID NO: 196945 - DNA, 25 bp, Probe sequence
gactcgaacaaaattagcaacatta

SEQ ID NO: 196946 - DNA, 25 bp, Probe sequence
gacgcatacattacatcattcgcat

SEQ ID NO: 196947 - DNA, 25 bp, Probe sequence
gagacaactgagattagttctatta

SEQ ID NO: 196948 - DNA, 25 bp, Probe sequence
gattagttctattaagaaacctgta

SEQ ID NO: 196949 - DNA, 25 bp, Probe sequence
gtggccctatcgactcgaacaaaat

SEQ ID NO: 196950 - DNA, 25 bp, Probe sequence
gggtacatattcacaaatgcagctg

SEQ ID NO: 196951 - DNA, 25 bp, Probe sequence
gggggcactatcaaagagacaactg

SEQ ID NO: 196952 - DNA, 25 bp, Probe sequence
ggaattaacttaaaagcaatgcaag

SEQ ID NO: 196953 - DNA, 25 bp, Probe sequence
ggccctatcgactcgaacaaaatta

SEQ ID NO: 196954 - DNA, 25 bp, Probe sequence
tcacaaatgcagctggtggccctat

SEQ ID NO: 196955 - DNA, 25 bp, Probe sequence
taacgacgcatacattacatcattc

SEQ ID NO: 196956 - DNA, 25 bp, Probe sequence
tacatcattcgcatatatctacact

SEQ ID NO: 196957 - DNA, 25 bp, Probe sequence
tacattacatcattcgcatatatct

SEQ ID NO: 196958 - DNA, 25 bp, Probe sequence
tagagatatacacacatgttactaa

SEQ ID NO: 196959 - DNA, 25 bp, Probe sequence
ttcgcatatatctacacttgctcaa

SEQ ID NO: 196960 - DNA, 25 bp, Probe sequence
attgctaatgacatgcgtatcggtg

SEQ ID NO: 196961 - DNA, 25 bp, Probe sequence
ataaaacgctagatatcgacggtaa

SEQ ID NO: 196962 - DNA, 25 bp, Probe sequence
atgcgtatcggtgagctacttgcaa

SEQ ID NO: 196963 - DNA, 25 bp, Probe sequence
atcggtgagctacttgcaataaaga

SEQ ID NO: 196964 - DNA, 25 bp, Probe sequence
atgacatgcgtatcggtgagctact

SEQ ID NO: 196965 - DNA, 25 bp, Probe sequence
acgctagatatcgacggtaaagtta

SEQ ID NO: 196966 - DNA, 25 bp, Probe sequence
acatgcgtatcggtgagctacttgc

SEQ ID NO: 196967 - DNA, 25 bp, Probe sequence
acagtttcaaattgctaatgacatg

SEQ ID NO: 196968 - DNA, 25 bp, Probe sequence
aaaacgctagatatcgacggtaaag

SEQ ID NO: 196969 - DNA, 25 bp, Probe sequence
aaacgctagatatcgacggtaaagt

SEQ ID NO: 196970 - DNA, 25 bp, Probe sequence
aagctatggtacagtttcaaattgc

SEQ ID NO: 196971 - DNA, 25 bp, Probe sequence
aatgacatgcgtatcggtgagctac

SEQ ID NO: 196972 - DNA, 25 bp, Probe sequence
aattgctaatgacatgcgtatcggt

SEQ ID NO: 196973 - DNA, 25 bp, Probe sequence
caaattgctaatgacatgcgtatcg

SEQ ID NO: 196974 - DNA, 25 bp, Probe sequence
catgcgtatcggtgagctacttgca

SEQ ID NO: 196975 - DNA, 25 bp, Probe sequence
ctaatgacatgcgtatcggtgagct

SEQ ID NO: 196976 - DNA, 25 bp, Probe sequence
cgtatcggtgagctacttgcaataa

SEQ ID NO: 196977 - DNA, 25 bp, Probe sequence
cggtgagctacttgcaataaagaga

SEQ ID NO: 196978 - DNA, 25 bp, Probe sequence
gcgtatcggtgagctacttgcaata

SEQ ID NO: 196979 - DNA, 25 bp, Probe sequence
gctatggtacagtttcaaattgcta

SEQ ID NO: 196980 - DNA, 25 bp, Probe sequence
gacatgcgtatcggtgagctacttg

SEQ ID NO: 196981 - DNA, 25 bp, Probe sequence
gatatcgacggtaaagttaattgga

SEQ ID NO: 196982 - DNA, 25 bp, Probe sequence
gtttcaaattgctaatgacatgcgt

SEQ ID NO: 196983 - DNA, 25 bp, Probe sequence
gtatcggtgagctacttgcaataaa

SEQ ID NO: 196984 - DNA, 25 bp, Probe sequence
gtaaaagctatggtacagtttcaaa

SEQ ID NO: 196985 - DNA, 25 bp, Probe sequence
gtgagctacttgcaataaagagagt

SEQ ID NO: 196986 - DNA, 25 bp, Probe sequence
ggtacagtttcaaattgctaatgac

SEQ ID NO: 196987 - DNA, 25 bp, Probe sequence
tggtaaaagctatggtacagtttca

SEQ ID NO: 196988 - DNA, 25 bp, Probe sequence
tgacatgcgtatcggtgagctactt

SEQ ID NO: 196989 - DNA, 25 bp, Probe sequence
tgcgtatcggtgagctacttgcaat

SEQ ID NO: 196990 - DNA, 25 bp, Probe sequence
tgctaatgacatgcgtatcggtgag

SEQ ID NO: 196991 - DNA, 25 bp, Probe sequence
taatgacatgcgtatcggtgagcta

SEQ ID NO: 196992 - DNA, 25 bp, Probe sequence
tatggtacagtttcaaattgctaat

SEQ ID NO: 196993 - DNA, 25 bp, Probe sequence
tatcggtgagctacttgcaataaag

SEQ ID NO: 196994 - DNA, 25 bp, Probe sequence
atcaactaaaacgcgtcattacggc

SEQ ID NO: 196995 - DNA, 25 bp, Probe sequence
atttactatacacgtcgacaataaa

SEQ ID NO: 196996 - DNA, 25 bp, Probe sequence
atacacgtcgacaataaatacagat

SEQ ID NO: 196997 - DNA, 25 bp, Probe sequence
atacacatcaactaaaacgcgtcat

SEQ ID NO: 196998 - DNA, 25 bp, Probe sequence
acgcgtcattacggcattttcaaca

SEQ ID NO: 196999 - DNA, 25 bp, Probe sequence
actaaaacgcgtcattacggcattt

SEQ ID NO: 197000 - DNA, 25 bp, Probe sequence
acggcattttcaacattaataatat

SEQ ID NO: 197001 - DNA, 25 bp, Probe sequence
actatacacgtcgacaataaataca

SEQ ID NO: 197002 - DNA, 25 bp, Probe sequence
acatcaactaaaacgcgtcattacg

SEQ ID NO: 197003 - DNA, 25 bp, Probe sequence
acacatcaactaaaacgcgtcatta

SEQ ID NO: 197004 - DNA, 25 bp, Probe sequence
aaacgcgtcattacggcattttcaa

SEQ ID NO: 197005 - DNA, 25 bp, Probe sequence
aaaacgcgtcattacggcattttca

SEQ ID NO: 197006 - DNA, 25 bp, Probe sequence
aactaaaacgcgtcattacggcatt

SEQ ID NO: 197007 - DNA, 25 bp, Probe sequence
aacgcgtcattacggcattttcaac

SEQ ID NO: 197008 - DNA, 25 bp, Probe sequence
cacatcaactaaaacgcgtcattac

SEQ ID NO: 197009 - DNA, 25 bp, Probe sequence
ctaaaacgcgtcattacggcatttt

SEQ ID NO: 197010 - DNA, 25 bp, Probe sequence
catcaactaaaacgcgtcattacgg

SEQ ID NO: 197011 - DNA, 25 bp, Probe sequence
cattacggcattttcaacattaata

SEQ ID NO: 197012 - DNA, 25 bp, Probe sequence
ctatacacgtcgacaataaatacag

SEQ ID NO: 197013 - DNA, 25 bp, Probe sequence
cgtcattacggcattttcaacatta

SEQ ID NO: 197014 - DNA, 25 bp, Probe sequence
gatacacatcaactaaaacgcgtca

SEQ ID NO: 197015 - DNA, 25 bp, Probe sequence
gtatttactatacacgtcgacaata

SEQ ID NO: 197016 - DNA, 25 bp, Probe sequence
gtcattacggcattttcaacattaa

SEQ ID NO: 197017 - DNA, 25 bp, Probe sequence
ggcattttcaacattaataatattt

SEQ ID NO: 197018 - DNA, 25 bp, Probe sequence
tcaactaaaacgcgtcattacggca

SEQ ID NO: 197019 - DNA, 25 bp, Probe sequence
taataatatttacgtatttactata

SEQ ID NO: 197020 - DNA, 25 bp, Probe sequence
taaaacgcgtcattacggcattttc

SEQ ID NO: 197021 - DNA, 25 bp, Probe sequence
tacacatcaactaaaacgcgtcatt

SEQ ID NO: 197022 - DNA, 25 bp, Probe sequence
tactatacacgtcgacaataaatac

SEQ ID NO: 197023 - DNA, 25 bp, Probe sequence
tatttactatacacgtcgacaataa

SEQ ID NO: 197024 - DNA, 25 bp, Probe sequence
tttactatacacgtcgacaataaat

SEQ ID NO: 197025 - DNA, 25 bp, Probe sequence
ttactatacacgtcgacaataaata

SEQ ID NO: 197026 - DNA, 25 bp, Probe sequence
ttacggcattttcaacattaataat

SEQ ID NO: 197027 - DNA, 25 bp, Probe sequence
ttcaatgatattagtgatacacatc

SEQ ID NO: 197028 - DNA, 25 bp, Probe sequence
accccggcaaggttgactagaattg

SEQ ID NO: 197029 - DNA, 25 bp, Probe sequence
attgatttatgtcccagcctggaca

SEQ ID NO: 197030 - DNA, 25 bp, Probe sequence
atttatgtcccagcctggacacatt

SEQ ID NO: 197031 - DNA, 25 bp, Probe sequence
aggttgactagaattgaaaaaagct

SEQ ID NO: 197032 - DNA, 25 bp, Probe sequence
acattgatttatgtcccagcctgga

SEQ ID NO: 197033 - DNA, 25 bp, Probe sequence
aaaaagcttgttacaagcgcatttt

SEQ ID NO: 197034 - DNA, 25 bp, Probe sequence
aaaaaagcttgttacaagcgcattt

SEQ ID NO: 197035 - DNA, 25 bp, Probe sequence
aaaagcttgttacaagcgcattttc

SEQ ID NO: 197036 - DNA, 25 bp, Probe sequence
aacattgatttatgtcccagcctgg

SEQ ID NO: 197037 - DNA, 25 bp, Probe sequence
caccccggcaaggttgactagaatt

SEQ ID NO: 197038 - DNA, 25 bp, Probe sequence
cccggcaaggttgactagaattgaa

SEQ ID NO: 197039 - DNA, 25 bp, Probe sequence
ccccggcaaggttgactagaattga

SEQ ID NO: 197040 - DNA, 25 bp, Probe sequence
cagtcaactactgccaatataactt

SEQ ID NO: 197041 - DNA, 25 bp, Probe sequence
cattgatttatgtcccagcctggac

SEQ ID NO: 197042 - DNA, 25 bp, Probe sequence
ctagaattgaaaaaagcttgttaca

SEQ ID NO: 197043 - DNA, 25 bp, Probe sequence
ccaccccggcaaggttgactagaat

SEQ ID NO: 197044 - DNA, 25 bp, Probe sequence
cggcaaggttgactagaattgaaaa

SEQ ID NO: 197045 - DNA, 25 bp, Probe sequence
ccggcaaggttgactagaattgaaa

SEQ ID NO: 197046 - DNA, 25 bp, Probe sequence
gcaaggttgactagaattgaaaaaa

SEQ ID NO: 197047 - DNA, 25 bp, Probe sequence
gaattgaaaaaagcttgttacaagc

SEQ ID NO: 197048 - DNA, 25 bp, Probe sequence
gaacattgatttatgtcccagcctg

SEQ ID NO: 197049 - DNA, 25 bp, Probe sequence
gaaaaaagcttgttacaagcgcatt

SEQ ID NO: 197050 - DNA, 25 bp, Probe sequence
gactagaattgaaaaaagcttgtta

SEQ ID NO: 197051 - DNA, 25 bp, Probe sequence
gatttatgtcccagcctggacacat

SEQ ID NO: 197052 - DNA, 25 bp, Probe sequence
gttgactagaattgaaaaaagcttg

SEQ ID NO: 197053 - DNA, 25 bp, Probe sequence
ggttgactagaattgaaaaaagctt

SEQ ID NO: 197054 - DNA, 25 bp, Probe sequence
ggcaaggttgactagaattgaaaaa

SEQ ID NO: 197055 - DNA, 25 bp, Probe sequence
tgatttatgtcccagcctggacaca

SEQ ID NO: 197056 - DNA, 25 bp, Probe sequence
tgactagaattgaaaaaagcttgtt

SEQ ID NO: 197057 - DNA, 25 bp, Probe sequence
tcagtcaactactgccaatataact

SEQ ID NO: 197058 - DNA, 25 bp, Probe sequence
tttatgtcccagcctggacacatta

SEQ ID NO: 197059 - DNA, 25 bp, Probe sequence
ttatgtcccagcctggacacattag

SEQ ID NO: 197060 - DNA, 25 bp, Probe sequence
ttcagtcaactactgccaatataac

SEQ ID NO: 197061 - DNA, 25 bp, Probe sequence
ttgatttatgtcccagcctggacac

SEQ ID NO: 197062 - DNA, 25 bp, Probe sequence
atacgcgagtatgatttcacacctt

SEQ ID NO: 197063 - DNA, 25 bp, Probe sequence
aggaatgaaattatacgcgagtatg

SEQ ID NO: 197064 - DNA, 25 bp, Probe sequence
agatcatttagttcagagtttaagt

SEQ ID NO: 197065 - DNA, 25 bp, Probe sequence
acgcgagtatgatttcacaccttcg

SEQ ID NO: 197066 - DNA, 25 bp, Probe sequence
acaccttcgacgtttgtaaatggcg

SEQ ID NO: 197067 - DNA, 25 bp, Probe sequence
aaatggtaagcctaggaatgaaatt

SEQ ID NO: 197068 - DNA, 25 bp, Probe sequence
aagcctaggaatgaaattatacgcg

SEQ ID NO: 197069 - DNA, 25 bp, Probe sequence
aagaagatcatttagttcagagttt

SEQ ID NO: 197070 - DNA, 25 bp, Probe sequence
aagttacaaatggttagattatata

SEQ ID NO: 197071 - DNA, 25 bp, Probe sequence
caccttcgacgtttgtaaatggcgg

SEQ ID NO: 197072 - DNA, 25 bp, Probe sequence
cacaccttcgacgtttgtaaatggc

SEQ ID NO: 197073 - DNA, 25 bp, Probe sequence
catttagttcagagtttaagttaca

SEQ ID NO: 197074 - DNA, 25 bp, Probe sequence
ctaggaatgaaattatacgcgagta

SEQ ID NO: 197075 - DNA, 25 bp, Probe sequence
cgagtatgatttcacaccttcgacg

SEQ ID NO: 197076 - DNA, 25 bp, Probe sequence
cgcgagtatgatttcacaccttcga

SEQ ID NO: 197077 - DNA, 25 bp, Probe sequence
gcctaggaatgaaattatacgcgag

SEQ ID NO: 197078 - DNA, 25 bp, Probe sequence
gcgagtatgatttcacaccttcgac

SEQ ID NO: 197079 - DNA, 25 bp, Probe sequence
gaagatcatttagttcagagtttaa

SEQ ID NO: 197080 - DNA, 25 bp, Probe sequence
gaaagaagatcatttagttcagagt

SEQ ID NO: 197081 - DNA, 25 bp, Probe sequence
gagtttaagttacaaatggttagat

SEQ ID NO: 197082 - DNA, 25 bp, Probe sequence
gatcatttagttcagagtttaagtt

SEQ ID NO: 197083 - DNA, 25 bp, Probe sequence
gatttcacaccttcgacgtttgtaa

SEQ ID NO: 197084 - DNA, 25 bp, Probe sequence
gttcagagtttaagttacaaatggt

SEQ ID NO: 197085 - DNA, 25 bp, Probe sequence
gtttgtaaatggcggttataaaatg

SEQ ID NO: 197086 - DNA, 25 bp, Probe sequence
ggtaagcctaggaatgaaattatac

SEQ ID NO: 197087 - DNA, 25 bp, Probe sequence
tgatttcacaccttcgacgtttgta

SEQ ID NO: 197088 - DNA, 25 bp, Probe sequence
tcgacgtttgtaaatggcggttata

SEQ ID NO: 197089 - DNA, 25 bp, Probe sequence
tcacaccttcgacgtttgtaaatgg

SEQ ID NO: 197090 - DNA, 25 bp, Probe sequence
tacgcgagtatgatttcacaccttc

SEQ ID NO: 197091 - DNA, 25 bp, Probe sequence
tatacgcgagtatgatttcacacct

SEQ ID NO: 197092 - DNA, 25 bp, Probe sequence
ttagttcagagtttaagttacaaat

SEQ ID NO: 197093 - DNA, 25 bp, Probe sequence
tttcacaccttcgacgtttgtaaat

SEQ ID NO: 197094 - DNA, 25 bp, Probe sequence
ttcacaccttcgacgtttgtaaatg

SEQ ID NO: 197095 - DNA, 25 bp, Probe sequence
ttcgacgtttgtaaatggcggttat

SEQ ID NO: 197096 - DNA, 25 bp, Probe sequence
agtgatcaccgtaccggttcgattc

SEQ ID NO: 197097 - DNA, 25 bp, Probe sequence
cggtgagtgatcaccgtaccggttc

SEQ ID NO: 197098 - DNA, 25 bp, Probe sequence
actggcagacgcacaggacttaaaa

SEQ ID NO: 197099 - DNA, 25 bp, Probe sequence
acttaaaatcctgcggtgagtgatc

SEQ ID NO: 197100 - DNA, 25 bp, Probe sequence
aactggcagacgcacaggacttaaa

SEQ ID NO: 197101 - DNA, 25 bp, Probe sequence
aatcctgcggtgagtgatcaccgta

SEQ ID NO: 197102 - DNA, 25 bp, Probe sequence
ctgcggtgagtgatcaccgtaccgg

SEQ ID NO: 197103 - DNA, 25 bp, Probe sequence
cggaactggcagacgcacaggactt

SEQ ID NO: 197104 - DNA, 25 bp, Probe sequence
cgcacaggacttaaaatcctgcggt

SEQ ID NO: 197105 - DNA, 25 bp, Probe sequence
cctgcggtgagtgatcaccgtaccg

SEQ ID NO: 197106 - DNA, 25 bp, Probe sequence
gcggtgagtgatcaccgtaccggtt

SEQ ID NO: 197107 - DNA, 25 bp, Probe sequence
gcagacgcacaggacttaaaatcct

SEQ ID NO: 197108 - DNA, 25 bp, Probe sequence
gcacaggacttaaaatcctgcggtg

SEQ ID NO: 197109 - DNA, 25 bp, Probe sequence
gaactggcagacgcacaggacttaa

SEQ ID NO: 197110 - DNA, 25 bp, Probe sequence
gatcaccgtaccggttcgattccgg

SEQ ID NO: 197111 - DNA, 25 bp, Probe sequence
gacttaaaatcctgcggtgagtgat

SEQ ID NO: 197112 - DNA, 25 bp, Probe sequence
gacgcacaggacttaaaatcctgcg

SEQ ID NO: 197113 - DNA, 25 bp, Probe sequence
gagtgatcaccgtaccggttcgatt

SEQ ID NO: 197114 - DNA, 25 bp, Probe sequence
gtgatcaccgtaccggttcgattcc

SEQ ID NO: 197115 - DNA, 25 bp, Probe sequence
gtgagtgatcaccgtaccggttcga

SEQ ID NO: 197116 - DNA, 25 bp, Probe sequence
gtggcggaactggcagacgcacagg

SEQ ID NO: 197117 - DNA, 25 bp, Probe sequence
ggtggcggaactggcagacgcacag

SEQ ID NO: 197118 - DNA, 25 bp, Probe sequence
ggacttaaaatcctgcggtgagtga

SEQ ID NO: 197119 - DNA, 25 bp, Probe sequence
ggaactggcagacgcacaggactta

SEQ ID NO: 197120 - DNA, 25 bp, Probe sequence
tgagtgatcaccgtaccggttcgat

SEQ ID NO: 197121 - DNA, 25 bp, Probe sequence
ggcagacgcacaggacttaaaatcc

SEQ ID NO: 197122 - DNA, 25 bp, Probe sequence
ggcggaactggcagacgcacaggac

SEQ ID NO: 197123 - DNA, 25 bp, Probe sequence
tgatcaccgtaccggttcgattccg

SEQ ID NO: 197124 - DNA, 25 bp, Probe sequence
tggcggaactggcagacgcacagga

SEQ ID NO: 197125 - DNA, 25 bp, Probe sequence
tggcagacgcacaggacttaaaatc

SEQ ID NO: 197126 - DNA, 25 bp, Probe sequence
tgcggtgagtgatcaccgtaccggt

SEQ ID NO: 197127 - DNA, 25 bp, Probe sequence
tcctgcggtgagtgatcaccgtacc

SEQ ID NO: 197128 - DNA, 25 bp, Probe sequence
taaaatcctgcggtgagtgatcacc

SEQ ID NO: 197129 - DNA, 25 bp, Probe sequence
ttaaaatcctgcggtgagtgatcac

SEQ ID NO: 197130 - DNA, 25 bp, Probe sequence
atcaagcaagtcacggatttattcg

SEQ ID NO: 197131 - DNA, 25 bp, Probe sequence
agttggagcattgttgctatttatc

SEQ ID NO: 197132 - DNA, 25 bp, Probe sequence
agcaagtcacggatttattcggatt

SEQ ID NO: 197133 - DNA, 25 bp, Probe sequence
aagcaagtcacggatttattcggat

SEQ ID NO: 197134 - DNA, 25 bp, Probe sequence
aagtcacggatttattcggattaga

SEQ ID NO: 197135 - DNA, 25 bp, Probe sequence
caagtcacggatttattcggattag

SEQ ID NO: 197136 - DNA, 25 bp, Probe sequence
caagcaagtcacggatttattcgga

SEQ ID NO: 197137 - DNA, 25 bp, Probe sequence
gcaagtcacggatttattcggatta

SEQ ID NO: 197138 - DNA, 25 bp, Probe sequence
gagcattgttgctatttatcaagca

SEQ ID NO: 197139 - DNA, 25 bp, Probe sequence
gttggagcattgttgctatttatca

SEQ ID NO: 197140 - DNA, 25 bp, Probe sequence
gtttagttggagcattgttgctatt

SEQ ID NO: 197141 - DNA, 25 bp, Probe sequence
ggtttagttggagcattgttgctat

SEQ ID NO: 197142 - DNA, 25 bp, Probe sequence
ggagcattgttgctatttatcaagc

SEQ ID NO: 197143 - DNA, 25 bp, Probe sequence
tggagcattgttgctatttatcaag

SEQ ID NO: 197144 - DNA, 25 bp, Probe sequence
tggtttagttggagcattgttgcta

SEQ ID NO: 197145 - DNA, 25 bp, Probe sequence
tgctatttatcaagcaagtcacgga

SEQ ID NO: 197146 - DNA, 25 bp, Probe sequence
tcaagcaagtcacggatttattcgg

SEQ ID NO: 197147 - DNA, 25 bp, Probe sequence
tagttggagcattgttgctatttat

SEQ ID NO: 197148 - DNA, 25 bp, Probe sequence
tatcaagcaagtcacggatttattc

SEQ ID NO: 197149 - DNA, 25 bp, Probe sequence
tttagttggagcattgttgctattt

SEQ ID NO: 197150 - DNA, 25 bp, Probe sequence
ttatcaagcaagtcacggatttatt

SEQ ID NO: 197151 - DNA, 25 bp, Probe sequence
ttagttggagcattgttgctattta

SEQ ID NO: 197152 - DNA, 25 bp, Probe sequence
ttgctatttatcaagcaagtcacgg

SEQ ID NO: 197153 - DNA, 25 bp, Probe sequence
ttggagcattgttgctatttatcaa

SEQ ID NO: 197154 - DNA, 25 bp, Probe sequence
attaggaaatcaactgtagaagaat

SEQ ID NO: 197155 - DNA, 25 bp, Probe sequence
atgtggccggtatacgaagtgatta

SEQ ID NO: 197156 - DNA, 25 bp, Probe sequence
aggaaatcaactgtagaagaattga

SEQ ID NO: 197157 - DNA, 25 bp, Probe sequence
agtgattaggaaatcaactgtagaa

SEQ ID NO: 197158 - DNA, 25 bp, Probe sequence
acgaagtgattaggaaatcaactgt

SEQ ID NO: 197159 - DNA, 25 bp, Probe sequence
aagtgattaggaaatcaactgtaga

SEQ ID NO: 197160 - DNA, 25 bp, Probe sequence
cttttatgtggccggtatacgaagt

SEQ ID NO: 197161 - DNA, 25 bp, Probe sequence
cggtatacgaagtgattaggaaatc

SEQ ID NO: 197162 - DNA, 25 bp, Probe sequence
cgaagtgattaggaaatcaactgta

SEQ ID NO: 197163 - DNA, 25 bp, Probe sequence
ccttttatgtggccggtatacgaag

SEQ ID NO: 197164 - DNA, 25 bp, Probe sequence
ccggtatacgaagtgattaggaaat

SEQ ID NO: 197165 - DNA, 25 bp, Probe sequence
gccggtatacgaagtgattaggaaa

SEQ ID NO: 197166 - DNA, 25 bp, Probe sequence
gaagtgattaggaaatcaactgtag

SEQ ID NO: 197167 - DNA, 25 bp, Probe sequence
gattaggaaatcaactgtagaagaa

SEQ ID NO: 197168 - DNA, 25 bp, Probe sequence
gtgattaggaaatcaactgtagaag

SEQ ID NO: 197169 - DNA, 25 bp, Probe sequence
gtggccggtatacgaagtgattagg

SEQ ID NO: 197170 - DNA, 25 bp, Probe sequence
ggtatacgaagtgattaggaaatca

SEQ ID NO: 197171 - DNA, 25 bp, Probe sequence
ggccggtatacgaagtgattaggaa

SEQ ID NO: 197172 - DNA, 25 bp, Probe sequence
tggccggtatacgaagtgattagga

SEQ ID NO: 197173 - DNA, 25 bp, Probe sequence
tgtggccggtatacgaagtgattag

SEQ ID NO: 197174 - DNA, 25 bp, Probe sequence
tatgtggccggtatacgaagtgatt

SEQ ID NO: 197175 - DNA, 25 bp, Probe sequence
taggaaatcaactgtagaagaattg

SEQ ID NO: 197176 - DNA, 25 bp, Probe sequence
ttttatgtggccggtatacgaagtg

SEQ ID NO: 197177 - DNA, 25 bp, Probe sequence
tttatgtggccggtatacgaagtga

SEQ ID NO: 197178 - DNA, 25 bp, Probe sequence
ttatgtggccggtatacgaagtgat

SEQ ID NO: 197179 - DNA, 25 bp, Probe sequence
ttaggaaatcaactgtagaagaatt

SEQ ID NO: 197180 - DNA, 25 bp, Probe sequence
attcacttcacacggtgtttataga

SEQ ID NO: 197181 - DNA, 25 bp, Probe sequence
atttattcacttcacacggtgttta

SEQ ID NO: 197182 - DNA, 25 bp, Probe sequence
atcaacggctatttcttgggtaatc

SEQ ID NO: 197183 - DNA, 25 bp, Probe sequence
atggcaaagcttatgagttaatgat

SEQ ID NO: 197184 - DNA, 25 bp, Probe sequence
agttgatttattcacttcacacggt

SEQ ID NO: 197185 - DNA, 25 bp, Probe sequence
agaaggctctgttgatggtggttat

SEQ ID NO: 197186 - DNA, 25 bp, Probe sequence
acggctatttcttgggtaatccaat

SEQ ID NO: 197187 - DNA, 25 bp, Probe sequence
acagttgatttattcacttcacacg

SEQ ID NO: 197188 - DNA, 25 bp, Probe sequence
caacggctatttcttgggtaatcca

SEQ ID NO: 197189 - DNA, 25 bp, Probe sequence
aaggctctgttgatggtggttatat

SEQ ID NO: 197190 - DNA, 25 bp, Probe sequence
caatttatggcaaagcttatgagtt

SEQ ID NO: 197191 - DNA, 25 bp, Probe sequence
cagaaggctctgttgatggtggtta

SEQ ID NO: 197192 - DNA, 25 bp, Probe sequence
cagttgatttattcacttcacacgg

SEQ ID NO: 197193 - DNA, 25 bp, Probe sequence
ctctgttgatggtggttatatttat

SEQ ID NO: 197194 - DNA, 25 bp, Probe sequence
cgacctagattgaaagtgttaagtg

SEQ ID NO: 197195 - DNA, 25 bp, Probe sequence
gcgattttatcaacggctatttctt

SEQ ID NO: 197196 - DNA, 25 bp, Probe sequence
gcaaagcttatgagttaatgattag

SEQ ID NO: 197197 - DNA, 25 bp, Probe sequence
gaaggctctgttgatggtggttata

SEQ ID NO: 197198 - DNA, 25 bp, Probe sequence
gattttatcaacggctatttcttgg

SEQ ID NO: 197199 - DNA, 25 bp, Probe sequence
gatttaaatgatgttgagtcacaca

SEQ ID NO: 197200 - DNA, 25 bp, Probe sequence
gatttattcacttcacacggtgttt

SEQ ID NO: 197201 - DNA, 25 bp, Probe sequence
gttgatttattcacttcacacggtg

SEQ ID NO: 197202 - DNA, 25 bp, Probe sequence
gtgttaagtgattattacgaaggta

SEQ ID NO: 197203 - DNA, 25 bp, Probe sequence
ggctctgttgatggtggttatattt

SEQ ID NO: 197204 - DNA, 25 bp, Probe sequence
tgatttattcacttcacacggtgtt

SEQ ID NO: 197205 - DNA, 25 bp, Probe sequence
tcaacggctatttcttgggtaatcc

SEQ ID NO: 197206 - DNA, 25 bp, Probe sequence
taagaacttagttgagttaacacga

SEQ ID NO: 197207 - DNA, 25 bp, Probe sequence
tacagttgatttattcacttcacac

SEQ ID NO: 197208 - DNA, 25 bp, Probe sequence
tattcacttcacacggtgtttatag

SEQ ID NO: 197209 - DNA, 25 bp, Probe sequence
ttttatcaacggctatttcttgggt

SEQ ID NO: 197210 - DNA, 25 bp, Probe sequence
tttattcacttcacacggtgtttat

SEQ ID NO: 197211 - DNA, 25 bp, Probe sequence
ttatattagcgattttatcaacggc

SEQ ID NO: 197212 - DNA, 25 bp, Probe sequence
ttatcaacggctatttcttgggtaa

SEQ ID NO: 197213 - DNA, 25 bp, Probe sequence
ttaaatgatgttgagtcacacaata

SEQ ID NO: 197214 - DNA, 25 bp, Probe sequence
attattcttactagcgatgtatgag

SEQ ID NO: 197215 - DNA, 25 bp, Probe sequence
atgatgatgtagaggcgccaagtga

SEQ ID NO: 197216 - DNA, 25 bp, Probe sequence
atgatgtagaggcgccaagtgactt

SEQ ID NO: 197217 - DNA, 25 bp, Probe sequence
agactattattcttactagcgatgt

SEQ ID NO: 197218 - DNA, 25 bp, Probe sequence
acggctaatgatgatgtagaggcgc

SEQ ID NO: 197219 - DNA, 25 bp, Probe sequence
actattattcttactagcgatgtat

SEQ ID NO: 197220 - DNA, 25 bp, Probe sequence
aaattttgagactattattcttact

SEQ ID NO: 197221 - DNA, 25 bp, Probe sequence
aagtatatattatgatgacggctaa

SEQ ID NO: 197222 - DNA, 25 bp, Probe sequence
aatgatgatgtagaggcgccaagtg

SEQ ID NO: 197223 - DNA, 25 bp, Probe sequence
aattttgagactattattcttacta

SEQ ID NO: 197224 - DNA, 25 bp, Probe sequence
ctattattcttactagcgatgtatg

SEQ ID NO: 197225 - DNA, 25 bp, Probe sequence
gctaatgatgatgtagaggcgccaa

SEQ ID NO: 197226 - DNA, 25 bp, Probe sequence
gcaagtatatattatgatgacggct

SEQ ID NO: 197227 - DNA, 25 bp, Probe sequence
gaaattttgagactattattcttac

SEQ ID NO: 197228 - DNA, 25 bp, Probe sequence
gactattattcttactagcgatgta

SEQ ID NO: 197229 - DNA, 25 bp, Probe sequence
gacggctaatgatgatgtagaggcg

SEQ ID NO: 197230 - DNA, 25 bp, Probe sequence
gagactattattcttactagcgatg

SEQ ID NO: 197231 - DNA, 25 bp, Probe sequence
gatgatgtagaggcgccaagtgact

SEQ ID NO: 197232 - DNA, 25 bp, Probe sequence
gatgacggctaatgatgatgtagag

SEQ ID NO: 197233 - DNA, 25 bp, Probe sequence
gtatatattatgatgacggctaatg

SEQ ID NO: 197234 - DNA, 25 bp, Probe sequence
gtatgtaactgagcaagtatatatt

SEQ ID NO: 197235 - DNA, 25 bp, Probe sequence
gtaagtatgtaactgagcaagtata

SEQ ID NO: 197236 - DNA, 25 bp, Probe sequence
tgatgatgtagaggcgccaagtgac

SEQ ID NO: 197237 - DNA, 25 bp, Probe sequence
tgatgacggctaatgatgatgtaga

SEQ ID NO: 197238 - DNA, 25 bp, Probe sequence
tgagactattattcttactagcgat

SEQ ID NO: 197239 - DNA, 25 bp, Probe sequence
taatgatgatgtagaggcgccaagt

SEQ ID NO: 197240 - DNA, 25 bp, Probe sequence
taggtaagtatgtaactgagcaagt

SEQ ID NO: 197241 - DNA, 25 bp, Probe sequence
tagtggtggttaaagaaattttgag

SEQ ID NO: 197242 - DNA, 25 bp, Probe sequence
tatgatgacggctaatgatgatgta

SEQ ID NO: 197243 - DNA, 25 bp, Probe sequence
tattattcttactagcgatgtatga

SEQ ID NO: 197244 - DNA, 25 bp, Probe sequence
tttgagactattattcttactagcg

SEQ ID NO: 197245 - DNA, 25 bp, Probe sequence
ttttgagactattattcttactagc

SEQ ID NO: 197246 - DNA, 25 bp, Probe sequence
ttatgatgacggctaatgatgatgt

SEQ ID NO: 197247 - DNA, 25 bp, Probe sequence
ttgagactattattcttactagcga

SEQ ID NO: 197248 - DNA, 25 bp, Probe sequence
ataaggagagatggagatgccaaag

SEQ ID NO: 197249 - DNA, 25 bp, Probe sequence
aggcacaagttaagataaggagaga

SEQ ID NO: 197250 - DNA, 25 bp, Probe sequence
agtaaagaagaagctgagcgcaaat

SEQ ID NO: 197251 - DNA, 25 bp, Probe sequence
agataaggagagatggagatgccaa

SEQ ID NO: 197252 - DNA, 25 bp, Probe sequence
agaagctgagcgcaaatacgaggca

SEQ ID NO: 197253 - DNA, 25 bp, Probe sequence
agaagaagctgagcgcaaatacgag

SEQ ID NO: 197254 - DNA, 25 bp, Probe sequence
agctgagcgcaaatacgaggcacaa

SEQ ID NO: 197255 - DNA, 25 bp, Probe sequence
aaagaagaagctgagcgcaaatacg

SEQ ID NO: 197256 - DNA, 25 bp, Probe sequence
aagctgagcgcaaatacgaggcaca

SEQ ID NO: 197257 - DNA, 25 bp, Probe sequence
aagaagaagctgagcgcaaatacga

SEQ ID NO: 197258 - DNA, 25 bp, Probe sequence
aagaagctgagcgcaaatacgaggc

SEQ ID NO: 197259 - DNA, 25 bp, Probe sequence
aagataaggagagatggagatgcca

SEQ ID NO: 197260 - DNA, 25 bp, Probe sequence
ctgagcgcaaatacgaggcacaagt

SEQ ID NO: 197261 - DNA, 25 bp, Probe sequence
cgaggcacaagttaagataaggaga

SEQ ID NO: 197262 - DNA, 25 bp, Probe sequence
gctgagcgcaaatacgaggcacaag

SEQ ID NO: 197263 - DNA, 25 bp, Probe sequence
gcacaagttaagataaggagagatg

SEQ ID NO: 197264 - DNA, 25 bp, Probe sequence
gaagaagctgagcgcaaatacgagg

SEQ ID NO: 197265 - DNA, 25 bp, Probe sequence
gaagctgagcgcaaatacgaggcac

SEQ ID NO: 197266 - DNA, 25 bp, Probe sequence
gagtaaagaagaagctgagcgcaaa

SEQ ID NO: 197267 - DNA, 25 bp, Probe sequence
gaggcacaagttaagataaggagag

SEQ ID NO: 197268 - DNA, 25 bp, Probe sequence
gataaggagagatggagatgccaaa

SEQ ID NO: 197269 - DNA, 25 bp, Probe sequence
gtaaagaagaagctgagcgcaaata

SEQ ID NO: 197270 - DNA, 25 bp, Probe sequence
ggcacaagttaagataaggagagat

SEQ ID NO: 197271 - DNA, 25 bp, Probe sequence
tgagcgcaaatacgaggcacaagtt

SEQ ID NO: 197272 - DNA, 25 bp, Probe sequence
taaagaagaagctgagcgcaaatac

SEQ ID NO: 197273 - DNA, 25 bp, Probe sequence
attatggcaggtcaagttatctata

SEQ ID NO: 197274 - DNA, 25 bp, Probe sequence
ataacggcaatgacacagagggatt

SEQ ID NO: 197275 - DNA, 25 bp, Probe sequence
atccgttataagtgctagtgcgtat

SEQ ID NO: 197276 - DNA, 25 bp, Probe sequence
atgctattcaacattcagttaaaga

SEQ ID NO: 197277 - DNA, 25 bp, Probe sequence
atgacacagagggattgctaaaaga

SEQ ID NO: 197278 - DNA, 25 bp, Probe sequence
atggcaggtcaagttatctataaat

SEQ ID NO: 197279 - DNA, 25 bp, Probe sequence
agtgcgtataacggcaatgacacag

SEQ ID NO: 197280 - DNA, 25 bp, Probe sequence
acgtgtataagaaagcgcgagcatt

SEQ ID NO: 197281 - DNA, 25 bp, Probe sequence
aacaatccgttataagtgctagtgc

SEQ ID NO: 197282 - DNA, 25 bp, Probe sequence
aagaaagcgcgagcatttgatgaaa

SEQ ID NO: 197283 - DNA, 25 bp, Probe sequence
aagtgctagtgcgtataacggcaat

SEQ ID NO: 197284 - DNA, 25 bp, Probe sequence
aatcgtgaacaaattgaacaatccg

SEQ ID NO: 197285 - DNA, 25 bp, Probe sequence
caatccgttataagtgctagtgcgt

SEQ ID NO: 197286 - DNA, 25 bp, Probe sequence
gcgcgagcatttgatgaaatacttg

SEQ ID NO: 197287 - DNA, 25 bp, Probe sequence
gcgtataacggcaatgacacagagg

SEQ ID NO: 197288 - DNA, 25 bp, Probe sequence
gctaaaagagattgaggacgtgtat

SEQ ID NO: 197289 - DNA, 25 bp, Probe sequence
gctagtgcgtataacggcaatgaca

SEQ ID NO: 197290 - DNA, 25 bp, Probe sequence
gcagtaggaattatggcaggtcaag

SEQ ID NO: 197291 - DNA, 25 bp, Probe sequence
gcaggtcaagttatctataaatatg

SEQ ID NO: 197292 - DNA, 25 bp, Probe sequence
gaaggtattgaacttgatgaagcag

SEQ ID NO: 197293 - DNA, 25 bp, Probe sequence
gaagcagtaggaattatggcaggtc

SEQ ID NO: 197294 - DNA, 25 bp, Probe sequence
gaacaatccgttataagtgctagtg

SEQ ID NO: 197295 - DNA, 25 bp, Probe sequence
gaaagcgcgagcatttgatgaaata

SEQ ID NO: 197296 - DNA, 25 bp, Probe sequence
gacaaatgctattcaacattcagtt

SEQ ID NO: 197297 - DNA, 25 bp, Probe sequence
gagggattgctaaaagagattgagg

SEQ ID NO: 197298 - DNA, 25 bp, Probe sequence
gatggaatgacaaatgctattcaac

SEQ ID NO: 197299 - DNA, 25 bp, Probe sequence
gtataacggcaatgacacagaggga

SEQ ID NO: 197300 - DNA, 25 bp, Probe sequence
gtataagaaagcgcgagcatttgat

SEQ ID NO: 197301 - DNA, 25 bp, Probe sequence
gtgctagtgcgtataacggcaatga

SEQ ID NO: 197302 - DNA, 25 bp, Probe sequence
ggtattgaacttgatgaagcagtag

SEQ ID NO: 197303 - DNA, 25 bp, Probe sequence
ggacgtgtataagaaagcgcgagca

SEQ ID NO: 197304 - DNA, 25 bp, Probe sequence
ggaattatggcaggtcaagttatct

SEQ ID NO: 197305 - DNA, 25 bp, Probe sequence
tataagtgctagtgcgtataacggc

SEQ ID NO: 197306 - DNA, 25 bp, Probe sequence
ttgatgaaatacttgatggaatgac

SEQ ID NO: 197307 - DNA, 25 bp, Probe sequence
cgggcatatcgtgccaggttggcaa

SEQ ID NO: 197308 - DNA, 25 bp, Probe sequence
atataacgcgcgcaaagaatactta

SEQ ID NO: 197309 - DNA, 25 bp, Probe sequence
atatccatgtagtgaatggcactta

SEQ ID NO: 197310 - DNA, 25 bp, Probe sequence
atcaggataacgaacgagtggcaca

SEQ ID NO: 197311 - DNA, 25 bp, Probe sequence
atggcacttattactttcacgggca

SEQ ID NO: 197312 - DNA, 25 bp, Probe sequence
accaatttttcggatctaagagata

SEQ ID NO: 197313 - DNA, 25 bp, Probe sequence
acgcgcgcaaagaatacttaaacca

SEQ ID NO: 197314 - DNA, 25 bp, Probe sequence
acttattactttcacgggcatatcg

SEQ ID NO: 197315 - DNA, 25 bp, Probe sequence
aaaagacatttgatactgctgaaga

SEQ ID NO: 197316 - DNA, 25 bp, Probe sequence
aacgaacgagtggcacatatccatg

SEQ ID NO: 197317 - DNA, 25 bp, Probe sequence
aagcaacatggtttggaatacgagg

SEQ ID NO: 197318 - DNA, 25 bp, Probe sequence
cacgggcatatcgtgccaggttggc

SEQ ID NO: 197319 - DNA, 25 bp, Probe sequence
ctttcacgggcatatcgtgccaggt

SEQ ID NO: 197320 - DNA, 25 bp, Probe sequence
ctatgacatataacgcgcgcaaaga

SEQ ID NO: 197321 - DNA, 25 bp, Probe sequence
ctgaagagctcgaaatatatataaa

SEQ ID NO: 197322 - DNA, 25 bp, Probe sequence
gccaggttggcaaagcgttaaaaag

SEQ ID NO: 197323 - DNA, 25 bp, Probe sequence
gcacttattactttcacgggcatat

SEQ ID NO: 197324 - DNA, 25 bp, Probe sequence
gaatggcacttattactttcacggg

SEQ ID NO: 197325 - DNA, 25 bp, Probe sequence
gaacgagtggcacatatccatgtag

SEQ ID NO: 197326 - DNA, 25 bp, Probe sequence
gaacagaagcaactaactttatttt

SEQ ID NO: 197327 - DNA, 25 bp, Probe sequence
gacatataacgcgcgcaaagaatac

SEQ ID NO: 197328 - DNA, 25 bp, Probe sequence
gacatttgatactgctgaagagctc

SEQ ID NO: 197329 - DNA, 25 bp, Probe sequence
gactatgacatataacgcgcgcaaa

SEQ ID NO: 197330 - DNA, 25 bp, Probe sequence
gagatatctgtatcaggataacgaa

SEQ ID NO: 197331 - DNA, 25 bp, Probe sequence
gagtggcacatatccatgtagtgaa

SEQ ID NO: 197332 - DNA, 25 bp, Probe sequence
gatactgctgaagagctcgaaatat

SEQ ID NO: 197333 - DNA, 25 bp, Probe sequence
gttggcaaagcgttaaaaagacatt

SEQ ID NO: 197334 - DNA, 25 bp, Probe sequence
ggatctaagagatatctgtatcagg

SEQ ID NO: 197335 - DNA, 25 bp, Probe sequence
ggaatacgaggaacagaagcaacta

SEQ ID NO: 197336 - DNA, 25 bp, Probe sequence
ggcacatatccatgtagtgaatggc

SEQ ID NO: 197337 - DNA, 25 bp, Probe sequence
tgactatgacatataacgcgcgcaa

SEQ ID NO: 197338 - DNA, 25 bp, Probe sequence
taaaccaatttttcggatctaagag

SEQ ID NO: 197339 - DNA, 25 bp, Probe sequence
tatcgtgccaggttggcaaagcgtt

SEQ ID NO: 197340 - DNA, 25 bp, Probe sequence
ttactttcacgggcatatcgtgcca

SEQ ID NO: 197341 - DNA, 25 bp, Probe sequence
atagtgtcgaaatagtcgttttaga

SEQ ID NO: 197342 - DNA, 25 bp, Probe sequence
atatagtgtcgaaatagtcgtttta

SEQ ID NO: 197343 - DNA, 25 bp, Probe sequence
agtgtcgaaatagtcgttttagatc

SEQ ID NO: 197344 - DNA, 25 bp, Probe sequence
agttaagaagcgagcatatagtgtc

SEQ ID NO: 197345 - DNA, 25 bp, Probe sequence
agagttaagaagcgagcatatagtg

SEQ ID NO: 197346 - DNA, 25 bp, Probe sequence
agaagcgagcatatagtgtcgaaat

SEQ ID NO: 197347 - DNA, 25 bp, Probe sequence
agcatatagtgtcgaaatagtcgtt

SEQ ID NO: 197348 - DNA, 25 bp, Probe sequence
agcgagcatatagtgtcgaaatagt

SEQ ID NO: 197349 - DNA, 25 bp, Probe sequence
aagcgagcatatagtgtcgaaatag

SEQ ID NO: 197350 - DNA, 25 bp, Probe sequence
aagaagcgagcatatagtgtcgaaa

SEQ ID NO: 197351 - DNA, 25 bp, Probe sequence
catatagtgtcgaaatagtcgtttt

SEQ ID NO: 197352 - DNA, 25 bp, Probe sequence
cgagcatatagtgtcgaaatagtcg

SEQ ID NO: 197353 - DNA, 25 bp, Probe sequence
cgaaaaatatttaatgtagatggct

SEQ ID NO: 197354 - DNA, 25 bp, Probe sequence
gcgagcatatagtgtcgaaatagtc

SEQ ID NO: 197355 - DNA, 25 bp, Probe sequence
gcatatagtgtcgaaatagtcgttt

SEQ ID NO: 197356 - DNA, 25 bp, Probe sequence
gaagcgagcatatagtgtcgaaata

SEQ ID NO: 197357 - DNA, 25 bp, Probe sequence
gagcatatagtgtcgaaatagtcgt

SEQ ID NO: 197358 - DNA, 25 bp, Probe sequence
gagttaagaagcgagcatatagtgt

SEQ ID NO: 197359 - DNA, 25 bp, Probe sequence
gattttcaattaagagttaagaagc

SEQ ID NO: 197360 - DNA, 25 bp, Probe sequence
gttaagaagcgagcatatagtgtcg

SEQ ID NO: 197361 - DNA, 25 bp, Probe sequence
gtcgaaaaatatttaatgtagatgg

SEQ ID NO: 197362 - DNA, 25 bp, Probe sequence
gtgtcgaaatagtcgttttagatca

SEQ ID NO: 197363 - DNA, 25 bp, Probe sequence
tcgaaaaatatttaatgtagatggc

SEQ ID NO: 197364 - DNA, 25 bp, Probe sequence
taagaagcgagcatatagtgtcgaa

SEQ ID NO: 197365 - DNA, 25 bp, Probe sequence
tagtgtcgaaatagtcgttttagat

SEQ ID NO: 197366 - DNA, 25 bp, Probe sequence
tatagtgtcgaaatagtcgttttag

SEQ ID NO: 197367 - DNA, 25 bp, Probe sequence
ttaagaagcgagcatatagtgtcga

SEQ ID NO: 197368 - DNA, 25 bp, Probe sequence
atacctgaaacacacgtgcttatca

SEQ ID NO: 197369 - DNA, 25 bp, Probe sequence
acaaggtatcgtacattatcctgat

SEQ ID NO: 197370 - DNA, 25 bp, Probe sequence
aacacacgtgcttatcacaaaagat

SEQ ID NO: 197371 - DNA, 25 bp, Probe sequence
aagacaggttattatttcaccctag

SEQ ID NO: 197372 - DNA, 25 bp, Probe sequence
aagaaggatgcataagtttgtagat

SEQ ID NO: 197373 - DNA, 25 bp, Probe sequence
aaggtatcgtacattatcctgatga

SEQ ID NO: 197374 - DNA, 25 bp, Probe sequence
aatagcttactcattagaccctgta

SEQ ID NO: 197375 - DNA, 25 bp, Probe sequence
aatacctgaaacacacgtgcttatc

SEQ ID NO: 197376 - DNA, 25 bp, Probe sequence
caggttattatttcaccctagactc

SEQ ID NO: 197377 - DNA, 25 bp, Probe sequence
ctgaaacacacgtgcttatcacaaa

SEQ ID NO: 197378 - DNA, 25 bp, Probe sequence
cctgaaacacacgtgcttatcacaa

SEQ ID NO: 197379 - DNA, 25 bp, Probe sequence
gcacaaggtatcgtacattatcctg

SEQ ID NO: 197380 - DNA, 25 bp, Probe sequence
gaacattttaatgagatttacaaag

SEQ ID NO: 197381 - DNA, 25 bp, Probe sequence
gaaacaatcaaagacaggttattat

SEQ ID NO: 197382 - DNA, 25 bp, Probe sequence
gacaggttattatttcaccctagac

SEQ ID NO: 197383 - DNA, 25 bp, Probe sequence
gagcacaaggtatcgtacattatcc

SEQ ID NO: 197384 - DNA, 25 bp, Probe sequence
gagatttacaaaggagggcacaaca

SEQ ID NO: 197385 - DNA, 25 bp, Probe sequence
gagttaagagcacaaggtatcgtac

SEQ ID NO: 197386 - DNA, 25 bp, Probe sequence
gagttaatagcttactcattagacc

SEQ ID NO: 197387 - DNA, 25 bp, Probe sequence
gatgcataagtttgtagatgaacat

SEQ ID NO: 197388 - DNA, 25 bp, Probe sequence
gttaatagcttactcattagaccct

SEQ ID NO: 197389 - DNA, 25 bp, Probe sequence
gttattatttcaccctagactcgaa

SEQ ID NO: 197390 - DNA, 25 bp, Probe sequence
gtacattatcctgatgagaatttta

SEQ ID NO: 197391 - DNA, 25 bp, Probe sequence
ggtatcgtacattatcctgatgaga

SEQ ID NO: 197392 - DNA, 25 bp, Probe sequence
ggttattatttcaccctagactcga

SEQ ID NO: 197393 - DNA, 25 bp, Probe sequence
ggaggtttaacgcaagaaggatgca

SEQ ID NO: 197394 - DNA, 25 bp, Probe sequence
tgagaattttaatcgttggaggttt

SEQ ID NO: 197395 - DNA, 25 bp, Probe sequence
ttcaccctagactcgaaaaagagtt

SEQ ID NO: 197396 - DNA, 25 bp, Probe sequence
taatcgttggaggtttaacgcaaga

SEQ ID NO: 197397 - DNA, 25 bp, Probe sequence
tatcgtacattatcctgatgagaat

SEQ ID NO: 197398 - DNA, 25 bp, Probe sequence
tattatttcaccctagactcgaaaa

SEQ ID NO: 197399 - DNA, 25 bp, Probe sequence
tatttcaccctagactcgaaaaaga

SEQ ID NO: 197400 - DNA, 25 bp, Probe sequence
ttacaaaggagggcacaacaaatga

SEQ ID NO: 197401 - DNA, 25 bp, Probe sequence
ttaagagcacaaggtatcgtacatt

SEQ ID NO: 197402 - DNA, 25 bp, Probe sequence
aggagcccatttcagcgacgaaaag

SEQ ID NO: 197403 - DNA, 25 bp, Probe sequence
attacttataccgagaagatggcac

SEQ ID NO: 197404 - DNA, 25 bp, Probe sequence
atattaaggtcatcaagtataaaga

SEQ ID NO: 197405 - DNA, 25 bp, Probe sequence
atattacttataccgagaagatggc

SEQ ID NO: 197406 - DNA, 25 bp, Probe sequence
aggtcatcaagtataaagacaacgt

SEQ ID NO: 197407 - DNA, 25 bp, Probe sequence
agcccatttcagcgacgaaaagaaa

SEQ ID NO: 197408 - DNA, 25 bp, Probe sequence
acgggcttctatatgagcaagagct

SEQ ID NO: 197409 - DNA, 25 bp, Probe sequence
aaatattacttataccgagaagatg

SEQ ID NO: 197410 - DNA, 25 bp, Probe sequence
aaaatattacttataccgagaagat

SEQ ID NO: 197411 - DNA, 25 bp, Probe sequence
aagatattaaggtcatcaagtataa

SEQ ID NO: 197412 - DNA, 25 bp, Probe sequence
aatattacttataccgagaagatgg

SEQ ID NO: 197413 - DNA, 25 bp, Probe sequence
cacgggcttctatatgagcaagagc

SEQ ID NO: 197414 - DNA, 25 bp, Probe sequence
catcaagtataaagacaacgtaaat

SEQ ID NO: 197415 - DNA, 25 bp, Probe sequence
cttctatatgagcaagagctaggat

SEQ ID NO: 197416 - DNA, 25 bp, Probe sequence
ctcacgggcttctatatgagcaaga

SEQ ID NO: 197417 - DNA, 25 bp, Probe sequence
cgggcttctatatgagcaagagcta

SEQ ID NO: 197418 - DNA, 25 bp, Probe sequence
cgctcacgggcttctatatgagcaa

SEQ ID NO: 197419 - DNA, 25 bp, Probe sequence
cccatttcagcgacgaaaagaaaat

SEQ ID NO: 197420 - DNA, 25 bp, Probe sequence
gcccatttcagcgacgaaaagaaaa

SEQ ID NO: 197421 - DNA, 25 bp, Probe sequence
gcgctcacgggcttctatatgagca

SEQ ID NO: 197422 - DNA, 25 bp, Probe sequence
gctcacgggcttctatatgagcaag

SEQ ID NO: 197423 - DNA, 25 bp, Probe sequence
gcttctatatgagcaagagctagga

SEQ ID NO: 197424 - DNA, 25 bp, Probe sequence
gaagatattaaggtcatcaagtata

SEQ ID NO: 197425 - DNA, 25 bp, Probe sequence
gaaaaatattacttataccgagaag

SEQ ID NO: 197426 - DNA, 25 bp, Probe sequence
gagcccatttcagcgacgaaaagaa

SEQ ID NO: 197427 - DNA, 25 bp, Probe sequence
gatattaaggtcatcaagtataaag

SEQ ID NO: 197428 - DNA, 25 bp, Probe sequence
ggagcccatttcagcgacgaaaaga

SEQ ID NO: 197429 - DNA, 25 bp, Probe sequence
gggcttctatatgagcaagagctag

SEQ ID NO: 197430 - DNA, 25 bp, Probe sequence
ggtcatcaagtataaagacaacgta

SEQ ID NO: 197431 - DNA, 25 bp, Probe sequence
ggcttctatatgagcaagagctagg

SEQ ID NO: 197432 - DNA, 25 bp, Probe sequence
ggcgctcacgggcttctatatgagc

SEQ ID NO: 197433 - DNA, 25 bp, Probe sequence
tcacgggcttctatatgagcaagag

SEQ ID NO: 197434 - DNA, 25 bp, Probe sequence
tattacttataccgagaagatggca

SEQ ID NO: 197435 - DNA, 25 bp, Probe sequence
ttctatatgagcaagagctaggatt

SEQ ID NO: 197436 - DNA, 25 bp, Probe sequence
aggattcgcaagtatcgcaacattc

SEQ ID NO: 197437 - DNA, 25 bp, Probe sequence
agcatggtcaattgcaggattcgca

SEQ ID NO: 197438 - DNA, 25 bp, Probe sequence
agctacctagtagcagtactatgct

SEQ ID NO: 197439 - DNA, 25 bp, Probe sequence
acctagtagcagtactatgcttcac

SEQ ID NO: 197440 - DNA, 25 bp, Probe sequence
actacagcatggtcaattgcaggat

SEQ ID NO: 197441 - DNA, 25 bp, Probe sequence
actatgcttcacagtcttagcgatt

SEQ ID NO: 197442 - DNA, 25 bp, Probe sequence
aagtatcgcaacattcatattctat

SEQ ID NO: 197443 - DNA, 25 bp, Probe sequence
cttatgccgtttctatacttcacta

SEQ ID NO: 197444 - DNA, 25 bp, Probe sequence
cttagcgattgtacttatgccgttt

SEQ ID NO: 197445 - DNA, 25 bp, Probe sequence
ccgtttctatacttcactacagcat

SEQ ID NO: 197446 - DNA, 25 bp, Probe sequence
gcgattgtacttatgccgtttctat

SEQ ID NO: 197447 - DNA, 25 bp, Probe sequence
gcttcacagtcttagcgattgtact

SEQ ID NO: 197448 - DNA, 25 bp, Probe sequence
gcagtactatgcttcacagtcttag

SEQ ID NO: 197449 - DNA, 25 bp, Probe sequence
gcaagtatcgcaacattcatattct

SEQ ID NO: 197450 - DNA, 25 bp, Probe sequence
gattcgcaagtatcgcaacattcat

SEQ ID NO: 197451 - DNA, 25 bp, Probe sequence
gattgtacttatgccgtttctatac

SEQ ID NO: 197452 - DNA, 25 bp, Probe sequence
gtttctatacttcactacagcatgg

SEQ ID NO: 197453 - DNA, 25 bp, Probe sequence
gtatcgcaacattcatattctataa

SEQ ID NO: 197454 - DNA, 25 bp, Probe sequence
gtagcagtactatgcttcacagtct

SEQ ID NO: 197455 - DNA, 25 bp, Probe sequence
gtactatgcttcacagtcttagcga

SEQ ID NO: 197456 - DNA, 25 bp, Probe sequence
gtcttagcgattgtacttatgccgt

SEQ ID NO: 197457 - DNA, 25 bp, Probe sequence
tgtacttatgccgtttctatacttc

SEQ ID NO: 197458 - DNA, 25 bp, Probe sequence
tgcaggattcgcaagtatcgcaaca

SEQ ID NO: 197459 - DNA, 25 bp, Probe sequence
tcgcaacattcatattctataagga

SEQ ID NO: 197460 - DNA, 25 bp, Probe sequence
tctatacttcactacagcatggtca

SEQ ID NO: 197461 - DNA, 25 bp, Probe sequence
tacttcactacagcatggtcaattg

SEQ ID NO: 197462 - DNA, 25 bp, Probe sequence
tacttatgccgtttctatacttcac

SEQ ID NO: 197463 - DNA, 25 bp, Probe sequence
tagcgattgtacttatgccgtttct

SEQ ID NO: 197464 - DNA, 25 bp, Probe sequence
tatgcttcacagtcttagcgattgt

SEQ ID NO: 197465 - DNA, 25 bp, Probe sequence
tatacttcactacagcatggtcaat

SEQ ID NO: 197466 - DNA, 25 bp, Probe sequence
ttatgccgtttctatacttcactac

SEQ ID NO: 197467 - DNA, 25 bp, Probe sequence
ttcactacagcatggtcaattgcag

SEQ ID NO: 197468 - DNA, 25 bp, Probe sequence
ttcacagtcttagcgattgtactta

SEQ ID NO: 197469 - DNA, 25 bp, Probe sequence
ttcgcaagtatcgcaacattcatat

SEQ ID NO: 197470 - DNA, 25 bp, Probe sequence
atgatgatgtagaggcgccgagtga

SEQ ID NO: 197471 - DNA, 25 bp, Probe sequence
atgatgtagaggcgccgagtgatta

SEQ ID NO: 197472 - DNA, 25 bp, Probe sequence
atgtagaggcgccgagtgattacgt

SEQ ID NO: 197473 - DNA, 25 bp, Probe sequence
atgtaactgagcaagtatatattat

SEQ ID NO: 197474 - DNA, 25 bp, Probe sequence
aggtaagtatgtaactgagcaagta

SEQ ID NO: 197475 - DNA, 25 bp, Probe sequence
agtgattacgtctttcgagcggagg

SEQ ID NO: 197476 - DNA, 25 bp, Probe sequence
agtatgtaactgagcaagtatatat

SEQ ID NO: 197477 - DNA, 25 bp, Probe sequence
aactgagcaagtatatattatgatg

SEQ ID NO: 197478 - DNA, 25 bp, Probe sequence
aagtatgtaactgagcaagtatata

SEQ ID NO: 197479 - DNA, 25 bp, Probe sequence
aatgatgatgtagaggcgccgagtg

SEQ ID NO: 197480 - DNA, 25 bp, Probe sequence
ctaatgatgatgtagaggcgccgag

SEQ ID NO: 197481 - DNA, 25 bp, Probe sequence
ctgagcaagtatatattatgatgac

SEQ ID NO: 197482 - DNA, 25 bp, Probe sequence
cgagtgattacgtctttcgagcgga

SEQ ID NO: 197483 - DNA, 25 bp, Probe sequence
cgccgagtgattacgtctttcgagc

SEQ ID NO: 197484 - DNA, 25 bp, Probe sequence
ccgagtgattacgtctttcgagcgg

SEQ ID NO: 197485 - DNA, 25 bp, Probe sequence
gccgagtgattacgtctttcgagcg

SEQ ID NO: 197486 - DNA, 25 bp, Probe sequence
gcgccgagtgattacgtctttcgag

SEQ ID NO: 197487 - DNA, 25 bp, Probe sequence
gctaatgatgatgtagaggcgccga

SEQ ID NO: 197488 - DNA, 25 bp, Probe sequence
gagtgattacgtctttcgagcggag

SEQ ID NO: 197489 - DNA, 25 bp, Probe sequence
gatgtagaggcgccgagtgattacg

SEQ ID NO: 197490 - DNA, 25 bp, Probe sequence
gatgatgtagaggcgccgagtgatt

SEQ ID NO: 197491 - DNA, 25 bp, Probe sequence
gtatgtaactgagcaagtatatatt

SEQ ID NO: 197492 - DNA, 25 bp, Probe sequence
gtagaggcgccgagtgattacgtct

SEQ ID NO: 197493 - DNA, 25 bp, Probe sequence
gtaagtatgtaactgagcaagtata

SEQ ID NO: 197494 - DNA, 25 bp, Probe sequence
gtaactgagcaagtatatattatga

SEQ ID NO: 197495 - DNA, 25 bp, Probe sequence
gtgattacgtctttcgagcggaggt

SEQ ID NO: 197496 - DNA, 25 bp, Probe sequence
ggtaagtatgtaactgagcaagtat

SEQ ID NO: 197497 - DNA, 25 bp, Probe sequence
tgtagaggcgccgagtgattacgtc

SEQ ID NO: 197498 - DNA, 25 bp, Probe sequence
tgatgtagaggcgccgagtgattac

SEQ ID NO: 197499 - DNA, 25 bp, Probe sequence
tgatgatgtagaggcgccgagtgat

SEQ ID NO: 197500 - DNA, 25 bp, Probe sequence
taatgatgatgtagaggcgccgagt

SEQ ID NO: 197501 - DNA, 25 bp, Probe sequence
taagtatgtaactgagcaagtatat

SEQ ID NO: 197502 - DNA, 25 bp, Probe sequence
tagaggcgccgagtgattacgtctt

SEQ ID NO: 197503 - DNA, 25 bp, Probe sequence
taggtaagtatgtaactgagcaagt

SEQ ID NO: 197504 - DNA, 25 bp, Probe sequence
attttactgctgctagagataatca

SEQ ID NO: 197505 - DNA, 25 bp, Probe sequence
atcagacgtttacagttgttgaggc

SEQ ID NO: 197506 - DNA, 25 bp, Probe sequence
atgaacattttactgctgctagaga

SEQ ID NO: 197507 - DNA, 25 bp, Probe sequence
aggactaccacatgaacattttact

SEQ ID NO: 197508 - DNA, 25 bp, Probe sequence
actgctgctagagataatcagacgt

SEQ ID NO: 197509 - DNA, 25 bp, Probe sequence
acattttactgctgctagagataat

SEQ ID NO: 197510 - DNA, 25 bp, Probe sequence
acatgaacattttactgctgctaga

SEQ ID NO: 197511 - DNA, 25 bp, Probe sequence
acagttgttgaggcggagagtaaag

SEQ ID NO: 197512 - DNA, 25 bp, Probe sequence
acaatacttagtcacaacattcaaa

SEQ ID NO: 197513 - DNA, 25 bp, Probe sequence
aagattcatcaggactaccacatga

SEQ ID NO: 197514 - DNA, 25 bp, Probe sequence
aattaggtcagttgtttgaaaatat

SEQ ID NO: 197515 - DNA, 25 bp, Probe sequence
caaagattcatcaggactaccacat

SEQ ID NO: 197516 - DNA, 25 bp, Probe sequence
cagacgtttacagttgttgaggcgg

SEQ ID NO: 197517 - DNA, 25 bp, Probe sequence
catcaggactaccacatgaacattt

SEQ ID NO: 197518 - DNA, 25 bp, Probe sequence
ccacatgaacattttactgctgcta

SEQ ID NO: 197519 - DNA, 25 bp, Probe sequence
gcagttattaaattaggtcagttgt

SEQ ID NO: 197520 - DNA, 25 bp, Probe sequence
gaagcgaaagagaagtacgaggcac

SEQ ID NO: 197521 - DNA, 25 bp, Probe sequence
gaacattttactgctgctagagata

SEQ ID NO: 197522 - DNA, 25 bp, Probe sequence
gaaagagaagtacgaggcacaagtt

SEQ ID NO: 197523 - DNA, 25 bp, Probe sequence
gacacaatacttagtcacaacattc

SEQ ID NO: 197524 - DNA, 25 bp, Probe sequence
gactaccacatgaacattttactgc

SEQ ID NO: 197525 - DNA, 25 bp, Probe sequence
gacgtttacagttgttgaggcggag

SEQ ID NO: 197526 - DNA, 25 bp, Probe sequence
gagaagtacgaggcacaagttaaaa

SEQ ID NO: 197527 - DNA, 25 bp, Probe sequence
gaggcacaagttaaaagggatgcag

SEQ ID NO: 197528 - DNA, 25 bp, Probe sequence
gataatcagacgtttacagttgttg

SEQ ID NO: 197529 - DNA, 25 bp, Probe sequence
gattcatcaggactaccacatgaac

SEQ ID NO: 197530 - DNA, 25 bp, Probe sequence
gttgttgaggcggagagtaaagaag

SEQ ID NO: 197531 - DNA, 25 bp, Probe sequence
gtttacagttgttgaggcggagagt

SEQ ID NO: 197532 - DNA, 25 bp, Probe sequence
gtacgaggcacaagttaaaagggat

SEQ ID NO: 197533 - DNA, 25 bp, Probe sequence
gtcacaacattcaaagattcatcag

SEQ ID NO: 197534 - DNA, 25 bp, Probe sequence
gggatgcagttattaaattaggtca

SEQ ID NO: 197535 - DNA, 25 bp, Probe sequence
tgaaaatataagggagtgtgggaaa

SEQ ID NO: 197536 - DNA, 25 bp, Probe sequence
taccacatgaacattttactgctgc

SEQ ID NO: 197537 - DNA, 25 bp, Probe sequence
tagtcacaacattcaaagattcatc

SEQ ID NO: 197538 - DNA, 25 bp, Probe sequence
attgcatctgatgagactatcaagg

SEQ ID NO: 197539 - DNA, 25 bp, Probe sequence
attactatttcatcctagatttgaa

SEQ ID NO: 197540 - DNA, 25 bp, Probe sequence
atatgatgagctaattggttattca

SEQ ID NO: 197541 - DNA, 25 bp, Probe sequence
atacctgaaacacatgtacttatca

SEQ ID NO: 197542 - DNA, 25 bp, Probe sequence
atcaaggacagattactatttcatc

SEQ ID NO: 197543 - DNA, 25 bp, Probe sequence
atcgctggagatttaacgcaagaaa

SEQ ID NO: 197544 - DNA, 25 bp, Probe sequence
agattactatttcatcctagatttg

SEQ ID NO: 197545 - DNA, 25 bp, Probe sequence
acagattactatttcatcctagatt

SEQ ID NO: 197546 - DNA, 25 bp, Probe sequence
aacacatgtacttatcacaaaagat

SEQ ID NO: 197547 - DNA, 25 bp, Probe sequence
aagaactaagagcgcaaggaattgt

SEQ ID NO: 197548 - DNA, 25 bp, Probe sequence
aaggacagattactatttcatccta

SEQ ID NO: 197549 - DNA, 25 bp, Probe sequence
aatacctgaaacacatgtacttatc

SEQ ID NO: 197550 - DNA, 25 bp, Probe sequence
aattggttattcattagaccctgta

SEQ ID NO: 197551 - DNA, 25 bp, Probe sequence
cagattactatttcatcctagattt

SEQ ID NO: 197552 - DNA, 25 bp, Probe sequence
ctgaaacacatgtacttatcacaaa

SEQ ID NO: 197553 - DNA, 25 bp, Probe sequence
cgtcgatgagcatttcaatgaaata

SEQ ID NO: 197554 - DNA, 25 bp, Probe sequence
cctgaaacacatgtacttatcacaa

SEQ ID NO: 197555 - DNA, 25 bp, Probe sequence
gctggagatttaacgcaagaaagat

SEQ ID NO: 197556 - DNA, 25 bp, Probe sequence
gcatctgatgagactatcaaggaca

SEQ ID NO: 197557 - DNA, 25 bp, Probe sequence
gacagattactatttcatcctagat

SEQ ID NO: 197558 - DNA, 25 bp, Probe sequence
gactatcaaggacagattactattt

SEQ ID NO: 197559 - DNA, 25 bp, Probe sequence
gagcgcaaggaattgtgcattaccc

SEQ ID NO: 197560 - DNA, 25 bp, Probe sequence
gagaattttaatcgctggagattta

SEQ ID NO: 197561 - DNA, 25 bp, Probe sequence
gagactatcaaggacagattactat

SEQ ID NO: 197562 - DNA, 25 bp, Probe sequence
gatgagactatcaaggacagattac

SEQ ID NO: 197563 - DNA, 25 bp, Probe sequence
gatgaataaattcgtcgatgagcat

SEQ ID NO: 197564 - DNA, 25 bp, Probe sequence
gatgaatatgatgagctaattggtt

SEQ ID NO: 197565 - DNA, 25 bp, Probe sequence
gattactatttcatcctagatttga

SEQ ID NO: 197566 - DNA, 25 bp, Probe sequence
ggacagattactatttcatcctaga

SEQ ID NO: 197567 - DNA, 25 bp, Probe sequence
tcatcctagatttgaaaaagaacta

SEQ ID NO: 197568 - DNA, 25 bp, Probe sequence
taattggttattcattagaccctgt

SEQ ID NO: 197569 - DNA, 25 bp, Probe sequence
taatcgctggagatttaacgcaaga

SEQ ID NO: 197570 - DNA, 25 bp, Probe sequence
tactatttcatcctagatttgaaaa

SEQ ID NO: 197571 - DNA, 25 bp, Probe sequence
ttttaatcgctggagatttaacgca

SEQ ID NO: 197572 - DNA, 25 bp, Probe sequence
atagtttttaacgaagattattcag

SEQ ID NO: 197573 - DNA, 25 bp, Probe sequence
atcaacagattgacagtgaagaaca

SEQ ID NO: 197574 - DNA, 25 bp, Probe sequence
atgcaaatattagttaacaagcgta

SEQ ID NO: 197575 - DNA, 25 bp, Probe sequence
agtacaaagttatcgatgcaagtta

SEQ ID NO: 197576 - DNA, 25 bp, Probe sequence
acagtcgcttctgatgacatcttac

SEQ ID NO: 197577 - DNA, 25 bp, Probe sequence
acacagtcgcttctgatgacatctt

SEQ ID NO: 197578 - DNA, 25 bp, Probe sequence
acaaaacacagtcgcttctgatgac

SEQ ID NO: 197579 - DNA, 25 bp, Probe sequence
aaatggttgctagtatgcagaaaca

SEQ ID NO: 197580 - DNA, 25 bp, Probe sequence
aaaacacagtcgcttctgatgacat

SEQ ID NO: 197581 - DNA, 25 bp, Probe sequence
aacacagtcgcttctgatgacatct

SEQ ID NO: 197582 - DNA, 25 bp, Probe sequence
aagcaaaatgcactaatggcaaaac

SEQ ID NO: 197583 - DNA, 25 bp, Probe sequence
aatggcaaaacaacttgtgacactt

SEQ ID NO: 197584 - DNA, 25 bp, Probe sequence
aatttaccagaaaatttctctcaag

SEQ ID NO: 197585 - DNA, 25 bp, Probe sequence
cagaaaatttctctcaagtttttag

SEQ ID NO: 197586 - DNA, 25 bp, Probe sequence
cagtcgcttctgatgacatcttacg

SEQ ID NO: 197587 - DNA, 25 bp, Probe sequence
cgcttctgatgacatcttacgaaaa

SEQ ID NO: 197588 - DNA, 25 bp, Probe sequence
gctagtatgcagaaacaagttgttc

SEQ ID NO: 197589 - DNA, 25 bp, Probe sequence
gctttgaagaaggtattgatattga

SEQ ID NO: 197590 - DNA, 25 bp, Probe sequence
gaagaacaaaacacagtcgcttctg

SEQ ID NO: 197591 - DNA, 25 bp, Probe sequence
gaagaggttaaaggagagactgaaa

SEQ ID NO: 197592 - DNA, 25 bp, Probe sequence
gaacaaaacacagtcgcttctgatg

SEQ ID NO: 197593 - DNA, 25 bp, Probe sequence
gacatcttacgaaaaatggttgcta

SEQ ID NO: 197594 - DNA, 25 bp, Probe sequence
gacttgcatcaacagattgacagtg

SEQ ID NO: 197595 - DNA, 25 bp, Probe sequence
gagataatttcatacgctatcattg

SEQ ID NO: 197596 - DNA, 25 bp, Probe sequence
gatgacttgcatcaacagattgaca

SEQ ID NO: 197597 - DNA, 25 bp, Probe sequence
gttcaaagtacaaagttatcgatgc

SEQ ID NO: 197598 - DNA, 25 bp, Probe sequence
gttaacaagcgtaatgagataattt

SEQ ID NO: 197599 - DNA, 25 bp, Probe sequence
gttatcgatgcaagttaataagcaa

SEQ ID NO: 197600 - DNA, 25 bp, Probe sequence
gtcgcttctgatgacatcttacgaa

SEQ ID NO: 197601 - DNA, 25 bp, Probe sequence
ggcaaaacaacttgtgacacttaat

SEQ ID NO: 197602 - DNA, 25 bp, Probe sequence
tctcaagtttttagacctaaagcct

SEQ ID NO: 197603 - DNA, 25 bp, Probe sequence
taaagcctttaaatattcaaatggg

SEQ ID NO: 197604 - DNA, 25 bp, Probe sequence
tagacctaaagcctttaaatattca

SEQ ID NO: 197605 - DNA, 25 bp, Probe sequence
ttctctcaagtttttagacctaaag

SEQ ID NO: 197606 - DNA, 25 bp, Probe sequence
attaacgataaatttactgttcaag

SEQ ID NO: 197607 - DNA, 25 bp, Probe sequence
atttacctgaacttatccaatgggc

SEQ ID NO: 197608 - DNA, 25 bp, Probe sequence
atccaatgggcttgggataacccca

SEQ ID NO: 197609 - DNA, 25 bp, Probe sequence
atgaatttacctgaacttatccaat

SEQ ID NO: 197610 - DNA, 25 bp, Probe sequence
acctgaacttatccaatgggcttgg

SEQ ID NO: 197611 - DNA, 25 bp, Probe sequence
acgcaactgttgtgtgacttttgat

SEQ ID NO: 197612 - DNA, 25 bp, Probe sequence
actggatacgtatcaattaacgata

SEQ ID NO: 197613 - DNA, 25 bp, Probe sequence
actgttgtgtgacttttgatgttga

SEQ ID NO: 197614 - DNA, 25 bp, Probe sequence
aaaagattctattcaaatgatgttg

SEQ ID NO: 197615 - DNA, 25 bp, Probe sequence
aacgcaactgttgtgtgacttttga

SEQ ID NO: 197616 - DNA, 25 bp, Probe sequence
aatgatgttgaacgcaactgttgtg

SEQ ID NO: 197617 - DNA, 25 bp, Probe sequence
aatttactgttcaagaggagatata

SEQ ID NO: 197618 - DNA, 25 bp, Probe sequence
caactgttgtgtgacttttgatgtt

SEQ ID NO: 197619 - DNA, 25 bp, Probe sequence
ctgttgtgtgacttttgatgttgat

SEQ ID NO: 197620 - DNA, 25 bp, Probe sequence
cgcaactgttgtgtgacttttgatg

SEQ ID NO: 197621 - DNA, 25 bp, Probe sequence
gcatcttatgtaatgtgactggata

SEQ ID NO: 197622 - DNA, 25 bp, Probe sequence
gcaactgttgtgtgacttttgatgt

SEQ ID NO: 197623 - DNA, 25 bp, Probe sequence
gaatttacctgaacttatccaatgg

SEQ ID NO: 197624 - DNA, 25 bp, Probe sequence
gaacgcaactgttgtgtgacttttg

SEQ ID NO: 197625 - DNA, 25 bp, Probe sequence
gaaatgaatttacctgaacttatcc

SEQ ID NO: 197626 - DNA, 25 bp, Probe sequence
gacttttgatgttgatagcatctta

SEQ ID NO: 197627 - DNA, 25 bp, Probe sequence
gatgttgaacgcaactgttgtgtga

SEQ ID NO: 197628 - DNA, 25 bp, Probe sequence
gatagcatcttatgtaatgtgactg

SEQ ID NO: 197629 - DNA, 25 bp, Probe sequence
gttgtgtgacttttgatgttgatag

SEQ ID NO: 197630 - DNA, 25 bp, Probe sequence
gttgaacgcaactgttgtgtgactt

SEQ ID NO: 197631 - DNA, 25 bp, Probe sequence
gtaatgtgactggatacgtatcaat

SEQ ID NO: 197632 - DNA, 25 bp, Probe sequence
tgggcttgggataaccccaagttat

SEQ ID NO: 197633 - DNA, 25 bp, Probe sequence
gtgactggatacgtatcaattaacg

SEQ ID NO: 197634 - DNA, 25 bp, Probe sequence
gtgtgacttttgatgttgatagcat

SEQ ID NO: 197635 - DNA, 25 bp, Probe sequence
ggataaccccaagttatcaggtaat

SEQ ID NO: 197636 - DNA, 25 bp, Probe sequence
ttacctgaacttatccaatgggctt

SEQ ID NO: 197637 - DNA, 25 bp, Probe sequence
tgaacttatccaatgggcttgggat

SEQ ID NO: 197638 - DNA, 25 bp, Probe sequence
tgaacgcaactgttgtgtgactttt

SEQ ID NO: 197639 - DNA, 25 bp, Probe sequence
ttgtgtgacttttgatgttgatagc

SEQ ID NO: 197640 - DNA, 25 bp, Probe sequence
attgttgcgatgctggtgtttctac

SEQ ID NO: 197641 - DNA, 25 bp, Probe sequence
attcctgtttattttattgttgcga

SEQ ID NO: 197642 - DNA, 25 bp, Probe sequence
attttattgttgcgatgctggtgtt

SEQ ID NO: 197643 - DNA, 25 bp, Probe sequence
atcttcttaatttgtttaggaactg

SEQ ID NO: 197644 - DNA, 25 bp, Probe sequence
atgctggtgtttctactttttaggt

SEQ ID NO: 197645 - DNA, 25 bp, Probe sequence
ctgtttattttattgttgcgatgct

SEQ ID NO: 197646 - DNA, 25 bp, Probe sequence
cgatgctggtgtttctactttttag

SEQ ID NO: 197647 - DNA, 25 bp, Probe sequence
cctgtttattttattgttgcgatgc

SEQ ID NO: 197648 - DNA, 25 bp, Probe sequence
gcttttattcctgtttattttattg

SEQ ID NO: 197649 - DNA, 25 bp, Probe sequence
gaagaaagcttttattcctgtttat

SEQ ID NO: 197650 - DNA, 25 bp, Probe sequence
gatgctggtgtttctactttttagg

SEQ ID NO: 197651 - DNA, 25 bp, Probe sequence
gtttattttattgttgcgatgctgg

SEQ ID NO: 197652 - DNA, 25 bp, Probe sequence
tttggaagaaagcttttattcctgt

SEQ ID NO: 197653 - DNA, 25 bp, Probe sequence
tggaagaaagcttttattcctgttt

SEQ ID NO: 197654 - DNA, 25 bp, Probe sequence
tgtttattttattgttgcgatgctg

SEQ ID NO: 197655 - DNA, 25 bp, Probe sequence
tgttgcgatgctggtgtttctactt

SEQ ID NO: 197656 - DNA, 25 bp, Probe sequence
tgctggtgtttctactttttaggtt

SEQ ID NO: 197657 - DNA, 25 bp, Probe sequence
tcctgtttattttattgttgcgatg

SEQ ID NO: 197658 - DNA, 25 bp, Probe sequence
tcttcttaatttgtttaggaactgc

SEQ ID NO: 197659 - DNA, 25 bp, Probe sequence
tattcctgtttattttattgttgcg

SEQ ID NO: 197660 - DNA, 25 bp, Probe sequence
tatcttcttaatttgtttaggaact

SEQ ID NO: 197661 - DNA, 25 bp, Probe sequence
tattttattgttgcgatgctggtgt

SEQ ID NO: 197662 - DNA, 25 bp, Probe sequence
tattgttgcgatgctggtgtttcta

SEQ ID NO: 197663 - DNA, 25 bp, Probe sequence
tttattgttgcgatgctggtgtttc

SEQ ID NO: 197664 - DNA, 25 bp, Probe sequence
ttttattgttgcgatgctggtgttt

SEQ ID NO: 197665 - DNA, 25 bp, Probe sequence
tttattttattgttgcgatgctggt

SEQ ID NO: 197666 - DNA, 25 bp, Probe sequence
tttattcctgtttattttattgttg

SEQ ID NO: 197667 - DNA, 25 bp, Probe sequence
ttattgttgcgatgctggtgtttct

SEQ ID NO: 197668 - DNA, 25 bp, Probe sequence
ttattcctgtttattttattgttgc

SEQ ID NO: 197669 - DNA, 25 bp, Probe sequence
ttattttattgttgcgatgctggtg

SEQ ID NO: 197670 - DNA, 25 bp, Probe sequence
ttgcgatgctggtgtttctactttt

SEQ ID NO: 197671 - DNA, 25 bp, Probe sequence
ttcctgtttattttattgttgcgat

SEQ ID NO: 197672 - DNA, 25 bp, Probe sequence
ttgttgcgatgctggtgtttctact

SEQ ID NO: 197673 - DNA, 25 bp, Probe sequence
ttggaagaaagcttttattcctgtt

SEQ ID NO: 197674 - DNA, 25 bp, Probe sequence
attgtggcatgttctacaaacgtaa

SEQ ID NO: 197675 - DNA, 25 bp, Probe sequence
atttttggtattgtggcatgttcta

SEQ ID NO: 197676 - DNA, 25 bp, Probe sequence
atcatgcttatcgtcttatttttct

SEQ ID NO: 197677 - DNA, 25 bp, Probe sequence
atgcttatcgtcttatttttcttaa

SEQ ID NO: 197678 - DNA, 25 bp, Probe sequence
aaagtgtcatcatgcttatcgtctt

SEQ ID NO: 197679 - DNA, 25 bp, Probe sequence
aaaagtgtcatcatgcttatcgtct

SEQ ID NO: 197680 - DNA, 25 bp, Probe sequence
aagaaactgatagaggttgtttgaa

SEQ ID NO: 197681 - DNA, 25 bp, Probe sequence
aagtgtcatcatgcttatcgtctta

SEQ ID NO: 197682 - DNA, 25 bp, Probe sequence
catgcttatcgtcttatttttctta

SEQ ID NO: 197683 - DNA, 25 bp, Probe sequence
catcatgcttatcgtcttatttttc

SEQ ID NO: 197684 - DNA, 25 bp, Probe sequence
gcttatcgtcttatttttcttaatt

SEQ ID NO: 197685 - DNA, 25 bp, Probe sequence
gcatgttctacaaacgtaaactttt

SEQ ID NO: 197686 - DNA, 25 bp, Probe sequence
gaaaagtgtcatcatgcttatcgtc

SEQ ID NO: 197687 - DNA, 25 bp, Probe sequence
gaggttgtttgaaaagtgtcatcat

SEQ ID NO: 197688 - DNA, 25 bp, Probe sequence
gatagaggttgtttgaaaagtgtca

SEQ ID NO: 197689 - DNA, 25 bp, Probe sequence
gtattgtggcatgttctacaaacgt

SEQ ID NO: 197690 - DNA, 25 bp, Probe sequence
gtttgaaaagtgtcatcatgcttat

SEQ ID NO: 197691 - DNA, 25 bp, Probe sequence
gtcatcatgcttatcgtcttatttt

SEQ ID NO: 197692 - DNA, 25 bp, Probe sequence
gtggcatgttctacaaacgtaaact

SEQ ID NO: 197693 - DNA, 25 bp, Probe sequence
ggtattgtggcatgttctacaaacg

SEQ ID NO: 197694 - DNA, 25 bp, Probe sequence
ggttgtttgaaaagtgtcatcatgc

SEQ ID NO: 197695 - DNA, 25 bp, Probe sequence
ggcatgttctacaaacgtaaacttt

SEQ ID NO: 197696 - DNA, 25 bp, Probe sequence
tggtattgtggcatgttctacaaac

SEQ ID NO: 197697 - DNA, 25 bp, Probe sequence
tgtggcatgttctacaaacgtaaac

SEQ ID NO: 197698 - DNA, 25 bp, Probe sequence
tgtcatcatgcttatcgtcttattt

SEQ ID NO: 197699 - DNA, 25 bp, Probe sequence
tgaaaagtgtcatcatgcttatcgt

SEQ ID NO: 197700 - DNA, 25 bp, Probe sequence
tgcttatcgtcttatttttcttaat

SEQ ID NO: 197701 - DNA, 25 bp, Probe sequence
tcatcatgcttatcgtcttattttt

SEQ ID NO: 197702 - DNA, 25 bp, Probe sequence
tcatgcttatcgtcttatttttctt

SEQ ID NO: 197703 - DNA, 25 bp, Probe sequence
tattgtggcatgttctacaaacgta

SEQ ID NO: 197704 - DNA, 25 bp, Probe sequence
tttggtattgtggcatgttctacaa

SEQ ID NO: 197705 - DNA, 25 bp, Probe sequence
tttttggtattgtggcatgttctac

SEQ ID NO: 197706 - DNA, 25 bp, Probe sequence
ttttggtattgtggcatgttctaca

SEQ ID NO: 197707 - DNA, 25 bp, Probe sequence
ttgaaaagtgtcatcatgcttatcg

SEQ ID NO: 197708 - DNA, 25 bp, Probe sequence
atcggtggacatgaattttacaaag

SEQ ID NO: 197709 - DNA, 25 bp, Probe sequence
atgatgaaacatttactggtggtgt

SEQ ID NO: 197710 - DNA, 25 bp, Probe sequence
atggcaaaagcccaatggtagcatt

SEQ ID NO: 197711 - DNA, 25 bp, Probe sequence
agatgaggacacagttgaaggttac

SEQ ID NO: 197712 - DNA, 25 bp, Probe sequence
agcccaatggtagcattcatgcaac

SEQ ID NO: 197713 - DNA, 25 bp, Probe sequence
acatcaacacaacttcctaaaacac

SEQ ID NO: 197714 - DNA, 25 bp, Probe sequence
acacaacttcctaaaacaccaatca

SEQ ID NO: 197715 - DNA, 25 bp, Probe sequence
acaacaaactatcatcggtggacat

SEQ ID NO: 197716 - DNA, 25 bp, Probe sequence
aaaggtcaaattaagataactgctg

SEQ ID NO: 197717 - DNA, 25 bp, Probe sequence
aaagcccaatggtagcattcatgca

SEQ ID NO: 197718 - DNA, 25 bp, Probe sequence
aaaagcctataatatcagtgaaaac

SEQ ID NO: 197719 - DNA, 25 bp, Probe sequence
aactatcatcggtggacatgaattt

SEQ ID NO: 197720 - DNA, 25 bp, Probe sequence
aagataactgctgatggaaataatt

SEQ ID NO: 197721 - DNA, 25 bp, Probe sequence
aagtgtttggatccgagagttgggg

SEQ ID NO: 197722 - DNA, 25 bp, Probe sequence
aatacgttgatatatttggaactaa

SEQ ID NO: 197723 - DNA, 25 bp, Probe sequence
aattaactgacacaaaccgttatgt

SEQ ID NO: 197724 - DNA, 25 bp, Probe sequence
caacttcctaaaacaccaatcagtt

SEQ ID NO: 197725 - DNA, 25 bp, Probe sequence
ctggtggtgttacgccagcagctac

SEQ ID NO: 197726 - DNA, 25 bp, Probe sequence
gaataaattagttttatcaacagca

SEQ ID NO: 197727 - DNA, 25 bp, Probe sequence
gaagtcatactcgaaaaatctaact

SEQ ID NO: 197728 - DNA, 25 bp, Probe sequence
gaagcaaaagcctataatatcagtg

SEQ ID NO: 197729 - DNA, 25 bp, Probe sequence
gacacagttgaaggttactggactt

SEQ ID NO: 197730 - DNA, 25 bp, Probe sequence
gagagttggggaaacattaatcagt

SEQ ID NO: 197731 - DNA, 25 bp, Probe sequence
gatggaaataattacacgattgatt

SEQ ID NO: 197732 - DNA, 25 bp, Probe sequence
gtcatattcaagtgtttggatccga

SEQ ID NO: 197733 - DNA, 25 bp, Probe sequence
gtgaaaacgagactaatatcaatga

SEQ ID NO: 197734 - DNA, 25 bp, Probe sequence
ggtagcattcatgcaacattgcaaa

SEQ ID NO: 197735 - DNA, 25 bp, Probe sequence
tggatccgagagttggggaaacatt

SEQ ID NO: 197736 - DNA, 25 bp, Probe sequence
tgaaggttactggacttatgatgaa

SEQ ID NO: 197737 - DNA, 25 bp, Probe sequence
tcaacacaacttcctaaaacaccaa

SEQ ID NO: 197738 - DNA, 25 bp, Probe sequence
taaacaacaaactatcatcggtgga

SEQ ID NO: 197739 - DNA, 25 bp, Probe sequence
tactggtggtgttacgccagcagct

SEQ ID NO: 197740 - DNA, 25 bp, Probe sequence
tttggaactaaagatgaggacacag

SEQ ID NO: 197741 - DNA, 25 bp, Probe sequence
ttcatgcaacattgcaaacgtgggt

SEQ ID NO: 197742 - DNA, 25 bp, Probe sequence
ggtacagttaaatggtttaacgctg

SEQ ID NO: 197743 - DNA, 25 bp, Probe sequence
agtagttgaaggcgaccgcggtcca

SEQ ID NO: 197744 - DNA, 25 bp, Probe sequence
attcgtacatttttcagcaattaac

SEQ ID NO: 197745 - DNA, 25 bp, Probe sequence
atgacgtattcgtacatttttcagc

SEQ ID NO: 197746 - DNA, 25 bp, Probe sequence
aggattcggctttatcgaagttgaa

SEQ ID NO: 197747 - DNA, 25 bp, Probe sequence
agctgttgagtttgaagtagttgaa

SEQ ID NO: 197748 - DNA, 25 bp, Probe sequence
agctgcaaacgttgttaaactataa

SEQ ID NO: 197749 - DNA, 25 bp, Probe sequence
acgtattcgtacatttttcagcaat

SEQ ID NO: 197750 - DNA, 25 bp, Probe sequence
acatttttcagcaattaaccaagat

SEQ ID NO: 197751 - DNA, 25 bp, Probe sequence
aaaggattcggctttatcgaagttg

SEQ ID NO: 197752 - DNA, 25 bp, Probe sequence
aaccaagatggttacaaatcattag

SEQ ID NO: 197753 - DNA, 25 bp, Probe sequence
aatcattagaagaaggtcaagctgt

SEQ ID NO: 197754 - DNA, 25 bp, Probe sequence
caagctgcaaacgttgttaaactat

SEQ ID NO: 197755 - DNA, 25 bp, Probe sequence
cacaagctgcaaacgttgttaaact

SEQ ID NO: 197756 - DNA, 25 bp, Probe sequence
cggtccacaagctgcaaacgttgtt

SEQ ID NO: 197757 - DNA, 25 bp, Probe sequence
gctgaaaaaggattcggctttatcg

SEQ ID NO: 197758 - DNA, 25 bp, Probe sequence
gaagtagttgaaggcgaccgcggtc

SEQ ID NO: 197759 - DNA, 25 bp, Probe sequence
gaaggagaaaatgacgtattcgtac

SEQ ID NO: 197760 - DNA, 25 bp, Probe sequence
gaaggtcaagctgttgagtttgaag

SEQ ID NO: 197761 - DNA, 25 bp, Probe sequence
gaagaaggtcaagctgttgagtttg

SEQ ID NO: 197762 - DNA, 25 bp, Probe sequence
gacgtattcgtacatttttcagcaa

SEQ ID NO: 197763 - DNA, 25 bp, Probe sequence
gtttgaagtagttgaaggcgaccgc

SEQ ID NO: 197764 - DNA, 25 bp, Probe sequence
gattcggctttatcgaagttgaagg

SEQ ID NO: 197765 - DNA, 25 bp, Probe sequence
gtattcgtacatttttcagcaatta

SEQ ID NO: 197766 - DNA, 25 bp, Probe sequence
gtacatttttcagcaattaaccaag

SEQ ID NO: 197767 - DNA, 25 bp, Probe sequence
gtccacaagctgcaaacgttgttaa

SEQ ID NO: 197768 - DNA, 25 bp, Probe sequence
ggtccacaagctgcaaacgttgtta

SEQ ID NO: 197769 - DNA, 25 bp, Probe sequence
ggctttatcgaagttgaaggagaaa

SEQ ID NO: 197770 - DNA, 25 bp, Probe sequence
tccacaagctgcaaacgttgttaaa

SEQ ID NO: 197771 - DNA, 25 bp, Probe sequence
tcgtacatttttcagcaattaacca

SEQ ID NO: 197772 - DNA, 25 bp, Probe sequence
tcggctttatcgaagttgaaggaga

SEQ ID NO: 197773 - DNA, 25 bp, Probe sequence
ttgaagtagttgaaggcgaccgcgg

SEQ ID NO: 197774 - DNA, 25 bp, Probe sequence
tttttcagcaattaaccaagatggt

SEQ ID NO: 197775 - DNA, 25 bp, Probe sequence
ttaacgctgaaaaaggattcggctt

SEQ ID NO: 197776 - DNA, 25 bp, Probe sequence
attggattcccaatttctacagaca

SEQ ID NO: 197777 - DNA, 25 bp, Probe sequence
attcccaatttctacagacaatgca

SEQ ID NO: 197778 - DNA, 25 bp, Probe sequence
atttctacagacaatgcaagttggg

SEQ ID NO: 197779 - DNA, 25 bp, Probe sequence
atgcaagttggggtgggacgacgaa

SEQ ID NO: 197780 - DNA, 25 bp, Probe sequence
agacaatgcaagttggggtgggacg

SEQ ID NO: 197781 - DNA, 25 bp, Probe sequence
aaagtcagcttacaataatgtgcaa

SEQ ID NO: 197782 - DNA, 25 bp, Probe sequence
aagtcagcttacaataatgtgcaag

SEQ ID NO: 197783 - DNA, 25 bp, Probe sequence
aatgcaagttggggtgggacgacga

SEQ ID NO: 197784 - DNA, 25 bp, Probe sequence
caatgcaagttggggtgggacgacg

SEQ ID NO: 197785 - DNA, 25 bp, Probe sequence
caatttctacagacaatgcaagttg

SEQ ID NO: 197786 - DNA, 25 bp, Probe sequence
caacaaagagaaattggattcccaa

SEQ ID NO: 197787 - DNA, 25 bp, Probe sequence
cagacaatgcaagttggggtgggac

SEQ ID NO: 197788 - DNA, 25 bp, Probe sequence
cccaatttctacagacaatgcaagt

SEQ ID NO: 197789 - DNA, 25 bp, Probe sequence
cccaacacagaagatgacgaaaagt

SEQ ID NO: 197790 - DNA, 25 bp, Probe sequence
gatgggccccaacaaagagaaattg

SEQ ID NO: 197791 - DNA, 25 bp, Probe sequence
gcaagttggggtgggacgacgaaat

SEQ ID NO: 197792 - DNA, 25 bp, Probe sequence
gaagatgacgaaaagtcagcttaca

SEQ ID NO: 197793 - DNA, 25 bp, Probe sequence
gaaaagtcagcttacaataatgtgc

SEQ ID NO: 197794 - DNA, 25 bp, Probe sequence
gacaatgcaagttggggtgggacga

SEQ ID NO: 197795 - DNA, 25 bp, Probe sequence
gacgaaaagtcagcttacaataatg

SEQ ID NO: 197796 - DNA, 25 bp, Probe sequence
tggattcccaatttctacagacaat

SEQ ID NO: 197797 - DNA, 25 bp, Probe sequence
gatgacgaaaagtcagcttacaata

SEQ ID NO: 197798 - DNA, 25 bp, Probe sequence
gattcccaatttctacagacaatgc

SEQ ID NO: 197799 - DNA, 25 bp, Probe sequence
gtcagcttacaataatgtgcaagtt

SEQ ID NO: 197800 - DNA, 25 bp, Probe sequence
ggatgggccccaacaaagagaaatt

SEQ ID NO: 197801 - DNA, 25 bp, Probe sequence
gggatgggccccaacaaagagaaat

SEQ ID NO: 197802 - DNA, 25 bp, Probe sequence
ggattcccaatttctacagacaatg

SEQ ID NO: 197803 - DNA, 25 bp, Probe sequence
tgcaagttggggtgggacgacgaaa

SEQ ID NO: 197804 - DNA, 25 bp, Probe sequence
tgggccccaacaaagagaaattgga

SEQ ID NO: 197805 - DNA, 25 bp, Probe sequence
tcccaatttctacagacaatgcaag

SEQ ID NO: 197806 - DNA, 25 bp, Probe sequence
tctacagacaatgcaagttggggtg

SEQ ID NO: 197807 - DNA, 25 bp, Probe sequence
tacagacaatgcaagttggggtggg

SEQ ID NO: 197808 - DNA, 25 bp, Probe sequence
ttcccaatttctacagacaatgcaa

SEQ ID NO: 197809 - DNA, 25 bp, Probe sequence
ttggattcccaatttctacagacaa

SEQ ID NO: 197810 - DNA, 25 bp, Probe sequence
attgccaccgcattaaaatcattta

SEQ ID NO: 197811 - DNA, 25 bp, Probe sequence
atacagtcatcgtaccagttggcgg

SEQ ID NO: 197812 - DNA, 25 bp, Probe sequence
atctgagaatgttcatggtatggct

SEQ ID NO: 197813 - DNA, 25 bp, Probe sequence
atgaaagatttaatgcagcgtgcca

SEQ ID NO: 197814 - DNA, 25 bp, Probe sequence
aggcgggaatgttgacttaactaga

SEQ ID NO: 197815 - DNA, 25 bp, Probe sequence
atggcatgacaatcgttcatccata

SEQ ID NO: 197816 - DNA, 25 bp, Probe sequence
aaatcatttaacccttcaattcata

SEQ ID NO: 197817 - DNA, 25 bp, Probe sequence
aaaggcattatcgcagcatctgctg

SEQ ID NO: 197818 - DNA, 25 bp, Probe sequence
aaggtgttgctttaacagctaaatt

SEQ ID NO: 197819 - DNA, 25 bp, Probe sequence
aatgcagcgtgccaaaattattact

SEQ ID NO: 197820 - DNA, 25 bp, Probe sequence
aatatgcaattcacaggatctttta

SEQ ID NO: 197821 - DNA, 25 bp, Probe sequence
catattatcggtgttcaatctgaga

SEQ ID NO: 197822 - DNA, 25 bp, Probe sequence
cgtcgaacacctctaattaaatcaa

SEQ ID NO: 197823 - DNA, 25 bp, Probe sequence
cgcattaccaacagctgcaatttta

SEQ ID NO: 197824 - DNA, 25 bp, Probe sequence
gctaaattattaggcattgatgcaa

SEQ ID NO: 197825 - DNA, 25 bp, Probe sequence
gaaacagcaccacaagcgaaacaac

SEQ ID NO: 197826 - DNA, 25 bp, Probe sequence
gacaatcgttcatccatatgacgat

SEQ ID NO: 197827 - DNA, 25 bp, Probe sequence
gacgataagtttgtaatggcaggcc

SEQ ID NO: 197828 - DNA, 25 bp, Probe sequence
gagatttaactgaacatcgagtgga

SEQ ID NO: 197829 - DNA, 25 bp, Probe sequence
gttcctggtgaacaaacatatgaag

SEQ ID NO: 197830 - DNA, 25 bp, Probe sequence
gtcatcgtaccagttggcggtggag

SEQ ID NO: 197831 - DNA, 25 bp, Probe sequence
gtaatgcctgaaacagcaccacaag

SEQ ID NO: 197832 - DNA, 25 bp, Probe sequence
gtcattgaacatggactgaatattg

SEQ ID NO: 197833 - DNA, 25 bp, Probe sequence
ggcaggccaaggaacaattggttta

SEQ ID NO: 197834 - DNA, 25 bp, Probe sequence
gtgcaggcgcattaccaacagctgc

SEQ ID NO: 197835 - DNA, 25 bp, Probe sequence
ggatcttttaaatttagaggcgcta

SEQ ID NO: 197836 - DNA, 25 bp, Probe sequence
ggaatgtgaatacagtcatcgtacc

SEQ ID NO: 197837 - DNA, 25 bp, Probe sequence
tggcggtggaggattaattgcaggt

SEQ ID NO: 197838 - DNA, 25 bp, Probe sequence
tggtatggctgagtctttctataag

SEQ ID NO: 197839 - DNA, 25 bp, Probe sequence
tcgcagcatctgctgggaaccatgc

SEQ ID NO: 197840 - DNA, 25 bp, Probe sequence
tactgaaggtgcaggcgcattacca

SEQ ID NO: 197841 - DNA, 25 bp, Probe sequence
tagtttcaggcgggaatgttgactt

SEQ ID NO: 197842 - DNA, 25 bp, Probe sequence
ttaacccttcaattcatattatcgg

SEQ ID NO: 197843 - DNA, 25 bp, Probe sequence
ttgtgatgtaaaagttcctggtgaa

SEQ ID NO: 197844 - DNA, 25 bp, Probe sequence
attcttgcttatggtgcctatgcga

SEQ ID NO: 197845 - DNA, 25 bp, Probe sequence
atatttagcgatgatgaacaacacc

SEQ ID NO: 197846 - DNA, 25 bp, Probe sequence
accagttgttatcgaccgtgtcgaa

SEQ ID NO: 197847 - DNA, 25 bp, Probe sequence
atccatacgatgagcacactgatat

SEQ ID NO: 197848 - DNA, 25 bp, Probe sequence
atggtgcctatgcgaagcgaccagt

SEQ ID NO: 197849 - DNA, 25 bp, Probe sequence
agtgattcttgcttatggtgcctat

SEQ ID NO: 197850 - DNA, 25 bp, Probe sequence
acagtgattcttgcttatggtgcct

SEQ ID NO: 197851 - DNA, 25 bp, Probe sequence
aaatccatacgatgagcacactgat

SEQ ID NO: 197852 - DNA, 25 bp, Probe sequence
aaagctcatcaatccagtaacaaat

SEQ ID NO: 197853 - DNA, 25 bp, Probe sequence
aaaaaagctcatcaatccagtaaca

SEQ ID NO: 197854 - DNA, 25 bp, Probe sequence
aacctcaaacatatcaaaaatccat

SEQ ID NO: 197855 - DNA, 25 bp, Probe sequence
aagtacgataaacacagaagccata

SEQ ID NO: 197856 - DNA, 25 bp, Probe sequence
cacccgaaaacctcaaacatatcaa

SEQ ID NO: 197857 - DNA, 25 bp, Probe sequence
gaccagttgttatcgaccgtgtcga

SEQ ID NO: 197858 - DNA, 25 bp, Probe sequence
cttatggtgcctatgcgaagcgacc

SEQ ID NO: 197859 - DNA, 25 bp, Probe sequence
cgatgagcacactgatattcatttg

SEQ ID NO: 197860 - DNA, 25 bp, Probe sequence
cctcaatcaattagctaatactgaa

SEQ ID NO: 197861 - DNA, 25 bp, Probe sequence
ccatacgatgagcacactgatattc

SEQ ID NO: 197862 - DNA, 25 bp, Probe sequence
gcgaccagttgttatcgaccgtgtc

SEQ ID NO: 197863 - DNA, 25 bp, Probe sequence
gctcatcaatccagtaacaaatgaa

SEQ ID NO: 197864 - DNA, 25 bp, Probe sequence
gaacacccgaaaacctcaaacatat

SEQ ID NO: 197865 - DNA, 25 bp, Probe sequence
gaaagtaaaaaagctcatcaatcca

SEQ ID NO: 197866 - DNA, 25 bp, Probe sequence
gaccgtgtcgaacaagtgatggaaa

SEQ ID NO: 197867 - DNA, 25 bp, Probe sequence
gagcacactgatattcatttgatga

SEQ ID NO: 197868 - DNA, 25 bp, Probe sequence
gatgatgaacaacaccgctatttac

SEQ ID NO: 197869 - DNA, 25 bp, Probe sequence
gattcttgcttatggtgcctatgcg

SEQ ID NO: 197870 - DNA, 25 bp, Probe sequence
gttgttatcgaccgtgtcgaacaag

SEQ ID NO: 197871 - DNA, 25 bp, Probe sequence
gtgattcttgcttatggtgcctatg

SEQ ID NO: 197872 - DNA, 25 bp, Probe sequence
tcgaccgtgtcgaacaagtgatgga

SEQ ID NO: 197873 - DNA, 25 bp, Probe sequence
tcttgcttatggtgcctatgcgaag

SEQ ID NO: 197874 - DNA, 25 bp, Probe sequence
tagaacacccgaaaacctcaaacat

SEQ ID NO: 197875 - DNA, 25 bp, Probe sequence
tattttcaaatattagaacacccga

SEQ ID NO: 197876 - DNA, 25 bp, Probe sequence
ttagctaatactgaacaatatggtg

SEQ ID NO: 197877 - DNA, 25 bp, Probe sequence
ttcatttgatgaaagcgattagtga

SEQ ID NO: 197878 - DNA, 25 bp, Probe sequence
atatactttcaatcatacatgagca

SEQ ID NO: 197879 - DNA, 25 bp, Probe sequence
atactttcaatcatacatgagcaag

SEQ ID NO: 197880 - DNA, 25 bp, Probe sequence
atacatgagcaagaacaacccacgt

SEQ ID NO: 197881 - DNA, 25 bp, Probe sequence
atcaatcgatatatcacaagaggca

SEQ ID NO: 197882 - DNA, 25 bp, Probe sequence
atcatacatgagcaagaacaaccca

SEQ ID NO: 197883 - DNA, 25 bp, Probe sequence
atcgatatatcacaagaggcattag

SEQ ID NO: 197884 - DNA, 25 bp, Probe sequence
atgaacatcaatcgatatatcacaa

SEQ ID NO: 197885 - DNA, 25 bp, Probe sequence
atgagcaagaacaacccacgtacaa

SEQ ID NO: 197886 - DNA, 25 bp, Probe sequence
agaatatactttcaatcatacatga

SEQ ID NO: 197887 - DNA, 25 bp, Probe sequence
actttcaatcatacatgagcaagaa

SEQ ID NO: 197888 - DNA, 25 bp, Probe sequence
acatgagcaagaacaacccacgtac

SEQ ID NO: 197889 - DNA, 25 bp, Probe sequence
acaacccacgtacaaattggaatat

SEQ ID NO: 197890 - DNA, 25 bp, Probe sequence
aacatcaatcgatatatcacaagag

SEQ ID NO: 197891 - DNA, 25 bp, Probe sequence
aatcgatatatcacaagaggcatta

SEQ ID NO: 197892 - DNA, 25 bp, Probe sequence
aatcatacatgagcaagaacaaccc

SEQ ID NO: 197893 - DNA, 25 bp, Probe sequence
aatatactttcaatcatacatgagc

SEQ ID NO: 197894 - DNA, 25 bp, Probe sequence
catgagcaagaacaacccacgtaca

SEQ ID NO: 197895 - DNA, 25 bp, Probe sequence
catacatgagcaagaacaacccacg

SEQ ID NO: 197896 - DNA, 25 bp, Probe sequence
catcaatcgatatatcacaagaggc

SEQ ID NO: 197897 - DNA, 25 bp, Probe sequence
cgatatatcacaagaggcattagtg

SEQ ID NO: 197898 - DNA, 25 bp, Probe sequence
gaatatactttcaatcatacatgag

SEQ ID NO: 197899 - DNA, 25 bp, Probe sequence
gaacatcaatcgatatatcacaaga

SEQ ID NO: 197900 - DNA, 25 bp, Probe sequence
gagcaagaacaacccacgtacaaat

SEQ ID NO: 197901 - DNA, 25 bp, Probe sequence
gagaatatactttcaatcatacatg

SEQ ID NO: 197902 - DNA, 25 bp, Probe sequence
tgagcaagaacaacccacgtacaaa

SEQ ID NO: 197903 - DNA, 25 bp, Probe sequence
tgagaatatactttcaatcatacat

SEQ ID NO: 197904 - DNA, 25 bp, Probe sequence
tgaacatcaatcgatatatcacaag

SEQ ID NO: 197905 - DNA, 25 bp, Probe sequence
tcgatatatcacaagaggcattagt

SEQ ID NO: 197906 - DNA, 25 bp, Probe sequence
tcatacatgagcaagaacaacccac

SEQ ID NO: 197907 - DNA, 25 bp, Probe sequence
tcaatcgatatatcacaagaggcat

SEQ ID NO: 197908 - DNA, 25 bp, Probe sequence
tacatgagcaagaacaacccacgta

SEQ ID NO: 197909 - DNA, 25 bp, Probe sequence
tactttcaatcatacatgagcaaga

SEQ ID NO: 197910 - DNA, 25 bp, Probe sequence
tatatcacaagaggcattagtgaac

SEQ ID NO: 197911 - DNA, 25 bp, Probe sequence
tatactttcaatcatacatgagcaa

SEQ ID NO: 197912 - DNA, 25 bp, Probe sequence
attcatgggtcaaacccgacgcgct

SEQ ID NO: 197913 - DNA, 25 bp, Probe sequence
atacgtcatggatcaaatactcgaa

SEQ ID NO: 197914 - DNA, 25 bp, Probe sequence
atcttatctaatccattctatgttg

SEQ ID NO: 197915 - DNA, 25 bp, Probe sequence
atgtggtgcaccaatggcagctagt

SEQ ID NO: 197916 - DNA, 25 bp, Probe sequence
agattgattctgttatggtctacaa

SEQ ID NO: 197917 - DNA, 25 bp, Probe sequence
accggatagcaagcatgaactcatg

SEQ ID NO: 197918 - DNA, 25 bp, Probe sequence
acccgacgcgctcaagaaggctatt

SEQ ID NO: 197919 - DNA, 25 bp, Probe sequence
acgaaacaaatcgctgccctattac

SEQ ID NO: 197920 - DNA, 25 bp, Probe sequence
aaaccgactagcacgtaacacttct

SEQ ID NO: 197921 - DNA, 25 bp, Probe sequence
aaagcctttcagtattggttcagtg

SEQ ID NO: 197922 - DNA, 25 bp, Probe sequence
aacaggtatcgttcattgtccacaa

SEQ ID NO: 197923 - DNA, 25 bp, Probe sequence
aaccaagtcttagaacgtgtcaatc

SEQ ID NO: 197924 - DNA, 25 bp, Probe sequence
aatgtcgaattcttcagcttatctg

SEQ ID NO: 197925 - DNA, 25 bp, Probe sequence
cagcttatctgagcgtatggaagtc

SEQ ID NO: 197926 - DNA, 25 bp, Probe sequence
ctacaaattctagcgagtttttcag

SEQ ID NO: 197927 - DNA, 25 bp, Probe sequence
ctcaaacgctctttcttcaaatcta

SEQ ID NO: 197928 - DNA, 25 bp, Probe sequence
gcgaatgcactcaatcacaaaggat

SEQ ID NO: 197929 - DNA, 25 bp, Probe sequence
gcattatatcttacagtcattgacc

SEQ ID NO: 197930 - DNA, 25 bp, Probe sequence
gcattgaaccacgatatcgcttata

SEQ ID NO: 197931 - DNA, 25 bp, Probe sequence
gcacgtaacacttctgacttactca

SEQ ID NO: 197932 - DNA, 25 bp, Probe sequence
gaagaccttcatcgtcaaaatgtcg

SEQ ID NO: 197933 - DNA, 25 bp, Probe sequence
gaaccgaccagaactacaacgtttg

SEQ ID NO: 197934 - DNA, 25 bp, Probe sequence
gagtcatatgctaaaggccacggat

SEQ ID NO: 197935 - DNA, 25 bp, Probe sequence
gatgaagtcagcgggaaactccata

SEQ ID NO: 197936 - DNA, 25 bp, Probe sequence
gatgcgaacgaaggtcagattgatt

SEQ ID NO: 197937 - DNA, 25 bp, Probe sequence
gataatccggacctaacatctgcat

SEQ ID NO: 197938 - DNA, 25 bp, Probe sequence
gttctacgttacactaaaactcaat

SEQ ID NO: 197939 - DNA, 25 bp, Probe sequence
gtcattgaccgtattgatattcgta

SEQ ID NO: 197940 - DNA, 25 bp, Probe sequence
gtctttatttttgcctcaaacgctc

SEQ ID NO: 197941 - DNA, 25 bp, Probe sequence
gtcggtatctatgttcgtgtatcaa

SEQ ID NO: 197942 - DNA, 25 bp, Probe sequence
ggtaagcattcccctattattattc

SEQ ID NO: 197943 - DNA, 25 bp, Probe sequence
ggttcagtgacctatatcttatcta

SEQ ID NO: 197944 - DNA, 25 bp, Probe sequence
ggcagctagtaacacaacgaacaca

SEQ ID NO: 197945 - DNA, 25 bp, Probe sequence
ttattcttgcagtaacttccgaaac

SEQ ID NO: 197946 - DNA, 25 bp, Probe sequence
atgcacaagtgcttccaaatggtta

SEQ ID NO: 197947 - DNA, 25 bp, Probe sequence
agtacaataactgggaggatctcta

SEQ ID NO: 197948 - DNA, 25 bp, Probe sequence
agagcaattgaacagtcatcttgat

SEQ ID NO: 197949 - DNA, 25 bp, Probe sequence
agaatgggatgatgttccttccaaa

SEQ ID NO: 197950 - DNA, 25 bp, Probe sequence
aacttacctttgccagatgataagg

SEQ ID NO: 197951 - DNA, 25 bp, Probe sequence
aagaaaatgtccacatccttctgcc

SEQ ID NO: 197952 - DNA, 25 bp, Probe sequence
aagagttctttaattttctggacat

SEQ ID NO: 197953 - DNA, 25 bp, Probe sequence
caagcagatacgctcatatctttga

SEQ ID NO: 197954 - DNA, 25 bp, Probe sequence
cagagagtacaccaattaacgagag

SEQ ID NO: 197955 - DNA, 25 bp, Probe sequence
gctacgatgactatgattgttcaag

SEQ ID NO: 197956 - DNA, 25 bp, Probe sequence
gcatgcttagattgcactcacttct

SEQ ID NO: 197957 - DNA, 25 bp, Probe sequence
gaacagttagagcgtacagaagagt

SEQ ID NO: 197958 - DNA, 25 bp, Probe sequence
gaaagcccagaaatgacaagcagat

SEQ ID NO: 197959 - DNA, 25 bp, Probe sequence
gaggactatccgaaaataccaagag

SEQ ID NO: 197960 - DNA, 25 bp, Probe sequence
gatgtagagcttcaatggttcaaga

SEQ ID NO: 197961 - DNA, 25 bp, Probe sequence
gataaggttaacccaacacaatatg

SEQ ID NO: 197962 - DNA, 25 bp, Probe sequence
gatagtgaatacctctttccaagaa

SEQ ID NO: 197963 - DNA, 25 bp, Probe sequence
gatttatagattccatgcccatgcc

SEQ ID NO: 197964 - DNA, 25 bp, Probe sequence
tgcactcacttctgtaccagtaagc

SEQ ID NO: 197965 - DNA, 25 bp, Probe sequence
gtcatcttgataaattacccgaata

SEQ ID NO: 197966 - DNA, 25 bp, Probe sequence
gtggttgtccacatgcgaatgcatg

SEQ ID NO: 197967 - DNA, 25 bp, Probe sequence
ggagtgggataaagacgtttgggat

SEQ ID NO: 197968 - DNA, 25 bp, Probe sequence
ggataagtgaattgtgcaccttgaa

SEQ ID NO: 197969 - DNA, 25 bp, Probe sequence
ggatagcttttcctatgtaagtgat

SEQ ID NO: 197970 - DNA, 25 bp, Probe sequence
ggaggatctctatattggaaggact

SEQ ID NO: 197971 - DNA, 25 bp, Probe sequence
ggagcatatagttccaatatctaaa

SEQ ID NO: 197972 - DNA, 25 bp, Probe sequence
ggaatgcaaaaactgtctggattag

SEQ ID NO: 197973 - DNA, 25 bp, Probe sequence
tccacatccttctgccatagaatta

SEQ ID NO: 197974 - DNA, 25 bp, Probe sequence
tgccccagcatattgtgcagaaatt

SEQ ID NO: 197975 - DNA, 25 bp, Probe sequence
taatagccgtgttaaagagcgttta

SEQ ID NO: 197976 - DNA, 25 bp, Probe sequence
taagcaattcttaccacagcacgaa

SEQ ID NO: 197977 - DNA, 25 bp, Probe sequence
tagcaggtggttgtccacatgcgaa

SEQ ID NO: 197978 - DNA, 25 bp, Probe sequence
tacccgaatatatagctacgatgac

SEQ ID NO: 197979 - DNA, 25 bp, Probe sequence
ttaccacagcacgaagaacagttag

SEQ ID NO: 197980 - DNA, 25 bp, Probe sequence
attgttcttgaacgacatcaaccat

SEQ ID NO: 197981 - DNA, 25 bp, Probe sequence
atagctatcttatcgttgagaaggg

SEQ ID NO: 197982 - DNA, 25 bp, Probe sequence
ataacatcagtacggatattgtcaa

SEQ ID NO: 197983 - DNA, 25 bp, Probe sequence
atcctaagccaagtgtagactctgt

SEQ ID NO: 197984 - DNA, 25 bp, Probe sequence
agtaccaccactatattttcatcct

SEQ ID NO: 197985 - DNA, 25 bp, Probe sequence
accactatattttcatcctaagcca

SEQ ID NO: 197986 - DNA, 25 bp, Probe sequence
aaatgctcaaaaaagtaccaccact

SEQ ID NO: 197987 - DNA, 25 bp, Probe sequence
aaatctgcaacgagctttgggttta

SEQ ID NO: 197988 - DNA, 25 bp, Probe sequence
aaagtgattcaaacggatattctaa

SEQ ID NO: 197989 - DNA, 25 bp, Probe sequence
aaccaattccgacaggctttgaagc

SEQ ID NO: 197990 - DNA, 25 bp, Probe sequence
aaggactacaaaaagtatcgatctt

SEQ ID NO: 197991 - DNA, 25 bp, Probe sequence
aaggacattttaccaaagagctagt

SEQ ID NO: 197992 - DNA, 25 bp, Probe sequence
gcggtaaacccctctgagaatataa

SEQ ID NO: 197993 - DNA, 25 bp, Probe sequence
gaattacctttgaaagtcaggctaa

SEQ ID NO: 197994 - DNA, 25 bp, Probe sequence
gaatatcgtgttcttttcactaaaa

SEQ ID NO: 197995 - DNA, 25 bp, Probe sequence
gaatcacacgaatatcagtaaacaa

SEQ ID NO: 197996 - DNA, 25 bp, Probe sequence
gaagcatgcaaatgtcactaatatt

SEQ ID NO: 197997 - DNA, 25 bp, Probe sequence
gacaacgtaatagaaatcggatcag

SEQ ID NO: 197998 - DNA, 25 bp, Probe sequence
gacacgcaaaattttattacttcta

SEQ ID NO: 197999 - DNA, 25 bp, Probe sequence
gagctttgggtttactattaatggt

SEQ ID NO: 198000 - DNA, 25 bp, Probe sequence
gactctgtattgattgttcttgaac

SEQ ID NO: 198001 - DNA, 25 bp, Probe sequence
gagctagtcaaaatgagtcgatcag

SEQ ID NO: 198002 - DNA, 25 bp, Probe sequence
gagaagggatttgcgaaaagattgc

SEQ ID NO: 198003 - DNA, 25 bp, Probe sequence
gatggaggcttatgtcaagtgacta

SEQ ID NO: 198004 - DNA, 25 bp, Probe sequence
gtatcgatcttttgtttataagtgg

SEQ ID NO: 198005 - DNA, 25 bp, Probe sequence
gggtaaaccgtgaatatcgtgttct

SEQ ID NO: 198006 - DNA, 25 bp, Probe sequence
ggtaatattccttataacatcagta

SEQ ID NO: 198007 - DNA, 25 bp, Probe sequence
ggaacaatttctttctattttcaat

SEQ ID NO: 198008 - DNA, 25 bp, Probe sequence
ggctaaatatagctatcttatcgtt

SEQ ID NO: 198009 - DNA, 25 bp, Probe sequence
tgaacgacatcaaccattgatttca

SEQ ID NO: 198010 - DNA, 25 bp, Probe sequence
taaagaagcggtaaacccctctgag

SEQ ID NO: 198011 - DNA, 25 bp, Probe sequence
tttcactaaaaaccaattccgacag

SEQ ID NO: 198012 - DNA, 25 bp, Probe sequence
ttccgacaggctttgaagcatgcaa

SEQ ID NO: 198013 - DNA, 25 bp, Probe sequence
ttccttcccaaaacatataaactat

SEQ ID NO: 198014 - DNA, 25 bp, Probe sequence
attgtgacatcatactttactaaga

SEQ ID NO: 198015 - DNA, 25 bp, Probe sequence
ataagcctgttacctttgctaatgc

SEQ ID NO: 198016 - DNA, 25 bp, Probe sequence
agtctatctggcgtacaatttttcg

SEQ ID NO: 198017 - DNA, 25 bp, Probe sequence
agtagtgatgatgtttgcttatgtt

SEQ ID NO: 198018 - DNA, 25 bp, Probe sequence
agaaggagaaacaagcattagatca

SEQ ID NO: 198019 - DNA, 25 bp, Probe sequence
acaagtctatctggcgtacaatttt

SEQ ID NO: 198020 - DNA, 25 bp, Probe sequence
aaaagttatagtatgtttgttacat

SEQ ID NO: 198021 - DNA, 25 bp, Probe sequence
aaaattgtgacatcatactttacta

SEQ ID NO: 198022 - DNA, 25 bp, Probe sequence
aagcctgttacctttgctaatgctt

SEQ ID NO: 198023 - DNA, 25 bp, Probe sequence
catcatactttactaagaaactttt

SEQ ID NO: 198024 - DNA, 25 bp, Probe sequence
ctgttacctttgctaatgcttactt

SEQ ID NO: 198025 - DNA, 25 bp, Probe sequence
cctgttacctttgctaatgcttact

SEQ ID NO: 198026 - DNA, 25 bp, Probe sequence
cctttgctaatgcttacttaagaca

SEQ ID NO: 198027 - DNA, 25 bp, Probe sequence
gcctgttacctttgctaatgcttac

SEQ ID NO: 198028 - DNA, 25 bp, Probe sequence
gctaatgcttacttaagacaaaatg

SEQ ID NO: 198029 - DNA, 25 bp, Probe sequence
gacagcgttaacttaaataagcctg

SEQ ID NO: 198030 - DNA, 25 bp, Probe sequence
gatgatgacagcgttaacttaaata

SEQ ID NO: 198031 - DNA, 25 bp, Probe sequence
gttacctttgctaatgcttacttaa

SEQ ID NO: 198032 - DNA, 25 bp, Probe sequence
gtatgtttgttacattagtagtgat

SEQ ID NO: 198033 - DNA, 25 bp, Probe sequence
gtctatctggcgtacaatttttcgt

SEQ ID NO: 198034 - DNA, 25 bp, Probe sequence
gtgacatcatactttactaagaaac

SEQ ID NO: 198035 - DNA, 25 bp, Probe sequence
gtgatgatgtttgcttatgttgctt

SEQ ID NO: 198036 - DNA, 25 bp, Probe sequence
tggcgtacaatttttcgttagtcct

SEQ ID NO: 198037 - DNA, 25 bp, Probe sequence
tgtttgcttatgttgctttattagg

SEQ ID NO: 198038 - DNA, 25 bp, Probe sequence
tgatgtttgcttatgttgctttatt

SEQ ID NO: 198039 - DNA, 25 bp, Probe sequence
tcgttagtcctaaggtagatttatc

SEQ ID NO: 198040 - DNA, 25 bp, Probe sequence
tctggcgtacaatttttcgttagtc

SEQ ID NO: 198041 - DNA, 25 bp, Probe sequence
taagcctgttacctttgctaatgct

SEQ ID NO: 198042 - DNA, 25 bp, Probe sequence
taacaattattggagcgattttatt

SEQ ID NO: 198043 - DNA, 25 bp, Probe sequence
taaataagcctgttacctttgctaa

SEQ ID NO: 198044 - DNA, 25 bp, Probe sequence
tacaagtctatctggcgtacaattt

SEQ ID NO: 198045 - DNA, 25 bp, Probe sequence
tagtgatgatgtttgcttatgttgc

SEQ ID NO: 198046 - DNA, 25 bp, Probe sequence
tatctggcgtacaatttttcgttag

SEQ ID NO: 198047 - DNA, 25 bp, Probe sequence
tatatctgatgatgacagcgttaac

SEQ ID NO: 198048 - DNA, 25 bp, Probe sequence
attacctactccaatagaactacct

SEQ ID NO: 198049 - DNA, 25 bp, Probe sequence
atactgaaaaattacctactccaat

SEQ ID NO: 198050 - DNA, 25 bp, Probe sequence
ataaaggatttgctagactggtata

SEQ ID NO: 198051 - DNA, 25 bp, Probe sequence
atcaaaactgcaaaagcatctacaa

SEQ ID NO: 198052 - DNA, 25 bp, Probe sequence
atcatctaatcaaataatcaaaact

SEQ ID NO: 198053 - DNA, 25 bp, Probe sequence
atcgtaagccctttgttgcttgcga

SEQ ID NO: 198054 - DNA, 25 bp, Probe sequence
agactggtatagtagtgggtctgac

SEQ ID NO: 198055 - DNA, 25 bp, Probe sequence
agactttgaaattcgtcatcagcta

SEQ ID NO: 198056 - DNA, 25 bp, Probe sequence
agccaacatactagcgaaggaactt

SEQ ID NO: 198057 - DNA, 25 bp, Probe sequence
aagttaaggttcatggtaaagatag

SEQ ID NO: 198058 - DNA, 25 bp, Probe sequence
aaaaaacacagatggcagcatcagc

SEQ ID NO: 198059 - DNA, 25 bp, Probe sequence
aaaaagccaacatactagcgaagga

SEQ ID NO: 198060 - DNA, 25 bp, Probe sequence
aaaacaattagctatatcaacttta

SEQ ID NO: 198061 - DNA, 25 bp, Probe sequence
aaaagcatctacaaacgataatata

SEQ ID NO: 198062 - DNA, 25 bp, Probe sequence
aataacaatgaatgacggatccaca

SEQ ID NO: 198063 - DNA, 25 bp, Probe sequence
aattccttaggatctatgcgtataa

SEQ ID NO: 198064 - DNA, 25 bp, Probe sequence
caagcgataaaacgggtggttattg

SEQ ID NO: 198065 - DNA, 25 bp, Probe sequence
cctgttcccttatcatctaatcaaa

SEQ ID NO: 198066 - DNA, 25 bp, Probe sequence
gaatacaatactgaaaaaccaccta

SEQ ID NO: 198067 - DNA, 25 bp, Probe sequence
gaatgacggatccacatatcaaagt

SEQ ID NO: 198068 - DNA, 25 bp, Probe sequence
gaaaaaccacctataaatattgatg

SEQ ID NO: 198069 - DNA, 25 bp, Probe sequence
gaaattcgtcatcagctaactcaaa

SEQ ID NO: 198070 - DNA, 25 bp, Probe sequence
gacggatccacatatcaaagtgatt

SEQ ID NO: 198071 - DNA, 25 bp, Probe sequence
gtgaagttttagataattccttagg

SEQ ID NO: 198072 - DNA, 25 bp, Probe sequence
ggatttgctagactggtatagtagt

SEQ ID NO: 198073 - DNA, 25 bp, Probe sequence
ggatctatgcgtataaaaaacacag

SEQ ID NO: 198074 - DNA, 25 bp, Probe sequence
tgttcccttatcatctaatcaaata

SEQ ID NO: 198075 - DNA, 25 bp, Probe sequence
tcgtaagccctttgttgcttgcgac

SEQ ID NO: 198076 - DNA, 25 bp, Probe sequence
tcagctaactcaaatacatggatta

SEQ ID NO: 198077 - DNA, 25 bp, Probe sequence
tacatggattatatcgttcaagcga

SEQ ID NO: 198078 - DNA, 25 bp, Probe sequence
tacctactccaatagaactaccttt

SEQ ID NO: 198079 - DNA, 25 bp, Probe sequence
ttttccgagtccttattatagccct

SEQ ID NO: 198080 - DNA, 25 bp, Probe sequence
ttagctatatcaactttagactttg

SEQ ID NO: 198081 - DNA, 25 bp, Probe sequence
ttcgtcatcagctaactcaaataca

SEQ ID NO: 198082 - DNA, 25 bp, Probe sequence
atttcatttgaatgatggttcatca

SEQ ID NO: 198083 - DNA, 25 bp, Probe sequence
atttgatactggaacaggacaagct

SEQ ID NO: 198084 - DNA, 25 bp, Probe sequence
atatatacggtggagttacattagc

SEQ ID NO: 198085 - DNA, 25 bp, Probe sequence
ataagtcaaaatttagttctggatt

SEQ ID NO: 198086 - DNA, 25 bp, Probe sequence
atcatgctgtagatgtatatggtct

SEQ ID NO: 198087 - DNA, 25 bp, Probe sequence
atcatctttcgcatcaattagtttt

SEQ ID NO: 198088 - DNA, 25 bp, Probe sequence
agagaaatctagacgtattcctatt

SEQ ID NO: 198089 - DNA, 25 bp, Probe sequence
agctatccaattgaagaccaccaaa

SEQ ID NO: 198090 - DNA, 25 bp, Probe sequence
agctgaatttaagaacgttgatgat

SEQ ID NO: 198091 - DNA, 25 bp, Probe sequence
aaatctagacgtattcctattaatc

SEQ ID NO: 198092 - DNA, 25 bp, Probe sequence
aatcctgaaaataatcatctttcgc

SEQ ID NO: 198093 - DNA, 25 bp, Probe sequence
aataatcatctttcgcatcaattag

SEQ ID NO: 198094 - DNA, 25 bp, Probe sequence
caggacaagctgaaagtttcttaaa

SEQ ID NO: 198095 - DNA, 25 bp, Probe sequence
gaagaccaccaaagtattaatcctg

SEQ ID NO: 198096 - DNA, 25 bp, Probe sequence
gaacaggacaagctgaaagtttctt

SEQ ID NO: 198097 - DNA, 25 bp, Probe sequence
gaacatcaaactatatctactgaca

SEQ ID NO: 198098 - DNA, 25 bp, Probe sequence
gaaaataatcatctttcgcatcaat

SEQ ID NO: 198099 - DNA, 25 bp, Probe sequence
gaccaccaaagtattaatcctgaaa

SEQ ID NO: 198100 - DNA, 25 bp, Probe sequence
gatggttcatcattttcttatgact

SEQ ID NO: 198101 - DNA, 25 bp, Probe sequence
tctttgggttaatggagaacatcaa

SEQ ID NO: 198102 - DNA, 25 bp, Probe sequence
ggtggagttacattagcaggtgatt

SEQ ID NO: 198103 - DNA, 25 bp, Probe sequence
ggttcatcattttcttatgacttat

SEQ ID NO: 198104 - DNA, 25 bp, Probe sequence
ggagttacattagcaggtgattatt

SEQ ID NO: 198105 - DNA, 25 bp, Probe sequence
ggagaacatcaaactatatctactg

SEQ ID NO: 198106 - DNA, 25 bp, Probe sequence
tgtatatggtctaagttatagtgga

SEQ ID NO: 198107 - DNA, 25 bp, Probe sequence
tgttttattgttttgctattcgcaa

SEQ ID NO: 198108 - DNA, 25 bp, Probe sequence
tcatctttcgcatcaattagttttt

SEQ ID NO: 198109 - DNA, 25 bp, Probe sequence
tcaaactatatctactgacaaagta

SEQ ID NO: 198110 - DNA, 25 bp, Probe sequence
tacattagcaggtgattatttagag

SEQ ID NO: 198111 - DNA, 25 bp, Probe sequence
tacggtggagttacattagcaggtg

SEQ ID NO: 198112 - DNA, 25 bp, Probe sequence
tatccaattgaagaccaccaaagta

SEQ ID NO: 198113 - DNA, 25 bp, Probe sequence
ttagttctggatttaatgcaggaaa

SEQ ID NO: 198114 - DNA, 25 bp, Probe sequence
ttcatcattttcttatgacttattt

SEQ ID NO: 198115 - DNA, 25 bp, Probe sequence
ttgctattcgcaaaatcatatcgca

SEQ ID NO: 198116 - DNA, 25 bp, Probe sequence
ataacgctgcatggattggagacaa

SEQ ID NO: 198117 - DNA, 25 bp, Probe sequence
atgcagacacaggagcagttgttga

SEQ ID NO: 198118 - DNA, 25 bp, Probe sequence
aggtcaagcgacattaattactaat

SEQ ID NO: 198119 - DNA, 25 bp, Probe sequence
agtttagaggatttgacgcatcaag

SEQ ID NO: 198120 - DNA, 25 bp, Probe sequence
acgcattacacgttacaaccgagtg

SEQ ID NO: 198121 - DNA, 25 bp, Probe sequence
aaatacatttggtcgtgagtcttac

SEQ ID NO: 198122 - DNA, 25 bp, Probe sequence
aaaccagcaacttcagatattaatt

SEQ ID NO: 198123 - DNA, 25 bp, Probe sequence
aaaacctccaagatgacgttatcaa

SEQ ID NO: 198124 - DNA, 25 bp, Probe sequence
aacagtaacgttgctgagctctttg

SEQ ID NO: 198125 - DNA, 25 bp, Probe sequence
aacgtgctggtgtagatgcgaatta

SEQ ID NO: 198126 - DNA, 25 bp, Probe sequence
caaagatgatcaacgtgctggtgta

SEQ ID NO: 198127 - DNA, 25 bp, Probe sequence
cattatcaagattactctgttacag

SEQ ID NO: 198128 - DNA, 25 bp, Probe sequence
cgagtgtggatggtgtgcatgcgcc

SEQ ID NO: 198129 - DNA, 25 bp, Probe sequence
gcggctgacaaagcatttaacgcag

SEQ ID NO: 198130 - DNA, 25 bp, Probe sequence
gcatggaacgaagttggcgtcgagt

SEQ ID NO: 198131 - DNA, 25 bp, Probe sequence
gaaagtgcatgcggacaaatcgggt

SEQ ID NO: 198132 - DNA, 25 bp, Probe sequence
gaagcagcagcaactggcacaggta

SEQ ID NO: 198133 - DNA, 25 bp, Probe sequence
gaaaggattcacgcattacacgtta

SEQ ID NO: 198134 - DNA, 25 bp, Probe sequence
gacgtagtagcacatgagttaacac

SEQ ID NO: 198135 - DNA, 25 bp, Probe sequence
gagtcttacgataaccatggtagtc

SEQ ID NO: 198136 - DNA, 25 bp, Probe sequence
gagttaacacatggcgtgacacaag

SEQ ID NO: 198137 - DNA, 25 bp, Probe sequence
gatgaggatttcttgatgggtgaag

SEQ ID NO: 198138 - DNA, 25 bp, Probe sequence
gataacggtggtgtgcatacgaatt

SEQ ID NO: 198139 - DNA, 25 bp, Probe sequence
gatacgaatcacaaaccagcaactt

SEQ ID NO: 198140 - DNA, 25 bp, Probe sequence
gatttatggtgatggcgatggccgc

SEQ ID NO: 198141 - DNA, 25 bp, Probe sequence
gtgcatacgaattctggcattccaa

SEQ ID NO: 198142 - DNA, 25 bp, Probe sequence
gtgaagatgtttacacaccaggaaa

SEQ ID NO: 198143 - DNA, 25 bp, Probe sequence
gtgtgcatgcgcctgacaaagaagt

SEQ ID NO: 198144 - DNA, 25 bp, Probe sequence
ggtagtccaatagtctcattaacac

SEQ ID NO: 198145 - DNA, 25 bp, Probe sequence
ggccgcacgtttacaaatttatcag

SEQ ID NO: 198146 - DNA, 25 bp, Probe sequence
tgatggcgatggccgcacgtttaca

SEQ ID NO: 198147 - DNA, 25 bp, Probe sequence
tgacacctgcagcactagcgagtga

SEQ ID NO: 198148 - DNA, 25 bp, Probe sequence
tgctgagctctttgacacctgcagc

SEQ ID NO: 198149 - DNA, 25 bp, Probe sequence
taatcaacggtgatactgatgcgaa

SEQ ID NO: 198150 - DNA, 25 bp, Probe sequence
atttttcttttcaggatcgttagat

SEQ ID NO: 198151 - DNA, 25 bp, Probe sequence
atatgaagcggaaccgccgttattt

SEQ ID NO: 198152 - DNA, 25 bp, Probe sequence
atagaatttttcatagccatttttt

SEQ ID NO: 198153 - DNA, 25 bp, Probe sequence
atagccattttttaaaagagcatga

SEQ ID NO: 198154 - DNA, 25 bp, Probe sequence
atggggatagaatttttcatagcca

SEQ ID NO: 198155 - DNA, 25 bp, Probe sequence
aaatgaatatgaagcggaaccgccg

SEQ ID NO: 198156 - DNA, 25 bp, Probe sequence
aaaatgaatatgaagcggaaccgcc

SEQ ID NO: 198157 - DNA, 25 bp, Probe sequence
aacaaattagcattggctatgaaga

SEQ ID NO: 198158 - DNA, 25 bp, Probe sequence
aagaacacttggacaaaaatgaata

SEQ ID NO: 198159 - DNA, 25 bp, Probe sequence
aatgaatatgaagcggaaccgccgt

SEQ ID NO: 198160 - DNA, 25 bp, Probe sequence
gccgttatttttcttttcaggatcg

SEQ ID NO: 198161 - DNA, 25 bp, Probe sequence
gccattttttaaaagagcatgaagt

SEQ ID NO: 198162 - DNA, 25 bp, Probe sequence
gcattggctatgaagaaatctatgg

SEQ ID NO: 198163 - DNA, 25 bp, Probe sequence
gaatatgaagcggaaccgccgttat

SEQ ID NO: 198164 - DNA, 25 bp, Probe sequence
gaaaaagaacacttggacaaaaatg

SEQ ID NO: 198165 - DNA, 25 bp, Probe sequence
gaaaaccgtcaatcaaataattgaa

SEQ ID NO: 198166 - DNA, 25 bp, Probe sequence
gaaacaaattagcattggctatgaa

SEQ ID NO: 198167 - DNA, 25 bp, Probe sequence
gatagaatttttcatagccattttt

SEQ ID NO: 198168 - DNA, 25 bp, Probe sequence
gggatagaatttttcatagccattt

SEQ ID NO: 198169 - DNA, 25 bp, Probe sequence
ggggatagaatttttcatagccatt

SEQ ID NO: 198170 - DNA, 25 bp, Probe sequence
ggatagaatttttcatagccatttt

SEQ ID NO: 198171 - DNA, 25 bp, Probe sequence
ggctatgaagaaatctatggggata

SEQ ID NO: 198172 - DNA, 25 bp, Probe sequence
tgaatatgaagcggaaccgccgtta

SEQ ID NO: 198173 - DNA, 25 bp, Probe sequence
tttcttttcaggatcgttagattag

SEQ ID NO: 198174 - DNA, 25 bp, Probe sequence
tcatagccattttttaaaagagcat

SEQ ID NO: 198175 - DNA, 25 bp, Probe sequence
tagcattggctatgaagaaatctat

SEQ ID NO: 198176 - DNA, 25 bp, Probe sequence
tagaatttttcatagccatttttta

SEQ ID NO: 198177 - DNA, 25 bp, Probe sequence
tatgaagcggaaccgccgttatttt

SEQ ID NO: 198178 - DNA, 25 bp, Probe sequence
tatttttcttttcaggatcgttaga

SEQ ID NO: 198179 - DNA, 25 bp, Probe sequence
tttttcttttcaggatcgttagatt

SEQ ID NO: 198180 - DNA, 25 bp, Probe sequence
ttttcatagccattttttaaaagag

SEQ ID NO: 198181 - DNA, 25 bp, Probe sequence
ttatttttcttttcaggatcgttag

SEQ ID NO: 198182 - DNA, 25 bp, Probe sequence
ttagcattggctatgaagaaatcta

SEQ ID NO: 198183 - DNA, 25 bp, Probe sequence
ttggaaaaccgtcaatcaaataatt

SEQ ID NO: 198184 - DNA, 25 bp, Probe sequence
attctaggcggaatctttttgaaga

SEQ ID NO: 198185 - DNA, 25 bp, Probe sequence
attttcaatttgataccgatatttc

SEQ ID NO: 198186 - DNA, 25 bp, Probe sequence
attttaatattgattctaggcggaa

SEQ ID NO: 198187 - DNA, 25 bp, Probe sequence
atttgataccgatatttcttataca

SEQ ID NO: 198188 - DNA, 25 bp, Probe sequence
atttcttatacagatgaattgggta

SEQ ID NO: 198189 - DNA, 25 bp, Probe sequence
ataaaaatcctaagtcagtttctga

SEQ ID NO: 198190 - DNA, 25 bp, Probe sequence
ataaaaatataagcttcgctaattt

SEQ ID NO: 198191 - DNA, 25 bp, Probe sequence
atcatttacagctggtataagatct

SEQ ID NO: 198192 - DNA, 25 bp, Probe sequence
atggatggttattctattagtggtt

SEQ ID NO: 198193 - DNA, 25 bp, Probe sequence
agttatcatttacagctggtataag

SEQ ID NO: 198194 - DNA, 25 bp, Probe sequence
agagcaaaatacgtccaataaataa

SEQ ID NO: 198195 - DNA, 25 bp, Probe sequence
agctggtataagatctgttgatgat

SEQ ID NO: 198196 - DNA, 25 bp, Probe sequence
acccaatggatggttattctattag

SEQ ID NO: 198197 - DNA, 25 bp, Probe sequence
aaatcctaagtcagtttctgaaata

SEQ ID NO: 198198 - DNA, 25 bp, Probe sequence
aaagagcaaaatacgtccaataaat

SEQ ID NO: 198199 - DNA, 25 bp, Probe sequence
aaaaatatcttatgattgtaattat

SEQ ID NO: 198200 - DNA, 25 bp, Probe sequence
aaaagttatcatttacagctggtat

SEQ ID NO: 198201 - DNA, 25 bp, Probe sequence
aacgatttatatgaagtacaatgtg

SEQ ID NO: 198202 - DNA, 25 bp, Probe sequence
gctggtataagatctgttgatgatt

SEQ ID NO: 198203 - DNA, 25 bp, Probe sequence
gaagtacaatgtgaaaggttataaa

SEQ ID NO: 198204 - DNA, 25 bp, Probe sequence
gaaaacccaatggatggttattcta

SEQ ID NO: 198205 - DNA, 25 bp, Probe sequence
gatgattttcaatttgataccgata

SEQ ID NO: 198206 - DNA, 25 bp, Probe sequence
gatctgttgatgattttcaatttga

SEQ ID NO: 198207 - DNA, 25 bp, Probe sequence
gataccgatatttcttatacagatg

SEQ ID NO: 198208 - DNA, 25 bp, Probe sequence
gtataagatctgttgatgattttca

SEQ ID NO: 198209 - DNA, 25 bp, Probe sequence
ggttattctattagtggttatataa

SEQ ID NO: 198210 - DNA, 25 bp, Probe sequence
ggatggttattctattagtggttat

SEQ ID NO: 198211 - DNA, 25 bp, Probe sequence
taaaaatcctaagtcagtttctgaa

SEQ ID NO: 198212 - DNA, 25 bp, Probe sequence
tacagctggtataagatctgttgat

SEQ ID NO: 198213 - DNA, 25 bp, Probe sequence
taccgatatttcttatacagatgaa

SEQ ID NO: 198214 - DNA, 25 bp, Probe sequence
taggcggaatctttttgaagatgaa

SEQ ID NO: 198215 - DNA, 25 bp, Probe sequence
tataagcttcgctaattttaaagaa

SEQ ID NO: 198216 - DNA, 25 bp, Probe sequence
ttcaatttgataccgatatttctta

SEQ ID NO: 198217 - DNA, 25 bp, Probe sequence
ttgataccgatatttcttatacaga

SEQ ID NO: 198218 - DNA, 25 bp, Probe sequence
attcaacaggacgtaaacatacaca

SEQ ID NO: 198219 - DNA, 25 bp, Probe sequence
atacacacataactaaagctaagag

SEQ ID NO: 198220 - DNA, 25 bp, Probe sequence
ataactaaagctaagagtaatcaaa

SEQ ID NO: 198221 - DNA, 25 bp, Probe sequence
agtaatcaaaggtttacagttgttg

SEQ ID NO: 198222 - DNA, 25 bp, Probe sequence
agattcaacaggacgtaaacataca

SEQ ID NO: 198223 - DNA, 25 bp, Probe sequence
agagtaatcaaaggtttacagttgt

SEQ ID NO: 198224 - DNA, 25 bp, Probe sequence
agctaagagtaatcaaaggtttaca

SEQ ID NO: 198225 - DNA, 25 bp, Probe sequence
actaaagctaagagtaatcaaaggt

SEQ ID NO: 198226 - DNA, 25 bp, Probe sequence
acataactaaagctaagagtaatca

SEQ ID NO: 198227 - DNA, 25 bp, Probe sequence
acaggacgtaaacatacacacataa

SEQ ID NO: 198228 - DNA, 25 bp, Probe sequence
acacataactaaagctaagagtaat

SEQ ID NO: 198229 - DNA, 25 bp, Probe sequence
acacacataactaaagctaagagta

SEQ ID NO: 198230 - DNA, 25 bp, Probe sequence
aacaggacgtaaacatacacacata

SEQ ID NO: 198231 - DNA, 25 bp, Probe sequence
aactaaagctaagagtaatcaaagg

SEQ ID NO: 198232 - DNA, 25 bp, Probe sequence
aagagtaatcaaaggtttacagttg

SEQ ID NO: 198233 - DNA, 25 bp, Probe sequence
aagattcaacaggacgtaaacatac

SEQ ID NO: 198234 - DNA, 25 bp, Probe sequence
caacaggacgtaaacatacacacat

SEQ ID NO: 198235 - DNA, 25 bp, Probe sequence
cacacataactaaagctaagagtaa

SEQ ID NO: 198236 - DNA, 25 bp, Probe sequence
cacataactaaagctaagagtaatc

SEQ ID NO: 198237 - DNA, 25 bp, Probe sequence
caggacgtaaacatacacacataac

SEQ ID NO: 198238 - DNA, 25 bp, Probe sequence
catacacacataactaaagctaaga

SEQ ID NO: 198239 - DNA, 25 bp, Probe sequence
cataactaaagctaagagtaatcaa

SEQ ID NO: 198240 - DNA, 25 bp, Probe sequence
ctaagagtaatcaaaggtttacagt

SEQ ID NO: 198241 - DNA, 25 bp, Probe sequence
ctaaagctaagagtaatcaaaggtt

SEQ ID NO: 198242 - DNA, 25 bp, Probe sequence
gctaagagtaatcaaaggtttacag

SEQ ID NO: 198243 - DNA, 25 bp, Probe sequence
gagtaatcaaaggtttacagttgtt

SEQ ID NO: 198244 - DNA, 25 bp, Probe sequence
gattcaacaggacgtaaacatacac

SEQ ID NO: 198245 - DNA, 25 bp, Probe sequence
gtaatcaaaggtttacagttgttga

SEQ ID NO: 198246 - DNA, 25 bp, Probe sequence
tcaacaggacgtaaacatacacaca

SEQ ID NO: 198247 - DNA, 25 bp, Probe sequence
taagagtaatcaaaggtttacagtt

SEQ ID NO: 198248 - DNA, 25 bp, Probe sequence
taactaaagctaagagtaatcaaag

SEQ ID NO: 198249 - DNA, 25 bp, Probe sequence
taaagctaagagtaatcaaaggttt

SEQ ID NO: 198250 - DNA, 25 bp, Probe sequence
tacacacataactaaagctaagagt

SEQ ID NO: 198251 - DNA, 25 bp, Probe sequence
ttcaacaggacgtaaacatacacac

SEQ ID NO: 198252 - DNA, 25 bp, Probe sequence
attgctacttgttgtcgcattgcct

SEQ ID NO: 198253 - DNA, 25 bp, Probe sequence
ataaccgcattgctacttgttgtcg

SEQ ID NO: 198254 - DNA, 25 bp, Probe sequence
atcgaaaactcagacttattcttca

SEQ ID NO: 198255 - DNA, 25 bp, Probe sequence
atgggttcgacatctttattgttgg

SEQ ID NO: 198256 - DNA, 25 bp, Probe sequence
accgcattgctacttgttgtcgcat

SEQ ID NO: 198257 - DNA, 25 bp, Probe sequence
actgtcattattcggtataaccgca

SEQ ID NO: 198258 - DNA, 25 bp, Probe sequence
acttgttgtcgcattgcctatctat

SEQ ID NO: 198259 - DNA, 25 bp, Probe sequence
aaaagttaagacgattggatataga

SEQ ID NO: 198260 - DNA, 25 bp, Probe sequence
aactcagacttattcttcaaaggaa

SEQ ID NO: 198261 - DNA, 25 bp, Probe sequence
aaccgcattgctacttgttgtcgca

SEQ ID NO: 198262 - DNA, 25 bp, Probe sequence
aatatggatgggttcgacatcttta

SEQ ID NO: 198263 - DNA, 25 bp, Probe sequence
caaaggaaagtttgatagcgcagac

SEQ ID NO: 198264 - DNA, 25 bp, Probe sequence
cattgctacttgttgtcgcattgcc

SEQ ID NO: 198265 - DNA, 25 bp, Probe sequence
cttgttgtcgcattgcctatctata

SEQ ID NO: 198266 - DNA, 25 bp, Probe sequence
ctacttgttgtcgcattgcctatct

SEQ ID NO: 198267 - DNA, 25 bp, Probe sequence
ctcagacttattcttcaaaggaaag

SEQ ID NO: 198268 - DNA, 25 bp, Probe sequence
cggtataaccgcattgctacttgtt

SEQ ID NO: 198269 - DNA, 25 bp, Probe sequence
ccgcattgctacttgttgtcgcatt

SEQ ID NO: 198270 - DNA, 25 bp, Probe sequence
gcattgctacttgttgtcgcattgc

SEQ ID NO: 198271 - DNA, 25 bp, Probe sequence
gaaaactcagacttattcttcaaag

SEQ ID NO: 198272 - DNA, 25 bp, Probe sequence
gaggacaaattctatattgtattag

SEQ ID NO: 198273 - DNA, 25 bp, Probe sequence
gttgtcgcattgcctatctatacag

SEQ ID NO: 198274 - DNA, 25 bp, Probe sequence
gtataaccgcattgctacttgttgt

SEQ ID NO: 198275 - DNA, 25 bp, Probe sequence
gtcatcgaaaactcagacttattct

SEQ ID NO: 198276 - DNA, 25 bp, Probe sequence
gtcattattcggtataaccgcattg

SEQ ID NO: 198277 - DNA, 25 bp, Probe sequence
ggatgggttcgacatctttattgtt

SEQ ID NO: 198278 - DNA, 25 bp, Probe sequence
tgggttcgacatctttattgttgga

SEQ ID NO: 198279 - DNA, 25 bp, Probe sequence
tgttgtcgcattgcctatctataca

SEQ ID NO: 198280 - DNA, 25 bp, Probe sequence
ttcggtataaccgcattgctacttg

SEQ ID NO: 198281 - DNA, 25 bp, Probe sequence
tgctacttgttgtcgcattgcctat

SEQ ID NO: 198282 - DNA, 25 bp, Probe sequence
tacttgttgtcgcattgcctatcta

SEQ ID NO: 198283 - DNA, 25 bp, Probe sequence
ttgctacttgttgtcgcattgccta

SEQ ID NO: 198284 - DNA, 25 bp, Probe sequence
ttggaatactgtcattattcggtat

SEQ ID NO: 198285 - DNA, 25 bp, Probe sequence
ttgtcgcattgcctatctatacagt

SEQ ID NO: 198286 - DNA, 25 bp, Probe sequence
attgcatttatcattgtttaacaaa

SEQ ID NO: 198287 - DNA, 25 bp, Probe sequence
atgattggtagcggcattttccata

SEQ ID NO: 198288 - DNA, 25 bp, Probe sequence
atggcgtcatgattggtagcggcat

SEQ ID NO: 198289 - DNA, 25 bp, Probe sequence
atggcattgatggcgtcatgattgg

SEQ ID NO: 198290 - DNA, 25 bp, Probe sequence
agaaccacgcgaacacacaagcaag

SEQ ID NO: 198291 - DNA, 25 bp, Probe sequence
acgacaattcaagagtttgcgtaga

SEQ ID NO: 198292 - DNA, 25 bp, Probe sequence
aaagaaccacgcgaacacacaagca

SEQ ID NO: 198293 - DNA, 25 bp, Probe sequence
aaccacgcgaacacacaagcaagga

SEQ ID NO: 198294 - DNA, 25 bp, Probe sequence
aagagcgctagcgaacttcgacatc

SEQ ID NO: 198295 - DNA, 25 bp, Probe sequence
aatatggcattgatggcgtcatgat

SEQ ID NO: 198296 - DNA, 25 bp, Probe sequence
caattcaagagtttgcgtagattct

SEQ ID NO: 198297 - DNA, 25 bp, Probe sequence
caagagtttgcgtagattctttaaa

SEQ ID NO: 198298 - DNA, 25 bp, Probe sequence
cattttccataatccattcgctttt

SEQ ID NO: 198299 - DNA, 25 bp, Probe sequence
cgtggcataagagcgctagcgaact

SEQ ID NO: 198300 - DNA, 25 bp, Probe sequence
ccacgcgaacacacaagcaaggaac

SEQ ID NO: 198301 - DNA, 25 bp, Probe sequence
ccataatccattcgcttttgaaaaa

SEQ ID NO: 198302 - DNA, 25 bp, Probe sequence
gcgctagcgaacttcgacatcaatt

SEQ ID NO: 198303 - DNA, 25 bp, Probe sequence
gcgaacacacaagcaaggaactatt

SEQ ID NO: 198304 - DNA, 25 bp, Probe sequence
gcggcattttccataatccattcgc

SEQ ID NO: 198305 - DNA, 25 bp, Probe sequence
gctagcgaacttcgacatcaattga

SEQ ID NO: 198306 - DNA, 25 bp, Probe sequence
gcaaggaactattagatctgttgag

SEQ ID NO: 198307 - DNA, 25 bp, Probe sequence
gagcgctagcgaacttcgacatcaa

SEQ ID NO: 198308 - DNA, 25 bp, Probe sequence
gagattgcatttatcattgtttaac

SEQ ID NO: 198309 - DNA, 25 bp, Probe sequence
gatggcgtcatgattggtagcggca

SEQ ID NO: 198310 - DNA, 25 bp, Probe sequence
gatctgttgagattgcatttatcat

SEQ ID NO: 198311 - DNA, 25 bp, Probe sequence
gattggtagcggcattttccataat

SEQ ID NO: 198312 - DNA, 25 bp, Probe sequence
ggcataagagcgctagcgaacttcg

SEQ ID NO: 198313 - DNA, 25 bp, Probe sequence
ggcattgatggcgtcatgattggta

SEQ ID NO: 198314 - DNA, 25 bp, Probe sequence
ggcgtcatgattggtagcggcattt

SEQ ID NO: 198315 - DNA, 25 bp, Probe sequence
tggtagcggcattttccataatcca

SEQ ID NO: 198316 - DNA, 25 bp, Probe sequence
tgcgtggcataagagcgctagcgaa

SEQ ID NO: 198317 - DNA, 25 bp, Probe sequence
tagcggcattttccataatccattc

SEQ ID NO: 198318 - DNA, 25 bp, Probe sequence
ttttccataatccattcgcttttga

SEQ ID NO: 198319 - DNA, 25 bp, Probe sequence
ttccataatccattcgcttttgaaa

SEQ ID NO: 198320 - DNA, 25 bp, Probe sequence
atttcattcaatttacctgaaggag

SEQ ID NO: 198321 - DNA, 25 bp, Probe sequence
atactcacggtcacttagtttatct

SEQ ID NO: 198322 - DNA, 25 bp, Probe sequence
atcaatcagataaattcgagcagtt

SEQ ID NO: 198323 - DNA, 25 bp, Probe sequence
atcggtaaggatactcacggtcact

SEQ ID NO: 198324 - DNA, 25 bp, Probe sequence
atgtatttcaatcaatcagataaat

SEQ ID NO: 198325 - DNA, 25 bp, Probe sequence
aggtcctaatccacactataacagc

SEQ ID NO: 198326 - DNA, 25 bp, Probe sequence
aggatactcacggtcacttagttta

SEQ ID NO: 198327 - DNA, 25 bp, Probe sequence
acaggtcctaatccacactataaca

SEQ ID NO: 198328 - DNA, 25 bp, Probe sequence
actcacggtcacttagtttatctta

SEQ ID NO: 198329 - DNA, 25 bp, Probe sequence
acactataacagcaacccttcgaaa

SEQ ID NO: 198330 - DNA, 25 bp, Probe sequence
aaacaggtcctaatccacactataa

SEQ ID NO: 198331 - DNA, 25 bp, Probe sequence
aaaacaggtcctaatccacactata

SEQ ID NO: 198332 - DNA, 25 bp, Probe sequence
aacaggtcctaatccacactataac

SEQ ID NO: 198333 - DNA, 25 bp, Probe sequence
aaggatactcacggtcacttagttt

SEQ ID NO: 198334 - DNA, 25 bp, Probe sequence
aatccacactataacagcaaccctt

SEQ ID NO: 198335 - DNA, 25 bp, Probe sequence
aatcagataaattcgagcagttaaa

SEQ ID NO: 198336 - DNA, 25 bp, Probe sequence
aatattaggtatttcattcaattta

SEQ ID NO: 198337 - DNA, 25 bp, Probe sequence
cacactataacagcaacccttcgaa

SEQ ID NO: 198338 - DNA, 25 bp, Probe sequence
catttcatgacttgaacagtcgtgc

SEQ ID NO: 198339 - DNA, 25 bp, Probe sequence
cggtaaggatactcacggtcactta

SEQ ID NO: 198340 - DNA, 25 bp, Probe sequence
cctaatccacactataacagcaacc

SEQ ID NO: 198341 - DNA, 25 bp, Probe sequence
gaagaatttacatttcatgacttga

SEQ ID NO: 198342 - DNA, 25 bp, Probe sequence
gtaaggatactcacggtcacttagt

SEQ ID NO: 198343 - DNA, 25 bp, Probe sequence
gtcctaatccacactataacagcaa

SEQ ID NO: 198344 - DNA, 25 bp, Probe sequence
ggtcctaatccacactataacagca

SEQ ID NO: 198345 - DNA, 25 bp, Probe sequence
ggtcacttagtttatcttaaaacag

SEQ ID NO: 198346 - DNA, 25 bp, Probe sequence
ggtatttcattcaatttacctgaag

SEQ ID NO: 198347 - DNA, 25 bp, Probe sequence
ggatactcacggtcacttagtttat

SEQ ID NO: 198348 - DNA, 25 bp, Probe sequence
ttacctgaaggagaagaatttacat

SEQ ID NO: 198349 - DNA, 25 bp, Probe sequence
tcacggtcacttagtttatcttaaa

SEQ ID NO: 198350 - DNA, 25 bp, Probe sequence
taatccacactataacagcaaccct

SEQ ID NO: 198351 - DNA, 25 bp, Probe sequence
tactcacggtcacttagtttatctt

SEQ ID NO: 198352 - DNA, 25 bp, Probe sequence
tatcttaaaacaggtcctaatccac

SEQ ID NO: 198353 - DNA, 25 bp, Probe sequence
tttacatttcatgacttgaacagtc

SEQ ID NO: 198354 - DNA, 25 bp, Probe sequence
attcgtgaagatggcgtagacgctt

SEQ ID NO: 198355 - DNA, 25 bp, Probe sequence
atggcgtagacgctttttattatgt

SEQ ID NO: 198356 - DNA, 25 bp, Probe sequence
aggtattagtgaatacctatctcta

SEQ ID NO: 198357 - DNA, 25 bp, Probe sequence
agtctacgtcattcgtgaagatggc

SEQ ID NO: 198358 - DNA, 25 bp, Probe sequence
agatggcgtagacgctttttattat

SEQ ID NO: 198359 - DNA, 25 bp, Probe sequence
agaggtattagtgaatacctatctc

SEQ ID NO: 198360 - DNA, 25 bp, Probe sequence
acgtcattcgtgaagatggcgtaga

SEQ ID NO: 198361 - DNA, 25 bp, Probe sequence
acatcacaagaggtattagtgaata

SEQ ID NO: 198362 - DNA, 25 bp, Probe sequence
aagatggcgtagacgctttttatta

SEQ ID NO: 198363 - DNA, 25 bp, Probe sequence
ctacgtcattcgtgaagatggcgta

SEQ ID NO: 198364 - DNA, 25 bp, Probe sequence
catcacaagaggtattagtgaatac

SEQ ID NO: 198365 - DNA, 25 bp, Probe sequence
cattcgtgaagatggcgtagacgct

SEQ ID NO: 198366 - DNA, 25 bp, Probe sequence
cgtcattcgtgaagatggcgtagac

SEQ ID NO: 198367 - DNA, 25 bp, Probe sequence
cgtgaagatggcgtagacgcttttt

SEQ ID NO: 198368 - DNA, 25 bp, Probe sequence
gaagatggcgtagacgctttttatt

SEQ ID NO: 198369 - DNA, 25 bp, Probe sequence
gaggtattagtgaatacctatctct

SEQ ID NO: 198370 - DNA, 25 bp, Probe sequence
gatggcgtagacgctttttattatg

SEQ ID NO: 198371 - DNA, 25 bp, Probe sequence
gtctacgtcattcgtgaagatggcg

SEQ ID NO: 198372 - DNA, 25 bp, Probe sequence
gtcattcgtgaagatggcgtagacg

SEQ ID NO: 198373 - DNA, 25 bp, Probe sequence
gtgaagatggcgtagacgcttttta

SEQ ID NO: 198374 - DNA, 25 bp, Probe sequence
tggcgtagacgctttttattatgtg

SEQ ID NO: 198375 - DNA, 25 bp, Probe sequence
tctacgtcattcgtgaagatggcgt

SEQ ID NO: 198376 - DNA, 25 bp, Probe sequence
tgaagatggcgtagacgctttttat

SEQ ID NO: 198377 - DNA, 25 bp, Probe sequence
tcgtgaagatggcgtagacgctttt

SEQ ID NO: 198378 - DNA, 25 bp, Probe sequence
tcattcgtgaagatggcgtagacgc

SEQ ID NO: 198379 - DNA, 25 bp, Probe sequence
tacatcacaagaggtattagtgaat

SEQ ID NO: 198380 - DNA, 25 bp, Probe sequence
tacgtcattcgtgaagatggcgtag

SEQ ID NO: 198381 - DNA, 25 bp, Probe sequence
ttcgtgaagatggcgtagacgcttt

SEQ ID NO: 198382 - DNA, 25 bp, Probe sequence
atggtgcttatgcgaagcggccagt

SEQ ID NO: 198383 - DNA, 25 bp, Probe sequence
agaacgtgtcgaacaagtaatggaa

SEQ ID NO: 198384 - DNA, 25 bp, Probe sequence
agaacgatacggtgctgtatatctt

SEQ ID NO: 198385 - DNA, 25 bp, Probe sequence
agcaattagcgaaagtgacacagtg

SEQ ID NO: 198386 - DNA, 25 bp, Probe sequence
acacagaagctatatttagcaagga

SEQ ID NO: 198387 - DNA, 25 bp, Probe sequence
aaatgaaatcatgcacccactcaac

SEQ ID NO: 198388 - DNA, 25 bp, Probe sequence
aaaaagctcattaatccagccacaa

SEQ ID NO: 198389 - DNA, 25 bp, Probe sequence
aaaatacgatatacacagaagctat

SEQ ID NO: 198390 - DNA, 25 bp, Probe sequence
aagctcattaatccagccacaaatg

SEQ ID NO: 198391 - DNA, 25 bp, Probe sequence
aagaaccttatgataaacacacaga

SEQ ID NO: 198392 - DNA, 25 bp, Probe sequence
cacacagacatccacttgatgaaag

SEQ ID NO: 198393 - DNA, 25 bp, Probe sequence
ctaatattaaaacaccagagaacct

SEQ ID NO: 198394 - DNA, 25 bp, Probe sequence
catccacttgatgaaagcaattagc

SEQ ID NO: 198395 - DNA, 25 bp, Probe sequence
cttatgcgaagcggccagttgttgt

SEQ ID NO: 198396 - DNA, 25 bp, Probe sequence
ctattctctaatattaaaacaccag

SEQ ID NO: 198397 - DNA, 25 bp, Probe sequence
cctcaatcaattagcgaattcagaa

SEQ ID NO: 198398 - DNA, 25 bp, Probe sequence
ccagttgttgtagaacgtgtcgaac

SEQ ID NO: 198399 - DNA, 25 bp, Probe sequence
gcggccagttgttgtagaacgtgtc

SEQ ID NO: 198400 - DNA, 25 bp, Probe sequence
gcttatggtgcttatgcgaagcggc

SEQ ID NO: 198401 - DNA, 25 bp, Probe sequence
gcaaggatgaaaaacaccgctattt

SEQ ID NO: 198402 - DNA, 25 bp, Probe sequence
gaattcagaacgatacggtgctgta

SEQ ID NO: 198403 - DNA, 25 bp, Probe sequence
gaagcggccagttgttgtagaacgt

SEQ ID NO: 198404 - DNA, 25 bp, Probe sequence
gataaacacacagacatccacttga

SEQ ID NO: 198405 - DNA, 25 bp, Probe sequence
gattctagcttatggtgcttatgcg

SEQ ID NO: 198406 - DNA, 25 bp, Probe sequence
gtaatggaaatgttgaagcctcata

SEQ ID NO: 198407 - DNA, 25 bp, Probe sequence
gtgcttatgcgaagcggccagttgt

SEQ ID NO: 198408 - DNA, 25 bp, Probe sequence
tgcgaagcggccagttgttgtagaa

SEQ ID NO: 198409 - DNA, 25 bp, Probe sequence
ggccagttgttgtagaacgtgtcga

SEQ ID NO: 198410 - DNA, 25 bp, Probe sequence
tggaaatgttgaagcctcataaaaa

SEQ ID NO: 198411 - DNA, 25 bp, Probe sequence
tctagcttatggtgcttatgcgaag

SEQ ID NO: 198412 - DNA, 25 bp, Probe sequence
tcttgtaaatctattctctaatatt

SEQ ID NO: 198413 - DNA, 25 bp, Probe sequence
taatccagccacaaatgaaatcatg

SEQ ID NO: 198414 - DNA, 25 bp, Probe sequence
tagcgaattcagaacgatacggtgc

SEQ ID NO: 198415 - DNA, 25 bp, Probe sequence
tatgcgaagcggccagttgttgtag

SEQ ID NO: 198416 - DNA, 25 bp, Probe sequence
attacctcgaaagatgtcgctgcag

SEQ ID NO: 198417 - DNA, 25 bp, Probe sequence
aggtgaaagcactcgttaagtatat

SEQ ID NO: 198418 - DNA, 25 bp, Probe sequence
catagtttacctcaattaactcgaa

SEQ ID NO: 198419 - DNA, 25 bp, Probe sequence
aattctatagaaacttctctcaatt

SEQ ID NO: 198420 - DNA, 25 bp, Probe sequence
ctccgtacctttgacagatattcga

SEQ ID NO: 198421 - DNA, 25 bp, Probe sequence
cgaatgtggcaaacagtgactactg

SEQ ID NO: 198422 - DNA, 25 bp, Probe sequence
gaatttatatacggtgagtggctca

SEQ ID NO: 198423 - DNA, 25 bp, Probe sequence
gaaaaggctatcggggagagtgtga

SEQ ID NO: 198424 - DNA, 25 bp, Probe sequence
gagcaattaaggattctttgccaga

SEQ ID NO: 198425 - DNA, 25 bp, Probe sequence
gagtatatctatttggttcagcagt

SEQ ID NO: 198426 - DNA, 25 bp, Probe sequence
gatcctgatttggctattgttttag

SEQ ID NO: 198427 - DNA, 25 bp, Probe sequence
gtgactactggtgaaattacctcga

SEQ ID NO: 198428 - DNA, 25 bp, Probe sequence
gtatttctctatttggtcctgattc

SEQ ID NO: 198429 - DNA, 25 bp, Probe sequence
gtagatgttctagtcgtcgtgaatc

SEQ ID NO: 198430 - DNA, 25 bp, Probe sequence
gtaatgtaattttaaccctagctcg

SEQ ID NO: 198431 - DNA, 25 bp, Probe sequence
gtaactttactggatatagctagaa

SEQ ID NO: 198432 - DNA, 25 bp, Probe sequence
gtcgtcgtgaatcatagtttacctc

SEQ ID NO: 198433 - DNA, 25 bp, Probe sequence
gtcgctgcagaatgggctatacctc

SEQ ID NO: 198434 - DNA, 25 bp, Probe sequence
gtgagtggctcaggggtgaatttga

SEQ ID NO: 198435 - DNA, 25 bp, Probe sequence
ggtggtttacgcattaacagcgatg

SEQ ID NO: 198436 - DNA, 25 bp, Probe sequence
ggattctgttagaccacttgaagtt

SEQ ID NO: 198437 - DNA, 25 bp, Probe sequence
ggagtgaagttgtcccttggcaata

SEQ ID NO: 198438 - DNA, 25 bp, Probe sequence
ggaaatacggattctgttagaccac

SEQ ID NO: 198439 - DNA, 25 bp, Probe sequence
ggacaaattcaggaaccaagctatg

SEQ ID NO: 198440 - DNA, 25 bp, Probe sequence
ggaaccaagctatgatcctgatttg

SEQ ID NO: 198441 - DNA, 25 bp, Probe sequence
ggaaaaataccaaatcaagcgattc

SEQ ID NO: 198442 - DNA, 25 bp, Probe sequence
tgggctatacctcttttacctaaag

SEQ ID NO: 198443 - DNA, 25 bp, Probe sequence
tggtcctgattcttcaagtatactt

SEQ ID NO: 198444 - DNA, 25 bp, Probe sequence
tgtcccttggcaatatcctccaaaa

SEQ ID NO: 198445 - DNA, 25 bp, Probe sequence
tctttgccagaactaattgagggga

SEQ ID NO: 198446 - DNA, 25 bp, Probe sequence
tcaagtatacttgtctccgtacctt

SEQ ID NO: 198447 - DNA, 25 bp, Probe sequence
taaccctagctcgaatgtggcaaac

SEQ ID NO: 198448 - DNA, 25 bp, Probe sequence
tacttgtctccgtacctttgacaga

SEQ ID NO: 198449 - DNA, 25 bp, Probe sequence
ttggttcagcagtaaatggtggttt

SEQ ID NO: 198450 - DNA, 25 bp, Probe sequence
actttgagcaagaggacgaccaaaa

SEQ ID NO: 198451 - DNA, 25 bp, Probe sequence
atgctaaacccagagctactcatga

SEQ ID NO: 198452 - DNA, 25 bp, Probe sequence
agaggacgaccaaaagcaagaaaat

SEQ ID NO: 198453 - DNA, 25 bp, Probe sequence
agcgtatatcgtccaattaataagt

SEQ ID NO: 198454 - DNA, 25 bp, Probe sequence
acccagagctactcatgagaggcga

SEQ ID NO: 198455 - DNA, 25 bp, Probe sequence
acacaatgatagcaactgttagaga

SEQ ID NO: 198456 - DNA, 25 bp, Probe sequence
aaagaagaactggagcattaatgct

SEQ ID NO: 198457 - DNA, 25 bp, Probe sequence
aaacccagagctactcatgagaggc

SEQ ID NO: 198458 - DNA, 25 bp, Probe sequence
aaaaagctcaagattgttaattata

SEQ ID NO: 198459 - DNA, 25 bp, Probe sequence
aaaagcgtatatcgtccaattaata

SEQ ID NO: 198460 - DNA, 25 bp, Probe sequence
cagaaggaacaaatacaagcacgaa

SEQ ID NO: 198461 - DNA, 25 bp, Probe sequence
ccagagctactcatgagaggcgatg

SEQ ID NO: 198462 - DNA, 25 bp, Probe sequence
gctaaacccagagctactcatgaga

SEQ ID NO: 198463 - DNA, 25 bp, Probe sequence
gctactcatgagaggcgatgaccaa

SEQ ID NO: 198464 - DNA, 25 bp, Probe sequence
gcattaatgctaaacccagagctac

SEQ ID NO: 198465 - DNA, 25 bp, Probe sequence
gcacgaaaaccgtaaatacaacgct

SEQ ID NO: 198466 - DNA, 25 bp, Probe sequence
gaacaaatacaagcacgaaaaccgt

SEQ ID NO: 198467 - DNA, 25 bp, Probe sequence
gaaaatgctttatcagaatattatt

SEQ ID NO: 198468 - DNA, 25 bp, Probe sequence
gagcattaatgctaaacccagagct

SEQ ID NO: 198469 - DNA, 25 bp, Probe sequence
gagctactcatgagaggcgatgacc

SEQ ID NO: 198470 - DNA, 25 bp, Probe sequence
gagcaagaggacgaccaaaagcaag

SEQ ID NO: 198471 - DNA, 25 bp, Probe sequence
gaggaaagtggagaagtaatagagg

SEQ ID NO: 198472 - DNA, 25 bp, Probe sequence
gatagcaactgttagagaaatagca

SEQ ID NO: 198473 - DNA, 25 bp, Probe sequence
gataggcggtaaaaagctcaagatt

SEQ ID NO: 198474 - DNA, 25 bp, Probe sequence
gtatatcgtccaattaataagtatg

SEQ ID NO: 198475 - DNA, 25 bp, Probe sequence
gtagataagctataccgtaaacaaa

SEQ ID NO: 198476 - DNA, 25 bp, Probe sequence
gtaaaagcgtatatcgtccaattaa

SEQ ID NO: 198477 - DNA, 25 bp, Probe sequence
gtaataacacaatgatagcaactgt

SEQ ID NO: 198478 - DNA, 25 bp, Probe sequence
gtctggtaactttgtaaaagcgtat

SEQ ID NO: 198479 - DNA, 25 bp, Probe sequence
ggcggtaaaaagctcaagattgtta

SEQ ID NO: 198480 - DNA, 25 bp, Probe sequence
tcatgagaggcgatgaccaaaaaca

SEQ ID NO: 198481 - DNA, 25 bp, Probe sequence
taatgctaaacccagagctactcat

SEQ ID NO: 198482 - DNA, 25 bp, Probe sequence
taaatacaacgcttaaaatcttaga

SEQ ID NO: 198483 - DNA, 25 bp, Probe sequence
tatgttagatatgataggcggtaaa

SEQ ID NO: 198484 - DNA, 25 bp, Probe sequence
atcaaatccatttaacacctagaga

SEQ ID NO: 198485 - DNA, 25 bp, Probe sequence
gtcacttgggacaatcaaatccatt

SEQ ID NO: 198486 - DNA, 25 bp, Probe sequence
aggcttgaagatattgtcacttggg

SEQ ID NO: 198487 - DNA, 25 bp, Probe sequence
agccgtatccattgtatttattact

SEQ ID NO: 198488 - DNA, 25 bp, Probe sequence
actttgagttgttagcagacttcgt

SEQ ID NO: 198489 - DNA, 25 bp, Probe sequence
aaagttgctgtacgagttcatggaa

SEQ ID NO: 198490 - DNA, 25 bp, Probe sequence
aaggatgggatgttgcgttcgttca

SEQ ID NO: 198491 - DNA, 25 bp, Probe sequence
aatgcttatgtatgagggtggttta

SEQ ID NO: 198492 - DNA, 25 bp, Probe sequence
aatacctatgttcatctttcagatc

SEQ ID NO: 198493 - DNA, 25 bp, Probe sequence
cacactcacgcaacgcagctaatta

SEQ ID NO: 198494 - DNA, 25 bp, Probe sequence
gcaaattattgatgcttgtcatacg

SEQ ID NO: 198495 - DNA, 25 bp, Probe sequence
gaacttatgtcactttatacagatt

SEQ ID NO: 198496 - DNA, 25 bp, Probe sequence
gagaggtgttattcttaatgatatt

SEQ ID NO: 198497 - DNA, 25 bp, Probe sequence
gagattaggtcacgcacatgttcag

SEQ ID NO: 198498 - DNA, 25 bp, Probe sequence
gagatatccttcagcatcaaatgta

SEQ ID NO: 198499 - DNA, 25 bp, Probe sequence
gagggtggtttaagaatcggtgaag

SEQ ID NO: 198500 - DNA, 25 bp, Probe sequence
gataatactggtaagtctcctaata

SEQ ID NO: 198501 - DNA, 25 bp, Probe sequence
gttggttgagatatccttcagcatc

SEQ ID NO: 198502 - DNA, 25 bp, Probe sequence
gttcatctttcagatcaggatatga

SEQ ID NO: 198503 - DNA, 25 bp, Probe sequence
gttcagacaacgttaaatacctatg

SEQ ID NO: 198504 - DNA, 25 bp, Probe sequence
gtagttatgagttttcttgattatt

SEQ ID NO: 198505 - DNA, 25 bp, Probe sequence
gtaccaaagtgttcttgatctagtt

SEQ ID NO: 198506 - DNA, 25 bp, Probe sequence
gtctcctaataccattaaggcatac

SEQ ID NO: 198507 - DNA, 25 bp, Probe sequence
gggatgttgcgttcgttcaaaagag

SEQ ID NO: 198508 - DNA, 25 bp, Probe sequence
ggtgaagtgttatcgcttaggcttg

SEQ ID NO: 198509 - DNA, 25 bp, Probe sequence
ggtcacgcacatgttcagacaacgt

SEQ ID NO: 198510 - DNA, 25 bp, Probe sequence
ggagaataagccgtatccattgtat

SEQ ID NO: 198511 - DNA, 25 bp, Probe sequence
ggactggaatagaatttacatcaca

SEQ ID NO: 198512 - DNA, 25 bp, Probe sequence
ggaattggagcatgattatgttttt

SEQ ID NO: 198513 - DNA, 25 bp, Probe sequence
tcacgcaacgcagctaattagggaa

SEQ ID NO: 198514 - DNA, 25 bp, Probe sequence
taaggcatactgctatcatttaaag

SEQ ID NO: 198515 - DNA, 25 bp, Probe sequence
tagcagacttcgtaggttggttgag

SEQ ID NO: 198516 - DNA, 25 bp, Probe sequence
ttacatcacatatgcttcgccacac

SEQ ID NO: 198517 - DNA, 25 bp, Probe sequence
ttcaaaggatttttacatcatgtta

SEQ ID NO: 198518 - DNA, 25 bp, Probe sequence
atgtccacttaagtaacaatacaat

SEQ ID NO: 198519 - DNA, 25 bp, Probe sequence
acgtctggtaacttcgtaaaggcat

SEQ ID NO: 198520 - DNA, 25 bp, Probe sequence
actggagtattaatgttaaaccctg

SEQ ID NO: 198521 - DNA, 25 bp, Probe sequence
acaggaacaagtctacaaacagtaa

SEQ ID NO: 198522 - DNA, 25 bp, Probe sequence
aaagctacaggaacaagtctacaaa

SEQ ID NO: 198523 - DNA, 25 bp, Probe sequence
aacaatacaatgatagctacaacaa

SEQ ID NO: 198524 - DNA, 25 bp, Probe sequence
aaccctgaactactaatgagaggcg

SEQ ID NO: 198525 - DNA, 25 bp, Probe sequence
aagaaaatgcattatctgattatta

SEQ ID NO: 198526 - DNA, 25 bp, Probe sequence
aaggcatatatagtgcaattaataa

SEQ ID NO: 198527 - DNA, 25 bp, Probe sequence
aatgttaaaccctgaactactaatg

SEQ ID NO: 198528 - DNA, 25 bp, Probe sequence
aatcgttaactatatcctagataat

SEQ ID NO: 198529 - DNA, 25 bp, Probe sequence
ctactaatgagaggcgacgaccaaa

SEQ ID NO: 198530 - DNA, 25 bp, Probe sequence
cctagataatgtccacttaagtaac

SEQ ID NO: 198531 - DNA, 25 bp, Probe sequence
gctacaggaacaagtctacaaacag

SEQ ID NO: 198532 - DNA, 25 bp, Probe sequence
gcattatctgattattattctttca

SEQ ID NO: 198533 - DNA, 25 bp, Probe sequence
gcaaaagctacaggaacaagtctac

SEQ ID NO: 198534 - DNA, 25 bp, Probe sequence
gaagtcatagaggtagacaagttat

SEQ ID NO: 198535 - DNA, 25 bp, Probe sequence
gaagaaagtggagaagtcatagagg

SEQ ID NO: 198536 - DNA, 25 bp, Probe sequence
gaactactaatgagaggcgacgacc

SEQ ID NO: 198537 - DNA, 25 bp, Probe sequence
gataatgtccacttaagtaacaata

SEQ ID NO: 198538 - DNA, 25 bp, Probe sequence
gatatgattggcggaaaaaaactta

SEQ ID NO: 198539 - DNA, 25 bp, Probe sequence
gttaaaccctgaactactaatgaga

SEQ ID NO: 198540 - DNA, 25 bp, Probe sequence
gtaacttcgtaaaggcatatatagt

SEQ ID NO: 198541 - DNA, 25 bp, Probe sequence
gtctacaaacagtaataacaacact

SEQ ID NO: 198542 - DNA, 25 bp, Probe sequence
gtctggtaacttcgtaaaggcatat

SEQ ID NO: 198543 - DNA, 25 bp, Probe sequence
taataacaacacttaaaatcttaga

SEQ ID NO: 198544 - DNA, 25 bp, Probe sequence
taatgagaggcgacgaccaaaaaca

SEQ ID NO: 198545 - DNA, 25 bp, Probe sequence
tacaatgatagctacaacaagagaa

SEQ ID NO: 198546 - DNA, 25 bp, Probe sequence
tagaggtagacaagttataccgtaa

SEQ ID NO: 198547 - DNA, 25 bp, Probe sequence
tatcctagataatgtccacttaagt

SEQ ID NO: 198548 - DNA, 25 bp, Probe sequence
tatgttagatatgattggcggaaaa

SEQ ID NO: 198549 - DNA, 25 bp, Probe sequence
tatatcctagataatgtccacttaa

SEQ ID NO: 198550 - DNA, 25 bp, Probe sequence
tattaatgttaaaccctgaactact

SEQ ID NO: 198551 - DNA, 25 bp, Probe sequence
ttaaaatcgttaactatatcctaga

SEQ ID NO: 198552 - DNA, 25 bp, Probe sequence
aggaaattcccacaatcgactaaag

SEQ ID NO: 198553 - DNA, 25 bp, Probe sequence
atgacccaagtacattttacactga

SEQ ID NO: 198554 - DNA, 25 bp, Probe sequence
atcggcttcatgattcaaagtggcg

SEQ ID NO: 198555 - DNA, 25 bp, Probe sequence
atcgcttaattggagccgttcttat

SEQ ID NO: 198556 - DNA, 25 bp, Probe sequence
agtctctgccattagaaaatccttc

SEQ ID NO: 198557 - DNA, 25 bp, Probe sequence
agtacccagaacacgtgatggccat

SEQ ID NO: 198558 - DNA, 25 bp, Probe sequence
agaaatatctttaccaccattccta

SEQ ID NO: 198559 - DNA, 25 bp, Probe sequence
agccgttcttatggacctacatgat

SEQ ID NO: 198560 - DNA, 25 bp, Probe sequence
agccctcatggcttcaatgttggaa

SEQ ID NO: 198561 - DNA, 25 bp, Probe sequence
acttaatgaccgatgtactctatat

SEQ ID NO: 198562 - DNA, 25 bp, Probe sequence
acacgtgatggccatttttcaccca

SEQ ID NO: 198563 - DNA, 25 bp, Probe sequence
aaatggctattatgagcgcagcttt

SEQ ID NO: 198564 - DNA, 25 bp, Probe sequence
aaaagattattcgcatcttccccaa

SEQ ID NO: 198565 - DNA, 25 bp, Probe sequence
aagtccttcgtttctagcttaacag

SEQ ID NO: 198566 - DNA, 25 bp, Probe sequence
caaaagcttgcgcatcattggatga

SEQ ID NO: 198567 - DNA, 25 bp, Probe sequence
cagatattaacttagcgcgtgaggc

SEQ ID NO: 198568 - DNA, 25 bp, Probe sequence
ccaatcaaacatcagccaatcgctt

SEQ ID NO: 198569 - DNA, 25 bp, Probe sequence
gcgcagctttacgacacgtgtaggc

SEQ ID NO: 198570 - DNA, 25 bp, Probe sequence
gaacctatggttaacgagtggcaga

SEQ ID NO: 198571 - DNA, 25 bp, Probe sequence
gaaaatccttcaccaacgtaagttg

SEQ ID NO: 198572 - DNA, 25 bp, Probe sequence
gacgcctttcaatataccgtacaag

SEQ ID NO: 198573 - DNA, 25 bp, Probe sequence
gagacctggacaacattttttgaat

SEQ ID NO: 198574 - DNA, 25 bp, Probe sequence
gagtggcagaatcgtttattatcag

SEQ ID NO: 198575 - DNA, 25 bp, Probe sequence
gatgatggattcgaagacgcctttc

SEQ ID NO: 198576 - DNA, 25 bp, Probe sequence
gatgcgcacaaaggattagtctctg

SEQ ID NO: 198577 - DNA, 25 bp, Probe sequence
gtatgtatcaggcgtttcaactcgt

SEQ ID NO: 198578 - DNA, 25 bp, Probe sequence
gtggcgaaagcgaagagacctggac

SEQ ID NO: 198579 - DNA, 25 bp, Probe sequence
ggaactcgttatttctgatgcgcac

SEQ ID NO: 198580 - DNA, 25 bp, Probe sequence
ggcaaagatgccaagttcacttcct

SEQ ID NO: 198581 - DNA, 25 bp, Probe sequence
ggcgaccgtgaaattatcggcttca

SEQ ID NO: 198582 - DNA, 25 bp, Probe sequence
tcgagtactctcaaaaagctgtcat

SEQ ID NO: 198583 - DNA, 25 bp, Probe sequence
tcaacgaaacgaaaaagccctcatg

SEQ ID NO: 198584 - DNA, 25 bp, Probe sequence
tcacccacagtgtttgaacgttatc

SEQ ID NO: 198585 - DNA, 25 bp, Probe sequence
ttgtggtaaatccgtctctaagtcc

SEQ ID NO: 198586 - DNA, 25 bp, Probe sequence
attgctatacacttttaagacctga

SEQ ID NO: 198587 - DNA, 25 bp, Probe sequence
attctaaagagattggttgttctga

SEQ ID NO: 198588 - DNA, 25 bp, Probe sequence
attatcttttattaaggaatattct

SEQ ID NO: 198589 - DNA, 25 bp, Probe sequence
atttacactcaataggaatgttacc

SEQ ID NO: 198590 - DNA, 25 bp, Probe sequence
atttgcatattgctatacactttta

SEQ ID NO: 198591 - DNA, 25 bp, Probe sequence
atattgctatacacttttaagacct

SEQ ID NO: 198592 - DNA, 25 bp, Probe sequence
atacacttttaagacctgatggaaa

SEQ ID NO: 198593 - DNA, 25 bp, Probe sequence
atgataccagttcatttgggtttat

SEQ ID NO: 198594 - DNA, 25 bp, Probe sequence
atgttacctaactatcaagacaaag

SEQ ID NO: 198595 - DNA, 25 bp, Probe sequence
aggatttgcatattgctatacactt

SEQ ID NO: 198596 - DNA, 25 bp, Probe sequence
aggtaatcctagagcttgccatgta

SEQ ID NO: 198597 - DNA, 25 bp, Probe sequence
agttcatttgggtttatagctaaag

SEQ ID NO: 198598 - DNA, 25 bp, Probe sequence
agagcttgccatgtatatgaaaaat

SEQ ID NO: 198599 - DNA, 25 bp, Probe sequence
accagttcatttgggtttatagcta

SEQ ID NO: 198600 - DNA, 25 bp, Probe sequence
aaattataggatttgcatattgcta

SEQ ID NO: 198601 - DNA, 25 bp, Probe sequence
aaaggtaatcctagagcttgccatg

SEQ ID NO: 198602 - DNA, 25 bp, Probe sequence
aaacaatgttttatttacactcaat

SEQ ID NO: 198603 - DNA, 25 bp, Probe sequence
aagacctgatggaaaaacaatgttt

SEQ ID NO: 198604 - DNA, 25 bp, Probe sequence
aagagattggttgttctgaaatgtt

SEQ ID NO: 198605 - DNA, 25 bp, Probe sequence
aaggatttcttaatgataccagttc

SEQ ID NO: 198606 - DNA, 25 bp, Probe sequence
aatgttttatttacactcaatagga

SEQ ID NO: 198607 - DNA, 25 bp, Probe sequence
aatcctagagcttgccatgtatatg

SEQ ID NO: 198608 - DNA, 25 bp, Probe sequence
gctatacacttttaagacctgatgg

SEQ ID NO: 198609 - DNA, 25 bp, Probe sequence
gcatattgctatacacttttaagac

SEQ ID NO: 198610 - DNA, 25 bp, Probe sequence
gataccagttcatttgggtttatag

SEQ ID NO: 198611 - DNA, 25 bp, Probe sequence
gattggttgttctgaaatgttttta

SEQ ID NO: 198612 - DNA, 25 bp, Probe sequence
gttctgaaatgtttttaataactga

SEQ ID NO: 198613 - DNA, 25 bp, Probe sequence
gtaatcctagagcttgccatgtata

SEQ ID NO: 198614 - DNA, 25 bp, Probe sequence
ggtaatcctagagcttgccatgtat

SEQ ID NO: 198615 - DNA, 25 bp, Probe sequence
ggttatggttcaaaattattatctt

SEQ ID NO: 198616 - DNA, 25 bp, Probe sequence
ggatttcttaatgataccagttcat

SEQ ID NO: 198617 - DNA, 25 bp, Probe sequence
ggaatgttacctaactatcaagaca

SEQ ID NO: 198618 - DNA, 25 bp, Probe sequence
tcctagagcttgccatgtatatgaa

SEQ ID NO: 198619 - DNA, 25 bp, Probe sequence
tcaagacaaaggttatggttcaaaa

SEQ ID NO: 198620 - DNA, 25 bp, Probe sequence
attgagcattactttgataatttca

SEQ ID NO: 198621 - DNA, 25 bp, Probe sequence
atactgattatcattatccaaaaac

SEQ ID NO: 198622 - DNA, 25 bp, Probe sequence
atccaagagcaataagggcatacca

SEQ ID NO: 198623 - DNA, 25 bp, Probe sequence
agtgatgaattatctatactaggtt

SEQ ID NO: 198624 - DNA, 25 bp, Probe sequence
agatgatgattttcctttgatgtta

SEQ ID NO: 198625 - DNA, 25 bp, Probe sequence
acgagatattgccagttttttaaga

SEQ ID NO: 198626 - DNA, 25 bp, Probe sequence
acaatgttcctattggatatggaca

SEQ ID NO: 198627 - DNA, 25 bp, Probe sequence
aaacattatacagagccttgggaag

SEQ ID NO: 198628 - DNA, 25 bp, Probe sequence
aacaccagaaatttattctactatg

SEQ ID NO: 198629 - DNA, 25 bp, Probe sequence
aatgcaacaacagtttttgagggta

SEQ ID NO: 198630 - DNA, 25 bp, Probe sequence
gccagttttttaagacaaatgcacg

SEQ ID NO: 198631 - DNA, 25 bp, Probe sequence
gcacggtttagattatacagatatt

SEQ ID NO: 198632 - DNA, 25 bp, Probe sequence
gaattattgaagatttgccagaaca

SEQ ID NO: 198633 - DNA, 25 bp, Probe sequence
gaagagtatatattgttgcgtgaaa

SEQ ID NO: 198634 - DNA, 25 bp, Probe sequence
gaacatgaattacacgagggcaaaa

SEQ ID NO: 198635 - DNA, 25 bp, Probe sequence
gacaaatgcacggtttagattatac

SEQ ID NO: 198636 - DNA, 25 bp, Probe sequence
gagggtaaaaagtgtttatgccata

SEQ ID NO: 198637 - DNA, 25 bp, Probe sequence
gagccttgggaagatgaagttttta

SEQ ID NO: 198638 - DNA, 25 bp, Probe sequence
gagatagtctatggtatggatcaat

SEQ ID NO: 198639 - DNA, 25 bp, Probe sequence
gagtattagaattttatggtggtag

SEQ ID NO: 198640 - DNA, 25 bp, Probe sequence
gatagtgtggcatatttagttaata

SEQ ID NO: 198641 - DNA, 25 bp, Probe sequence
gatatgatgataatgccacaaatgt

SEQ ID NO: 198642 - DNA, 25 bp, Probe sequence
gatttgccagaacatgaattacacg

SEQ ID NO: 198643 - DNA, 25 bp, Probe sequence
gttgcgtgaaactatttataatgat

SEQ ID NO: 198644 - DNA, 25 bp, Probe sequence
gtatggatcaatttataggagagcc

SEQ ID NO: 198645 - DNA, 25 bp, Probe sequence
gggcataccaaaaatctggttttag

SEQ ID NO: 198646 - DNA, 25 bp, Probe sequence
tgcagttattttagaccctcataaa

SEQ ID NO: 198647 - DNA, 25 bp, Probe sequence
tcggtagtggttatgatagtgtggc

SEQ ID NO: 198648 - DNA, 25 bp, Probe sequence
tagaccctcataaaaataatccaag

SEQ ID NO: 198649 - DNA, 25 bp, Probe sequence
tatgccataatgattttagttgtaa

SEQ ID NO: 198650 - DNA, 25 bp, Probe sequence
tattatcctattgaaactattgttt

SEQ ID NO: 198651 - DNA, 25 bp, Probe sequence
ttagttgtaatcatctattgttaga

SEQ ID NO: 198652 - DNA, 25 bp, Probe sequence
ttgattttggagattctggaattat

SEQ ID NO: 198653 - DNA, 25 bp, Probe sequence
ttgtgattttatatacttacttgaa

SEQ ID NO: 198654 - DNA, 25 bp, Probe sequence
attgcagagcagtggcaagtttcac

SEQ ID NO: 198655 - DNA, 25 bp, Probe sequence
atttagcgaccatattagtggttca

SEQ ID NO: 198656 - DNA, 25 bp, Probe sequence
atatttagcgaccatattagtggtt

SEQ ID NO: 198657 - DNA, 25 bp, Probe sequence
atctgaatttacaggaggaccgatt

SEQ ID NO: 198658 - DNA, 25 bp, Probe sequence
aggaggaccgattaaacgcatatgg

SEQ ID NO: 198659 - DNA, 25 bp, Probe sequence
agatatttagcgaccatattagtgg

SEQ ID NO: 198660 - DNA, 25 bp, Probe sequence
actggattacaaaatctgaatttac

SEQ ID NO: 198661 - DNA, 25 bp, Probe sequence
acaggaggaccgattaaacgcatat

SEQ ID NO: 198662 - DNA, 25 bp, Probe sequence
acaattgcagagcagtggcaagttt

SEQ ID NO: 198663 - DNA, 25 bp, Probe sequence
aaagatatttagcgaccatattagt

SEQ ID NO: 198664 - DNA, 25 bp, Probe sequence
aagatatttagcgaccatattagtg

SEQ ID NO: 198665 - DNA, 25 bp, Probe sequence
aatctgaatttacaggaggaccgat

SEQ ID NO: 198666 - DNA, 25 bp, Probe sequence
aattgcagagcagtggcaagtttca

SEQ ID NO: 198667 - DNA, 25 bp, Probe sequence
caattgcagagcagtggcaagtttc

SEQ ID NO: 198668 - DNA, 25 bp, Probe sequence
caggaggaccgattaaacgcatatg

SEQ ID NO: 198669 - DNA, 25 bp, Probe sequence
ctgaatttacaggaggaccgattaa

SEQ ID NO: 198670 - DNA, 25 bp, Probe sequence
gagactcgacagactaggacgtaat

SEQ ID NO: 198671 - DNA, 25 bp, Probe sequence
gaggaccgattaaacgcatatggtt

SEQ ID NO: 198672 - DNA, 25 bp, Probe sequence
gatatttagcgaccatattagtggt

SEQ ID NO: 198673 - DNA, 25 bp, Probe sequence
gttgtttggagactcgacagactag

SEQ ID NO: 198674 - DNA, 25 bp, Probe sequence
gtttggagactcgacagactaggac

SEQ ID NO: 198675 - DNA, 25 bp, Probe sequence
ggagactcgacagactaggacgtaa

SEQ ID NO: 198676 - DNA, 25 bp, Probe sequence
ggaggaccgattaaacgcatatggt

SEQ ID NO: 198677 - DNA, 25 bp, Probe sequence
tgttgtttggagactcgacagacta

SEQ ID NO: 198678 - DNA, 25 bp, Probe sequence
tgcagagcagtggcaagtttcacgt

SEQ ID NO: 198679 - DNA, 25 bp, Probe sequence
tctgaatttacaggaggaccgatta

SEQ ID NO: 198680 - DNA, 25 bp, Probe sequence
tacaggaggaccgattaaacgcata

SEQ ID NO: 198681 - DNA, 25 bp, Probe sequence
tatttagcgaccatattagtggttc

SEQ ID NO: 198682 - DNA, 25 bp, Probe sequence
tttggagactcgacagactaggacg

SEQ ID NO: 198683 - DNA, 25 bp, Probe sequence
ttacaggaggaccgattaaacgcat

SEQ ID NO: 198684 - DNA, 25 bp, Probe sequence
tttagcgaccatattagtggttcaa

SEQ ID NO: 198685 - DNA, 25 bp, Probe sequence
ttgcagagcagtggcaagtttcacg

SEQ ID NO: 198686 - DNA, 25 bp, Probe sequence
ttagcgaccatattagtggttcaaa

SEQ ID NO: 198687 - DNA, 25 bp, Probe sequence
atcctcgacatgcagaaattgaagt

SEQ ID NO: 198688 - DNA, 25 bp, Probe sequence
atggctatggcaaaaccctaacggt

SEQ ID NO: 198689 - DNA, 25 bp, Probe sequence
aggaactacatcaacacaaccgcct

SEQ ID NO: 198690 - DNA, 25 bp, Probe sequence
aggtgtaacaccagcagctacttca

SEQ ID NO: 198691 - DNA, 25 bp, Probe sequence
agaaggctattggacttatgatgaa

SEQ ID NO: 198692 - DNA, 25 bp, Probe sequence
acgcatattcaagtatttggtcctg

SEQ ID NO: 198693 - DNA, 25 bp, Probe sequence
acaaccgcctaaagcaccaatcagt

SEQ ID NO: 198694 - DNA, 25 bp, Probe sequence
gcaaaaccctaacggtaccatacat

SEQ ID NO: 198695 - DNA, 25 bp, Probe sequence
aacaacaaactatgattggtggact

SEQ ID NO: 198696 - DNA, 25 bp, Probe sequence
aacgtgggtttggtacacgcatatt

SEQ ID NO: 198697 - DNA, 25 bp, Probe sequence
aacggtaccatacatgcaacattac

SEQ ID NO: 198698 - DNA, 25 bp, Probe sequence
aaccctaacggtaccatacatgcaa

SEQ ID NO: 198699 - DNA, 25 bp, Probe sequence
aagaactagatttccgcgtacgtca

SEQ ID NO: 198700 - DNA, 25 bp, Probe sequence
aatcaaatattacacgcagccacac

SEQ ID NO: 198701 - DNA, 25 bp, Probe sequence
caaatattacacgcagccacacctt

SEQ ID NO: 198702 - DNA, 25 bp, Probe sequence
cagccacacctttcattttctggaa

SEQ ID NO: 198703 - DNA, 25 bp, Probe sequence
caggtggtggtaatcattatacgat

SEQ ID NO: 198704 - DNA, 25 bp, Probe sequence
cattgttacttttaggaactacatc

SEQ ID NO: 198705 - DNA, 25 bp, Probe sequence
ccgcctaaagcaccaatcagttttt

SEQ ID NO: 198706 - DNA, 25 bp, Probe sequence
gccacacctttcattttctggaaaa

SEQ ID NO: 198707 - DNA, 25 bp, Probe sequence
gaagtcattcttgaaaaatctcatt

SEQ ID NO: 198708 - DNA, 25 bp, Probe sequence
gaacaaaattgttttatcaacagca

SEQ ID NO: 198709 - DNA, 25 bp, Probe sequence
gaaaaagaacatcacgaacaaaatt

SEQ ID NO: 198710 - DNA, 25 bp, Probe sequence
gatgaaacctttactggaggtgtaa

SEQ ID NO: 198711 - DNA, 25 bp, Probe sequence
gattggtggacttgagttttatcaa

SEQ ID NO: 198712 - DNA, 25 bp, Probe sequence
gttaaaaatcctcgacatgcagaaa

SEQ ID NO: 198713 - DNA, 25 bp, Probe sequence
gtcaaattaggattacaggtggtgg

SEQ ID NO: 198714 - DNA, 25 bp, Probe sequence
gggtttggtacacgcatattcaagt

SEQ ID NO: 198715 - DNA, 25 bp, Probe sequence
ggatgaggatactatagaaggctat

SEQ ID NO: 198716 - DNA, 25 bp, Probe sequence
tacatgcaacattacaaacgtgggt

SEQ ID NO: 198717 - DNA, 25 bp, Probe sequence
tacttcatctgataagccttataaa

SEQ ID NO: 198718 - DNA, 25 bp, Probe sequence
tagatttccgcgtacgtcaaacttt

SEQ ID NO: 198719 - DNA, 25 bp, Probe sequence
tttggtaccaaggatgaggatacta

SEQ ID NO: 198720 - DNA, 25 bp, Probe sequence
ttcaagtatttggtcctgaaagttg

SEQ ID NO: 198721 - DNA, 25 bp, Probe sequence
atatgatatcaagccaggaacattt

SEQ ID NO: 198722 - DNA, 25 bp, Probe sequence
atagcgtatcatgcaggtatcaaat

SEQ ID NO: 198723 - DNA, 25 bp, Probe sequence
atcaagccaggaacatttaaatata

SEQ ID NO: 198724 - DNA, 25 bp, Probe sequence
atcgcaatacagttactacaatacg

SEQ ID NO: 198725 - DNA, 25 bp, Probe sequence
atggggaacacaatatatgatatca

SEQ ID NO: 198726 - DNA, 25 bp, Probe sequence
atggcgacaaggttattgactaata

SEQ ID NO: 198727 - DNA, 25 bp, Probe sequence
agaagagatggttgaagcagttgaa

SEQ ID NO: 198728 - DNA, 25 bp, Probe sequence
agcgtatcatgcaggtatcaaataa

SEQ ID NO: 198729 - DNA, 25 bp, Probe sequence
agcgatagcgtatcatgcaggtatc

SEQ ID NO: 198730 - DNA, 25 bp, Probe sequence
accaacattgtgtatggaccgttac

SEQ ID NO: 198731 - DNA, 25 bp, Probe sequence
acgaaagaactagacaccaacattg

SEQ ID NO: 198732 - DNA, 25 bp, Probe sequence
acaactgagttaatggcgacaaggt

SEQ ID NO: 198733 - DNA, 25 bp, Probe sequence
aactttgttaaagcgatagcgtatc

SEQ ID NO: 198734 - DNA, 25 bp, Probe sequence
aacattgtgtatggaccgttacaaa

SEQ ID NO: 198735 - DNA, 25 bp, Probe sequence
aatacagttactacaatacgaaaga

SEQ ID NO: 198736 - DNA, 25 bp, Probe sequence
caaataggggatgcttgtcacatgc

SEQ ID NO: 198737 - DNA, 25 bp, Probe sequence
catgcatcgcaatacagttactaca

SEQ ID NO: 198738 - DNA, 25 bp, Probe sequence
gcttgtcacatgcatcgcaatacag

SEQ ID NO: 198739 - DNA, 25 bp, Probe sequence
gacaccaacattgtgtatggaccgt

SEQ ID NO: 198740 - DNA, 25 bp, Probe sequence
gaccgttacaaaaaggagagccagt

SEQ ID NO: 198741 - DNA, 25 bp, Probe sequence
gagaatggagatacttaacccaacg

SEQ ID NO: 198742 - DNA, 25 bp, Probe sequence
gagtacttaaagttacctgaagatc

SEQ ID NO: 198743 - DNA, 25 bp, Probe sequence
gagttaatggcgacaaggttattga

SEQ ID NO: 198744 - DNA, 25 bp, Probe sequence
gatgttacgtaacttagaagagatg

SEQ ID NO: 198745 - DNA, 25 bp, Probe sequence
gttactacaatacgaaagaactttg

SEQ ID NO: 198746 - DNA, 25 bp, Probe sequence
gtcacatgcatcgcaatacagttac

SEQ ID NO: 198747 - DNA, 25 bp, Probe sequence
ggggatgcttgtcacatgcatcgca

SEQ ID NO: 198748 - DNA, 25 bp, Probe sequence
ggttgaagcagttgaaagtgagtac

SEQ ID NO: 198749 - DNA, 25 bp, Probe sequence
ggatgcttgtcacatgcatcgcaat

SEQ ID NO: 198750 - DNA, 25 bp, Probe sequence
ggagagccagttagaacaactgagt

SEQ ID NO: 198751 - DNA, 25 bp, Probe sequence
tggagatacttaacccaacgaaaga

SEQ ID NO: 198752 - DNA, 25 bp, Probe sequence
tgcatcgcaatacagttactacaat

SEQ ID NO: 198753 - DNA, 25 bp, Probe sequence
taaagttacctgaagatcataagaa

SEQ ID NO: 198754 - DNA, 25 bp, Probe sequence
ttgactaataagatgttacgtaact

SEQ ID NO: 198755 - DNA, 25 bp, Probe sequence
ctaggtaagtatgtaacggagcaag

SEQ ID NO: 198756 - DNA, 25 bp, Probe sequence
atattcttactagcaatgtatgagc

SEQ ID NO: 198757 - DNA, 25 bp, Probe sequence
atgatgatgtagaggtgccgagtga

SEQ ID NO: 198758 - DNA, 25 bp, Probe sequence
atgtagaggtgccgagtgattttga

SEQ ID NO: 198759 - DNA, 25 bp, Probe sequence
aggtgccgagtgattttgaaaaaat

SEQ ID NO: 198760 - DNA, 25 bp, Probe sequence
agaggtgccgagtgattttgaaaaa

SEQ ID NO: 198761 - DNA, 25 bp, Probe sequence
agactaatattcttactagcaatgt

SEQ ID NO: 198762 - DNA, 25 bp, Probe sequence
aaatcagagctgaagtttcatggta

SEQ ID NO: 198763 - DNA, 25 bp, Probe sequence
aagtatatattatgatgacggctaa

SEQ ID NO: 198764 - DNA, 25 bp, Probe sequence
aatgatgatgtagaggtgccgagtg

SEQ ID NO: 198765 - DNA, 25 bp, Probe sequence
aatcagagctgaagtttcatggtaa

SEQ ID NO: 198766 - DNA, 25 bp, Probe sequence
ctaatattcttactagcaatgtatg

SEQ ID NO: 198767 - DNA, 25 bp, Probe sequence
gcaatgtatgagctaggtaagtatg

SEQ ID NO: 198768 - DNA, 25 bp, Probe sequence
gcaagtatatattatgatgacggct

SEQ ID NO: 198769 - DNA, 25 bp, Probe sequence
gactaatattcttactagcaatgta

SEQ ID NO: 198770 - DNA, 25 bp, Probe sequence
gacggctaatgatgatgtagaggtg

SEQ ID NO: 198771 - DNA, 25 bp, Probe sequence
gaggtgccgagtgattttgaaaaaa

SEQ ID NO: 198772 - DNA, 25 bp, Probe sequence
gatgtagaggtgccgagtgattttg

SEQ ID NO: 198773 - DNA, 25 bp, Probe sequence
gatgatgtagaggtgccgagtgatt

SEQ ID NO: 198774 - DNA, 25 bp, Probe sequence
gatgacggctaatgatgatgtagag

SEQ ID NO: 198775 - DNA, 25 bp, Probe sequence
gatacaggagatgacaatgatgatt

SEQ ID NO: 198776 - DNA, 25 bp, Probe sequence
gtatgtaacggagcaagtatatatt

SEQ ID NO: 198777 - DNA, 25 bp, Probe sequence
gtatgagctaggtaagtatgtaacg

SEQ ID NO: 198778 - DNA, 25 bp, Probe sequence
gtagaggtgccgagtgattttgaaa

SEQ ID NO: 198779 - DNA, 25 bp, Probe sequence
gtaacggagcaagtatatattatga

SEQ ID NO: 198780 - DNA, 25 bp, Probe sequence
ggtaagtatgtaacggagcaagtat

SEQ ID NO: 198781 - DNA, 25 bp, Probe sequence
ggagatgacaatgatgattaaacaa

SEQ ID NO: 198782 - DNA, 25 bp, Probe sequence
tgtagaggtgccgagtgattttgaa

SEQ ID NO: 198783 - DNA, 25 bp, Probe sequence
tgatgtagaggtgccgagtgatttt

SEQ ID NO: 198784 - DNA, 25 bp, Probe sequence
tgagctaggtaagtatgtaacggag

SEQ ID NO: 198785 - DNA, 25 bp, Probe sequence
taatgatgatgtagaggtgccgagt

SEQ ID NO: 198786 - DNA, 25 bp, Probe sequence
tagaggtgccgagtgattttgaaaa

SEQ ID NO: 198787 - DNA, 25 bp, Probe sequence
tatgatgacggctaatgatgatgta

SEQ ID NO: 198788 - DNA, 25 bp, Probe sequence
tattcttactagcaatgtatgagct

SEQ ID NO: 198789 - DNA, 25 bp, Probe sequence
attctaaagtgaccttattcgaaag

SEQ ID NO: 198790 - DNA, 25 bp, Probe sequence
attgtttactacactaataattcta

SEQ ID NO: 198791 - DNA, 25 bp, Probe sequence
atatgagtcacaaaatacacctatt

SEQ ID NO: 198792 - DNA, 25 bp, Probe sequence
atacacctattgtttactacactaa

SEQ ID NO: 198793 - DNA, 25 bp, Probe sequence
ataattctaaagtgaccttattcga

SEQ ID NO: 198794 - DNA, 25 bp, Probe sequence
agtgaccttattcgaaagacctagt

SEQ ID NO: 198795 - DNA, 25 bp, Probe sequence
accttattcgaaagacctagtgaag

SEQ ID NO: 198796 - DNA, 25 bp, Probe sequence
acctattgtttactacactaataat

SEQ ID NO: 198797 - DNA, 25 bp, Probe sequence
acacctattgtttactacactaata

SEQ ID NO: 198798 - DNA, 25 bp, Probe sequence
aaatacacctattgtttactacact

SEQ ID NO: 198799 - DNA, 25 bp, Probe sequence
aagtgaccttattcgaaagacctag

SEQ ID NO: 198800 - DNA, 25 bp, Probe sequence
aatacacctattgtttactacacta

SEQ ID NO: 198801 - DNA, 25 bp, Probe sequence
aatatgagtcacaaaatacacctat

SEQ ID NO: 198802 - DNA, 25 bp, Probe sequence
caaaatacacctattgtttactaca

SEQ ID NO: 198803 - DNA, 25 bp, Probe sequence
cacaaaatacacctattgtttacta

SEQ ID NO: 198804 - DNA, 25 bp, Probe sequence
cacctattgtttactacactaataa

SEQ ID NO: 198805 - DNA, 25 bp, Probe sequence
cttattcgaaagacctagtgaagaa

SEQ ID NO: 198806 - DNA, 25 bp, Probe sequence
cctattgtttactacactaataatt

SEQ ID NO: 198807 - DNA, 25 bp, Probe sequence
gcgaaagagaaatatgagtcacaaa

SEQ ID NO: 198808 - DNA, 25 bp, Probe sequence
gaagaagtattaggttctttgttcg

SEQ ID NO: 198809 - DNA, 25 bp, Probe sequence
gaccttattcgaaagacctagtgaa

SEQ ID NO: 198810 - DNA, 25 bp, Probe sequence
gagtcacaaaatacacctattgttt

SEQ ID NO: 198811 - DNA, 25 bp, Probe sequence
gtttactacactaataattctaaag

SEQ ID NO: 198812 - DNA, 25 bp, Probe sequence
gtcacaaaatacacctattgtttac

SEQ ID NO: 198813 - DNA, 25 bp, Probe sequence
gtgaccttattcgaaagacctagtg

SEQ ID NO: 198814 - DNA, 25 bp, Probe sequence
tgaccttattcgaaagacctagtga

SEQ ID NO: 198815 - DNA, 25 bp, Probe sequence
tgagtcacaaaatacacctattgtt

SEQ ID NO: 198816 - DNA, 25 bp, Probe sequence
tcgaaagacctagtgaagaagtatt

SEQ ID NO: 198817 - DNA, 25 bp, Probe sequence
taattctaaagtgaccttattcgaa

SEQ ID NO: 198818 - DNA, 25 bp, Probe sequence
tctaaagtgaccttattcgaaagac

SEQ ID NO: 198819 - DNA, 25 bp, Probe sequence
taaagtgaccttattcgaaagacct

SEQ ID NO: 198820 - DNA, 25 bp, Probe sequence
tacacctattgtttactacactaat

SEQ ID NO: 198821 - DNA, 25 bp, Probe sequence
tatgagtcacaaaatacacctattg

SEQ ID NO: 198822 - DNA, 25 bp, Probe sequence
ttgtttactacactaataattctaa

SEQ ID NO: 198823 - DNA, 25 bp, Probe sequence
ataagtgctagtgcgtataacggta

SEQ ID NO: 198824 - DNA, 25 bp, Probe sequence
ataacggtaatgacacagaggggtt

SEQ ID NO: 198825 - DNA, 25 bp, Probe sequence
atccgttataagtgctagtgcgtat

SEQ ID NO: 198826 - DNA, 25 bp, Probe sequence
agggtttacctaatgctatgcaaga

SEQ ID NO: 198827 - DNA, 25 bp, Probe sequence
agtgctagtgcgtataacggtaatg

SEQ ID NO: 198828 - DNA, 25 bp, Probe sequence
agcacaagcgtttgatgaaatactt

SEQ ID NO: 198829 - DNA, 25 bp, Probe sequence
acttgagggtttacctaatgctatg

SEQ ID NO: 198830 - DNA, 25 bp, Probe sequence
aaaagagattgaagacgtgtataag

SEQ ID NO: 198831 - DNA, 25 bp, Probe sequence
aacaatccgttataagtgctagtgc

SEQ ID NO: 198832 - DNA, 25 bp, Probe sequence
aatacttgagggtttacctaatgct

SEQ ID NO: 198833 - DNA, 25 bp, Probe sequence
caatccgttataagtgctagtgcgt

SEQ ID NO: 198834 - DNA, 25 bp, Probe sequence
ctaatgctatgcaagatgcactcaa

SEQ ID NO: 198835 - DNA, 25 bp, Probe sequence
gctagtgcgtataacggtaatgaca

SEQ ID NO: 198836 - DNA, 25 bp, Probe sequence
gcagtagggattatgacgagtcaag

SEQ ID NO: 198837 - DNA, 25 bp, Probe sequence
gaagcagtagggattatgacgagtc

SEQ ID NO: 198838 - DNA, 25 bp, Probe sequence
gaacaatccgttataagtgctagtg

SEQ ID NO: 198839 - DNA, 25 bp, Probe sequence
gacacagaggggttactaaaagaga

SEQ ID NO: 198840 - DNA, 25 bp, Probe sequence
gacgtgtataagaaagcacaagcgt

SEQ ID NO: 198841 - DNA, 25 bp, Probe sequence
gacgagtcaagttgtctataaatat

SEQ ID NO: 198842 - DNA, 25 bp, Probe sequence
gatgaaatacttgagggtttaccta

SEQ ID NO: 198843 - DNA, 25 bp, Probe sequence
gagatatttatcttgatgaagcagt

SEQ ID NO: 198844 - DNA, 25 bp, Probe sequence
gagggtttacctaatgctatgcaag

SEQ ID NO: 198845 - DNA, 25 bp, Probe sequence
gatgcactcaaaggagatatttatc

SEQ ID NO: 198846 - DNA, 25 bp, Probe sequence
gatatttatcttgatgaagcagtag

SEQ ID NO: 198847 - DNA, 25 bp, Probe sequence
gttgtctataaatatgaggaggagc

SEQ ID NO: 198848 - DNA, 25 bp, Probe sequence
gtttacctaatgctatgcaagatgc

SEQ ID NO: 198849 - DNA, 25 bp, Probe sequence
gtataagaaagcacaagcgtttgat

SEQ ID NO: 198850 - DNA, 25 bp, Probe sequence
tgaataaccgtaaacaaatagaaca

SEQ ID NO: 198851 - DNA, 25 bp, Probe sequence
tgaggaggagcaggaaaatgactaa

SEQ ID NO: 198852 - DNA, 25 bp, Probe sequence
tgcgtataacggtaatgacacagag

SEQ ID NO: 198853 - DNA, 25 bp, Probe sequence
tgctatgcaagatgcactcaaagga

SEQ ID NO: 198854 - DNA, 25 bp, Probe sequence
taatgacacagaggggttactaaaa

SEQ ID NO: 198855 - DNA, 25 bp, Probe sequence
tacctaatgctatgcaagatgcact

SEQ ID NO: 198856 - DNA, 25 bp, Probe sequence
ttatgacgagtcaagttgtctataa

SEQ ID NO: 198857 - DNA, 25 bp, Probe sequence
attttaacaatcattggggcgattt

SEQ ID NO: 198858 - DNA, 25 bp, Probe sequence
atagcatctttgtaacattagtggt

SEQ ID NO: 198859 - DNA, 25 bp, Probe sequence
ataagccaatcacctttgctaatac

SEQ ID NO: 198860 - DNA, 25 bp, Probe sequence
atcacaacatcatattttacaaaga

SEQ ID NO: 198861 - DNA, 25 bp, Probe sequence
atcacctttgctaatacgtacttaa

SEQ ID NO: 198862 - DNA, 25 bp, Probe sequence
atctggtgtgcaatttttcgttaac

SEQ ID NO: 198863 - DNA, 25 bp, Probe sequence
atgatgtttgcatacgttgctttat

SEQ ID NO: 198864 - DNA, 25 bp, Probe sequence
aggacaatgtgaactttaataagcc

SEQ ID NO: 198865 - DNA, 25 bp, Probe sequence
actgacaaggacaatgtgaacttta

SEQ ID NO: 198866 - DNA, 25 bp, Probe sequence
acaggcattagatcaacggttgtct

SEQ ID NO: 198867 - DNA, 25 bp, Probe sequence
aaagttatagcatctttgtaacatt

SEQ ID NO: 198868 - DNA, 25 bp, Probe sequence
aagccaatcacctttgctaatacgt

SEQ ID NO: 198869 - DNA, 25 bp, Probe sequence
aatgttagttagtatctatttaata

SEQ ID NO: 198870 - DNA, 25 bp, Probe sequence
caatcacctttgctaatacgtactt

SEQ ID NO: 198871 - DNA, 25 bp, Probe sequence
catacgttgctttattaggtttgtt

SEQ ID NO: 198872 - DNA, 25 bp, Probe sequence
ctttgctaatacgtacttaagagaa

SEQ ID NO: 198873 - DNA, 25 bp, Probe sequence
gccaatcacctttgctaatacgtac

SEQ ID NO: 198874 - DNA, 25 bp, Probe sequence
gcatctttgtaacattagtggtgat

SEQ ID NO: 198875 - DNA, 25 bp, Probe sequence
gaattgtcgacaacggttgttattt

SEQ ID NO: 198876 - DNA, 25 bp, Probe sequence
gaactttaataagccaatcaccttt

SEQ ID NO: 198877 - DNA, 25 bp, Probe sequence
gaaaaacaggcattagatcaacggt

SEQ ID NO: 198878 - DNA, 25 bp, Probe sequence
gatcaacggttgtctagtattactg

SEQ ID NO: 198879 - DNA, 25 bp, Probe sequence
gtttgcatacgttgctttattaggt

SEQ ID NO: 198880 - DNA, 25 bp, Probe sequence
gtagaattgtcgacaacggttgtta

SEQ ID NO: 198881 - DNA, 25 bp, Probe sequence
gtctagtattactgacaaggacaat

SEQ ID NO: 198882 - DNA, 25 bp, Probe sequence
gtctatctggtgtgcaatttttcgt

SEQ ID NO: 198883 - DNA, 25 bp, Probe sequence
ggtgatgatgtttgcatacgttgct

SEQ ID NO: 198884 - DNA, 25 bp, Probe sequence
tggtgtgcaatttttcgttaaccct

SEQ ID NO: 198885 - DNA, 25 bp, Probe sequence
tggggcgattttattaatgttagtt

SEQ ID NO: 198886 - DNA, 25 bp, Probe sequence
tcaacggttgtctagtattactgac

SEQ ID NO: 198887 - DNA, 25 bp, Probe sequence
taaccctaaagtagaattgtcgaca

SEQ ID NO: 198888 - DNA, 25 bp, Probe sequence
tacaagtctatctggtgtgcaattt

SEQ ID NO: 198889 - DNA, 25 bp, Probe sequence
tagtggtgatgatgtttgcatacgt

SEQ ID NO: 198890 - DNA, 25 bp, Probe sequence
ttaataagccaatcacctttgctaa

SEQ ID NO: 198891 - DNA, 25 bp, Probe sequence
atttgcaacgtttatacaatcatcg

SEQ ID NO: 198892 - DNA, 25 bp, Probe sequence
atatgatttgcaacgtttatacaat

SEQ ID NO: 198893 - DNA, 25 bp, Probe sequence
atcgtaaaactcagtatgcttaatt

SEQ ID NO: 198894 - DNA, 25 bp, Probe sequence
agaaagagctaaatacgtccaataa

SEQ ID NO: 198895 - DNA, 25 bp, Probe sequence
acgtttatacaatcatcgtaaaact

SEQ ID NO: 198896 - DNA, 25 bp, Probe sequence
acagtcatatgatttgcaacgttta

SEQ ID NO: 198897 - DNA, 25 bp, Probe sequence
acaatcatcgtaaaactcagtatgc

SEQ ID NO: 198898 - DNA, 25 bp, Probe sequence
aaaactcagtatgcttaatttattt

SEQ ID NO: 198899 - DNA, 25 bp, Probe sequence
aaaaccaacagtcatatgatttgca

SEQ ID NO: 198900 - DNA, 25 bp, Probe sequence
aaaatgtttgtcaataagtccagtg

SEQ ID NO: 198901 - DNA, 25 bp, Probe sequence
aactcagtatgcttaatttatttaa

SEQ ID NO: 198902 - DNA, 25 bp, Probe sequence
aaccaacagtcatatgatttgcaac

SEQ ID NO: 198903 - DNA, 25 bp, Probe sequence
aagaaagagctaaatacgtccaata

SEQ ID NO: 198904 - DNA, 25 bp, Probe sequence
aatgtttgtcaataagtccagtgaa

SEQ ID NO: 198905 - DNA, 25 bp, Probe sequence
aatcatcgtaaaactcagtatgctt

SEQ ID NO: 198906 - DNA, 25 bp, Probe sequence
cagctggcataagatctattgatga

SEQ ID NO: 198907 - DNA, 25 bp, Probe sequence
cagtcatatgatttgcaacgtttat

SEQ ID NO: 198908 - DNA, 25 bp, Probe sequence
ccaacagtcatatgatttgcaacgt

SEQ ID NO: 198909 - DNA, 25 bp, Probe sequence
gctggcataagatctattgatgatt

SEQ ID NO: 198910 - DNA, 25 bp, Probe sequence
gcaacgtttatacaatcatcgtaaa

SEQ ID NO: 198911 - DNA, 25 bp, Probe sequence
gaaaaggagattgattttttgaata

SEQ ID NO: 198912 - DNA, 25 bp, Probe sequence
gactaatgttaaaaccaacagtcat

SEQ ID NO: 198913 - DNA, 25 bp, Probe sequence
gatttgcaacgtttatacaatcatc

SEQ ID NO: 198914 - DNA, 25 bp, Probe sequence
gttaaaaccaacagtcatatgattt

SEQ ID NO: 198915 - DNA, 25 bp, Probe sequence
gtttgtcaataagtccagtgaaaag

SEQ ID NO: 198916 - DNA, 25 bp, Probe sequence
gtttatacaatcatcgtaaaactca

SEQ ID NO: 198917 - DNA, 25 bp, Probe sequence
gtcatatgatttgcaacgtttatac

SEQ ID NO: 198918 - DNA, 25 bp, Probe sequence
tggcataagatctattgatgatttt

SEQ ID NO: 198919 - DNA, 25 bp, Probe sequence
tcatcgtaaaactcagtatgcttaa

SEQ ID NO: 198920 - DNA, 25 bp, Probe sequence
taaaaatataagctttactaattgt

SEQ ID NO: 198921 - DNA, 25 bp, Probe sequence
tacagctggcataagatctattgat

SEQ ID NO: 198922 - DNA, 25 bp, Probe sequence
tatacaatcatcgtaaaactcagta

SEQ ID NO: 198923 - DNA, 25 bp, Probe sequence
tttacagctggcataagatctattg

SEQ ID NO: 198924 - DNA, 25 bp, Probe sequence
ttgcaacgtttatacaatcatcgta

SEQ ID NO: 198925 - DNA, 25 bp, Probe sequence
atttgatacaggaacagggcaagct

SEQ ID NO: 198926 - DNA, 25 bp, Probe sequence
atcgtgctgttgatgtatacggcct

SEQ ID NO: 198927 - DNA, 25 bp, Probe sequence
atccaatcgaagaccatcaaaatat

SEQ ID NO: 198928 - DNA, 25 bp, Probe sequence
atgacggtacatcattctcttatga

SEQ ID NO: 198929 - DNA, 25 bp, Probe sequence
agagaagtctagatgtattcctatt

SEQ ID NO: 198930 - DNA, 25 bp, Probe sequence
agctatccaatcgaagaccatcaaa

SEQ ID NO: 198931 - DNA, 25 bp, Probe sequence
acaataatcgtctttcacatcaatt

SEQ ID NO: 198932 - DNA, 25 bp, Probe sequence
aaaaaattcaaaaatcgtgctgttg

SEQ ID NO: 198933 - DNA, 25 bp, Probe sequence
aagtctagatgtattcctattaatc

SEQ ID NO: 198934 - DNA, 25 bp, Probe sequence
aatcctgacaataatcgtctttcac

SEQ ID NO: 198935 - DNA, 25 bp, Probe sequence
aatcgtctttcacatcaattagttt

SEQ ID NO: 198936 - DNA, 25 bp, Probe sequence
cagggcaagctgaaagtttcctaaa

SEQ ID NO: 198937 - DNA, 25 bp, Probe sequence
cctgacaataatcgtctttcacatc

SEQ ID NO: 198938 - DNA, 25 bp, Probe sequence
gctgttgatgtatacggcctaagtt

SEQ ID NO: 198939 - DNA, 25 bp, Probe sequence
gaagaccatcaaaatattaatcctg

SEQ ID NO: 198940 - DNA, 25 bp, Probe sequence
gaacagggcaagctgaaagtttcct

SEQ ID NO: 198941 - DNA, 25 bp, Probe sequence
gacggtacatcattctcttatgact

SEQ ID NO: 198942 - DNA, 25 bp, Probe sequence
gaccatcaaaatattaatcctgaca

SEQ ID NO: 198943 - DNA, 25 bp, Probe sequence
gttgatgtatacggcctaagttata

SEQ ID NO: 198944 - DNA, 25 bp, Probe sequence
gttactttagcgggtgattatttag

SEQ ID NO: 198945 - DNA, 25 bp, Probe sequence
gtgctgttgatgtatacggcctaag

SEQ ID NO: 198946 - DNA, 25 bp, Probe sequence
ggtacatcattctcttatgacttat

SEQ ID NO: 198947 - DNA, 25 bp, Probe sequence
ggagttactttagcgggtgattatt

SEQ ID NO: 198948 - DNA, 25 bp, Probe sequence
ggaggagttactttagcgggtgatt

SEQ ID NO: 198949 - DNA, 25 bp, Probe sequence
ggcaagctgaaagtttcctaaaaat

SEQ ID NO: 198950 - DNA, 25 bp, Probe sequence
tgtacggaggagttactttagcggg

SEQ ID NO: 198951 - DNA, 25 bp, Probe sequence
tgtatacggcctaagttatagtgga

SEQ ID NO: 198952 - DNA, 25 bp, Probe sequence
tgttttattgttttgttattcacaa

SEQ ID NO: 198953 - DNA, 25 bp, Probe sequence
tcgtctttcacatcaattagttttt

SEQ ID NO: 198954 - DNA, 25 bp, Probe sequence
tacatcattctcttatgacttattt

SEQ ID NO: 198955 - DNA, 25 bp, Probe sequence
tactttagcgggtgattatttagag

SEQ ID NO: 198956 - DNA, 25 bp, Probe sequence
tatcatttcatttgaatgacggtac

SEQ ID NO: 198957 - DNA, 25 bp, Probe sequence
tttctggatttaatactgggaaaat

SEQ ID NO: 198958 - DNA, 25 bp, Probe sequence
ttgttattcacaaaatcatatcgca

SEQ ID NO: 198959 - DNA, 25 bp, Probe sequence
ataaaaaaggctatgcttccatttc

SEQ ID NO: 198960 - DNA, 25 bp, Probe sequence
aggcaagttgactaataatgaagat

SEQ ID NO: 198961 - DNA, 25 bp, Probe sequence
agtaactcgacaaagactacagact

SEQ ID NO: 198962 - DNA, 25 bp, Probe sequence
agcaaaaccagatttaattgttgta

SEQ ID NO: 198963 - DNA, 25 bp, Probe sequence
acaatcccatatacatacaataaat

SEQ ID NO: 198964 - DNA, 25 bp, Probe sequence
aaaggctatgcttccatttcaaaag

SEQ ID NO: 198965 - DNA, 25 bp, Probe sequence
aaagcaaaaccagatttaattgttg

SEQ ID NO: 198966 - DNA, 25 bp, Probe sequence
aaaccagatttaattgttgtagatg

SEQ ID NO: 198967 - DNA, 25 bp, Probe sequence
aaaaaggctatgcttccatttcaaa

SEQ ID NO: 198968 - DNA, 25 bp, Probe sequence
aaaaaaggctatgcttccatttcaa

SEQ ID NO: 198969 - DNA, 25 bp, Probe sequence
aaaaccagatttaattgttgtagat

SEQ ID NO: 198970 - DNA, 25 bp, Probe sequence
aaaaggctatgcttccatttcaaaa

SEQ ID NO: 198971 - DNA, 25 bp, Probe sequence
aacaatcccatatacatacaataaa

SEQ ID NO: 198972 - DNA, 25 bp, Probe sequence
aaccagatttaattgttgtagatgc

SEQ ID NO: 198973 - DNA, 25 bp, Probe sequence
aagcaaaaccagatttaattgttgt

SEQ ID NO: 198974 - DNA, 25 bp, Probe sequence
aagttgactaataatgaagataaag

SEQ ID NO: 198975 - DNA, 25 bp, Probe sequence
aaggctatgcttccatttcaaaaga

SEQ ID NO: 198976 - DNA, 25 bp, Probe sequence
caagttgactaataatgaagataaa

SEQ ID NO: 198977 - DNA, 25 bp, Probe sequence
caaaaccagatttaattgttgtaga

SEQ ID NO: 198978 - DNA, 25 bp, Probe sequence
caacaatcccatatacatacaataa

SEQ ID NO: 198979 - DNA, 25 bp, Probe sequence
ccaacaatcccatatacatacaata

SEQ ID NO: 198980 - DNA, 25 bp, Probe sequence
gccaacaatcccatatacatacaat

SEQ ID NO: 198981 - DNA, 25 bp, Probe sequence
gcaaaaccagatttaattgttgtag

SEQ ID NO: 198982 - DNA, 25 bp, Probe sequence
gcaagttgactaataatgaagataa

SEQ ID NO: 198983 - DNA, 25 bp, Probe sequence
gaagagtgggacgataaaactagaa

SEQ ID NO: 198984 - DNA, 25 bp, Probe sequence
gagtgggacgataaaactagaaaag

SEQ ID NO: 198985 - DNA, 25 bp, Probe sequence
gtaactcgacaaagactacagacta

SEQ ID NO: 198986 - DNA, 25 bp, Probe sequence
gtgggacgataaaactagaaaagat

SEQ ID NO: 198987 - DNA, 25 bp, Probe sequence
ggcaagttgactaataatgaagata

SEQ ID NO: 198988 - DNA, 25 bp, Probe sequence
tgggacgataaaactagaaaagata

SEQ ID NO: 198989 - DNA, 25 bp, Probe sequence
taactcgacaaagactacagactat

SEQ ID NO: 198990 - DNA, 25 bp, Probe sequence
taaaaaaggctatgcttccatttca

SEQ ID NO: 198991 - DNA, 25 bp, Probe sequence
taggcaagttgactaataatgaaga

SEQ ID NO: 198992 - DNA, 25 bp, Probe sequence
atttgatactgctgaagagctcgaa

SEQ ID NO: 198993 - DNA, 25 bp, Probe sequence
atattcatgtagtaaacggcactta

SEQ ID NO: 198994 - DNA, 25 bp, Probe sequence
atcaggataacgaacgagtggcaca

SEQ ID NO: 198995 - DNA, 25 bp, Probe sequence
atcgtgccaggttggcaaagcgtta

SEQ ID NO: 198996 - DNA, 25 bp, Probe sequence
atgacagataacgcacgcaaagaat

SEQ ID NO: 198997 - DNA, 25 bp, Probe sequence
acgaacgagtggcacatattcatgt

SEQ ID NO: 198998 - DNA, 25 bp, Probe sequence
aaaagacatttgatactgctgaaga

SEQ ID NO: 198999 - DNA, 25 bp, Probe sequence
aacggcacttattactttcatgggc

SEQ ID NO: 199000 - DNA, 25 bp, Probe sequence
aacgcacgcaaagaatacctaaatc

SEQ ID NO: 199001 - DNA, 25 bp, Probe sequence
aacgagtggcacatattcatgtagt

SEQ ID NO: 199002 - DNA, 25 bp, Probe sequence
aagcaacatggtttggaatacgagg

SEQ ID NO: 199003 - DNA, 25 bp, Probe sequence
cacttattactttcatgggcatatc

SEQ ID NO: 199004 - DNA, 25 bp, Probe sequence
catgggcatatcgtgccaggttggc

SEQ ID NO: 199005 - DNA, 25 bp, Probe sequence
gcatatcgtgccaggttggcaaagc

SEQ ID NO: 199006 - DNA, 25 bp, Probe sequence
ctttcatgggcatatcgtgccaggt

SEQ ID NO: 199007 - DNA, 25 bp, Probe sequence
ctgaagagctcgaaatatatataaa

SEQ ID NO: 199008 - DNA, 25 bp, Probe sequence
cggcacttattactttcatgggcat

SEQ ID NO: 199009 - DNA, 25 bp, Probe sequence
gccaggttggcaaagcgttaaaaag

SEQ ID NO: 199010 - DNA, 25 bp, Probe sequence
gcacgcaaagaatacctaaatcaat

SEQ ID NO: 199011 - DNA, 25 bp, Probe sequence
gaatacctaaatcaattctttggat

SEQ ID NO: 199012 - DNA, 25 bp, Probe sequence
gaacagaagcaactaactttatttt

SEQ ID NO: 199013 - DNA, 25 bp, Probe sequence
gacatttgatactgctgaagagctc

SEQ ID NO: 199014 - DNA, 25 bp, Probe sequence
gagatatctgtatcaggataacgaa

SEQ ID NO: 199015 - DNA, 25 bp, Probe sequence
gagtggcacatattcatgtagtaaa

SEQ ID NO: 199016 - DNA, 25 bp, Probe sequence
gataacgcacgcaaagaatacctaa

SEQ ID NO: 199017 - DNA, 25 bp, Probe sequence
gatactgctgaagagctcgaaatat

SEQ ID NO: 199018 - DNA, 25 bp, Probe sequence
gttggcaaagcgttaaaaagacatt

SEQ ID NO: 199019 - DNA, 25 bp, Probe sequence
ggataacgaacgagtggcacatatt

SEQ ID NO: 199020 - DNA, 25 bp, Probe sequence
ggaatacgaggaacagaagcaacta

SEQ ID NO: 199021 - DNA, 25 bp, Probe sequence
ggcacttattactttcatgggcata

SEQ ID NO: 199022 - DNA, 25 bp, Probe sequence
tgggcatatcgtgccaggttggcaa

SEQ ID NO: 199023 - DNA, 25 bp, Probe sequence
taaacggcacttattactttcatgg

SEQ ID NO: 199024 - DNA, 25 bp, Probe sequence
tattactttcatgggcatatcgtgc

SEQ ID NO: 199025 - DNA, 25 bp, Probe sequence
ttggatttaagagatatctgtatca

SEQ ID NO: 199026 - DNA, 25 bp, Probe sequence
atattagaacactgaatgtaacaca

SEQ ID NO: 199027 - DNA, 25 bp, Probe sequence
ataccgttagaagattatgagtcaa

SEQ ID NO: 199028 - DNA, 25 bp, Probe sequence
atgggacggaggtgatgaggggtta

SEQ ID NO: 199029 - DNA, 25 bp, Probe sequence
atgttgggtaaatatcataaattat

SEQ ID NO: 199030 - DNA, 25 bp, Probe sequence
agataagcatgatataaacggtaat

SEQ ID NO: 199031 - DNA, 25 bp, Probe sequence
aaagagttattacatgtgctaacga

SEQ ID NO: 199032 - DNA, 25 bp, Probe sequence
aaacggtaatgtacctatattcatt

SEQ ID NO: 199033 - DNA, 25 bp, Probe sequence
aactgcaaagcaagcacgttttgtg

SEQ ID NO: 199034 - DNA, 25 bp, Probe sequence
aagcaggatataacgcaaatagcgc

SEQ ID NO: 199035 - DNA, 25 bp, Probe sequence
caggatataacgcaaatagcgcaca

SEQ ID NO: 199036 - DNA, 25 bp, Probe sequence
ctgcaaagcaagcacgttttgtgaa

SEQ ID NO: 199037 - DNA, 25 bp, Probe sequence
cggtaatgtacctatattcattaat

SEQ ID NO: 199038 - DNA, 25 bp, Probe sequence
gaatgggacggaggtgatgaggggt

SEQ ID NO: 199039 - DNA, 25 bp, Probe sequence
gaaaaagccgcacatcaagcaatat

SEQ ID NO: 199040 - DNA, 25 bp, Probe sequence
gacagcgtgtaggttattgaaaaag

SEQ ID NO: 199041 - DNA, 25 bp, Probe sequence
gacggaggtgatgaggggttagata

SEQ ID NO: 199042 - DNA, 25 bp, Probe sequence
gagttattacatgtgctaacgaatg

SEQ ID NO: 199043 - DNA, 25 bp, Probe sequence
gagttaactgcaaagcaagcacgtt

SEQ ID NO: 199044 - DNA, 25 bp, Probe sequence
gaggtgatgaggggttagataaggc

SEQ ID NO: 199045 - DNA, 25 bp, Probe sequence
gatataccgttagaagattatgagt

SEQ ID NO: 199046 - DNA, 25 bp, Probe sequence
gattatgagtcaattaggtttttat

SEQ ID NO: 199047 - DNA, 25 bp, Probe sequence
gttaactgcaaagcaagcacgtttt

SEQ ID NO: 199048 - DNA, 25 bp, Probe sequence
gttattacatgtgctaacgaatgcg

SEQ ID NO: 199049 - DNA, 25 bp, Probe sequence
gtaggttattgaaaaagccgcacat

SEQ ID NO: 199050 - DNA, 25 bp, Probe sequence
gtgaatgggacggaggtgatgaggg

SEQ ID NO: 199051 - DNA, 25 bp, Probe sequence
gtgagttaactgcaaagcaagcacg

SEQ ID NO: 199052 - DNA, 25 bp, Probe sequence
gtgacagcgtgtaggttattgaaaa

SEQ ID NO: 199053 - DNA, 25 bp, Probe sequence
gtgatgaggggttagataaggcagt

SEQ ID NO: 199054 - DNA, 25 bp, Probe sequence
gggacggaggtgatgaggggttaga

SEQ ID NO: 199055 - DNA, 25 bp, Probe sequence
ggttattgaaaaagccgcacatcaa

SEQ ID NO: 199056 - DNA, 25 bp, Probe sequence
tgaaaaagccgcacatcaagcaata

SEQ ID NO: 199057 - DNA, 25 bp, Probe sequence
tgccataaaagcaggatataacgca

SEQ ID NO: 199058 - DNA, 25 bp, Probe sequence
taggttattgaaaaagccgcacatc

SEQ ID NO: 199059 - DNA, 25 bp, Probe sequence
tattgaaaaagccgcacatcaagca

SEQ ID NO: 199060 - DNA, 25 bp, Probe sequence
atagttgttttagatcatgagggga

SEQ ID NO: 199061 - DNA, 25 bp, Probe sequence
atagcgtcgaaatagttgttttaga

SEQ ID NO: 199062 - DNA, 25 bp, Probe sequence
ataacacagatgaacaggacaaact

SEQ ID NO: 199063 - DNA, 25 bp, Probe sequence
atgtagatggctttgattttcgatt

SEQ ID NO: 199064 - DNA, 25 bp, Probe sequence
actagtttctgacgagaacgatcta

SEQ ID NO: 199065 - DNA, 25 bp, Probe sequence
aatgaacttagtcatgaaatggtag

SEQ ID NO: 199066 - DNA, 25 bp, Probe sequence
aattgacgggatactagtttctgac

SEQ ID NO: 199067 - DNA, 25 bp, Probe sequence
cacagcgttagatattttgaaacaa

SEQ ID NO: 199068 - DNA, 25 bp, Probe sequence
ctatacacagcgttagatattttga

SEQ ID NO: 199069 - DNA, 25 bp, Probe sequence
cgggatactagtttctgacgagaac

SEQ ID NO: 199070 - DNA, 25 bp, Probe sequence
gcgtcgaaatagttgttttagatca

SEQ ID NO: 199071 - DNA, 25 bp, Probe sequence
gaatggattgaaaataacacagatg

SEQ ID NO: 199072 - DNA, 25 bp, Probe sequence
gatactagtttctgacgagaacgat

SEQ ID NO: 199073 - DNA, 25 bp, Probe sequence
gaacgatctatacacagcgttagat

SEQ ID NO: 199074 - DNA, 25 bp, Probe sequence
gaaacaaagtatttatgaatggatt

SEQ ID NO: 199075 - DNA, 25 bp, Probe sequence
gaaacgagcatatagcgtcgaaata

SEQ ID NO: 199076 - DNA, 25 bp, Probe sequence
gacgggatactagtttctgacgaga

SEQ ID NO: 199077 - DNA, 25 bp, Probe sequence
gacgagaacgatctatacacagcgt

SEQ ID NO: 199078 - DNA, 25 bp, Probe sequence
gagcatatagcgtcgaaatagttgt

SEQ ID NO: 199079 - DNA, 25 bp, Probe sequence
gagaacgatctatacacagcgttag

SEQ ID NO: 199080 - DNA, 25 bp, Probe sequence
gaggggaattcaattgacgggatac

SEQ ID NO: 199081 - DNA, 25 bp, Probe sequence
gatggctttgattttcgattaagag

SEQ ID NO: 199082 - DNA, 25 bp, Probe sequence
gttttagatcatgaggggaattcaa

SEQ ID NO: 199083 - DNA, 25 bp, Probe sequence
gtagatggctttgattttcgattaa

SEQ ID NO: 199084 - DNA, 25 bp, Probe sequence
ggggaattcaattgacgggatacta

SEQ ID NO: 199085 - DNA, 25 bp, Probe sequence
ggaattcaattgacgggatactagt

SEQ ID NO: 199086 - DNA, 25 bp, Probe sequence
ggctttgattttcgattaagagtta

SEQ ID NO: 199087 - DNA, 25 bp, Probe sequence
tgatgtattacaaaacgggtgacgt

SEQ ID NO: 199088 - DNA, 25 bp, Probe sequence
tgaacaggacaaactaatgaactta

SEQ ID NO: 199089 - DNA, 25 bp, Probe sequence
ttacaaaacgggtgacgtatgtcaa

SEQ ID NO: 199090 - DNA, 25 bp, Probe sequence
tcatgaggggaattcaattgacggg

SEQ ID NO: 199091 - DNA, 25 bp, Probe sequence
taagaaacgagcatatagcgtcgaa

SEQ ID NO: 199092 - DNA, 25 bp, Probe sequence
tttctgacgagaacgatctatacac

SEQ ID NO: 199093 - DNA, 25 bp, Probe sequence
ttgacgggatactagtttctgacga

SEQ ID NO: 199094 - DNA, 25 bp, Probe sequence
atgctttaaatggcgcagttagagg

SEQ ID NO: 199095 - DNA, 25 bp, Probe sequence
aggcgaattgaatgtatcagattta

SEQ ID NO: 199096 - DNA, 25 bp, Probe sequence
agatagcattttaaaagcaatcaag

SEQ ID NO: 199097 - DNA, 25 bp, Probe sequence
agatgctttaaatggcgcagttaga

SEQ ID NO: 199098 - DNA, 25 bp, Probe sequence
aagcgagtcctaatgcgaagacatc

SEQ ID NO: 199099 - DNA, 25 bp, Probe sequence
aatggcgcagttagaggacgtcaag

SEQ ID NO: 199100 - DNA, 25 bp, Probe sequence
aatgcgaagacatctgtaagaagtc

SEQ ID NO: 199101 - DNA, 25 bp, Probe sequence
aatcaagcgagtcctaatgcgaaga

SEQ ID NO: 199102 - DNA, 25 bp, Probe sequence
caatcaagcgagtcctaatgcgaag

SEQ ID NO: 199103 - DNA, 25 bp, Probe sequence
aataaatttgctgttgagctcaaca

SEQ ID NO: 199104 - DNA, 25 bp, Probe sequence
aatttgctgttgagctcaacaaaga

SEQ ID NO: 199105 - DNA, 25 bp, Probe sequence
gcgcagttagaggacgtcaagtgat

SEQ ID NO: 199106 - DNA, 25 bp, Probe sequence
gcgagtcctaatgcgaagacatctg

SEQ ID NO: 199107 - DNA, 25 bp, Probe sequence
gctgcaaacaaagatagcattttaa

SEQ ID NO: 199108 - DNA, 25 bp, Probe sequence
gctttaaatggcgcagttagaggac

SEQ ID NO: 199109 - DNA, 25 bp, Probe sequence
gcagttagaggacgtcaagtgatta

SEQ ID NO: 199110 - DNA, 25 bp, Probe sequence
gacatctgtaagaagtctattaggc

SEQ ID NO: 199111 - DNA, 25 bp, Probe sequence
gagtcctaatgcgaagacatctgta

SEQ ID NO: 199112 - DNA, 25 bp, Probe sequence
gaggacgtcaagtgattattaataa

SEQ ID NO: 199113 - DNA, 25 bp, Probe sequence
gaggcaattgctgcaaacaaagata

SEQ ID NO: 199114 - DNA, 25 bp, Probe sequence
gatttaagtgacttccttaataaag

SEQ ID NO: 199115 - DNA, 25 bp, Probe sequence
gttagaggacgtcaagtgattatta

SEQ ID NO: 199116 - DNA, 25 bp, Probe sequence
gtcctaatgcgaagacatctgtaag

SEQ ID NO: 199117 - DNA, 25 bp, Probe sequence
tgtaagaagtctattaggcgtttta

SEQ ID NO: 199118 - DNA, 25 bp, Probe sequence
ggtatttttattaggcgaattgaat

SEQ ID NO: 199119 - DNA, 25 bp, Probe sequence
ggcgcagttagaggacgtcaagtga

SEQ ID NO: 199120 - DNA, 25 bp, Probe sequence
tggcgcagttagaggacgtcaagtg

SEQ ID NO: 199121 - DNA, 25 bp, Probe sequence
tgagctcaacaaagatatttataca

SEQ ID NO: 199122 - DNA, 25 bp, Probe sequence
tcagatttaagtgacttccttaata

SEQ ID NO: 199123 - DNA, 25 bp, Probe sequence
tcaagcgagtcctaatgcgaagaca

SEQ ID NO: 199124 - DNA, 25 bp, Probe sequence
taacaaaggtttacacgttgccaat

SEQ ID NO: 199125 - DNA, 25 bp, Probe sequence
taaatggcgcagttagaggacgtca

SEQ ID NO: 199126 - DNA, 25 bp, Probe sequence
tacagaggcaattgctgcaaacaaa

SEQ ID NO: 199127 - DNA, 25 bp, Probe sequence
tattaataaatttgctgttgagctc

SEQ ID NO: 199128 - DNA, 25 bp, Probe sequence
attggaaaagctactgctgctagtt

SEQ ID NO: 199129 - DNA, 25 bp, Probe sequence
attgctggtttttatttctggaata

SEQ ID NO: 199130 - DNA, 25 bp, Probe sequence
atagcaagtccagcttctgggcaaa

SEQ ID NO: 199131 - DNA, 25 bp, Probe sequence
atggtacaagcaggcaatccaattg

SEQ ID NO: 199132 - DNA, 25 bp, Probe sequence
aaagtatctcaagttatacctgtta

SEQ ID NO: 199133 - DNA, 25 bp, Probe sequence
aaaagctactgctgctagtttttca

SEQ ID NO: 199134 - DNA, 25 bp, Probe sequence
aaaatagcaagtccagcttctgggc

SEQ ID NO: 199135 - DNA, 25 bp, Probe sequence
aagctactgctgctagtttttcatt

SEQ ID NO: 199136 - DNA, 25 bp, Probe sequence
aattacgttagattcagaaccgtct

SEQ ID NO: 199137 - DNA, 25 bp, Probe sequence
caacagttactgttcaaggtcaaga

SEQ ID NO: 199138 - DNA, 25 bp, Probe sequence
caaatcactaaatgttaagcaaggt

SEQ ID NO: 199139 - DNA, 25 bp, Probe sequence
ccagcttctgggcaaatcaaatcac

SEQ ID NO: 199140 - DNA, 25 bp, Probe sequence
ccaattgcttatgcttacaatttag

SEQ ID NO: 199141 - DNA, 25 bp, Probe sequence
gctactgctgctagtttttcattaa

SEQ ID NO: 199142 - DNA, 25 bp, Probe sequence
gcttctgggcaaatcaaatcactaa

SEQ ID NO: 199143 - DNA, 25 bp, Probe sequence
gcaggcaatccaattgcttatgctt

SEQ ID NO: 199144 - DNA, 25 bp, Probe sequence
gcaagtccagcttctgggcaaatca

SEQ ID NO: 199145 - DNA, 25 bp, Probe sequence
gcaatccaattgcttatgcttacaa

SEQ ID NO: 199146 - DNA, 25 bp, Probe sequence
gatggtaactatactaaagtatctc

SEQ ID NO: 199147 - DNA, 25 bp, Probe sequence
gatggcgaaactaaagatatggaac

SEQ ID NO: 199148 - DNA, 25 bp, Probe sequence
gatggcatggaaggttctatggtac

SEQ ID NO: 199149 - DNA, 25 bp, Probe sequence
gataaagtagcaacagttactgttc

SEQ ID NO: 199150 - DNA, 25 bp, Probe sequence
gatatggaacttaaaatgccacaaa

SEQ ID NO: 199151 - DNA, 25 bp, Probe sequence
gtccagcttctgggcaaatcaaatc

SEQ ID NO: 199152 - DNA, 25 bp, Probe sequence
gggcaaatcaaatcactaaatgtta

SEQ ID NO: 199153 - DNA, 25 bp, Probe sequence
gggattgctggtttttatttctgga

SEQ ID NO: 199154 - DNA, 25 bp, Probe sequence
ggtacaattgctaaattagatggca

SEQ ID NO: 199155 - DNA, 25 bp, Probe sequence
ggttctatggtacaagcaggcaatc

SEQ ID NO: 199156 - DNA, 25 bp, Probe sequence
ggattgctggtttttatttctggaa

SEQ ID NO: 199157 - DNA, 25 bp, Probe sequence
ggaaaagctactgctgctagttttt

SEQ ID NO: 199158 - DNA, 25 bp, Probe sequence
ggaaggttctatggtacaagcaggc

SEQ ID NO: 199159 - DNA, 25 bp, Probe sequence
tgctgctagtttttcattaatgcca

SEQ ID NO: 199160 - DNA, 25 bp, Probe sequence
tacgttagattcagaaccgtctaaa

SEQ ID NO: 199161 - DNA, 25 bp, Probe sequence
tatacctgttaaaattacgttagat

SEQ ID NO: 199162 - DNA, 25 bp, Probe sequence
atgtggctgtcgaaagtacctacgt

SEQ ID NO: 199163 - DNA, 25 bp, Probe sequence
agtacctacgtaagtctgatcgcag

SEQ ID NO: 199164 - DNA, 25 bp, Probe sequence
agactacccggcggataaattgtat

SEQ ID NO: 199165 - DNA, 25 bp, Probe sequence
acccggcggataaattgtatgcaaa

SEQ ID NO: 199166 - DNA, 25 bp, Probe sequence
actacccggcggataaattgtatgc

SEQ ID NO: 199167 - DNA, 25 bp, Probe sequence
cagactacccggcggataaattgta

SEQ ID NO: 199168 - DNA, 25 bp, Probe sequence
aaagtacctacgtaagtctgatcgc

SEQ ID NO: 199169 - DNA, 25 bp, Probe sequence
aaatgtggctgtcgaaagtacctac

SEQ ID NO: 199170 - DNA, 25 bp, Probe sequence
aaaaatgtggctgtcgaaagtacct

SEQ ID NO: 199171 - DNA, 25 bp, Probe sequence
aaaatgtggctgtcgaaagtaccta

SEQ ID NO: 199172 - DNA, 25 bp, Probe sequence
aagtacctacgtaagtctgatcgca

SEQ ID NO: 199173 - DNA, 25 bp, Probe sequence
aatgtggctgtcgaaagtacctacg

SEQ ID NO: 199174 - DNA, 25 bp, Probe sequence
cggcggataaattgtatgcaaaatt

SEQ ID NO: 199175 - DNA, 25 bp, Probe sequence
ctacccggcggataaattgtatgca

SEQ ID NO: 199176 - DNA, 25 bp, Probe sequence
ctgtcgaaagtacctacgtaagtct

SEQ ID NO: 199177 - DNA, 25 bp, Probe sequence
gctgtcgaaagtacctacgtaagtc

SEQ ID NO: 199178 - DNA, 25 bp, Probe sequence
cgaaagtacctacgtaagtctgatc

SEQ ID NO: 199179 - DNA, 25 bp, Probe sequence
tcgaaagtacctacgtaagtctgat

SEQ ID NO: 199180 - DNA, 25 bp, Probe sequence
cccggcggataaattgtatgcaaaa

SEQ ID NO: 199181 - DNA, 25 bp, Probe sequence
ccggcggataaattgtatgcaaaat

SEQ ID NO: 199182 - DNA, 25 bp, Probe sequence
gcagactacccggcggataaattgt

SEQ ID NO: 199183 - DNA, 25 bp, Probe sequence
gaaagtacctacgtaagtctgatcg

SEQ ID NO: 199184 - DNA, 25 bp, Probe sequence
gactacccggcggataaattgtatg

SEQ ID NO: 199185 - DNA, 25 bp, Probe sequence
gtacctacgtaagtctgatcgcaga

SEQ ID NO: 199186 - DNA, 25 bp, Probe sequence
tgtcgaaagtacctacgtaagtctg

SEQ ID NO: 199187 - DNA, 25 bp, Probe sequence
gtcgaaagtacctacgtaagtctga

SEQ ID NO: 199188 - DNA, 25 bp, Probe sequence
gtggctgtcgaaagtacctacgtaa

SEQ ID NO: 199189 - DNA, 25 bp, Probe sequence
ggctgtcgaaagtacctacgtaagt

SEQ ID NO: 199190 - DNA, 25 bp, Probe sequence
tggctgtcgaaagtacctacgtaag

SEQ ID NO: 199191 - DNA, 25 bp, Probe sequence
tgtggctgtcgaaagtacctacgta

SEQ ID NO: 199192 - DNA, 25 bp, Probe sequence
taaaaatgtggctgtcgaaagtacc

SEQ ID NO: 199193 - DNA, 25 bp, Probe sequence
tacccggcggataaattgtatgcaa

SEQ ID NO: 199194 - DNA, 25 bp, Probe sequence
tacctacgtaagtctgatcgcagac

SEQ ID NO: 199195 - DNA, 25 bp, Probe sequence
ttaaaaatgtggctgtcgaaagtac

SEQ ID NO: 199196 - DNA, 25 bp, Probe sequence
atgaattgacacccttaattggtaa

SEQ ID NO: 199197 - DNA, 25 bp, Probe sequence
agtgacaactttagatgaattgaca

SEQ ID NO: 199198 - DNA, 25 bp, Probe sequence
agatgaattgacacccttaattggt

SEQ ID NO: 199199 - DNA, 25 bp, Probe sequence
agaaaatcaaagtgacaactttaga

SEQ ID NO: 199200 - DNA, 25 bp, Probe sequence
actttagatgaattgacacccttaa

SEQ ID NO: 199201 - DNA, 25 bp, Probe sequence
acaactttagatgaattgacaccct

SEQ ID NO: 199202 - DNA, 25 bp, Probe sequence
aaatcaaagtgacaactttagatga

SEQ ID NO: 199203 - DNA, 25 bp, Probe sequence
aaagagaaaatcaaagtgacaactt

SEQ ID NO: 199204 - DNA, 25 bp, Probe sequence
aaaatcaaagtgacaactttagatg

SEQ ID NO: 199205 - DNA, 25 bp, Probe sequence
aactttagatgaattgacaccctta

SEQ ID NO: 199206 - DNA, 25 bp, Probe sequence
aagagaaaatcaaagtgacaacttt

SEQ ID NO: 199207 - DNA, 25 bp, Probe sequence
aagtgacaactttagatgaattgac

SEQ ID NO: 199208 - DNA, 25 bp, Probe sequence
caactttagatgaattgacaccctt

SEQ ID NO: 199209 - DNA, 25 bp, Probe sequence
ctttagatgaattgacacccttaat

SEQ ID NO: 199210 - DNA, 25 bp, Probe sequence
gaaaatcaaagtgacaactttagat

SEQ ID NO: 199211 - DNA, 25 bp, Probe sequence
gaaagagaaaatcaaagtgacaact

SEQ ID NO: 199212 - DNA, 25 bp, Probe sequence
gacaactttagatgaattgacaccc

SEQ ID NO: 199213 - DNA, 25 bp, Probe sequence
gagaaaatcaaagtgacaactttag

SEQ ID NO: 199214 - DNA, 25 bp, Probe sequence
gatgaattgacacccttaattggta

SEQ ID NO: 199215 - DNA, 25 bp, Probe sequence
gtgacaactttagatgaattgacac

SEQ ID NO: 199216 - DNA, 25 bp, Probe sequence
tgacaactttagatgaattgacacc

SEQ ID NO: 199217 - DNA, 25 bp, Probe sequence
tgaattgacacccttaattggtaaa

SEQ ID NO: 199218 - DNA, 25 bp, Probe sequence
tagatgaattgacacccttaattgg

SEQ ID NO: 199219 - DNA, 25 bp, Probe sequence
tttagatgaattgacacccttaatt

SEQ ID NO: 199220 - DNA, 25 bp, Probe sequence
ttagatgaattgacacccttaattg

SEQ ID NO: 199221 - DNA, 25 bp, Probe sequence
atatgcaggtatggtgttcttcaac

SEQ ID NO: 199222 - DNA, 25 bp, Probe sequence
atatgcacatgttatgacaccagaa

SEQ ID NO: 199223 - DNA, 25 bp, Probe sequence
atacgtattcaactaaagcaatcgt

SEQ ID NO: 199224 - DNA, 25 bp, Probe sequence
atgtattttacagttggctggtatt

SEQ ID NO: 199225 - DNA, 25 bp, Probe sequence
aggattggtcttggttgtactaacg

SEQ ID NO: 199226 - DNA, 25 bp, Probe sequence
agtcgattcgacttggttgaatatt

SEQ ID NO: 199227 - DNA, 25 bp, Probe sequence
agtacacatgttgatggtctcatta

SEQ ID NO: 199228 - DNA, 25 bp, Probe sequence
acaccaggacgatacatgcttaaat

SEQ ID NO: 199229 - DNA, 25 bp, Probe sequence
aaatatcgtttttgcattccttggt

SEQ ID NO: 199230 - DNA, 25 bp, Probe sequence
aaatctatgatggcaggtttcttat

SEQ ID NO: 199231 - DNA, 25 bp, Probe sequence
aaaacacaattcgcaagtacacatg

SEQ ID NO: 199232 - DNA, 25 bp, Probe sequence
aagccttaactgccttagttcagaa

SEQ ID NO: 199233 - DNA, 25 bp, Probe sequence
aagcaatcgtagactcaatatcatc

SEQ ID NO: 199234 - DNA, 25 bp, Probe sequence
cattcttcattgcttgtggtgttat

SEQ ID NO: 199235 - DNA, 25 bp, Probe sequence
gctttcagcttaggattggtcttgg

SEQ ID NO: 199236 - DNA, 25 bp, Probe sequence
gacacaagccttaactgccttagtt

SEQ ID NO: 199237 - DNA, 25 bp, Probe sequence
gacaccagaaatgacacaagcctta

SEQ ID NO: 199238 - DNA, 25 bp, Probe sequence
gactcaatatcatcatctgttcaaa

SEQ ID NO: 199239 - DNA, 25 bp, Probe sequence
gagcacgttgtattcaatgctggtt

SEQ ID NO: 199240 - DNA, 25 bp, Probe sequence
gatgctgtatcttggttacatgtat

SEQ ID NO: 199241 - DNA, 25 bp, Probe sequence
gtttttgcattccttggtaactttg

SEQ ID NO: 199242 - DNA, 25 bp, Probe sequence
gtaggacttgtttatgcatttttaa

SEQ ID NO: 199243 - DNA, 25 bp, Probe sequence
gtaaatgggggaagtgctgtgataa

SEQ ID NO: 199244 - DNA, 25 bp, Probe sequence
gggagcaattgctttcagcttagga

SEQ ID NO: 199245 - DNA, 25 bp, Probe sequence
ggtgttcttcaaccttgatgctgta

SEQ ID NO: 199246 - DNA, 25 bp, Probe sequence
ggttgtactaacgaattctgaatta

SEQ ID NO: 199247 - DNA, 25 bp, Probe sequence
ggtacagcaaacaccaggacgatac

SEQ ID NO: 199248 - DNA, 25 bp, Probe sequence
ggcaggtttcttattgtccattgtt

SEQ ID NO: 199249 - DNA, 25 bp, Probe sequence
ggcggattgacaaaagcattcttca

SEQ ID NO: 199250 - DNA, 25 bp, Probe sequence
tgcttgtggtgttatagtctttgta

SEQ ID NO: 199251 - DNA, 25 bp, Probe sequence
taggtggttttgtattattcttctt

SEQ ID NO: 199252 - DNA, 25 bp, Probe sequence
tatcggtatttttatttctatgcaa

SEQ ID NO: 199253 - DNA, 25 bp, Probe sequence
tattgtccattgttactgtttttat

SEQ ID NO: 199254 - DNA, 25 bp, Probe sequence
ttggtaactttgtaggtggcggtat

SEQ ID NO: 199255 - DNA, 25 bp, Probe sequence
attgaaggatacataaacgaaaaca

SEQ ID NO: 199256 - DNA, 25 bp, Probe sequence
atttgtaggtgatataatactaagc

SEQ ID NO: 199257 - DNA, 25 bp, Probe sequence
atatgtatagtcgctacggtcatac

SEQ ID NO: 199258 - DNA, 25 bp, Probe sequence
atagtcgctacggtcatacatttta

SEQ ID NO: 199259 - DNA, 25 bp, Probe sequence
atgtatagtcgctacggtcatacat

SEQ ID NO: 199260 - DNA, 25 bp, Probe sequence
atgtatatgtatagtcgctacggtc

SEQ ID NO: 199261 - DNA, 25 bp, Probe sequence
aggtgatataatactaagcaaaaat

SEQ ID NO: 199262 - DNA, 25 bp, Probe sequence
agtcgctacggtcatacattttaaa

SEQ ID NO: 199263 - DNA, 25 bp, Probe sequence
aaatctgtacacttcacaaagttgg

SEQ ID NO: 199264 - DNA, 25 bp, Probe sequence
aatctgtacacttcacaaagttgga

SEQ ID NO: 199265 - DNA, 25 bp, Probe sequence
ctgtacacttcacaaagttggaaac

SEQ ID NO: 199266 - DNA, 25 bp, Probe sequence
atctgtacacttcacaaagttggaa

SEQ ID NO: 199267 - DNA, 25 bp, Probe sequence
gattgaaggatacataaacgaaaac

SEQ ID NO: 199268 - DNA, 25 bp, Probe sequence
gtatatgtatagtcgctacggtcat

SEQ ID NO: 199269 - DNA, 25 bp, Probe sequence
gtatagtcgctacggtcatacattt

SEQ ID NO: 199270 - DNA, 25 bp, Probe sequence
gtaggtgatataatactaagcaaaa

SEQ ID NO: 199271 - DNA, 25 bp, Probe sequence
gtacacttcacaaagttggaaacaa

SEQ ID NO: 199272 - DNA, 25 bp, Probe sequence
gtcgctacggtcatacattttaaaa

SEQ ID NO: 199273 - DNA, 25 bp, Probe sequence
tgtatagtcgctacggtcatacatt

SEQ ID NO: 199274 - DNA, 25 bp, Probe sequence
tgtacacttcacaaagttggaaaca

SEQ ID NO: 199275 - DNA, 25 bp, Probe sequence
tgtaggtgatataatactaagcaaa

SEQ ID NO: 199276 - DNA, 25 bp, Probe sequence
tgtatatgtatagtcgctacggtca

SEQ ID NO: 199277 - DNA, 25 bp, Probe sequence
tgaaggatacataaacgaaaacaaa

SEQ ID NO: 199278 - DNA, 25 bp, Probe sequence
tcgctacggtcatacattttaaaat

SEQ ID NO: 199279 - DNA, 25 bp, Probe sequence
tctgtacacttcacaaagttggaaa

SEQ ID NO: 199280 - DNA, 25 bp, Probe sequence
taatactaagcaaaaatttatcgga

SEQ ID NO: 199281 - DNA, 25 bp, Probe sequence
tacacttcacaaagttggaaacaag

SEQ ID NO: 199282 - DNA, 25 bp, Probe sequence
tactaagcaaaaatttatcggaaat

SEQ ID NO: 199283 - DNA, 25 bp, Probe sequence
tagtcgctacggtcatacattttaa

SEQ ID NO: 199284 - DNA, 25 bp, Probe sequence
tatgtatagtcgctacggtcataca

SEQ ID NO: 199285 - DNA, 25 bp, Probe sequence
tatatgtatagtcgctacggtcata

SEQ ID NO: 199286 - DNA, 25 bp, Probe sequence
tatagtcgctacggtcatacatttt

SEQ ID NO: 199287 - DNA, 25 bp, Probe sequence
tttgtaggtgatataatactaagca

SEQ ID NO: 199288 - DNA, 25 bp, Probe sequence
ttgtaggtgatataatactaagcaa

SEQ ID NO: 199289 - DNA, 25 bp, Probe sequence
attactaaaaccagcacagaaatta

SEQ ID NO: 199290 - DNA, 25 bp, Probe sequence
ataatactatagaaccgaacacgat

SEQ ID NO: 199291 - DNA, 25 bp, Probe sequence
agtgaattactaaaaccagcacaga

SEQ ID NO: 199292 - DNA, 25 bp, Probe sequence
agaaattaaaatcgcctgatgatat

SEQ ID NO: 199293 - DNA, 25 bp, Probe sequence
agcacagaaattaaaatcgcctgat

SEQ ID NO: 199294 - DNA, 25 bp, Probe sequence
agcataatactatagaaccgaacac

SEQ ID NO: 199295 - DNA, 25 bp, Probe sequence
accagcacagaaattaaaatcgcct

SEQ ID NO: 199296 - DNA, 25 bp, Probe sequence
acagaaattaaaatcgcctgatgat

SEQ ID NO: 199297 - DNA, 25 bp, Probe sequence
aaattaaaatcgcctgatgatataa

SEQ ID NO: 199298 - DNA, 25 bp, Probe sequence
aaaccagcacagaaattaaaatcgc

SEQ ID NO: 199299 - DNA, 25 bp, Probe sequence
aaaaccagcacagaaattaaaatcg

SEQ ID NO: 199300 - DNA, 25 bp, Probe sequence
aaccagcacagaaattaaaatcgcc

SEQ ID NO: 199301 - DNA, 25 bp, Probe sequence
aagcataatactatagaaccgaaca

SEQ ID NO: 199302 - DNA, 25 bp, Probe sequence
aagtgaattactaaaaccagcacag

SEQ ID NO: 199303 - DNA, 25 bp, Probe sequence
aattactaaaaccagcacagaaatt

SEQ ID NO: 199304 - DNA, 25 bp, Probe sequence
caagcataatactatagaaccgaac

SEQ ID NO: 199305 - DNA, 25 bp, Probe sequence
cacagaaattaaaatcgcctgatga

SEQ ID NO: 199306 - DNA, 25 bp, Probe sequence
cagaaattaaaatcgcctgatgata

SEQ ID NO: 199307 - DNA, 25 bp, Probe sequence
cagcacagaaattaaaatcgcctga

SEQ ID NO: 199308 - DNA, 25 bp, Probe sequence
cataatactatagaaccgaacacga

SEQ ID NO: 199309 - DNA, 25 bp, Probe sequence
ccagcacagaaattaaaatcgcctg

SEQ ID NO: 199310 - DNA, 25 bp, Probe sequence
gcataatactatagaaccgaacacg

SEQ ID NO: 199311 - DNA, 25 bp, Probe sequence
gcacagaaattaaaatcgcctgatg

SEQ ID NO: 199312 - DNA, 25 bp, Probe sequence
gaattactaaaaccagcacagaaat

SEQ ID NO: 199313 - DNA, 25 bp, Probe sequence
gaaattaaaatcgcctgatgatata

SEQ ID NO: 199314 - DNA, 25 bp, Probe sequence
gagctaaacaaaaagaagggtcact

SEQ ID NO: 199315 - DNA, 25 bp, Probe sequence
gtgaattactaaaaccagcacagaa

SEQ ID NO: 199316 - DNA, 25 bp, Probe sequence
tgaattactaaaaccagcacagaaa

SEQ ID NO: 199317 - DNA, 25 bp, Probe sequence
tcaagcataatactatagaaccgaa

SEQ ID NO: 199318 - DNA, 25 bp, Probe sequence
taagtgaattactaaaaccagcaca

SEQ ID NO: 199319 - DNA, 25 bp, Probe sequence
taaaaccagcacagaaattaaaatc

SEQ ID NO: 199320 - DNA, 25 bp, Probe sequence
tactaaaaccagcacagaaattaaa

SEQ ID NO: 199321 - DNA, 25 bp, Probe sequence
ttactaaaaccagcacagaaattaa

SEQ ID NO: 199322 - DNA, 25 bp, Probe sequence
ctatgggaagtgctgtgattgaagg

SEQ ID NO: 199323 - DNA, 25 bp, Probe sequence
ataaagaacaacaagcgcgcattac

SEQ ID NO: 199324 - DNA, 25 bp, Probe sequence
atcaattaaaatcaccagatgatat

SEQ ID NO: 199325 - DNA, 25 bp, Probe sequence
atcacctgaaaataactttcaattt

SEQ ID NO: 199326 - DNA, 25 bp, Probe sequence
atcatattaattagtgttgcaagta

SEQ ID NO: 199327 - DNA, 25 bp, Probe sequence
atgggaagtgctgtgattgaaggtt

SEQ ID NO: 199328 - DNA, 25 bp, Probe sequence
agtgttgcaagtatctattttaaaa

SEQ ID NO: 199329 - DNA, 25 bp, Probe sequence
agtgctgtgattgaaggttacataa

SEQ ID NO: 199330 - DNA, 25 bp, Probe sequence
agtcctatgggaagtgctgtgattg

SEQ ID NO: 199331 - DNA, 25 bp, Probe sequence
agaacaacaagcgcgcattacactt

SEQ ID NO: 199332 - DNA, 25 bp, Probe sequence
actttcaatttgtaggtgatttaat

SEQ ID NO: 199333 - DNA, 25 bp, Probe sequence
acaacaagcgcgcattacactttat

SEQ ID NO: 199334 - DNA, 25 bp, Probe sequence
acaagtcctatgggaagtgctgtga

SEQ ID NO: 199335 - DNA, 25 bp, Probe sequence
aaagaacaacaagcgcgcattacac

SEQ ID NO: 199336 - DNA, 25 bp, Probe sequence
aacaagtcctatgggaagtgctgtg

SEQ ID NO: 199337 - DNA, 25 bp, Probe sequence
aacaacaagcgcgcattacacttta

SEQ ID NO: 199338 - DNA, 25 bp, Probe sequence
aacaagcgcgcattacactttatct

SEQ ID NO: 199339 - DNA, 25 bp, Probe sequence
aagaacaacaagcgcgcattacact

SEQ ID NO: 199340 - DNA, 25 bp, Probe sequence
aataactttcaatttgtaggtgatt

SEQ ID NO: 199341 - DNA, 25 bp, Probe sequence
aattagtgttgcaagtatctatttt

SEQ ID NO: 199342 - DNA, 25 bp, Probe sequence
caagtcctatgggaagtgctgtgat

SEQ ID NO: 199343 - DNA, 25 bp, Probe sequence
caacaagcgcgcattacactttatc

SEQ ID NO: 199344 - DNA, 25 bp, Probe sequence
gctgtgattgaaggttacataaatg

SEQ ID NO: 199345 - DNA, 25 bp, Probe sequence
gaagtgctgtgattgaaggttacat

SEQ ID NO: 199346 - DNA, 25 bp, Probe sequence
gaacaacaagcgcgcattacacttt

SEQ ID NO: 199347 - DNA, 25 bp, Probe sequence
gaaacaagtcctatgggaagtgctg

SEQ ID NO: 199348 - DNA, 25 bp, Probe sequence
gattaagtgagttactaaaaccagc

SEQ ID NO: 199349 - DNA, 25 bp, Probe sequence
gttgcaagtatctattttaaaatga

SEQ ID NO: 199350 - DNA, 25 bp, Probe sequence
gtcctatgggaagtgctgtgattga

SEQ ID NO: 199351 - DNA, 25 bp, Probe sequence
gggaagtgctgtgattgaaggttac

SEQ ID NO: 199352 - DNA, 25 bp, Probe sequence
ggaaacaagtcctatgggaagtgct

SEQ ID NO: 199353 - DNA, 25 bp, Probe sequence
tcctatgggaagtgctgtgattgaa

SEQ ID NO: 199354 - DNA, 25 bp, Probe sequence
taaagaacaacaagcgcgcattaca

SEQ ID NO: 199355 - DNA, 25 bp, Probe sequence
ttataaagaacaacaagcgcgcatt

SEQ ID NO: 199356 - DNA, 25 bp, Probe sequence
agacaggacctatgggcgatgccgt

SEQ ID NO: 199357 - DNA, 25 bp, Probe sequence
attggtgttattttatgtatatgta

SEQ ID NO: 199358 - DNA, 25 bp, Probe sequence
atcaaaccaaatcacctgatgagat

SEQ ID NO: 199359 - DNA, 25 bp, Probe sequence
agaacatcattatcaatttggtgga

SEQ ID NO: 199360 - DNA, 25 bp, Probe sequence
agcacatcaaaccaaatcacctgat

SEQ ID NO: 199361 - DNA, 25 bp, Probe sequence
agcacgttattaaaaccagcacatc

SEQ ID NO: 199362 - DNA, 25 bp, Probe sequence
agcgtattacactctatctcaagca

SEQ ID NO: 199363 - DNA, 25 bp, Probe sequence
accagcacatcaaaccaaatcacct

SEQ ID NO: 199364 - DNA, 25 bp, Probe sequence
acaggacctatgggcgatgccgtaa

SEQ ID NO: 199365 - DNA, 25 bp, Probe sequence
aaatctgtacatttcacaagtttaa

SEQ ID NO: 199366 - DNA, 25 bp, Probe sequence
aaaccagcacatcaaaccaaatcac

SEQ ID NO: 199367 - DNA, 25 bp, Probe sequence
aaacatgtttttataattattggtg

SEQ ID NO: 199368 - DNA, 25 bp, Probe sequence
aagctgattttgttgcatatgggtc

SEQ ID NO: 199369 - DNA, 25 bp, Probe sequence
aagaacaacaagagcgtattacact

SEQ ID NO: 199370 - DNA, 25 bp, Probe sequence
cactctatctcaagcataacactaa

SEQ ID NO: 199371 - DNA, 25 bp, Probe sequence
cgtattacactctatctcaagcata

SEQ ID NO: 199372 - DNA, 25 bp, Probe sequence
gcataacactaaagaaccgaacacg

SEQ ID NO: 199373 - DNA, 25 bp, Probe sequence
gaaccgaacacgatcaaatctgtac

SEQ ID NO: 199374 - DNA, 25 bp, Probe sequence
gaacacgatcaaatctgtacatttc

SEQ ID NO: 199375 - DNA, 25 bp, Probe sequence
atgccgtaattgaaggttacatcaa

SEQ ID NO: 199376 - DNA, 25 bp, Probe sequence
gatcaaatctgtacatttcacaagt

SEQ ID NO: 199377 - DNA, 25 bp, Probe sequence
gattttgttgcatatgggtctccag

SEQ ID NO: 199378 - DNA, 25 bp, Probe sequence
gttgcatatgggtctccagaacatc

SEQ ID NO: 199379 - DNA, 25 bp, Probe sequence
gttgctacagtcatttatttaaaag

SEQ ID NO: 199380 - DNA, 25 bp, Probe sequence
gtatatgtatagttgctacagtcat

SEQ ID NO: 199381 - DNA, 25 bp, Probe sequence
gtatagttgctacagtcatttattt

SEQ ID NO: 199382 - DNA, 25 bp, Probe sequence
gtctccagaacatcattatcaattt

SEQ ID NO: 199383 - DNA, 25 bp, Probe sequence
ggacctatgggcgatgccgtaattg

SEQ ID NO: 199384 - DNA, 25 bp, Probe sequence
gggtctccagaacatcattatcaat

SEQ ID NO: 199385 - DNA, 25 bp, Probe sequence
tgggcgatgccgtaattgaaggtta

SEQ ID NO: 199386 - DNA, 25 bp, Probe sequence
tagagtctaaaaagaacgaccgcta

SEQ ID NO: 199387 - DNA, 25 bp, Probe sequence
tatgggtctccagaacatcattatc

SEQ ID NO: 199388 - DNA, 25 bp, Probe sequence
ttacactctatctcaagcataacac

SEQ ID NO: 199389 - DNA, 25 bp, Probe sequence
ttcacaagtttaaagacaggaccta

SEQ ID NO: 199390 - DNA, 25 bp, Probe sequence
catctgtagggtctaaagagttaga

SEQ ID NO: 199391 - DNA, 25 bp, Probe sequence
atatgacataccaacgaaacaagca

SEQ ID NO: 199392 - DNA, 25 bp, Probe sequence
atgacataccaacgaaacaagcacc

SEQ ID NO: 199393 - DNA, 25 bp, Probe sequence
atgattataatgtgcaacagttaag

SEQ ID NO: 199394 - DNA, 25 bp, Probe sequence
atgttattaaaaggcgatggtgatt

SEQ ID NO: 199395 - DNA, 25 bp, Probe sequence
aggctcatctgtagggtctaaagag

SEQ ID NO: 199396 - DNA, 25 bp, Probe sequence
accaacgaaacaagcaccgaaaatg

SEQ ID NO: 199397 - DNA, 25 bp, Probe sequence
acgaaacaagcaccgaaaatgttat

SEQ ID NO: 199398 - DNA, 25 bp, Probe sequence
acataccaacgaaacaagcaccgaa

SEQ ID NO: 199399 - DNA, 25 bp, Probe sequence
aaaggctcatctgtagggtctaaag

SEQ ID NO: 199400 - DNA, 25 bp, Probe sequence
aaatgttattaaaaggcgatggtga

SEQ ID NO: 199401 - DNA, 25 bp, Probe sequence
aaaaggctcatctgtagggtctaaa

SEQ ID NO: 199402 - DNA, 25 bp, Probe sequence
aaggctcatctgtagggtctaaaga

SEQ ID NO: 199403 - DNA, 25 bp, Probe sequence
aatgttattaaaaggcgatggtgat

SEQ ID NO: 199404 - DNA, 25 bp, Probe sequence
caacgaaacaagcaccgaaaatgtt

SEQ ID NO: 199405 - DNA, 25 bp, Probe sequence
cataccaacgaaacaagcaccgaaa

SEQ ID NO: 199406 - DNA, 25 bp, Probe sequence
ctcatctgtagggtctaaagagtta

SEQ ID NO: 199407 - DNA, 25 bp, Probe sequence
ccaacgaaacaagcaccgaaaatgt

SEQ ID NO: 199408 - DNA, 25 bp, Probe sequence
gctcatctgtagggtctaaagagtt

SEQ ID NO: 199409 - DNA, 25 bp, Probe sequence
gaaacaagcaccgaaaatgttatta

SEQ ID NO: 199410 - DNA, 25 bp, Probe sequence
gacataccaacgaaacaagcaccga

SEQ ID NO: 199411 - DNA, 25 bp, Probe sequence
gttattaaaaggcgatggtgattta

SEQ ID NO: 199412 - DNA, 25 bp, Probe sequence
ggctcatctgtagggtctaaagagt

SEQ ID NO: 199413 - DNA, 25 bp, Probe sequence
tgtgcaacagttaagaaaaagatat

SEQ ID NO: 199414 - DNA, 25 bp, Probe sequence
tgtgccaagttattccgaaaaatat

SEQ ID NO: 199415 - DNA, 25 bp, Probe sequence
tgatgattataatgtgcaacagtta

SEQ ID NO: 199416 - DNA, 25 bp, Probe sequence
tctaaagagttagaatttacttttg

SEQ ID NO: 199417 - DNA, 25 bp, Probe sequence
tcatctgtagggtctaaagagttag

SEQ ID NO: 199418 - DNA, 25 bp, Probe sequence
taaaaggctcatctgtagggtctaa

SEQ ID NO: 199419 - DNA, 25 bp, Probe sequence
taccaacgaaacaagcaccgaaaat

SEQ ID NO: 199420 - DNA, 25 bp, Probe sequence
tatgacataccaacgaaacaagcac

SEQ ID NO: 199421 - DNA, 25 bp, Probe sequence
tattccgaaaaatatcaattgagga

SEQ ID NO: 199422 - DNA, 25 bp, Probe sequence
tttaaaaggctcatctgtagggtct

SEQ ID NO: 199423 - DNA, 25 bp, Probe sequence
ttaaaaggctcatctgtagggtcta

SEQ ID NO: 199424 - DNA, 25 bp, Probe sequence
attatcccaacgaagccaatacaag

SEQ ID NO: 199425 - DNA, 25 bp, Probe sequence
atagaaatacaaaaaggacaacagg

SEQ ID NO: 199426 - DNA, 25 bp, Probe sequence
ataatcaaattatcccaacgaagcc

SEQ ID NO: 199427 - DNA, 25 bp, Probe sequence
ataatcagctctgaaatgaatattc

SEQ ID NO: 199428 - DNA, 25 bp, Probe sequence
atcaaattatcccaacgaagccaat

SEQ ID NO: 199429 - DNA, 25 bp, Probe sequence
atcccaacgaagccaatacaagatg

SEQ ID NO: 199430 - DNA, 25 bp, Probe sequence
aggtacatggataatcagctctgaa

SEQ ID NO: 199431 - DNA, 25 bp, Probe sequence
acgaagccaatacaagatgacaagt

SEQ ID NO: 199432 - DNA, 25 bp, Probe sequence
aaattatcccaacgaagccaataca

SEQ ID NO: 199433 - DNA, 25 bp, Probe sequence
aaaggtacatggataatcagctctg

SEQ ID NO: 199434 - DNA, 25 bp, Probe sequence
aacgaagccaatacaagatgacaag

SEQ ID NO: 199435 - DNA, 25 bp, Probe sequence
aagccaatacaagatgacaagttga

SEQ ID NO: 199436 - DNA, 25 bp, Probe sequence
aagaaaaaaatatccagtcaaaatg

SEQ ID NO: 199437 - DNA, 25 bp, Probe sequence
aaggtacatggataatcagctctga

SEQ ID NO: 199438 - DNA, 25 bp, Probe sequence
acaaaggtacatggataatcagctc

SEQ ID NO: 199439 - DNA, 25 bp, Probe sequence
aatcaaattatcccaacgaagccaa

SEQ ID NO: 199440 - DNA, 25 bp, Probe sequence
aattatcccaacgaagccaatacaa

SEQ ID NO: 199441 - DNA, 25 bp, Probe sequence
caacgaagccaatacaagatgacaa

SEQ ID NO: 199442 - DNA, 25 bp, Probe sequence
caaattatcccaacgaagccaatac

SEQ ID NO: 199443 - DNA, 25 bp, Probe sequence
catggataatcagctctgaaatgaa

SEQ ID NO: 199444 - DNA, 25 bp, Probe sequence
cgaagccaatacaagatgacaagtt

SEQ ID NO: 199445 - DNA, 25 bp, Probe sequence
cccaacgaagccaatacaagatgac

SEQ ID NO: 199446 - DNA, 25 bp, Probe sequence
ccaacgaagccaatacaagatgaca

SEQ ID NO: 199447 - DNA, 25 bp, Probe sequence
gaatttgacaaaggtacatggataa

SEQ ID NO: 199448 - DNA, 25 bp, Probe sequence
gacaaaggtacatggataatcagct

SEQ ID NO: 199449 - DNA, 25 bp, Probe sequence
gtacatggataatcagctctgaaat

SEQ ID NO: 199450 - DNA, 25 bp, Probe sequence
ggtacatggataatcagctctgaaa

SEQ ID NO: 199451 - DNA, 25 bp, Probe sequence
ggataatcagctctgaaatgaatat

SEQ ID NO: 199452 - DNA, 25 bp, Probe sequence
tcccaacgaagccaatacaagatga

SEQ ID NO: 199453 - DNA, 25 bp, Probe sequence
tcaaattatcccaacgaagccaata

SEQ ID NO: 199454 - DNA, 25 bp, Probe sequence
taatcaaattatcccaacgaagcca

SEQ ID NO: 199455 - DNA, 25 bp, Probe sequence
tacatggataatcagctctgaaatg

SEQ ID NO: 199456 - DNA, 25 bp, Probe sequence
tatcccaacgaagccaatacaagat

SEQ ID NO: 199457 - DNA, 25 bp, Probe sequence
ttatcccaacgaagccaatacaaga

SEQ ID NO: 199458 - DNA, 25 bp, Probe sequence
attggattgttgattctgagatggt

SEQ ID NO: 199459 - DNA, 25 bp, Probe sequence
atataaatcgtaatactagaacaac

SEQ ID NO: 199460 - DNA, 25 bp, Probe sequence
ataatattccaaccaacaaagctcc

SEQ ID NO: 199461 - DNA, 25 bp, Probe sequence
agtatggtgctctatataaatcgta

SEQ ID NO: 199462 - DNA, 25 bp, Probe sequence
agacttttatgataaggaaggcttt

SEQ ID NO: 199463 - DNA, 25 bp, Probe sequence
agagaacatttatttttctgatagt

SEQ ID NO: 199464 - DNA, 25 bp, Probe sequence
aaagggcgacaaaggcaattggatt

SEQ ID NO: 199465 - DNA, 25 bp, Probe sequence
aaagctccgaaactattattgaaag

SEQ ID NO: 199466 - DNA, 25 bp, Probe sequence
aaaaggttcatcaataggatcaaaa

SEQ ID NO: 199467 - DNA, 25 bp, Probe sequence
aacaaagctccgaaactattattga

SEQ ID NO: 199468 - DNA, 25 bp, Probe sequence
aatggaatctagaagtatggtgctc

SEQ ID NO: 199469 - DNA, 25 bp, Probe sequence
aatattccaaccaacaaagctccga

SEQ ID NO: 199470 - DNA, 25 bp, Probe sequence
caaccaacaaagctccgaaactatt

SEQ ID NO: 199471 - DNA, 25 bp, Probe sequence
cataatcgaattatcccaacgaaac

SEQ ID NO: 199472 - DNA, 25 bp, Probe sequence
ccaacaaagctccgaaactattatt

SEQ ID NO: 199473 - DNA, 25 bp, Probe sequence
gctccgaaactattattgaaaggtg

SEQ ID NO: 199474 - DNA, 25 bp, Probe sequence
gaagtatggtgctctatataaatcg

SEQ ID NO: 199475 - DNA, 25 bp, Probe sequence
gaagagaacatttatttttctgata

SEQ ID NO: 199476 - DNA, 25 bp, Probe sequence
gaaactattattgaaaggtgatggt

SEQ ID NO: 199477 - DNA, 25 bp, Probe sequence
gagatggtaattgagctgaaggata

SEQ ID NO: 199478 - DNA, 25 bp, Probe sequence
gatcaaaaaatctagaatttacctt

SEQ ID NO: 199479 - DNA, 25 bp, Probe sequence
gattctgagatggtaattgagctga

SEQ ID NO: 199480 - DNA, 25 bp, Probe sequence
gttagagaattgtgggaagatagta

SEQ ID NO: 199481 - DNA, 25 bp, Probe sequence
gtaaagggtatgcacaaagtaaaga

SEQ ID NO: 199482 - DNA, 25 bp, Probe sequence
gtgaagcaacttcgaaaaagatata

SEQ ID NO: 199483 - DNA, 25 bp, Probe sequence
gggcgacaaaggcaattggattgtt

SEQ ID NO: 199484 - DNA, 25 bp, Probe sequence
gggaagatagtaaagggtatgcaca

SEQ ID NO: 199485 - DNA, 25 bp, Probe sequence
ggattgttgattctgagatggtaat

SEQ ID NO: 199486 - DNA, 25 bp, Probe sequence
ggaatctagaagtatggtgctctat

SEQ ID NO: 199487 - DNA, 25 bp, Probe sequence
ggcaattggattgttgattctgaga

SEQ ID NO: 199488 - DNA, 25 bp, Probe sequence
tccaaccaacaaagctccgaaacta

SEQ ID NO: 199489 - DNA, 25 bp, Probe sequence
taatcgaattatcccaacgaaaccg

SEQ ID NO: 199490 - DNA, 25 bp, Probe sequence
tatggtgctctatataaatcgtaat

SEQ ID NO: 199491 - DNA, 25 bp, Probe sequence
tattccaaccaacaaagctccgaaa

SEQ ID NO: 199492 - DNA, 25 bp, Probe sequence
atttttgtactttctggtgcgattt

SEQ ID NO: 199493 - DNA, 25 bp, Probe sequence
atataatctttgggtacttcatcat

SEQ ID NO: 199494 - DNA, 25 bp, Probe sequence
atctttgggtacttcatcatatttg

SEQ ID NO: 199495 - DNA, 25 bp, Probe sequence
atggcagttatataatctttgggta

SEQ ID NO: 199496 - DNA, 25 bp, Probe sequence
agaggcgcgacttttcatttgattt

SEQ ID NO: 199497 - DNA, 25 bp, Probe sequence
acttcatcatatttgcagtcgagca

SEQ ID NO: 199498 - DNA, 25 bp, Probe sequence
aaatgcatattttagaggcgcgact

SEQ ID NO: 199499 - DNA, 25 bp, Probe sequence
aaatgttgcctgaaaatgcatattt

SEQ ID NO: 199500 - DNA, 25 bp, Probe sequence
catggttattatagggttcttatat

SEQ ID NO: 199501 - DNA, 25 bp, Probe sequence
catcatatttgcagtcgagcattta

SEQ ID NO: 199502 - DNA, 25 bp, Probe sequence
cttttcatttgatttcttacacagt

SEQ ID NO: 199503 - DNA, 25 bp, Probe sequence
ctctttatttttgtactttctggtg

SEQ ID NO: 199504 - DNA, 25 bp, Probe sequence
gcgacttttcatttgatttcttaca

SEQ ID NO: 199505 - DNA, 25 bp, Probe sequence
gcatattttagaggcgcgacttttc

SEQ ID NO: 199506 - DNA, 25 bp, Probe sequence
gcagtcgagcatttaatggattatt

SEQ ID NO: 199507 - DNA, 25 bp, Probe sequence
gaagtatgtacgataacctattata

SEQ ID NO: 199508 - DNA, 25 bp, Probe sequence
gataacctattatattatggcagtt

SEQ ID NO: 199509 - DNA, 25 bp, Probe sequence
gatttcttacacagttgcaacaacg

SEQ ID NO: 199510 - DNA, 25 bp, Probe sequence
gttctctttatttttgtactttctg

SEQ ID NO: 199511 - DNA, 25 bp, Probe sequence
gtttgtaagcttcaattttaccctg

SEQ ID NO: 199512 - DNA, 25 bp, Probe sequence
gggtacttcatcatatttgcagtcg

SEQ ID NO: 199513 - DNA, 25 bp, Probe sequence
ggtgcgatttttttaacatttctag

SEQ ID NO: 199514 - DNA, 25 bp, Probe sequence
ggttgggtgactttacatataatag

SEQ ID NO: 199515 - DNA, 25 bp, Probe sequence
ggcgcgacttttcatttgatttctt

SEQ ID NO: 199516 - DNA, 25 bp, Probe sequence
tgtactttctggtgcgattttttta

SEQ ID NO: 199517 - DNA, 25 bp, Probe sequence
tgcgatttttttaacatttctaggg

SEQ ID NO: 199518 - DNA, 25 bp, Probe sequence
tctagggtttggtttatatggatta

SEQ ID NO: 199519 - DNA, 25 bp, Probe sequence
tcatttgatttcttacacagttgca

SEQ ID NO: 199520 - DNA, 25 bp, Probe sequence
taagcttcaattttaccctgaaagt

SEQ ID NO: 199521 - DNA, 25 bp, Probe sequence
tatcaatatcgatttttgggtcatc

SEQ ID NO: 199522 - DNA, 25 bp, Probe sequence
tattttaggttgggtgactttacat

SEQ ID NO: 199523 - DNA, 25 bp, Probe sequence
tttagaggcgcgacttttcatttga

SEQ ID NO: 199524 - DNA, 25 bp, Probe sequence
ttatagggttcttatatgtttgtaa

SEQ ID NO: 199525 - DNA, 25 bp, Probe sequence
ttcttacacagttgcaacaacgtta

SEQ ID NO: 199526 - DNA, 25 bp, Probe sequence
atctcggaaaatgccactatttatg

SEQ ID NO: 199527 - DNA, 25 bp, Probe sequence
atgccactatttatgacgataattt

SEQ ID NO: 199528 - DNA, 25 bp, Probe sequence
actttgtaccatttgaatctcggaa

SEQ ID NO: 199529 - DNA, 25 bp, Probe sequence
actatttatgacgataatttttaca

SEQ ID NO: 199530 - DNA, 25 bp, Probe sequence
aaatgccactatttatgacgataat

SEQ ID NO: 199531 - DNA, 25 bp, Probe sequence
aaaatgccactatttatgacgataa

SEQ ID NO: 199532 - DNA, 25 bp, Probe sequence
aatctcggaaaatgccactatttat

SEQ ID NO: 199533 - DNA, 25 bp, Probe sequence
aatgccactatttatgacgataatt

SEQ ID NO: 199534 - DNA, 25 bp, Probe sequence
cactatttatgacgataatttttac

SEQ ID NO: 199535 - DNA, 25 bp, Probe sequence
ctttgtaccatttgaatctcggaaa

SEQ ID NO: 199536 - DNA, 25 bp, Probe sequence
ctatttatgacgataatttttacaa

SEQ ID NO: 199537 - DNA, 25 bp, Probe sequence
ctcggaaaatgccactatttatgac

SEQ ID NO: 199538 - DNA, 25 bp, Probe sequence
cggaaaatgccactatttatgacga

SEQ ID NO: 199539 - DNA, 25 bp, Probe sequence
ccactatttatgacgataattttta

SEQ ID NO: 199540 - DNA, 25 bp, Probe sequence
gccactatttatgacgataattttt

SEQ ID NO: 199541 - DNA, 25 bp, Probe sequence
gaatctcggaaaatgccactattta

SEQ ID NO: 199542 - DNA, 25 bp, Probe sequence
gaaaatgccactatttatgacgata

SEQ ID NO: 199543 - DNA, 25 bp, Probe sequence
gtaccatttgaatctcggaaaatgc

SEQ ID NO: 199544 - DNA, 25 bp, Probe sequence
ggaaaatgccactatttatgacgat

SEQ ID NO: 199545 - DNA, 25 bp, Probe sequence
tgtaccatttgaatctcggaaaatg

SEQ ID NO: 199546 - DNA, 25 bp, Probe sequence
tgaatctcggaaaatgccactattt

SEQ ID NO: 199547 - DNA, 25 bp, Probe sequence
tgccactatttatgacgataatttt

SEQ ID NO: 199548 - DNA, 25 bp, Probe sequence
tcggaaaatgccactatttatgacg

SEQ ID NO: 199549 - DNA, 25 bp, Probe sequence
tctcggaaaatgccactatttatga

SEQ ID NO: 199550 - DNA, 25 bp, Probe sequence
tttgtaccatttgaatctcggaaaa

SEQ ID NO: 199551 - DNA, 25 bp, Probe sequence
tatttatgacgataatttttacaat

SEQ ID NO: 199552 - DNA, 25 bp, Probe sequence
tttgaatctcggaaaatgccactat

SEQ ID NO: 199553 - DNA, 25 bp, Probe sequence
ttgtaccatttgaatctcggaaaat

SEQ ID NO: 199554 - DNA, 25 bp, Probe sequence
ttgaatctcggaaaatgccactatt

SEQ ID NO: 199555 - DNA, 25 bp, Probe sequence
attgaacttaactcaagatcaactt

SEQ ID NO: 199556 - DNA, 25 bp, Probe sequence
atagaaccaaattgaacttaactca

SEQ ID NO: 199557 - DNA, 25 bp, Probe sequence
atcgatgatttgtttcctacaagaa

SEQ ID NO: 199558 - DNA, 25 bp, Probe sequence
atgatgacatattgcatgaagaagt

SEQ ID NO: 199559 - DNA, 25 bp, Probe sequence
agtatcgatgatttgtttcctacaa

SEQ ID NO: 199560 - DNA, 25 bp, Probe sequence
acagggtacagaactcctaaacaag

SEQ ID NO: 199561 - DNA, 25 bp, Probe sequence
actacgcaaatgagcaattagatga

SEQ ID NO: 199562 - DNA, 25 bp, Probe sequence
acttaactacgcaaatgagcaatta

SEQ ID NO: 199563 - DNA, 25 bp, Probe sequence
aaatcagatactatagaaccaaatt

SEQ ID NO: 199564 - DNA, 25 bp, Probe sequence
aaaaaagctactatttcaaattatg

SEQ ID NO: 199565 - DNA, 25 bp, Probe sequence
aattagcgaaatttataggcaataa

SEQ ID NO: 199566 - DNA, 25 bp, Probe sequence
caacttggagaaaaactcaacacta

SEQ ID NO: 199567 - DNA, 25 bp, Probe sequence
cagaactcctaaacaagatgatttg

SEQ ID NO: 199568 - DNA, 25 bp, Probe sequence
catattttaaatatcagtatcgatg

SEQ ID NO: 199569 - DNA, 25 bp, Probe sequence
cttaactcaagatcaacttggagaa

SEQ ID NO: 199570 - DNA, 25 bp, Probe sequence
gctactatttcaaattatgagacag

SEQ ID NO: 199571 - DNA, 25 bp, Probe sequence
gaaccaaattgaacttaactcaaga

SEQ ID NO: 199572 - DNA, 25 bp, Probe sequence
gaacttaactcaagatcaacttgga

SEQ ID NO: 199573 - DNA, 25 bp, Probe sequence
gacagggtacagaactcctaaacaa

SEQ ID NO: 199574 - DNA, 25 bp, Probe sequence
gagacagggtacagaactcctaaac

SEQ ID NO: 199575 - DNA, 25 bp, Probe sequence
gatgatttgtttgaaattgctcata

SEQ ID NO: 199576 - DNA, 25 bp, Probe sequence
gatgatttgtttcctacaagaaata

SEQ ID NO: 199577 - DNA, 25 bp, Probe sequence
gatactatagaaccaaattgaactt

SEQ ID NO: 199578 - DNA, 25 bp, Probe sequence
gatttgtttcctacaagaaataata

SEQ ID NO: 199579 - DNA, 25 bp, Probe sequence
gatttgtttgaaattgctcatattt

SEQ ID NO: 199580 - DNA, 25 bp, Probe sequence
gtttgaaattgctcatattttaaat

SEQ ID NO: 199581 - DNA, 25 bp, Probe sequence
gtatcgatgatttgtttcctacaag

SEQ ID NO: 199582 - DNA, 25 bp, Probe sequence
gtacttaactacgcaaatgagcaat

SEQ ID NO: 199583 - DNA, 25 bp, Probe sequence
gggtacagaactcctaaacaagatg

SEQ ID NO: 199584 - DNA, 25 bp, Probe sequence
ggtacagaactcctaaacaagatga

SEQ ID NO: 199585 - DNA, 25 bp, Probe sequence
tgacatattgcatgaagaagtattt

SEQ ID NO: 199586 - DNA, 25 bp, Probe sequence
tgaaattgctcatattttaaatatc

SEQ ID NO: 199587 - DNA, 25 bp, Probe sequence
tacagaactcctaaacaagatgatt

SEQ ID NO: 199588 - DNA, 25 bp, Probe sequence
tatgagacagggtacagaactccta

SEQ ID NO: 199589 - DNA, 25 bp, Probe sequence
attgttgatattacgccaccagatt

SEQ ID NO: 199590 - DNA, 25 bp, Probe sequence
attagatattccaccagaagcttta

SEQ ID NO: 199591 - DNA, 25 bp, Probe sequence
ataatgaaactgctactccaaaaga

SEQ ID NO: 199592 - DNA, 25 bp, Probe sequence
atcttatttgatgttgtaggctatg

SEQ ID NO: 199593 - DNA, 25 bp, Probe sequence
atgccattggtcatcatgttttaga

SEQ ID NO: 199594 - DNA, 25 bp, Probe sequence
agcttacagatttctcattacctaa

SEQ ID NO: 199595 - DNA, 25 bp, Probe sequence
agctgtaagttactcaactttccta

SEQ ID NO: 199596 - DNA, 25 bp, Probe sequence
gtcaaatagctatgtacttgtctag

SEQ ID NO: 199597 - DNA, 25 bp, Probe sequence
acaactgaattaactgctgaagctt

SEQ ID NO: 199598 - DNA, 25 bp, Probe sequence
aaagattaccatccaagatattcaa

SEQ ID NO: 199599 - DNA, 25 bp, Probe sequence
aaacccatttaatgcatgccattgg

SEQ ID NO: 199600 - DNA, 25 bp, Probe sequence
aaacctcactttattactactgaag

SEQ ID NO: 199601 - DNA, 25 bp, Probe sequence
aaaaccttctactgaaacaactgag

SEQ ID NO: 199602 - DNA, 25 bp, Probe sequence
aattgtaggccagtactataatgtt

SEQ ID NO: 199603 - DNA, 25 bp, Probe sequence
cagccaaagcgtacaatccattatt

SEQ ID NO: 199604 - DNA, 25 bp, Probe sequence
catttgacacttttgtaatcggacc

SEQ ID NO: 199605 - DNA, 25 bp, Probe sequence
cgctttgaatgggggctaattgttg

SEQ ID NO: 199606 - DNA, 25 bp, Probe sequence
gcccataacacatttgacacttttg

SEQ ID NO: 199607 - DNA, 25 bp, Probe sequence
gaaggtgcattaacacgtttacttg

SEQ ID NO: 199608 - DNA, 25 bp, Probe sequence
gaagcaccagccaaagcgtacaatc

SEQ ID NO: 199609 - DNA, 25 bp, Probe sequence
gagagcaattcaatgcccataacac

SEQ ID NO: 199610 - DNA, 25 bp, Probe sequence
gaggataatcatgtgcttggtagag

SEQ ID NO: 199611 - DNA, 25 bp, Probe sequence
gatggtgaagctatcgtattatcga

SEQ ID NO: 199612 - DNA, 25 bp, Probe sequence
gatatcgtaatatcgacgtcttatt

SEQ ID NO: 199613 - DNA, 25 bp, Probe sequence
gatatcattcaagcaccaaaatcta

SEQ ID NO: 199614 - DNA, 25 bp, Probe sequence
gtacttgtctagagagcttacagat

SEQ ID NO: 199615 - DNA, 25 bp, Probe sequence
ggtgaagaatttggtgggcgtgatc

SEQ ID NO: 199616 - DNA, 25 bp, Probe sequence
tggtgggcgtgatcatacgaccgtc

SEQ ID NO: 199617 - DNA, 25 bp, Probe sequence
tgaaactcgaatggcaattttgcag

SEQ ID NO: 199618 - DNA, 25 bp, Probe sequence
tccagatgccaaagtgatttacaca

SEQ ID NO: 199619 - DNA, 25 bp, Probe sequence
taacacgtttacttgcatattcaca

SEQ ID NO: 199620 - DNA, 25 bp, Probe sequence
tacgccaccagattatgaaactcga

SEQ ID NO: 199621 - DNA, 25 bp, Probe sequence
tacgaccgtcattcatgctcatgaa

SEQ ID NO: 199622 - DNA, 25 bp, Probe sequence
ttatcgagtattccttttaatgcaa

SEQ ID NO: 199623 - DNA, 25 bp, Probe sequence
atcttctttgcttcaaaccaagttt

SEQ ID NO: 199624 - DNA, 25 bp, Probe sequence
atatttcagaaacaggctcagtagt

SEQ ID NO: 199625 - DNA, 25 bp, Probe sequence
atatcctttattacctcaagtttct

SEQ ID NO: 199626 - DNA, 25 bp, Probe sequence
atgaattaatatgcacagcgactga

SEQ ID NO: 199627 - DNA, 25 bp, Probe sequence
atgtgaactttatttctcgattatt

SEQ ID NO: 199628 - DNA, 25 bp, Probe sequence
aggacattatcctgatacaacacgt

SEQ ID NO: 199629 - DNA, 25 bp, Probe sequence
agttttatcatgcgattgatcgtgc

SEQ ID NO: 199630 - DNA, 25 bp, Probe sequence
agacattgatatcttctttgcttca

SEQ ID NO: 199631 - DNA, 25 bp, Probe sequence
acctcaagtttctagagatgacgca

SEQ ID NO: 199632 - DNA, 25 bp, Probe sequence
acttcctggacgattctttgttgat

SEQ ID NO: 199633 - DNA, 25 bp, Probe sequence
aaatgtcatcattccaggtaaggct

SEQ ID NO: 199634 - DNA, 25 bp, Probe sequence
aattttgcagtgtccacctcagaaa

SEQ ID NO: 199635 - DNA, 25 bp, Probe sequence
caaacgatgttgaaggtggtagcct

SEQ ID NO: 199636 - DNA, 25 bp, Probe sequence
cattccaggtaaggctttagctgaa

SEQ ID NO: 199637 - DNA, 25 bp, Probe sequence
ctcagaaacacgcccagtactaact

SEQ ID NO: 199638 - DNA, 25 bp, Probe sequence
gctcagtagtacttcctggacgatt

SEQ ID NO: 199639 - DNA, 25 bp, Probe sequence
gaattcttcggtacaatgaaaccat

SEQ ID NO: 199640 - DNA, 25 bp, Probe sequence
gaaatcactattcctaaaactgtag

SEQ ID NO: 199641 - DNA, 25 bp, Probe sequence
gacaatggggagttttatcatgcga

SEQ ID NO: 199642 - DNA, 25 bp, Probe sequence
gacacattaaaagctatttcaccaa

SEQ ID NO: 199643 - DNA, 25 bp, Probe sequence
gacattaattacatcaggtcattct

SEQ ID NO: 199644 - DNA, 25 bp, Probe sequence
gatgacgcaattcaattgtcggtaa

SEQ ID NO: 199645 - DNA, 25 bp, Probe sequence
gatacaacacgtttattccctgaaa

SEQ ID NO: 199646 - DNA, 25 bp, Probe sequence
gtactaactggtgtgaactggctta

SEQ ID NO: 199647 - DNA, 25 bp, Probe sequence
gtagatggcgaagatattgtcaata

SEQ ID NO: 199648 - DNA, 25 bp, Probe sequence
gtagcctgaaaatttcattcaactc

SEQ ID NO: 199649 - DNA, 25 bp, Probe sequence
gtacaggtgatgacgttgttgaatt

SEQ ID NO: 199650 - DNA, 25 bp, Probe sequence
ggtgacgactcggtaacgcaattaa

SEQ ID NO: 199651 - DNA, 25 bp, Probe sequence
tgcagtgtccacctcagaaacacgc

SEQ ID NO: 199652 - DNA, 25 bp, Probe sequence
tcacaccgcttggctgtaagaaagt

SEQ ID NO: 199653 - DNA, 25 bp, Probe sequence
taattttaccaatcagaacttacta

SEQ ID NO: 199654 - DNA, 25 bp, Probe sequence
tacatcaccagaaattggtactgta

SEQ ID NO: 199655 - DNA, 25 bp, Probe sequence
tagatccagatcaatatcctttatt

SEQ ID NO: 199656 - DNA, 25 bp, Probe sequence
ttcaccaagaacaacattacctata

SEQ ID NO: 199657 - DNA, 25 bp, Probe sequence
acctaacttatatcatttcttaaat

SEQ ID NO: 199658 - DNA, 25 bp, Probe sequence
acatttgatgttattggtagtcctt

SEQ ID NO: 199659 - DNA, 25 bp, Probe sequence
acagtttgaagtagataaagccatt

SEQ ID NO: 199660 - DNA, 25 bp, Probe sequence
ccgaggtcgcacagacgtaacgcat

SEQ ID NO: 199661 - DNA, 25 bp, Probe sequence
aactggcaatcatttaacatatgga

SEQ ID NO: 199662 - DNA, 25 bp, Probe sequence
aaccattagttgtagtttgtcatgc

SEQ ID NO: 199663 - DNA, 25 bp, Probe sequence
catatggaacagatgattatccggg

SEQ ID NO: 199664 - DNA, 25 bp, Probe sequence
cgaacatcatcttatagtagagctt

SEQ ID NO: 199665 - DNA, 25 bp, Probe sequence
gccattcatcttggtggtaaggaag

SEQ ID NO: 199666 - DNA, 25 bp, Probe sequence
gctagatgtattggatagtcacaac

SEQ ID NO: 199667 - DNA, 25 bp, Probe sequence
gacaaattacacagtagatacttta

SEQ ID NO: 199668 - DNA, 25 bp, Probe sequence
gaccgaggtcgcacagacgtaacgc

SEQ ID NO: 199669 - DNA, 25 bp, Probe sequence
gagcgaatgaacgaggtatacaagc

SEQ ID NO: 199670 - DNA, 25 bp, Probe sequence
gataacttgcgtttgagatatgagc

SEQ ID NO: 199671 - DNA, 25 bp, Probe sequence
gatttgaattgttatctgacactgc

SEQ ID NO: 199672 - DNA, 25 bp, Probe sequence
gttatctgacactgctagatgtatt

SEQ ID NO: 199673 - DNA, 25 bp, Probe sequence
gttttaaatatcatcgtcatttctt

SEQ ID NO: 199674 - DNA, 25 bp, Probe sequence
gtttgtcatgcattaactggcaatc

SEQ ID NO: 199675 - DNA, 25 bp, Probe sequence
gtacctgggcacctaacttatatca

SEQ ID NO: 199676 - DNA, 25 bp, Probe sequence
gggcacctaacttatatcatttctt

SEQ ID NO: 199677 - DNA, 25 bp, Probe sequence
gggaagtcatagataacttgcgttt

SEQ ID NO: 199678 - DNA, 25 bp, Probe sequence
ggtggcgagaaattattgatggggg

SEQ ID NO: 199679 - DNA, 25 bp, Probe sequence
ggttatcatggacaaccattagttg

SEQ ID NO: 199680 - DNA, 25 bp, Probe sequence
ggaaggtctaagtattgcacgccaa

SEQ ID NO: 199681 - DNA, 25 bp, Probe sequence
tggtagtcctttcggttcaagttca

SEQ ID NO: 199682 - DNA, 25 bp, Probe sequence
tgttattggtagtcctttcggttca

SEQ ID NO: 199683 - DNA, 25 bp, Probe sequence
tgatggattcctactaaactttagt

SEQ ID NO: 199684 - DNA, 25 bp, Probe sequence
tcttatagtagagctttcaatgaaa

SEQ ID NO: 199685 - DNA, 25 bp, Probe sequence
tcatgcattaactggcaatcattta

SEQ ID NO: 199686 - DNA, 25 bp, Probe sequence
tagtcacaacattgaccgaggtcgc

SEQ ID NO: 199687 - DNA, 25 bp, Probe sequence
tagtcctttcggttcaagttcacct

SEQ ID NO: 199688 - DNA, 25 bp, Probe sequence
taggttttttgacatatcgatcatc

SEQ ID NO: 199689 - DNA, 25 bp, Probe sequence
tttagtacctgggcacctaacttat

SEQ ID NO: 199690 - DNA, 25 bp, Probe sequence
ttgcacgccaattaggttttttgac

SEQ ID NO: 199691 - DNA, 25 bp, Probe sequence
attctaataataatccatttaacat

SEQ ID NO: 199692 - DNA, 25 bp, Probe sequence
atttgatggcaataactatatagat

SEQ ID NO: 199693 - DNA, 25 bp, Probe sequence
atattgttcgatatcttcggatgta

SEQ ID NO: 199694 - DNA, 25 bp, Probe sequence
atagcagccggctcagttgttacta

SEQ ID NO: 199695 - DNA, 25 bp, Probe sequence
atcctacacacttttttagctcatc

SEQ ID NO: 199696 - DNA, 25 bp, Probe sequence
agactttaatgaccaaccaagccgt

SEQ ID NO: 199697 - DNA, 25 bp, Probe sequence
agctcatcaccgattttttattcta

SEQ ID NO: 199698 - DNA, 25 bp, Probe sequence
accagtcctctaaagaatcgaatgt

SEQ ID NO: 199699 - DNA, 25 bp, Probe sequence
actggtgcagtcatagcagccggct

SEQ ID NO: 199700 - DNA, 25 bp, Probe sequence
acttttttagctcatcaccgatttt

SEQ ID NO: 199701 - DNA, 25 bp, Probe sequence
gcaagtggtgggagaaaacgcctga

SEQ ID NO: 199702 - DNA, 25 bp, Probe sequence
acagttatattggatttggtagtga

SEQ ID NO: 199703 - DNA, 25 bp, Probe sequence
acacttttttagctcatcaccgatt

SEQ ID NO: 199704 - DNA, 25 bp, Probe sequence
aaaatcaggaattctcacattggtg

SEQ ID NO: 199705 - DNA, 25 bp, Probe sequence
aacatcctacacacttttttagctc

SEQ ID NO: 199706 - DNA, 25 bp, Probe sequence
aagtgattaagaagcgatttgacaa

SEQ ID NO: 199707 - DNA, 25 bp, Probe sequence
aatgttaagattcatcgcttggcgt

SEQ ID NO: 199708 - DNA, 25 bp, Probe sequence
cagccggctcagttgttactaaaaa

SEQ ID NO: 199709 - DNA, 25 bp, Probe sequence
catcaccgattttttattctaataa

SEQ ID NO: 199710 - DNA, 25 bp, Probe sequence
ctcacattggtgaatacagttatat

SEQ ID NO: 199711 - DNA, 25 bp, Probe sequence
gcttggcgtatattacaaactcaaa

SEQ ID NO: 199712 - DNA, 25 bp, Probe sequence
gaaaaaccagtcctctaaagaatcg

SEQ ID NO: 199713 - DNA, 25 bp, Probe sequence
gaccaaccaagccgtacaacaatta

SEQ ID NO: 199714 - DNA, 25 bp, Probe sequence
gatgtgtggattggtgcaaatgtaa

SEQ ID NO: 199715 - DNA, 25 bp, Probe sequence
gattcatcgcttggcgtatattaca

SEQ ID NO: 199716 - DNA, 25 bp, Probe sequence
gttcctgcaaaagtgattaagaagc

SEQ ID NO: 199717 - DNA, 25 bp, Probe sequence
gtttgctgaaaaaccagtcctctaa

SEQ ID NO: 199718 - DNA, 25 bp, Probe sequence
gtaggagcatatgaggttgttggtg

SEQ ID NO: 199719 - DNA, 25 bp, Probe sequence
gtcatagcagccggctcagttgtta

SEQ ID NO: 199720 - DNA, 25 bp, Probe sequence
gggttaggaaaacatcctacacact

SEQ ID NO: 199721 - DNA, 25 bp, Probe sequence
taatgaccaaccaagccgtacaaca

SEQ ID NO: 199722 - DNA, 25 bp, Probe sequence
tacacacttttttagctcatcaccg

SEQ ID NO: 199723 - DNA, 25 bp, Probe sequence
tatcttcggatgtaaaaattgggtt

SEQ ID NO: 199724 - DNA, 25 bp, Probe sequence
ttgaaaagataattggtttgctgaa

SEQ ID NO: 199725 - DNA, 25 bp, Probe sequence
gatataagtaacggtaaaggttcag

SEQ ID NO: 199726 - DNA, 25 bp, Probe sequence
atttctcattatctgaaatagaaaa

SEQ ID NO: 199727 - DNA, 25 bp, Probe sequence
atatcgtaataagtctttttctgta

SEQ ID NO: 199728 - DNA, 25 bp, Probe sequence
atatgaatatatacctgaagatgat

SEQ ID NO: 199729 - DNA, 25 bp, Probe sequence
atcgtaataagtctttttctgtagt

SEQ ID NO: 199730 - DNA, 25 bp, Probe sequence
atcgagaagcaagaatttcccgaaa

SEQ ID NO: 199731 - DNA, 25 bp, Probe sequence
atgcagaggttatagatttctcatt

SEQ ID NO: 199732 - DNA, 25 bp, Probe sequence
agaggttatagatttctcattatct

SEQ ID NO: 199733 - DNA, 25 bp, Probe sequence
aagagactttatcgagaagcaagaa

SEQ ID NO: 199734 - DNA, 25 bp, Probe sequence
aataagtctttttctgtagtaagag

SEQ ID NO: 199735 - DNA, 25 bp, Probe sequence
cagaggttatagatttctcattatc

SEQ ID NO: 199736 - DNA, 25 bp, Probe sequence
ctttttctgtagtaagagactttat

SEQ ID NO: 199737 - DNA, 25 bp, Probe sequence
cgagaagcaagaatttcccgaaaat

SEQ ID NO: 199738 - DNA, 25 bp, Probe sequence
gcagaggttatagatttctcattat

SEQ ID NO: 199739 - DNA, 25 bp, Probe sequence
gaagatgaacaggttataatatatg

SEQ ID NO: 199740 - DNA, 25 bp, Probe sequence
gaagcaagaatttcccgaaaattat

SEQ ID NO: 199741 - DNA, 25 bp, Probe sequence
gaagaatattttatgttatatcgta

SEQ ID NO: 199742 - DNA, 25 bp, Probe sequence
gagaagcaagaatttcccgaaaatt

SEQ ID NO: 199743 - DNA, 25 bp, Probe sequence
gagactttatcgagaagcaagaatt

SEQ ID NO: 199744 - DNA, 25 bp, Probe sequence
gatgcagaggttatagatttctcat

SEQ ID NO: 199745 - DNA, 25 bp, Probe sequence
gttatatcgtaataagtctttttct

SEQ ID NO: 199746 - DNA, 25 bp, Probe sequence
gtagtaagagactttatcgagaagc

SEQ ID NO: 199747 - DNA, 25 bp, Probe sequence
gtaagagactttatcgagaagcaag

SEQ ID NO: 199748 - DNA, 25 bp, Probe sequence
gtaataagtctttttctgtagtaag

SEQ ID NO: 199749 - DNA, 25 bp, Probe sequence
gtctttttctgtagtaagagacttt

SEQ ID NO: 199750 - DNA, 25 bp, Probe sequence
tgaagatgatataagtaacggtaaa

SEQ ID NO: 199751 - DNA, 25 bp, Probe sequence
tcgtaataagtctttttctgtagta

SEQ ID NO: 199752 - DNA, 25 bp, Probe sequence
tctgtagtaagagactttatcgaga

SEQ ID NO: 199753 - DNA, 25 bp, Probe sequence
taagtctttttctgtagtaagagac

SEQ ID NO: 199754 - DNA, 25 bp, Probe sequence
tatcgtaataagtctttttctgtag

SEQ ID NO: 199755 - DNA, 25 bp, Probe sequence
tatcgagaagcaagaatttcccgaa

SEQ ID NO: 199756 - DNA, 25 bp, Probe sequence
tatatcgtaataagtctttttctgt

SEQ ID NO: 199757 - DNA, 25 bp, Probe sequence
tttcccgaaaattataaaatagcat

SEQ ID NO: 199758 - DNA, 25 bp, Probe sequence
tttctgtagtaagagactttatcga

SEQ ID NO: 199759 - DNA, 25 bp, Probe sequence
ctagtaaagggctatttcctgaatc

SEQ ID NO: 199760 - DNA, 25 bp, Probe sequence
atttcctgaatctgaactcgtagca

SEQ ID NO: 199761 - DNA, 25 bp, Probe sequence
atctgaactcgtagcatggggataa

SEQ ID NO: 199762 - DNA, 25 bp, Probe sequence
agggctatttcctgaatctgaactc

SEQ ID NO: 199763 - DNA, 25 bp, Probe sequence
agtgttacatataaatattttccta

SEQ ID NO: 199764 - DNA, 25 bp, Probe sequence
agtaaagggctatttcctgaatctg

SEQ ID NO: 199765 - DNA, 25 bp, Probe sequence
agacagaatatacataaatactagt

SEQ ID NO: 199766 - DNA, 25 bp, Probe sequence
aaagggctatttcctgaatctgaac

SEQ ID NO: 199767 - DNA, 25 bp, Probe sequence
aagggctatttcctgaatctgaact

SEQ ID NO: 199768 - DNA, 25 bp, Probe sequence
aatctgaactcgtagcatggggata

SEQ ID NO: 199769 - DNA, 25 bp, Probe sequence
aatactagtaaagggctatttcctg

SEQ ID NO: 199770 - DNA, 25 bp, Probe sequence
aattattttattcatgccatagaca

SEQ ID NO: 199771 - DNA, 25 bp, Probe sequence
cctgaatctgaactcgtagcatggg

SEQ ID NO: 199772 - DNA, 25 bp, Probe sequence
catgccatagacagaatatacataa

SEQ ID NO: 199773 - DNA, 25 bp, Probe sequence
ctatttcctgaatctgaactcgtag

SEQ ID NO: 199774 - DNA, 25 bp, Probe sequence
ctgaatctgaactcgtagcatgggg

SEQ ID NO: 199775 - DNA, 25 bp, Probe sequence
gctatttcctgaatctgaactcgta

SEQ ID NO: 199776 - DNA, 25 bp, Probe sequence
gaatctgaactcgtagcatggggat

SEQ ID NO: 199777 - DNA, 25 bp, Probe sequence
gaagttatcaatgctgaaaaatcta

SEQ ID NO: 199778 - DNA, 25 bp, Probe sequence
gttacatataaatattttcctaata

SEQ ID NO: 199779 - DNA, 25 bp, Probe sequence
gtaaagggctatttcctgaatctga

SEQ ID NO: 199780 - DNA, 25 bp, Probe sequence
gggctatttcctgaatctgaactcg

SEQ ID NO: 199781 - DNA, 25 bp, Probe sequence
ggtattattcaaatggatatagata

SEQ ID NO: 199782 - DNA, 25 bp, Probe sequence
ggctatttcctgaatctgaactcgt

SEQ ID NO: 199783 - DNA, 25 bp, Probe sequence
tgaatctgaactcgtagcatgggga

SEQ ID NO: 199784 - DNA, 25 bp, Probe sequence
tcctgaatctgaactcgtagcatgg

SEQ ID NO: 199785 - DNA, 25 bp, Probe sequence
tcaatgctgaaaaatctagtttaga

SEQ ID NO: 199786 - DNA, 25 bp, Probe sequence
taaagggctatttcctgaatctgaa

SEQ ID NO: 199787 - DNA, 25 bp, Probe sequence
tactagtaaagggctatttcctgaa

SEQ ID NO: 199788 - DNA, 25 bp, Probe sequence
tatttcctgaatctgaactcgtagc

SEQ ID NO: 199789 - DNA, 25 bp, Probe sequence
tattttattcatgccatagacagaa

SEQ ID NO: 199790 - DNA, 25 bp, Probe sequence
ttcatgccatagacagaatatacat

SEQ ID NO: 199791 - DNA, 25 bp, Probe sequence
tttcctgaatctgaactcgtagcat

SEQ ID NO: 199792 - DNA, 25 bp, Probe sequence
ttcctgaatctgaactcgtagcatg

SEQ ID NO: 199793 - DNA, 25 bp, Probe sequence
attacagttcgcagcttagatcgcg

SEQ ID NO: 199794 - DNA, 25 bp, Probe sequence
attacaaattattacagttcgcagc

SEQ ID NO: 199795 - DNA, 25 bp, Probe sequence
attattacagttcgcagcttagatc

SEQ ID NO: 199796 - DNA, 25 bp, Probe sequence
atattgcaaacgctaaattacaaat

SEQ ID NO: 199797 - DNA, 25 bp, Probe sequence
agttcgcagcttagatcgcgacgga

SEQ ID NO: 199798 - DNA, 25 bp, Probe sequence
tcgcagcttagatcgcgacggacct

SEQ ID NO: 199799 - DNA, 25 bp, Probe sequence
acagttcgcagcttagatcgcgacg

SEQ ID NO: 199800 - DNA, 25 bp, Probe sequence
acaaattattacagttcgcagctta

SEQ ID NO: 199801 - DNA, 25 bp, Probe sequence
aaattattacagttcgcagcttaga

SEQ ID NO: 199802 - DNA, 25 bp, Probe sequence
aaattacaaattattacagttcgca

SEQ ID NO: 199803 - DNA, 25 bp, Probe sequence
aattattacagttcgcagcttagat

SEQ ID NO: 199804 - DNA, 25 bp, Probe sequence
aattacaaattattacagttcgcag

SEQ ID NO: 199805 - DNA, 25 bp, Probe sequence
caaattattacagttcgcagcttag

SEQ ID NO: 199806 - DNA, 25 bp, Probe sequence
cagttcgcagcttagatcgcgacgg

SEQ ID NO: 199807 - DNA, 25 bp, Probe sequence
catattgcaaacgctaaattacaaa

SEQ ID NO: 199808 - DNA, 25 bp, Probe sequence
gttcgcagcttagatcgcgacggac

SEQ ID NO: 199809 - DNA, 25 bp, Probe sequence
tattacagttcgcagcttagatcgc

SEQ ID NO: 199810 - DNA, 25 bp, Probe sequence
taaattacaaattattacagttcgc

SEQ ID NO: 199811 - DNA, 25 bp, Probe sequence
tacaaattattacagttcgcagctt

SEQ ID NO: 199812 - DNA, 25 bp, Probe sequence
tacagttcgcagcttagatcgcgac

SEQ ID NO: 199813 - DNA, 25 bp, Probe sequence
ttcgcagcttagatcgcgacggacc

SEQ ID NO: 199814 - DNA, 25 bp, Probe sequence
tattgcaaacgctaaattacaaatt

SEQ ID NO: 199815 - DNA, 25 bp, Probe sequence
ttattacagttcgcagcttagatcg

SEQ ID NO: 199816 - DNA, 25 bp, Probe sequence
ttacagttcgcagcttagatcgcga

SEQ ID NO: 199817 - DNA, 25 bp, Probe sequence
ttacaaattattacagttcgcagct

SEQ ID NO: 199818 - DNA, 25 bp, Probe sequence
attgtgataacctttcaatcagtta

SEQ ID NO: 199819 - DNA, 25 bp, Probe sequence
attcccattttgttgaaatagaaat

SEQ ID NO: 199820 - DNA, 25 bp, Probe sequence
attcaattgtgataacctttcaatc

SEQ ID NO: 199821 - DNA, 25 bp, Probe sequence
ataagaaacgttttgctgcaactga

SEQ ID NO: 199822 - DNA, 25 bp, Probe sequence
agaaacgttttgctgcaactgaaat

SEQ ID NO: 199823 - DNA, 25 bp, Probe sequence
acggcaattcccattttgttgaaat

SEQ ID NO: 199824 - DNA, 25 bp, Probe sequence
aacgttttgctgcaactgaaatagg

SEQ ID NO: 199825 - DNA, 25 bp, Probe sequence
aagaaacgttttgctgcaactgaaa

SEQ ID NO: 199826 - DNA, 25 bp, Probe sequence
caattcaattgtgataacctttcaa

SEQ ID NO: 199827 - DNA, 25 bp, Probe sequence
caattcccattttgttgaaatagaa

SEQ ID NO: 199828 - DNA, 25 bp, Probe sequence
aattgtgataacctttcaatcagtt

SEQ ID NO: 199829 - DNA, 25 bp, Probe sequence
caaaacggcaattcccattttgttg

SEQ ID NO: 199830 - DNA, 25 bp, Probe sequence
cggcaattcccattttgttgaaata

SEQ ID NO: 199831 - DNA, 25 bp, Probe sequence
cgttttgctgcaactgaaataggtg

SEQ ID NO: 199832 - DNA, 25 bp, Probe sequence
cgtttttatagttcaattcaattgt

SEQ ID NO: 199833 - DNA, 25 bp, Probe sequence
ccgtttttatagttcaattcaattg

SEQ ID NO: 199834 - DNA, 25 bp, Probe sequence
gcaattcccattttgttgaaataga

SEQ ID NO: 199835 - DNA, 25 bp, Probe sequence
gaaacgttttgctgcaactgaaata

SEQ ID NO: 199836 - DNA, 25 bp, Probe sequence
gataacctttcaatcagttataaga

SEQ ID NO: 199837 - DNA, 25 bp, Probe sequence
gttataagaaacgttttgctgcaac

SEQ ID NO: 199838 - DNA, 25 bp, Probe sequence
gttttgctgcaactgaaataggtgg

SEQ ID NO: 199839 - DNA, 25 bp, Probe sequence
gtgataacctttcaatcagttataa

SEQ ID NO: 199840 - DNA, 25 bp, Probe sequence
ggcaattcccattttgttgaaatag

SEQ ID NO: 199841 - DNA, 25 bp, Probe sequence
tgtgataacctttcaatcagttata

SEQ ID NO: 199842 - DNA, 25 bp, Probe sequence
tgctgcaactgaaataggtggaatt

SEQ ID NO: 199843 - DNA, 25 bp, Probe sequence
ttttgctgcaactgaaataggtgga

SEQ ID NO: 199844 - DNA, 25 bp, Probe sequence
tcaattcaattgtgataacctttca

SEQ ID NO: 199845 - DNA, 25 bp, Probe sequence
tcaattgtgataacctttcaatcag

SEQ ID NO: 199846 - DNA, 25 bp, Probe sequence
taacctttcaatcagttataagaaa

SEQ ID NO: 199847 - DNA, 25 bp, Probe sequence
taagaaacgttttgctgcaactgaa

SEQ ID NO: 199848 - DNA, 25 bp, Probe sequence
taccgtttttatagttcaattcaat

SEQ ID NO: 199849 - DNA, 25 bp, Probe sequence
tataagaaacgttttgctgcaactg

SEQ ID NO: 199850 - DNA, 25 bp, Probe sequence
ttcaattcaattgtgataacctttc

SEQ ID NO: 199851 - DNA, 25 bp, Probe sequence
ttgctgcaactgaaataggtggaat

SEQ ID NO: 199852 - DNA, 25 bp, Probe sequence
attgaagatgcatatcgtaaagatg

SEQ ID NO: 199853 - DNA, 25 bp, Probe sequence
attcgtttgatgaaactgagataaa

SEQ ID NO: 199854 - DNA, 25 bp, Probe sequence
attttgctgtttattcgtttgatga

SEQ ID NO: 199855 - DNA, 25 bp, Probe sequence
atcacgcttttgaataatgaagaat

SEQ ID NO: 199856 - DNA, 25 bp, Probe sequence
atgttattatcacgcttttgaataa

SEQ ID NO: 199857 - DNA, 25 bp, Probe sequence
agatgttattatcacgcttttgaat

SEQ ID NO: 199858 - DNA, 25 bp, Probe sequence
agatgcatatcgtaaagatgttatt

SEQ ID NO: 199859 - DNA, 25 bp, Probe sequence
acaggaaatcttgttgtagatatac

SEQ ID NO: 199860 - DNA, 25 bp, Probe sequence
aaagatgttattatcacgcttttga

SEQ ID NO: 199861 - DNA, 25 bp, Probe sequence
aaacaggaaatcttgttgtagatat

SEQ ID NO: 199862 - DNA, 25 bp, Probe sequence
aagatgttattatcacgcttttgaa

SEQ ID NO: 199863 - DNA, 25 bp, Probe sequence
cacgcttttgaataatgaagaatac

SEQ ID NO: 199864 - DNA, 25 bp, Probe sequence
ctgtttattcgtttgatgaaactga

SEQ ID NO: 199865 - DNA, 25 bp, Probe sequence
gctgtttattcgtttgatgaaactg

SEQ ID NO: 199866 - DNA, 25 bp, Probe sequence
gaagatgcatatcgtaaagatgtta

SEQ ID NO: 199867 - DNA, 25 bp, Probe sequence
gaaacaggaaatcttgttgtagata

SEQ ID NO: 199868 - DNA, 25 bp, Probe sequence
gaaatcttgttgtagatatacagac

SEQ ID NO: 199869 - DNA, 25 bp, Probe sequence
gatgttattatcacgcttttgaata

SEQ ID NO: 199870 - DNA, 25 bp, Probe sequence
gatgcatatcgtaaagatgttatta

SEQ ID NO: 199871 - DNA, 25 bp, Probe sequence
gattttgctgtttattcgtttgatg

SEQ ID NO: 199872 - DNA, 25 bp, Probe sequence
gttattatcacgcttttgaataatg

SEQ ID NO: 199873 - DNA, 25 bp, Probe sequence
gtttattcgtttgatgaaactgaga

SEQ ID NO: 199874 - DNA, 25 bp, Probe sequence
tgttattatcacgcttttgaataat

SEQ ID NO: 199875 - DNA, 25 bp, Probe sequence
tgaagatgcatatcgtaaagatgtt

SEQ ID NO: 199876 - DNA, 25 bp, Probe sequence
tgctgtttattcgtttgatgaaact

SEQ ID NO: 199877 - DNA, 25 bp, Probe sequence
tatcacgcttttgaataatgaagaa

SEQ ID NO: 199878 - DNA, 25 bp, Probe sequence
tattatcacgcttttgaataatgaa

SEQ ID NO: 199879 - DNA, 25 bp, Probe sequence
tttgctgtttattcgtttgatgaaa

SEQ ID NO: 199880 - DNA, 25 bp, Probe sequence
ttttgctgtttattcgtttgatgaa

SEQ ID NO: 199881 - DNA, 25 bp, Probe sequence
ttattcgtttgatgaaactgagata

SEQ ID NO: 199882 - DNA, 25 bp, Probe sequence
ttattatcacgcttttgaataatga

SEQ ID NO: 199883 - DNA, 25 bp, Probe sequence
ttatcacgcttttgaataatgaaga

SEQ ID NO: 199884 - DNA, 25 bp, Probe sequence
ttgctgtttattcgtttgatgaaac

SEQ ID NO: 199885 - DNA, 25 bp, Probe sequence
ttgtaactgactatgaaaatgaatt

SEQ ID NO: 199886 - DNA, 25 bp, Probe sequence
attaatggtctatttaagcaattat

SEQ ID NO: 199887 - DNA, 25 bp, Probe sequence
attattgcttcatcagcttttaaac

SEQ ID NO: 199888 - DNA, 25 bp, Probe sequence
atattgttcaagacccaagggtact

SEQ ID NO: 199889 - DNA, 25 bp, Probe sequence
atatgcgaaaaatgcctttattaat

SEQ ID NO: 199890 - DNA, 25 bp, Probe sequence
ataattcgagggtttggtccgcatg

SEQ ID NO: 199891 - DNA, 25 bp, Probe sequence
atgccttcgtaacagtaagtcatgc

SEQ ID NO: 199892 - DNA, 25 bp, Probe sequence
atgaataattcacaagctactaata

SEQ ID NO: 199893 - DNA, 25 bp, Probe sequence
aggcgtctaaaattttgaattggca

SEQ ID NO: 199894 - DNA, 25 bp, Probe sequence
agattgtaattatcgtttgttaggt

SEQ ID NO: 199895 - DNA, 25 bp, Probe sequence
agagtttattattgcttcatcagct

SEQ ID NO: 199896 - DNA, 25 bp, Probe sequence
agaattggttgataagttagcagaa

SEQ ID NO: 199897 - DNA, 25 bp, Probe sequence
agcgaatgttattacgaatgcacct

SEQ ID NO: 199898 - DNA, 25 bp, Probe sequence
aaaacatcgtgttaatgccttcgta

SEQ ID NO: 199899 - DNA, 25 bp, Probe sequence
aagcgtataagatttgcaacaggtg

SEQ ID NO: 199900 - DNA, 25 bp, Probe sequence
aagagcatatttatctcaatgaaaa

SEQ ID NO: 199901 - DNA, 25 bp, Probe sequence
aatgctccttcattcataattcgag

SEQ ID NO: 199902 - DNA, 25 bp, Probe sequence
cacgatttgtttaatcatttacgtc

SEQ ID NO: 199903 - DNA, 25 bp, Probe sequence
gtttgttaggtagcaaggtagatcc

SEQ ID NO: 199904 - DNA, 25 bp, Probe sequence
gctaatattgtttatgatgcgcatg

SEQ ID NO: 199905 - DNA, 25 bp, Probe sequence
gcttttaaacaaaatgctccttcat

SEQ ID NO: 199906 - DNA, 25 bp, Probe sequence
gaatgtatacatgctggtttaccag

SEQ ID NO: 199907 - DNA, 25 bp, Probe sequence
gatttcgacgtattattaatggtct

SEQ ID NO: 199908 - DNA, 25 bp, Probe sequence
gatttgcaacaggtgttatccgaga

SEQ ID NO: 199909 - DNA, 25 bp, Probe sequence
gattcatgcaaatgatttcgacgta

SEQ ID NO: 199910 - DNA, 25 bp, Probe sequence
gttccacttatttcaaagtttgtag

SEQ ID NO: 199911 - DNA, 25 bp, Probe sequence
gttagcagaaagtaatgttggtgtt

SEQ ID NO: 199912 - DNA, 25 bp, Probe sequence
gttattacgaatgcacctattttaa

SEQ ID NO: 199913 - DNA, 25 bp, Probe sequence
gtatcgagtaatattgttcaagacc

SEQ ID NO: 199914 - DNA, 25 bp, Probe sequence
gtaacagtaagtcatgcagcaaaag

SEQ ID NO: 199915 - DNA, 25 bp, Probe sequence
gtcaaaatgcaattaaggcgtctaa

SEQ ID NO: 199916 - DNA, 25 bp, Probe sequence
ggtgttatccgagaaattaaagctt

SEQ ID NO: 199917 - DNA, 25 bp, Probe sequence
ggtttggtccgcatgaagaagtgat

SEQ ID NO: 199918 - DNA, 25 bp, Probe sequence
tcgagggtttggtccgcatgaagaa

SEQ ID NO: 199919 - DNA, 25 bp, Probe sequence
taaacctgacgtgattcatgcaaat

SEQ ID NO: 199920 - DNA, 25 bp, Probe sequence
attttgatggttataattcgataga

SEQ ID NO: 199921 - DNA, 25 bp, Probe sequence
atttacagtcatacataggcaaatt

SEQ ID NO: 199922 - DNA, 25 bp, Probe sequence
atacaggtagaattacatatgatat

SEQ ID NO: 199923 - DNA, 25 bp, Probe sequence
atgaatttacagtcatacataggca

SEQ ID NO: 199924 - DNA, 25 bp, Probe sequence
aggcaaattagtcaaattaacgctt

SEQ ID NO: 199925 - DNA, 25 bp, Probe sequence
agtcatacataggcaaattagtcaa

SEQ ID NO: 199926 - DNA, 25 bp, Probe sequence
agtcaaattaacgcttactaataat

SEQ ID NO: 199927 - DNA, 25 bp, Probe sequence
acagtcatacataggcaaattagtc

SEQ ID NO: 199928 - DNA, 25 bp, Probe sequence
aatttacagtcatacataggcaaat

SEQ ID NO: 199929 - DNA, 25 bp, Probe sequence
caaattagtcaaattaacgcttact

SEQ ID NO: 199930 - DNA, 25 bp, Probe sequence
cagtcatacataggcaaattagtca

SEQ ID NO: 199931 - DNA, 25 bp, Probe sequence
catacataggcaaattagtcaaatt

SEQ ID NO: 199932 - DNA, 25 bp, Probe sequence
gcaaattagtcaaattaacgcttac

SEQ ID NO: 199933 - DNA, 25 bp, Probe sequence
gaatttacagtcatacataggcaaa

SEQ ID NO: 199934 - DNA, 25 bp, Probe sequence
gaaattgatacaggtagaattacat

SEQ ID NO: 199935 - DNA, 25 bp, Probe sequence
gataattttgatggttataattcga

SEQ ID NO: 199936 - DNA, 25 bp, Probe sequence
gatacaggtagaattacatatgata

SEQ ID NO: 199937 - DNA, 25 bp, Probe sequence
gtcaaattaacgcttactaataata

SEQ ID NO: 199938 - DNA, 25 bp, Probe sequence
gtcatacataggcaaattagtcaaa

SEQ ID NO: 199939 - DNA, 25 bp, Probe sequence
ggcaaattagtcaaattaacgctta

SEQ ID NO: 199940 - DNA, 25 bp, Probe sequence
tgaatttacagtcatacataggcaa

SEQ ID NO: 199941 - DNA, 25 bp, Probe sequence
tcatacataggcaaattagtcaaat

SEQ ID NO: 199942 - DNA, 25 bp, Probe sequence
tcaaattaacgcttactaataataa

SEQ ID NO: 199943 - DNA, 25 bp, Probe sequence
tacagtcatacataggcaaattagt

SEQ ID NO: 199944 - DNA, 25 bp, Probe sequence
tagtcaaattaacgcttactaataa

SEQ ID NO: 199945 - DNA, 25 bp, Probe sequence
taggcaaattagtcaaattaacgct

SEQ ID NO: 199946 - DNA, 25 bp, Probe sequence
tttgatggttataattcgatagaaa

SEQ ID NO: 199947 - DNA, 25 bp, Probe sequence
tttacagtcatacataggcaaatta

SEQ ID NO: 199948 - DNA, 25 bp, Probe sequence
ttttgatggttataattcgatagaa

SEQ ID NO: 199949 - DNA, 25 bp, Probe sequence
ttagtcaaattaacgcttactaata

SEQ ID NO: 199950 - DNA, 25 bp, Probe sequence
ttacagtcatacataggcaaattag

SEQ ID NO: 199951 - DNA, 25 bp, Probe sequence
ttaacgcttactaataataaaatat

SEQ ID NO: 199952 - DNA, 25 bp, Probe sequence
ttcgatagaaattgatacaggtaga

SEQ ID NO: 199953 - DNA, 25 bp, Probe sequence
ttgatggttataattcgatagaaat

SEQ ID NO: 199954 - DNA, 25 bp, Probe sequence
attattttagccattggattcatca

SEQ ID NO: 199955 - DNA, 25 bp, Probe sequence
atatgccaatagaccgctgtctgtt

SEQ ID NO: 199956 - DNA, 25 bp, Probe sequence
atatggactttagaagttttgaatt

SEQ ID NO: 199957 - DNA, 25 bp, Probe sequence
atatgatgttaagtatttccctaaa

SEQ ID NO: 199958 - DNA, 25 bp, Probe sequence
ataataaagttgatcatttcattga

SEQ ID NO: 199959 - DNA, 25 bp, Probe sequence
atcatatgccaatagaccgctgtct

SEQ ID NO: 199960 - DNA, 25 bp, Probe sequence
atgccaatagaccgctgtctgttaa

SEQ ID NO: 199961 - DNA, 25 bp, Probe sequence
atggtactgataacaaacaagttca

SEQ ID NO: 199962 - DNA, 25 bp, Probe sequence
acttgggcatggctatttgtacttt

SEQ ID NO: 199963 - DNA, 25 bp, Probe sequence
acagcgagttcaacttgggcatggc

SEQ ID NO: 199964 - DNA, 25 bp, Probe sequence
aacaagttcaaaaacatcatgattt

SEQ ID NO: 199965 - DNA, 25 bp, Probe sequence
aagggtggcttatgaacatgatatt

SEQ ID NO: 199966 - DNA, 25 bp, Probe sequence
aattcaccaattcaaatagctgcaa

SEQ ID NO: 199967 - DNA, 25 bp, Probe sequence
caccaattcaaatagctgcaagtgg

SEQ ID NO: 199968 - DNA, 25 bp, Probe sequence
cgtacagcgagttcaacttgggcat

SEQ ID NO: 199969 - DNA, 25 bp, Probe sequence
gcgagttcaacttgggcatggctat

SEQ ID NO: 199970 - DNA, 25 bp, Probe sequence
gctagtgactggcatcaaattgaat

SEQ ID NO: 199971 - DNA, 25 bp, Probe sequence
gcatggctatttgtactttttgtct

SEQ ID NO: 199972 - DNA, 25 bp, Probe sequence
gaatcatatgccaatagaccgctgt

SEQ ID NO: 199973 - DNA, 25 bp, Probe sequence
gagttcaacttgggcatggctattt

SEQ ID NO: 199974 - DNA, 25 bp, Probe sequence
gataaaggtaattatggtactgata

SEQ ID NO: 199975 - DNA, 25 bp, Probe sequence
gttcaacttgggcatggctatttgt

SEQ ID NO: 199976 - DNA, 25 bp, Probe sequence
gtatgcttttgatggatcaagatgg

SEQ ID NO: 199977 - DNA, 25 bp, Probe sequence
gtgttaacggatttcgatggacttt

SEQ ID NO: 199978 - DNA, 25 bp, Probe sequence
gggcatggctatttgtactttttgt

SEQ ID NO: 199979 - DNA, 25 bp, Probe sequence
ggttatgtcggaggatttaacattg

SEQ ID NO: 199980 - DNA, 25 bp, Probe sequence
ggatcaagatggttttttaactgaa

SEQ ID NO: 199981 - DNA, 25 bp, Probe sequence
tggctatttgtactttttgtcttac

SEQ ID NO: 199982 - DNA, 25 bp, Probe sequence
tgattccatgtaagccagatcatcc

SEQ ID NO: 199983 - DNA, 25 bp, Probe sequence
tgattggttttattctttacttgtt

SEQ ID NO: 199984 - DNA, 25 bp, Probe sequence
tgatgttaagtatttccctaaaaag

SEQ ID NO: 199985 - DNA, 25 bp, Probe sequence
ttattttagactggaattcgcaagc

SEQ ID NO: 199986 - DNA, 25 bp, Probe sequence
ttagccattggattcatcattaatt

SEQ ID NO: 199987 - DNA, 25 bp, Probe sequence
ttggattcatcattaatttagtatt

SEQ ID NO: 199988 - DNA, 25 bp, Probe sequence
attttatatcttcaacaacttcata

SEQ ID NO: 199989 - DNA, 25 bp, Probe sequence
atacgattttatatcttcaacaact

SEQ ID NO: 199990 - DNA, 25 bp, Probe sequence
atcttcaacaacttcatattaattt

SEQ ID NO: 199991 - DNA, 25 bp, Probe sequence
atctcagattacgttatccgatgaa

SEQ ID NO: 199992 - DNA, 25 bp, Probe sequence
atggcactatcaaaattattacttc

SEQ ID NO: 199993 - DNA, 25 bp, Probe sequence
agtctcaattgttgattcatacttc

SEQ ID NO: 199994 - DNA, 25 bp, Probe sequence
accaatcagcaatctcagattacgt

SEQ ID NO: 199995 - DNA, 25 bp, Probe sequence
acgtcacatattagaaccaatcagc

SEQ ID NO: 199996 - DNA, 25 bp, Probe sequence
acttaatgattcaacgtcacatatt

SEQ ID NO: 199997 - DNA, 25 bp, Probe sequence
aaagtgaaaatcgcagtataatgtt

SEQ ID NO: 199998 - DNA, 25 bp, Probe sequence
aaaagtctcaattgttgattcatac

SEQ ID NO: 199999 - DNA, 25 bp, Probe sequence
aaaatcataatggcactatcaaaat

SEQ ID NO: 200000 - DNA, 25 bp, Probe sequence
aatgatacgattttatatcttcaac

SEQ ID NO: 200001 - DNA, 25 bp, Probe sequence
caatctcagattacgttatccgatg

SEQ ID NO: 200002 - DNA, 25 bp, Probe sequence
caacaacttcatattaatttggatg

SEQ ID NO: 200003 - DNA, 25 bp, Probe sequence
cactatcaaaattattacttcaaat

SEQ ID NO: 200004 - DNA, 25 bp, Probe sequence
cagattacgttatccgatgaatata

SEQ ID NO: 200005 - DNA, 25 bp, Probe sequence
ctcagattacgttatccgatgaata

SEQ ID NO: 200006 - DNA, 25 bp, Probe sequence
cgattttatatcttcaacaacttca

SEQ ID NO: 200007 - DNA, 25 bp, Probe sequence
gcaaaggggatctaattatgatact

SEQ ID NO: 200008 - DNA, 25 bp, Probe sequence
gcaatctcagattacgttatccgat

SEQ ID NO: 200009 - DNA, 25 bp, Probe sequence
gaaccaatcagcaatctcagattac

SEQ ID NO: 200010 - DNA, 25 bp, Probe sequence
gataaagatgatttagttattcaaa

SEQ ID NO: 200011 - DNA, 25 bp, Probe sequence
gattttatatcttcaacaacttcat

SEQ ID NO: 200012 - DNA, 25 bp, Probe sequence
gattcatacttcaacaataaaaagc

SEQ ID NO: 200013 - DNA, 25 bp, Probe sequence
gattcaacgtcacatattagaacca

SEQ ID NO: 200014 - DNA, 25 bp, Probe sequence
gtcacatattagaaccaatcagcaa

SEQ ID NO: 200015 - DNA, 25 bp, Probe sequence
ggatctaattatgatactaagttac

SEQ ID NO: 200016 - DNA, 25 bp, Probe sequence
ggcactatcaaaattattacttcaa

SEQ ID NO: 200017 - DNA, 25 bp, Probe sequence
tctcaattgttgattcatacttcaa

SEQ ID NO: 200018 - DNA, 25 bp, Probe sequence
tcaacgtcacatattagaaccaatc

SEQ ID NO: 200019 - DNA, 25 bp, Probe sequence
tattagaaccaatcagcaatctcag

SEQ ID NO: 200020 - DNA, 25 bp, Probe sequence
ttatatcttcaacaacttcatatta

SEQ ID NO: 200021 - DNA, 25 bp, Probe sequence
ttagaaccaatcagcaatctcagat

SEQ ID NO: 200022 - DNA, 25 bp, Probe sequence
atagcttatggttatttagaggtca

SEQ ID NO: 200023 - DNA, 25 bp, Probe sequence
atacgcttcaaataatataacgcaa

SEQ ID NO: 200024 - DNA, 25 bp, Probe sequence
atgaggattgtgatgctgttattta

SEQ ID NO: 200025 - DNA, 25 bp, Probe sequence
aggtcagtcgagtctttcagtgagt

SEQ ID NO: 200026 - DNA, 25 bp, Probe sequence
agttccgaaagctggtcgagcacct

SEQ ID NO: 200027 - DNA, 25 bp, Probe sequence
aacggtctagcttcgagagtggtta

SEQ ID NO: 200028 - DNA, 25 bp, Probe sequence
aacgaattatcattatttcctgact

SEQ ID NO: 200029 - DNA, 25 bp, Probe sequence
aagctggtcgagcaccttatgataa

SEQ ID NO: 200030 - DNA, 25 bp, Probe sequence
aagagttatcttattatggtatcaa

SEQ ID NO: 200031 - DNA, 25 bp, Probe sequence
cattatttcctgacttagatggttt

SEQ ID NO: 200032 - DNA, 25 bp, Probe sequence
gcgcaacatcacggattagctacta

SEQ ID NO: 200033 - DNA, 25 bp, Probe sequence
gctaactatagcgcaacatcacgga

SEQ ID NO: 200034 - DNA, 25 bp, Probe sequence
gaagaactacacaaaatcatcataa

SEQ ID NO: 200035 - DNA, 25 bp, Probe sequence
gaaacattttatgcttggaaacgtc

SEQ ID NO: 200036 - DNA, 25 bp, Probe sequence
gagcctcctacaaattctatagaag

SEQ ID NO: 200037 - DNA, 25 bp, Probe sequence
gagagtggttagacaaagtggaatt

SEQ ID NO: 200038 - DNA, 25 bp, Probe sequence
gagttttaatcctttagttgctgcc

SEQ ID NO: 200039 - DNA, 25 bp, Probe sequence
gagtctttcagtgagttacatcaag

SEQ ID NO: 200040 - DNA, 25 bp, Probe sequence
gatgctgttatttatgcctatttaa

SEQ ID NO: 200041 - DNA, 25 bp, Probe sequence
gatatgaatatgaaaggggctacgc

SEQ ID NO: 200042 - DNA, 25 bp, Probe sequence
gtaaagcctaacggtctagcttcga

SEQ ID NO: 200043 - DNA, 25 bp, Probe sequence
gtgattgggatatgctaactatagc

SEQ ID NO: 200044 - DNA, 25 bp, Probe sequence
gggctacgccttttaagagtaaatg

SEQ ID NO: 200045 - DNA, 25 bp, Probe sequence
ggtttatctagccatgttaattgga

SEQ ID NO: 200046 - DNA, 25 bp, Probe sequence
ggattagctactagactattggatt

SEQ ID NO: 200047 - DNA, 25 bp, Probe sequence
ggagataaatccatacgcttcaaat

SEQ ID NO: 200048 - DNA, 25 bp, Probe sequence
ggaaacgtcaagcaatgatattttt

SEQ ID NO: 200049 - DNA, 25 bp, Probe sequence
tggagtttagttccgaaagctggtc

SEQ ID NO: 200050 - DNA, 25 bp, Probe sequence
tcctttagttgctgccttttttgcg

SEQ ID NO: 200051 - DNA, 25 bp, Probe sequence
tctatagaagctaatctttcagaga

SEQ ID NO: 200052 - DNA, 25 bp, Probe sequence
tcatgagcctcctacaaattctata

SEQ ID NO: 200053 - DNA, 25 bp, Probe sequence
tttgcggtgcaaacatatgaggatt

SEQ ID NO: 200054 - DNA, 25 bp, Probe sequence
tttttactattcatgagcctcctac

SEQ ID NO: 200055 - DNA, 25 bp, Probe sequence
ttgctgccttttttgcggtgcaaac

SEQ ID NO: 200056 - DNA, 25 bp, Probe sequence
atttatcaagtaatcgttaattcta

SEQ ID NO: 200057 - DNA, 25 bp, Probe sequence
atatgggtatactaaactctcggtt

SEQ ID NO: 200058 - DNA, 25 bp, Probe sequence
atcttcaaaaagagcagtctaggaa

SEQ ID NO: 200059 - DNA, 25 bp, Probe sequence
acctatttggcataaagtgagtgtt

SEQ ID NO: 200060 - DNA, 25 bp, Probe sequence
aagcagcaaaaacttgcagatttac

SEQ ID NO: 200061 - DNA, 25 bp, Probe sequence
aagcaattagttacaaagcagcaaa

SEQ ID NO: 200062 - DNA, 25 bp, Probe sequence
aagagcagtctaggaatcaaaagaa

SEQ ID NO: 200063 - DNA, 25 bp, Probe sequence
aagtcaaatgtcaaaatctgcaaaa

SEQ ID NO: 200064 - DNA, 25 bp, Probe sequence
caagtaatcgttaattctaagaatt

SEQ ID NO: 200065 - DNA, 25 bp, Probe sequence
caaaagaaattatccagtatgttag

SEQ ID NO: 200066 - DNA, 25 bp, Probe sequence
gcaggtacgaatttttatcctttct

SEQ ID NO: 200067 - DNA, 25 bp, Probe sequence
gcatacaacccatatttagtagata

SEQ ID NO: 200068 - DNA, 25 bp, Probe sequence
gcagatttacaagttgagtatacta

SEQ ID NO: 200069 - DNA, 25 bp, Probe sequence
gaatttttatcctttctaaacagag

SEQ ID NO: 200070 - DNA, 25 bp, Probe sequence
gaatatgatgtctttctatcccatt

SEQ ID NO: 200071 - DNA, 25 bp, Probe sequence
gaataagttaccagatgaaattgat

SEQ ID NO: 200072 - DNA, 25 bp, Probe sequence
gaagatgtacgtgcatacaacccat

SEQ ID NO: 200073 - DNA, 25 bp, Probe sequence
gaagagcatgttattatattaccta

SEQ ID NO: 200074 - DNA, 25 bp, Probe sequence
gaaaacctacttccagtaatattag

SEQ ID NO: 200075 - DNA, 25 bp, Probe sequence
gaaagtggttggagcaggtacgaat

SEQ ID NO: 200076 - DNA, 25 bp, Probe sequence
ggtatactaaactctcggtttgttg

SEQ ID NO: 200077 - DNA, 25 bp, Probe sequence
gttattatattacctatttggcata

SEQ ID NO: 200078 - DNA, 25 bp, Probe sequence
gtacgtgcatacaacccatatttag

SEQ ID NO: 200079 - DNA, 25 bp, Probe sequence
gtctttctatcccattctagtttag

SEQ ID NO: 200080 - DNA, 25 bp, Probe sequence
gtgagtgttgaagatgtacgtgcat

SEQ ID NO: 200081 - DNA, 25 bp, Probe sequence
ggttggagcaggtacgaatttttat

SEQ ID NO: 200082 - DNA, 25 bp, Probe sequence
ggactaaaagtctttgaagatgtta

SEQ ID NO: 200083 - DNA, 25 bp, Probe sequence
tgttgtagtatttttatcccctaat

SEQ ID NO: 200084 - DNA, 25 bp, Probe sequence
tctatcccattctagtttagataaa

SEQ ID NO: 200085 - DNA, 25 bp, Probe sequence
taaactctcggtttgttgtagtatt

SEQ ID NO: 200086 - DNA, 25 bp, Probe sequence
tacttccagtaatattagagatttg

SEQ ID NO: 200087 - DNA, 25 bp, Probe sequence
tatgatgtctttctatcccattcta

SEQ ID NO: 200088 - DNA, 25 bp, Probe sequence
tatgcattgaatacaagtgatttta

SEQ ID NO: 200089 - DNA, 25 bp, Probe sequence
ttatcccctaattttattgaaagtg

SEQ ID NO: 200090 - DNA, 25 bp, Probe sequence
gggattgcttaaccaccgaacaaat

SEQ ID NO: 200091 - DNA, 25 bp, Probe sequence
attgcttaaccaccgaacaaatcgc

SEQ ID NO: 200092 - DNA, 25 bp, Probe sequence
atagggattgcttaaccaccgaaca

SEQ ID NO: 200093 - DNA, 25 bp, Probe sequence
ataaaataatggtgcttgggaaaga

SEQ ID NO: 200094 - DNA, 25 bp, Probe sequence
atcgattgatgagtacgaaatagtt

SEQ ID NO: 200095 - DNA, 25 bp, Probe sequence
atgagagctcattatccttgaagac

SEQ ID NO: 200096 - DNA, 25 bp, Probe sequence
agaaaacatctaaaggtggattgat

SEQ ID NO: 200097 - DNA, 25 bp, Probe sequence
actgagttatcgattgatgagtacg

SEQ ID NO: 200098 - DNA, 25 bp, Probe sequence
actaatctattgaacgaaccccatt

SEQ ID NO: 200099 - DNA, 25 bp, Probe sequence
aaaggtggattgatgggagttaagt

SEQ ID NO: 200100 - DNA, 25 bp, Probe sequence
aatctattgaacgaaccccattatt

SEQ ID NO: 200101 - DNA, 25 bp, Probe sequence
gcttaaccaccgaacaaatcgctaa

SEQ ID NO: 200102 - DNA, 25 bp, Probe sequence
gaagacagtttatcctgtaggtact

SEQ ID NO: 200103 - DNA, 25 bp, Probe sequence
gaagattttatagagacagactaca

SEQ ID NO: 200104 - DNA, 25 bp, Probe sequence
gaaccccattattattacttaattg

SEQ ID NO: 200105 - DNA, 25 bp, Probe sequence
gaacaaatcgctaaagaattatgta

SEQ ID NO: 200106 - DNA, 25 bp, Probe sequence
gaaaagtggactaatctattgaacg

SEQ ID NO: 200107 - DNA, 25 bp, Probe sequence
gacagtttatcctgtaggtactgag

SEQ ID NO: 200108 - DNA, 25 bp, Probe sequence
gagctcattatccttgaagacagtt

SEQ ID NO: 200109 - DNA, 25 bp, Probe sequence
gagacagactacaagaaaacatcta

SEQ ID NO: 200110 - DNA, 25 bp, Probe sequence
gagagctcattatccttgaagacag

SEQ ID NO: 200111 - DNA, 25 bp, Probe sequence
gtgacggaaataaatgagagctcat

SEQ ID NO: 200112 - DNA, 25 bp, Probe sequence
ggtgcttgggaaagaaaagtggact

SEQ ID NO: 200113 - DNA, 25 bp, Probe sequence
ggattgatgggagttaagtatttta

SEQ ID NO: 200114 - DNA, 25 bp, Probe sequence
ggactaatctattgaacgaacccca

SEQ ID NO: 200115 - DNA, 25 bp, Probe sequence
tgaacgaaccccattattattactt

SEQ ID NO: 200116 - DNA, 25 bp, Probe sequence
tctattgaacgaaccccattattat

SEQ ID NO: 200117 - DNA, 25 bp, Probe sequence
taaccaccgaacaaatcgctaaaga

SEQ ID NO: 200118 - DNA, 25 bp, Probe sequence
taggtactgagttatcgattgatga

SEQ ID NO: 200119 - DNA, 25 bp, Probe sequence
tagggattgcttaaccaccgaacaa

SEQ ID NO: 200120 - DNA, 25 bp, Probe sequence
tatcctgtaggtactgagttatcga

SEQ ID NO: 200121 - DNA, 25 bp, Probe sequence
tattgaacgaaccccattattatta

SEQ ID NO: 200122 - DNA, 25 bp, Probe sequence
ttatccttgaagacagtttatcctg

SEQ ID NO: 200123 - DNA, 25 bp, Probe sequence
ttgaatagggattgcttaaccaccg

SEQ ID NO: 200124 - DNA, 25 bp, Probe sequence
atacgacagtcggatcacttgatcg

SEQ ID NO: 200125 - DNA, 25 bp, Probe sequence
atcacttgatcggtttcgagataag

SEQ ID NO: 200126 - DNA, 25 bp, Probe sequence
accgaagtatgcagtaccaattctt

SEQ ID NO: 200127 - DNA, 25 bp, Probe sequence
atgtatcttaaaggtgttgaaggag

SEQ ID NO: 200128 - DNA, 25 bp, Probe sequence
accatctacacatacgacagtcgga

SEQ ID NO: 200129 - DNA, 25 bp, Probe sequence
acgacagtcggatcacttgatcggt

SEQ ID NO: 200130 - DNA, 25 bp, Probe sequence
acttgatcggtttcgagataagaca

SEQ ID NO: 200131 - DNA, 25 bp, Probe sequence
aacagactttagtgatttaccatct

SEQ ID NO: 200132 - DNA, 25 bp, Probe sequence
cagactttagtgatttaccatctac

SEQ ID NO: 200133 - DNA, 25 bp, Probe sequence
cagtcggatcacttgatcggtttcg

SEQ ID NO: 200134 - DNA, 25 bp, Probe sequence
catctacacatacgacagtcggatc

SEQ ID NO: 200135 - DNA, 25 bp, Probe sequence
catacgacagtcggatcacttgatc

SEQ ID NO: 200136 - DNA, 25 bp, Probe sequence
ctttagtgatttaccatctacacat

SEQ ID NO: 200137 - DNA, 25 bp, Probe sequence
gcagtaccaattcttgaaacagact

SEQ ID NO: 200138 - DNA, 25 bp, Probe sequence
gaaggagatacaccgaagtatgcag

SEQ ID NO: 200139 - DNA, 25 bp, Probe sequence
gaagtatgcagtaccaattcttgaa

SEQ ID NO: 200140 - DNA, 25 bp, Probe sequence
gacaatgagcattaacagaagcggg

SEQ ID NO: 200141 - DNA, 25 bp, Probe sequence
gacagtcggatcacttgatcggttt

SEQ ID NO: 200142 - DNA, 25 bp, Probe sequence
gagcattaacagaagcgggagtaac

SEQ ID NO: 200143 - DNA, 25 bp, Probe sequence
gactttagtgatttaccatctacac

SEQ ID NO: 200144 - DNA, 25 bp, Probe sequence
gagatacaccgaagtatgcagtacc

SEQ ID NO: 200145 - DNA, 25 bp, Probe sequence
gatttaccatctacacatacgacag

SEQ ID NO: 200146 - DNA, 25 bp, Probe sequence
gtatgcagtaccaattcttgaaaca

SEQ ID NO: 200147 - DNA, 25 bp, Probe sequence
gtaccaattcttgaaacagacttta

SEQ ID NO: 200148 - DNA, 25 bp, Probe sequence
gtcggatcacttgatcggtttcgag

SEQ ID NO: 200149 - DNA, 25 bp, Probe sequence
gtgatttaccatctacacatacgac

SEQ ID NO: 200150 - DNA, 25 bp, Probe sequence
ggatcacttgatcggtttcgagata

SEQ ID NO: 200151 - DNA, 25 bp, Probe sequence
taccatctacacatacgacagtcgg

SEQ ID NO: 200152 - DNA, 25 bp, Probe sequence
tcggtttcgagataagacaatgagc

SEQ ID NO: 200153 - DNA, 25 bp, Probe sequence
taacagaagcgggagtaactgttga

SEQ ID NO: 200154 - DNA, 25 bp, Probe sequence
tacaccgaagtatgcagtaccaatt

SEQ ID NO: 200155 - DNA, 25 bp, Probe sequence
tacacatacgacagtcggatcactt

SEQ ID NO: 200156 - DNA, 25 bp, Probe sequence
tagtgatttaccatctacacatacg

SEQ ID NO: 200157 - DNA, 25 bp, Probe sequence
tttaccatctacacatacgacagtc

SEQ ID NO: 200158 - DNA, 25 bp, Probe sequence
caagtcaactggagaaaatttttcg

SEQ ID NO: 200159 - DNA, 25 bp, Probe sequence
attgattaagttatatcgtacaaac

SEQ ID NO: 200160 - DNA, 25 bp, Probe sequence
ataccttcatcaagtcaactggaga

SEQ ID NO: 200161 - DNA, 25 bp, Probe sequence
atctgatacatcactctttctcaat

SEQ ID NO: 200162 - DNA, 25 bp, Probe sequence
atcgattgacgatgtaaaattaact

SEQ ID NO: 200163 - DNA, 25 bp, Probe sequence
atgaattcccataaaacacaaaaag

SEQ ID NO: 200164 - DNA, 25 bp, Probe sequence
aggagattacatttgttatgacagt

SEQ ID NO: 200165 - DNA, 25 bp, Probe sequence
accttcatcaagtcaactggagaaa

SEQ ID NO: 200166 - DNA, 25 bp, Probe sequence
acatcactctttctcaataaaacta

SEQ ID NO: 200167 - DNA, 25 bp, Probe sequence
acatccaagattttgaaataccttc

SEQ ID NO: 200168 - DNA, 25 bp, Probe sequence
aaagcagttagtatatcaattgatt

SEQ ID NO: 200169 - DNA, 25 bp, Probe sequence
aatgtaatcagaacctagatgatat

SEQ ID NO: 200170 - DNA, 25 bp, Probe sequence
cactctttctcaataaaactaaaca

SEQ ID NO: 200171 - DNA, 25 bp, Probe sequence
ctgatacatcactctttctcaataa

SEQ ID NO: 200172 - DNA, 25 bp, Probe sequence
cggactttattacatcgattgacga

SEQ ID NO: 200173 - DNA, 25 bp, Probe sequence
gaattaaaagtgtacatccaagatt

SEQ ID NO: 200174 - DNA, 25 bp, Probe sequence
gaaatttcatatttaggatggaatg

SEQ ID NO: 200175 - DNA, 25 bp, Probe sequence
gaaataccttcatcaagtcaactgg

SEQ ID NO: 200176 - DNA, 25 bp, Probe sequence
gacagttttaaatgtaatcagaacc

SEQ ID NO: 200177 - DNA, 25 bp, Probe sequence
gataattcttctaaccgaaaatata

SEQ ID NO: 200178 - DNA, 25 bp, Probe sequence
gataaattcgaaggtatatatggcg

SEQ ID NO: 200179 - DNA, 25 bp, Probe sequence
gatacatcactctttctcaataaaa

SEQ ID NO: 200180 - DNA, 25 bp, Probe sequence
gatattgatatctcggactttatta

SEQ ID NO: 200181 - DNA, 25 bp, Probe sequence
gattacatttgttatgacagtttta

SEQ ID NO: 200182 - DNA, 25 bp, Probe sequence
gtaaaatttgtaatcaggaatctga

SEQ ID NO: 200183 - DNA, 25 bp, Probe sequence
ggtatatatggcgaaatttcaccaa

SEQ ID NO: 200184 - DNA, 25 bp, Probe sequence
ggatggaatgataattcttctaacc

SEQ ID NO: 200185 - DNA, 25 bp, Probe sequence
ggaatgataattcttctaaccgaaa

SEQ ID NO: 200186 - DNA, 25 bp, Probe sequence
ggaatctgatacatcactctttctc

SEQ ID NO: 200187 - DNA, 25 bp, Probe sequence
tctaaccgaaaatatatcgtttata

SEQ ID NO: 200188 - DNA, 25 bp, Probe sequence
tcgtacaaacgatatgaattcccat

SEQ ID NO: 200189 - DNA, 25 bp, Probe sequence
tatggcgaaatttcaccaaataaag

SEQ ID NO: 200190 - DNA, 25 bp, Probe sequence
tatctcggactttattacatcgatt

SEQ ID NO: 200191 - DNA, 25 bp, Probe sequence
ttgatatctcggactttattacatc

SEQ ID NO: 200192 - DNA, 25 bp, Probe sequence
atatttttatggttaggtgcgtctc

SEQ ID NO: 200193 - DNA, 25 bp, Probe sequence
aggtgcgtctctattaataactttt

SEQ ID NO: 200194 - DNA, 25 bp, Probe sequence
agcagtatattgtattagtcatttt

SEQ ID NO: 200195 - DNA, 25 bp, Probe sequence
accgagctatcatttgcgtaaacta

SEQ ID NO: 200196 - DNA, 25 bp, Probe sequence
aacttttggcatattattttctttg

SEQ ID NO: 200197 - DNA, 25 bp, Probe sequence
aactaggtgtagatattgcttcaaa

SEQ ID NO: 200198 - DNA, 25 bp, Probe sequence
aattggcttcaacatgttgctcatg

SEQ ID NO: 200199 - DNA, 25 bp, Probe sequence
catttacttttactagttattatat

SEQ ID NO: 200200 - DNA, 25 bp, Probe sequence
gcgtctctattaataacttttggca

SEQ ID NO: 200201 - DNA, 25 bp, Probe sequence
gctgcaatttgcaatagcgatatta

SEQ ID NO: 200202 - DNA, 25 bp, Probe sequence
gctatcatttgcgtaaactaggtgt

SEQ ID NO: 200203 - DNA, 25 bp, Probe sequence
gcttcaaatcatcatatcaatttaa

SEQ ID NO: 200204 - DNA, 25 bp, Probe sequence
gagtatatgtatagtatgacggttt

SEQ ID NO: 200205 - DNA, 25 bp, Probe sequence
gagtgcagttcaatggttagagtca

SEQ ID NO: 200206 - DNA, 25 bp, Probe sequence
gatattcaaaaaacaagtgctttag

SEQ ID NO: 200207 - DNA, 25 bp, Probe sequence
gttgctcatgttttaccgagctatc

SEQ ID NO: 200208 - DNA, 25 bp, Probe sequence
gttttaccgagctatcatttgcgta

SEQ ID NO: 200209 - DNA, 25 bp, Probe sequence
gtatgacggtttatagtttgttaag

SEQ ID NO: 200210 - DNA, 25 bp, Probe sequence
gtagtgaaaactatgctgcaatttg

SEQ ID NO: 200211 - DNA, 25 bp, Probe sequence
gtagatattgcttcaaatcatcata

SEQ ID NO: 200212 - DNA, 25 bp, Probe sequence
gtggattgtggtttccgataaacac

SEQ ID NO: 200213 - DNA, 25 bp, Probe sequence
ggttagagtcaggaatatttttatg

SEQ ID NO: 200214 - DNA, 25 bp, Probe sequence
ggcgccaaagattaatggtaacacc

SEQ ID NO: 200215 - DNA, 25 bp, Probe sequence
tgtggtttccgataaacacatttcc

SEQ ID NO: 200216 - DNA, 25 bp, Probe sequence
tgtattagtcattttaaaagggcgg

SEQ ID NO: 200217 - DNA, 25 bp, Probe sequence
ttgccggaagatgttaaacctaaat

SEQ ID NO: 200218 - DNA, 25 bp, Probe sequence
tgcagttcaatggttagagtcagga

SEQ ID NO: 200219 - DNA, 25 bp, Probe sequence
taatattatctattttatttcctgt

SEQ ID NO: 200220 - DNA, 25 bp, Probe sequence
taacttttccattagatattattaa

SEQ ID NO: 200221 - DNA, 25 bp, Probe sequence
tatggttaggtgcgtctctattaat

SEQ ID NO: 200222 - DNA, 25 bp, Probe sequence
ttaggtggattgtggtttccgataa

SEQ ID NO: 200223 - DNA, 25 bp, Probe sequence
ttagcagtattaggtggattgtggt

SEQ ID NO: 200224 - DNA, 25 bp, Probe sequence
ttctatatattatttacttcgatat

SEQ ID NO: 200225 - DNA, 25 bp, Probe sequence
ttggcatattattttctttgttaaa

SEQ ID NO: 200226 - DNA, 25 bp, Probe sequence
atattaaagaaccactttcaacgat

SEQ ID NO: 200227 - DNA, 25 bp, Probe sequence
atttgatttttcattactcactaat

SEQ ID NO: 200228 - DNA, 25 bp, Probe sequence
atcaattgcaaggcgtaacgaataa

SEQ ID NO: 200229 - DNA, 25 bp, Probe sequence
aggtacgtttaattgtggttatcat

SEQ ID NO: 200230 - DNA, 25 bp, Probe sequence
agaaatatgatgtgacacctatatc

SEQ ID NO: 200231 - DNA, 25 bp, Probe sequence
aaaatttgatttttcattactcact

SEQ ID NO: 200232 - DNA, 25 bp, Probe sequence
aaggtaatcaattgcaaggcgtaac

SEQ ID NO: 200233 - DNA, 25 bp, Probe sequence
aatgaagtggctttacagctttcaa

SEQ ID NO: 200234 - DNA, 25 bp, Probe sequence
aatagacttaaatttcttgagaaat

SEQ ID NO: 200235 - DNA, 25 bp, Probe sequence
caaatcaagacaaattacctttatt

SEQ ID NO: 200236 - DNA, 25 bp, Probe sequence
gctgaagatttactaaaattatcaa

SEQ ID NO: 200237 - DNA, 25 bp, Probe sequence
gctttcaaacgctattaatttaatc

SEQ ID NO: 200238 - DNA, 25 bp, Probe sequence
gctattattgtttttcatacagttt

SEQ ID NO: 200239 - DNA, 25 bp, Probe sequence
gaaggcggtagactgacagatagct

SEQ ID NO: 200240 - DNA, 25 bp, Probe sequence
gaagtggctttacagctttcaaacg

SEQ ID NO: 200241 - DNA, 25 bp, Probe sequence
gaaccactttcaacgataaaatacg

SEQ ID NO: 200242 - DNA, 25 bp, Probe sequence
gaaaacagtataatgaagtggcttt

SEQ ID NO: 200243 - DNA, 25 bp, Probe sequence
gaaagacggtgaaggcggtagactg

SEQ ID NO: 200244 - DNA, 25 bp, Probe sequence
gacacctatatcacatttaaaatta

SEQ ID NO: 200245 - DNA, 25 bp, Probe sequence
gacagatagctattattgtttttca

SEQ ID NO: 200246 - DNA, 25 bp, Probe sequence
gacggtgaaggcggtagactgacag

SEQ ID NO: 200247 - DNA, 25 bp, Probe sequence
gagaagatatctgaaattaatgtaa

SEQ ID NO: 200248 - DNA, 25 bp, Probe sequence
gatagctattattgtttttcataca

SEQ ID NO: 200249 - DNA, 25 bp, Probe sequence
gatttttcattactcactaataaaa

SEQ ID NO: 200250 - DNA, 25 bp, Probe sequence
gtggctttacagctttcaaacgcta

SEQ ID NO: 200251 - DNA, 25 bp, Probe sequence
ggtgaaggcggtagactgacagata

SEQ ID NO: 200252 - DNA, 25 bp, Probe sequence
ggctttacagctttcaaacgctatt

SEQ ID NO: 200253 - DNA, 25 bp, Probe sequence
ggcggtagactgacagatagctatt

SEQ ID NO: 200254 - DNA, 25 bp, Probe sequence
tgtggttatcatattgctgaagatt

SEQ ID NO: 200255 - DNA, 25 bp, Probe sequence
tcaacgataaaatacgaaaccgata

SEQ ID NO: 200256 - DNA, 25 bp, Probe sequence
tattatagtgaaccatatgatagta

SEQ ID NO: 200257 - DNA, 25 bp, Probe sequence
tattgtttttcatacagtttaaaag

SEQ ID NO: 200258 - DNA, 25 bp, Probe sequence
tttacagctttcaaacgctattaat

SEQ ID NO: 200259 - DNA, 25 bp, Probe sequence
ttaattgtggttatcatattgctga

SEQ ID NO: 200260 - DNA, 25 bp, Probe sequence
atagagttatcgctaaatcttcttt

SEQ ID NO: 200261 - DNA, 25 bp, Probe sequence
agtaagtaatcagttaaacaatgaa

SEQ ID NO: 200262 - DNA, 25 bp, Probe sequence
agttatcgctaaatcttctttaaga

SEQ ID NO: 200263 - DNA, 25 bp, Probe sequence
agagttatcgctaaatcttctttaa

SEQ ID NO: 200264 - DNA, 25 bp, Probe sequence
agaagcaaatagagttatcgctaaa

SEQ ID NO: 200265 - DNA, 25 bp, Probe sequence
agcagaagcaaatagagttatcgct

SEQ ID NO: 200266 - DNA, 25 bp, Probe sequence
agcaaatagagttatcgctaaatct

SEQ ID NO: 200267 - DNA, 25 bp, Probe sequence
aaagtaagtaatcagttaaacaatg

SEQ ID NO: 200268 - DNA, 25 bp, Probe sequence
aaatagagttatcgctaaatcttct

SEQ ID NO: 200269 - DNA, 25 bp, Probe sequence
aagcaaatagagttatcgctaaatc

SEQ ID NO: 200270 - DNA, 25 bp, Probe sequence
aagtaagtaatcagttaaacaatga

SEQ ID NO: 200271 - DNA, 25 bp, Probe sequence
aatagagttatcgctaaatcttctt

SEQ ID NO: 200272 - DNA, 25 bp, Probe sequence
caaatagagttatcgctaaatcttc

SEQ ID NO: 200273 - DNA, 25 bp, Probe sequence
cagaagcaaatagagttatcgctaa

SEQ ID NO: 200274 - DNA, 25 bp, Probe sequence
gcagaagcaaatagagttatcgcta

SEQ ID NO: 200275 - DNA, 25 bp, Probe sequence
gcaaatagagttatcgctaaatctt

SEQ ID NO: 200276 - DNA, 25 bp, Probe sequence
gaagcaaatagagttatcgctaaat

SEQ ID NO: 200277 - DNA, 25 bp, Probe sequence
gagttatcgctaaatcttctttaag

SEQ ID NO: 200278 - DNA, 25 bp, Probe sequence
gataaagtaagtaatcagttaaaca

SEQ ID NO: 200279 - DNA, 25 bp, Probe sequence
gttatcgctaaatcttctttaagaa

SEQ ID NO: 200280 - DNA, 25 bp, Probe sequence
gtagcagaagcaaatagagttatcg

SEQ ID NO: 200281 - DNA, 25 bp, Probe sequence
gtaagtaatcagttaaacaatgaaa

SEQ ID NO: 200282 - DNA, 25 bp, Probe sequence
taaagtaagtaatcagttaaacaat

SEQ ID NO: 200283 - DNA, 25 bp, Probe sequence
tagcagaagcaaatagagttatcgc

SEQ ID NO: 200284 - DNA, 25 bp, Probe sequence
tagagttatcgctaaatcttcttta

SEQ ID NO: 200285 - DNA, 25 bp, Probe sequence
tatcgctaaatcttctttaagaaaa

SEQ ID NO: 200286 - DNA, 25 bp, Probe sequence
ttatcgctaaatcttctttaagaaa

SEQ ID NO: 200287 - DNA, 25 bp, Probe sequence
attgaagcattaggagtgcctttat

SEQ ID NO: 200288 - DNA, 25 bp, Probe sequence
atttaatatttctcgtagtactgct

SEQ ID NO: 200289 - DNA, 25 bp, Probe sequence
atatcatatgattgaatactgtaat

SEQ ID NO: 200290 - DNA, 25 bp, Probe sequence
ataaaaatcaacaatggtacttcgt

SEQ ID NO: 200291 - DNA, 25 bp, Probe sequence
ataactatgcagaattttcaacagt

SEQ ID NO: 200292 - DNA, 25 bp, Probe sequence
atctccaatgttagtaagttacctt

SEQ ID NO: 200293 - DNA, 25 bp, Probe sequence
agtcatttaaaatctgttattcaca

SEQ ID NO: 200294 - DNA, 25 bp, Probe sequence
agttaccttttcaaacagaatatca

SEQ ID NO: 200295 - DNA, 25 bp, Probe sequence
aaatagcaatcacagacgaagaatt

SEQ ID NO: 200296 - DNA, 25 bp, Probe sequence
aatctgttattcacaaaactatttg

SEQ ID NO: 200297 - DNA, 25 bp, Probe sequence
aatctgttagattatatcatatgat

SEQ ID NO: 200298 - DNA, 25 bp, Probe sequence
aatagtcacatgtggtgccaatgtc

SEQ ID NO: 200299 - DNA, 25 bp, Probe sequence
cactttcaagtatctccaatgttag

SEQ ID NO: 200300 - DNA, 25 bp, Probe sequence
cttcgttgttgttaatatagcatca

SEQ ID NO: 200301 - DNA, 25 bp, Probe sequence
gcagaattttcaacagtttatggtt

SEQ ID NO: 200302 - DNA, 25 bp, Probe sequence
gaattgaaagctttagtatttacac

SEQ ID NO: 200303 - DNA, 25 bp, Probe sequence
gaagagacatatttgtttaaatcaa

SEQ ID NO: 200304 - DNA, 25 bp, Probe sequence
gaaaccaaacgaaaatagcaatcac

SEQ ID NO: 200305 - DNA, 25 bp, Probe sequence
gaaaggatacttgtggagtgactat

SEQ ID NO: 200306 - DNA, 25 bp, Probe sequence
gaccataggtaatcgaaaccaaacg

SEQ ID NO: 200307 - DNA, 25 bp, Probe sequence
gatacatatcagttcaaaagttata

SEQ ID NO: 200308 - DNA, 25 bp, Probe sequence
gattaacaattggtagtaagtcatt

SEQ ID NO: 200309 - DNA, 25 bp, Probe sequence
gtatttacactttcaagtatctcca

SEQ ID NO: 200310 - DNA, 25 bp, Probe sequence
gtcacatgtggtgccaatgtcaaag

SEQ ID NO: 200311 - DNA, 25 bp, Probe sequence
gtgccaatgtcaaagtagaatttcc

SEQ ID NO: 200312 - DNA, 25 bp, Probe sequence
gtgaacatgcaagatataaatttta

SEQ ID NO: 200313 - DNA, 25 bp, Probe sequence
gtgtcacctattgatactaaaaggg

SEQ ID NO: 200314 - DNA, 25 bp, Probe sequence
gtggagtgactatatgattgaaaat

SEQ ID NO: 200315 - DNA, 25 bp, Probe sequence
ggtacttcgttgttgttaatatagc

SEQ ID NO: 200316 - DNA, 25 bp, Probe sequence
ggagtgcctttatatagtagtacag

SEQ ID NO: 200317 - DNA, 25 bp, Probe sequence
ggcggttatatgaccataggtaatc

SEQ ID NO: 200318 - DNA, 25 bp, Probe sequence
tacagggaaaaatggcggttatatg

SEQ ID NO: 200319 - DNA, 25 bp, Probe sequence
taaaggtattggtatcttatataaa

SEQ ID NO: 200320 - DNA, 25 bp, Probe sequence
ttctcgtagtactgctttaagggat

SEQ ID NO: 200321 - DNA, 25 bp, Probe sequence
atttcttaaagttctataatgacaa

SEQ ID NO: 200322 - DNA, 25 bp, Probe sequence
ataaaatttcattctactaaatcaa

SEQ ID NO: 200323 - DNA, 25 bp, Probe sequence
atcaagtttctattatgacttattt

SEQ ID NO: 200324 - DNA, 25 bp, Probe sequence
atgacttatttgattttaaggtgaa

SEQ ID NO: 200325 - DNA, 25 bp, Probe sequence
atgattcggaaactggagatataca

SEQ ID NO: 200326 - DNA, 25 bp, Probe sequence
atgtatgattcggaaactggagata

SEQ ID NO: 200327 - DNA, 25 bp, Probe sequence
acgtgtggatttcttaaagttctat

SEQ ID NO: 200328 - DNA, 25 bp, Probe sequence
actaaatcaagtttctattatgact

SEQ ID NO: 200329 - DNA, 25 bp, Probe sequence
acatatagatatctatttgtttaac

SEQ ID NO: 200330 - DNA, 25 bp, Probe sequence
aaatcaagtttctattatgacttat

SEQ ID NO: 200331 - DNA, 25 bp, Probe sequence
aaaatttcattctactaaatcaagt

SEQ ID NO: 200332 - DNA, 25 bp, Probe sequence
aatcaagtttctattatgacttatt

SEQ ID NO: 200333 - DNA, 25 bp, Probe sequence
caagtttctattatgacttatttga

SEQ ID NO: 200334 - DNA, 25 bp, Probe sequence
cattctactaaatcaagtttctatt

SEQ ID NO: 200335 - DNA, 25 bp, Probe sequence
cgtgtggatttcttaaagttctata

SEQ ID NO: 200336 - DNA, 25 bp, Probe sequence
gaaactggagatatacaaaaaggat

SEQ ID NO: 200337 - DNA, 25 bp, Probe sequence
gatatataaaatttcattctactaa

SEQ ID NO: 200338 - DNA, 25 bp, Probe sequence
gatttcttaaagttctataatgaca

SEQ ID NO: 200339 - DNA, 25 bp, Probe sequence
gattcggaaactggagatatacaaa

SEQ ID NO: 200340 - DNA, 25 bp, Probe sequence
tgattcggaaactggagatatacaa

SEQ ID NO: 200341 - DNA, 25 bp, Probe sequence
gttctataatgacaatgaacttata

SEQ ID NO: 200342 - DNA, 25 bp, Probe sequence
gtatgattcggaaactggagatata

SEQ ID NO: 200343 - DNA, 25 bp, Probe sequence
gtgtggatttcttaaagttctataa

SEQ ID NO: 200344 - DNA, 25 bp, Probe sequence
gtggatttcttaaagttctataatg

SEQ ID NO: 200345 - DNA, 25 bp, Probe sequence
ggatttcttaaagttctataatgac

SEQ ID NO: 200346 - DNA, 25 bp, Probe sequence
ggatatataaaatttcattctacta

SEQ ID NO: 200347 - DNA, 25 bp, Probe sequence
tgtggatttcttaaagttctataat

SEQ ID NO: 200348 - DNA, 25 bp, Probe sequence
tctactaaatcaagtttctattatg

SEQ ID NO: 200349 - DNA, 25 bp, Probe sequence
tcttaaagttctataatgacaatga

SEQ ID NO: 200350 - DNA, 25 bp, Probe sequence
tcattctactaaatcaagtttctat

SEQ ID NO: 200351 - DNA, 25 bp, Probe sequence
tcaagtttctattatgacttatttg

SEQ ID NO: 200352 - DNA, 25 bp, Probe sequence
tactaaatcaagtttctattatgac

SEQ ID NO: 200353 - DNA, 25 bp, Probe sequence
ttcggaaactggagatatacaaaaa

SEQ ID NO: 200354 - DNA, 25 bp, Probe sequence
ttctactaaatcaagtttctattat

SEQ ID NO: 200355 - DNA, 25 bp, Probe sequence
attgctgaaatatcgtctatacttt

SEQ ID NO: 200356 - DNA, 25 bp, Probe sequence
attgccggtatattttttaatgaag

SEQ ID NO: 200357 - DNA, 25 bp, Probe sequence
attatatcagtcattgtcttttcgt

SEQ ID NO: 200358 - DNA, 25 bp, Probe sequence
attatttgttattttgttttcagtg

SEQ ID NO: 200359 - DNA, 25 bp, Probe sequence
attttgttttcagtgtacatccaat

SEQ ID NO: 200360 - DNA, 25 bp, Probe sequence
atattatatcagtcattgtcttttc

SEQ ID NO: 200361 - DNA, 25 bp, Probe sequence
atgttttacattttgttgattattc

SEQ ID NO: 200362 - DNA, 25 bp, Probe sequence
atgtgtttgcaagtttatcattaaa

SEQ ID NO: 200363 - DNA, 25 bp, Probe sequence
atggttgtatattatatcagtcatt

SEQ ID NO: 200364 - DNA, 25 bp, Probe sequence
acattttgttgattattcattattt

SEQ ID NO: 200365 - DNA, 25 bp, Probe sequence
acatccaatgctaagtttgtttttc

SEQ ID NO: 200366 - DNA, 25 bp, Probe sequence
cagtgtacatccaatgctaagtttg

SEQ ID NO: 200367 - DNA, 25 bp, Probe sequence
ctgaaatatcgtctatactttatct

SEQ ID NO: 200368 - DNA, 25 bp, Probe sequence
gctgaaatatcgtctatactttatc

SEQ ID NO: 200369 - DNA, 25 bp, Probe sequence
gacttaatacattaatgttttacat

SEQ ID NO: 200370 - DNA, 25 bp, Probe sequence
gatacttcaattgctgaaatatcgt

SEQ ID NO: 200371 - DNA, 25 bp, Probe sequence
gttattttgttttcagtgtacatcc

SEQ ID NO: 200372 - DNA, 25 bp, Probe sequence
gttttcagtgtacatccaatgctaa

SEQ ID NO: 200373 - DNA, 25 bp, Probe sequence
gtatattatatcagtcattgtcttt

SEQ ID NO: 200374 - DNA, 25 bp, Probe sequence
gtacatccaatgctaagtttgtttt

SEQ ID NO: 200375 - DNA, 25 bp, Probe sequence
gtgtacatccaatgctaagtttgtt

SEQ ID NO: 200376 - DNA, 25 bp, Probe sequence
tgtttgcaagtttatcattaaaatc

SEQ ID NO: 200377 - DNA, 25 bp, Probe sequence
tgtttttcttttatagtgcttttgc

SEQ ID NO: 200378 - DNA, 25 bp, Probe sequence
tgcaaatgcttcaaaagttcatggt

SEQ ID NO: 200379 - DNA, 25 bp, Probe sequence
tgctaagtttgtttttcttttatag

SEQ ID NO: 200380 - DNA, 25 bp, Probe sequence
tcctattgccggtatattttttaat

SEQ ID NO: 200381 - DNA, 25 bp, Probe sequence
tccaatgctaagtttgtttttcttt

SEQ ID NO: 200382 - DNA, 25 bp, Probe sequence
tcgtatcttatattagttatagtaa

SEQ ID NO: 200383 - DNA, 25 bp, Probe sequence
tcaattgctgaaatatcgtctatac

SEQ ID NO: 200384 - DNA, 25 bp, Probe sequence
tttaaaagatacttcaattgctgaa

SEQ ID NO: 200385 - DNA, 25 bp, Probe sequence
ttttttaatgaagtatatggtccca

SEQ ID NO: 200386 - DNA, 25 bp, Probe sequence
ttatatcagtcattgtcttttcgtt

SEQ ID NO: 200387 - DNA, 25 bp, Probe sequence
ttcagtgtacatccaatgctaagtt

SEQ ID NO: 200388 - DNA, 25 bp, Probe sequence
ttgttttcagtgtacatccaatgct

SEQ ID NO: 200389 - DNA, 25 bp, Probe sequence
atatagcgccacattgatgacttca

SEQ ID NO: 200390 - DNA, 25 bp, Probe sequence
atagaaatgccaggcatgactggac

SEQ ID NO: 200391 - DNA, 25 bp, Probe sequence
atagcgccacattgatgacttcatt

SEQ ID NO: 200392 - DNA, 25 bp, Probe sequence
atcctaacgttgttattttagatat

SEQ ID NO: 200393 - DNA, 25 bp, Probe sequence
agcagatactgataatggtctcgat

SEQ ID NO: 200394 - DNA, 25 bp, Probe sequence
agcgccacattgatgacttcatttt

SEQ ID NO: 200395 - DNA, 25 bp, Probe sequence
acattgatgacttcattttttgtag

SEQ ID NO: 200396 - DNA, 25 bp, Probe sequence
aaaagcagttgtgaatgatgtggat

SEQ ID NO: 200397 - DNA, 25 bp, Probe sequence
aatatagcgccacattgatgacttc

SEQ ID NO: 200398 - DNA, 25 bp, Probe sequence
ctcgatgcaatgaaacttattgaag

SEQ ID NO: 200399 - DNA, 25 bp, Probe sequence
cgccacattgatgacttcatttttt

SEQ ID NO: 200400 - DNA, 25 bp, Probe sequence
ccattaacgcccaaagaacaaattg

SEQ ID NO: 200401 - DNA, 25 bp, Probe sequence
ccacattgatgacttcattttttgt

SEQ ID NO: 200402 - DNA, 25 bp, Probe sequence
gccacattgatgacttcattttttg

SEQ ID NO: 200403 - DNA, 25 bp, Probe sequence
gcgccacattgatgacttcattttt

SEQ ID NO: 200404 - DNA, 25 bp, Probe sequence
gaagaatataatcctaacgttgtta

SEQ ID NO: 200405 - DNA, 25 bp, Probe sequence
gaaattggcaatggtttaagtagta

SEQ ID NO: 200406 - DNA, 25 bp, Probe sequence
gaccgggatactttgaaaaagcagt

SEQ ID NO: 200407 - DNA, 25 bp, Probe sequence
gatgacttcattttttgtagataaa

SEQ ID NO: 200408 - DNA, 25 bp, Probe sequence
gtattaagggaaattggcaatggtt

SEQ ID NO: 200409 - DNA, 25 bp, Probe sequence
gtctcgatgcaatgaaacttattga

SEQ ID NO: 200410 - DNA, 25 bp, Probe sequence
ggaaattggcaatggtttaagtagt

SEQ ID NO: 200411 - DNA, 25 bp, Probe sequence
tggtctcgatgcaatgaaacttatt

SEQ ID NO: 200412 - DNA, 25 bp, Probe sequence
tgatgacttcattttttgtagataa

SEQ ID NO: 200413 - DNA, 25 bp, Probe sequence
tgaagaatataatcctaacgttgtt

SEQ ID NO: 200414 - DNA, 25 bp, Probe sequence
taatcctaacgttgttattttagat

SEQ ID NO: 200415 - DNA, 25 bp, Probe sequence
taacgcccaaagaacaaattgtatt

SEQ ID NO: 200416 - DNA, 25 bp, Probe sequence
taacgttgttattttagatatagaa

SEQ ID NO: 200417 - DNA, 25 bp, Probe sequence
tagcagatactgataatggtctcga

SEQ ID NO: 200418 - DNA, 25 bp, Probe sequence
tagcgccacattgatgacttcattt

SEQ ID NO: 200419 - DNA, 25 bp, Probe sequence
tataatcctaacgttgttattttag

SEQ ID NO: 200420 - DNA, 25 bp, Probe sequence
tatagcgccacattgatgacttcat

SEQ ID NO: 200421 - DNA, 25 bp, Probe sequence
tttagatatagaaatgccaggcatg

SEQ ID NO: 200422 - DNA, 25 bp, Probe sequence
ttttgaaattttagcagatactgat

SEQ ID NO: 200423 - DNA, 25 bp, Probe sequence
attcagcgaaatatcaactaactaa

SEQ ID NO: 200424 - DNA, 25 bp, Probe sequence
attaattctgaaatggcgactcaaa

SEQ ID NO: 200425 - DNA, 25 bp, Probe sequence
attattaattctgaaatggcgactc

SEQ ID NO: 200426 - DNA, 25 bp, Probe sequence
atttttattgggggttgtggcatgg

SEQ ID NO: 200427 - DNA, 25 bp, Probe sequence
atactttagtgatagcttagattat

SEQ ID NO: 200428 - DNA, 25 bp, Probe sequence
atggcgactcaaaataagggagaag

SEQ ID NO: 200429 - DNA, 25 bp, Probe sequence
agcgaaatatcaactaactaatgat

SEQ ID NO: 200430 - DNA, 25 bp, Probe sequence
aatggcgactcaaaataagggagaa

SEQ ID NO: 200431 - DNA, 25 bp, Probe sequence
actttagtgatagcttagattataa

SEQ ID NO: 200432 - DNA, 25 bp, Probe sequence
aaatggcgactcaaaataagggaga

SEQ ID NO: 200433 - DNA, 25 bp, Probe sequence
aatttttattgggggttgtggcatg

SEQ ID NO: 200434 - DNA, 25 bp, Probe sequence
caatttttattgggggttgtggcat

SEQ ID NO: 200435 - DNA, 25 bp, Probe sequence
cgactcaaaataagggagaagcttt

SEQ ID NO: 200436 - DNA, 25 bp, Probe sequence
cagcgaaatatcaactaactaatga

SEQ ID NO: 200437 - DNA, 25 bp, Probe sequence
gcgactcaaaataagggagaagctt

SEQ ID NO: 200438 - DNA, 25 bp, Probe sequence
gattattaattctgaaatggcgact

SEQ ID NO: 200439 - DNA, 25 bp, Probe sequence
gattgataataaagttattccaaca

SEQ ID NO: 200440 - DNA, 25 bp, Probe sequence
gtatggtcttatacatgaatagaaa

SEQ ID NO: 200441 - DNA, 25 bp, Probe sequence
ggtcttatacatgaatagaaataca

SEQ ID NO: 200442 - DNA, 25 bp, Probe sequence
ggtatggtcttatacatgaatagaa

SEQ ID NO: 200443 - DNA, 25 bp, Probe sequence
ggcgactcaaaataagggagaagct

SEQ ID NO: 200444 - DNA, 25 bp, Probe sequence
tggtcttatacatgaatagaaatac

SEQ ID NO: 200445 - DNA, 25 bp, Probe sequence
ttttattgggggttgtggcatgggt

SEQ ID NO: 200446 - DNA, 25 bp, Probe sequence
tcagcgaaatatcaactaactaatg

SEQ ID NO: 200447 - DNA, 25 bp, Probe sequence
taaaaaagataaaggcacatggatt

SEQ ID NO: 200448 - DNA, 25 bp, Probe sequence
taaaggcacatggattattaattct

SEQ ID NO: 200449 - DNA, 25 bp, Probe sequence
tactttagtgatagcttagattata

SEQ ID NO: 200450 - DNA, 25 bp, Probe sequence
tacccagttaaaatgattgataata

SEQ ID NO: 200451 - DNA, 25 bp, Probe sequence
tagttttatgtattagttttctatt

SEQ ID NO: 200452 - DNA, 25 bp, Probe sequence
tttttattgggggttgtggcatggg

SEQ ID NO: 200453 - DNA, 25 bp, Probe sequence
tattaattctgaaatggcgactcaa

SEQ ID NO: 200454 - DNA, 25 bp, Probe sequence
ttattaattctgaaatggcgactca

SEQ ID NO: 200455 - DNA, 25 bp, Probe sequence
ttagtgatagcttagattataaaaa

SEQ ID NO: 200456 - DNA, 25 bp, Probe sequence
ttcagcgaaatatcaactaactaat

SEQ ID NO: 200457 - DNA, 25 bp, Probe sequence
attcggaagaaactagcgcaatatc

SEQ ID NO: 200458 - DNA, 25 bp, Probe sequence
atgttgtggcatacaatcctgctcc

SEQ ID NO: 200459 - DNA, 25 bp, Probe sequence
atggttgaccaagaacttcagcagt

SEQ ID NO: 200460 - DNA, 25 bp, Probe sequence
aggatcaacaattggcagggcaaat

SEQ ID NO: 200461 - DNA, 25 bp, Probe sequence
agagatgctatctttcttgggcttc

SEQ ID NO: 200462 - DNA, 25 bp, Probe sequence
acttgtggtgatgtgttacgtataa

SEQ ID NO: 200463 - DNA, 25 bp, Probe sequence
acaatcctgctccgttagaagtaaa

SEQ ID NO: 200464 - DNA, 25 bp, Probe sequence
acaatggtcagggccatgcgatgga

SEQ ID NO: 200465 - DNA, 25 bp, Probe sequence
aacttgctaccgaaccacataatga

SEQ ID NO: 200466 - DNA, 25 bp, Probe sequence
aacattttgcaaatacacagcagtt

SEQ ID NO: 200467 - DNA, 25 bp, Probe sequence
aactttagtggcattttcggtagct

SEQ ID NO: 200468 - DNA, 25 bp, Probe sequence
aatggctggtacaaactttcacggc

SEQ ID NO: 200469 - DNA, 25 bp, Probe sequence
aattgataccgttactggtcattct

SEQ ID NO: 200470 - DNA, 25 bp, Probe sequence
caaactttcacggcgatcaacttaa

SEQ ID NO: 200471 - DNA, 25 bp, Probe sequence
ctttcttgggcttcgttataacatc

SEQ ID NO: 200472 - DNA, 25 bp, Probe sequence
ccctctcgtcttctcaacaaaaatt

SEQ ID NO: 200473 - DNA, 25 bp, Probe sequence
gcgtacagatcatttaacttgtggt

SEQ ID NO: 200474 - DNA, 25 bp, Probe sequence
gactatttagtgaagcgtacagatc

SEQ ID NO: 200475 - DNA, 25 bp, Probe sequence
gaccacggcaacggcatttttaaat

SEQ ID NO: 200476 - DNA, 25 bp, Probe sequence
gatgtacgaggcactatgaaggatg

SEQ ID NO: 200477 - DNA, 25 bp, Probe sequence
gatagttatacagaccccagtacgg

SEQ ID NO: 200478 - DNA, 25 bp, Probe sequence
gatatcgcgatgcaaatgacaaagc

SEQ ID NO: 200479 - DNA, 25 bp, Probe sequence
gttactggtcattctttaggaggga

SEQ ID NO: 200480 - DNA, 25 bp, Probe sequence
gtaggtaaacatctttcatacccag

SEQ ID NO: 200481 - DNA, 25 bp, Probe sequence
gtagcacttagttcgatgtctccgt

SEQ ID NO: 200482 - DNA, 25 bp, Probe sequence
gtgcattagataacggtggtgtcaa

SEQ ID NO: 200483 - DNA, 25 bp, Probe sequence
ggtgtagcggatttagccattggag

SEQ ID NO: 200484 - DNA, 25 bp, Probe sequence
tacagaccccagtacggggaccacg

SEQ ID NO: 200485 - DNA, 25 bp, Probe sequence
ggcattttcggtagctgaaggacta

SEQ ID NO: 200486 - DNA, 25 bp, Probe sequence
tgaaatcaaatcgaagttactgcaa

SEQ ID NO: 200487 - DNA, 25 bp, Probe sequence
taaagttactgttggaatggctggt

SEQ ID NO: 200488 - DNA, 25 bp, Probe sequence
tagttcgatgtctccgttattattc

SEQ ID NO: 200489 - DNA, 25 bp, Probe sequence
ttattcccaccctctaagcaagata

SEQ ID NO: 200490 - DNA, 25 bp, Probe sequence
ttactgcaaacgaacggtggcgccc

SEQ ID NO: 200491 - DNA, 25 bp, Probe sequence
atgctaaggtgagacgactagttga

SEQ ID NO: 200492 - DNA, 25 bp, Probe sequence
atgaacaaagttatgatgcattttt

SEQ ID NO: 200493 - DNA, 25 bp, Probe sequence
atgaagcagatacttatattagaca

SEQ ID NO: 200494 - DNA, 25 bp, Probe sequence
aggtgagacgactagttgaagaatt

SEQ ID NO: 200495 - DNA, 25 bp, Probe sequence
agggagatacaaaatcttagtgatt

SEQ ID NO: 200496 - DNA, 25 bp, Probe sequence
agttgaaacgtattgaaagggagat

SEQ ID NO: 200497 - DNA, 25 bp, Probe sequence
agttatgatgcatttttgtatttaa

SEQ ID NO: 200498 - DNA, 25 bp, Probe sequence
agcagatacttatattagacaaaaa

SEQ ID NO: 200499 - DNA, 25 bp, Probe sequence
aaatgctaaggtgagacgactagtt

SEQ ID NO: 200500 - DNA, 25 bp, Probe sequence
aaagttatgatgcatttttgtattt

SEQ ID NO: 200501 - DNA, 25 bp, Probe sequence
aaaatatcaccttagaagagaaaat

SEQ ID NO: 200502 - DNA, 25 bp, Probe sequence
caaatgctaaggtgagacgactagt

SEQ ID NO: 200503 - DNA, 25 bp, Probe sequence
aaggtgagacgactagttgaagaat

SEQ ID NO: 200504 - DNA, 25 bp, Probe sequence
aatgctaaggtgagacgactagttg

SEQ ID NO: 200505 - DNA, 25 bp, Probe sequence
aatttgattatgaagcagatactta

SEQ ID NO: 200506 - DNA, 25 bp, Probe sequence
gctaaggtgagacgactagttgaag

SEQ ID NO: 200507 - DNA, 25 bp, Probe sequence
gcatatgaaatagagttgaaacgta

SEQ ID NO: 200508 - DNA, 25 bp, Probe sequence
gaagagtcaaatgctaaggtgagac

SEQ ID NO: 200509 - DNA, 25 bp, Probe sequence
gaagagaatatatacagcaatctga

SEQ ID NO: 200510 - DNA, 25 bp, Probe sequence
gaagcagatacttatattagacaaa

SEQ ID NO: 200511 - DNA, 25 bp, Probe sequence
gaactatagtgaagagtcaaatgct

SEQ ID NO: 200512 - DNA, 25 bp, Probe sequence
gagaatatatacagcaatctgaaaa

SEQ ID NO: 200513 - DNA, 25 bp, Probe sequence
gagttgaaacgtattgaaagggaga

SEQ ID NO: 200514 - DNA, 25 bp, Probe sequence
gagtcaaatgctaaggtgagacgac

SEQ ID NO: 200515 - DNA, 25 bp, Probe sequence
gatttaaaatatcaccttagaagag

SEQ ID NO: 200516 - DNA, 25 bp, Probe sequence
gattatgaagcagatacttatatta

SEQ ID NO: 200517 - DNA, 25 bp, Probe sequence
gtcaaatgctaaggtgagacgacta

SEQ ID NO: 200518 - DNA, 25 bp, Probe sequence
gtgaagagtcaaatgctaaggtgag

SEQ ID NO: 200519 - DNA, 25 bp, Probe sequence
gtgagacgactagttgaagaatttg

SEQ ID NO: 200520 - DNA, 25 bp, Probe sequence
ggtgagacgactagttgaagaattt

SEQ ID NO: 200521 - DNA, 25 bp, Probe sequence
tgaaaaaataatggaggcgaagtag

SEQ ID NO: 200522 - DNA, 25 bp, Probe sequence
tgctaaggtgagacgactagttgaa

SEQ ID NO: 200523 - DNA, 25 bp, Probe sequence
taaggtgagacgactagttgaagaa

SEQ ID NO: 200524 - DNA, 25 bp, Probe sequence
tagagttgaaacgtattgaaaggga

SEQ ID NO: 200525 - DNA, 25 bp, Probe sequence
atcacaacagtcatcgcacctgaac

SEQ ID NO: 200526 - DNA, 25 bp, Probe sequence
atcctatgtctgaccctttactagg

SEQ ID NO: 200527 - DNA, 25 bp, Probe sequence
atccctgatccgttatctaatccta

SEQ ID NO: 200528 - DNA, 25 bp, Probe sequence
atgtctgaccctttactaggagata

SEQ ID NO: 200529 - DNA, 25 bp, Probe sequence
atggccatacatttaagagtgattt

SEQ ID NO: 200530 - DNA, 25 bp, Probe sequence
acaacagtcatcgcacctgaacatg

SEQ ID NO: 200531 - DNA, 25 bp, Probe sequence
aaatgtagctaaaggtgattgggtt

SEQ ID NO: 200532 - DNA, 25 bp, Probe sequence
aacagtcatcgcacctgaacatgat

SEQ ID NO: 200533 - DNA, 25 bp, Probe sequence
aactaatcacaacagtcatcgcacc

SEQ ID NO: 200534 - DNA, 25 bp, Probe sequence
aagccatgcaagacttagataaatt

SEQ ID NO: 200535 - DNA, 25 bp, Probe sequence
ctatgtctgaccctttactaggaga

SEQ ID NO: 200536 - DNA, 25 bp, Probe sequence
ccctgatccgttatctaatcctatg

SEQ ID NO: 200537 - DNA, 25 bp, Probe sequence
gcacctgaacatgatgaaaagcatc

SEQ ID NO: 200538 - DNA, 25 bp, Probe sequence
gaatccctgatccgttatctaatcc

SEQ ID NO: 200539 - DNA, 25 bp, Probe sequence
gaaaagcaattgatcaatcagttaa

SEQ ID NO: 200540 - DNA, 25 bp, Probe sequence
gaccctttactaggagatagttgga

SEQ ID NO: 200541 - DNA, 25 bp, Probe sequence
gatccgttatctaatcctatgtctg

SEQ ID NO: 200542 - DNA, 25 bp, Probe sequence
gataaattaggcaatgagcttaaaa

SEQ ID NO: 200543 - DNA, 25 bp, Probe sequence
gttggatggtaggtgatttgaaaaa

SEQ ID NO: 200544 - DNA, 25 bp, Probe sequence
gttatctaatcctatgtctgaccct

SEQ ID NO: 200545 - DNA, 25 bp, Probe sequence
gtctgaccctttactaggagatagt

SEQ ID NO: 200546 - DNA, 25 bp, Probe sequence
gtcatcgcacctgaacatgatgaaa

SEQ ID NO: 200547 - DNA, 25 bp, Probe sequence
gtgattgggttaataaagccatgca

SEQ ID NO: 200548 - DNA, 25 bp, Probe sequence
gggaatccctgatccgttatctaat

SEQ ID NO: 200549 - DNA, 25 bp, Probe sequence
gggttaataaagccatgcaagactt

SEQ ID NO: 200550 - DNA, 25 bp, Probe sequence
ggagatagttggatggtaggtgatt

SEQ ID NO: 200551 - DNA, 25 bp, Probe sequence
tgggaatccctgatccgttatctaa

SEQ ID NO: 200552 - DNA, 25 bp, Probe sequence
tccgttatctaatcctatgtctgac

SEQ ID NO: 200553 - DNA, 25 bp, Probe sequence
tctaatcctatgtctgaccctttac

SEQ ID NO: 200554 - DNA, 25 bp, Probe sequence
tcagttaattaatcatggccataca

SEQ ID NO: 200555 - DNA, 25 bp, Probe sequence
taatcacaacagtcatcgcacctga

SEQ ID NO: 200556 - DNA, 25 bp, Probe sequence
taatcatggccatacatttaagagt

SEQ ID NO: 200557 - DNA, 25 bp, Probe sequence
taatcctatgtctgaccctttacta

SEQ ID NO: 200558 - DNA, 25 bp, Probe sequence
tatctaatcctatgtctgacccttt

SEQ ID NO: 200559 - DNA, 25 bp, Probe sequence
attggcgtatgtatggataagtaaa

SEQ ID NO: 200560 - DNA, 25 bp, Probe sequence
atacgcctgtacaaccatttggcaa

SEQ ID NO: 200561 - DNA, 25 bp, Probe sequence
atcatgaaactgtacaagatttaaa

SEQ ID NO: 200562 - DNA, 25 bp, Probe sequence
aggggttgatacgccagaaacggtg

SEQ ID NO: 200563 - DNA, 25 bp, Probe sequence
agtacatgttcaaagagttgtggat

SEQ ID NO: 200564 - DNA, 25 bp, Probe sequence
agaaaaacaagatcgctatggtaga

SEQ ID NO: 200565 - DNA, 25 bp, Probe sequence
acgcctgtacaaccatttggcaaag

SEQ ID NO: 200566 - DNA, 25 bp, Probe sequence
acaaccatttggcaaagaagcatca

SEQ ID NO: 200567 - DNA, 25 bp, Probe sequence
aaccgaatacgcctgtacaaccatt

SEQ ID NO: 200568 - DNA, 25 bp, Probe sequence
aagtatttttcaccaaatggcaaat

SEQ ID NO: 200569 - DNA, 25 bp, Probe sequence
gaaaccgaatacgcctgtacaacca

SEQ ID NO: 200570 - DNA, 25 bp, Probe sequence
cggtgaaaccgaatacgcctgtaca

SEQ ID NO: 200571 - DNA, 25 bp, Probe sequence
cgaatacgcctgtacaaccatttgg

SEQ ID NO: 200572 - DNA, 25 bp, Probe sequence
gccatcattattgtaggtgtattag

SEQ ID NO: 200573 - DNA, 25 bp, Probe sequence
gcttgctatgattgtggtagccatc

SEQ ID NO: 200574 - DNA, 25 bp, Probe sequence
gcttataggggttgatacgccagaa

SEQ ID NO: 200575 - DNA, 25 bp, Probe sequence
gaagtcaaataaatcgcttgctatg

SEQ ID NO: 200576 - DNA, 25 bp, Probe sequence
gaaatgtatttatagaagcacaaaa

SEQ ID NO: 200577 - DNA, 25 bp, Probe sequence
gagttgtggatggtgatacatttat

SEQ ID NO: 200578 - DNA, 25 bp, Probe sequence
gatggtgatacatttattgcaaatc

SEQ ID NO: 200579 - DNA, 25 bp, Probe sequence
gatcgtatgtacaataaggaattag

SEQ ID NO: 200580 - DNA, 25 bp, Probe sequence
gatcgctatggtagaacattggcgt

SEQ ID NO: 200581 - DNA, 25 bp, Probe sequence
gatacgccagaaacggtgaaaccga

SEQ ID NO: 200582 - DNA, 25 bp, Probe sequence
gattgtggtagccatcattattgta

SEQ ID NO: 200583 - DNA, 25 bp, Probe sequence
gtgaaaccgaatacgcctgtacaac

SEQ ID NO: 200584 - DNA, 25 bp, Probe sequence
ggtgtattagcatttcaatttatga

SEQ ID NO: 200585 - DNA, 25 bp, Probe sequence
ggtagaacattggcgtatgtatgga

SEQ ID NO: 200586 - DNA, 25 bp, Probe sequence
ggtagccatcattattgtaggtgta

SEQ ID NO: 200587 - DNA, 25 bp, Probe sequence
ggataagtaaagatcgtatgtacaa

SEQ ID NO: 200588 - DNA, 25 bp, Probe sequence
ggcaaagaagcatcaaattatagta

SEQ ID NO: 200589 - DNA, 25 bp, Probe sequence
taggcttataggggttgatacgcca

SEQ ID NO: 200590 - DNA, 25 bp, Probe sequence
taaatcgcttgctatgattgtggta

SEQ ID NO: 200591 - DNA, 25 bp, Probe sequence
tagtggaaaagggacttgctagaga

SEQ ID NO: 200592 - DNA, 25 bp, Probe sequence
ttagcatttcaatttatgaatcata

SEQ ID NO: 200593 - DNA, 25 bp, Probe sequence
tagggttccctatagagccggtgta

SEQ ID NO: 200594 - DNA, 25 bp, Probe sequence
attgtgtttataccaggagggcgtg

SEQ ID NO: 200595 - DNA, 25 bp, Probe sequence
atttgcatttatacttattacgttt

SEQ ID NO: 200596 - DNA, 25 bp, Probe sequence
atagcaatctatccaatcacattat

SEQ ID NO: 200597 - DNA, 25 bp, Probe sequence
atgtttgctttatctagctttttat

SEQ ID NO: 200598 - DNA, 25 bp, Probe sequence
agctttttattatttttcaccagat

SEQ ID NO: 200599 - DNA, 25 bp, Probe sequence
aaaacgcttcgtacctttcagcatt

SEQ ID NO: 200600 - DNA, 25 bp, Probe sequence
aacatgggcagttccagcggcaatt

SEQ ID NO: 200601 - DNA, 25 bp, Probe sequence
aatgatttgcattttgctactagtt

SEQ ID NO: 200602 - DNA, 25 bp, Probe sequence
aattctttacggcttatttgcattt

SEQ ID NO: 200603 - DNA, 25 bp, Probe sequence
aattgctatatgtttgctttatcta

SEQ ID NO: 200604 - DNA, 25 bp, Probe sequence
gccggattaggcatttatttcatta

SEQ ID NO: 200605 - DNA, 25 bp, Probe sequence
gcattaagcatatctagtgtattga

SEQ ID NO: 200606 - DNA, 25 bp, Probe sequence
gaacattttcatatctacaaggtgg

SEQ ID NO: 200607 - DNA, 25 bp, Probe sequence
gaaattccgcgagggttaatattat

SEQ ID NO: 200608 - DNA, 25 bp, Probe sequence
gaaatataccacataacatcattat

SEQ ID NO: 200609 - DNA, 25 bp, Probe sequence
gacttatgaactatcaaaacgcttc

SEQ ID NO: 200610 - DNA, 25 bp, Probe sequence
gagccggtgtattactcaaccatgg

SEQ ID NO: 200611 - DNA, 25 bp, Probe sequence
gatccaaacactatagatttactcg

SEQ ID NO: 200612 - DNA, 25 bp, Probe sequence
gatatccctattgtgtttataccag

SEQ ID NO: 200613 - DNA, 25 bp, Probe sequence
gtacttctggaagaggaccgattta

SEQ ID NO: 200614 - DNA, 25 bp, Probe sequence
gatttactcgttatgtttatagcaa

SEQ ID NO: 200615 - DNA, 25 bp, Probe sequence
gttgattctatcatttggcttatta

SEQ ID NO: 200616 - DNA, 25 bp, Probe sequence
gttccagcggcaattagtggtattt

SEQ ID NO: 200617 - DNA, 25 bp, Probe sequence
gtacctttcagcatttactgccgga

SEQ ID NO: 200618 - DNA, 25 bp, Probe sequence
gtactttgtgcaattatcagcatga

SEQ ID NO: 200619 - DNA, 25 bp, Probe sequence
ggtgctattttattaattctttacg

SEQ ID NO: 200620 - DNA, 25 bp, Probe sequence
ggagggcgtggaggtgctattttat

SEQ ID NO: 200621 - DNA, 25 bp, Probe sequence
ggctatgggccatttaactattata

SEQ ID NO: 200622 - DNA, 25 bp, Probe sequence
tggtttgtgttgttctattttatta

SEQ ID NO: 200623 - DNA, 25 bp, Probe sequence
tacctagctatatcaattttggact

SEQ ID NO: 200624 - DNA, 25 bp, Probe sequence
tttattacaaaaggacggcgtcatc

SEQ ID NO: 200625 - DNA, 25 bp, Probe sequence
tattctattctttttaacatgggca

SEQ ID NO: 200626 - DNA, 25 bp, Probe sequence
ttggcttattagggttttttatcat

SEQ ID NO: 200627 - DNA, 25 bp, Probe sequence
attgggatgtggattatattaaacc

SEQ ID NO: 200628 - DNA, 25 bp, Probe sequence
atatacgtatacctaagagtaacat

SEQ ID NO: 200629 - DNA, 25 bp, Probe sequence
atcgcaattatttaaatttcacggt

SEQ ID NO: 200630 - DNA, 25 bp, Probe sequence
atgcgttactatacatagataagca

SEQ ID NO: 200631 - DNA, 25 bp, Probe sequence
atgaaaacatcatcgcaattattta

SEQ ID NO: 200632 - DNA, 25 bp, Probe sequence
atgtatgatctaatgcaacaccatc

SEQ ID NO: 200633 - DNA, 25 bp, Probe sequence
aaatatgcgtggaacgtaagcgttt

SEQ ID NO: 200634 - DNA, 25 bp, Probe sequence
gccatgcagcttttcttaaatgatg

SEQ ID NO: 200635 - DNA, 25 bp, Probe sequence
gctaaagaagatttatcactttcaa

SEQ ID NO: 200636 - DNA, 25 bp, Probe sequence
gaattaaaattaccttctattgttg

SEQ ID NO: 200637 - DNA, 25 bp, Probe sequence
gcagcttttcttaaatgatgaatta

SEQ ID NO: 200638 - DNA, 25 bp, Probe sequence
gcaacgtattaaggatgcaatccag

SEQ ID NO: 200639 - DNA, 25 bp, Probe sequence
gcaatcatatgcgttactatacata

SEQ ID NO: 200640 - DNA, 25 bp, Probe sequence
gaatggatttttagattggatccga

SEQ ID NO: 200641 - DNA, 25 bp, Probe sequence
gaagttgccatgcagcttttcttaa

SEQ ID NO: 200642 - DNA, 25 bp, Probe sequence
gatctaatgcaacaccatcagtatc

SEQ ID NO: 200643 - DNA, 25 bp, Probe sequence
gatgcattaagctactatcaatttt

SEQ ID NO: 200644 - DNA, 25 bp, Probe sequence
gataagcaagatcaagcaatagcta

SEQ ID NO: 200645 - DNA, 25 bp, Probe sequence
gatttatcactttcaaaaattgcaa

SEQ ID NO: 200646 - DNA, 25 bp, Probe sequence
gattggatccgaatatacgtatacc

SEQ ID NO: 200647 - DNA, 25 bp, Probe sequence
gttgccatgcagcttttcttaaatg

SEQ ID NO: 200648 - DNA, 25 bp, Probe sequence
gttattccgcaatcatatgcgttac

SEQ ID NO: 200649 - DNA, 25 bp, Probe sequence
gtagtaggtgagcaacgtattaagg

SEQ ID NO: 200650 - DNA, 25 bp, Probe sequence
gtaagcgtttaagtgatattgtgaa

SEQ ID NO: 200651 - DNA, 25 bp, Probe sequence
gtcatagatgcattaagctactatc

SEQ ID NO: 200652 - DNA, 25 bp, Probe sequence
gtgaaagttattccgcaatcatatg

SEQ ID NO: 200653 - DNA, 25 bp, Probe sequence
gtgatattgtgaaagttattccgca

SEQ ID NO: 200654 - DNA, 25 bp, Probe sequence
ggtgaagttgccatgcagcttttct

SEQ ID NO: 200655 - DNA, 25 bp, Probe sequence
ggatccgaatatacgtatacctaag

SEQ ID NO: 200656 - DNA, 25 bp, Probe sequence
taatgcaacaccatcagtatcatca

SEQ ID NO: 200657 - DNA, 25 bp, Probe sequence
taatgagtattttcgtttatgatgt

SEQ ID NO: 200658 - DNA, 25 bp, Probe sequence
taagctactatcaattttttatttt

SEQ ID NO: 200659 - DNA, 25 bp, Probe sequence
taccttctattgttgaaatatgcgt

SEQ ID NO: 200660 - DNA, 25 bp, Probe sequence
ttcacggtgaagttgccatgcagct

SEQ ID NO: 200661 - DNA, 25 bp, Probe sequence
attggtgatgccgttggtgacacga

SEQ ID NO: 200662 - DNA, 25 bp, Probe sequence
attagcagtacatcttaaactttta

SEQ ID NO: 200663 - DNA, 25 bp, Probe sequence
atttcaccgatcattaagagttgca

SEQ ID NO: 200664 - DNA, 25 bp, Probe sequence
atatttatcatttaaccaagtcatt

SEQ ID NO: 200665 - DNA, 25 bp, Probe sequence
atctggtgttgttaaaatcatcgaa

SEQ ID NO: 200666 - DNA, 25 bp, Probe sequence
aggcaatattaccatttcaccgatc

SEQ ID NO: 200667 - DNA, 25 bp, Probe sequence
aggattaggtactgtcggatctggt

SEQ ID NO: 200668 - DNA, 25 bp, Probe sequence
acacacattgccaccacattttgaa

SEQ ID NO: 200669 - DNA, 25 bp, Probe sequence
aaatccaatttctttgtagtagtga

SEQ ID NO: 200670 - DNA, 25 bp, Probe sequence
aaagcatcaattagcagctgtagag

SEQ ID NO: 200671 - DNA, 25 bp, Probe sequence
aacgacatttgaggaagcacttgat

SEQ ID NO: 200672 - DNA, 25 bp, Probe sequence
aaccgacagcaaattcaagatacat

SEQ ID NO: 200673 - DNA, 25 bp, Probe sequence
aagcgagtgtagcaggtggtattcc

SEQ ID NO: 200674 - DNA, 25 bp, Probe sequence
aatgtagccgatcaactggggtata

SEQ ID NO: 200675 - DNA, 25 bp, Probe sequence
aatcatcgaagagaaccgacagcaa

SEQ ID NO: 200676 - DNA, 25 bp, Probe sequence
catatgccgctgttatagttggatt

SEQ ID NO: 200677 - DNA, 25 bp, Probe sequence
gaatgtagcattattctttgaatca

SEQ ID NO: 200678 - DNA, 25 bp, Probe sequence
gaagttgacaaagtatacccagtag

SEQ ID NO: 200679 - DNA, 25 bp, Probe sequence
gaagcggatccaactgatgatgtag

SEQ ID NO: 200680 - DNA, 25 bp, Probe sequence
gaaaaggagcaggcagtttagcaac

SEQ ID NO: 200681 - DNA, 25 bp, Probe sequence
gatgccgttggtgacacgatgtttt

SEQ ID NO: 200682 - DNA, 25 bp, Probe sequence
gatgcagcgcgtaaagttgtcatta

SEQ ID NO: 200683 - DNA, 25 bp, Probe sequence
gatattatcgttgaagtcatgggag

SEQ ID NO: 200684 - DNA, 25 bp, Probe sequence
gttggattggaatcatcaccggaag

SEQ ID NO: 200685 - DNA, 25 bp, Probe sequence
gttgtcattacatcatatttatcat

SEQ ID NO: 200686 - DNA, 25 bp, Probe sequence
gtagaaggggtagatgcagcgcgta

SEQ ID NO: 200687 - DNA, 25 bp, Probe sequence
gtttagcaacaggtagtgccgttgt

SEQ ID NO: 200688 - DNA, 25 bp, Probe sequence
gtcataaagcatattcttgttcgag

SEQ ID NO: 200689 - DNA, 25 bp, Probe sequence
gtggtattccgatcgtaaatgccat

SEQ ID NO: 200690 - DNA, 25 bp, Probe sequence
gggaggaattgaaccaactgtagat

SEQ ID NO: 200691 - DNA, 25 bp, Probe sequence
ggtactgtcggatctggtgttgtta

SEQ ID NO: 200692 - DNA, 25 bp, Probe sequence
ggttttgctgaagcggatccaactg

SEQ ID NO: 200693 - DNA, 25 bp, Probe sequence
tcatcaccggaagaattaatcacta

SEQ ID NO: 200694 - DNA, 25 bp, Probe sequence
tcagatttacacacattgccaccac

SEQ ID NO: 200695 - DNA, 25 bp, Probe sequence
attgccgaaaatgtttggcttccaa

SEQ ID NO: 200696 - DNA, 25 bp, Probe sequence
attgcaactgctattcgaattggta

SEQ ID NO: 200697 - DNA, 25 bp, Probe sequence
attactgcatattggaaaggcttta

SEQ ID NO: 200698 - DNA, 25 bp, Probe sequence
atcctgaaacgattgcaactgctat

SEQ ID NO: 200699 - DNA, 25 bp, Probe sequence
atgcgcttcgactggaaatacatca

SEQ ID NO: 200700 - DNA, 25 bp, Probe sequence
agagtttaaagcacatttaccagta

SEQ ID NO: 200701 - DNA, 25 bp, Probe sequence
agctatcgtcgtaataccagaaggt

SEQ ID NO: 200702 - DNA, 25 bp, Probe sequence
aaatgtttggcttccaagctgaagg

SEQ ID NO: 200703 - DNA, 25 bp, Probe sequence
aaaattgtaatatgcgcttcgactg

SEQ ID NO: 200704 - DNA, 25 bp, Probe sequence
aagaaggtgtctttagtgaaccagc

SEQ ID NO: 200705 - DNA, 25 bp, Probe sequence
aagatcgcggtatggtaatggctgt

SEQ ID NO: 200706 - DNA, 25 bp, Probe sequence
aatgtatggtgcagaaatcgtttct

SEQ ID NO: 200707 - DNA, 25 bp, Probe sequence
aatacatcagcgtctgcagcagcat

SEQ ID NO: 200708 - DNA, 25 bp, Probe sequence
aatacaccactcattcattgtgaaa

SEQ ID NO: 200709 - DNA, 25 bp, Probe sequence
aattagacggtgaagcacctgatat

SEQ ID NO: 200710 - DNA, 25 bp, Probe sequence
cgaattggtaatcctgctagttggg

SEQ ID NO: 200711 - DNA, 25 bp, Probe sequence
gcgactaatgctcttaaagaatcaa

SEQ ID NO: 200712 - DNA, 25 bp, Probe sequence
gcggtatggtaatggctgtgacaaa

SEQ ID NO: 200713 - DNA, 25 bp, Probe sequence
gcgtctgcagcagcatatgcagcga

SEQ ID NO: 200714 - DNA, 25 bp, Probe sequence
gcatcaccaattgttcaaaataaag

SEQ ID NO: 200715 - DNA, 25 bp, Probe sequence
gcattaggtaaattgtcgcaagcag

SEQ ID NO: 200716 - DNA, 25 bp, Probe sequence
gcagcatatgcagcgagagcaggtt

SEQ ID NO: 200717 - DNA, 25 bp, Probe sequence
gcacctgatattttagcgattcctg

SEQ ID NO: 200718 - DNA, 25 bp, Probe sequence
gaagtatgaaggtgccaatccgaca

SEQ ID NO: 200719 - DNA, 25 bp, Probe sequence
gaagcatatcagttaatgacaacta

SEQ ID NO: 200720 - DNA, 25 bp, Probe sequence
gagcaggtttaaaagctatcgtcgt

SEQ ID NO: 200721 - DNA, 25 bp, Probe sequence
gacaggctcatttgaaattgtacaa

SEQ ID NO: 200722 - DNA, 25 bp, Probe sequence
gagggaaatacaccactcattcatt

SEQ ID NO: 200723 - DNA, 25 bp, Probe sequence
gatggcaaggattagtagaagagtt

SEQ ID NO: 200724 - DNA, 25 bp, Probe sequence
gtaatgcttctattgcaggtttaat

SEQ ID NO: 200725 - DNA, 25 bp, Probe sequence
gtgccaatccgacaggttcatttaa

SEQ ID NO: 200726 - DNA, 25 bp, Probe sequence
ggaaactttgatgaagctttagaaa

SEQ ID NO: 200727 - DNA, 25 bp, Probe sequence
ttagcgattcctgtaggtaatgcag

SEQ ID NO: 200728 - DNA, 25 bp, Probe sequence
ttgtcgcaagcagtaatgtatggtg

SEQ ID NO: 200729 - DNA, 25 bp, Probe sequence
atttatggtggtttaatcgctggat

SEQ ID NO: 200730 - DNA, 25 bp, Probe sequence
aactcatgcaacaagatggctttca

SEQ ID NO: 200731 - DNA, 25 bp, Probe sequence
aaccttggagttggctttgattcta

SEQ ID NO: 200732 - DNA, 25 bp, Probe sequence
aatgttgcgccgaccatttatggtg

SEQ ID NO: 200733 - DNA, 25 bp, Probe sequence
aatacaatgatttgtgcattagcac

SEQ ID NO: 200734 - DNA, 25 bp, Probe sequence
aatatattttccatgatgatgcatc

SEQ ID NO: 200735 - DNA, 25 bp, Probe sequence
aattcctgcatcaacagccaacctt

SEQ ID NO: 200736 - DNA, 25 bp, Probe sequence
ctgcatcaacagccaaccttggagt

SEQ ID NO: 200737 - DNA, 25 bp, Probe sequence
cgactgaaatcgaaggacatcctga

SEQ ID NO: 200738 - DNA, 25 bp, Probe sequence
gcatcaagacgtgctttaccacaaa

SEQ ID NO: 200739 - DNA, 25 bp, Probe sequence
gcattagcacagcacaattatgaat

SEQ ID NO: 200740 - DNA, 25 bp, Probe sequence
gcaactgtaattagtggtgctggac

SEQ ID NO: 200741 - DNA, 25 bp, Probe sequence
gaattagcaggtaaactcatgcaac

SEQ ID NO: 200742 - DNA, 25 bp, Probe sequence
gaaccgtatcgtcagcatttaattg

SEQ ID NO: 200743 - DNA, 25 bp, Probe sequence
gaaacgtcagttgcacatatcgaca

SEQ ID NO: 200744 - DNA, 25 bp, Probe sequence
gacatcctgataatgttgcgccgac

SEQ ID NO: 200745 - DNA, 25 bp, Probe sequence
gacgaaacaaactttatttatcatg

SEQ ID NO: 200746 - DNA, 25 bp, Probe sequence
gagaagtgatattccattggcaaga

SEQ ID NO: 200747 - DNA, 25 bp, Probe sequence
gaggtattacaattagcgactgaaa

SEQ ID NO: 200748 - DNA, 25 bp, Probe sequence
gatggctttcatgaaccgtatcgtc

SEQ ID NO: 200749 - DNA, 25 bp, Probe sequence
gataaatttttgcatctgtctgtaa

SEQ ID NO: 200750 - DNA, 25 bp, Probe sequence
gttgcacatatcgacataccagacg

SEQ ID NO: 200751 - DNA, 25 bp, Probe sequence
gttcgtcagcttctgctttagtagg

SEQ ID NO: 200752 - DNA, 25 bp, Probe sequence
gtaggagctatatatatcgcaaatt

SEQ ID NO: 200753 - DNA, 25 bp, Probe sequence
gtaacgataccaacttatgaactaa

SEQ ID NO: 200754 - DNA, 25 bp, Probe sequence
gtcagcttctgctttagtaggagct

SEQ ID NO: 200755 - DNA, 25 bp, Probe sequence
gtgctttaccacaaaaattaacaca

SEQ ID NO: 200756 - DNA, 25 bp, Probe sequence
ggtgctggaccaactattttaatat

SEQ ID NO: 200757 - DNA, 25 bp, Probe sequence
ggatgtgattgtaacgataccaact

SEQ ID NO: 200758 - DNA, 25 bp, Probe sequence
ggcaagagggttaggttcgtcagct

SEQ ID NO: 200759 - DNA, 25 bp, Probe sequence
ggctttgattctataggtatggctt

SEQ ID NO: 200760 - DNA, 25 bp, Probe sequence
tggagttaacaattcctgcatcaac

SEQ ID NO: 200761 - DNA, 25 bp, Probe sequence
tcgacataccagacgtggatgtgat

SEQ ID NO: 200762 - DNA, 25 bp, Probe sequence
tcaacataatgcctatgcaactgta

SEQ ID NO: 200763 - DNA, 25 bp, Probe sequence
atagggatagtatgtatgcatcatt

SEQ ID NO: 200764 - DNA, 25 bp, Probe sequence
atcaacctatactgtatctcatttc

SEQ ID NO: 200765 - DNA, 25 bp, Probe sequence
atctcatttcaaaggagtctcatat

SEQ ID NO: 200766 - DNA, 25 bp, Probe sequence
atgacagtgataatcaacctatact

SEQ ID NO: 200767 - DNA, 25 bp, Probe sequence
aggagtctcatattaaaacgtctgt

SEQ ID NO: 200768 - DNA, 25 bp, Probe sequence
agataatgacagtgataatcaacct

SEQ ID NO: 200769 - DNA, 25 bp, Probe sequence
acctatactgtatctcatttcaaag

SEQ ID NO: 200770 - DNA, 25 bp, Probe sequence
aaatgatactcaacatattattaca

SEQ ID NO: 200771 - DNA, 25 bp, Probe sequence
aacatattattacagaagtttattt

SEQ ID NO: 200772 - DNA, 25 bp, Probe sequence
aacgacagcaacttgttgataagat

SEQ ID NO: 200773 - DNA, 25 bp, Probe sequence
aaggtttaaacaatcgagagataca

SEQ ID NO: 200774 - DNA, 25 bp, Probe sequence
aaggagacatgttaattaattataa

SEQ ID NO: 200775 - DNA, 25 bp, Probe sequence
aataaacgacagcaacttgttgata

SEQ ID NO: 200776 - DNA, 25 bp, Probe sequence
caatcgagagatacagaagaagtta

SEQ ID NO: 200777 - DNA, 25 bp, Probe sequence
caacctatactgtatctcatttcaa

SEQ ID NO: 200778 - DNA, 25 bp, Probe sequence
caacagcaattgtatcagtatgata

SEQ ID NO: 200779 - DNA, 25 bp, Probe sequence
ctatactgtatctcatttcaaagga

SEQ ID NO: 200780 - DNA, 25 bp, Probe sequence
gctcaacagcaattgtatcagtatg

SEQ ID NO: 200781 - DNA, 25 bp, Probe sequence
gcagacattatatgaagctcaacag

SEQ ID NO: 200782 - DNA, 25 bp, Probe sequence
gaagttaattgaatataagcagaca

SEQ ID NO: 200783 - DNA, 25 bp, Probe sequence
gaagctcaacagcaattgtatcagt

SEQ ID NO: 200784 - DNA, 25 bp, Probe sequence
gacattatatgaagctcaacagcaa

SEQ ID NO: 200785 - DNA, 25 bp, Probe sequence
gatggcaagattatgatcaagaata

SEQ ID NO: 200786 - DNA, 25 bp, Probe sequence
gataatcaacctatactgtatctca

SEQ ID NO: 200787 - DNA, 25 bp, Probe sequence
gatactcaacatattattacagaag

SEQ ID NO: 200788 - DNA, 25 bp, Probe sequence
gatagtatgtatgcatcatttgatg

SEQ ID NO: 200789 - DNA, 25 bp, Probe sequence
gtatctcatttcaaaggagtctcat

SEQ ID NO: 200790 - DNA, 25 bp, Probe sequence
gtatgcatcatttgatggcaagatt

SEQ ID NO: 200791 - DNA, 25 bp, Probe sequence
gtatgatagtcaaaatagggatagt

SEQ ID NO: 200792 - DNA, 25 bp, Probe sequence
gtatgtatgcatcatttgatggcaa

SEQ ID NO: 200793 - DNA, 25 bp, Probe sequence
gtaataaacgacagcaacttgttga

SEQ ID NO: 200794 - DNA, 25 bp, Probe sequence
gggatagtatgtatgcatcatttga

SEQ ID NO: 200795 - DNA, 25 bp, Probe sequence
taatcaacctatactgtatctcatt

SEQ ID NO: 200796 - DNA, 25 bp, Probe sequence
tactgtatctcatttcaaaggagtc

SEQ ID NO: 200797 - DNA, 25 bp, Probe sequence
attgcgcgagccattataaataatc

SEQ ID NO: 200798 - DNA, 25 bp, Probe sequence
atagatcgagagtatcatggtgaat

SEQ ID NO: 200799 - DNA, 25 bp, Probe sequence
aggaagtaattatcagacacaatct

SEQ ID NO: 200800 - DNA, 25 bp, Probe sequence
agtcacacatgatcgtaaagtagca

SEQ ID NO: 200801 - DNA, 25 bp, Probe sequence
acgtgttgcaattgcgcgagccatt

SEQ ID NO: 200802 - DNA, 25 bp, Probe sequence
actcctagtaaactatcaggcggtc

SEQ ID NO: 200803 - DNA, 25 bp, Probe sequence
actgtgctcagtgctgtaggcctag

SEQ ID NO: 200804 - DNA, 25 bp, Probe sequence
aaagctgatcgaataattcatattt

SEQ ID NO: 200805 - DNA, 25 bp, Probe sequence
aaaccgagataatcatactacaatt

SEQ ID NO: 200806 - DNA, 25 bp, Probe sequence
aactatcaggcggtcaacaacaacg

SEQ ID NO: 200807 - DNA, 25 bp, Probe sequence
aacgggtgctttggattcagataca

SEQ ID NO: 200808 - DNA, 25 bp, Probe sequence
aatgcaggtgaattcatagcgatta

SEQ ID NO: 200809 - DNA, 25 bp, Probe sequence
aatccaaagtttattattgcagatg

SEQ ID NO: 200810 - DNA, 25 bp, Probe sequence
caggctcagggaagagcacactgat

SEQ ID NO: 200811 - DNA, 25 bp, Probe sequence
catggtgaatatttgtttgaaggaa

SEQ ID NO: 200812 - DNA, 25 bp, Probe sequence
gctgtaggcctagatggcaaaggtg

SEQ ID NO: 200813 - DNA, 25 bp, Probe sequence
gctcagtgctgtaggcctagatggc

SEQ ID NO: 200814 - DNA, 25 bp, Probe sequence
gaataaagttatgactgtgctcagt

SEQ ID NO: 200815 - DNA, 25 bp, Probe sequence
gaaaatataagtatgccactggtat

SEQ ID NO: 200816 - DNA, 25 bp, Probe sequence
gacacaatctgataatcaattggca

SEQ ID NO: 200817 - DNA, 25 bp, Probe sequence
gagccaacgggtgctttggattcag

SEQ ID NO: 200818 - DNA, 25 bp, Probe sequence
gagcacactgattaatatcttagga

SEQ ID NO: 200819 - DNA, 25 bp, Probe sequence
gttgcaattgcgcgagccattataa

SEQ ID NO: 200820 - DNA, 25 bp, Probe sequence
ggtgctttggattcagatacatcta

SEQ ID NO: 200821 - DNA, 25 bp, Probe sequence
ggacatatttacatcattaaaccga

SEQ ID NO: 200822 - DNA, 25 bp, Probe sequence
ggcaaaggtgattttactcctagta

SEQ ID NO: 200823 - DNA, 25 bp, Probe sequence
tgggaccatcaggctcagggaagag

SEQ ID NO: 200824 - DNA, 25 bp, Probe sequence
tggtcgtatacaacatgaagaggtg

SEQ ID NO: 200825 - DNA, 25 bp, Probe sequence
tgcagatgagccaacgggtgctttg

SEQ ID NO: 200826 - DNA, 25 bp, Probe sequence
tactacaattattttagtcacacat

SEQ ID NO: 200827 - DNA, 25 bp, Probe sequence
tagcgattatgggaccatcaggctc

SEQ ID NO: 200828 - DNA, 25 bp, Probe sequence
tatgccactggtatatacaaatatg

SEQ ID NO: 200829 - DNA, 25 bp, Probe sequence
tatacatatcaatgcaggtgaattc

SEQ ID NO: 200830 - DNA, 25 bp, Probe sequence
ttatgggaccatcaggctcagggaa

SEQ ID NO: 200831 - DNA, 25 bp, Probe sequence
attcaactactatatgggacactta

SEQ ID NO: 200832 - DNA, 25 bp, Probe sequence
atcatcggtatttcttctgttatta

SEQ ID NO: 200833 - DNA, 25 bp, Probe sequence
atcgctatatattgagggacaggga

SEQ ID NO: 200834 - DNA, 25 bp, Probe sequence
aggtctgcctaccttacagataatt

SEQ ID NO: 200835 - DNA, 25 bp, Probe sequence
agtgtagtaagtttgagttctgtca

SEQ ID NO: 200836 - DNA, 25 bp, Probe sequence
aaaggatcgggctctgttttaggtg

SEQ ID NO: 200837 - DNA, 25 bp, Probe sequence
aaaaactgctgctgatcaattttca

SEQ ID NO: 200838 - DNA, 25 bp, Probe sequence
aactatattctgactcatctaccgt

SEQ ID NO: 200839 - DNA, 25 bp, Probe sequence
aatgcctgaaaatacattcaactac

SEQ ID NO: 200840 - DNA, 25 bp, Probe sequence
aattgcggttagtgtgtcgatatta

SEQ ID NO: 200841 - DNA, 25 bp, Probe sequence
ccagctcgcgcagcatctaagaaag

SEQ ID NO: 200842 - DNA, 25 bp, Probe sequence
gccggtatttcactttttattgctg

SEQ ID NO: 200843 - DNA, 25 bp, Probe sequence
gaatgtcatgtatatatctgtagct

SEQ ID NO: 200844 - DNA, 25 bp, Probe sequence
gaagtcataggaattacggataaac

SEQ ID NO: 200845 - DNA, 25 bp, Probe sequence
gaagccacaataactaatgtccaga

SEQ ID NO: 200846 - DNA, 25 bp, Probe sequence
gaagcgttgattagctttactttta

SEQ ID NO: 200847 - DNA, 25 bp, Probe sequence
gactcatctaccgttataatgcctg

SEQ ID NO: 200848 - DNA, 25 bp, Probe sequence
gagagcattttaatatgtgtgacaa

SEQ ID NO: 200849 - DNA, 25 bp, Probe sequence
gagttctgtcataattgcggttagt

SEQ ID NO: 200850 - DNA, 25 bp, Probe sequence
gatgctggcgccggaaaacaagaag

SEQ ID NO: 200851 - DNA, 25 bp, Probe sequence
gataatgtctttgggaaatggcttt

SEQ ID NO: 200852 - DNA, 25 bp, Probe sequence
gttgatggcgtactagatgcgaagc

SEQ ID NO: 200853 - DNA, 25 bp, Probe sequence
gtattacttattttgtagcagctgt

SEQ ID NO: 200854 - DNA, 25 bp, Probe sequence
gtatttcttctgttattacgataat

SEQ ID NO: 200855 - DNA, 25 bp, Probe sequence
gtgtgacaagtggttttattggact

SEQ ID NO: 200856 - DNA, 25 bp, Probe sequence
gggacacttacatcaaggtctgcct

SEQ ID NO: 200857 - DNA, 25 bp, Probe sequence
gggctctgttttaggtgagtataca

SEQ ID NO: 200858 - DNA, 25 bp, Probe sequence
tgcgatacgacgtgcatttggtgca

SEQ ID NO: 200859 - DNA, 25 bp, Probe sequence
tcaattttcagatgctggcgccgga

SEQ ID NO: 200860 - DNA, 25 bp, Probe sequence
taatgctattggtaaatcgctatat

SEQ ID NO: 200861 - DNA, 25 bp, Probe sequence
tagcagctgttgccggtatttcact

SEQ ID NO: 200862 - DNA, 25 bp, Probe sequence
tttggatggataccagctcgcgcag

SEQ ID NO: 200863 - DNA, 25 bp, Probe sequence
ttaattggacttctttttggatgga

SEQ ID NO: 200864 - DNA, 25 bp, Probe sequence
ttcactttttattgctggtattgga

SEQ ID NO: 200865 - DNA, 25 bp, Probe sequence
agtagtgtttggaacgcgctagctg

SEQ ID NO: 200866 - DNA, 25 bp, Probe sequence
acgcgctagctgttgctggtattgc

SEQ ID NO: 200867 - DNA, 25 bp, Probe sequence
actgccttatataatggaagtagtg

SEQ ID NO: 200868 - DNA, 25 bp, Probe sequence
actacatttattactgccttatata

SEQ ID NO: 200869 - DNA, 25 bp, Probe sequence
aaaggttcagctataactacattta

SEQ ID NO: 200870 - DNA, 25 bp, Probe sequence
aaaaaaatagcttggacaggaatca

SEQ ID NO: 200871 - DNA, 25 bp, Probe sequence
aactacatttattactgccttatat

SEQ ID NO: 200872 - DNA, 25 bp, Probe sequence
cgtacgaaaaacagctgcttggtaa

SEQ ID NO: 200873 - DNA, 25 bp, Probe sequence
cagctcttggtcgtgcaacagtaat

SEQ ID NO: 200874 - DNA, 25 bp, Probe sequence
catttattactgccttatataatgg

SEQ ID NO: 200875 - DNA, 25 bp, Probe sequence
cggttgcagctcttggtcgtgcaac

SEQ ID NO: 200876 - DNA, 25 bp, Probe sequence
gcgctagctgttgctggtattgctt

SEQ ID NO: 200877 - DNA, 25 bp, Probe sequence
gaatcaaaggttcagctataactac

SEQ ID NO: 200878 - DNA, 25 bp, Probe sequence
gctggtattgcttttggtggtggcg

SEQ ID NO: 200879 - DNA, 25 bp, Probe sequence
gctgttgctggtattgcttttggtg

SEQ ID NO: 200880 - DNA, 25 bp, Probe sequence
gctcttggtcgtgcaacagtaatga

SEQ ID NO: 200881 - DNA, 25 bp, Probe sequence
gctagctgttgctggtattgctttt

SEQ ID NO: 200882 - DNA, 25 bp, Probe sequence
gaacgcgctagctgttgctggtatt

SEQ ID NO: 200883 - DNA, 25 bp, Probe sequence
gatttatcaaacgttggggcgtacg

SEQ ID NO: 200884 - DNA, 25 bp, Probe sequence
gttgcagctcttggtcgtgcaacag

SEQ ID NO: 200885 - DNA, 25 bp, Probe sequence
gttgctggtattgcttttggtggtg

SEQ ID NO: 200886 - DNA, 25 bp, Probe sequence
ggggcgtacgaaaaacagctgcttg

SEQ ID NO: 200887 - DNA, 25 bp, Probe sequence
ggcgtacgaaaaacagctgcttggt

SEQ ID NO: 200888 - DNA, 25 bp, Probe sequence
ggtcgtgcaacagtaatgagattta

SEQ ID NO: 200889 - DNA, 25 bp, Probe sequence
ggacaggaatcaaaggttcagctat

SEQ ID NO: 200890 - DNA, 25 bp, Probe sequence
ggaagtagtgtttggaacgcgctag

SEQ ID NO: 200891 - DNA, 25 bp, Probe sequence
ttttggtggtggcgctggtactgcg

SEQ ID NO: 200892 - DNA, 25 bp, Probe sequence
tggtattgcttttggtggtggcgct

SEQ ID NO: 200893 - DNA, 25 bp, Probe sequence
tgagatttatcaaacgttggggcgt

SEQ ID NO: 200894 - DNA, 25 bp, Probe sequence
tgcagctcttggtcgtgcaacagta

SEQ ID NO: 200895 - DNA, 25 bp, Probe sequence
tactgcggttgcagctcttggtcgt

SEQ ID NO: 200896 - DNA, 25 bp, Probe sequence
tagctgttgctggtattgcttttgg

SEQ ID NO: 200897 - DNA, 25 bp, Probe sequence
tagtgtttggaacgcgctagctgtt

SEQ ID NO: 200898 - DNA, 25 bp, Probe sequence
tattgcttttggtggtggcgctggt

SEQ ID NO: 200899 - DNA, 25 bp, Probe sequence
atttaatgcccttgaccatgttgct

SEQ ID NO: 200900 - DNA, 25 bp, Probe sequence
atacctgtatataatttttcaagtg

SEQ ID NO: 200901 - DNA, 25 bp, Probe sequence
atgctagttttaaataatcttcaaa

SEQ ID NO: 200902 - DNA, 25 bp, Probe sequence
agtcatttaatcaaaccacgttaga

SEQ ID NO: 200903 - DNA, 25 bp, Probe sequence
agaactctcagaaaatatttatttg

SEQ ID NO: 200904 - DNA, 25 bp, Probe sequence
agcatcaattgcatagtgggagtaa

SEQ ID NO: 200905 - DNA, 25 bp, Probe sequence
accacgttagaaacatggttgttag

SEQ ID NO: 200906 - DNA, 25 bp, Probe sequence
aaactaaattttgcttctatgttat

SEQ ID NO: 200907 - DNA, 25 bp, Probe sequence
aataattttcactagtcatttgcct

SEQ ID NO: 200908 - DNA, 25 bp, Probe sequence
aatacaattttagaactctcagaaa

SEQ ID NO: 200909 - DNA, 25 bp, Probe sequence
aatttgtacttaatatgtagcctat

SEQ ID NO: 200910 - DNA, 25 bp, Probe sequence
aattttcactagtcatttgcctaat

SEQ ID NO: 200911 - DNA, 25 bp, Probe sequence
cagataaacgaaaagcacagtcatt

SEQ ID NO: 200912 - DNA, 25 bp, Probe sequence
gcacagtcatttaatcaaaccacgt

SEQ ID NO: 200913 - DNA, 25 bp, Probe sequence
gaaccatttaatgcccttgaccatg

SEQ ID NO: 200914 - DNA, 25 bp, Probe sequence
gagattttttacacaccagtaaatc

SEQ ID NO: 200915 - DNA, 25 bp, Probe sequence
gaggtgataccttatgaagaaaaat

SEQ ID NO: 200916 - DNA, 25 bp, Probe sequence
gatggatgttttacagataaacgaa

SEQ ID NO: 200917 - DNA, 25 bp, Probe sequence
gatgaaccatttaatgcccttgacc

SEQ ID NO: 200918 - DNA, 25 bp, Probe sequence
gatgccaacaaaaggtgatgtatat

SEQ ID NO: 200919 - DNA, 25 bp, Probe sequence
gttgctcaaaaaaatttcacacgaa

SEQ ID NO: 200920 - DNA, 25 bp, Probe sequence
gtttagaagtgggagcatcaattgc

SEQ ID NO: 200921 - DNA, 25 bp, Probe sequence
gtagattcaaatgttttattattag

SEQ ID NO: 200922 - DNA, 25 bp, Probe sequence
gtgggagcatcaattgcatagtggg

SEQ ID NO: 200923 - DNA, 25 bp, Probe sequence
ggttttgaataatgtgaatgctaag

SEQ ID NO: 200924 - DNA, 25 bp, Probe sequence
tgcccttgaccatgttgctcaaaaa

SEQ ID NO: 200925 - DNA, 25 bp, Probe sequence
taaattttgcttctatgttattagt

SEQ ID NO: 200926 - DNA, 25 bp, Probe sequence
tagaagatctaaatatacctgtata

SEQ ID NO: 200927 - DNA, 25 bp, Probe sequence
tagtgggagtaaatggggcaggtaa

SEQ ID NO: 200928 - DNA, 25 bp, Probe sequence
tagtcatttgcctaatacaatttta

SEQ ID NO: 200929 - DNA, 25 bp, Probe sequence
tatgtagcctatataatcggaaaat

SEQ ID NO: 200930 - DNA, 25 bp, Probe sequence
tattagtagtatattgatgccaaca

SEQ ID NO: 200931 - DNA, 25 bp, Probe sequence
ttcacacgaattttaaagggattag

SEQ ID NO: 200932 - DNA, 25 bp, Probe sequence
ttcactagtcatttgcctaatacaa

SEQ ID NO: 200933 - DNA, 25 bp, Probe sequence
attgggatattcggtggatcaagtc

SEQ ID NO: 200934 - DNA, 25 bp, Probe sequence
atcaatgtttgaagtcgcaggtcta

SEQ ID NO: 200935 - DNA, 25 bp, Probe sequence
atcagatgaacttaagcaatatgca

SEQ ID NO: 200936 - DNA, 25 bp, Probe sequence
agcatctggtagacctactgaaggt

SEQ ID NO: 200937 - DNA, 25 bp, Probe sequence
acctgaacatcatagctatattatt

SEQ ID NO: 200938 - DNA, 25 bp, Probe sequence
actgaaggtatgattccaactgcta

SEQ ID NO: 200939 - DNA, 25 bp, Probe sequence
aaattatttacgacagcgaacatga

SEQ ID NO: 200940 - DNA, 25 bp, Probe sequence
aaagcgttatgtcacaaattgggat

SEQ ID NO: 200941 - DNA, 25 bp, Probe sequence
aaaattacctgaacatcatagctat

SEQ ID NO: 200942 - DNA, 25 bp, Probe sequence
aagccattcttcttagaatttatgg

SEQ ID NO: 200943 - DNA, 25 bp, Probe sequence
aagtcattgcttttggtgatagtat

SEQ ID NO: 200944 - DNA, 25 bp, Probe sequence
cgttcttacatatcatgatggtcaa

SEQ ID NO: 200945 - DNA, 25 bp, Probe sequence
gctatggggaatgcatcagatgaac

SEQ ID NO: 200946 - DNA, 25 bp, Probe sequence
gctttttcgttcttacatatcatga

SEQ ID NO: 200947 - DNA, 25 bp, Probe sequence
gcaggtctagctattgctatgggga

SEQ ID NO: 200948 - DNA, 25 bp, Probe sequence
gaagtcgcaggtctagctattgcta

SEQ ID NO: 200949 - DNA, 25 bp, Probe sequence
gaagtaagtaaatcgattggtaagc

SEQ ID NO: 200950 - DNA, 25 bp, Probe sequence
gaaaatggtattccacatgcgctca

SEQ ID NO: 200951 - DNA, 25 bp, Probe sequence
gaaactgcaaattatttaacagcaa

SEQ ID NO: 200952 - DNA, 25 bp, Probe sequence
gacaagtaagccattcttcttagaa

SEQ ID NO: 200953 - DNA, 25 bp, Probe sequence
gaggctttttcgttcttacatatca

SEQ ID NO: 200954 - DNA, 25 bp, Probe sequence
gatggtcaaattatttacgacagcg

SEQ ID NO: 200955 - DNA, 25 bp, Probe sequence
gatgaaattgtagattattgtcgag

SEQ ID NO: 200956 - DNA, 25 bp, Probe sequence
gatgctacgacaagtaagccattct

SEQ ID NO: 200957 - DNA, 25 bp, Probe sequence
gattccaactgctagagatttaaaa

SEQ ID NO: 200958 - DNA, 25 bp, Probe sequence
gtgttcaatgataatgtagatgcta

SEQ ID NO: 200959 - DNA, 25 bp, Probe sequence
ggtggatcaagtcattgcttttggt

SEQ ID NO: 200960 - DNA, 25 bp, Probe sequence
ggtcatgggtgtagattatgtagcg

SEQ ID NO: 200961 - DNA, 25 bp, Probe sequence
ggtaatgcaattaaagcgttatgtc

SEQ ID NO: 200962 - DNA, 25 bp, Probe sequence
ggtatgattccaactgctagagatt

SEQ ID NO: 200963 - DNA, 25 bp, Probe sequence
ggtttaccgatgaaacgtgttgatg

SEQ ID NO: 200964 - DNA, 25 bp, Probe sequence
ggtattccacatgcgctcaaaaaat

SEQ ID NO: 200965 - DNA, 25 bp, Probe sequence
ggatgacacattgctaaattcagat

SEQ ID NO: 200966 - DNA, 25 bp, Probe sequence
ttacagaagctagaattgatttgaa

SEQ ID NO: 200967 - DNA, 25 bp, Probe sequence
atgcgcgtagttgacaataaccaag

SEQ ID NO: 200968 - DNA, 25 bp, Probe sequence
atgagtatcctctaattgaagttgg

SEQ ID NO: 200969 - DNA, 25 bp, Probe sequence
atggtatcacgatgagtatcctcta

SEQ ID NO: 200970 - DNA, 25 bp, Probe sequence
aggagaacgtggtgctgctgatgcg

SEQ ID NO: 200971 - DNA, 25 bp, Probe sequence
aaacgacgtcatattcgtcattgtt

SEQ ID NO: 200972 - DNA, 25 bp, Probe sequence
aacacaccagtattcttctttagag

SEQ ID NO: 200973 - DNA, 25 bp, Probe sequence
aagccaccattcccaactgatggat

SEQ ID NO: 200974 - DNA, 25 bp, Probe sequence
aacgcgatttattcgaagccattga

SEQ ID NO: 200975 - DNA, 25 bp, Probe sequence
aatgcaatggaaggcgtaacggatg

SEQ ID NO: 200976 - DNA, 25 bp, Probe sequence
aatatttgtccttttagtagagatg

SEQ ID NO: 200977 - DNA, 25 bp, Probe sequence
caaaataactgggatttctggacgg

SEQ ID NO: 200978 - DNA, 25 bp, Probe sequence
cattgttacaaagctgacccagaat

SEQ ID NO: 200979 - DNA, 25 bp, Probe sequence
cttccagaagcattgcaccaagtaa

SEQ ID NO: 200980 - DNA, 25 bp, Probe sequence
cccaactgatggatacggctatgaa

SEQ ID NO: 200981 - DNA, 25 bp, Probe sequence
gcggtgaaacgagatcctagaacaa

SEQ ID NO: 200982 - DNA, 25 bp, Probe sequence
gcatttgggacatttactgtaacta

SEQ ID NO: 200983 - DNA, 25 bp, Probe sequence
gcaccaagtaacgatcttaatgtca

SEQ ID NO: 200984 - DNA, 25 bp, Probe sequence
gcaagggcgtttattctcatatggc

SEQ ID NO: 200985 - DNA, 25 bp, Probe sequence
gattctggtgaacgtgtttgggtta

SEQ ID NO: 200986 - DNA, 25 bp, Probe sequence
gattcatctcaacgcgatttattcg

SEQ ID NO: 200987 - DNA, 25 bp, Probe sequence
gtagagatggtcaaatgcgcgtagt

SEQ ID NO: 200988 - DNA, 25 bp, Probe sequence
gtgacattcgaggatttgcgttaaa

SEQ ID NO: 200989 - DNA, 25 bp, Probe sequence
ggtaaatttgattctcaacctgaat

SEQ ID NO: 200990 - DNA, 25 bp, Probe sequence
ggttctggtgcatttgggacattta

SEQ ID NO: 200991 - DNA, 25 bp, Probe sequence
ggatttgcgttaaagttctacactg

SEQ ID NO: 200992 - DNA, 25 bp, Probe sequence
ggagttaatcattggcagattcctg

SEQ ID NO: 200993 - DNA, 25 bp, Probe sequence
ggcagattcctgtaaaccaacctaa

SEQ ID NO: 200994 - DNA, 25 bp, Probe sequence
tgcatgccaaaggttctggtgcatt

SEQ ID NO: 200995 - DNA, 25 bp, Probe sequence
tgcccgtttctctactgtagcagga

SEQ ID NO: 200996 - DNA, 25 bp, Probe sequence
tccaggattagatttttctccagac

SEQ ID NO: 200997 - DNA, 25 bp, Probe sequence
tccattttagaacgcaacaaggtat

SEQ ID NO: 200998 - DNA, 25 bp, Probe sequence
tactctatgtataatgattctggtg

SEQ ID NO: 200999 - DNA, 25 bp, Probe sequence
tataaaaagccaccattcccaactg

SEQ ID NO: 201000 - DNA, 25 bp, Probe sequence
ttattctcatatggcgatgcgcaaa

SEQ ID NO: 201001 - DNA, 25 bp, Probe sequence
ataatcctgagcgtattgaaatgaa

SEQ ID NO: 201002 - DNA, 25 bp, Probe sequence
atcgtaactatatcactactaaaaa

SEQ ID NO: 201003 - DNA, 25 bp, Probe sequence
atgtggcgatcgtaactatatcact

SEQ ID NO: 201004 - DNA, 25 bp, Probe sequence
agcatgcacagaatgtggcgatcgt

SEQ ID NO: 201005 - DNA, 25 bp, Probe sequence
agaatgtggcgatcgtaactatatc

SEQ ID NO: 201006 - DNA, 25 bp, Probe sequence
acagaatgtggcgatcgtaactata

SEQ ID NO: 201007 - DNA, 25 bp, Probe sequence
acaaatatacgttacatcgtgaaac

SEQ ID NO: 201008 - DNA, 25 bp, Probe sequence
aaatattgcccaagattaaacaaat

SEQ ID NO: 201009 - DNA, 25 bp, Probe sequence
aacgtaacattagcatgcacagaat

SEQ ID NO: 201010 - DNA, 25 bp, Probe sequence
aacgtaataatcctgagcgtattga

SEQ ID NO: 201011 - DNA, 25 bp, Probe sequence
aatgtggcgatcgtaactatatcac

SEQ ID NO: 201012 - DNA, 25 bp, Probe sequence
aatcctgagcgtattgaaatgaaaa

SEQ ID NO: 201013 - DNA, 25 bp, Probe sequence
cacagaatgtggcgatcgtaactat

SEQ ID NO: 201014 - DNA, 25 bp, Probe sequence
cgatcgtaactatatcactactaaa

SEQ ID NO: 201015 - DNA, 25 bp, Probe sequence
gcgcgtaaacgtaacattagcatgc

SEQ ID NO: 201016 - DNA, 25 bp, Probe sequence
gcgatcgtaactatatcactactaa

SEQ ID NO: 201017 - DNA, 25 bp, Probe sequence
gcgtaaacgtaacattagcatgcac

SEQ ID NO: 201018 - DNA, 25 bp, Probe sequence
gcatgcacagaatgtggcgatcgta

SEQ ID NO: 201019 - DNA, 25 bp, Probe sequence
gcacagaatgtggcgatcgtaacta

SEQ ID NO: 201020 - DNA, 25 bp, Probe sequence
gaatgtggcgatcgtaactatatca

SEQ ID NO: 201021 - DNA, 25 bp, Probe sequence
gaaatgaaaaaatattgcccaagat

SEQ ID NO: 201022 - DNA, 25 bp, Probe sequence
gatcgtaactatatcactactaaaa

SEQ ID NO: 201023 - DNA, 25 bp, Probe sequence
gtaaacgtaacattagcatgcacag

SEQ ID NO: 201024 - DNA, 25 bp, Probe sequence
gtaactatatcactactaaaaataa

SEQ ID NO: 201025 - DNA, 25 bp, Probe sequence
gtggcgatcgtaactatatcactac

SEQ ID NO: 201026 - DNA, 25 bp, Probe sequence
ggcgatcgtaactatatcactacta

SEQ ID NO: 201027 - DNA, 25 bp, Probe sequence
tggcgatcgtaactatatcactact

SEQ ID NO: 201028 - DNA, 25 bp, Probe sequence
tgtggcgatcgtaactatatcacta

SEQ ID NO: 201029 - DNA, 25 bp, Probe sequence
tgcccaagattaaacaaatatacgt

SEQ ID NO: 201030 - DNA, 25 bp, Probe sequence
taaacgtaataatcctgagcgtatt

SEQ ID NO: 201031 - DNA, 25 bp, Probe sequence
taaacgtaacattagcatgcacaga

SEQ ID NO: 201032 - DNA, 25 bp, Probe sequence
tacgttacatcgtgaaactaagtaa

SEQ ID NO: 201033 - DNA, 25 bp, Probe sequence
tatacgttacatcgtgaaactaagt

SEQ ID NO: 201034 - DNA, 25 bp, Probe sequence
ttagcatgcacagaatgtggcgatc

SEQ ID NO: 201035 - DNA, 25 bp, Probe sequence
attcatcacctacacgtttaactag

SEQ ID NO: 201036 - DNA, 25 bp, Probe sequence
atttgaaatgtctcgtattgcgttt

SEQ ID NO: 201037 - DNA, 25 bp, Probe sequence
atcacctacacgtttaactagaaga

SEQ ID NO: 201038 - DNA, 25 bp, Probe sequence
atgtctcgtattgcgtttagagaac

SEQ ID NO: 201039 - DNA, 25 bp, Probe sequence
agattcatcacctacacgtttaact

SEQ ID NO: 201040 - DNA, 25 bp, Probe sequence
agagattcatcacctacacgtttaa

SEQ ID NO: 201041 - DNA, 25 bp, Probe sequence
accaagagattcatcacctacacgt

SEQ ID NO: 201042 - DNA, 25 bp, Probe sequence
acctacacgtttaactagaagatgt

SEQ ID NO: 201043 - DNA, 25 bp, Probe sequence
acatgcgcacaaaggacaaattcca

SEQ ID NO: 201044 - DNA, 25 bp, Probe sequence
aaatttgaaatgtctcgtattgcgt

SEQ ID NO: 201045 - DNA, 25 bp, Probe sequence
aaaattaccaagagattcatcacct

SEQ ID NO: 201046 - DNA, 25 bp, Probe sequence
aacatgcgcacaaaggacaaattcc

SEQ ID NO: 201047 - DNA, 25 bp, Probe sequence
aagagattcatcacctacacgttta

SEQ ID NO: 201048 - DNA, 25 bp, Probe sequence
aagtaactggaagacctagaggtgt

SEQ ID NO: 201049 - DNA, 25 bp, Probe sequence
aattaccaagagattcatcacctac

SEQ ID NO: 201050 - DNA, 25 bp, Probe sequence
cacaaaggacaaattccaggtgtta

SEQ ID NO: 201051 - DNA, 25 bp, Probe sequence
gcgcacaaaggacaaattccaggtg

SEQ ID NO: 201052 - DNA, 25 bp, Probe sequence
ccaagagattcatcacctacacgtt

SEQ ID NO: 201053 - DNA, 25 bp, Probe sequence
gcgtttagagaacatgcgcacaaag

SEQ ID NO: 201054 - DNA, 25 bp, Probe sequence
gaagatgtaaagtaactggaagacc

SEQ ID NO: 201055 - DNA, 25 bp, Probe sequence
gaaatgtctcgtattgcgtttagag

SEQ ID NO: 201056 - DNA, 25 bp, Probe sequence
gacctagaggtgtattacgtaaatt

SEQ ID NO: 201057 - DNA, 25 bp, Probe sequence
gagaacatgcgcacaaaggacaaat

SEQ ID NO: 201058 - DNA, 25 bp, Probe sequence
gagattcatcacctacacgtttaac

SEQ ID NO: 201059 - DNA, 25 bp, Probe sequence
gaggtgtattacgtaaatttgaaat

SEQ ID NO: 201060 - DNA, 25 bp, Probe sequence
gattcatcacctacacgtttaacta

SEQ ID NO: 201061 - DNA, 25 bp, Probe sequence
ggaagacctagaggtgtattacgta

SEQ ID NO: 201062 - DNA, 25 bp, Probe sequence
tcgtattgcgtttagagaacatgcg

SEQ ID NO: 201063 - DNA, 25 bp, Probe sequence
tcatcacctacacgtttaactagaa

SEQ ID NO: 201064 - DNA, 25 bp, Probe sequence
tagagaacatgcgcacaaaggacaa

SEQ ID NO: 201065 - DNA, 25 bp, Probe sequence
ttcatcacctacacgtttaactaga

SEQ ID NO: 201066 - DNA, 25 bp, Probe sequence
ttaccaagagattcatcacctacac

SEQ ID NO: 201067 - DNA, 25 bp, Probe sequence
ttccaggtgttaaaaaatcaagttg

SEQ ID NO: 201068 - DNA, 25 bp, Probe sequence
ttgaaatgtctcgtattgcgtttag

SEQ ID NO: 201069 - DNA, 25 bp, Probe sequence
attcaagctacctgtagttcctgca

SEQ ID NO: 201070 - DNA, 25 bp, Probe sequence
attacttttatatcatgcatcgttt

SEQ ID NO: 201071 - DNA, 25 bp, Probe sequence
attttggtagtgcatctgaatttca

SEQ ID NO: 201072 - DNA, 25 bp, Probe sequence
atacctgatagttttgttattgctg

SEQ ID NO: 201073 - DNA, 25 bp, Probe sequence
agatttggtgcatcaatggtcatga

SEQ ID NO: 201074 - DNA, 25 bp, Probe sequence
acgccagaaggtgttagagaattag

SEQ ID NO: 201075 - DNA, 25 bp, Probe sequence
aaacctttgattgccgatggtggta

SEQ ID NO: 201076 - DNA, 25 bp, Probe sequence
aacatatgtagtaaagcagctcgta

SEQ ID NO: 201077 - DNA, 25 bp, Probe sequence
aacatatgcaaaattcaggcttatt

SEQ ID NO: 201078 - DNA, 25 bp, Probe sequence
aagtcggtataggtcctggtagagt

SEQ ID NO: 201079 - DNA, 25 bp, Probe sequence
aatggtttgctgaaaatgattactt

SEQ ID NO: 201080 - DNA, 25 bp, Probe sequence
aatgcatagttgaaagtaggtctga

SEQ ID NO: 201081 - DNA, 25 bp, Probe sequence
caggcttatttgcatctatttcagt

SEQ ID NO: 201082 - DNA, 25 bp, Probe sequence
cgtactgtagattatgttattgtta

SEQ ID NO: 201083 - DNA, 25 bp, Probe sequence
gctacctgtagttcctgcaaatatg

SEQ ID NO: 201084 - DNA, 25 bp, Probe sequence
gcagctcgtaaacctttgattgccg

SEQ ID NO: 201085 - DNA, 25 bp, Probe sequence
gcacacgaagaatcacctggtgaaa

SEQ ID NO: 201086 - DNA, 25 bp, Probe sequence
gaaaatgctggtgctgatgctacca

SEQ ID NO: 201087 - DNA, 25 bp, Probe sequence
gaaactctattttcaacggtgatag

SEQ ID NO: 201088 - DNA, 25 bp, Probe sequence
gacttgaaatcattacgtactgtag

SEQ ID NO: 201089 - DNA, 25 bp, Probe sequence
gatggtggtataagaacgcatggcg

SEQ ID NO: 201090 - DNA, 25 bp, Probe sequence
gatattgcgcatggtcactcagatt

SEQ ID NO: 201091 - DNA, 25 bp, Probe sequence
gttttgttattgctggtaatgttgg

SEQ ID NO: 201092 - DNA, 25 bp, Probe sequence
gtaggtctgaatgtgatacaactat

SEQ ID NO: 201093 - DNA, 25 bp, Probe sequence
gtgatacaactatccaatttggtcc

SEQ ID NO: 201094 - DNA, 25 bp, Probe sequence
ggtgctgatgctaccaaagtcggta

SEQ ID NO: 201095 - DNA, 25 bp, Probe sequence
ggtcctggtagagtttgtattacaa

SEQ ID NO: 201096 - DNA, 25 bp, Probe sequence
ggtgaaactgtagaacttgatggta

SEQ ID NO: 201097 - DNA, 25 bp, Probe sequence
ggcagttagcggcattaaacatatg

SEQ ID NO: 201098 - DNA, 25 bp, Probe sequence
tggtcatgattggttcattatttgc

SEQ ID NO: 201099 - DNA, 25 bp, Probe sequence
tggtggttggcagttagcggcatta

SEQ ID NO: 201100 - DNA, 25 bp, Probe sequence
tatgccggtggaaaagacttgaaat

SEQ ID NO: 201101 - DNA, 25 bp, Probe sequence
tttgcatctatttcagttggtgtaa

SEQ ID NO: 201102 - DNA, 25 bp, Probe sequence
ttgcgcatggtcactcagattcagt

SEQ ID NO: 201103 - DNA, 25 bp, Probe sequence
attacggggattaactataggcgag

SEQ ID NO: 201104 - DNA, 25 bp, Probe sequence
ataggtgttttattcaatgcagtga

SEQ ID NO: 201105 - DNA, 25 bp, Probe sequence
atgcagtgagtattatgatccaaac

SEQ ID NO: 201106 - DNA, 25 bp, Probe sequence
atgacaattgcgtttggtctaaatg

SEQ ID NO: 201107 - DNA, 25 bp, Probe sequence
aacacgcatcaataacattacaagc

SEQ ID NO: 201108 - DNA, 25 bp, Probe sequence
aagattatgtgatgctactgagtac

SEQ ID NO: 201109 - DNA, 25 bp, Probe sequence
aatagccttaataatttgaatctct

SEQ ID NO: 201110 - DNA, 25 bp, Probe sequence
caatcacgagtgttgtattaggcaa

SEQ ID NO: 201111 - DNA, 25 bp, Probe sequence
gcgaattatatgacgcttcacacga

SEQ ID NO: 201112 - DNA, 25 bp, Probe sequence
gcgtttggtctaaatggattctttt

SEQ ID NO: 201113 - DNA, 25 bp, Probe sequence
gctcttattcaatttttaggtttgc

SEQ ID NO: 201114 - DNA, 25 bp, Probe sequence
gaatgtattttttaggatgacttta

SEQ ID NO: 201115 - DNA, 25 bp, Probe sequence
gaaagtttttattatggatagcgta

SEQ ID NO: 201116 - DNA, 25 bp, Probe sequence
gacgcttcacacgattacatttata

SEQ ID NO: 201117 - DNA, 25 bp, Probe sequence
gagagtatagctttaattattgtat

SEQ ID NO: 201118 - DNA, 25 bp, Probe sequence
gatagattaatcttattaccaatta

SEQ ID NO: 201119 - DNA, 25 bp, Probe sequence
gatattatctttttaattctactta

SEQ ID NO: 201120 - DNA, 25 bp, Probe sequence
gattttgtatattgctcttattcaa

SEQ ID NO: 201121 - DNA, 25 bp, Probe sequence
gattacaatttttagcttatccaat

SEQ ID NO: 201122 - DNA, 25 bp, Probe sequence
gattcaagtttatattcgaagttta

SEQ ID NO: 201123 - DNA, 25 bp, Probe sequence
gttgcttatagctttaggattacaa

SEQ ID NO: 201124 - DNA, 25 bp, Probe sequence
gtagtactttcatatatttctgtaa

SEQ ID NO: 201125 - DNA, 25 bp, Probe sequence
gtcatgattatatgttatccaatta

SEQ ID NO: 201126 - DNA, 25 bp, Probe sequence
ggattcttttggacaacgctgttca

SEQ ID NO: 201127 - DNA, 25 bp, Probe sequence
ggattgtttgttttattaccagtga

SEQ ID NO: 201128 - DNA, 25 bp, Probe sequence
ggacaacgctgttcagcaacattat

SEQ ID NO: 201129 - DNA, 25 bp, Probe sequence
ggaacagctgtaactatatcatttc

SEQ ID NO: 201130 - DNA, 25 bp, Probe sequence
ggcaatacgcttaacaatatacgat

SEQ ID NO: 201131 - DNA, 25 bp, Probe sequence
taattggtacgttgcttatagcttt

SEQ ID NO: 201132 - DNA, 25 bp, Probe sequence
tactgagtacaaatagccttaataa

SEQ ID NO: 201133 - DNA, 25 bp, Probe sequence
taccagtgaattgtttgcaacgata

SEQ ID NO: 201134 - DNA, 25 bp, Probe sequence
tatacaaatccaatcattactactg

SEQ ID NO: 201135 - DNA, 25 bp, Probe sequence
tattgtctctttactgtataacatt

SEQ ID NO: 201136 - DNA, 25 bp, Probe sequence
ttaggtttgctgataggactatttc

SEQ ID NO: 201137 - DNA, 25 bp, Probe sequence
attctaaacagaattctgaaactgc

SEQ ID NO: 201138 - DNA, 25 bp, Probe sequence
atacgacggtattttatgataagca

SEQ ID NO: 201139 - DNA, 25 bp, Probe sequence
atcaccatttgatcgattgaaaaaa

SEQ ID NO: 201140 - DNA, 25 bp, Probe sequence
atcgacgtaataatgtaacagctgt

SEQ ID NO: 201141 - DNA, 25 bp, Probe sequence
atcgcttgcagatagttttgaacta

SEQ ID NO: 201142 - DNA, 25 bp, Probe sequence
atgaattctattggtcacagaaaaa

SEQ ID NO: 201143 - DNA, 25 bp, Probe sequence
acgaagtggtatacgtattatgatg

SEQ ID NO: 201144 - DNA, 25 bp, Probe sequence
aaatcggttgtaaggcaaagattag

SEQ ID NO: 201145 - DNA, 25 bp, Probe sequence
aaaatcacatttatacgacggtatt

SEQ ID NO: 201146 - DNA, 25 bp, Probe sequence
aaaaggtcaatcaccatttgatcga

SEQ ID NO: 201147 - DNA, 25 bp, Probe sequence
aaggtcaatcaccatttgatcgatt

SEQ ID NO: 201148 - DNA, 25 bp, Probe sequence
aatcattattttgatcatacaaatt

SEQ ID NO: 201149 - DNA, 25 bp, Probe sequence
catgtcgaaatcagatgttgagaaa

SEQ ID NO: 201150 - DNA, 25 bp, Probe sequence
catttaactcagccggagagaattt

SEQ ID NO: 201151 - DNA, 25 bp, Probe sequence
gccggagagaatttagcatatggtc

SEQ ID NO: 201152 - DNA, 25 bp, Probe sequence
gaatttagcatatggtcaagttagt

SEQ ID NO: 201153 - DNA, 25 bp, Probe sequence
gaatatggtacgaagtggtatacgt

SEQ ID NO: 201154 - DNA, 25 bp, Probe sequence
gagattgttaaaggtagagtgcgtt

SEQ ID NO: 201155 - DNA, 25 bp, Probe sequence
gatgttttccataaaaatcacattt

SEQ ID NO: 201156 - DNA, 25 bp, Probe sequence
gatgaaaaacaacctttttggacag

SEQ ID NO: 201157 - DNA, 25 bp, Probe sequence
gttaatgcgttatatacaaatcaaa

SEQ ID NO: 201158 - DNA, 25 bp, Probe sequence
gttagtagtatctatgcacatcaag

SEQ ID NO: 201159 - DNA, 25 bp, Probe sequence
gtatctatgcacatcaaggattaat

SEQ ID NO: 201160 - DNA, 25 bp, Probe sequence
gtagtatctatgcacatcaaggatt

SEQ ID NO: 201161 - DNA, 25 bp, Probe sequence
gtaagcatagtaaagatatggccaa

SEQ ID NO: 201162 - DNA, 25 bp, Probe sequence
gtaacagctgttttacaagtaagtg

SEQ ID NO: 201163 - DNA, 25 bp, Probe sequence
gtgacatttaatgaatatggtacga

SEQ ID NO: 201164 - DNA, 25 bp, Probe sequence
ggtcaagttagtagtatctatgcac

SEQ ID NO: 201165 - DNA, 25 bp, Probe sequence
ggtagagtgcgttacgaacaaaata

SEQ ID NO: 201166 - DNA, 25 bp, Probe sequence
ggtattttatgataagcatcgacgt

SEQ ID NO: 201167 - DNA, 25 bp, Probe sequence
ggattaatgaattctattggtcaca

SEQ ID NO: 201168 - DNA, 25 bp, Probe sequence
tcgaaatcgcttgcagatagttttg

SEQ ID NO: 201169 - DNA, 25 bp, Probe sequence
tacaaatgaacatgtcgaaatcaga

SEQ ID NO: 201170 - DNA, 25 bp, Probe sequence
tttacaagtaagtgatgctatggaa

SEQ ID NO: 201171 - DNA, 25 bp, Probe sequence
atatcatcatatttttagtttcaag

SEQ ID NO: 201172 - DNA, 25 bp, Probe sequence
cgaacataaagaccctacaaacaat

SEQ ID NO: 201173 - DNA, 25 bp, Probe sequence
agtgcagcctttgcaatattcttgt

SEQ ID NO: 201174 - DNA, 25 bp, Probe sequence
aaaacgtatcaacatatatcatcat

SEQ ID NO: 201175 - DNA, 25 bp, Probe sequence
aagcatacgaacataaagaccctac

SEQ ID NO: 201176 - DNA, 25 bp, Probe sequence
aagagatgggaaagtgttcgcttta

SEQ ID NO: 201177 - DNA, 25 bp, Probe sequence
aagtgtacgaaatgactgaccatca

SEQ ID NO: 201178 - DNA, 25 bp, Probe sequence
caagtgcagcctttgcaatattctt

SEQ ID NO: 201179 - DNA, 25 bp, Probe sequence
cagcctttgcaatattcttgttaag

SEQ ID NO: 201180 - DNA, 25 bp, Probe sequence
gcctttgcaatattcttgttaagtg

SEQ ID NO: 201181 - DNA, 25 bp, Probe sequence
gctcactcggaacaagtgtacgaaa

SEQ ID NO: 201182 - DNA, 25 bp, Probe sequence
gcatacgaacataaagaccctacaa

SEQ ID NO: 201183 - DNA, 25 bp, Probe sequence
gcagcctttgcaatattcttgttaa

SEQ ID NO: 201184 - DNA, 25 bp, Probe sequence
gaacaatacgataaataaagcatac

SEQ ID NO: 201185 - DNA, 25 bp, Probe sequence
gaaagtgttcgctttaataaattga

SEQ ID NO: 201186 - DNA, 25 bp, Probe sequence
gaaatgactgaccatcaaattaaga

SEQ ID NO: 201187 - DNA, 25 bp, Probe sequence
gactgaccatcaaattaagaacaat

SEQ ID NO: 201188 - DNA, 25 bp, Probe sequence
gatgggaaagtgttcgctttaataa

SEQ ID NO: 201189 - DNA, 25 bp, Probe sequence
gtttcaagtgcagcctttgcaatat

SEQ ID NO: 201190 - DNA, 25 bp, Probe sequence
gtatcaacatatatcatcatatttt

SEQ ID NO: 201191 - DNA, 25 bp, Probe sequence
gtacgaaatgactgaccatcaaatt

SEQ ID NO: 201192 - DNA, 25 bp, Probe sequence
gtgcagcctttgcaatattcttgtt

SEQ ID NO: 201193 - DNA, 25 bp, Probe sequence
gtgctcactcggaacaagtgtacga

SEQ ID NO: 201194 - DNA, 25 bp, Probe sequence
gtgtacgaaatgactgaccatcaaa

SEQ ID NO: 201195 - DNA, 25 bp, Probe sequence
tgcaatattcttgttaagtgcgaac

SEQ ID NO: 201196 - DNA, 25 bp, Probe sequence
tcatatttttagtttcaagtgcagc

SEQ ID NO: 201197 - DNA, 25 bp, Probe sequence
tcatcatatttttagtttcaagtgc

SEQ ID NO: 201198 - DNA, 25 bp, Probe sequence
tacgaacataaagaccctacaaaca

SEQ ID NO: 201199 - DNA, 25 bp, Probe sequence
tagtttcaagtgcagcctttgcaat

SEQ ID NO: 201200 - DNA, 25 bp, Probe sequence
tatttttagtttcaagtgcagcctt

SEQ ID NO: 201201 - DNA, 25 bp, Probe sequence
ttttagtttcaagtgcagcctttgc

SEQ ID NO: 201202 - DNA, 25 bp, Probe sequence
tttagtttcaagtgcagcctttgca

SEQ ID NO: 201203 - DNA, 25 bp, Probe sequence
ttagtgctcactcggaacaagtgta

SEQ ID NO: 201204 - DNA, 25 bp, Probe sequence
ttcaagtgcagcctttgcaatattc

SEQ ID NO: 201205 - DNA, 25 bp, Probe sequence
atactaaagtaattgatccagaagg

SEQ ID NO: 201206 - DNA, 25 bp, Probe sequence
atcgaaagaattaacgagttagcta

SEQ ID NO: 201207 - DNA, 25 bp, Probe sequence
agaaaagcttatcttgagagtttta

SEQ ID NO: 201208 - DNA, 25 bp, Probe sequence
agaaggtaatgatgtaacacctgaa

SEQ ID NO: 201209 - DNA, 25 bp, Probe sequence
agcttatcttgagagttttagaaaa

SEQ ID NO: 201210 - DNA, 25 bp, Probe sequence
actaaagtaattgatccagaaggta

SEQ ID NO: 201211 - DNA, 25 bp, Probe sequence
aaagcttatcttgagagttttagaa

SEQ ID NO: 201212 - DNA, 25 bp, Probe sequence
aaaagcttatcttgagagttttaga

SEQ ID NO: 201213 - DNA, 25 bp, Probe sequence
aagcttatcttgagagttttagaaa

SEQ ID NO: 201214 - DNA, 25 bp, Probe sequence
aagaagaagcaaaggagcaaacagc

SEQ ID NO: 201215 - DNA, 25 bp, Probe sequence
aagaaaagcttatcttgagagtttt

SEQ ID NO: 201216 - DNA, 25 bp, Probe sequence
aagaagtaggattaactcaagaaga

SEQ ID NO: 201217 - DNA, 25 bp, Probe sequence
aagtaattgatccagaaggtaatga

SEQ ID NO: 201218 - DNA, 25 bp, Probe sequence
aatgatgtaacacctgaaaaaatta

SEQ ID NO: 201219 - DNA, 25 bp, Probe sequence
aatactaaagtaattgatccagaag

SEQ ID NO: 201220 - DNA, 25 bp, Probe sequence
aattctgatttgaatatcgaaagaa

SEQ ID NO: 201221 - DNA, 25 bp, Probe sequence
aattgatccagaaggtaatgatgta

SEQ ID NO: 201222 - DNA, 25 bp, Probe sequence
ctaaagtaattgatccagaaggtaa

SEQ ID NO: 201223 - DNA, 25 bp, Probe sequence
ccagaaggtaatgatgtaacacctg

SEQ ID NO: 201224 - DNA, 25 bp, Probe sequence
gcttatcttgagagttttagaaaag

SEQ ID NO: 201225 - DNA, 25 bp, Probe sequence
gaaggtaatgatgtaacacctgaaa

SEQ ID NO: 201226 - DNA, 25 bp, Probe sequence
gaaaagcttatcttgagagttttag

SEQ ID NO: 201227 - DNA, 25 bp, Probe sequence
gagtaattctgatttgaatatcgaa

SEQ ID NO: 201228 - DNA, 25 bp, Probe sequence
gatccagaaggtaatgatgtaacac

SEQ ID NO: 201229 - DNA, 25 bp, Probe sequence
gattaactcaagaagaagcaaagga

SEQ ID NO: 201230 - DNA, 25 bp, Probe sequence
gtaggattaactcaagaagaagcaa

SEQ ID NO: 201231 - DNA, 25 bp, Probe sequence
gtaatgatgtaacacctgaaaaaat

SEQ ID NO: 201232 - DNA, 25 bp, Probe sequence
gtaattgatccagaaggtaatgatg

SEQ ID NO: 201233 - DNA, 25 bp, Probe sequence
gtaattctgatttgaatatcgaaag

SEQ ID NO: 201234 - DNA, 25 bp, Probe sequence
ggtaatgatgtaacacctgaaaaaa

SEQ ID NO: 201235 - DNA, 25 bp, Probe sequence
ggattaactcaagaagaagcaaagg

SEQ ID NO: 201236 - DNA, 25 bp, Probe sequence
tgatgtaacacctgaaaaaattaaa

SEQ ID NO: 201237 - DNA, 25 bp, Probe sequence
tactaaagtaattgatccagaaggt

SEQ ID NO: 201238 - DNA, 25 bp, Probe sequence
ttatcttgagagttttagaaaaggg

SEQ ID NO: 201239 - DNA, 25 bp, Probe sequence
atgtattagcttctgacggtgattt

SEQ ID NO: 201240 - DNA, 25 bp, Probe sequence
atggcttacactttgtggacacgtc

SEQ ID NO: 201241 - DNA, 25 bp, Probe sequence
agaccttgctggttcaaacaaatcc

SEQ ID NO: 201242 - DNA, 25 bp, Probe sequence
accagcgttacgtttatcatcaatt

SEQ ID NO: 201243 - DNA, 25 bp, Probe sequence
aatatgaatgttatccgtcctgctg

SEQ ID NO: 201244 - DNA, 25 bp, Probe sequence
cacgtcatctgaattttaatccaca

SEQ ID NO: 201245 - DNA, 25 bp, Probe sequence
ctttggtggatcagcagaccttgct

SEQ ID NO: 201246 - DNA, 25 bp, Probe sequence
ctgtcccttcattctttggtggatc

SEQ ID NO: 201247 - DNA, 25 bp, Probe sequence
cgtgttgtttcaatgcctaactgga

SEQ ID NO: 201248 - DNA, 25 bp, Probe sequence
gctattgacggctttggcgcaagtg

SEQ ID NO: 201249 - DNA, 25 bp, Probe sequence
gctttagcagaagatcacctagcag

SEQ ID NO: 201250 - DNA, 25 bp, Probe sequence
gcttcaccgcttggatggcataaat

SEQ ID NO: 201251 - DNA, 25 bp, Probe sequence
gcaagtgcacctggcgatttagtag

SEQ ID NO: 201252 - DNA, 25 bp, Probe sequence
gaatctgaatctacacctacttcat

SEQ ID NO: 201253 - DNA, 25 bp, Probe sequence
gaatcagttattccatcaagcgtaa

SEQ ID NO: 201254 - DNA, 25 bp, Probe sequence
gaagcagcttcatttgctggacata

SEQ ID NO: 201255 - DNA, 25 bp, Probe sequence
gaaaaggtgcctatacagtttatgg

SEQ ID NO: 201256 - DNA, 25 bp, Probe sequence
gaggtttacatccatatggtgcaac

SEQ ID NO: 201257 - DNA, 25 bp, Probe sequence
gattacttcaatagagaccgtttcg

SEQ ID NO: 201258 - DNA, 25 bp, Probe sequence
gattaaatgcaacgttcatcttcac

SEQ ID NO: 201259 - DNA, 25 bp, Probe sequence
gttatccgtcctgctgatggtaatg

SEQ ID NO: 201260 - DNA, 25 bp, Probe sequence
gttgcgattgaaatggcttcaccgc

SEQ ID NO: 201261 - DNA, 25 bp, Probe sequence
gtatagcttgttacatgtttctggt

SEQ ID NO: 201262 - DNA, 25 bp, Probe sequence
gtatggctgcacatggaggtttaca

SEQ ID NO: 201263 - DNA, 25 bp, Probe sequence
gtgctgctgtaaatggtatggctgc

SEQ ID NO: 201264 - DNA, 25 bp, Probe sequence
gtgaatttgctatgggtgctgctgt

SEQ ID NO: 201265 - DNA, 25 bp, Probe sequence
gtgttcatggggcacctttaggtga

SEQ ID NO: 201266 - DNA, 25 bp, Probe sequence
gtggtttggtgtacgtgaatttgct

SEQ ID NO: 201267 - DNA, 25 bp, Probe sequence
gggaagttgccttagaatctgaatc

SEQ ID NO: 201268 - DNA, 25 bp, Probe sequence
ggtgaagatggtcctactcatgaac

SEQ ID NO: 201269 - DNA, 25 bp, Probe sequence
ggtgcaacattcttcgtatttagtg

SEQ ID NO: 201270 - DNA, 25 bp, Probe sequence
ggtcataatggtgcatctcgtgctg

SEQ ID NO: 201271 - DNA, 25 bp, Probe sequence
tctcgtgctgattctggtactgtta

SEQ ID NO: 201272 - DNA, 25 bp, Probe sequence
tcagtaaaactgtcccttcattctt

SEQ ID NO: 201273 - DNA, 25 bp, Probe sequence
atagtagctgcattaattttaggtt

SEQ ID NO: 201274 - DNA, 25 bp, Probe sequence
atgggtcaaaaaccttctcagaaga

SEQ ID NO: 201275 - DNA, 25 bp, Probe sequence
atggatcaaaatatgaagagtgcga

SEQ ID NO: 201276 - DNA, 25 bp, Probe sequence
agtagctgcattaattttaggttta

SEQ ID NO: 201277 - DNA, 25 bp, Probe sequence
agcgggtgaaacaatggcaacttgg

SEQ ID NO: 201278 - DNA, 25 bp, Probe sequence
acccaccaatcaacgaagaaatgct

SEQ ID NO: 201279 - DNA, 25 bp, Probe sequence
aaatatatgatggactacttgaaga

SEQ ID NO: 201280 - DNA, 25 bp, Probe sequence
aaacccaccaatcaacgaagaaatg

SEQ ID NO: 201281 - DNA, 25 bp, Probe sequence
aacccaccaatcaacgaagaaatgc

SEQ ID NO: 201282 - DNA, 25 bp, Probe sequence
aagcgggtgaaacaatggcaacttg

SEQ ID NO: 201283 - DNA, 25 bp, Probe sequence
aaccttctcagaagaaaattaatca

SEQ ID NO: 201284 - DNA, 25 bp, Probe sequence
aagaaatgcttcgtatgatgatgat

SEQ ID NO: 201285 - DNA, 25 bp, Probe sequence
aatgggtcaaaaaccttctcagaag

SEQ ID NO: 201286 - DNA, 25 bp, Probe sequence
aatgcttcgtatgatgatgatgcaa

SEQ ID NO: 201287 - DNA, 25 bp, Probe sequence
caattatttttatagtagctgcatt

SEQ ID NO: 201288 - DNA, 25 bp, Probe sequence
caaatgggtcaaaaaccttctcaga

SEQ ID NO: 201289 - DNA, 25 bp, Probe sequence
caaatgatgacgatgatgaataaaa

SEQ ID NO: 201290 - DNA, 25 bp, Probe sequence
cgtatgatgatgatgcaaatgggtc

SEQ ID NO: 201291 - DNA, 25 bp, Probe sequence
cccaccaatcaacgaagaaatgctt

SEQ ID NO: 201292 - DNA, 25 bp, Probe sequence
gctgcattaattttaggtttaattg

SEQ ID NO: 201293 - DNA, 25 bp, Probe sequence
gcttcgtatgatgatgatgcaaatg

SEQ ID NO: 201294 - DNA, 25 bp, Probe sequence
gcaaatgggtcaaaaaccttctcag

SEQ ID NO: 201295 - DNA, 25 bp, Probe sequence
gaaaatatatgatggactacttgaa

SEQ ID NO: 201296 - DNA, 25 bp, Probe sequence
gaaagcgggtgaaacaatggcaact

SEQ ID NO: 201297 - DNA, 25 bp, Probe sequence
gaaatgcttcgtatgatgatgatgc

SEQ ID NO: 201298 - DNA, 25 bp, Probe sequence
gatggactacttgaagaaaaaccca

SEQ ID NO: 201299 - DNA, 25 bp, Probe sequence
gtttccttttagctagaaaatatat

SEQ ID NO: 201300 - DNA, 25 bp, Probe sequence
gtagctgcattaattttaggtttaa

SEQ ID NO: 201301 - DNA, 25 bp, Probe sequence
tgggtcaaaaaccttctcagaagaa

SEQ ID NO: 201302 - DNA, 25 bp, Probe sequence
tgaagaaaaacccaccaatcaacga

SEQ ID NO: 201303 - DNA, 25 bp, Probe sequence
taattggaggtttccttttagctag

SEQ ID NO: 201304 - DNA, 25 bp, Probe sequence
tacttgaagaaaaacccaccaatca

SEQ ID NO: 201305 - DNA, 25 bp, Probe sequence
taggataaagaaagcgggtgaaaca

SEQ ID NO: 201306 - DNA, 25 bp, Probe sequence
ttatttttatagtagctgcattaat

SEQ ID NO: 201307 - DNA, 25 bp, Probe sequence
attgatagaggctattttccagata

SEQ ID NO: 201308 - DNA, 25 bp, Probe sequence
attcgcaattgatagaggctatttt

SEQ ID NO: 201309 - DNA, 25 bp, Probe sequence
atatggaaatggcctctttttataa

SEQ ID NO: 201310 - DNA, 25 bp, Probe sequence
atagaggctattttccagatatgga

SEQ ID NO: 201311 - DNA, 25 bp, Probe sequence
atggaaatggcctctttttataatc

SEQ ID NO: 201312 - DNA, 25 bp, Probe sequence
atggcctctttttataatcaaatta

SEQ ID NO: 201313 - DNA, 25 bp, Probe sequence
agtaaattcgcaattgatagaggct

SEQ ID NO: 201314 - DNA, 25 bp, Probe sequence
agatatggaaatggcctctttttat

SEQ ID NO: 201315 - DNA, 25 bp, Probe sequence
agaggctattttccagatatggaaa

SEQ ID NO: 201316 - DNA, 25 bp, Probe sequence
aaattcgcaattgatagaggctatt

SEQ ID NO: 201317 - DNA, 25 bp, Probe sequence
aaatggcctctttttataatcaaat

SEQ ID NO: 201318 - DNA, 25 bp, Probe sequence
aatggcctctttttataatcaaatt

SEQ ID NO: 201319 - DNA, 25 bp, Probe sequence
aattgatagaggctattttccagat

SEQ ID NO: 201320 - DNA, 25 bp, Probe sequence
aattcgcaattgatagaggctattt

SEQ ID NO: 201321 - DNA, 25 bp, Probe sequence
caattgatagaggctattttccaga

SEQ ID NO: 201322 - DNA, 25 bp, Probe sequence
cagatatggaaatggcctcttttta

SEQ ID NO: 201323 - DNA, 25 bp, Probe sequence
cgcaattgatagaggctattttcca

SEQ ID NO: 201324 - DNA, 25 bp, Probe sequence
ccagatatggaaatggcctcttttt

SEQ ID NO: 201325 - DNA, 25 bp, Probe sequence
gcaattgatagaggctattttccag

SEQ ID NO: 201326 - DNA, 25 bp, Probe sequence
gaaatggcctctttttataatcaaa

SEQ ID NO: 201327 - DNA, 25 bp, Probe sequence
gaggctattttccagatatggaaat

SEQ ID NO: 201328 - DNA, 25 bp, Probe sequence
gatagaggctattttccagatatgg

SEQ ID NO: 201329 - DNA, 25 bp, Probe sequence
gatatggaaatggcctctttttata

SEQ ID NO: 201330 - DNA, 25 bp, Probe sequence
gtaaattcgcaattgatagaggcta

SEQ ID NO: 201331 - DNA, 25 bp, Probe sequence
ggaaatggcctctttttataatcaa

SEQ ID NO: 201332 - DNA, 25 bp, Probe sequence
tggaaatggcctctttttataatca

SEQ ID NO: 201333 - DNA, 25 bp, Probe sequence
tgatagaggctattttccagatatg

SEQ ID NO: 201334 - DNA, 25 bp, Probe sequence
tccagatatggaaatggcctctttt

SEQ ID NO: 201335 - DNA, 25 bp, Probe sequence
tcgcaattgatagaggctattttcc

SEQ ID NO: 201336 - DNA, 25 bp, Probe sequence
taaattcgcaattgatagaggctat

SEQ ID NO: 201337 - DNA, 25 bp, Probe sequence
tagaggctattttccagatatggaa

SEQ ID NO: 201338 - DNA, 25 bp, Probe sequence
tatggaaatggcctctttttataat

SEQ ID NO: 201339 - DNA, 25 bp, Probe sequence
ttcgcaattgatagaggctattttc

SEQ ID NO: 201340 - DNA, 25 bp, Probe sequence
ttgatagaggctattttccagatat

SEQ ID NO: 201341 - DNA, 25 bp, Probe sequence
aggcggcatgttctttttattagca

SEQ ID NO: 201342 - DNA, 25 bp, Probe sequence
aattaggcggcatgttctttttatt

SEQ ID NO: 201343 - DNA, 25 bp, Probe sequence
cattgtagctttatttatgggaact

SEQ ID NO: 201344 - DNA, 25 bp, Probe sequence
cattcgtactgtgatgaaaatattc

SEQ ID NO: 201345 - DNA, 25 bp, Probe sequence
gctagaagcctttataattggtttg

SEQ ID NO: 201346 - DNA, 25 bp, Probe sequence
gcttttttctacagttctaatttgg

SEQ ID NO: 201347 - DNA, 25 bp, Probe sequence
gcattctgtatgattgttccttgga

SEQ ID NO: 201348 - DNA, 25 bp, Probe sequence
gcatttccagttattttgatttcat

SEQ ID NO: 201349 - DNA, 25 bp, Probe sequence
gaaagctcaaaattatccggtaaat

SEQ ID NO: 201350 - DNA, 25 bp, Probe sequence
gaaacgatctaaagcatttccagtt

SEQ ID NO: 201351 - DNA, 25 bp, Probe sequence
gatgtacgtcgttccatattttagg

SEQ ID NO: 201352 - DNA, 25 bp, Probe sequence
gatcctggagaattaggcggcatgt

SEQ ID NO: 201353 - DNA, 25 bp, Probe sequence
gatctaaagcatttccagttatttt

SEQ ID NO: 201354 - DNA, 25 bp, Probe sequence
gtacgtcgttccatattttaggcta

SEQ ID NO: 201355 - DNA, 25 bp, Probe sequence
gttctaatttggacttctcgatttg

SEQ ID NO: 201356 - DNA, 25 bp, Probe sequence
gtttgcttttttctacagttctaat

SEQ ID NO: 201357 - DNA, 25 bp, Probe sequence
gtcgttccatattttaggctaacag

SEQ ID NO: 201358 - DNA, 25 bp, Probe sequence
gtgcattgatgtacgtcgttccata

SEQ ID NO: 201359 - DNA, 25 bp, Probe sequence
gtgctctatttaatattttcaatca

SEQ ID NO: 201360 - DNA, 25 bp, Probe sequence
ggatcggaaatgctagaagccttta

SEQ ID NO: 201361 - DNA, 25 bp, Probe sequence
ggacttctcgatttgaagtcaaagg

SEQ ID NO: 201362 - DNA, 25 bp, Probe sequence
ggcatgttctttttattagcattct

SEQ ID NO: 201363 - DNA, 25 bp, Probe sequence
tggtttgcttttttctacagttcta

SEQ ID NO: 201364 - DNA, 25 bp, Probe sequence
tgttctttttattagcattctgtat

SEQ ID NO: 201365 - DNA, 25 bp, Probe sequence
tgagaaaaaaatagttttgccaccg

SEQ ID NO: 201366 - DNA, 25 bp, Probe sequence
tccagttattttgatttcattactt

SEQ ID NO: 201367 - DNA, 25 bp, Probe sequence
tctaatttggacttctcgatttgaa

SEQ ID NO: 201368 - DNA, 25 bp, Probe sequence
taattggtttgcttttttctacagt

SEQ ID NO: 201369 - DNA, 25 bp, Probe sequence
tacagttctaatttggacttctcga

SEQ ID NO: 201370 - DNA, 25 bp, Probe sequence
tatagttattcgtatgaaagctcaa

SEQ ID NO: 201371 - DNA, 25 bp, Probe sequence
ttaggctaacaggatcggaaatgct

SEQ ID NO: 201372 - DNA, 25 bp, Probe sequence
ttttcaatcattgtagctttattta

SEQ ID NO: 201373 - DNA, 25 bp, Probe sequence
ttagtaatgaaatagatcctggaga

SEQ ID NO: 201374 - DNA, 25 bp, Probe sequence
ttctgtatgattgttccttggagag

SEQ ID NO: 201375 - DNA, 25 bp, Probe sequence
attgatgatttagtgaggtttgaga

SEQ ID NO: 201376 - DNA, 25 bp, Probe sequence
atctgattatgttagaacctatatt

SEQ ID NO: 201377 - DNA, 25 bp, Probe sequence
atgttagaacctatatttattgatg

SEQ ID NO: 201378 - DNA, 25 bp, Probe sequence
agtggtcgttatcatagaatatttg

SEQ ID NO: 201379 - DNA, 25 bp, Probe sequence
agaaagtggtcgttatcatagaata

SEQ ID NO: 201380 - DNA, 25 bp, Probe sequence
acaattgacaattgacaccccttag

SEQ ID NO: 201381 - DNA, 25 bp, Probe sequence
aaatctgattatgttagaacctata

SEQ ID NO: 201382 - DNA, 25 bp, Probe sequence
aaagtggtcgttatcatagaatatt

SEQ ID NO: 201383 - DNA, 25 bp, Probe sequence
aaagaaagtggtcgttatcatagaa

SEQ ID NO: 201384 - DNA, 25 bp, Probe sequence
aaaagaaagtggtcgttatcataga

SEQ ID NO: 201385 - DNA, 25 bp, Probe sequence
aagaaagtggtcgttatcatagaat

SEQ ID NO: 201386 - DNA, 25 bp, Probe sequence
aagtggtcgttatcatagaatattt

SEQ ID NO: 201387 - DNA, 25 bp, Probe sequence
aatctgattatgttagaacctatat

SEQ ID NO: 201388 - DNA, 25 bp, Probe sequence
ctgattatgttagaacctatattta

SEQ ID NO: 201389 - DNA, 25 bp, Probe sequence
gaatatttggcgataaggtaaatct

SEQ ID NO: 201390 - DNA, 25 bp, Probe sequence
gaatgattgaattacaattgacaat

SEQ ID NO: 201391 - DNA, 25 bp, Probe sequence
gaaagtggtcgttatcatagaatat

SEQ ID NO: 201392 - DNA, 25 bp, Probe sequence
gatgatttagtgaggtttgagaaga

SEQ ID NO: 201393 - DNA, 25 bp, Probe sequence
gatttagtgaggtttgagaagacaa

SEQ ID NO: 201394 - DNA, 25 bp, Probe sequence
gattatgttagaacctatatttatt

SEQ ID NO: 201395 - DNA, 25 bp, Probe sequence
gtaaatctgattatgttagaaccta

SEQ ID NO: 201396 - DNA, 25 bp, Probe sequence
gtgaggtttgagaagacaagaatga

SEQ ID NO: 201397 - DNA, 25 bp, Probe sequence
gtggtcgttatcatagaatatttgg

SEQ ID NO: 201398 - DNA, 25 bp, Probe sequence
ggtcgttatcatagaatatttggcg

SEQ ID NO: 201399 - DNA, 25 bp, Probe sequence
ggtaaatctgattatgttagaacct

SEQ ID NO: 201400 - DNA, 25 bp, Probe sequence
ggcgataaggtaaatctgattatgt

SEQ ID NO: 201401 - DNA, 25 bp, Probe sequence
tggtcgttatcatagaatatttggc

SEQ ID NO: 201402 - DNA, 25 bp, Probe sequence
tcgttatcatagaatatttggcgat

SEQ ID NO: 201403 - DNA, 25 bp, Probe sequence
tcatagaatatttggcgataaggta

SEQ ID NO: 201404 - DNA, 25 bp, Probe sequence
tacaattgacaattgacacccctta

SEQ ID NO: 201405 - DNA, 25 bp, Probe sequence
tatgttagaacctatatttattgat

SEQ ID NO: 201406 - DNA, 25 bp, Probe sequence
tatttggcgataaggtaaatctgat

SEQ ID NO: 201407 - DNA, 25 bp, Probe sequence
tttggcgataaggtaaatctgatta

SEQ ID NO: 201408 - DNA, 25 bp, Probe sequence
ttgatgatttagtgaggtttgagaa

SEQ ID NO: 201409 - DNA, 25 bp, Probe sequence
agtaacttttgagacactaaacgat

SEQ ID NO: 201410 - DNA, 25 bp, Probe sequence
agacactaaacgatgctcctaaaag

SEQ ID NO: 201411 - DNA, 25 bp, Probe sequence
agctcacacagatataatttatgga

SEQ ID NO: 201412 - DNA, 25 bp, Probe sequence
acaagccttcgacactgttctattt

SEQ ID NO: 201413 - DNA, 25 bp, Probe sequence
aaatatcagcaaaggttagttacat

SEQ ID NO: 201414 - DNA, 25 bp, Probe sequence
aaacacctgtgcaaaacatcatagt

SEQ ID NO: 201415 - DNA, 25 bp, Probe sequence
aaaatgttttttggagagctataga

SEQ ID NO: 201416 - DNA, 25 bp, Probe sequence
aactacattaccaacttatagaaat

SEQ ID NO: 201417 - DNA, 25 bp, Probe sequence
aagtaatcgacgttaaagagtatga

SEQ ID NO: 201418 - DNA, 25 bp, Probe sequence
aatacaatattataccagcttgggt

SEQ ID NO: 201419 - DNA, 25 bp, Probe sequence
cactccctttacaatagaacaaatg

SEQ ID NO: 201420 - DNA, 25 bp, Probe sequence
cttccagaaaagttattgtgtgcat

SEQ ID NO: 201421 - DNA, 25 bp, Probe sequence
gccttcgacactgttctatttagat

SEQ ID NO: 201422 - DNA, 25 bp, Probe sequence
gaattaattttacaaacacctgtgc

SEQ ID NO: 201423 - DNA, 25 bp, Probe sequence
gaatttggtaaagatgagccgaaaa

SEQ ID NO: 201424 - DNA, 25 bp, Probe sequence
gaatggaatgagactctaactaaga

SEQ ID NO: 201425 - DNA, 25 bp, Probe sequence
gaaaatatttatgagtatgccagaa

SEQ ID NO: 201426 - DNA, 25 bp, Probe sequence
gaaatagaatagctcacacagatat

SEQ ID NO: 201427 - DNA, 25 bp, Probe sequence
gagatttgtctactttttatagaac

SEQ ID NO: 201428 - DNA, 25 bp, Probe sequence
gagttcaataggttacaaaatgttt

SEQ ID NO: 201429 - DNA, 25 bp, Probe sequence
gatgctcctaaaagtgaaataccca

SEQ ID NO: 201430 - DNA, 25 bp, Probe sequence
gatgagtataaatattctgccaaaa

SEQ ID NO: 201431 - DNA, 25 bp, Probe sequence
ggttgaatagtatcaggtttttgag

SEQ ID NO: 201432 - DNA, 25 bp, Probe sequence
ggtataagcataaaacttccagaaa

SEQ ID NO: 201433 - DNA, 25 bp, Probe sequence
ggttagttacatttttattagctat

SEQ ID NO: 201434 - DNA, 25 bp, Probe sequence
tgtggagcttttacatagtgttggc

SEQ ID NO: 201435 - DNA, 25 bp, Probe sequence
tgagtataataacaagccttcgaca

SEQ ID NO: 201436 - DNA, 25 bp, Probe sequence
tgcgaaacacagttggccttttttt

SEQ ID NO: 201437 - DNA, 25 bp, Probe sequence
tacccactccctttacaatagaaca

SEQ ID NO: 201438 - DNA, 25 bp, Probe sequence
tagttttggagatttgtctactttt

SEQ ID NO: 201439 - DNA, 25 bp, Probe sequence
tagtgttggctattataatttgaag

SEQ ID NO: 201440 - DNA, 25 bp, Probe sequence
tttatagaactacattaccaactta

SEQ ID NO: 201441 - DNA, 25 bp, Probe sequence
ttataccagcttgggttttattcca

SEQ ID NO: 201442 - DNA, 25 bp, Probe sequence
ttgtgtgcatggttgaatagtatca

SEQ ID NO: 201443 - DNA, 25 bp, Probe sequence
ctaaccggtggagccacattctgct

SEQ ID NO: 201444 - DNA, 25 bp, Probe sequence
tgtcggcggtggtctaaccggtgga

SEQ ID NO: 201445 - DNA, 25 bp, Probe sequence
atgcgtttctggtatagcgggtggc

SEQ ID NO: 201446 - DNA, 25 bp, Probe sequence
agttggagctgttggtggtgctgtc

SEQ ID NO: 201447 - DNA, 25 bp, Probe sequence
aaaaggaaattttgccatcaactgc

SEQ ID NO: 201448 - DNA, 25 bp, Probe sequence
aaccggtggagccacattctgctaa

SEQ ID NO: 201449 - DNA, 25 bp, Probe sequence
aattgggacagttagtggaggcgta

SEQ ID NO: 201450 - DNA, 25 bp, Probe sequence
ctactttaggtcttgcaggtgcagg

SEQ ID NO: 201451 - DNA, 25 bp, Probe sequence
cgggtggcgcagtgacaggaggcac

SEQ ID NO: 201452 - DNA, 25 bp, Probe sequence
ctggtatagcgggtggcgcagtgac

SEQ ID NO: 201453 - DNA, 25 bp, Probe sequence
cgtttctggtatagcgggtggcgca

SEQ ID NO: 201454 - DNA, 25 bp, Probe sequence
gcaggtgcaggagtaggaacagtta

SEQ ID NO: 201455 - DNA, 25 bp, Probe sequence
gagtaggaacagttactattccagt

SEQ ID NO: 201456 - DNA, 25 bp, Probe sequence
gaaatgcgtttctggtatagcgggt

SEQ ID NO: 201457 - DNA, 25 bp, Probe sequence
gaaattttgccatcaactgcaaaag

SEQ ID NO: 201458 - DNA, 25 bp, Probe sequence
gacaggaggcactactttaggtctt

SEQ ID NO: 201459 - DNA, 25 bp, Probe sequence
gaggcgtagttggagctgttggtgg

SEQ ID NO: 201460 - DNA, 25 bp, Probe sequence
gtatagcgggtggcgcagtgacagg

SEQ ID NO: 201461 - DNA, 25 bp, Probe sequence
ggtctaaccggtggagccacattct

SEQ ID NO: 201462 - DNA, 25 bp, Probe sequence
gtggaggcgtagttggagctgttgg

SEQ ID NO: 201463 - DNA, 25 bp, Probe sequence
gtggcgcagtgacaggaggcactac

SEQ ID NO: 201464 - DNA, 25 bp, Probe sequence
gtggcaacactaaaagatgtaaaga

SEQ ID NO: 201465 - DNA, 25 bp, Probe sequence
ggtggtctaaccggtggagccacat

SEQ ID NO: 201466 - DNA, 25 bp, Probe sequence
ggtaaattaggtttttatgtgcaga

SEQ ID NO: 201467 - DNA, 25 bp, Probe sequence
ggagtagggaaatgcgtttctggta

SEQ ID NO: 201468 - DNA, 25 bp, Probe sequence
ggaggcactactttaggtcttgcag

SEQ ID NO: 201469 - DNA, 25 bp, Probe sequence
ggaacagttactattccagtaattg

SEQ ID NO: 201470 - DNA, 25 bp, Probe sequence
ggacagttagtggaggcgtagttgg

SEQ ID NO: 201471 - DNA, 25 bp, Probe sequence
ggcactactttaggtcttgcaggtg

SEQ ID NO: 201472 - DNA, 25 bp, Probe sequence
ggcgtagttggagctgttggtggtg

SEQ ID NO: 201473 - DNA, 25 bp, Probe sequence
ggcgcagtgacaggaggcactactt

SEQ ID NO: 201474 - DNA, 25 bp, Probe sequence
taggtcttgcaggtgcaggagtagg

SEQ ID NO: 201475 - DNA, 25 bp, Probe sequence
tcggcggtggtctaaccggtggagc

SEQ ID NO: 201476 - DNA, 25 bp, Probe sequence
tactattccagtaattgggacagtt

SEQ ID NO: 201477 - DNA, 25 bp, Probe sequence
attagtaatgtcaagattccgtgta

SEQ ID NO: 201478 - DNA, 25 bp, Probe sequence
attatgccgaagatattctgctgaa

SEQ ID NO: 201479 - DNA, 25 bp, Probe sequence
atagatatttaaagccgttagcaaa

SEQ ID NO: 201480 - DNA, 25 bp, Probe sequence
atctgaattatgttatggacttggt

SEQ ID NO: 201481 - DNA, 25 bp, Probe sequence
atccctgctggatctttaggtaaca

SEQ ID NO: 201482 - DNA, 25 bp, Probe sequence
atgatcattacttttattgctaata

SEQ ID NO: 201483 - DNA, 25 bp, Probe sequence
agagcactagtttggtctaataatc

SEQ ID NO: 201484 - DNA, 25 bp, Probe sequence
acagtcagatgttattacttatttt

SEQ ID NO: 201485 - DNA, 25 bp, Probe sequence
aaataatgtcattcttttcatcttt

SEQ ID NO: 201486 - DNA, 25 bp, Probe sequence
aacatcatgttacttgactctggta

SEQ ID NO: 201487 - DNA, 25 bp, Probe sequence
aagcaagaatttttctcaacgctga

SEQ ID NO: 201488 - DNA, 25 bp, Probe sequence
aatacagtcttattgatggcctgca

SEQ ID NO: 201489 - DNA, 25 bp, Probe sequence
cttttggttctattctgttatacga

SEQ ID NO: 201490 - DNA, 25 bp, Probe sequence
gaagtatcaagtttttgctgcacat

SEQ ID NO: 201491 - DNA, 25 bp, Probe sequence
gaagctttctctatggtagtatcgt

SEQ ID NO: 201492 - DNA, 25 bp, Probe sequence
gaaaaatttctttattcagcaatag

SEQ ID NO: 201493 - DNA, 25 bp, Probe sequence
gaaatcactcaaatacagtcagatg

SEQ ID NO: 201494 - DNA, 25 bp, Probe sequence
gacttggtaaagtgatttctgatga

SEQ ID NO: 201495 - DNA, 25 bp, Probe sequence
gagactgaattggcagaagtttttc

SEQ ID NO: 201496 - DNA, 25 bp, Probe sequence
gatggcctgcaaaggtattctacaa

SEQ ID NO: 201497 - DNA, 25 bp, Probe sequence
gataaggcatctattacgggaacta

SEQ ID NO: 201498 - DNA, 25 bp, Probe sequence
gattccgtgtatcttctttgaagga

SEQ ID NO: 201499 - DNA, 25 bp, Probe sequence
gttaacaacagtttttatccagata

SEQ ID NO: 201500 - DNA, 25 bp, Probe sequence
gttaccaacttttcaaagagcacta

SEQ ID NO: 201501 - DNA, 25 bp, Probe sequence
gtttttgctgcacattgggacagat

SEQ ID NO: 201502 - DNA, 25 bp, Probe sequence
gtactggtcaggaacaggtgatcga

SEQ ID NO: 201503 - DNA, 25 bp, Probe sequence
ggggcatcagagagtacaaaagcag

SEQ ID NO: 201504 - DNA, 25 bp, Probe sequence
ggtaatgcaataatccctgctggat

SEQ ID NO: 201505 - DNA, 25 bp, Probe sequence
ggatctcatcgtatagtattgaatt

SEQ ID NO: 201506 - DNA, 25 bp, Probe sequence
tggttttccttttggttctattctg

SEQ ID NO: 201507 - DNA, 25 bp, Probe sequence
tgctaattgtatttggcattcctac

SEQ ID NO: 201508 - DNA, 25 bp, Probe sequence
tcaacgctgaaagatggttttcctt

SEQ ID NO: 201509 - DNA, 25 bp, Probe sequence
ttttcatctttatggatctcatcgt

SEQ ID NO: 201510 - DNA, 25 bp, Probe sequence
ttagaagcttctattcatctttgaa

SEQ ID NO: 201511 - DNA, 25 bp, Probe sequence
attttttgtagcattggtagaatat

SEQ ID NO: 201512 - DNA, 25 bp, Probe sequence
atctattttttacaatgggcaattt

SEQ ID NO: 201513 - DNA, 25 bp, Probe sequence
atggagctatctattttttacaatg

SEQ ID NO: 201514 - DNA, 25 bp, Probe sequence
agaaaaagcaaaagcggaagcgcta

SEQ ID NO: 201515 - DNA, 25 bp, Probe sequence
acctaaatattctacccaagcacaa

SEQ ID NO: 201516 - DNA, 25 bp, Probe sequence
acccaagcacaaatagctattaaga

SEQ ID NO: 201517 - DNA, 25 bp, Probe sequence
acaatgggcaattttttgtagcatt

SEQ ID NO: 201518 - DNA, 25 bp, Probe sequence
aaatttatccaatacacatttggga

SEQ ID NO: 201519 - DNA, 25 bp, Probe sequence
aaatctaaatttatccaatacacat

SEQ ID NO: 201520 - DNA, 25 bp, Probe sequence
aaaaacgtgatgcatttcaaaaaag

SEQ ID NO: 201521 - DNA, 25 bp, Probe sequence
aaaactacaacgacaaattgctaag

SEQ ID NO: 201522 - DNA, 25 bp, Probe sequence
aaaagagaagcataaggggcattag

SEQ ID NO: 201523 - DNA, 25 bp, Probe sequence
aacctaaatattctacccaagcaca

SEQ ID NO: 201524 - DNA, 25 bp, Probe sequence
aatattctacccaagcacaaatagc

SEQ ID NO: 201525 - DNA, 25 bp, Probe sequence
ctaaatattctacccaagcacaaat

SEQ ID NO: 201526 - DNA, 25 bp, Probe sequence
gcggaagcgctataaagaaaaacgt

SEQ ID NO: 201527 - DNA, 25 bp, Probe sequence
gctatctattttttacaatgggcaa

SEQ ID NO: 201528 - DNA, 25 bp, Probe sequence
gaacctgatgatatagaggtattgg

SEQ ID NO: 201529 - DNA, 25 bp, Probe sequence
gaaaatgattgatgatgtgcaaact

SEQ ID NO: 201530 - DNA, 25 bp, Probe sequence
gaaacctaaatattctacccaagca

SEQ ID NO: 201531 - DNA, 25 bp, Probe sequence
gagctatctattttttacaatgggc

SEQ ID NO: 201532 - DNA, 25 bp, Probe sequence
gaggtattggattttattcatcatc

SEQ ID NO: 201533 - DNA, 25 bp, Probe sequence
gatgtgcaaactattgtttatacga

SEQ ID NO: 201534 - DNA, 25 bp, Probe sequence
gattgatgatgtgcaaactattgtt

SEQ ID NO: 201535 - DNA, 25 bp, Probe sequence
gtgcaaactattgtttatacgaaaa

SEQ ID NO: 201536 - DNA, 25 bp, Probe sequence
ggtattggattttattcatcatcaa

SEQ ID NO: 201537 - DNA, 25 bp, Probe sequence
ggattttattcatcatcaattaatg

SEQ ID NO: 201538 - DNA, 25 bp, Probe sequence
tgggcaattttttgtagcattggta

SEQ ID NO: 201539 - DNA, 25 bp, Probe sequence
tctacccaagcacaaatagctatta

SEQ ID NO: 201540 - DNA, 25 bp, Probe sequence
tacaacgacaaattgctaaggagca

SEQ ID NO: 201541 - DNA, 25 bp, Probe sequence
tacacatttgggaatgaacctgatg

SEQ ID NO: 201542 - DNA, 25 bp, Probe sequence
tattctacccaagcacaaatagcta

SEQ ID NO: 201543 - DNA, 25 bp, Probe sequence
ttggattttattcatcatcaattaa

SEQ ID NO: 201544 - DNA, 25 bp, Probe sequence
ttgggaatgaacctgatgatataga

SEQ ID NO: 201545 - DNA, 25 bp, Probe sequence
attaattcctagagaacctgcagaa

SEQ ID NO: 201546 - DNA, 25 bp, Probe sequence
attacttggtggattattaattcct

SEQ ID NO: 201547 - DNA, 25 bp, Probe sequence
atttcgaacaaagacgtaactgacg

SEQ ID NO: 201548 - DNA, 25 bp, Probe sequence
actgacgattataaacatggagcaa

SEQ ID NO: 201549 - DNA, 25 bp, Probe sequence
aaagggtgtaggtgtggcaactgct

SEQ ID NO: 201550 - DNA, 25 bp, Probe sequence
aacatggagcaatagttacattaaa

SEQ ID NO: 201551 - DNA, 25 bp, Probe sequence
aagacgtaactgacgattataaaca

SEQ ID NO: 201552 - DNA, 25 bp, Probe sequence
aatagcccatcatgtggatcacaag

SEQ ID NO: 201553 - DNA, 25 bp, Probe sequence
cacgcatgtccagaattacttggtg

SEQ ID NO: 201554 - DNA, 25 bp, Probe sequence
gctgcaaaggttgttactatttcga

SEQ ID NO: 201555 - DNA, 25 bp, Probe sequence
gcccatcatgtggatcacaagagat

SEQ ID NO: 201556 - DNA, 25 bp, Probe sequence
gctattcacgcatgtccagaattac

SEQ ID NO: 201557 - DNA, 25 bp, Probe sequence
gcaaatagcccatcatgtggatcac

SEQ ID NO: 201558 - DNA, 25 bp, Probe sequence
gcaaaggttgttactatttcgaaca

SEQ ID NO: 201559 - DNA, 25 bp, Probe sequence
gcaactgctttactcattaatgaag

SEQ ID NO: 201560 - DNA, 25 bp, Probe sequence
gaatgacgctgcaaaggttgttact

SEQ ID NO: 201561 - DNA, 25 bp, Probe sequence
gaacctgcagaaattattggtggcg

SEQ ID NO: 201562 - DNA, 25 bp, Probe sequence
gaaaagctattcacgcatgtccaga

SEQ ID NO: 201563 - DNA, 25 bp, Probe sequence
gacagcggaaaagctattcacgcat

SEQ ID NO: 201564 - DNA, 25 bp, Probe sequence
gatgtatggaatgacgctgcaaagg

SEQ ID NO: 201565 - DNA, 25 bp, Probe sequence
gatacgatggtggtaatcaattgaa

SEQ ID NO: 201566 - DNA, 25 bp, Probe sequence
gataggcgataatgtaagatacgat

SEQ ID NO: 201567 - DNA, 25 bp, Probe sequence
gatatatgatgggaattttacagga

SEQ ID NO: 201568 - DNA, 25 bp, Probe sequence
gttcgtgtttgataggcgataatgt

SEQ ID NO: 201569 - DNA, 25 bp, Probe sequence
gtaggtgtggcaactgctttactca

SEQ ID NO: 201570 - DNA, 25 bp, Probe sequence
gtggttgggatgattttaattagtt

SEQ ID NO: 201571 - DNA, 25 bp, Probe sequence
gtggcaactgctttactcattaatg

SEQ ID NO: 201572 - DNA, 25 bp, Probe sequence
gggtgtaggtgtggcaactgcttta

SEQ ID NO: 201573 - DNA, 25 bp, Probe sequence
ggtggcgatggttttgatgtatgga

SEQ ID NO: 201574 - DNA, 25 bp, Probe sequence
ggtgtggcaactgctttactcatta

SEQ ID NO: 201575 - DNA, 25 bp, Probe sequence
tgatgaaaatacgttttttgaccaa

SEQ ID NO: 201576 - DNA, 25 bp, Probe sequence
tatcaatgtgatacagttattttaa

SEQ ID NO: 201577 - DNA, 25 bp, Probe sequence
tattggtggcgatggttttgatgta

SEQ ID NO: 201578 - DNA, 25 bp, Probe sequence
ttaaaagcaaatagcccatcatgtg

SEQ ID NO: 201579 - DNA, 25 bp, Probe sequence
attgattttgtattagattctttag

SEQ ID NO: 201580 - DNA, 25 bp, Probe sequence
atattttactatgattgtcctccta

SEQ ID NO: 201581 - DNA, 25 bp, Probe sequence
agtggacagaagactttttcaaaga

SEQ ID NO: 201582 - DNA, 25 bp, Probe sequence
agttattgcaatagacacttaaaag

SEQ ID NO: 201583 - DNA, 25 bp, Probe sequence
agcttcattatcatttaaacatcaa

SEQ ID NO: 201584 - DNA, 25 bp, Probe sequence
acacattgatggtaggcgtacttgt

SEQ ID NO: 201585 - DNA, 25 bp, Probe sequence
aagatttttccctatcattacaaca

SEQ ID NO: 201586 - DNA, 25 bp, Probe sequence
aattattttaatagctggtgatagc

SEQ ID NO: 201587 - DNA, 25 bp, Probe sequence
gcgaaagaaagagctgacgagttat

SEQ ID NO: 201588 - DNA, 25 bp, Probe sequence
gctgacgagttatatagttattgca

SEQ ID NO: 201589 - DNA, 25 bp, Probe sequence
gaatgtaaatttttccaatactgat

SEQ ID NO: 201590 - DNA, 25 bp, Probe sequence
gaaacaacttgtcattacacattga

SEQ ID NO: 201591 - DNA, 25 bp, Probe sequence
gaaaggtagcattgaggttaggaga

SEQ ID NO: 201592 - DNA, 25 bp, Probe sequence
gacacttaaaagagacacatttcaa

SEQ ID NO: 201593 - DNA, 25 bp, Probe sequence
gacatagcttcattatcatttaaac

SEQ ID NO: 201594 - DNA, 25 bp, Probe sequence
gagttgagtgagtattcagttgaat

SEQ ID NO: 201595 - DNA, 25 bp, Probe sequence
gataagcgcaaaagtctacggaaaa

SEQ ID NO: 201596 - DNA, 25 bp, Probe sequence
gatttttccctatcattacaacaaa

SEQ ID NO: 201597 - DNA, 25 bp, Probe sequence
gattttgtacctgctgctaaactag

SEQ ID NO: 201598 - DNA, 25 bp, Probe sequence
gttgaatacaacttaaaatactcta

SEQ ID NO: 201599 - DNA, 25 bp, Probe sequence
gtagccattttagtagatggtggat

SEQ ID NO: 201600 - DNA, 25 bp, Probe sequence
gtacctgctgctaaactagcaagaa

SEQ ID NO: 201601 - DNA, 25 bp, Probe sequence
gtctacggaaaagttacagcgaaag

SEQ ID NO: 201602 - DNA, 25 bp, Probe sequence
gtgatagcgattttgtacctgctgc

SEQ ID NO: 201603 - DNA, 25 bp, Probe sequence
ggtaggcgtacttgtgatgaaaaat

SEQ ID NO: 201604 - DNA, 25 bp, Probe sequence
ggaagtatcgatttaaatgatttga

SEQ ID NO: 201605 - DNA, 25 bp, Probe sequence
ttgaggttaggagagttgagtgagt

SEQ ID NO: 201606 - DNA, 25 bp, Probe sequence
tgattgtcctcctattgataagata

SEQ ID NO: 201607 - DNA, 25 bp, Probe sequence
taagatagtttatcaccccttatta

SEQ ID NO: 201608 - DNA, 25 bp, Probe sequence
taaatttttccaatactgatacgaa

SEQ ID NO: 201609 - DNA, 25 bp, Probe sequence
tagattctttaggggcagatattag

SEQ ID NO: 201610 - DNA, 25 bp, Probe sequence
taggtttagacatagcttcattatc

SEQ ID NO: 201611 - DNA, 25 bp, Probe sequence
tatcaccccttattaaaaaagaatg

SEQ ID NO: 201612 - DNA, 25 bp, Probe sequence
ttactatgattgtcctcctattgat

SEQ ID NO: 201613 - DNA, 25 bp, Probe sequence
agaccattaactattggaacggttg

SEQ ID NO: 201614 - DNA, 25 bp, Probe sequence
attcattttcggaagcgggtcaagc

SEQ ID NO: 201615 - DNA, 25 bp, Probe sequence
attactgatccaatgatgagtttaa

SEQ ID NO: 201616 - DNA, 25 bp, Probe sequence
atatagtggctccttattgcagtat

SEQ ID NO: 201617 - DNA, 25 bp, Probe sequence
atatgtctcatattactgatccaat

SEQ ID NO: 201618 - DNA, 25 bp, Probe sequence
atgacacaacatatccaagtaaaga

SEQ ID NO: 201619 - DNA, 25 bp, Probe sequence
atgatggcattattaacgatgtatt

SEQ ID NO: 201620 - DNA, 25 bp, Probe sequence
agaagaacctgatatcattgtgata

SEQ ID NO: 201621 - DNA, 25 bp, Probe sequence
acgatgtatttattcctcttaagcc

SEQ ID NO: 201622 - DNA, 25 bp, Probe sequence
actcccttatgctactgtgagcgaa

SEQ ID NO: 201623 - DNA, 25 bp, Probe sequence
acagcagactggcacttagggaaaa

SEQ ID NO: 201624 - DNA, 25 bp, Probe sequence
aagaattatcggatatccaatctaa

SEQ ID NO: 201625 - DNA, 25 bp, Probe sequence
aaggtgtttttgatatatttgatta

SEQ ID NO: 201626 - DNA, 25 bp, Probe sequence
caaggtggaaagacatctgattctg

SEQ ID NO: 201627 - DNA, 25 bp, Probe sequence
gctggagatttatatgacacaacat

SEQ ID NO: 201628 - DNA, 25 bp, Probe sequence
gcatcatccatttagtatagaagac

SEQ ID NO: 201629 - DNA, 25 bp, Probe sequence
gaacagattttacatcgattaattc

SEQ ID NO: 201630 - DNA, 25 bp, Probe sequence
gacatctgattctgaaagaccatta

SEQ ID NO: 201631 - DNA, 25 bp, Probe sequence
gattatgtcatgctaggtcacttgc

SEQ ID NO: 201632 - DNA, 25 bp, Probe sequence
gttaatttttatacactcccttatg

SEQ ID NO: 201633 - DNA, 25 bp, Probe sequence
ggtcacttgcatcatccatttagta

SEQ ID NO: 201634 - DNA, 25 bp, Probe sequence
ggaacggttgaatcagttcagaaag

SEQ ID NO: 201635 - DNA, 25 bp, Probe sequence
ggaattacgcgctgtattgaaacaa

SEQ ID NO: 201636 - DNA, 25 bp, Probe sequence
ggcaaacagcttttagaagatcaag

SEQ ID NO: 201637 - DNA, 25 bp, Probe sequence
ggctccttattgcagtattcatttt

SEQ ID NO: 201638 - DNA, 25 bp, Probe sequence
tgctaggtcacttgcatcatccatt

SEQ ID NO: 201639 - DNA, 25 bp, Probe sequence
taaactatggggcgagttggtttga

SEQ ID NO: 201640 - DNA, 25 bp, Probe sequence
tacatcgattaattcaccaatagag

SEQ ID NO: 201641 - DNA, 25 bp, Probe sequence
tagaactgcgtataccaataattat

SEQ ID NO: 201642 - DNA, 25 bp, Probe sequence
tagtcatctgactgttcaaggtgga

SEQ ID NO: 201643 - DNA, 25 bp, Probe sequence
tatacatacagcagactggcactta

SEQ ID NO: 201644 - DNA, 25 bp, Probe sequence
tatacactcccttatgctactgtga

SEQ ID NO: 201645 - DNA, 25 bp, Probe sequence
tttagcgctgacgaatgaaactttt

SEQ ID NO: 201646 - DNA, 25 bp, Probe sequence
ttatcctaatactttagcgctgacg

SEQ ID NO: 201647 - DNA, 25 bp, Probe sequence
aaatcagatgtatacggggacctag

SEQ ID NO: 201648 - DNA, 25 bp, Probe sequence
attggcggtataagtaagacaaata

SEQ ID NO: 201649 - DNA, 25 bp, Probe sequence
atattgggctactaggtgaagatag

SEQ ID NO: 201650 - DNA, 25 bp, Probe sequence
atacggggacctagatgcattttta

SEQ ID NO: 201651 - DNA, 25 bp, Probe sequence
atgtatacggggacctagatgcatt

SEQ ID NO: 201652 - DNA, 25 bp, Probe sequence
agatactacatcaactaaagatagt

SEQ ID NO: 201653 - DNA, 25 bp, Probe sequence
acggggacctagatgcatttttagt

SEQ ID NO: 201654 - DNA, 25 bp, Probe sequence
acgatgcaattaaccatagaaaagg

SEQ ID NO: 201655 - DNA, 25 bp, Probe sequence
aaaagcagacagagatactacatca

SEQ ID NO: 201656 - DNA, 25 bp, Probe sequence
aactgataaaggtgcatatgtatgg

SEQ ID NO: 201657 - DNA, 25 bp, Probe sequence
aagattattatattgggctactagg

SEQ ID NO: 201658 - DNA, 25 bp, Probe sequence
aatcagatgtatacggggacctaga

SEQ ID NO: 201659 - DNA, 25 bp, Probe sequence
caatattcaattggcggtataagta

SEQ ID NO: 201660 - DNA, 25 bp, Probe sequence
cagatgtatacggggacctagatgc

SEQ ID NO: 201661 - DNA, 25 bp, Probe sequence
gcatttttagtcatagaagaagaac

SEQ ID NO: 201662 - DNA, 25 bp, Probe sequence
gcatatgtatggaaaaatcttaaag

SEQ ID NO: 201663 - DNA, 25 bp, Probe sequence
gaatttatacgatgcaattaaccat

SEQ ID NO: 201664 - DNA, 25 bp, Probe sequence
gaacctgttaaaggaagacaatatt

SEQ ID NO: 201665 - DNA, 25 bp, Probe sequence
gaaaagcagacagagatactacatc

SEQ ID NO: 201666 - DNA, 25 bp, Probe sequence
gaaagaagagaatttatacgatgca

SEQ ID NO: 201667 - DNA, 25 bp, Probe sequence
gacaacatttaactgataaaggtgc

SEQ ID NO: 201668 - DNA, 25 bp, Probe sequence
gagttaataaatgtagatggtctgt

SEQ ID NO: 201669 - DNA, 25 bp, Probe sequence
gatgtatacggggacctagatgcat

SEQ ID NO: 201670 - DNA, 25 bp, Probe sequence
gattattatattgggctactaggtg

SEQ ID NO: 201671 - DNA, 25 bp, Probe sequence
gtatacggggacctagatgcatttt

SEQ ID NO: 201672 - DNA, 25 bp, Probe sequence
gtatagacaacatttaactgataaa

SEQ ID NO: 201673 - DNA, 25 bp, Probe sequence
gtagatggtctgtatagacaacatt

SEQ ID NO: 201674 - DNA, 25 bp, Probe sequence
gtcatagaagaagaacctgttaaag

SEQ ID NO: 201675 - DNA, 25 bp, Probe sequence
ggtctgtatagacaacatttaactg

SEQ ID NO: 201676 - DNA, 25 bp, Probe sequence
tcaaatcagatgtatacggggacct

SEQ ID NO: 201677 - DNA, 25 bp, Probe sequence
tacggggacctagatgcatttttag

SEQ ID NO: 201678 - DNA, 25 bp, Probe sequence
tatacgatgcaattaaccatagaaa

SEQ ID NO: 201679 - DNA, 25 bp, Probe sequence
ttattatattgggctactaggtgaa

SEQ ID NO: 201680 - DNA, 25 bp, Probe sequence
ttcaattggcggtataagtaagaca

SEQ ID NO: 201681 - DNA, 25 bp, Probe sequence
atagcctggaggggcgagcaagagg

SEQ ID NO: 201682 - DNA, 25 bp, Probe sequence
ataccacttttacaagctaggtcga

SEQ ID NO: 201683 - DNA, 25 bp, Probe sequence
atcaacaaattgaccttttatggca

SEQ ID NO: 201684 - DNA, 25 bp, Probe sequence
atcgtcgcttgcattagctttaggg

SEQ ID NO: 201685 - DNA, 25 bp, Probe sequence
agggcatcatattgattttgacagt

SEQ ID NO: 201686 - DNA, 25 bp, Probe sequence
aaagtgcatagacaaggcccttata

SEQ ID NO: 201687 - DNA, 25 bp, Probe sequence
aaacgaacgctaaatttgatgtatt

SEQ ID NO: 201688 - DNA, 25 bp, Probe sequence
aacacaatctatagtttcgcatatt

SEQ ID NO: 201689 - DNA, 25 bp, Probe sequence
aacgctttttaatatcaaacagtcg

SEQ ID NO: 201690 - DNA, 25 bp, Probe sequence
tggtaagactggatcgggtaaaaca

SEQ ID NO: 201691 - DNA, 25 bp, Probe sequence
cactgaatttgaaacactctcgaaa

SEQ ID NO: 201692 - DNA, 25 bp, Probe sequence
gccttgtttggtaaagcatcaactg

SEQ ID NO: 201693 - DNA, 25 bp, Probe sequence
gcctcaaggtgaattcaaacgcttt

SEQ ID NO: 201694 - DNA, 25 bp, Probe sequence
gcagcaatcaggaggtatttcacta

SEQ ID NO: 201695 - DNA, 25 bp, Probe sequence
gaatactctgctgttcattatcaat

SEQ ID NO: 201696 - DNA, 25 bp, Probe sequence
gaaggattcggtacattagatcaag

SEQ ID NO: 201697 - DNA, 25 bp, Probe sequence
gaagtattgaataagcgtctgctag

SEQ ID NO: 201698 - DNA, 25 bp, Probe sequence
gaaatgtcgaggctgaatttaactg

SEQ ID NO: 201699 - DNA, 25 bp, Probe sequence
gaaattcaggatttagggcatcata

SEQ ID NO: 201700 - DNA, 25 bp, Probe sequence
gacatattagctcgttatcaggtgg

SEQ ID NO: 201701 - DNA, 25 bp, Probe sequence
gatggtaaacagccgatgtcagtaa

SEQ ID NO: 201702 - DNA, 25 bp, Probe sequence
gatgtatttgagatggtggatggca

SEQ ID NO: 201703 - DNA, 25 bp, Probe sequence
gatgcaatgacttatgccttgtttg

SEQ ID NO: 201704 - DNA, 25 bp, Probe sequence
gtaaatgcagatcaattccgacaat

SEQ ID NO: 201705 - DNA, 25 bp, Probe sequence
gtaatttcaggtacccaattcatta

SEQ ID NO: 201706 - DNA, 25 bp, Probe sequence
ggtttctcatggtcttagtggccta

SEQ ID NO: 201707 - DNA, 25 bp, Probe sequence
ggttgggattatttcacatgtgagc

SEQ ID NO: 201708 - DNA, 25 bp, Probe sequence
ggagatcaatgtccgatatgtggta

SEQ ID NO: 201709 - DNA, 25 bp, Probe sequence
ggagaaactttccaatcgtcgcttg

SEQ ID NO: 201710 - DNA, 25 bp, Probe sequence
ggcgagaagcggtttctcatggtct

SEQ ID NO: 201711 - DNA, 25 bp, Probe sequence
tgtcagataatcgataccaactaat

SEQ ID NO: 201712 - DNA, 25 bp, Probe sequence
tgagaagtcatttcgctgatggtaa

SEQ ID NO: 201713 - DNA, 25 bp, Probe sequence
tccgacaattgtttattttgcctca

SEQ ID NO: 201714 - DNA, 25 bp, Probe sequence
ttagtggcctagaaattgatgtatt

SEQ ID NO: 201715 - DNA, 25 bp, Probe sequence
attgccacttcttgaagaacaacag

SEQ ID NO: 201716 - DNA, 25 bp, Probe sequence
attcatcagcaaacttgaccgacaa

SEQ ID NO: 201717 - DNA, 25 bp, Probe sequence
atattttatcaaaaggcgacttagc

SEQ ID NO: 201718 - DNA, 25 bp, Probe sequence
atacaattgccacttcttgaagaac

SEQ ID NO: 201719 - DNA, 25 bp, Probe sequence
atctatacaattgccacttcttgaa

SEQ ID NO: 201720 - DNA, 25 bp, Probe sequence
aaatagcacttataatgatcaaaat

SEQ ID NO: 201721 - DNA, 25 bp, Probe sequence
aaaggcgacttagcaatggtattaa

SEQ ID NO: 201722 - DNA, 25 bp, Probe sequence
aactactaaacaattgcacaagata

SEQ ID NO: 201723 - DNA, 25 bp, Probe sequence
aagattaataccatttgctgaaaat

SEQ ID NO: 201724 - DNA, 25 bp, Probe sequence
aataggcgaattcatcagcaaactt

SEQ ID NO: 201725 - DNA, 25 bp, Probe sequence
gcaaggagcaacccaagtttatata

SEQ ID NO: 201726 - DNA, 25 bp, Probe sequence
gaattcatcagcaaacttgaccgac

SEQ ID NO: 201727 - DNA, 25 bp, Probe sequence
gaataagggtggcactgctctagaa

SEQ ID NO: 201728 - DNA, 25 bp, Probe sequence
gaagttttatctggaataactacta

SEQ ID NO: 201729 - DNA, 25 bp, Probe sequence
gaactgaaagattaataccatttgc

SEQ ID NO: 201730 - DNA, 25 bp, Probe sequence
gagaataagggtggcactgctctag

SEQ ID NO: 201731 - DNA, 25 bp, Probe sequence
gaggaaggtaaagattatccagatt

SEQ ID NO: 201732 - DNA, 25 bp, Probe sequence
gagggtttctagaagttttatctgg

SEQ ID NO: 201733 - DNA, 25 bp, Probe sequence
gatgcaaggagcaacccaagtttat

SEQ ID NO: 201734 - DNA, 25 bp, Probe sequence
gatatctatacaattgccacttctt

SEQ ID NO: 201735 - DNA, 25 bp, Probe sequence
gggtggcactgctctagaaacagaa

SEQ ID NO: 201736 - DNA, 25 bp, Probe sequence
ggtatgatgcaaggagcaacccaag

SEQ ID NO: 201737 - DNA, 25 bp, Probe sequence
ggagcaacccaagtttatataaatt

SEQ ID NO: 201738 - DNA, 25 bp, Probe sequence
ggaagttattctataaatagcactt

SEQ ID NO: 201739 - DNA, 25 bp, Probe sequence
ggaataactactaaacaattgcaca

SEQ ID NO: 201740 - DNA, 25 bp, Probe sequence
ggcactgctctagaaacagaattta

SEQ ID NO: 201741 - DNA, 25 bp, Probe sequence
ggcgaattcatcagcaaacttgacc

SEQ ID NO: 201742 - DNA, 25 bp, Probe sequence
ggcgacttagcaatggtattaaatg

SEQ ID NO: 201743 - DNA, 25 bp, Probe sequence
tgcacaagatagaccaattaaaaga

SEQ ID NO: 201744 - DNA, 25 bp, Probe sequence
tcatcagcaaacttgaccgacaaat

SEQ ID NO: 201745 - DNA, 25 bp, Probe sequence
taagggtggcactgctctagaaaca

SEQ ID NO: 201746 - DNA, 25 bp, Probe sequence
tatggttcttaatgaatacagattt

SEQ ID NO: 201747 - DNA, 25 bp, Probe sequence
tattcatctattaaattgatatcta

SEQ ID NO: 201748 - DNA, 25 bp, Probe sequence
ttggaaatcaaaatcaattcaagaa

SEQ ID NO: 201749 - DNA, 25 bp, Probe sequence
atcagttacttcaaaagatacacaa

SEQ ID NO: 201750 - DNA, 25 bp, Probe sequence
agggtcaggtaaacacgcagataat

SEQ ID NO: 201751 - DNA, 25 bp, Probe sequence
agataatatatcaattggtggaatt

SEQ ID NO: 201752 - DNA, 25 bp, Probe sequence
acgttaatttattgacttctaagag

SEQ ID NO: 201753 - DNA, 25 bp, Probe sequence
acagagcctaaagacagcaaaatta

SEQ ID NO: 201754 - DNA, 25 bp, Probe sequence
aaaaatggcggctactatacgtttg

SEQ ID NO: 201755 - DNA, 25 bp, Probe sequence
aaaatggcggctactatacgtttga

SEQ ID NO: 201756 - DNA, 25 bp, Probe sequence
aacggtcaaaatactgcttctgtga

SEQ ID NO: 201757 - DNA, 25 bp, Probe sequence
aagaatcaatataaagaccctgtac

SEQ ID NO: 201758 - DNA, 25 bp, Probe sequence
caatataaagaccctgtacaaaacg

SEQ ID NO: 201759 - DNA, 25 bp, Probe sequence
caaaatactgcttctgtgacttcag

SEQ ID NO: 201760 - DNA, 25 bp, Probe sequence
caggtaaacacgcagataatatatc

SEQ ID NO: 201761 - DNA, 25 bp, Probe sequence
cggtcaaaatactgcttctgtgact

SEQ ID NO: 201762 - DNA, 25 bp, Probe sequence
gaatcaatataaagaccctgtacaa

SEQ ID NO: 201763 - DNA, 25 bp, Probe sequence
gaagggtcaggtaaacacgcagata

SEQ ID NO: 201764 - DNA, 25 bp, Probe sequence
gaaggacttgatgtatttgttgtaa

SEQ ID NO: 201765 - DNA, 25 bp, Probe sequence
gaagattatgaaggacttgatgtat

SEQ ID NO: 201766 - DNA, 25 bp, Probe sequence
gaacttgatttcaaactaagaaagc

SEQ ID NO: 201767 - DNA, 25 bp, Probe sequence
gaaaaatggcggctactatacgttt

SEQ ID NO: 201768 - DNA, 25 bp, Probe sequence
gaaaggtttaaggacgatgaagatt

SEQ ID NO: 201769 - DNA, 25 bp, Probe sequence
gacagcaaaattaaagtttctatga

SEQ ID NO: 201770 - DNA, 25 bp, Probe sequence
gagaagggtcaggtaaacacgcaga

SEQ ID NO: 201771 - DNA, 25 bp, Probe sequence
gttacttcaaaagatacacaagaat

SEQ ID NO: 201772 - DNA, 25 bp, Probe sequence
gtttctatgaaaaatggcggctact

SEQ ID NO: 201773 - DNA, 25 bp, Probe sequence
gtaacggtcaaaatactgcttctgt

SEQ ID NO: 201774 - DNA, 25 bp, Probe sequence
tgtacaaaacgttaatttattgact

SEQ ID NO: 201775 - DNA, 25 bp, Probe sequence
ggtcaggtaaacacgcagataatat

SEQ ID NO: 201776 - DNA, 25 bp, Probe sequence
ggacttgatgtatttgttgtaagag

SEQ ID NO: 201777 - DNA, 25 bp, Probe sequence
tttgttgtaagagaagggtcaggta

SEQ ID NO: 201778 - DNA, 25 bp, Probe sequence
tcaaaatactgcttctgtgacttca

SEQ ID NO: 201779 - DNA, 25 bp, Probe sequence
taacggtcaaaatactgcttctgtg

SEQ ID NO: 201780 - DNA, 25 bp, Probe sequence
tacttggcacagacaaagaaaggtt

SEQ ID NO: 201781 - DNA, 25 bp, Probe sequence
tattgacttctaagagtaacggtca

SEQ ID NO: 201782 - DNA, 25 bp, Probe sequence
tttattgacttctaagagtaacggt

SEQ ID NO: 201783 - DNA, 25 bp, Probe sequence
attgaggtatcatcatcaagccctg

SEQ ID NO: 201784 - DNA, 25 bp, Probe sequence
attacatcaaggatttgtctctaaa

SEQ ID NO: 201785 - DNA, 25 bp, Probe sequence
aggtgatgcgcaattgttccctgat

SEQ ID NO: 201786 - DNA, 25 bp, Probe sequence
agtgctgattcagttgaaggaggat

SEQ ID NO: 201787 - DNA, 25 bp, Probe sequence
agatcctatcaaaccaggagctcaa

SEQ ID NO: 201788 - DNA, 25 bp, Probe sequence
agctgtttcgcagactgaacaaaat

SEQ ID NO: 201789 - DNA, 25 bp, Probe sequence
aaagcggcagagtcttctaaaaact

SEQ ID NO: 201790 - DNA, 25 bp, Probe sequence
aaaagctgtttcgcagactgaacaa

SEQ ID NO: 201791 - DNA, 25 bp, Probe sequence
aactttgtaaatttagatcctatca

SEQ ID NO: 201792 - DNA, 25 bp, Probe sequence
aagagattacagggaagactaaatt

SEQ ID NO: 201793 - DNA, 25 bp, Probe sequence
aattgtaggatatgatgttcaaggt

SEQ ID NO: 201794 - DNA, 25 bp, Probe sequence
aattgtccataaccaagaaattgag

SEQ ID NO: 201795 - DNA, 25 bp, Probe sequence
caagctgaagcatctgaaactaatc

SEQ ID NO: 201796 - DNA, 25 bp, Probe sequence
ccaggagctcaaaaagtaacaggta

SEQ ID NO: 201797 - DNA, 25 bp, Probe sequence
gcaattgttccctgatattcaagta

SEQ ID NO: 201798 - DNA, 25 bp, Probe sequence
gaatcaaaagctgtttcgcagactg

SEQ ID NO: 201799 - DNA, 25 bp, Probe sequence
gaaacaaaagcggcagagtcttcta

SEQ ID NO: 201800 - DNA, 25 bp, Probe sequence
gaaactaatcagaaggtaagtacaa

SEQ ID NO: 201801 - DNA, 25 bp, Probe sequence
gaggtatcatcatcaagccctgatt

SEQ ID NO: 201802 - DNA, 25 bp, Probe sequence
gttgaaggaggatatggtgatttta

SEQ ID NO: 201803 - DNA, 25 bp, Probe sequence
gtactacattaccgaatcatattat

SEQ ID NO: 201804 - DNA, 25 bp, Probe sequence
gtaacaggtactacattaccgaatc

SEQ ID NO: 201805 - DNA, 25 bp, Probe sequence
ggtgattttataactgcaaatgaca

SEQ ID NO: 201806 - DNA, 25 bp, Probe sequence
ggtatcatcatcaagccctgattta

SEQ ID NO: 201807 - DNA, 25 bp, Probe sequence
ggatatggtgattttataactgcaa

SEQ ID NO: 201808 - DNA, 25 bp, Probe sequence
ggatttgtctctaaatatattgatg

SEQ ID NO: 201809 - DNA, 25 bp, Probe sequence
ggagagtttgagtatcctttaaata

SEQ ID NO: 201810 - DNA, 25 bp, Probe sequence
ggcagagtcttctaaaaactttgta

SEQ ID NO: 201811 - DNA, 25 bp, Probe sequence
tgatgcgcaattgttccctgatatt

SEQ ID NO: 201812 - DNA, 25 bp, Probe sequence
tgcgcaattgttccctgatattcaa

SEQ ID NO: 201813 - DNA, 25 bp, Probe sequence
taatcgtaaaattgtccataaccaa

SEQ ID NO: 201814 - DNA, 25 bp, Probe sequence
taccgaatcatattattttacttaa

SEQ ID NO: 201815 - DNA, 25 bp, Probe sequence
tattgatgtatatgaatctccggaa

SEQ ID NO: 201816 - DNA, 25 bp, Probe sequence
ttaggtgatgcgcaattgttccctg

SEQ ID NO: 201817 - DNA, 25 bp, Probe sequence
aacagggactactttacccagccat

SEQ ID NO: 201818 - DNA, 25 bp, Probe sequence
attacatcaaggattcgtttctaag

SEQ ID NO: 201819 - DNA, 25 bp, Probe sequence
atatcatgacaaatggcgaagcaga

SEQ ID NO: 201820 - DNA, 25 bp, Probe sequence
agctggtactgaggaagaaaacaca

SEQ ID NO: 201821 - DNA, 25 bp, Probe sequence
acaaatggcgaagcagaagcatctg

SEQ ID NO: 201822 - DNA, 25 bp, Probe sequence
aattgaggtttcgtcatccagtcct

SEQ ID NO: 201823 - DNA, 25 bp, Probe sequence
aattgtcggctatgatgttcaaggt

SEQ ID NO: 201824 - DNA, 25 bp, Probe sequence
caaagttggatcacaaccagttcaa

SEQ ID NO: 201825 - DNA, 25 bp, Probe sequence
gcaactgtttcctgatattcaagta

SEQ ID NO: 201826 - DNA, 25 bp, Probe sequence
gaagcatctgaaggtagccaaactg

SEQ ID NO: 201827 - DNA, 25 bp, Probe sequence
gaacccaaaggtgaatgcaactgaa

SEQ ID NO: 201828 - DNA, 25 bp, Probe sequence
gaccccattaaacctggtgctcaaa

SEQ ID NO: 201829 - DNA, 25 bp, Probe sequence
gattcgagtatccactacacaatag

SEQ ID NO: 201830 - DNA, 25 bp, Probe sequence
gtttcgtcatccagtcctgatttag

SEQ ID NO: 201831 - DNA, 25 bp, Probe sequence
gtatttgctgatgaaaacggaagat

SEQ ID NO: 201832 - DNA, 25 bp, Probe sequence
gtcatccagtcctgatttaggtgat

SEQ ID NO: 201833 - DNA, 25 bp, Probe sequence
gtgctgattcagtagatggaggaaa

SEQ ID NO: 201834 - DNA, 25 bp, Probe sequence
gtgatgcgcaactgtttcctgatat

SEQ ID NO: 201835 - DNA, 25 bp, Probe sequence
ggtgctcaaaaggtaacagggacta

SEQ ID NO: 201836 - DNA, 25 bp, Probe sequence
ggtattctcgataaacagggaacta

SEQ ID NO: 201837 - DNA, 25 bp, Probe sequence
ggattcgtttctaagtatatcgatg

SEQ ID NO: 201838 - DNA, 25 bp, Probe sequence
ggatcacaaccagttcaaaataatc

SEQ ID NO: 201839 - DNA, 25 bp, Probe sequence
ggaagattcgagtatccactacaca

SEQ ID NO: 201840 - DNA, 25 bp, Probe sequence
ggaagtttgtaccatacagaacaag

SEQ ID NO: 201841 - DNA, 25 bp, Probe sequence
tgcgcaactgtttcctgatattcaa

SEQ ID NO: 201842 - DNA, 25 bp, Probe sequence
tccagtcctgatttaggtgatgatg

SEQ ID NO: 201843 - DNA, 25 bp, Probe sequence
tcgagtatccactacacaatagaaa

SEQ ID NO: 201844 - DNA, 25 bp, Probe sequence
tactttacccagccatattattcta

SEQ ID NO: 201845 - DNA, 25 bp, Probe sequence
tagccaaactgttaagaacccaaag

SEQ ID NO: 201846 - DNA, 25 bp, Probe sequence
tacccagccatattattctaatgaa

SEQ ID NO: 201847 - DNA, 25 bp, Probe sequence
taggtgatgcgcaactgtttcctga

SEQ ID NO: 201848 - DNA, 25 bp, Probe sequence
tagtgatttagtatttgctgatgaa

SEQ ID NO: 201849 - DNA, 25 bp, Probe sequence
tatcgatgtttatgaatctccggaa

SEQ ID NO: 201850 - DNA, 25 bp, Probe sequence
tttagaccccattaaacctggtgct

SEQ ID NO: 201851 - DNA, 25 bp, Probe sequence
atatgttaactagctctacgggtag

SEQ ID NO: 201852 - DNA, 25 bp, Probe sequence
atcgtgttcttctgtatattcctta

SEQ ID NO: 201853 - DNA, 25 bp, Probe sequence
agtcgtattacttggtgcattttta

SEQ ID NO: 201854 - DNA, 25 bp, Probe sequence
agatcccaaaactactgaagcttat

SEQ ID NO: 201855 - DNA, 25 bp, Probe sequence
agcaagtgcatggtctggattaagt

SEQ ID NO: 201856 - DNA, 25 bp, Probe sequence
aagtattcaccagtcttcatctata

SEQ ID NO: 201857 - DNA, 25 bp, Probe sequence
cattctttattacatctgctgactc

SEQ ID NO: 201858 - DNA, 25 bp, Probe sequence
cattggggattccatgcttgggctg

SEQ ID NO: 201859 - DNA, 25 bp, Probe sequence
ctacgttcaacatttttccattggg

SEQ ID NO: 201860 - DNA, 25 bp, Probe sequence
gcgttggcatattcgcaattccgta

SEQ ID NO: 201861 - DNA, 25 bp, Probe sequence
gcgattatcatcattgttgttacta

SEQ ID NO: 201862 - DNA, 25 bp, Probe sequence
gcttgggctgtttatggtgttgttg

SEQ ID NO: 201863 - DNA, 25 bp, Probe sequence
gaattcttcttcaccagagaatcca

SEQ ID NO: 201864 - DNA, 25 bp, Probe sequence
gactcctgaaacacagctatttgga

SEQ ID NO: 201865 - DNA, 25 bp, Probe sequence
gagagttcatttctggtgtcttgct

SEQ ID NO: 201866 - DNA, 25 bp, Probe sequence
gtttcgttaggtatgggtgctctac

SEQ ID NO: 201867 - DNA, 25 bp, Probe sequence
gtagctgctttaattgttggaccaa

SEQ ID NO: 201868 - DNA, 25 bp, Probe sequence
gtcttcatggacactttattactgg

SEQ ID NO: 201869 - DNA, 25 bp, Probe sequence
gtgcagctgaaccgatggcgcactt

SEQ ID NO: 201870 - DNA, 25 bp, Probe sequence
ggggaatttcacaggccttaatagc

SEQ ID NO: 201871 - DNA, 25 bp, Probe sequence
gtgtctttggtgtattaggcatcga

SEQ ID NO: 201872 - DNA, 25 bp, Probe sequence
ggtgtcttgctagttccagcaattg

SEQ ID NO: 201873 - DNA, 25 bp, Probe sequence
ggtgttgttgcgttagcgttggcat

SEQ ID NO: 201874 - DNA, 25 bp, Probe sequence
ggtttggtgttttatggtgcagctg

SEQ ID NO: 201875 - DNA, 25 bp, Probe sequence
ggagtgtttaatcatgtgccatttg

SEQ ID NO: 201876 - DNA, 25 bp, Probe sequence
tgttggaccaactgttcttatttta

SEQ ID NO: 201877 - DNA, 25 bp, Probe sequence
tctcctttgtcgtcatactcatgat

SEQ ID NO: 201878 - DNA, 25 bp, Probe sequence
tctagaactttacgtcctcttttag

SEQ ID NO: 201879 - DNA, 25 bp, Probe sequence
tcttattcttactacgattatcgtg

SEQ ID NO: 201880 - DNA, 25 bp, Probe sequence
ttcctaggtttaacattgactccga

SEQ ID NO: 201881 - DNA, 25 bp, Probe sequence
tattccttatttttagtcctattgg

SEQ ID NO: 201882 - DNA, 25 bp, Probe sequence
ttgtacttttattagctggtggcgg

SEQ ID NO: 201883 - DNA, 25 bp, Probe sequence
ttataagtgcattcccattctcctt

SEQ ID NO: 201884 - DNA, 25 bp, Probe sequence
ttgacgttttatctgtatttgcgac

SEQ ID NO: 201885 - DNA, 25 bp, Probe sequence
attggcggaagatttaattgcgaat

SEQ ID NO: 201886 - DNA, 25 bp, Probe sequence
attcttgtttactctaatccaccaa

SEQ ID NO: 201887 - DNA, 25 bp, Probe sequence
atttttatccggaatatgtatcttc

SEQ ID NO: 201888 - DNA, 25 bp, Probe sequence
attttatgtcagtatttttatccgg

SEQ ID NO: 201889 - DNA, 25 bp, Probe sequence
atatgatgcgggtatccaaattgat

SEQ ID NO: 201890 - DNA, 25 bp, Probe sequence
atatgatcagattcttgtttactct

SEQ ID NO: 201891 - DNA, 25 bp, Probe sequence
ataagcaatctgatatcgttcaaca

SEQ ID NO: 201892 - DNA, 25 bp, Probe sequence
aggatcatcaatttctttagtttat

SEQ ID NO: 201893 - DNA, 25 bp, Probe sequence
agcacctgataatgcgattaagaca

SEQ ID NO: 201894 - DNA, 25 bp, Probe sequence
actcactcgagtaaggaattgcacg

SEQ ID NO: 201895 - DNA, 25 bp, Probe sequence
acaggtacagactatgctgacgtat

SEQ ID NO: 201896 - DNA, 25 bp, Probe sequence
aaaatattcttttgtggtgtatgat

SEQ ID NO: 201897 - DNA, 25 bp, Probe sequence
aacaatactttgtggtcatggtaag

SEQ ID NO: 201898 - DNA, 25 bp, Probe sequence
aacttcatcaacactcactcgagta

SEQ ID NO: 201899 - DNA, 25 bp, Probe sequence
aacggcaatagaagaccatcgtatt

SEQ ID NO: 201900 - DNA, 25 bp, Probe sequence
aagcttaccgtgagcaatacgacaa

SEQ ID NO: 201901 - DNA, 25 bp, Probe sequence
caatcttgccattaataccagacgt

SEQ ID NO: 201902 - DNA, 25 bp, Probe sequence
cgttggtactcatcatggataagca

SEQ ID NO: 201903 - DNA, 25 bp, Probe sequence
gccatttataacttcatcaacactc

SEQ ID NO: 201904 - DNA, 25 bp, Probe sequence
gcgaatcacattaatgtcgatgtca

SEQ ID NO: 201905 - DNA, 25 bp, Probe sequence
gcggatgtatgtattgcatcgctga

SEQ ID NO: 201906 - DNA, 25 bp, Probe sequence
gcattcgacgtctcaagtattcgag

SEQ ID NO: 201907 - DNA, 25 bp, Probe sequence
gcatcgctgattaaagaaggcgtcg

SEQ ID NO: 201908 - DNA, 25 bp, Probe sequence
gcacgagatgggtgagcgcgcacat

SEQ ID NO: 201909 - DNA, 25 bp, Probe sequence
gaaaaactacttactaaatcatcaa

SEQ ID NO: 201910 - DNA, 25 bp, Probe sequence
gaaatttgcagatgtcaaaacggca

SEQ ID NO: 201911 - DNA, 25 bp, Probe sequence
gacacatttaaagcttaccgtgagc

SEQ ID NO: 201912 - DNA, 25 bp, Probe sequence
gagcgcgcacatcaactgtttaaag

SEQ ID NO: 201913 - DNA, 25 bp, Probe sequence
gattcctaactggtatgacatgcgt

SEQ ID NO: 201914 - DNA, 25 bp, Probe sequence
gtatagcggtaatatggggcagtta

SEQ ID NO: 201915 - DNA, 25 bp, Probe sequence
gtcgatgtcatgtgtggatggccat

SEQ ID NO: 201916 - DNA, 25 bp, Probe sequence
gtgtatgatatagcacctgataatg

SEQ ID NO: 201917 - DNA, 25 bp, Probe sequence
gggcagttacaggatatggagacac

SEQ ID NO: 201918 - DNA, 25 bp, Probe sequence
tctaatccaccaatcttgccattaa

SEQ ID NO: 201919 - DNA, 25 bp, Probe sequence
atcagctgattctcttggtctagat

SEQ ID NO: 201920 - DNA, 25 bp, Probe sequence
atggtatgggttcatctcgtgactg

SEQ ID NO: 201921 - DNA, 25 bp, Probe sequence
accacaaggcgcaacagcaactgat

SEQ ID NO: 201922 - DNA, 25 bp, Probe sequence
acaacatttaccactagcagaccgt

SEQ ID NO: 201923 - DNA, 25 bp, Probe sequence
aaagccaattacctagcttcaccac

SEQ ID NO: 201924 - DNA, 25 bp, Probe sequence
aaaacttctctagcaccaggatcaa

SEQ ID NO: 201925 - DNA, 25 bp, Probe sequence
aacctctatatgactttgatcctaa

SEQ ID NO: 201926 - DNA, 25 bp, Probe sequence
aagcgattgctgatgaggacctatt

SEQ ID NO: 201927 - DNA, 25 bp, Probe sequence
aatggttcgaggtacgtttgctaat

SEQ ID NO: 201928 - DNA, 25 bp, Probe sequence
cacatctctccagcaggtgcaattg

SEQ ID NO: 201929 - DNA, 25 bp, Probe sequence
ctgtgacaactgaccacatctctcc

SEQ ID NO: 201930 - DNA, 25 bp, Probe sequence
gccgtagttgatttagcttctttac

SEQ ID NO: 201931 - DNA, 25 bp, Probe sequence
gctggaatgcttggacaaccttctt

SEQ ID NO: 201932 - DNA, 25 bp, Probe sequence
gcggattcttcccagttgatgatga

SEQ ID NO: 201933 - DNA, 25 bp, Probe sequence
gctatggttcgttttgactcacttg

SEQ ID NO: 201934 - DNA, 25 bp, Probe sequence
gcttcaccacagttagttgttgctt

SEQ ID NO: 201935 - DNA, 25 bp, Probe sequence
gcatcgctttcaggaccaaaacgtc

SEQ ID NO: 201936 - DNA, 25 bp, Probe sequence
gacatctgtattatctggtaaccgt

SEQ ID NO: 201937 - DNA, 25 bp, Probe sequence
gagttctttggtccaggtgtacaac

SEQ ID NO: 201938 - DNA, 25 bp, Probe sequence
gaggtaccatttaaaccttctcgtg

SEQ ID NO: 201939 - DNA, 25 bp, Probe sequence
gataattacaatgcagttcctcctg

SEQ ID NO: 201940 - DNA, 25 bp, Probe sequence
gatttcacaggtgtaccagccgtag

SEQ ID NO: 201941 - DNA, 25 bp, Probe sequence
gatttagttattgaccactcagttc

SEQ ID NO: 201942 - DNA, 25 bp, Probe sequence
gttcctcctgcaactggaatagttc

SEQ ID NO: 201943 - DNA, 25 bp, Probe sequence
gtatccatcctcttgttaaagccaa

SEQ ID NO: 201944 - DNA, 25 bp, Probe sequence
gtaaattcggtgattctgtgacaac

SEQ ID NO: 201945 - DNA, 25 bp, Probe sequence
gtaactttgaaggtcgtatccatcc

SEQ ID NO: 201946 - DNA, 25 bp, Probe sequence
gtaatgcctatctttgatgctgcaa

SEQ ID NO: 201947 - DNA, 25 bp, Probe sequence
ggggtgttggtggtattgaagctga

SEQ ID NO: 201948 - DNA, 25 bp, Probe sequence
tggagcaacttgcggattcttccca

SEQ ID NO: 201949 - DNA, 25 bp, Probe sequence
tggacaaccttcttatttcccaatt

SEQ ID NO: 201950 - DNA, 25 bp, Probe sequence
tgttcaaccacatgactacgtcaaa

SEQ ID NO: 201951 - DNA, 25 bp, Probe sequence
taattcaggtcctttattaccagaa

SEQ ID NO: 201952 - DNA, 25 bp, Probe sequence
ttcaaaatccatcattcttccaagg

SEQ ID NO: 201953 - DNA, 25 bp, Probe sequence
atcatttcacctgtgactgacctca

SEQ ID NO: 201954 - DNA, 25 bp, Probe sequence
agaagcgcgttatgctgaaactgat

SEQ ID NO: 201955 - DNA, 25 bp, Probe sequence
agcgcgttatgctgaaactgataag

SEQ ID NO: 201956 - DNA, 25 bp, Probe sequence
acctgtgactgacctcaatgtcaat

SEQ ID NO: 201957 - DNA, 25 bp, Probe sequence
aaatattcgagattacgttcagtgt

SEQ ID NO: 201958 - DNA, 25 bp, Probe sequence
aaaggtgaacttgcaactacaggtt

SEQ ID NO: 201959 - DNA, 25 bp, Probe sequence
aacaaggaatcatttcacctgtgac

SEQ ID NO: 201960 - DNA, 25 bp, Probe sequence
aacttgcaactacaggttccacaga

SEQ ID NO: 201961 - DNA, 25 bp, Probe sequence
aagcctatacggttggatcgttatt

SEQ ID NO: 201962 - DNA, 25 bp, Probe sequence
catttcacctgtgactgacctcaat

SEQ ID NO: 201963 - DNA, 25 bp, Probe sequence
cttttaagcctatacggttggatcg

SEQ ID NO: 201964 - DNA, 25 bp, Probe sequence
cttggtttgaagttgcgcggttgga

SEQ ID NO: 201965 - DNA, 25 bp, Probe sequence
gcaactacaggttccacagaattga

SEQ ID NO: 201966 - DNA, 25 bp, Probe sequence
gaagttaggttttagttatgctgat

SEQ ID NO: 201967 - DNA, 25 bp, Probe sequence
gaagttgcgcggttggattatatat

SEQ ID NO: 201968 - DNA, 25 bp, Probe sequence
gaagatacttttaagcctatacggt

SEQ ID NO: 201969 - DNA, 25 bp, Probe sequence
gatgggtgtaatttatcacgggaat

SEQ ID NO: 201970 - DNA, 25 bp, Probe sequence
gatacttttaagcctatacggttgg

SEQ ID NO: 201971 - DNA, 25 bp, Probe sequence
gttatttcccagattggcatgaagc

SEQ ID NO: 201972 - DNA, 25 bp, Probe sequence
gttgcgcggttggattatatatcga

SEQ ID NO: 201973 - DNA, 25 bp, Probe sequence
gtgaacttgcaactacaggttccac

SEQ ID NO: 201974 - DNA, 25 bp, Probe sequence
gtgactgacctcaatgtcaattata

SEQ ID NO: 201975 - DNA, 25 bp, Probe sequence
gggaattatgcaacttggtttgaag

SEQ ID NO: 201976 - DNA, 25 bp, Probe sequence
ggtttgaagttgcgcggttggatta

SEQ ID NO: 201977 - DNA, 25 bp, Probe sequence
ggttttagttatgctgatatggaaa

SEQ ID NO: 201978 - DNA, 25 bp, Probe sequence
ggttccacagaattgatttgcatta

SEQ ID NO: 201979 - DNA, 25 bp, Probe sequence
ggattatatatcgaagttaggtttt

SEQ ID NO: 201980 - DNA, 25 bp, Probe sequence
ggaatcatttcacctgtgactgacc

SEQ ID NO: 201981 - DNA, 25 bp, Probe sequence
tgctgaaactgataagatgggtgta

SEQ ID NO: 201982 - DNA, 25 bp, Probe sequence
tatacggttggatcgttatttccca

SEQ ID NO: 201983 - DNA, 25 bp, Probe sequence
tcgagattacgttcagtgtataaat

SEQ ID NO: 201984 - DNA, 25 bp, Probe sequence
tcacgggaattatgcaacttggttt

SEQ ID NO: 201985 - DNA, 25 bp, Probe sequence
ttacagaaatagaagcgcgttatgc

SEQ ID NO: 201986 - DNA, 25 bp, Probe sequence
ttcacctgtgactgacctcaatgtc

SEQ ID NO: 201987 - DNA, 25 bp, Probe sequence
attgctttacctccactttataaat

SEQ ID NO: 201988 - DNA, 25 bp, Probe sequence
atggacgtggtatgccaacaggtat

SEQ ID NO: 201989 - DNA, 25 bp, Probe sequence
agagcgtcaagagcattaccattat

SEQ ID NO: 201990 - DNA, 25 bp, Probe sequence
agctcgtgaagatgctcgttcaggt

SEQ ID NO: 201991 - DNA, 25 bp, Probe sequence
accgacagtcgaagttatctttact

SEQ ID NO: 201992 - DNA, 25 bp, Probe sequence
aacgcttaatgatttacgcagtggt

SEQ ID NO: 201993 - DNA, 25 bp, Probe sequence
aatctaaattgggtacttctgaagc

SEQ ID NO: 201994 - DNA, 25 bp, Probe sequence
gcgggaggttcagcaaaacttggac

SEQ ID NO: 201995 - DNA, 25 bp, Probe sequence
cgtgtatttattgctttacctccac

SEQ ID NO: 201996 - DNA, 25 bp, Probe sequence
gaaggtttaacagctgttgtgtctg

SEQ ID NO: 201997 - DNA, 25 bp, Probe sequence
gaagtgcgttcatctaaacgtgtaa

SEQ ID NO: 201998 - DNA, 25 bp, Probe sequence
gaagttttgcatgacgtggctacat

SEQ ID NO: 201999 - DNA, 25 bp, Probe sequence
gaaattgtcgataactccgtcgatg

SEQ ID NO: 202000 - DNA, 25 bp, Probe sequence
gacgatgaacccagaaacacgaact

SEQ ID NO: 202001 - DNA, 25 bp, Probe sequence
gactacaagagtctgcgttcttatt

SEQ ID NO: 202002 - DNA, 25 bp, Probe sequence
gacgtggctacattttcaggtgaag

SEQ ID NO: 202003 - DNA, 25 bp, Probe sequence
gacctggtatgtatattggatcaac

SEQ ID NO: 202004 - DNA, 25 bp, Probe sequence
gagttgaatacgcttggacagacga

SEQ ID NO: 202005 - DNA, 25 bp, Probe sequence
gaggtagacgtagctttccaatata

SEQ ID NO: 202006 - DNA, 25 bp, Probe sequence
gatggtgcgcatattcaagtgctat

SEQ ID NO: 202007 - DNA, 25 bp, Probe sequence
ggacgagaccgcaaattccaagcga

SEQ ID NO: 202008 - DNA, 25 bp, Probe sequence
gtaaagacactttgctatctggtaa

SEQ ID NO: 202009 - DNA, 25 bp, Probe sequence
gtcgaaggtgattctgcgggaggtt

SEQ ID NO: 202010 - DNA, 25 bp, Probe sequence
gtgacaaagtacaacctagacgtga

SEQ ID NO: 202011 - DNA, 25 bp, Probe sequence
gtgctattgttaacattcttcttca

SEQ ID NO: 202012 - DNA, 25 bp, Probe sequence
gggcaggcgttggtactgactttaa

SEQ ID NO: 202013 - DNA, 25 bp, Probe sequence
gggaagctgcacgtaaagctcgtga

SEQ ID NO: 202014 - DNA, 25 bp, Probe sequence
ggtggtacacatgaagttggtttta

SEQ ID NO: 202015 - DNA, 25 bp, Probe sequence
ggcttgaagttgaaatccatcgaga

SEQ ID NO: 202016 - DNA, 25 bp, Probe sequence
tatgactgatgctgatactgatggt

SEQ ID NO: 202017 - DNA, 25 bp, Probe sequence
tatgcacgtcgtattaatgaactta

SEQ ID NO: 202018 - DNA, 25 bp, Probe sequence
tataaaacttcaggtggtcttcacg

SEQ ID NO: 202019 - DNA, 25 bp, Probe sequence
ttatccacacaatcggggcaggcgt

SEQ ID NO: 202020 - DNA, 25 bp, Probe sequence
ttccaagcgatattaccattacgtg

SEQ ID NO: 202021 - DNA, 25 bp, Probe sequence
attaaacgtacttctattcgtagct

SEQ ID NO: 202022 - DNA, 25 bp, Probe sequence
attacgtcatattcttgataaccat

SEQ ID NO: 202023 - DNA, 25 bp, Probe sequence
atataatttcaacatggtcgctatt

SEQ ID NO: 202024 - DNA, 25 bp, Probe sequence
atagttgcgcttgaaggtgaacata

SEQ ID NO: 202025 - DNA, 25 bp, Probe sequence
atgttttaggtgatcgctttggaag

SEQ ID NO: 202026 - DNA, 25 bp, Probe sequence
acagtcggtgatgttattggtcaat

SEQ ID NO: 202027 - DNA, 25 bp, Probe sequence
caggtatatctgcaggttacgcgac

SEQ ID NO: 202028 - DNA, 25 bp, Probe sequence
catgtatcacaaatagttcctatcg

SEQ ID NO: 202029 - DNA, 25 bp, Probe sequence
gccacacaacgcggctcgttaaaac

SEQ ID NO: 202030 - DNA, 25 bp, Probe sequence
gcggcaatgcgttacactgaagcta

SEQ ID NO: 202031 - DNA, 25 bp, Probe sequence
gcattttatgtttttgcgactcaaa

SEQ ID NO: 202032 - DNA, 25 bp, Probe sequence
gcaagataccgtactagtatttaca

SEQ ID NO: 202033 - DNA, 25 bp, Probe sequence
gcaatggtccgtttaagtcaagact

SEQ ID NO: 202034 - DNA, 25 bp, Probe sequence
gaactggtttacgaatagcaattga

SEQ ID NO: 202035 - DNA, 25 bp, Probe sequence
gacaaagaagttatggtgcctagtg

SEQ ID NO: 202036 - DNA, 25 bp, Probe sequence
gactggaagttacgacatgtcttaa

SEQ ID NO: 202037 - DNA, 25 bp, Probe sequence
gagcacaacgtggaataactttatt

SEQ ID NO: 202038 - DNA, 25 bp, Probe sequence
gatggtcgtccaaaattgatgggta

SEQ ID NO: 202039 - DNA, 25 bp, Probe sequence
gataatccggatattacagtcaatc

SEQ ID NO: 202040 - DNA, 25 bp, Probe sequence
gatttcctaacttactagtgaatgg

SEQ ID NO: 202041 - DNA, 25 bp, Probe sequence
gatttgattagtgttatgcgctttg

SEQ ID NO: 202042 - DNA, 25 bp, Probe sequence
gttacgcgacagatataccaccaca

SEQ ID NO: 202043 - DNA, 25 bp, Probe sequence
gtatcgatgaattacgtgctgacaa

SEQ ID NO: 202044 - DNA, 25 bp, Probe sequence
gtagctgcacatgtagtgacaggtg

SEQ ID NO: 202045 - DNA, 25 bp, Probe sequence
gtacagtgcctctatttaaaacaac

SEQ ID NO: 202046 - DNA, 25 bp, Probe sequence
gtcgatggtatcgttgaagtacgtg

SEQ ID NO: 202047 - DNA, 25 bp, Probe sequence
ggtcgctattagtgatggtcgtcca

SEQ ID NO: 202048 - DNA, 25 bp, Probe sequence
ggtattgccatcaagatttcctaac

SEQ ID NO: 202049 - DNA, 25 bp, Probe sequence
tggtcaatatcatccacatggagac

SEQ ID NO: 202050 - DNA, 25 bp, Probe sequence
ttaaaggtcctgattttccaactgg

SEQ ID NO: 202051 - DNA, 25 bp, Probe sequence
tataccaccacataatttagctgaa

SEQ ID NO: 202052 - DNA, 25 bp, Probe sequence
tattcaagagcgtgcattgccagat

SEQ ID NO: 202053 - DNA, 25 bp, Probe sequence
tattgatggccacacaacgcggctc

SEQ ID NO: 202054 - DNA, 25 bp, Probe sequence
ttcaaatctgaacgactgtctttaa

SEQ ID NO: 202055 - DNA, 25 bp, Probe sequence
atattgctggtgttgcgactgcgat

SEQ ID NO: 202056 - DNA, 25 bp, Probe sequence
aggttctgctggaggtattttctta

SEQ ID NO: 202057 - DNA, 25 bp, Probe sequence
aaatggctaggtatcgtatttgcga

SEQ ID NO: 202058 - DNA, 25 bp, Probe sequence
aagatggtggattccgtggtggtcc

SEQ ID NO: 202059 - DNA, 25 bp, Probe sequence
aatccaatcattaggtgtgttcttt

SEQ ID NO: 202060 - DNA, 25 bp, Probe sequence
aatctaatacaattgcggagtcgtt

SEQ ID NO: 202061 - DNA, 25 bp, Probe sequence
cttcgttaattgtaccgattatggc

SEQ ID NO: 202062 - DNA, 25 bp, Probe sequence
cttgtctttgtcggtgcagttgtaa

SEQ ID NO: 202063 - DNA, 25 bp, Probe sequence
gcgccgaatgcagcggcaactgctg

SEQ ID NO: 202064 - DNA, 25 bp, Probe sequence
gcatttgcgattagtgctggttcga

SEQ ID NO: 202065 - DNA, 25 bp, Probe sequence
gcagacttatttatgggcttaatgg

SEQ ID NO: 202066 - DNA, 25 bp, Probe sequence
gcagcgagtgcatttatagaagcga

SEQ ID NO: 202067 - DNA, 25 bp, Probe sequence
gaatttgtccatgttggtaccgatt

SEQ ID NO: 202068 - DNA, 25 bp, Probe sequence
gaagcgactttggctcaggtttata

SEQ ID NO: 202069 - DNA, 25 bp, Probe sequence
gataacgcacctcaaggtgttgcag

SEQ ID NO: 202070 - DNA, 25 bp, Probe sequence
gtgctggttcgagagttggtactgg

SEQ ID NO: 202071 - DNA, 25 bp, Probe sequence
gttgtagtacttgtctttgtcggtg

SEQ ID NO: 202072 - DNA, 25 bp, Probe sequence
gtatgggttctgcgccgaatgcagc

SEQ ID NO: 202073 - DNA, 25 bp, Probe sequence
gtatttcgccattccaagcatttgc

SEQ ID NO: 202074 - DNA, 25 bp, Probe sequence
gtgttgcgactgcgattgttttagg

SEQ ID NO: 202075 - DNA, 25 bp, Probe sequence
gtattgctacgttatcttcgttaat

SEQ ID NO: 202076 - DNA, 25 bp, Probe sequence
gtatcgaacaagtaactggtggcgc

SEQ ID NO: 202077 - DNA, 25 bp, Probe sequence
gtaccgatttaatatggtctcaata

SEQ ID NO: 202078 - DNA, 25 bp, Probe sequence
gtaagaagggtatttcgccattcca

SEQ ID NO: 202079 - DNA, 25 bp, Probe sequence
gtggtggtccagcttactatattac

SEQ ID NO: 202080 - DNA, 25 bp, Probe sequence
gtgtgttctttgatacaatgttggt

SEQ ID NO: 202081 - DNA, 25 bp, Probe sequence
ggtttgtacagcaactgcaatcatg

SEQ ID NO: 202082 - DNA, 25 bp, Probe sequence
ggactgtccaatgtagcttttgcat

SEQ ID NO: 202083 - DNA, 25 bp, Probe sequence
ggaattagtgcttggggcgctaaca

SEQ ID NO: 202084 - DNA, 25 bp, Probe sequence
taactggtggcgctgtaggtgctgc

SEQ ID NO: 202085 - DNA, 25 bp, Probe sequence
tagagctttagtagaacgtccagaa

SEQ ID NO: 202086 - DNA, 25 bp, Probe sequence
tattgacagctggattcttctttac

SEQ ID NO: 202087 - DNA, 25 bp, Probe sequence
ttatttccattataggactgtccaa

SEQ ID NO: 202088 - DNA, 25 bp, Probe sequence
ttggtggtgtacgtagtattgctac

SEQ ID NO: 202089 - DNA, 25 bp, Probe sequence
attgatcagttaaatgcagcattag

SEQ ID NO: 202090 - DNA, 25 bp, Probe sequence
atcactatccgatttgctataacac

SEQ ID NO: 202091 - DNA, 25 bp, Probe sequence
atcattacaataccaacgttttata

SEQ ID NO: 202092 - DNA, 25 bp, Probe sequence
agatgattttgtgtctatgattaaa

SEQ ID NO: 202093 - DNA, 25 bp, Probe sequence
acttgtagtttcattaacggatcat

SEQ ID NO: 202094 - DNA, 25 bp, Probe sequence
acaagtaattattgattcgttgaat

SEQ ID NO: 202095 - DNA, 25 bp, Probe sequence
aaggaatcattacaataccaacgtt

SEQ ID NO: 202096 - DNA, 25 bp, Probe sequence
aagtttagttgaaatcgctgatgat

SEQ ID NO: 202097 - DNA, 25 bp, Probe sequence
cagaccttgtgacaactgttgataa

SEQ ID NO: 202098 - DNA, 25 bp, Probe sequence
ctaatactgcgatgaatgttgattc

SEQ ID NO: 202099 - DNA, 25 bp, Probe sequence
ccatttgttatggaaactatgcagt

SEQ ID NO: 202100 - DNA, 25 bp, Probe sequence
gcagttatatagtgatgcatatcat

SEQ ID NO: 202101 - DNA, 25 bp, Probe sequence
gaattttatttctaatactgcgatg

SEQ ID NO: 202102 - DNA, 25 bp, Probe sequence
gaatcagaccttgtgacaactgttg

SEQ ID NO: 202103 - DNA, 25 bp, Probe sequence
gaacaacaatgtcgtagtatgtact

SEQ ID NO: 202104 - DNA, 25 bp, Probe sequence
gaaaagaatatatacatgcacaaga

SEQ ID NO: 202105 - DNA, 25 bp, Probe sequence
gaaatcgctgatgataatgtattac

SEQ ID NO: 202106 - DNA, 25 bp, Probe sequence
gagataggatttattgcattacata

SEQ ID NO: 202107 - DNA, 25 bp, Probe sequence
gatgaccttgatcaataatgttatt

SEQ ID NO: 202108 - DNA, 25 bp, Probe sequence
gatgcatatcatattgctaaacagg

SEQ ID NO: 202109 - DNA, 25 bp, Probe sequence
gatatcattgaatcagaccttgtga

SEQ ID NO: 202110 - DNA, 25 bp, Probe sequence
gatttatctatgcatgagatgacct

SEQ ID NO: 202111 - DNA, 25 bp, Probe sequence
gattcaaaacaacttgtagtttcat

SEQ ID NO: 202112 - DNA, 25 bp, Probe sequence
gattcgttgaattttatttctaata

SEQ ID NO: 202113 - DNA, 25 bp, Probe sequence
tccgatttgctataacacagcatat

SEQ ID NO: 202114 - DNA, 25 bp, Probe sequence
taacattacacattcatcattttga

SEQ ID NO: 202115 - DNA, 25 bp, Probe sequence
tacaatttttaattcgccgattaag

SEQ ID NO: 202116 - DNA, 25 bp, Probe sequence
tatgcatgagatgaccttgatcaat

SEQ ID NO: 202117 - DNA, 25 bp, Probe sequence
tatttaacattacacattcatcatt

SEQ ID NO: 202118 - DNA, 25 bp, Probe sequence
tatttgcttataaacgcttaaaaca

SEQ ID NO: 202119 - DNA, 25 bp, Probe sequence
ttattgcattacatattgcatctaa

SEQ ID NO: 202120 - DNA, 25 bp, Probe sequence
ttaaacgaccaaactattacaatag

SEQ ID NO: 202121 - DNA, 25 bp, Probe sequence
ttaacggatcatattatatttgctt

SEQ ID NO: 202122 - DNA, 25 bp, Probe sequence
ttgatgttaatatcagtgagtctga

SEQ ID NO: 202123 - DNA, 25 bp, Probe sequence
ataagtggactgtttttatacaaca

SEQ ID NO: 202124 - DNA, 25 bp, Probe sequence
agtggactgtttttatacaacatct

SEQ ID NO: 202125 - DNA, 25 bp, Probe sequence
agggtatttgtatggtatcattgat

SEQ ID NO: 202126 - DNA, 25 bp, Probe sequence
agtggtggtgaatctataattgaat

SEQ ID NO: 202127 - DNA, 25 bp, Probe sequence
actgtttttatacaacatcttatga

SEQ ID NO: 202128 - DNA, 25 bp, Probe sequence
aaagggtatttgtatggtatcattg

SEQ ID NO: 202129 - DNA, 25 bp, Probe sequence
aagtggactgtttttatacaacatc

SEQ ID NO: 202130 - DNA, 25 bp, Probe sequence
tattacacgggcgtttcgttactgt

SEQ ID NO: 202131 - DNA, 25 bp, Probe sequence
cataagtggactgtttttatacaac

SEQ ID NO: 202132 - DNA, 25 bp, Probe sequence
gaatattttaagtggtggtgaatct

SEQ ID NO: 202133 - DNA, 25 bp, Probe sequence
gactgtttttatacaacatcttatg

SEQ ID NO: 202134 - DNA, 25 bp, Probe sequence
gtattacacgggcgtttcgttactg

SEQ ID NO: 202135 - DNA, 25 bp, Probe sequence
gtttttatacaacatcttatgaata

SEQ ID NO: 202136 - DNA, 25 bp, Probe sequence
gtatttgtatggtatcattgatgtt

SEQ ID NO: 202137 - DNA, 25 bp, Probe sequence
gtatcattgatgttagtaattttac

SEQ ID NO: 202138 - DNA, 25 bp, Probe sequence
gtatggtatcattgatgttagtaat

SEQ ID NO: 202139 - DNA, 25 bp, Probe sequence
gtaaagggtatttgtatggtatcat

SEQ ID NO: 202140 - DNA, 25 bp, Probe sequence
gtaattttacataagtggactgttt

SEQ ID NO: 202141 - DNA, 25 bp, Probe sequence
gtggactgtttttatacaacatctt

SEQ ID NO: 202142 - DNA, 25 bp, Probe sequence
gggtatttgtatggtatcattgatg

SEQ ID NO: 202143 - DNA, 25 bp, Probe sequence
ggactgtttttatacaacatcttat

SEQ ID NO: 202144 - DNA, 25 bp, Probe sequence
tggactgtttttatacaacatctta

SEQ ID NO: 202145 - DNA, 25 bp, Probe sequence
tggtggtgaatctataattgaatga

SEQ ID NO: 202146 - DNA, 25 bp, Probe sequence
tgtattacacgggcgtttcgttact

SEQ ID NO: 202147 - DNA, 25 bp, Probe sequence
tcgttactgtaaagggtatttgtat

SEQ ID NO: 202148 - DNA, 25 bp, Probe sequence
taagtgtattacacgggcgtttcgt

SEQ ID NO: 202149 - DNA, 25 bp, Probe sequence
taatcaatcctaaattaagtgtatt

SEQ ID NO: 202150 - DNA, 25 bp, Probe sequence
taagtggtggtgaatctataattga

SEQ ID NO: 202151 - DNA, 25 bp, Probe sequence
tacataagtggactgtttttataca

SEQ ID NO: 202152 - DNA, 25 bp, Probe sequence
tatgaatattttaagtggtggtgaa

SEQ ID NO: 202153 - DNA, 25 bp, Probe sequence
tatacaacatcttatgaatatttta

SEQ ID NO: 202154 - DNA, 25 bp, Probe sequence
tattttaagtggtggtgaatctata

SEQ ID NO: 202155 - DNA, 25 bp, Probe sequence
tatttgtatggtatcattgatgtta

SEQ ID NO: 202156 - DNA, 25 bp, Probe sequence
tttacataagtggactgtttttata

SEQ ID NO: 202157 - DNA, 25 bp, Probe sequence
attctattctatctatttaacccaa

SEQ ID NO: 202158 - DNA, 25 bp, Probe sequence
atttagggcctactatagcgatttc

SEQ ID NO: 202159 - DNA, 25 bp, Probe sequence
atagctgctataacatcgccgtgga

SEQ ID NO: 202160 - DNA, 25 bp, Probe sequence
atcatcgtctctttaattctattct

SEQ ID NO: 202161 - DNA, 25 bp, Probe sequence
atcggtatactgttgtttatcggtt

SEQ ID NO: 202162 - DNA, 25 bp, Probe sequence
atcgccgtggatgctcttaaaatta

SEQ ID NO: 202163 - DNA, 25 bp, Probe sequence
atcgtttcattctgtatcggtatac

SEQ ID NO: 202164 - DNA, 25 bp, Probe sequence
agcaaataatacgtttttctcttcg

SEQ ID NO: 202165 - DNA, 25 bp, Probe sequence
accatttgtactattctttatgctt

SEQ ID NO: 202166 - DNA, 25 bp, Probe sequence
aaggacaaattatcgtttcattctg

SEQ ID NO: 202167 - DNA, 25 bp, Probe sequence
aatattatgccaccgaaattccgaa

SEQ ID NO: 202168 - DNA, 25 bp, Probe sequence
aattgcttggtattgtaggcgttat

SEQ ID NO: 202169 - DNA, 25 bp, Probe sequence
cgattgctaatattggcgttgtgat

SEQ ID NO: 202170 - DNA, 25 bp, Probe sequence
gaagggcacttcatttcaccaaata

SEQ ID NO: 202171 - DNA, 25 bp, Probe sequence
gagttgcaggtatttctattattta

SEQ ID NO: 202172 - DNA, 25 bp, Probe sequence
gatggacatcacttcaaagaatttt

SEQ ID NO: 202173 - DNA, 25 bp, Probe sequence
gatacctattattggttcgcaagta

SEQ ID NO: 202174 - DNA, 25 bp, Probe sequence
gatagcagcacctatcatcgtctct

SEQ ID NO: 202175 - DNA, 25 bp, Probe sequence
gttaaaaattcaccgcaatatctag

SEQ ID NO: 202176 - DNA, 25 bp, Probe sequence
gtttttgatccttttatcatcgttt

SEQ ID NO: 202177 - DNA, 25 bp, Probe sequence
gtttttctcttcgtattatagtcaa

SEQ ID NO: 202178 - DNA, 25 bp, Probe sequence
gtattagttactcatttattccaat

SEQ ID NO: 202179 - DNA, 25 bp, Probe sequence
gtaaaacacttaagattcatccact

SEQ ID NO: 202180 - DNA, 25 bp, Probe sequence
gtgaatttacagatggctttgggtc

SEQ ID NO: 202181 - DNA, 25 bp, Probe sequence
gtcgatacaatcgtttctatggtaa

SEQ ID NO: 202182 - DNA, 25 bp, Probe sequence
gtgattgtcacaacaccatttgtac

SEQ ID NO: 202183 - DNA, 25 bp, Probe sequence
ggtattccgggatatgctattttaa

SEQ ID NO: 202184 - DNA, 25 bp, Probe sequence
ggctttgggtctaaaattgcaacgt

SEQ ID NO: 202185 - DNA, 25 bp, Probe sequence
tggtgggaatgatttagtcttctca

SEQ ID NO: 202186 - DNA, 25 bp, Probe sequence
tgtaggcgttattttaggtattccg

SEQ ID NO: 202187 - DNA, 25 bp, Probe sequence
tgagtgttcaagttggttcatacat

SEQ ID NO: 202188 - DNA, 25 bp, Probe sequence
tatcggttattcggttatcgggttg

SEQ ID NO: 202189 - DNA, 25 bp, Probe sequence
tactgtgtgcaggcaaattgcttgg

SEQ ID NO: 202190 - DNA, 25 bp, Probe sequence
ttcatccacttacaatcattttcat

SEQ ID NO: 202191 - DNA, 25 bp, Probe sequence
attacgtcgttataaatctaaatat

SEQ ID NO: 202192 - DNA, 25 bp, Probe sequence
attattgaaccaccgttttcaactg

SEQ ID NO: 202193 - DNA, 25 bp, Probe sequence
atcgtaaagataattcgctttggga

SEQ ID NO: 202194 - DNA, 25 bp, Probe sequence
atcgtcaggaaatgcatttctctgt

SEQ ID NO: 202195 - DNA, 25 bp, Probe sequence
agatggttgccagagttagatttac

SEQ ID NO: 202196 - DNA, 25 bp, Probe sequence
acatgcctttatatcataatttcgg

SEQ ID NO: 202197 - DNA, 25 bp, Probe sequence
aacgccgtggatttagagcgacttt

SEQ ID NO: 202198 - DNA, 25 bp, Probe sequence
aacatactttaatgatgccatttca

SEQ ID NO: 202199 - DNA, 25 bp, Probe sequence
gaagcattctataattacgctgagt

SEQ ID NO: 202200 - DNA, 25 bp, Probe sequence
gaaaatgcctttgatgaattgttag

SEQ ID NO: 202201 - DNA, 25 bp, Probe sequence
gatgtgattttatctagagctttaa

SEQ ID NO: 202202 - DNA, 25 bp, Probe sequence
gatgccatttcagtcgatttaatta

SEQ ID NO: 202203 - DNA, 25 bp, Probe sequence
gatcaacacatgcctttatatcata

SEQ ID NO: 202204 - DNA, 25 bp, Probe sequence
gttggtcaattgcattattcatatt

SEQ ID NO: 202205 - DNA, 25 bp, Probe sequence
gttacagatcaacacatgcctttat

SEQ ID NO: 202206 - DNA, 25 bp, Probe sequence
gttatcgaacgttggtcaattgcat

SEQ ID NO: 202207 - DNA, 25 bp, Probe sequence
gttatattctatcaagttacagatc

SEQ ID NO: 202208 - DNA, 25 bp, Probe sequence
gtttgctacagctttatttattttt

SEQ ID NO: 202209 - DNA, 25 bp, Probe sequence
gtaatgcgtgtaatacgtcacaaat

SEQ ID NO: 202210 - DNA, 25 bp, Probe sequence
gtcgatttaattagatggttgccag

SEQ ID NO: 202211 - DNA, 25 bp, Probe sequence
gtgtctttgaacatttcaacggtct

SEQ ID NO: 202212 - DNA, 25 bp, Probe sequence
tgtagtttaatgccaacatacttta

SEQ ID NO: 202213 - DNA, 25 bp, Probe sequence
taatccgaattgggaaccacgcttt

SEQ ID NO: 202214 - DNA, 25 bp, Probe sequence
tgaaccaccgttttcaactgaattt

SEQ ID NO: 202215 - DNA, 25 bp, Probe sequence
tcaacttcaggtaaaaaacgccgtg

SEQ ID NO: 202216 - DNA, 25 bp, Probe sequence
taaaaattacgtttgctacagcttt

SEQ ID NO: 202217 - DNA, 25 bp, Probe sequence
tatcgtttccaaggattacgtcgtt

SEQ ID NO: 202218 - DNA, 25 bp, Probe sequence
tatgggtatggcaacgttatcgaac

SEQ ID NO: 202219 - DNA, 25 bp, Probe sequence
tttattggtggtggggcatcgcttg

SEQ ID NO: 202220 - DNA, 25 bp, Probe sequence
ttaggctatgatgttatattctatc

SEQ ID NO: 202221 - DNA, 25 bp, Probe sequence
ttacgctgagtatttaggctatgat

SEQ ID NO: 202222 - DNA, 25 bp, Probe sequence
ttcaacggtctatatcgtttccaag

SEQ ID NO: 202223 - DNA, 25 bp, Probe sequence
ttaacgcaattttcaacttcaggta

SEQ ID NO: 202224 - DNA, 25 bp, Probe sequence
ttcgctttgggaatcactttctaaa

SEQ ID NO: 202225 - DNA, 25 bp, Probe sequence
attccgtcacgaccctgaaggtgac

SEQ ID NO: 202226 - DNA, 25 bp, Probe sequence
atagacgtcaaagtgaacatcgcac

SEQ ID NO: 202227 - DNA, 25 bp, Probe sequence
atactgatggtagtgcattacagat

SEQ ID NO: 202228 - DNA, 25 bp, Probe sequence
atcatggttgttcaatatgacttta

SEQ ID NO: 202229 - DNA, 25 bp, Probe sequence
agtacatcaatttaatggaccagta

SEQ ID NO: 202230 - DNA, 25 bp, Probe sequence
agcacaaggtggacaatcaagaaca

SEQ ID NO: 202231 - DNA, 25 bp, Probe sequence
acagattctatcatggttgttcaat

SEQ ID NO: 202232 - DNA, 25 bp, Probe sequence
acacaaaattaattcagcatacgct

SEQ ID NO: 202233 - DNA, 25 bp, Probe sequence
acaatagcggtgtagaatatgccaa

SEQ ID NO: 202234 - DNA, 25 bp, Probe sequence
aaattacctatcattcttctgattg

SEQ ID NO: 202235 - DNA, 25 bp, Probe sequence
aaatttctattcttgtactcggtgc

SEQ ID NO: 202236 - DNA, 25 bp, Probe sequence
caaagtgaacatcgcacttcggcgc

SEQ ID NO: 202237 - DNA, 25 bp, Probe sequence
cgcacttcggcgcctaagcgaaaaa

SEQ ID NO: 202238 - DNA, 25 bp, Probe sequence
gaatatgccaagaaacatgcgaaag

SEQ ID NO: 202239 - DNA, 25 bp, Probe sequence
gaatacaaacattcctgattcaggg

SEQ ID NO: 202240 - DNA, 25 bp, Probe sequence
gaaggtgtaccaattaatgtcgaaa

SEQ ID NO: 202241 - DNA, 25 bp, Probe sequence
gaactcatacgaagatgtcaataca

SEQ ID NO: 202242 - DNA, 25 bp, Probe sequence
gaaaatgatgtctgtcatgcgtgat

SEQ ID NO: 202243 - DNA, 25 bp, Probe sequence
gactgtgccaatcaagaactcatac

SEQ ID NO: 202244 - DNA, 25 bp, Probe sequence
gacgcgtgcgacgtcagcaacaagt

SEQ ID NO: 202245 - DNA, 25 bp, Probe sequence
gatgtctgtcatgcgtgatatttat

SEQ ID NO: 202246 - DNA, 25 bp, Probe sequence
gttgtaattttacttatcgcattag

SEQ ID NO: 202247 - DNA, 25 bp, Probe sequence
gtagttgattttactggatttgaga

SEQ ID NO: 202248 - DNA, 25 bp, Probe sequence
gtcgaaaaatattggtgtatctttg

SEQ ID NO: 202249 - DNA, 25 bp, Probe sequence
gtgatatttatgcagatattccagg

SEQ ID NO: 202250 - DNA, 25 bp, Probe sequence
tgaaggtgacttcggacgcgtgcga

SEQ ID NO: 202251 - DNA, 25 bp, Probe sequence
tggttatgcaagattccgtcacgac

SEQ ID NO: 202252 - DNA, 25 bp, Probe sequence
tcattcttctgattgttgtaatttt

SEQ ID NO: 202253 - DNA, 25 bp, Probe sequence
taatcctgaatattatgcagtagtt

SEQ ID NO: 202254 - DNA, 25 bp, Probe sequence
taagtcattgactgtgccaatcaag

SEQ ID NO: 202255 - DNA, 25 bp, Probe sequence
tacttatcgcattagttgtatatat

SEQ ID NO: 202256 - DNA, 25 bp, Probe sequence
ttcagcatacgctttaggtggtcca

SEQ ID NO: 202257 - DNA, 25 bp, Probe sequence
ttcttgtactcggtgcagataaagc

SEQ ID NO: 202258 - DNA, 25 bp, Probe sequence
ttgcaggtattttaagaggctatgt

SEQ ID NO: 202259 - DNA, 25 bp, Probe sequence
attacttaacacatcaatctatgat

SEQ ID NO: 202260 - DNA, 25 bp, Probe sequence
atagacacacctaatgttgcaactg

SEQ ID NO: 202261 - DNA, 25 bp, Probe sequence
agtccgattctgttaattacagcat

SEQ ID NO: 202262 - DNA, 25 bp, Probe sequence
agatcaatgaaaatagacacaccta

SEQ ID NO: 202263 - DNA, 25 bp, Probe sequence
agcgattattcgatgtagtgagttc

SEQ ID NO: 202264 - DNA, 25 bp, Probe sequence
acaaagacagggaaggtcattcgta

SEQ ID NO: 202265 - DNA, 25 bp, Probe sequence
acctctattgatgaattgccacaat

SEQ ID NO: 202266 - DNA, 25 bp, Probe sequence
acgtgcatacgattagaccaggtgt

SEQ ID NO: 202267 - DNA, 25 bp, Probe sequence
aaaagaccgacgattaataatgaat

SEQ ID NO: 202268 - DNA, 25 bp, Probe sequence
aattgtaggtcctagaccagcgctt

SEQ ID NO: 202269 - DNA, 25 bp, Probe sequence
caatctatgatgcttgatatgtata

SEQ ID NO: 202270 - DNA, 25 bp, Probe sequence
caaaaagtagcgtatgatcattatt

SEQ ID NO: 202271 - DNA, 25 bp, Probe sequence
cacacctaatgttgcaactgattta

SEQ ID NO: 202272 - DNA, 25 bp, Probe sequence
cagcgctttataatcaatacgaatt

SEQ ID NO: 202273 - DNA, 25 bp, Probe sequence
ctagctcaagtgatggggagagatg

SEQ ID NO: 202274 - DNA, 25 bp, Probe sequence
cctagaccagcgctttataatcaat

SEQ ID NO: 202275 - DNA, 25 bp, Probe sequence
gaattgccacaattattgaatgttt

SEQ ID NO: 202276 - DNA, 25 bp, Probe sequence
gaacgtgcatacgattagaccaggt

SEQ ID NO: 202277 - DNA, 25 bp, Probe sequence
gacacacctaatgttgcaactgatt

SEQ ID NO: 202278 - DNA, 25 bp, Probe sequence
gaccagcgctttataatcaatacga

SEQ ID NO: 202279 - DNA, 25 bp, Probe sequence
gaccagccattttcaaacaaaaaag

SEQ ID NO: 202280 - DNA, 25 bp, Probe sequence
gagaaatgtcaattgtaggtcctag

SEQ ID NO: 202281 - DNA, 25 bp, Probe sequence
gagttcaatatatggtttagtagtt

SEQ ID NO: 202282 - DNA, 25 bp, Probe sequence
gatcattattacttaacacatcaat

SEQ ID NO: 202283 - DNA, 25 bp, Probe sequence
gattattcgatgtagtgagttcaat

SEQ ID NO: 202284 - DNA, 25 bp, Probe sequence
gattctgttaattacagcattacta

SEQ ID NO: 202285 - DNA, 25 bp, Probe sequence
gttgcaactgatttaatggattcaa

SEQ ID NO: 202286 - DNA, 25 bp, Probe sequence
tgtaggtcctagaccagcgctttat

SEQ ID NO: 202287 - DNA, 25 bp, Probe sequence
gtagcgtatgatcattattacttaa

SEQ ID NO: 202288 - DNA, 25 bp, Probe sequence
gtcctagaccagcgctttataatca

SEQ ID NO: 202289 - DNA, 25 bp, Probe sequence
tagtagttttaagtccgattctgtt

SEQ ID NO: 202290 - DNA, 25 bp, Probe sequence
taggtcctagaccagcgctttataa

SEQ ID NO: 202291 - DNA, 25 bp, Probe sequence
tttaagtccgattctgttaattaca

SEQ ID NO: 202292 - DNA, 25 bp, Probe sequence
ttacttcagaaggtgtgcatcacta

SEQ ID NO: 202293 - DNA, 25 bp, Probe sequence
attccacctgaagatttacaccaat

SEQ ID NO: 202294 - DNA, 25 bp, Probe sequence
atcgtcgaacagaagccaaattgaa

SEQ ID NO: 202295 - DNA, 25 bp, Probe sequence
aggcatttattgtactgtgggcatt

SEQ ID NO: 202296 - DNA, 25 bp, Probe sequence
aggtgttgatatgcatctacatgcg

SEQ ID NO: 202297 - DNA, 25 bp, Probe sequence
agatactaagcgtcagggttctgta

SEQ ID NO: 202298 - DNA, 25 bp, Probe sequence
agagttcggtattttaggtgttgat

SEQ ID NO: 202299 - DNA, 25 bp, Probe sequence
agcaatccatcgatatgcaaaagtc

SEQ ID NO: 202300 - DNA, 25 bp, Probe sequence
agcagtatcgtttacagaagcaggt

SEQ ID NO: 202301 - DNA, 25 bp, Probe sequence
acattatcaatccaagtatgcgtaa

SEQ ID NO: 202302 - DNA, 25 bp, Probe sequence
acaagcactatatcgtacgctaagt

SEQ ID NO: 202303 - DNA, 25 bp, Probe sequence
aaaggggctagatccattagaaaca

SEQ ID NO: 202304 - DNA, 25 bp, Probe sequence
aagatgttgctagcagagttcgagc

SEQ ID NO: 202305 - DNA, 25 bp, Probe sequence
aatggtatagctgaatggcgatatc

SEQ ID NO: 202306 - DNA, 25 bp, Probe sequence
aatggcgatatcaagatgtaccaac

SEQ ID NO: 202307 - DNA, 25 bp, Probe sequence
gctgttgttgcagatactaagcgtc

SEQ ID NO: 202308 - DNA, 25 bp, Probe sequence
gctatttctaagattgcattgcgtt

SEQ ID NO: 202309 - DNA, 25 bp, Probe sequence
gaataccaacgcaaacgtgacgaat

SEQ ID NO: 202310 - DNA, 25 bp, Probe sequence
gaacgatacattttgcctttggcta

SEQ ID NO: 202311 - DNA, 25 bp, Probe sequence
gacgaattttttatggatgttactg

SEQ ID NO: 202312 - DNA, 25 bp, Probe sequence
gatgagcgacagttaagtctgtttg

SEQ ID NO: 202313 - DNA, 25 bp, Probe sequence
gattaggtttaatggctggacataa

SEQ ID NO: 202314 - DNA, 25 bp, Probe sequence
gttctacagtacatgcattttgcga

SEQ ID NO: 202315 - DNA, 25 bp, Probe sequence
gtttttttgcgagtgtttcttgtat

SEQ ID NO: 202316 - DNA, 25 bp, Probe sequence
gtatgcgtaaatatcttaatgtttc

SEQ ID NO: 202317 - DNA, 25 bp, Probe sequence
gtactgtgggcattggttctaatat

SEQ ID NO: 202318 - DNA, 25 bp, Probe sequence
gtacgctaagtatatctttgagtca

SEQ ID NO: 202319 - DNA, 25 bp, Probe sequence
ggtattgtgtccaaagcagtatcgt

SEQ ID NO: 202320 - DNA, 25 bp, Probe sequence
tgcattgcgttatattccacctgaa

SEQ ID NO: 202321 - DNA, 25 bp, Probe sequence
tcgcgattgtttgaaataccacata

SEQ ID NO: 202322 - DNA, 25 bp, Probe sequence
tatggatgttactgatagctatcat

SEQ ID NO: 202323 - DNA, 25 bp, Probe sequence
tattggctgcgacacctaaattaaa

SEQ ID NO: 202324 - DNA, 25 bp, Probe sequence
ttttggggtattaatcgtcgaacag

SEQ ID NO: 202325 - DNA, 25 bp, Probe sequence
tttgcctttggctatagtgatgaag

SEQ ID NO: 202326 - DNA, 25 bp, Probe sequence
ttaatgtttcagttgctatttctaa

SEQ ID NO: 202327 - DNA, 25 bp, Probe sequence
attatggttcagatgcttcagcagc

SEQ ID NO: 202328 - DNA, 25 bp, Probe sequence
attttgttagctttgatccacgtac

SEQ ID NO: 202329 - DNA, 25 bp, Probe sequence
atagtccttcaggagacacagaaga

SEQ ID NO: 202330 - DNA, 25 bp, Probe sequence
atacagtttctatttgtgccaaaga

SEQ ID NO: 202331 - DNA, 25 bp, Probe sequence
atgcatattgcttatcaccaattga

SEQ ID NO: 202332 - DNA, 25 bp, Probe sequence
agatgcttcagcagctttacatgct

SEQ ID NO: 202333 - DNA, 25 bp, Probe sequence
agacttgggttatcaaacaacacta

SEQ ID NO: 202334 - DNA, 25 bp, Probe sequence
agacatggtttatttggcgctggca

SEQ ID NO: 202335 - DNA, 25 bp, Probe sequence
acgcgattgagggtgaatattgcca

SEQ ID NO: 202336 - DNA, 25 bp, Probe sequence
acgctgtattactgctcatgttgat

SEQ ID NO: 202337 - DNA, 25 bp, Probe sequence
acaacgcaattttatatttctaata

SEQ ID NO: 202338 - DNA, 25 bp, Probe sequence
aaataggttacggtgcaaatgcatc

SEQ ID NO: 202339 - DNA, 25 bp, Probe sequence
aacaggtattaatagtccttcagga

SEQ ID NO: 202340 - DNA, 25 bp, Probe sequence
aactgatgctggtcaaatatataca

SEQ ID NO: 202341 - DNA, 25 bp, Probe sequence
aatattaccacatacaacgcaattt

SEQ ID NO: 202342 - DNA, 25 bp, Probe sequence
cacctagttaatctttgcaaaataa

SEQ ID NO: 202343 - DNA, 25 bp, Probe sequence
caggttttattaaatctcgtcattt

SEQ ID NO: 202344 - DNA, 25 bp, Probe sequence
cggtgcaaatgcatcaattgattcg

SEQ ID NO: 202345 - DNA, 25 bp, Probe sequence
gcgcgttgggagacggtcaagcatc

SEQ ID NO: 202346 - DNA, 25 bp, Probe sequence
gcgacagagaaattactatatgcat

SEQ ID NO: 202347 - DNA, 25 bp, Probe sequence
gctggtgcggatatcagacatggtt

SEQ ID NO: 202348 - DNA, 25 bp, Probe sequence
gctcatgttgatactttaggtgcaa

SEQ ID NO: 202349 - DNA, 25 bp, Probe sequence
gcattagatatgggcgcgttgggag

SEQ ID NO: 202350 - DNA, 25 bp, Probe sequence
gctttacatgctggtgcggatatca

SEQ ID NO: 202351 - DNA, 25 bp, Probe sequence
gaatcatctcatgcaatggaacgaa

SEQ ID NO: 202352 - DNA, 25 bp, Probe sequence
gaagaagcaattcaatttgtcgaaa

SEQ ID NO: 202353 - DNA, 25 bp, Probe sequence
gatccacgtacagttatcacgtcat

SEQ ID NO: 202354 - DNA, 25 bp, Probe sequence
gttatcacgtcatcaggttttatta

SEQ ID NO: 202355 - DNA, 25 bp, Probe sequence
gttattaataacagtgccaggcaaa

SEQ ID NO: 202356 - DNA, 25 bp, Probe sequence
gtacaacgctgtattactgctcatg

SEQ ID NO: 202357 - DNA, 25 bp, Probe sequence
ggaggattcacgtataacgcgattg

SEQ ID NO: 202358 - DNA, 25 bp, Probe sequence
ggaacgaacacatattgattctatt

SEQ ID NO: 202359 - DNA, 25 bp, Probe sequence
ggcgctggcattgaatcatctcatg

SEQ ID NO: 202360 - DNA, 25 bp, Probe sequence
ttcaggtccatatcataagcaattg

SEQ ID NO: 202361 - DNA, 25 bp, Probe sequence
atttacaaatatgcgcatcatgcta

SEQ ID NO: 202362 - DNA, 25 bp, Probe sequence
atatctggatatgttgggacgtgta

SEQ ID NO: 202363 - DNA, 25 bp, Probe sequence
atatgaaacaactacttaatgatcc

SEQ ID NO: 202364 - DNA, 25 bp, Probe sequence
aaatcagatcttgagaatcgagtta

SEQ ID NO: 202365 - DNA, 25 bp, Probe sequence
aacgacaaaacccaagtccatatat

SEQ ID NO: 202366 - DNA, 25 bp, Probe sequence
aacccaagtccatatatgtattatc

SEQ ID NO: 202367 - DNA, 25 bp, Probe sequence
caacaggtaccgtttcaggtgcacc

SEQ ID NO: 202368 - DNA, 25 bp, Probe sequence
caagttgtgccatcaagaatttaca

SEQ ID NO: 202369 - DNA, 25 bp, Probe sequence
caaccattcatgcctacacaagatt

SEQ ID NO: 202370 - DNA, 25 bp, Probe sequence
catgcctacacaagattttgatttt

SEQ ID NO: 202371 - DNA, 25 bp, Probe sequence
gcacaacttcattccaagaagatca

SEQ ID NO: 202372 - DNA, 25 bp, Probe sequence
gaagacttaactaaaatccaaccat

SEQ ID NO: 202373 - DNA, 25 bp, Probe sequence
gaagactaccataatattcaagatg

SEQ ID NO: 202374 - DNA, 25 bp, Probe sequence
gaacgatgatgatagatgagcagta

SEQ ID NO: 202375 - DNA, 25 bp, Probe sequence
gaacatgttatgcatatcgtaagtg

SEQ ID NO: 202376 - DNA, 25 bp, Probe sequence
gaacaagtttatgtatttgaccatt

SEQ ID NO: 202377 - DNA, 25 bp, Probe sequence
gaaagtttcgtaagtgtcaaagatc

SEQ ID NO: 202378 - DNA, 25 bp, Probe sequence
gacatgaatttcctaaattgcaatc

SEQ ID NO: 202379 - DNA, 25 bp, Probe sequence
gacagttattgcgaatttattacca

SEQ ID NO: 202380 - DNA, 25 bp, Probe sequence
gagcagtatatcaacgtagaagctg

SEQ ID NO: 202381 - DNA, 25 bp, Probe sequence
gagttatatatcatcgcgacgaatc

SEQ ID NO: 202382 - DNA, 25 bp, Probe sequence
gattcaacgtggtgagacgacacaa

SEQ ID NO: 202383 - DNA, 25 bp, Probe sequence
gttgtatatgattctattcctgaaa

SEQ ID NO: 202384 - DNA, 25 bp, Probe sequence
gttttagcacaacttcattccaaga

SEQ ID NO: 202385 - DNA, 25 bp, Probe sequence
gtttcaggtgcaccaaaattacgtg

SEQ ID NO: 202386 - DNA, 25 bp, Probe sequence
gggacgtgtagctttgatttagtaa

SEQ ID NO: 202387 - DNA, 25 bp, Probe sequence
ggtaccgtttcaggtgcaccaaaat

SEQ ID NO: 202388 - DNA, 25 bp, Probe sequence
ggcgtttatagtggtggtgttggat

SEQ ID NO: 202389 - DNA, 25 bp, Probe sequence
tgtaacaactaatcctattgcaggt

SEQ ID NO: 202390 - DNA, 25 bp, Probe sequence
tgtattatcttaatatcgatcaacc

SEQ ID NO: 202391 - DNA, 25 bp, Probe sequence
tcctattgcaggtacgattcaacgt

SEQ ID NO: 202392 - DNA, 25 bp, Probe sequence
tcatcgcgacgaatcaattttcaaa

SEQ ID NO: 202393 - DNA, 25 bp, Probe sequence
taaaatccaaccattcatgcctaca

SEQ ID NO: 202394 - DNA, 25 bp, Probe sequence
ttgcgaatttattaccaacaggtac

SEQ ID NO: 202395 - DNA, 25 bp, Probe sequence
atataactacgctatatcgcaaaat

SEQ ID NO: 202396 - DNA, 25 bp, Probe sequence
atgacttacctgaacgagatttatc

SEQ ID NO: 202397 - DNA, 25 bp, Probe sequence
acctgaacgagatttatcgcaacaa

SEQ ID NO: 202398 - DNA, 25 bp, Probe sequence
acttttacaaaatggctattatcaa

SEQ ID NO: 202399 - DNA, 25 bp, Probe sequence
acaagctggtgcatctatgatttta

SEQ ID NO: 202400 - DNA, 25 bp, Probe sequence
aaatcgaagagtcctacagttaatg

SEQ ID NO: 202401 - DNA, 25 bp, Probe sequence
aaacaagctggtgcatctatgattt

SEQ ID NO: 202402 - DNA, 25 bp, Probe sequence
aaaacaacattacccgtattatgca

SEQ ID NO: 202403 - DNA, 25 bp, Probe sequence
aatggctattatcaagacaaactta

SEQ ID NO: 202404 - DNA, 25 bp, Probe sequence
caacattacccgtattatgcaaaga

SEQ ID NO: 202405 - DNA, 25 bp, Probe sequence
ctaataggtgaggcgcttatgcgtt

SEQ ID NO: 202406 - DNA, 25 bp, Probe sequence
gcgttgtgacaatctatctgaattt

SEQ ID NO: 202407 - DNA, 25 bp, Probe sequence
gaattagaacgtgcctataaggtta

SEQ ID NO: 202408 - DNA, 25 bp, Probe sequence
gaaccaaagctagcaattattgcag

SEQ ID NO: 202409 - DNA, 25 bp, Probe sequence
gaacgtgcctataaggttaatgcta

SEQ ID NO: 202410 - DNA, 25 bp, Probe sequence
gaaaaatcttgcatagtggtatcga

SEQ ID NO: 202411 - DNA, 25 bp, Probe sequence
gaaattaaatcgaagagtcctacag

SEQ ID NO: 202412 - DNA, 25 bp, Probe sequence
gacaaacttaataccttgaaaagtg

SEQ ID NO: 202413 - DNA, 25 bp, Probe sequence
gacaatctatctgaatttttaccac

SEQ ID NO: 202414 - DNA, 25 bp, Probe sequence
gagaaagaaccaaagctagcaatta

SEQ ID NO: 202415 - DNA, 25 bp, Probe sequence
gatggcttactaataggtgaggcgc

SEQ ID NO: 202416 - DNA, 25 bp, Probe sequence
gattggtgtaaataacagggactta

SEQ ID NO: 202417 - DNA, 25 bp, Probe sequence
gtcctacagttaatgacttacctga

SEQ ID NO: 202418 - DNA, 25 bp, Probe sequence
gtggtagttttgaaagattacaagc

SEQ ID NO: 202419 - DNA, 25 bp, Probe sequence
gtggtatcgatggcttactaatagg

SEQ ID NO: 202420 - DNA, 25 bp, Probe sequence
gtggaacatacaaatactattttag

SEQ ID NO: 202421 - DNA, 25 bp, Probe sequence
ggtgaggcgcttatgcgttgtgaca

SEQ ID NO: 202422 - DNA, 25 bp, Probe sequence
ggttaatgctaaattgattggtgta

SEQ ID NO: 202423 - DNA, 25 bp, Probe sequence
ggcgcttatgcgttgtgacaatcta

SEQ ID NO: 202424 - DNA, 25 bp, Probe sequence
tgaaagatttatataactacgctat

SEQ ID NO: 202425 - DNA, 25 bp, Probe sequence
tgcatagtggtatcgatggcttact

SEQ ID NO: 202426 - DNA, 25 bp, Probe sequence
tatctgaatttttaccacaactgaa

SEQ ID NO: 202427 - DNA, 25 bp, Probe sequence
tttatcgcaacaaatctcagattat

SEQ ID NO: 202428 - DNA, 25 bp, Probe sequence
ttaccacaactgaaaatgcaaaagg

SEQ ID NO: 202429 - DNA, 25 bp, Probe sequence
ctcagtgtcgtatggtggtaccggt

SEQ ID NO: 202430 - DNA, 25 bp, Probe sequence
attgatgcgataggtttcatccatt

SEQ ID NO: 202431 - DNA, 25 bp, Probe sequence
agtgtcgtatggtggtaccggtcaa

SEQ ID NO: 202432 - DNA, 25 bp, Probe sequence
atgcgataggtttcatccattatga

SEQ ID NO: 202433 - DNA, 25 bp, Probe sequence
atgttacagcggccagtcaattacc

SEQ ID NO: 202434 - DNA, 25 bp, Probe sequence
atggtggtaccggtcaaacatatga

SEQ ID NO: 202435 - DNA, 25 bp, Probe sequence
agttacacggcacagaatctattga

SEQ ID NO: 202436 - DNA, 25 bp, Probe sequence
agctgcagatgaaaacataatccaa

SEQ ID NO: 202437 - DNA, 25 bp, Probe sequence
acagttacacggcacagaatctatt

SEQ ID NO: 202438 - DNA, 25 bp, Probe sequence
acacaatacagttacacggcacaga

SEQ ID NO: 202439 - DNA, 25 bp, Probe sequence
aaaggcatcaaacaattacccaaat

SEQ ID NO: 202440 - DNA, 25 bp, Probe sequence
aaaaaagttagcgtctgctgttcca

SEQ ID NO: 202441 - DNA, 25 bp, Probe sequence
aacatatgactggactattttgaag

SEQ ID NO: 202442 - DNA, 25 bp, Probe sequence
aaggatgttacagcggccagtcaat

SEQ ID NO: 202443 - DNA, 25 bp, Probe sequence
aatacagttacacggcacagaatct

SEQ ID NO: 202444 - DNA, 25 bp, Probe sequence
ccctcagtgtcgtatggtggtaccg

SEQ ID NO: 202445 - DNA, 25 bp, Probe sequence
gccagtcaattacctattgatgcga

SEQ ID NO: 202446 - DNA, 25 bp, Probe sequence
gcggccagtcaattacctattgatg

SEQ ID NO: 202447 - DNA, 25 bp, Probe sequence
tcaggtatagaagtaaatgggcgaa

SEQ ID NO: 202448 - DNA, 25 bp, Probe sequence
gaatctattgattttatacaggaaa

SEQ ID NO: 202449 - DNA, 25 bp, Probe sequence
gaaaacataatccaaaacataaata

SEQ ID NO: 202450 - DNA, 25 bp, Probe sequence
gaaattgaaattttgtggctttaca

SEQ ID NO: 202451 - DNA, 25 bp, Probe sequence
gttacagcggccagtcaattaccta

SEQ ID NO: 202452 - DNA, 25 bp, Probe sequence
gtcgtatggtggtaccggtcaaaca

SEQ ID NO: 202453 - DNA, 25 bp, Probe sequence
ggtggtaccggtcaaacatatgact

SEQ ID NO: 202454 - DNA, 25 bp, Probe sequence
gggttcgtagatttatttattatcg

SEQ ID NO: 202455 - DNA, 25 bp, Probe sequence
ggatgttacagcggccagtcaatta

SEQ ID NO: 202456 - DNA, 25 bp, Probe sequence
ggcatcaaacaattacccaaataaa

SEQ ID NO: 202457 - DNA, 25 bp, Probe sequence
tgatcttgcatcaggtatagaagta

SEQ ID NO: 202458 - DNA, 25 bp, Probe sequence
tgaaattttgtggctttacatcaat

SEQ ID NO: 202459 - DNA, 25 bp, Probe sequence
tcgtagatttatttattatcgacac

SEQ ID NO: 202460 - DNA, 25 bp, Probe sequence
tacagcggccagtcaattacctatt

SEQ ID NO: 202461 - DNA, 25 bp, Probe sequence
taaagctttagctgcagatgaaaac

SEQ ID NO: 202462 - DNA, 25 bp, Probe sequence
tacacggcacagaatctattgattt

SEQ ID NO: 202463 - DNA, 25 bp, Probe sequence
atttctggacgtggcgataaagata

SEQ ID NO: 202464 - DNA, 25 bp, Probe sequence
ataatgcgttaggtcaagcgttgct

SEQ ID NO: 202465 - DNA, 25 bp, Probe sequence
atggaacttgttgtctttatgggaa

SEQ ID NO: 202466 - DNA, 25 bp, Probe sequence
aggatctaaatcatacaggcgccca

SEQ ID NO: 202467 - DNA, 25 bp, Probe sequence
agagcgaggtcttgcaaatgactaa

SEQ ID NO: 202468 - DNA, 25 bp, Probe sequence
agcagatgaattaggtttctttggt

SEQ ID NO: 202469 - DNA, 25 bp, Probe sequence
acggttgctgcattatttgatatgg

SEQ ID NO: 202470 - DNA, 25 bp, Probe sequence
aagcagacccagagtttcaaagaga

SEQ ID NO: 202471 - DNA, 25 bp, Probe sequence
aagaggcaaaagcagacccagagtt

SEQ ID NO: 202472 - DNA, 25 bp, Probe sequence
aatcatacaggcgcccataaaatta

SEQ ID NO: 202473 - DNA, 25 bp, Probe sequence
ccacgacattggtagagtaactttt

SEQ ID NO: 202474 - DNA, 25 bp, Probe sequence
gcaggacttgattatcctggtattg

SEQ ID NO: 202475 - DNA, 25 bp, Probe sequence
gcacattctatttcagcaggacttg

SEQ ID NO: 202476 - DNA, 25 bp, Probe sequence
gcaatcggtacattttatccattta

SEQ ID NO: 202477 - DNA, 25 bp, Probe sequence
gcaattggcaaaggatcacctggcg

SEQ ID NO: 202478 - DNA, 25 bp, Probe sequence
gaatgctttaatcaactttacaaaa

SEQ ID NO: 202479 - DNA, 25 bp, Probe sequence
gaacattcttattaccacgacattg

SEQ ID NO: 202480 - DNA, 25 bp, Probe sequence
gaaagaaggtcgacttccggatgca

SEQ ID NO: 202481 - DNA, 25 bp, Probe sequence
gactagcgcctacgatgtcgaaaga

SEQ ID NO: 202482 - DNA, 25 bp, Probe sequence
gatcacctggcgtattacatggtac

SEQ ID NO: 202483 - DNA, 25 bp, Probe sequence
gatactgataaacatgcacttgcaa

SEQ ID NO: 202484 - DNA, 25 bp, Probe sequence
gttccagaaacattaatgccagcaa

SEQ ID NO: 202485 - DNA, 25 bp, Probe sequence
gtcgacttccggatgcaattgtagc

SEQ ID NO: 202486 - DNA, 25 bp, Probe sequence
gttatgttgaaagactagcgcctac

SEQ ID NO: 202487 - DNA, 25 bp, Probe sequence
gtagcatgtatcggtggtggctcaa

SEQ ID NO: 202488 - DNA, 25 bp, Probe sequence
gtgcacatgcactgagttatgttga

SEQ ID NO: 202489 - DNA, 25 bp, Probe sequence
gtgttgaagccgcaggtcaaggcga

SEQ ID NO: 202490 - DNA, 25 bp, Probe sequence
gtggtggctcaaatgcaatcggtac

SEQ ID NO: 202491 - DNA, 25 bp, Probe sequence
gggcaagtgcaactagcacattcta

SEQ ID NO: 202492 - DNA, 25 bp, Probe sequence
ggtgcgggtcaacatggtgtagcta

SEQ ID NO: 202493 - DNA, 25 bp, Probe sequence
ggtcaagggactttatcggatgcag

SEQ ID NO: 202494 - DNA, 25 bp, Probe sequence
tatcagagtatgtaggacgcgcgac

SEQ ID NO: 202495 - DNA, 25 bp, Probe sequence
tagctagtgctacggttgctgcatt

SEQ ID NO: 202496 - DNA, 25 bp, Probe sequence
ttggtgcaaaggttgtggcagttga

SEQ ID NO: 202497 - DNA, 25 bp, Probe sequence
attgttgagtgaaaatggtgcagat

SEQ ID NO: 202498 - DNA, 25 bp, Probe sequence
attgagtcaattaaagcgatagcca

SEQ ID NO: 202499 - DNA, 25 bp, Probe sequence
atcgttagttgcgatgactactgat

SEQ ID NO: 202500 - DNA, 25 bp, Probe sequence
atggtgcagatataattgaaattgg

SEQ ID NO: 202501 - DNA, 25 bp, Probe sequence
agttgtcgcaggatttggtataaga

SEQ ID NO: 202502 - DNA, 25 bp, Probe sequence
agcgatagccaatgtgccagttgtc

SEQ ID NO: 202503 - DNA, 25 bp, Probe sequence
aatgtgccagttgtcgcaggatttg

SEQ ID NO: 202504 - DNA, 25 bp, Probe sequence
cacaacatgttgcagatataaaaga

SEQ ID NO: 202505 - DNA, 25 bp, Probe sequence
cggaaggctttatttatactgtgac

SEQ ID NO: 202506 - DNA, 25 bp, Probe sequence
gccaatgtgccagttgtcgcaggat

SEQ ID NO: 202507 - DNA, 25 bp, Probe sequence
gctgatggtccagttatcatggaag

SEQ ID NO: 202508 - DNA, 25 bp, Probe sequence
gaattatcgcagcgtttaaaacaac

SEQ ID NO: 202509 - DNA, 25 bp, Probe sequence
gaagcaggtcaacaagcgattaaac

SEQ ID NO: 202510 - DNA, 25 bp, Probe sequence
gagaacaagcgttttttgaaaaatg

SEQ ID NO: 202511 - DNA, 25 bp, Probe sequence
gatgactactgatgacaaacgtata

SEQ ID NO: 202512 - DNA, 25 bp, Probe sequence
gtgccagttgtcgcaggatttggta

SEQ ID NO: 202513 - DNA, 25 bp, Probe sequence
gatagccaatgtgccagttgtcgca

SEQ ID NO: 202514 - DNA, 25 bp, Probe sequence
gttgcgatgactactgatgacaaac

SEQ ID NO: 202515 - DNA, 25 bp, Probe sequence
gtcaacaagcgattaaacaaggcat

SEQ ID NO: 202516 - DNA, 25 bp, Probe sequence
gtcaaaatcatatcgttagttgcga

SEQ ID NO: 202517 - DNA, 25 bp, Probe sequence
gtcattatggagaacaagcgttttt

SEQ ID NO: 202518 - DNA, 25 bp, Probe sequence
gtctacggcttaattattcctgatt

SEQ ID NO: 202519 - DNA, 25 bp, Probe sequence
ggtccagttatcatggaagcaggtc

SEQ ID NO: 202520 - DNA, 25 bp, Probe sequence
ggtgtctacggcttaattattcctg

SEQ ID NO: 202521 - DNA, 25 bp, Probe sequence
ggttgctgatggtccagttatcatg

SEQ ID NO: 202522 - DNA, 25 bp, Probe sequence
ggcttaattattcctgatttaccat

SEQ ID NO: 202523 - DNA, 25 bp, Probe sequence
tgatccggttgctgatggtccagtt

SEQ ID NO: 202524 - DNA, 25 bp, Probe sequence
tccggttgctgatggtccagttatc

SEQ ID NO: 202525 - DNA, 25 bp, Probe sequence
tgcggaaggctttatttatactgtg

SEQ ID NO: 202526 - DNA, 25 bp, Probe sequence
tctgatccggttgctgatggtccag

SEQ ID NO: 202527 - DNA, 25 bp, Probe sequence
taaagcgatagccaatgtgccagtt

SEQ ID NO: 202528 - DNA, 25 bp, Probe sequence
taaaacaacaatttagtcactatgg

SEQ ID NO: 202529 - DNA, 25 bp, Probe sequence
tacggcttaattattcctgatttac

SEQ ID NO: 202530 - DNA, 25 bp, Probe sequence
tagccaatgtgccagttgtcgcagg

SEQ ID NO: 202531 - DNA, 25 bp, Probe sequence
attgcagcttgcttacttactgctg

SEQ ID NO: 202532 - DNA, 25 bp, Probe sequence
attatgctggtggtacatcaaatgc

SEQ ID NO: 202533 - DNA, 25 bp, Probe sequence
atcgatccatatttaccatatcaat

SEQ ID NO: 202534 - DNA, 25 bp, Probe sequence
agcatgccatacagtcatttcacgc

SEQ ID NO: 202535 - DNA, 25 bp, Probe sequence
agcttgctgaaggttatgaaacaca

SEQ ID NO: 202536 - DNA, 25 bp, Probe sequence
acaaattcgttatcactcagtgtta

SEQ ID NO: 202537 - DNA, 25 bp, Probe sequence
aaagcttttgctgatcgtgatgaca

SEQ ID NO: 202538 - DNA, 25 bp, Probe sequence
aaaacatcgttgtctatacctacat

SEQ ID NO: 202539 - DNA, 25 bp, Probe sequence
aacctgtttacgcagcatataccgc

SEQ ID NO: 202540 - DNA, 25 bp, Probe sequence
aatgctggtaatgattggttctttg

SEQ ID NO: 202541 - DNA, 25 bp, Probe sequence
ccgtcattttgccggaagttatgca

SEQ ID NO: 202542 - DNA, 25 bp, Probe sequence
gccactatgagttaaagcttgctga

SEQ ID NO: 202543 - DNA, 25 bp, Probe sequence
gcgagataacttacaacaacaactt

SEQ ID NO: 202544 - DNA, 25 bp, Probe sequence
gctgtacctgttatgaaagtgttca

SEQ ID NO: 202545 - DNA, 25 bp, Probe sequence
gcattaaatcatggcattgaccgtt

SEQ ID NO: 202546 - DNA, 25 bp, Probe sequence
gaattacctatctctgctggtttct

SEQ ID NO: 202547 - DNA, 25 bp, Probe sequence
gaagttgtttattatgctggtggta

SEQ ID NO: 202548 - DNA, 25 bp, Probe sequence
gaagatgctgaagatgctggtgtag

SEQ ID NO: 202549 - DNA, 25 bp, Probe sequence
gaactcgtacactttttctttaatg

SEQ ID NO: 202550 - DNA, 25 bp, Probe sequence
gaaagtgttcaagtatttttattca

SEQ ID NO: 202551 - DNA, 25 bp, Probe sequence
gatcctgtgctacaaattcgttatc

SEQ ID NO: 202552 - DNA, 25 bp, Probe sequence
gatgctggtgtagttaaattcaaaa

SEQ ID NO: 202553 - DNA, 25 bp, Probe sequence
gatacgtcagaatcaaaagcttttg

SEQ ID NO: 202554 - DNA, 25 bp, Probe sequence
gtcatttcacgcaaactgttggcca

SEQ ID NO: 202555 - DNA, 25 bp, Probe sequence
gtctatacctacatatcgatccata

SEQ ID NO: 202556 - DNA, 25 bp, Probe sequence
ggatttgaacatactggattccata

SEQ ID NO: 202557 - DNA, 25 bp, Probe sequence
tggcattgaccgttataatttctat

SEQ ID NO: 202558 - DNA, 25 bp, Probe sequence
tgcttacttactgctgtacctgtta

SEQ ID NO: 202559 - DNA, 25 bp, Probe sequence
tgccggaagttatgcagtgcaatgg

SEQ ID NO: 202560 - DNA, 25 bp, Probe sequence
tctctgctggtttcttctttatcaa

SEQ ID NO: 202561 - DNA, 25 bp, Probe sequence
tcatgatggcgagattacaggtaat

SEQ ID NO: 202562 - DNA, 25 bp, Probe sequence
tcacgcaaactgttggccactatga

SEQ ID NO: 202563 - DNA, 25 bp, Probe sequence
tttttattcaaatcgcggtccagtg

SEQ ID NO: 202564 - DNA, 25 bp, Probe sequence
ttacgcagcatataccgcacttaaa

SEQ ID NO: 202565 - DNA, 25 bp, Probe sequence
atctgacagcatttattgatcaatt

SEQ ID NO: 202566 - DNA, 25 bp, Probe sequence
atgagtactatggcagtttatggaa

SEQ ID NO: 202567 - DNA, 25 bp, Probe sequence
atggtatttccaaaaagttcgctga

SEQ ID NO: 202568 - DNA, 25 bp, Probe sequence
atggatatatcggtaatgctttaaa

SEQ ID NO: 202569 - DNA, 25 bp, Probe sequence
acggttaatgcaattgtcaaagcga

SEQ ID NO: 202570 - DNA, 25 bp, Probe sequence
aaatattttaattacaggcgtacat

SEQ ID NO: 202571 - DNA, 25 bp, Probe sequence
aaaagttcgctgaacaagcattaca

SEQ ID NO: 202572 - DNA, 25 bp, Probe sequence
aacaatttatttttatgagtactat

SEQ ID NO: 202573 - DNA, 25 bp, Probe sequence
caacaattcacctcaagcaaggcta

SEQ ID NO: 202574 - DNA, 25 bp, Probe sequence
cacaaacaccaatgaaccctacgac

SEQ ID NO: 202575 - DNA, 25 bp, Probe sequence
catacagcagctttggttcacaaca

SEQ ID NO: 202576 - DNA, 25 bp, Probe sequence
cattgcccaggaaatttccaacggt

SEQ ID NO: 202577 - DNA, 25 bp, Probe sequence
gctttggttcacaacaattcacctc

SEQ ID NO: 202578 - DNA, 25 bp, Probe sequence
gcagctttggttcacaacaattcac

SEQ ID NO: 202579 - DNA, 25 bp, Probe sequence
gaaacaattggcacaaaaggctaaa

SEQ ID NO: 202580 - DNA, 25 bp, Probe sequence
gaaacgacaaccaaagataaggcat

SEQ ID NO: 202581 - DNA, 25 bp, Probe sequence
gataagcttattgaacaaggacatc

SEQ ID NO: 202582 - DNA, 25 bp, Probe sequence
gatacacaaacaccaatgaacccta

SEQ ID NO: 202583 - DNA, 25 bp, Probe sequence
gatttatggtgcacattgcccagga

SEQ ID NO: 202584 - DNA, 25 bp, Probe sequence
gattagtgattcgtttaaagtagca

SEQ ID NO: 202585 - DNA, 25 bp, Probe sequence
gtcacttgttattgcggacatcatg

SEQ ID NO: 202586 - DNA, 25 bp, Probe sequence
ggtgcacattgcccaggaaatttcc

SEQ ID NO: 202587 - DNA, 25 bp, Probe sequence
ggacatcatggatgaaacgacaacc

SEQ ID NO: 202588 - DNA, 25 bp, Probe sequence
ggaaatttccaacggttaatgcaat

SEQ ID NO: 202589 - DNA, 25 bp, Probe sequence
tgttattgcggacatcatggatgaa

SEQ ID NO: 202590 - DNA, 25 bp, Probe sequence
tcggtctttagaaaattattcggca

SEQ ID NO: 202591 - DNA, 25 bp, Probe sequence
taatgtatgaaatacgtcgccaatc

SEQ ID NO: 202592 - DNA, 25 bp, Probe sequence
taaagtagcaattgtgagaccacca

SEQ ID NO: 202593 - DNA, 25 bp, Probe sequence
tacaggcgtacatggatatatcggt

SEQ ID NO: 202594 - DNA, 25 bp, Probe sequence
tactttgatacatcgtcagtaatgt

SEQ ID NO: 202595 - DNA, 25 bp, Probe sequence
tatatattaaacatctgacagcatt

SEQ ID NO: 202596 - DNA, 25 bp, Probe sequence
tattcctggaaaaatgtcacttgtt

SEQ ID NO: 202597 - DNA, 25 bp, Probe sequence
ttcacaacaattcacctcaagcaag

SEQ ID NO: 202598 - DNA, 25 bp, Probe sequence
ttgtgagaccaccaatgatttatgg

SEQ ID NO: 202599 - DNA, 25 bp, Probe sequence
aggggatttctataaaccaattcat

SEQ ID NO: 202600 - DNA, 25 bp, Probe sequence
atttctatggtttatcaggtgattt

SEQ ID NO: 202601 - DNA, 25 bp, Probe sequence
ataactttattgacacatatggaga

SEQ ID NO: 202602 - DNA, 25 bp, Probe sequence
atgggaagttatgtttactattcga

SEQ ID NO: 202603 - DNA, 25 bp, Probe sequence
atggttacgagcatcatggctttac

SEQ ID NO: 202604 - DNA, 25 bp, Probe sequence
atggctttgaagtagttttattagg

SEQ ID NO: 202605 - DNA, 25 bp, Probe sequence
agtgaagattatggcgtataccgct

SEQ ID NO: 202606 - DNA, 25 bp, Probe sequence
agattccttgaacgtgatgagttca

SEQ ID NO: 202607 - DNA, 25 bp, Probe sequence
aatcgtcgtgatcaaatgatggcga

SEQ ID NO: 202608 - DNA, 25 bp, Probe sequence
aatatttacagcaacatcaatgttt

SEQ ID NO: 202609 - DNA, 25 bp, Probe sequence
cgagccaagtacgatggatgggcgt

SEQ ID NO: 202610 - DNA, 25 bp, Probe sequence
cgtggtccagtaatggatttttcag

SEQ ID NO: 202611 - DNA, 25 bp, Probe sequence
cgtgccatttgaaggtcgcgagaaa

SEQ ID NO: 202612 - DNA, 25 bp, Probe sequence
gcccaattctaaaccttgcttctgg

SEQ ID NO: 202613 - DNA, 25 bp, Probe sequence
gcaagccttttctctaaaattccta

SEQ ID NO: 202614 - DNA, 25 bp, Probe sequence
gagttaactgttaccgaatttgaca

SEQ ID NO: 202615 - DNA, 25 bp, Probe sequence
gacaactttgtacaaaatccatcat

SEQ ID NO: 202616 - DNA, 25 bp, Probe sequence
gagcaaaacggacggcccaattcta

SEQ ID NO: 202617 - DNA, 25 bp, Probe sequence
gagcatcatggctttacaactgagt

SEQ ID NO: 202618 - DNA, 25 bp, Probe sequence
gagtatgatacatcgagccaagtac

SEQ ID NO: 202619 - DNA, 25 bp, Probe sequence
gatgggcgtattaaaccttgaaggt

SEQ ID NO: 202620 - DNA, 25 bp, Probe sequence
gatccgtattggttatatcatctat

SEQ ID NO: 202621 - DNA, 25 bp, Probe sequence
gatatcgtgccatttgaaggtcgcg

SEQ ID NO: 202622 - DNA, 25 bp, Probe sequence
gttacccgtgagaatgatggctttg

SEQ ID NO: 202623 - DNA, 25 bp, Probe sequence
gtttactattcgaatcgtggtccag

SEQ ID NO: 202624 - DNA, 25 bp, Probe sequence
gtaccattagcatatattgaccttg

SEQ ID NO: 202625 - DNA, 25 bp, Probe sequence
gtaattgcagcaagccttttctcta

SEQ ID NO: 202626 - DNA, 25 bp, Probe sequence
ggatttttcagatttaggattagtt

SEQ ID NO: 202627 - DNA, 25 bp, Probe sequence
ggcgtataccgctttaaacgtggat

SEQ ID NO: 202628 - DNA, 25 bp, Probe sequence
tcgtgaaactgaagagcgtgctgga

SEQ ID NO: 202629 - DNA, 25 bp, Probe sequence
tacatgatgcattggtttatgatta

SEQ ID NO: 202630 - DNA, 25 bp, Probe sequence
tttatgattaactattgcttcgata

SEQ ID NO: 202631 - DNA, 25 bp, Probe sequence
ttttctctaaaattcctactatggg

SEQ ID NO: 202632 - DNA, 25 bp, Probe sequence
ttgaccttgatgaatatgtgttaaa

SEQ ID NO: 202633 - DNA, 25 bp, Probe sequence
attatgctgcacaacttgacgctga

SEQ ID NO: 202634 - DNA, 25 bp, Probe sequence
atttttgagcgtttagatccacata

SEQ ID NO: 202635 - DNA, 25 bp, Probe sequence
ataacattgatataacagcgcaaaa

SEQ ID NO: 202636 - DNA, 25 bp, Probe sequence
atcagcacgtccgattcgtgatttg

SEQ ID NO: 202637 - DNA, 25 bp, Probe sequence
atccacataagctggccagttgtat

SEQ ID NO: 202638 - DNA, 25 bp, Probe sequence
agatccacataagctggccagttgt

SEQ ID NO: 202639 - DNA, 25 bp, Probe sequence
agctatttgcaaagtcttaaaatca

SEQ ID NO: 202640 - DNA, 25 bp, Probe sequence
aatatatatttgatgcagatgttaa

SEQ ID NO: 202641 - DNA, 25 bp, Probe sequence
cacacacgcaatattgaaacttgat

SEQ ID NO: 202642 - DNA, 25 bp, Probe sequence
cagaagcatacacacacgcaatatt

SEQ ID NO: 202643 - DNA, 25 bp, Probe sequence
catcagaagcatacacacacgcaat

SEQ ID NO: 202644 - DNA, 25 bp, Probe sequence
ctgcacaacttgacgctgagaacgc

SEQ ID NO: 202645 - DNA, 25 bp, Probe sequence
ccacataagctggccagttgtattg

SEQ ID NO: 202646 - DNA, 25 bp, Probe sequence
gcgtttagatccacataagctggcc

SEQ ID NO: 202647 - DNA, 25 bp, Probe sequence
gcatcagcacgtccgattcgtgatt

SEQ ID NO: 202648 - DNA, 25 bp, Probe sequence
gctggccagttgtattgatgttgca

SEQ ID NO: 202649 - DNA, 25 bp, Probe sequence
gcatacacacacgcaatattgaaac

SEQ ID NO: 202650 - DNA, 25 bp, Probe sequence
gcagatgttaaatatatagcatttg

SEQ ID NO: 202651 - DNA, 25 bp, Probe sequence
gaattggaaatgattcaccattcaa

SEQ ID NO: 202652 - DNA, 25 bp, Probe sequence
gaagcatacacacacgcaatattga

SEQ ID NO: 202653 - DNA, 25 bp, Probe sequence
gatgatgattggaattatgctgcac

SEQ ID NO: 202654 - DNA, 25 bp, Probe sequence
gatgattggaattatgctgcacaac

SEQ ID NO: 202655 - DNA, 25 bp, Probe sequence
gtttagatccacataagctggccag

SEQ ID NO: 202656 - DNA, 25 bp, Probe sequence
gtattgatgttgcaaatatcgacac

SEQ ID NO: 202657 - DNA, 25 bp, Probe sequence
ggaattatgctgcacaacttgacgc

SEQ ID NO: 202658 - DNA, 25 bp, Probe sequence
ggctatattataggaccatcagaag

SEQ ID NO: 202659 - DNA, 25 bp, Probe sequence
ggccagttgtattgatgttgcaaat

SEQ ID NO: 202660 - DNA, 25 bp, Probe sequence
tgctgcacaacttgacgctgagaac

SEQ ID NO: 202661 - DNA, 25 bp, Probe sequence
taagctggccagttgtattgatgtt

SEQ ID NO: 202662 - DNA, 25 bp, Probe sequence
tatgctgcacaacttgacgctgaga

SEQ ID NO: 202663 - DNA, 25 bp, Probe sequence
tataggaccatcagaagcatacaca

SEQ ID NO: 202664 - DNA, 25 bp, Probe sequence
tatactgcattacaatatatatttg

SEQ ID NO: 202665 - DNA, 25 bp, Probe sequence
tttgagcgtttagatccacataagc

SEQ ID NO: 202666 - DNA, 25 bp, Probe sequence
tttgcatcagcacgtccgattcgtg

SEQ ID NO: 202667 - DNA, 25 bp, Probe sequence
attgatggtacgctttgttttgacg

SEQ ID NO: 202668 - DNA, 25 bp, Probe sequence
attcatacagatacatatcaccata

SEQ ID NO: 202669 - DNA, 25 bp, Probe sequence
atattgatggtacgctttgttttga

SEQ ID NO: 202670 - DNA, 25 bp, Probe sequence
atatcaccatatcttaaaaataatt

SEQ ID NO: 202671 - DNA, 25 bp, Probe sequence
atacagatacatatcaccatatctt

SEQ ID NO: 202672 - DNA, 25 bp, Probe sequence
atacatatcaccatatcttaaaaat

SEQ ID NO: 202673 - DNA, 25 bp, Probe sequence
atcaccatatcttaaaaataattca

SEQ ID NO: 202674 - DNA, 25 bp, Probe sequence
agatacatatcaccatatcttaaaa

SEQ ID NO: 202675 - DNA, 25 bp, Probe sequence
acatatcaccatatcttaaaaataa

SEQ ID NO: 202676 - DNA, 25 bp, Probe sequence
acagatacatatcaccatatcttaa

SEQ ID NO: 202677 - DNA, 25 bp, Probe sequence
aattcatacagatacatatcaccat

SEQ ID NO: 202678 - DNA, 25 bp, Probe sequence
caattcatacagatacatatcacca

SEQ ID NO: 202679 - DNA, 25 bp, Probe sequence
cagatacatatcaccatatcttaaa

SEQ ID NO: 202680 - DNA, 25 bp, Probe sequence
catacagatacatatcaccatatct

SEQ ID NO: 202681 - DNA, 25 bp, Probe sequence
catatcaccatatcttaaaaataat

SEQ ID NO: 202682 - DNA, 25 bp, Probe sequence
ctttgatattgatggtacgctttgt

SEQ ID NO: 202683 - DNA, 25 bp, Probe sequence
ccaattcatacagatacatatcacc

SEQ ID NO: 202684 - DNA, 25 bp, Probe sequence
gatacatatcaccatatcttaaaaa

SEQ ID NO: 202685 - DNA, 25 bp, Probe sequence
gatattgatggtacgctttgttttg

SEQ ID NO: 202686 - DNA, 25 bp, Probe sequence
gtctttgatattgatggtacgcttt

SEQ ID NO: 202687 - DNA, 25 bp, Probe sequence
tgtctttgatattgatggtacgctt

SEQ ID NO: 202688 - DNA, 25 bp, Probe sequence
tgatattgatggtacgctttgtttt

SEQ ID NO: 202689 - DNA, 25 bp, Probe sequence
tgatggtacgctttgttttgacggc

SEQ ID NO: 202690 - DNA, 25 bp, Probe sequence
tctttgatattgatggtacgctttg

SEQ ID NO: 202691 - DNA, 25 bp, Probe sequence
tcatacagatacatatcaccatatc

SEQ ID NO: 202692 - DNA, 25 bp, Probe sequence
tacagatacatatcaccatatctta

SEQ ID NO: 202693 - DNA, 25 bp, Probe sequence
tacatatcaccatatcttaaaaata

SEQ ID NO: 202694 - DNA, 25 bp, Probe sequence
tatcaccatatcttaaaaataattc

SEQ ID NO: 202695 - DNA, 25 bp, Probe sequence
tattgatggtacgctttgttttgac

SEQ ID NO: 202696 - DNA, 25 bp, Probe sequence
tttgatattgatggtacgctttgtt

SEQ ID NO: 202697 - DNA, 25 bp, Probe sequence
ttcatacagatacatatcaccatat

SEQ ID NO: 202698 - DNA, 25 bp, Probe sequence
ttgatggtacgctttgttttgacgg

SEQ ID NO: 202699 - DNA, 25 bp, Probe sequence
ttgatattgatggtacgctttgttt

SEQ ID NO: 202700 - DNA, 25 bp, Probe sequence
attggctcaattttatctagaacat

SEQ ID NO: 202701 - DNA, 25 bp, Probe sequence
atatgtgtttatttcttggactggt

SEQ ID NO: 202702 - DNA, 25 bp, Probe sequence
gatggtacaacgtaccctgtcgact

SEQ ID NO: 202703 - DNA, 25 bp, Probe sequence
agctcaaaaacatcaaccatatctt

SEQ ID NO: 202704 - DNA, 25 bp, Probe sequence
agccattccaattatctgcgtcggt

SEQ ID NO: 202705 - DNA, 25 bp, Probe sequence
acaggcgcattttgtgcaagtccat

SEQ ID NO: 202706 - DNA, 25 bp, Probe sequence
aacgcgtgatatgtttgaccgtcaa

SEQ ID NO: 202707 - DNA, 25 bp, Probe sequence
aacagccacttaaatctacaattca

SEQ ID NO: 202708 - DNA, 25 bp, Probe sequence
aagtccatactttacacattcatat

SEQ ID NO: 202709 - DNA, 25 bp, Probe sequence
aatcatgtccatatcaacactatat

SEQ ID NO: 202710 - DNA, 25 bp, Probe sequence
aatatcagcatactaccgcggctac

SEQ ID NO: 202711 - DNA, 25 bp, Probe sequence
cagtccttacgatttatacggcacg

SEQ ID NO: 202712 - DNA, 25 bp, Probe sequence
ccctgtcgactatgctacgtttgaa

SEQ ID NO: 202713 - DNA, 25 bp, Probe sequence
gcgtgacttggcaccagttatgcag

SEQ ID NO: 202714 - DNA, 25 bp, Probe sequence
gctaaacttttacaacgtattcacg

SEQ ID NO: 202715 - DNA, 25 bp, Probe sequence
gctagatattacattcgattcattt

SEQ ID NO: 202716 - DNA, 25 bp, Probe sequence
gaaggccaaccagctgttgatgctt

SEQ ID NO: 202717 - DNA, 25 bp, Probe sequence
gaagctgcttatcaacgtgaagtgt

SEQ ID NO: 202718 - DNA, 25 bp, Probe sequence
gacattactacagaacagccactta

SEQ ID NO: 202719 - DNA, 25 bp, Probe sequence
gagcgctaaattatctactacatac

SEQ ID NO: 202720 - DNA, 25 bp, Probe sequence
gagaagatgttcctgtttcagaaac

SEQ ID NO: 202721 - DNA, 25 bp, Probe sequence
gttacgtgaagcatacgatcagcga

SEQ ID NO: 202722 - DNA, 25 bp, Probe sequence
gtattgacgctctagtacaacaagc

SEQ ID NO: 202723 - DNA, 25 bp, Probe sequence
gtactttgttgaagccccttctaca

SEQ ID NO: 202724 - DNA, 25 bp, Probe sequence
gtagacatgactgagggtgctgaat

SEQ ID NO: 202725 - DNA, 25 bp, Probe sequence
gtgtatcacctgtcgaacttgcaaa

SEQ ID NO: 202726 - DNA, 25 bp, Probe sequence
ggtgaatctttaaatgcgccgacat

SEQ ID NO: 202727 - DNA, 25 bp, Probe sequence
ggtgctgaattaacatggatgcgtc

SEQ ID NO: 202728 - DNA, 25 bp, Probe sequence
ggatgcgtcaacctcattactatat

SEQ ID NO: 202729 - DNA, 25 bp, Probe sequence
ggctgaagcatttgtcttagcacat

SEQ ID NO: 202730 - DNA, 25 bp, Probe sequence
tgcaggtcattttacattagctcaa

SEQ ID NO: 202731 - DNA, 25 bp, Probe sequence
tcgtatacgtattctgctggcttaa

SEQ ID NO: 202732 - DNA, 25 bp, Probe sequence
tatcacctacgctaaacagtcctta

SEQ ID NO: 202733 - DNA, 25 bp, Probe sequence
tattttaattgccttagatcgctta

SEQ ID NO: 202734 - DNA, 25 bp, Probe sequence
attcggtgaaccagacgtactatta

SEQ ID NO: 202735 - DNA, 25 bp, Probe sequence
atgaacgtctagctgttttaaaaca

SEQ ID NO: 202736 - DNA, 25 bp, Probe sequence
attagcgcaaagtttattcggtgaa

SEQ ID NO: 202737 - DNA, 25 bp, Probe sequence
atctaaacaagcaacaagtcgtaaa

SEQ ID NO: 202738 - DNA, 25 bp, Probe sequence
atgcttatgaagatgaacgcgtgct

SEQ ID NO: 202739 - DNA, 25 bp, Probe sequence
atgttggtaactatgatttttggta

SEQ ID NO: 202740 - DNA, 25 bp, Probe sequence
atggattaattggtgcgaatggtgc

SEQ ID NO: 202741 - DNA, 25 bp, Probe sequence
agatggtatccgtgctgctgaactt

SEQ ID NO: 202742 - DNA, 25 bp, Probe sequence
agctaacgcttctaaatctaaacaa

SEQ ID NO: 202743 - DNA, 25 bp, Probe sequence
actgatgtgagtttacgttttggag

SEQ ID NO: 202744 - DNA, 25 bp, Probe sequence
aaaacaggaccactatgcttatgaa

SEQ ID NO: 202745 - DNA, 25 bp, Probe sequence
ctaacggtctcgatattccagcaat

SEQ ID NO: 202746 - DNA, 25 bp, Probe sequence
gaattagattctcaaacaggacatg

SEQ ID NO: 202747 - DNA, 25 bp, Probe sequence
gaagatttcttaattaactttgata

SEQ ID NO: 202748 - DNA, 25 bp, Probe sequence
gaagatatcctttcgttaaattcac

SEQ ID NO: 202749 - DNA, 25 bp, Probe sequence
gaacgcgtgcttgatgttgtaatta

SEQ ID NO: 202750 - DNA, 25 bp, Probe sequence
gacgtactattactggatgagccta

SEQ ID NO: 202751 - DNA, 25 bp, Probe sequence
gatgaagatggtatccgtgctgctg

SEQ ID NO: 202752 - DNA, 25 bp, Probe sequence
gatattccagcaatcagttggttag

SEQ ID NO: 202753 - DNA, 25 bp, Probe sequence
gatattcaaccatcatcaagaagat

SEQ ID NO: 202754 - DNA, 25 bp, Probe sequence
gttacttccctaaagataactcaga

SEQ ID NO: 202755 - DNA, 25 bp, Probe sequence
gtttaggtatcgatccaactttaca

SEQ ID NO: 202756 - DNA, 25 bp, Probe sequence
gtttctcagctaacgcttctaaatc

SEQ ID NO: 202757 - DNA, 25 bp, Probe sequence
gtcagttagctcaaaagatggctca

SEQ ID NO: 202758 - DNA, 25 bp, Probe sequence
ggtcacgaacgtctttatgaggtta

SEQ ID NO: 202759 - DNA, 25 bp, Probe sequence
ggtggagaaaaagtacgttgtatgc

SEQ ID NO: 202760 - DNA, 25 bp, Probe sequence
ggtgcaggtaaatcaacattcttaa

SEQ ID NO: 202761 - DNA, 25 bp, Probe sequence
ggtatcaatctagtcagttagctca

SEQ ID NO: 202762 - DNA, 25 bp, Probe sequence
ggatgagcctactaacggtctcgat

SEQ ID NO: 202763 - DNA, 25 bp, Probe sequence
tgaatggttggaatgctgaagctga

SEQ ID NO: 202764 - DNA, 25 bp, Probe sequence
tccgtgctgctgaacttgaaggtga

SEQ ID NO: 202765 - DNA, 25 bp, Probe sequence
tcgatccaactttacacgataaaaa

SEQ ID NO: 202766 - DNA, 25 bp, Probe sequence
tatgaagccagatttcagtgatgaa

SEQ ID NO: 202767 - DNA, 25 bp, Probe sequence
tttggagatcgtaaactatttgaag

SEQ ID NO: 202768 - DNA, 25 bp, Probe sequence
attaattggctcaggcatgcgtgat

SEQ ID NO: 202769 - DNA, 25 bp, Probe sequence
atcccctacctgacaatcagctact

SEQ ID NO: 202770 - DNA, 25 bp, Probe sequence
accgctgtggcacttgctgttagta

SEQ ID NO: 202771 - DNA, 25 bp, Probe sequence
aaacgactagacatcgtctcatatg

SEQ ID NO: 202772 - DNA, 25 bp, Probe sequence
aactggcattattattgacaaccgg

SEQ ID NO: 202773 - DNA, 25 bp, Probe sequence
aactgtatcttatttatcaatggta

SEQ ID NO: 202774 - DNA, 25 bp, Probe sequence
aaccattggccatcatttaaaaagt

SEQ ID NO: 202775 - DNA, 25 bp, Probe sequence
aagtatttcatacgtcattgatgat

SEQ ID NO: 202776 - DNA, 25 bp, Probe sequence
caatcagctacttacccaactattt

SEQ ID NO: 202777 - DNA, 25 bp, Probe sequence
caaccggagagcaacaaactgtatc

SEQ ID NO: 202778 - DNA, 25 bp, Probe sequence
cagctacttacccaactatttacgg

SEQ ID NO: 202779 - DNA, 25 bp, Probe sequence
ctacaactatccttcacgattaaag

SEQ ID NO: 202780 - DNA, 25 bp, Probe sequence
ctcaaacatttgaacaagcctttca

SEQ ID NO: 202781 - DNA, 25 bp, Probe sequence
ctggtgtggctttggataaacatat

SEQ ID NO: 202782 - DNA, 25 bp, Probe sequence
gcgctttaggtgctggtgtacttga

SEQ ID NO: 202783 - DNA, 25 bp, Probe sequence
gcgggtattaaaaccattggccatc

SEQ ID NO: 202784 - DNA, 25 bp, Probe sequence
gcggatcatccgtcagtgattttac

SEQ ID NO: 202785 - DNA, 25 bp, Probe sequence
gcatgcgtgatatgtcaggtgtggc

SEQ ID NO: 202786 - DNA, 25 bp, Probe sequence
gcaatgactggctatcaagcgggta

SEQ ID NO: 202787 - DNA, 25 bp, Probe sequence
gaaggtgctgtaaatgttgatatga

SEQ ID NO: 202788 - DNA, 25 bp, Probe sequence
taacaattagttatcccctacctga

SEQ ID NO: 202789 - DNA, 25 bp, Probe sequence
gatgattttaatgggcaacaagcgg

SEQ ID NO: 202790 - DNA, 25 bp, Probe sequence
gatttcacaaatcgtcaacttggat

SEQ ID NO: 202791 - DNA, 25 bp, Probe sequence
gtagttgctggatttcaaggcatca

SEQ ID NO: 202792 - DNA, 25 bp, Probe sequence
gtcaggtgtggcatcaaaagcattt

SEQ ID NO: 202793 - DNA, 25 bp, Probe sequence
ggaaatgagcgctttaggtgctggt

SEQ ID NO: 202794 - DNA, 25 bp, Probe sequence
tgatggtgtgtatgccactgaccca

SEQ ID NO: 202795 - DNA, 25 bp, Probe sequence
tgctatgggtaacacaacagatcaa

SEQ ID NO: 202796 - DNA, 25 bp, Probe sequence
taatatacctttctaccaaacaaca

SEQ ID NO: 202797 - DNA, 25 bp, Probe sequence
taattgtcgttgtaagtgctatggg

SEQ ID NO: 202798 - DNA, 25 bp, Probe sequence
taccgacgttgatggtgtgtatgcc

SEQ ID NO: 202799 - DNA, 25 bp, Probe sequence
taccttgtgaaatttataccgacgt

SEQ ID NO: 202800 - DNA, 25 bp, Probe sequence
tagtgattttcatcaaatttctatg

SEQ ID NO: 202801 - DNA, 25 bp, Probe sequence
ttgctcaaattaatcctcaaacatt

SEQ ID NO: 202802 - DNA, 25 bp, Probe sequence
attgatttaatcgttccggaagtca

SEQ ID NO: 202803 - DNA, 25 bp, Probe sequence
attttcatcagcacgttctgcaggg

SEQ ID NO: 202804 - DNA, 25 bp, Probe sequence
atattcctttcgatgaattagtatt

SEQ ID NO: 202805 - DNA, 25 bp, Probe sequence
ataatgtgttaccgcatattgatgt

SEQ ID NO: 202806 - DNA, 25 bp, Probe sequence
agctgtatcaggttcagggatgaaa

SEQ ID NO: 202807 - DNA, 25 bp, Probe sequence
acgagtggcatatacaacatatcaa

SEQ ID NO: 202808 - DNA, 25 bp, Probe sequence
acaagaggtatcattgccaatccaa

SEQ ID NO: 202809 - DNA, 25 bp, Probe sequence
aaatactttccatgtatggtgtaca

SEQ ID NO: 202810 - DNA, 25 bp, Probe sequence
aacatatcaagctgtatcaggttca

SEQ ID NO: 202811 - DNA, 25 bp, Probe sequence
aaggtgctgcattaaatgctgtaca

SEQ ID NO: 202812 - DNA, 25 bp, Probe sequence
aatgctgtacaagtattggaacaag

SEQ ID NO: 202813 - DNA, 25 bp, Probe sequence
cagaagcatatccacatccaattta

SEQ ID NO: 202814 - DNA, 25 bp, Probe sequence
cgcgttgttttagtagacaatccag

SEQ ID NO: 202815 - DNA, 25 bp, Probe sequence
cctgttcaagatagtcatagtgttg

SEQ ID NO: 202816 - DNA, 25 bp, Probe sequence
gccaatccaaactgctctacgattc

SEQ ID NO: 202817 - DNA, 25 bp, Probe sequence
tcgttccggaagtcaatgaacctac

SEQ ID NO: 202818 - DNA, 25 bp, Probe sequence
gcatatccacatccaatttataata

SEQ ID NO: 202819 - DNA, 25 bp, Probe sequence
gcaagatgcttatggtttaaaacga

SEQ ID NO: 202820 - DNA, 25 bp, Probe sequence
gaaaaattttaaatgcgccagactt

SEQ ID NO: 202821 - DNA, 25 bp, Probe sequence
gacaattcaagtcaatggcgtatgg

SEQ ID NO: 202822 - DNA, 25 bp, Probe sequence
gagaacaatgaatatccaatggcaa

SEQ ID NO: 202823 - DNA, 25 bp, Probe sequence
gttaccgcatattgatgtgttttta

SEQ ID NO: 202824 - DNA, 25 bp, Probe sequence
gttatgcgtttaaaaggagcgaatt

SEQ ID NO: 202825 - DNA, 25 bp, Probe sequence
gtattattttcatcagcacgttctg

SEQ ID NO: 202826 - DNA, 25 bp, Probe sequence
gtattggaacaagttatgcgtttaa

SEQ ID NO: 202827 - DNA, 25 bp, Probe sequence
gtatggtgtacatcagacaatttat

SEQ ID NO: 202828 - DNA, 25 bp, Probe sequence
gtcaatggcgtatggcagaagatat

SEQ ID NO: 202829 - DNA, 25 bp, Probe sequence
ggtgcaatcgttatagacaattcaa

SEQ ID NO: 202830 - DNA, 25 bp, Probe sequence
ggtaaagcaccagaagcatatccac

SEQ ID NO: 202831 - DNA, 25 bp, Probe sequence
ggcggtacaagcgaacactttgccc

SEQ ID NO: 202832 - DNA, 25 bp, Probe sequence
tggccgtatacgtagagatgattca

SEQ ID NO: 202833 - DNA, 25 bp, Probe sequence
tgcgccagacttaaaagtaacagca

SEQ ID NO: 202834 - DNA, 25 bp, Probe sequence
tcattgccaatccaaactgctctac

SEQ ID NO: 202835 - DNA, 25 bp, Probe sequence
taatgagtgctggtggcggtacaag

SEQ ID NO: 202836 - DNA, 25 bp, Probe sequence
atttatttgagggtgttggcgttgc

SEQ ID NO: 202837 - DNA, 25 bp, Probe sequence
atacgatgctcaacaaagtggatta

SEQ ID NO: 202838 - DNA, 25 bp, Probe sequence
atagtggcaatgatgacaacgtcgt

SEQ ID NO: 202839 - DNA, 25 bp, Probe sequence
atcatcgttaatggaactactgctg

SEQ ID NO: 202840 - DNA, 25 bp, Probe sequence
actgctgagagccctactttaacaa

SEQ ID NO: 202841 - DNA, 25 bp, Probe sequence
acaaattcatttgcattatatagtg

SEQ ID NO: 202842 - DNA, 25 bp, Probe sequence
aaagatgctacgaatgattttgagt

SEQ ID NO: 202843 - DNA, 25 bp, Probe sequence
aacatccttatatagttgctttaaa

SEQ ID NO: 202844 - DNA, 25 bp, Probe sequence
aaccaatcggcacactgttatcagc

SEQ ID NO: 202845 - DNA, 25 bp, Probe sequence
aatgcccaagcaatcatcgttaatg

SEQ ID NO: 202846 - DNA, 25 bp, Probe sequence
cagttgatattaacccaattcctat

SEQ ID NO: 202847 - DNA, 25 bp, Probe sequence
gaatactatcaacgtggcggtcaag

SEQ ID NO: 202848 - DNA, 25 bp, Probe sequence
gaatttcaagcgttatacgatgctc

SEQ ID NO: 202849 - DNA, 25 bp, Probe sequence
gaactactgctgagagccctacttt

SEQ ID NO: 202850 - DNA, 25 bp, Probe sequence
gaacgaacatgacaattgaaccaga

SEQ ID NO: 202851 - DNA, 25 bp, Probe sequence
gagagccctactttaacaacagatg

SEQ ID NO: 202852 - DNA, 25 bp, Probe sequence
gatgctgtgaaattaccagtcgtgc

SEQ ID NO: 202853 - DNA, 25 bp, Probe sequence
gatcttgtagataaacgtgttcctg

SEQ ID NO: 202854 - DNA, 25 bp, Probe sequence
gatcaatttaaaccaatcggcacac

SEQ ID NO: 202855 - DNA, 25 bp, Probe sequence
gatacagatactaaagtgcttcgtg

SEQ ID NO: 202856 - DNA, 25 bp, Probe sequence
gatactgaaaagtcaatccaagctt

SEQ ID NO: 202857 - DNA, 25 bp, Probe sequence
gttattgccaatgtcattcctaaag

SEQ ID NO: 202858 - DNA, 25 bp, Probe sequence
gtagaaatattaagtcaacatcctt

SEQ ID NO: 202859 - DNA, 25 bp, Probe sequence
gtacaatgttccttcaagaacgaac

SEQ ID NO: 202860 - DNA, 25 bp, Probe sequence
gtcgtgctgtacaatgttccttcaa

SEQ ID NO: 202861 - DNA, 25 bp, Probe sequence
gtgaaattaccagtcgtgctgtaca

SEQ ID NO: 202862 - DNA, 25 bp, Probe sequence
ggtgttggcgttgcacttacaaccc

SEQ ID NO: 202863 - DNA, 25 bp, Probe sequence
ggttatctctgttattgccaatgtc

SEQ ID NO: 202864 - DNA, 25 bp, Probe sequence
tggcggtcaaggggttatctctgtt

SEQ ID NO: 202865 - DNA, 25 bp, Probe sequence
tccaagctaaagccttaggggctga

SEQ ID NO: 202866 - DNA, 25 bp, Probe sequence
taccattggttagcctagaagatac

SEQ ID NO: 202867 - DNA, 25 bp, Probe sequence
tagataaacgtgttcctgtcatagc

SEQ ID NO: 202868 - DNA, 25 bp, Probe sequence
taggggctgatgcaattatgttaat

SEQ ID NO: 202869 - DNA, 25 bp, Probe sequence
tattaacccaattcctattaaagct

SEQ ID NO: 202870 - DNA, 25 bp, Probe sequence
attaaatgaaaaacgccagccacaa

SEQ ID NO: 202871 - DNA, 25 bp, Probe sequence
atacaagcagcagaacgcttagtta

SEQ ID NO: 202872 - DNA, 25 bp, Probe sequence
aaattttagcagctgctgttcccct

SEQ ID NO: 202873 - DNA, 25 bp, Probe sequence
accgaaagcaacaacgccatatcaa

SEQ ID NO: 202874 - DNA, 25 bp, Probe sequence
acgattgtcggtgaacatgaagttc

SEQ ID NO: 202875 - DNA, 25 bp, Probe sequence
acaccgaaagcaacaacgccatatc

SEQ ID NO: 202876 - DNA, 25 bp, Probe sequence
acaagcagcagaacgcttagttaat

SEQ ID NO: 202877 - DNA, 25 bp, Probe sequence
aacgccagccacaagatattggtat

SEQ ID NO: 202878 - DNA, 25 bp, Probe sequence
aagcaacaacgccatatcaacaata

SEQ ID NO: 202879 - DNA, 25 bp, Probe sequence
aatacaccgaaagcaacaacgccat

SEQ ID NO: 202880 - DNA, 25 bp, Probe sequence
aattttagcagctgctgttccccta

SEQ ID NO: 202881 - DNA, 25 bp, Probe sequence
caactggcgagaaagaaaaactact

SEQ ID NO: 202882 - DNA, 25 bp, Probe sequence
caaaagatatttttgcgaatggtgc

SEQ ID NO: 202883 - DNA, 25 bp, Probe sequence
catcgtgcacaatcaaaagatattt

SEQ ID NO: 202884 - DNA, 25 bp, Probe sequence
cattctattcgtggaggtacgattg

SEQ ID NO: 202885 - DNA, 25 bp, Probe sequence
cgcgttgctagattagcagaagaaa

SEQ ID NO: 202886 - DNA, 25 bp, Probe sequence
gcgcgaacatgagttatggcgttca

SEQ ID NO: 202887 - DNA, 25 bp, Probe sequence
gaacatgagttatggcgttcatgca

SEQ ID NO: 202888 - DNA, 25 bp, Probe sequence
gaaaaaggacatgaaatcgttgggg

SEQ ID NO: 202889 - DNA, 25 bp, Probe sequence
gaaatcgttggggtcattgaaaata

SEQ ID NO: 202890 - DNA, 25 bp, Probe sequence
gaaaaacgccagccacaagatattg

SEQ ID NO: 202891 - DNA, 25 bp, Probe sequence
gaaagcaacaacgccatatcaacaa

SEQ ID NO: 202892 - DNA, 25 bp, Probe sequence
gaggtacgattgtcggtgaacatga

SEQ ID NO: 202893 - DNA, 25 bp, Probe sequence
gaggcacatcataataaaaaagtag

SEQ ID NO: 202894 - DNA, 25 bp, Probe sequence
gatgttgcaatagatttttcaaatc

SEQ ID NO: 202895 - DNA, 25 bp, Probe sequence
gttggggtcattgaaaatacaccga

SEQ ID NO: 202896 - DNA, 25 bp, Probe sequence
gtcggtgaacatgaagttctatttg

SEQ ID NO: 202897 - DNA, 25 bp, Probe sequence
gtggaggtacgattgtcggtgaaca

SEQ ID NO: 202898 - DNA, 25 bp, Probe sequence
gtgaaaatattactaattggctatg

SEQ ID NO: 202899 - DNA, 25 bp, Probe sequence
gtggcaacaactggcgagaaagaaa

SEQ ID NO: 202900 - DNA, 25 bp, Probe sequence
ggacatgaaatcgttggggtcattg

SEQ ID NO: 202901 - DNA, 25 bp, Probe sequence
ggcactgatgaaacgattcaaatca

SEQ ID NO: 202902 - DNA, 25 bp, Probe sequence
tttcagcgcgaacatgagttatggc

SEQ ID NO: 202903 - DNA, 25 bp, Probe sequence
tttttcagcgcgaacatgagttatg

SEQ ID NO: 202904 - DNA, 25 bp, Probe sequence
atattggcgcagtcgttggcgaagg

SEQ ID NO: 202905 - DNA, 25 bp, Probe sequence
attgaagatggtgctgtcgttatga

SEQ ID NO: 202906 - DNA, 25 bp, Probe sequence
atgtacatgtaggggctggcgcagt

SEQ ID NO: 202907 - DNA, 25 bp, Probe sequence
atggtacaacatttaacagctgaag

SEQ ID NO: 202908 - DNA, 25 bp, Probe sequence
aaagtatttggttcagaacaatcta

SEQ ID NO: 202909 - DNA, 25 bp, Probe sequence
aagatggtgctgtcgttatgatggg

SEQ ID NO: 202910 - DNA, 25 bp, Probe sequence
aaggtgctattgttgcagctggcgc

SEQ ID NO: 202911 - DNA, 25 bp, Probe sequence
aattaatattggcgcagtcgttggc

SEQ ID NO: 202912 - DNA, 25 bp, Probe sequence
caagatgtaccagctggtgcagttg

SEQ ID NO: 202913 - DNA, 25 bp, Probe sequence
caagcttctgaagtacaagatacta

SEQ ID NO: 202914 - DNA, 25 bp, Probe sequence
cagctggtgcagttgttgctggtac

SEQ ID NO: 202915 - DNA, 25 bp, Probe sequence
ctattgttgcagctggcgcgattgt

SEQ ID NO: 202916 - DNA, 25 bp, Probe sequence
cggtggtcgtgctacaactggtaaa

SEQ ID NO: 202917 - DNA, 25 bp, Probe sequence
gcagttattttagaaggtgtacgtg

SEQ ID NO: 202918 - DNA, 25 bp, Probe sequence
gaacaatctaaagtaatcttttgtg

SEQ ID NO: 202919 - DNA, 25 bp, Probe sequence
gagattgtagcagcattaagaaaac

SEQ ID NO: 202920 - DNA, 25 bp, Probe sequence
gatgattggaaacctttttacgaag

SEQ ID NO: 202921 - DNA, 25 bp, Probe sequence
gatatgaatgctactctcggtggtc

SEQ ID NO: 202922 - DNA, 25 bp, Probe sequence
gattgatatgaatgctactctcggt

SEQ ID NO: 202923 - DNA, 25 bp, Probe sequence
gtcgtgctacaactggtaaaaatgt

SEQ ID NO: 202924 - DNA, 25 bp, Probe sequence
gtgcagttgttgctggtacacctgc

SEQ ID NO: 202925 - DNA, 25 bp, Probe sequence
gtgttggtaaaggtgctattgttgc

SEQ ID NO: 202926 - DNA, 25 bp, Probe sequence
gtgattaagcaagcttctgaagtac

SEQ ID NO: 202927 - DNA, 25 bp, Probe sequence
gtggtcgtgctacaactggtaaaaa

SEQ ID NO: 202928 - DNA, 25 bp, Probe sequence
ggtgtacgtgttggtaaaggtgcta

SEQ ID NO: 202929 - DNA, 25 bp, Probe sequence
ggtacaacatttaacagctgaagaa

SEQ ID NO: 202930 - DNA, 25 bp, Probe sequence
tgtaccagctggtgcagttgttgct

SEQ ID NO: 202931 - DNA, 25 bp, Probe sequence
tgctattgttgcagctggcgcgatt

SEQ ID NO: 202932 - DNA, 25 bp, Probe sequence
tacatgtaggggctggcgcagtatt

SEQ ID NO: 202933 - DNA, 25 bp, Probe sequence
taatcgaggatgatgtattaatcgg

SEQ ID NO: 202934 - DNA, 25 bp, Probe sequence
ttacgaagcatatggtagtcaattc

SEQ ID NO: 202935 - DNA, 25 bp, Probe sequence
ttgttgcagctggcgcgattgtgac

SEQ ID NO: 202936 - DNA, 25 bp, Probe sequence
ttgaaatggatcgtcgcaattctgc

SEQ ID NO: 202937 - DNA, 25 bp, Probe sequence
ttggcgcagtcgttggcgaaggtac

SEQ ID NO: 202938 - DNA, 25 bp, Probe sequence
atagaagtatgtgcttatgatccac

SEQ ID NO: 202939 - DNA, 25 bp, Probe sequence
agtgaccactcagaatttaaaaatt

SEQ ID NO: 202940 - DNA, 25 bp, Probe sequence
acatgctgtcaaagacgcatcgcta

SEQ ID NO: 202941 - DNA, 25 bp, Probe sequence
aaatttatcggacagtcattttgat

SEQ ID NO: 202942 - DNA, 25 bp, Probe sequence
aaatggcaaacaaacatccgcgtgt

SEQ ID NO: 202943 - DNA, 25 bp, Probe sequence
aagaccctgaaaatgcaaagttaat

SEQ ID NO: 202944 - DNA, 25 bp, Probe sequence
aagacgcatcgctagtattgatttt

SEQ ID NO: 202945 - DNA, 25 bp, Probe sequence
aatgatgatcagtaccggtcatgtg

SEQ ID NO: 202946 - DNA, 25 bp, Probe sequence
aattgaaggtatctacaacgccaga

SEQ ID NO: 202947 - DNA, 25 bp, Probe sequence
cgtcgatgtgcttggtgttgatatt

SEQ ID NO: 202948 - DNA, 25 bp, Probe sequence
ccagcatttgatatttatgagctat

SEQ ID NO: 202949 - DNA, 25 bp, Probe sequence
gaagttaacagtagttggcttaggt

SEQ ID NO: 202950 - DNA, 25 bp, Probe sequence
gaagaggtactgtcatcgggaaaat

SEQ ID NO: 202951 - DNA, 25 bp, Probe sequence
gacaattgcgcctaaaacgatggat

SEQ ID NO: 202952 - DNA, 25 bp, Probe sequence
gacatttcgctagttatgcgtgcat

SEQ ID NO: 202953 - DNA, 25 bp, Probe sequence
gagctattaaatcaagaaccagaca

SEQ ID NO: 202954 - DNA, 25 bp, Probe sequence
gatgcacgtactgctgaaatgagta

SEQ ID NO: 202955 - DNA, 25 bp, Probe sequence
gattttgtaaaaccagtcattgaaa

SEQ ID NO: 202956 - DNA, 25 bp, Probe sequence
gattgaaacagatgcacgtactgct

SEQ ID NO: 202957 - DNA, 25 bp, Probe sequence
gttgatccgtactttattattgcta

SEQ ID NO: 202958 - DNA, 25 bp, Probe sequence
gtttagctgttgatccgtactttat

SEQ ID NO: 202959 - DNA, 25 bp, Probe sequence
gtattgattttaagtgaccactcag

SEQ ID NO: 202960 - DNA, 25 bp, Probe sequence
gtaggcggtcattgtttagctgttg

SEQ ID NO: 202961 - DNA, 25 bp, Probe sequence
gtaccggtcatgtgacatttcgcta

SEQ ID NO: 202962 - DNA, 25 bp, Probe sequence
gtgcttatgatccacatgttgaatt

SEQ ID NO: 202963 - DNA, 25 bp, Probe sequence
ggaacatgatatgtcacatgctgtc

SEQ ID NO: 202964 - DNA, 25 bp, Probe sequence
tggcttaggttatattggtttacca

SEQ ID NO: 202965 - DNA, 25 bp, Probe sequence
tgtccagaacgtgtactgccaggaa

SEQ ID NO: 202966 - DNA, 25 bp, Probe sequence
tgtagagtcgacaattgcgcctaaa

SEQ ID NO: 202967 - DNA, 25 bp, Probe sequence
tgatgtttttatcattgccgttccg

SEQ ID NO: 202968 - DNA, 25 bp, Probe sequence
tatgcgtgcattagatagtatttta

SEQ ID NO: 202969 - DNA, 25 bp, Probe sequence
tttagtgcattgtccagaacgtgta

SEQ ID NO: 202970 - DNA, 25 bp, Probe sequence
ttattattgctaaagaccctgaaaa

SEQ ID NO: 202971 - DNA, 25 bp, Probe sequence
ttaccaacatcaattatgtttgcaa

SEQ ID NO: 202972 - DNA, 25 bp, Probe sequence
atttgcagaaggttatccccctaca

SEQ ID NO: 202973 - DNA, 25 bp, Probe sequence
aggcctgtcaagtcatgttgctgat

SEQ ID NO: 202974 - DNA, 25 bp, Probe sequence
agtgtcaagcttctgtttaatgtag

SEQ ID NO: 202975 - DNA, 25 bp, Probe sequence
acccatttgctgatgaaggcattgc

SEQ ID NO: 202976 - DNA, 25 bp, Probe sequence
aactggcgtcattgcatacttagaa

SEQ ID NO: 202977 - DNA, 25 bp, Probe sequence
aagcggtatttggtattcatgttaa

SEQ ID NO: 202978 - DNA, 25 bp, Probe sequence
aatcgattaataaaagccggtgcct

SEQ ID NO: 202979 - DNA, 25 bp, Probe sequence
aattaccgcaaaatgtcgttttcat

SEQ ID NO: 202980 - DNA, 25 bp, Probe sequence
caatagtccgaaattacgtactcaa

SEQ ID NO: 202981 - DNA, 25 bp, Probe sequence
ctagctccagcttactttgttttta

SEQ ID NO: 202982 - DNA, 25 bp, Probe sequence
cgcaacagagtatcgctttttctta

SEQ ID NO: 202983 - DNA, 25 bp, Probe sequence
cgccgtcatttacatcaacatcctg

SEQ ID NO: 202984 - DNA, 25 bp, Probe sequence
ccttatcgcagtcaatctgatcatg

SEQ ID NO: 202985 - DNA, 25 bp, Probe sequence
gccggtgcctttgataagtatccaa

SEQ ID NO: 202986 - DNA, 25 bp, Probe sequence
gcttgtggacatgatggtcatacaa

SEQ ID NO: 202987 - DNA, 25 bp, Probe sequence
gaagcgattaacactgtaccaagta

SEQ ID NO: 202988 - DNA, 25 bp, Probe sequence
gaaactggtggcggtgcaaatcgat

SEQ ID NO: 202989 - DNA, 25 bp, Probe sequence
gaaattacggccagcgcaacagagt

SEQ ID NO: 202990 - DNA, 25 bp, Probe sequence
gaggacgccttaataaaagctgatt

SEQ ID NO: 202991 - DNA, 25 bp, Probe sequence
gatcatgtgatgcatgcttgtggac

SEQ ID NO: 202992 - DNA, 25 bp, Probe sequence
gattgcccattggaaactggcgtca

SEQ ID NO: 202993 - DNA, 25 bp, Probe sequence
gttcatattggtcattttaaagctg

SEQ ID NO: 202994 - DNA, 25 bp, Probe sequence
gttacgaaacatcgccgtcatttac

SEQ ID NO: 202995 - DNA, 25 bp, Probe sequence
gttttgtaactggtttgcacacatc

SEQ ID NO: 202996 - DNA, 25 bp, Probe sequence
gtattcatgttaacccatttgctga

SEQ ID NO: 202997 - DNA, 25 bp, Probe sequence
ggtaatggctcacatacgatagcgt

SEQ ID NO: 202998 - DNA, 25 bp, Probe sequence
tgacaaaccaacgccattcttattt

SEQ ID NO: 202999 - DNA, 25 bp, Probe sequence
tcgttttcattttccaacctgcaga

SEQ ID NO: 203000 - DNA, 25 bp, Probe sequence
tcgctttttcttaacaggcctgtca

SEQ ID NO: 203001 - DNA, 25 bp, Probe sequence
tcaacatcctgaattaagcttacat

SEQ ID NO: 203002 - DNA, 25 bp, Probe sequence
taatgctttttgtacaacgttgcaa

SEQ ID NO: 203003 - DNA, 25 bp, Probe sequence
tacgtactcaaatagaggacgcctt

SEQ ID NO: 203004 - DNA, 25 bp, Probe sequence
tatggtcaacaactagctccagctt

SEQ ID NO: 203005 - DNA, 25 bp, Probe sequence
tatccccctacaatcaatagtccga

SEQ ID NO: 203006 - DNA, 25 bp, Probe sequence
attgcggttatagctttgcctttga

SEQ ID NO: 203007 - DNA, 25 bp, Probe sequence
atagctttgcctttgaagtgactaa

SEQ ID NO: 203008 - DNA, 25 bp, Probe sequence
gtgcgagtttttatcgggaaggaca

SEQ ID NO: 203009 - DNA, 25 bp, Probe sequence
acaagctggtgattattgcggttat

SEQ ID NO: 203010 - DNA, 25 bp, Probe sequence
aaaggtgttggtgcaaattctgaac

SEQ ID NO: 203011 - DNA, 25 bp, Probe sequence
aagcacatgttattcaagtgcgcga

SEQ ID NO: 203012 - DNA, 25 bp, Probe sequence
aagcacttatcaatggtaaacgcta

SEQ ID NO: 203013 - DNA, 25 bp, Probe sequence
aagtgcgcgaagtacaagctggtga

SEQ ID NO: 203014 - DNA, 25 bp, Probe sequence
aatttattacatcggtctggattta

SEQ ID NO: 203015 - DNA, 25 bp, Probe sequence
cacagtcaaaaacaatcagccatta

SEQ ID NO: 203016 - DNA, 25 bp, Probe sequence
cggttcaagaccatatagttcactg

SEQ ID NO: 203017 - DNA, 25 bp, Probe sequence
gccgtcgttgacatattactataac

SEQ ID NO: 203018 - DNA, 25 bp, Probe sequence
gctgtagttgatatcggttatggcg

SEQ ID NO: 203019 - DNA, 25 bp, Probe sequence
gcagtttacgagtttgatttagtcc

SEQ ID NO: 203020 - DNA, 25 bp, Probe sequence
gcacaacatcactacgagaagcaat

SEQ ID NO: 203021 - DNA, 25 bp, Probe sequence
gaagcacttttatctgaaggttatc

SEQ ID NO: 203022 - DNA, 25 bp, Probe sequence
gacctagaatttgctgtaactcagt

SEQ ID NO: 203023 - DNA, 25 bp, Probe sequence
gatgagccatatgtttgttgaagta

SEQ ID NO: 203024 - DNA, 25 bp, Probe sequence
gatgcaacaatctttttaatgaatg

SEQ ID NO: 203025 - DNA, 25 bp, Probe sequence
gatacgtgcattaatgatgagccat

SEQ ID NO: 203026 - DNA, 25 bp, Probe sequence
gatatccgcatcgatgaatatacct

SEQ ID NO: 203027 - DNA, 25 bp, Probe sequence
gatatgctgatgaattcgatgtgtc

SEQ ID NO: 203028 - DNA, 25 bp, Probe sequence
gttcgacctaatccatgctcaaaat

SEQ ID NO: 203029 - DNA, 25 bp, Probe sequence
gtaaacgctacccgatacgtgcatt

SEQ ID NO: 203030 - DNA, 25 bp, Probe sequence
gtagatggcaatgtacatgcacaag

SEQ ID NO: 203031 - DNA, 25 bp, Probe sequence
gtaactcagtttatccatgcaggta

SEQ ID NO: 203032 - DNA, 25 bp, Probe sequence
ggttatcagttcgacctaatccatg

SEQ ID NO: 203033 - DNA, 25 bp, Probe sequence
ggtattgcgttatacggttcaagac

SEQ ID NO: 203034 - DNA, 25 bp, Probe sequence
ggtatagatacatttagcacaacat

SEQ ID NO: 203035 - DNA, 25 bp, Probe sequence
ggatggaaattgttgaagcactttt

SEQ ID NO: 203036 - DNA, 25 bp, Probe sequence
ggacccattttggatatgctgatga

SEQ ID NO: 203037 - DNA, 25 bp, Probe sequence
tgttgaacgttcacaatggatggaa

SEQ ID NO: 203038 - DNA, 25 bp, Probe sequence
tacacatgactttgccgtcgttgac

SEQ ID NO: 203039 - DNA, 25 bp, Probe sequence
tattagtggtttatggacccatttt

SEQ ID NO: 203040 - DNA, 25 bp, Probe sequence
attacgagttaatccaggtgttgaa

SEQ ID NO: 203041 - DNA, 25 bp, Probe sequence
atatcattactctatggcatccaat

SEQ ID NO: 203042 - DNA, 25 bp, Probe sequence
atcttgctatattatcaactggtgc

SEQ ID NO: 203043 - DNA, 25 bp, Probe sequence
atgtgagtctggtgatatcattatt

SEQ ID NO: 203044 - DNA, 25 bp, Probe sequence
agtcgcatccatttccatggtaaca

SEQ ID NO: 203045 - DNA, 25 bp, Probe sequence
acagttagatgttgtttctgaaggt

SEQ ID NO: 203046 - DNA, 25 bp, Probe sequence
aaatatgtttcaatcgatggcggta

SEQ ID NO: 203047 - DNA, 25 bp, Probe sequence
aaatgcaaaagccttctgtgttttt

SEQ ID NO: 203048 - DNA, 25 bp, Probe sequence
aaagctttggtacacctaccattgt

SEQ ID NO: 203049 - DNA, 25 bp, Probe sequence
aaacgtggagactatcttgctatat

SEQ ID NO: 203050 - DNA, 25 bp, Probe sequence
aaaagatggcaaagcacgtgaagtt

SEQ ID NO: 203051 - DNA, 25 bp, Probe sequence
aagacgctaaattaccttcatcagt

SEQ ID NO: 203052 - DNA, 25 bp, Probe sequence
aagttctaggtatagatgcaccaga

SEQ ID NO: 203053 - DNA, 25 bp, Probe sequence
aatcgatggcggtatgagtgatcat

SEQ ID NO: 203054 - DNA, 25 bp, Probe sequence
aatagaccgctatgctaatgatacg

SEQ ID NO: 203055 - DNA, 25 bp, Probe sequence
ctatggcatccaattacaatcaaat

SEQ ID NO: 203056 - DNA, 25 bp, Probe sequence
ccgttaccatcgcgcatttaaagat

SEQ ID NO: 203057 - DNA, 25 bp, Probe sequence
gaagaagcagatgacagtgtaacta

SEQ ID NO: 203058 - DNA, 25 bp, Probe sequence
gaagctggcgttactttatatgaag

SEQ ID NO: 203059 - DNA, 25 bp, Probe sequence
gacgcaaagtatcaagcattgcttg

SEQ ID NO: 203060 - DNA, 25 bp, Probe sequence
gattatcaattcaatatggcttagc

SEQ ID NO: 203061 - DNA, 25 bp, Probe sequence
gattgaaggtacagaagcatttatt

SEQ ID NO: 203062 - DNA, 25 bp, Probe sequence
gttgaagcacatacacacgaattta

SEQ ID NO: 203063 - DNA, 25 bp, Probe sequence
gtaggtgaagctggcgttactttat

SEQ ID NO: 203064 - DNA, 25 bp, Probe sequence
gtgatcatatcagaactgcacttta

SEQ ID NO: 203065 - DNA, 25 bp, Probe sequence
gtgtacattgtcatattggttcaca

SEQ ID NO: 203066 - DNA, 25 bp, Probe sequence
ggtacacctaccattgtttatgatg

SEQ ID NO: 203067 - DNA, 25 bp, Probe sequence
tcagaactgcactttatgacgcaaa

SEQ ID NO: 203068 - DNA, 25 bp, Probe sequence
tcaactggtgcatatcattactcta

SEQ ID NO: 203069 - DNA, 25 bp, Probe sequence
taaaccttggtggtggctttggtat

SEQ ID NO: 203070 - DNA, 25 bp, Probe sequence
tagagaacagatgcgccgttaccat

SEQ ID NO: 203071 - DNA, 25 bp, Probe sequence
ttaccttcatcagtcaaacgtggag

SEQ ID NO: 203072 - DNA, 25 bp, Probe sequence
ttccctatcgaaagtggtattaaag

SEQ ID NO: 203073 - DNA, 25 bp, Probe sequence
ttgttttacgttggcttaaagagca

SEQ ID NO: 203074 - DNA, 25 bp, Probe sequence
attgaaggtgcctcaccagcatcaa

SEQ ID NO: 203075 - DNA, 25 bp, Probe sequence
attcggacgcgttcaaggcgtcgga

SEQ ID NO: 203076 - DNA, 25 bp, Probe sequence
agccatcaacttgaagagttagaac

SEQ ID NO: 203077 - DNA, 25 bp, Probe sequence
acaagtattcggacgcgttcaaggc

SEQ ID NO: 203078 - DNA, 25 bp, Probe sequence
acacaacgcattgcaatgaactata

SEQ ID NO: 203079 - DNA, 25 bp, Probe sequence
aaaattatcggattttcgatcaata

SEQ ID NO: 203080 - DNA, 25 bp, Probe sequence
aacattgtcggtactgttcaaaatg

SEQ ID NO: 203081 - DNA, 25 bp, Probe sequence
aagtattcggacgcgttcaaggcgt

SEQ ID NO: 203082 - DNA, 25 bp, Probe sequence
caaggtgtaattgaaggtgcctcac

SEQ ID NO: 203083 - DNA, 25 bp, Probe sequence
catttacaagtattcggacgcgttc

SEQ ID NO: 203084 - DNA, 25 bp, Probe sequence
ctataacattgtcggtactgttcaa

SEQ ID NO: 203085 - DNA, 25 bp, Probe sequence
tcggacgcgttcaaggcgtcggatt

SEQ ID NO: 203086 - DNA, 25 bp, Probe sequence
gcgtcggatttagatattttacaca

SEQ ID NO: 203087 - DNA, 25 bp, Probe sequence
gcgttcaaggcgtcggatttagata

SEQ ID NO: 203088 - DNA, 25 bp, Probe sequence
gcacaaggggatgacgcagatatag

SEQ ID NO: 203089 - DNA, 25 bp, Probe sequence
gagacatatacatttacaagtattc

SEQ ID NO: 203090 - DNA, 25 bp, Probe sequence
gagatatatgcacaaggggatgacg

SEQ ID NO: 203091 - DNA, 25 bp, Probe sequence
gatgactatgtagagatatatgcac

SEQ ID NO: 203092 - DNA, 25 bp, Probe sequence
gtgcctcaccagcatcaaatgtaac

SEQ ID NO: 203093 - DNA, 25 bp, Probe sequence
gtgtaattgaaggtgcctcaccagc

SEQ ID NO: 203094 - DNA, 25 bp, Probe sequence
gggatgacgcagatatagagagatt

SEQ ID NO: 203095 - DNA, 25 bp, Probe sequence
ggtgcctcaccagcatcaaatgtaa

SEQ ID NO: 203096 - DNA, 25 bp, Probe sequence
ggtactgttcaaaatgtagatgact

SEQ ID NO: 203097 - DNA, 25 bp, Probe sequence
ggatttagatattttacacaacgca

SEQ ID NO: 203098 - DNA, 25 bp, Probe sequence
ggacgcgttcaaggcgtcggattta

SEQ ID NO: 203099 - DNA, 25 bp, Probe sequence
tgaactataacattgtcggtactgt

SEQ ID NO: 203100 - DNA, 25 bp, Probe sequence
tgaaggtgcctcaccagcatcaaat

SEQ ID NO: 203101 - DNA, 25 bp, Probe sequence
tcaaggcgtcggatttagatatttt

SEQ ID NO: 203102 - DNA, 25 bp, Probe sequence
taattgaaggtgcctcaccagcatc

SEQ ID NO: 203103 - DNA, 25 bp, Probe sequence
tagagagatttattcaaggtgtaat

SEQ ID NO: 203104 - DNA, 25 bp, Probe sequence
tagatattttacacaacgcattgca

SEQ ID NO: 203105 - DNA, 25 bp, Probe sequence
tattttacacaacgcattgcaatga

SEQ ID NO: 203106 - DNA, 25 bp, Probe sequence
tttacaagtattcggacgcgttcaa

SEQ ID NO: 203107 - DNA, 25 bp, Probe sequence
ttgtcggtactgttcaaaatgtaga

SEQ ID NO: 203108 - DNA, 25 bp, Probe sequence
attcctgtagcgtttttaacaagca

SEQ ID NO: 203109 - DNA, 25 bp, Probe sequence
attgcacttgatgtatcttttttaa

SEQ ID NO: 203110 - DNA, 25 bp, Probe sequence
atttctcatatatttggggtgttag

SEQ ID NO: 203111 - DNA, 25 bp, Probe sequence
ataccaaatttcacgttctatttat

SEQ ID NO: 203112 - DNA, 25 bp, Probe sequence
atgtctattggtattgttggctttt

SEQ ID NO: 203113 - DNA, 25 bp, Probe sequence
agagacctgcatcattttataaagt

SEQ ID NO: 203114 - DNA, 25 bp, Probe sequence
actcacttcacgcaaatatttaaac

SEQ ID NO: 203115 - DNA, 25 bp, Probe sequence
aaagcgtctcaacgaagatgattat

SEQ ID NO: 203116 - DNA, 25 bp, Probe sequence
aacacgaattactttggatgaggtc

SEQ ID NO: 203117 - DNA, 25 bp, Probe sequence
aacgtatgtcaatataagatcaatt

SEQ ID NO: 203118 - DNA, 25 bp, Probe sequence
aatcgctgatttaaagcgtctcaac

SEQ ID NO: 203119 - DNA, 25 bp, Probe sequence
aatcatacacaccaaaaacttagag

SEQ ID NO: 203120 - DNA, 25 bp, Probe sequence
caaaaactcacttcacgcaaatatt

SEQ ID NO: 203121 - DNA, 25 bp, Probe sequence
cacgttctatttatacgacagttag

SEQ ID NO: 203122 - DNA, 25 bp, Probe sequence
cgaaatcagttaaatcatacacacc

SEQ ID NO: 203123 - DNA, 25 bp, Probe sequence
ccgatacaaaaactcacttcacgca

SEQ ID NO: 203124 - DNA, 25 bp, Probe sequence
gacagttagacagagacctgcatca

SEQ ID NO: 203125 - DNA, 25 bp, Probe sequence
gacagagacctgcatcattttataa

SEQ ID NO: 203126 - DNA, 25 bp, Probe sequence
gactatcgctatattcgaaatcagt

SEQ ID NO: 203127 - DNA, 25 bp, Probe sequence
gatgattatgaacgtttagatattg

SEQ ID NO: 203128 - DNA, 25 bp, Probe sequence
gataatgctttaaatttggttgatg

SEQ ID NO: 203129 - DNA, 25 bp, Probe sequence
gatatataccaaatttcacgttcta

SEQ ID NO: 203130 - DNA, 25 bp, Probe sequence
gttggctttttaatgacatacctac

SEQ ID NO: 203131 - DNA, 25 bp, Probe sequence
gtagcgtttttaacaagcatatttg

SEQ ID NO: 203132 - DNA, 25 bp, Probe sequence
ggtcaaacgaacattaatcgctgat

SEQ ID NO: 203133 - DNA, 25 bp, Probe sequence
ggtttgactagaaaagactatcgct

SEQ ID NO: 203134 - DNA, 25 bp, Probe sequence
ggatgaggtcaaacgaacattaatc

SEQ ID NO: 203135 - DNA, 25 bp, Probe sequence
ggctttttttattctcatattgata

SEQ ID NO: 203136 - DNA, 25 bp, Probe sequence
tggggtgttagtgggaattcctgta

SEQ ID NO: 203137 - DNA, 25 bp, Probe sequence
tcttttttaattgatatgtctattg

SEQ ID NO: 203138 - DNA, 25 bp, Probe sequence
taatgacatacctaccgatacaaaa

SEQ ID NO: 203139 - DNA, 25 bp, Probe sequence
tacacgtctagcaaaaatgcccaaa

SEQ ID NO: 203140 - DNA, 25 bp, Probe sequence
tagtgggaattcctgtagcgttttt

SEQ ID NO: 203141 - DNA, 25 bp, Probe sequence
ttggttgatgcatatacacgtctag

SEQ ID NO: 203142 - DNA, 25 bp, Probe sequence
attgcatatcattgctgcacagcaa

SEQ ID NO: 203143 - DNA, 25 bp, Probe sequence
atcaaatggccattgcgcttacatt

SEQ ID NO: 203144 - DNA, 25 bp, Probe sequence
atcgcataacgattcaactgcagaa

SEQ ID NO: 203145 - DNA, 25 bp, Probe sequence
atgacttacagctttcaagacaaat

SEQ ID NO: 203146 - DNA, 25 bp, Probe sequence
agtgctcaagtcgatcgcataacga

SEQ ID NO: 203147 - DNA, 25 bp, Probe sequence
agttgctgcacaacgagctgtcact

SEQ ID NO: 203148 - DNA, 25 bp, Probe sequence
agcgcagcaatccactaatcaaatg

SEQ ID NO: 203149 - DNA, 25 bp, Probe sequence
acgagctgtcactgatacaactaat

SEQ ID NO: 203150 - DNA, 25 bp, Probe sequence
acaaatgtctcaattttcacatcaa

SEQ ID NO: 203151 - DNA, 25 bp, Probe sequence
aaatactgataaaccatctatgtta

SEQ ID NO: 203152 - DNA, 25 bp, Probe sequence
aaagtaaagatgttggtcctattgg

SEQ ID NO: 203153 - DNA, 25 bp, Probe sequence
aaacaggtagacacaatcagtaaac

SEQ ID NO: 203154 - DNA, 25 bp, Probe sequence
aactgcaacagaaaatgagcgtggc

SEQ ID NO: 203155 - DNA, 25 bp, Probe sequence
aacgcatatatgacttacagctttc

SEQ ID NO: 203156 - DNA, 25 bp, Probe sequence
caactgcagaaacatcaaacacatt

SEQ ID NO: 203157 - DNA, 25 bp, Probe sequence
cgcgaagaacgacaattagctgaaa

SEQ ID NO: 203158 - DNA, 25 bp, Probe sequence
gcaaagtcgtctatcaatgaaatct

SEQ ID NO: 203159 - DNA, 25 bp, Probe sequence
gcaaactgcgccacaaattcgtatg

SEQ ID NO: 203160 - DNA, 25 bp, Probe sequence
gcaatcagttagtgctcaagtcgat

SEQ ID NO: 203161 - DNA, 25 bp, Probe sequence
gaatttttagcagagcaaagtcgtc

SEQ ID NO: 203162 - DNA, 25 bp, Probe sequence
gaaagccatccactagatgatttta

SEQ ID NO: 203163 - DNA, 25 bp, Probe sequence
gagacagcgtaatgcagttgctgca

SEQ ID NO: 203164 - DNA, 25 bp, Probe sequence
gatgacttatcattgcatatcattg

SEQ ID NO: 203165 - DNA, 25 bp, Probe sequence
gatacattgaaacgtacacagcgta

SEQ ID NO: 203166 - DNA, 25 bp, Probe sequence
gtttcaaagaaagccatccactaga

SEQ ID NO: 203167 - DNA, 25 bp, Probe sequence
gtacacagcgtaacattattgagac

SEQ ID NO: 203168 - DNA, 25 bp, Probe sequence
ggtcctattggagatactttgtcag

SEQ ID NO: 203169 - DNA, 25 bp, Probe sequence
ggccattgcgcttacattaatgaga

SEQ ID NO: 203170 - DNA, 25 bp, Probe sequence
tgaaaagctaccacaattgcaacag

SEQ ID NO: 203171 - DNA, 25 bp, Probe sequence
tgcaacagcaagcgcagcaatccac

SEQ ID NO: 203172 - DNA, 25 bp, Probe sequence
tgcgccacaaattcgtatgattcaa

SEQ ID NO: 203173 - DNA, 25 bp, Probe sequence
taattattcaacaacacggtcgcga

SEQ ID NO: 203174 - DNA, 25 bp, Probe sequence
ttcaacaacacggtcgcgaagaacg

SEQ ID NO: 203175 - DNA, 25 bp, Probe sequence
ttttgacaagtattccactatggaa

SEQ ID NO: 203176 - DNA, 25 bp, Probe sequence
attgggcgtcaatgcaaagacagtt

SEQ ID NO: 203177 - DNA, 25 bp, Probe sequence
atgccggaacaattatccgtaagaa

SEQ ID NO: 203178 - DNA, 25 bp, Probe sequence
atgcaaagacagttggtcattggga

SEQ ID NO: 203179 - DNA, 25 bp, Probe sequence
atgttacagtttacgctttagcaaa

SEQ ID NO: 203180 - DNA, 25 bp, Probe sequence
agtagcagatatattgggcgtcaat

SEQ ID NO: 203181 - DNA, 25 bp, Probe sequence
aagtagcagatatattgggcgtcaa

SEQ ID NO: 203182 - DNA, 25 bp, Probe sequence
aatggagacttgtaagggacttgaa

SEQ ID NO: 203183 - DNA, 25 bp, Probe sequence
aatgttacagtttacgctttagcaa

SEQ ID NO: 203184 - DNA, 25 bp, Probe sequence
cagtttacgctttagcaaagttata

SEQ ID NO: 203185 - DNA, 25 bp, Probe sequence
gcgtcaatgcaaagacagttggtca

SEQ ID NO: 203186 - DNA, 25 bp, Probe sequence
gcagatatattgggcgtcaatgcaa

SEQ ID NO: 203187 - DNA, 25 bp, Probe sequence
gcaaagacagttggtcattgggaaa

SEQ ID NO: 203188 - DNA, 25 bp, Probe sequence
gaagtagcagatatattgggcgtca

SEQ ID NO: 203189 - DNA, 25 bp, Probe sequence
gaaaatggagacttgtaagggactt

SEQ ID NO: 203190 - DNA, 25 bp, Probe sequence
gacactaatttaagtaatgttacag

SEQ ID NO: 203191 - DNA, 25 bp, Probe sequence
gacagttggtcattgggaaaaggat

SEQ ID NO: 203192 - DNA, 25 bp, Probe sequence
gacttgtaagggacttgaaacagca

SEQ ID NO: 203193 - DNA, 25 bp, Probe sequence
gatatattgggcgtcaatgcaaaga

SEQ ID NO: 203194 - DNA, 25 bp, Probe sequence
gatattgaggtagaccagataaagg

SEQ ID NO: 203195 - DNA, 25 bp, Probe sequence
gttacagtttacgctttagcaaagt

SEQ ID NO: 203196 - DNA, 25 bp, Probe sequence
gtttacgctttagcaaagttatatg

SEQ ID NO: 203197 - DNA, 25 bp, Probe sequence
gttatatgatattgaggtagaccag

SEQ ID NO: 203198 - DNA, 25 bp, Probe sequence
gtcaatgcaaagacagttggtcatt

SEQ ID NO: 203199 - DNA, 25 bp, Probe sequence
gggcgtcaatgcaaagacagttggt

SEQ ID NO: 203200 - DNA, 25 bp, Probe sequence
gggacttgaaacagcaagaagtagc

SEQ ID NO: 203201 - DNA, 25 bp, Probe sequence
gggaaaaggatgacactaatttaag

SEQ ID NO: 203202 - DNA, 25 bp, Probe sequence
ggagacttgtaagggacttgaaaca

SEQ ID NO: 203203 - DNA, 25 bp, Probe sequence
ggatgacactaatttaagtaatgtt

SEQ ID NO: 203204 - DNA, 25 bp, Probe sequence
ggaacaattatccgtaagaaaatgg

SEQ ID NO: 203205 - DNA, 25 bp, Probe sequence
ggcgtcaatgcaaagacagttggtc

SEQ ID NO: 203206 - DNA, 25 bp, Probe sequence
tgttacagtttacgctttagcaaag

SEQ ID NO: 203207 - DNA, 25 bp, Probe sequence
taatgttacagtttacgctttagca

SEQ ID NO: 203208 - DNA, 25 bp, Probe sequence
tacagtttacgctttagcaaagtta

SEQ ID NO: 203209 - DNA, 25 bp, Probe sequence
tagcagatatattgggcgtcaatgc

SEQ ID NO: 203210 - DNA, 25 bp, Probe sequence
attaaagatgattctcttacttctt

SEQ ID NO: 203211 - DNA, 25 bp, Probe sequence
atcaatacagttaccaagctgacaa

SEQ ID NO: 203212 - DNA, 25 bp, Probe sequence
atgattctcttacttcttgaagata

SEQ ID NO: 203213 - DNA, 25 bp, Probe sequence
aggtaggacttgccagtgataactg

SEQ ID NO: 203214 - DNA, 25 bp, Probe sequence
agatgattctcttacttcttgaaga

SEQ ID NO: 203215 - DNA, 25 bp, Probe sequence
acagttaccaagctgacaaggtagg

SEQ ID NO: 203216 - DNA, 25 bp, Probe sequence
aaataatcaatacagttaccaagct

SEQ ID NO: 203217 - DNA, 25 bp, Probe sequence
aactgtcaacaaatagcaaataact

SEQ ID NO: 203218 - DNA, 25 bp, Probe sequence
aagctgacaaggtaggacttgccag

SEQ ID NO: 203219 - DNA, 25 bp, Probe sequence
aaggtaggacttgccagtgataact

SEQ ID NO: 203220 - DNA, 25 bp, Probe sequence
aagatgattctcttacttcttgaag

SEQ ID NO: 203221 - DNA, 25 bp, Probe sequence
aatacagttaccaagctgacaaggt

SEQ ID NO: 203222 - DNA, 25 bp, Probe sequence
cttgccagtgataactgtcaacaaa

SEQ ID NO: 203223 - DNA, 25 bp, Probe sequence
ctcttacttcttgaagatataccaa

SEQ ID NO: 203224 - DNA, 25 bp, Probe sequence
ccaagctgacaaggtaggacttgcc

SEQ ID NO: 203225 - DNA, 25 bp, Probe sequence
ccagtgataactgtcaacaaatagc

SEQ ID NO: 203226 - DNA, 25 bp, Probe sequence
gctgacaaggtaggacttgccagtg

SEQ ID NO: 203227 - DNA, 25 bp, Probe sequence
gcaaataactataagcactatggat

SEQ ID NO: 203228 - DNA, 25 bp, Probe sequence
gaatggaatcgattagtaaatgaag

SEQ ID NO: 203229 - DNA, 25 bp, Probe sequence
gacttgccagtgataactgtcaaca

SEQ ID NO: 203230 - DNA, 25 bp, Probe sequence
gacaaggtaggacttgccagtgata

SEQ ID NO: 203231 - DNA, 25 bp, Probe sequence
gagacgaatggaatcgattagtaaa

SEQ ID NO: 203232 - DNA, 25 bp, Probe sequence
gatgattctcttacttcttgaagat

SEQ ID NO: 203233 - DNA, 25 bp, Probe sequence
gatataccaagagacgaatggaatc

SEQ ID NO: 203234 - DNA, 25 bp, Probe sequence
gattctcttacttcttgaagatata

SEQ ID NO: 203235 - DNA, 25 bp, Probe sequence
gttaccaagctgacaaggtaggact

SEQ ID NO: 203236 - DNA, 25 bp, Probe sequence
gtgataactgtcaacaaatagcaaa

SEQ ID NO: 203237 - DNA, 25 bp, Probe sequence
ggtaggacttgccagtgataactgt

SEQ ID NO: 203238 - DNA, 25 bp, Probe sequence
ggacttgccagtgataactgtcaac

SEQ ID NO: 203239 - DNA, 25 bp, Probe sequence
taatcaatacagttaccaagctgac

SEQ ID NO: 203240 - DNA, 25 bp, Probe sequence
taactataagcactatggattttaa

SEQ ID NO: 203241 - DNA, 25 bp, Probe sequence
taaagatgattctcttacttcttga

SEQ ID NO: 203242 - DNA, 25 bp, Probe sequence
taggacttgccagtgataactgtca

SEQ ID NO: 203243 - DNA, 25 bp, Probe sequence
ttctcttacttcttgaagatatacc

SEQ ID NO: 203244 - DNA, 25 bp, Probe sequence
attttcagaagagatcatgcgtcag

SEQ ID NO: 203245 - DNA, 25 bp, Probe sequence
atcatgcgtcagtagaatctttaac

SEQ ID NO: 203246 - DNA, 25 bp, Probe sequence
atgcgtcagtagaatctttaacaga

SEQ ID NO: 203247 - DNA, 25 bp, Probe sequence
atgaacgtcgactaagaaaggaaat

SEQ ID NO: 203248 - DNA, 25 bp, Probe sequence
agggttagacataatcataccaagg

SEQ ID NO: 203249 - DNA, 25 bp, Probe sequence
agatcatgcgtcagtagaatcttta

SEQ ID NO: 203250 - DNA, 25 bp, Probe sequence
agagatcatgcgtcagtagaatctt

SEQ ID NO: 203251 - DNA, 25 bp, Probe sequence
agaagagatcatgcgtcagtagaat

SEQ ID NO: 203252 - DNA, 25 bp, Probe sequence
aacagaaaatgaacgtcgactaaga

SEQ ID NO: 203253 - DNA, 25 bp, Probe sequence
aatcagaagggttagacataatcat

SEQ ID NO: 203254 - DNA, 25 bp, Probe sequence
cagaagagatcatgcgtcagtagaa

SEQ ID NO: 203255 - DNA, 25 bp, Probe sequence
catgcgtcagtagaatctttaacag

SEQ ID NO: 203256 - DNA, 25 bp, Probe sequence
cataccaaggattttcagaagagat

SEQ ID NO: 203257 - DNA, 25 bp, Probe sequence
cataatcataccaaggattttcaga

SEQ ID NO: 203258 - DNA, 25 bp, Probe sequence
gcgtcagtagaatctttaacagaaa

SEQ ID NO: 203259 - DNA, 25 bp, Probe sequence
gaatctttaacagaaaatgaacgtc

SEQ ID NO: 203260 - DNA, 25 bp, Probe sequence
gaagggttagacataatcataccaa

SEQ ID NO: 203261 - DNA, 25 bp, Probe sequence
gaagagatcatgcgtcagtagaatc

SEQ ID NO: 203262 - DNA, 25 bp, Probe sequence
gaacgtcgactaagaaaggaaatat

SEQ ID NO: 203263 - DNA, 25 bp, Probe sequence
gaaaatgaacgtcgactaagaaagg

SEQ ID NO: 203264 - DNA, 25 bp, Probe sequence
gacataatcataccaaggattttca

SEQ ID NO: 203265 - DNA, 25 bp, Probe sequence
gagatcatgcgtcagtagaatcttt

SEQ ID NO: 203266 - DNA, 25 bp, Probe sequence
gatcatgcgtcagtagaatctttaa

SEQ ID NO: 203267 - DNA, 25 bp, Probe sequence
ggttagacataatcataccaaggat

SEQ ID NO: 203268 - DNA, 25 bp, Probe sequence
ggattttcagaagagatcatgcgtc

SEQ ID NO: 203269 - DNA, 25 bp, Probe sequence
tgcgtcagtagaatctttaacagaa

SEQ ID NO: 203270 - DNA, 25 bp, Probe sequence
tcataccaaggattttcagaagaga

SEQ ID NO: 203271 - DNA, 25 bp, Probe sequence
tcagaagagatcatgcgtcagtaga

SEQ ID NO: 203272 - DNA, 25 bp, Probe sequence
tcatgcgtcagtagaatctttaaca

SEQ ID NO: 203273 - DNA, 25 bp, Probe sequence
tcagaagggttagacataatcatac

SEQ ID NO: 203274 - DNA, 25 bp, Probe sequence
tttaacagaaaatgaacgtcgacta

SEQ ID NO: 203275 - DNA, 25 bp, Probe sequence
tttcagaagagatcatgcgtcagta

SEQ ID NO: 203276 - DNA, 25 bp, Probe sequence
ttttcagaagagatcatgcgtcagt

SEQ ID NO: 203277 - DNA, 25 bp, Probe sequence
ttcagaagagatcatgcgtcagtag

SEQ ID NO: 203278 - DNA, 25 bp, Probe sequence
atttagcgagcgaaatcgatgaaga

SEQ ID NO: 203279 - DNA, 25 bp, Probe sequence
atgactcaagacgaattaagggatt

SEQ ID NO: 203280 - DNA, 25 bp, Probe sequence
accgtcgtcacattgtgtgattggg

SEQ ID NO: 203281 - DNA, 25 bp, Probe sequence
atcgctgatgttatcaaaatgcgtt

SEQ ID NO: 203282 - DNA, 25 bp, Probe sequence
atgtagggattagcaacggagattt

SEQ ID NO: 203283 - DNA, 25 bp, Probe sequence
agattttacaccgtcgtcacattgt

SEQ ID NO: 203284 - DNA, 25 bp, Probe sequence
agacatgactcaagacgaattaagg

SEQ ID NO: 203285 - DNA, 25 bp, Probe sequence
acaccgtcgtcacattgtgtgattg

SEQ ID NO: 203286 - DNA, 25 bp, Probe sequence
aacgtagagctgtttaccgagatat

SEQ ID NO: 203287 - DNA, 25 bp, Probe sequence
gctgtttaccgagatatcgctgatg

SEQ ID NO: 203288 - DNA, 25 bp, Probe sequence
gctaatttattgaaacgtagagctg

SEQ ID NO: 203289 - DNA, 25 bp, Probe sequence
gcagaattgtttgatttagcgagcg

SEQ ID NO: 203290 - DNA, 25 bp, Probe sequence
gcaacggagattttacaccgtcgtc

SEQ ID NO: 203291 - DNA, 25 bp, Probe sequence
gaattgtttgatttagcgagcgaaa

SEQ ID NO: 203292 - DNA, 25 bp, Probe sequence
gaatgcagaattgtttgatttagcg

SEQ ID NO: 203293 - DNA, 25 bp, Probe sequence
gaaacgtagagctgtttaccgagat

SEQ ID NO: 203294 - DNA, 25 bp, Probe sequence
gagctgtttaccgagatatcgctga

SEQ ID NO: 203295 - DNA, 25 bp, Probe sequence
gagcgaaatcgatgaagaaactgaa

SEQ ID NO: 203296 - DNA, 25 bp, Probe sequence
gagattttacaccgtcgtcacattg

SEQ ID NO: 203297 - DNA, 25 bp, Probe sequence
gagatatcgctgatgttatcaaaat

SEQ ID NO: 203298 - DNA, 25 bp, Probe sequence
gattttacaccgtcgtcacattgtg

SEQ ID NO: 203299 - DNA, 25 bp, Probe sequence
gattgggaatgttgttgatattgct

SEQ ID NO: 203300 - DNA, 25 bp, Probe sequence
gttgttgatattgctaatttattga

SEQ ID NO: 203301 - DNA, 25 bp, Probe sequence
gtttaccgagatatcgctgatgtta

SEQ ID NO: 203302 - DNA, 25 bp, Probe sequence
gtagagctgtttaccgagatatcgc

SEQ ID NO: 203303 - DNA, 25 bp, Probe sequence
gtcgtcacattgtgtgattgggaat

SEQ ID NO: 203304 - DNA, 25 bp, Probe sequence
gggaatgttgttgatattgctaatt

SEQ ID NO: 203305 - DNA, 25 bp, Probe sequence
gggattagcaacggagattttacac

SEQ ID NO: 203306 - DNA, 25 bp, Probe sequence
ggagattttacaccgtcgtcacatt

SEQ ID NO: 203307 - DNA, 25 bp, Probe sequence
tgaagaaactgaatttgacgtttta

SEQ ID NO: 203308 - DNA, 25 bp, Probe sequence
tacttttttcaaatgtagggattag

SEQ ID NO: 203309 - DNA, 25 bp, Probe sequence
taccgagatatcgctgatgttatca

SEQ ID NO: 203310 - DNA, 25 bp, Probe sequence
ttacaccgtcgtcacattgtgtgat

SEQ ID NO: 203311 - DNA, 25 bp, Probe sequence
ttttacaccgtcgtcacattgtgtg

SEQ ID NO: 203312 - DNA, 25 bp, Probe sequence
attgttatgcaattgtcattacatt

SEQ ID NO: 203313 - DNA, 25 bp, Probe sequence
atttcagcaactttaggtaatgtca

SEQ ID NO: 203314 - DNA, 25 bp, Probe sequence
agcattacacgcaatctttgatgtt

SEQ ID NO: 203315 - DNA, 25 bp, Probe sequence
acgcaatctttgatgttgtgccacg

SEQ ID NO: 203316 - DNA, 25 bp, Probe sequence
aaatctttggtatttcagcaacttt

SEQ ID NO: 203317 - DNA, 25 bp, Probe sequence
aacaaggtttaattgcatgggttgc

SEQ ID NO: 203318 - DNA, 25 bp, Probe sequence
aacagttttcaatgtaccatttgga

SEQ ID NO: 203319 - DNA, 25 bp, Probe sequence
cttatggtacttatgtatcgctttt

SEQ ID NO: 203320 - DNA, 25 bp, Probe sequence
gcttctatttatttagcaacagata

SEQ ID NO: 203321 - DNA, 25 bp, Probe sequence
gcatgggttgcaattggcacaatca

SEQ ID NO: 203322 - DNA, 25 bp, Probe sequence
gcacaatcattgccaacatacaagt

SEQ ID NO: 203323 - DNA, 25 bp, Probe sequence
gagcagtttggttaggcttttcatc

SEQ ID NO: 203324 - DNA, 25 bp, Probe sequence
gatgtatttatcttttcactaatta

SEQ ID NO: 203325 - DNA, 25 bp, Probe sequence
gataaaacgtttttcatccgtgcat

SEQ ID NO: 203326 - DNA, 25 bp, Probe sequence
gatatttatgggcgtagagttgcaa

SEQ ID NO: 203327 - DNA, 25 bp, Probe sequence
gtttacctggtacagttgtatttga

SEQ ID NO: 203328 - DNA, 25 bp, Probe sequence
gtttggttaggcttttcatcaacat

SEQ ID NO: 203329 - DNA, 25 bp, Probe sequence
gtaccatttggatatattgctaaat

SEQ ID NO: 203330 - DNA, 25 bp, Probe sequence
gtcattacattttattcctgcacca

SEQ ID NO: 203331 - DNA, 25 bp, Probe sequence
ggtaatgtcatgtttgcttctattt

SEQ ID NO: 203332 - DNA, 25 bp, Probe sequence
ggtacttatgtatcgcttttttggt

SEQ ID NO: 203333 - DNA, 25 bp, Probe sequence
ggtagtacatttttaagctcaataa

SEQ ID NO: 203334 - DNA, 25 bp, Probe sequence
ggcacaaaaagcattacacgcaatc

SEQ ID NO: 203335 - DNA, 25 bp, Probe sequence
tgtatcgcttttttggtaaacaagg

SEQ ID NO: 203336 - DNA, 25 bp, Probe sequence
tgtcatgtttgcttctatttattta

SEQ ID NO: 203337 - DNA, 25 bp, Probe sequence
tcgcatatattattggtcaacatat

SEQ ID NO: 203338 - DNA, 25 bp, Probe sequence
tttatcggaagtttacctggtacag

SEQ ID NO: 203339 - DNA, 25 bp, Probe sequence
tcattgccaacatacaagtgattaa

SEQ ID NO: 203340 - DNA, 25 bp, Probe sequence
taaaattagcttcaacagttttcaa

SEQ ID NO: 203341 - DNA, 25 bp, Probe sequence
tagttacgtttattgcaacgttcgt

SEQ ID NO: 203342 - DNA, 25 bp, Probe sequence
taggcttttcatcaacattaattat

SEQ ID NO: 203343 - DNA, 25 bp, Probe sequence
ttaggactagttacgtttattgcaa

SEQ ID NO: 203344 - DNA, 25 bp, Probe sequence
ttacattttattcctgcaccagaag

SEQ ID NO: 203345 - DNA, 25 bp, Probe sequence
ttcctgcaccagaagatatggcaca

SEQ ID NO: 203346 - DNA, 25 bp, Probe sequence
agacgggacgtttaggttctatgat

SEQ ID NO: 203347 - DNA, 25 bp, Probe sequence
aaaaactagaatcatggaacctcct

SEQ ID NO: 203348 - DNA, 25 bp, Probe sequence
atgaaccttttaacatcgacgaaat

SEQ ID NO: 203349 - DNA, 25 bp, Probe sequence
agcttaccatcactttgaagacaag

SEQ ID NO: 203350 - DNA, 25 bp, Probe sequence
acggcagacacgtattattgctttt

SEQ ID NO: 203351 - DNA, 25 bp, Probe sequence
caagaaatcccagttttacgctacg

SEQ ID NO: 203352 - DNA, 25 bp, Probe sequence
catggaacctcctagtacaaaaagg

SEQ ID NO: 203353 - DNA, 25 bp, Probe sequence
ccagttttacgctacgataaaccag

SEQ ID NO: 203354 - DNA, 25 bp, Probe sequence
gagggaataaagttgttacgtcaag

SEQ ID NO: 203355 - DNA, 25 bp, Probe sequence
gaatcatggaacctcctagtacaaa

SEQ ID NO: 203356 - DNA, 25 bp, Probe sequence
gaaccttttaacatcgacgaaatag

SEQ ID NO: 203357 - DNA, 25 bp, Probe sequence
gaaatcccagttttacgctacgata

SEQ ID NO: 203358 - DNA, 25 bp, Probe sequence
gaaatagatttttggttgaggtttg

SEQ ID NO: 203359 - DNA, 25 bp, Probe sequence
gaaatattgattcagaatttttcaa

SEQ ID NO: 203360 - DNA, 25 bp, Probe sequence
gacaagcaacattttttaacaacat

SEQ ID NO: 203361 - DNA, 25 bp, Probe sequence
gttctatgatgattataccaaccaa

SEQ ID NO: 203362 - DNA, 25 bp, Probe sequence
gttagcttaccatcactttgaagac

SEQ ID NO: 203363 - DNA, 25 bp, Probe sequence
gtttttgtatttgttagcttaccat

SEQ ID NO: 203364 - DNA, 25 bp, Probe sequence
gtatttgttagcttaccatcacttt

SEQ ID NO: 203365 - DNA, 25 bp, Probe sequence
gtcaagaaatcccagttttacgcta

SEQ ID NO: 203366 - DNA, 25 bp, Probe sequence
gggacgtttaggttctatgatgatt

SEQ ID NO: 203367 - DNA, 25 bp, Probe sequence
tgatattaattatacggcagacacg

SEQ ID NO: 203368 - DNA, 25 bp, Probe sequence
tgatgattataccaaccaaaaacta

SEQ ID NO: 203369 - DNA, 25 bp, Probe sequence
tgaggtttggtttcaagctaaaaag

SEQ ID NO: 203370 - DNA, 25 bp, Probe sequence
tgaaagaacgactaaaagcattttt

SEQ ID NO: 203371 - DNA, 25 bp, Probe sequence
tacgctacgataaaccagaagtaac

SEQ ID NO: 203372 - DNA, 25 bp, Probe sequence
taccatcactttgaagacaagcaac

SEQ ID NO: 203373 - DNA, 25 bp, Probe sequence
tattgcttttataaagacgggacgt

SEQ ID NO: 203374 - DNA, 25 bp, Probe sequence
tattttttaatgtccatattccttt

SEQ ID NO: 203375 - DNA, 25 bp, Probe sequence
tttgttagcttaccatcactttgaa

SEQ ID NO: 203376 - DNA, 25 bp, Probe sequence
ttgttacgtcaagaaatcccagttt

SEQ ID NO: 203377 - DNA, 25 bp, Probe sequence
ttatatattatttatgcatagcatt

SEQ ID NO: 203378 - DNA, 25 bp, Probe sequence
ttatgcatagcattttaggcaaaaa

SEQ ID NO: 203379 - DNA, 25 bp, Probe sequence
ttggttgaggtttggtttcaagcta

SEQ ID NO: 203380 - DNA, 25 bp, Probe sequence
atgacgaaacaaaacaacacctata

SEQ ID NO: 203381 - DNA, 25 bp, Probe sequence
agggataacaacctatgccaaatgt

SEQ ID NO: 203382 - DNA, 25 bp, Probe sequence
agtgcatcacattgtgtatgtaaca

SEQ ID NO: 203383 - DNA, 25 bp, Probe sequence
agaagacttcagtaaagctttagat

SEQ ID NO: 203384 - DNA, 25 bp, Probe sequence
acctatgccaaatgtgcttgcgtga

SEQ ID NO: 203385 - DNA, 25 bp, Probe sequence
acgtaagtcttaccgatatgattgg

SEQ ID NO: 203386 - DNA, 25 bp, Probe sequence
acacctataagcatggacgtaagtc

SEQ ID NO: 203387 - DNA, 25 bp, Probe sequence
acaacacctataagcatggacgtaa

SEQ ID NO: 203388 - DNA, 25 bp, Probe sequence
aacaacctatgccaaatgtgcttgc

SEQ ID NO: 203389 - DNA, 25 bp, Probe sequence
aacatagtgcatcacattgtgtatg

SEQ ID NO: 203390 - DNA, 25 bp, Probe sequence
aagtcttaccgatatgattggttct

SEQ ID NO: 203391 - DNA, 25 bp, Probe sequence
aatgtgcttgcgtgaagggaaaatt

SEQ ID NO: 203392 - DNA, 25 bp, Probe sequence
aatttgatgtcagtttgctatacct

SEQ ID NO: 203393 - DNA, 25 bp, Probe sequence
caacctatgccaaatgtgcttgcgt

SEQ ID NO: 203394 - DNA, 25 bp, Probe sequence
cagtttgctatacctgtcataacca

SEQ ID NO: 203395 - DNA, 25 bp, Probe sequence
ctatgccaaatgtgcttgcgtgaag

SEQ ID NO: 203396 - DNA, 25 bp, Probe sequence
cttaccgatatgattggttctatca

SEQ ID NO: 203397 - DNA, 25 bp, Probe sequence
gccaaatgtgcttgcgtgaagggaa

SEQ ID NO: 203398 - DNA, 25 bp, Probe sequence
gcttgcgtgaagggaaaattacaga

SEQ ID NO: 203399 - DNA, 25 bp, Probe sequence
gctatacctgtcataaccaaattca

SEQ ID NO: 203400 - DNA, 25 bp, Probe sequence
gcatggacgtaagtcttaccgatat

SEQ ID NO: 203401 - DNA, 25 bp, Probe sequence
gcaaacatagtgcatcacattgtgt

SEQ ID NO: 203402 - DNA, 25 bp, Probe sequence
gaaacaaaacaacacctataagcat

SEQ ID NO: 203403 - DNA, 25 bp, Probe sequence
gaaatagcactagatagggataaca

SEQ ID NO: 203404 - DNA, 25 bp, Probe sequence
gacttcagtaaagctttagatttag

SEQ ID NO: 203405 - DNA, 25 bp, Probe sequence
gatgtcagtttgctatacctgtcat

SEQ ID NO: 203406 - DNA, 25 bp, Probe sequence
gataacaacctatgccaaatgtgct

SEQ ID NO: 203407 - DNA, 25 bp, Probe sequence
gtttgctatacctgtcataaccaaa

SEQ ID NO: 203408 - DNA, 25 bp, Probe sequence
gtcagtttgctatacctgtcataac

SEQ ID NO: 203409 - DNA, 25 bp, Probe sequence
gtgtatgtaacagaagacttcagta

SEQ ID NO: 203410 - DNA, 25 bp, Probe sequence
gggaaaattacagatgcaaacatag

SEQ ID NO: 203411 - DNA, 25 bp, Probe sequence
taagcatggacgtaagtcttaccga

SEQ ID NO: 203412 - DNA, 25 bp, Probe sequence
tacctgtcataaccaaattcatgca

SEQ ID NO: 203413 - DNA, 25 bp, Probe sequence
ttctatcattctaaagcatggaaaa

SEQ ID NO: 203414 - DNA, 25 bp, Probe sequence
attgattgtcttattagttgctgat

SEQ ID NO: 203415 - DNA, 25 bp, Probe sequence
attgccgcttgtatcagttgctaat

SEQ ID NO: 203416 - DNA, 25 bp, Probe sequence
atttggtgccgttgcagaaacatgt

SEQ ID NO: 203417 - DNA, 25 bp, Probe sequence
atcacgcaaaggtttcactgttaca

SEQ ID NO: 203418 - DNA, 25 bp, Probe sequence
agctgtattgccgcttgtatcagtt

SEQ ID NO: 203419 - DNA, 25 bp, Probe sequence
accaactcgatatttatcacgcaaa

SEQ ID NO: 203420 - DNA, 25 bp, Probe sequence
aacgaagttgtagctgtattgccgc

SEQ ID NO: 203421 - DNA, 25 bp, Probe sequence
aaggtttcactgttacattgaacga

SEQ ID NO: 203422 - DNA, 25 bp, Probe sequence
aattctcacaggattagcagccgtt

SEQ ID NO: 203423 - DNA, 25 bp, Probe sequence
cacaggattagcagccgttgatgaa

SEQ ID NO: 203424 - DNA, 25 bp, Probe sequence
cacgcaaaggtttcactgttacatt

SEQ ID NO: 203425 - DNA, 25 bp, Probe sequence
gccgcttgtatcagttgctaataaa

SEQ ID NO: 203426 - DNA, 25 bp, Probe sequence
gctgatgtcacatttggtgccgttg

SEQ ID NO: 203427 - DNA, 25 bp, Probe sequence
gcagccgttgatgaagtaccaactc

SEQ ID NO: 203428 - DNA, 25 bp, Probe sequence
gcaattctcacaggattagcagccg

SEQ ID NO: 203429 - DNA, 25 bp, Probe sequence
gaagtaccaactcgatatttatcac

SEQ ID NO: 203430 - DNA, 25 bp, Probe sequence
gaagttgtagctgtattgccgcttg

SEQ ID NO: 203431 - DNA, 25 bp, Probe sequence
gatgtcacatttggtgccgttgcag

SEQ ID NO: 203432 - DNA, 25 bp, Probe sequence
gatatttatcacgcaaaggtttcac

SEQ ID NO: 203433 - DNA, 25 bp, Probe sequence
gattagcagccgttgatgaagtacc

SEQ ID NO: 203434 - DNA, 25 bp, Probe sequence
gattgtcttattagttgctgatgtc

SEQ ID NO: 203435 - DNA, 25 bp, Probe sequence
gttgtagctgtattgccgcttgtat

SEQ ID NO: 203436 - DNA, 25 bp, Probe sequence
gttgctgatgtcacatttggtgccg

SEQ ID NO: 203437 - DNA, 25 bp, Probe sequence
gtattgccgcttgtatcagttgcta

SEQ ID NO: 203438 - DNA, 25 bp, Probe sequence
gtagctgtattgccgcttgtatcag

SEQ ID NO: 203439 - DNA, 25 bp, Probe sequence
gtaccaactcgatatttatcacgca

SEQ ID NO: 203440 - DNA, 25 bp, Probe sequence
gtcacatttggtgccgttgcagaaa

SEQ ID NO: 203441 - DNA, 25 bp, Probe sequence
gtcttattagttgctgatgtcacat

SEQ ID NO: 203442 - DNA, 25 bp, Probe sequence
tcactgttacattgaacgaagttgt

SEQ ID NO: 203443 - DNA, 25 bp, Probe sequence
tcagttgctaataaattgattgtct

SEQ ID NO: 203444 - DNA, 25 bp, Probe sequence
ttggcaattctcacaggattagcag

SEQ ID NO: 203445 - DNA, 25 bp, Probe sequence
tttatcacgcaaaggtttcactgtt

SEQ ID NO: 203446 - DNA, 25 bp, Probe sequence
ttctcacaggattagcagccgttga

SEQ ID NO: 203447 - DNA, 25 bp, Probe sequence
ttgccgcttgtatcagttgctaata

SEQ ID NO: 203448 - DNA, 25 bp, Probe sequence
attgtcgattacgggatgaattgaa

SEQ ID NO: 203449 - DNA, 25 bp, Probe sequence
attttattgtcgattacgggatgaa

SEQ ID NO: 203450 - DNA, 25 bp, Probe sequence
atctgacgatatgttaattaattta

SEQ ID NO: 203451 - DNA, 25 bp, Probe sequence
atccattaagtattgaactgacaaa

SEQ ID NO: 203452 - DNA, 25 bp, Probe sequence
aaatctgacgatatgttaattaatt

SEQ ID NO: 203453 - DNA, 25 bp, Probe sequence
aaagctggagcaagtaatattgtta

SEQ ID NO: 203454 - DNA, 25 bp, Probe sequence
aaacagtgatttgatgatggagcat

SEQ ID NO: 203455 - DNA, 25 bp, Probe sequence
aaaacagctgaaagaatatattgaa

SEQ ID NO: 203456 - DNA, 25 bp, Probe sequence
aatccattaagtattgaactgacaa

SEQ ID NO: 203457 - DNA, 25 bp, Probe sequence
aattttattgtcgattacgggatga

SEQ ID NO: 203458 - DNA, 25 bp, Probe sequence
cagtgatttgatgatggagcatacc

SEQ ID NO: 203459 - DNA, 25 bp, Probe sequence
gctggagcaagtaatattgttaaga

SEQ ID NO: 203460 - DNA, 25 bp, Probe sequence
gctgaaagaatatattgaagactac

SEQ ID NO: 203461 - DNA, 25 bp, Probe sequence
gcataccaataaagctggagcaagt

SEQ ID NO: 203462 - DNA, 25 bp, Probe sequence
gcaagtaatattgttaagaatccat

SEQ ID NO: 203463 - DNA, 25 bp, Probe sequence
gaattttattgtcgattacgggatg

SEQ ID NO: 203464 - DNA, 25 bp, Probe sequence
gaagactacaaaaaatctgacgata

SEQ ID NO: 203465 - DNA, 25 bp, Probe sequence
gactacaaaaaatctgacgatatgt

SEQ ID NO: 203466 - DNA, 25 bp, Probe sequence
gagcataccaataaagctggagcaa

SEQ ID NO: 203467 - DNA, 25 bp, Probe sequence
gatggagcataccaataaagctgga

SEQ ID NO: 203468 - DNA, 25 bp, Probe sequence
gatgatggagcataccaataaagct

SEQ ID NO: 203469 - DNA, 25 bp, Probe sequence
gatttgatgatggagcataccaata

SEQ ID NO: 203470 - DNA, 25 bp, Probe sequence
gtcgattacgggatgaattgaaaaa

SEQ ID NO: 203471 - DNA, 25 bp, Probe sequence
gtgatttgatgatggagcataccaa

SEQ ID NO: 203472 - DNA, 25 bp, Probe sequence
ggagcataccaataaagctggagca

SEQ ID NO: 203473 - DNA, 25 bp, Probe sequence
ggaaaaagatagtgcaagaagaagg

SEQ ID NO: 203474 - DNA, 25 bp, Probe sequence
tggagcataccaataaagctggagc

SEQ ID NO: 203475 - DNA, 25 bp, Probe sequence
tgaattttattgtcgattacgggat

SEQ ID NO: 203476 - DNA, 25 bp, Probe sequence
ttacgggatgaattgaaaaacagtg

SEQ ID NO: 203477 - DNA, 25 bp, Probe sequence
taagaatccattaagtattgaactg

SEQ ID NO: 203478 - DNA, 25 bp, Probe sequence
tattgtcgattacgggatgaattga

SEQ ID NO: 203479 - DNA, 25 bp, Probe sequence
tttattgtcgattacgggatgaatt

SEQ ID NO: 203480 - DNA, 25 bp, Probe sequence
ttttattgtcgattacgggatgaat

SEQ ID NO: 203481 - DNA, 25 bp, Probe sequence
ttgtcgattacgggatgaattgaaa

SEQ ID NO: 203482 - DNA, 25 bp, Probe sequence
attgttggtggaatgtcatctggca

SEQ ID NO: 203483 - DNA, 25 bp, Probe sequence
attactcatattagatgcaactact

SEQ ID NO: 203484 - DNA, 25 bp, Probe sequence
aggattattgattgttggtggaatg

SEQ ID NO: 203485 - DNA, 25 bp, Probe sequence
actcatattagatgcaactacttta

SEQ ID NO: 203486 - DNA, 25 bp, Probe sequence
acaggattattgattgttggtggaa

SEQ ID NO: 203487 - DNA, 25 bp, Probe sequence
aacagcattactcatattagatgca

SEQ ID NO: 203488 - DNA, 25 bp, Probe sequence
aatgtcatctggcaaaatagtaaca

SEQ ID NO: 203489 - DNA, 25 bp, Probe sequence
cagcattactcatattagatgcaac

SEQ ID NO: 203490 - DNA, 25 bp, Probe sequence
catctggcaaaatagtaacagcatt

SEQ ID NO: 203491 - DNA, 25 bp, Probe sequence
catattagatgcaactactttatta

SEQ ID NO: 203492 - DNA, 25 bp, Probe sequence
cattactcatattagatgcaactac

SEQ ID NO: 203493 - DNA, 25 bp, Probe sequence
ctcatattagatgcaactactttat

SEQ ID NO: 203494 - DNA, 25 bp, Probe sequence
gcatttattccaacaggattattga

SEQ ID NO: 203495 - DNA, 25 bp, Probe sequence
gaatgtcatctggcaaaatagtaac

SEQ ID NO: 203496 - DNA, 25 bp, Probe sequence
gattattgattgttggtggaatgtc

SEQ ID NO: 203497 - DNA, 25 bp, Probe sequence
gattgttggtggaatgtcatctggc

SEQ ID NO: 203498 - DNA, 25 bp, Probe sequence
gttggtggaatgtcatctggcaaaa

SEQ ID NO: 203499 - DNA, 25 bp, Probe sequence
gtaacagcattactcatattagatg

SEQ ID NO: 203500 - DNA, 25 bp, Probe sequence
gtcatctggcaaaatagtaacagca

SEQ ID NO: 203501 - DNA, 25 bp, Probe sequence
gtggaatgtcatctggcaaaatagt

SEQ ID NO: 203502 - DNA, 25 bp, Probe sequence
ggtggaatgtcatctggcaaaatag

SEQ ID NO: 203503 - DNA, 25 bp, Probe sequence
ggaatgtcatctggcaaaatagtaa

SEQ ID NO: 203504 - DNA, 25 bp, Probe sequence
ggcatttattccaacaggattattg

SEQ ID NO: 203505 - DNA, 25 bp, Probe sequence
tggaatgtcatctggcaaaatagta

SEQ ID NO: 203506 - DNA, 25 bp, Probe sequence
tggcatttattccaacaggattatt

SEQ ID NO: 203507 - DNA, 25 bp, Probe sequence
tggtggaatgtcatctggcaaaata

SEQ ID NO: 203508 - DNA, 25 bp, Probe sequence
tgttggtggaatgtcatctggcaaa

SEQ ID NO: 203509 - DNA, 25 bp, Probe sequence
tactcatattagatgcaactacttt

SEQ ID NO: 203510 - DNA, 25 bp, Probe sequence
tattgattgttggtggaatgtcatc

SEQ ID NO: 203511 - DNA, 25 bp, Probe sequence
ttattccaacaggattattgattgt

SEQ ID NO: 203512 - DNA, 25 bp, Probe sequence
ttgttggtggaatgtcatctggcaa

SEQ ID NO: 203513 - DNA, 25 bp, Probe sequence
ttgattgttggtggaatgtcatctg

SEQ ID NO: 203514 - DNA, 25 bp, Probe sequence
ttggtggaatgtcatctggcaaaat

SEQ ID NO: 203515 - DNA, 25 bp, Probe sequence
ttggcatttattccaacaggattat

SEQ ID NO: 203516 - DNA, 25 bp, Probe sequence
attttacaaatcaatcgtacctcgt

SEQ ID NO: 203517 - DNA, 25 bp, Probe sequence
atcggattgaattaattgagccatt

SEQ ID NO: 203518 - DNA, 25 bp, Probe sequence
atggacaagcatcacgacgtatttg

SEQ ID NO: 203519 - DNA, 25 bp, Probe sequence
agacaagccggatgaattcgtacct

SEQ ID NO: 203520 - DNA, 25 bp, Probe sequence
aacagcgcatcgtcgtgaaaatatt

SEQ ID NO: 203521 - DNA, 25 bp, Probe sequence
aagatgttgtcttcatttatccaat

SEQ ID NO: 203522 - DNA, 25 bp, Probe sequence
aaggtaagagcgattgccgaaaaat

SEQ ID NO: 203523 - DNA, 25 bp, Probe sequence
aatactcaccatttcctgaagagtt

SEQ ID NO: 203524 - DNA, 25 bp, Probe sequence
catggtgatactacaacgacttttg

SEQ ID NO: 203525 - DNA, 25 bp, Probe sequence
cgagtcatggtaagtaatattgctg

SEQ ID NO: 203526 - DNA, 25 bp, Probe sequence
gccggatgaattcgtacctttacgt

SEQ ID NO: 203527 - DNA, 25 bp, Probe sequence
gctcctacatttggaaaacctgtgt

SEQ ID NO: 203528 - DNA, 25 bp, Probe sequence
gctgaattgaattttgcgccaacag

SEQ ID NO: 203529 - DNA, 25 bp, Probe sequence
gcatcacgacgtatttgtgaagcaa

SEQ ID NO: 203530 - DNA, 25 bp, Probe sequence
gacccgaagcaataaaaatggcacc

SEQ ID NO: 203531 - DNA, 25 bp, Probe sequence
gaaggcgttgaggcgggaacatcga

SEQ ID NO: 203532 - DNA, 25 bp, Probe sequence
gaagagttaaatcgagtcatggtaa

SEQ ID NO: 203533 - DNA, 25 bp, Probe sequence
gaagctggacttcgaacacatcaga

SEQ ID NO: 203534 - DNA, 25 bp, Probe sequence
gaagcgaacattgtgattacagcac

SEQ ID NO: 203535 - DNA, 25 bp, Probe sequence
gaaccgatgcatcagatttttaaag

SEQ ID NO: 203536 - DNA, 25 bp, Probe sequence
gaacacatcagaaatactcaccatt

SEQ ID NO: 203537 - DNA, 25 bp, Probe sequence
gaaatacagttattgacgcattgtc

SEQ ID NO: 203538 - DNA, 25 bp, Probe sequence
gacagattctggtggtattcaagag

SEQ ID NO: 203539 - DNA, 25 bp, Probe sequence
gacgcattgtcaacaacagttcaaa

SEQ ID NO: 203540 - DNA, 25 bp, Probe sequence
gagtcaagcgaataatccatatggt

SEQ ID NO: 203541 - DNA, 25 bp, Probe sequence
gatattcaagctgatcatgatttaa

SEQ ID NO: 203542 - DNA, 25 bp, Probe sequence
gtcttcatttatccaatgcatcgta

SEQ ID NO: 203543 - DNA, 25 bp, Probe sequence
ggaacatcgagagtaattggcacag

SEQ ID NO: 203544 - DNA, 25 bp, Probe sequence
ggaactttgaagcgaacattgtgat

SEQ ID NO: 203545 - DNA, 25 bp, Probe sequence
ggcacagattatgacaatattgttc

SEQ ID NO: 203546 - DNA, 25 bp, Probe sequence
ggcagcattttatcatcaaattccg

SEQ ID NO: 203547 - DNA, 25 bp, Probe sequence
tattttcggtacgagacccgaagca

SEQ ID NO: 203548 - DNA, 25 bp, Probe sequence
ttttactaacagcgcatcgtcgtga

SEQ ID NO: 203549 - DNA, 25 bp, Probe sequence
ttgcgccaacagtaattgcagctaa

SEQ ID NO: 203550 - DNA, 25 bp, Probe sequence
ccttggtcaaggtgaattagcgatt

SEQ ID NO: 203551 - DNA, 25 bp, Probe sequence
attgctccactgttaatcactttaa

SEQ ID NO: 203552 - DNA, 25 bp, Probe sequence
attaaagatcgtcgtgctaaacaat

SEQ ID NO: 203553 - DNA, 25 bp, Probe sequence
attagcgattaatccacctaaatca

SEQ ID NO: 203554 - DNA, 25 bp, Probe sequence
atattcatgattttatctggtactt

SEQ ID NO: 203555 - DNA, 25 bp, Probe sequence
atggtaatgcagcaatgcctcaaac

SEQ ID NO: 203556 - DNA, 25 bp, Probe sequence
acgattaaatatgatgactacggta

SEQ ID NO: 203557 - DNA, 25 bp, Probe sequence
aaataaacagccagcttcatccgaa

SEQ ID NO: 203558 - DNA, 25 bp, Probe sequence
aaaaaccagcatctatatcactcat

SEQ ID NO: 203559 - DNA, 25 bp, Probe sequence
aacaaacgaattacactgagtgata

SEQ ID NO: 203560 - DNA, 25 bp, Probe sequence
aagccgttttcaatcgtatatccaa

SEQ ID NO: 203561 - DNA, 25 bp, Probe sequence
aaggttcaagtggtcatcatggtaa

SEQ ID NO: 203562 - DNA, 25 bp, Probe sequence
aatcactttaaccatttcgggcatt

SEQ ID NO: 203563 - DNA, 25 bp, Probe sequence
aattgccggtatgatggacacaaac

SEQ ID NO: 203564 - DNA, 25 bp, Probe sequence
caatatttattgctccactgttaat

SEQ ID NO: 203565 - DNA, 25 bp, Probe sequence
catcgcgtaaaaaaaccagcatcta

SEQ ID NO: 203566 - DNA, 25 bp, Probe sequence
caggtgttactgggctagatgtatc

SEQ ID NO: 203567 - DNA, 25 bp, Probe sequence
catacgtattctaatgtgatgcgaa

SEQ ID NO: 203568 - DNA, 25 bp, Probe sequence
cgttacgtctttctagatcataaca

SEQ ID NO: 203569 - DNA, 25 bp, Probe sequence
gccatggtctggttttatgggcagt

SEQ ID NO: 203570 - DNA, 25 bp, Probe sequence
gccagcttcatccgaaaaaggttca

SEQ ID NO: 203571 - DNA, 25 bp, Probe sequence
gccattatttggattatcacttatc

SEQ ID NO: 203572 - DNA, 25 bp, Probe sequence
gcattccgcttcacgaaggtcattt

SEQ ID NO: 203573 - DNA, 25 bp, Probe sequence
gaatgagttttttggtgacagtgat

SEQ ID NO: 203574 - DNA, 25 bp, Probe sequence
gactacggtattattgctaaatggt

SEQ ID NO: 203575 - DNA, 25 bp, Probe sequence
gatgcgaagtatacatagttctttg

SEQ ID NO: 203576 - DNA, 25 bp, Probe sequence
gttagcatacttgatgaaccatata

SEQ ID NO: 203577 - DNA, 25 bp, Probe sequence
ggacacaaacggtgaccttggtcaa

SEQ ID NO: 203578 - DNA, 25 bp, Probe sequence
gtaattcaggtgttactgggctaga

SEQ ID NO: 203579 - DNA, 25 bp, Probe sequence
ggcaaaagtggcacgcaatgattgg

SEQ ID NO: 203580 - DNA, 25 bp, Probe sequence
tagttctttgtttactgaaaatact

SEQ ID NO: 203581 - DNA, 25 bp, Probe sequence
ttttatctggtacttatttactcat

SEQ ID NO: 203582 - DNA, 25 bp, Probe sequence
ttatcattgcaattccagtatttgt

SEQ ID NO: 203583 - DNA, 25 bp, Probe sequence
ttaactggattgccatggtctggtt

SEQ ID NO: 203584 - DNA, 25 bp, Probe sequence
attttcgtacaccttcaacaactga

SEQ ID NO: 203585 - DNA, 25 bp, Probe sequence
atattcatgaccatcaagtcgaaca

SEQ ID NO: 203586 - DNA, 25 bp, Probe sequence
atgaccatcaagtcgaacatatgaa

SEQ ID NO: 203587 - DNA, 25 bp, Probe sequence
agatgaaagtgaggaccgcgtatga

SEQ ID NO: 203588 - DNA, 25 bp, Probe sequence
agcttattttcgtacaccttcaaca

SEQ ID NO: 203589 - DNA, 25 bp, Probe sequence
acaactgattacaacggcgtttatc

SEQ ID NO: 203590 - DNA, 25 bp, Probe sequence
aaaccatatcgtaaaaatagtgcta

SEQ ID NO: 203591 - DNA, 25 bp, Probe sequence
aaaagcgacattgcagttattcaca

SEQ ID NO: 203592 - DNA, 25 bp, Probe sequence
aagcctacgccagtacaaatagtta

SEQ ID NO: 203593 - DNA, 25 bp, Probe sequence
aaggttattatattgattttgaagc

SEQ ID NO: 203594 - DNA, 25 bp, Probe sequence
aatggttaccatattccttatcagt

SEQ ID NO: 203595 - DNA, 25 bp, Probe sequence
aatagtgctatagacggagggaaaa

SEQ ID NO: 203596 - DNA, 25 bp, Probe sequence
aatattgagtatggtggacgtggta

SEQ ID NO: 203597 - DNA, 25 bp, Probe sequence
catattccttatcagtatcaaccaa

SEQ ID NO: 203598 - DNA, 25 bp, Probe sequence
gcggagtaaagctgtgattaacgaa

SEQ ID NO: 203599 - DNA, 25 bp, Probe sequence
gctgtgattaacgaagcttattttc

SEQ ID NO: 203600 - DNA, 25 bp, Probe sequence
gcagttattcacaaaaagcctacgc

SEQ ID NO: 203601 - DNA, 25 bp, Probe sequence
gaaaaagaccgctgcctttagtaat

SEQ ID NO: 203602 - DNA, 25 bp, Probe sequence
gacggagggaaaaagaccgctgcct

SEQ ID NO: 203603 - DNA, 25 bp, Probe sequence
gaccgctgcctttagtaatattgag

SEQ ID NO: 203604 - DNA, 25 bp, Probe sequence
gatgaagtttatcttttaccctatt

SEQ ID NO: 203605 - DNA, 25 bp, Probe sequence
gttaatgtcaactatcctaagcgga

SEQ ID NO: 203606 - DNA, 25 bp, Probe sequence
gttaccatattccttatcagtatca

SEQ ID NO: 203607 - DNA, 25 bp, Probe sequence
gttttatcttaaaagcgacattgca

SEQ ID NO: 203608 - DNA, 25 bp, Probe sequence
gtatcaaccaagattagactatcta

SEQ ID NO: 203609 - DNA, 25 bp, Probe sequence
gtacaccttcaacaactgattacaa

SEQ ID NO: 203610 - DNA, 25 bp, Probe sequence
gtcctttcctttaaataatattcat

SEQ ID NO: 203611 - DNA, 25 bp, Probe sequence
ggtattgtgtttttaatgattcgtt

SEQ ID NO: 203612 - DNA, 25 bp, Probe sequence
ggacgtggtatgtcacttgaaaaag

SEQ ID NO: 203613 - DNA, 25 bp, Probe sequence
tggtggacgtggtatgtcacttgaa

SEQ ID NO: 203614 - DNA, 25 bp, Probe sequence
tgtcaactatcctaagcggagtaaa

SEQ ID NO: 203615 - DNA, 25 bp, Probe sequence
tacaacggcgtttatcaaggttatt

SEQ ID NO: 203616 - DNA, 25 bp, Probe sequence
tatcttttaccctattcaaaattcg

SEQ ID NO: 203617 - DNA, 25 bp, Probe sequence
ttcacaaaaagcctacgccagtaca

SEQ ID NO: 203618 - DNA, 25 bp, Probe sequence
attacaagatccgattcctgcaaag

SEQ ID NO: 203619 - DNA, 25 bp, Probe sequence
atcgtttctacgaacatggcgcact

SEQ ID NO: 203620 - DNA, 25 bp, Probe sequence
atcgaatacgatcatactagccata

SEQ ID NO: 203621 - DNA, 25 bp, Probe sequence
atgtcagtgtggatgggcttcagta

SEQ ID NO: 203622 - DNA, 25 bp, Probe sequence
atgggtgctaagacaggtactggta

SEQ ID NO: 203623 - DNA, 25 bp, Probe sequence
atggcgcacttgattataaacgttt

SEQ ID NO: 203624 - DNA, 25 bp, Probe sequence
agtatcccatcaatcaatgtttctg

SEQ ID NO: 203625 - DNA, 25 bp, Probe sequence
agcttatttagccggtttacctcag

SEQ ID NO: 203626 - DNA, 25 bp, Probe sequence
acgaaggcgatattggtccatctga

SEQ ID NO: 203627 - DNA, 25 bp, Probe sequence
actaggtatcttattgtttgcttat

SEQ ID NO: 203628 - DNA, 25 bp, Probe sequence
aaagcacctgcttttaccgaagcta

SEQ ID NO: 203629 - DNA, 25 bp, Probe sequence
aaacgtcctagctcagtaagtggta

SEQ ID NO: 203630 - DNA, 25 bp, Probe sequence
aacaaaggatcttctcagcctaaga

SEQ ID NO: 203631 - DNA, 25 bp, Probe sequence
aagtacttggtggttctgcttcaga

SEQ ID NO: 203632 - DNA, 25 bp, Probe sequence
cacacggtggtagtgacacatcagc

SEQ ID NO: 203633 - DNA, 25 bp, Probe sequence
cctttcttagcgtatggacctgcca

SEQ ID NO: 203634 - DNA, 25 bp, Probe sequence
gcatttgctgcaatcgctaacggtg

SEQ ID NO: 203635 - DNA, 25 bp, Probe sequence
gaaggtgcctcaacattaacacaac

SEQ ID NO: 203636 - DNA, 25 bp, Probe sequence
gaagagtcacggtactgtatctatt

SEQ ID NO: 203637 - DNA, 25 bp, Probe sequence
gatggcgaagactttaaacgtccta

SEQ ID NO: 203638 - DNA, 25 bp, Probe sequence
gatgcacctaagaaattcgctgcca

SEQ ID NO: 203639 - DNA, 25 bp, Probe sequence
gattacactgcatacatgttagctg

SEQ ID NO: 203640 - DNA, 25 bp, Probe sequence
gtggatttggttctgaaggtgcctc

SEQ ID NO: 203641 - DNA, 25 bp, Probe sequence
gtggtacttataacaacgcgcattc

SEQ ID NO: 203642 - DNA, 25 bp, Probe sequence
ggtactggtacttacggtgctgaaa

SEQ ID NO: 203643 - DNA, 25 bp, Probe sequence
ggattaacggctttacacctcaata

SEQ ID NO: 203644 - DNA, 25 bp, Probe sequence
tggttctgcatatggccatggtgta

SEQ ID NO: 203645 - DNA, 25 bp, Probe sequence
tgggcaacaaaccatgcgattcaag

SEQ ID NO: 203646 - DNA, 25 bp, Probe sequence
tctgcttcagaattctcaccaacac

SEQ ID NO: 203647 - DNA, 25 bp, Probe sequence
tcaccaacacaattagcatcagcat

SEQ ID NO: 203648 - DNA, 25 bp, Probe sequence
taaacgtttattcggtgcaattggt

SEQ ID NO: 203649 - DNA, 25 bp, Probe sequence
tttacctcaggttccaaacaactat

SEQ ID NO: 203650 - DNA, 25 bp, Probe sequence
ttacacctcaatacactatgtcagt

SEQ ID NO: 203651 - DNA, 25 bp, Probe sequence
ttcatctttaaaacctttcttagcg

SEQ ID NO: 203652 - DNA, 25 bp, Probe sequence
attaggtatcgagcaacctgttgtt

SEQ ID NO: 203653 - DNA, 25 bp, Probe sequence
atcacgcatggtaccgatacgttag

SEQ ID NO: 203654 - DNA, 25 bp, Probe sequence
acatctacttgttattcatactggt

SEQ ID NO: 203655 - DNA, 25 bp, Probe sequence
aaatatacctattgtgctagtttca

SEQ ID NO: 203656 - DNA, 25 bp, Probe sequence
aaaggatcgtgtgcaattccatcat

SEQ ID NO: 203657 - DNA, 25 bp, Probe sequence
aagtccaaatcatggtccgctaggt

SEQ ID NO: 203658 - DNA, 25 bp, Probe sequence
aaggcgtgatggttgtatttaatga

SEQ ID NO: 203659 - DNA, 25 bp, Probe sequence
aatccttttaatgtaccatcacctc

SEQ ID NO: 203660 - DNA, 25 bp, Probe sequence
aatacaaacacatttcaaagtccaa

SEQ ID NO: 203661 - DNA, 25 bp, Probe sequence
catggtccgctaggtgtattgacaa

SEQ ID NO: 203662 - DNA, 25 bp, Probe sequence
catacggcgcgtaatgttaccaaaa

SEQ ID NO: 203663 - DNA, 25 bp, Probe sequence
ctattcgcgttgcctctgatgaaaa

SEQ ID NO: 203664 - DNA, 25 bp, Probe sequence
ctccaagcgcattagaaggcattca

SEQ ID NO: 203665 - DNA, 25 bp, Probe sequence
gctagtttcacgttcctttaatggt

SEQ ID NO: 203666 - DNA, 25 bp, Probe sequence
gcgctcgtctaatgaaattggttct

SEQ ID NO: 203667 - DNA, 25 bp, Probe sequence
gttaccaactcgcacaacaaggttt

SEQ ID NO: 203668 - DNA, 25 bp, Probe sequence
gcaacctgttgttattactggcgca

SEQ ID NO: 203669 - DNA, 25 bp, Probe sequence
gcaattccatcatatgccatatcgc

SEQ ID NO: 203670 - DNA, 25 bp, Probe sequence
gaaggtatcgatggtatggttattg

SEQ ID NO: 203671 - DNA, 25 bp, Probe sequence
gaagaaactgcctttttacttgatt

SEQ ID NO: 203672 - DNA, 25 bp, Probe sequence
gaaattggttctgacggattatata

SEQ ID NO: 203673 - DNA, 25 bp, Probe sequence
gatggtttcgttatcacgcatggta

SEQ ID NO: 203674 - DNA, 25 bp, Probe sequence
gttcctttaatggtattgtgagtcc

SEQ ID NO: 203675 - DNA, 25 bp, Probe sequence
gttaccaaaacacatacgtctaata

SEQ ID NO: 203676 - DNA, 25 bp, Probe sequence
gtaccatcacctcatatgacaatcc

SEQ ID NO: 203677 - DNA, 25 bp, Probe sequence
gtgagtccaacttacgcatacgatg

SEQ ID NO: 203678 - DNA, 25 bp, Probe sequence
gggtatgccaggtgacatttttagt

SEQ ID NO: 203679 - DNA, 25 bp, Probe sequence
ggtggcaccattagtatgtcacaag

SEQ ID NO: 203680 - DNA, 25 bp, Probe sequence
ggcattcaacaattagtatctttaa

SEQ ID NO: 203681 - DNA, 25 bp, Probe sequence
tgccatatcgccaacaagcattgga

SEQ ID NO: 203682 - DNA, 25 bp, Probe sequence
tacgcatacgatggtggtggttacc

SEQ ID NO: 203683 - DNA, 25 bp, Probe sequence
tatatttccgctattcgcgttgcct

SEQ ID NO: 203684 - DNA, 25 bp, Probe sequence
ttactggcgcaatgcgctcgtctaa

SEQ ID NO: 203685 - DNA, 25 bp, Probe sequence
ttgttattcatactggtggcaccat

SEQ ID NO: 203686 - DNA, 25 bp, Probe sequence
attgatggatgccctacagattcta

SEQ ID NO: 203687 - DNA, 25 bp, Probe sequence
attgctttcgtaatccttgacgata

SEQ ID NO: 203688 - DNA, 25 bp, Probe sequence
atcatttgatggggacgctttaaaa

SEQ ID NO: 203689 - DNA, 25 bp, Probe sequence
atggatgccctacagattctattaa

SEQ ID NO: 203690 - DNA, 25 bp, Probe sequence
aggtattgctttcgtaatccttgac

SEQ ID NO: 203691 - DNA, 25 bp, Probe sequence
cgacgacgaaggtattgctttcgta

SEQ ID NO: 203692 - DNA, 25 bp, Probe sequence
aattgatggatgccctacagattct

SEQ ID NO: 203693 - DNA, 25 bp, Probe sequence
aattgcagacgaatcatttgatggg

SEQ ID NO: 203694 - DNA, 25 bp, Probe sequence
cggtgcagcagcgccagatatatat

SEQ ID NO: 203695 - DNA, 25 bp, Probe sequence
gcgccagatatatatgattacgacg

SEQ ID NO: 203696 - DNA, 25 bp, Probe sequence
gctttcgtaatccttgacgataacc

SEQ ID NO: 203697 - DNA, 25 bp, Probe sequence
gcagaagtacctgaggaattatatg

SEQ ID NO: 203698 - DNA, 25 bp, Probe sequence
gcagcagcgccagatatatatgatt

SEQ ID NO: 203699 - DNA, 25 bp, Probe sequence
gcagcgccagatatatatgattacg

SEQ ID NO: 203700 - DNA, 25 bp, Probe sequence
gcaattgatggatgccctacagatt

SEQ ID NO: 203701 - DNA, 25 bp, Probe sequence
gaaggtattgctttcgtaatccttg

SEQ ID NO: 203702 - DNA, 25 bp, Probe sequence
gatggatgccctacagattctatta

SEQ ID NO: 203703 - DNA, 25 bp, Probe sequence
gatggggacgctttaaaatttgaat

SEQ ID NO: 203704 - DNA, 25 bp, Probe sequence
gatgcaattgatggatgccctacag

SEQ ID NO: 203705 - DNA, 25 bp, Probe sequence
gatgccctacagattctattaaaat

SEQ ID NO: 203706 - DNA, 25 bp, Probe sequence
gattacgacgacgaaggtattgctt

SEQ ID NO: 203707 - DNA, 25 bp, Probe sequence
gatatatatgattacgacgacgaag

SEQ ID NO: 203708 - DNA, 25 bp, Probe sequence
gtacctgaggaattatatgaagata

SEQ ID NO: 203709 - DNA, 25 bp, Probe sequence
gtgcagcagcgccagatatatatga

SEQ ID NO: 203710 - DNA, 25 bp, Probe sequence
ggtgcagcagcgccagatatatatg

SEQ ID NO: 203711 - DNA, 25 bp, Probe sequence
ggtattgctttcgtaatccttgacg

SEQ ID NO: 203712 - DNA, 25 bp, Probe sequence
ggaagatgcaattgatggatgccct

SEQ ID NO: 203713 - DNA, 25 bp, Probe sequence
taatccttgacgataaccaaggtac

SEQ ID NO: 203714 - DNA, 25 bp, Probe sequence
tggatgccctacagattctattaaa

SEQ ID NO: 203715 - DNA, 25 bp, Probe sequence
tgatggatgccctacagattctatt

SEQ ID NO: 203716 - DNA, 25 bp, Probe sequence
ttcgtaatccttgacgataaccaag

SEQ ID NO: 203717 - DNA, 25 bp, Probe sequence
ttgatggggacgctttaaaatttga

SEQ ID NO: 203718 - DNA, 25 bp, Probe sequence
ttacgacgacgaaggtattgctttc

SEQ ID NO: 203719 - DNA, 25 bp, Probe sequence
ttggcaaaatatacaatcgttgata

SEQ ID NO: 203720 - DNA, 25 bp, Probe sequence
atttctattatcaatttcatactaa

SEQ ID NO: 203721 - DNA, 25 bp, Probe sequence
atttcctatgtcatgacattttaga

SEQ ID NO: 203722 - DNA, 25 bp, Probe sequence
atcttgtttgcaactgcttgttacc

SEQ ID NO: 203723 - DNA, 25 bp, Probe sequence
agagatgcgttataccttaatttaa

SEQ ID NO: 203724 - DNA, 25 bp, Probe sequence
agcaaagcctttttcatctgttata

SEQ ID NO: 203725 - DNA, 25 bp, Probe sequence
agcctttttcatctgttatattacc

SEQ ID NO: 203726 - DNA, 25 bp, Probe sequence
actacagtaagcaagatgcagttgt

SEQ ID NO: 203727 - DNA, 25 bp, Probe sequence
aacaggcactgataaatttctatta

SEQ ID NO: 203728 - DNA, 25 bp, Probe sequence
caactgcttgttaccattatcgccg

SEQ ID NO: 203729 - DNA, 25 bp, Probe sequence
caacagatccttttattgtagacca

SEQ ID NO: 203730 - DNA, 25 bp, Probe sequence
caaagcctttttcatctgttatatt

SEQ ID NO: 203731 - DNA, 25 bp, Probe sequence
catactaagcaacattatttcctat

SEQ ID NO: 203732 - DNA, 25 bp, Probe sequence
cattatttcctatgtcatgacattt

SEQ ID NO: 203733 - DNA, 25 bp, Probe sequence
cttgtttgcaactgcttgttaccat

SEQ ID NO: 203734 - DNA, 25 bp, Probe sequence
cttgttaccattatcgccgcaataa

SEQ ID NO: 203735 - DNA, 25 bp, Probe sequence
cttttattgtagaccatcacatgcg

SEQ ID NO: 203736 - DNA, 25 bp, Probe sequence
cgcatcatcaaggccaactatccag

SEQ ID NO: 203737 - DNA, 25 bp, Probe sequence
ccgcaataatttaaaaggcgcctat

SEQ ID NO: 203738 - DNA, 25 bp, Probe sequence
cctttttcatctgttatattaccaa

SEQ ID NO: 203739 - DNA, 25 bp, Probe sequence
gcatcatcaaggccaactatccaga

SEQ ID NO: 203740 - DNA, 25 bp, Probe sequence
gcaacattatttcctatgtcatgac

SEQ ID NO: 203741 - DNA, 25 bp, Probe sequence
gcaactgcttgttaccattatcgcc

SEQ ID NO: 203742 - DNA, 25 bp, Probe sequence
gcaagatgcagttgttagtttaatc

SEQ ID NO: 203743 - DNA, 25 bp, Probe sequence
gaatgcagcaaagcctttttcatct

SEQ ID NO: 203744 - DNA, 25 bp, Probe sequence
gatgcgttataccttaatttaaatg

SEQ ID NO: 203745 - DNA, 25 bp, Probe sequence
gatccttttattgtagaccatcaca

SEQ ID NO: 203746 - DNA, 25 bp, Probe sequence
gatagagatgcgttataccttaatt

SEQ ID NO: 203747 - DNA, 25 bp, Probe sequence
gttaccattatcgccgcaataattt

SEQ ID NO: 203748 - DNA, 25 bp, Probe sequence
gtttaatcttgtttgcaactgcttg

SEQ ID NO: 203749 - DNA, 25 bp, Probe sequence
gtttgcaactgcttgttaccattat

SEQ ID NO: 203750 - DNA, 25 bp, Probe sequence
tgcagcaaagcctttttcatctgtt

SEQ ID NO: 203751 - DNA, 25 bp, Probe sequence
taatttaaaaggcgcctataagtct

SEQ ID NO: 203752 - DNA, 25 bp, Probe sequence
tatcaatttcatactaagcaacatt

SEQ ID NO: 203753 - DNA, 25 bp, Probe sequence
tttagaagatgcatggaaagctgaa

SEQ ID NO: 203754 - DNA, 25 bp, Probe sequence
atcacatgacgtgcttggttccatc

SEQ ID NO: 203755 - DNA, 25 bp, Probe sequence
atcattattagatgcaattcacaac

SEQ ID NO: 203756 - DNA, 25 bp, Probe sequence
atctgcattgacatttagttattta

SEQ ID NO: 203757 - DNA, 25 bp, Probe sequence
atgggatccgagtaaatcctatatt

SEQ ID NO: 203758 - DNA, 25 bp, Probe sequence
aggattattaacttcaaacagtgtt

SEQ ID NO: 203759 - DNA, 25 bp, Probe sequence
agttatttaacatcacatgacgtgc

SEQ ID NO: 203760 - DNA, 25 bp, Probe sequence
agattgtgctgttgaaaatggtatc

SEQ ID NO: 203761 - DNA, 25 bp, Probe sequence
agaaggaattatacgtgcttacggt

SEQ ID NO: 203762 - DNA, 25 bp, Probe sequence
aaacagtgttaatgtgctcgacaat

SEQ ID NO: 203763 - DNA, 25 bp, Probe sequence
aacttcatggcggaaccattgatga

SEQ ID NO: 203764 - DNA, 25 bp, Probe sequence
aacgataatgtctcaattcaatttg

SEQ ID NO: 203765 - DNA, 25 bp, Probe sequence
aagtattggcaagaggacctgtgtc

SEQ ID NO: 203766 - DNA, 25 bp, Probe sequence
gcttacggtatttcttctattcgcc

SEQ ID NO: 203767 - DNA, 25 bp, Probe sequence
gcttggttccatcattgtaggtgca

SEQ ID NO: 203768 - DNA, 25 bp, Probe sequence
gcaagagctcgtgtaaaggatttgg

SEQ ID NO: 203769 - DNA, 25 bp, Probe sequence
gaattaggtctaggttgcatgagtt

SEQ ID NO: 203770 - DNA, 25 bp, Probe sequence
gaaagtaatttatctgcattgacat

SEQ ID NO: 203771 - DNA, 25 bp, Probe sequence
gacgaaacaataagcgcatttgatg

SEQ ID NO: 203772 - DNA, 25 bp, Probe sequence
gaggacctgtgtctaaaggattatt

SEQ ID NO: 203773 - DNA, 25 bp, Probe sequence
gatggtatttttgattattctcatg

SEQ ID NO: 203774 - DNA, 25 bp, Probe sequence
gatcagattaaaacagcaagagctc

SEQ ID NO: 203775 - DNA, 25 bp, Probe sequence
gatcatatcgatttatatcaacttc

SEQ ID NO: 203776 - DNA, 25 bp, Probe sequence
gattgataatcgtccagaatcatta

SEQ ID NO: 203777 - DNA, 25 bp, Probe sequence
tgtaggtgcaagtagcgtcgaccaa

SEQ ID NO: 203778 - DNA, 25 bp, Probe sequence
gtgcaagtagcgtcgaccaattaaa

SEQ ID NO: 203779 - DNA, 25 bp, Probe sequence
ggttgcatgagtttaggtacagatt

SEQ ID NO: 203780 - DNA, 25 bp, Probe sequence
ggaatataccaatcatttagtgtag

SEQ ID NO: 203781 - DNA, 25 bp, Probe sequence
tggtacaaaagtaggcaatcgttta

SEQ ID NO: 203782 - DNA, 25 bp, Probe sequence
tgacgtgcttggttccatcattgta

SEQ ID NO: 203783 - DNA, 25 bp, Probe sequence
tgaatcagttgttggtaaggcactt

SEQ ID NO: 203784 - DNA, 25 bp, Probe sequence
tcttctattcgcccaaatgtaattg

SEQ ID NO: 203785 - DNA, 25 bp, Probe sequence
tatatcaacttcatggcggaaccat

SEQ ID NO: 203786 - DNA, 25 bp, Probe sequence
tatttcttctattcgcccaaatgta

SEQ ID NO: 203787 - DNA, 25 bp, Probe sequence
ttgggtgaaacaatagcctctatta

SEQ ID NO: 203788 - DNA, 25 bp, Probe sequence
attgatattccatttgctgcaagac

SEQ ID NO: 203789 - DNA, 25 bp, Probe sequence
attttctcaaaatatcacacgtgca

SEQ ID NO: 203790 - DNA, 25 bp, Probe sequence
atttccattatttcgcaagtgttat

SEQ ID NO: 203791 - DNA, 25 bp, Probe sequence
atgatcaattggtgccacgtttaca

SEQ ID NO: 203792 - DNA, 25 bp, Probe sequence
atggcagtaaacgttcgagattata

SEQ ID NO: 203793 - DNA, 25 bp, Probe sequence
agagcttggtggtaaaagcgccaat

SEQ ID NO: 203794 - DNA, 25 bp, Probe sequence
accttcgtcttcaacaccattaagt

SEQ ID NO: 203795 - DNA, 25 bp, Probe sequence
acgggctcaactgatgtaggttatc

SEQ ID NO: 203796 - DNA, 25 bp, Probe sequence
acaggacgtatttggattaacactt

SEQ ID NO: 203797 - DNA, 25 bp, Probe sequence
acaaccaagtaccagaaggcgcacc

SEQ ID NO: 203798 - DNA, 25 bp, Probe sequence
aaattatcatttacgggctcaactg

SEQ ID NO: 203799 - DNA, 25 bp, Probe sequence
aaagacacaatgagtatcgtacgac

SEQ ID NO: 203800 - DNA, 25 bp, Probe sequence
aaaccgattcgtgagacaacagcaa

SEQ ID NO: 203801 - DNA, 25 bp, Probe sequence
aagtatgtagtgcaggttctcgatt

SEQ ID NO: 203802 - DNA, 25 bp, Probe sequence
aatcatggtcattaacttctaaatc

SEQ ID NO: 203803 - DNA, 25 bp, Probe sequence
aattgtgattcaaccttcgtcttca

SEQ ID NO: 203804 - DNA, 25 bp, Probe sequence
cgtacgacatgagccgattggcgtc

SEQ ID NO: 203805 - DNA, 25 bp, Probe sequence
ccacgtttacaagaggcattttcaa

SEQ ID NO: 203806 - DNA, 25 bp, Probe sequence
gctgcatggaagattgcgccagcca

SEQ ID NO: 203807 - DNA, 25 bp, Probe sequence
gctgcaagacatttccattatttcg

SEQ ID NO: 203808 - DNA, 25 bp, Probe sequence
gcaggttctcgattattagttcatg

SEQ ID NO: 203809 - DNA, 25 bp, Probe sequence
gcaactggagaaacactatcacata

SEQ ID NO: 203810 - DNA, 25 bp, Probe sequence
gaaggcgcaccatttggtggttata

SEQ ID NO: 203811 - DNA, 25 bp, Probe sequence
gaacttcccaatgctattagctgca

SEQ ID NO: 203812 - DNA, 25 bp, Probe sequence
gaacgtgcacaaatgttgcgtgata

SEQ ID NO: 203813 - DNA, 25 bp, Probe sequence
gatgctaatttagaccttgcagttg

SEQ ID NO: 203814 - DNA, 25 bp, Probe sequence
gattggcgtcgtaggtgctgttgtt

SEQ ID NO: 203815 - DNA, 25 bp, Probe sequence
gttatcaagttgccgaagctgcagc

SEQ ID NO: 203816 - DNA, 25 bp, Probe sequence
gtcgatcatgcagtcaaagtggcgc

SEQ ID NO: 203817 - DNA, 25 bp, Probe sequence
ggtgttgtcaatatactaacgggta

SEQ ID NO: 203818 - DNA, 25 bp, Probe sequence
ggtattcagttaggtattttattca

SEQ ID NO: 203819 - DNA, 25 bp, Probe sequence
tgctgttgttgcttggaacttccca

SEQ ID NO: 203820 - DNA, 25 bp, Probe sequence
tcgaagtgactaatccagcaactgg

SEQ ID NO: 203821 - DNA, 25 bp, Probe sequence
ttgcgccagccattgctgcaggtaa

SEQ ID NO: 203822 - DNA, 25 bp, Probe sequence
atatttcaaacatccaagttacatc

SEQ ID NO: 203823 - DNA, 25 bp, Probe sequence
atatggcgaaggctatatcgatggt

SEQ ID NO: 203824 - DNA, 25 bp, Probe sequence
atcactgcgtcatttccaatctgaa

SEQ ID NO: 203825 - DNA, 25 bp, Probe sequence
agcataccgtgatgaagatcgcgtt

SEQ ID NO: 203826 - DNA, 25 bp, Probe sequence
agctatggaagcacctattagttta

SEQ ID NO: 203827 - DNA, 25 bp, Probe sequence
aaatcagccgaagcattaaacaatc

SEQ ID NO: 203828 - DNA, 25 bp, Probe sequence
aaatcatcaattcaaaagcacgtaa

SEQ ID NO: 203829 - DNA, 25 bp, Probe sequence
aaagtacttaaatcactgcgtcatt

SEQ ID NO: 203830 - DNA, 25 bp, Probe sequence
aaaatcttctggtcttactgataca

SEQ ID NO: 203831 - DNA, 25 bp, Probe sequence
aatggcaccacaattctttggcgtt

SEQ ID NO: 203832 - DNA, 25 bp, Probe sequence
aatcacaatctttggtgcaactggt

SEQ ID NO: 203833 - DNA, 25 bp, Probe sequence
ctttggcgttatttctgattatcta

SEQ ID NO: 203834 - DNA, 25 bp, Probe sequence
gcgaatgcgatgtttgaaccattat

SEQ ID NO: 203835 - DNA, 25 bp, Probe sequence
gaactttgttcgtggtcaatatggc

SEQ ID NO: 203836 - DNA, 25 bp, Probe sequence
gaagatcgcgttgcagatgactcta

SEQ ID NO: 203837 - DNA, 25 bp, Probe sequence
gaacatattgccatcatcggtattg

SEQ ID NO: 203838 - DNA, 25 bp, Probe sequence
gaaatttatcgtattgaccactatt

SEQ ID NO: 203839 - DNA, 25 bp, Probe sequence
gactattctatttagcaatggcacc

SEQ ID NO: 203840 - DNA, 25 bp, Probe sequence
gacgcgtttatggaacatgtcttct

SEQ ID NO: 203841 - DNA, 25 bp, Probe sequence
gaggtattacgttttgcgaatgcga

SEQ ID NO: 203842 - DNA, 25 bp, Probe sequence
gattgtcttaaaggtgatgccacta

SEQ ID NO: 203843 - DNA, 25 bp, Probe sequence
gttgcagatgactctaacacaccta

SEQ ID NO: 203844 - DNA, 25 bp, Probe sequence
gtgcaactggtgacttaagccatcg

SEQ ID NO: 203845 - DNA, 25 bp, Probe sequence
gtgaagatatccgtgctgagaaagt

SEQ ID NO: 203846 - DNA, 25 bp, Probe sequence
gtgtatctttacatctaaatgctaa

SEQ ID NO: 203847 - DNA, 25 bp, Probe sequence
ggtgttgaagatcgtggtggttatt

SEQ ID NO: 203848 - DNA, 25 bp, Probe sequence
ggtaaccattggtgggacgatattc

SEQ ID NO: 203849 - DNA, 25 bp, Probe sequence
ggttgatccagaattccctaactat

SEQ ID NO: 203850 - DNA, 25 bp, Probe sequence
tgtttccatcaatattccatctcta

SEQ ID NO: 203851 - DNA, 25 bp, Probe sequence
tgaatcaggtactaatggtccatta

SEQ ID NO: 203852 - DNA, 25 bp, Probe sequence
tcatcggtattggacgtcgtgacat

SEQ ID NO: 203853 - DNA, 25 bp, Probe sequence
taagccatcgtaagttgtttccatc

SEQ ID NO: 203854 - DNA, 25 bp, Probe sequence
tacttgctcgtgatggtaaccattg

SEQ ID NO: 203855 - DNA, 25 bp, Probe sequence
tattccatctctaccaacaagacaa

SEQ ID NO: 203856 - DNA, 25 bp, Probe sequence
atttgttattagttgtcctcttgaa

SEQ ID NO: 203857 - DNA, 25 bp, Probe sequence
atatgttgaagtgtaccctctcgat

SEQ ID NO: 203858 - DNA, 25 bp, Probe sequence
atctccagaagcttatgcacgcgcg

SEQ ID NO: 203859 - DNA, 25 bp, Probe sequence
atgacactcgctgcaaatgatgtga

SEQ ID NO: 203860 - DNA, 25 bp, Probe sequence
atgaagcttggtactatattgaatc

SEQ ID NO: 203861 - DNA, 25 bp, Probe sequence
agtgtaccctctcgatatttcattt

SEQ ID NO: 203862 - DNA, 25 bp, Probe sequence
agttgtcctcttgaaaatggtttag

SEQ ID NO: 203863 - DNA, 25 bp, Probe sequence
agagcctttcaatttgcaagaatta

SEQ ID NO: 203864 - DNA, 25 bp, Probe sequence
acgacgatataatgacgttagtcca

SEQ ID NO: 203865 - DNA, 25 bp, Probe sequence
acactaagtatttgtcacatccttt

SEQ ID NO: 203866 - DNA, 25 bp, Probe sequence
aaaattcagctttggattcctgtta

SEQ ID NO: 203867 - DNA, 25 bp, Probe sequence
aagtttgcagttaacattgccatat

SEQ ID NO: 203868 - DNA, 25 bp, Probe sequence
aatgattgtcggcttatctccagaa

SEQ ID NO: 203869 - DNA, 25 bp, Probe sequence
cgatttttacctggcaaacattgtg

SEQ ID NO: 203870 - DNA, 25 bp, Probe sequence
gcacgcgcgcgtaaaatgacactcg

SEQ ID NO: 203871 - DNA, 25 bp, Probe sequence
gaagatcgtttattagagcctttca

SEQ ID NO: 203872 - DNA, 25 bp, Probe sequence
gaagacttgctcattgatggtaaaa

SEQ ID NO: 203873 - DNA, 25 bp, Probe sequence
gaacgttatcctgcacacttagaaa

SEQ ID NO: 203874 - DNA, 25 bp, Probe sequence
gacgttagtccatttgaactatttg

SEQ ID NO: 203875 - DNA, 25 bp, Probe sequence
gatatttcattggttggatatgcac

SEQ ID NO: 203876 - DNA, 25 bp, Probe sequence
gattttagtgattttcacggcgtat

SEQ ID NO: 203877 - DNA, 25 bp, Probe sequence
gattaatggtgctacacgacttgta

SEQ ID NO: 203878 - DNA, 25 bp, Probe sequence
gtcacatccttttaatgttccggat

SEQ ID NO: 203879 - DNA, 25 bp, Probe sequence
ggtgtaccaagtgaacgttatcctg

SEQ ID NO: 203880 - DNA, 25 bp, Probe sequence
ggatatgcacgatttatagacacta

SEQ ID NO: 203881 - DNA, 25 bp, Probe sequence
ggacgttatcaagcaaatacaacag

SEQ ID NO: 203882 - DNA, 25 bp, Probe sequence
tcctgttaaacagagtccttatgac

SEQ ID NO: 203883 - DNA, 25 bp, Probe sequence
tggagtgaaagttttggacgttatc

SEQ ID NO: 203884 - DNA, 25 bp, Probe sequence
tgattacgttggtctttcgccatac

SEQ ID NO: 203885 - DNA, 25 bp, Probe sequence
tccggattttttagaagacttgctc

SEQ ID NO: 203886 - DNA, 25 bp, Probe sequence
tacacgacttgtagatatcgctaaa

SEQ ID NO: 203887 - DNA, 25 bp, Probe sequence
ttcacggcgtatcacctattcaagc

SEQ ID NO: 203888 - DNA, 25 bp, Probe sequence
tttcatttaatgacccattcactaa

SEQ ID NO: 203889 - DNA, 25 bp, Probe sequence
ttcgccataccatcttgatcaatca

SEQ ID NO: 203890 - DNA, 25 bp, Probe sequence
attgttattaacgagtatcattcca

SEQ ID NO: 203891 - DNA, 25 bp, Probe sequence
attaacgagtatcattccaatttta

SEQ ID NO: 203892 - DNA, 25 bp, Probe sequence
attatcgttatgcttgtatcagttg

SEQ ID NO: 203893 - DNA, 25 bp, Probe sequence
attatcattatcgttatgcttgtat

SEQ ID NO: 203894 - DNA, 25 bp, Probe sequence
atatcttatgtcgtaattattaata

SEQ ID NO: 203895 - DNA, 25 bp, Probe sequence
atcagttgtattagcattgttatta

SEQ ID NO: 203896 - DNA, 25 bp, Probe sequence
atcattatcgttatgcttgtatcag

SEQ ID NO: 203897 - DNA, 25 bp, Probe sequence
atcgttatgcttgtatcagttgtat

SEQ ID NO: 203898 - DNA, 25 bp, Probe sequence
aggttattcatttggaggcacacaa

SEQ ID NO: 203899 - DNA, 25 bp, Probe sequence
agttttaagaattatcattatcgtt

SEQ ID NO: 203900 - DNA, 25 bp, Probe sequence
aaaggttattcatttggaggcacac

SEQ ID NO: 203901 - DNA, 25 bp, Probe sequence
aagaattatcattatcgttatgctt

SEQ ID NO: 203902 - DNA, 25 bp, Probe sequence
aaggttattcatttggaggcacaca

SEQ ID NO: 203903 - DNA, 25 bp, Probe sequence
cttgtatcagttgtattagcattgt

SEQ ID NO: 203904 - DNA, 25 bp, Probe sequence
ctagttatatcgtctcaagttaaaa

SEQ ID NO: 203905 - DNA, 25 bp, Probe sequence
gctagttatatcgtctcaagttaaa

SEQ ID NO: 203906 - DNA, 25 bp, Probe sequence
gaattatcattatcgttatgcttgt

SEQ ID NO: 203907 - DNA, 25 bp, Probe sequence
gttgtattagcattgttattaacga

SEQ ID NO: 203908 - DNA, 25 bp, Probe sequence
gttattcatttggaggcacacaaaa

SEQ ID NO: 203909 - DNA, 25 bp, Probe sequence
gttatgcttgtatcagttgtattag

SEQ ID NO: 203910 - DNA, 25 bp, Probe sequence
gttattaacgagtatcattccaatt

SEQ ID NO: 203911 - DNA, 25 bp, Probe sequence
gtatcagttgtattagcattgttat

SEQ ID NO: 203912 - DNA, 25 bp, Probe sequence
tgctagttatatcgtctcaagttaa

SEQ ID NO: 203913 - DNA, 25 bp, Probe sequence
tcgttatgcttgtatcagttgtatt

SEQ ID NO: 203914 - DNA, 25 bp, Probe sequence
tcttatgtcgtaattattaatacaa

SEQ ID NO: 203915 - DNA, 25 bp, Probe sequence
tcattatcgttatgcttgtatcagt

SEQ ID NO: 203916 - DNA, 25 bp, Probe sequence
tatcgttatgcttgtatcagttgta

SEQ ID NO: 203917 - DNA, 25 bp, Probe sequence
tatcattatcgttatgcttgtatca

SEQ ID NO: 203918 - DNA, 25 bp, Probe sequence
tattaacgagtatcattccaatttt

SEQ ID NO: 203919 - DNA, 25 bp, Probe sequence
ttttatatcttatgtcgtaattatt

SEQ ID NO: 203920 - DNA, 25 bp, Probe sequence
ttatcgttatgcttgtatcagttgt

SEQ ID NO: 203921 - DNA, 25 bp, Probe sequence
ttcatttggaggcacacaaaatgca

SEQ ID NO: 203922 - DNA, 25 bp, Probe sequence
ttgctagttatatcgtctcaagtta

SEQ ID NO: 203923 - DNA, 25 bp, Probe sequence
ttggaggcacacaaaatgcaaaata

SEQ ID NO: 203924 - DNA, 25 bp, Probe sequence
atcgatggtttatcacttagtgatg

SEQ ID NO: 203925 - DNA, 25 bp, Probe sequence
agtgctcacacttcatacaaagatg

SEQ ID NO: 203926 - DNA, 25 bp, Probe sequence
agatgctatcgatggtttatcactt

SEQ ID NO: 203927 - DNA, 25 bp, Probe sequence
acttacaaaaggacaacaagcgttg

SEQ ID NO: 203928 - DNA, 25 bp, Probe sequence
acaaaggcgataagaatgttcaatc

SEQ ID NO: 203929 - DNA, 25 bp, Probe sequence
acaaaatttagcaccattagaagaa

SEQ ID NO: 203930 - DNA, 25 bp, Probe sequence
agttgctaaagctttgaaatcctat

SEQ ID NO: 203931 - DNA, 25 bp, Probe sequence
aacatactacgacaaagttgctaaa

SEQ ID NO: 203932 - DNA, 25 bp, Probe sequence
aaaactgcatctaataatacgaaaa

SEQ ID NO: 203933 - DNA, 25 bp, Probe sequence
aactcaaactagatattcaagaact

SEQ ID NO: 203934 - DNA, 25 bp, Probe sequence
aactctgatttgaatcatgcatttg

SEQ ID NO: 203935 - DNA, 25 bp, Probe sequence
aagataatcatcaactcaaactaga

SEQ ID NO: 203936 - DNA, 25 bp, Probe sequence
aatcatcaactcaaactagatattc

SEQ ID NO: 203937 - DNA, 25 bp, Probe sequence
aatatcgataaattaaactctgatt

SEQ ID NO: 203938 - DNA, 25 bp, Probe sequence
aattggtttcaattgttggcgcaac

SEQ ID NO: 203939 - DNA, 25 bp, Probe sequence
cacttcatacaaagatgctatcgat

SEQ ID NO: 203940 - DNA, 25 bp, Probe sequence
ctgatttgaatcatgcatttgatga

SEQ ID NO: 203941 - DNA, 25 bp, Probe sequence
gctatcgatggtttatcacttagtg

SEQ ID NO: 203942 - DNA, 25 bp, Probe sequence
gctcacacttcatacaaagatgcta

SEQ ID NO: 203943 - DNA, 25 bp, Probe sequence
gctaaagctttgaaatcctataacg

SEQ ID NO: 203944 - DNA, 25 bp, Probe sequence
gctttgaaatcctataacgatattg

SEQ ID NO: 203945 - DNA, 25 bp, Probe sequence
gatgaatgttacatcaacatactac

SEQ ID NO: 203946 - DNA, 25 bp, Probe sequence
gatattcaaagtgctcacacttcat

SEQ ID NO: 203947 - DNA, 25 bp, Probe sequence
gatattcaagaacttaatcaacaaa

SEQ ID NO: 203948 - DNA, 25 bp, Probe sequence
gttggcgcaacattattgttagctg

SEQ ID NO: 203949 - DNA, 25 bp, Probe sequence
gttacatcaacatactacgacaaag

SEQ ID NO: 203950 - DNA, 25 bp, Probe sequence
ggatcacaaaatttagcaccattag

SEQ ID NO: 203951 - DNA, 25 bp, Probe sequence
ggcgcaacattattgttagctggat

SEQ ID NO: 203952 - DNA, 25 bp, Probe sequence
taatgatattcaaagtgctcacact

SEQ ID NO: 203953 - DNA, 25 bp, Probe sequence
tactacgacaaagttgctaaagctt

SEQ ID NO: 203954 - DNA, 25 bp, Probe sequence
ttattgttagctggatgtggatcac

SEQ ID NO: 203955 - DNA, 25 bp, Probe sequence
ttcaaagtgctcacacttcatacaa

SEQ ID NO: 203956 - DNA, 25 bp, Probe sequence
ttggtttcaattgttggcgcaacat

SEQ ID NO: 203957 - DNA, 25 bp, Probe sequence
ttgttagctggatgtggatcacaaa

SEQ ID NO: 203958 - DNA, 25 bp, Probe sequence
attgctgcgattggattagtaatga

SEQ ID NO: 203959 - DNA, 25 bp, Probe sequence
atttcttcatcttaactgaagacca

SEQ ID NO: 203960 - DNA, 25 bp, Probe sequence
atctagatgcctttattttttcaat

SEQ ID NO: 203961 - DNA, 25 bp, Probe sequence
atgcctttattttttcaatcgtcag

SEQ ID NO: 203962 - DNA, 25 bp, Probe sequence
atgaatctagatgcctttatttttt

SEQ ID NO: 203963 - DNA, 25 bp, Probe sequence
agatgcctttattttttcaatcgtc

SEQ ID NO: 203964 - DNA, 25 bp, Probe sequence
agctttgctgtaatagctggtatta

SEQ ID NO: 203965 - DNA, 25 bp, Probe sequence
actgaagaccaacgcaaatatcgca

SEQ ID NO: 203966 - DNA, 25 bp, Probe sequence
aactgaagaccaacgcaaatatcgc

SEQ ID NO: 203967 - DNA, 25 bp, Probe sequence
aagaccaacgcaaatatcgcaaagc

SEQ ID NO: 203968 - DNA, 25 bp, Probe sequence
aatgaatctagatgcctttattttt

SEQ ID NO: 203969 - DNA, 25 bp, Probe sequence
aatctagatgcctttattttttcaa

SEQ ID NO: 203970 - DNA, 25 bp, Probe sequence
catcttaactgaagaccaacgcaaa

SEQ ID NO: 203971 - DNA, 25 bp, Probe sequence
ctttattttttcaatcgtcagaatg

SEQ ID NO: 203972 - DNA, 25 bp, Probe sequence
ctagatgcctttattttttcaatcg

SEQ ID NO: 203973 - DNA, 25 bp, Probe sequence
ctgaagaccaacgcaaatatcgcaa

SEQ ID NO: 203974 - DNA, 25 bp, Probe sequence
gcctttattttttcaatcgtcagaa

SEQ ID NO: 203975 - DNA, 25 bp, Probe sequence
gctggtattatttatctgatttatt

SEQ ID NO: 203976 - DNA, 25 bp, Probe sequence
gctttgctgtaatagctggtattat

SEQ ID NO: 203977 - DNA, 25 bp, Probe sequence
gaatctagatgcctttattttttca

SEQ ID NO: 203978 - DNA, 25 bp, Probe sequence
gaagaccaacgcaaatatcgcaaag

SEQ ID NO: 203979 - DNA, 25 bp, Probe sequence
gatgcctttattttttcaatcgtca

SEQ ID NO: 203980 - DNA, 25 bp, Probe sequence
gtaatgaatctagatgcctttattt

SEQ ID NO: 203981 - DNA, 25 bp, Probe sequence
tgaatctagatgcctttattttttc

SEQ ID NO: 203982 - DNA, 25 bp, Probe sequence
tgctgcgattggattagtaatgaat

SEQ ID NO: 203983 - DNA, 25 bp, Probe sequence
tgcctttattttttcaatcgtcaga

SEQ ID NO: 203984 - DNA, 25 bp, Probe sequence
tctagatgcctttattttttcaatc

SEQ ID NO: 203985 - DNA, 25 bp, Probe sequence
tagctggtattatttatctgattta

SEQ ID NO: 203986 - DNA, 25 bp, Probe sequence
tagatgcctttattttttcaatcgt

SEQ ID NO: 203987 - DNA, 25 bp, Probe sequence
tagtaatgaatctagatgcctttat

SEQ ID NO: 203988 - DNA, 25 bp, Probe sequence
tattttttcaatcgtcagaatgtta

SEQ ID NO: 203989 - DNA, 25 bp, Probe sequence
ttcatcttaactgaagaccaacgca

SEQ ID NO: 203990 - DNA, 25 bp, Probe sequence
ttattatttcttcatcttaactgaa

SEQ ID NO: 203991 - DNA, 25 bp, Probe sequence
ttaactgaagaccaacgcaaatatc

SEQ ID NO: 203992 - DNA, 25 bp, Probe sequence
attcctatgacaatgttcaggcaac

SEQ ID NO: 203993 - DNA, 25 bp, Probe sequence
atatctatatgttaaaaggcggcta

SEQ ID NO: 203994 - DNA, 25 bp, Probe sequence
atagagccgctcgtattttgaaaaa

SEQ ID NO: 203995 - DNA, 25 bp, Probe sequence
agttgactatgactacggtcacatt

SEQ ID NO: 203996 - DNA, 25 bp, Probe sequence
agcgagctgttaaagaattagatca

SEQ ID NO: 203997 - DNA, 25 bp, Probe sequence
aacaaattcttaacaagcgagctgt

SEQ ID NO: 203998 - DNA, 25 bp, Probe sequence
aagtcatcgatgttagagagaaagt

SEQ ID NO: 203999 - DNA, 25 bp, Probe sequence
aatgttcaggcaacgattccaagga

SEQ ID NO: 204000 - DNA, 25 bp, Probe sequence
aatgggattagaaaagctcaagtca

SEQ ID NO: 204001 - DNA, 25 bp, Probe sequence
caaccggtatacttatgtgatgcca

SEQ ID NO: 204002 - DNA, 25 bp, Probe sequence
cattaatgggtctcgcaatattcct

SEQ ID NO: 204003 - DNA, 25 bp, Probe sequence
gactacggtcacattaatgggtctc

SEQ ID NO: 204004 - DNA, 25 bp, Probe sequence
gctagctatagagccgctcgtattt

SEQ ID NO: 204005 - DNA, 25 bp, Probe sequence
gctagtttgtacatcgcaataattt

SEQ ID NO: 204006 - DNA, 25 bp, Probe sequence
gaaaagctcaagtcatcgatgttag

SEQ ID NO: 204007 - DNA, 25 bp, Probe sequence
gacaatgttcaggcaacgattccaa

SEQ ID NO: 204008 - DNA, 25 bp, Probe sequence
gagccgctcgtattttgaaaaagaa

SEQ ID NO: 204009 - DNA, 25 bp, Probe sequence
gagaaagttgactatgactacggtc

SEQ ID NO: 204010 - DNA, 25 bp, Probe sequence
gatcaaaatgaattccataatggga

SEQ ID NO: 204011 - DNA, 25 bp, Probe sequence
gattgctagctatagagccgctcgt

SEQ ID NO: 204012 - DNA, 25 bp, Probe sequence
gtacatcgcaataattttagttata

SEQ ID NO: 204013 - DNA, 25 bp, Probe sequence
gtgatgccaatgggattgctagcta

SEQ ID NO: 204014 - DNA, 25 bp, Probe sequence
gggattgctagctatagagccgctc

SEQ ID NO: 204015 - DNA, 25 bp, Probe sequence
gggtctcgcaatattcctatgacaa

SEQ ID NO: 204016 - DNA, 25 bp, Probe sequence
ggtcacattaatgggtctcgcaata

SEQ ID NO: 204017 - DNA, 25 bp, Probe sequence
ggtatacttatgtgatgccaatggg

SEQ ID NO: 204018 - DNA, 25 bp, Probe sequence
ggcggctataaaaaatggactggaa

SEQ ID NO: 204019 - DNA, 25 bp, Probe sequence
tgagtgctagtttgtacatcgcaat

SEQ ID NO: 204020 - DNA, 25 bp, Probe sequence
tgcttatatgattgttcaacaaatt

SEQ ID NO: 204021 - DNA, 25 bp, Probe sequence
tcgcaatattcctatgacaatgttc

SEQ ID NO: 204022 - DNA, 25 bp, Probe sequence
taatgggtctcgcaatattcctatg

SEQ ID NO: 204023 - DNA, 25 bp, Probe sequence
tacggtcacattaatgggtctcgca

SEQ ID NO: 204024 - DNA, 25 bp, Probe sequence
ttcaggcaacgattccaaggattaa

SEQ ID NO: 204025 - DNA, 25 bp, Probe sequence
ttgctagctatagagccgctcgtat

SEQ ID NO: 204026 - DNA, 25 bp, Probe sequence
attccatattgtatcgagccatcac

SEQ ID NO: 204027 - DNA, 25 bp, Probe sequence
atcactccaggtaacttcattttca

SEQ ID NO: 204028 - DNA, 25 bp, Probe sequence
agtaaaattcgatatcgcgctgata

SEQ ID NO: 204029 - DNA, 25 bp, Probe sequence
agtatgggaagcttcaggacactta

SEQ ID NO: 204030 - DNA, 25 bp, Probe sequence
acgtacagttttacacttccatcct

SEQ ID NO: 204031 - DNA, 25 bp, Probe sequence
acagaggttttgtgttccctggtag

SEQ ID NO: 204032 - DNA, 25 bp, Probe sequence
aaaattcattacacaatcaccgttt

SEQ ID NO: 204033 - DNA, 25 bp, Probe sequence
aacaacttcaacgacccaatgattg

SEQ ID NO: 204034 - DNA, 25 bp, Probe sequence
aacttttgcaagtgactggttaaca

SEQ ID NO: 204035 - DNA, 25 bp, Probe sequence
aactgctaactggactgaaattcgc

SEQ ID NO: 204036 - DNA, 25 bp, Probe sequence
aacgtgcaacgttcaatgcgtaaaa

SEQ ID NO: 204037 - DNA, 25 bp, Probe sequence
aagttacagtacgtgacagagattc

SEQ ID NO: 204038 - DNA, 25 bp, Probe sequence
caatcaccgtttaacgttggtatcg

SEQ ID NO: 204039 - DNA, 25 bp, Probe sequence
cagacttcgacttacgtaaacatgc

SEQ ID NO: 204040 - DNA, 25 bp, Probe sequence
cattccgtaatgaaatcactccagg

SEQ ID NO: 204041 - DNA, 25 bp, Probe sequence
cttccatcctgcattagcaccatat

SEQ ID NO: 204042 - DNA, 25 bp, Probe sequence
gttccctggtagtgatatttacggt

SEQ ID NO: 204043 - DNA, 25 bp, Probe sequence
gcttcaggacacttaaacaacttca

SEQ ID NO: 204044 - DNA, 25 bp, Probe sequence
gaaggtattgtttgtcctgtaagta

SEQ ID NO: 204045 - DNA, 25 bp, Probe sequence
gaaaacttcattgccgatggtttaa

SEQ ID NO: 204046 - DNA, 25 bp, Probe sequence
gagccatcacttggtgcagatcgtg

SEQ ID NO: 204047 - DNA, 25 bp, Probe sequence
gatcgtgtaacattagctttcttat

SEQ ID NO: 204048 - DNA, 25 bp, Probe sequence
gttggggtgagttatggggtatcgc

SEQ ID NO: 204049 - DNA, 25 bp, Probe sequence
gttcgtatgccaatctcagagttag

SEQ ID NO: 204050 - DNA, 25 bp, Probe sequence
gttctaaattctcaatcgatttcga

SEQ ID NO: 204051 - DNA, 25 bp, Probe sequence
gtaaacatgctgaacactctggtga

SEQ ID NO: 204052 - DNA, 25 bp, Probe sequence
gtgtaacattcgactttgattcatt

SEQ ID NO: 204053 - DNA, 25 bp, Probe sequence
gggattatggtcctttaggtgttga

SEQ ID NO: 204054 - DNA, 25 bp, Probe sequence
ggtcaaattggtaaatcattccgta

SEQ ID NO: 204055 - DNA, 25 bp, Probe sequence
ggaacaagttcgtatgccaatctca

SEQ ID NO: 204056 - DNA, 25 bp, Probe sequence
tggaacttgaattcttctgtaaacc

SEQ ID NO: 204057 - DNA, 25 bp, Probe sequence
tggggtatcgcaagtcgtacagact

SEQ ID NO: 204058 - DNA, 25 bp, Probe sequence
tcttacgtcctgaaacagcacaagg

SEQ ID NO: 204059 - DNA, 25 bp, Probe sequence
tatgcgtttacgtgatcatgatgaa

SEQ ID NO: 204060 - DNA, 25 bp, Probe sequence
atggcaaatatcaaatctgcaatta

SEQ ID NO: 204061 - DNA, 25 bp, Probe sequence
agttagtagacaaagctgctcaaag

SEQ ID NO: 204062 - DNA, 25 bp, Probe sequence
agcacgcaacatttcacaaaagagt

SEQ ID NO: 204063 - DNA, 25 bp, Probe sequence
agctgtttcaaataacgctgataat

SEQ ID NO: 204064 - DNA, 25 bp, Probe sequence
agctgaagcacgcaacatttcacaa

SEQ ID NO: 204065 - DNA, 25 bp, Probe sequence
agctgctcaaagtaatttaatacat

SEQ ID NO: 204066 - DNA, 25 bp, Probe sequence
acattcaaacaaagctgaccgtatt

SEQ ID NO: 204067 - DNA, 25 bp, Probe sequence
acaaagctgaccgtattaaatcaca

SEQ ID NO: 204068 - DNA, 25 bp, Probe sequence
aaatcacaattaatgactgcaaata

SEQ ID NO: 204069 - DNA, 25 bp, Probe sequence
aaagctgaagcacgcaacatttcac

SEQ ID NO: 204070 - DNA, 25 bp, Probe sequence
aaagctgctcaaagtaatttaatac

SEQ ID NO: 204071 - DNA, 25 bp, Probe sequence
aaacgctaaaacagctgtttcaaat

SEQ ID NO: 204072 - DNA, 25 bp, Probe sequence
aaaagagtgcaatgcgtacagcagt

SEQ ID NO: 204073 - DNA, 25 bp, Probe sequence
aacagctgtttcaaataacgctgat

SEQ ID NO: 204074 - DNA, 25 bp, Probe sequence
aagctgaccgtattaaatcacaatt

SEQ ID NO: 204075 - DNA, 25 bp, Probe sequence
aagagtgcaatgcgtacagcagtta

SEQ ID NO: 204076 - DNA, 25 bp, Probe sequence
aatgaattagtaagcttagcagtta

SEQ ID NO: 204077 - DNA, 25 bp, Probe sequence
aatacattcaaacaaagctgaccgt

SEQ ID NO: 204078 - DNA, 25 bp, Probe sequence
caaacaaagctgaccgtattaaatc

SEQ ID NO: 204079 - DNA, 25 bp, Probe sequence
caaatctgcaattaaacgtgtaaaa

SEQ ID NO: 204080 - DNA, 25 bp, Probe sequence
cagcagttaaaaacgctaaaacagc

SEQ ID NO: 204081 - DNA, 25 bp, Probe sequence
cacgcaacatttcacaaaagagtgc

SEQ ID NO: 204082 - DNA, 25 bp, Probe sequence
gctgaccgtattaaatcacaattaa

SEQ ID NO: 204083 - DNA, 25 bp, Probe sequence
gctgaagcacgcaacatttcacaaa

SEQ ID NO: 204084 - DNA, 25 bp, Probe sequence
gcaatgcgtacagcagttaaaaacg

SEQ ID NO: 204085 - DNA, 25 bp, Probe sequence
gaagcacgcaacatttcacaaaaga

SEQ ID NO: 204086 - DNA, 25 bp, Probe sequence
gaaaaagctgaagcacgcaacattt

SEQ ID NO: 204087 - DNA, 25 bp, Probe sequence
gacaaagctgctcaaagtaatttaa

SEQ ID NO: 204088 - DNA, 25 bp, Probe sequence
gagtgcaatgcgtacagcagttaaa

SEQ ID NO: 204089 - DNA, 25 bp, Probe sequence
gttaagttagtagacaaagctgctc

SEQ ID NO: 204090 - DNA, 25 bp, Probe sequence
taagttagtagacaaagctgctcaa

SEQ ID NO: 204091 - DNA, 25 bp, Probe sequence
taaaaacgctaaaacagctgtttca

SEQ ID NO: 204092 - DNA, 25 bp, Probe sequence
tagtaagcttagcagttaagttagt

SEQ ID NO: 204093 - DNA, 25 bp, Probe sequence
tatcaaatctgcaattaaacgtgta

SEQ ID NO: 204094 - DNA, 25 bp, Probe sequence
attatcatcgtctttatcttctttt

SEQ ID NO: 204095 - DNA, 25 bp, Probe sequence
atatgtcgctacactctaattctag

SEQ ID NO: 204096 - DNA, 25 bp, Probe sequence
atacttatgtccttacctgatgttg

SEQ ID NO: 204097 - DNA, 25 bp, Probe sequence
atcgtctttatcttctttttactat

SEQ ID NO: 204098 - DNA, 25 bp, Probe sequence
atgtcgctacactctaattctagga

SEQ ID NO: 204099 - DNA, 25 bp, Probe sequence
acggcagttttattgcaattgcgtc

SEQ ID NO: 204100 - DNA, 25 bp, Probe sequence
acttatgtccttacctgatgttgtt

SEQ ID NO: 204101 - DNA, 25 bp, Probe sequence
acatatgtcgctacactctaattct

SEQ ID NO: 204102 - DNA, 25 bp, Probe sequence
acactctaattctaggatttatact

SEQ ID NO: 204103 - DNA, 25 bp, Probe sequence
aagatagctacatacggcagtttta

SEQ ID NO: 204104 - DNA, 25 bp, Probe sequence
aataatcaaaatagtctcgtaacaa

SEQ ID NO: 204105 - DNA, 25 bp, Probe sequence
aattgcgtcgtttgtcattttattt

SEQ ID NO: 204106 - DNA, 25 bp, Probe sequence
cgtctttatcttctttttactatag

SEQ ID NO: 204107 - DNA, 25 bp, Probe sequence
gctacatacggcagttttattgcaa

SEQ ID NO: 204108 - DNA, 25 bp, Probe sequence
gctacactctaattctaggatttat

SEQ ID NO: 204109 - DNA, 25 bp, Probe sequence
gcaattgcgtcgtttgtcattttat

SEQ ID NO: 204110 - DNA, 25 bp, Probe sequence
gaacatatgtcgctacactctaatt

SEQ ID NO: 204111 - DNA, 25 bp, Probe sequence
gaaaattatattcgatgcatttatt

SEQ ID NO: 204112 - DNA, 25 bp, Probe sequence
gatagctacatacggcagttttatt

SEQ ID NO: 204113 - DNA, 25 bp, Probe sequence
gatttatacttatgtccttacctga

SEQ ID NO: 204114 - DNA, 25 bp, Probe sequence
gtcgctacactctaattctaggatt

SEQ ID NO: 204115 - DNA, 25 bp, Probe sequence
ggcagttttattgcaattgcgtcgt

SEQ ID NO: 204116 - DNA, 25 bp, Probe sequence
tgtccttacctgatgttgttgataa

SEQ ID NO: 204117 - DNA, 25 bp, Probe sequence
tgcatttattatcatcgtctttatc

SEQ ID NO: 204118 - DNA, 25 bp, Probe sequence
tcatcgtctttatcttctttttact

SEQ ID NO: 204119 - DNA, 25 bp, Probe sequence
taaagttttcatttaatatcgagtt

SEQ ID NO: 204120 - DNA, 25 bp, Probe sequence
tagtctcgtaacaaagatagctaca

SEQ ID NO: 204121 - DNA, 25 bp, Probe sequence
tatgtccttacctgatgttgttgat

SEQ ID NO: 204122 - DNA, 25 bp, Probe sequence
tatgaacatatgtcgctacactcta

SEQ ID NO: 204123 - DNA, 25 bp, Probe sequence
tatcatcgtctttatcttcttttta

SEQ ID NO: 204124 - DNA, 25 bp, Probe sequence
tattgcaattgcgtcgtttgtcatt

SEQ ID NO: 204125 - DNA, 25 bp, Probe sequence
tttatacttatgtccttacctgatg

SEQ ID NO: 204126 - DNA, 25 bp, Probe sequence
ttattatcatcgtctttatcttctt

SEQ ID NO: 204127 - DNA, 25 bp, Probe sequence
ttgcaattgcgtcgtttgtcatttt

SEQ ID NO: 204128 - DNA, 25 bp, Probe sequence
atatgcaattagactcttatcgtcg

SEQ ID NO: 204129 - DNA, 25 bp, Probe sequence
atcgtgtcgatttaggattaggacg

SEQ ID NO: 204130 - DNA, 25 bp, Probe sequence
atgtttaaatacaatcgttgctgaa

SEQ ID NO: 204131 - DNA, 25 bp, Probe sequence
aggacgtgcacctggaacagatatg

SEQ ID NO: 204132 - DNA, 25 bp, Probe sequence
agcacaatatttagcttcatctatg

SEQ ID NO: 204133 - DNA, 25 bp, Probe sequence
accttgtccctattcgagaaggtga

SEQ ID NO: 204134 - DNA, 25 bp, Probe sequence
actcgtggcagaatgcagcccgttc

SEQ ID NO: 204135 - DNA, 25 bp, Probe sequence
aaagggcttccatatgtgttcgctg

SEQ ID NO: 204136 - DNA, 25 bp, Probe sequence
aaaacgttatttgaaccttctgatg

SEQ ID NO: 204137 - DNA, 25 bp, Probe sequence
aacacatacgtgtaggttctggagg

SEQ ID NO: 204138 - DNA, 25 bp, Probe sequence
aacattatttccaaatcgtgtcgat

SEQ ID NO: 204139 - DNA, 25 bp, Probe sequence
aacgctcccaacctagtaagttcag

SEQ ID NO: 204140 - DNA, 25 bp, Probe sequence
cagattctgcacatttagctgctcg

SEQ ID NO: 204141 - DNA, 25 bp, Probe sequence
catgctccattaatcgttgcggaac

SEQ ID NO: 204142 - DNA, 25 bp, Probe sequence
cattaaaccttgtccctattcgaga

SEQ ID NO: 204143 - DNA, 25 bp, Probe sequence
gctggacattttgcacctcaacaaa

SEQ ID NO: 204144 - DNA, 25 bp, Probe sequence
gctcaccaacaagcatatgttcgtg

SEQ ID NO: 204145 - DNA, 25 bp, Probe sequence
gcagtaggtaaaaatgtgcctttat

SEQ ID NO: 204146 - DNA, 25 bp, Probe sequence
gcatatgttcgtgcttatccagcag

SEQ ID NO: 204147 - DNA, 25 bp, Probe sequence
gaaccttctgatgtattagacgaac

SEQ ID NO: 204148 - DNA, 25 bp, Probe sequence
gaacagatatgatgaccgcaagtgc

SEQ ID NO: 204149 - DNA, 25 bp, Probe sequence
gacgaaccttatgttattgtatgtt

SEQ ID NO: 204150 - DNA, 25 bp, Probe sequence
gacgagatcaacatgatggtgttta

SEQ ID NO: 204151 - DNA, 25 bp, Probe sequence
gaccgcaagtgcattaagacgagat

SEQ ID NO: 204152 - DNA, 25 bp, Probe sequence
gttcgtgcttatccagcagtaggta

SEQ ID NO: 204153 - DNA, 25 bp, Probe sequence
gtaatggttagtatcactcgtggca

SEQ ID NO: 204154 - DNA, 25 bp, Probe sequence
ggattgctgaacaccataacgctcc

SEQ ID NO: 204155 - DNA, 25 bp, Probe sequence
ggattaggacgtgcacctggaacag

SEQ ID NO: 204156 - DNA, 25 bp, Probe sequence
ggttcagaaaatactgttcaacaaa

SEQ ID NO: 204157 - DNA, 25 bp, Probe sequence
ggcacgatggcaacattatttccaa

SEQ ID NO: 204158 - DNA, 25 bp, Probe sequence
tgtgttcgctggacattttgcacct

SEQ ID NO: 204159 - DNA, 25 bp, Probe sequence
tattcagcattaaaccttgtcccta

SEQ ID NO: 204160 - DNA, 25 bp, Probe sequence
ttcttggttcttcaacagattctgc

SEQ ID NO: 204161 - DNA, 25 bp, Probe sequence
ttagcttcatctatggcacaagtaa

SEQ ID NO: 204162 - DNA, 25 bp, Probe sequence
gggtttagacaagcgaccgttcaat

SEQ ID NO: 204163 - DNA, 25 bp, Probe sequence
attccaccatcagcgagcatagtaa

SEQ ID NO: 204164 - DNA, 25 bp, Probe sequence
attaccaggtttcatcattatcatt

SEQ ID NO: 204165 - DNA, 25 bp, Probe sequence
attattggtcaattgctcaaagaaa

SEQ ID NO: 204166 - DNA, 25 bp, Probe sequence
atgagcggtattttattatggatat

SEQ ID NO: 204167 - DNA, 25 bp, Probe sequence
atgtttattatttacaggtcaaccg

SEQ ID NO: 204168 - DNA, 25 bp, Probe sequence
accgagtgtgttccagagcattctt

SEQ ID NO: 204169 - DNA, 25 bp, Probe sequence
acaggtcaaccgagtgtgttccaga

SEQ ID NO: 204170 - DNA, 25 bp, Probe sequence
aaatttaaaatcgctacacctgtat

SEQ ID NO: 204171 - DNA, 25 bp, Probe sequence
aaagcgaaaggtttgccgaatgcag

SEQ ID NO: 204172 - DNA, 25 bp, Probe sequence
aaacattacatgaagcgattacgat

SEQ ID NO: 204173 - DNA, 25 bp, Probe sequence
aaaacctttcaagcaaacattacat

SEQ ID NO: 204174 - DNA, 25 bp, Probe sequence
cgattacgatgagcggtgccgatgc

SEQ ID NO: 204175 - DNA, 25 bp, Probe sequence
gcgaccgttcaattaccaggtttca

SEQ ID NO: 204176 - DNA, 25 bp, Probe sequence
gcgagcatagtaaaacctttcaagc

SEQ ID NO: 204177 - DNA, 25 bp, Probe sequence
tcggtacaatactgacacctacgac

SEQ ID NO: 204178 - DNA, 25 bp, Probe sequence
gcaaccataccaggtatcgttttat

SEQ ID NO: 204179 - DNA, 25 bp, Probe sequence
gaataaatcaatacaatctttcggg

SEQ ID NO: 204180 - DNA, 25 bp, Probe sequence
gttggtatttgtcgctttagcttta

SEQ ID NO: 204181 - DNA, 25 bp, Probe sequence
gtagcgatgagcttaatttcattaa

SEQ ID NO: 204182 - DNA, 25 bp, Probe sequence
gtgccgatgcgaatatgacccaaat

SEQ ID NO: 204183 - DNA, 25 bp, Probe sequence
gtgttattcatttctttggtaaagc

SEQ ID NO: 204184 - DNA, 25 bp, Probe sequence
gtgtgttccagagcattcttttaaa

SEQ ID NO: 204185 - DNA, 25 bp, Probe sequence
ggtttcatcattatcattacatttt

SEQ ID NO: 204186 - DNA, 25 bp, Probe sequence
ggactacttggtgttatcgatttaa

SEQ ID NO: 204187 - DNA, 25 bp, Probe sequence
taatcgtcttaattaacttaatcgt

SEQ ID NO: 204188 - DNA, 25 bp, Probe sequence
tacacctgtatttaagccacttttc

SEQ ID NO: 204189 - DNA, 25 bp, Probe sequence
tagctttatatctagtgcctggttt

SEQ ID NO: 204190 - DNA, 25 bp, Probe sequence
tatcattacatttttaatcgtctta

SEQ ID NO: 204191 - DNA, 25 bp, Probe sequence
tttaagccacttttcgcgtggcaaa

SEQ ID NO: 204192 - DNA, 25 bp, Probe sequence
ttagtgcacttattacagtaattat

SEQ ID NO: 204193 - DNA, 25 bp, Probe sequence
ttcgcgtggcaaatgagcggtattt

SEQ ID NO: 204194 - DNA, 25 bp, Probe sequence
ttgccgaatgcagtaacgattttac

SEQ ID NO: 204195 - DNA, 25 bp, Probe sequence
ttgtaggactacttggtgttatcga

SEQ ID NO: 204196 - DNA, 25 bp, Probe sequence
attaagtgcccatgttgtgttagat

SEQ ID NO: 204197 - DNA, 25 bp, Probe sequence
attagatgagccatacttcgacaaa

SEQ ID NO: 204198 - DNA, 25 bp, Probe sequence
attttaatggaaagtgtgcctcaac

SEQ ID NO: 204199 - DNA, 25 bp, Probe sequence
atttcactcatcattttacgtggtg

SEQ ID NO: 204200 - DNA, 25 bp, Probe sequence
atatggcattgcacattcaacgttg

SEQ ID NO: 204201 - DNA, 25 bp, Probe sequence
actcatcattttacgtggtggttat

SEQ ID NO: 204202 - DNA, 25 bp, Probe sequence
acatgaatttcatttgtggagtatt

SEQ ID NO: 204203 - DNA, 25 bp, Probe sequence
aagtgcattatggcatttcatggga

SEQ ID NO: 204204 - DNA, 25 bp, Probe sequence
aagtggcattatgtttatgattgct

SEQ ID NO: 204205 - DNA, 25 bp, Probe sequence
aattacgcgtaatgcgtggttaatt

SEQ ID NO: 204206 - DNA, 25 bp, Probe sequence
caatatcaatattcaaagtgcatta

SEQ ID NO: 204207 - DNA, 25 bp, Probe sequence
caatctggattttatatgaagctat

SEQ ID NO: 204208 - DNA, 25 bp, Probe sequence
cagatacaaatattttcatcatgtc

SEQ ID NO: 204209 - DNA, 25 bp, Probe sequence
cattattcattaagtgcccatgttg

SEQ ID NO: 204210 - DNA, 25 bp, Probe sequence
catttcatatgcttagtgatgtatt

SEQ ID NO: 204211 - DNA, 25 bp, Probe sequence
gcgattgatcaagtatcatcattgt

SEQ ID NO: 204212 - DNA, 25 bp, Probe sequence
gcgtaatgcgtggttaattttaatg

SEQ ID NO: 204213 - DNA, 25 bp, Probe sequence
gaatccattagatgagccatacttc

SEQ ID NO: 204214 - DNA, 25 bp, Probe sequence
gaagctattgtacgtattatttatc

SEQ ID NO: 204215 - DNA, 25 bp, Probe sequence
gaactctattggtgtcatcgttgca

SEQ ID NO: 204216 - DNA, 25 bp, Probe sequence
gaaaacttgcaattgaatccattag

SEQ ID NO: 204217 - DNA, 25 bp, Probe sequence
gtattgtaatttcactcatcatttt

SEQ ID NO: 204218 - DNA, 25 bp, Probe sequence
gtgcctcaacatttggatactgatc

SEQ ID NO: 204219 - DNA, 25 bp, Probe sequence
gtgcccatgttgtgttagataaaaa

SEQ ID NO: 204220 - DNA, 25 bp, Probe sequence
gggagacttattgaactctattggt

SEQ ID NO: 204221 - DNA, 25 bp, Probe sequence
ggtttagcattaattgtaatttcaa

SEQ ID NO: 204222 - DNA, 25 bp, Probe sequence
ggaaagtgtgcctcaacatttggat

SEQ ID NO: 204223 - DNA, 25 bp, Probe sequence
ggcattgcacattcaacgttgcaaa

SEQ ID NO: 204224 - DNA, 25 bp, Probe sequence
tggtgtcatcgttgcagttgtattg

SEQ ID NO: 204225 - DNA, 25 bp, Probe sequence
tggtggttataaaattacgcgtaat

SEQ ID NO: 204226 - DNA, 25 bp, Probe sequence
tgattgctagtattggtttactcgt

SEQ ID NO: 204227 - DNA, 25 bp, Probe sequence
tagatggcatattagatgtacatga

SEQ ID NO: 204228 - DNA, 25 bp, Probe sequence
tatggcatttcatgggagacttatt

SEQ ID NO: 204229 - DNA, 25 bp, Probe sequence
ttgtacgtattatttatccgcaacc

SEQ ID NO: 204230 - DNA, 25 bp, Probe sequence
atggctatgtttcacagcaatattt

SEQ ID NO: 204231 - DNA, 25 bp, Probe sequence
agcgattcgttcaagagcgcaaatt

SEQ ID NO: 204232 - DNA, 25 bp, Probe sequence
aaagcaatttcgggcagtacgcaat

SEQ ID NO: 204233 - DNA, 25 bp, Probe sequence
aaaatgtctggtcaagttatcttgt

SEQ ID NO: 204234 - DNA, 25 bp, Probe sequence
aatccttatcatgctatcaatccag

SEQ ID NO: 204235 - DNA, 25 bp, Probe sequence
aatctatccgtggtagcgacgtcaa

SEQ ID NO: 204236 - DNA, 25 bp, Probe sequence
caatgattttttatggtccacctgg

SEQ ID NO: 204237 - DNA, 25 bp, Probe sequence
caaggtgatgttcgtagtgcgttaa

SEQ ID NO: 204238 - DNA, 25 bp, Probe sequence
ccactaagccaagcagtaatcgaac

SEQ ID NO: 204239 - DNA, 25 bp, Probe sequence
ccatgacctacttttctacacaaag

SEQ ID NO: 204240 - DNA, 25 bp, Probe sequence
gccattgatagtgcattgtccgata

SEQ ID NO: 204241 - DNA, 25 bp, Probe sequence
gccaagcgttaactcgtgcaataga

SEQ ID NO: 204242 - DNA, 25 bp, Probe sequence
gccgctttacattatttagcacgat

SEQ ID NO: 204243 - DNA, 25 bp, Probe sequence
gctggtcagagaacacttgctgcta

SEQ ID NO: 204244 - DNA, 25 bp, Probe sequence
gctatcaatccagcgattcgttcaa

SEQ ID NO: 204245 - DNA, 25 bp, Probe sequence
gaatcagcagaacgtctaggtttac

SEQ ID NO: 204246 - DNA, 25 bp, Probe sequence
gaagatgccatgacctacttttcta

SEQ ID NO: 204247 - DNA, 25 bp, Probe sequence
gaagatgtgcgccaagcgttaactc

SEQ ID NO: 204248 - DNA, 25 bp, Probe sequence
gaagctggagatttacctacaatag

SEQ ID NO: 204249 - DNA, 25 bp, Probe sequence
gaacgtctaggtttaccagaagcta

SEQ ID NO: 204250 - DNA, 25 bp, Probe sequence
gacggttatcgacatgttacattgc

SEQ ID NO: 204251 - DNA, 25 bp, Probe sequence
gagcgctttccaaaaatctatccgt

SEQ ID NO: 204252 - DNA, 25 bp, Probe sequence
gagaacacttgctgctattgaatca

SEQ ID NO: 204253 - DNA, 25 bp, Probe sequence
gaggatataggcttagcctcaccta

SEQ ID NO: 204254 - DNA, 25 bp, Probe sequence
gtagcgacgtcaatgccgctttaca

SEQ ID NO: 204255 - DNA, 25 bp, Probe sequence
gtaatcgaactatgcttatcaccta

SEQ ID NO: 204256 - DNA, 25 bp, Probe sequence
ggtgctacaacttcaaatccttatc

SEQ ID NO: 204257 - DNA, 25 bp, Probe sequence
ggaattagctgtattaagcgcagat

SEQ ID NO: 204258 - DNA, 25 bp, Probe sequence
tggtccacctggtataggcaaaaca

SEQ ID NO: 204259 - DNA, 25 bp, Probe sequence
tacctacaatagttcgacgattact

SEQ ID NO: 204260 - DNA, 25 bp, Probe sequence
tagcctcacctaatgctggtcagag

SEQ ID NO: 204261 - DNA, 25 bp, Probe sequence
taggccgatctattggttacaaata

SEQ ID NO: 204262 - DNA, 25 bp, Probe sequence
ttatcacctaagtcaaattcagcaa

SEQ ID NO: 204263 - DNA, 25 bp, Probe sequence
ttacgatgttatgagcgctttccaa

SEQ ID NO: 204264 - DNA, 25 bp, Probe sequence
atatcgttcatcatcgtaaaaaatt

SEQ ID NO: 204265 - DNA, 25 bp, Probe sequence
atcgaccgcttaatgacttttccaa

SEQ ID NO: 204266 - DNA, 25 bp, Probe sequence
atgctgggctatcttggttaactat

SEQ ID NO: 204267 - DNA, 25 bp, Probe sequence
accgctctatgatagcaaggcattg

SEQ ID NO: 204268 - DNA, 25 bp, Probe sequence
acatgctgggctatcttggttaact

SEQ ID NO: 204269 - DNA, 25 bp, Probe sequence
acatgcttctgatcgtatcacagtt

SEQ ID NO: 204270 - DNA, 25 bp, Probe sequence
aaacttttagcattagaatcacaac

SEQ ID NO: 204271 - DNA, 25 bp, Probe sequence
aaaaggtagcacaaatgaccgctca

SEQ ID NO: 204272 - DNA, 25 bp, Probe sequence
aagcattttatgatttcgaaccaga

SEQ ID NO: 204273 - DNA, 25 bp, Probe sequence
cacaacatgctgggctatcttggtt

SEQ ID NO: 204274 - DNA, 25 bp, Probe sequence
catgtatggggacaaccgctctatg

SEQ ID NO: 204275 - DNA, 25 bp, Probe sequence
gatttcgaaccagaaaaggtagcac

SEQ ID NO: 204276 - DNA, 25 bp, Probe sequence
gctgggctatcttggttaactattt

SEQ ID NO: 204277 - DNA, 25 bp, Probe sequence
gcttctgatcgtatcacagttgatg

SEQ ID NO: 204278 - DNA, 25 bp, Probe sequence
gcaaggcattgtttaaacttttagc

SEQ ID NO: 204279 - DNA, 25 bp, Probe sequence
gaatcacaacatgctgggctatctt

SEQ ID NO: 204280 - DNA, 25 bp, Probe sequence
gaagcaattgttaatcaagctcaag

SEQ ID NO: 204281 - DNA, 25 bp, Probe sequence
gacaaccgctctatgatagcaaggc

SEQ ID NO: 204282 - DNA, 25 bp, Probe sequence
gacttttccaaatatcgttcatcat

SEQ ID NO: 204283 - DNA, 25 bp, Probe sequence
gaccgcttaatgacttttccaaata

SEQ ID NO: 204284 - DNA, 25 bp, Probe sequence
gatcatgtatggggacaaccgctct

SEQ ID NO: 204285 - DNA, 25 bp, Probe sequence
gatatcgaccgcttaatgacttttc

SEQ ID NO: 204286 - DNA, 25 bp, Probe sequence
gtatgaacatgcttctgatcgtatc

SEQ ID NO: 204287 - DNA, 25 bp, Probe sequence
gtaagcctaaagatttgcagtatga

SEQ ID NO: 204288 - DNA, 25 bp, Probe sequence
ggggacaaccgctctatgatagcaa

SEQ ID NO: 204289 - DNA, 25 bp, Probe sequence
tgggctatcttggttaactatttta

SEQ ID NO: 204290 - DNA, 25 bp, Probe sequence
tgtatggggacaaccgctctatgat

SEQ ID NO: 204291 - DNA, 25 bp, Probe sequence
tgttaatcaagctcaagggtattta

SEQ ID NO: 204292 - DNA, 25 bp, Probe sequence
tgaacatgcttctgatcgtatcaca

SEQ ID NO: 204293 - DNA, 25 bp, Probe sequence
tgcaacacaactatctaaagattta

SEQ ID NO: 204294 - DNA, 25 bp, Probe sequence
tgcagtatgaacatgcttctgatcg

SEQ ID NO: 204295 - DNA, 25 bp, Probe sequence
tcaagctcaagggtatttaaaaatt

SEQ ID NO: 204296 - DNA, 25 bp, Probe sequence
ttaggtccagtaacagtattttcgt

SEQ ID NO: 204297 - DNA, 25 bp, Probe sequence
ttccaaatatcgttcatcatcgtaa

SEQ ID NO: 204298 - DNA, 25 bp, Probe sequence
atcagcgaacaagatgctcaagcat

SEQ ID NO: 204299 - DNA, 25 bp, Probe sequence
attagctggcgaaggtacagtcgta

SEQ ID NO: 204300 - DNA, 25 bp, Probe sequence
attacttggtgtagacactcagtta

SEQ ID NO: 204301 - DNA, 25 bp, Probe sequence
atttgtacttggaagtgtcagccac

SEQ ID NO: 204302 - DNA, 25 bp, Probe sequence
aacttactgaagaacgaagcaagcg

SEQ ID NO: 204303 - DNA, 25 bp, Probe sequence
agctttagaagattatggtattgat

SEQ ID NO: 204304 - DNA, 25 bp, Probe sequence
aaagaagaactattaaaacatgcta

SEQ ID NO: 204305 - DNA, 25 bp, Probe sequence
aaacgtgcgactatccctgtattaa

SEQ ID NO: 204306 - DNA, 25 bp, Probe sequence
aaaacacgcaaagctttagaagatt

SEQ ID NO: 204307 - DNA, 25 bp, Probe sequence
aacgcaatcagcgaacaagatgctc

SEQ ID NO: 204308 - DNA, 25 bp, Probe sequence
aatatattacttggtgtagacactc

SEQ ID NO: 204309 - DNA, 25 bp, Probe sequence
aattgttcgtggtaatgcaaaagaa

SEQ ID NO: 204310 - DNA, 25 bp, Probe sequence
catcaattaaagcaggtgttcattt

SEQ ID NO: 204311 - DNA, 25 bp, Probe sequence
ctatccctgtattaatcgttaaata

SEQ ID NO: 204312 - DNA, 25 bp, Probe sequence
gcgattggaaaaaacacgcaaagct

SEQ ID NO: 204313 - DNA, 25 bp, Probe sequence
cgtgcgactatccctgtattaatcg

SEQ ID NO: 204314 - DNA, 25 bp, Probe sequence
gcgaaggtacagtcgtaacagtttt

SEQ ID NO: 204315 - DNA, 25 bp, Probe sequence
gctggcgaaggtacagtcgtaacag

SEQ ID NO: 204316 - DNA, 25 bp, Probe sequence
gaagtgtctaaattagctggcgaag

SEQ ID NO: 204317 - DNA, 25 bp, Probe sequence
gaagaacgaagcaagcgattggaaa

SEQ ID NO: 204318 - DNA, 25 bp, Probe sequence
gactatccctgtattaatcgttaaa

SEQ ID NO: 204319 - DNA, 25 bp, Probe sequence
gattatgaccaaataattgttcgtg

SEQ ID NO: 204320 - DNA, 25 bp, Probe sequence
gtagcaaaacgtgcgactatccctg

SEQ ID NO: 204321 - DNA, 25 bp, Probe sequence
gtacttggaagtgtcagccacaaag

SEQ ID NO: 204322 - DNA, 25 bp, Probe sequence
gtaacagttttaaacgcaatcagcg

SEQ ID NO: 204323 - DNA, 25 bp, Probe sequence
gtctaaattagctggcgaaggtaca

SEQ ID NO: 204324 - DNA, 25 bp, Probe sequence
gtgtcagccacaaagtagcaaaacg

SEQ ID NO: 204325 - DNA, 25 bp, Probe sequence
ggtgttcatttaaacaaacttactg

SEQ ID NO: 204326 - DNA, 25 bp, Probe sequence
ggaagtgtcagccacaaagtagcaa

SEQ ID NO: 204327 - DNA, 25 bp, Probe sequence
tggtgtagacactcagttaaaaaat

SEQ ID NO: 204328 - DNA, 25 bp, Probe sequence
tgcgactatccctgtattaatcgtt

SEQ ID NO: 204329 - DNA, 25 bp, Probe sequence
taagtaaccgtaaagcagaagacaa

SEQ ID NO: 204330 - DNA, 25 bp, Probe sequence
tagcaaaacgtgcgactatccctgt

SEQ ID NO: 204331 - DNA, 25 bp, Probe sequence
tacagtcgtaacagttttaaacgca

SEQ ID NO: 204332 - DNA, 25 bp, Probe sequence
attaaaatgtattttgcacagttag

SEQ ID NO: 204333 - DNA, 25 bp, Probe sequence
attttgcacagttagatggtgaaat

SEQ ID NO: 204334 - DNA, 25 bp, Probe sequence
ataaacagtcacaagaattattgga

SEQ ID NO: 204335 - DNA, 25 bp, Probe sequence
ataactaataaacagtcacaagaat

SEQ ID NO: 204336 - DNA, 25 bp, Probe sequence
atgtattttgcacagttagatggtg

SEQ ID NO: 204337 - DNA, 25 bp, Probe sequence
agtcacaagaattattggataaaga

SEQ ID NO: 204338 - DNA, 25 bp, Probe sequence
agatggtgaaataactaataaacag

SEQ ID NO: 204339 - DNA, 25 bp, Probe sequence
actaataaacagtcacaagaattat

SEQ ID NO: 204340 - DNA, 25 bp, Probe sequence
acagtcacaagaattattggataaa

SEQ ID NO: 204341 - DNA, 25 bp, Probe sequence
aaataactaataaacagtcacaaga

SEQ ID NO: 204342 - DNA, 25 bp, Probe sequence
aaatgtattttgcacagttagatgg

SEQ ID NO: 204343 - DNA, 25 bp, Probe sequence
aaacagtcacaagaattattggata

SEQ ID NO: 204344 - DNA, 25 bp, Probe sequence
aaaatgtattttgcacagttagatg

SEQ ID NO: 204345 - DNA, 25 bp, Probe sequence
aacagtcacaagaattattggataa

SEQ ID NO: 204346 - DNA, 25 bp, Probe sequence
aactaataaacagtcacaagaatta

SEQ ID NO: 204347 - DNA, 25 bp, Probe sequence
aatgtattttgcacagttagatggt

SEQ ID NO: 204348 - DNA, 25 bp, Probe sequence
aataactaataaacagtcacaagaa

SEQ ID NO: 204349 - DNA, 25 bp, Probe sequence
cagtcacaagaattattggataaag

SEQ ID NO: 204350 - DNA, 25 bp, Probe sequence
gaaataactaataaacagtcacaag

SEQ ID NO: 204351 - DNA, 25 bp, Probe sequence
gatggtgaaataactaataaacagt

SEQ ID NO: 204352 - DNA, 25 bp, Probe sequence
gattaaaatgtattttgcacagtta

SEQ ID NO: 204353 - DNA, 25 bp, Probe sequence
gtattttgcacagttagatggtgaa

SEQ ID NO: 204354 - DNA, 25 bp, Probe sequence
gtgattaaaatgtattttgcacagt

SEQ ID NO: 204355 - DNA, 25 bp, Probe sequence
tgtattttgcacagttagatggtga

SEQ ID NO: 204356 - DNA, 25 bp, Probe sequence
tgattaaaatgtattttgcacagtt

SEQ ID NO: 204357 - DNA, 25 bp, Probe sequence
tgcacagttagatggtgaaataact

SEQ ID NO: 204358 - DNA, 25 bp, Probe sequence
taactaataaacagtcacaagaatt

SEQ ID NO: 204359 - DNA, 25 bp, Probe sequence
taaaatgtattttgcacagttagat

SEQ ID NO: 204360 - DNA, 25 bp, Probe sequence
taaacagtcacaagaattattggat

SEQ ID NO: 204361 - DNA, 25 bp, Probe sequence
tattttgcacagttagatggtgaaa

SEQ ID NO: 204362 - DNA, 25 bp, Probe sequence
tttgcacagttagatggtgaaataa

SEQ ID NO: 204363 - DNA, 25 bp, Probe sequence
ttttgcacagttagatggtgaaata

SEQ ID NO: 204364 - DNA, 25 bp, Probe sequence
ttaaaatgtattttgcacagttaga

SEQ ID NO: 204365 - DNA, 25 bp, Probe sequence
ttgcacagttagatggtgaaataac

SEQ ID NO: 204366 - DNA, 25 bp, Probe sequence
attatataatcagtctcaagtttat

SEQ ID NO: 204367 - DNA, 25 bp, Probe sequence
ataaatctatccaaacaacgactat

SEQ ID NO: 204368 - DNA, 25 bp, Probe sequence
atctatccaaacaacgactattgtt

SEQ ID NO: 204369 - DNA, 25 bp, Probe sequence
atccaaacaacgactattgttacta

SEQ ID NO: 204370 - DNA, 25 bp, Probe sequence
acgactattgttactaactatagtg

SEQ ID NO: 204371 - DNA, 25 bp, Probe sequence
acttcattatataatcagtctcaag

SEQ ID NO: 204372 - DNA, 25 bp, Probe sequence
acaacgactattgttactaactata

SEQ ID NO: 204373 - DNA, 25 bp, Probe sequence
aaataaatctatccaaacaacgact

SEQ ID NO: 204374 - DNA, 25 bp, Probe sequence
aaatctatccaaacaacgactattg

SEQ ID NO: 204375 - DNA, 25 bp, Probe sequence
aaacttcattatataatcagtctca

SEQ ID NO: 204376 - DNA, 25 bp, Probe sequence
aaaacaatctataactatgagaaat

SEQ ID NO: 204377 - DNA, 25 bp, Probe sequence
aaaacttcattatataatcagtctc

SEQ ID NO: 204378 - DNA, 25 bp, Probe sequence
aacttcattatataatcagtctcaa

SEQ ID NO: 204379 - DNA, 25 bp, Probe sequence
aatctatccaaacaacgactattgt

SEQ ID NO: 204380 - DNA, 25 bp, Probe sequence
aataaatctatccaaacaacgacta

SEQ ID NO: 204381 - DNA, 25 bp, Probe sequence
caaacaacgactattgttactaact

SEQ ID NO: 204382 - DNA, 25 bp, Probe sequence
caacgactattgttactaactatag

SEQ ID NO: 204383 - DNA, 25 bp, Probe sequence
cattatataatcagtctcaagttta

SEQ ID NO: 204384 - DNA, 25 bp, Probe sequence
ctattgttactaactatagtgtagt

SEQ ID NO: 204385 - DNA, 25 bp, Probe sequence
ctatccaaacaacgactattgttac

SEQ ID NO: 204386 - DNA, 25 bp, Probe sequence
gcgatagttgataatattctaaagc

SEQ ID NO: 204387 - DNA, 25 bp, Probe sequence
gaatggtttaaagatgtttattgga

SEQ ID NO: 204388 - DNA, 25 bp, Probe sequence
gaagcgatagttgataatattctaa

SEQ ID NO: 204389 - DNA, 25 bp, Probe sequence
gaaataaatctatccaaacaacgac

SEQ ID NO: 204390 - DNA, 25 bp, Probe sequence
gactattgttactaactatagtgta

SEQ ID NO: 204391 - DNA, 25 bp, Probe sequence
gagaaataatgaagcgatagttgat

SEQ ID NO: 204392 - DNA, 25 bp, Probe sequence
gattttcattgaatggtttaaagat

SEQ ID NO: 204393 - DNA, 25 bp, Probe sequence
tgataatattctaaagcaactttat

SEQ ID NO: 204394 - DNA, 25 bp, Probe sequence
tcattatataatcagtctcaagttt

SEQ ID NO: 204395 - DNA, 25 bp, Probe sequence
tcagtctcaagtttataaaattatg

SEQ ID NO: 204396 - DNA, 25 bp, Probe sequence
taatcagtctcaagtttataaaatt

SEQ ID NO: 204397 - DNA, 25 bp, Probe sequence
taaatctatccaaacaacgactatt

SEQ ID NO: 204398 - DNA, 25 bp, Probe sequence
ttcattatataatcagtctcaagtt

SEQ ID NO: 204399 - DNA, 25 bp, Probe sequence
ttgataatattctaaagcaacttta

SEQ ID NO: 204400 - DNA, 25 bp, Probe sequence
attcaacaattagatggttacattt

SEQ ID NO: 204401 - DNA, 25 bp, Probe sequence
attaatcaatcaaagtctaaatatc

SEQ ID NO: 204402 - DNA, 25 bp, Probe sequence
attagatggttacatttctatagaa

SEQ ID NO: 204403 - DNA, 25 bp, Probe sequence
atgtcaattcaacaattagatggtt

SEQ ID NO: 204404 - DNA, 25 bp, Probe sequence
atggttacatttctatagaagattt

SEQ ID NO: 204405 - DNA, 25 bp, Probe sequence
agatttttttaagcatatggatgaa

SEQ ID NO: 204406 - DNA, 25 bp, Probe sequence
agatggttacatttctatagaagat

SEQ ID NO: 204407 - DNA, 25 bp, Probe sequence
agaagatttttttaagcatatggat

SEQ ID NO: 204408 - DNA, 25 bp, Probe sequence
acaattagatggttacatttctata

SEQ ID NO: 204409 - DNA, 25 bp, Probe sequence
aacaattagatggttacatttctat

SEQ ID NO: 204410 - DNA, 25 bp, Probe sequence
aagcatatggatgaattatcgaaga

SEQ ID NO: 204411 - DNA, 25 bp, Probe sequence
aagaaattaatcaatcaaagtctaa

SEQ ID NO: 204412 - DNA, 25 bp, Probe sequence
aagatttttttaagcatatggatga

SEQ ID NO: 204413 - DNA, 25 bp, Probe sequence
aattagatggttacatttctataga

SEQ ID NO: 204414 - DNA, 25 bp, Probe sequence
aattcaacaattagatggttacatt

SEQ ID NO: 204415 - DNA, 25 bp, Probe sequence
caattcaacaattagatggttacat

SEQ ID NO: 204416 - DNA, 25 bp, Probe sequence
caattagatggttacatttctatag

SEQ ID NO: 204417 - DNA, 25 bp, Probe sequence
caacaattagatggttacatttcta

SEQ ID NO: 204418 - DNA, 25 bp, Probe sequence
gcatatggatgaattatcgaagaaa

SEQ ID NO: 204419 - DNA, 25 bp, Probe sequence
gaagatttttttaagcatatggatg

SEQ ID NO: 204420 - DNA, 25 bp, Probe sequence
gaaattaatcaatcaaagtctaaat

SEQ ID NO: 204421 - DNA, 25 bp, Probe sequence
gatggttacatttctatagaagatt

SEQ ID NO: 204422 - DNA, 25 bp, Probe sequence
gatttttttaagcatatggatgaat

SEQ ID NO: 204423 - DNA, 25 bp, Probe sequence
gttacatttctatagaagatttttt

SEQ ID NO: 204424 - DNA, 25 bp, Probe sequence
gtcaattcaacaattagatggttac

SEQ ID NO: 204425 - DNA, 25 bp, Probe sequence
ggttacatttctatagaagattttt

SEQ ID NO: 204426 - DNA, 25 bp, Probe sequence
tcaacaattagatggttacatttct

SEQ ID NO: 204427 - DNA, 25 bp, Probe sequence
tagaagatttttttaagcatatgga

SEQ ID NO: 204428 - DNA, 25 bp, Probe sequence
tagatggttacatttctatagaaga

SEQ ID NO: 204429 - DNA, 25 bp, Probe sequence
ttagatggttacatttctatagaag

SEQ ID NO: 204430 - DNA, 25 bp, Probe sequence
ttaagcatatggatgaattatcgaa

SEQ ID NO: 204431 - DNA, 25 bp, Probe sequence
ttaatcaatcaaagtctaaatatca

SEQ ID NO: 204432 - DNA, 25 bp, Probe sequence
ttcaacaattagatggttacatttc

SEQ ID NO: 204433 - DNA, 25 bp, Probe sequence
ttctatagaagatttttttaagcat

SEQ ID NO: 204434 - DNA, 25 bp, Probe sequence
atcacctcatggcacaccaggagat

SEQ ID NO: 204435 - DNA, 25 bp, Probe sequence
atgtcaattcattcggagatgttga

SEQ ID NO: 204436 - DNA, 25 bp, Probe sequence
agtcgaagaagtcaaagcatcacct

SEQ ID NO: 204437 - DNA, 25 bp, Probe sequence
agtcaaagcatcacctttcacaggt

SEQ ID NO: 204438 - DNA, 25 bp, Probe sequence
acaacaccgttgaatgtatattatt

SEQ ID NO: 204439 - DNA, 25 bp, Probe sequence
acaatcgaaccaggtatttatgtac

SEQ ID NO: 204440 - DNA, 25 bp, Probe sequence
taccgtagcgaaccccatgaaagat

SEQ ID NO: 204441 - DNA, 25 bp, Probe sequence
aagatatcgatcatatcgctagaaa

SEQ ID NO: 204442 - DNA, 25 bp, Probe sequence
aatcgttggatatttagacactgaa

SEQ ID NO: 204443 - DNA, 25 bp, Probe sequence
aatacgtaaagctgctgagttagca

SEQ ID NO: 204444 - DNA, 25 bp, Probe sequence
aattactaattgaaagcgagcactt

SEQ ID NO: 204445 - DNA, 25 bp, Probe sequence
ctaatttgttagaagctggcatggt

SEQ ID NO: 204446 - DNA, 25 bp, Probe sequence
cagaaacatctgcaatccaagcaat

SEQ ID NO: 204447 - DNA, 25 bp, Probe sequence
ctttttcactttatcctcaaacaat

SEQ ID NO: 204448 - DNA, 25 bp, Probe sequence
cgagcacttaacagtagcacgccaa

SEQ ID NO: 204449 - DNA, 25 bp, Probe sequence
gcgaaccccatgaaagattatttgc

SEQ ID NO: 204450 - DNA, 25 bp, Probe sequence
gcacgccaaaaacaattaatctctg

SEQ ID NO: 204451 - DNA, 25 bp, Probe sequence
gaacaatcaacaagctgatgcagca

SEQ ID NO: 204452 - DNA, 25 bp, Probe sequence
gaaatgagttttgatacgatggttt

SEQ ID NO: 204453 - DNA, 25 bp, Probe sequence
gacatacttgtcactaatgaaggat

SEQ ID NO: 204454 - DNA, 25 bp, Probe sequence
gagcattattgtagcgatatgacac

SEQ ID NO: 204455 - DNA, 25 bp, Probe sequence
gatgtttcaagtactaattctaatt

SEQ ID NO: 204456 - DNA, 25 bp, Probe sequence
gatgcagcatggattacaacaccgt

SEQ ID NO: 204457 - DNA, 25 bp, Probe sequence
gatacgatggttttatttggagatc

SEQ ID NO: 204458 - DNA, 25 bp, Probe sequence
gtgaagtagtcaaccatattgagca

SEQ ID NO: 204459 - DNA, 25 bp, Probe sequence
ggttatggtgaatatttccctcatc

SEQ ID NO: 204460 - DNA, 25 bp, Probe sequence
ggtgttgcaggtgtaagaattgaag

SEQ ID NO: 204461 - DNA, 25 bp, Probe sequence
ggcacaccaggagatcgcagattaa

SEQ ID NO: 204462 - DNA, 25 bp, Probe sequence
tggtaaacaagtactattttgtcca

SEQ ID NO: 204463 - DNA, 25 bp, Probe sequence
tgaatatttccctcatcgcttaggt

SEQ ID NO: 204464 - DNA, 25 bp, Probe sequence
tctgcaatccaagcaattaaacctg

SEQ ID NO: 204465 - DNA, 25 bp, Probe sequence
taatctctggtttcaatgtcaattc

SEQ ID NO: 204466 - DNA, 25 bp, Probe sequence
ttactggataccgtagcgaacccca

SEQ ID NO: 204467 - DNA, 25 bp, Probe sequence
tttggagatcatgccgcatcacctc

SEQ ID NO: 204468 - DNA, 25 bp, Probe sequence
agttgcaacaactcaattacgtgaa

SEQ ID NO: 204469 - DNA, 25 bp, Probe sequence
agagtttggctctcctaaatctatc

SEQ ID NO: 204470 - DNA, 25 bp, Probe sequence
agaagtagctactaacgctggtgtt

SEQ ID NO: 204471 - DNA, 25 bp, Probe sequence
agcagacttccaaccacaagttgca

SEQ ID NO: 204472 - DNA, 25 bp, Probe sequence
acgatgcgaagttaacaattgtgaa

SEQ ID NO: 204473 - DNA, 25 bp, Probe sequence
aaatctaagcattttgcagaagaat

SEQ ID NO: 204474 - DNA, 25 bp, Probe sequence
aagagttaccagcagacttccaacc

SEQ ID NO: 204475 - DNA, 25 bp, Probe sequence
aatgccgtggaaagatttattgttg

SEQ ID NO: 204476 - DNA, 25 bp, Probe sequence
gcgtctagagtttggctctcctaaa

SEQ ID NO: 204477 - DNA, 25 bp, Probe sequence
gctctcctaaatctatcattcctaa

SEQ ID NO: 204478 - DNA, 25 bp, Probe sequence
gcagttggtgttgctaaacgtaacg

SEQ ID NO: 204479 - DNA, 25 bp, Probe sequence
gaagtttatgatgctcaatttactg

SEQ ID NO: 204480 - DNA, 25 bp, Probe sequence
gaacgtattcttcttatgaagttta

SEQ ID NO: 204481 - DNA, 25 bp, Probe sequence
gaaacgcgtctagagtttggctctc

SEQ ID NO: 204482 - DNA, 25 bp, Probe sequence
gacttccaaccacaagttgcaacaa

SEQ ID NO: 204483 - DNA, 25 bp, Probe sequence
gagtggtacatcaggcttaaatgcc

SEQ ID NO: 204484 - DNA, 25 bp, Probe sequence
gatttattgttggttctgtatcaga

SEQ ID NO: 204485 - DNA, 25 bp, Probe sequence
gattcaagaacgtattcttcttatg

SEQ ID NO: 204486 - DNA, 25 bp, Probe sequence
gtagctactaacgctggtgttaaag

SEQ ID NO: 204487 - DNA, 25 bp, Probe sequence
gtacatcaggcttaaatgccgtgga

SEQ ID NO: 204488 - DNA, 25 bp, Probe sequence
gtgacgtgttagttgttcgtactga

SEQ ID NO: 204489 - DNA, 25 bp, Probe sequence
gtgttgctaaacgtaacgatgcgaa

SEQ ID NO: 204490 - DNA, 25 bp, Probe sequence
gggcatttaacagagcagttggtgt

SEQ ID NO: 204491 - DNA, 25 bp, Probe sequence
ggtgttaaagatgtagaaacgcgtc

SEQ ID NO: 204492 - DNA, 25 bp, Probe sequence
ggttcacatgaagcggaatgggcat

SEQ ID NO: 204493 - DNA, 25 bp, Probe sequence
ggaatgggcatttaacagagcagtt

SEQ ID NO: 204494 - DNA, 25 bp, Probe sequence
tgcagacttgattatgagtggtaca

SEQ ID NO: 204495 - DNA, 25 bp, Probe sequence
tcgcagttgacggttcacatgaagc

SEQ ID NO: 204496 - DNA, 25 bp, Probe sequence
tctgtatcagaatctatcgttcgtc

SEQ ID NO: 204497 - DNA, 25 bp, Probe sequence
tagttgttcgtactgaagagttacc

SEQ ID NO: 204498 - DNA, 25 bp, Probe sequence
tatcagaatctatcgttcgtcatgc

SEQ ID NO: 204499 - DNA, 25 bp, Probe sequence
tatcattcctaaaaagcttgcacat

SEQ ID NO: 204500 - DNA, 25 bp, Probe sequence
tttggctctcctaaatctatcattc

SEQ ID NO: 204501 - DNA, 25 bp, Probe sequence
ttttaatcgcagttgacggttcaca

SEQ ID NO: 204502 - DNA, 25 bp, Probe sequence
aaaaagaagctagacaacgtatcgt

SEQ ID NO: 204503 - DNA, 25 bp, Probe sequence
attgtccctttcatttatccatata

SEQ ID NO: 204504 - DNA, 25 bp, Probe sequence
attgctatttatatttattgtccct

SEQ ID NO: 204505 - DNA, 25 bp, Probe sequence
attatgcttttttcactacttatat

SEQ ID NO: 204506 - DNA, 25 bp, Probe sequence
atttattgtccctttcatttatcca

SEQ ID NO: 204507 - DNA, 25 bp, Probe sequence
atttatatttattgtccctttcatt

SEQ ID NO: 204508 - DNA, 25 bp, Probe sequence
atatttattgtccctttcatttatc

SEQ ID NO: 204509 - DNA, 25 bp, Probe sequence
atgcttttttcactacttatattaa

SEQ ID NO: 204510 - DNA, 25 bp, Probe sequence
agaagctagacaacgtatcgttggc

SEQ ID NO: 204511 - DNA, 25 bp, Probe sequence
aacaacacatttgattacgtttatc

SEQ ID NO: 204512 - DNA, 25 bp, Probe sequence
aacacatttgattacgtttatcttt

SEQ ID NO: 204513 - DNA, 25 bp, Probe sequence
aagaagctagacaacgtatcgttgg

SEQ ID NO: 204514 - DNA, 25 bp, Probe sequence
cacatttgattacgtttatctttaa

SEQ ID NO: 204515 - DNA, 25 bp, Probe sequence
gctatttatatttattgtccctttc

SEQ ID NO: 204516 - DNA, 25 bp, Probe sequence
gcttttttcactacttatattaatt

SEQ ID NO: 204517 - DNA, 25 bp, Probe sequence
gattatgcttttttcactacttata

SEQ ID NO: 204518 - DNA, 25 bp, Probe sequence
gtttatctttaaacaattgctattt

SEQ ID NO: 204519 - DNA, 25 bp, Probe sequence
gtccctttcatttatccatataaaa

SEQ ID NO: 204520 - DNA, 25 bp, Probe sequence
gtgattatgcttttttcactactta

SEQ ID NO: 204521 - DNA, 25 bp, Probe sequence
tgtccctttcatttatccatataaa

SEQ ID NO: 204522 - DNA, 25 bp, Probe sequence
tgcttttttcactacttatattaat

SEQ ID NO: 204523 - DNA, 25 bp, Probe sequence
tccctttcatttatccatataaaaa

SEQ ID NO: 204524 - DNA, 25 bp, Probe sequence
tatgcttttttcactacttatatta

SEQ ID NO: 204525 - DNA, 25 bp, Probe sequence
tatatttattgtccctttcatttat

SEQ ID NO: 204526 - DNA, 25 bp, Probe sequence
tatttatatttattgtccctttcat

SEQ ID NO: 204527 - DNA, 25 bp, Probe sequence
tatttattgtccctttcatttatcc

SEQ ID NO: 204528 - DNA, 25 bp, Probe sequence
tattgtccctttcatttatccatat

SEQ ID NO: 204529 - DNA, 25 bp, Probe sequence
tttattgtccctttcatttatccat

SEQ ID NO: 204530 - DNA, 25 bp, Probe sequence
tttatatttattgtccctttcattt

SEQ ID NO: 204531 - DNA, 25 bp, Probe sequence
ttattgtccctttcatttatccata

SEQ ID NO: 204532 - DNA, 25 bp, Probe sequence
ttatatttattgtccctttcattta

SEQ ID NO: 204533 - DNA, 25 bp, Probe sequence
ttatgcttttttcactacttatatt

SEQ ID NO: 204534 - DNA, 25 bp, Probe sequence
ttcactacttatattaattaaaaca

SEQ ID NO: 204535 - DNA, 25 bp, Probe sequence
ttgtccctttcatttatccatataa

SEQ ID NO: 204536 - DNA, 25 bp, Probe sequence
attaacccaacaaactacacattat

SEQ ID NO: 204537 - DNA, 25 bp, Probe sequence
attttaagtaacatgtctgccttat

SEQ ID NO: 204538 - DNA, 25 bp, Probe sequence
atatcgcttgtgatgctaatagtaa

SEQ ID NO: 204539 - DNA, 25 bp, Probe sequence
atgacaacaattaacccaacaaact

SEQ ID NO: 204540 - DNA, 25 bp, Probe sequence
atgaacttatacttggacctttcca

SEQ ID NO: 204541 - DNA, 25 bp, Probe sequence
agccgtttcagaacgtcgtacacaa

SEQ ID NO: 204542 - DNA, 25 bp, Probe sequence
acatatcgcttgtgatgctaatagt

SEQ ID NO: 204543 - DNA, 25 bp, Probe sequence
acagccgtttcagaacgtcgtacac

SEQ ID NO: 204544 - DNA, 25 bp, Probe sequence
acaattaacccaacaaactacacat

SEQ ID NO: 204545 - DNA, 25 bp, Probe sequence
aaattattgaaaagcaactcgcata

SEQ ID NO: 204546 - DNA, 25 bp, Probe sequence
aacaagcagcaagccttattgaaga

SEQ ID NO: 204547 - DNA, 25 bp, Probe sequence
aacatgtctgccttattaaatgata

SEQ ID NO: 204548 - DNA, 25 bp, Probe sequence
aagtaacatgtctgccttattaaat

SEQ ID NO: 204549 - DNA, 25 bp, Probe sequence
aaggacatatcgcttgtgatgctaa

SEQ ID NO: 204550 - DNA, 25 bp, Probe sequence
caagcagcaagccttattgaagatg

SEQ ID NO: 204551 - DNA, 25 bp, Probe sequence
cagccgtttcagaacgtcgtacaca

SEQ ID NO: 204552 - DNA, 25 bp, Probe sequence
cccaacaaactacacattattaaag

SEQ ID NO: 204553 - DNA, 25 bp, Probe sequence
gcttgtgatgctaatagtaagtctg

SEQ ID NO: 204554 - DNA, 25 bp, Probe sequence
gcagcaagccttattgaagatgaac

SEQ ID NO: 204555 - DNA, 25 bp, Probe sequence
gcaagccttattgaagatgaacatc

SEQ ID NO: 204556 - DNA, 25 bp, Probe sequence
gaacatcttgaagcaattgttaaaa

SEQ ID NO: 204557 - DNA, 25 bp, Probe sequence
gaaacaagcagcaagccttattgaa

SEQ ID NO: 204558 - DNA, 25 bp, Probe sequence
gtcttagatatcgatgcccctataa

SEQ ID NO: 204559 - DNA, 25 bp, Probe sequence
gtacagccgtttcagaacgtcgtac

SEQ ID NO: 204560 - DNA, 25 bp, Probe sequence
gtaacatgtctgccttattaaatga

SEQ ID NO: 204561 - DNA, 25 bp, Probe sequence
gtctgccttattaaatgataatcta

SEQ ID NO: 204562 - DNA, 25 bp, Probe sequence
ggtacagccgtttcagaacgtcgta

SEQ ID NO: 204563 - DNA, 25 bp, Probe sequence
ggacatatcgcttgtgatgctaata

SEQ ID NO: 204564 - DNA, 25 bp, Probe sequence
ggcttttacttattggaacaaaatg

SEQ ID NO: 204565 - DNA, 25 bp, Probe sequence
tgaacttatacttggacctttccaa

SEQ ID NO: 204566 - DNA, 25 bp, Probe sequence
tcttagatatcgatgcccctataac

SEQ ID NO: 204567 - DNA, 25 bp, Probe sequence
taacccaacaaactacacattatta

SEQ ID NO: 204568 - DNA, 25 bp, Probe sequence
tacagccgtttcagaacgtcgtaca

SEQ ID NO: 204569 - DNA, 25 bp, Probe sequence
tatacttggacctttccaaggacac

SEQ ID NO: 204570 - DNA, 25 bp, Probe sequence
aacgtccttacgcaccaggacaaca

SEQ ID NO: 204571 - DNA, 25 bp, Probe sequence
attccgtaacacatttgacatcgct

SEQ ID NO: 204572 - DNA, 25 bp, Probe sequence
attagcaagtcgtttagacgctgtt

SEQ ID NO: 204573 - DNA, 25 bp, Probe sequence
atggctcgattcagaggttcaaact

SEQ ID NO: 204574 - DNA, 25 bp, Probe sequence
agaatatggtttacaattacgtgaa

SEQ ID NO: 204575 - DNA, 25 bp, Probe sequence
acttaaactttgatgctgacagctt

SEQ ID NO: 204576 - DNA, 25 bp, Probe sequence
acagcttaactggtactttcgtacg

SEQ ID NO: 204577 - DNA, 25 bp, Probe sequence
acaattaatcgttgagtactactca

SEQ ID NO: 204578 - DNA, 25 bp, Probe sequence
aaatcaacaatttcgtacctgagta

SEQ ID NO: 204579 - DNA, 25 bp, Probe sequence
aacgtgttgatattccatcttattc

SEQ ID NO: 204580 - DNA, 25 bp, Probe sequence
aatctcgtcgtttaggtatctcttt

SEQ ID NO: 204581 - DNA, 25 bp, Probe sequence
cggtgtacacggtgaaaacttcatg

SEQ ID NO: 204582 - DNA, 25 bp, Probe sequence
cgtacctgagtacttaaactttgat

SEQ ID NO: 204583 - DNA, 25 bp, Probe sequence
tagaaaaacgtccttacgcaccagg

SEQ ID NO: 204584 - DNA, 25 bp, Probe sequence
gcacgtcaattagttaaccacggtc

SEQ ID NO: 204585 - DNA, 25 bp, Probe sequence
gaattacctgctgaaattaacgaac

SEQ ID NO: 204586 - DNA, 25 bp, Probe sequence
gaacgtagcgaattacctgctgaaa

SEQ ID NO: 204587 - DNA, 25 bp, Probe sequence
gacatcgctggtaaaaaattcggtg

SEQ ID NO: 204588 - DNA, 25 bp, Probe sequence
gactgaaagacaattccgtaacaca

SEQ ID NO: 204589 - DNA, 25 bp, Probe sequence
gacgctgttgtttattcattaggtt

SEQ ID NO: 204590 - DNA, 25 bp, Probe sequence
gatgctgacagcttaactggtactt

SEQ ID NO: 204591 - DNA, 25 bp, Probe sequence
gtaacacatttgacatcgctggtaa

SEQ ID NO: 204592 - DNA, 25 bp, Probe sequence
gtcgtttagacgctgttgtttattc

SEQ ID NO: 204593 - DNA, 25 bp, Probe sequence
ggtatctctttaagcggtactggta

SEQ ID NO: 204594 - DNA, 25 bp, Probe sequence
tcattaggtttagctcgtactcgtc

SEQ ID NO: 204595 - DNA, 25 bp, Probe sequence
taaccacggtcatatcttagtagat

SEQ ID NO: 204596 - DNA, 25 bp, Probe sequence
tactcgtcgtcaagcacgtcaatta

SEQ ID NO: 204597 - DNA, 25 bp, Probe sequence
tacgttacttatatggaatgactga

SEQ ID NO: 204598 - DNA, 25 bp, Probe sequence
tacgcaccaggacaacatggtccaa

SEQ ID NO: 204599 - DNA, 25 bp, Probe sequence
tattccatcttattctgttaaacct

SEQ ID NO: 204600 - DNA, 25 bp, Probe sequence
ttcgtacgtttaccagaacgtagcg

SEQ ID NO: 204601 - DNA, 25 bp, Probe sequence
tttagctcgtactcgtcgtcaagca

SEQ ID NO: 204602 - DNA, 25 bp, Probe sequence
ttcaaactggaaaaaatctcgtcgt

SEQ ID NO: 204603 - DNA, 25 bp, Probe sequence
ttcagttcgtgaaaaatctcaaaaa

SEQ ID NO: 204604 - DNA, 25 bp, Probe sequence
attccggaaggcattacgatggatc

SEQ ID NO: 204605 - DNA, 25 bp, Probe sequence
atctacgaagacaattccaacatta

SEQ ID NO: 204606 - DNA, 25 bp, Probe sequence
atgaagaagcggtacgtcgcgcgcg

SEQ ID NO: 204607 - DNA, 25 bp, Probe sequence
atgacattatttttattagaagcta

SEQ ID NO: 204608 - DNA, 25 bp, Probe sequence
agtcaaagaagtacgcttagttggt

SEQ ID NO: 204609 - DNA, 25 bp, Probe sequence
atggtgatgcacatgttgattacct

SEQ ID NO: 204610 - DNA, 25 bp, Probe sequence
agttgatacaccgattgatggcatc

SEQ ID NO: 204611 - DNA, 25 bp, Probe sequence
agaagtgccagaagttgaatttaaa

SEQ ID NO: 204612 - DNA, 25 bp, Probe sequence
aaagcagttgatacaccgattgatg

SEQ ID NO: 204613 - DNA, 25 bp, Probe sequence
aacaatcttgattttgcatcaacga

SEQ ID NO: 204614 - DNA, 25 bp, Probe sequence
aacattaattgaagtacaagctact

SEQ ID NO: 204615 - DNA, 25 bp, Probe sequence
aactcatggttattttattgtggaa

SEQ ID NO: 204616 - DNA, 25 bp, Probe sequence
aacgcacctgatgaagaagcggtac

SEQ ID NO: 204617 - DNA, 25 bp, Probe sequence
catggttattttattgtggaagcaa

SEQ ID NO: 204618 - DNA, 25 bp, Probe sequence
catcactatctacgaagacaattcc

SEQ ID NO: 204619 - DNA, 25 bp, Probe sequence
cgatggatcaatatttagcacgtaa

SEQ ID NO: 204620 - DNA, 25 bp, Probe sequence
gaagtacgcttagttggtaaagatt

SEQ ID NO: 204621 - DNA, 25 bp, Probe sequence
gaagatatgtctaaatgtatttgtt

SEQ ID NO: 204622 - DNA, 25 bp, Probe sequence
gaagcagaagctaaacaatttttaa

SEQ ID NO: 204623 - DNA, 25 bp, Probe sequence
gaagctaacaatcttgattttgcat

SEQ ID NO: 204624 - DNA, 25 bp, Probe sequence
gatacaccgattgatggcatcgaaa

SEQ ID NO: 204625 - DNA, 25 bp, Probe sequence
gattttgcatcaacgaaagaagaac

SEQ ID NO: 204626 - DNA, 25 bp, Probe sequence
gattaccttgtaacttggaacattc

SEQ ID NO: 204627 - DNA, 25 bp, Probe sequence
gattgatggcatcgaaaaactttaa

SEQ ID NO: 204628 - DNA, 25 bp, Probe sequence
gtttatacaacgcacctgatgaaga

SEQ ID NO: 204629 - DNA, 25 bp, Probe sequence
gtatttgtttatacaacgcacctga

SEQ ID NO: 204630 - DNA, 25 bp, Probe sequence
gtgatgcacatgttgattaccttgt

SEQ ID NO: 204631 - DNA, 25 bp, Probe sequence
gtggaagcaaatgacgaagcagaag

SEQ ID NO: 204632 - DNA, 25 bp, Probe sequence
ggaacattccggaaggcattacgat

SEQ ID NO: 204633 - DNA, 25 bp, Probe sequence
ggaaggcattacgatggatcaatat

SEQ ID NO: 204634 - DNA, 25 bp, Probe sequence
tgttcattatgaagaagtgccagaa

SEQ ID NO: 204635 - DNA, 25 bp, Probe sequence
tgaatttaaacgcacatatgtatgt

SEQ ID NO: 204636 - DNA, 25 bp, Probe sequence
tgcacatgttgattaccttgtaact

SEQ ID NO: 204637 - DNA, 25 bp, Probe sequence
taccttgtaacttggaacattccgg

SEQ ID NO: 204638 - DNA, 25 bp, Probe sequence
attgcatgatttcaaatgctgtaag

SEQ ID NO: 204639 - DNA, 25 bp, Probe sequence
attagcagctactcttgaacgtgca

SEQ ID NO: 204640 - DNA, 25 bp, Probe sequence
atatcatctcattagcagctactct

SEQ ID NO: 204641 - DNA, 25 bp, Probe sequence
atcatctcattagcagctactcttg

SEQ ID NO: 204642 - DNA, 25 bp, Probe sequence
atctcattagcagctactcttgaac

SEQ ID NO: 204643 - DNA, 25 bp, Probe sequence
atcgattggaacagcttgtttaaat

SEQ ID NO: 204644 - DNA, 25 bp, Probe sequence
agctactcttgaacgtgcaaagttc

SEQ ID NO: 204645 - DNA, 25 bp, Probe sequence
agcacaattagaaaagcgattacca

SEQ ID NO: 204646 - DNA, 25 bp, Probe sequence
acttcttggcaaggtggtcgtaaca

SEQ ID NO: 204647 - DNA, 25 bp, Probe sequence
acgtgcaaagttcacagatatttca

SEQ ID NO: 204648 - DNA, 25 bp, Probe sequence
acaacaatcgattggaacagcttgt

SEQ ID NO: 204649 - DNA, 25 bp, Probe sequence
aacaatgtcggaaacgttcaaggcg

SEQ ID NO: 204650 - DNA, 25 bp, Probe sequence
aacgttcaaggcgacatactttcag

SEQ ID NO: 204651 - DNA, 25 bp, Probe sequence
aagcgattaccaaaattgataacaa

SEQ ID NO: 204652 - DNA, 25 bp, Probe sequence
aaggcgacatactttcagagaatat

SEQ ID NO: 204653 - DNA, 25 bp, Probe sequence
aattccaagtgatcaaatagcacaa

SEQ ID NO: 204654 - DNA, 25 bp, Probe sequence
caaggtggtcgtaacaatgtcggaa

SEQ ID NO: 204655 - DNA, 25 bp, Probe sequence
gcgacatactttcagagaatatttc

SEQ ID NO: 204656 - DNA, 25 bp, Probe sequence
gcagataataattgcatgatttcaa

SEQ ID NO: 204657 - DNA, 25 bp, Probe sequence
gcagctactcttgaacgtgcaaagt

SEQ ID NO: 204658 - DNA, 25 bp, Probe sequence
gcaaagttcacagatatttcaattg

SEQ ID NO: 204659 - DNA, 25 bp, Probe sequence
gatatttcaattgaacaacaatcga

SEQ ID NO: 204660 - DNA, 25 bp, Probe sequence
gttcaaggcgacatactttcagaga

SEQ ID NO: 204661 - DNA, 25 bp, Probe sequence
gttatatcatctcattagcagctac

SEQ ID NO: 204662 - DNA, 25 bp, Probe sequence
gtatgtcaaaaattgtgcaccatcc

SEQ ID NO: 204663 - DNA, 25 bp, Probe sequence
gtcgtaacaatgtcggaaacgttca

SEQ ID NO: 204664 - DNA, 25 bp, Probe sequence
ggtggtcgtaacaatgtcggaaacg

SEQ ID NO: 204665 - DNA, 25 bp, Probe sequence
ggcaaggtggtcgtaacaatgtcgg

SEQ ID NO: 204666 - DNA, 25 bp, Probe sequence
ggaaacgttcaaggcgacatacttt

SEQ ID NO: 204667 - DNA, 25 bp, Probe sequence
tgtcaaaaattgtgcaccatcctca

SEQ ID NO: 204668 - DNA, 25 bp, Probe sequence
tcattagcagctactcttgaacgtg

SEQ ID NO: 204669 - DNA, 25 bp, Probe sequence
tcatcatgttatatcatctcattag

SEQ ID NO: 204670 - DNA, 25 bp, Probe sequence
tagcagctactcttgaacgtgcaaa

SEQ ID NO: 204671 - DNA, 25 bp, Probe sequence
tatatcatctcattagcagctactc

SEQ ID NO: 204672 - DNA, 25 bp, Probe sequence
attctacaccgttcacaccaaatgt

SEQ ID NO: 204673 - DNA, 25 bp, Probe sequence
ataaagatgcatctccaacggttac

SEQ ID NO: 204674 - DNA, 25 bp, Probe sequence
ataaatacatttcgtcacaagctga

SEQ ID NO: 204675 - DNA, 25 bp, Probe sequence
atctacgacagtgctacaccctatt

SEQ ID NO: 204676 - DNA, 25 bp, Probe sequence
atgtattatcatcaaccgttgttat

SEQ ID NO: 204677 - DNA, 25 bp, Probe sequence
agcttttgtagcttatagccaccgt

SEQ ID NO: 204678 - DNA, 25 bp, Probe sequence
agcacctatggttggtcatcgttct

SEQ ID NO: 204679 - DNA, 25 bp, Probe sequence
acaagctgacaattctacaccgttc

SEQ ID NO: 204680 - DNA, 25 bp, Probe sequence
aaagcaattatgttacctccaggat

SEQ ID NO: 204681 - DNA, 25 bp, Probe sequence
aattagtcctttcgatattttatcg

SEQ ID NO: 204682 - DNA, 25 bp, Probe sequence
aattgctggtggtcaaggccatctt

SEQ ID NO: 204683 - DNA, 25 bp, Probe sequence
caagcatttcaaggtctaaagccaa

SEQ ID NO: 204684 - DNA, 25 bp, Probe sequence
caccgttcacaccaaatgtgtcttt

SEQ ID NO: 204685 - DNA, 25 bp, Probe sequence
gctacaccctattcacgagttagga

SEQ ID NO: 204686 - DNA, 25 bp, Probe sequence
gcattggtgctgttgatgttgacat

SEQ ID NO: 204687 - DNA, 25 bp, Probe sequence
gaaggtttcaatcacgtaatagcac

SEQ ID NO: 204688 - DNA, 25 bp, Probe sequence
gacggcgtaagttgcattggtgctg

SEQ ID NO: 204689 - DNA, 25 bp, Probe sequence
gaagatcacttcgttgtcattgttt

SEQ ID NO: 204690 - DNA, 25 bp, Probe sequence
gaacaccgtaaagttaactatatcg

SEQ ID NO: 204691 - DNA, 25 bp, Probe sequence
gaacattgtaaaccctgaagatcac

SEQ ID NO: 204692 - DNA, 25 bp, Probe sequence
gagagaaattcaagcacctatggtt

SEQ ID NO: 204693 - DNA, 25 bp, Probe sequence
gttgtcattgtttcaggtgcctttg

SEQ ID NO: 204694 - DNA, 25 bp, Probe sequence
gttacctccaggattagcttttgta

SEQ ID NO: 204695 - DNA, 25 bp, Probe sequence
gtagcttatagccaccgtgcaaaag

SEQ ID NO: 204696 - DNA, 25 bp, Probe sequence
gtaatagcacgacactatgcaatta

SEQ ID NO: 204697 - DNA, 25 bp, Probe sequence
ggtcaaggccatcttaaaggtcaaa

SEQ ID NO: 204698 - DNA, 25 bp, Probe sequence
ggttggtcatcgttctaaagatttt

SEQ ID NO: 204699 - DNA, 25 bp, Probe sequence
tcaggtgcctttggtaaccgattta

SEQ ID NO: 204700 - DNA, 25 bp, Probe sequence
tcaaccgttgttattaacacctggc

SEQ ID NO: 204701 - DNA, 25 bp, Probe sequence
taacatctagcggtacaagcgtctt

SEQ ID NO: 204702 - DNA, 25 bp, Probe sequence
tatttattttgtagttgacggcgta

SEQ ID NO: 204703 - DNA, 25 bp, Probe sequence
tattgcgaaacatctacgacagtgc

SEQ ID NO: 204704 - DNA, 25 bp, Probe sequence
ttttatcggtagtatctgctttaga

SEQ ID NO: 204705 - DNA, 25 bp, Probe sequence
ttgatgtacttgtttctggtagtca

SEQ ID NO: 204706 - DNA, 25 bp, Probe sequence
atcaacattgcatctatgactttag

SEQ ID NO: 204707 - DNA, 25 bp, Probe sequence
atccgttgatcaacctgtttcaaac

SEQ ID NO: 204708 - DNA, 25 bp, Probe sequence
agatgatcttggtcctgaagtcaat

SEQ ID NO: 204709 - DNA, 25 bp, Probe sequence
acgatagcgattccgttaaagttgg

SEQ ID NO: 204710 - DNA, 25 bp, Probe sequence
accatgctttaatcgttcgtagtca

SEQ ID NO: 204711 - DNA, 25 bp, Probe sequence
acgcgccggtgttggtgtagataat

SEQ ID NO: 204712 - DNA, 25 bp, Probe sequence
aaaagtaatcgcacgcgccggtgtt

SEQ ID NO: 204713 - DNA, 25 bp, Probe sequence
aaattattgttacacctcatttggg

SEQ ID NO: 204714 - DNA, 25 bp, Probe sequence
aaatgctgctgattctttaaaagta

SEQ ID NO: 204715 - DNA, 25 bp, Probe sequence
aaaactggcgcattgttaggtaaat

SEQ ID NO: 204716 - DNA, 25 bp, Probe sequence
aaaattataccttcataccatgctt

SEQ ID NO: 204717 - DNA, 25 bp, Probe sequence
aacattaggtgtcattggtgctggt

SEQ ID NO: 204718 - DNA, 25 bp, Probe sequence
aatgtacaatgcaccaagctctatt

SEQ ID NO: 204719 - DNA, 25 bp, Probe sequence
aatgtactcgttgcagatcccatat

SEQ ID NO: 204720 - DNA, 25 bp, Probe sequence
aatcattcatcaatttaagccaaac

SEQ ID NO: 204721 - DNA, 25 bp, Probe sequence
aatcaatgtggcacgtggtggtatt

SEQ ID NO: 204722 - DNA, 25 bp, Probe sequence
aattgatggtactgtaacgcatgca

SEQ ID NO: 204723 - DNA, 25 bp, Probe sequence
catacaccactaacacctaaaacaa

SEQ ID NO: 204724 - DNA, 25 bp, Probe sequence
cgcaagcacaccaatcacttacaaa

SEQ ID NO: 204725 - DNA, 25 bp, Probe sequence
gcttttgacccttacttaacggatg

SEQ ID NO: 204726 - DNA, 25 bp, Probe sequence
gcttctgtctttacaggtttcggtc

SEQ ID NO: 204727 - DNA, 25 bp, Probe sequence
gaatgcacctaaaatggacttaagc

SEQ ID NO: 204728 - DNA, 25 bp, Probe sequence
gaagtcaatattatcaatgctctaa

SEQ ID NO: 204729 - DNA, 25 bp, Probe sequence
gatggtaatacgatttcagctactg

SEQ ID NO: 204730 - DNA, 25 bp, Probe sequence
gatgcgctaatgattttatccgttg

SEQ ID NO: 204731 - DNA, 25 bp, Probe sequence
gattgcccaacattctgatttcgtt

SEQ ID NO: 204732 - DNA, 25 bp, Probe sequence
gtagaactgaagcgggcggagatgc

SEQ ID NO: 204733 - DNA, 25 bp, Probe sequence
gtaacgcatgcagtgaatgcaccta

SEQ ID NO: 204734 - DNA, 25 bp, Probe sequence
gtgctggtagaattggtttaggtgt

SEQ ID NO: 204735 - DNA, 25 bp, Probe sequence
gtgtttgaacatgaacctgcaactg

SEQ ID NO: 204736 - DNA, 25 bp, Probe sequence
tcgcctcttgttgcacatgataaaa

SEQ ID NO: 204737 - DNA, 25 bp, Probe sequence
tttagttattaatgccccagatggt

SEQ ID NO: 204738 - DNA, 25 bp, Probe sequence
tacggtggcgacttagcctctattg

SEQ ID NO: 204739 - DNA, 25 bp, Probe sequence
tacaggtttcggtccaagaattgtt

SEQ ID NO: 204740 - DNA, 25 bp, Probe sequence
attggtgcacttctagtacttggta

SEQ ID NO: 204741 - DNA, 25 bp, Probe sequence
agtacaaactggcgatagcgtattc

SEQ ID NO: 204742 - DNA, 25 bp, Probe sequence
agcgttcttcaaacagatgctgcta

SEQ ID NO: 204743 - DNA, 25 bp, Probe sequence
acaacaaaccatagccaaacaccta

SEQ ID NO: 204744 - DNA, 25 bp, Probe sequence
acaaccaaaacgtcaaagccgatca

SEQ ID NO: 204745 - DNA, 25 bp, Probe sequence
aaaggcaaatcatctaaaccatctg

SEQ ID NO: 204746 - DNA, 25 bp, Probe sequence
aacagtcatcgttgcattgattgct

SEQ ID NO: 204747 - DNA, 25 bp, Probe sequence
aacccaggtaactcaggtggcgcat

SEQ ID NO: 204748 - DNA, 25 bp, Probe sequence
aagccgatcagaacgtcaatcacct

SEQ ID NO: 204749 - DNA, 25 bp, Probe sequence
aagcatcaagtgtagacgacttatt

SEQ ID NO: 204750 - DNA, 25 bp, Probe sequence
aatgataaaatctgtctcccctaca

SEQ ID NO: 204751 - DNA, 25 bp, Probe sequence
aattcggtaccgttcatgaaatgat

SEQ ID NO: 204752 - DNA, 25 bp, Probe sequence
caatttgctaactctgtaacatctg

SEQ ID NO: 204753 - DNA, 25 bp, Probe sequence
caattcagcttatatcgttacaaac

SEQ ID NO: 204754 - DNA, 25 bp, Probe sequence
cactgttaccgttatccgtgatggt

SEQ ID NO: 204755 - DNA, 25 bp, Probe sequence
cagaagacctaaatttccatggttt

SEQ ID NO: 204756 - DNA, 25 bp, Probe sequence
ctcaggtggcgcattagtagatatt

SEQ ID NO: 204757 - DNA, 25 bp, Probe sequence
ctgtctcccctacaattgttggagt

SEQ ID NO: 204758 - DNA, 25 bp, Probe sequence
gccaaacacctagatacagaagacc

SEQ ID NO: 204759 - DNA, 25 bp, Probe sequence
gccaactcttcaaaagtacaaactg

SEQ ID NO: 204760 - DNA, 25 bp, Probe sequence
gcccttcgattggtattggtttaat

SEQ ID NO: 204761 - DNA, 25 bp, Probe sequence
gaatcagtcactgttaccgttatcc

SEQ ID NO: 204762 - DNA, 25 bp, Probe sequence
gaaaattgctgcgacacaagttgaa

SEQ ID NO: 204763 - DNA, 25 bp, Probe sequence
gacggtcaaagcaagaaattcggta

SEQ ID NO: 204764 - DNA, 25 bp, Probe sequence
gagcgcgagcaacttcatactgata

SEQ ID NO: 204765 - DNA, 25 bp, Probe sequence
gatgctgctattaacccaggtaact

SEQ ID NO: 204766 - DNA, 25 bp, Probe sequence
gatgcagtaactgatattgctgtac

SEQ ID NO: 204767 - DNA, 25 bp, Probe sequence
gtcaatcacctggccaaggcgatag

SEQ ID NO: 204768 - DNA, 25 bp, Probe sequence
gtaacatctggtatcatttcagcaa

SEQ ID NO: 204769 - DNA, 25 bp, Probe sequence
gggtttgctattccaagtaatgaag

SEQ ID NO: 204770 - DNA, 25 bp, Probe sequence
ggtggcaatcaattagacggtcaaa

SEQ ID NO: 204771 - DNA, 25 bp, Probe sequence
ggccaaggcgatagagatttcttta

SEQ ID NO: 204772 - DNA, 25 bp, Probe sequence
taacccattaggattacaatttgct

SEQ ID NO: 204773 - DNA, 25 bp, Probe sequence
tagcgtattcgcaatgggtaaccca

SEQ ID NO: 204774 - DNA, 25 bp, Probe sequence
attctcaaaactcactcattatagg

SEQ ID NO: 204775 - DNA, 25 bp, Probe sequence
attagattagaacacctactctcaa

SEQ ID NO: 204776 - DNA, 25 bp, Probe sequence
atataaagctatcaaacatgtcatt

SEQ ID NO: 204777 - DNA, 25 bp, Probe sequence
atcaaagttcaggtggtagcacaat

SEQ ID NO: 204778 - DNA, 25 bp, Probe sequence
acatgatggcatcttaccaaaggcg

SEQ ID NO: 204779 - DNA, 25 bp, Probe sequence
acatgtcattgtttttatatttatg

SEQ ID NO: 204780 - DNA, 25 bp, Probe sequence
aaagttcgacaaatacctggcgatg

SEQ ID NO: 204781 - DNA, 25 bp, Probe sequence
aaagcgtatgttaatcgaagatcaa

SEQ ID NO: 204782 - DNA, 25 bp, Probe sequence
aaaacatcaagtccaaatgtcatta

SEQ ID NO: 204783 - DNA, 25 bp, Probe sequence
aaaacgtccgactcattatcagatg

SEQ ID NO: 204784 - DNA, 25 bp, Probe sequence
aaccattctcaaaactcactcatta

SEQ ID NO: 204785 - DNA, 25 bp, Probe sequence
caatcatcaattgaatcatcgtata

SEQ ID NO: 204786 - DNA, 25 bp, Probe sequence
catcgttgctatcgctgtgattgcg

SEQ ID NO: 204787 - DNA, 25 bp, Probe sequence
gctgtgattgcgatgtctttatatt

SEQ ID NO: 204788 - DNA, 25 bp, Probe sequence
gaatacaacgacgcattaaaatatg

SEQ ID NO: 204789 - DNA, 25 bp, Probe sequence
gaacttcgcctagcaattagattag

SEQ ID NO: 204790 - DNA, 25 bp, Probe sequence
gaacacctactctcaaaagatgaaa

SEQ ID NO: 204791 - DNA, 25 bp, Probe sequence
gaaaagcaaatgaacttcgcctagc

SEQ ID NO: 204792 - DNA, 25 bp, Probe sequence
gacaaatacctggcgatgaattatt

SEQ ID NO: 204793 - DNA, 25 bp, Probe sequence
gacgaatcaagacaacaatcatcaa

SEQ ID NO: 204794 - DNA, 25 bp, Probe sequence
gtataaccattctcaaaactcactc

SEQ ID NO: 204795 - DNA, 25 bp, Probe sequence
gtctttatattttcatcatttaact

SEQ ID NO: 204796 - DNA, 25 bp, Probe sequence
gtccgactcattatcagatgatgct

SEQ ID NO: 204797 - DNA, 25 bp, Probe sequence
ggtagcacaattacacaacaacttg

SEQ ID NO: 204798 - DNA, 25 bp, Probe sequence
ggcatcttaccaaaggcgattttaa

SEQ ID NO: 204799 - DNA, 25 bp, Probe sequence
tgcacaatctgcataccttatcggt

SEQ ID NO: 204800 - DNA, 25 bp, Probe sequence
tccaccaaaagatttatcaattgca

SEQ ID NO: 204801 - DNA, 25 bp, Probe sequence
tcatttaactaaaacgtccgactca

SEQ ID NO: 204802 - DNA, 25 bp, Probe sequence
tctgcataccttatcggtttgttgc

SEQ ID NO: 204803 - DNA, 25 bp, Probe sequence
tcatctgaagacactttattttata

SEQ ID NO: 204804 - DNA, 25 bp, Probe sequence
taccttatcggtttgttgcaaagcc

SEQ ID NO: 204805 - DNA, 25 bp, Probe sequence
tatggctatacaccctacgaaaaag

SEQ ID NO: 204806 - DNA, 25 bp, Probe sequence
tatgattttcattgccatcgttgct

SEQ ID NO: 204807 - DNA, 25 bp, Probe sequence
ttttcattgccatcgttgctatcgc

SEQ ID NO: 204808 - DNA, 25 bp, Probe sequence
attgggggcaattgaagtcagcatc

SEQ ID NO: 204809 - DNA, 25 bp, Probe sequence
attcgctacagatgatccagaaata

SEQ ID NO: 204810 - DNA, 25 bp, Probe sequence
attacattagaacagcaacaagcgt

SEQ ID NO: 204811 - DNA, 25 bp, Probe sequence
atttaaccgcatttagagatgctga

SEQ ID NO: 204812 - DNA, 25 bp, Probe sequence
atcctgatgaaattgagcgctggtc

SEQ ID NO: 204813 - DNA, 25 bp, Probe sequence
agaaattacaacattaccagaaggt

SEQ ID NO: 204814 - DNA, 25 bp, Probe sequence
agcggttaatggcaactggtggact

SEQ ID NO: 204815 - DNA, 25 bp, Probe sequence
acgaagatttgaaagcgcttacttt

SEQ ID NO: 204816 - DNA, 25 bp, Probe sequence
aaattgagcgctggtctacaggtaa

SEQ ID NO: 204817 - DNA, 25 bp, Probe sequence
aactcattgtgggttatgtcacttt

SEQ ID NO: 204818 - DNA, 25 bp, Probe sequence
aagcgtttgatgatattcgttatat

SEQ ID NO: 204819 - DNA, 25 bp, Probe sequence
aatgcagcggttaatggcaactggt

SEQ ID NO: 204820 - DNA, 25 bp, Probe sequence
caacttagcctttctacaccagaat

SEQ ID NO: 204821 - DNA, 25 bp, Probe sequence
catttaaagacgtatcaatccgaag

SEQ ID NO: 204822 - DNA, 25 bp, Probe sequence
gaatattactggcattgggatttaa

SEQ ID NO: 204823 - DNA, 25 bp, Probe sequence
gcaatttgttattgaaggtccttta

SEQ ID NO: 204824 - DNA, 25 bp, Probe sequence
gaaggtagaatttatgttgctcgcc

SEQ ID NO: 204825 - DNA, 25 bp, Probe sequence
gaagtcagcatcaattttaggcaat

SEQ ID NO: 204826 - DNA, 25 bp, Probe sequence
gaacagcaacaagcgtttgatgata

SEQ ID NO: 204827 - DNA, 25 bp, Probe sequence
gaaatattcgctacagatgatccag

SEQ ID NO: 204828 - DNA, 25 bp, Probe sequence
gacgtatcaatccgaagattattac

SEQ ID NO: 204829 - DNA, 25 bp, Probe sequence
gatgaaattgagcgctggtctacag

SEQ ID NO: 204830 - DNA, 25 bp, Probe sequence
gttaatggcaactggtggacttgaa

SEQ ID NO: 204831 - DNA, 25 bp, Probe sequence
gtcactttccactatcctgatgaaa

SEQ ID NO: 204832 - DNA, 25 bp, Probe sequence
gtcagcatcaattttaggcaattac

SEQ ID NO: 204833 - DNA, 25 bp, Probe sequence
ggtggacttgaaatattcgctacag

SEQ ID NO: 204834 - DNA, 25 bp, Probe sequence
ggtagaatttatgttgctcgccaag

SEQ ID NO: 204835 - DNA, 25 bp, Probe sequence
tgggttatgtcactttccactatcc

SEQ ID NO: 204836 - DNA, 25 bp, Probe sequence
tccagctaattgtttaatggcaaga

SEQ ID NO: 204837 - DNA, 25 bp, Probe sequence
tcgttatatgaatcggtttttcttt

SEQ ID NO: 204838 - DNA, 25 bp, Probe sequence
tagcctttctacaccagaattcgag

SEQ ID NO: 204839 - DNA, 25 bp, Probe sequence
tagaatttatgttgctcgccaagat

SEQ ID NO: 204840 - DNA, 25 bp, Probe sequence
tttgaaagcgcttactttcgatgcg

SEQ ID NO: 204841 - DNA, 25 bp, Probe sequence
ttccatatttaatcgaattgggggc

SEQ ID NO: 204842 - DNA, 25 bp, Probe sequence
attaaatggttgtcacttaggtggt

SEQ ID NO: 204843 - DNA, 25 bp, Probe sequence
atcatagataccgatgcacatcatg

SEQ ID NO: 204844 - DNA, 25 bp, Probe sequence
atcgatttcatgaccaacatccctt

SEQ ID NO: 204845 - DNA, 25 bp, Probe sequence
accatgttactacttattctatcca

SEQ ID NO: 204846 - DNA, 25 bp, Probe sequence
acacactgtaaatgtcccacttgaa

SEQ ID NO: 204847 - DNA, 25 bp, Probe sequence
acaacagagctacttttgaatgcaa

SEQ ID NO: 204848 - DNA, 25 bp, Probe sequence
aacatcccttcaatcaaatgcgttt

SEQ ID NO: 204849 - DNA, 25 bp, Probe sequence
aactcatctaaattgtacgttacat

SEQ ID NO: 204850 - DNA, 25 bp, Probe sequence
aattatgtttggtggcggaggctac

SEQ ID NO: 204851 - DNA, 25 bp, Probe sequence
ctatgtcccccgcacaaaagaaatt

SEQ ID NO: 204852 - DNA, 25 bp, Probe sequence
ctacttattctatccatgaaaccgg

SEQ ID NO: 204853 - DNA, 25 bp, Probe sequence
cgcggtgaagatatcggctatggac

SEQ ID NO: 204854 - DNA, 25 bp, Probe sequence
gcatgcttcacatggcattatcagt

SEQ ID NO: 204855 - DNA, 25 bp, Probe sequence
gaatacaatcaacgcgttttaatca

SEQ ID NO: 204856 - DNA, 25 bp, Probe sequence
gaatgcaaatttattgtctccagaa

SEQ ID NO: 204857 - DNA, 25 bp, Probe sequence
gagttggtacgaatctactcgtcaa

SEQ ID NO: 204858 - DNA, 25 bp, Probe sequence
gatggtacacaatggagtttctatg

SEQ ID NO: 204859 - DNA, 25 bp, Probe sequence
gatatcggctatggacacactgtaa

SEQ ID NO: 204860 - DNA, 25 bp, Probe sequence
gtaccacgtgcatggagtcatgtat

SEQ ID NO: 204861 - DNA, 25 bp, Probe sequence
gtcaatttaagcatatgcaccgcca

SEQ ID NO: 204862 - DNA, 25 bp, Probe sequence
gtctccagaacaaatagtacaacct

SEQ ID NO: 204863 - DNA, 25 bp, Probe sequence
gtgccacaattgttggaggcgcttt

SEQ ID NO: 204864 - DNA, 25 bp, Probe sequence
gtggttatttaccgttagaatggat

SEQ ID NO: 204865 - DNA, 25 bp, Probe sequence
gtggcggaggctacaatatttggag

SEQ ID NO: 204866 - DNA, 25 bp, Probe sequence
ggaggcgctttaactttagcagatc

SEQ ID NO: 204867 - DNA, 25 bp, Probe sequence
ggagtcatgtattcttaagtttaat

SEQ ID NO: 204868 - DNA, 25 bp, Probe sequence
taaatgtcccacttgaaccgtatac

SEQ ID NO: 204869 - DNA, 25 bp, Probe sequence
tcccaggctctggtcactatactga

SEQ ID NO: 204870 - DNA, 25 bp, Probe sequence
taaatgattatacctatgtcccccg

SEQ ID NO: 204871 - DNA, 25 bp, Probe sequence
taaacctgatattattctaagcgta

SEQ ID NO: 204872 - DNA, 25 bp, Probe sequence
tatgcaccgccatagtgccacaatt

SEQ ID NO: 204873 - DNA, 25 bp, Probe sequence
tagcagatcttattatgtcaggcaa

SEQ ID NO: 204874 - DNA, 25 bp, Probe sequence
tattcatctgaattattacctaaaa

SEQ ID NO: 204875 - DNA, 25 bp, Probe sequence
ttatcgtgatccactaactcatcta

SEQ ID NO: 204876 - DNA, 25 bp, Probe sequence
attgtaattatttctaccatttcaa

SEQ ID NO: 204877 - DNA, 25 bp, Probe sequence
attccaacaataattgcagtagcca

SEQ ID NO: 204878 - DNA, 25 bp, Probe sequence
attaatcgtaaacgctataatcccg

SEQ ID NO: 204879 - DNA, 25 bp, Probe sequence
atttctaccatttcaatcatccaat

SEQ ID NO: 204880 - DNA, 25 bp, Probe sequence
atattttatgaatgtcaaaggctca

SEQ ID NO: 204881 - DNA, 25 bp, Probe sequence
atactggtgaagtcattaacattgt

SEQ ID NO: 204882 - DNA, 25 bp, Probe sequence
atcaaggtggaattacaactattaa

SEQ ID NO: 204883 - DNA, 25 bp, Probe sequence
atggtcaaaatattcattatgattt

SEQ ID NO: 204884 - DNA, 25 bp, Probe sequence
agatgcatatactggtgaagtcatt

SEQ ID NO: 204885 - DNA, 25 bp, Probe sequence
actgaaatatataattccaacaata

SEQ ID NO: 204886 - DNA, 25 bp, Probe sequence
aaccattcgttcatcctgaaactga

SEQ ID NO: 204887 - DNA, 25 bp, Probe sequence
aaggctcatatatcgtttatgaacc

SEQ ID NO: 204888 - DNA, 25 bp, Probe sequence
aataattgcagtagccattgtaatt

SEQ ID NO: 204889 - DNA, 25 bp, Probe sequence
aattatttctaccatttcaatcatc

SEQ ID NO: 204890 - DNA, 25 bp, Probe sequence
gccattgtaattatttctaccattt

SEQ ID NO: 204891 - DNA, 25 bp, Probe sequence
gcatatactggtgaagtcattaaca

SEQ ID NO: 204892 - DNA, 25 bp, Probe sequence
gaatgtcaaaggctcatatatcgtt

SEQ ID NO: 204893 - DNA, 25 bp, Probe sequence
gaagtcattaacattgtagagcgtt

SEQ ID NO: 204894 - DNA, 25 bp, Probe sequence
gaaccattcgttcatcctgaaactg

SEQ ID NO: 204895 - DNA, 25 bp, Probe sequence
gataaataccgtttagtttatcaag

SEQ ID NO: 204896 - DNA, 25 bp, Probe sequence
gtttatgaaccattcgttcatcctg

SEQ ID NO: 204897 - DNA, 25 bp, Probe sequence
gtaattatttctaccatttcaatca

SEQ ID NO: 204898 - DNA, 25 bp, Probe sequence
ggtgaagtcattaacattgtagagc

SEQ ID NO: 204899 - DNA, 25 bp, Probe sequence
tgtcaaaggctcatatatcgtttat

SEQ ID NO: 204900 - DNA, 25 bp, Probe sequence
tgcagatgcatatactggtgaagtc

SEQ ID NO: 204901 - DNA, 25 bp, Probe sequence
tgcagtagccattgtaattatttct

SEQ ID NO: 204902 - DNA, 25 bp, Probe sequence
tcattatgatttttatgcagatgca

SEQ ID NO: 204903 - DNA, 25 bp, Probe sequence
taatcgtaaacgctataatcccgtt

SEQ ID NO: 204904 - DNA, 25 bp, Probe sequence
tagccattgtaattatttctaccat

SEQ ID NO: 204905 - DNA, 25 bp, Probe sequence
tatatcgtttatgaaccattcgttc

SEQ ID NO: 204906 - DNA, 25 bp, Probe sequence
tataatcccgttaaagtacttaatg

SEQ ID NO: 204907 - DNA, 25 bp, Probe sequence
tatttctaccatttcaatcatccaa

SEQ ID NO: 204908 - DNA, 25 bp, Probe sequence
tttagtttatcaaggtggaattaca

SEQ ID NO: 204909 - DNA, 25 bp, Probe sequence
ttatttctaccatttcaatcatcca

SEQ ID NO: 204910 - DNA, 25 bp, Probe sequence
atagataaggcatttgtcacaggtg

SEQ ID NO: 204911 - DNA, 25 bp, Probe sequence
atactggtggttataatattacaag

SEQ ID NO: 204912 - DNA, 25 bp, Probe sequence
atacatggttatactggtggttata

SEQ ID NO: 204913 - DNA, 25 bp, Probe sequence
atcacatcattattatcggacacac

SEQ ID NO: 204914 - DNA, 25 bp, Probe sequence
atcattattatcggacacaccagat

SEQ ID NO: 204915 - DNA, 25 bp, Probe sequence
atcggacacaccagataaaatcatt

SEQ ID NO: 204916 - DNA, 25 bp, Probe sequence
atgaaaataccacatcacatcactt

SEQ ID NO: 204917 - DNA, 25 bp, Probe sequence
aggacatgtcgctggattatatgcc

SEQ ID NO: 204918 - DNA, 25 bp, Probe sequence
actcgtaacaggacatgtcgctgga

SEQ ID NO: 204919 - DNA, 25 bp, Probe sequence
acatcattattatcggacacaccag

SEQ ID NO: 204920 - DNA, 25 bp, Probe sequence
acatcacatcattattatcggacac

SEQ ID NO: 204921 - DNA, 25 bp, Probe sequence
acaggacatgtcgctggattatatg

SEQ ID NO: 204922 - DNA, 25 bp, Probe sequence
acacatcacatcattattatcggac

SEQ ID NO: 204923 - DNA, 25 bp, Probe sequence
acaagtgcactcgtaacaggacatg

SEQ ID NO: 204924 - DNA, 25 bp, Probe sequence
aacgggacattacctatagataagg

SEQ ID NO: 204925 - DNA, 25 bp, Probe sequence
aagtgcactcgtaacaggacatgtc

SEQ ID NO: 204926 - DNA, 25 bp, Probe sequence
aaggcatttgtcacaggtggtggtg

SEQ ID NO: 204927 - DNA, 25 bp, Probe sequence
caacacatcacatcattattatcgg

SEQ ID NO: 204928 - DNA, 25 bp, Probe sequence
gcactcgtaacaggacatgtcgctg

SEQ ID NO: 204929 - DNA, 25 bp, Probe sequence
gacatgtcgctggattatatgccgg

SEQ ID NO: 204930 - DNA, 25 bp, Probe sequence
gataaggcatttgtcacaggtggtg

SEQ ID NO: 204931 - DNA, 25 bp, Probe sequence
gttataatattacaagtgcactcgt

SEQ ID NO: 204932 - DNA, 25 bp, Probe sequence
gtaacaggacatgtcgctggattat

SEQ ID NO: 204933 - DNA, 25 bp, Probe sequence
gtgcactcgtaacaggacatgtcgc

SEQ ID NO: 204934 - DNA, 25 bp, Probe sequence
gggacattacctatagataaggcat

SEQ ID NO: 204935 - DNA, 25 bp, Probe sequence
ggattatttttatgtggtgaagtat

SEQ ID NO: 204936 - DNA, 25 bp, Probe sequence
ggacatgtcgctggattatatgccg

SEQ ID NO: 204937 - DNA, 25 bp, Probe sequence
ggacacaccagataaaatcattaaa

SEQ ID NO: 204938 - DNA, 25 bp, Probe sequence
ggcatttgtcacaggtggtggtgtg

SEQ ID NO: 204939 - DNA, 25 bp, Probe sequence
tgcactcgtaacaggacatgtcgct

SEQ ID NO: 204940 - DNA, 25 bp, Probe sequence
tcgtaacaggacatgtcgctggatt

SEQ ID NO: 204941 - DNA, 25 bp, Probe sequence
tcacatcattattatcggacacacc

SEQ ID NO: 204942 - DNA, 25 bp, Probe sequence
tatttttatgtggtgaagtattaga

SEQ ID NO: 204943 - DNA, 25 bp, Probe sequence
ttgtcacaggtggtggtgtgtcact

SEQ ID NO: 204944 - DNA, 25 bp, Probe sequence
atagcaattgaatgtccagtaacaa

SEQ ID NO: 204945 - DNA, 25 bp, Probe sequence
agtttccaacaaagcacaagacgtg

SEQ ID NO: 204946 - DNA, 25 bp, Probe sequence
agcacatttctatggcaatcgatgc

SEQ ID NO: 204947 - DNA, 25 bp, Probe sequence
actatcgaacgccaacatgtaacga

SEQ ID NO: 204948 - DNA, 25 bp, Probe sequence
acatttctatggcaatcgatgcatt

SEQ ID NO: 204949 - DNA, 25 bp, Probe sequence
acacagcacatttctatggcaatcg

SEQ ID NO: 204950 - DNA, 25 bp, Probe sequence
acagcacatttctatggcaatcgat

SEQ ID NO: 204951 - DNA, 25 bp, Probe sequence
aaagtagcagtgtgttactcattga

SEQ ID NO: 204952 - DNA, 25 bp, Probe sequence
aaagcacaagacgtggttgatacat

SEQ ID NO: 204953 - DNA, 25 bp, Probe sequence
aaaagacacagcacatttctatggc

SEQ ID NO: 204954 - DNA, 25 bp, Probe sequence
aagacacagcacatttctatggcaa

SEQ ID NO: 204955 - DNA, 25 bp, Probe sequence
aagacgtggttgatacattagtgac

SEQ ID NO: 204956 - DNA, 25 bp, Probe sequence
caactatcgaacgccaacatgtaac

SEQ ID NO: 204957 - DNA, 25 bp, Probe sequence
ccagtttccaacaaagcacaagacg

SEQ ID NO: 204958 - DNA, 25 bp, Probe sequence
gcagtgtgttactcattgaaaaaaa

SEQ ID NO: 204959 - DNA, 25 bp, Probe sequence
gcacatttctatggcaatcgatgca

SEQ ID NO: 204960 - DNA, 25 bp, Probe sequence
gcacaagacgtggttgatacattag

SEQ ID NO: 204961 - DNA, 25 bp, Probe sequence
gcaagcgaacaaagtagcagtgtgt

SEQ ID NO: 204962 - DNA, 25 bp, Probe sequence
gcaattgaatgtccagtaacaaatt

SEQ ID NO: 204963 - DNA, 25 bp, Probe sequence
gacaactatcgaacgccaacatgta

SEQ ID NO: 204964 - DNA, 25 bp, Probe sequence
gacacagcacatttctatggcaatc

SEQ ID NO: 204965 - DNA, 25 bp, Probe sequence
gacgtggttgatacattagtgacaa

SEQ ID NO: 204966 - DNA, 25 bp, Probe sequence
gtttccagtttccaacaaagcacaa

SEQ ID NO: 204967 - DNA, 25 bp, Probe sequence
gtagcagtgtgttactcattgaaaa

SEQ ID NO: 204968 - DNA, 25 bp, Probe sequence
gtaacaaatttggaggaagcgtata

SEQ ID NO: 204969 - DNA, 25 bp, Probe sequence
gtgacaactatcgaacgccaacatg

SEQ ID NO: 204970 - DNA, 25 bp, Probe sequence
ggaggaagcgtatatgtatcaaaca

SEQ ID NO: 204971 - DNA, 25 bp, Probe sequence
ggaagcgtatatgtatcaaacaatt

SEQ ID NO: 204972 - DNA, 25 bp, Probe sequence
tcaaaagacacagcacatttctatg

SEQ ID NO: 204973 - DNA, 25 bp, Probe sequence
tagtgacaactatcgaacgccaaca

SEQ ID NO: 204974 - DNA, 25 bp, Probe sequence
tatcgaacgccaacatgtaacgatt

SEQ ID NO: 204975 - DNA, 25 bp, Probe sequence
tttccagtttccaacaaagcacaag

SEQ ID NO: 204976 - DNA, 25 bp, Probe sequence
tttctatggcaatcgatgcatttcc

SEQ ID NO: 204977 - DNA, 25 bp, Probe sequence
ttagtgacaactatcgaacgccaac

SEQ ID NO: 204978 - DNA, 25 bp, Probe sequence
aaatgatcgttcaccgaattaccgg

SEQ ID NO: 204979 - DNA, 25 bp, Probe sequence
atattgcttattttcaggcatttac

SEQ ID NO: 204980 - DNA, 25 bp, Probe sequence
atcaatgtatgtacacacatcatta

SEQ ID NO: 204981 - DNA, 25 bp, Probe sequence
atctgatttaatcaatcgtgcccat

SEQ ID NO: 204982 - DNA, 25 bp, Probe sequence
atgacatgatgatggctactgccaa

SEQ ID NO: 204983 - DNA, 25 bp, Probe sequence
atgggcaatcatttccaatacgctt

SEQ ID NO: 204984 - DNA, 25 bp, Probe sequence
acatcattaatggcttacctggcga

SEQ ID NO: 204985 - DNA, 25 bp, Probe sequence
aaagttgcattggatggcgggtttg

SEQ ID NO: 204986 - DNA, 25 bp, Probe sequence
aacgttatcacacatggaattacca

SEQ ID NO: 204987 - DNA, 25 bp, Probe sequence
aatggcttacctggcgaagactatg

SEQ ID NO: 204988 - DNA, 25 bp, Probe sequence
caatcatttccaatacgcttttgaa

SEQ ID NO: 204989 - DNA, 25 bp, Probe sequence
ctgtctaccagacgatgttgtcgaa

SEQ ID NO: 204990 - DNA, 25 bp, Probe sequence
gcgttacaagtctaaggtgaagcaa

SEQ ID NO: 204991 - DNA, 25 bp, Probe sequence
gaattaccggtgatggtccaataga

SEQ ID NO: 204992 - DNA, 25 bp, Probe sequence
gaagttgcacaaatggatgtacaag

SEQ ID NO: 204993 - DNA, 25 bp, Probe sequence
gactttgcaggtaatcgtgcagatt

SEQ ID NO: 204994 - DNA, 25 bp, Probe sequence
gaccaattagaagtgattccccctg

SEQ ID NO: 204995 - DNA, 25 bp, Probe sequence
gatggcactgtagcacatggtggat

SEQ ID NO: 204996 - DNA, 25 bp, Probe sequence
gatgttgtcgaatatttagcagatt

SEQ ID NO: 204997 - DNA, 25 bp, Probe sequence
gattatctattggtacgcgtcctga

SEQ ID NO: 204998 - DNA, 25 bp, Probe sequence
gattccccctgaaatgatcgttcac

SEQ ID NO: 204999 - DNA, 25 bp, Probe sequence
gtacattttgttctgctgcaggtag

SEQ ID NO: 205000 - DNA, 25 bp, Probe sequence
gtcctgactgtctaccagacgatgt

SEQ ID NO: 205001 - DNA, 25 bp, Probe sequence
gtggatgtacattttgttctgctgc

SEQ ID NO: 205002 - DNA, 25 bp, Probe sequence
ggtttattaacttttatgactcaag

SEQ ID NO: 205003 - DNA, 25 bp, Probe sequence
ggctactgccaaagaagttgcacaa

SEQ ID NO: 205004 - DNA, 25 bp, Probe sequence
tggatggcgggtttgactgtcctaa

SEQ ID NO: 205005 - DNA, 25 bp, Probe sequence
tcatttgttaaaaggtacaccgatg

SEQ ID NO: 205006 - DNA, 25 bp, Probe sequence
taaaattcatttacttcatttgtta

SEQ ID NO: 205007 - DNA, 25 bp, Probe sequence
tacctggcgaagactatgacatgat

SEQ ID NO: 205008 - DNA, 25 bp, Probe sequence
tatctattggtacgcgtcctgactg

SEQ ID NO: 205009 - DNA, 25 bp, Probe sequence
tatcaaggcttgcgttacaagtcta

SEQ ID NO: 205010 - DNA, 25 bp, Probe sequence
tttaatcaatcgtgcccatgatatg

SEQ ID NO: 205011 - DNA, 25 bp, Probe sequence
tttcaggcatttacaaatacacatg

SEQ ID NO: 205012 - DNA, 25 bp, Probe sequence
ttcccgagcaactgtccgggggtat

SEQ ID NO: 205013 - DNA, 25 bp, Probe sequence
gcattttcccgagcaactgtccggg

SEQ ID NO: 205014 - DNA, 25 bp, Probe sequence
atggatgagccattaggtgcattag

SEQ ID NO: 205015 - DNA, 25 bp, Probe sequence
aggtgaagggtgcaatattatttct

SEQ ID NO: 205016 - DNA, 25 bp, Probe sequence
agcctaacgttatattgatggatga

SEQ ID NO: 205017 - DNA, 25 bp, Probe sequence
acaacatcactttggatcacataaa

SEQ ID NO: 205018 - DNA, 25 bp, Probe sequence
aacaattacaacatcactttggatc

SEQ ID NO: 205019 - DNA, 25 bp, Probe sequence
aacgcacagcttaaattagttgatt

SEQ ID NO: 205020 - DNA, 25 bp, Probe sequence
aattcataactttaatttggacatt

SEQ ID NO: 205021 - DNA, 25 bp, Probe sequence
caagttgaacctgaatattatttat

SEQ ID NO: 205022 - DNA, 25 bp, Probe sequence
caacgtgtggcactatgtcgagcgc

SEQ ID NO: 205023 - DNA, 25 bp, Probe sequence
cacgcagtcgtaatgatagccacct

SEQ ID NO: 205024 - DNA, 25 bp, Probe sequence
tccgggggtatgaaacaacgtgtgg

SEQ ID NO: 205025 - DNA, 25 bp, Probe sequence
ccgaccgcattgttctgttaggtga

SEQ ID NO: 205026 - DNA, 25 bp, Probe sequence
gcgcatgtgcataagcctaacgtta

SEQ ID NO: 205027 - DNA, 25 bp, Probe sequence
gctgccatggaaaacgattaatgac

SEQ ID NO: 205028 - DNA, 25 bp, Probe sequence
gcattgttctgttaggtgaagggtg

SEQ ID NO: 205029 - DNA, 25 bp, Probe sequence
gcatcacatccacgcagtcgtaatg

SEQ ID NO: 205030 - DNA, 25 bp, Probe sequence
gcactatgtcgagcgcatgtgcata

SEQ ID NO: 205031 - DNA, 25 bp, Probe sequence
gaatcatcatcaagttgaacctgaa

SEQ ID NO: 205032 - DNA, 25 bp, Probe sequence
gaaacatttgcattgaatcatcatc

SEQ ID NO: 205033 - DNA, 25 bp, Probe sequence
gaaattacagcatcacatccacgca

SEQ ID NO: 205034 - DNA, 25 bp, Probe sequence
gagcaactgtccgggggtatgaaac

SEQ ID NO: 205035 - DNA, 25 bp, Probe sequence
gatgaagagattaacgcacagctta

SEQ ID NO: 205036 - DNA, 25 bp, Probe sequence
gtttaatgctatttcaacatcataa

SEQ ID NO: 205037 - DNA, 25 bp, Probe sequence
gtcgtaatgatagccacctacttaa

SEQ ID NO: 205038 - DNA, 25 bp, Probe sequence
gtcgagcgcatgtgcataagcctaa

SEQ ID NO: 205039 - DNA, 25 bp, Probe sequence
ggaaagcattttcccgagcaactgt

SEQ ID NO: 205040 - DNA, 25 bp, Probe sequence
tgtggcactatgtcgagcgcatgtg

SEQ ID NO: 205041 - DNA, 25 bp, Probe sequence
tgagccattaggtgcattagatgca

SEQ ID NO: 205042 - DNA, 25 bp, Probe sequence
tgaagctatttatctttccgaccgc

SEQ ID NO: 205043 - DNA, 25 bp, Probe sequence
tctccagattgtttaatgctatttc

SEQ ID NO: 205044 - DNA, 25 bp, Probe sequence
tatttatctttccgaccgcattgtt

SEQ ID NO: 205045 - DNA, 25 bp, Probe sequence
tttccgaccgcattgttctgttagg

SEQ ID NO: 205046 - DNA, 25 bp, Probe sequence
cctaggttatttgcctaaaggtgat

SEQ ID NO: 205047 - DNA, 25 bp, Probe sequence
ataaaggtcatattgatgcagccat

SEQ ID NO: 205048 - DNA, 25 bp, Probe sequence
atcatgctccattcatttgtgccat

SEQ ID NO: 205049 - DNA, 25 bp, Probe sequence
accaacgtaatcatgctccattcat

SEQ ID NO: 205050 - DNA, 25 bp, Probe sequence
aaatctatcgtgacaaagcctgaca

SEQ ID NO: 205051 - DNA, 25 bp, Probe sequence
aaaccaacgtaatcatgctccattc

SEQ ID NO: 205052 - DNA, 25 bp, Probe sequence
aaacaacatataacaccagaaagta

SEQ ID NO: 205053 - DNA, 25 bp, Probe sequence
aacgtaatcatgctccattcatttg

SEQ ID NO: 205054 - DNA, 25 bp, Probe sequence
aagcctgacacgacaatccaagcta

SEQ ID NO: 205055 - DNA, 25 bp, Probe sequence
caagtaccagaaggacatgtttatg

SEQ ID NO: 205056 - DNA, 25 bp, Probe sequence
caaagcctgacacgacaatccaagc

SEQ ID NO: 205057 - DNA, 25 bp, Probe sequence
caaaaacacttattaaacaacatat

SEQ ID NO: 205058 - DNA, 25 bp, Probe sequence
catgctccattcatttgtgccatag

SEQ ID NO: 205059 - DNA, 25 bp, Probe sequence
cctgacacgacaatccaagctatta

SEQ ID NO: 205060 - DNA, 25 bp, Probe sequence
gctccattcatttgtgccatagaaa

SEQ ID NO: 205061 - DNA, 25 bp, Probe sequence
gcaatgacactttatttttagccga

SEQ ID NO: 205062 - DNA, 25 bp, Probe sequence
gaaggacatgtttatggtttcgaca

SEQ ID NO: 205063 - DNA, 25 bp, Probe sequence
gacaaagcctgacacgacaatccaa

SEQ ID NO: 205064 - DNA, 25 bp, Probe sequence
gacatgtttatggtttcgacattca

SEQ ID NO: 205065 - DNA, 25 bp, Probe sequence
gacgcaacttgcggtaacggcaatg

SEQ ID NO: 205066 - DNA, 25 bp, Probe sequence
gatgcacataaaggtcatattgatg

SEQ ID NO: 205067 - DNA, 25 bp, Probe sequence
gtaacggcaatgacactttattttt

SEQ ID NO: 205068 - DNA, 25 bp, Probe sequence
gtaatcatgctccattcatttgtgc

SEQ ID NO: 205069 - DNA, 25 bp, Probe sequence
ggtttcgacattcaagatttagctt

SEQ ID NO: 205070 - DNA, 25 bp, Probe sequence
tgacactttatttttagccgaacaa

SEQ ID NO: 205071 - DNA, 25 bp, Probe sequence
tgacacgacaatccaagctattaat

SEQ ID NO: 205072 - DNA, 25 bp, Probe sequence
tgcggtaacggcaatgacactttat

SEQ ID NO: 205073 - DNA, 25 bp, Probe sequence
tcgacattcaagatttagctttgga

SEQ ID NO: 205074 - DNA, 25 bp, Probe sequence
taaggatttcaatcatgtttcttta

SEQ ID NO: 205075 - DNA, 25 bp, Probe sequence
tacacgtgataaagttaaggatttc

SEQ ID NO: 205076 - DNA, 25 bp, Probe sequence
tagccgaacaagtaccagaaggaca

SEQ ID NO: 205077 - DNA, 25 bp, Probe sequence
tttgcctaaaggtgataaatctatc

SEQ ID NO: 205078 - DNA, 25 bp, Probe sequence
ttatttttagccgaacaagtaccag

SEQ ID NO: 205079 - DNA, 25 bp, Probe sequence
ttagctttggaaaatacacgtgata

SEQ ID NO: 205080 - DNA, 25 bp, Probe sequence
atttcacttcaattgcaacacatga

SEQ ID NO: 205081 - DNA, 25 bp, Probe sequence
atgctagcctgcaacaaattgttca

SEQ ID NO: 205082 - DNA, 25 bp, Probe sequence
atgttggtactgtaattcaagcata

SEQ ID NO: 205083 - DNA, 25 bp, Probe sequence
atggttttagatcagagttagcaga

SEQ ID NO: 205084 - DNA, 25 bp, Probe sequence
agattagcagaacgcccacaaaacc

SEQ ID NO: 205085 - DNA, 25 bp, Probe sequence
agaatttgtgaaacctgctggctta

SEQ ID NO: 205086 - DNA, 25 bp, Probe sequence
agctttaggagctacagttatgtta

SEQ ID NO: 205087 - DNA, 25 bp, Probe sequence
acaattatggacgcgcttcatcaac

SEQ ID NO: 205088 - DNA, 25 bp, Probe sequence
aacgaatcaattgcatttcaatcta

SEQ ID NO: 205089 - DNA, 25 bp, Probe sequence
aattccaaatgctctatggttttag

SEQ ID NO: 205090 - DNA, 25 bp, Probe sequence
ctgctggcttaaaacgtgttggcat

SEQ ID NO: 205091 - DNA, 25 bp, Probe sequence
cgcagcaaaaaaagtgggcccacgt

SEQ ID NO: 205092 - DNA, 25 bp, Probe sequence
cgcgcttcatcaacatggcgtaaag

SEQ ID NO: 205093 - DNA, 25 bp, Probe sequence
gccaataaagtcgttgccggaaata

SEQ ID NO: 205094 - DNA, 25 bp, Probe sequence
gcaacacatgaccatcgcatcatta

SEQ ID NO: 205095 - DNA, 25 bp, Probe sequence
gaatttttttatcggattatctaat

SEQ ID NO: 205096 - DNA, 25 bp, Probe sequence
gaacaacgtttgttaaacgcacgca

SEQ ID NO: 205097 - DNA, 25 bp, Probe sequence
gaccatcgcatcattaatcatgtaa

SEQ ID NO: 205098 - DNA, 25 bp, Probe sequence
gatcgtatggaattccaaatgctct

SEQ ID NO: 205099 - DNA, 25 bp, Probe sequence
gatactgaaaaatatgctagcctgc

SEQ ID NO: 205100 - DNA, 25 bp, Probe sequence
gattacgtttggttaaaggtgcata

SEQ ID NO: 205101 - DNA, 25 bp, Probe sequence
gattggtttgcgtattttatgagaa

SEQ ID NO: 205102 - DNA, 25 bp, Probe sequence
gttaggtgcagaattcgacttagaa

SEQ ID NO: 205103 - DNA, 25 bp, Probe sequence
gtaccaagatttacgattacgtttg

SEQ ID NO: 205104 - DNA, 25 bp, Probe sequence
gtcgttgccggaaatacaattccag

SEQ ID NO: 205105 - DNA, 25 bp, Probe sequence
gtgttggcataattgcagctttagg

SEQ ID NO: 205106 - DNA, 25 bp, Probe sequence
ggcgtaaaggcacatatgtctgtta

SEQ ID NO: 205107 - DNA, 25 bp, Probe sequence
tcactatttatgtaccttatggcga

SEQ ID NO: 205108 - DNA, 25 bp, Probe sequence
taaacgcacgcaatttcacttcaat

SEQ ID NO: 205109 - DNA, 25 bp, Probe sequence
taaatgacaagaatatcgctgttac

SEQ ID NO: 205110 - DNA, 25 bp, Probe sequence
tatggcgatgattggtttgcgtatt

SEQ ID NO: 205111 - DNA, 25 bp, Probe sequence
taggggaatttgtcggtacagttga

SEQ ID NO: 205112 - DNA, 25 bp, Probe sequence
ttcaagcatatttatacgatagcca

SEQ ID NO: 205113 - DNA, 25 bp, Probe sequence
ttcgacttagaattagcttaccaaa

SEQ ID NO: 205114 - DNA, 25 bp, Probe sequence
atgcgcttgtgatttgttagcacat

SEQ ID NO: 205115 - DNA, 25 bp, Probe sequence
agagttatgcgcttgtgatttgtta

SEQ ID NO: 205116 - DNA, 25 bp, Probe sequence
aacttgtctaaggttcatacctcta

SEQ ID NO: 205117 - DNA, 25 bp, Probe sequence
aaggttcatacctctaaccaacgat

SEQ ID NO: 205118 - DNA, 25 bp, Probe sequence
aatcataatatttttgagtccgtaa

SEQ ID NO: 205119 - DNA, 25 bp, Probe sequence
aataacttgtctaaggttcatacct

SEQ ID NO: 205120 - DNA, 25 bp, Probe sequence
cttgtggagagttatgcgcttgtga

SEQ ID NO: 205121 - DNA, 25 bp, Probe sequence
ctaaggttcatacctctaaccaacg

SEQ ID NO: 205122 - DNA, 25 bp, Probe sequence
gcgcttgtgatttgttagcacattt

SEQ ID NO: 205123 - DNA, 25 bp, Probe sequence
gcagattagaaatactagatttact

SEQ ID NO: 205124 - DNA, 25 bp, Probe sequence
gcaacatttttaaaagttttatcag

SEQ ID NO: 205125 - DNA, 25 bp, Probe sequence
gacgtataaagaactagcaacattt

SEQ ID NO: 205126 - DNA, 25 bp, Probe sequence
gagagttatgcgcttgtgatttgtt

SEQ ID NO: 205127 - DNA, 25 bp, Probe sequence
gagttatgcgcttgtgatttgttag

SEQ ID NO: 205128 - DNA, 25 bp, Probe sequence
gagtccgtaattaataacttgtcta

SEQ ID NO: 205129 - DNA, 25 bp, Probe sequence
gatttgttagcacattttcaattct

SEQ ID NO: 205130 - DNA, 25 bp, Probe sequence
gttagcacattttcaattctctcaa

SEQ ID NO: 205131 - DNA, 25 bp, Probe sequence
gttatgcgcttgtgatttgttagca

SEQ ID NO: 205132 - DNA, 25 bp, Probe sequence
gtctaaggttcatacctctaaccaa

SEQ ID NO: 205133 - DNA, 25 bp, Probe sequence
gtgatttgttagcacattttcaatt

SEQ ID NO: 205134 - DNA, 25 bp, Probe sequence
gtggagagttatgcgcttgtgattt

SEQ ID NO: 205135 - DNA, 25 bp, Probe sequence
ggttcatacctctaaccaacgatgt

SEQ ID NO: 205136 - DNA, 25 bp, Probe sequence
ggagagttatgcgcttgtgatttgt

SEQ ID NO: 205137 - DNA, 25 bp, Probe sequence
tgttagcacattttcaattctctca

SEQ ID NO: 205138 - DNA, 25 bp, Probe sequence
tttgtcataaccttaagactggtga

SEQ ID NO: 205139 - DNA, 25 bp, Probe sequence
tcataatatttttgagtccgtaatt

SEQ ID NO: 205140 - DNA, 25 bp, Probe sequence
taaccttaagactggtgaatgctaa

SEQ ID NO: 205141 - DNA, 25 bp, Probe sequence
tactttcttgtggagagttatgcgc

SEQ ID NO: 205142 - DNA, 25 bp, Probe sequence
tagcacattttcaattctctcaacc

SEQ ID NO: 205143 - DNA, 25 bp, Probe sequence
ttgtctaaggttcatacctctaacc

SEQ ID NO: 205144 - DNA, 25 bp, Probe sequence
tttactttcttgtggagagttatgc

SEQ ID NO: 205145 - DNA, 25 bp, Probe sequence
tttatcagattcaagcagattagaa

SEQ ID NO: 205146 - DNA, 25 bp, Probe sequence
ttagcacattttcaattctctcaac

SEQ ID NO: 205147 - DNA, 25 bp, Probe sequence
ttcttgtggagagttatgcgcttgt

SEQ ID NO: 205148 - DNA, 25 bp, Probe sequence
ataggttttagtaagcgggccatat

SEQ ID NO: 205149 - DNA, 25 bp, Probe sequence
atagtattattttcaattggtatgt

SEQ ID NO: 205150 - DNA, 25 bp, Probe sequence
atggtcagctattcacatgcttcat

SEQ ID NO: 205151 - DNA, 25 bp, Probe sequence
agggcgcaccttggaatatagtatt

SEQ ID NO: 205152 - DNA, 25 bp, Probe sequence
aatgaataatatgcctacagtttta

SEQ ID NO: 205153 - DNA, 25 bp, Probe sequence
ctggtgttgtaagtttttccgatgt

SEQ ID NO: 205154 - DNA, 25 bp, Probe sequence
ctgtggttacacgtcttaacacaaa

SEQ ID NO: 205155 - DNA, 25 bp, Probe sequence
gatttcttggggcacatactttaaa

SEQ ID NO: 205156 - DNA, 25 bp, Probe sequence
gctattggtcaatcaaatgtccatg

SEQ ID NO: 205157 - DNA, 25 bp, Probe sequence
gctattcacatgcttcatgcttcaa

SEQ ID NO: 205158 - DNA, 25 bp, Probe sequence
gaatatatttccaattacggtctat

SEQ ID NO: 205159 - DNA, 25 bp, Probe sequence
gaaatgctggcattactttaatatt

SEQ ID NO: 205160 - DNA, 25 bp, Probe sequence
gatgttaagatttcttggggcacat

SEQ ID NO: 205161 - DNA, 25 bp, Probe sequence
gttggattattcgaatggtcagcta

SEQ ID NO: 205162 - DNA, 25 bp, Probe sequence
gttatcggttctgatttaggtccaa

SEQ ID NO: 205163 - DNA, 25 bp, Probe sequence
gtatatcgtcgtattcggcttaaga

SEQ ID NO: 205164 - DNA, 25 bp, Probe sequence
gtattcggcttaagaaatgctggca

SEQ ID NO: 205165 - DNA, 25 bp, Probe sequence
gtcaatcaaatgtccatggcatgtt

SEQ ID NO: 205166 - DNA, 25 bp, Probe sequence
gtccaaaaattacaccgataggctc

SEQ ID NO: 205167 - DNA, 25 bp, Probe sequence
gtgcctttattgctgttattactgg

SEQ ID NO: 205168 - DNA, 25 bp, Probe sequence
ggtatgtatatcgtcgtattcggct

SEQ ID NO: 205169 - DNA, 25 bp, Probe sequence
ggtatcatcattacaattccagtac

SEQ ID NO: 205170 - DNA, 25 bp, Probe sequence
ggcatgttaaaagaaggcctaattt

SEQ ID NO: 205171 - DNA, 25 bp, Probe sequence
ggcaacctaaaggcctagatattgg

SEQ ID NO: 205172 - DNA, 25 bp, Probe sequence
tcatttttctagtaactttattatt

SEQ ID NO: 205173 - DNA, 25 bp, Probe sequence
taagcaagtcattaagggcgcacct

SEQ ID NO: 205174 - DNA, 25 bp, Probe sequence
tacagttttaatagatgcgattgct

SEQ ID NO: 205175 - DNA, 25 bp, Probe sequence
tagctacattactgtggttacacgt

SEQ ID NO: 205176 - DNA, 25 bp, Probe sequence
tagttatattacttttcggctatct

SEQ ID NO: 205177 - DNA, 25 bp, Probe sequence
tattatttgtattatggcaacctaa

SEQ ID NO: 205178 - DNA, 25 bp, Probe sequence
tttccgatgttttcgaagtaacagg

SEQ ID NO: 205179 - DNA, 25 bp, Probe sequence
tttccaattacggtctatttagcac

SEQ ID NO: 205180 - DNA, 25 bp, Probe sequence
ttttgggaatgggcttcatttcagc

SEQ ID NO: 205181 - DNA, 25 bp, Probe sequence
ttattgctgttattactggtgttgt

SEQ ID NO: 205182 - DNA, 25 bp, Probe sequence
atatgtacaggcaactcatgtcgaa

SEQ ID NO: 205183 - DNA, 25 bp, Probe sequence
acacggtgttaatcccaaagcgata

SEQ ID NO: 205184 - DNA, 25 bp, Probe sequence
atgatcctgcaggcaagccttggtc

SEQ ID NO: 205185 - DNA, 25 bp, Probe sequence
atgtcgaagtcaaatggctgaaggt

SEQ ID NO: 205186 - DNA, 25 bp, Probe sequence
agttgttacattatgtagtgatgca

SEQ ID NO: 205187 - DNA, 25 bp, Probe sequence
aacacacggtgttaatcccaaagcg

SEQ ID NO: 205188 - DNA, 25 bp, Probe sequence
aacattggggatttgatgatcctgc

SEQ ID NO: 205189 - DNA, 25 bp, Probe sequence
aatcccaaagcgatagaagctatga

SEQ ID NO: 205190 - DNA, 25 bp, Probe sequence
aatcatacatcagatttaatcgata

SEQ ID NO: 205191 - DNA, 25 bp, Probe sequence
aattgcccttctttaccaacaaatg

SEQ ID NO: 205192 - DNA, 25 bp, Probe sequence
aattcaaatttagttgttacattat

SEQ ID NO: 205193 - DNA, 25 bp, Probe sequence
cagagttccaacgtgtaagagatga

SEQ ID NO: 205194 - DNA, 25 bp, Probe sequence
caggcaagccttggtcagagttcca

SEQ ID NO: 205195 - DNA, 25 bp, Probe sequence
ctgctggtatcgaaacacacggtgt

SEQ ID NO: 205196 - DNA, 25 bp, Probe sequence
gccttggtcagagttccaacgtgta

SEQ ID NO: 205197 - DNA, 25 bp, Probe sequence
gcagacgtaaattgcccttctttac

SEQ ID NO: 205198 - DNA, 25 bp, Probe sequence
gcaagccttggtcagagttccaacg

SEQ ID NO: 205199 - DNA, 25 bp, Probe sequence
gcaactcatgtcgaagtcaaatggc

SEQ ID NO: 205200 - DNA, 25 bp, Probe sequence
gatcctgcaggcaagccttggtcag

SEQ ID NO: 205201 - DNA, 25 bp, Probe sequence
gttgggctaaacaaatcttagcgga

SEQ ID NO: 205202 - DNA, 25 bp, Probe sequence
gatgcagacgtaaattgcccttctt

SEQ ID NO: 205203 - DNA, 25 bp, Probe sequence
gatttgatgatcctgcaggcaagcc

SEQ ID NO: 205204 - DNA, 25 bp, Probe sequence
gtatattctgctggtatcgaaacac

SEQ ID NO: 205205 - DNA, 25 bp, Probe sequence
gtaggcattgatatatcaaatcata

SEQ ID NO: 205206 - DNA, 25 bp, Probe sequence
gtacaggcaactcatgtcgaagtca

SEQ ID NO: 205207 - DNA, 25 bp, Probe sequence
gtgttaatcccaaagcgatagaagc

SEQ ID NO: 205208 - DNA, 25 bp, Probe sequence
ggtcagagttccaacgtgtaagaga

SEQ ID NO: 205209 - DNA, 25 bp, Probe sequence
ggaatgtatattctgctggtatcga

SEQ ID NO: 205210 - DNA, 25 bp, Probe sequence
ggctgaaggttgggctaaacaaatc

SEQ ID NO: 205211 - DNA, 25 bp, Probe sequence
tggggatttgatgatcctgcaggca

SEQ ID NO: 205212 - DNA, 25 bp, Probe sequence
tgcccttctttaccaacaaatgtta

SEQ ID NO: 205213 - DNA, 25 bp, Probe sequence
tcctgcaggcaagccttggtcagag

SEQ ID NO: 205214 - DNA, 25 bp, Probe sequence
tcttagcggatgattggaatgtata

SEQ ID NO: 205215 - DNA, 25 bp, Probe sequence
ttgatgatcctgcaggcaagccttg

SEQ ID NO: 205216 - DNA, 25 bp, Probe sequence
attgctgaaatcatgtcattatcgc

SEQ ID NO: 205217 - DNA, 25 bp, Probe sequence
atcatgtcattatcgctttcaacga

SEQ ID NO: 205218 - DNA, 25 bp, Probe sequence
atgtcattatcgctttcaacgatta

SEQ ID NO: 205219 - DNA, 25 bp, Probe sequence
atggctcaaactataccttgaagga

SEQ ID NO: 205220 - DNA, 25 bp, Probe sequence
agactatggctcaaactataccttg

SEQ ID NO: 205221 - DNA, 25 bp, Probe sequence
agcgtaaatgccaacataattttaa

SEQ ID NO: 205222 - DNA, 25 bp, Probe sequence
aaatcatgtcattatcgctttcaac

SEQ ID NO: 205223 - DNA, 25 bp, Probe sequence
aaagatgtcattttatgtgagaata

SEQ ID NO: 205224 - DNA, 25 bp, Probe sequence
aactataccttgaaggatacaagca

SEQ ID NO: 205225 - DNA, 25 bp, Probe sequence
aagactatggctcaaactatacctt

SEQ ID NO: 205226 - DNA, 25 bp, Probe sequence
aatcatgtcattatcgctttcaacg

SEQ ID NO: 205227 - DNA, 25 bp, Probe sequence
aattcaccaacattaactgaacaac

SEQ ID NO: 205228 - DNA, 25 bp, Probe sequence
caccaacattaactgaacaaccaac

SEQ ID NO: 205229 - DNA, 25 bp, Probe sequence
cattatcgctttcaacgattaaatt

SEQ ID NO: 205230 - DNA, 25 bp, Probe sequence
cattaactgaacaaccaacatactt

SEQ ID NO: 205231 - DNA, 25 bp, Probe sequence
cttcgtttacaagatatcttcaagc

SEQ ID NO: 205232 - DNA, 25 bp, Probe sequence
ctatggctcaaactataccttgaag

SEQ ID NO: 205233 - DNA, 25 bp, Probe sequence
ctcttttttattcactcgattaaat

SEQ ID NO: 205234 - DNA, 25 bp, Probe sequence
ccaacattaactgaacaaccaacat

SEQ ID NO: 205235 - DNA, 25 bp, Probe sequence
gctgaaatcatgtcattatcgcttt

SEQ ID NO: 205236 - DNA, 25 bp, Probe sequence
gaaggatacaagcaatttgaaattg

SEQ ID NO: 205237 - DNA, 25 bp, Probe sequence
gaaagactatggctcaaactatacc

SEQ ID NO: 205238 - DNA, 25 bp, Probe sequence
gaaattgctgaaatcatgtcattat

SEQ ID NO: 205239 - DNA, 25 bp, Probe sequence
gactatggctcaaactataccttga

SEQ ID NO: 205240 - DNA, 25 bp, Probe sequence
gagaataattcaccaacattaactg

SEQ ID NO: 205241 - DNA, 25 bp, Probe sequence
gtttacaagatatcttcaagctttt

SEQ ID NO: 205242 - DNA, 25 bp, Probe sequence
gtaaatgccaacataattttaatta

SEQ ID NO: 205243 - DNA, 25 bp, Probe sequence
gtcattatcgctttcaacgattaaa

SEQ ID NO: 205244 - DNA, 25 bp, Probe sequence
ggctcaaactataccttgaaggata

SEQ ID NO: 205245 - DNA, 25 bp, Probe sequence
tcgctttcaacgattaaattaatta

SEQ ID NO: 205246 - DNA, 25 bp, Probe sequence
tcatgtcattatcgctttcaacgat

SEQ ID NO: 205247 - DNA, 25 bp, Probe sequence
taagatgtccgttaagcgtaaatgc

SEQ ID NO: 205248 - DNA, 25 bp, Probe sequence
tacaagatatcttcaagcttttaaa

SEQ ID NO: 205249 - DNA, 25 bp, Probe sequence
ttaattaagatgtccgttaagcgta

SEQ ID NO: 205250 - DNA, 25 bp, Probe sequence
attaaggcatcagttaagcgtaaat

SEQ ID NO: 205251 - DNA, 25 bp, Probe sequence
atattatgtcattatcaacttcaac

SEQ ID NO: 205252 - DNA, 25 bp, Probe sequence
atgtttgtgccctactaaaccacag

SEQ ID NO: 205253 - DNA, 25 bp, Probe sequence
atgtcattatcaacttcaacaatta

SEQ ID NO: 205254 - DNA, 25 bp, Probe sequence
agggaacgtcagtggcttatgcttt

SEQ ID NO: 205255 - DNA, 25 bp, Probe sequence
agatgtttgtgccctactaaaccac

SEQ ID NO: 205256 - DNA, 25 bp, Probe sequence
accacaaaatcatacaccatctttt

SEQ ID NO: 205257 - DNA, 25 bp, Probe sequence
acgtcagtggcttatgctttatctt

SEQ ID NO: 205258 - DNA, 25 bp, Probe sequence
acttttaccttatcgatctattcag

SEQ ID NO: 205259 - DNA, 25 bp, Probe sequence
acagggaacgtcagtggcttatgct

SEQ ID NO: 205260 - DNA, 25 bp, Probe sequence
acaaaaacgtttaaatgatatcatt

SEQ ID NO: 205261 - DNA, 25 bp, Probe sequence
acaagatgtttgtgccctactaaac

SEQ ID NO: 205262 - DNA, 25 bp, Probe sequence
aacaccacaaaatcatacaccatct

SEQ ID NO: 205263 - DNA, 25 bp, Probe sequence
aacttttaccttatcgatctattca

SEQ ID NO: 205264 - DNA, 25 bp, Probe sequence
catgcgactaaacttttaccttatc

SEQ ID NO: 205265 - DNA, 25 bp, Probe sequence
cttcgtttacaagatgtttgtgccc

SEQ ID NO: 205266 - DNA, 25 bp, Probe sequence
ctactaaaccacagggaacgtcagt

SEQ ID NO: 205267 - DNA, 25 bp, Probe sequence
cctcttttttattcatgcgactaaa

SEQ ID NO: 205268 - DNA, 25 bp, Probe sequence
gcgactaaacttttaccttatcgat

SEQ ID NO: 205269 - DNA, 25 bp, Probe sequence
gctttatcttgaaggctataagcaa

SEQ ID NO: 205270 - DNA, 25 bp, Probe sequence
gcttatgctttatcttgaaggctat

SEQ ID NO: 205271 - DNA, 25 bp, Probe sequence
gaacgtcagtggcttatgctttatc

SEQ ID NO: 205272 - DNA, 25 bp, Probe sequence
gaaaatcattcaccaatactaactg

SEQ ID NO: 205273 - DNA, 25 bp, Probe sequence
gaaattgctgatattatgtcattat

SEQ ID NO: 205274 - DNA, 25 bp, Probe sequence
gactaaacttttaccttatcgatct

SEQ ID NO: 205275 - DNA, 25 bp, Probe sequence
gtttacaagatgtttgtgccctact

SEQ ID NO: 205276 - DNA, 25 bp, Probe sequence
gtttgtgccctactaaaccacaggg

SEQ ID NO: 205277 - DNA, 25 bp, Probe sequence
gtcagtggcttatgctttatcttga

SEQ ID NO: 205278 - DNA, 25 bp, Probe sequence
gtgccctactaaaccacagggaacg

SEQ ID NO: 205279 - DNA, 25 bp, Probe sequence
gggaacgtcagtggcttatgcttta

SEQ ID NO: 205280 - DNA, 25 bp, Probe sequence
gtggcttatgctttatcttgaaggc

SEQ ID NO: 205281 - DNA, 25 bp, Probe sequence
tcaccaatactaactgaacagccaa

SEQ ID NO: 205282 - DNA, 25 bp, Probe sequence
tactaactgaacagccaacatactt

SEQ ID NO: 205283 - DNA, 25 bp, Probe sequence
tattcatgcgactaaacttttacct

SEQ ID NO: 205284 - DNA, 25 bp, Probe sequence
attatgcgaaattgcatttatcatc

SEQ ID NO: 205285 - DNA, 25 bp, Probe sequence
atattgttggtatgactgccataga

SEQ ID NO: 205286 - DNA, 25 bp, Probe sequence
atatccaaactgctacttcaaacca

SEQ ID NO: 205287 - DNA, 25 bp, Probe sequence
atgcacattatattgttggtatgac

SEQ ID NO: 205288 - DNA, 25 bp, Probe sequence
actttatatccaaactgctacttca

SEQ ID NO: 205289 - DNA, 25 bp, Probe sequence
acattttcaagaaggcattcagcta

SEQ ID NO: 205290 - DNA, 25 bp, Probe sequence
acaaactcgtttcatattatgcgaa

SEQ ID NO: 205291 - DNA, 25 bp, Probe sequence
aaaccatctcgaaacaaattgtgtc

SEQ ID NO: 205292 - DNA, 25 bp, Probe sequence
aaaaatgtcatgaaagtttagcttt

SEQ ID NO: 205293 - DNA, 25 bp, Probe sequence
aaaacataaacgtgcaccgatacaa

SEQ ID NO: 205294 - DNA, 25 bp, Probe sequence
aactgctacttcaaaccatctcgaa

SEQ ID NO: 205295 - DNA, 25 bp, Probe sequence
aagtttagctttgaagcacttcatt

SEQ ID NO: 205296 - DNA, 25 bp, Probe sequence
aataaactggttcctatttacatca

SEQ ID NO: 205297 - DNA, 25 bp, Probe sequence
aattgtgtctttttacattgcgatt

SEQ ID NO: 205298 - DNA, 25 bp, Probe sequence
caaactgctacttcaaaccatctcg

SEQ ID NO: 205299 - DNA, 25 bp, Probe sequence
caaagtgtgctaattgagactgcaa

SEQ ID NO: 205300 - DNA, 25 bp, Probe sequence
ctactaaatatctactttatatcca

SEQ ID NO: 205301 - DNA, 25 bp, Probe sequence
ctggttcctatttacatcaacccaa

SEQ ID NO: 205302 - DNA, 25 bp, Probe sequence
gctacttcaaaccatctcgaaacaa

SEQ ID NO: 205303 - DNA, 25 bp, Probe sequence
gaattcaacattaatacattttcaa

SEQ ID NO: 205304 - DNA, 25 bp, Probe sequence
gaaggcattcagctagaagttgatg

SEQ ID NO: 205305 - DNA, 25 bp, Probe sequence
gaagttgatgagccattttctctag

SEQ ID NO: 205306 - DNA, 25 bp, Probe sequence
gacaattctactaaatatctacttt

SEQ ID NO: 205307 - DNA, 25 bp, Probe sequence
gactgccatagagaattcaacatta

SEQ ID NO: 205308 - DNA, 25 bp, Probe sequence
gagccattttctctagtttcaaaaa

SEQ ID NO: 205309 - DNA, 25 bp, Probe sequence
gagactgcaaaaaacatactaaata

SEQ ID NO: 205310 - DNA, 25 bp, Probe sequence
gatgagccattttctctagtttcaa

SEQ ID NO: 205311 - DNA, 25 bp, Probe sequence
gttccaattaacaaactcgtttcat

SEQ ID NO: 205312 - DNA, 25 bp, Probe sequence
gattacattcttaaagttccaatta

SEQ ID NO: 205313 - DNA, 25 bp, Probe sequence
gtctttttacattgcgattacattc

SEQ ID NO: 205314 - DNA, 25 bp, Probe sequence
tacaaatttatatcaatgcacatta

SEQ ID NO: 205315 - DNA, 25 bp, Probe sequence
ttacatcaacccaaaaactatactt

SEQ ID NO: 205316 - DNA, 25 bp, Probe sequence
ttgcgattacattcttaaagttcca

SEQ ID NO: 205317 - DNA, 25 bp, Probe sequence
ttgcatttatcatcacaaagtgtgc

SEQ ID NO: 205318 - DNA, 25 bp, Probe sequence
attcctaatataactaaccctgcaa

SEQ ID NO: 205319 - DNA, 25 bp, Probe sequence
attccagaacatttgcttgctagat

SEQ ID NO: 205320 - DNA, 25 bp, Probe sequence
attaccaatatatccttagcttcta

SEQ ID NO: 205321 - DNA, 25 bp, Probe sequence
atttcagcaatttcattaccgatgg

SEQ ID NO: 205322 - DNA, 25 bp, Probe sequence
atttggtcctttagtagatgcctta

SEQ ID NO: 205323 - DNA, 25 bp, Probe sequence
atatccttagcttctattcaacaaa

SEQ ID NO: 205324 - DNA, 25 bp, Probe sequence
atacggcttgatcattttagtggca

SEQ ID NO: 205325 - DNA, 25 bp, Probe sequence
atcactaattgcttctttaaaccta

SEQ ID NO: 205326 - DNA, 25 bp, Probe sequence
atcattttctttatatctacacctt

SEQ ID NO: 205327 - DNA, 25 bp, Probe sequence
atggatacctttaaaggctgaccat

SEQ ID NO: 205328 - DNA, 25 bp, Probe sequence
caatggacgcaaaaccctttactag

SEQ ID NO: 205329 - DNA, 25 bp, Probe sequence
aattcactcctactagttgttgcat

SEQ ID NO: 205330 - DNA, 25 bp, Probe sequence
ctacaccttacagatcattgcctaa

SEQ ID NO: 205331 - DNA, 25 bp, Probe sequence
gctttttttccactatattctatta

SEQ ID NO: 205332 - DNA, 25 bp, Probe sequence
gcaaattctgctatgagtgtcgcat

SEQ ID NO: 205333 - DNA, 25 bp, Probe sequence
gagtgtcgcatatcaaggaacagat

SEQ ID NO: 205334 - DNA, 25 bp, Probe sequence
gatgccttaccattaaagaagactc

SEQ ID NO: 205335 - DNA, 25 bp, Probe sequence
gatacccagctcagtctaaagctat

SEQ ID NO: 205336 - DNA, 25 bp, Probe sequence
gattcctatgtgtatttcattttta

SEQ ID NO: 205337 - DNA, 25 bp, Probe sequence
gttgcagcaatagctttttttccac

SEQ ID NO: 205338 - DNA, 25 bp, Probe sequence
gttgttgcattggtaagtggtgtta

SEQ ID NO: 205339 - DNA, 25 bp, Probe sequence
gtctctattatgtttctacaacttg

SEQ ID NO: 205340 - DNA, 25 bp, Probe sequence
gtggcaattgcaatgttttgcactc

SEQ ID NO: 205341 - DNA, 25 bp, Probe sequence
tgggtagttttattggcggaatcct

SEQ ID NO: 205342 - DNA, 25 bp, Probe sequence
ggttcattaatcacaccttatataa

SEQ ID NO: 205343 - DNA, 25 bp, Probe sequence
ggactaggacttctttatacatgga

SEQ ID NO: 205344 - DNA, 25 bp, Probe sequence
ggctgaccatttaggtggagcctat

SEQ ID NO: 205345 - DNA, 25 bp, Probe sequence
tggagcctattattacggtttatta

SEQ ID NO: 205346 - DNA, 25 bp, Probe sequence
tcgttcgttttctaatttacttatg

SEQ ID NO: 205347 - DNA, 25 bp, Probe sequence
taaatgctggtgatagtctctatta

SEQ ID NO: 205348 - DNA, 25 bp, Probe sequence
tttgcactcaaataggatacccagc

SEQ ID NO: 205349 - DNA, 25 bp, Probe sequence
tttagttaactatattccgcgaaat

SEQ ID NO: 205350 - DNA, 25 bp, Probe sequence
ttttgtttccagtagcttttatgac

SEQ ID NO: 205351 - DNA, 25 bp, Probe sequence
ttaacccctttattacaatgtctat

SEQ ID NO: 205352 - DNA, 25 bp, Probe sequence
atttctattttcactgttaccatca

SEQ ID NO: 205353 - DNA, 25 bp, Probe sequence
ataacttgttagctctgctctttat

SEQ ID NO: 205354 - DNA, 25 bp, Probe sequence
atcggcatagttgtcagtgaagtac

SEQ ID NO: 205355 - DNA, 25 bp, Probe sequence
atgggttagataatctttatttata

SEQ ID NO: 205356 - DNA, 25 bp, Probe sequence
acttatattctggtttgatttttgg

SEQ ID NO: 205357 - DNA, 25 bp, Probe sequence
acttgttagctctgctctttataat

SEQ ID NO: 205358 - DNA, 25 bp, Probe sequence
acattgtctcaagttatttatatta

SEQ ID NO: 205359 - DNA, 25 bp, Probe sequence
acacgaatctgacacttggattggt

SEQ ID NO: 205360 - DNA, 25 bp, Probe sequence
aatacgaaatacaccattctatatt

SEQ ID NO: 205361 - DNA, 25 bp, Probe sequence
ctattttcactgttaccatcatccc

SEQ ID NO: 205362 - DNA, 25 bp, Probe sequence
ctatatttctattttcactgttacc

SEQ ID NO: 205363 - DNA, 25 bp, Probe sequence
ccatcatccccgctattgtggaaga

SEQ ID NO: 205364 - DNA, 25 bp, Probe sequence
gcatcattacacgaatctgacactt

SEQ ID NO: 205365 - DNA, 25 bp, Probe sequence
gacacttggattggttatttacctt

SEQ ID NO: 205366 - DNA, 25 bp, Probe sequence
gaggctattcaaaatcaatttattc

SEQ ID NO: 205367 - DNA, 25 bp, Probe sequence
gttagctctgctctttataatatgg

SEQ ID NO: 205368 - DNA, 25 bp, Probe sequence
gtttttcgcggtatgataataaggg

SEQ ID NO: 205369 - DNA, 25 bp, Probe sequence
gtttttgcatcattacacgaatctg

SEQ ID NO: 205370 - DNA, 25 bp, Probe sequence
gtttagtttttgcatcattacacga

SEQ ID NO: 205371 - DNA, 25 bp, Probe sequence
gtacatttactttatagcatgctaa

SEQ ID NO: 205372 - DNA, 25 bp, Probe sequence
gtaatattcatgcacttcttaaata

SEQ ID NO: 205373 - DNA, 25 bp, Probe sequence
ggtttaattctattgaggctattca

SEQ ID NO: 205374 - DNA, 25 bp, Probe sequence
ggttatttaccttacttatattctg

SEQ ID NO: 205375 - DNA, 25 bp, Probe sequence
ggaagaaattgtttttcgcggtatg

SEQ ID NO: 205376 - DNA, 25 bp, Probe sequence
ggcggtgcactattaatttatgggt

SEQ ID NO: 205377 - DNA, 25 bp, Probe sequence
tcatccccgctattgtggaagaaat

SEQ ID NO: 205378 - DNA, 25 bp, Probe sequence
tcatgcacttcttaaataacttgtt

SEQ ID NO: 205379 - DNA, 25 bp, Probe sequence
tcaaaatcaatttattctcttttaa

SEQ ID NO: 205380 - DNA, 25 bp, Probe sequence
tacaccattctatatttctattttc

SEQ ID NO: 205381 - DNA, 25 bp, Probe sequence
tagttgtcagtgaagtacatttact

SEQ ID NO: 205382 - DNA, 25 bp, Probe sequence
tatttatcggcatagttgtcagtga

SEQ ID NO: 205383 - DNA, 25 bp, Probe sequence
tatttatattataggcggtgcacta

SEQ ID NO: 205384 - DNA, 25 bp, Probe sequence
ttaccttacttatattctggtttga

SEQ ID NO: 205385 - DNA, 25 bp, Probe sequence
ttgtgtctagtttagtttttgcatc

SEQ ID NO: 205386 - DNA, 25 bp, Probe sequence
atatatttttatcggtggtgcttta

SEQ ID NO: 205387 - DNA, 25 bp, Probe sequence
atatgctgtaacaagttatgtcttt

SEQ ID NO: 205388 - DNA, 25 bp, Probe sequence
atgggattgctaacagccttaacaa

SEQ ID NO: 205389 - DNA, 25 bp, Probe sequence
agctattacgactggttttcttggt

SEQ ID NO: 205390 - DNA, 25 bp, Probe sequence
acctcatttcttttctgaatactga

SEQ ID NO: 205391 - DNA, 25 bp, Probe sequence
acgactttttcaacatttcaattag

SEQ ID NO: 205392 - DNA, 25 bp, Probe sequence
aaaactaggtggtggtttatcatga

SEQ ID NO: 205393 - DNA, 25 bp, Probe sequence
cactgatagccaatttgactggtgc

SEQ ID NO: 205394 - DNA, 25 bp, Probe sequence
cagccttaacaattgcatttttttc

SEQ ID NO: 205395 - DNA, 25 bp, Probe sequence
ggtgctttaggcgctttattacgtt

SEQ ID NO: 205396 - DNA, 25 bp, Probe sequence
gctaacagccttaacaattgcattt

SEQ ID NO: 205397 - DNA, 25 bp, Probe sequence
gctttattacgttacctcatttctt

SEQ ID NO: 205398 - DNA, 25 bp, Probe sequence
tacgtcggtataaaactaggtggtg

SEQ ID NO: 205399 - DNA, 25 bp, Probe sequence
gactggttttcttggtgctttaacg

SEQ ID NO: 205400 - DNA, 25 bp, Probe sequence
gatcatcaacaatttataactttac

SEQ ID NO: 205401 - DNA, 25 bp, Probe sequence
gttacctcatttcttttctgaatac

SEQ ID NO: 205402 - DNA, 25 bp, Probe sequence
gttatgtctttggtattttgttatg

SEQ ID NO: 205403 - DNA, 25 bp, Probe sequence
ggtggtgctttaggcgctttattac

SEQ ID NO: 205404 - DNA, 25 bp, Probe sequence
ggtgctttaacgactttttcaacat

SEQ ID NO: 205405 - DNA, 25 bp, Probe sequence
ggaggttttccaatcggaacactga

SEQ ID NO: 205406 - DNA, 25 bp, Probe sequence
ggaacactgatagccaatttgactg

SEQ ID NO: 205407 - DNA, 25 bp, Probe sequence
tcttggtgctttaacgactttttca

SEQ ID NO: 205408 - DNA, 25 bp, Probe sequence
tactgacggaggttttccaatcgga

SEQ ID NO: 205409 - DNA, 25 bp, Probe sequence
tatcggtggtgctttaggcgcttta

SEQ ID NO: 205410 - DNA, 25 bp, Probe sequence
tacgactggttttcttggtgcttta

SEQ ID NO: 205411 - DNA, 25 bp, Probe sequence
taggcgctttattacgttacctcat

SEQ ID NO: 205412 - DNA, 25 bp, Probe sequence
tataactttactactatatgctgta

SEQ ID NO: 205413 - DNA, 25 bp, Probe sequence
tattttgttatgttacgtcggtata

SEQ ID NO: 205414 - DNA, 25 bp, Probe sequence
tttccaatcggaacactgatagcca

SEQ ID NO: 205415 - DNA, 25 bp, Probe sequence
ttacgttacctcatttcttttctga

SEQ ID NO: 205416 - DNA, 25 bp, Probe sequence
ttgtaatgggattgctaacagcctt

SEQ ID NO: 205417 - DNA, 25 bp, Probe sequence
ttaatacatatgtttgatcatcaac

SEQ ID NO: 205418 - DNA, 25 bp, Probe sequence
ttgcatttttttcaaaccatccgac

SEQ ID NO: 205419 - DNA, 25 bp, Probe sequence
ttcttttctgaatactgacggaggt

SEQ ID NO: 205420 - DNA, 25 bp, Probe sequence
attcacttttacaattcatcattgg

SEQ ID NO: 205421 - DNA, 25 bp, Probe sequence
attattcacttttacaattcatcat

SEQ ID NO: 205422 - DNA, 25 bp, Probe sequence
attttagtcatgattggcggcggtt

SEQ ID NO: 205423 - DNA, 25 bp, Probe sequence
agcttgttatattggctatcatatt

SEQ ID NO: 205424 - DNA, 25 bp, Probe sequence
acttcaaagttacctatcgcaacat

SEQ ID NO: 205425 - DNA, 25 bp, Probe sequence
aaagttacctatcgcaacattgata

SEQ ID NO: 205426 - DNA, 25 bp, Probe sequence
aattcatcattggatttatagcttg

SEQ ID NO: 205427 - DNA, 25 bp, Probe sequence
caattattcacttttacaattcatc

SEQ ID NO: 205428 - DNA, 25 bp, Probe sequence
caaagttacctatcgcaacattgat

SEQ ID NO: 205429 - DNA, 25 bp, Probe sequence
catcattggatttatagcttgttat

SEQ ID NO: 205430 - DNA, 25 bp, Probe sequence
cttcaaagttacctatcgcaacatt

SEQ ID NO: 205431 - DNA, 25 bp, Probe sequence
ctagaagtgccattactgattattt

SEQ ID NO: 205432 - DNA, 25 bp, Probe sequence
ctcaattattcacttttacaattca

SEQ ID NO: 205433 - DNA, 25 bp, Probe sequence
gcttgttatattggctatcatattt

SEQ ID NO: 205434 - DNA, 25 bp, Probe sequence
gttacctatcgcaacattgatagta

SEQ ID NO: 205435 - DNA, 25 bp, Probe sequence
ggatttatagcttgttatattggct

SEQ ID NO: 205436 - DNA, 25 bp, Probe sequence
tcatcattggatttatagcttgtta

SEQ ID NO: 205437 - DNA, 25 bp, Probe sequence
tcaaagttacctatcgcaacattga

SEQ ID NO: 205438 - DNA, 25 bp, Probe sequence
taacctttttctcaattattcactt

SEQ ID NO: 205439 - DNA, 25 bp, Probe sequence
tacctatcgcaacattgatagtaaa

SEQ ID NO: 205440 - DNA, 25 bp, Probe sequence
taggtggcttaacaactttctcaac

SEQ ID NO: 205441 - DNA, 25 bp, Probe sequence
tattaacctttttctcaattattca

SEQ ID NO: 205442 - DNA, 25 bp, Probe sequence
tattcacttttacaattcatcattg

SEQ ID NO: 205443 - DNA, 25 bp, Probe sequence
tttctcaattattcacttttacaat

SEQ ID NO: 205444 - DNA, 25 bp, Probe sequence
tttaggtggcttaacaactttctca

SEQ ID NO: 205445 - DNA, 25 bp, Probe sequence
tttttctcaattattcacttttaca

SEQ ID NO: 205446 - DNA, 25 bp, Probe sequence
ttttagtcatgattggcggcggttt

SEQ ID NO: 205447 - DNA, 25 bp, Probe sequence
ttttctcaattattcacttttacaa

SEQ ID NO: 205448 - DNA, 25 bp, Probe sequence
ttattcacttttacaattcatcatt

SEQ ID NO: 205449 - DNA, 25 bp, Probe sequence
ttaggtggcttaacaactttctcaa

SEQ ID NO: 205450 - DNA, 25 bp, Probe sequence
ttaacctttttctcaattattcact

SEQ ID NO: 205451 - DNA, 25 bp, Probe sequence
ttcaaagttacctatcgcaacattg

SEQ ID NO: 205452 - DNA, 25 bp, Probe sequence
ttctcaattattcacttttacaatt

SEQ ID NO: 205453 - DNA, 25 bp, Probe sequence
ttgttatattggctatcatatttaa

SEQ ID NO: 205454 - DNA, 25 bp, Probe sequence
attggtgcacaatcgggattaggtt

SEQ ID NO: 205455 - DNA, 25 bp, Probe sequence
atttggttttattattgatcgattc

SEQ ID NO: 205456 - DNA, 25 bp, Probe sequence
atatggcggtaggaacaagttggat

SEQ ID NO: 205457 - DNA, 25 bp, Probe sequence
atcgaaccgctatttcaattgatta

SEQ ID NO: 205458 - DNA, 25 bp, Probe sequence
atggtcattattattgggcattacc

SEQ ID NO: 205459 - DNA, 25 bp, Probe sequence
agcgggctttgttgtcgcattgttg

SEQ ID NO: 205460 - DNA, 25 bp, Probe sequence
acttagaagatgttttagcagcaat

SEQ ID NO: 205461 - DNA, 25 bp, Probe sequence
acaacgctatcgaaccgctatttca

SEQ ID NO: 205462 - DNA, 25 bp, Probe sequence
aactgggtggtcattgtatcgcaat

SEQ ID NO: 205463 - DNA, 25 bp, Probe sequence
cacatttattattttcttaggcatt

SEQ ID NO: 205464 - DNA, 25 bp, Probe sequence
gccagcgattgcgattatttttatc

SEQ ID NO: 205465 - DNA, 25 bp, Probe sequence
gcttggaaggaatcgttggctatac

SEQ ID NO: 205466 - DNA, 25 bp, Probe sequence
gcaatatattatttcccggggcatt

SEQ ID NO: 205467 - DNA, 25 bp, Probe sequence
gagaaattttccaacatttagcaat

SEQ ID NO: 205468 - DNA, 25 bp, Probe sequence
gatgcacgaaatatgttgaacttag

SEQ ID NO: 205469 - DNA, 25 bp, Probe sequence
gatcgattcattagttatattgagc

SEQ ID NO: 205470 - DNA, 25 bp, Probe sequence
gttggatatttttagtttctggtga

SEQ ID NO: 205471 - DNA, 25 bp, Probe sequence
gttgttctatggtttggtattggta

SEQ ID NO: 205472 - DNA, 25 bp, Probe sequence
gtttctggtgaaatgattggtgcac

SEQ ID NO: 205473 - DNA, 25 bp, Probe sequence
gtcgcattgttggttgctattccat

SEQ ID NO: 205474 - DNA, 25 bp, Probe sequence
ggtagtttgccagcgattgcgatta

SEQ ID NO: 205475 - DNA, 25 bp, Probe sequence
ggcattaccaacctgtattgttacc

SEQ ID NO: 205476 - DNA, 25 bp, Probe sequence
ggcgttagagacattgaacctcaat

SEQ ID NO: 205477 - DNA, 25 bp, Probe sequence
tgggcaccatttgttgttctatggt

SEQ ID NO: 205478 - DNA, 25 bp, Probe sequence
tccattgggcttcttgcttggaagg

SEQ ID NO: 205479 - DNA, 25 bp, Probe sequence
tctttatcggattatttggttttat

SEQ ID NO: 205480 - DNA, 25 bp, Probe sequence
tcatggctgggatacatatggcggt

SEQ ID NO: 205481 - DNA, 25 bp, Probe sequence
tatggagatttgtagcgggctttgt

SEQ ID NO: 205482 - DNA, 25 bp, Probe sequence
taggttttttaatcgttgatgcacg

SEQ ID NO: 205483 - DNA, 25 bp, Probe sequence
tattacctattatcacatttattat

SEQ ID NO: 205484 - DNA, 25 bp, Probe sequence
ttagcagcaatattctttatcggat

SEQ ID NO: 205485 - DNA, 25 bp, Probe sequence
ttcccggggcatttaaacaaatcat

SEQ ID NO: 205486 - DNA, 25 bp, Probe sequence
ttgctattccattgggcttcttgct

SEQ ID NO: 205487 - DNA, 25 bp, Probe sequence
ttggctatacaacgctatcgaaccg

SEQ ID NO: 205488 - DNA, 25 bp, Probe sequence
aggggtattaacagaacttggtgct

SEQ ID NO: 205489 - DNA, 25 bp, Probe sequence
atatcgaaggtggctgctatgcaaa

SEQ ID NO: 205490 - DNA, 25 bp, Probe sequence
atcggcggtactgaatacgctggtg

SEQ ID NO: 205491 - DNA, 25 bp, Probe sequence
atgaattatctcttaccgatgcaag

SEQ ID NO: 205492 - DNA, 25 bp, Probe sequence
atggtgtaggacgtagaatcagctt

SEQ ID NO: 205493 - DNA, 25 bp, Probe sequence
accaacgtcacattttcaactttcg

SEQ ID NO: 205494 - DNA, 25 bp, Probe sequence
actgcggatgcatttggtgttattc

SEQ ID NO: 205495 - DNA, 25 bp, Probe sequence
actttcgacgacacaactttataat

SEQ ID NO: 205496 - DNA, 25 bp, Probe sequence
acacaaagtcattttaatcggcggt

SEQ ID NO: 205497 - DNA, 25 bp, Probe sequence
aaaggtatcttctctgtaatgaatt

SEQ ID NO: 205498 - DNA, 25 bp, Probe sequence
aacctaacttcactatcgtttctgc

SEQ ID NO: 205499 - DNA, 25 bp, Probe sequence
aaccatcattctcaacatgtttcgg

SEQ ID NO: 205500 - DNA, 25 bp, Probe sequence
aagaaccacagatttttgacgcaat

SEQ ID NO: 205501 - DNA, 25 bp, Probe sequence
aatatactggtcgttcgcctaaaga

SEQ ID NO: 205502 - DNA, 25 bp, Probe sequence
caattattttcttaactgcggatgc

SEQ ID NO: 205503 - DNA, 25 bp, Probe sequence
cacattttcaactttcgacgacaca

SEQ ID NO: 205504 - DNA, 25 bp, Probe sequence
cattgctcagcaaacgttggtgaaa

SEQ ID NO: 205505 - DNA, 25 bp, Probe sequence
ccacattttaaagcagatccagaag

SEQ ID NO: 205506 - DNA, 25 bp, Probe sequence
gcagaagatggttcagtggactttg

SEQ ID NO: 205507 - DNA, 25 bp, Probe sequence
gcaatgtatcatttcttgagtggtt

SEQ ID NO: 205508 - DNA, 25 bp, Probe sequence
gaatcagcttacattacacacgtca

SEQ ID NO: 205509 - DNA, 25 bp, Probe sequence
gaacctgaaccatcattctcaacat

SEQ ID NO: 205510 - DNA, 25 bp, Probe sequence
gaaacctttgtcattatttcattta

SEQ ID NO: 205511 - DNA, 25 bp, Probe sequence
gagcgtggtgtgacagaacctgaac

SEQ ID NO: 205512 - DNA, 25 bp, Probe sequence
gagtggtttcacttctaaattagct

SEQ ID NO: 205513 - DNA, 25 bp, Probe sequence
gttgcattattctttggtctatctg

SEQ ID NO: 205514 - DNA, 25 bp, Probe sequence
gttaatactggatggactggcggaa

SEQ ID NO: 205515 - DNA, 25 bp, Probe sequence
gtacgtttggtttaagcattcctgt

SEQ ID NO: 205516 - DNA, 25 bp, Probe sequence
gtgttattccaccgatttcaaagtt

SEQ ID NO: 205517 - DNA, 25 bp, Probe sequence
ggtactaaatctgaaacctttgtca

SEQ ID NO: 205518 - DNA, 25 bp, Probe sequence
ggggagaaattaatcaacctatcga

SEQ ID NO: 205519 - DNA, 25 bp, Probe sequence
ggtaaaccaagcgatttctggcaaa

SEQ ID NO: 205520 - DNA, 25 bp, Probe sequence
tggtgctgttaatgcaagtactgga

SEQ ID NO: 205521 - DNA, 25 bp, Probe sequence
ttaggtgaacttatcgatttacatg

SEQ ID NO: 205522 - DNA, 25 bp, Probe sequence
aataccacggtgctttcaaaggcct

SEQ ID NO: 205523 - DNA, 25 bp, Probe sequence
attcatttttatcaacgtttcattt

SEQ ID NO: 205524 - DNA, 25 bp, Probe sequence
attttaaaatgtcatccgcttcata

SEQ ID NO: 205525 - DNA, 25 bp, Probe sequence
agcgattcaataccacggtgctttc

SEQ ID NO: 205526 - DNA, 25 bp, Probe sequence
cgtattttaaaatgtcatccgcttc

SEQ ID NO: 205527 - DNA, 25 bp, Probe sequence
acaagtcagcaagcaagcattcaca

SEQ ID NO: 205528 - DNA, 25 bp, Probe sequence
aaagatattcttggcgatgattcat

SEQ ID NO: 205529 - DNA, 25 bp, Probe sequence
aacttgtcgtttttatccaacatgt

SEQ ID NO: 205530 - DNA, 25 bp, Probe sequence
aagacaagtcagcaagcaagcattc

SEQ ID NO: 205531 - DNA, 25 bp, Probe sequence
cacggtgctttcaaaggcctttatt

SEQ ID NO: 205532 - DNA, 25 bp, Probe sequence
cactccaccaacttgtcgtttttat

SEQ ID NO: 205533 - DNA, 25 bp, Probe sequence
cagagtacactagagaagcgattca

SEQ ID NO: 205534 - DNA, 25 bp, Probe sequence
ccacggtgctttcaaaggcctttat

SEQ ID NO: 205535 - DNA, 25 bp, Probe sequence
ccaacatgttcagagtacactagag

SEQ ID NO: 205536 - DNA, 25 bp, Probe sequence
ccaacttgtcgtttttatccaacat

SEQ ID NO: 205537 - DNA, 25 bp, Probe sequence
gcgattcaataccacggtgctttca

SEQ ID NO: 205538 - DNA, 25 bp, Probe sequence
gaagcgattcaataccacggtgctt

SEQ ID NO: 205539 - DNA, 25 bp, Probe sequence
gagaagcgattcaataccacggtgc

SEQ ID NO: 205540 - DNA, 25 bp, Probe sequence
gatattcttggcgatgattcatttt

SEQ ID NO: 205541 - DNA, 25 bp, Probe sequence
gattcaataccacggtgctttcaaa

SEQ ID NO: 205542 - DNA, 25 bp, Probe sequence
gtttttatccaacatgttcagagta

SEQ ID NO: 205543 - DNA, 25 bp, Probe sequence
gtcgtttttatccaacatgttcaga

SEQ ID NO: 205544 - DNA, 25 bp, Probe sequence
gtgctttcaaaggcctttatttagg

SEQ ID NO: 205545 - DNA, 25 bp, Probe sequence
ggtgctttcaaaggcctttatttag

SEQ ID NO: 205546 - DNA, 25 bp, Probe sequence
ggcgatgattcatttttatcaacgt

SEQ ID NO: 205547 - DNA, 25 bp, Probe sequence
tccaccaacttgtcgtttttatcca

SEQ ID NO: 205548 - DNA, 25 bp, Probe sequence
tcaataccacggtgctttcaaaggc

SEQ ID NO: 205549 - DNA, 25 bp, Probe sequence
taaaatgtcatccgcttcataaagg

SEQ ID NO: 205550 - DNA, 25 bp, Probe sequence
taccacggtgctttcaaaggccttt

SEQ ID NO: 205551 - DNA, 25 bp, Probe sequence
tatccaacatgttcagagtacacta

SEQ ID NO: 205552 - DNA, 25 bp, Probe sequence
ttatcaacgtttcatttcgccactc

SEQ ID NO: 205553 - DNA, 25 bp, Probe sequence
ttttatcaacgtttcatttcgccac

SEQ ID NO: 205554 - DNA, 25 bp, Probe sequence
ttcttggcgatgattcatttttatc

SEQ ID NO: 205555 - DNA, 25 bp, Probe sequence
ttgtcgtttttatccaacatgttca

SEQ ID NO: 205556 - DNA, 25 bp, Probe sequence
gttaaaaggatgcggcggttgcctt

SEQ ID NO: 205557 - DNA, 25 bp, Probe sequence
attaacacaccaaacgttgcagaag

SEQ ID NO: 205558 - DNA, 25 bp, Probe sequence
atcatcaatccacgcaacctaagac

SEQ ID NO: 205559 - DNA, 25 bp, Probe sequence
atcagcctgttcaatgatgtttagt

SEQ ID NO: 205560 - DNA, 25 bp, Probe sequence
atgttaaaaggatgcggcggttgcc

SEQ ID NO: 205561 - DNA, 25 bp, Probe sequence
atcatcaaaaacgcaattaactcaa

SEQ ID NO: 205562 - DNA, 25 bp, Probe sequence
atcttattatcagcctgttcaatga

SEQ ID NO: 205563 - DNA, 25 bp, Probe sequence
atccgaatggtgtcactgccgatca

SEQ ID NO: 205564 - DNA, 25 bp, Probe sequence
aggatttacaatcaaccgaagaagt

SEQ ID NO: 205565 - DNA, 25 bp, Probe sequence
agcctgttcaatgatgtttagtaat

SEQ ID NO: 205566 - DNA, 25 bp, Probe sequence
acagagaacaacaagaatcaaaacc

SEQ ID NO: 205567 - DNA, 25 bp, Probe sequence
aaaggatgcggcggttgccttattt

SEQ ID NO: 205568 - DNA, 25 bp, Probe sequence
aaaaggatgcggcggttgccttatt

SEQ ID NO: 205569 - DNA, 25 bp, Probe sequence
aatcaatcatcaaaaacgcaattaa

SEQ ID NO: 205570 - DNA, 25 bp, Probe sequence
cttattatcagcctgttcaatgatg

SEQ ID NO: 205571 - DNA, 25 bp, Probe sequence
cctgttcaatgatgtttagtaataa

SEQ ID NO: 205572 - DNA, 25 bp, Probe sequence
gctaattgtaagcaacttagacaag

SEQ ID NO: 205573 - DNA, 25 bp, Probe sequence
gcaacaatcatttgctaattgtaag

SEQ ID NO: 205574 - DNA, 25 bp, Probe sequence
gaggagatttacctttgaatacaga

SEQ ID NO: 205575 - DNA, 25 bp, Probe sequence
gatttacaatcaaccgaagaagtac

SEQ ID NO: 205576 - DNA, 25 bp, Probe sequence
gatttacctttgaatacagagaaca

SEQ ID NO: 205577 - DNA, 25 bp, Probe sequence
ggagatttacctttgaatacagaga

SEQ ID NO: 205578 - DNA, 25 bp, Probe sequence
tccgaatggtgtcactgccgatcat

SEQ ID NO: 205579 - DNA, 25 bp, Probe sequence
tcttattatcagcctgttcaatgat

SEQ ID NO: 205580 - DNA, 25 bp, Probe sequence
tcactgccgatcatccagcatatcg

SEQ ID NO: 205581 - DNA, 25 bp, Probe sequence
tcagcctgttcaatgatgtttagta

SEQ ID NO: 205582 - DNA, 25 bp, Probe sequence
tcaaaaacgcaattaactcaaaaag

SEQ ID NO: 205583 - DNA, 25 bp, Probe sequence
tatccgaatggtgtcactgccgatc

SEQ ID NO: 205584 - DNA, 25 bp, Probe sequence
taaaaggatgcggcggttgccttat

SEQ ID NO: 205585 - DNA, 25 bp, Probe sequence
tattatcagcctgttcaatgatgtt

SEQ ID NO: 205586 - DNA, 25 bp, Probe sequence
tttagtaataatgacaattccacta

SEQ ID NO: 205587 - DNA, 25 bp, Probe sequence
ttatcagcctgttcaatgatgttta

SEQ ID NO: 205588 - DNA, 25 bp, Probe sequence
ttacctttgaatacagagaacaaca

SEQ ID NO: 205589 - DNA, 25 bp, Probe sequence
ttaacacaccaaacgttgcagaaga

SEQ ID NO: 205590 - DNA, 25 bp, Probe sequence
attatcatcggtatttcagcttgta

SEQ ID NO: 205591 - DNA, 25 bp, Probe sequence
atttagcgtcaagaagattacattt

SEQ ID NO: 205592 - DNA, 25 bp, Probe sequence
atttctagtttatttagcgtcaaga

SEQ ID NO: 205593 - DNA, 25 bp, Probe sequence
atttgtcgttgctgatgtgacgatt

SEQ ID NO: 205594 - DNA, 25 bp, Probe sequence
atcatcggtatttcagcttgtacag

SEQ ID NO: 205595 - DNA, 25 bp, Probe sequence
accagcaatacggacaaaagaaatc

SEQ ID NO: 205596 - DNA, 25 bp, Probe sequence
acaattccaagctttccaaaatcaa

SEQ ID NO: 205597 - DNA, 25 bp, Probe sequence
aaaattcatttttcttacagcgtat

SEQ ID NO: 205598 - DNA, 25 bp, Probe sequence
aatgggaacaattccaagctttcca

SEQ ID NO: 205599 - DNA, 25 bp, Probe sequence
aattcatttttcttacagcgtataa

SEQ ID NO: 205600 - DNA, 25 bp, Probe sequence
aattccaagctttccaaaatcaaca

SEQ ID NO: 205601 - DNA, 25 bp, Probe sequence
catcggtatttcagcttgtacagct

SEQ ID NO: 205602 - DNA, 25 bp, Probe sequence
catttttcttacagcgtataaatcc

SEQ ID NO: 205603 - DNA, 25 bp, Probe sequence
cggtatttcagcttgtacagctggt

SEQ ID NO: 205604 - DNA, 25 bp, Probe sequence
gaagcgttaacaattgatagttcaa

SEQ ID NO: 205605 - DNA, 25 bp, Probe sequence
gaacaattccaagctttccaaaatc

SEQ ID NO: 205606 - DNA, 25 bp, Probe sequence
gaaaacatagccaacgcaaaagata

SEQ ID NO: 205607 - DNA, 25 bp, Probe sequence
gaaatctaaaaaaggatggttctgg

SEQ ID NO: 205608 - DNA, 25 bp, Probe sequence
gacaagcaagatacagaagtagctg

SEQ ID NO: 205609 - DNA, 25 bp, Probe sequence
gattacatttgatttatccgatgct

SEQ ID NO: 205610 - DNA, 25 bp, Probe sequence
gttgctgatgtgacgattaaaaaca

SEQ ID NO: 205611 - DNA, 25 bp, Probe sequence
gttatttctagtttatttagcgtca

SEQ ID NO: 205612 - DNA, 25 bp, Probe sequence
gtaaaattgttttcgatgtgtcaga

SEQ ID NO: 205613 - DNA, 25 bp, Probe sequence
tacatttgatttatccgatgctaaa

SEQ ID NO: 205614 - DNA, 25 bp, Probe sequence
gtgtcagaaaacatagccaacgcaa

SEQ ID NO: 205615 - DNA, 25 bp, Probe sequence
ggtgataaaacatttgaagcagata

SEQ ID NO: 205616 - DNA, 25 bp, Probe sequence
tgatttatccgatgctaaaaaaaca

SEQ ID NO: 205617 - DNA, 25 bp, Probe sequence
tgcgagttcaaatagcgataatgta

SEQ ID NO: 205618 - DNA, 25 bp, Probe sequence
tagtttatttagcgtcaagaagatt

SEQ ID NO: 205619 - DNA, 25 bp, Probe sequence
ttatgaagcttcggctactacacct

SEQ ID NO: 205620 - DNA, 25 bp, Probe sequence
tatgaagcttcggctactacacctg

SEQ ID NO: 205621 - DNA, 25 bp, Probe sequence
tttccaaaatcaacaaaaccaacag

SEQ ID NO: 205622 - DNA, 25 bp, Probe sequence
ttccaagctttccaaaatcaacaaa

SEQ ID NO: 205623 - DNA, 25 bp, Probe sequence
ttgtcgttgctgatgtgacgattaa

SEQ ID NO: 205624 - DNA, 25 bp, Probe sequence
attaatatttttgatgatatgtcag

SEQ ID NO: 205625 - DNA, 25 bp, Probe sequence
attatgttgaacatctagtccgcga

SEQ ID NO: 205626 - DNA, 25 bp, Probe sequence
atattatgttgaacatctagtccgc

SEQ ID NO: 205627 - DNA, 25 bp, Probe sequence
atatttttgatgatatgtcagaaaa

SEQ ID NO: 205628 - DNA, 25 bp, Probe sequence
atgaatattatgttgaacatctagt

SEQ ID NO: 205629 - DNA, 25 bp, Probe sequence
atgttgaacatctagtccgcgatgc

SEQ ID NO: 205630 - DNA, 25 bp, Probe sequence
acatctagtccgcgatgcagttggc

SEQ ID NO: 205631 - DNA, 25 bp, Probe sequence
agaagaatttgaagcatttaaaaag

SEQ ID NO: 205632 - DNA, 25 bp, Probe sequence
acatgaatattatgttgaacatcta

SEQ ID NO: 205633 - DNA, 25 bp, Probe sequence
aacatctagtccgcgatgcagttgg

SEQ ID NO: 205634 - DNA, 25 bp, Probe sequence
aatattatgttgaacatctagtccg

SEQ ID NO: 205635 - DNA, 25 bp, Probe sequence
aatatttttgatgatatgtcagaaa

SEQ ID NO: 205636 - DNA, 25 bp, Probe sequence
catctagtccgcgatgcagttggca

SEQ ID NO: 205637 - DNA, 25 bp, Probe sequence
catgaatattatgttgaacatctag

SEQ ID NO: 205638 - DNA, 25 bp, Probe sequence
gcatttaaaaagagaagccctaaat

SEQ ID NO: 205639 - DNA, 25 bp, Probe sequence
gaatattatgttgaacatctagtcc

SEQ ID NO: 205640 - DNA, 25 bp, Probe sequence
gaagaatttgaagcatttaaaaaga

SEQ ID NO: 205641 - DNA, 25 bp, Probe sequence
gaagcatttaaaaagagaagcccta

SEQ ID NO: 205642 - DNA, 25 bp, Probe sequence
gaacatctagtccgcgatgcagttg

SEQ ID NO: 205643 - DNA, 25 bp, Probe sequence
gttgaacatctagtccgcgatgcag

SEQ ID NO: 205644 - DNA, 25 bp, Probe sequence
gttcgaaacgattacaaagcaagag

SEQ ID NO: 205645 - DNA, 25 bp, Probe sequence
ggtgctaatcaacataaagaaaata

SEQ ID NO: 205646 - DNA, 25 bp, Probe sequence
tgttgaacatctagtccgcgatgca

SEQ ID NO: 205647 - DNA, 25 bp, Probe sequence
tgaacatctagtccgcgatgcagtt

SEQ ID NO: 205648 - DNA, 25 bp, Probe sequence
tgaatattatgttgaacatctagtc

SEQ ID NO: 205649 - DNA, 25 bp, Probe sequence
tctagtccgcgatgcagttggcaca

SEQ ID NO: 205650 - DNA, 25 bp, Probe sequence
taatatttttgatgatatgtcagaa

SEQ ID NO: 205651 - DNA, 25 bp, Probe sequence
tatgttgaacatctagtccgcgatg

SEQ ID NO: 205652 - DNA, 25 bp, Probe sequence
tatttttgatgatatgtcagaaaaa

SEQ ID NO: 205653 - DNA, 25 bp, Probe sequence
tattatgttgaacatctagtccgcg

SEQ ID NO: 205654 - DNA, 25 bp, Probe sequence
ttatgttgaacatctagtccgcgat

SEQ ID NO: 205655 - DNA, 25 bp, Probe sequence
ttaatatttttgatgatatgtcaga

SEQ ID NO: 205656 - DNA, 25 bp, Probe sequence
ttcgaaacgattacaaagcaagagg

SEQ ID NO: 205657 - DNA, 25 bp, Probe sequence
ttgaacatctagtccgcgatgcagt

SEQ ID NO: 205658 - DNA, 25 bp, Probe sequence
atatgtcattaaagaaggttatcaa

SEQ ID NO: 205659 - DNA, 25 bp, Probe sequence
atcaagatatttatttcctcaacaa

SEQ ID NO: 205660 - DNA, 25 bp, Probe sequence
agtgtctggcgtggcaaacatatta

SEQ ID NO: 205661 - DNA, 25 bp, Probe sequence
agtaagaagtgtctggcgtggcaaa

SEQ ID NO: 205662 - DNA, 25 bp, Probe sequence
agaagtgtctggcgtggcaaacata

SEQ ID NO: 205663 - DNA, 25 bp, Probe sequence
aagaagtgtctggcgtggcaaacat

SEQ ID NO: 205664 - DNA, 25 bp, Probe sequence
aagtaagaagtgtctggcgtggcaa

SEQ ID NO: 205665 - DNA, 25 bp, Probe sequence
aagtgtctggcgtggcaaacatatt

SEQ ID NO: 205666 - DNA, 25 bp, Probe sequence
ctggcgtggcaaacatattattaga

SEQ ID NO: 205667 - DNA, 25 bp, Probe sequence
cgaagtaagaagtgtctggcgtggc

SEQ ID NO: 205668 - DNA, 25 bp, Probe sequence
gcgatcaaagacaagaagctacaaa

SEQ ID NO: 205669 - DNA, 25 bp, Probe sequence
gaagtgtctggcgtggcaaacatat

SEQ ID NO: 205670 - DNA, 25 bp, Probe sequence
gaagtaagaagtgtctggcgtggca

SEQ ID NO: 205671 - DNA, 25 bp, Probe sequence
gaagctacaaaatatgtcattaaag

SEQ ID NO: 205672 - DNA, 25 bp, Probe sequence
gagttaaagatggtttgttaggttg

SEQ ID NO: 205673 - DNA, 25 bp, Probe sequence
gatggtttgttaggttggagaaaag

SEQ ID NO: 205674 - DNA, 25 bp, Probe sequence
gataatgtttggcgatcaaagacaa

SEQ ID NO: 205675 - DNA, 25 bp, Probe sequence
gttatcaagatatttatttcctcaa

SEQ ID NO: 205676 - DNA, 25 bp, Probe sequence
gtaagaagtgtctggcgtggcaaac

SEQ ID NO: 205677 - DNA, 25 bp, Probe sequence
gtctggcgtggcaaacatattatta

SEQ ID NO: 205678 - DNA, 25 bp, Probe sequence
gtgtctggcgtggcaaacatattat

SEQ ID NO: 205679 - DNA, 25 bp, Probe sequence
gtgggattgataatgtttggcgatc

SEQ ID NO: 205680 - DNA, 25 bp, Probe sequence
gtggcaaacatattattagagttaa

SEQ ID NO: 205681 - DNA, 25 bp, Probe sequence
gggaatggtattatttcgaagtaag

SEQ ID NO: 205682 - DNA, 25 bp, Probe sequence
gggattgataatgtttggcgatcaa

SEQ ID NO: 205683 - DNA, 25 bp, Probe sequence
ggttatcaagatatttatttcctca

SEQ ID NO: 205684 - DNA, 25 bp, Probe sequence
ggcgtggcaaacatattattagagt

SEQ ID NO: 205685 - DNA, 25 bp, Probe sequence
tggcgatcaaagacaagaagctaca

SEQ ID NO: 205686 - DNA, 25 bp, Probe sequence
tctggcgtggcaaacatattattag

SEQ ID NO: 205687 - DNA, 25 bp, Probe sequence
tcaagatatttatttcctcaacaaa

SEQ ID NO: 205688 - DNA, 25 bp, Probe sequence
taagaagtgtctggcgtggcaaaca

SEQ ID NO: 205689 - DNA, 25 bp, Probe sequence
taaagatggtttgttaggttggaga

SEQ ID NO: 205690 - DNA, 25 bp, Probe sequence
tatcaagatatttatttcctcaaca

SEQ ID NO: 205691 - DNA, 25 bp, Probe sequence
ttatcaagatatttatttcctcaac

SEQ ID NO: 205692 - DNA, 25 bp, Probe sequence
attatgtcaattaaactttacaaca

SEQ ID NO: 205693 - DNA, 25 bp, Probe sequence
atttatataattttcgatacttaga

SEQ ID NO: 205694 - DNA, 25 bp, Probe sequence
atatcttagtgcaagcacctagatt

SEQ ID NO: 205695 - DNA, 25 bp, Probe sequence
atcttagtgcaagcacctagattat

SEQ ID NO: 205696 - DNA, 25 bp, Probe sequence
atcctaaatatatcaagttatccaa

SEQ ID NO: 205697 - DNA, 25 bp, Probe sequence
atggggtattcttagagatcgttta

SEQ ID NO: 205698 - DNA, 25 bp, Probe sequence
atggcatggggtattcttagagatc

SEQ ID NO: 205699 - DNA, 25 bp, Probe sequence
agtgcaagcacctagattattaaat

SEQ ID NO: 205700 - DNA, 25 bp, Probe sequence
actgtttatttatataattttcgat

SEQ ID NO: 205701 - DNA, 25 bp, Probe sequence
aaatcctaaatatatcaagttatcc

SEQ ID NO: 205702 - DNA, 25 bp, Probe sequence
aaaatggcatggggtattcttagag

SEQ ID NO: 205703 - DNA, 25 bp, Probe sequence
aatggttgggttgattctaaaacag

SEQ ID NO: 205704 - DNA, 25 bp, Probe sequence
aataatatcttagtgcaagcaccta

SEQ ID NO: 205705 - DNA, 25 bp, Probe sequence
aattttcgatacttagattatataa

SEQ ID NO: 205706 - DNA, 25 bp, Probe sequence
cagagaaaagttttatcaaataccg

SEQ ID NO: 205707 - DNA, 25 bp, Probe sequence
caagttatccaatgatgcaaaaatg

SEQ ID NO: 205708 - DNA, 25 bp, Probe sequence
caagcacctagattattaaataaac

SEQ ID NO: 205709 - DNA, 25 bp, Probe sequence
cttagagatcgtttagatttatcaa

SEQ ID NO: 205710 - DNA, 25 bp, Probe sequence
gcaaaaatggcatggggtattctta

SEQ ID NO: 205711 - DNA, 25 bp, Probe sequence
gcatggggtattcttagagatcgtt

SEQ ID NO: 205712 - DNA, 25 bp, Probe sequence
gaataatatcttagtgcaagcacct

SEQ ID NO: 205713 - DNA, 25 bp, Probe sequence
gaaagaggtttttattatgtcaatt

SEQ ID NO: 205714 - DNA, 25 bp, Probe sequence
gagatcgtttagatttatcaattaa

SEQ ID NO: 205715 - DNA, 25 bp, Probe sequence
gaggaatacagagaaaagttttatc

SEQ ID NO: 205716 - DNA, 25 bp, Probe sequence
gtcaattaaactttacaacataaat

SEQ ID NO: 205717 - DNA, 25 bp, Probe sequence
gggttgattctaaaacaggtaatat

SEQ ID NO: 205718 - DNA, 25 bp, Probe sequence
ggggtattcttagagatcgtttaga

SEQ ID NO: 205719 - DNA, 25 bp, Probe sequence
ggtattcttagagatcgtttagatt

SEQ ID NO: 205720 - DNA, 25 bp, Probe sequence
ggcatggggtattcttagagatcgt

SEQ ID NO: 205721 - DNA, 25 bp, Probe sequence
tggcatggggtattcttagagatcg

SEQ ID NO: 205722 - DNA, 25 bp, Probe sequence
tggttgggttgattctaaaacaggt

SEQ ID NO: 205723 - DNA, 25 bp, Probe sequence
tgcaagcacctagattattaaataa

SEQ ID NO: 205724 - DNA, 25 bp, Probe sequence
tcggaaagaggtttttattatgtca

SEQ ID NO: 205725 - DNA, 25 bp, Probe sequence
tatatcaagttatccaatgatgcaa

SEQ ID NO: 205726 - DNA, 25 bp, Probe sequence
atacttgtgatgtgatctgtgtaca

SEQ ID NO: 205727 - DNA, 25 bp, Probe sequence
atgaaaatacttgtgatgtgatctg

SEQ ID NO: 205728 - DNA, 25 bp, Probe sequence
atgagtgttgcttcaacttcacatc

SEQ ID NO: 205729 - DNA, 25 bp, Probe sequence
agtgttgcttcaacttcacatcatt

SEQ ID NO: 205730 - DNA, 25 bp, Probe sequence
acttcacatcatttaaggcttttat

SEQ ID NO: 205731 - DNA, 25 bp, Probe sequence
acttgtgatgtgatctgtgtacatg

SEQ ID NO: 205732 - DNA, 25 bp, Probe sequence
aaatacttgtgatgtgatctgtgta

SEQ ID NO: 205733 - DNA, 25 bp, Probe sequence
aaatgagtgttgcttcaacttcaca

SEQ ID NO: 205734 - DNA, 25 bp, Probe sequence
aatgaggtacttgatttttataaag

SEQ ID NO: 205735 - DNA, 25 bp, Probe sequence
caatgctttaagttttttagaagat

SEQ ID NO: 205736 - DNA, 25 bp, Probe sequence
caacttcacatcatttaaggctttt

SEQ ID NO: 205737 - DNA, 25 bp, Probe sequence
cacatcatttaaggcttttatataa

SEQ ID NO: 205738 - DNA, 25 bp, Probe sequence
catgaggataaagttaacaatgctt

SEQ ID NO: 205739 - DNA, 25 bp, Probe sequence
gcttcaacttcacatcatttaaggc

SEQ ID NO: 205740 - DNA, 25 bp, Probe sequence
gaaaatgagtgttgcttcaacttca

SEQ ID NO: 205741 - DNA, 25 bp, Probe sequence
gaaagatggcatattattttattaa

SEQ ID NO: 205742 - DNA, 25 bp, Probe sequence
gaaattgaaaatcatattatctttg

SEQ ID NO: 205743 - DNA, 25 bp, Probe sequence
gagagtttttctctaaaaatcagga

SEQ ID NO: 205744 - DNA, 25 bp, Probe sequence
gagtttttctctaaaaatcaggagg

SEQ ID NO: 205745 - DNA, 25 bp, Probe sequence
gagtgttgcttcaacttcacatcat

SEQ ID NO: 205746 - DNA, 25 bp, Probe sequence
gatctgtgtacatgaggataaagtt

SEQ ID NO: 205747 - DNA, 25 bp, Probe sequence
gttgcttcaacttcacatcatttaa

SEQ ID NO: 205748 - DNA, 25 bp, Probe sequence
gtttgtgatatttctttgatattga

SEQ ID NO: 205749 - DNA, 25 bp, Probe sequence
gtgatgtgatctgtgtacatgagga

SEQ ID NO: 205750 - DNA, 25 bp, Probe sequence
gtgttgcttcaacttcacatcattt

SEQ ID NO: 205751 - DNA, 25 bp, Probe sequence
gtgtttgtgatatttctttgatatt

SEQ ID NO: 205752 - DNA, 25 bp, Probe sequence
gtgtgtttgtgatatttctttgata

SEQ ID NO: 205753 - DNA, 25 bp, Probe sequence
ggtacttgatttttataaagatgga

SEQ ID NO: 205754 - DNA, 25 bp, Probe sequence
tgtgatctgtgtacatgaggataaa

SEQ ID NO: 205755 - DNA, 25 bp, Probe sequence
tgttgcttcaacttcacatcattta

SEQ ID NO: 205756 - DNA, 25 bp, Probe sequence
tgagtgttgcttcaacttcacatca

SEQ ID NO: 205757 - DNA, 25 bp, Probe sequence
ttcaacttcacatcatttaaggctt

SEQ ID NO: 205758 - DNA, 25 bp, Probe sequence
ttcacatcatttaaggcttttatat

SEQ ID NO: 205759 - DNA, 25 bp, Probe sequence
ttgcttcaacttcacatcatttaag

SEQ ID NO: 205760 - DNA, 25 bp, Probe sequence
atgatcaaaccaacagtcattgatt

SEQ ID NO: 205761 - DNA, 25 bp, Probe sequence
atgtcaaatgatcaaaccaacagtc

SEQ ID NO: 205762 - DNA, 25 bp, Probe sequence
atggatgcaagccaccaaagcacgt

SEQ ID NO: 205763 - DNA, 25 bp, Probe sequence
agcatggatgcaagccaccaaagca

SEQ ID NO: 205764 - DNA, 25 bp, Probe sequence
accagcatggatgcaagccaccaaa

SEQ ID NO: 205765 - DNA, 25 bp, Probe sequence
accaacagtcattgattggtacatt

SEQ ID NO: 205766 - DNA, 25 bp, Probe sequence
aaatgatcaaaccaacagtcattga

SEQ ID NO: 205767 - DNA, 25 bp, Probe sequence
aaaccaacagtcattgattggtaca

SEQ ID NO: 205768 - DNA, 25 bp, Probe sequence
aaaccagcatggatgcaagccacca

SEQ ID NO: 205769 - DNA, 25 bp, Probe sequence
aaaaccagcatggatgcaagccacc

SEQ ID NO: 205770 - DNA, 25 bp, Probe sequence
aaccagcatggatgcaagccaccaa

SEQ ID NO: 205771 - DNA, 25 bp, Probe sequence
aaccaacagtcattgattggtacat

SEQ ID NO: 205772 - DNA, 25 bp, Probe sequence
aatatagtcaattattagacgctac

SEQ ID NO: 205773 - DNA, 25 bp, Probe sequence
caaaaccagcatggatgcaagccac

SEQ ID NO: 205774 - DNA, 25 bp, Probe sequence
cagcatggatgcaagccaccaaagc

SEQ ID NO: 205775 - DNA, 25 bp, Probe sequence
caccaaagcacgtgcctatttgcct

SEQ ID NO: 205776 - DNA, 25 bp, Probe sequence
catggatgcaagccaccaaagcacg

SEQ ID NO: 205777 - DNA, 25 bp, Probe sequence
ccagcatggatgcaagccaccaaag

SEQ ID NO: 205778 - DNA, 25 bp, Probe sequence
ccaccaaagcacgtgcctatttgcc

SEQ ID NO: 205779 - DNA, 25 bp, Probe sequence
ccaaaaccagcatggatgcaagcca

SEQ ID NO: 205780 - DNA, 25 bp, Probe sequence
gccaccaaagcacgtgcctatttgc

SEQ ID NO: 205781 - DNA, 25 bp, Probe sequence
gcatttaattttacatgcaattatt

SEQ ID NO: 205782 - DNA, 25 bp, Probe sequence
gcatggatgcaagccaccaaagcac

SEQ ID NO: 205783 - DNA, 25 bp, Probe sequence
gaatatagtcaattattagacgcta

SEQ ID NO: 205784 - DNA, 25 bp, Probe sequence
gatcaaaccaacagtcattgattgg

SEQ ID NO: 205785 - DNA, 25 bp, Probe sequence
gattatgtcaaatgatcaaaccaac

SEQ ID NO: 205786 - DNA, 25 bp, Probe sequence
gtcaaatgatcaaaccaacagtcat

SEQ ID NO: 205787 - DNA, 25 bp, Probe sequence
tggatgcaagccaccaaagcacgtg

SEQ ID NO: 205788 - DNA, 25 bp, Probe sequence
tgtcaaatgatcaaaccaacagtca

SEQ ID NO: 205789 - DNA, 25 bp, Probe sequence
tccaaaaccagcatggatgcaagcc

SEQ ID NO: 205790 - DNA, 25 bp, Probe sequence
tcaaaccaacagtcattgattggta

SEQ ID NO: 205791 - DNA, 25 bp, Probe sequence
tactcattaaaattgacgatatgtt

SEQ ID NO: 205792 - DNA, 25 bp, Probe sequence
ttatgtcaaatgatcaaaccaacag

SEQ ID NO: 205793 - DNA, 25 bp, Probe sequence
ttaattttacatgcaattattacaa

SEQ ID NO: 205794 - DNA, 25 bp, Probe sequence
atttttatttcatcaacttatttag

SEQ ID NO: 205795 - DNA, 25 bp, Probe sequence
atacaaagtgtacctagtgaaatta

SEQ ID NO: 205796 - DNA, 25 bp, Probe sequence
atggatcaatgaatcagatgcagtg

SEQ ID NO: 205797 - DNA, 25 bp, Probe sequence
agcacacaccatttgatgatagtta

SEQ ID NO: 205798 - DNA, 25 bp, Probe sequence
agctcaagccggtcattttaaatta

SEQ ID NO: 205799 - DNA, 25 bp, Probe sequence
acctatatatgtttttgagatgaat

SEQ ID NO: 205800 - DNA, 25 bp, Probe sequence
aaattataaggctacgctagtcgat

SEQ ID NO: 205801 - DNA, 25 bp, Probe sequence
aaagccattagctcaagccggtcat

SEQ ID NO: 205802 - DNA, 25 bp, Probe sequence
aactcaagtagtaaaagccaatggg

SEQ ID NO: 205803 - DNA, 25 bp, Probe sequence
aactttttatttccagcacacacca

SEQ ID NO: 205804 - DNA, 25 bp, Probe sequence
aagcatctaccgaatccgcggaaaa

SEQ ID NO: 205805 - DNA, 25 bp, Probe sequence
aagtatctcagactttaatacaaag

SEQ ID NO: 205806 - DNA, 25 bp, Probe sequence
caagccggtcattttaaattaagct

SEQ ID NO: 205807 - DNA, 25 bp, Probe sequence
cagtaataatattccagcaggtatg

SEQ ID NO: 205808 - DNA, 25 bp, Probe sequence
tctaccgaatccgcggaaaagtcta

SEQ ID NO: 205809 - DNA, 25 bp, Probe sequence
gccattagctcaagccggtcatttt

SEQ ID NO: 205810 - DNA, 25 bp, Probe sequence
gcagtagtagaagcagttttaaaca

SEQ ID NO: 205811 - DNA, 25 bp, Probe sequence
gaataaagcatctaccgaatccgcg

SEQ ID NO: 205812 - DNA, 25 bp, Probe sequence
gaagatatagaaaactacctgctaa

SEQ ID NO: 205813 - DNA, 25 bp, Probe sequence
gaaaactacctgctaaattatgaaa

SEQ ID NO: 205814 - DNA, 25 bp, Probe sequence
gagcgtcaagcagtagtagaagcag

SEQ ID NO: 205815 - DNA, 25 bp, Probe sequence
gatgcagtgatattattgttaggtt

SEQ ID NO: 205816 - DNA, 25 bp, Probe sequence
gatttaatagaagagcgtcaagcag

SEQ ID NO: 205817 - DNA, 25 bp, Probe sequence
gatttagatacatatgattttttga

SEQ ID NO: 205818 - DNA, 25 bp, Probe sequence
gttaggttctagttatggaacaatt

SEQ ID NO: 205819 - DNA, 25 bp, Probe sequence
gtatggaactttttaactcaagtag

SEQ ID NO: 205820 - DNA, 25 bp, Probe sequence
gtgatattattgttaggttctagtt

SEQ ID NO: 205821 - DNA, 25 bp, Probe sequence
ggagtacaattttgctaaatcttta

SEQ ID NO: 205822 - DNA, 25 bp, Probe sequence
ggatggataagagtacaggattgtg

SEQ ID NO: 205823 - DNA, 25 bp, Probe sequence
ggaaataataacacaatggatcaat

SEQ ID NO: 205824 - DNA, 25 bp, Probe sequence
ggaatgtgataggtgcttaaaagca

SEQ ID NO: 205825 - DNA, 25 bp, Probe sequence
ggctacgctagtcgatattaaagga

SEQ ID NO: 205826 - DNA, 25 bp, Probe sequence
tttccagcacacaccatttgatgat

SEQ ID NO: 205827 - DNA, 25 bp, Probe sequence
tttatttccagcacacaccatttga

SEQ ID NO: 205828 - DNA, 25 bp, Probe sequence
attggactgatgcgttcaatatccg

SEQ ID NO: 205829 - DNA, 25 bp, Probe sequence
atatccgaagttaagcaactaaaca

SEQ ID NO: 205830 - DNA, 25 bp, Probe sequence
atccgaagttaagcaactaaacatt

SEQ ID NO: 205831 - DNA, 25 bp, Probe sequence
atgcgttcaatatccgaagttaagc

SEQ ID NO: 205832 - DNA, 25 bp, Probe sequence
actgatgcgttcaatatccgaagtt

SEQ ID NO: 205833 - DNA, 25 bp, Probe sequence
actaaaaaaggctctatgtcaaatt

SEQ ID NO: 205834 - DNA, 25 bp, Probe sequence
aaattggactgatgcgttcaatatc

SEQ ID NO: 205835 - DNA, 25 bp, Probe sequence
aaaggctctatgtcaaattggactg

SEQ ID NO: 205836 - DNA, 25 bp, Probe sequence
aaaaaggctctatgtcaaattggac

SEQ ID NO: 205837 - DNA, 25 bp, Probe sequence
aaaaaaggctctatgtcaaattgga

SEQ ID NO: 205838 - DNA, 25 bp, Probe sequence
aaaaggctctatgtcaaattggact

SEQ ID NO: 205839 - DNA, 25 bp, Probe sequence
aactaaaaaaggctctatgtcaaat

SEQ ID NO: 205840 - DNA, 25 bp, Probe sequence
aattggactgatgcgttcaatatcc

SEQ ID NO: 205841 - DNA, 25 bp, Probe sequence
caatatccgaagttaagcaactaaa

SEQ ID NO: 205842 - DNA, 25 bp, Probe sequence
caaattggactgatgcgttcaatat

SEQ ID NO: 205843 - DNA, 25 bp, Probe sequence
ctaaaaaaggctctatgtcaaattg

SEQ ID NO: 205844 - DNA, 25 bp, Probe sequence
ctgatgcgttcaatatccgaagtta

SEQ ID NO: 205845 - DNA, 25 bp, Probe sequence
cgttcaatatccgaagttaagcaac

SEQ ID NO: 205846 - DNA, 25 bp, Probe sequence
ccgaagttaagcaactaaacattgc

SEQ ID NO: 205847 - DNA, 25 bp, Probe sequence
gcgttcaatatccgaagttaagcaa

SEQ ID NO: 205848 - DNA, 25 bp, Probe sequence
gaactaaaaaaggctctatgtcaaa

SEQ ID NO: 205849 - DNA, 25 bp, Probe sequence
gactgatgcgttcaatatccgaagt

SEQ ID NO: 205850 - DNA, 25 bp, Probe sequence
gatgcgttcaatatccgaagttaag

SEQ ID NO: 205851 - DNA, 25 bp, Probe sequence
gttcaatatccgaagttaagcaact

SEQ ID NO: 205852 - DNA, 25 bp, Probe sequence
ggactgatgcgttcaatatccgaag

SEQ ID NO: 205853 - DNA, 25 bp, Probe sequence
tggactgatgcgttcaatatccgaa

SEQ ID NO: 205854 - DNA, 25 bp, Probe sequence
tgatgcgttcaatatccgaagttaa

SEQ ID NO: 205855 - DNA, 25 bp, Probe sequence
tgcgttcaatatccgaagttaagca

SEQ ID NO: 205856 - DNA, 25 bp, Probe sequence
tcaatatccgaagttaagcaactaa

SEQ ID NO: 205857 - DNA, 25 bp, Probe sequence
taaaaaaggctctatgtcaaattgg

SEQ ID NO: 205858 - DNA, 25 bp, Probe sequence
taaagagaaacatcaagaactaaaa

SEQ ID NO: 205859 - DNA, 25 bp, Probe sequence
tatccgaagttaagcaactaaacat

SEQ ID NO: 205860 - DNA, 25 bp, Probe sequence
ttcaatatccgaagttaagcaacta

SEQ ID NO: 205861 - DNA, 25 bp, Probe sequence
ttggactgatgcgttcaatatccga

SEQ ID NO: 205862 - DNA, 25 bp, Probe sequence
attcttcagatagctcttctccagt

SEQ ID NO: 205863 - DNA, 25 bp, Probe sequence
atttattcttcagatagctcttctc

SEQ ID NO: 205864 - DNA, 25 bp, Probe sequence
atggatattctagcagcgtttctgc

SEQ ID NO: 205865 - DNA, 25 bp, Probe sequence
atggccaaaaagtatctatttattc

SEQ ID NO: 205866 - DNA, 25 bp, Probe sequence
agtaacgagtacgaaacaatcaacg

SEQ ID NO: 205867 - DNA, 25 bp, Probe sequence
agattcattacatgattctgatatt

SEQ ID NO: 205868 - DNA, 25 bp, Probe sequence
acgcttcatcaacaaaatcacaatt

SEQ ID NO: 205869 - DNA, 25 bp, Probe sequence
aaatactctaactaaacgcttcatc

SEQ ID NO: 205870 - DNA, 25 bp, Probe sequence
aaatacatggaattctctaaccgag

SEQ ID NO: 205871 - DNA, 25 bp, Probe sequence
aaatgtctacgatgactttaacaaa

SEQ ID NO: 205872 - DNA, 25 bp, Probe sequence
aacacaatctatagactttaaagga

SEQ ID NO: 205873 - DNA, 25 bp, Probe sequence
aactaaggaaaatgtctacgatgac

SEQ ID NO: 205874 - DNA, 25 bp, Probe sequence
aagcaatggatattctagcagcgtt

SEQ ID NO: 205875 - DNA, 25 bp, Probe sequence
cagcgtttctgctcctggaaatgat

SEQ ID NO: 205876 - DNA, 25 bp, Probe sequence
ctcttctccagtctcgggtaaagtg

SEQ ID NO: 205877 - DNA, 25 bp, Probe sequence
ctagcagcgtttctgctcctggaaa

SEQ ID NO: 205878 - DNA, 25 bp, Probe sequence
gcgtttctgctcctggaaatgatga

SEQ ID NO: 205879 - DNA, 25 bp, Probe sequence
gaaggagtaactagtggtggcgaaa

SEQ ID NO: 205880 - DNA, 25 bp, Probe sequence
gacagatggtcaattatggaaaaaa

SEQ ID NO: 205881 - DNA, 25 bp, Probe sequence
gatggaggccatctaacacaatcta

SEQ ID NO: 205882 - DNA, 25 bp, Probe sequence
gattctgatattattttaagtaacg

SEQ ID NO: 205883 - DNA, 25 bp, Probe sequence
gttgttaaaacggctaaagcagaag

SEQ ID NO: 205884 - DNA, 25 bp, Probe sequence
gtacgaaacaatcaacgttacttat

SEQ ID NO: 205885 - DNA, 25 bp, Probe sequence
gtcttggtttactacaaaatggcca

SEQ ID NO: 205886 - DNA, 25 bp, Probe sequence
gtggtggcgaaaatactctaactaa

SEQ ID NO: 205887 - DNA, 25 bp, Probe sequence
ggaggccatctaacacaatctatag

SEQ ID NO: 205888 - DNA, 25 bp, Probe sequence
ggccatctaacacaatctatagact

SEQ ID NO: 205889 - DNA, 25 bp, Probe sequence
tggaattctctaaccgagaagttaa

SEQ ID NO: 205890 - DNA, 25 bp, Probe sequence
tctaactaaacgcttcatcaacaaa

SEQ ID NO: 205891 - DNA, 25 bp, Probe sequence
ttctccagtctcgggtaaagtggga

SEQ ID NO: 205892 - DNA, 25 bp, Probe sequence
taaacgcttcatcaacaaaatcaca

SEQ ID NO: 205893 - DNA, 25 bp, Probe sequence
tactctaactaaacgcttcatcaac

SEQ ID NO: 205894 - DNA, 25 bp, Probe sequence
ttctagcagcgtttctgctcctgga

SEQ ID NO: 205895 - DNA, 25 bp, Probe sequence
ttctgctcctggaaatgatgatgga

SEQ ID NO: 205896 - DNA, 25 bp, Probe sequence
agggacgtattatccgagaacattt

SEQ ID NO: 205897 - DNA, 25 bp, Probe sequence
attccaataggattaggctcaatta

SEQ ID NO: 205898 - DNA, 25 bp, Probe sequence
atcgaagctgtatcgcagtcttgtt

SEQ ID NO: 205899 - DNA, 25 bp, Probe sequence
atgccagctgtaagtaatattcaag

SEQ ID NO: 205900 - DNA, 25 bp, Probe sequence
atgttcattctacgtgccaatcaag

SEQ ID NO: 205901 - DNA, 25 bp, Probe sequence
agcagtttgcggcaactattcgccc

SEQ ID NO: 205902 - DNA, 25 bp, Probe sequence
agttctttagagttaattgatgcat

SEQ ID NO: 205903 - DNA, 25 bp, Probe sequence
agttgaaccttgaacacacttatgt

SEQ ID NO: 205904 - DNA, 25 bp, Probe sequence
agagcgtacacaccatattcgccac

SEQ ID NO: 205905 - DNA, 25 bp, Probe sequence
acaggattttgtttatggtgccaat

SEQ ID NO: 205906 - DNA, 25 bp, Probe sequence
acagcaattgttatctggagaaata

SEQ ID NO: 205907 - DNA, 25 bp, Probe sequence
aaataatgacttacaacagcaattg

SEQ ID NO: 205908 - DNA, 25 bp, Probe sequence
aagaacaattagatcctcatttagt

SEQ ID NO: 205909 - DNA, 25 bp, Probe sequence
aagaccattattttggtgcgatttc

SEQ ID NO: 205910 - DNA, 25 bp, Probe sequence
gctgtatcgcagtcttgtttgacaa

SEQ ID NO: 205911 - DNA, 25 bp, Probe sequence
gctgaagtaatcgaagctgtatcgc

SEQ ID NO: 205912 - DNA, 25 bp, Probe sequence
gcatgatgcgaagcagtttgcggca

SEQ ID NO: 205913 - DNA, 25 bp, Probe sequence
gcagtcttgtttgacaacaggattt

SEQ ID NO: 205914 - DNA, 25 bp, Probe sequence
gaatcatcagatgaatttgtcatgt

SEQ ID NO: 205915 - DNA, 25 bp, Probe sequence
gaacacacttatgttgatggacaat

SEQ ID NO: 205916 - DNA, 25 bp, Probe sequence
gatgacggtaacttaacttcacatt

SEQ ID NO: 205917 - DNA, 25 bp, Probe sequence
gatggacaattggttgtcagtggac

SEQ ID NO: 205918 - DNA, 25 bp, Probe sequence
gattaggctcaattaaaagttcttt

SEQ ID NO: 205919 - DNA, 25 bp, Probe sequence
gattgtctaatccgatgaagtcatt

SEQ ID NO: 205920 - DNA, 25 bp, Probe sequence
gtagaagttgatgaagggacgtatt

SEQ ID NO: 205921 - DNA, 25 bp, Probe sequence
gtcagtggacgtatgccagctgtaa

SEQ ID NO: 205922 - DNA, 25 bp, Probe sequence
ggttgtcagtggacgtatgccagct

SEQ ID NO: 205923 - DNA, 25 bp, Probe sequence
ggacgtatgccagctgtaagtaata

SEQ ID NO: 205924 - DNA, 25 bp, Probe sequence
tctggagaaatattaggtgctaccg

SEQ ID NO: 205925 - DNA, 25 bp, Probe sequence
tacgtgccaatcaagatggtatcac

SEQ ID NO: 205926 - DNA, 25 bp, Probe sequence
taggtgctaccggattgtctaatcc

SEQ ID NO: 205927 - DNA, 25 bp, Probe sequence
tattatgcaatattagatgacggta

SEQ ID NO: 205928 - DNA, 25 bp, Probe sequence
tttgtcatgttcattctacgtgcca

SEQ ID NO: 205929 - DNA, 25 bp, Probe sequence
ttagatcctcatttagtagaagttg

SEQ ID NO: 205930 - DNA, 25 bp, Probe sequence
attaatgcctatacaggaacagaca

SEQ ID NO: 205931 - DNA, 25 bp, Probe sequence
atatgtcgtttttagagtataataa

SEQ ID NO: 205932 - DNA, 25 bp, Probe sequence
atcacaccctagttagaatagatat

SEQ ID NO: 205933 - DNA, 25 bp, Probe sequence
atcgctccgaaaagtcatattcaca

SEQ ID NO: 205934 - DNA, 25 bp, Probe sequence
agataggttttcaatttcaatcatt

SEQ ID NO: 205935 - DNA, 25 bp, Probe sequence
acttgaaagatttccccgacatcta

SEQ ID NO: 205936 - DNA, 25 bp, Probe sequence
aaagatacctatcacaccctagtta

SEQ ID NO: 205937 - DNA, 25 bp, Probe sequence
aaaaacaatagttgctagtcgaata

SEQ ID NO: 205938 - DNA, 25 bp, Probe sequence
aaaaggataggtttgcttatgaaat

SEQ ID NO: 205939 - DNA, 25 bp, Probe sequence
aacggtggtactcacgataatccag

SEQ ID NO: 205940 - DNA, 25 bp, Probe sequence
aatgtgtatatgtcgtttttagagt

SEQ ID NO: 205941 - DNA, 25 bp, Probe sequence
aatccagatggaacaatcgctccga

SEQ ID NO: 205942 - DNA, 25 bp, Probe sequence
aatcattttcaaagatacctatcac

SEQ ID NO: 205943 - DNA, 25 bp, Probe sequence
aatagatattaacggtggtactcac

SEQ ID NO: 205944 - DNA, 25 bp, Probe sequence
aatatccagaaactcatatcgatgt

SEQ ID NO: 205945 - DNA, 25 bp, Probe sequence
cagacatggctaaacttgatttaaa

SEQ ID NO: 205946 - DNA, 25 bp, Probe sequence
cccgacatctataacttgtataatg

SEQ ID NO: 205947 - DNA, 25 bp, Probe sequence
gctccgaaaagtcatattcacatat

SEQ ID NO: 205948 - DNA, 25 bp, Probe sequence
gatggaacaatcgctccgaaaagtc

SEQ ID NO: 205949 - DNA, 25 bp, Probe sequence
gatacctatcacaccctagttagaa

SEQ ID NO: 205950 - DNA, 25 bp, Probe sequence
gaaagatttccccgacatctataac

SEQ ID NO: 205951 - DNA, 25 bp, Probe sequence
gatttccccgacatctataacttgt

SEQ ID NO: 205952 - DNA, 25 bp, Probe sequence
gttgctagtcgaataaatgaaaggc

SEQ ID NO: 205953 - DNA, 25 bp, Probe sequence
gtactcacgataatccagatggaac

SEQ ID NO: 205954 - DNA, 25 bp, Probe sequence
ggtggtactcacgataatccagatg

SEQ ID NO: 205955 - DNA, 25 bp, Probe sequence
ggtttgcttatgaaattaacttgaa

SEQ ID NO: 205956 - DNA, 25 bp, Probe sequence
ggttttcaatttcaatcattttcaa

SEQ ID NO: 205957 - DNA, 25 bp, Probe sequence
ggaacaatcgctccgaaaagtcata

SEQ ID NO: 205958 - DNA, 25 bp, Probe sequence
ggaacagacatggctaaacttgatt

SEQ ID NO: 205959 - DNA, 25 bp, Probe sequence
tccagatggaacaatcgctccgaaa

SEQ ID NO: 205960 - DNA, 25 bp, Probe sequence
tccagaaactcatatcgatgtaaat

SEQ ID NO: 205961 - DNA, 25 bp, Probe sequence
taacttgaaagatttccccgacatc

SEQ ID NO: 205962 - DNA, 25 bp, Probe sequence
tacctatcacaccctagttagaata

SEQ ID NO: 205963 - DNA, 25 bp, Probe sequence
ttccccgacatctataacttgtata

SEQ ID NO: 205964 - DNA, 25 bp, Probe sequence
atataacgataaaactcacgaaatt

SEQ ID NO: 205965 - DNA, 25 bp, Probe sequence
ataggaagcagtggtgttgttcata

SEQ ID NO: 205966 - DNA, 25 bp, Probe sequence
atatgtacttactttctaatcctaa

SEQ ID NO: 205967 - DNA, 25 bp, Probe sequence
agtccagagacatgattacactgac

SEQ ID NO: 205968 - DNA, 25 bp, Probe sequence
agagcacctttcagcttacggtatt

SEQ ID NO: 205969 - DNA, 25 bp, Probe sequence
agagttttctaatttatcaaacaat

SEQ ID NO: 205970 - DNA, 25 bp, Probe sequence
aaatcttcttcatgaaaactatatt

SEQ ID NO: 205971 - DNA, 25 bp, Probe sequence
aaagaatatcttgattggtataatc

SEQ ID NO: 205972 - DNA, 25 bp, Probe sequence
aagacacaggcaaaatgagtttatt

SEQ ID NO: 205973 - DNA, 25 bp, Probe sequence
aagtcgaaaataacggatgctatgc

SEQ ID NO: 205974 - DNA, 25 bp, Probe sequence
aataacggatgctatgcaagcaaaa

SEQ ID NO: 205975 - DNA, 25 bp, Probe sequence
aatttattacagtgccttatatttg

SEQ ID NO: 205976 - DNA, 25 bp, Probe sequence
aattctatgattattaagtcgaaaa

SEQ ID NO: 205977 - DNA, 25 bp, Probe sequence
cagtgccttatatttgttaatgata

SEQ ID NO: 205978 - DNA, 25 bp, Probe sequence
cttactttctaatcctaagtcacag

SEQ ID NO: 205979 - DNA, 25 bp, Probe sequence
ctaatcctaagtcacagaacatatt

SEQ ID NO: 205980 - DNA, 25 bp, Probe sequence
gctttatacgatcagtccagagaca

SEQ ID NO: 205981 - DNA, 25 bp, Probe sequence
gcagtggtgttgttcataatttcga

SEQ ID NO: 205982 - DNA, 25 bp, Probe sequence
gcacctttcagcttacggtattaaa

SEQ ID NO: 205983 - DNA, 25 bp, Probe sequence
gaacataataaaaatcttcttcatg

SEQ ID NO: 205984 - DNA, 25 bp, Probe sequence
gaaacataatttattacagtgcctt

SEQ ID NO: 205985 - DNA, 25 bp, Probe sequence
gatgttgcaaacaaattggatgaac

SEQ ID NO: 205986 - DNA, 25 bp, Probe sequence
gatttttgaagagcacctttcagct

SEQ ID NO: 205987 - DNA, 25 bp, Probe sequence
gttaatgatatgtacttactttcta

SEQ ID NO: 205988 - DNA, 25 bp, Probe sequence
gtacaatagattatagcgaattaga

SEQ ID NO: 205989 - DNA, 25 bp, Probe sequence
gtcacagaacatatttacagaagat

SEQ ID NO: 205990 - DNA, 25 bp, Probe sequence
gtgttgttcataatttcgacttttt

SEQ ID NO: 205991 - DNA, 25 bp, Probe sequence
gtggtgttgttcataatttcgactt

SEQ ID NO: 205992 - DNA, 25 bp, Probe sequence
ggatgaacataacatttattacgga

SEQ ID NO: 205993 - DNA, 25 bp, Probe sequence
tgaagagcacctttcagcttacggt

SEQ ID NO: 205994 - DNA, 25 bp, Probe sequence
tcgacttttttattagcgctaagaa

SEQ ID NO: 205995 - DNA, 25 bp, Probe sequence
taatttcgacttttttattagcgct

SEQ ID NO: 205996 - DNA, 25 bp, Probe sequence
tacgctttatacgatcagtccagag

SEQ ID NO: 205997 - DNA, 25 bp, Probe sequence
tttctaaccctaataattctatgat

SEQ ID NO: 205998 - DNA, 25 bp, Probe sequence
atcccgttaaaatgattgacaataa

SEQ ID NO: 205999 - DNA, 25 bp, Probe sequence
aggaacgtggactattagttctgaa

SEQ ID NO: 206000 - DNA, 25 bp, Probe sequence
aggagaaaacacttactttacagct

SEQ ID NO: 206001 - DNA, 25 bp, Probe sequence
agatggttcatcaattggatacaaa

SEQ ID NO: 206002 - DNA, 25 bp, Probe sequence
acttactttacagctaacctacatt

SEQ ID NO: 206003 - DNA, 25 bp, Probe sequence
actattagttctgaaatggcaattc

SEQ ID NO: 206004 - DNA, 25 bp, Probe sequence
acacttactttacagctaacctaca

SEQ ID NO: 206005 - DNA, 25 bp, Probe sequence
aaatgataaaggaacgtggactatt

SEQ ID NO: 206006 - DNA, 25 bp, Probe sequence
aaatggcagacctcaggataagcaa

SEQ ID NO: 206007 - DNA, 25 bp, Probe sequence
aaaggattttactatgttaatgcga

SEQ ID NO: 206008 - DNA, 25 bp, Probe sequence
aactttaagtttttcgcgcagtatg

SEQ ID NO: 206009 - DNA, 25 bp, Probe sequence
aagtttttcgcgcagtatggcaatt

SEQ ID NO: 206010 - DNA, 25 bp, Probe sequence
aatacattggtattgtacatcagtt

SEQ ID NO: 206011 - DNA, 25 bp, Probe sequence
cagctaacctacattttaaaccgag

SEQ ID NO: 206012 - DNA, 25 bp, Probe sequence
cctacattttaaaccgagtaatgat

SEQ ID NO: 206013 - DNA, 25 bp, Probe sequence
gcagacctcaggataagcaaataga

SEQ ID NO: 206014 - DNA, 25 bp, Probe sequence
gcaaaatatcaactaaccaatgatg

SEQ ID NO: 206015 - DNA, 25 bp, Probe sequence
gaatatcccgttaaaatgattgaca

SEQ ID NO: 206016 - DNA, 25 bp, Probe sequence
gaaggatgaaaatggcagacctcag

SEQ ID NO: 206017 - DNA, 25 bp, Probe sequence
gagaaaacacttactttacagctaa

SEQ ID NO: 206018 - DNA, 25 bp, Probe sequence
gatttgacgaagtataaaggtggag

SEQ ID NO: 206019 - DNA, 25 bp, Probe sequence
gtttttcgcgcagtatggcaatttt

SEQ ID NO: 206020 - DNA, 25 bp, Probe sequence
gtggactattagttctgaaatggca

SEQ ID NO: 206021 - DNA, 25 bp, Probe sequence
ggttcaggaaatttagatggttcat

SEQ ID NO: 206022 - DNA, 25 bp, Probe sequence
ggattttactatgttaatgcgataa

SEQ ID NO: 206023 - DNA, 25 bp, Probe sequence
ggatgaaaatggcagacctcaggat

SEQ ID NO: 206024 - DNA, 25 bp, Probe sequence
tcagttttttgatattaatcatcag

SEQ ID NO: 206025 - DNA, 25 bp, Probe sequence
taagcaaatagaatatcccgttaaa

SEQ ID NO: 206026 - DNA, 25 bp, Probe sequence
tacagctaacctacattttaaaccg

SEQ ID NO: 206027 - DNA, 25 bp, Probe sequence
tactttacagctaacctacatttta

SEQ ID NO: 206028 - DNA, 25 bp, Probe sequence
tattaatcatcagtatcgttgctgg

SEQ ID NO: 206029 - DNA, 25 bp, Probe sequence
tttaagtttttcgcgcagtatggca

SEQ ID NO: 206030 - DNA, 25 bp, Probe sequence
tttcgcgcagtatggcaattttaaa

SEQ ID NO: 206031 - DNA, 25 bp, Probe sequence
ttggtattgtacatcagttttttga

SEQ ID NO: 206032 - DNA, 25 bp, Probe sequence
attgatggatttggttataagtggg

SEQ ID NO: 206033 - DNA, 25 bp, Probe sequence
attaattcctaaaaaagcttctgct

SEQ ID NO: 206034 - DNA, 25 bp, Probe sequence
attcatttccacttaattcctcgat

SEQ ID NO: 206035 - DNA, 25 bp, Probe sequence
ataatggtgagtttgcagatcaatc

SEQ ID NO: 206036 - DNA, 25 bp, Probe sequence
atgtcagaaacaattttcggcaaaa

SEQ ID NO: 206037 - DNA, 25 bp, Probe sequence
atgtctatgcctttttagatatatc

SEQ ID NO: 206038 - DNA, 25 bp, Probe sequence
agataacgatgcaaaacaacaaatt

SEQ ID NO: 206039 - DNA, 25 bp, Probe sequence
aagcttctgctaatatctttgaaac

SEQ ID NO: 206040 - DNA, 25 bp, Probe sequence
aatcctgatggtttaaacattattc

SEQ ID NO: 206041 - DNA, 25 bp, Probe sequence
aattcctagctttaaagtatatgaa

SEQ ID NO: 206042 - DNA, 25 bp, Probe sequence
cacaagttactaaaggacatacgtt

SEQ ID NO: 206043 - DNA, 25 bp, Probe sequence
catattcatttccacttaattcctc

SEQ ID NO: 206044 - DNA, 25 bp, Probe sequence
ctatgcctttttagatatatcacaa

SEQ ID NO: 206045 - DNA, 25 bp, Probe sequence
ctgaacaaattcaagcacaatttta

SEQ ID NO: 206046 - DNA, 25 bp, Probe sequence
gcctttttagatatatcacaagtta

SEQ ID NO: 206047 - DNA, 25 bp, Probe sequence
gcgtgcatttaatcctgatggttta

SEQ ID NO: 206048 - DNA, 25 bp, Probe sequence
gctaatatctttgaaactgatgaag

SEQ ID NO: 206049 - DNA, 25 bp, Probe sequence
gcttctgctaatatctttgaaactg

SEQ ID NO: 206050 - DNA, 25 bp, Probe sequence
gcagcattacctaaagtagcaaatg

SEQ ID NO: 206051 - DNA, 25 bp, Probe sequence
gaagacgattatgtctatgcctttt

SEQ ID NO: 206052 - DNA, 25 bp, Probe sequence
gacgattatgtctatgcctttttag

SEQ ID NO: 206053 - DNA, 25 bp, Probe sequence
gatggtttaaacattattcaaaata

SEQ ID NO: 206054 - DNA, 25 bp, Probe sequence
gatttggttataagtgggaaacaca

SEQ ID NO: 206055 - DNA, 25 bp, Probe sequence
gattatgtctatgcctttttagata

SEQ ID NO: 206056 - DNA, 25 bp, Probe sequence
gtatttcatattcatttccacttaa

SEQ ID NO: 206057 - DNA, 25 bp, Probe sequence
gtagcaaatgctattaagcgtgcat

SEQ ID NO: 206058 - DNA, 25 bp, Probe sequence
ggagaaattcctagctttaaagtat

SEQ ID NO: 206059 - DNA, 25 bp, Probe sequence
taattcctaaaaaagcttctgctaa

SEQ ID NO: 206060 - DNA, 25 bp, Probe sequence
taagcgtgcatttaatcctgatggt

SEQ ID NO: 206061 - DNA, 25 bp, Probe sequence
taaaggacatacgttattaattcct

SEQ ID NO: 206062 - DNA, 25 bp, Probe sequence
tattcatttccacttaattcctcga

SEQ ID NO: 206063 - DNA, 25 bp, Probe sequence
ttaactggagaaattcctagcttta

SEQ ID NO: 206064 - DNA, 25 bp, Probe sequence
ttcatattcatttccacttaattcc

SEQ ID NO: 206065 - DNA, 25 bp, Probe sequence
ttcatttccacttaattcctcgata

SEQ ID NO: 206066 - DNA, 25 bp, Probe sequence
attcggtatcggtgttggcgtagca

SEQ ID NO: 206067 - DNA, 25 bp, Probe sequence
atcacgcattctattcggtatcggt

SEQ ID NO: 206068 - DNA, 25 bp, Probe sequence
atcggtgttggcgtagcagctggtt

SEQ ID NO: 206069 - DNA, 25 bp, Probe sequence
atgaaagcatcacgcattctattcg

SEQ ID NO: 206070 - DNA, 25 bp, Probe sequence
atgacattttaaactatggtgttca

SEQ ID NO: 206071 - DNA, 25 bp, Probe sequence
acgcattctattcggtatcggtgtt

SEQ ID NO: 206072 - DNA, 25 bp, Probe sequence
acgtttacagtcacacatcgaaaat

SEQ ID NO: 206073 - DNA, 25 bp, Probe sequence
aaatcgtggcgaggatattggaaac

SEQ ID NO: 206074 - DNA, 25 bp, Probe sequence
aagcatcacgcattctattcggtat

SEQ ID NO: 206075 - DNA, 25 bp, Probe sequence
aatcctaatattgaacgtttacagt

SEQ ID NO: 206076 - DNA, 25 bp, Probe sequence
aatcagaactacaacgtgaatttga

SEQ ID NO: 206077 - DNA, 25 bp, Probe sequence
cagctggttttgtagttgcacttca

SEQ ID NO: 206078 - DNA, 25 bp, Probe sequence
cattctattcggtatcggtgttggc

SEQ ID NO: 206079 - DNA, 25 bp, Probe sequence
ctgcccctactggttcaaaatcaga

SEQ ID NO: 206080 - DNA, 25 bp, Probe sequence
cggtatcggtgttggcgtagcagct

SEQ ID NO: 206081 - DNA, 25 bp, Probe sequence
gcccctactggttcaaaatcagaac

SEQ ID NO: 206082 - DNA, 25 bp, Probe sequence
gctggttttgtagttgcacttcaag

SEQ ID NO: 206083 - DNA, 25 bp, Probe sequence
gcatcacgcattctattcggtatcg

SEQ ID NO: 206084 - DNA, 25 bp, Probe sequence
gaacgtttacagtcacacatcgaaa

SEQ ID NO: 206085 - DNA, 25 bp, Probe sequence
gaaaatttacaaaatcgtggcgagg

SEQ ID NO: 206086 - DNA, 25 bp, Probe sequence
gaaagcatcacgcattctattcggt

SEQ ID NO: 206087 - DNA, 25 bp, Probe sequence
gaaagtgcggaatttggtagttcaa

SEQ ID NO: 206088 - DNA, 25 bp, Probe sequence
gacaaaagtgtcaagaacaacacga

SEQ ID NO: 206089 - DNA, 25 bp, Probe sequence
gttttgtagttgcacttcaaggacg

SEQ ID NO: 206090 - DNA, 25 bp, Probe sequence
gtagcagctggttttgtagttgcac

SEQ ID NO: 206091 - DNA, 25 bp, Probe sequence
gtcattacttggaaacttcaaatct

SEQ ID NO: 206092 - DNA, 25 bp, Probe sequence
gtgttggcgtagcagctggttttgt

SEQ ID NO: 206093 - DNA, 25 bp, Probe sequence
gtggcgaggatattggaaacgaaat

SEQ ID NO: 206094 - DNA, 25 bp, Probe sequence
ggtggtgaaattaagtcattacttg

SEQ ID NO: 206095 - DNA, 25 bp, Probe sequence
ggcgtagcagctggttttgtagttg

SEQ ID NO: 206096 - DNA, 25 bp, Probe sequence
tctattcggtatcggtgttggcgta

SEQ ID NO: 206097 - DNA, 25 bp, Probe sequence
tactgcccctactggttcaaaatca

SEQ ID NO: 206098 - DNA, 25 bp, Probe sequence
tacagtcacacatcgaaaatttaca

SEQ ID NO: 206099 - DNA, 25 bp, Probe sequence
tacttggaaacttcaaatctgacat

SEQ ID NO: 206100 - DNA, 25 bp, Probe sequence
attcccgcaatatggacattatttt

SEQ ID NO: 206101 - DNA, 25 bp, Probe sequence
atttccattacagatttattatatt

SEQ ID NO: 206102 - DNA, 25 bp, Probe sequence
atcaacctgtacacaaattttattt

SEQ ID NO: 206103 - DNA, 25 bp, Probe sequence
ataatacctacgtcaatcaacctgt

SEQ ID NO: 206104 - DNA, 25 bp, Probe sequence
atcaatgcacgatttggtttgccta

SEQ ID NO: 206105 - DNA, 25 bp, Probe sequence
atcagatagacattttctcatcttt

SEQ ID NO: 206106 - DNA, 25 bp, Probe sequence
atgacgtatccattacataaaagta

SEQ ID NO: 206107 - DNA, 25 bp, Probe sequence
acgtcaatcaacctgtacacaaatt

SEQ ID NO: 206108 - DNA, 25 bp, Probe sequence
aatggcttatattctataataccta

SEQ ID NO: 206109 - DNA, 25 bp, Probe sequence
aattgatatcaatgcacgatttggt

SEQ ID NO: 206110 - DNA, 25 bp, Probe sequence
ccatcattatgtttttagttagtta

SEQ ID NO: 206111 - DNA, 25 bp, Probe sequence
gcacgatttggtttgcctagaattg

SEQ ID NO: 206112 - DNA, 25 bp, Probe sequence
gcagttgcaaccatcattatgtttt

SEQ ID NO: 206113 - DNA, 25 bp, Probe sequence
gcaatgttcgtttatctaacaattt

SEQ ID NO: 206114 - DNA, 25 bp, Probe sequence
gaattgcatttatgagtgcagttgc

SEQ ID NO: 206115 - DNA, 25 bp, Probe sequence
gaatttcggtatttccattacagat

SEQ ID NO: 206116 - DNA, 25 bp, Probe sequence
gacattattttatgttcttattggc

SEQ ID NO: 206117 - DNA, 25 bp, Probe sequence
gacattttctcatctttttattact

SEQ ID NO: 206118 - DNA, 25 bp, Probe sequence
gagtgcagttgcaaccatcattatg

SEQ ID NO: 206119 - DNA, 25 bp, Probe sequence
gttgcaaccatcattatgtttttag

SEQ ID NO: 206120 - DNA, 25 bp, Probe sequence
gttcttattggcattgaatttcggt

SEQ ID NO: 206121 - DNA, 25 bp, Probe sequence
gttatgaagtaatgtattttttatc

SEQ ID NO: 206122 - DNA, 25 bp, Probe sequence
gtacacaaattttatttttgcatta

SEQ ID NO: 206123 - DNA, 25 bp, Probe sequence
ggtttgcctagaattgcatttatga

SEQ ID NO: 206124 - DNA, 25 bp, Probe sequence
ggcattgaatttcggtatttccatt

SEQ ID NO: 206125 - DNA, 25 bp, Probe sequence
tgccgttaattatcttatctgcaat

SEQ ID NO: 206126 - DNA, 25 bp, Probe sequence
tcttaccatatagaaaatcgtttaa

SEQ ID NO: 206127 - DNA, 25 bp, Probe sequence
tacttgtatttatgacgtatccatt

SEQ ID NO: 206128 - DNA, 25 bp, Probe sequence
tacctacgtcaatcaacctgtacac

SEQ ID NO: 206129 - DNA, 25 bp, Probe sequence
tattgccgttaattatcttatctgc

SEQ ID NO: 206130 - DNA, 25 bp, Probe sequence
tttgcattaacttaatattgccgtt

SEQ ID NO: 206131 - DNA, 25 bp, Probe sequence
ttatcttatctgcaatgttcgttta

SEQ ID NO: 206132 - DNA, 25 bp, Probe sequence
ttatctgcaatgttcgtttatctaa

SEQ ID NO: 206133 - DNA, 25 bp, Probe sequence
ttctcatctttttattacttgtatt

SEQ ID NO: 206134 - DNA, 25 bp, Probe sequence
atttacgtactgctgcttatcataa

SEQ ID NO: 206135 - DNA, 25 bp, Probe sequence
atcaagctttggatatcatattatt

SEQ ID NO: 206136 - DNA, 25 bp, Probe sequence
atgttgactttaaagatcgtgatat

SEQ ID NO: 206137 - DNA, 25 bp, Probe sequence
actgatgcatacaaagatctattaa

SEQ ID NO: 206138 - DNA, 25 bp, Probe sequence
aaacttaaacaaggtggcgcacaag

SEQ ID NO: 206139 - DNA, 25 bp, Probe sequence
aaaatctctgattctgaaattaaag

SEQ ID NO: 206140 - DNA, 25 bp, Probe sequence
aaaattagtcgatcagaaagtacaa

SEQ ID NO: 206141 - DNA, 25 bp, Probe sequence
aacagcaaggtttaacagccgataa

SEQ ID NO: 206142 - DNA, 25 bp, Probe sequence
aagctgataaaccaacagactttaa

SEQ ID NO: 206143 - DNA, 25 bp, Probe sequence
aatgcaaaagcaatacggcggtaaa

SEQ ID NO: 206144 - DNA, 25 bp, Probe sequence
aatcgttccggtaacagctagtgct

SEQ ID NO: 206145 - DNA, 25 bp, Probe sequence
aatacattaatttcttctaaagctg

SEQ ID NO: 206146 - DNA, 25 bp, Probe sequence
gcgcttgtggcgctagtgccacaga

SEQ ID NO: 206147 - DNA, 25 bp, Probe sequence
gctagtgctttattattaggcgctt

SEQ ID NO: 206148 - DNA, 25 bp, Probe sequence
gaatcaatggatactggttcagcta

SEQ ID NO: 206149 - DNA, 25 bp, Probe sequence
gaagtttcaaaagatccaagtaaat

SEQ ID NO: 206150 - DNA, 25 bp, Probe sequence
gaaaatttacgtactgctgcttatc

SEQ ID NO: 206151 - DNA, 25 bp, Probe sequence
gaaagcttcacacattttaattaaa

SEQ ID NO: 206152 - DNA, 25 bp, Probe sequence
gacagcaagaaagcttcacacattt

SEQ ID NO: 206153 - DNA, 25 bp, Probe sequence
gatggcgaattaggttatgttctta

SEQ ID NO: 206154 - DNA, 25 bp, Probe sequence
gatcgtgatattaaatcagttgtcg

SEQ ID NO: 206155 - DNA, 25 bp, Probe sequence
gttgttaaatcaagctttggatatc

SEQ ID NO: 206156 - DNA, 25 bp, Probe sequence
gttccggtaacagctagtgctttat

SEQ ID NO: 206157 - DNA, 25 bp, Probe sequence
gtactgctgcttatcataaagaatt

SEQ ID NO: 206158 - DNA, 25 bp, Probe sequence
gtaaagatcaaattgcaaatgcatc

SEQ ID NO: 206159 - DNA, 25 bp, Probe sequence
gtaacagttgcagatacaatgaaaa

SEQ ID NO: 206160 - DNA, 25 bp, Probe sequence
ggtggcgcacaaggcggacaatccg

SEQ ID NO: 206161 - DNA, 25 bp, Probe sequence
ggttatgttcttaaaggacaaactg

SEQ ID NO: 206162 - DNA, 25 bp, Probe sequence
ggttcagctaaaaaagatggcgaat

SEQ ID NO: 206163 - DNA, 25 bp, Probe sequence
ggcccttcaacagcaaggtttaaca

SEQ ID NO: 206164 - DNA, 25 bp, Probe sequence
ggcggacaatccggcatgagccaat

SEQ ID NO: 206165 - DNA, 25 bp, Probe sequence
tgataaacaaattaatcgttccggt

SEQ ID NO: 206166 - DNA, 25 bp, Probe sequence
taaaccaacagactttaacagtgaa

SEQ ID NO: 206167 - DNA, 25 bp, Probe sequence
ttaggcgcttgtggcgctagtgcca

SEQ ID NO: 206168 - DNA, 25 bp, Probe sequence
attacgcggatatacaaagcaaatg

SEQ ID NO: 206169 - DNA, 25 bp, Probe sequence
atcaaattcgtgtgcatttagctga

SEQ ID NO: 206170 - DNA, 25 bp, Probe sequence
agaagacaatgatattacgcggata

SEQ ID NO: 206171 - DNA, 25 bp, Probe sequence
agcaaatgttaaggcacttttacct

SEQ ID NO: 206172 - DNA, 25 bp, Probe sequence
accaattcatcgactggaccaggaa

SEQ ID NO: 206173 - DNA, 25 bp, Probe sequence
aaatagagtttgtgcatcccttgac

SEQ ID NO: 206174 - DNA, 25 bp, Probe sequence
aaaccacaaacgattgatatgccaa

SEQ ID NO: 206175 - DNA, 25 bp, Probe sequence
aagtaattatgttccaagttatcgt

SEQ ID NO: 206176 - DNA, 25 bp, Probe sequence
aattccattcgaataaacgacgtgt

SEQ ID NO: 206177 - DNA, 25 bp, Probe sequence
aattgttgctaaaaatcctttaatg

SEQ ID NO: 206178 - DNA, 25 bp, Probe sequence
catttccgtttctttggatgactaa

SEQ ID NO: 206179 - DNA, 25 bp, Probe sequence
cttgatcgcatgttagaagacaatg

SEQ ID NO: 206180 - DNA, 25 bp, Probe sequence
cgtactcatcaaattcgtgtgcatt

SEQ ID NO: 206181 - DNA, 25 bp, Probe sequence
cgaaccaattcatcgactggaccag

SEQ ID NO: 206182 - DNA, 25 bp, Probe sequence
gcaattacacacattttaacttcaa

SEQ ID NO: 206183 - DNA, 25 bp, Probe sequence
gaaaaaaattcttgatcgcatgtta

SEQ ID NO: 206184 - DNA, 25 bp, Probe sequence
gacagcgtgcaattacacacatttt

SEQ ID NO: 206185 - DNA, 25 bp, Probe sequence
gataaagtgcatactggcgacgatg

SEQ ID NO: 206186 - DNA, 25 bp, Probe sequence
gataaacctgcgcgattaatggata

SEQ ID NO: 206187 - DNA, 25 bp, Probe sequence
gatatggcaatcgtaatgaaaccta

SEQ ID NO: 206188 - DNA, 25 bp, Probe sequence
gttggatactggacgtactcatcaa

SEQ ID NO: 206189 - DNA, 25 bp, Probe sequence
gttccaagttatcgttatgcacaaa

SEQ ID NO: 206190 - DNA, 25 bp, Probe sequence
gtatttgttccaaccatcgatgaaa

SEQ ID NO: 206191 - DNA, 25 bp, Probe sequence
gtctcctactggacagcgtgcaatt

SEQ ID NO: 206192 - DNA, 25 bp, Probe sequence
ggtgattcaacgttaagacaattag

SEQ ID NO: 206193 - DNA, 25 bp, Probe sequence
ggaccaggaaacagtaggattatta

SEQ ID NO: 206194 - DNA, 25 bp, Probe sequence
ggaagtcatttccgtttctttggat

SEQ ID NO: 206195 - DNA, 25 bp, Probe sequence
ggcgacgatgtatttgttccaacca

SEQ ID NO: 206196 - DNA, 25 bp, Probe sequence
tgtgcatcccttgactaaggaagtc

SEQ ID NO: 206197 - DNA, 25 bp, Probe sequence
tgcatttagctgaaattggtcaccc

SEQ ID NO: 206198 - DNA, 25 bp, Probe sequence
taaacgacgtgtgtctcctactgga

SEQ ID NO: 206199 - DNA, 25 bp, Probe sequence
tactattaatgataaacctgcgcga

SEQ ID NO: 206200 - DNA, 25 bp, Probe sequence
tacgagatattttccaacaacttaa

SEQ ID NO: 206201 - DNA, 25 bp, Probe sequence
tagagtttgtgcatcccttgactaa

SEQ ID NO: 206202 - DNA, 25 bp, Probe sequence
atttgttttcgataagtcaatagaa

SEQ ID NO: 206203 - DNA, 25 bp, Probe sequence
ataattgggcgattgcacatatgac

SEQ ID NO: 206204 - DNA, 25 bp, Probe sequence
atgctccattatacacgcacagaga

SEQ ID NO: 206205 - DNA, 25 bp, Probe sequence
agtattcgagtgtcgtttaaagata

SEQ ID NO: 206206 - DNA, 25 bp, Probe sequence
agataattgggcgattgcacatatg

SEQ ID NO: 206207 - DNA, 25 bp, Probe sequence
agatacgcatactaaagaacaacaa

SEQ ID NO: 206208 - DNA, 25 bp, Probe sequence
acctaaacgacaaacgcaatgaatc

SEQ ID NO: 206209 - DNA, 25 bp, Probe sequence
acagatattgatttgaatgatgatg

SEQ ID NO: 206210 - DNA, 25 bp, Probe sequence
acaattctcgaatctagtaagatct

SEQ ID NO: 206211 - DNA, 25 bp, Probe sequence
aagaacaacaattctcgaatctagt

SEQ ID NO: 206212 - DNA, 25 bp, Probe sequence
aattatttacagatattgatttgaa

SEQ ID NO: 206213 - DNA, 25 bp, Probe sequence
aattgggcgattgcacatatgacag

SEQ ID NO: 206214 - DNA, 25 bp, Probe sequence
cacgcacagagaagattaaacagat

SEQ ID NO: 206215 - DNA, 25 bp, Probe sequence
ctcgaatctagtaagatcttatcgt

SEQ ID NO: 206216 - DNA, 25 bp, Probe sequence
gctccattatacacgcacagagaag

SEQ ID NO: 206217 - DNA, 25 bp, Probe sequence
gcacatatgacaggtgttttgagta

SEQ ID NO: 206218 - DNA, 25 bp, Probe sequence
gaatctagtaagatcttatcgtaaa

SEQ ID NO: 206219 - DNA, 25 bp, Probe sequence
gaagtcatttcaatatttgttttcg

SEQ ID NO: 206220 - DNA, 25 bp, Probe sequence
gaacaacaattctcgaatctagtaa

SEQ ID NO: 206221 - DNA, 25 bp, Probe sequence
gacaggtgttttgagtaaagttgag

SEQ ID NO: 206222 - DNA, 25 bp, Probe sequence
gagtgtcgtttaaagataattgggc

SEQ ID NO: 206223 - DNA, 25 bp, Probe sequence
gatcttatcgtaaagaatacgtggg

SEQ ID NO: 206224 - DNA, 25 bp, Probe sequence
gattgcacatatgacaggtgttttg

SEQ ID NO: 206225 - DNA, 25 bp, Probe sequence
gtcatttcaatatttgttttcgata

SEQ ID NO: 206226 - DNA, 25 bp, Probe sequence
gtgaatactatagatacgcatacta

SEQ ID NO: 206227 - DNA, 25 bp, Probe sequence
gggcgattgcacatatgacaggtgt

SEQ ID NO: 206228 - DNA, 25 bp, Probe sequence
ggtgttttgagtaaagttgagagtt

SEQ ID NO: 206229 - DNA, 25 bp, Probe sequence
tccattatacacgcacagagaagat

SEQ ID NO: 206230 - DNA, 25 bp, Probe sequence
taggcgctaagtttgtaaaattatt

SEQ ID NO: 206231 - DNA, 25 bp, Probe sequence
tatacacgcacagagaagattaaac

SEQ ID NO: 206232 - DNA, 25 bp, Probe sequence
ttttacctaaacgacaaacgcaatg

SEQ ID NO: 206233 - DNA, 25 bp, Probe sequence
ttcaatatttgttttcgataagtca

SEQ ID NO: 206234 - DNA, 25 bp, Probe sequence
ttgtaggcgctaagtttgtaaaatt

SEQ ID NO: 206235 - DNA, 25 bp, Probe sequence
ttgggcgattgcacatatgacaggt

SEQ ID NO: 206236 - DNA, 25 bp, Probe sequence
attctaggcggtgtcaattcccctt

SEQ ID NO: 206237 - DNA, 25 bp, Probe sequence
attcgctttgtaaattctggaacag

SEQ ID NO: 206238 - DNA, 25 bp, Probe sequence
agtaattactgcattccgtttccat

SEQ ID NO: 206239 - DNA, 25 bp, Probe sequence
agcagtcatgacaacaattcgtgtt

SEQ ID NO: 206240 - DNA, 25 bp, Probe sequence
acattctgacggcgaagcgttcggt

SEQ ID NO: 206241 - DNA, 25 bp, Probe sequence
aaagctgcagactatgcttttagtc

SEQ ID NO: 206242 - DNA, 25 bp, Probe sequence
aagctgtaggaggcggtgcacctgt

SEQ ID NO: 206243 - DNA, 25 bp, Probe sequence
aattgccgcagtattagtagaacca

SEQ ID NO: 206244 - DNA, 25 bp, Probe sequence
caagtagcacctctaggacctgcat

SEQ ID NO: 206245 - DNA, 25 bp, Probe sequence
gcattccgtttccattacggtgccg

SEQ ID NO: 206246 - DNA, 25 bp, Probe sequence
ccatctcttgagaaaattcgctttg

SEQ ID NO: 206247 - DNA, 25 bp, Probe sequence
gctggatcttatcatggccattctg

SEQ ID NO: 206248 - DNA, 25 bp, Probe sequence
gcaggtattgcattactcgaagtac

SEQ ID NO: 206249 - DNA, 25 bp, Probe sequence
gatcaagttgaacattctgacggcg

SEQ ID NO: 206250 - DNA, 25 bp, Probe sequence
gatttagtattggttgcagcaggta

SEQ ID NO: 206251 - DNA, 25 bp, Probe sequence
gatttattaggtgttatccctgatt

SEQ ID NO: 206252 - DNA, 25 bp, Probe sequence
gtttgaagcttggttcttaacaact

SEQ ID NO: 206253 - DNA, 25 bp, Probe sequence
ggtaatgcctcaacctggattttta

SEQ ID NO: 206254 - DNA, 25 bp, Probe sequence
ggcggtggtttaccaattggaggct

SEQ ID NO: 206255 - DNA, 25 bp, Probe sequence
ggtaactttggaatggtaatgcctc

SEQ ID NO: 206256 - DNA, 25 bp, Probe sequence
ggtatcaatttagcaccttctaagt

SEQ ID NO: 206257 - DNA, 25 bp, Probe sequence
ggatctttaacattgtactttacag

SEQ ID NO: 206258 - DNA, 25 bp, Probe sequence
ggacctgcatatcaagctggtacaa

SEQ ID NO: 206259 - DNA, 25 bp, Probe sequence
ggcatgcacatcctcatattactaa

SEQ ID NO: 206260 - DNA, 25 bp, Probe sequence
ggcggtgcacctgttgttatgaaag

SEQ ID NO: 206261 - DNA, 25 bp, Probe sequence
tggaggctatggtggacgtcaagat

SEQ ID NO: 206262 - DNA, 25 bp, Probe sequence
tgttttatttggtacaccgactgaa

SEQ ID NO: 206263 - DNA, 25 bp, Probe sequence
tccccttctcgttcttataaagctg

SEQ ID NO: 206264 - DNA, 25 bp, Probe sequence
tacggtgccgctcaagatttattag

SEQ ID NO: 206265 - DNA, 25 bp, Probe sequence
tacgtgatgcaattccatctcttga

SEQ ID NO: 206266 - DNA, 25 bp, Probe sequence
tagacagcttaggccaacaactaga

SEQ ID NO: 206267 - DNA, 25 bp, Probe sequence
tatccctgatttaactgcatttggt

SEQ ID NO: 206268 - DNA, 25 bp, Probe sequence
ttcgtgttgcacgtgcatatactaa

SEQ ID NO: 206269 - DNA, 25 bp, Probe sequence
ttggggtgatgaaattgccgcagta

SEQ ID NO: 206270 - DNA, 25 bp, Probe sequence
attccatccctttcacaatactatg

SEQ ID NO: 206271 - DNA, 25 bp, Probe sequence
attatcaacagactccattttatgg

SEQ ID NO: 206272 - DNA, 25 bp, Probe sequence
atggacactgcaacacatatcgcaa

SEQ ID NO: 206273 - DNA, 25 bp, Probe sequence
atggcttctacgtttggtgcaacag

SEQ ID NO: 206274 - DNA, 25 bp, Probe sequence
agctcgcagtatttttacatgtctt

SEQ ID NO: 206275 - DNA, 25 bp, Probe sequence
acatatcgcaattggggtgggcctt

SEQ ID NO: 206276 - DNA, 25 bp, Probe sequence
aacaacgttagcagatggttctact

SEQ ID NO: 206277 - DNA, 25 bp, Probe sequence
aacttttcatcaatctatcgttggc

SEQ ID NO: 206278 - DNA, 25 bp, Probe sequence
aagatccagcaatggcttctacgtt

SEQ ID NO: 206279 - DNA, 25 bp, Probe sequence
aatttatggaatggcgtgtcgcgat

SEQ ID NO: 206280 - DNA, 25 bp, Probe sequence
aattggggtgggccttacagcactt

SEQ ID NO: 206281 - DNA, 25 bp, Probe sequence
cagcacttgcaactcaagatccagc

SEQ ID NO: 206282 - DNA, 25 bp, Probe sequence
catagaggtatcacgcattccatcc

SEQ ID NO: 206283 - DNA, 25 bp, Probe sequence
ctataatcgctttactaatcattta

SEQ ID NO: 206284 - DNA, 25 bp, Probe sequence
gctacaacccttatcgttggttcat

SEQ ID NO: 206285 - DNA, 25 bp, Probe sequence
gcatcaccctgttaaagtatttgtt

SEQ ID NO: 206286 - DNA, 25 bp, Probe sequence
gcaacatatatttcgcatcatagag

SEQ ID NO: 206287 - DNA, 25 bp, Probe sequence
gcaattcaacaagagcatcaccctg

SEQ ID NO: 206288 - DNA, 25 bp, Probe sequence
gaccactcttatattggctgggtat

SEQ ID NO: 206289 - DNA, 25 bp, Probe sequence
gaccctattattttcacagttcttt

SEQ ID NO: 206290 - DNA, 25 bp, Probe sequence
gatggttctactgaaattcgtttga

SEQ ID NO: 206291 - DNA, 25 bp, Probe sequence
gatcattattcatttgtggcaattg

SEQ ID NO: 206292 - DNA, 25 bp, Probe sequence
gataatgtcatagaccactcttata

SEQ ID NO: 206293 - DNA, 25 bp, Probe sequence
gatatattcaattcttatggtacac

SEQ ID NO: 206294 - DNA, 25 bp, Probe sequence
gttggttcattaattcctgatgggg

SEQ ID NO: 206295 - DNA, 25 bp, Probe sequence
gtcgcgatacaaactgatgcacatg

SEQ ID NO: 206296 - DNA, 25 bp, Probe sequence
gtgattaacacatttgaccctatta

SEQ ID NO: 206297 - DNA, 25 bp, Probe sequence
tggtgcaacagctacaacccttatc

SEQ ID NO: 206298 - DNA, 25 bp, Probe sequence
tcctgatggggatactgttcttaaa

SEQ ID NO: 206299 - DNA, 25 bp, Probe sequence
tccctttcacaatactatggccaat

SEQ ID NO: 206300 - DNA, 25 bp, Probe sequence
tcgtttgattgatttgcgttattta

SEQ ID NO: 206301 - DNA, 25 bp, Probe sequence
tacatttttaatattcacgttcttt

SEQ ID NO: 206302 - DNA, 25 bp, Probe sequence
tatggatgtgggctcagctcgcagt

SEQ ID NO: 206303 - DNA, 25 bp, Probe sequence
ttgcagtcttctttcctataatcgc

SEQ ID NO: 206304 - DNA, 25 bp, Probe sequence
attcgcaaatgttggctttggcgca

SEQ ID NO: 206305 - DNA, 25 bp, Probe sequence
atatcgatgttatgcatatctcaca

SEQ ID NO: 206306 - DNA, 25 bp, Probe sequence
atcattaaattgtcattgttccgag

SEQ ID NO: 206307 - DNA, 25 bp, Probe sequence
atgctcaatcaaagtacgctaccac

SEQ ID NO: 206308 - DNA, 25 bp, Probe sequence
atgtatccagctgactttgcaagtc

SEQ ID NO: 206309 - DNA, 25 bp, Probe sequence
atggacttaatttatcgtagacttg

SEQ ID NO: 206310 - DNA, 25 bp, Probe sequence
agaacatggccaattaactttaagt

SEQ ID NO: 206311 - DNA, 25 bp, Probe sequence
acattgcctcaagatcgttatttag

SEQ ID NO: 206312 - DNA, 25 bp, Probe sequence
acaggtggcgaaccaatgttttcta

SEQ ID NO: 206313 - DNA, 25 bp, Probe sequence
aaatgtgttaactctagcggaaatg

SEQ ID NO: 206314 - DNA, 25 bp, Probe sequence
aaatggttatcctctgatcttgcta

SEQ ID NO: 206315 - DNA, 25 bp, Probe sequence
caaagtacgctaccacatttacgaa

SEQ ID NO: 206316 - DNA, 25 bp, Probe sequence
tcgaccccgagcctttagatatgga

SEQ ID NO: 206317 - DNA, 25 bp, Probe sequence
gccactgtgcagttggttatacttt

SEQ ID NO: 206318 - DNA, 25 bp, Probe sequence
gactagaaatgacccggatggccgt

SEQ ID NO: 206319 - DNA, 25 bp, Probe sequence
gaattcaaacctaacattgcctcaa

SEQ ID NO: 206320 - DNA, 25 bp, Probe sequence
gaagcaaccaccgttaaaagctaag

SEQ ID NO: 206321 - DNA, 25 bp, Probe sequence
gaaattccaaatctgcgaacgatgt

SEQ ID NO: 206322 - DNA, 25 bp, Probe sequence
tgacccggatggccgtagtcgttta

SEQ ID NO: 206323 - DNA, 25 bp, Probe sequence
gagcgtcatatgcacaaacaaccac

SEQ ID NO: 206324 - DNA, 25 bp, Probe sequence
gtatctgcggaaacaatgctcaatc

SEQ ID NO: 206325 - DNA, 25 bp, Probe sequence
gtagcagacacgagattcaccctat

SEQ ID NO: 206326 - DNA, 25 bp, Probe sequence
gtaatatgcgttgtagccactgtgc

SEQ ID NO: 206327 - DNA, 25 bp, Probe sequence
gtcattgttccgagtttagttgttt

SEQ ID NO: 206328 - DNA, 25 bp, Probe sequence
ggggaacaactgatgaattcgcaaa

SEQ ID NO: 206329 - DNA, 25 bp, Probe sequence
ggatgttatttggtactttgcctgt

SEQ ID NO: 206330 - DNA, 25 bp, Probe sequence
ggccgtagtcgtttaaatgtcaatg

SEQ ID NO: 206331 - DNA, 25 bp, Probe sequence
ggcgcaatgaagaagcaaccaccgt

SEQ ID NO: 206332 - DNA, 25 bp, Probe sequence
tcaaaagttactatcacgtttaaga

SEQ ID NO: 206333 - DNA, 25 bp, Probe sequence
tcaccctatgtatccagctgacttt

SEQ ID NO: 206334 - DNA, 25 bp, Probe sequence
taaacctctattaaagtatgcacat

SEQ ID NO: 206335 - DNA, 25 bp, Probe sequence
tatactttacaaactgtcgaccccg

SEQ ID NO: 206336 - DNA, 25 bp, Probe sequence
tatcctctgatcttgctaaatcatt

SEQ ID NO: 206337 - DNA, 25 bp, Probe sequence
ttggtactttgcctgtgtttccatg

SEQ ID NO: 206338 - DNA, 25 bp, Probe sequence
attttgaaggtgtatacgacatggt

SEQ ID NO: 206339 - DNA, 25 bp, Probe sequence
agatccatactacacgaataatttt

SEQ ID NO: 206340 - DNA, 25 bp, Probe sequence
acgacatggtattatcatcttgtga

SEQ ID NO: 206341 - DNA, 25 bp, Probe sequence
acattcaagaggtactggtagctgg

SEQ ID NO: 206342 - DNA, 25 bp, Probe sequence
aacaaacacaatattccatttgatg

SEQ ID NO: 206343 - DNA, 25 bp, Probe sequence
aatggcagaagcaatcatgcgacaa

SEQ ID NO: 206344 - DNA, 25 bp, Probe sequence
aatcctaatcttaagggacaattgt

SEQ ID NO: 206345 - DNA, 25 bp, Probe sequence
aatatatgtcgttctccaatggcag

SEQ ID NO: 206346 - DNA, 25 bp, Probe sequence
catactacacgaataattttgaagg

SEQ ID NO: 206347 - DNA, 25 bp, Probe sequence
ctggtagctggaatttaggagagcc

SEQ ID NO: 206348 - DNA, 25 bp, Probe sequence
gcatttgtctgtcttggcaatatat

SEQ ID NO: 206349 - DNA, 25 bp, Probe sequence
gcaatcatgcgacaaagacttaaag

SEQ ID NO: 206350 - DNA, 25 bp, Probe sequence
gaagagagtgatgtaccagatccat

SEQ ID NO: 206351 - DNA, 25 bp, Probe sequence
gaagcgacagatgattttgattaca

SEQ ID NO: 206352 - DNA, 25 bp, Probe sequence
gaggtactggtagctggaatttagg

SEQ ID NO: 206353 - DNA, 25 bp, Probe sequence
gagtgatgtaccagatccatactac

SEQ ID NO: 206354 - DNA, 25 bp, Probe sequence
gatggcatgattagtgaattattcg

SEQ ID NO: 206355 - DNA, 25 bp, Probe sequence
gatgtagcatttgtctgtcttggca

SEQ ID NO: 206356 - DNA, 25 bp, Probe sequence
gatgtaccagatccatactacacga

SEQ ID NO: 206357 - DNA, 25 bp, Probe sequence
gatgattttgattacattgtggcta

SEQ ID NO: 206358 - DNA, 25 bp, Probe sequence
gattacattgtggctatggatcaaa

SEQ ID NO: 206359 - DNA, 25 bp, Probe sequence
gtagcatttgtctgtcttggcaata

SEQ ID NO: 206360 - DNA, 25 bp, Probe sequence
gtaccagatccatactacacgaata

SEQ ID NO: 206361 - DNA, 25 bp, Probe sequence
gtcttggcaatatatgtcgttctcc

SEQ ID NO: 206362 - DNA, 25 bp, Probe sequence
gtcgttctccaatggcagaagcaat

SEQ ID NO: 206363 - DNA, 25 bp, Probe sequence
gtgaattattcgaagcgacagatga

SEQ ID NO: 206364 - DNA, 25 bp, Probe sequence
gggacaattgttcaaactgttagaa

SEQ ID NO: 206365 - DNA, 25 bp, Probe sequence
ggtagatgtagcatttgtctgtctt

SEQ ID NO: 206366 - DNA, 25 bp, Probe sequence
ggcaatatatgtcgttctccaatgg

SEQ ID NO: 206367 - DNA, 25 bp, Probe sequence
tgtggctatggatcaaagtaacgtt

SEQ ID NO: 206368 - DNA, 25 bp, Probe sequence
taatttaatagactacatcgtaaaa

SEQ ID NO: 206369 - DNA, 25 bp, Probe sequence
taaatctatcaatcctaatcttaag

SEQ ID NO: 206370 - DNA, 25 bp, Probe sequence
tatgtcgttctccaatggcagaagc

SEQ ID NO: 206371 - DNA, 25 bp, Probe sequence
ttccatttgatggcatgattagtga

SEQ ID NO: 206372 - DNA, 25 bp, Probe sequence
aatggtaaccgcactcgtaagcctt

SEQ ID NO: 206373 - DNA, 25 bp, Probe sequence
atctacacgtcaagctttagttcaa

SEQ ID NO: 206374 - DNA, 25 bp, Probe sequence
acgtcaagctttagttcaatcagtt

SEQ ID NO: 206375 - DNA, 25 bp, Probe sequence
actcgtaagccttctaaagtcagca

SEQ ID NO: 206376 - DNA, 25 bp, Probe sequence
aaatggtaaccgcactcgtaagcct

SEQ ID NO: 206377 - DNA, 25 bp, Probe sequence
aaatctacacgtcaagctttagttc

SEQ ID NO: 206378 - DNA, 25 bp, Probe sequence
aagccttctaaagtcagcaagatta

SEQ ID NO: 206379 - DNA, 25 bp, Probe sequence
aagaaattcgtcgtaataatcctga

SEQ ID NO: 206380 - DNA, 25 bp, Probe sequence
aattggtgccgtaattggtggtgca

SEQ ID NO: 206381 - DNA, 25 bp, Probe sequence
cactcgtaagccttctaaagtcagc

SEQ ID NO: 206382 - DNA, 25 bp, Probe sequence
cacgtcaagctttagttcaatcagt

SEQ ID NO: 206383 - DNA, 25 bp, Probe sequence
cgcactcgtaagccttctaaagtca

SEQ ID NO: 206384 - DNA, 25 bp, Probe sequence
ccgcactcgtaagccttctaaagtc

SEQ ID NO: 206385 - DNA, 25 bp, Probe sequence
gccttctaaagtcagcaagattaaa

SEQ ID NO: 206386 - DNA, 25 bp, Probe sequence
gctgataaatctacacgtcaagctt

SEQ ID NO: 206387 - DNA, 25 bp, Probe sequence
gcactcgtaagccttctaaagtcag

SEQ ID NO: 206388 - DNA, 25 bp, Probe sequence
gaaattcgtcgtaataatcctgaat

SEQ ID NO: 206389 - DNA, 25 bp, Probe sequence
gatgttgttgaagaaattcgtcgta

SEQ ID NO: 206390 - DNA, 25 bp, Probe sequence
gatgcaaaaaatggtaaccgcactc

SEQ ID NO: 206391 - DNA, 25 bp, Probe sequence
gataaatctacacgtcaagctttag

SEQ ID NO: 206392 - DNA, 25 bp, Probe sequence
gtttagctgataaatctacacgtca

SEQ ID NO: 206393 - DNA, 25 bp, Probe sequence
gtaagccttctaaagtcagcaagat

SEQ ID NO: 206394 - DNA, 25 bp, Probe sequence
gtcaagctttagttcaatcagttaa

SEQ ID NO: 206395 - DNA, 25 bp, Probe sequence
ggtggtgcaattagtttagctgata

SEQ ID NO: 206396 - DNA, 25 bp, Probe sequence
tggaaaataaatttgttcctggtat

SEQ ID NO: 206397 - DNA, 25 bp, Probe sequence
tattttaattggtgccgtaattggt

SEQ ID NO: 206398 - DNA, 25 bp, Probe sequence
tcgtaagccttctaaagtcagcaag

SEQ ID NO: 206399 - DNA, 25 bp, Probe sequence
tcagcaagattaaagacgaagtttt

SEQ ID NO: 206400 - DNA, 25 bp, Probe sequence
taatcctgaattagaacgttcatta

SEQ ID NO: 206401 - DNA, 25 bp, Probe sequence
tacacgtcaagctttagttcaatca

SEQ ID NO: 206402 - DNA, 25 bp, Probe sequence
tagctgataaatctacacgtcaagc

SEQ ID NO: 206403 - DNA, 25 bp, Probe sequence
tagttcaatcagttaaagatgcaaa

SEQ ID NO: 206404 - DNA, 25 bp, Probe sequence
ttcgtcgtaataatcctgaattaga

SEQ ID NO: 206405 - DNA, 25 bp, Probe sequence
ttggtgccgtaattggtggtgcaat

SEQ ID NO: 206406 - DNA, 25 bp, Probe sequence
attaacattattaccatttttcaat

SEQ ID NO: 206407 - DNA, 25 bp, Probe sequence
attagtcatttcctattcggtccac

SEQ ID NO: 206408 - DNA, 25 bp, Probe sequence
atttcctattcggtccacttggatt

SEQ ID NO: 206409 - DNA, 25 bp, Probe sequence
ataactcaaaactccagtggtggct

SEQ ID NO: 206410 - DNA, 25 bp, Probe sequence
atgacttaccatttcgtacttgcta

SEQ ID NO: 206411 - DNA, 25 bp, Probe sequence
accaggtgcagtatttacttcaatt

SEQ ID NO: 206412 - DNA, 25 bp, Probe sequence
acccgctgaaacatctactctaatt

SEQ ID NO: 206413 - DNA, 25 bp, Probe sequence
aactactaagtgttgtcttcactgt

SEQ ID NO: 206414 - DNA, 25 bp, Probe sequence
aacgcttggttctgtaattagtcat

SEQ ID NO: 206415 - DNA, 25 bp, Probe sequence
aagatgatgcctcaggactagcagc

SEQ ID NO: 206416 - DNA, 25 bp, Probe sequence
cggtccacttggatttgacgaacaa

SEQ ID NO: 206417 - DNA, 25 bp, Probe sequence
gaacctcaacaattccaatctaaga

SEQ ID NO: 206418 - DNA, 25 bp, Probe sequence
gaacatcctagtgatacctatccag

SEQ ID NO: 206419 - DNA, 25 bp, Probe sequence
gactctaatttcttatcatatctca

SEQ ID NO: 206420 - DNA, 25 bp, Probe sequence
gatgatcaggttttcttcttatcaa

SEQ ID NO: 206421 - DNA, 25 bp, Probe sequence
gatcgtacatatattgaacctcaac

SEQ ID NO: 206422 - DNA, 25 bp, Probe sequence
gattttagcaatttggtcagcttca

SEQ ID NO: 206423 - DNA, 25 bp, Probe sequence
gttttattataattgtcggtgctga

SEQ ID NO: 206424 - DNA, 25 bp, Probe sequence
gtacttgctatgttccctatgttgc

SEQ ID NO: 206425 - DNA, 25 bp, Probe sequence
gtaatcccaaaattgatgttgatcg

SEQ ID NO: 206426 - DNA, 25 bp, Probe sequence
gtcttcactgtagttatgggcgttg

SEQ ID NO: 206427 - DNA, 25 bp, Probe sequence
gtcggtgctgaaatcaatgcaatca

SEQ ID NO: 206428 - DNA, 25 bp, Probe sequence
gtggtggcttattatctatcggttt

SEQ ID NO: 206429 - DNA, 25 bp, Probe sequence
gggcgttgtgtttgtagttgctcta

SEQ ID NO: 206430 - DNA, 25 bp, Probe sequence
tgcaatcattcatcagcgtagtgta

SEQ ID NO: 206431 - DNA, 25 bp, Probe sequence
tgctctagcattaccaacgcttggt

SEQ ID NO: 206432 - DNA, 25 bp, Probe sequence
tccctatgttgcttttcctattaac

SEQ ID NO: 206433 - DNA, 25 bp, Probe sequence
tcgtgttatattcggttgcacctaa

SEQ ID NO: 206434 - DNA, 25 bp, Probe sequence
tcatttggttttggttggtatattt

SEQ ID NO: 206435 - DNA, 25 bp, Probe sequence
tcagcttcaaatggaatgactgcaa

SEQ ID NO: 206436 - DNA, 25 bp, Probe sequence
tatgaattctttcaatgttgcttac

SEQ ID NO: 206437 - DNA, 25 bp, Probe sequence
tatcatatctcatctatcgcatagg

SEQ ID NO: 206438 - DNA, 25 bp, Probe sequence
tatattcggttgcacctaacgttaa

SEQ ID NO: 206439 - DNA, 25 bp, Probe sequence
ttaagtcagtattaccaggtgcagt

SEQ ID NO: 206440 - DNA, 25 bp, Probe sequence
attcaactttttgtctcgaacattg

SEQ ID NO: 206441 - DNA, 25 bp, Probe sequence
attattttacaatcgctgccaagaa

SEQ ID NO: 206442 - DNA, 25 bp, Probe sequence
attattggactcgtgacatcaggtt

SEQ ID NO: 206443 - DNA, 25 bp, Probe sequence
ataaacatttaattggtgccagaac

SEQ ID NO: 206444 - DNA, 25 bp, Probe sequence
atcaccttttacatatgcattgagt

SEQ ID NO: 206445 - DNA, 25 bp, Probe sequence
atgccattttaacagctgtagtcac

SEQ ID NO: 206446 - DNA, 25 bp, Probe sequence
atggcactagatttaacacccatct

SEQ ID NO: 206447 - DNA, 25 bp, Probe sequence
acgttcacgattttattctgtacaa

SEQ ID NO: 206448 - DNA, 25 bp, Probe sequence
aactaaacgtgcatatacgaatcgt

SEQ ID NO: 206449 - DNA, 25 bp, Probe sequence
aaggttatcgtagattacctgctac

SEQ ID NO: 206450 - DNA, 25 bp, Probe sequence
aatgatttatcgactgctagacagc

SEQ ID NO: 206451 - DNA, 25 bp, Probe sequence
aattaacttcatggtgtttccacct

SEQ ID NO: 206452 - DNA, 25 bp, Probe sequence
caattaaaactggtattgccatttt

SEQ ID NO: 206453 - DNA, 25 bp, Probe sequence
cattagctatgattccaggtattca

SEQ ID NO: 206454 - DNA, 25 bp, Probe sequence
gctgtactaacatcattagctatga

SEQ ID NO: 206455 - DNA, 25 bp, Probe sequence
gctgtcttttgtatggcactagatt

SEQ ID NO: 206456 - DNA, 25 bp, Probe sequence
gctacggtaattggtgcaggctttg

SEQ ID NO: 206457 - DNA, 25 bp, Probe sequence
gcaggctttgcagtattatttacat

SEQ ID NO: 206458 - DNA, 25 bp, Probe sequence
gaaccaactgccaaggcatcactta

SEQ ID NO: 206459 - DNA, 25 bp, Probe sequence
gatgcctacatattcaactttttgt

SEQ ID NO: 206460 - DNA, 25 bp, Probe sequence
gatttaacacccatctatgccattt

SEQ ID NO: 206461 - DNA, 25 bp, Probe sequence
gattctgtagaaactttacgttcga

SEQ ID NO: 206462 - DNA, 25 bp, Probe sequence
gtagtcacaattgaaccaactgcca

SEQ ID NO: 206463 - DNA, 25 bp, Probe sequence
gtaagacagatgccttgatgtataa

SEQ ID NO: 206464 - DNA, 25 bp, Probe sequence
gtgacatcaggtttaattaacttca

SEQ ID NO: 206465 - DNA, 25 bp, Probe sequence
gtgtttccacctaagtattatggtc

SEQ ID NO: 206466 - DNA, 25 bp, Probe sequence
tcgtttgtttatcactcatttatca

SEQ ID NO: 206467 - DNA, 25 bp, Probe sequence
taagtattatggtcaggtcgaagaa

SEQ ID NO: 206468 - DNA, 25 bp, Probe sequence
tactcgtgttaacttttcaggtgac

SEQ ID NO: 206469 - DNA, 25 bp, Probe sequence
tacgaatcgtttgtttatcactcat

SEQ ID NO: 206470 - DNA, 25 bp, Probe sequence
tatcttatcaagactgcaatctgat

SEQ ID NO: 206471 - DNA, 25 bp, Probe sequence
tatttacatatttattcggcgatca

SEQ ID NO: 206472 - DNA, 25 bp, Probe sequence
ttcggcgatcaatcaccttttacat

SEQ ID NO: 206473 - DNA, 25 bp, Probe sequence
ttccaggtattcatgatgcctacat

SEQ ID NO: 206474 - DNA, 25 bp, Probe sequence
attggtgtcgttgaagttacaggaa

SEQ ID NO: 206475 - DNA, 25 bp, Probe sequence
atacagttagtgtggcagaacatgc

SEQ ID NO: 206476 - DNA, 25 bp, Probe sequence
atgtttggtatccacaacctgcacc

SEQ ID NO: 206477 - DNA, 25 bp, Probe sequence
acattacaacactatgatccaatca

SEQ ID NO: 206478 - DNA, 25 bp, Probe sequence
aaagcaccgaacttgaaattagcaa

SEQ ID NO: 206479 - DNA, 25 bp, Probe sequence
aagtggtcgtattgctagtaaaagt

SEQ ID NO: 206480 - DNA, 25 bp, Probe sequence
aaggatatgctggtgatgtttggta

SEQ ID NO: 206481 - DNA, 25 bp, Probe sequence
catgcaccattaacaccagaaactg

SEQ ID NO: 206482 - DNA, 25 bp, Probe sequence
cctgcatatatgactcgtgaacgta

SEQ ID NO: 206483 - DNA, 25 bp, Probe sequence
gcgatgcgttagttgaagcgttagc

SEQ ID NO: 206484 - DNA, 25 bp, Probe sequence
gcaggtgtaggatctgaccatgtag

SEQ ID NO: 206485 - DNA, 25 bp, Probe sequence
gcacctgctgatcatccatggagaa

SEQ ID NO: 206486 - DNA, 25 bp, Probe sequence
gaattggacaacttgttgctgaaag

SEQ ID NO: 206487 - DNA, 25 bp, Probe sequence
gaaggtgaatggaacttgtctcaag

SEQ ID NO: 206488 - DNA, 25 bp, Probe sequence
gaagaaggtcatcgtcaatcagtag

SEQ ID NO: 206489 - DNA, 25 bp, Probe sequence
gaacaatgcctagaaatgctatgac

SEQ ID NO: 206490 - DNA, 25 bp, Probe sequence
gagcgtttcttcaatcatgaacctt

SEQ ID NO: 206491 - DNA, 25 bp, Probe sequence
gaccatgtagatttagcggcagcaa

SEQ ID NO: 206492 - DNA, 25 bp, Probe sequence
gatgcgattacaattcatgcaccat

SEQ ID NO: 206493 - DNA, 25 bp, Probe sequence
gatccaatcaatcaacaagaccata

SEQ ID NO: 206494 - DNA, 25 bp, Probe sequence
gatattattgttgcaagtggtcgta

SEQ ID NO: 206495 - DNA, 25 bp, Probe sequence
gatattttagagcgtttcttcaatc

SEQ ID NO: 206496 - DNA, 25 bp, Probe sequence
gttcactattcaggtatgactttag

SEQ ID NO: 206497 - DNA, 25 bp, Probe sequence
gttatggatttattaatacttctta

SEQ ID NO: 206498 - DNA, 25 bp, Probe sequence
gtctcaagtaggtaatcatgcgcat

SEQ ID NO: 206499 - DNA, 25 bp, Probe sequence
ggtaaaattgtaaatcgcgatgcgt

SEQ ID NO: 206500 - DNA, 25 bp, Probe sequence
ggatgtgattattagtgcgccattt

SEQ ID NO: 206501 - DNA, 25 bp, Probe sequence
tgtaagctttgatgaacttgtttca

SEQ ID NO: 206502 - DNA, 25 bp, Probe sequence
tcatccatggagaacaatgcctaga

SEQ ID NO: 206503 - DNA, 25 bp, Probe sequence
tcatgcgcatgaattacaacacaaa

SEQ ID NO: 206504 - DNA, 25 bp, Probe sequence
tagtgcgccattttatcctgcatat

SEQ ID NO: 206505 - DNA, 25 bp, Probe sequence
tttagtgaatactgcacgtggtaaa

SEQ ID NO: 206506 - DNA, 25 bp, Probe sequence
ttcaatcatgaacctttccaagata

SEQ ID NO: 206507 - DNA, 25 bp, Probe sequence
ttgctgaaagattagcgccatttaa

SEQ ID NO: 206508 - DNA, 25 bp, Probe sequence
atggcaatggcagcatactgtgata

SEQ ID NO: 206509 - DNA, 25 bp, Probe sequence
agagcagtttcagcaccaaaaattg

SEQ ID NO: 206510 - DNA, 25 bp, Probe sequence
agcaatgcattatatctttacgaaa

SEQ ID NO: 206511 - DNA, 25 bp, Probe sequence
acttatctgaaatcgctcgtcaaga

SEQ ID NO: 206512 - DNA, 25 bp, Probe sequence
aaatgaaccatgagtactttgcagc

SEQ ID NO: 206513 - DNA, 25 bp, Probe sequence
aacttcttcattcaacaagctaaag

SEQ ID NO: 206514 - DNA, 25 bp, Probe sequence
aactcacatcaattatttaactcgt

SEQ ID NO: 206515 - DNA, 25 bp, Probe sequence
aagacagcttatctcaagaacaaga

SEQ ID NO: 206516 - DNA, 25 bp, Probe sequence
aattcagagcagtttcagcaccaaa

SEQ ID NO: 206517 - DNA, 25 bp, Probe sequence
aattgacttttcaagcatactagaa

SEQ ID NO: 206518 - DNA, 25 bp, Probe sequence
caatgtttgaaactcacatcaatta

SEQ ID NO: 206519 - DNA, 25 bp, Probe sequence
caagacgtttctataacttatctga

SEQ ID NO: 206520 - DNA, 25 bp, Probe sequence
cacgcatatatggcaatggcagcat

SEQ ID NO: 206521 - DNA, 25 bp, Probe sequence
ctatctcattcttaaactggttctt

SEQ ID NO: 206522 - DNA, 25 bp, Probe sequence
gctaaagaagaacgtttccatggac

SEQ ID NO: 206523 - DNA, 25 bp, Probe sequence
gcaactatctcattcttaaactggt

SEQ ID NO: 206524 - DNA, 25 bp, Probe sequence
gaagtaacaagacgtttctataact

SEQ ID NO: 206525 - DNA, 25 bp, Probe sequence
gaacgtttccatggacaaaagattt

SEQ ID NO: 206526 - DNA, 25 bp, Probe sequence
gaaactttcaaagacagcttatctc

SEQ ID NO: 206527 - DNA, 25 bp, Probe sequence
gacagcaatgcattatatctttacg

SEQ ID NO: 206528 - DNA, 25 bp, Probe sequence
gattatgcaactatctcattcttaa

SEQ ID NO: 206529 - DNA, 25 bp, Probe sequence
ggtgcacatgcagaattcagagcag

SEQ ID NO: 206530 - DNA, 25 bp, Probe sequence
ggttcttagatgaacaagtcgaaga

SEQ ID NO: 206531 - DNA, 25 bp, Probe sequence
ggcagcatactgtgataaagaatcg

SEQ ID NO: 206532 - DNA, 25 bp, Probe sequence
tcgctcgtcaagataaagattatgc

SEQ ID NO: 206533 - DNA, 25 bp, Probe sequence
tcattcttaaactggttcttagatg

SEQ ID NO: 206534 - DNA, 25 bp, Probe sequence
tcagcaccaaaaattgacttttcaa

SEQ ID NO: 206535 - DNA, 25 bp, Probe sequence
tcaattatttaactcgtatcggcga

SEQ ID NO: 206536 - DNA, 25 bp, Probe sequence
tatcggcgatgacagcaatgcatta

SEQ ID NO: 206537 - DNA, 25 bp, Probe sequence
tataacttatctgaaatcgctcgtc

SEQ ID NO: 206538 - DNA, 25 bp, Probe sequence
tatttaactcgtatcggcgatgaca

SEQ ID NO: 206539 - DNA, 25 bp, Probe sequence
ttaacgacagaggtgcacatgcaga

SEQ ID NO: 206540 - DNA, 25 bp, Probe sequence
ttcaagcatactagaaactttcaaa

SEQ ID NO: 206541 - DNA, 25 bp, Probe sequence
ttgcaaacttcttcattcaacaagc

SEQ ID NO: 206542 - DNA, 25 bp, Probe sequence
attgcagatttacctgttgtcgcac

SEQ ID NO: 206543 - DNA, 25 bp, Probe sequence
atttcatactcttgtgaatccgcaa

SEQ ID NO: 206544 - DNA, 25 bp, Probe sequence
acctgttgtcgcacataacgcggca

SEQ ID NO: 206545 - DNA, 25 bp, Probe sequence
acttacttttgtagttatcaacttg

SEQ ID NO: 206546 - DNA, 25 bp, Probe sequence
acagaaacatttcatactcttgtga

SEQ ID NO: 206547 - DNA, 25 bp, Probe sequence
aagtatttgttctgtcggaatggtt

SEQ ID NO: 206548 - DNA, 25 bp, Probe sequence
aacgtacaagtatttgttctgtcgg

SEQ ID NO: 206549 - DNA, 25 bp, Probe sequence
aagcattcaaaatattggtttacca

SEQ ID NO: 206550 - DNA, 25 bp, Probe sequence
aagaaccgttgattcgtatcgatac

SEQ ID NO: 206551 - DNA, 25 bp, Probe sequence
caattagattttcatggtcatcatg

SEQ ID NO: 206552 - DNA, 25 bp, Probe sequence
catggtcatcatgatgcattgaatg

SEQ ID NO: 206553 - DNA, 25 bp, Probe sequence
cgtttgactacgtatttccatatat

SEQ ID NO: 206554 - DNA, 25 bp, Probe sequence
gcggcatttgatatgaacgtcttac

SEQ ID NO: 206555 - DNA, 25 bp, Probe sequence
gaatgatgccaaagcatgcgcaatg

SEQ ID NO: 206556 - DNA, 25 bp, Probe sequence
gcatgcgcaatgattacttttaggc

SEQ ID NO: 206557 - DNA, 25 bp, Probe sequence
gcaatgattacttttaggctactga

SEQ ID NO: 206558 - DNA, 25 bp, Probe sequence
gaatccgcaagactatttttcacaa

SEQ ID NO: 206559 - DNA, 25 bp, Probe sequence
gaagatgttgaaaatgcacctacgt

SEQ ID NO: 206560 - DNA, 25 bp, Probe sequence
gaacgtcttacatcaaagcattcaa

SEQ ID NO: 206561 - DNA, 25 bp, Probe sequence
gaaaatgcacctacgtttgactacg

SEQ ID NO: 206562 - DNA, 25 bp, Probe sequence
gaaacagcaaatggtaaacgtacaa

SEQ ID NO: 206563 - DNA, 25 bp, Probe sequence
gactacgtatttccatatatgatgc

SEQ ID NO: 206564 - DNA, 25 bp, Probe sequence
gatggagttttatcaattagatttt

SEQ ID NO: 206565 - DNA, 25 bp, Probe sequence
gatgcgtttgttgcacttgattttg

SEQ ID NO: 206566 - DNA, 25 bp, Probe sequence
gatacaagatgcgtttgttgcactt

SEQ ID NO: 206567 - DNA, 25 bp, Probe sequence
gatttacctgttgtcgcacataacg

SEQ ID NO: 206568 - DNA, 25 bp, Probe sequence
gttgcacttgattttgaaacagcaa

SEQ ID NO: 206569 - DNA, 25 bp, Probe sequence
gttctgtcggaatggttaaagtcat

SEQ ID NO: 206570 - DNA, 25 bp, Probe sequence
tccgcaagactatttttcacaacaa

SEQ ID NO: 206571 - DNA, 25 bp, Probe sequence
tcgtatcgatacggtttaaaacata

SEQ ID NO: 206572 - DNA, 25 bp, Probe sequence
tcgcacataacgcggcatttgatat

SEQ ID NO: 206573 - DNA, 25 bp, Probe sequence
tcatggcatacaaccagaagatgtt

SEQ ID NO: 206574 - DNA, 25 bp, Probe sequence
ttatcaacttgctaaaagaaccgtt

SEQ ID NO: 206575 - DNA, 25 bp, Probe sequence
ttccatatatgatgcaatttattgc

SEQ ID NO: 206576 - DNA, 25 bp, Probe sequence
agcactcgaaggttacaggtagaaa

SEQ ID NO: 206577 - DNA, 25 bp, Probe sequence
actccatgtatctattgatgaattt

SEQ ID NO: 206578 - DNA, 25 bp, Probe sequence
actatccttaatggaagcactagca

SEQ ID NO: 206579 - DNA, 25 bp, Probe sequence
acacccaagtacacaagtgctgtat

SEQ ID NO: 206580 - DNA, 25 bp, Probe sequence
acaaaggacaacacccaagtacaca

SEQ ID NO: 206581 - DNA, 25 bp, Probe sequence
aacggggtctcactcgtgaacaagt

SEQ ID NO: 206582 - DNA, 25 bp, Probe sequence
aaaagcactcgaaggttacaggtag

SEQ ID NO: 206583 - DNA, 25 bp, Probe sequence
aagtacacaagtgctgtatgatctt

SEQ ID NO: 206584 - DNA, 25 bp, Probe sequence
aagtgctgtatgatcttgtatcatt

SEQ ID NO: 206585 - DNA, 25 bp, Probe sequence
aaggacaacacccaagtacacaagt

SEQ ID NO: 206586 - DNA, 25 bp, Probe sequence
aatgattgaaattgacccacgttat

SEQ ID NO: 206587 - DNA, 25 bp, Probe sequence
aatacatggatagctttacagacaa

SEQ ID NO: 206588 - DNA, 25 bp, Probe sequence
cattactccatgtatctattgatga

SEQ ID NO: 206589 - DNA, 25 bp, Probe sequence
ctcgtgaacaagtgggaacaatgat

SEQ ID NO: 206590 - DNA, 25 bp, Probe sequence
gctcgaatgaaacggggtctcactc

SEQ ID NO: 206591 - DNA, 25 bp, Probe sequence
gaatgaaacggggtctcactcgtga

SEQ ID NO: 206592 - DNA, 25 bp, Probe sequence
gacaacacccaagtacacaagtgct

SEQ ID NO: 206593 - DNA, 25 bp, Probe sequence
gaggctcgaatgaaacggggtctca

SEQ ID NO: 206594 - DNA, 25 bp, Probe sequence
gatgaatttttcttacctacagata

SEQ ID NO: 206595 - DNA, 25 bp, Probe sequence
gatcttgtatcattactccatgtat

SEQ ID NO: 206596 - DNA, 25 bp, Probe sequence
tgaaacggggtctcactcgtgaaca

SEQ ID NO: 206597 - DNA, 25 bp, Probe sequence
gataatttgattaaaagcactcgaa

SEQ ID NO: 206598 - DNA, 25 bp, Probe sequence
gattttagagccgttggtttagcga

SEQ ID NO: 206599 - DNA, 25 bp, Probe sequence
gtatcattactccatgtatctattg

SEQ ID NO: 206600 - DNA, 25 bp, Probe sequence
gtctcactcgtgaacaagtgggaac

SEQ ID NO: 206601 - DNA, 25 bp, Probe sequence
ggggtctcactcgtgaacaagtggg

SEQ ID NO: 206602 - DNA, 25 bp, Probe sequence
ggtttagcgattaaagaggctcgaa

SEQ ID NO: 206603 - DNA, 25 bp, Probe sequence
ggaagcactagcaaaaggtatcaat

SEQ ID NO: 206604 - DNA, 25 bp, Probe sequence
tgaaattgacccacgttatttaaca

SEQ ID NO: 206605 - DNA, 25 bp, Probe sequence
taaatacgattttagagccgttggt

SEQ ID NO: 206606 - DNA, 25 bp, Probe sequence
tagagccgttggtttagcgattaaa

SEQ ID NO: 206607 - DNA, 25 bp, Probe sequence
tttacagacaaagaactatccttaa

SEQ ID NO: 206608 - DNA, 25 bp, Probe sequence
ttttcttacctacagataatttgat

SEQ ID NO: 206609 - DNA, 25 bp, Probe sequence
ttgacccacgttatttaacaaatat

SEQ ID NO: 206610 - DNA, 25 bp, Probe sequence
attgactatatacacacaccaatcc

SEQ ID NO: 206611 - DNA, 25 bp, Probe sequence
atattctcaaatttctttagttgga

SEQ ID NO: 206612 - DNA, 25 bp, Probe sequence
atcaatattctcaaatttctttagt

SEQ ID NO: 206613 - DNA, 25 bp, Probe sequence
atcacatactatcgatttaagtcaa

SEQ ID NO: 206614 - DNA, 25 bp, Probe sequence
atgggtgattctatcgacggcagac

SEQ ID NO: 206615 - DNA, 25 bp, Probe sequence
agagcgtaaaaatgttactggatat

SEQ ID NO: 206616 - DNA, 25 bp, Probe sequence
agatggcaaatcacatactatcgat

SEQ ID NO: 206617 - DNA, 25 bp, Probe sequence
accaaatttataaagaagacatctc

SEQ ID NO: 206618 - DNA, 25 bp, Probe sequence
acgtgcaatcaaacaacacggcttg

SEQ ID NO: 206619 - DNA, 25 bp, Probe sequence
actatatacacacaccaatccttga

SEQ ID NO: 206620 - DNA, 25 bp, Probe sequence
acaaacagtcaaccttttattgact

SEQ ID NO: 206621 - DNA, 25 bp, Probe sequence
aaatttctttagttggatctgataa

SEQ ID NO: 206622 - DNA, 25 bp, Probe sequence
aaatttaaagatggagacaactcga

SEQ ID NO: 206623 - DNA, 25 bp, Probe sequence
aaatgttactggatataaatatact

SEQ ID NO: 206624 - DNA, 25 bp, Probe sequence
aaccttttattgactatatacacac

SEQ ID NO: 206625 - DNA, 25 bp, Probe sequence
cacacaccaatccttgaaatcaaga

SEQ ID NO: 206626 - DNA, 25 bp, Probe sequence
ctcaattggtggcgtaacaaaaaca

SEQ ID NO: 206627 - DNA, 25 bp, Probe sequence
gaacgtatgggtgattctatcgacg

SEQ ID NO: 206628 - DNA, 25 bp, Probe sequence
gaaagatggcaaatcacatactatc

SEQ ID NO: 206629 - DNA, 25 bp, Probe sequence
gacaatcaatattctcaaatttctt

SEQ ID NO: 206630 - DNA, 25 bp, Probe sequence
gagacaactcgaatatagatgtgtt

SEQ ID NO: 206631 - DNA, 25 bp, Probe sequence
gatgttatagtagacaatcaatatt

SEQ ID NO: 206632 - DNA, 25 bp, Probe sequence
gtatgggtgattctatcgacggcag

SEQ ID NO: 206633 - DNA, 25 bp, Probe sequence
gtgattctatcgacggcagacaaat

SEQ ID NO: 206634 - DNA, 25 bp, Probe sequence
gtggcgtaacaaaaacaaacagtca

SEQ ID NO: 206635 - DNA, 25 bp, Probe sequence
gggtgattctatcgacggcagacaa

SEQ ID NO: 206636 - DNA, 25 bp, Probe sequence
ggtgattctatcgacggcagacaaa

SEQ ID NO: 206637 - DNA, 25 bp, Probe sequence
ggcaaatcacatactatcgatttaa

SEQ ID NO: 206638 - DNA, 25 bp, Probe sequence
tgggtgattctatcgacggcagaca

SEQ ID NO: 206639 - DNA, 25 bp, Probe sequence
tacacacaccaatccttgaaatcaa

SEQ ID NO: 206640 - DNA, 25 bp, Probe sequence
tatacacacaccaatccttgaaatc

SEQ ID NO: 206641 - DNA, 25 bp, Probe sequence
ttttattgactatatacacacacca

SEQ ID NO: 206642 - DNA, 25 bp, Probe sequence
ttaagagaacgtgcaatcaaacaac

SEQ ID NO: 206643 - DNA, 25 bp, Probe sequence
ttctcaaatttctttagttggatct

SEQ ID NO: 206644 - DNA, 25 bp, Probe sequence
atattatgattgccgtctacttctt

SEQ ID NO: 206645 - DNA, 25 bp, Probe sequence
agatgctacctaaagctagacgttt

SEQ ID NO: 206646 - DNA, 25 bp, Probe sequence
actcttccatcctcttgtaggtggt

SEQ ID NO: 206647 - DNA, 25 bp, Probe sequence
acggctggggaacgtttcatgatgt

SEQ ID NO: 206648 - DNA, 25 bp, Probe sequence
acattctggtttcgtatctggtggt

SEQ ID NO: 206649 - DNA, 25 bp, Probe sequence
acaagcaagcaactggtaacctaag

SEQ ID NO: 206650 - DNA, 25 bp, Probe sequence
aattatctctctattttcatgggga

SEQ ID NO: 206651 - DNA, 25 bp, Probe sequence
aattgcgatggttatggtccctatt

SEQ ID NO: 206652 - DNA, 25 bp, Probe sequence
gccatcgcgattgcatggaatccaa

SEQ ID NO: 206653 - DNA, 25 bp, Probe sequence
gccgtctacttcttgatactaatcg

SEQ ID NO: 206654 - DNA, 25 bp, Probe sequence
gacacgtgccggtgctgtaagtgga

SEQ ID NO: 206655 - DNA, 25 bp, Probe sequence
gacgtttaggtattagctggatggc

SEQ ID NO: 206656 - DNA, 25 bp, Probe sequence
gatggctgttggtttattaggcgct

SEQ ID NO: 206657 - DNA, 25 bp, Probe sequence
gatgagtcaagtactcttccatcct

SEQ ID NO: 206658 - DNA, 25 bp, Probe sequence
gatgcaattacattaccagatttct

SEQ ID NO: 206659 - DNA, 25 bp, Probe sequence
gatcctgagacattattcatcgtga

SEQ ID NO: 206660 - DNA, 25 bp, Probe sequence
gatactaatcgttattggcttttac

SEQ ID NO: 206661 - DNA, 25 bp, Probe sequence
gtagcaattgttgccatcgcgattg

SEQ ID NO: 206662 - DNA, 25 bp, Probe sequence
gttatttcggtcaacctcatatcat

SEQ ID NO: 206663 - DNA, 25 bp, Probe sequence
gtattgcattcgtacctgcttatca

SEQ ID NO: 206664 - DNA, 25 bp, Probe sequence
gtattggaccgtatattactgcatt

SEQ ID NO: 206665 - DNA, 25 bp, Probe sequence
gtcattttctatactttctttggtg

SEQ ID NO: 206666 - DNA, 25 bp, Probe sequence
gtggaatggtttcaggtgccttagt

SEQ ID NO: 206667 - DNA, 25 bp, Probe sequence
ggtgccttagtcgttatcgtttgga

SEQ ID NO: 206668 - DNA, 25 bp, Probe sequence
ggatttggtgcatcgttcagtccac

SEQ ID NO: 206669 - DNA, 25 bp, Probe sequence
tggaaaggtttgacacgtgccggtg

SEQ ID NO: 206670 - DNA, 25 bp, Probe sequence
tggtttcttacttgctgcgattcta

SEQ ID NO: 206671 - DNA, 25 bp, Probe sequence
tggtccctattgttgctatgatgaa

SEQ ID NO: 206672 - DNA, 25 bp, Probe sequence
tacagatttcttccaaggtgtcatt

SEQ ID NO: 206673 - DNA, 25 bp, Probe sequence
tactttgttgttgctcctagacttc

SEQ ID NO: 206674 - DNA, 25 bp, Probe sequence
tactgcattatcagctggagcttca

SEQ ID NO: 206675 - DNA, 25 bp, Probe sequence
taggcgctgtggctgttggtttaac

SEQ ID NO: 206676 - DNA, 25 bp, Probe sequence
ttagttgctttcattgtcattttct

SEQ ID NO: 206677 - DNA, 25 bp, Probe sequence
ttcagtccacttgtgctatttgcac

SEQ ID NO: 206678 - DNA, 25 bp, Probe sequence
acgttaatttgtcagtttctaagag

SEQ ID NO: 206679 - DNA, 25 bp, Probe sequence
atcagctatcacaacatcgattggt

SEQ ID NO: 206680 - DNA, 25 bp, Probe sequence
aggtcaacacactacttctgtgact

SEQ ID NO: 206681 - DNA, 25 bp, Probe sequence
agtttctaatgttgacgtgtttgta

SEQ ID NO: 206682 - DNA, 25 bp, Probe sequence
acaggtcaacacactacttctgtga

SEQ ID NO: 206683 - DNA, 25 bp, Probe sequence
aaaacggtggctattatacatttga

SEQ ID NO: 206684 - DNA, 25 bp, Probe sequence
aacggtggctattatacatttgaat

SEQ ID NO: 206685 - DNA, 25 bp, Probe sequence
aatgttgacgtgtttgtagtaagag

SEQ ID NO: 206686 - DNA, 25 bp, Probe sequence
aatttgtcagtttctaagagtacag

SEQ ID NO: 206687 - DNA, 25 bp, Probe sequence
aattgatgttacattgacaggaaat

SEQ ID NO: 206688 - DNA, 25 bp, Probe sequence
aattctcaacaaattgatgttacat

SEQ ID NO: 206689 - DNA, 25 bp, Probe sequence
caacacactacttctgtgacttcag

SEQ ID NO: 206690 - DNA, 25 bp, Probe sequence
cacaacatcgattggtggaattaca

SEQ ID NO: 206691 - DNA, 25 bp, Probe sequence
cagctatcacaacatcgattggtgg

SEQ ID NO: 206692 - DNA, 25 bp, Probe sequence
gctatcacaacatcgattggtggaa

SEQ ID NO: 206693 - DNA, 25 bp, Probe sequence
gaattactatgaaaaacggtggcta

SEQ ID NO: 206694 - DNA, 25 bp, Probe sequence
gaaggtagtgacaaatcagctatca

SEQ ID NO: 206695 - DNA, 25 bp, Probe sequence
gaagtttctaatgttgacgtgtttg

SEQ ID NO: 206696 - DNA, 25 bp, Probe sequence
gacaaatgggactcaacataaagat

SEQ ID NO: 206697 - DNA, 25 bp, Probe sequence
gacaaatcagctatcacaacatcga

SEQ ID NO: 206698 - DNA, 25 bp, Probe sequence
gacgtgtttgtagtaagagaaggta

SEQ ID NO: 206699 - DNA, 25 bp, Probe sequence
gagtacaggtcaacacactacttct

SEQ ID NO: 206700 - DNA, 25 bp, Probe sequence
gatgacgaagtttctaatgttgacg

SEQ ID NO: 206701 - DNA, 25 bp, Probe sequence
gatactgttcaaaacgttaatttgt

SEQ ID NO: 206702 - DNA, 25 bp, Probe sequence
gttacatttatagataattctcaac

SEQ ID NO: 206703 - DNA, 25 bp, Probe sequence
gtacaggtcaacacactacttctgt

SEQ ID NO: 206704 - DNA, 25 bp, Probe sequence
gtcagtttctaagagtacaggtcaa

SEQ ID NO: 206705 - DNA, 25 bp, Probe sequence
gtcaacacactacttctgtgacttc

SEQ ID NO: 206706 - DNA, 25 bp, Probe sequence
gggactcaacataaagatactgttc

SEQ ID NO: 206707 - DNA, 25 bp, Probe sequence
ggtggctattatacatttgaattaa

SEQ ID NO: 206708 - DNA, 25 bp, Probe sequence
taaagggagaggatttgaattaaca

SEQ ID NO: 206709 - DNA, 25 bp, Probe sequence
tttctaagagtacaggtcaacacac

SEQ ID NO: 206710 - DNA, 25 bp, Probe sequence
ttacaaagacaaatgggactcaaca

SEQ ID NO: 206711 - DNA, 25 bp, Probe sequence
ttaactgttaaagatgatgacgaag

SEQ ID NO: 206712 - DNA, 25 bp, Probe sequence
attccagtatccaatggcgaccatt

SEQ ID NO: 206713 - DNA, 25 bp, Probe sequence
ataattatacttacaacgagcaata

SEQ ID NO: 206714 - DNA, 25 bp, Probe sequence
atggcagttgttgggaacgctaaat

SEQ ID NO: 206715 - DNA, 25 bp, Probe sequence
agttcatcttctaaatacacaatca

SEQ ID NO: 206716 - DNA, 25 bp, Probe sequence
aactcagggaagaagtccacaactt

SEQ ID NO: 206717 - DNA, 25 bp, Probe sequence
aaatgcgacttataatactaacaaa

SEQ ID NO: 206718 - DNA, 25 bp, Probe sequence
aaaacaatgttattccagtatccaa

SEQ ID NO: 206719 - DNA, 25 bp, Probe sequence
aaaagcttctgtcactatgccaact

SEQ ID NO: 206720 - DNA, 25 bp, Probe sequence
aacgctgagagcaattcaaatatca

SEQ ID NO: 206721 - DNA, 25 bp, Probe sequence
aacgccaagagagatgatttatttt

SEQ ID NO: 206722 - DNA, 25 bp, Probe sequence
aatggttttatgactcaagatgcta

SEQ ID NO: 206723 - DNA, 25 bp, Probe sequence
gcctcgtatacacttggtgaacctt

SEQ ID NO: 206724 - DNA, 25 bp, Probe sequence
gcatgtgcaagttaatgtcgaggac

SEQ ID NO: 206725 - DNA, 25 bp, Probe sequence
gcagaagctgtgatgagatttttac

SEQ ID NO: 206726 - DNA, 25 bp, Probe sequence
gaacactgaaggtaatatcgattat

SEQ ID NO: 206727 - DNA, 25 bp, Probe sequence
gaaatggtatgcacgcagggcatgc

SEQ ID NO: 206728 - DNA, 25 bp, Probe sequence
gactatctttcttatgttacttcac

SEQ ID NO: 206729 - DNA, 25 bp, Probe sequence
gagaaagcctcgtatacacttggtg

SEQ ID NO: 206730 - DNA, 25 bp, Probe sequence
gagtatacctactggcaataatgta

SEQ ID NO: 206731 - DNA, 25 bp, Probe sequence
gtacgtaatttagcgcaaaaagact

SEQ ID NO: 206732 - DNA, 25 bp, Probe sequence
gatttattttggacaaactcaggga

SEQ ID NO: 206733 - DNA, 25 bp, Probe sequence
gattatatagttacaatttcaccaa

SEQ ID NO: 206734 - DNA, 25 bp, Probe sequence
gttggtgtgcaggctatacgatgtc

SEQ ID NO: 206735 - DNA, 25 bp, Probe sequence
gtcactatgccaactagtcaattta

SEQ ID NO: 206736 - DNA, 25 bp, Probe sequence
gtccacaacttcttaatagaatgac

SEQ ID NO: 206737 - DNA, 25 bp, Probe sequence
ggtaacaatggttggtgtgcaggct

SEQ ID NO: 206738 - DNA, 25 bp, Probe sequence
ggtattcatctatttatggttatta

SEQ ID NO: 206739 - DNA, 25 bp, Probe sequence
ggttactatgtggttactcaaaatc

SEQ ID NO: 206740 - DNA, 25 bp, Probe sequence
ggcaataatgtaacgcaactaaagc

SEQ ID NO: 206741 - DNA, 25 bp, Probe sequence
tgagatttttacacccaaacttaca

SEQ ID NO: 206742 - DNA, 25 bp, Probe sequence
tccaatttactggtttaacgccaag

SEQ ID NO: 206743 - DNA, 25 bp, Probe sequence
tagtactaaaaacaccacgtctaga

SEQ ID NO: 206744 - DNA, 25 bp, Probe sequence
tctttcttatgttacttcacttgat

SEQ ID NO: 206745 - DNA, 25 bp, Probe sequence
ttacccctattgcaaacgctgagag

SEQ ID NO: 206746 - DNA, 25 bp, Probe sequence
attccaacagaaaaggcgcctaaat

SEQ ID NO: 206747 - DNA, 25 bp, Probe sequence
attctgaagctcctatttattcagc

SEQ ID NO: 206748 - DNA, 25 bp, Probe sequence
atttcctataattctgaagctccta

SEQ ID NO: 206749 - DNA, 25 bp, Probe sequence
atatttttcagatggattaaactta

SEQ ID NO: 206750 - DNA, 25 bp, Probe sequence
ataattctgaagctcctatttattc

SEQ ID NO: 206751 - DNA, 25 bp, Probe sequence
atggtgacatttcctataattctga

SEQ ID NO: 206752 - DNA, 25 bp, Probe sequence
acatttcctataattctgaagctcc

SEQ ID NO: 206753 - DNA, 25 bp, Probe sequence
aaatatatatttttcagatggatta

SEQ ID NO: 206754 - DNA, 25 bp, Probe sequence
aaaattattccaactgaggagataa

SEQ ID NO: 206755 - DNA, 25 bp, Probe sequence
aagtatcctgtgaaaatgataaaca

SEQ ID NO: 206756 - DNA, 25 bp, Probe sequence
aatggtgacatttcctataattctg

SEQ ID NO: 206757 - DNA, 25 bp, Probe sequence
aatattccaacagaaaaggcgccta

SEQ ID NO: 206758 - DNA, 25 bp, Probe sequence
cagaaaaggcgcctaaattgttgtt

SEQ ID NO: 206759 - DNA, 25 bp, Probe sequence
catttcctataattctgaagctcct

SEQ ID NO: 206760 - DNA, 25 bp, Probe sequence
cctataattctgaagctcctattta

SEQ ID NO: 206761 - DNA, 25 bp, Probe sequence
gcaatatggcagttttaaaggaata

SEQ ID NO: 206762 - DNA, 25 bp, Probe sequence
gaaaaagccttgatgaaagagaaac

SEQ ID NO: 206763 - DNA, 25 bp, Probe sequence
gacatttcctataattctgaagctc

SEQ ID NO: 206764 - DNA, 25 bp, Probe sequence
gatggattaaacttaattccaagtg

SEQ ID NO: 206765 - DNA, 25 bp, Probe sequence
gattaaacttaattccaagtgacta

SEQ ID NO: 206766 - DNA, 25 bp, Probe sequence
gatttgaaagggtcttcagttggat

SEQ ID NO: 206767 - DNA, 25 bp, Probe sequence
gtgacatttcctataattctgaagc

SEQ ID NO: 206768 - DNA, 25 bp, Probe sequence
ggggatttgaaagggtcttcagttg

SEQ ID NO: 206769 - DNA, 25 bp, Probe sequence
ggtgacatttcctataattctgaag

SEQ ID NO: 206770 - DNA, 25 bp, Probe sequence
ggtcttcagttggatataaggaaat

SEQ ID NO: 206771 - DNA, 25 bp, Probe sequence
tgaaagggtcttcagttggatataa

SEQ ID NO: 206772 - DNA, 25 bp, Probe sequence
tgaagctcctatttattcagcgaaa

SEQ ID NO: 206773 - DNA, 25 bp, Probe sequence
tcgggggatttgaaagggtcttcag

SEQ ID NO: 206774 - DNA, 25 bp, Probe sequence
tctgaagctcctatttattcagcga

SEQ ID NO: 206775 - DNA, 25 bp, Probe sequence
taattctgaagctcctatttattca

SEQ ID NO: 206776 - DNA, 25 bp, Probe sequence
tagaaatactaggaccacaaccggt

SEQ ID NO: 206777 - DNA, 25 bp, Probe sequence
tttcctataattctgaagctcctat

SEQ ID NO: 206778 - DNA, 25 bp, Probe sequence
ttttgtgcaatatggcagttttaaa

SEQ ID NO: 206779 - DNA, 25 bp, Probe sequence
ttcctataattctgaagctcctatt

SEQ ID NO: 206780 - DNA, 25 bp, Probe sequence
attctcagtacctcagacgattctg

SEQ ID NO: 206781 - DNA, 25 bp, Probe sequence
attcaaatgtaattcagaggctaag

SEQ ID NO: 206782 - DNA, 25 bp, Probe sequence
atttattctcagtacctcagacgat

SEQ ID NO: 206783 - DNA, 25 bp, Probe sequence
atacagaacacaaacaactcacatt

SEQ ID NO: 206784 - DNA, 25 bp, Probe sequence
atggcatcctcaagatttaaatgat

SEQ ID NO: 206785 - DNA, 25 bp, Probe sequence
agggagaatggcatcctcaagattt

SEQ ID NO: 206786 - DNA, 25 bp, Probe sequence
acttctcctagaatgactttcatta

SEQ ID NO: 206787 - DNA, 25 bp, Probe sequence
acagaacacaaacaactcacattat

SEQ ID NO: 206788 - DNA, 25 bp, Probe sequence
aaatttattctcagtacctcagacg

SEQ ID NO: 206789 - DNA, 25 bp, Probe sequence
aaaataatagctcaattgttattga

SEQ ID NO: 206790 - DNA, 25 bp, Probe sequence
aatactactaacaattatgaacaca

SEQ ID NO: 206791 - DNA, 25 bp, Probe sequence
cacaaacaactcacattatataata

SEQ ID NO: 206792 - DNA, 25 bp, Probe sequence
cagacgattctgattacatttgcaa

SEQ ID NO: 206793 - DNA, 25 bp, Probe sequence
cagtacctcagacgattctgattac

SEQ ID NO: 206794 - DNA, 25 bp, Probe sequence
ctcagtacctcagacgattctgatt

SEQ ID NO: 206795 - DNA, 25 bp, Probe sequence
gaatggcatcctcaagatttaaatg

SEQ ID NO: 206796 - DNA, 25 bp, Probe sequence
gaacttctcctagaatgactttcat

SEQ ID NO: 206797 - DNA, 25 bp, Probe sequence
gaacacaaacaactcacattatata

SEQ ID NO: 206798 - DNA, 25 bp, Probe sequence
gacgattctgattacatttgcaaat

SEQ ID NO: 206799 - DNA, 25 bp, Probe sequence
gagaatggcatcctcaagatttaaa

SEQ ID NO: 206800 - DNA, 25 bp, Probe sequence
gaggctaagtattatcttaatatta

SEQ ID NO: 206801 - DNA, 25 bp, Probe sequence
gattctgattacatttgcaaatata

SEQ ID NO: 206802 - DNA, 25 bp, Probe sequence
gtattatcttaatattattgaggga

SEQ ID NO: 206803 - DNA, 25 bp, Probe sequence
gtacctcagacgattctgattacat

SEQ ID NO: 206804 - DNA, 25 bp, Probe sequence
gtaattcagaggctaagtattatct

SEQ ID NO: 206805 - DNA, 25 bp, Probe sequence
gggagaatggcatcctcaagattta

SEQ ID NO: 206806 - DNA, 25 bp, Probe sequence
ggaacttctcctagaatgactttca

SEQ ID NO: 206807 - DNA, 25 bp, Probe sequence
ggcatcctcaagatttaaatgatag

SEQ ID NO: 206808 - DNA, 25 bp, Probe sequence
tctcctagaatgactttcattaagc

SEQ ID NO: 206809 - DNA, 25 bp, Probe sequence
taacaattatgaacacagaagcttt

SEQ ID NO: 206810 - DNA, 25 bp, Probe sequence
tattctcagtacctcagacgattct

SEQ ID NO: 206811 - DNA, 25 bp, Probe sequence
ttattctcagtacctcagacgattc

SEQ ID NO: 206812 - DNA, 25 bp, Probe sequence
ttctcagtacctcagacgattctga

SEQ ID NO: 206813 - DNA, 25 bp, Probe sequence
ttaaaatttattctcagtacctcag

SEQ ID NO: 206814 - DNA, 25 bp, Probe sequence
attactatatatgctccaaaggatg

SEQ ID NO: 206815 - DNA, 25 bp, Probe sequence
atgcaagagatgttactgacgaagc

SEQ ID NO: 206816 - DNA, 25 bp, Probe sequence
atggtgctaaaatggcttggcgtaa

SEQ ID NO: 206817 - DNA, 25 bp, Probe sequence
agatcgagcacttgttgaattgaac

SEQ ID NO: 206818 - DNA, 25 bp, Probe sequence
agaggctcaagctttcatagaaaac

SEQ ID NO: 206819 - DNA, 25 bp, Probe sequence
agaaactgggacatatacacataca

SEQ ID NO: 206820 - DNA, 25 bp, Probe sequence
acacgcttagcaaatcacttaggtt

SEQ ID NO: 206821 - DNA, 25 bp, Probe sequence
aaacgtttacatgacattgaactag

SEQ ID NO: 206822 - DNA, 25 bp, Probe sequence
aatggtatgcagtccctatcatttc

SEQ ID NO: 206823 - DNA, 25 bp, Probe sequence
aatcaaatgctaaccagtgcccttt

SEQ ID NO: 206824 - DNA, 25 bp, Probe sequence
caatcaattaattcgctatgctggc

SEQ ID NO: 206825 - DNA, 25 bp, Probe sequence
caaatcgttgcattggtcgtttatt

SEQ ID NO: 206826 - DNA, 25 bp, Probe sequence
cgccattatctccaacattgacgtc

SEQ ID NO: 206827 - DNA, 25 bp, Probe sequence
gctgcaaagcaattcgaactattcg

SEQ ID NO: 206828 - DNA, 25 bp, Probe sequence
gctatgctggctatgacaattgtgg

SEQ ID NO: 206829 - DNA, 25 bp, Probe sequence
gcattggtcgtttattttgggattc

SEQ ID NO: 206830 - DNA, 25 bp, Probe sequence
gcagtccctatcatttccaatatgg

SEQ ID NO: 206831 - DNA, 25 bp, Probe sequence
gaaggcgtatcaattgtcgatcatt

SEQ ID NO: 206832 - DNA, 25 bp, Probe sequence
gaagcacaacaaggtcgtcaagtta

SEQ ID NO: 206833 - DNA, 25 bp, Probe sequence
gaagaagaacttatttatggtgcta

SEQ ID NO: 206834 - DNA, 25 bp, Probe sequence
gaactatgctgtgtatcattccttt

SEQ ID NO: 206835 - DNA, 25 bp, Probe sequence
gaaattggcgtacgtaactttattg

SEQ ID NO: 206836 - DNA, 25 bp, Probe sequence
gacaattgtggtgatcctgctgaaa

SEQ ID NO: 206837 - DNA, 25 bp, Probe sequence
gacgaagcatcgttcttatcatcaa

SEQ ID NO: 206838 - DNA, 25 bp, Probe sequence
gatgattaccgttacaatttactag

SEQ ID NO: 206839 - DNA, 25 bp, Probe sequence
gttaccggaaaatggtcttggctag

SEQ ID NO: 206840 - DNA, 25 bp, Probe sequence
gttgcagatgcgtttgaatttgata

SEQ ID NO: 206841 - DNA, 25 bp, Probe sequence
gttaccactgatttaccaattacct

SEQ ID NO: 206842 - DNA, 25 bp, Probe sequence
gtactaattttgacgtgttaccact

SEQ ID NO: 206843 - DNA, 25 bp, Probe sequence
gtcgatcatttgaccgctgcaaagc

SEQ ID NO: 206844 - DNA, 25 bp, Probe sequence
ggatggacctaaaattttcaacaat

SEQ ID NO: 206845 - DNA, 25 bp, Probe sequence
ggcttggcgtaattcaaatcgttgc

SEQ ID NO: 206846 - DNA, 25 bp, Probe sequence
tggacttaaaaatcggtggcattgt

SEQ ID NO: 206847 - DNA, 25 bp, Probe sequence
ttttgggattcgttaaatgtcattg

SEQ ID NO: 206848 - DNA, 25 bp, Probe sequence
attacaccaatgcatgataaacctg

SEQ ID NO: 206849 - DNA, 25 bp, Probe sequence
atttgactatgattatgtcgacagt

SEQ ID NO: 206850 - DNA, 25 bp, Probe sequence
aggccctaaaggtacattttcatat

SEQ ID NO: 206851 - DNA, 25 bp, Probe sequence
agttgcagatgatgacacatcgatt

SEQ ID NO: 206852 - DNA, 25 bp, Probe sequence
acaacaaattacatacatcaacatc

SEQ ID NO: 206853 - DNA, 25 bp, Probe sequence
aaaagtgtattctattgcaccagca

SEQ ID NO: 206854 - DNA, 25 bp, Probe sequence
aatggcgttgcagcaattgcacctt

SEQ ID NO: 206855 - DNA, 25 bp, Probe sequence
caattatattatttaggccctaaag

SEQ ID NO: 206856 - DNA, 25 bp, Probe sequence
cacatcgattggtgttgtccctatt

SEQ ID NO: 206857 - DNA, 25 bp, Probe sequence
catacatcaacatcaatttgactat

SEQ ID NO: 206858 - DNA, 25 bp, Probe sequence
cattttcatatttggcttgtcgtca

SEQ ID NO: 206859 - DNA, 25 bp, Probe sequence
gcagcaatttgatcaaaatgcgaca

SEQ ID NO: 206860 - DNA, 25 bp, Probe sequence
gcacagcaagatgtctttgcacacg

SEQ ID NO: 206861 - DNA, 25 bp, Probe sequence
gaagcttatggttttacacctattg

SEQ ID NO: 206862 - DNA, 25 bp, Probe sequence
gactatccacataacgtgacacgtt

SEQ ID NO: 206863 - DNA, 25 bp, Probe sequence
gagtctcgtcctttaaaaacacaat

SEQ ID NO: 206864 - DNA, 25 bp, Probe sequence
gatgtttttaattacaccaatgcat

SEQ ID NO: 206865 - DNA, 25 bp, Probe sequence
tgcagcaattgcacctttaggtagt

SEQ ID NO: 206866 - DNA, 25 bp, Probe sequence
gtttagatattaactttgcattata

SEQ ID NO: 206867 - DNA, 25 bp, Probe sequence
gtatgtatcgatttttcgttcaggc

SEQ ID NO: 206868 - DNA, 25 bp, Probe sequence
gtcattgctattttagaaaccttag

SEQ ID NO: 206869 - DNA, 25 bp, Probe sequence
gtctttgcacacggtgaaatacgtt

SEQ ID NO: 206870 - DNA, 25 bp, Probe sequence
gtcgacagtacaattcaaagtttga

SEQ ID NO: 206871 - DNA, 25 bp, Probe sequence
gtggcagatgcacttgcacagcaag

SEQ ID NO: 206872 - DNA, 25 bp, Probe sequence
gtgtgcttaatacatttgctttgtt

SEQ ID NO: 206873 - DNA, 25 bp, Probe sequence
ggtgttgtccctattgaaaattcta

SEQ ID NO: 206874 - DNA, 25 bp, Probe sequence
ggttttacacctattgatacacata

SEQ ID NO: 206875 - DNA, 25 bp, Probe sequence
ggctgattctgcaattacaaccgat

SEQ ID NO: 206876 - DNA, 25 bp, Probe sequence
tgcaccagcaatcagtcaaacaaca

SEQ ID NO: 206877 - DNA, 25 bp, Probe sequence
tcgatttttcgttcaggctgattct

SEQ ID NO: 206878 - DNA, 25 bp, Probe sequence
tcaacattgtggcagatgcacttgc

SEQ ID NO: 206879 - DNA, 25 bp, Probe sequence
tacacatattgaagactatccacat

SEQ ID NO: 206880 - DNA, 25 bp, Probe sequence
tatcctggattgagtctcgtccttt

SEQ ID NO: 206881 - DNA, 25 bp, Probe sequence
tttggcttgtcgtcagtatttttct

SEQ ID NO: 206882 - DNA, 25 bp, Probe sequence
attcccaccacacaatatcgtagat

SEQ ID NO: 206883 - DNA, 25 bp, Probe sequence
atttcaaaaactcattaggtgcaga

SEQ ID NO: 206884 - DNA, 25 bp, Probe sequence
atttacatgacattcatcatcctga

SEQ ID NO: 206885 - DNA, 25 bp, Probe sequence
atatattctttttaatggatttaca

SEQ ID NO: 206886 - DNA, 25 bp, Probe sequence
atgacacatcgcgcactattagttg

SEQ ID NO: 206887 - DNA, 25 bp, Probe sequence
atgacattcatcatcctgaaagtaa

SEQ ID NO: 206888 - DNA, 25 bp, Probe sequence
agggcatgaatgggcacttgcacat

SEQ ID NO: 206889 - DNA, 25 bp, Probe sequence
agtcgaaatcgttggtgtatgtacc

SEQ ID NO: 206890 - DNA, 25 bp, Probe sequence
agttgttgactattcatatgacttt

SEQ ID NO: 206891 - DNA, 25 bp, Probe sequence
aaatttcagtacctgctgagggagt

SEQ ID NO: 206892 - DNA, 25 bp, Probe sequence
aaagcgcaacctaatgtacatttca

SEQ ID NO: 206893 - DNA, 25 bp, Probe sequence
aaaacgcgctatgattcgttctttg

SEQ ID NO: 206894 - DNA, 25 bp, Probe sequence
aacatgcggtaaacctggacaaaat

SEQ ID NO: 206895 - DNA, 25 bp, Probe sequence
aattattatcaagaccatatattct

SEQ ID NO: 206896 - DNA, 25 bp, Probe sequence
cagcaatttctgcatacaacttagg

SEQ ID NO: 206897 - DNA, 25 bp, Probe sequence
catcgcgcactattagttgttgact

SEQ ID NO: 206898 - DNA, 25 bp, Probe sequence
cgctatgattcgttctttggtaccc

SEQ ID NO: 206899 - DNA, 25 bp, Probe sequence
cccaccacacaatatcgtagataca

SEQ ID NO: 206900 - DNA, 25 bp, Probe sequence
gcgtgttacatacagcaatttctgc

SEQ ID NO: 206901 - DNA, 25 bp, Probe sequence
gaagtattaatcaagtcgaaatcgt

SEQ ID NO: 206902 - DNA, 25 bp, Probe sequence
gaagattttattgtttctcgtatca

SEQ ID NO: 206903 - DNA, 25 bp, Probe sequence
gaaagtaaattattcccaccacaca

SEQ ID NO: 206904 - DNA, 25 bp, Probe sequence
gacggcttactaacatgcggtaaac

SEQ ID NO: 206905 - DNA, 25 bp, Probe sequence
gactattcatatgactttatcgcag

SEQ ID NO: 206906 - DNA, 25 bp, Probe sequence
gagggagtggcttcatttaatcaaa

SEQ ID NO: 206907 - DNA, 25 bp, Probe sequence
gtacctgctgagggagtggcttcat

SEQ ID NO: 206908 - DNA, 25 bp, Probe sequence
gggcacttgcacatttcaaaaactc

SEQ ID NO: 206909 - DNA, 25 bp, Probe sequence
ggtgcagaggtagaacaacacgttt

SEQ ID NO: 206910 - DNA, 25 bp, Probe sequence
ggcttcatttaatcaaaaagggcat

SEQ ID NO: 206911 - DNA, 25 bp, Probe sequence
tgtacatttcattgataaaacgcgc

SEQ ID NO: 206912 - DNA, 25 bp, Probe sequence
tacgaaacaattaaagcgcaaccta

SEQ ID NO: 206913 - DNA, 25 bp, Probe sequence
taccccgcttgatagtttattgaga

SEQ ID NO: 206914 - DNA, 25 bp, Probe sequence
ttggtaccccgcttgatagtttatt

SEQ ID NO: 206915 - DNA, 25 bp, Probe sequence
ttgtttctcgtatcaatgactttaa

SEQ ID NO: 206916 - DNA, 25 bp, Probe sequence
atagcttacttttcaaatcaccaac

SEQ ID NO: 206917 - DNA, 25 bp, Probe sequence
atgacatggccttcttatctggtgt

SEQ ID NO: 206918 - DNA, 25 bp, Probe sequence
atgtacctgctccggaattattaac

SEQ ID NO: 206919 - DNA, 25 bp, Probe sequence
agtgcagaaactcaattcgcgttag

SEQ ID NO: 206920 - DNA, 25 bp, Probe sequence
agttaatgctgttgaccttgacgaa

SEQ ID NO: 206921 - DNA, 25 bp, Probe sequence
aaagcaggtgcttcaacaactgata

SEQ ID NO: 206922 - DNA, 25 bp, Probe sequence
aaacaaatcgtacctcaaatcactg

SEQ ID NO: 206923 - DNA, 25 bp, Probe sequence
aactcaattcgcgttagatacattt

SEQ ID NO: 206924 - DNA, 25 bp, Probe sequence
caaatcaccaacatgtacacaacaa

SEQ ID NO: 206925 - DNA, 25 bp, Probe sequence
gctgttgaccttgacgaagtgttaa

SEQ ID NO: 206926 - DNA, 25 bp, Probe sequence
gctaaatcatttactatgggtgact

SEQ ID NO: 206927 - DNA, 25 bp, Probe sequence
gaattgcaaatttcgaaactgctgg

SEQ ID NO: 206928 - DNA, 25 bp, Probe sequence
gcaatttcatctgcgattattatgg

SEQ ID NO: 206929 - DNA, 25 bp, Probe sequence
gaattcttattaaacatggatgcta

SEQ ID NO: 206930 - DNA, 25 bp, Probe sequence
gaaccagttggttgtacagctacaa

SEQ ID NO: 206931 - DNA, 25 bp, Probe sequence
gaacgtggctttgaaattaaacctg

SEQ ID NO: 206932 - DNA, 25 bp, Probe sequence
gaaatgttagctgtaagtgcacaag

SEQ ID NO: 206933 - DNA, 25 bp, Probe sequence
gacactgatgcaatttcatctgcga

SEQ ID NO: 206934 - DNA, 25 bp, Probe sequence
gaggtaattcaggagccaaagcata

SEQ ID NO: 206935 - DNA, 25 bp, Probe sequence
gatacgattgcctctgctacaatta

SEQ ID NO: 206936 - DNA, 25 bp, Probe sequence
gattgcctctgctacaattaagcat

SEQ ID NO: 206937 - DNA, 25 bp, Probe sequence
gtacttgttgttactgacatcatta

SEQ ID NO: 206938 - DNA, 25 bp, Probe sequence
gtgactcgtattgcacaagttaatg

SEQ ID NO: 206939 - DNA, 25 bp, Probe sequence
gggtgactatgtgactcgtattgca

SEQ ID NO: 206940 - DNA, 25 bp, Probe sequence
ggagccaaagcataccgtttaggtg

SEQ ID NO: 206941 - DNA, 25 bp, Probe sequence
ggacataagaatccagacactgatg

SEQ ID NO: 206942 - DNA, 25 bp, Probe sequence
ggcgaagcattcaatgttcaattag

SEQ ID NO: 206943 - DNA, 25 bp, Probe sequence
tgatcataacgaattccaacaaagt

SEQ ID NO: 206944 - DNA, 25 bp, Probe sequence
tcgtacctcaaatcactgaagcatt

SEQ ID NO: 206945 - DNA, 25 bp, Probe sequence
taagcatgtaattgatcatcacaga

SEQ ID NO: 206946 - DNA, 25 bp, Probe sequence
tacatttaatgtacctgctccggaa

SEQ ID NO: 206947 - DNA, 25 bp, Probe sequence
taccgtttaggtgatgtgagtgcag

SEQ ID NO: 206948 - DNA, 25 bp, Probe sequence
tatgacttatttgtacttgttgtta

SEQ ID NO: 206949 - DNA, 25 bp, Probe sequence
ttatgttatcgtgctgaaccagttg

SEQ ID NO: 206950 - DNA, 25 bp, Probe sequence
atgccggccaaacatgtgttgcacc

SEQ ID NO: 206951 - DNA, 25 bp, Probe sequence
atgtagacacacctttatatttatt

SEQ ID NO: 206952 - DNA, 25 bp, Probe sequence
atggccgcattgtaaaccttaaaca

SEQ ID NO: 206953 - DNA, 25 bp, Probe sequence
agctgccagcgaaaatttagttcct

SEQ ID NO: 206954 - DNA, 25 bp, Probe sequence
accttaaacattatcatcgtctgac

SEQ ID NO: 206955 - DNA, 25 bp, Probe sequence
acattgatgcacctagcgaatccta

SEQ ID NO: 206956 - DNA, 25 bp, Probe sequence
acagccctatcaaaaacgttgcgtg

SEQ ID NO: 206957 - DNA, 25 bp, Probe sequence
aacgttgcgtgaattttatggtcaa

SEQ ID NO: 206958 - DNA, 25 bp, Probe sequence
aaccaacattgttagatcacgttac

SEQ ID NO: 206959 - DNA, 25 bp, Probe sequence
caaaatcgtttatcaagctgccagc

SEQ ID NO: 206960 - DNA, 25 bp, Probe sequence
caaagtccagattatggccgcattg

SEQ ID NO: 206961 - DNA, 25 bp, Probe sequence
gcctcaggtatgggacgctatcatg

SEQ ID NO: 206962 - DNA, 25 bp, Probe sequence
gcgaatcctaaattaccatttggtg

SEQ ID NO: 206963 - DNA, 25 bp, Probe sequence
gcggcggcgctattaatgatacatt

SEQ ID NO: 206964 - DNA, 25 bp, Probe sequence
gctactgaaattggcataactttga

SEQ ID NO: 206965 - DNA, 25 bp, Probe sequence
gcaccatttaactatccttttcaac

SEQ ID NO: 206966 - DNA, 25 bp, Probe sequence
gaatattgtatttggtggtcatagt

SEQ ID NO: 206967 - DNA, 25 bp, Probe sequence
gaatcaggtgtccatttaccaccat

SEQ ID NO: 206968 - DNA, 25 bp, Probe sequence
gaagcaatagcctttattcaccaaa

SEQ ID NO: 206969 - DNA, 25 bp, Probe sequence
gaaaatttagttcctgtgacattag

SEQ ID NO: 206970 - DNA, 25 bp, Probe sequence
gagagcgatattttagaagcactat

SEQ ID NO: 206971 - DNA, 25 bp, Probe sequence
gatgatttaatcacagccctatcaa

SEQ ID NO: 206972 - DNA, 25 bp, Probe sequence
gattttaacgtatcagtcattggat

SEQ ID NO: 206973 - DNA, 25 bp, Probe sequence
gttaattcacttaccttttgactat

SEQ ID NO: 206974 - DNA, 25 bp, Probe sequence
gtgagcgcatttgttttgggaaatt

SEQ ID NO: 206975 - DNA, 25 bp, Probe sequence
gtgttgcaccagattacattttagt

SEQ ID NO: 206976 - DNA, 25 bp, Probe sequence
gggacgctatcatggtaaatattca

SEQ ID NO: 206977 - DNA, 25 bp, Probe sequence
ggtaaatctccagtcatcgttgatg

SEQ ID NO: 206978 - DNA, 25 bp, Probe sequence
tggtcctatcttaccgattttaacg

SEQ ID NO: 206979 - DNA, 25 bp, Probe sequence
tcattgcaccatttaactatccttt

SEQ ID NO: 206980 - DNA, 25 bp, Probe sequence
taatcggtgctattgcagcaggtaa

SEQ ID NO: 206981 - DNA, 25 bp, Probe sequence
taaagcttttttcaatacacaacaa

SEQ ID NO: 206982 - DNA, 25 bp, Probe sequence
tatcatttggcggcggcgctattaa

SEQ ID NO: 206983 - DNA, 25 bp, Probe sequence
tttgactatgtcttctttacaggaa

SEQ ID NO: 206984 - DNA, 25 bp, Probe sequence
attgttggctatagtggtctaacct

SEQ ID NO: 206985 - DNA, 25 bp, Probe sequence
attatatctggttaccttattgaga

SEQ ID NO: 206986 - DNA, 25 bp, Probe sequence
attatttattcgcctatagtttcag

SEQ ID NO: 206987 - DNA, 25 bp, Probe sequence
atttgggtcacatcaattgtggcaa

SEQ ID NO: 206988 - DNA, 25 bp, Probe sequence
atctcctcatatattgctattagac

SEQ ID NO: 206989 - DNA, 25 bp, Probe sequence
agtggtctaacctatcttaatcagt

SEQ ID NO: 206990 - DNA, 25 bp, Probe sequence
agtacttatttatcaagcgacgatg

SEQ ID NO: 206991 - DNA, 25 bp, Probe sequence
acctatcttaatcagtttggcttat

SEQ ID NO: 206992 - DNA, 25 bp, Probe sequence
aaattattggtttttgtgttgcata

SEQ ID NO: 206993 - DNA, 25 bp, Probe sequence
aaagctttaatcactggtttgctga

SEQ ID NO: 206994 - DNA, 25 bp, Probe sequence
catttttcagaaacactagctaggt

SEQ ID NO: 206995 - DNA, 25 bp, Probe sequence
gcctatagtttcagaacaacgcttt

SEQ ID NO: 206996 - DNA, 25 bp, Probe sequence
gcgacgatggtgataatgcttgtgt

SEQ ID NO: 206997 - DNA, 25 bp, Probe sequence
gctaatgattaatacggtcgtcgtc

SEQ ID NO: 206998 - DNA, 25 bp, Probe sequence
gctaggttagggattgtgttgggtg

SEQ ID NO: 206999 - DNA, 25 bp, Probe sequence
gacagcatttataccgtttatagca

SEQ ID NO: 207000 - DNA, 25 bp, Probe sequence
gactttgaaagtacgattgattagc

SEQ ID NO: 207001 - DNA, 25 bp, Probe sequence
gttttaacaattggtgctagcatgc

SEQ ID NO: 207002 - DNA, 25 bp, Probe sequence
gggtgaattttcaatctcctcatat

SEQ ID NO: 207003 - DNA, 25 bp, Probe sequence
ggtgataatgcttgtgttcatgggc

SEQ ID NO: 207004 - DNA, 25 bp, Probe sequence
ggtcgtcgtcattttactcacgtat

SEQ ID NO: 207005 - DNA, 25 bp, Probe sequence
ggtgctagcatgcttgttgctggtg

SEQ ID NO: 207006 - DNA, 25 bp, Probe sequence
ggtttgctgatttatattgttggct

SEQ ID NO: 207007 - DNA, 25 bp, Probe sequence
ggttacctcaagaccgaaatcaagt

SEQ ID NO: 207008 - DNA, 25 bp, Probe sequence
tacagctaattattacgacagcatt

SEQ ID NO: 207009 - DNA, 25 bp, Probe sequence
tagcagcttgtatatttttaattgt

SEQ ID NO: 207010 - DNA, 25 bp, Probe sequence
tagtggttctaaaatttccattgtc

SEQ ID NO: 207011 - DNA, 25 bp, Probe sequence
taggtggcttgatgtatggctacag

SEQ ID NO: 207012 - DNA, 25 bp, Probe sequence
tttggcttattagttgtttttatga

SEQ ID NO: 207013 - DNA, 25 bp, Probe sequence
tttactcacgtattcaatctcgaaa

SEQ ID NO: 207014 - DNA, 25 bp, Probe sequence
ttatatgttattgatttcggggttc

SEQ ID NO: 207015 - DNA, 25 bp, Probe sequence
ttatgataattgcgactgtaggtga

SEQ ID NO: 207016 - DNA, 25 bp, Probe sequence
ttattttatatatttggttacctca

SEQ ID NO: 207017 - DNA, 25 bp, Probe sequence
ttcggggttcagtatcatcatgatg

SEQ ID NO: 207018 - DNA, 25 bp, Probe sequence
attcggctacacgaggcgctacaat

SEQ ID NO: 207019 - DNA, 25 bp, Probe sequence
atacctatgggaagaggcatgatta

SEQ ID NO: 207020 - DNA, 25 bp, Probe sequence
atcttagatattgtcttgttacctt

SEQ ID NO: 207021 - DNA, 25 bp, Probe sequence
atgcccaacctgtagaagttaaatt

SEQ ID NO: 207022 - DNA, 25 bp, Probe sequence
atggctttgtagattcagtacgctt

SEQ ID NO: 207023 - DNA, 25 bp, Probe sequence
agatgatcaattggctgagctaaac

SEQ ID NO: 207024 - DNA, 25 bp, Probe sequence
agaaactgattatcgtaacgttcca

SEQ ID NO: 207025 - DNA, 25 bp, Probe sequence
accatttatcgtattgatgctatta

SEQ ID NO: 207026 - DNA, 25 bp, Probe sequence
actagataacaatatacctatggga

SEQ ID NO: 207027 - DNA, 25 bp, Probe sequence
acaatatgcccaacctgtagaagtt

SEQ ID NO: 207028 - DNA, 25 bp, Probe sequence
acaatacattatcgaccaaaacaaa

SEQ ID NO: 207029 - DNA, 25 bp, Probe sequence
aatttctatctttgatatcttagat

SEQ ID NO: 207030 - DNA, 25 bp, Probe sequence
aattcgaaacgattcaacaatacat

SEQ ID NO: 207031 - DNA, 25 bp, Probe sequence
aattacacgtcctgtattatcagat

SEQ ID NO: 207032 - DNA, 25 bp, Probe sequence
caacgtcaaaaaatttctatctttg

SEQ ID NO: 207033 - DNA, 25 bp, Probe sequence
cacgtcctgtattatcagatgatca

SEQ ID NO: 207034 - DNA, 25 bp, Probe sequence
cgaggcgctacaatatgcccaacct

SEQ ID NO: 207035 - DNA, 25 bp, Probe sequence
gcgctacaatatgcccaacctgtag

SEQ ID NO: 207036 - DNA, 25 bp, Probe sequence
gaccaaaacaaaattacacgtcctg

SEQ ID NO: 207037 - DNA, 25 bp, Probe sequence
gaggcatgattaaatgggctccttt

SEQ ID NO: 207038 - DNA, 25 bp, Probe sequence
gatggttatgtttacaatcagcaac

SEQ ID NO: 207039 - DNA, 25 bp, Probe sequence
gattaaatgggctccttttgcaaca

SEQ ID NO: 207040 - DNA, 25 bp, Probe sequence
gattatcgtaacgttccaagagaat

SEQ ID NO: 207041 - DNA, 25 bp, Probe sequence
gattcaacaatacattatcgaccaa

SEQ ID NO: 207042 - DNA, 25 bp, Probe sequence
gattcagtacgcttaaccatttatc

SEQ ID NO: 207043 - DNA, 25 bp, Probe sequence
gtttacaatcagcaacaacgtcaaa

SEQ ID NO: 207044 - DNA, 25 bp, Probe sequence
gtacgcttaaccatttatcgtattg

SEQ ID NO: 207045 - DNA, 25 bp, Probe sequence
ggctacacgaggcgctacaatatgc

SEQ ID NO: 207046 - DNA, 25 bp, Probe sequence
ggctgagctaaacattcggctacac

SEQ ID NO: 207047 - DNA, 25 bp, Probe sequence
tgggctccttttgcaacattacccg

SEQ ID NO: 207048 - DNA, 25 bp, Probe sequence
tccttttgcaacattacccgaacaa

SEQ ID NO: 207049 - DNA, 25 bp, Probe sequence
taaacattcggctacacgaggcgct

SEQ ID NO: 207050 - DNA, 25 bp, Probe sequence
taacgttccaagagaattactagat

SEQ ID NO: 207051 - DNA, 25 bp, Probe sequence
ttgcaacattacccgaacaattcga

SEQ ID NO: 207052 - DNA, 25 bp, Probe sequence
attggtcctgtatcaagggtaactg

SEQ ID NO: 207053 - DNA, 25 bp, Probe sequence
attaccaccctgcaacttatgatgg

SEQ ID NO: 207054 - DNA, 25 bp, Probe sequence
atcatggttagatggtcaagacctt

SEQ ID NO: 207055 - DNA, 25 bp, Probe sequence
atcaacctacagatagcggtttagc

SEQ ID NO: 207056 - DNA, 25 bp, Probe sequence
atgactacagcatttaagttattca

SEQ ID NO: 207057 - DNA, 25 bp, Probe sequence
atgggctataactttatgcaccgga

SEQ ID NO: 207058 - DNA, 25 bp, Probe sequence
agctcatttagctacatactgatgg

SEQ ID NO: 207059 - DNA, 25 bp, Probe sequence
acgtgtcccacgtttcgatatagat

SEQ ID NO: 207060 - DNA, 25 bp, Probe sequence
aaatggcttcaacaaacacctcttc

SEQ ID NO: 207061 - DNA, 25 bp, Probe sequence
aaagtatactcaaaatgccaacacg

SEQ ID NO: 207062 - DNA, 25 bp, Probe sequence
aactgcatattttacattgggagaa

SEQ ID NO: 207063 - DNA, 25 bp, Probe sequence
aataccacacagaagctcatttagc

SEQ ID NO: 207064 - DNA, 25 bp, Probe sequence
aatatcactcactttactggcaata

SEQ ID NO: 207065 - DNA, 25 bp, Probe sequence
ctggcaccatccatacatcaatgta

SEQ ID NO: 207066 - DNA, 25 bp, Probe sequence
gcggtttagctcaaattggtcctgt

SEQ ID NO: 207067 - DNA, 25 bp, Probe sequence
ccgagatcaatagatgttcgttatg

SEQ ID NO: 207068 - DNA, 25 bp, Probe sequence
gcgcgtaccatttcacaaactaatg

SEQ ID NO: 207069 - DNA, 25 bp, Probe sequence
gacttttagaggttcacatttcgag

SEQ ID NO: 207070 - DNA, 25 bp, Probe sequence
gagtcaggattaactatgggctata

SEQ ID NO: 207071 - DNA, 25 bp, Probe sequence
gatggacaaatcattgaaccatgca

SEQ ID NO: 207072 - DNA, 25 bp, Probe sequence
gattggtcgtctaattcttgaaaat

SEQ ID NO: 207073 - DNA, 25 bp, Probe sequence
gggagaaaatgcgccaccagaaata

SEQ ID NO: 207074 - DNA, 25 bp, Probe sequence
ggtcaagaccttaatatcactcact

SEQ ID NO: 207075 - DNA, 25 bp, Probe sequence
ggttcacatttcgagttaggtgtta

SEQ ID NO: 207076 - DNA, 25 bp, Probe sequence
tggacattatcgttttaccgattta

SEQ ID NO: 207077 - DNA, 25 bp, Probe sequence
tgtatgttatatgattggtcgtcta

SEQ ID NO: 207078 - DNA, 25 bp, Probe sequence
tgaaccatgcaattgttgaagtgac

SEQ ID NO: 207079 - DNA, 25 bp, Probe sequence
tcaaggcaaagacttcatggttaga

SEQ ID NO: 207080 - DNA, 25 bp, Probe sequence
tcaacaaacacctcttctaaaaaat

SEQ ID NO: 207081 - DNA, 25 bp, Probe sequence
tcaaaagctggtctggcaccatcca

SEQ ID NO: 207082 - DNA, 25 bp, Probe sequence
taaactattcaaaagctggtctggc

SEQ ID NO: 207083 - DNA, 25 bp, Probe sequence
tacgcacctcaaatatgggaagaat

SEQ ID NO: 207084 - DNA, 25 bp, Probe sequence
tagataccgacttaacttttgccaa

SEQ ID NO: 207085 - DNA, 25 bp, Probe sequence
ttactggcaatatagataccgactt

SEQ ID NO: 207086 - DNA, 25 bp, Probe sequence
attaccgagcaaagatcatccagac

SEQ ID NO: 207087 - DNA, 25 bp, Probe sequence
atctatcaatcatttgagttaccag

SEQ ID NO: 207088 - DNA, 25 bp, Probe sequence
accaagagcaaatgaagtccaaaaa

SEQ ID NO: 207089 - DNA, 25 bp, Probe sequence
accgttctcagtatctatcaatcat

SEQ ID NO: 207090 - DNA, 25 bp, Probe sequence
actgatcgatcaatatttaacaaat

SEQ ID NO: 207091 - DNA, 25 bp, Probe sequence
acacatcagtgaagcattaaattta

SEQ ID NO: 207092 - DNA, 25 bp, Probe sequence
aaatcacgtgcaattcctatcttcg

SEQ ID NO: 207093 - DNA, 25 bp, Probe sequence
aaatggtaaatcacgtgcaattcct

SEQ ID NO: 207094 - DNA, 25 bp, Probe sequence
aaagcagtttataattccatcctaa

SEQ ID NO: 207095 - DNA, 25 bp, Probe sequence
aaaaatttgtaactgatgttcgtgc

SEQ ID NO: 207096 - DNA, 25 bp, Probe sequence
aaaactgacgcttcattttggaaag

SEQ ID NO: 207097 - DNA, 25 bp, Probe sequence
aagaaacacacttagttatatcaaa

SEQ ID NO: 207098 - DNA, 25 bp, Probe sequence
aagatcatccagactatgcagattt

SEQ ID NO: 207099 - DNA, 25 bp, Probe sequence
aatctcccaattctaaaacacatca

SEQ ID NO: 207100 - DNA, 25 bp, Probe sequence
ctcccaattctaaaacacatcagtg

SEQ ID NO: 207101 - DNA, 25 bp, Probe sequence
cgcgtgttccatagagatgatgata

SEQ ID NO: 207102 - DNA, 25 bp, Probe sequence
gctataaaactgacgcttcattttg

SEQ ID NO: 207103 - DNA, 25 bp, Probe sequence
gcaattcctatcttcgtattcttga

SEQ ID NO: 207104 - DNA, 25 bp, Probe sequence
gaagatgattcacgcatcaaaaaaa

SEQ ID NO: 207105 - DNA, 25 bp, Probe sequence
gaagactggtgtggagatgcaatga

SEQ ID NO: 207106 - DNA, 25 bp, Probe sequence
gaaacagtttggggaccaagagcaa

SEQ ID NO: 207107 - DNA, 25 bp, Probe sequence
gacaaatcaagataccgttctcagt

SEQ ID NO: 207108 - DNA, 25 bp, Probe sequence
gacgcttcattttggaaagcagttt

SEQ ID NO: 207109 - DNA, 25 bp, Probe sequence
gagttaccagaagatgattcacgca

SEQ ID NO: 207110 - DNA, 25 bp, Probe sequence
gatgatgatacaaaactgatcgatc

SEQ ID NO: 207111 - DNA, 25 bp, Probe sequence
gatgcaatgatgaatctcccaattc

SEQ ID NO: 207112 - DNA, 25 bp, Probe sequence
gttctcagtatctatcaatcatttg

SEQ ID NO: 207113 - DNA, 25 bp, Probe sequence
gtattcttgaatgatcaattcgaac

SEQ ID NO: 207114 - DNA, 25 bp, Probe sequence
gtaattactgaagactggtgtggag

SEQ ID NO: 207115 - DNA, 25 bp, Probe sequence
tcatccagactatgcagatttagaa

SEQ ID NO: 207116 - DNA, 25 bp, Probe sequence
tcacgtgcaattcctatcttcgtat

SEQ ID NO: 207117 - DNA, 25 bp, Probe sequence
tagccaacccttaaatgaatacatt

SEQ ID NO: 207118 - DNA, 25 bp, Probe sequence
ttcaaaaatagccaacccttaaatg

SEQ ID NO: 207119 - DNA, 25 bp, Probe sequence
ttcctatcttcgtattcttgaatga

SEQ ID NO: 207120 - DNA, 25 bp, Probe sequence
atgaatcctttagcccaaagcttaa

SEQ ID NO: 207121 - DNA, 25 bp, Probe sequence
atccgacaggttacacacctacgca

SEQ ID NO: 207122 - DNA, 25 bp, Probe sequence
agagctatcaatcgacaacatgtca

SEQ ID NO: 207123 - DNA, 25 bp, Probe sequence
aaatgttgcgtgacaatccagagct

SEQ ID NO: 207124 - DNA, 25 bp, Probe sequence
aaaccttcaaacatatcctatcttt

SEQ ID NO: 207125 - DNA, 25 bp, Probe sequence
aaagcgctgttaagcatgtattaaa

SEQ ID NO: 207126 - DNA, 25 bp, Probe sequence
aactctggatactttatggcaataa

SEQ ID NO: 207127 - DNA, 25 bp, Probe sequence
aactccagatgaaatattcccttat

SEQ ID NO: 207128 - DNA, 25 bp, Probe sequence
aagaacgctatgaagtcactaagga

SEQ ID NO: 207129 - DNA, 25 bp, Probe sequence
aatgcaactataggtatggcgacaa

SEQ ID NO: 207130 - DNA, 25 bp, Probe sequence
aatttttcgcatggggattccgtgt

SEQ ID NO: 207131 - DNA, 25 bp, Probe sequence
cttccaacacaaagcgctgttaagc

SEQ ID NO: 207132 - DNA, 25 bp, Probe sequence
ctaaggaagttgtctatgctgatca

SEQ ID NO: 207133 - DNA, 25 bp, Probe sequence
ccaccacaaggcatcgaagaattac

SEQ ID NO: 207134 - DNA, 25 bp, Probe sequence
gctgatcaatatcattcacattggc

SEQ ID NO: 207135 - DNA, 25 bp, Probe sequence
gcaatgtttaatgatttaactccag

SEQ ID NO: 207136 - DNA, 25 bp, Probe sequence
gaattacgtgatttatggcaacaaa

SEQ ID NO: 207137 - DNA, 25 bp, Probe sequence
gaatgcattaacacatggtttatct

SEQ ID NO: 207138 - DNA, 25 bp, Probe sequence
gaagatgtgtatactcaatcattat

SEQ ID NO: 207139 - DNA, 25 bp, Probe sequence
gaaaaatgtttgcatcatctttaga

SEQ ID NO: 207140 - DNA, 25 bp, Probe sequence
gacaatccagagctatcaatcgaca

SEQ ID NO: 207141 - DNA, 25 bp, Probe sequence
gacgggcattatactactgattcac

SEQ ID NO: 207142 - DNA, 25 bp, Probe sequence
gatatcccacatgtatttgattcaa

SEQ ID NO: 207143 - DNA, 25 bp, Probe sequence
gtagaagctttacaatcatacaata

SEQ ID NO: 207144 - DNA, 25 bp, Probe sequence
ggtgcaaaccttcaaacatatccta

SEQ ID NO: 207145 - DNA, 25 bp, Probe sequence
ggttacacacctacgcataaagaag

SEQ ID NO: 207146 - DNA, 25 bp, Probe sequence
ggaacgtctgatcaaacaactaaag

SEQ ID NO: 207147 - DNA, 25 bp, Probe sequence
ggcattttatctcaatctgctgaag

SEQ ID NO: 207148 - DNA, 25 bp, Probe sequence
tgaacaacttcaacagtcaaatgca

SEQ ID NO: 207149 - DNA, 25 bp, Probe sequence
tcaacagtcaaatgcaactgccttt

SEQ ID NO: 207150 - DNA, 25 bp, Probe sequence
tactcaatcattatttactgcatta

SEQ ID NO: 207151 - DNA, 25 bp, Probe sequence
tatgactttaactctggatacttta

SEQ ID NO: 207152 - DNA, 25 bp, Probe sequence
ttatcctaataatccgacaggttac

SEQ ID NO: 207153 - DNA, 25 bp, Probe sequence
ttatgacatttggaacgtctgatca

SEQ ID NO: 207154 - DNA, 25 bp, Probe sequence
atagtgccaaagccgaatctaagaa

SEQ ID NO: 207155 - DNA, 25 bp, Probe sequence
ataatgatagcaacaaaggctttgt

SEQ ID NO: 207156 - DNA, 25 bp, Probe sequence
atgcgttcccatattactacgttta

SEQ ID NO: 207157 - DNA, 25 bp, Probe sequence
atccagcatgttttcaaaagcggtt

SEQ ID NO: 207158 - DNA, 25 bp, Probe sequence
actgatttgaagttagttagtcata

SEQ ID NO: 207159 - DNA, 25 bp, Probe sequence
aaatccagcatgttttcaaaagcgg

SEQ ID NO: 207160 - DNA, 25 bp, Probe sequence
aataaaggcactccagagttcaaag

SEQ ID NO: 207161 - DNA, 25 bp, Probe sequence
aaaacctaagccatgggatgtatat

SEQ ID NO: 207162 - DNA, 25 bp, Probe sequence
aacacttgcattagcaaatttatta

SEQ ID NO: 207163 - DNA, 25 bp, Probe sequence
aaggcactccagagttcaaagatat

SEQ ID NO: 207164 - DNA, 25 bp, Probe sequence
caatagtgccaaagccgaatctaag

SEQ ID NO: 207165 - DNA, 25 bp, Probe sequence
ccagcatgttttcaaaagcggttgt

SEQ ID NO: 207166 - DNA, 25 bp, Probe sequence
gcgttcccatattactacgtttaca

SEQ ID NO: 207167 - DNA, 25 bp, Probe sequence
gaagttgtgactgaaaaacctaagc

SEQ ID NO: 207168 - DNA, 25 bp, Probe sequence
gaaaaacctaagccatgggatgtat

SEQ ID NO: 207169 - DNA, 25 bp, Probe sequence
gaaagatgatactgatttgaagtta

SEQ ID NO: 207170 - DNA, 25 bp, Probe sequence
gacaatagtgccaaagccgaatcta

SEQ ID NO: 207171 - DNA, 25 bp, Probe sequence
gactgaaaaacctaagccatgggat

SEQ ID NO: 207172 - DNA, 25 bp, Probe sequence
gatgtatatgcgttcccatattact

SEQ ID NO: 207173 - DNA, 25 bp, Probe sequence
gatactgatttgaagttagttagtc

SEQ ID NO: 207174 - DNA, 25 bp, Probe sequence
gttcccatattactacgtttacaat

SEQ ID NO: 207175 - DNA, 25 bp, Probe sequence
gtatatgcgttcccatattactacg

SEQ ID NO: 207176 - DNA, 25 bp, Probe sequence
gtgactgaaaaacctaagccatggg

SEQ ID NO: 207177 - DNA, 25 bp, Probe sequence
gtgccaaagccgaatctaagaaaga

SEQ ID NO: 207178 - DNA, 25 bp, Probe sequence
gtggattcgataatgatagcaacaa

SEQ ID NO: 207179 - DNA, 25 bp, Probe sequence
gggatgtatatgcgttcccatatta

SEQ ID NO: 207180 - DNA, 25 bp, Probe sequence
ggttgtggattcgataatgatagca

SEQ ID NO: 207181 - DNA, 25 bp, Probe sequence
tgcaacacttgcattagcaaattta

SEQ ID NO: 207182 - DNA, 25 bp, Probe sequence
tgcgttcccatattactacgtttac

SEQ ID NO: 207183 - DNA, 25 bp, Probe sequence
tcccatattactacgtttacaatga

SEQ ID NO: 207184 - DNA, 25 bp, Probe sequence
tactacgtttacaatgatttttcag

SEQ ID NO: 207185 - DNA, 25 bp, Probe sequence
tacgtttacaatgatttttcagatc

SEQ ID NO: 207186 - DNA, 25 bp, Probe sequence
tatgcgttcccatattactacgttt

SEQ ID NO: 207187 - DNA, 25 bp, Probe sequence
ttgtgactgaaaaacctaagccatg

SEQ ID NO: 207188 - DNA, 25 bp, Probe sequence
atcaaattcaattgcgaaatataat

SEQ ID NO: 207189 - DNA, 25 bp, Probe sequence
atgtatccaaactggggacaatata

SEQ ID NO: 207190 - DNA, 25 bp, Probe sequence
aggtttctatgtatccaaactgggg

SEQ ID NO: 207191 - DNA, 25 bp, Probe sequence
acccaataaatactgttgttacaag

SEQ ID NO: 207192 - DNA, 25 bp, Probe sequence
actggggacaatataaacgcgctga

SEQ ID NO: 207193 - DNA, 25 bp, Probe sequence
actccaaacccaataaatactgttg

SEQ ID NO: 207194 - DNA, 25 bp, Probe sequence
acaaggtttctatgtatccaaactg

SEQ ID NO: 207195 - DNA, 25 bp, Probe sequence
aaactggggacaatataaacgcgct

SEQ ID NO: 207196 - DNA, 25 bp, Probe sequence
aactggggacaatataaacgcgctg

SEQ ID NO: 207197 - DNA, 25 bp, Probe sequence
aaggtttctatgtatccaaactggg

SEQ ID NO: 207198 - DNA, 25 bp, Probe sequence
aatactgttgttacaaggtttctat

SEQ ID NO: 207199 - DNA, 25 bp, Probe sequence
caaggtttctatgtatccaaactgg

SEQ ID NO: 207200 - DNA, 25 bp, Probe sequence
ctatgtatccaaactggggacaata

SEQ ID NO: 207201 - DNA, 25 bp, Probe sequence
cggtcgttctcaatcaggttgggac

SEQ ID NO: 207202 - DNA, 25 bp, Probe sequence
ctggggacaatataaacgcgctgat

SEQ ID NO: 207203 - DNA, 25 bp, Probe sequence
ccctcaatcaaattcaattgcgaaa

SEQ ID NO: 207204 - DNA, 25 bp, Probe sequence
gactccaaacccaataaatactgtt

SEQ ID NO: 207205 - DNA, 25 bp, Probe sequence
gttgttacaaggtttctatgtatcc

SEQ ID NO: 207206 - DNA, 25 bp, Probe sequence
gttacaaggtttctatgtatccaaa

SEQ ID NO: 207207 - DNA, 25 bp, Probe sequence
gtttctatgtatccaaactggggac

SEQ ID NO: 207208 - DNA, 25 bp, Probe sequence
ggactccaaacccaataaatactgt

SEQ ID NO: 207209 - DNA, 25 bp, Probe sequence
ggtggcgaccttaatgttaataaag

SEQ ID NO: 207210 - DNA, 25 bp, Probe sequence
ggtcgttctcaatcaggttgggaca

SEQ ID NO: 207211 - DNA, 25 bp, Probe sequence
ggtttctatgtatccaaactgggga

SEQ ID NO: 207212 - DNA, 25 bp, Probe sequence
tggggacaatataaacgcgctgatt

SEQ ID NO: 207213 - DNA, 25 bp, Probe sequence
tgttacaaggtttctatgtatccaa

SEQ ID NO: 207214 - DNA, 25 bp, Probe sequence
tccaaacccaataaatactgttgtt

SEQ ID NO: 207215 - DNA, 25 bp, Probe sequence
tcggtcgttctcaatcaggttggga

SEQ ID NO: 207216 - DNA, 25 bp, Probe sequence
taaacaaccaaaacaattagtcaat

SEQ ID NO: 207217 - DNA, 25 bp, Probe sequence
tactgttgttacaaggtttctatgt

SEQ ID NO: 207218 - DNA, 25 bp, Probe sequence
taggtggcgaccttaatgttaataa

SEQ ID NO: 207219 - DNA, 25 bp, Probe sequence
tataggtggcgaccttaatgttaat

SEQ ID NO: 207220 - DNA, 25 bp, Probe sequence
tatataggtggcgaccttaatgtta

SEQ ID NO: 207221 - DNA, 25 bp, Probe sequence
ttctatgtatccaaactggggacaa

SEQ ID NO: 207222 - DNA, 25 bp, Probe sequence
attagtaatccgccctttcaatatt

SEQ ID NO: 207223 - DNA, 25 bp, Probe sequence
atttttacatagttgtttaatcatt

SEQ ID NO: 207224 - DNA, 25 bp, Probe sequence
atagtgctaacgtacaaattgtgat

SEQ ID NO: 207225 - DNA, 25 bp, Probe sequence
agtaatccgccctttcaatattatc

SEQ ID NO: 207226 - DNA, 25 bp, Probe sequence
agtagtcgatagtgctaacgtacaa

SEQ ID NO: 207227 - DNA, 25 bp, Probe sequence
agtcgatagtgctaacgtacaaatt

SEQ ID NO: 207228 - DNA, 25 bp, Probe sequence
aaagtagtcgatagtgctaacgtac

SEQ ID NO: 207229 - DNA, 25 bp, Probe sequence
aagtagtcgatagtgctaacgtaca

SEQ ID NO: 207230 - DNA, 25 bp, Probe sequence
aatctttgcaaatgaagtagctggt

SEQ ID NO: 207231 - DNA, 25 bp, Probe sequence
gccctttcaatattatccttcttta

SEQ ID NO: 207232 - DNA, 25 bp, Probe sequence
gcaaatgaagtagctggtaatacag

SEQ ID NO: 207233 - DNA, 25 bp, Probe sequence
gaagtagctggtaatacagtgaaag

SEQ ID NO: 207234 - DNA, 25 bp, Probe sequence
gaaagtagtcgatagtgctaacgta

SEQ ID NO: 207235 - DNA, 25 bp, Probe sequence
gatagtgctaacgtacaaattgtga

SEQ ID NO: 207236 - DNA, 25 bp, Probe sequence
gatatttttacatagttgtttaatc

SEQ ID NO: 207237 - DNA, 25 bp, Probe sequence
gatttcagaattaatctttgcaaat

SEQ ID NO: 207238 - DNA, 25 bp, Probe sequence
gtttaatcattagtaatccgccctt

SEQ ID NO: 207239 - DNA, 25 bp, Probe sequence
gtagtcgatagtgctaacgtacaaa

SEQ ID NO: 207240 - DNA, 25 bp, Probe sequence
gtagctggtaatacagtgaaagtag

SEQ ID NO: 207241 - DNA, 25 bp, Probe sequence
gtaatccgccctttcaatattatcc

SEQ ID NO: 207242 - DNA, 25 bp, Probe sequence
gtgctaacgtacaaattgtgatatt

SEQ ID NO: 207243 - DNA, 25 bp, Probe sequence
gtgaaagtagtcgatagtgctaacg

SEQ ID NO: 207244 - DNA, 25 bp, Probe sequence
tcgatagtgctaacgtacaaattgt

SEQ ID NO: 207245 - DNA, 25 bp, Probe sequence
tcattagtaatccgccctttcaata

SEQ ID NO: 207246 - DNA, 25 bp, Probe sequence
taatcattagtaatccgccctttca

SEQ ID NO: 207247 - DNA, 25 bp, Probe sequence
taatccgccctttcaatattatcct

SEQ ID NO: 207248 - DNA, 25 bp, Probe sequence
tagtcgatagtgctaacgtacaaat

SEQ ID NO: 207249 - DNA, 25 bp, Probe sequence
tagtaatccgccctttcaatattat

SEQ ID NO: 207250 - DNA, 25 bp, Probe sequence
tagtgctaacgtacaaattgtgata

SEQ ID NO: 207251 - DNA, 25 bp, Probe sequence
tttaatcattagtaatccgcccttt

SEQ ID NO: 207252 - DNA, 25 bp, Probe sequence
tttgcaaatgaagtagctggtaata

SEQ ID NO: 207253 - DNA, 25 bp, Probe sequence
ttagtaatccgccctttcaatatta

SEQ ID NO: 207254 - DNA, 25 bp, Probe sequence
ttaatcattagtaatccgccctttc

SEQ ID NO: 207255 - DNA, 25 bp, Probe sequence
ttgtgatatttttacatagttgttt

SEQ ID NO: 207256 - DNA, 25 bp, Probe sequence
attgctgaaccaactggatctggaa

SEQ ID NO: 207257 - DNA, 25 bp, Probe sequence
ataagctttcactcgatattccaag

SEQ ID NO: 207258 - DNA, 25 bp, Probe sequence
ataaggacaatgttgatttagccat

SEQ ID NO: 207259 - DNA, 25 bp, Probe sequence
atccattaatggcacatcaaatcga

SEQ ID NO: 207260 - DNA, 25 bp, Probe sequence
atgcatctggtcttacagctgtatg

SEQ ID NO: 207261 - DNA, 25 bp, Probe sequence
agatttattcgacaagtacgatatt

SEQ ID NO: 207262 - DNA, 25 bp, Probe sequence
agaccagttcctgagtatgataacg

SEQ ID NO: 207263 - DNA, 25 bp, Probe sequence
agctttcactcgatattccaagcaa

SEQ ID NO: 207264 - DNA, 25 bp, Probe sequence
agctcagttccatttattggtgaca

SEQ ID NO: 207265 - DNA, 25 bp, Probe sequence
actctgtaccagatgaagcttcact

SEQ ID NO: 207266 - DNA, 25 bp, Probe sequence
aaagatgtagcttctagttatgtag

SEQ ID NO: 207267 - DNA, 25 bp, Probe sequence
aaagctgtccatagctcagttccat

SEQ ID NO: 207268 - DNA, 25 bp, Probe sequence
aaacaatttaactctgtaccagatg

SEQ ID NO: 207269 - DNA, 25 bp, Probe sequence
aaaaattcaattactagcagatatt

SEQ ID NO: 207270 - DNA, 25 bp, Probe sequence
cgacctgtaacaagcgataaaaata

SEQ ID NO: 207271 - DNA, 25 bp, Probe sequence
gctgtatgttcgattataaatggcg

SEQ ID NO: 207272 - DNA, 25 bp, Probe sequence
gcaaattatgcatctggtcttacag

SEQ ID NO: 207273 - DNA, 25 bp, Probe sequence
gaatcgtttttccaaaatatcatta

SEQ ID NO: 207274 - DNA, 25 bp, Probe sequence
gaagcttcacttgaatttaacgtaa

SEQ ID NO: 207275 - DNA, 25 bp, Probe sequence
gaaagttaatgaacaccgcgccaat

SEQ ID NO: 207276 - DNA, 25 bp, Probe sequence
gacaatgcaattgatacactgcttg

SEQ ID NO: 207277 - DNA, 25 bp, Probe sequence
gatacactgcttgaattttataatc

SEQ ID NO: 207278 - DNA, 25 bp, Probe sequence
gatttagccatttttggaccaggta

SEQ ID NO: 207279 - DNA, 25 bp, Probe sequence
gttcctgagtatgataacgacttta

SEQ ID NO: 207280 - DNA, 25 bp, Probe sequence
gttccatttattggtgacaatgcaa

SEQ ID NO: 207281 - DNA, 25 bp, Probe sequence
gtccatagctcagttccatttattg

SEQ ID NO: 207282 - DNA, 25 bp, Probe sequence
gtggatagcaataagctttcactcg

SEQ ID NO: 207283 - DNA, 25 bp, Probe sequence
ggtctatgtcatgtaaagtaactgc

SEQ ID NO: 207284 - DNA, 25 bp, Probe sequence
ggtcatatggatgttgttgatgcag

SEQ ID NO: 207285 - DNA, 25 bp, Probe sequence
ggatctggaatttattatgcacata

SEQ ID NO: 207286 - DNA, 25 bp, Probe sequence
ggaccaggtaatccattaatggcac

SEQ ID NO: 207287 - DNA, 25 bp, Probe sequence
tggtcttacagctgtatgttcgatt

SEQ ID NO: 207288 - DNA, 25 bp, Probe sequence
tactagcagatattgttgaactaca

SEQ ID NO: 207289 - DNA, 25 bp, Probe sequence
tttaacgtaagaccagttcctgagt

SEQ ID NO: 207290 - DNA, 25 bp, Probe sequence
atacggtcgaggcacaacggatatg

SEQ ID NO: 207291 - DNA, 25 bp, Probe sequence
aaatcggtaacggctcacctatact

SEQ ID NO: 207292 - DNA, 25 bp, Probe sequence
aaatatttgtttcagcgcttgtagg

SEQ ID NO: 207293 - DNA, 25 bp, Probe sequence
aagctggcaaattatacggtcgagg

SEQ ID NO: 207294 - DNA, 25 bp, Probe sequence
aagcaatcaccgacctgtaacaagc

SEQ ID NO: 207295 - DNA, 25 bp, Probe sequence
aatcgatgaatattgtttgactgta

SEQ ID NO: 207296 - DNA, 25 bp, Probe sequence
aatcaagataattggacttatcccc

SEQ ID NO: 207297 - DNA, 25 bp, Probe sequence
aatatcaacaagcacattttcattg

SEQ ID NO: 207298 - DNA, 25 bp, Probe sequence
aattattggctgataaaggctattt

SEQ ID NO: 207299 - DNA, 25 bp, Probe sequence
cgatattccaagcaatcaccgacct

SEQ ID NO: 207300 - DNA, 25 bp, Probe sequence
cgataagattactagctactgctgg

SEQ ID NO: 207301 - DNA, 25 bp, Probe sequence
gctttggtcatcacactcattgaat

SEQ ID NO: 207302 - DNA, 25 bp, Probe sequence
gcaacagatgcctctagtttcttag

SEQ ID NO: 207303 - DNA, 25 bp, Probe sequence
gaattagatgttgcacccatgttca

SEQ ID NO: 207304 - DNA, 25 bp, Probe sequence
gaacaaaatcaattgcctcaaggaa

SEQ ID NO: 207305 - DNA, 25 bp, Probe sequence
gatggctttggtcatcacactcatt

SEQ ID NO: 207306 - DNA, 25 bp, Probe sequence
gatgcctctagtttcttaggagata

SEQ ID NO: 207307 - DNA, 25 bp, Probe sequence
gattactagctactgctggcgaaga

SEQ ID NO: 207308 - DNA, 25 bp, Probe sequence
gtttcagcgcttgtaggtgcaacag

SEQ ID NO: 207309 - DNA, 25 bp, Probe sequence
gtagatggcttaattattgctgaac

SEQ ID NO: 207310 - DNA, 25 bp, Probe sequence
ggtgcaacagatgcctctagtttct

SEQ ID NO: 207311 - DNA, 25 bp, Probe sequence
ggcacaacggatatgaaaggcggtc

SEQ ID NO: 207312 - DNA, 25 bp, Probe sequence
ggctcacctatactcgcattgagtg

SEQ ID NO: 207313 - DNA, 25 bp, Probe sequence
ggctatttagacgatgtagatggct

SEQ ID NO: 207314 - DNA, 25 bp, Probe sequence
ggcggtctgatggctttggtcatca

SEQ ID NO: 207315 - DNA, 25 bp, Probe sequence
tggcttaattattgctgaaccaact

SEQ ID NO: 207316 - DNA, 25 bp, Probe sequence
tggtcatcacactcattgaattaaa

SEQ ID NO: 207317 - DNA, 25 bp, Probe sequence
tgttgcacccatgttcaaatcattg

SEQ ID NO: 207318 - DNA, 25 bp, Probe sequence
tgaaaggcggtctgatggctttggt

SEQ ID NO: 207319 - DNA, 25 bp, Probe sequence
tgcagaaatcggtaacggctcacct

SEQ ID NO: 207320 - DNA, 25 bp, Probe sequence
tactcgcattgagtggtcatatgga

SEQ ID NO: 207321 - DNA, 25 bp, Probe sequence
tagctactgctggcgaagagaaaga

SEQ ID NO: 207322 - DNA, 25 bp, Probe sequence
ttcaactcacagaaaaagctggcaa

SEQ ID NO: 207323 - DNA, 25 bp, Probe sequence
ttgcctcaaggaacgataagattac

SEQ ID NO: 207324 - DNA, 25 bp, Probe sequence
attggtatgatttgtttgtgtttat

SEQ ID NO: 207325 - DNA, 25 bp, Probe sequence
attaccgctacactaaaggacaaat

SEQ ID NO: 207326 - DNA, 25 bp, Probe sequence
attatattcgttatgctttgcggta

SEQ ID NO: 207327 - DNA, 25 bp, Probe sequence
ataaaactatctattgttaccatta

SEQ ID NO: 207328 - DNA, 25 bp, Probe sequence
agatgccctatttatagcttcaagt

SEQ ID NO: 207329 - DNA, 25 bp, Probe sequence
accgtaaccctattgacactagtat

SEQ ID NO: 207330 - DNA, 25 bp, Probe sequence
acctggtggtgttattaagctaatt

SEQ ID NO: 207331 - DNA, 25 bp, Probe sequence
acaatctcaatactcataatatttg

SEQ ID NO: 207332 - DNA, 25 bp, Probe sequence
aagctaattaaacacttggctattt

SEQ ID NO: 207333 - DNA, 25 bp, Probe sequence
aatccgaacatatcattaatcaagt

SEQ ID NO: 207334 - DNA, 25 bp, Probe sequence
gccaatatcttttttagatgcccta

SEQ ID NO: 207335 - DNA, 25 bp, Probe sequence
gcccctctcagtgcagctggaggaa

SEQ ID NO: 207336 - DNA, 25 bp, Probe sequence
gaacaaagtccacaaacctttatat

SEQ ID NO: 207337 - DNA, 25 bp, Probe sequence
gttaccattaatatctcatttctat

SEQ ID NO: 207338 - DNA, 25 bp, Probe sequence
gtcttaactacaactagtatcctaa

SEQ ID NO: 207339 - DNA, 25 bp, Probe sequence
gggttaagtatgaaccttaccacag

SEQ ID NO: 207340 - DNA, 25 bp, Probe sequence
ggaatattgacgaacctggtggtgt

SEQ ID NO: 207341 - DNA, 25 bp, Probe sequence
tggctatttatagtttagtcactga

SEQ ID NO: 207342 - DNA, 25 bp, Probe sequence
tgaaccttaccacagaatatcatgg

SEQ ID NO: 207343 - DNA, 25 bp, Probe sequence
tcttctctacaactatcataggtgc

SEQ ID NO: 207344 - DNA, 25 bp, Probe sequence
tatgctttgcggtaaagtaggacta

SEQ ID NO: 207345 - DNA, 25 bp, Probe sequence
tatctttacattctaaattagtctt

SEQ ID NO: 207346 - DNA, 25 bp, Probe sequence
tatagcttcaagtgcatttacagtt

SEQ ID NO: 207347 - DNA, 25 bp, Probe sequence
tattattcgaagtggtttctgcatt

SEQ ID NO: 207348 - DNA, 25 bp, Probe sequence
tattaagaacatttataccaccaaa

SEQ ID NO: 207349 - DNA, 25 bp, Probe sequence
tattcacatcagtatcagcttttaa

SEQ ID NO: 207350 - DNA, 25 bp, Probe sequence
tttggaggtattggacattttgtcg

SEQ ID NO: 207351 - DNA, 25 bp, Probe sequence
tttagtcactgaattaattggtatg

SEQ ID NO: 207352 - DNA, 25 bp, Probe sequence
ttatgtttattggtggtgcccctct

SEQ ID NO: 207353 - DNA, 25 bp, Probe sequence
ttataggagctattacattcttttt

SEQ ID NO: 207354 - DNA, 25 bp, Probe sequence
ttatcgataattaatccgaacatat

SEQ ID NO: 207355 - DNA, 25 bp, Probe sequence
ttcaagtgcatttacagttactggc

SEQ ID NO: 207356 - DNA, 25 bp, Probe sequence
ttaatatctcatttctatttatcag

SEQ ID NO: 207357 - DNA, 25 bp, Probe sequence
ttgtttgtgtttatcttttatacca

SEQ ID NO: 207358 - DNA, 25 bp, Probe sequence
atattgtctcaatttttaccgcttc

SEQ ID NO: 207359 - DNA, 25 bp, Probe sequence
atatcattccatgggcattgcttgg

SEQ ID NO: 207360 - DNA, 25 bp, Probe sequence
atcgccgccacgacgattattttaa

SEQ ID NO: 207361 - DNA, 25 bp, Probe sequence
agtggcatagaactgactaaagcag

SEQ ID NO: 207362 - DNA, 25 bp, Probe sequence
agtcatttacatacaacttgttcta

SEQ ID NO: 207363 - DNA, 25 bp, Probe sequence
aaattaccatttgtacaatatagtg

SEQ ID NO: 207364 - DNA, 25 bp, Probe sequence
aatatatcattccatgggcattgct

SEQ ID NO: 207365 - DNA, 25 bp, Probe sequence
caatttttaccgcttctcattgtaa

SEQ ID NO: 207366 - DNA, 25 bp, Probe sequence
catttgtacaatatagtggcataga

SEQ ID NO: 207367 - DNA, 25 bp, Probe sequence
cttgttctatttttaatcgccgcca

SEQ ID NO: 207368 - DNA, 25 bp, Probe sequence
cgttatattccaattacttaatcct

SEQ ID NO: 207369 - DNA, 25 bp, Probe sequence
gccacggaacaagcgaattttatat

SEQ ID NO: 207370 - DNA, 25 bp, Probe sequence
gccgccacgacgattattttaatta

SEQ ID NO: 207371 - DNA, 25 bp, Probe sequence
gccacgacgattattttaattaatt

SEQ ID NO: 207372 - DNA, 25 bp, Probe sequence
gctaactgttattatttatatattg

SEQ ID NO: 207373 - DNA, 25 bp, Probe sequence
gcagtcatttacatacaacttgttc

SEQ ID NO: 207374 - DNA, 25 bp, Probe sequence
gaaaaaagccacggaacaagcgaat

SEQ ID NO: 207375 - DNA, 25 bp, Probe sequence
gactaaagcagtcatttacatacaa

SEQ ID NO: 207376 - DNA, 25 bp, Probe sequence
gggcatcattgctaactgttattat

SEQ ID NO: 207377 - DNA, 25 bp, Probe sequence
ggatttgtcgttatattccaattac

SEQ ID NO: 207378 - DNA, 25 bp, Probe sequence
ggaacaagcgaattttatatatcac

SEQ ID NO: 207379 - DNA, 25 bp, Probe sequence
tccatgggcattgcttggatttgca

SEQ ID NO: 207380 - DNA, 25 bp, Probe sequence
tctcaatttttaccgcttctcattg

SEQ ID NO: 207381 - DNA, 25 bp, Probe sequence
tcattccatgggcattgcttggatt

SEQ ID NO: 207382 - DNA, 25 bp, Probe sequence
tacaacttgttctatttttaatcgc

SEQ ID NO: 207383 - DNA, 25 bp, Probe sequence
taccgcttctcattgtaaaaaaatt

SEQ ID NO: 207384 - DNA, 25 bp, Probe sequence
tatgggcatcattgctaactgttat

SEQ ID NO: 207385 - DNA, 25 bp, Probe sequence
tatttttaatcgccgccacgacgat

SEQ ID NO: 207386 - DNA, 25 bp, Probe sequence
tatatatcacatttttattccataa

SEQ ID NO: 207387 - DNA, 25 bp, Probe sequence
tattgtctcaatttttaccgcttct

SEQ ID NO: 207388 - DNA, 25 bp, Probe sequence
tttaatcgccgccacgacgattatt

SEQ ID NO: 207389 - DNA, 25 bp, Probe sequence
ttatattccaattacttaatcctga

SEQ ID NO: 207390 - DNA, 25 bp, Probe sequence
ttctatttttaatcgccgccacgac

SEQ ID NO: 207391 - DNA, 25 bp, Probe sequence
ttgtcgttatattccaattacttaa

SEQ ID NO: 207392 - DNA, 25 bp, Probe sequence
atttttccacatcaacacgggttca

SEQ ID NO: 207393 - DNA, 25 bp, Probe sequence
atgtggttaacctcctcattattta

SEQ ID NO: 207394 - DNA, 25 bp, Probe sequence
atgtcgctgtgcaatttgacggagt

SEQ ID NO: 207395 - DNA, 25 bp, Probe sequence
atggcatcgttggctgttagtgtgt

SEQ ID NO: 207396 - DNA, 25 bp, Probe sequence
aatgcatatcgtggcaatactgtta

SEQ ID NO: 207397 - DNA, 25 bp, Probe sequence
caaagttccaaatcgtattcctatt

SEQ ID NO: 207398 - DNA, 25 bp, Probe sequence
catgcaaggcgagcgtcggtgtggc

SEQ ID NO: 207399 - DNA, 25 bp, Probe sequence
cgtttgttacccgatggcaacatag

SEQ ID NO: 207400 - DNA, 25 bp, Probe sequence
gcatcgcatatagcattagactcaa

SEQ ID NO: 207401 - DNA, 25 bp, Probe sequence
gcaattacagtgcgcgaagtcttcg

SEQ ID NO: 207402 - DNA, 25 bp, Probe sequence
gaatcaacgacacaccgtaatgcgt

SEQ ID NO: 207403 - DNA, 25 bp, Probe sequence
gaaggcattgcctatcatggactat

SEQ ID NO: 207404 - DNA, 25 bp, Probe sequence
gagactatttttcattgttatcatc

SEQ ID NO: 207405 - DNA, 25 bp, Probe sequence
gatgcgcaaacagttgttaccttat

SEQ ID NO: 207406 - DNA, 25 bp, Probe sequence
gatcgtgtcgctgtcatagctgaaa

SEQ ID NO: 207407 - DNA, 25 bp, Probe sequence
gataccgaacacttgctatgccaaa

SEQ ID NO: 207408 - DNA, 25 bp, Probe sequence
gatacttcatgaatttctgcctttt

SEQ ID NO: 207409 - DNA, 25 bp, Probe sequence
gatttgctctcaatcgagacgctga

SEQ ID NO: 207410 - DNA, 25 bp, Probe sequence
gattttcatgtgtccattttcgatg

SEQ ID NO: 207411 - DNA, 25 bp, Probe sequence
gttgaacctaatgatcgtgtcgctg

SEQ ID NO: 207412 - DNA, 25 bp, Probe sequence
gtttcagttcgctgatgctgcatat

SEQ ID NO: 207413 - DNA, 25 bp, Probe sequence
gtagcaccgagtacagataccgaac

SEQ ID NO: 207414 - DNA, 25 bp, Probe sequence
gtacctattttaagcttaccgacag

SEQ ID NO: 207415 - DNA, 25 bp, Probe sequence
gtgtggcgttggtattcctggagaa

SEQ ID NO: 207416 - DNA, 25 bp, Probe sequence
ggtggggcttacgtgccaattgatc

SEQ ID NO: 207417 - DNA, 25 bp, Probe sequence
ggttgagcatgcgctcgagcgtata

SEQ ID NO: 207418 - DNA, 25 bp, Probe sequence
tggactatgtcgatacggatgccta

SEQ ID NO: 207419 - DNA, 25 bp, Probe sequence
tgaatgcacgcgcgaatgatttagc

SEQ ID NO: 207420 - DNA, 25 bp, Probe sequence
tccgcaccgaggtattgttcgcttg

SEQ ID NO: 207421 - DNA, 25 bp, Probe sequence
taacaatactcgacagcatgcacat

SEQ ID NO: 207422 - DNA, 25 bp, Probe sequence
taaaacaagttccatcttcttccgc

SEQ ID NO: 207423 - DNA, 25 bp, Probe sequence
taaagggacactaattccgcaccga

SEQ ID NO: 207424 - DNA, 25 bp, Probe sequence
tacggatgcctatgtagcaccgagt

SEQ ID NO: 207425 - DNA, 25 bp, Probe sequence
ttccatcttcttccgcaaactatga

SEQ ID NO: 207426 - DNA, 25 bp, Probe sequence
acaggcggggcaactagtacggcat

SEQ ID NO: 207427 - DNA, 25 bp, Probe sequence
attgcgcacatgctcctatcaaatg

SEQ ID NO: 207428 - DNA, 25 bp, Probe sequence
atcacatgatgcctcacggaatcca

SEQ ID NO: 207429 - DNA, 25 bp, Probe sequence
atgattgcggcgatgttggcgacag

SEQ ID NO: 207430 - DNA, 25 bp, Probe sequence
aggcatgtttgctaatacgttggta

SEQ ID NO: 207431 - DNA, 25 bp, Probe sequence
acgatcgaatgcttaatgtcccggg

SEQ ID NO: 207432 - DNA, 25 bp, Probe sequence
aactactaacatcaccatatacacg

SEQ ID NO: 207433 - DNA, 25 bp, Probe sequence
aacgacattaccagtcattcaattg

SEQ ID NO: 207434 - DNA, 25 bp, Probe sequence
aaggtaatcatgttgcgctagtcat

SEQ ID NO: 207435 - DNA, 25 bp, Probe sequence
aatggtcatacgcttgtgattccag

SEQ ID NO: 207436 - DNA, 25 bp, Probe sequence
aattaacacacattcaacccaaatc

SEQ ID NO: 207437 - DNA, 25 bp, Probe sequence
cagtcatcgcatttattgtttcata

SEQ ID NO: 207438 - DNA, 25 bp, Probe sequence
ctggtacgaccgggatgcctaaagg

SEQ ID NO: 207439 - DNA, 25 bp, Probe sequence
cgatgttagttgtctcgcatttaaa

SEQ ID NO: 207440 - DNA, 25 bp, Probe sequence
gctatttacacatctggtacgaccg

SEQ ID NO: 207441 - DNA, 25 bp, Probe sequence
gaaacagttcgtcacatgggtaatc

SEQ ID NO: 207442 - DNA, 25 bp, Probe sequence
gaaacgaatcatgctcattttgggc

SEQ ID NO: 207443 - DNA, 25 bp, Probe sequence
gatgtcatacgtttggcacaacaac

SEQ ID NO: 207444 - DNA, 25 bp, Probe sequence
gatacctgagacgattccaattggc

SEQ ID NO: 207445 - DNA, 25 bp, Probe sequence
gatttggccatcatatttcaatgca

SEQ ID NO: 207446 - DNA, 25 bp, Probe sequence
gttgcattaccggataatctttcgg

SEQ ID NO: 207447 - DNA, 25 bp, Probe sequence
gtatttcaatgcctatggaccatct

SEQ ID NO: 207448 - DNA, 25 bp, Probe sequence
gtcagatggtttgttatgcggtatt

SEQ ID NO: 207449 - DNA, 25 bp, Probe sequence
gtcatcacatcgtattggtcacatc

SEQ ID NO: 207450 - DNA, 25 bp, Probe sequence
gtggatactacgcgtttgccaaatc

SEQ ID NO: 207451 - DNA, 25 bp, Probe sequence
ggtgcatcttatatacctatcgata

SEQ ID NO: 207452 - DNA, 25 bp, Probe sequence
ggcaaacccttatctaacatccaag

SEQ ID NO: 207453 - DNA, 25 bp, Probe sequence
ggtatgccaggcgagttgtgtattg

SEQ ID NO: 207454 - DNA, 25 bp, Probe sequence
ggaccatctgagtcaacagtcatca

SEQ ID NO: 207455 - DNA, 25 bp, Probe sequence
ggcatacgagcatcaagaataccca

SEQ ID NO: 207456 - DNA, 25 bp, Probe sequence
tgcctaaaggggttgccatacgaca

SEQ ID NO: 207457 - DNA, 25 bp, Probe sequence
taactgcagtcatgtcttacggcgt

SEQ ID NO: 207458 - DNA, 25 bp, Probe sequence
ttagcacgttatacatctgatggtc

SEQ ID NO: 207459 - DNA, 25 bp, Probe sequence
ttgtcgcattagcacaggtcaacac

SEQ ID NO: 207460 - DNA, 25 bp, Probe sequence
atgcagttaaacatgttccttcatc

SEQ ID NO: 207461 - DNA, 25 bp, Probe sequence
agtggtttacaagaacaaatgccaa

SEQ ID NO: 207462 - DNA, 25 bp, Probe sequence
agttaaacatgttccttcatcattt

SEQ ID NO: 207463 - DNA, 25 bp, Probe sequence
agaatcaatgattgcacatgcagtt

SEQ ID NO: 207464 - DNA, 25 bp, Probe sequence
actaaaggcataggtgcttcattac

SEQ ID NO: 207465 - DNA, 25 bp, Probe sequence
aaatgccatgcatcaatttgcaatt

SEQ ID NO: 207466 - DNA, 25 bp, Probe sequence
aaagaagtcatgggagagaatcgtg

SEQ ID NO: 207467 - DNA, 25 bp, Probe sequence
aacatgttccttcatcatttaattc

SEQ ID NO: 207468 - DNA, 25 bp, Probe sequence
aacttcaaacattcatacggtacaa

SEQ ID NO: 207469 - DNA, 25 bp, Probe sequence
aatgccatttggtgatattcgtgaa

SEQ ID NO: 207470 - DNA, 25 bp, Probe sequence
aatccagtggaagatcgtttcgtaa

SEQ ID NO: 207471 - DNA, 25 bp, Probe sequence
caaatgccaaactactatgataatt

SEQ ID NO: 207472 - DNA, 25 bp, Probe sequence
catacggtacaattttgttttatga

SEQ ID NO: 207473 - DNA, 25 bp, Probe sequence
cattacaacactataatccacttgt

SEQ ID NO: 207474 - DNA, 25 bp, Probe sequence
ctcaatcaactagaattgttctctt

SEQ ID NO: 207475 - DNA, 25 bp, Probe sequence
gccatgcatcaatttgcaatttgga

SEQ ID NO: 207476 - DNA, 25 bp, Probe sequence
gcttcattacaacactataatccac

SEQ ID NO: 207477 - DNA, 25 bp, Probe sequence
gcaatttggactgcattagctacta

SEQ ID NO: 207478 - DNA, 25 bp, Probe sequence
gaaacttattgctcaaatgccattt

SEQ ID NO: 207479 - DNA, 25 bp, Probe sequence
gagaatcgtgatttcgagccaactg

SEQ ID NO: 207480 - DNA, 25 bp, Probe sequence
gataattttgcaatatggtcaactc

SEQ ID NO: 207481 - DNA, 25 bp, Probe sequence
gataacttcaaacattcatacggta

SEQ ID NO: 207482 - DNA, 25 bp, Probe sequence
gatttcgagccaactgaacaaaaaa

SEQ ID NO: 207483 - DNA, 25 bp, Probe sequence
gttggaaacttattgctcaaatgcc

SEQ ID NO: 207484 - DNA, 25 bp, Probe sequence
gttccttcatcatttaattctcaat

SEQ ID NO: 207485 - DNA, 25 bp, Probe sequence
gtgaagctgctggcgaaaaaacatt

SEQ ID NO: 207486 - DNA, 25 bp, Probe sequence
ggtgatattcgtgaagctgctggcg

SEQ ID NO: 207487 - DNA, 25 bp, Probe sequence
ggtcaactcaaacaaatgccatgca

SEQ ID NO: 207488 - DNA, 25 bp, Probe sequence
ggactgcattagctactaaaggcat

SEQ ID NO: 207489 - DNA, 25 bp, Probe sequence
ggcgaaaaaacatttaatccagtgg

SEQ ID NO: 207490 - DNA, 25 bp, Probe sequence
tcgtgatttcgagccaactgaacaa

SEQ ID NO: 207491 - DNA, 25 bp, Probe sequence
tcatcatttaattctcaatcaacta

SEQ ID NO: 207492 - DNA, 25 bp, Probe sequence
tatcaattagcgatgacgaattaga

SEQ ID NO: 207493 - DNA, 25 bp, Probe sequence
ttgggataacacaaaagcaatttta

SEQ ID NO: 207494 - DNA, 25 bp, Probe sequence
atttaatacagcttttagtgtgaat

SEQ ID NO: 207495 - DNA, 25 bp, Probe sequence
atacgacaaagttcatttagttcct

SEQ ID NO: 207496 - DNA, 25 bp, Probe sequence
ataaagtcgatatcgtagctgggtc

SEQ ID NO: 207497 - DNA, 25 bp, Probe sequence
atctaggacaaagtttttcatttat

SEQ ID NO: 207498 - DNA, 25 bp, Probe sequence
agtccaaatttatcaattaccgatt

SEQ ID NO: 207499 - DNA, 25 bp, Probe sequence
atggctatgatttagagcatttaaa

SEQ ID NO: 207500 - DNA, 25 bp, Probe sequence
agaacagcaacgcgaaaatatacct

SEQ ID NO: 207501 - DNA, 25 bp, Probe sequence
agctgaaccctttcaattgtctgac

SEQ ID NO: 207502 - DNA, 25 bp, Probe sequence
acgtagctgaaccctttcaattgtc

SEQ ID NO: 207503 - DNA, 25 bp, Probe sequence
acttatgtgacccaacttatctgtt

SEQ ID NO: 207504 - DNA, 25 bp, Probe sequence
aaatgaagtagaacagcaacgcgaa

SEQ ID NO: 207505 - DNA, 25 bp, Probe sequence
aaaggcacgtgcaattgaaaataat

SEQ ID NO: 207506 - DNA, 25 bp, Probe sequence
aagttcatttagttcctatgttaag

SEQ ID NO: 207507 - DNA, 25 bp, Probe sequence
aatatgtttgtcattggaactaata

SEQ ID NO: 207508 - DNA, 25 bp, Probe sequence
ctcaaataacgcaatggttcgaaaa

SEQ ID NO: 207509 - DNA, 25 bp, Probe sequence
gcctatgtcacgtcttcaacattgg

SEQ ID NO: 207510 - DNA, 25 bp, Probe sequence
gaatgctgaagtagatgtagtcgtt

SEQ ID NO: 207511 - DNA, 25 bp, Probe sequence
gaatccgcagatattttgactgtag

SEQ ID NO: 207512 - DNA, 25 bp, Probe sequence
gaaccctttcaattgtctgacggta

SEQ ID NO: 207513 - DNA, 25 bp, Probe sequence
gaaatgtggaataatggctatgatt

SEQ ID NO: 207514 - DNA, 25 bp, Probe sequence
gacggtacttatgtgacccaactta

SEQ ID NO: 207515 - DNA, 25 bp, Probe sequence
gagaattaaatgaatccgcagatat

SEQ ID NO: 207516 - DNA, 25 bp, Probe sequence
gtagatgtagtcgttttacctgaaa

SEQ ID NO: 207517 - DNA, 25 bp, Probe sequence
gtagtcgttttacctgaaatgtgga

SEQ ID NO: 207518 - DNA, 25 bp, Probe sequence
gtctgacggtacttatgtgacccaa

SEQ ID NO: 207519 - DNA, 25 bp, Probe sequence
gtgacccaacttatctgttatgatt

SEQ ID NO: 207520 - DNA, 25 bp, Probe sequence
gtggtgctaaaattgcattttatgt

SEQ ID NO: 207521 - DNA, 25 bp, Probe sequence
ggtaacacagaatatgctggtcatt

SEQ ID NO: 207522 - DNA, 25 bp, Probe sequence
ggaactaatagcactggattcgatg

SEQ ID NO: 207523 - DNA, 25 bp, Probe sequence
tgtcacgtcttcaacattggcattc

SEQ ID NO: 207524 - DNA, 25 bp, Probe sequence
tagcactggattcgatggtaacaca

SEQ ID NO: 207525 - DNA, 25 bp, Probe sequence
tagttcctatgttaagagagcatga

SEQ ID NO: 207526 - DNA, 25 bp, Probe sequence
tatgctggtcattcgatagttataa

SEQ ID NO: 207527 - DNA, 25 bp, Probe sequence
ttatctgttatgatttacgttttcc

SEQ ID NO: 207528 - DNA, 25 bp, Probe sequence
atttgtctacaaagttgcagcgatg

SEQ ID NO: 207529 - DNA, 25 bp, Probe sequence
aggctgttactttttagatattcaa

SEQ ID NO: 207530 - DNA, 25 bp, Probe sequence
agatattcaactttcaactgatatt

SEQ ID NO: 207531 - DNA, 25 bp, Probe sequence
agatgtcataatagctttgtcgtca

SEQ ID NO: 207532 - DNA, 25 bp, Probe sequence
agaaactgcacatacacgcttacaa

SEQ ID NO: 207533 - DNA, 25 bp, Probe sequence
agaacactgctatgcatcggtgaga

SEQ ID NO: 207534 - DNA, 25 bp, Probe sequence
actgctatgcatcggtgagaaacgt

SEQ ID NO: 207535 - DNA, 25 bp, Probe sequence
aaataaagaacactgctatgcatcg

SEQ ID NO: 207536 - DNA, 25 bp, Probe sequence
aaactgcacatacacgcttacaatt

SEQ ID NO: 207537 - DNA, 25 bp, Probe sequence
aaaacgtggcagtaattcagtgtat

SEQ ID NO: 207538 - DNA, 25 bp, Probe sequence
aaaatctcacagactcattgcccat

SEQ ID NO: 207539 - DNA, 25 bp, Probe sequence
aatggtatcaaattaggcagtgaaa

SEQ ID NO: 207540 - DNA, 25 bp, Probe sequence
aatccttatgaggtgcttgagcaag

SEQ ID NO: 207541 - DNA, 25 bp, Probe sequence
cacagactcattgcccatttagata

SEQ ID NO: 207542 - DNA, 25 bp, Probe sequence
ctcacagactcattgcccatttaga

SEQ ID NO: 207543 - DNA, 25 bp, Probe sequence
ccttatgaggtgcttgagcaagcta

SEQ ID NO: 207544 - DNA, 25 bp, Probe sequence
gcccatttagataaccgtcaaattg

SEQ ID NO: 207545 - DNA, 25 bp, Probe sequence
gctatgcatcggtgagaaacgttaa

SEQ ID NO: 207546 - DNA, 25 bp, Probe sequence
gaatcatcaacaaaatctcacagac

SEQ ID NO: 207547 - DNA, 25 bp, Probe sequence
gaatgacataggctgttacttttta

SEQ ID NO: 207548 - DNA, 25 bp, Probe sequence
gaactgagtcaattagatgatcgtt

SEQ ID NO: 207549 - DNA, 25 bp, Probe sequence
gacataggctgttactttttagata

SEQ ID NO: 207550 - DNA, 25 bp, Probe sequence
gactcattgcccatttagataaccg

SEQ ID NO: 207551 - DNA, 25 bp, Probe sequence
gatattatgttttttgaatcatcaa

SEQ ID NO: 207552 - DNA, 25 bp, Probe sequence
gtttagaaactgcacatacacgctt

SEQ ID NO: 207553 - DNA, 25 bp, Probe sequence
gtcataatagctttgtcgtcaatcg

SEQ ID NO: 207554 - DNA, 25 bp, Probe sequence
gtggcagtaattcagtgtatgttca

SEQ ID NO: 207555 - DNA, 25 bp, Probe sequence
tgagtcaattagatgatcgtttctt

SEQ ID NO: 207556 - DNA, 25 bp, Probe sequence
tcattgcccatttagataaccgtca

SEQ ID NO: 207557 - DNA, 25 bp, Probe sequence
tcaactttcaactgatattaatggt

SEQ ID NO: 207558 - DNA, 25 bp, Probe sequence
taaccgtcaaattgaattttatggt

SEQ ID NO: 207559 - DNA, 25 bp, Probe sequence
tacaaagttgcagcgatggatttta

SEQ ID NO: 207560 - DNA, 25 bp, Probe sequence
taggcagtgaaattcgtaagcatga

SEQ ID NO: 207561 - DNA, 25 bp, Probe sequence
ttcagtgtatgttcaatatgatgat

SEQ ID NO: 207562 - DNA, 25 bp, Probe sequence
atatgacgcgtgaattaaaaaatga

SEQ ID NO: 207563 - DNA, 25 bp, Probe sequence
atgcactgtatagctggctttttaa

SEQ ID NO: 207564 - DNA, 25 bp, Probe sequence
atgacgcgtgaattaaaaaatgatg

SEQ ID NO: 207565 - DNA, 25 bp, Probe sequence
atgatgtaacgtctctttgtatacc

SEQ ID NO: 207566 - DNA, 25 bp, Probe sequence
atgtaacgtctctttgtatacctat

SEQ ID NO: 207567 - DNA, 25 bp, Probe sequence
actgtatagctggctttttaatttt

SEQ ID NO: 207568 - DNA, 25 bp, Probe sequence
acaaaattaaatatgacgcgtgaat

SEQ ID NO: 207569 - DNA, 25 bp, Probe sequence
aaattaaatatgacgcgtgaattaa

SEQ ID NO: 207570 - DNA, 25 bp, Probe sequence
aaatatgacgcgtgaattaaaaaat

SEQ ID NO: 207571 - DNA, 25 bp, Probe sequence
aaatgatgtaacgtctctttgtata

SEQ ID NO: 207572 - DNA, 25 bp, Probe sequence
aaaaatgatgtaacgtctctttgta

SEQ ID NO: 207573 - DNA, 25 bp, Probe sequence
aaaaaatgatgtaacgtctctttgt

SEQ ID NO: 207574 - DNA, 25 bp, Probe sequence
aaaatgatgtaacgtctctttgtat

SEQ ID NO: 207575 - DNA, 25 bp, Probe sequence
aacaaaattaaatatgacgcgtgaa

SEQ ID NO: 207576 - DNA, 25 bp, Probe sequence
aacgtctctttgtatacctattcct

SEQ ID NO: 207577 - DNA, 25 bp, Probe sequence
aatgatgtaacgtctctttgtatac

SEQ ID NO: 207578 - DNA, 25 bp, Probe sequence
cactgtatagctggctttttaattt

SEQ ID NO: 207579 - DNA, 25 bp, Probe sequence
ctttgtatacctattcctattacta

SEQ ID NO: 207580 - DNA, 25 bp, Probe sequence
ctctttgtatacctattcctattac

SEQ ID NO: 207581 - DNA, 25 bp, Probe sequence
ctgtatagctggctttttaatttta

SEQ ID NO: 207582 - DNA, 25 bp, Probe sequence
gcactgtatagctggctttttaatt

SEQ ID NO: 207583 - DNA, 25 bp, Probe sequence
gatgtaacgtctctttgtataccta

SEQ ID NO: 207584 - DNA, 25 bp, Probe sequence
gtatagctggctttttaattttatt

SEQ ID NO: 207585 - DNA, 25 bp, Probe sequence
gtaacgtctctttgtatacctattc

SEQ ID NO: 207586 - DNA, 25 bp, Probe sequence
tgtaacgtctctttgtatacctatt

SEQ ID NO: 207587 - DNA, 25 bp, Probe sequence
tgtatagctggctttttaattttat

SEQ ID NO: 207588 - DNA, 25 bp, Probe sequence
tgatgtaacgtctctttgtatacct

SEQ ID NO: 207589 - DNA, 25 bp, Probe sequence
tgcactgtatagctggctttttaat

SEQ ID NO: 207590 - DNA, 25 bp, Probe sequence
tctctttgtatacctattcctatta

SEQ ID NO: 207591 - DNA, 25 bp, Probe sequence
tctttgtatacctattcctattact

SEQ ID NO: 207592 - DNA, 25 bp, Probe sequence
taacgtctctttgtatacctattcc

SEQ ID NO: 207593 - DNA, 25 bp, Probe sequence
tatagctggctttttaattttatta

SEQ ID NO: 207594 - DNA, 25 bp, Probe sequence
tttgtatacctattcctattactac

SEQ ID NO: 207595 - DNA, 25 bp, Probe sequence
ttgtatacctattcctattactaca

SEQ ID NO: 207596 - DNA, 25 bp, Probe sequence
atataaaacacatatgtcccgttat

SEQ ID NO: 207597 - DNA, 25 bp, Probe sequence
atcaaactgcaattaccaaacctat

SEQ ID NO: 207598 - DNA, 25 bp, Probe sequence
atcagccatgatcgttactttttag

SEQ ID NO: 207599 - DNA, 25 bp, Probe sequence
atggcgccggtaaatcaacattgat

SEQ ID NO: 207600 - DNA, 25 bp, Probe sequence
actagcactacttatgttgcaacgt

SEQ ID NO: 207601 - DNA, 25 bp, Probe sequence
aaagtggcttgaagattatctacgt

SEQ ID NO: 207602 - DNA, 25 bp, Probe sequence
aaaatattacccgtgcttcaacaag

SEQ ID NO: 207603 - DNA, 25 bp, Probe sequence
aacacgtttatctttagctcaaatg

SEQ ID NO: 207604 - DNA, 25 bp, Probe sequence
aagcgcttaatggcgatattacttt

SEQ ID NO: 207605 - DNA, 25 bp, Probe sequence
aatactatttgtttcccatgatcgt

SEQ ID NO: 207606 - DNA, 25 bp, Probe sequence
caatttggctttgaccggaatacag

SEQ ID NO: 207607 - DNA, 25 bp, Probe sequence
gcgatcatatagcaatcattgggcc

SEQ ID NO: 207608 - DNA, 25 bp, Probe sequence
gcaaacgaattagctatccaaaaac

SEQ ID NO: 207609 - DNA, 25 bp, Probe sequence
gaagcgttgaaagcgcaccaagaag

SEQ ID NO: 207610 - DNA, 25 bp, Probe sequence
gaacgacaaatatccgagtgtgaaa

SEQ ID NO: 207611 - DNA, 25 bp, Probe sequence
gaacctgatttattacttttagatg

SEQ ID NO: 207612 - DNA, 25 bp, Probe sequence
gaacacgctatgtctaaatgggaag

SEQ ID NO: 207613 - DNA, 25 bp, Probe sequence
gaacagtcagttaacgtacaagcac

SEQ ID NO: 207614 - DNA, 25 bp, Probe sequence
gaaactttagagactactatcttac

SEQ ID NO: 207615 - DNA, 25 bp, Probe sequence
gatgtggctttaggtgatgtcaaac

SEQ ID NO: 207616 - DNA, 25 bp, Probe sequence
gatacttttacaactcaatcatata

SEQ ID NO: 207617 - DNA, 25 bp, Probe sequence
gttgcaacgtgacaatgtacttatt

SEQ ID NO: 207618 - DNA, 25 bp, Probe sequence
gtttcccatgatcgttactttatta

SEQ ID NO: 207619 - DNA, 25 bp, Probe sequence
gtatcgtaggaagaaatggcgccgg

SEQ ID NO: 207620 - DNA, 25 bp, Probe sequence
gtgaacaacgcaaacttgaacgaca

SEQ ID NO: 207621 - DNA, 25 bp, Probe sequence
ggtgatgtcaaacgctatgttggta

SEQ ID NO: 207622 - DNA, 25 bp, Probe sequence
ggaacaatcgtcgtatcataaccaa

SEQ ID NO: 207623 - DNA, 25 bp, Probe sequence
ggaatacaggtaatgacgtcatgca

SEQ ID NO: 207624 - DNA, 25 bp, Probe sequence
tgtcccgttatgaatctttatcgaa

SEQ ID NO: 207625 - DNA, 25 bp, Probe sequence
taccaaccacctcgatatagattca

SEQ ID NO: 207626 - DNA, 25 bp, Probe sequence
tagacgagcaattaacccaaccaga

SEQ ID NO: 207627 - DNA, 25 bp, Probe sequence
tagatgaacctactaaccacttaga

SEQ ID NO: 207628 - DNA, 25 bp, Probe sequence
tagaggtctctaaaggcgatcatat

SEQ ID NO: 207629 - DNA, 25 bp, Probe sequence
tttagatgaacctaccaaccacctc

SEQ ID NO: 207630 - DNA, 25 bp, Probe sequence
attcttgcatcggctatacaaacag

SEQ ID NO: 207631 - DNA, 25 bp, Probe sequence
atttcttatgagttgcctatttaat

SEQ ID NO: 207632 - DNA, 25 bp, Probe sequence
atacaaacagttaccgcaagcaaat

SEQ ID NO: 207633 - DNA, 25 bp, Probe sequence
atcaacctggaattgtgttcacgtc

SEQ ID NO: 207634 - DNA, 25 bp, Probe sequence
atgcctgtttacgtggaatgctttc

SEQ ID NO: 207635 - DNA, 25 bp, Probe sequence
atggcaaatgccgatgatgtgttat

SEQ ID NO: 207636 - DNA, 25 bp, Probe sequence
agttggtattttattatttcttatg

SEQ ID NO: 207637 - DNA, 25 bp, Probe sequence
acagcacgtcatttaacgagtgttt

SEQ ID NO: 207638 - DNA, 25 bp, Probe sequence
aaatcacttcatttccagcaaaaat

SEQ ID NO: 207639 - DNA, 25 bp, Probe sequence
aaacgtaacatatcatttagctttg

SEQ ID NO: 207640 - DNA, 25 bp, Probe sequence
aaaacaaggctatactatctcaaaa

SEQ ID NO: 207641 - DNA, 25 bp, Probe sequence
aaggtaccaacacaactgaacgaat

SEQ ID NO: 207642 - DNA, 25 bp, Probe sequence
aatatattgtttctatgcccgtttt

SEQ ID NO: 207643 - DNA, 25 bp, Probe sequence
aattgtttcgattacatagctgaat

SEQ ID NO: 207644 - DNA, 25 bp, Probe sequence
caggcgatagttattttatggctga

SEQ ID NO: 207645 - DNA, 25 bp, Probe sequence
ctatgcccgtttttaccagttatct

SEQ ID NO: 207646 - DNA, 25 bp, Probe sequence
cttttatcagaccgaactcacattt

SEQ ID NO: 207647 - DNA, 25 bp, Probe sequence
gccgcttcagaatcagtactatcat

SEQ ID NO: 207648 - DNA, 25 bp, Probe sequence
gcaactttaaagcgtacatatgagg

SEQ ID NO: 207649 - DNA, 25 bp, Probe sequence
gaatgctttcaattacgaacaaatc

SEQ ID NO: 207650 - DNA, 25 bp, Probe sequence
gaagatatcggagctatggtaatta

SEQ ID NO: 207651 - DNA, 25 bp, Probe sequence
gaacgaattgccgcttcagaatcag

SEQ ID NO: 207652 - DNA, 25 bp, Probe sequence
gaccgaactcacatttcgactatga

SEQ ID NO: 207653 - DNA, 25 bp, Probe sequence
gatgcagtagccaatgatttctcac

SEQ ID NO: 207654 - DNA, 25 bp, Probe sequence
gatacatgagtcgtcaacgtctatt

SEQ ID NO: 207655 - DNA, 25 bp, Probe sequence
gttaacacatccactcatagcagat

SEQ ID NO: 207656 - DNA, 25 bp, Probe sequence
gttaaacttattttcatgcttgatt

SEQ ID NO: 207657 - DNA, 25 bp, Probe sequence
gtttatccaacatttccagaccaaa

SEQ ID NO: 207658 - DNA, 25 bp, Probe sequence
gttattgcagcaacacatgatattg

SEQ ID NO: 207659 - DNA, 25 bp, Probe sequence
gtcgtcaacgtctattaaaatctat

SEQ ID NO: 207660 - DNA, 25 bp, Probe sequence
gtgttcacgtcaatggcaaatgccg

SEQ ID NO: 207661 - DNA, 25 bp, Probe sequence
tctaatgcttcgggtaaatcaacat

SEQ ID NO: 207662 - DNA, 25 bp, Probe sequence
taagcaatttagaacagcacgtcat

SEQ ID NO: 207663 - DNA, 25 bp, Probe sequence
ttaccagttatctcatttgcagtta

SEQ ID NO: 207664 - DNA, 25 bp, Probe sequence
atggaacaaaatgcctgccctactt

SEQ ID NO: 207665 - DNA, 25 bp, Probe sequence
accatacaacggtactgcacttgca

SEQ ID NO: 207666 - DNA, 25 bp, Probe sequence
acacccggtatgattttagcagcca

SEQ ID NO: 207667 - DNA, 25 bp, Probe sequence
aaaggagatcaccaagcaccagcaa

SEQ ID NO: 207668 - DNA, 25 bp, Probe sequence
aagaagtcttttacatgccacgggc

SEQ ID NO: 207669 - DNA, 25 bp, Probe sequence
aaccacgtgatatcgttactcgcga

SEQ ID NO: 207670 - DNA, 25 bp, Probe sequence
aagttggcggcgttgatccatctat

SEQ ID NO: 207671 - DNA, 25 bp, Probe sequence
aatgctattgccaaacgcacgccat

SEQ ID NO: 207672 - DNA, 25 bp, Probe sequence
aattaacgctcattggtttgacggc

SEQ ID NO: 207673 - DNA, 25 bp, Probe sequence
cacctacttcctctattgttggtcg

SEQ ID NO: 207674 - DNA, 25 bp, Probe sequence
ctatcttttgctctggtggaccaat

SEQ ID NO: 207675 - DNA, 25 bp, Probe sequence
cgcgtcgccgagaatctttaacacc

SEQ ID NO: 207676 - DNA, 25 bp, Probe sequence
cccctgaagctgcatctggtggacc

SEQ ID NO: 207677 - DNA, 25 bp, Probe sequence
cctacttgtggttcatgtgctggga

SEQ ID NO: 207678 - DNA, 25 bp, Probe sequence
gcacttgcagtcagtgatcagcgac

SEQ ID NO: 207679 - DNA, 25 bp, Probe sequence
gaatgcgatattctctaccatcacg

SEQ ID NO: 207680 - DNA, 25 bp, Probe sequence
gaaatgattcgccaagcagctttta

SEQ ID NO: 207681 - DNA, 25 bp, Probe sequence
gtttttccggtgccacaagaggtat

SEQ ID NO: 207682 - DNA, 25 bp, Probe sequence
gtttgacggcgtattttacattcct

SEQ ID NO: 207683 - DNA, 25 bp, Probe sequence
ggtactgcatacgttagccattgcc

SEQ ID NO: 207684 - DNA, 25 bp, Probe sequence
ggttcaacaaacacggtactgcata

SEQ ID NO: 207685 - DNA, 25 bp, Probe sequence
ggcacgttacacccagatagaatca

SEQ ID NO: 207686 - DNA, 25 bp, Probe sequence
ggcggtttatctatcttatttggta

SEQ ID NO: 207687 - DNA, 25 bp, Probe sequence
tgaggacaaacgtaccagctatctt

SEQ ID NO: 207688 - DNA, 25 bp, Probe sequence
tgaaatgttagcacctacttcctct

SEQ ID NO: 207689 - DNA, 25 bp, Probe sequence
tgaaagctggcttatctgcacatgg

SEQ ID NO: 207690 - DNA, 25 bp, Probe sequence
tgcaggccacgtcgttgtcattaga

SEQ ID NO: 207691 - DNA, 25 bp, Probe sequence
tgcagttggtcatatttcccctgaa

SEQ ID NO: 207692 - DNA, 25 bp, Probe sequence
tacaggtggcgtcatgcaagtccct

SEQ ID NO: 207693 - DNA, 25 bp, Probe sequence
tagacaatcgtaccgttcgtgcagg

SEQ ID NO: 207694 - DNA, 25 bp, Probe sequence
tagcacctagttcatcgtattcaat

SEQ ID NO: 207695 - DNA, 25 bp, Probe sequence
tatttggtaatatcgcccctaaagg

SEQ ID NO: 207696 - DNA, 25 bp, Probe sequence
ttagagaagccggtgccattccatt

SEQ ID NO: 207697 - DNA, 25 bp, Probe sequence
ttatctagctcgttatactgcccta

SEQ ID NO: 207698 - DNA, 25 bp, Probe sequence
ataacaccatttaaagattcagaga

SEQ ID NO: 207699 - DNA, 25 bp, Probe sequence
atggtatcaaagacattactattga

SEQ ID NO: 207700 - DNA, 25 bp, Probe sequence
agtaagcaattacagaaggtatatt

SEQ ID NO: 207701 - DNA, 25 bp, Probe sequence
agaggaataacaccatttaaagatt

SEQ ID NO: 207702 - DNA, 25 bp, Probe sequence
acagaaggtatattggtttaacaca

SEQ ID NO: 207703 - DNA, 25 bp, Probe sequence
acaccatttaaagattcagagaagg

SEQ ID NO: 207704 - DNA, 25 bp, Probe sequence
aaagattcagagaaggtgtttataa

SEQ ID NO: 207705 - DNA, 25 bp, Probe sequence
aaaaatttcagttactgcttataga

SEQ ID NO: 207706 - DNA, 25 bp, Probe sequence
aaaatttcagttactgcttatagaa

SEQ ID NO: 207707 - DNA, 25 bp, Probe sequence
aacacaaaatcaaatggctaataat

SEQ ID NO: 207708 - DNA, 25 bp, Probe sequence
aacaccatttaaagattcagagaag

SEQ ID NO: 207709 - DNA, 25 bp, Probe sequence
aagaggaataacaccatttaaagat

SEQ ID NO: 207710 - DNA, 25 bp, Probe sequence
aagacattactattgatgatatttt

SEQ ID NO: 207711 - DNA, 25 bp, Probe sequence
aatggtatcaaagacattactattg

SEQ ID NO: 207712 - DNA, 25 bp, Probe sequence
aataacaccatttaaagattcagag

SEQ ID NO: 207713 - DNA, 25 bp, Probe sequence
caaagacattactattgatgatatt

SEQ ID NO: 207714 - DNA, 25 bp, Probe sequence
cagaaggtatattggtttaacacaa

SEQ ID NO: 207715 - DNA, 25 bp, Probe sequence
cagttactgcttatagaaataaaga

SEQ ID NO: 207716 - DNA, 25 bp, Probe sequence
cattactattgatgatatttttttt

SEQ ID NO: 207717 - DNA, 25 bp, Probe sequence
gaaaatggtatcaaagacattacta

SEQ ID NO: 207718 - DNA, 25 bp, Probe sequence
gaaagaggaataacaccatttaaag

SEQ ID NO: 207719 - DNA, 25 bp, Probe sequence
gacattactattgatgatatttttt

SEQ ID NO: 207720 - DNA, 25 bp, Probe sequence
gattcagagaaggtgtttataaaaa

SEQ ID NO: 207721 - DNA, 25 bp, Probe sequence
gtttaacacaaaatcaaatggctaa

SEQ ID NO: 207722 - DNA, 25 bp, Probe sequence
gtatattggtttaacacaaaatcaa

SEQ ID NO: 207723 - DNA, 25 bp, Probe sequence
ggtatcaaagacattactattgatg

SEQ ID NO: 207724 - DNA, 25 bp, Probe sequence
ggtatattggtttaacacaaaatca

SEQ ID NO: 207725 - DNA, 25 bp, Probe sequence
ggtttaacacaaaatcaaatggcta

SEQ ID NO: 207726 - DNA, 25 bp, Probe sequence
ggaataacaccatttaaagattcag

SEQ ID NO: 207727 - DNA, 25 bp, Probe sequence
taatttaaaaatttcagttactgct

SEQ ID NO: 207728 - DNA, 25 bp, Probe sequence
taacaccatttaaagattcagagaa

SEQ ID NO: 207729 - DNA, 25 bp, Probe sequence
taaaaatttcagttactgcttatag

SEQ ID NO: 207730 - DNA, 25 bp, Probe sequence
tacagaaggtatattggtttaacac

SEQ ID NO: 207731 - DNA, 25 bp, Probe sequence
ttaacacaaaatcaaatggctaata

SEQ ID NO: 207732 - DNA, 25 bp, Probe sequence
attagtccacaacgctaccagttaa

SEQ ID NO: 207733 - DNA, 25 bp, Probe sequence
atgacaaaactaacttatccaatgt

SEQ ID NO: 207734 - DNA, 25 bp, Probe sequence
atgacatgccaattgatgagttatt

SEQ ID NO: 207735 - DNA, 25 bp, Probe sequence
atgagtgtcagattctttcagaaat

SEQ ID NO: 207736 - DNA, 25 bp, Probe sequence
agtccacaacgctaccagttaaagg

SEQ ID NO: 207737 - DNA, 25 bp, Probe sequence
acttggtattagtccacaacgctac

SEQ ID NO: 207738 - DNA, 25 bp, Probe sequence
aaatgagtgtcagattctttcagaa

SEQ ID NO: 207739 - DNA, 25 bp, Probe sequence
aaatgtatgacatgccaattgatga

SEQ ID NO: 207740 - DNA, 25 bp, Probe sequence
aaaggtgacacgcaaaagaaagttg

SEQ ID NO: 207741 - DNA, 25 bp, Probe sequence
aaacttggtattagtccacaacgct

SEQ ID NO: 207742 - DNA, 25 bp, Probe sequence
aacttatccaatgttatacattact

SEQ ID NO: 207743 - DNA, 25 bp, Probe sequence
aactaacttatccaatgttatacat

SEQ ID NO: 207744 - DNA, 25 bp, Probe sequence
caacgctaccagttaaaggaaagtg

SEQ ID NO: 207745 - DNA, 25 bp, Probe sequence
catgccaattgatgagttattttca

SEQ ID NO: 207746 - DNA, 25 bp, Probe sequence
cttggtattagtccacaacgctacc

SEQ ID NO: 207747 - DNA, 25 bp, Probe sequence
gctagcaaacttggtattagtccac

SEQ ID NO: 207748 - DNA, 25 bp, Probe sequence
gcaaacttggtattagtccacaacg

SEQ ID NO: 207749 - DNA, 25 bp, Probe sequence
gacaaaactaacttatccaatgtta

SEQ ID NO: 207750 - DNA, 25 bp, Probe sequence
gacacgcaaaagaaagttgctagca

SEQ ID NO: 207751 - DNA, 25 bp, Probe sequence
gacatgccaattgatgagttatttt

SEQ ID NO: 207752 - DNA, 25 bp, Probe sequence
gagtgtcagattctttcagaaatgt

SEQ ID NO: 207753 - DNA, 25 bp, Probe sequence
gttgctagcaaacttggtattagtc

SEQ ID NO: 207754 - DNA, 25 bp, Probe sequence
gtatgacatgccaattgatgagtta

SEQ ID NO: 207755 - DNA, 25 bp, Probe sequence
gtcagattctttcagaaatgtatga

SEQ ID NO: 207756 - DNA, 25 bp, Probe sequence
gtccacaacgctaccagttaaagga

SEQ ID NO: 207757 - DNA, 25 bp, Probe sequence
ggtattagtccacaacgctaccagt

SEQ ID NO: 207758 - DNA, 25 bp, Probe sequence
tagtccacaacgctaccagttaaag

SEQ ID NO: 207759 - DNA, 25 bp, Probe sequence
tccacaacgctaccagttaaaggaa

SEQ ID NO: 207760 - DNA, 25 bp, Probe sequence
ttggtattagtccacaacgctacca

SEQ ID NO: 207761 - DNA, 25 bp, Probe sequence
taaagtagaggggtcaaggcaatga

SEQ ID NO: 207762 - DNA, 25 bp, Probe sequence
tatccaatgttatacattactagaa

SEQ ID NO: 207763 - DNA, 25 bp, Probe sequence
tattagtccacaacgctaccagtta

SEQ ID NO: 207764 - DNA, 25 bp, Probe sequence
ttagtccacaacgctaccagttaaa

SEQ ID NO: 207765 - DNA, 25 bp, Probe sequence
ttaaatgagtgtcagattctttcag

SEQ ID NO: 207766 - DNA, 25 bp, Probe sequence
atcagtcctgaaaagcacttagaat

SEQ ID NO: 207767 - DNA, 25 bp, Probe sequence
atgaacacacggaatatgttgatgg

SEQ ID NO: 207768 - DNA, 25 bp, Probe sequence
atgttgatggtattgaagtggtttc

SEQ ID NO: 207769 - DNA, 25 bp, Probe sequence
agatcagtcctgaaaagcacttaga

SEQ ID NO: 207770 - DNA, 25 bp, Probe sequence
agaacacgtggtttatcaacttgag

SEQ ID NO: 207771 - DNA, 25 bp, Probe sequence
acgtggtttatcaacttgagttaag

SEQ ID NO: 207772 - DNA, 25 bp, Probe sequence
acacgtggtttatcaacttgagtta

SEQ ID NO: 207773 - DNA, 25 bp, Probe sequence
acacggaatatgttgatggtattga

SEQ ID NO: 207774 - DNA, 25 bp, Probe sequence
acacacggaatatgttgatggtatt

SEQ ID NO: 207775 - DNA, 25 bp, Probe sequence
aacacgtggtttatcaacttgagtt

SEQ ID NO: 207776 - DNA, 25 bp, Probe sequence
aagtggtttcagagatcagtcctga

SEQ ID NO: 207777 - DNA, 25 bp, Probe sequence
aatggtgcgcacaagaattaaagaa

SEQ ID NO: 207778 - DNA, 25 bp, Probe sequence
aatgaaatggtgcgcacaagaatta

SEQ ID NO: 207779 - DNA, 25 bp, Probe sequence
aatagaacacgtggtttatcaactt

SEQ ID NO: 207780 - DNA, 25 bp, Probe sequence
cagagatcagtcctgaaaagcactt

SEQ ID NO: 207781 - DNA, 25 bp, Probe sequence
cagtcctgaaaagcacttagaattg

SEQ ID NO: 207782 - DNA, 25 bp, Probe sequence
gaattgataatgaaatggtgcgcac

SEQ ID NO: 207783 - DNA, 25 bp, Probe sequence
gaagtggtttcagagatcagtcctg

SEQ ID NO: 207784 - DNA, 25 bp, Probe sequence
gaagtaatagaacacgtggtttatc

SEQ ID NO: 207785 - DNA, 25 bp, Probe sequence
gaacacacggaatatgttgatggta

SEQ ID NO: 207786 - DNA, 25 bp, Probe sequence
gaacacgtggtttatcaacttgagt

SEQ ID NO: 207787 - DNA, 25 bp, Probe sequence
gaaaagcacttagaattgataatga

SEQ ID NO: 207788 - DNA, 25 bp, Probe sequence
gaaagttatgaacacacggaatatg

SEQ ID NO: 207789 - DNA, 25 bp, Probe sequence
gagttaagtatcatgaataattttg

SEQ ID NO: 207790 - DNA, 25 bp, Probe sequence
gatcagtcctgaaaagcacttagaa

SEQ ID NO: 207791 - DNA, 25 bp, Probe sequence
gtaatagaacacgtggtttatcaac

SEQ ID NO: 207792 - DNA, 25 bp, Probe sequence
gtcctgaaaagcacttagaattgat

SEQ ID NO: 207793 - DNA, 25 bp, Probe sequence
gtggtttcagagatcagtcctgaaa

SEQ ID NO: 207794 - DNA, 25 bp, Probe sequence
ggtgcgcacaagaattaaagaataa

SEQ ID NO: 207795 - DNA, 25 bp, Probe sequence
ggtttatcaacttgagttaagtatc

SEQ ID NO: 207796 - DNA, 25 bp, Probe sequence
tgataatgaaatggtgcgcacaaga

SEQ ID NO: 207797 - DNA, 25 bp, Probe sequence
tgaagtggtttcagagatcagtcct

SEQ ID NO: 207798 - DNA, 25 bp, Probe sequence
tagaacacgtggtttatcaacttga

SEQ ID NO: 207799 - DNA, 25 bp, Probe sequence
tatcaacttgagttaagtatcatga

SEQ ID NO: 207800 - DNA, 25 bp, Probe sequence
atttcgccacgaggtaaggcagata

SEQ ID NO: 207801 - DNA, 25 bp, Probe sequence
atcacatttcgccacgaggtaaggc

SEQ ID NO: 207802 - DNA, 25 bp, Probe sequence
atccttatatcgtgtgtgttgtcga

SEQ ID NO: 207803 - DNA, 25 bp, Probe sequence
aaaaaccgcgtacagtcaactatag

SEQ ID NO: 207804 - DNA, 25 bp, Probe sequence
atggacagcccatctatgtgagctt

SEQ ID NO: 207805 - DNA, 25 bp, Probe sequence
agataaactcatgcacagattggga

SEQ ID NO: 207806 - DNA, 25 bp, Probe sequence
accgcgtacagtcaactatagatac

SEQ ID NO: 207807 - DNA, 25 bp, Probe sequence
acagattgggagatattttagtgca

SEQ ID NO: 207808 - DNA, 25 bp, Probe sequence
aacacaatcgtgatggacagcccat

SEQ ID NO: 207809 - DNA, 25 bp, Probe sequence
aagatatcacaacgtttagactggc

SEQ ID NO: 207810 - DNA, 25 bp, Probe sequence
aagtgtctgtatttcagttattgag

SEQ ID NO: 207811 - DNA, 25 bp, Probe sequence
aaggattggacatttatgatatgac

SEQ ID NO: 207812 - DNA, 25 bp, Probe sequence
aatatcacaaagtcgttggtcatat

SEQ ID NO: 207813 - DNA, 25 bp, Probe sequence
aatttatttttgatcagtttatggt

SEQ ID NO: 207814 - DNA, 25 bp, Probe sequence
caatcacacttttatcaatcacgtg

SEQ ID NO: 207815 - DNA, 25 bp, Probe sequence
cacacttttatcaatcacgtgaagt

SEQ ID NO: 207816 - DNA, 25 bp, Probe sequence
gcaatatggaattcaacatgacaca

SEQ ID NO: 207817 - DNA, 25 bp, Probe sequence
gaagtgaagttcaaacaatttattt

SEQ ID NO: 207818 - DNA, 25 bp, Probe sequence
gaagaattaatatcacaaagtcgtt

SEQ ID NO: 207819 - DNA, 25 bp, Probe sequence
gacagcccatctatgtgagcttatc

SEQ ID NO: 207820 - DNA, 25 bp, Probe sequence
gacgtgtttctctacaaacgaagca

SEQ ID NO: 207821 - DNA, 25 bp, Probe sequence
gatcagtttatggtacaggtatgtt

SEQ ID NO: 207822 - DNA, 25 bp, Probe sequence
gttatccttatatcgtgtgtgttgt

SEQ ID NO: 207823 - DNA, 25 bp, Probe sequence
gtgtgttgtcgataaagaaccagtt

SEQ ID NO: 207824 - DNA, 25 bp, Probe sequence
gtaatgcaattacagagtaacttga

SEQ ID NO: 207825 - DNA, 25 bp, Probe sequence
gtcgttggtcatataaaaaaccgcg

SEQ ID NO: 207826 - DNA, 25 bp, Probe sequence
gtgagcttatcatatagttatcctt

SEQ ID NO: 207827 - DNA, 25 bp, Probe sequence
ggcattatcacatttcgccacgagg

SEQ ID NO: 207828 - DNA, 25 bp, Probe sequence
tctctacaaacgaagcacatcaaat

SEQ ID NO: 207829 - DNA, 25 bp, Probe sequence
tacaatcaagataaactcatgcaca

SEQ ID NO: 207830 - DNA, 25 bp, Probe sequence
tatggtacaggtatgtttcttagga

SEQ ID NO: 207831 - DNA, 25 bp, Probe sequence
tatcacaacgtttagactggcgtac

SEQ ID NO: 207832 - DNA, 25 bp, Probe sequence
tattaccacatgaatggcattatca

SEQ ID NO: 207833 - DNA, 25 bp, Probe sequence
ttagtgacgtgtttctctacaaacg

SEQ ID NO: 207834 - DNA, 25 bp, Probe sequence
attccttcgtcaattggtgccaaat

SEQ ID NO: 207835 - DNA, 25 bp, Probe sequence
atgcgttcaggatcagaagtgctag

SEQ ID NO: 207836 - DNA, 25 bp, Probe sequence
atgggattcggtattccttcgtcaa

SEQ ID NO: 207837 - DNA, 25 bp, Probe sequence
atggttcttatgctagtaacatggc

SEQ ID NO: 207838 - DNA, 25 bp, Probe sequence
agcaaacctgatgcctttgcaccta

SEQ ID NO: 207839 - DNA, 25 bp, Probe sequence
agcatatggcgtcaaaggtttctta

SEQ ID NO: 207840 - DNA, 25 bp, Probe sequence
acatcaaatcccaacagttactact

SEQ ID NO: 207841 - DNA, 25 bp, Probe sequence
acaaggtgctgttcatgctgcagaa

SEQ ID NO: 207842 - DNA, 25 bp, Probe sequence
aaatcgtacacgaagctttccatgt

SEQ ID NO: 207843 - DNA, 25 bp, Probe sequence
aaaagcctgtcgtattagccggcgc

SEQ ID NO: 207844 - DNA, 25 bp, Probe sequence
aacgcttctcacactcagtatttaa

SEQ ID NO: 207845 - DNA, 25 bp, Probe sequence
aagttctttaatcaacgcttctcac

SEQ ID NO: 207846 - DNA, 25 bp, Probe sequence
caagcggtccaggtgcaactaatgt

SEQ ID NO: 207847 - DNA, 25 bp, Probe sequence
cggatgcacattgcgactctttacc

SEQ ID NO: 207848 - DNA, 25 bp, Probe sequence
gcgtcgttgtagttacaagcggtcc

SEQ ID NO: 207849 - DNA, 25 bp, Probe sequence
gaaggttatgcacgtgtatctggta

SEQ ID NO: 207850 - DNA, 25 bp, Probe sequence
gaaacgtgttgaagatatccctaaa

SEQ ID NO: 207851 - DNA, 25 bp, Probe sequence
gacaagttgctacaccaggcattgg

SEQ ID NO: 207852 - DNA, 25 bp, Probe sequence
gacaggtattacggatgcacattgc

SEQ ID NO: 207853 - DNA, 25 bp, Probe sequence
gacattgacactttcatctcacttt

SEQ ID NO: 207854 - DNA, 25 bp, Probe sequence
gttactactttactaggtctaggtg

SEQ ID NO: 207855 - DNA, 25 bp, Probe sequence
gtagctaattctggacgcaaaggtc

SEQ ID NO: 207856 - DNA, 25 bp, Probe sequence
gggcagctcaattttatccatttaa

SEQ ID NO: 207857 - DNA, 25 bp, Probe sequence
ggtctaggtgctgtaccttatgagg

SEQ ID NO: 207858 - DNA, 25 bp, Probe sequence
ggtcctgtagtgattgattttccaa

SEQ ID NO: 207859 - DNA, 25 bp, Probe sequence
ggtgccaaattagctaatcctgata

SEQ ID NO: 207860 - DNA, 25 bp, Probe sequence
ggacaatgggttacaagcggtggtt

SEQ ID NO: 207861 - DNA, 25 bp, Probe sequence
ggatattctatctatgacttcacca

SEQ ID NO: 207862 - DNA, 25 bp, Probe sequence
tcgtcggtgacggtggtttccaaat

SEQ ID NO: 207863 - DNA, 25 bp, Probe sequence
tgcctttgcacctaacgccaaaatt

SEQ ID NO: 207864 - DNA, 25 bp, Probe sequence
tcggttatcctggtggtgccgtact

SEQ ID NO: 207865 - DNA, 25 bp, Probe sequence
tactacagacgtgggacaacatcaa

SEQ ID NO: 207866 - DNA, 25 bp, Probe sequence
tagccggcgcaggtattaatcaatc

SEQ ID NO: 207867 - DNA, 25 bp, Probe sequence
taggtagccgcttcgatgatagatt

SEQ ID NO: 207868 - DNA, 25 bp, Probe sequence
attacaagtgcttttgttcgcctac

SEQ ID NO: 207869 - DNA, 25 bp, Probe sequence
atatcgatacattacatgttacaca

SEQ ID NO: 207870 - DNA, 25 bp, Probe sequence
atgttttaacggttgaatgctacga

SEQ ID NO: 207871 - DNA, 25 bp, Probe sequence
agtcagcacgctaaatcgaattaca

SEQ ID NO: 207872 - DNA, 25 bp, Probe sequence
acggttgaatgctacgaccttgttg

SEQ ID NO: 207873 - DNA, 25 bp, Probe sequence
aacggttgaatgctacgaccttgtt

SEQ ID NO: 207874 - DNA, 25 bp, Probe sequence
acaagttgcggatcaagtcagcacg

SEQ ID NO: 207875 - DNA, 25 bp, Probe sequence
aacaacctgggatttctaacatgga

SEQ ID NO: 207876 - DNA, 25 bp, Probe sequence
aagttgcggatcaagtcagcacgct

SEQ ID NO: 207877 - DNA, 25 bp, Probe sequence
aagtgcttttgttcgcctacaatat

SEQ ID NO: 207878 - DNA, 25 bp, Probe sequence
aatgctacgaccttgttgataacga

SEQ ID NO: 207879 - DNA, 25 bp, Probe sequence
caagtgcttttgttcgcctacaata

SEQ ID NO: 207880 - DNA, 25 bp, Probe sequence
caacctgggatttctaacatggaaa

SEQ ID NO: 207881 - DNA, 25 bp, Probe sequence
cagcacgctaaatcgaattacaagt

SEQ ID NO: 207882 - DNA, 25 bp, Probe sequence
catggaaattcaagtcgatattcaa

SEQ ID NO: 207883 - DNA, 25 bp, Probe sequence
gaattacaagtgcttttgttcgcct

SEQ ID NO: 207884 - DNA, 25 bp, Probe sequence
cgaccttgttgataacgaagcttaa

SEQ ID NO: 207885 - DNA, 25 bp, Probe sequence
gcggatcaagtcagcacgctaaatc

SEQ ID NO: 207886 - DNA, 25 bp, Probe sequence
gctacgaccttgttgataacgaagc

SEQ ID NO: 207887 - DNA, 25 bp, Probe sequence
gcttttgttcgcctacaatataata

SEQ ID NO: 207888 - DNA, 25 bp, Probe sequence
gaattcttaaattacaagttgcgga

SEQ ID NO: 207889 - DNA, 25 bp, Probe sequence
gatcaagtcagcacgctaaatcgaa

SEQ ID NO: 207890 - DNA, 25 bp, Probe sequence
gttgaatgctacgaccttgttgata

SEQ ID NO: 207891 - DNA, 25 bp, Probe sequence
gttgcggatcaagtcagcacgctaa

SEQ ID NO: 207892 - DNA, 25 bp, Probe sequence
gttcgcctacaatataatatcgata

SEQ ID NO: 207893 - DNA, 25 bp, Probe sequence
gtgcttttgttcgcctacaatataa

SEQ ID NO: 207894 - DNA, 25 bp, Probe sequence
gtcgatattcaagatgatacatcac

SEQ ID NO: 207895 - DNA, 25 bp, Probe sequence
ggaaattcaagtcgatattcaagat

SEQ ID NO: 207896 - DNA, 25 bp, Probe sequence
tgaatgctacgaccttgttgataac

SEQ ID NO: 207897 - DNA, 25 bp, Probe sequence
tctgaacaacctgggatttctaaca

SEQ ID NO: 207898 - DNA, 25 bp, Probe sequence
ttaacggttgaatgctacgaccttg

SEQ ID NO: 207899 - DNA, 25 bp, Probe sequence
tacaagtgcttttgttcgcctacaa

SEQ ID NO: 207900 - DNA, 25 bp, Probe sequence
tacgaccttgttgataacgaagctt

SEQ ID NO: 207901 - DNA, 25 bp, Probe sequence
ttcaagatgatacatcacttcatat

SEQ ID NO: 207902 - DNA, 25 bp, Probe sequence
atcaaatcgcaactcttcctgagcc

SEQ ID NO: 207903 - DNA, 25 bp, Probe sequence
agcaaccaacaagcgcatagattta

SEQ ID NO: 207904 - DNA, 25 bp, Probe sequence
agctaagcaaccaacaagcgcatag

SEQ ID NO: 207905 - DNA, 25 bp, Probe sequence
acgcagcaaagaacacataacatca

SEQ ID NO: 207906 - DNA, 25 bp, Probe sequence
acaagcgcatagatttatgaaagtt

SEQ ID NO: 207907 - DNA, 25 bp, Probe sequence
aaccaacaagcgcatagatttatga

SEQ ID NO: 207908 - DNA, 25 bp, Probe sequence
aagcaaccaacaagcgcatagattt

SEQ ID NO: 207909 - DNA, 25 bp, Probe sequence
cagaacgcagcaaagaacacataac

SEQ ID NO: 207910 - DNA, 25 bp, Probe sequence
cttcctgagccagaacgcagcaaag

SEQ ID NO: 207911 - DNA, 25 bp, Probe sequence
ctcttcctgagccagaacgcagcaa

SEQ ID NO: 207912 - DNA, 25 bp, Probe sequence
gccagaacgcagcaaagaacacata

SEQ ID NO: 207913 - DNA, 25 bp, Probe sequence
gctaagcaaccaacaagcgcataga

SEQ ID NO: 207914 - DNA, 25 bp, Probe sequence
gcagcaaagaacacataacatcaaa

SEQ ID NO: 207915 - DNA, 25 bp, Probe sequence
gcaaccaacaagcgcatagatttat

SEQ ID NO: 207916 - DNA, 25 bp, Probe sequence
gaagctaagcaaccaacaagcgcat

SEQ ID NO: 207917 - DNA, 25 bp, Probe sequence
gaacgcagcaaagaacacataacat

SEQ ID NO: 207918 - DNA, 25 bp, Probe sequence
gaacacataacatcaaatggtgaaa

SEQ ID NO: 207919 - DNA, 25 bp, Probe sequence
gaaagttagtgaagagtacgaaggt

SEQ ID NO: 207920 - DNA, 25 bp, Probe sequence
gagccagaacgcagcaaagaacaca

SEQ ID NO: 207921 - DNA, 25 bp, Probe sequence
gttttgtatcaaatcgcaactcttc

SEQ ID NO: 207922 - DNA, 25 bp, Probe sequence
gtatcaaatcgcaactcttcctgag

SEQ ID NO: 207923 - DNA, 25 bp, Probe sequence
gtgaagagtacgaaggttcaaattt

SEQ ID NO: 207924 - DNA, 25 bp, Probe sequence
gtgaagctaagcaaccaacaagcgc

SEQ ID NO: 207925 - DNA, 25 bp, Probe sequence
tggtgaaactaaaattccatactaa

SEQ ID NO: 207926 - DNA, 25 bp, Probe sequence
tgtatcaaatcgcaactcttcctga

SEQ ID NO: 207927 - DNA, 25 bp, Probe sequence
tgagccagaacgcagcaaagaacac

SEQ ID NO: 207928 - DNA, 25 bp, Probe sequence
tcctgagccagaacgcagcaaagaa

SEQ ID NO: 207929 - DNA, 25 bp, Probe sequence
tcttcctgagccagaacgcagcaaa

SEQ ID NO: 207930 - DNA, 25 bp, Probe sequence
taagcaaccaacaagcgcatagatt

SEQ ID NO: 207931 - DNA, 25 bp, Probe sequence
tagggttaaatgttttgtatcaaat

SEQ ID NO: 207932 - DNA, 25 bp, Probe sequence
tatcaaatcgcaactcttcctgagc

SEQ ID NO: 207933 - DNA, 25 bp, Probe sequence
tttgtatcaaatcgcaactcttcct

SEQ ID NO: 207934 - DNA, 25 bp, Probe sequence
ttcctgagccagaacgcagcaaaga

SEQ ID NO: 207935 - DNA, 25 bp, Probe sequence
ttgtatcaaatcgcaactcttcctg

SEQ ID NO: 207936 - DNA, 25 bp, Probe sequence
atggctttaacattcattttggtgt

SEQ ID NO: 207937 - DNA, 25 bp, Probe sequence
accaccagctgatgttgatgtattt

SEQ ID NO: 207938 - DNA, 25 bp, Probe sequence
acgtacatttgttgaaggttctgct

SEQ ID NO: 207939 - DNA, 25 bp, Probe sequence
aacataatgcgcttgcatttgctca

SEQ ID NO: 207940 - DNA, 25 bp, Probe sequence
aagttggtcgtgaattacgcgaaat

SEQ ID NO: 207941 - DNA, 25 bp, Probe sequence
aaggttctgctgtaccatcactatt

SEQ ID NO: 207942 - DNA, 25 bp, Probe sequence
aatgtacgttactcaatttcaaata

SEQ ID NO: 207943 - DNA, 25 bp, Probe sequence
aatactgctgaatttggtgactatg

SEQ ID NO: 207944 - DNA, 25 bp, Probe sequence
caaaaggtattggtgcaactcgtgc

SEQ ID NO: 207945 - DNA, 25 bp, Probe sequence
cacgcgcatgcacaaaacttaaaag

SEQ ID NO: 207946 - DNA, 25 bp, Probe sequence
cagtagtaggttatggatcacaagg

SEQ ID NO: 207947 - DNA, 25 bp, Probe sequence
cgcttcaggtcaagcacgtaatatt

SEQ ID NO: 207948 - DNA, 25 bp, Probe sequence
ccgggtcatttagttagacgtacat

SEQ ID NO: 207949 - DNA, 25 bp, Probe sequence
gcttgcatttgctcatggctttaac

SEQ ID NO: 207950 - DNA, 25 bp, Probe sequence
gaattacgcgaaatgatgcctttta

SEQ ID NO: 207951 - DNA, 25 bp, Probe sequence
gaaagctgtattaactgatatccaa

SEQ ID NO: 207952 - DNA, 25 bp, Probe sequence
gaccacgtgttatcacaccagatgt

SEQ ID NO: 207953 - DNA, 25 bp, Probe sequence
gagacagatttatttggtgaacaag

SEQ ID NO: 207954 - DNA, 25 bp, Probe sequence
gttgatttgatgtatgaaggcggta

SEQ ID NO: 207955 - DNA, 25 bp, Probe sequence
gttgatgtatttttagtagctccta

SEQ ID NO: 207956 - DNA, 25 bp, Probe sequence
gtttcaggaccacgtgttatcacac

SEQ ID NO: 207957 - DNA, 25 bp, Probe sequence
gtagctcctaaaggaccgggtcatt

SEQ ID NO: 207958 - DNA, 25 bp, Probe sequence
gtaccatcactatttggtattcaac

SEQ ID NO: 207959 - DNA, 25 bp, Probe sequence
gtactttgcggtggtgtatcgaaat

SEQ ID NO: 207960 - DNA, 25 bp, Probe sequence
gtgttccctgttgcagaagcagtta

SEQ ID NO: 207961 - DNA, 25 bp, Probe sequence
gtgttattcaaccaccagctgatgt

SEQ ID NO: 207962 - DNA, 25 bp, Probe sequence
ggtgaacaagcagtactttgcggtg

SEQ ID NO: 207963 - DNA, 25 bp, Probe sequence
ggtgactatgtttcaggaccacgtg

SEQ ID NO: 207964 - DNA, 25 bp, Probe sequence
ggtaacttcagtaatcgctttatcg

SEQ ID NO: 207965 - DNA, 25 bp, Probe sequence
ggttatcaaccagaattagcttatt

SEQ ID NO: 207966 - DNA, 25 bp, Probe sequence
ggatttgatgtgttccctgttgcag

SEQ ID NO: 207967 - DNA, 25 bp, Probe sequence
tgcaactcgtgcaggtgttattgaa

SEQ ID NO: 207968 - DNA, 25 bp, Probe sequence
taattatggtgctattacctgatga

SEQ ID NO: 207969 - DNA, 25 bp, Probe sequence
tacgcgaagaacaacatggtcatca

SEQ ID NO: 207970 - DNA, 25 bp, Probe sequence
attcatgcgattattcaaggttctg

SEQ ID NO: 207971 - DNA, 25 bp, Probe sequence
attttacttttgatgaacgcttgcg

SEQ ID NO: 207972 - DNA, 25 bp, Probe sequence
atagtgctcattgccatgacgattt

SEQ ID NO: 207973 - DNA, 25 bp, Probe sequence
atgatcattatggtgctcaaactgc

SEQ ID NO: 207974 - DNA, 25 bp, Probe sequence
actacaatatgtctctagcggcctt

SEQ ID NO: 207975 - DNA, 25 bp, Probe sequence
acaacggctgtatgtggtttagcta

SEQ ID NO: 207976 - DNA, 25 bp, Probe sequence
acaatgcagttgatcgtattttcca

SEQ ID NO: 207977 - DNA, 25 bp, Probe sequence
aaatctgacatcgatgctgtatatg

SEQ ID NO: 207978 - DNA, 25 bp, Probe sequence
aaagatgcagcgaagccggtcgtgc

SEQ ID NO: 207979 - DNA, 25 bp, Probe sequence
aatattcctgatacagtcggctaca

SEQ ID NO: 207980 - DNA, 25 bp, Probe sequence
aattatctggtaaacacgccttctc

SEQ ID NO: 207981 - DNA, 25 bp, Probe sequence
cagtcggctacagttaccatgatga

SEQ ID NO: 207982 - DNA, 25 bp, Probe sequence
gctggatttcctgcttcaagtacag

SEQ ID NO: 207983 - DNA, 25 bp, Probe sequence
gcaacgcgtactgaattaccattct

SEQ ID NO: 207984 - DNA, 25 bp, Probe sequence
gcaacatcacctattcatcttgaac

SEQ ID NO: 207985 - DNA, 25 bp, Probe sequence
gaatcaggtattcaccaagatggcg

SEQ ID NO: 207986 - DNA, 25 bp, Probe sequence
gaaggcggtgcgagacgaattgaag

SEQ ID NO: 207987 - DNA, 25 bp, Probe sequence
gaagcacatgctaaatttgcagctg

SEQ ID NO: 207988 - DNA, 25 bp, Probe sequence
gaagccggtcgtgcatgtttttata

SEQ ID NO: 207989 - DNA, 25 bp, Probe sequence
gaacgagcaggtaatgcagcacttg

SEQ ID NO: 207990 - DNA, 25 bp, Probe sequence
gaacgcttgcgtattgcattgcaat

SEQ ID NO: 207991 - DNA, 25 bp, Probe sequence
gaacatgtcacatacgcgaaacaat

SEQ ID NO: 207992 - DNA, 25 bp, Probe sequence
gaaattatgacacctcaacttgttg

SEQ ID NO: 207993 - DNA, 25 bp, Probe sequence
gagggtcatatttaccaggattcaa

SEQ ID NO: 207994 - DNA, 25 bp, Probe sequence
gatatgcaggtattcgagtgcctag

SEQ ID NO: 207995 - DNA, 25 bp, Probe sequence
gattatcgtattaattctgtcactg

SEQ ID NO: 207996 - DNA, 25 bp, Probe sequence
gttgacgctggagctacagttatta

SEQ ID NO: 207997 - DNA, 25 bp, Probe sequence
gtcactgaaggtactgatgcccaag

SEQ ID NO: 207998 - DNA, 25 bp, Probe sequence
gtgtaagcacgactgaacttccatt

SEQ ID NO: 207999 - DNA, 25 bp, Probe sequence
ggtaagactgtcaatggctttggta

SEQ ID NO: 208000 - DNA, 25 bp, Probe sequence
ggttctgagcatgagcatcaagcac

SEQ ID NO: 208001 - DNA, 25 bp, Probe sequence
tgaagaagtcgcgcttgcactatac

SEQ ID NO: 208002 - DNA, 25 bp, Probe sequence
tagcggccttcaaagtgctgttgtt

SEQ ID NO: 208003 - DNA, 25 bp, Probe sequence
ttttcacctgaagatgcaacgcgta

SEQ ID NO: 208004 - DNA, 25 bp, Probe sequence
attcctggttcacttggtttatcac

SEQ ID NO: 208005 - DNA, 25 bp, Probe sequence
atcacgaggccttagattctcttac

SEQ ID NO: 208006 - DNA, 25 bp, Probe sequence
aggcacagatttagttatagtccgt

SEQ ID NO: 208007 - DNA, 25 bp, Probe sequence
aggcgctagttctttatcaccttta

SEQ ID NO: 208008 - DNA, 25 bp, Probe sequence
agttttagtaacgatggtccaagat

SEQ ID NO: 208009 - DNA, 25 bp, Probe sequence
agaacgcgttgaaggcacagattta

SEQ ID NO: 208010 - DNA, 25 bp, Probe sequence
aattggccgcttcaagacgaggaaa

SEQ ID NO: 208011 - DNA, 25 bp, Probe sequence
aacgacagcagatttaggcggcaaa

SEQ ID NO: 208012 - DNA, 25 bp, Probe sequence
cacgaatttggtggtgcctctattg

SEQ ID NO: 208013 - DNA, 25 bp, Probe sequence
ccactaccgttgtcaaaggcgctag

SEQ ID NO: 208014 - DNA, 25 bp, Probe sequence
gccctacctggtgatggaatcggtc

SEQ ID NO: 208015 - DNA, 25 bp, Probe sequence
gcgatgtgtttacgtgaaagcttaa

SEQ ID NO: 208016 - DNA, 25 bp, Probe sequence
gcttaaatcaaccagatgctgcaga

SEQ ID NO: 208017 - DNA, 25 bp, Probe sequence
gaatcggtccagaaattttgaacgg

SEQ ID NO: 208018 - DNA, 25 bp, Probe sequence
gaagcttcagtgattcctggttcac

SEQ ID NO: 208019 - DNA, 25 bp, Probe sequence
gaacgcattgttcacgtagcattta

SEQ ID NO: 208020 - DNA, 25 bp, Probe sequence
gaacggatctctatcattgcttgaa

SEQ ID NO: 208021 - DNA, 25 bp, Probe sequence
gaacatgggcaaacgacagcagatt

SEQ ID NO: 208022 - DNA, 25 bp, Probe sequence
gagcctattcatggatcagcaccag

SEQ ID NO: 208023 - DNA, 25 bp, Probe sequence
gagcagatgctattttactgggtgc

SEQ ID NO: 208024 - DNA, 25 bp, Probe sequence
gttcacttggtttatcaccttctgc

SEQ ID NO: 208025 - DNA, 25 bp, Probe sequence
gtagcatttaaattggccgcttcaa

SEQ ID NO: 208026 - DNA, 25 bp, Probe sequence
gtggtgcctctattgatacattcgg

SEQ ID NO: 208027 - DNA, 25 bp, Probe sequence
ggtggacctaaatggacagatccta

SEQ ID NO: 208028 - DNA, 25 bp, Probe sequence
ggtccaagattgtatgagcctattc

SEQ ID NO: 208029 - DNA, 25 bp, Probe sequence
ggtaaaaacgttgccaatccatttg

SEQ ID NO: 208030 - DNA, 25 bp, Probe sequence
ggacagatcctaacaatcgaccaga

SEQ ID NO: 208031 - DNA, 25 bp, Probe sequence
ggaatgattctatctttagcgatgt

SEQ ID NO: 208032 - DNA, 25 bp, Probe sequence
ggccttagattctcttacttataca

SEQ ID NO: 208033 - DNA, 25 bp, Probe sequence
tactgggtgcaatcggtggacctaa

SEQ ID NO: 208034 - DNA, 25 bp, Probe sequence
tgtggcgcaaagtcgtaaatgaagt

SEQ ID NO: 208035 - DNA, 25 bp, Probe sequence
tagcttctagtaaattgtggcgcaa

SEQ ID NO: 208036 - DNA, 25 bp, Probe sequence
ttataacattgttgccctacctggt

SEQ ID NO: 208037 - DNA, 25 bp, Probe sequence
ttatcaccttctgctagttttagta

SEQ ID NO: 208038 - DNA, 25 bp, Probe sequence
atacattgatttacaccttatacat

SEQ ID NO: 208039 - DNA, 25 bp, Probe sequence
atcctgaccaagtacctgagggcgt

SEQ ID NO: 208040 - DNA, 25 bp, Probe sequence
agcatttggtgctattgcatttgga

SEQ ID NO: 208041 - DNA, 25 bp, Probe sequence
acgccatagattttggggtgcatat

SEQ ID NO: 208042 - DNA, 25 bp, Probe sequence
actcgatcacaatgttcctactatt

SEQ ID NO: 208043 - DNA, 25 bp, Probe sequence
aagaacacatttagtatcccctgct

SEQ ID NO: 208044 - DNA, 25 bp, Probe sequence
aagttacttctcctcaagcatttga

SEQ ID NO: 208045 - DNA, 25 bp, Probe sequence
aatacggcataatccaacctgatga

SEQ ID NO: 208046 - DNA, 25 bp, Probe sequence
caatcgtttgtggtgactctcacac

SEQ ID NO: 208047 - DNA, 25 bp, Probe sequence
cacagcaacacatggagcatttggt

SEQ ID NO: 208048 - DNA, 25 bp, Probe sequence
ccttaccaacaggcgtctatgctaa

SEQ ID NO: 208049 - DNA, 25 bp, Probe sequence
ccaggatgttcaatgtgtttaggca

SEQ ID NO: 208050 - DNA, 25 bp, Probe sequence
gctaaggacattattctgcatttaa

SEQ ID NO: 208051 - DNA, 25 bp, Probe sequence
gaaccacaagtgacatggggaacta

SEQ ID NO: 208052 - DNA, 25 bp, Probe sequence
gacctgagacaggacttacacagcc

SEQ ID NO: 208053 - DNA, 25 bp, Probe sequence
gacgacgcgatatttgatcgtgtaa

SEQ ID NO: 208054 - DNA, 25 bp, Probe sequence
gacgcccagatttaacatttgcaac

SEQ ID NO: 208055 - DNA, 25 bp, Probe sequence
gatgtttcaacattagaaccacaag

SEQ ID NO: 208056 - DNA, 25 bp, Probe sequence
gatatcaacgatcaacgtgcgtatg

SEQ ID NO: 208057 - DNA, 25 bp, Probe sequence
gttaatttcagtgaaccattccctg

SEQ ID NO: 208058 - DNA, 25 bp, Probe sequence
gttgaacatgttttcgcaactcaaa

SEQ ID NO: 208059 - DNA, 25 bp, Probe sequence
gtaacatggctatcgaaggtggtgc

SEQ ID NO: 208060 - DNA, 25 bp, Probe sequence
gtcgaatgactatttgtaacatggc

SEQ ID NO: 208061 - DNA, 25 bp, Probe sequence
gtgtttaggcatgaatcctgaccaa

SEQ ID NO: 208062 - DNA, 25 bp, Probe sequence
ggaactaatcctgaaatgggtgtta

SEQ ID NO: 208063 - DNA, 25 bp, Probe sequence
ggcagcagcagcagctattcatggt

SEQ ID NO: 208064 - DNA, 25 bp, Probe sequence
ggcgaaccgcaactattatacattg

SEQ ID NO: 208065 - DNA, 25 bp, Probe sequence
tggtgactctcacacagcaacacat

SEQ ID NO: 208066 - DNA, 25 bp, Probe sequence
tgataagtggcgtgagctatattct

SEQ ID NO: 208067 - DNA, 25 bp, Probe sequence
tgagggcgtacattgtgcatctaca

SEQ ID NO: 208068 - DNA, 25 bp, Probe sequence
tacaggctatgctttggaatttact

SEQ ID NO: 208069 - DNA, 25 bp, Probe sequence
tatcccctgctatggcagcagcagc

SEQ ID NO: 208070 - DNA, 25 bp, Probe sequence
ttaacatttgcaacactcgatcaca

SEQ ID NO: 208071 - DNA, 25 bp, Probe sequence
ttcgcaactcaaacgctatggcaaa

SEQ ID NO: 208072 - DNA, 25 bp, Probe sequence
ataacaacgcagactctatagagga

SEQ ID NO: 208073 - DNA, 25 bp, Probe sequence
atccttttgataacaacgcagactc

SEQ ID NO: 208074 - DNA, 25 bp, Probe sequence
agacgggcaacgtgtatttgttaca

SEQ ID NO: 208075 - DNA, 25 bp, Probe sequence
agtaaacagaacattcacgaatgct

SEQ ID NO: 208076 - DNA, 25 bp, Probe sequence
acgactacaaacacgtaactatgaa

SEQ ID NO: 208077 - DNA, 25 bp, Probe sequence
accaacaacaaaacaacaattatca

SEQ ID NO: 208078 - DNA, 25 bp, Probe sequence
acgcagactctatagaggatcttcc

SEQ ID NO: 208079 - DNA, 25 bp, Probe sequence
acgggcaacgtgtatttgttacaga

SEQ ID NO: 208080 - DNA, 25 bp, Probe sequence
actggtaataatccttttgataaca

SEQ ID NO: 208081 - DNA, 25 bp, Probe sequence
aaaacaacaattatcaacaacaaag

SEQ ID NO: 208082 - DNA, 25 bp, Probe sequence
aacaaagacgggcaacgtgtatttg

SEQ ID NO: 208083 - DNA, 25 bp, Probe sequence
aacaacgcagactctatagaggatc

SEQ ID NO: 208084 - DNA, 25 bp, Probe sequence
caaagacgggcaacgtgtatttgtt

SEQ ID NO: 208085 - DNA, 25 bp, Probe sequence
cttttgataacaacgcagactctat

SEQ ID NO: 208086 - DNA, 25 bp, Probe sequence
ctctatagaggatcttcctttttag

SEQ ID NO: 208087 - DNA, 25 bp, Probe sequence
gcagactctatagaggatcttcctt

SEQ ID NO: 208088 - DNA, 25 bp, Probe sequence
gacggacgactacaaacacgtaact

SEQ ID NO: 208089 - DNA, 25 bp, Probe sequence
gacgggcaacgtgtatttgttacag

SEQ ID NO: 208090 - DNA, 25 bp, Probe sequence
gactctatagaggatcttccttttt

SEQ ID NO: 208091 - DNA, 25 bp, Probe sequence
gataacaacgcagactctatagagg

SEQ ID NO: 208092 - DNA, 25 bp, Probe sequence
gtagacggacgactacaaacacgta

SEQ ID NO: 208093 - DNA, 25 bp, Probe sequence
gtaataatccttttgataacaacgc

SEQ ID NO: 208094 - DNA, 25 bp, Probe sequence
gggcaacgtgtatttgttacagaag

SEQ ID NO: 208095 - DNA, 25 bp, Probe sequence
ggtgtagacggacgactacaaacac

SEQ ID NO: 208096 - DNA, 25 bp, Probe sequence
ggacgactacaaacacgtaactatg

SEQ ID NO: 208097 - DNA, 25 bp, Probe sequence
ggcaggtgtagacggacgactacaa

SEQ ID NO: 208098 - DNA, 25 bp, Probe sequence
tccttttgataacaacgcagactct

SEQ ID NO: 208099 - DNA, 25 bp, Probe sequence
taatccttttgataacaacgcagac

SEQ ID NO: 208100 - DNA, 25 bp, Probe sequence
taacaaccaacaacaaaacaacaat

SEQ ID NO: 208101 - DNA, 25 bp, Probe sequence
tatgaaaacaaagacgggcaacgtg

SEQ ID NO: 208102 - DNA, 25 bp, Probe sequence
tacaaacacgtaactatgaaaacaa

SEQ ID NO: 208103 - DNA, 25 bp, Probe sequence
tagacggacgactacaaacacgtaa

SEQ ID NO: 208104 - DNA, 25 bp, Probe sequence
ttatcaacaacaaagacaaactcaa

SEQ ID NO: 208105 - DNA, 25 bp, Probe sequence
ttgataacaacgcagactctataga

SEQ ID NO: 208106 - DNA, 25 bp, Probe sequence
attaatcatttaggtatcgaatatg

SEQ ID NO: 208107 - DNA, 25 bp, Probe sequence
ataggcatgcatttgaaacaggatt

SEQ ID NO: 208108 - DNA, 25 bp, Probe sequence
atcacttggaaaataataggcatgc

SEQ ID NO: 208109 - DNA, 25 bp, Probe sequence
atcttgaatggtgtaatcacttgga

SEQ ID NO: 208110 - DNA, 25 bp, Probe sequence
agcagtaaaggtagagttagaactc

SEQ ID NO: 208111 - DNA, 25 bp, Probe sequence
aaatttgtattaaccatattgacgg

SEQ ID NO: 208112 - DNA, 25 bp, Probe sequence
aaccgttatcaaaaatggaggcatt

SEQ ID NO: 208113 - DNA, 25 bp, Probe sequence
cacctaatggtcgagatgtaagagt

SEQ ID NO: 208114 - DNA, 25 bp, Probe sequence
aacgcaaagattttttagtccacag

SEQ ID NO: 208115 - DNA, 25 bp, Probe sequence
aagattttttagtccacagattagt

SEQ ID NO: 208116 - DNA, 25 bp, Probe sequence
cttggtctaaccgttatcaaaaatg

SEQ ID NO: 208117 - DNA, 25 bp, Probe sequence
cttaggcagaagtcatagttatatt

SEQ ID NO: 208118 - DNA, 25 bp, Probe sequence
gaattatggaaagatgttgtaggtt

SEQ ID NO: 208119 - DNA, 25 bp, Probe sequence
gaagtcatagttatattagcgacaa

SEQ ID NO: 208120 - DNA, 25 bp, Probe sequence
gaaacaggattaatgcataccaata

SEQ ID NO: 208121 - DNA, 25 bp, Probe sequence
gagatgtaagagtaaccctttggaa

SEQ ID NO: 208122 - DNA, 25 bp, Probe sequence
gagggcatatacgaagtaagcagta

SEQ ID NO: 208123 - DNA, 25 bp, Probe sequence
gatgttgtaggttacgagggcatat

SEQ ID NO: 208124 - DNA, 25 bp, Probe sequence
gatgttactgatatacatggtaata

SEQ ID NO: 208125 - DNA, 25 bp, Probe sequence
gataaaacacctaatggtcgagatg

SEQ ID NO: 208126 - DNA, 25 bp, Probe sequence
gattagtggcattcgcctttatacc

SEQ ID NO: 208127 - DNA, 25 bp, Probe sequence
gtagagcaggaaaattcttaggcag

SEQ ID NO: 208128 - DNA, 25 bp, Probe sequence
gtaatcacaaagatgttactgatat

SEQ ID NO: 208129 - DNA, 25 bp, Probe sequence
gtccacagattagtggcattcgcct

SEQ ID NO: 208130 - DNA, 25 bp, Probe sequence
gtggcattcgcctttataccaatga

SEQ ID NO: 208131 - DNA, 25 bp, Probe sequence
ggcattcgcctttataccaatgata

SEQ ID NO: 208132 - DNA, 25 bp, Probe sequence
ggcattggaaacagcgttatttaaa

SEQ ID NO: 208133 - DNA, 25 bp, Probe sequence
tggctgtaaaacttattaatcattt

SEQ ID NO: 208134 - DNA, 25 bp, Probe sequence
tggaggcattggaaacagcgttatt

SEQ ID NO: 208135 - DNA, 25 bp, Probe sequence
tgtattaaccatattgacgggaacc

SEQ ID NO: 208136 - DNA, 25 bp, Probe sequence
taatgcataccaatatggctgtaaa

SEQ ID NO: 208137 - DNA, 25 bp, Probe sequence
taggttacgagggcatatacgaagt

SEQ ID NO: 208138 - DNA, 25 bp, Probe sequence
ttagtggcattcgcctttataccaa

SEQ ID NO: 208139 - DNA, 25 bp, Probe sequence
ttcgcctttataccaatgatagaag

SEQ ID NO: 208140 - DNA, 25 bp, Probe sequence
atgtaccccttgacgcaatcgtcaa

SEQ ID NO: 208141 - DNA, 25 bp, Probe sequence
agtaatggttactttgcaactttat

SEQ ID NO: 208142 - DNA, 25 bp, Probe sequence
agatacgataaccgacttactgaca

SEQ ID NO: 208143 - DNA, 25 bp, Probe sequence
aagaaacattcttttgagcaaatca

SEQ ID NO: 208144 - DNA, 25 bp, Probe sequence
aaggaagatgtaccccttgacgcaa

SEQ ID NO: 208145 - DNA, 25 bp, Probe sequence
caatacccctattgacgcaaatgtc

SEQ ID NO: 208146 - DNA, 25 bp, Probe sequence
aatagcgcaactgacgttacgcatg

SEQ ID NO: 208147 - DNA, 25 bp, Probe sequence
aatacccctattgataattctgtca

SEQ ID NO: 208148 - DNA, 25 bp, Probe sequence
aattacggcaaatgtcagatacgat

SEQ ID NO: 208149 - DNA, 25 bp, Probe sequence
caatatgtcgatgcgttccagcgtg

SEQ ID NO: 208150 - DNA, 25 bp, Probe sequence
caagcaatatcaaaagcaccctaaa

SEQ ID NO: 208151 - DNA, 25 bp, Probe sequence
gcgcaactgacgttacgcatgagca

SEQ ID NO: 208152 - DNA, 25 bp, Probe sequence
gcgtgcatcgcaatccagtatagaa

SEQ ID NO: 208153 - DNA, 25 bp, Probe sequence
gcagaagtgaataaccaatatgtcg

SEQ ID NO: 208154 - DNA, 25 bp, Probe sequence
gcaaatcatgcaaggtactcgagag

SEQ ID NO: 208155 - DNA, 25 bp, Probe sequence
gaagatgtcttttactaaattcaaa

SEQ ID NO: 208156 - DNA, 25 bp, Probe sequence
gacgttacgcatgagcaatttgagg

SEQ ID NO: 208157 - DNA, 25 bp, Probe sequence
gactgatcaaccaagttactattca

SEQ ID NO: 208158 - DNA, 25 bp, Probe sequence
gaggaatggtggaaactttacaaca

SEQ ID NO: 208159 - DNA, 25 bp, Probe sequence
gataaccgacttactgacagcgaaa

SEQ ID NO: 208160 - DNA, 25 bp, Probe sequence
gttactattcaataattacggcaaa

SEQ ID NO: 208161 - DNA, 25 bp, Probe sequence
gttaaagaaactatatctcgtagaa

SEQ ID NO: 208162 - DNA, 25 bp, Probe sequence
gttactttgcaactttatacaacgt

SEQ ID NO: 208163 - DNA, 25 bp, Probe sequence
gtaacaagtacggatactgcacagc

SEQ ID NO: 208164 - DNA, 25 bp, Probe sequence
gtcgatgcgttccagcgtgcatcgc

SEQ ID NO: 208165 - DNA, 25 bp, Probe sequence
ggatactgcacagcaagtaatggtt

SEQ ID NO: 208166 - DNA, 25 bp, Probe sequence
tgataattctgtcaatacccctatt

SEQ ID NO: 208167 - DNA, 25 bp, Probe sequence
tgacgcaaaaatcaatacccctatt

SEQ ID NO: 208168 - DNA, 25 bp, Probe sequence
tgacgcaatcgtcaatacctattga

SEQ ID NO: 208169 - DNA, 25 bp, Probe sequence
tctcgtagaatttcaaaccttacca

SEQ ID NO: 208170 - DNA, 25 bp, Probe sequence
tactttttgcagaaataacgtcttt

SEQ ID NO: 208171 - DNA, 25 bp, Probe sequence
tactaaattcaaatcatgcttaaag

SEQ ID NO: 208172 - DNA, 25 bp, Probe sequence
tactgacagcgaaaagttacttttt

SEQ ID NO: 208173 - DNA, 25 bp, Probe sequence
ttccagcgtgcatcgcaatccagta

SEQ ID NO: 208174 - DNA, 25 bp, Probe sequence
attcaaggctcatttggtacaggta

SEQ ID NO: 208175 - DNA, 25 bp, Probe sequence
attcaaacatggttgtgactgcgaa

SEQ ID NO: 208176 - DNA, 25 bp, Probe sequence
atgaccgaacaggaattggctcaaa

SEQ ID NO: 208177 - DNA, 25 bp, Probe sequence
aggcaaacacaatatctttactact

SEQ ID NO: 208178 - DNA, 25 bp, Probe sequence
acttacaacgtatattcagcagaat

SEQ ID NO: 208179 - DNA, 25 bp, Probe sequence
acaacactaatcaagatggacggtc

SEQ ID NO: 208180 - DNA, 25 bp, Probe sequence
acaaccaaactgctatgaccgaaca

SEQ ID NO: 208181 - DNA, 25 bp, Probe sequence
aaacacttataacaaccaaactgct

SEQ ID NO: 208182 - DNA, 25 bp, Probe sequence
aacaatcgctactaattcaaggctc

SEQ ID NO: 208183 - DNA, 25 bp, Probe sequence
aagcgatgtcgatttgatggtattc

SEQ ID NO: 208184 - DNA, 25 bp, Probe sequence
aagctaaaggctacacagtgctata

SEQ ID NO: 208185 - DNA, 25 bp, Probe sequence
cagtgctatatatgaatgtacctca

SEQ ID NO: 208186 - DNA, 25 bp, Probe sequence
gcgaaaaacttatgcgaacgttacg

SEQ ID NO: 208187 - DNA, 25 bp, Probe sequence
gcgaacgttacgcaaacaatttcac

SEQ ID NO: 208188 - DNA, 25 bp, Probe sequence
gcagaacgcatattcaaacaatcga

SEQ ID NO: 208189 - DNA, 25 bp, Probe sequence
gaattcgctactagtaagatgttcg

SEQ ID NO: 208190 - DNA, 25 bp, Probe sequence
gcaacgtttgataattacaatccga

SEQ ID NO: 208191 - DNA, 25 bp, Probe sequence
gaatgtacctcaattgatatcaaca

SEQ ID NO: 208192 - DNA, 25 bp, Probe sequence
gaacgaagatctaacgaaagcaacg

SEQ ID NO: 208193 - DNA, 25 bp, Probe sequence
gaacaactagtctatgcgaaaaact

SEQ ID NO: 208194 - DNA, 25 bp, Probe sequence
gaacaagcgtttgatttgaaatgtg

SEQ ID NO: 208195 - DNA, 25 bp, Probe sequence
gactgcgaaatgatagagtatgcca

SEQ ID NO: 208196 - DNA, 25 bp, Probe sequence
gagaactgtggacgtaagtacgact

SEQ ID NO: 208197 - DNA, 25 bp, Probe sequence
gatgacggttcagaattcaaacatg

SEQ ID NO: 208198 - DNA, 25 bp, Probe sequence
gatggtattcgatgattatggtatc

SEQ ID NO: 208199 - DNA, 25 bp, Probe sequence
gtatcaacatgaacgaattcgctac

SEQ ID NO: 208200 - DNA, 25 bp, Probe sequence
gtatgccaaacaatcaactgaaaac

SEQ ID NO: 208201 - DNA, 25 bp, Probe sequence
gtacgactattacaaatttgatgac

SEQ ID NO: 208202 - DNA, 25 bp, Probe sequence
ggtacaggtaaatcacacttatcaa

SEQ ID NO: 208203 - DNA, 25 bp, Probe sequence
ggacggtcaagattacaggactaga

SEQ ID NO: 208204 - DNA, 25 bp, Probe sequence
ggagtcattccagaacttagcaaag

SEQ ID NO: 208205 - DNA, 25 bp, Probe sequence
tacgcaaacaatttcacgttagaca

SEQ ID NO: 208206 - DNA, 25 bp, Probe sequence
tatctttactactaacttggacgaa

SEQ ID NO: 208207 - DNA, 25 bp, Probe sequence
ttacaatccgactaatgaacaacta

SEQ ID NO: 208208 - DNA, 25 bp, Probe sequence
attcgctcacaggagcccatttcag

SEQ ID NO: 208209 - DNA, 25 bp, Probe sequence
aggagcccatttcagcgacgaaaag

SEQ ID NO: 208210 - DNA, 25 bp, Probe sequence
atttaaaggcgctcacggacttcta

SEQ ID NO: 208211 - DNA, 25 bp, Probe sequence
ataccgagaagatggcacagaagat

SEQ ID NO: 208212 - DNA, 25 bp, Probe sequence
aggcgctcacggacttctatatgag

SEQ ID NO: 208213 - DNA, 25 bp, Probe sequence
agctaggtttacaagcaacgatatt

SEQ ID NO: 208214 - DNA, 25 bp, Probe sequence
agcccatttcagcgacgaaaagaaa

SEQ ID NO: 208215 - DNA, 25 bp, Probe sequence
acaagcaacgatatttgatatttag

SEQ ID NO: 208216 - DNA, 25 bp, Probe sequence
aacgatttaaaggcgctcacggact

SEQ ID NO: 208217 - DNA, 25 bp, Probe sequence
aagtttattcgctcacaggagccca

SEQ ID NO: 208218 - DNA, 25 bp, Probe sequence
aatgaagtttattcgctcacaggag

SEQ ID NO: 208219 - DNA, 25 bp, Probe sequence
cacggacttctatatgagcaagagc

SEQ ID NO: 208220 - DNA, 25 bp, Probe sequence
cgctcacaggagcccatttcagcga

SEQ ID NO: 208221 - DNA, 25 bp, Probe sequence
gcgctcacggacttctatatgagca

SEQ ID NO: 208222 - DNA, 25 bp, Probe sequence
gcaagagctaggtttacaagcaacg

SEQ ID NO: 208223 - DNA, 25 bp, Probe sequence
gaagatattaaggtcatcaagtata

SEQ ID NO: 208224 - DNA, 25 bp, Probe sequence
gaaaattatgactgatagtgatcta

SEQ ID NO: 208225 - DNA, 25 bp, Probe sequence
gaaaaatattacttataccgagaag

SEQ ID NO: 208226 - DNA, 25 bp, Probe sequence
gactgatagtgatctaaaacgattt

SEQ ID NO: 208227 - DNA, 25 bp, Probe sequence
gagaatgaagtttattcgctcacag

SEQ ID NO: 208228 - DNA, 25 bp, Probe sequence
gatggcacagaagatattaaggtca

SEQ ID NO: 208229 - DNA, 25 bp, Probe sequence
gatttaaaggcgctcacggacttct

SEQ ID NO: 208230 - DNA, 25 bp, Probe sequence
gtttattcgctcacaggagcccatt

SEQ ID NO: 208231 - DNA, 25 bp, Probe sequence
ggagcccatttcagcgacgaaaaga

SEQ ID NO: 208232 - DNA, 25 bp, Probe sequence
ggtttacaagcaacgatatttgata

SEQ ID NO: 208233 - DNA, 25 bp, Probe sequence
ggacttctatatgagcaagagctag

SEQ ID NO: 208234 - DNA, 25 bp, Probe sequence
tgaagtttattcgctcacaggagcc

SEQ ID NO: 208235 - DNA, 25 bp, Probe sequence
tcgctcacaggagcccatttcagcg

SEQ ID NO: 208236 - DNA, 25 bp, Probe sequence
taaaacgatttaaaggcgctcacgg

SEQ ID NO: 208237 - DNA, 25 bp, Probe sequence
taaaggcgctcacggacttctatat

SEQ ID NO: 208238 - DNA, 25 bp, Probe sequence
tacttataccgagaagatggcacag

SEQ ID NO: 208239 - DNA, 25 bp, Probe sequence
ttattcgctcacaggagcccatttc

SEQ ID NO: 208240 - DNA, 25 bp, Probe sequence
ttaaaggcgctcacggacttctata

SEQ ID NO: 208241 - DNA, 25 bp, Probe sequence
ttcgctcacaggagcccatttcagc

SEQ ID NO: 208242 - DNA, 25 bp, Probe sequence
attgcagacttcgcgttatatctcg

SEQ ID NO: 208243 - DNA, 25 bp, Probe sequence
attcgaattattaccaaaactagat

SEQ ID NO: 208244 - DNA, 25 bp, Probe sequence
atatctcgatgacaaactgattgaa

SEQ ID NO: 208245 - DNA, 25 bp, Probe sequence
atgccaaccgaagtagcaaaactta

SEQ ID NO: 208246 - DNA, 25 bp, Probe sequence
atgatcatatcgaaatacaaccgaa

SEQ ID NO: 208247 - DNA, 25 bp, Probe sequence
acttaaagctaagattttcagacat

SEQ ID NO: 208248 - DNA, 25 bp, Probe sequence
acaggcaaaacatggattacttacg

SEQ ID NO: 208249 - DNA, 25 bp, Probe sequence
acatggattacttacgaggaattaa

SEQ ID NO: 208250 - DNA, 25 bp, Probe sequence
aaaggtatgccaaccgaagtagcaa

SEQ ID NO: 208251 - DNA, 25 bp, Probe sequence
aaagcaagacgagaacgcaaaagag

SEQ ID NO: 208252 - DNA, 25 bp, Probe sequence
aagcacctaagtacacaggcaaaac

SEQ ID NO: 208253 - DNA, 25 bp, Probe sequence
aattggatatgtaaagcacctaagt

SEQ ID NO: 208254 - DNA, 25 bp, Probe sequence
cagacttcgcgttatatctcgatga

SEQ ID NO: 208255 - DNA, 25 bp, Probe sequence
cagaaacataaaactcaattggata

SEQ ID NO: 208256 - DNA, 25 bp, Probe sequence
gcgttatatctcgatgacaaactga

SEQ ID NO: 208257 - DNA, 25 bp, Probe sequence
gctaagattttcagacataaataca

SEQ ID NO: 208258 - DNA, 25 bp, Probe sequence
gcagacttcgcgttatatctcgatg

SEQ ID NO: 208259 - DNA, 25 bp, Probe sequence
gcacctaagtacacaggcaaaacat

SEQ ID NO: 208260 - DNA, 25 bp, Probe sequence
gcaaaacatggattacttacgagga

SEQ ID NO: 208261 - DNA, 25 bp, Probe sequence
gaatatattgcagacttcgcgttat

SEQ ID NO: 208262 - DNA, 25 bp, Probe sequence
gaatggcactaattatgatcatatc

SEQ ID NO: 208263 - DNA, 25 bp, Probe sequence
gaaagtaatatgaatggcactaatt

SEQ ID NO: 208264 - DNA, 25 bp, Probe sequence
gaaatacaaccgaaattcgaattat

SEQ ID NO: 208265 - DNA, 25 bp, Probe sequence
gacaaactgattgaagttatcgaca

SEQ ID NO: 208266 - DNA, 25 bp, Probe sequence
gacattaaaggtatgccaaccgaag

SEQ ID NO: 208267 - DNA, 25 bp, Probe sequence
gacttcgcgttatatctcgatgaca

SEQ ID NO: 208268 - DNA, 25 bp, Probe sequence
gattgaatatattgcagacttcgcg

SEQ ID NO: 208269 - DNA, 25 bp, Probe sequence
gttatcgacattaaaggtatgccaa

SEQ ID NO: 208270 - DNA, 25 bp, Probe sequence
gtaaagcacctaagtacacaggcaa

SEQ ID NO: 208271 - DNA, 25 bp, Probe sequence
ggtatgccaaccgaagtagcaaaac

SEQ ID NO: 208272 - DNA, 25 bp, Probe sequence
tgcagacttcgcgttatatctcgat

SEQ ID NO: 208273 - DNA, 25 bp, Probe sequence
tatattgcagacttcgcgttatatc

SEQ ID NO: 208274 - DNA, 25 bp, Probe sequence
tattgcagacttcgcgttatatctc

SEQ ID NO: 208275 - DNA, 25 bp, Probe sequence
ttcgcgttatatctcgatgacaaac

SEQ ID NO: 208276 - DNA, 25 bp, Probe sequence
atttgcttttgatgaatggcggtac

SEQ ID NO: 208277 - DNA, 25 bp, Probe sequence
atatcgatacagaccaaatcattcc

SEQ ID NO: 208278 - DNA, 25 bp, Probe sequence
atcaaacctattacaacatataaag

SEQ ID NO: 208279 - DNA, 25 bp, Probe sequence
atcaccctacaatatgaatcattaa

SEQ ID NO: 208280 - DNA, 25 bp, Probe sequence
atgacattgcaatcaccctacaata

SEQ ID NO: 208281 - DNA, 25 bp, Probe sequence
atggcggtacttacctgatggttca

SEQ ID NO: 208282 - DNA, 25 bp, Probe sequence
atggcagcaatcaaacctattacaa

SEQ ID NO: 208283 - DNA, 25 bp, Probe sequence
agatgacattgcaatcaccctacaa

SEQ ID NO: 208284 - DNA, 25 bp, Probe sequence
accaaatcaaactgtgtcatcacca

SEQ ID NO: 208285 - DNA, 25 bp, Probe sequence
acgacaatatcgatacagaccaaat

SEQ ID NO: 208286 - DNA, 25 bp, Probe sequence
aaatcaaactgtgtcatcaccagac

SEQ ID NO: 208287 - DNA, 25 bp, Probe sequence
catataaaggtaaaatagtccctct

SEQ ID NO: 208288 - DNA, 25 bp, Probe sequence
cggtacttacctgatggttcagata

SEQ ID NO: 208289 - DNA, 25 bp, Probe sequence
gcttttgatgaatggcggtacttac

SEQ ID NO: 208290 - DNA, 25 bp, Probe sequence
gcagcaatcaaacctattacaacat

SEQ ID NO: 208291 - DNA, 25 bp, Probe sequence
gcaatcaaacctattacaacatata

SEQ ID NO: 208292 - DNA, 25 bp, Probe sequence
gcaatcaccctacaatatgaatcat

SEQ ID NO: 208293 - DNA, 25 bp, Probe sequence
gaatggcggtacttacctgatggtt

SEQ ID NO: 208294 - DNA, 25 bp, Probe sequence
gacattgcaatcaccctacaatatg

SEQ ID NO: 208295 - DNA, 25 bp, Probe sequence
gatgaatggcggtacttacctgatg

SEQ ID NO: 208296 - DNA, 25 bp, Probe sequence
gatttaccaaatcaaactgtgtcat

SEQ ID NO: 208297 - DNA, 25 bp, Probe sequence
ggtccatttgcttttgatgaatggc

SEQ ID NO: 208298 - DNA, 25 bp, Probe sequence
ggcttagatgacattgcaatcaccc

SEQ ID NO: 208299 - DNA, 25 bp, Probe sequence
ggcggtacttacctgatggttcaga

SEQ ID NO: 208300 - DNA, 25 bp, Probe sequence
tccattttgaaattgatgaaacttg

SEQ ID NO: 208301 - DNA, 25 bp, Probe sequence
tcgatacagaccaaatcattcctaa

SEQ ID NO: 208302 - DNA, 25 bp, Probe sequence
tcaaactgtgtcatcaccagacaag

SEQ ID NO: 208303 - DNA, 25 bp, Probe sequence
taaacttgtaaatggcttagatgac

SEQ ID NO: 208304 - DNA, 25 bp, Probe sequence
tttgatgaatggcggtacttacctg

SEQ ID NO: 208305 - DNA, 25 bp, Probe sequence
tacacttaaagcgtatttcaaaaag

SEQ ID NO: 208306 - DNA, 25 bp, Probe sequence
ttagatgacattgcaatcaccctac

SEQ ID NO: 208307 - DNA, 25 bp, Probe sequence
ttaccaaatcaaactgtgtcatcac

SEQ ID NO: 208308 - DNA, 25 bp, Probe sequence
ttcaacgacaatatcgatacagacc

SEQ ID NO: 208309 - DNA, 25 bp, Probe sequence
ttgcaatcaccctacaatatgaatc

SEQ ID NO: 208310 - DNA, 25 bp, Probe sequence
attttacagtcctatgatggctaat

SEQ ID NO: 208311 - DNA, 25 bp, Probe sequence
atgcctagtttaattgatactggag

SEQ ID NO: 208312 - DNA, 25 bp, Probe sequence
atgatgcctagtttaattgatactg

SEQ ID NO: 208313 - DNA, 25 bp, Probe sequence
agtgaattttacagtcctatgatgg

SEQ ID NO: 208314 - DNA, 25 bp, Probe sequence
agacagtgaattttacagtcctatg

SEQ ID NO: 208315 - DNA, 25 bp, Probe sequence
acagtcctatgatggctaatatgaa

SEQ ID NO: 208316 - DNA, 25 bp, Probe sequence
acagtgaattttacagtcctatgat

SEQ ID NO: 208317 - DNA, 25 bp, Probe sequence
aaacacctgaagaaaaagctaagat

SEQ ID NO: 208318 - DNA, 25 bp, Probe sequence
aagaatgatgcctagtttaattgat

SEQ ID NO: 208319 - DNA, 25 bp, Probe sequence
aagacagtgaattttacagtcctat

SEQ ID NO: 208320 - DNA, 25 bp, Probe sequence
aattttacagtcctatgatggctaa

SEQ ID NO: 208321 - DNA, 25 bp, Probe sequence
cagtgaattttacagtcctatgatg

SEQ ID NO: 208322 - DNA, 25 bp, Probe sequence
cagtcctatgatggctaatatgaat

SEQ ID NO: 208323 - DNA, 25 bp, Probe sequence
gcctagtttaattgatactggagat

SEQ ID NO: 208324 - DNA, 25 bp, Probe sequence
gctaagattgaagatgatttcatta

SEQ ID NO: 208325 - DNA, 25 bp, Probe sequence
gctatgttaagaatgatgcctagtt

SEQ ID NO: 208326 - DNA, 25 bp, Probe sequence
gaattttacagtcctatgatggcta

SEQ ID NO: 208327 - DNA, 25 bp, Probe sequence
gaatgaacatgaattaagggctatg

SEQ ID NO: 208328 - DNA, 25 bp, Probe sequence
gaatgatgcctagtttaattgatac

SEQ ID NO: 208329 - DNA, 25 bp, Probe sequence
gatgcctagtttaattgatactgga

SEQ ID NO: 208330 - DNA, 25 bp, Probe sequence
gtttaattgatactggagatgacaa

SEQ ID NO: 208331 - DNA, 25 bp, Probe sequence
gtcctatgatggctaatatgaatga

SEQ ID NO: 208332 - DNA, 25 bp, Probe sequence
gtgaattttacagtcctatgatggc

SEQ ID NO: 208333 - DNA, 25 bp, Probe sequence
gggctatgttaagaatgatgcctag

SEQ ID NO: 208334 - DNA, 25 bp, Probe sequence
ggaaaagtacactgaaataatcaaa

SEQ ID NO: 208335 - DNA, 25 bp, Probe sequence
tgaaattcccggaaaagtacactga

SEQ ID NO: 208336 - DNA, 25 bp, Probe sequence
tgatggctaatatgaatgaacatga

SEQ ID NO: 208337 - DNA, 25 bp, Probe sequence
tgaattttacagtcctatgatggct

SEQ ID NO: 208338 - DNA, 25 bp, Probe sequence
tcccggaaaagtacactgaaataat

SEQ ID NO: 208339 - DNA, 25 bp, Probe sequence
taatattcctaaaatgaaattcccg

SEQ ID NO: 208340 - DNA, 25 bp, Probe sequence
tacagtcctatgatggctaatatga

SEQ ID NO: 208341 - DNA, 25 bp, Probe sequence
tttacagtcctatgatggctaatat

SEQ ID NO: 208342 - DNA, 25 bp, Probe sequence
ttttacagtcctatgatggctaata

SEQ ID NO: 208343 - DNA, 25 bp, Probe sequence
ttacagtcctatgatggctaatatg

SEQ ID NO: 208344 - DNA, 25 bp, Probe sequence
attggccagaatgaaatcggctata

SEQ ID NO: 208345 - DNA, 25 bp, Probe sequence
atcatagcactacagaaactcaaaa

SEQ ID NO: 208346 - DNA, 25 bp, Probe sequence
atctaccgcttatgatatgaggaaa

SEQ ID NO: 208347 - DNA, 25 bp, Probe sequence
atcggtggagatagggtgcaaagca

SEQ ID NO: 208348 - DNA, 25 bp, Probe sequence
atcgcaattggccagaatgaaatcg

SEQ ID NO: 208349 - DNA, 25 bp, Probe sequence
atgaaatcggctatagaggttgtat

SEQ ID NO: 208350 - DNA, 25 bp, Probe sequence
agcaattacaattacttcgataaag

SEQ ID NO: 208351 - DNA, 25 bp, Probe sequence
agcactacagaaactcaaaaactta

SEQ ID NO: 208352 - DNA, 25 bp, Probe sequence
acccgtggagtcaacaagatactaa

SEQ ID NO: 208353 - DNA, 25 bp, Probe sequence
acttcgataaagatatagcgcgtgt

SEQ ID NO: 208354 - DNA, 25 bp, Probe sequence
aaatttaactggtgtagctcaagaa

SEQ ID NO: 208355 - DNA, 25 bp, Probe sequence
aaagctattagagttgttaatgata

SEQ ID NO: 208356 - DNA, 25 bp, Probe sequence
aactggtgtagctcaagaaataaat

SEQ ID NO: 208357 - DNA, 25 bp, Probe sequence
aagcctagaacattaaatttaactg

SEQ ID NO: 208358 - DNA, 25 bp, Probe sequence
aatgtaagtaaatctaccgcttatg

SEQ ID NO: 208359 - DNA, 25 bp, Probe sequence
cagaaactcaaaaacttatggaact

SEQ ID NO: 208360 - DNA, 25 bp, Probe sequence
gcaaagcaatgtaagtgtaactgaa

SEQ ID NO: 208361 - DNA, 25 bp, Probe sequence
gaattaagcaattacaattacttcg

SEQ ID NO: 208362 - DNA, 25 bp, Probe sequence
gaagattatcgcaattggccagaat

SEQ ID NO: 208363 - DNA, 25 bp, Probe sequence
gagatgaagttttaaacccgtggag

SEQ ID NO: 208364 - DNA, 25 bp, Probe sequence
gagtttgagaaaatcaacgcaaaga

SEQ ID NO: 208365 - DNA, 25 bp, Probe sequence
gaggttgtatataatcatagcacta

SEQ ID NO: 208366 - DNA, 25 bp, Probe sequence
gatatagcgcgtgtaagagatgaag

SEQ ID NO: 208367 - DNA, 25 bp, Probe sequence
gatatattagttaggttagctgatg

SEQ ID NO: 208368 - DNA, 25 bp, Probe sequence
gattatcgcaattggccagaatgaa

SEQ ID NO: 208369 - DNA, 25 bp, Probe sequence
gtaaatctaccgcttatgatatgag

SEQ ID NO: 208370 - DNA, 25 bp, Probe sequence
gtcaacaagatactaatatcggtgg

SEQ ID NO: 208371 - DNA, 25 bp, Probe sequence
gggtgcaaagcaatgtaagtgtaac

SEQ ID NO: 208372 - DNA, 25 bp, Probe sequence
ggtggagatagggtgcaaagcaatg

SEQ ID NO: 208373 - DNA, 25 bp, Probe sequence
tcaaaaacttatggaactttattat

SEQ ID NO: 208374 - DNA, 25 bp, Probe sequence
taaacccgtggagtcaacaagatac

SEQ ID NO: 208375 - DNA, 25 bp, Probe sequence
tagcgcgtgtaagagatgaagtttt

SEQ ID NO: 208376 - DNA, 25 bp, Probe sequence
tagaagattatcgcaattggccaga

SEQ ID NO: 208377 - DNA, 25 bp, Probe sequence
taggttagctgatgaattaggtata

SEQ ID NO: 208378 - DNA, 25 bp, Probe sequence
attagaccattacttatctcaaaag

SEQ ID NO: 208379 - DNA, 25 bp, Probe sequence
agtgcaggtaatcatgctcaaggtg

SEQ ID NO: 208380 - DNA, 25 bp, Probe sequence
agatccattcaataatgttcataca

SEQ ID NO: 208381 - DNA, 25 bp, Probe sequence
acgtgtaaatcatttcgatccttcc

SEQ ID NO: 208382 - DNA, 25 bp, Probe sequence
acaggtactgtcattattggtattc

SEQ ID NO: 208383 - DNA, 25 bp, Probe sequence
acaatttctggacaaggtacgcttg

SEQ ID NO: 208384 - DNA, 25 bp, Probe sequence
aaatcatttcgatccttccaatatt

SEQ ID NO: 208385 - DNA, 25 bp, Probe sequence
aaatcttctcaaaatacaggtactg

SEQ ID NO: 208386 - DNA, 25 bp, Probe sequence
aaatgaactttatagatccattcaa

SEQ ID NO: 208387 - DNA, 25 bp, Probe sequence
aacagtttctacgaaagatatcgat

SEQ ID NO: 208388 - DNA, 25 bp, Probe sequence
aagatgttatattcattgttaattt

SEQ ID NO: 208389 - DNA, 25 bp, Probe sequence
gccagtcactacacctttacaaaag

SEQ ID NO: 208390 - DNA, 25 bp, Probe sequence
gctgaagctttaacttatacaagtg

SEQ ID NO: 208391 - DNA, 25 bp, Probe sequence
gctcaaggtgttgcctatacagcta

SEQ ID NO: 208392 - DNA, 25 bp, Probe sequence
gaagatttacaatgggtacgttctt

SEQ ID NO: 208393 - DNA, 25 bp, Probe sequence
gaaacacctttacaattagaccatt

SEQ ID NO: 208394 - DNA, 25 bp, Probe sequence
gaaatagtaacgttgaagttgtact

SEQ ID NO: 208395 - DNA, 25 bp, Probe sequence
gacagtcaaaacaacagtttctacg

SEQ ID NO: 208396 - DNA, 25 bp, Probe sequence
gatacatttgatcactgtttagctg

SEQ ID NO: 208397 - DNA, 25 bp, Probe sequence
gatattgtcaaagaaacacctttac

SEQ ID NO: 208398 - DNA, 25 bp, Probe sequence
gatttaatacaactcaaacaacgtg

SEQ ID NO: 208399 - DNA, 25 bp, Probe sequence
gttatctttatgccagtcactacac

SEQ ID NO: 208400 - DNA, 25 bp, Probe sequence
gtttgtgtcattagtggtggtaata

SEQ ID NO: 208401 - DNA, 25 bp, Probe sequence
gtactgtcattattggtattcaact

SEQ ID NO: 208402 - DNA, 25 bp, Probe sequence
gtaatcatgctcaaggtgttgccta

SEQ ID NO: 208403 - DNA, 25 bp, Probe sequence
ggtgttgcctatacagctaaaaaac

SEQ ID NO: 208404 - DNA, 25 bp, Probe sequence
ggtacgcttgctaaagaaatgctag

SEQ ID NO: 208405 - DNA, 25 bp, Probe sequence
ggtattcaacttaaagatcatgatg

SEQ ID NO: 208406 - DNA, 25 bp, Probe sequence
taatgttcatacaatttctggacaa

SEQ ID NO: 208407 - DNA, 25 bp, Probe sequence
taaacgctgttatctttatgccagt

SEQ ID NO: 208408 - DNA, 25 bp, Probe sequence
tttcgatccttccaatatttatatt

SEQ ID NO: 208409 - DNA, 25 bp, Probe sequence
ttatgccagtcactacacctttaca

SEQ ID NO: 208410 - DNA, 25 bp, Probe sequence
ttctggacaaggtacgcttgctaaa

SEQ ID NO: 208411 - DNA, 25 bp, Probe sequence
ttgatcactgtttagctgaagcttt

SEQ ID NO: 208412 - DNA, 25 bp, Probe sequence
atggatatccaagagaagttaaaac

SEQ ID NO: 208413 - DNA, 25 bp, Probe sequence
agtcgtcgtatgaagcagaaagaaa

SEQ ID NO: 208414 - DNA, 25 bp, Probe sequence
agatcaaatcgctgaatatgaacgc

SEQ ID NO: 208415 - DNA, 25 bp, Probe sequence
aaagaagaattaagtcgtcgtatga

SEQ ID NO: 208416 - DNA, 25 bp, Probe sequence
aacaagacaaaaagactaattcaga

SEQ ID NO: 208417 - DNA, 25 bp, Probe sequence
aacaacgatgatgaaggcaaagaca

SEQ ID NO: 208418 - DNA, 25 bp, Probe sequence
aactcaaattacagttttttgctga

SEQ ID NO: 208419 - DNA, 25 bp, Probe sequence
aactgacactgctgaacaaaccaaa

SEQ ID NO: 208420 - DNA, 25 bp, Probe sequence
aagataacaacgatgatgaaggcaa

SEQ ID NO: 208421 - DNA, 25 bp, Probe sequence
aatgaacaaagatcaaatcgctgaa

SEQ ID NO: 208422 - DNA, 25 bp, Probe sequence
aatttggttgtaactgacactgctg

SEQ ID NO: 208423 - DNA, 25 bp, Probe sequence
caaaccaaatcgaacgttgaagctt

SEQ ID NO: 208424 - DNA, 25 bp, Probe sequence
caaatcgaacgttgaagctttttct

SEQ ID NO: 208425 - DNA, 25 bp, Probe sequence
cactgctgaacaaaccaaatcgaac

SEQ ID NO: 208426 - DNA, 25 bp, Probe sequence
ctgctgaacaaaccaaatcgaacgt

SEQ ID NO: 208427 - DNA, 25 bp, Probe sequence
ctgacactgctgaacaaaccaaatc

SEQ ID NO: 208428 - DNA, 25 bp, Probe sequence
gctgaacaaaccaaatcgaacgttg

SEQ ID NO: 208429 - DNA, 25 bp, Probe sequence
gctgttgatgaagctaaacgattag

SEQ ID NO: 208430 - DNA, 25 bp, Probe sequence
gaatataacaagcgtcttaaagaag

SEQ ID NO: 208431 - DNA, 25 bp, Probe sequence
gaattaagtcgtcgtatgaagcaga

SEQ ID NO: 208432 - DNA, 25 bp, Probe sequence
gaaggcaaagacaaacaagacaaaa

SEQ ID NO: 208433 - DNA, 25 bp, Probe sequence
gaagaattaagtcgtcgtatgaagc

SEQ ID NO: 208434 - DNA, 25 bp, Probe sequence
gaagctgttgatgaagctaaacgat

SEQ ID NO: 208435 - DNA, 25 bp, Probe sequence
gaacaaaccaaatcgaacgttgaag

SEQ ID NO: 208436 - DNA, 25 bp, Probe sequence
gacactgctgaacaaaccaaatcga

SEQ ID NO: 208437 - DNA, 25 bp, Probe sequence
gttttttgctgaagaatcagatgga

SEQ ID NO: 208438 - DNA, 25 bp, Probe sequence
gtaactgacactgctgaacaaacca

SEQ ID NO: 208439 - DNA, 25 bp, Probe sequence
tggttgtaactgacactgctgaaca

SEQ ID NO: 208440 - DNA, 25 bp, Probe sequence
tcaatttggttgtaactgacactgc

SEQ ID NO: 208441 - DNA, 25 bp, Probe sequence
taactgacactgctgaacaaaccaa

SEQ ID NO: 208442 - DNA, 25 bp, Probe sequence
tacagttttttgctgaagaatcaga

SEQ ID NO: 208443 - DNA, 25 bp, Probe sequence
tttggttgtaactgacactgctgaa

SEQ ID NO: 208444 - DNA, 25 bp, Probe sequence
ttaagtcgtcgtatgaagcagaaag

SEQ ID NO: 208445 - DNA, 25 bp, Probe sequence
ttggttgtaactgacactgctgaac

SEQ ID NO: 208446 - DNA, 25 bp, Probe sequence
ataagttgatttacggtatccctca

SEQ ID NO: 208447 - DNA, 25 bp, Probe sequence
attagtgcctgctgacaaaaaaaca

SEQ ID NO: 208448 - DNA, 25 bp, Probe sequence
atgcatgtagcgttacacatcgctg

SEQ ID NO: 208449 - DNA, 25 bp, Probe sequence
atgtagcgttacacatcgctgacga

SEQ ID NO: 208450 - DNA, 25 bp, Probe sequence
agtgcctgctgacaaaaaaacagat

SEQ ID NO: 208451 - DNA, 25 bp, Probe sequence
acagtgatacgttagatggtctacc

SEQ ID NO: 208452 - DNA, 25 bp, Probe sequence
aaacgcggtgaattaattactggtg

SEQ ID NO: 208453 - DNA, 25 bp, Probe sequence
aaacttattcgaacaagacatggtg

SEQ ID NO: 208454 - DNA, 25 bp, Probe sequence
aaaaaaacagattcagtaccaggag

SEQ ID NO: 208455 - DNA, 25 bp, Probe sequence
aagcattcgctaaattagtgcctgc

SEQ ID NO: 208456 - DNA, 25 bp, Probe sequence
aactatgcatgtagcgttacacatc

SEQ ID NO: 208457 - DNA, 25 bp, Probe sequence
aatcaagcaatttaaaacgcggtga

SEQ ID NO: 208458 - DNA, 25 bp, Probe sequence
cacacctgtaaacttattcgaacaa

SEQ ID NO: 208459 - DNA, 25 bp, Probe sequence
catcgctgacgataaagcattcgct

SEQ ID NO: 208460 - DNA, 25 bp, Probe sequence
ctatgcatgtagcgttacacatcgc

SEQ ID NO: 208461 - DNA, 25 bp, Probe sequence
gcgttacacatcgctgacgataaag

SEQ ID NO: 208462 - DNA, 25 bp, Probe sequence
gcggtgaattaattactggtgactt

SEQ ID NO: 208463 - DNA, 25 bp, Probe sequence
gctaaattagtgcctgctgacaaaa

SEQ ID NO: 208464 - DNA, 25 bp, Probe sequence
gcattcgctaaattagtgcctgctg

SEQ ID NO: 208465 - DNA, 25 bp, Probe sequence
gcatgtagcgttacacatcgctgac

SEQ ID NO: 208466 - DNA, 25 bp, Probe sequence
gaattaattactggtgactttgata

SEQ ID NO: 208467 - DNA, 25 bp, Probe sequence
gaccgtaacagtgatacgttagatg

SEQ ID NO: 208468 - DNA, 25 bp, Probe sequence
gatacgttagatggtctacctgtgg

SEQ ID NO: 208469 - DNA, 25 bp, Probe sequence
gttacacatcgctgacgataaagca

SEQ ID NO: 208470 - DNA, 25 bp, Probe sequence
gtagatcctgaaactaaggaacgta

SEQ ID NO: 208471 - DNA, 25 bp, Probe sequence
gtagcgttacacatcgctgacgata

SEQ ID NO: 208472 - DNA, 25 bp, Probe sequence
gtgatacgttagatggtctacctgt

SEQ ID NO: 208473 - DNA, 25 bp, Probe sequence
tgaaactaaggaacgtatttatgac

SEQ ID NO: 208474 - DNA, 25 bp, Probe sequence
tcgctaaattagtgcctgctgacaa

SEQ ID NO: 208475 - DNA, 25 bp, Probe sequence
tcgctgacgataaagcattcgctaa

SEQ ID NO: 208476 - DNA, 25 bp, Probe sequence
taattactggtgactttgataagtt

SEQ ID NO: 208477 - DNA, 25 bp, Probe sequence
tacgttagatggtctacctgtggtt

SEQ ID NO: 208478 - DNA, 25 bp, Probe sequence
ttactggtgactttgataagttgat

SEQ ID NO: 208479 - DNA, 25 bp, Probe sequence
ttcgctaaattagtgcctgctgaca

SEQ ID NO: 208480 - DNA, 25 bp, Probe sequence
attgcaaccttatctcgttagtgaa

SEQ ID NO: 208481 - DNA, 25 bp, Probe sequence
atttcgcatgacatacgtacaccgt

SEQ ID NO: 208482 - DNA, 25 bp, Probe sequence
atttcataatgagcgccgatgtatt

SEQ ID NO: 208483 - DNA, 25 bp, Probe sequence
atagccaaaccgttgcattaggatt

SEQ ID NO: 208484 - DNA, 25 bp, Probe sequence
atcaccctatcgtcctaaaggcaaa

SEQ ID NO: 208485 - DNA, 25 bp, Probe sequence
agtgcatcaacatctcatgcttgca

SEQ ID NO: 208486 - DNA, 25 bp, Probe sequence
agaatcgccgacaatagtacttatc

SEQ ID NO: 208487 - DNA, 25 bp, Probe sequence
aatgaacaaatcaccctatcgtcct

SEQ ID NO: 208488 - DNA, 25 bp, Probe sequence
acatcggttacagtccaggtgttgg

SEQ ID NO: 208489 - DNA, 25 bp, Probe sequence
acaacagatacatttccaggcatta

SEQ ID NO: 208490 - DNA, 25 bp, Probe sequence
aaagaggcattccatattgctcaaa

SEQ ID NO: 208491 - DNA, 25 bp, Probe sequence
aaaagcgtataactgtatcatcctc

SEQ ID NO: 208492 - DNA, 25 bp, Probe sequence
aacgtcactcaaacctcatattgct

SEQ ID NO: 208493 - DNA, 25 bp, Probe sequence
aacgtgtacccgactatttcataat

SEQ ID NO: 208494 - DNA, 25 bp, Probe sequence
aagatattcgagcctttttacacag

SEQ ID NO: 208495 - DNA, 25 bp, Probe sequence
aataccattgcaaaaccatatcgat

SEQ ID NO: 208496 - DNA, 25 bp, Probe sequence
cgaccgcataatcgaagaatcgccg

SEQ ID NO: 208497 - DNA, 25 bp, Probe sequence
cccacctaagcgaactgcgtacatt

SEQ ID NO: 208498 - DNA, 25 bp, Probe sequence
gaagtcgtagatatctcacctgaac

SEQ ID NO: 208499 - DNA, 25 bp, Probe sequence
gaactttctctcgccgttgaaaatg

SEQ ID NO: 208500 - DNA, 25 bp, Probe sequence
gaacagttgccgacttgatgagtga

SEQ ID NO: 208501 - DNA, 25 bp, Probe sequence
gagaatccatgttacaggctgaacg

SEQ ID NO: 208502 - DNA, 25 bp, Probe sequence
gttaaacacacttctactgacacca

SEQ ID NO: 208503 - DNA, 25 bp, Probe sequence
gtcaaacactgaatcgctaaacata

SEQ ID NO: 208504 - DNA, 25 bp, Probe sequence
gggactgtggatttatcaacttgat

SEQ ID NO: 208505 - DNA, 25 bp, Probe sequence
ggttgataccaattggcacatctcc

SEQ ID NO: 208506 - DNA, 25 bp, Probe sequence
ggcacatctccgattaaaggcattc

SEQ ID NO: 208507 - DNA, 25 bp, Probe sequence
ggcattctagccattgattaccaaa

SEQ ID NO: 208508 - DNA, 25 bp, Probe sequence
ggctgaacgtcaactgacacattca

SEQ ID NO: 208509 - DNA, 25 bp, Probe sequence
tgttaaatgaactttctctcgccgt

SEQ ID NO: 208510 - DNA, 25 bp, Probe sequence
tgatttttctcatcggcatcatttt

SEQ ID NO: 208511 - DNA, 25 bp, Probe sequence
tacaatataaaccgaaccaaccaca

SEQ ID NO: 208512 - DNA, 25 bp, Probe sequence
tacagactatcctacacaaacatca

SEQ ID NO: 208513 - DNA, 25 bp, Probe sequence
ttgactatcctattacatttatcgt

SEQ ID NO: 208514 - DNA, 25 bp, Probe sequence
atcatctgaacagtcaatagaagct

SEQ ID NO: 208515 - DNA, 25 bp, Probe sequence
atctaacaacacactgaatcaagct

SEQ ID NO: 208516 - DNA, 25 bp, Probe sequence
agacacgctaactcatctatgatta

SEQ ID NO: 208517 - DNA, 25 bp, Probe sequence
accaatggtcgattagattcacaat

SEQ ID NO: 208518 - DNA, 25 bp, Probe sequence
actcatctatgattattcatattac

SEQ ID NO: 208519 - DNA, 25 bp, Probe sequence
acactggacgcgtacatgcgcaagc

SEQ ID NO: 208520 - DNA, 25 bp, Probe sequence
acaacacactgaatcaagctaaaca

SEQ ID NO: 208521 - DNA, 25 bp, Probe sequence
aaacagtatgtagatggtaagttac

SEQ ID NO: 208522 - DNA, 25 bp, Probe sequence
aagcgatcgaatcatctgaacagtc

SEQ ID NO: 208523 - DNA, 25 bp, Probe sequence
aatacactggacgcgtacatgcgca

SEQ ID NO: 208524 - DNA, 25 bp, Probe sequence
caatatccagaatgatctaattagt

SEQ ID NO: 208525 - DNA, 25 bp, Probe sequence
cactggacgcgtacatgcgcaagca

SEQ ID NO: 208526 - DNA, 25 bp, Probe sequence
cacgctaactcatctatgattattc

SEQ ID NO: 208527 - DNA, 25 bp, Probe sequence
caccaatggtcgattagattcacaa

SEQ ID NO: 208528 - DNA, 25 bp, Probe sequence
cttaaaatacactggacgcgtacat

SEQ ID NO: 208529 - DNA, 25 bp, Probe sequence
gcgatcgaatcatctgaacagtcaa

SEQ ID NO: 208530 - DNA, 25 bp, Probe sequence
gctgttttaagacacgctaactcat

SEQ ID NO: 208531 - DNA, 25 bp, Probe sequence
gctaactcatctatgattattcata

SEQ ID NO: 208532 - DNA, 25 bp, Probe sequence
gcttcaatatccagaatgatctaat

SEQ ID NO: 208533 - DNA, 25 bp, Probe sequence
gaagaaatatctaacaacacactga

SEQ ID NO: 208534 - DNA, 25 bp, Probe sequence
gaagctgttttaagacacgctaact

SEQ ID NO: 208535 - DNA, 25 bp, Probe sequence
gaaatatctaacaacacactgaatc

SEQ ID NO: 208536 - DNA, 25 bp, Probe sequence
gatctaattagtaattttgacggta

SEQ ID NO: 208537 - DNA, 25 bp, Probe sequence
gatgtgccagaaaaggcggatatag

SEQ ID NO: 208538 - DNA, 25 bp, Probe sequence
gatcgaatcatctgaacagtcaata

SEQ ID NO: 208539 - DNA, 25 bp, Probe sequence
gttacaaagtataagttggcaacaa

SEQ ID NO: 208540 - DNA, 25 bp, Probe sequence
gttttaagacacgctaactcatcta

SEQ ID NO: 208541 - DNA, 25 bp, Probe sequence
tgacggtaaaacaaagctagtttat

SEQ ID NO: 208542 - DNA, 25 bp, Probe sequence
ggtaaagcgatcgaatcatctgaac

SEQ ID NO: 208543 - DNA, 25 bp, Probe sequence
tgaatcaagctaaacagtatgtaga

SEQ ID NO: 208544 - DNA, 25 bp, Probe sequence
tacggtaaagcgatcgaatcatctg

SEQ ID NO: 208545 - DNA, 25 bp, Probe sequence
taagacacgctaactcatctatgat

SEQ ID NO: 208546 - DNA, 25 bp, Probe sequence
tttagcttcaatatccagaatgatc

SEQ ID NO: 208547 - DNA, 25 bp, Probe sequence
ttactaatgcaaaagatgtgccaga

SEQ ID NO: 208548 - DNA, 25 bp, Probe sequence
attggttatcaaatgttgcagtgga

SEQ ID NO: 208549 - DNA, 25 bp, Probe sequence
attcaagctttagataacggtgcga

SEQ ID NO: 208550 - DNA, 25 bp, Probe sequence
atttacttgatgttgcattaacttt

SEQ ID NO: 208551 - DNA, 25 bp, Probe sequence
atattattaaaacacatccacgcat

SEQ ID NO: 208552 - DNA, 25 bp, Probe sequence
atatggctatgttaataagactgaa

SEQ ID NO: 208553 - DNA, 25 bp, Probe sequence
atcacacatttacttgatgttgcat

SEQ ID NO: 208554 - DNA, 25 bp, Probe sequence
atgttgatgagcttcgggcacgaat

SEQ ID NO: 208555 - DNA, 25 bp, Probe sequence
agatggattatgtttgatttcagaa

SEQ ID NO: 208556 - DNA, 25 bp, Probe sequence
agactgaaatgcctagtttaagagt

SEQ ID NO: 208557 - DNA, 25 bp, Probe sequence
accagatgtcattttattagattta

SEQ ID NO: 208558 - DNA, 25 bp, Probe sequence
acatactgacattcctatcattgta

SEQ ID NO: 208559 - DNA, 25 bp, Probe sequence
acaagcacactttaaaattcaaatt

SEQ ID NO: 208560 - DNA, 25 bp, Probe sequence
aacacatccacgcattggttatcaa

SEQ ID NO: 208561 - DNA, 25 bp, Probe sequence
aacggtgcgaatgactatatgacta

SEQ ID NO: 208562 - DNA, 25 bp, Probe sequence
aatgccacacaagcacactttaaaa

SEQ ID NO: 208563 - DNA, 25 bp, Probe sequence
aattcaaattgataaaccagatgtc

SEQ ID NO: 208564 - DNA, 25 bp, Probe sequence
ctttggctccaaatctgttgttatt

SEQ ID NO: 208565 - DNA, 25 bp, Probe sequence
gcttgttagaactattgtcaaatca

SEQ ID NO: 208566 - DNA, 25 bp, Probe sequence
gaatttagcttgttagaactattgt

SEQ ID NO: 208567 - DNA, 25 bp, Probe sequence
gaagatgatcacgcaatcacacatt

SEQ ID NO: 208568 - DNA, 25 bp, Probe sequence
gaacaaacaattattcaagctttag

SEQ ID NO: 208569 - DNA, 25 bp, Probe sequence
gacattcctatcattgtaataagtg

SEQ ID NO: 208570 - DNA, 25 bp, Probe sequence
gatcacgcaatcacacatttacttg

SEQ ID NO: 208571 - DNA, 25 bp, Probe sequence
gatttcagaaatcaggcaacatact

SEQ ID NO: 208572 - DNA, 25 bp, Probe sequence
gattattacaatgtaactacagccg

SEQ ID NO: 208573 - DNA, 25 bp, Probe sequence
gttgcattaactttagattattaca

SEQ ID NO: 208574 - DNA, 25 bp, Probe sequence
gtttaagagtgcatatgacatcatt

SEQ ID NO: 208575 - DNA, 25 bp, Probe sequence
ggaaaagtactcacttatgagatga

SEQ ID NO: 208576 - DNA, 25 bp, Probe sequence
ggcaacatactgacattcctatcat

SEQ ID NO: 208577 - DNA, 25 bp, Probe sequence
ggctccaaatctgttgttattaata

SEQ ID NO: 208578 - DNA, 25 bp, Probe sequence
taagcatcgactttggctccaaatc

SEQ ID NO: 208579 - DNA, 25 bp, Probe sequence
taacattgtatttactaacggtttg

SEQ ID NO: 208580 - DNA, 25 bp, Probe sequence
tagatttaggtttaccagataaaga

SEQ ID NO: 208581 - DNA, 25 bp, Probe sequence
tttaatgttgatgagcttcgggcac

SEQ ID NO: 208582 - DNA, 25 bp, Probe sequence
attcgcattcggatcatacacctct

SEQ ID NO: 208583 - DNA, 25 bp, Probe sequence
atgttgatcatagataccgcacttt

SEQ ID NO: 208584 - DNA, 25 bp, Probe sequence
agatgattacatggaactacagcaa

SEQ ID NO: 208585 - DNA, 25 bp, Probe sequence
agagaataacattactagcagtgaa

SEQ ID NO: 208586 - DNA, 25 bp, Probe sequence
acgattgcgaaatggtttgtagaga

SEQ ID NO: 208587 - DNA, 25 bp, Probe sequence
acacctctcaatatctatcggaatt

SEQ ID NO: 208588 - DNA, 25 bp, Probe sequence
aaatttgatttgattgaaacgtata

SEQ ID NO: 208589 - DNA, 25 bp, Probe sequence
aacacatgaacaaactccatggaaa

SEQ ID NO: 208590 - DNA, 25 bp, Probe sequence
aacactaacctaaatgaagatgatt

SEQ ID NO: 208591 - DNA, 25 bp, Probe sequence
aactcatttattttgcagatgcgat

SEQ ID NO: 208592 - DNA, 25 bp, Probe sequence
aatccgcaacttagttttgaagatt

SEQ ID NO: 208593 - DNA, 25 bp, Probe sequence
aattgttaaattcgcattcggatca

SEQ ID NO: 208594 - DNA, 25 bp, Probe sequence
catacacctctcaatatctatcgga

SEQ ID NO: 208595 - DNA, 25 bp, Probe sequence
ccagtaggatttgcgaacggcccgg

SEQ ID NO: 208596 - DNA, 25 bp, Probe sequence
gcccggtgtaccagtctgtttatgt

SEQ ID NO: 208597 - DNA, 25 bp, Probe sequence
gcagatgcgatgaattacgcaatca

SEQ ID NO: 208598 - DNA, 25 bp, Probe sequence
gcaaaaaaagttttatcaatccgca

SEQ ID NO: 208599 - DNA, 25 bp, Probe sequence
gaattacgcaatcaacaacaaaaaa

SEQ ID NO: 208600 - DNA, 25 bp, Probe sequence
gaatcaattaattcagatgacgctg

SEQ ID NO: 208601 - DNA, 25 bp, Probe sequence
gaaactttaaaattgcttagaattg

SEQ ID NO: 208602 - DNA, 25 bp, Probe sequence
gacatataatattaatacgattgcg

SEQ ID NO: 208603 - DNA, 25 bp, Probe sequence
gatgacgctgaaatttctgaagaaa

SEQ ID NO: 208604 - DNA, 25 bp, Probe sequence
gatcatacacctctcaatatctatc

SEQ ID NO: 208605 - DNA, 25 bp, Probe sequence
gatcatagataccgcactttagaat

SEQ ID NO: 208606 - DNA, 25 bp, Probe sequence
gataccgcactttagaatcaattaa

SEQ ID NO: 208607 - DNA, 25 bp, Probe sequence
gattacatggaactacagcaattaa

SEQ ID NO: 208608 - DNA, 25 bp, Probe sequence
gtatatgatataaacactaacctaa

SEQ ID NO: 208609 - DNA, 25 bp, Probe sequence
gtaccagtctgtttatgttgatcat

SEQ ID NO: 208610 - DNA, 25 bp, Probe sequence
gtacggagatatgaatttagacaat

SEQ ID NO: 208611 - DNA, 25 bp, Probe sequence
ggatgaaataccagtaggatttgcg

SEQ ID NO: 208612 - DNA, 25 bp, Probe sequence
tagcagtgaaaatagttacgacgga

SEQ ID NO: 208613 - DNA, 25 bp, Probe sequence
tatctatcggaattaacacatgaac

SEQ ID NO: 208614 - DNA, 25 bp, Probe sequence
ttttatcaatccgcaacttagtttt

SEQ ID NO: 208615 - DNA, 25 bp, Probe sequence
ttcggatcatacacctctcaatatc

SEQ ID NO: 208616 - DNA, 25 bp, Probe sequence
attgctatgaattgttttattgtga

SEQ ID NO: 208617 - DNA, 25 bp, Probe sequence
atgcatgatggttcggtatttatag

SEQ ID NO: 208618 - DNA, 25 bp, Probe sequence
agtcctaatataaaacctcgtcaat

SEQ ID NO: 208619 - DNA, 25 bp, Probe sequence
aaaagagataccagtcctaatataa

SEQ ID NO: 208620 - DNA, 25 bp, Probe sequence
aactgcagtgaattgctatgaattg

SEQ ID NO: 208621 - DNA, 25 bp, Probe sequence
aacctcgtcaatttattgttattag

SEQ ID NO: 208622 - DNA, 25 bp, Probe sequence
aagcctaagatgtggatttaatgtt

SEQ ID NO: 208623 - DNA, 25 bp, Probe sequence
caacaaagtaaaattcaacctatca

SEQ ID NO: 208624 - DNA, 25 bp, Probe sequence
ccagtcctaatataaaacctcgtca

SEQ ID NO: 208625 - DNA, 25 bp, Probe sequence
gacatccaaggaaaagtaaggtcca

SEQ ID NO: 208626 - DNA, 25 bp, Probe sequence
gcatgatggttcggtatttatagca

SEQ ID NO: 208627 - DNA, 25 bp, Probe sequence
gaagaaagcctaagatgtggattta

SEQ ID NO: 208628 - DNA, 25 bp, Probe sequence
gaaacagagagatctacctattgaa

SEQ ID NO: 208629 - DNA, 25 bp, Probe sequence
gaaattttgtctttgaaacagagag

SEQ ID NO: 208630 - DNA, 25 bp, Probe sequence
gaaatatcatattttaacgtctgaa

SEQ ID NO: 208631 - DNA, 25 bp, Probe sequence
gactgagagcgttatcaacaaagta

SEQ ID NO: 208632 - DNA, 25 bp, Probe sequence
gagagatctacctattgaaatttta

SEQ ID NO: 208633 - DNA, 25 bp, Probe sequence
gagatctacctattgaaattttaaa

SEQ ID NO: 208634 - DNA, 25 bp, Probe sequence
gatggttcggtatttatagcaaaaa

SEQ ID NO: 208635 - DNA, 25 bp, Probe sequence
gataccagtcctaatataaaacctc

SEQ ID NO: 208636 - DNA, 25 bp, Probe sequence
gatttaaaagagataccagtcctaa

SEQ ID NO: 208637 - DNA, 25 bp, Probe sequence
gatttaatgttaaaactgcagtgaa

SEQ ID NO: 208638 - DNA, 25 bp, Probe sequence
gtaaaattcaacctatcaaatatta

SEQ ID NO: 208639 - DNA, 25 bp, Probe sequence
gtaaggtccattaaagaagaagagt

SEQ ID NO: 208640 - DNA, 25 bp, Probe sequence
gtcaatttattgttattagtagcga

SEQ ID NO: 208641 - DNA, 25 bp, Probe sequence
ggatatttatattttttagagactg

SEQ ID NO: 208642 - DNA, 25 bp, Probe sequence
tgaaattttaaaagacatccaagga

SEQ ID NO: 208643 - DNA, 25 bp, Probe sequence
taaaacctcgtcaatttattgttat

SEQ ID NO: 208644 - DNA, 25 bp, Probe sequence
taccagtcctaatataaaacctcgt

SEQ ID NO: 208645 - DNA, 25 bp, Probe sequence
tagagactgagagcgttatcaacaa

SEQ ID NO: 208646 - DNA, 25 bp, Probe sequence
ttttttagagactgagagcgttatc

SEQ ID NO: 208647 - DNA, 25 bp, Probe sequence
tattttcctgaaattttgtctttga

SEQ ID NO: 208648 - DNA, 25 bp, Probe sequence
tttaacgtctgaagaaagcctaaga

SEQ ID NO: 208649 - DNA, 25 bp, Probe sequence
ttcctgaaattttgtctttgaaaca

SEQ ID NO: 208650 - DNA, 25 bp, Probe sequence
gacccgatggagaaacgtactcgtg

SEQ ID NO: 208651 - DNA, 25 bp, Probe sequence
attgcatctatcgttcttgtcgtga

SEQ ID NO: 208652 - DNA, 25 bp, Probe sequence
attgcgcatggttcagacgataaaa

SEQ ID NO: 208653 - DNA, 25 bp, Probe sequence
atcacaatcaggcctagacttagca

SEQ ID NO: 208654 - DNA, 25 bp, Probe sequence
agttccgatcaattcgtagcctatt

SEQ ID NO: 208655 - DNA, 25 bp, Probe sequence
agacgtggtgaaagcttcatctcta

SEQ ID NO: 208656 - DNA, 25 bp, Probe sequence
accatttgtcatcatgatcatcaca

SEQ ID NO: 208657 - DNA, 25 bp, Probe sequence
aaaccaatcattgcgacattatttt

SEQ ID NO: 208658 - DNA, 25 bp, Probe sequence
aagcttcatctctaatccattgttg

SEQ ID NO: 208659 - DNA, 25 bp, Probe sequence
aatgggtgtatggtttatctttaat

SEQ ID NO: 208660 - DNA, 25 bp, Probe sequence
cagcgagttatttacgtgcacatgg

SEQ ID NO: 208661 - DNA, 25 bp, Probe sequence
cattgatccaacattacgacgcgtg

SEQ ID NO: 208662 - DNA, 25 bp, Probe sequence
cgcgttcactcggttcagtaaatgt

SEQ ID NO: 208663 - DNA, 25 bp, Probe sequence
gaatcggcagtccactaagaaagct

SEQ ID NO: 208664 - DNA, 25 bp, Probe sequence
gaagcatcatatgttgttgcgagac

SEQ ID NO: 208665 - DNA, 25 bp, Probe sequence
gacataaacgtcctgacttagatgc

SEQ ID NO: 208666 - DNA, 25 bp, Probe sequence
gaaactttacattacgaacaggatc

SEQ ID NO: 208667 - DNA, 25 bp, Probe sequence
gaaagctttactaataccatttgtc

SEQ ID NO: 208668 - DNA, 25 bp, Probe sequence
gatgacatctaagacaaccgtagtg

SEQ ID NO: 208669 - DNA, 25 bp, Probe sequence
gatacgattttaacgcaacatttct

SEQ ID NO: 208670 - DNA, 25 bp, Probe sequence
gttggttatcgtgcccaattaacat

SEQ ID NO: 208671 - DNA, 25 bp, Probe sequence
gttgatacgcataaaccggaactgg

SEQ ID NO: 208672 - DNA, 25 bp, Probe sequence
gttatcgatcatcatagacgtggtg

SEQ ID NO: 208673 - DNA, 25 bp, Probe sequence
gtggatacttacattaatcgatctg

SEQ ID NO: 208674 - DNA, 25 bp, Probe sequence
ggatcaagaacattcgatgcagcga

SEQ ID NO: 208675 - DNA, 25 bp, Probe sequence
ggaagcacttggtggcggtggacat

SEQ ID NO: 208676 - DNA, 25 bp, Probe sequence
tgattggtatatctgcgcgttcact

SEQ ID NO: 208677 - DNA, 25 bp, Probe sequence
tgatcacatcgaatgggttaaccaa

SEQ ID NO: 208678 - DNA, 25 bp, Probe sequence
tgcctctatttctttgatataactg

SEQ ID NO: 208679 - DNA, 25 bp, Probe sequence
tcggtgtgtctagatttgcaatgat

SEQ ID NO: 208680 - DNA, 25 bp, Probe sequence
tatggcggtaagactgacccgatgg

SEQ ID NO: 208681 - DNA, 25 bp, Probe sequence
tatcatttccaagtacgttattctg

SEQ ID NO: 208682 - DNA, 25 bp, Probe sequence
tttatcatccagtaacagttgcaca

SEQ ID NO: 208683 - DNA, 25 bp, Probe sequence
ttggtgcagcaatcggtgtgtctag

SEQ ID NO: 208684 - DNA, 25 bp, Probe sequence
atacgcacctgtttatagtaagcat

SEQ ID NO: 208685 - DNA, 25 bp, Probe sequence
atgaaggtatacgcacctgtttata

SEQ ID NO: 208686 - DNA, 25 bp, Probe sequence
aggcgcgtcaccttatgaaggtata

SEQ ID NO: 208687 - DNA, 25 bp, Probe sequence
aggtatacgcacctgtttatagtaa

SEQ ID NO: 208688 - DNA, 25 bp, Probe sequence
agtaagcattatttagcttcaaata

SEQ ID NO: 208689 - DNA, 25 bp, Probe sequence
agaaaaaacaggcgcgtcaccttat

SEQ ID NO: 208690 - DNA, 25 bp, Probe sequence
acctgtttatagtaagcattattta

SEQ ID NO: 208691 - DNA, 25 bp, Probe sequence
acgcacctgtttatagtaagcatta

SEQ ID NO: 208692 - DNA, 25 bp, Probe sequence
acaggcgcgtcaccttatgaaggta

SEQ ID NO: 208693 - DNA, 25 bp, Probe sequence
aaacaggcgcgtcaccttatgaagg

SEQ ID NO: 208694 - DNA, 25 bp, Probe sequence
aaaaacaggcgcgtcaccttatgaa

SEQ ID NO: 208695 - DNA, 25 bp, Probe sequence
aaaaaacaggcgcgtcaccttatga

SEQ ID NO: 208696 - DNA, 25 bp, Probe sequence
aaaacaggcgcgtcaccttatgaag

SEQ ID NO: 208697 - DNA, 25 bp, Probe sequence
aacaggcgcgtcaccttatgaaggt

SEQ ID NO: 208698 - DNA, 25 bp, Probe sequence
aaggtatacgcacctgtttatagta

SEQ ID NO: 208699 - DNA, 25 bp, Probe sequence
caccttatgaaggtatacgcacctg

SEQ ID NO: 208700 - DNA, 25 bp, Probe sequence
cacctgtttatagtaagcattattt

SEQ ID NO: 208701 - DNA, 25 bp, Probe sequence
caggcgcgtcaccttatgaaggtat

SEQ ID NO: 208702 - DNA, 25 bp, Probe sequence
cgcacctgtttatagtaagcattat

SEQ ID NO: 208703 - DNA, 25 bp, Probe sequence
ccttatgaaggtatacgcacctgtt

SEQ ID NO: 208704 - DNA, 25 bp, Probe sequence
gcgcgtcaccttatgaaggtatacg

SEQ ID NO: 208705 - DNA, 25 bp, Probe sequence
gcgtcaccttatgaaggtatacgca

SEQ ID NO: 208706 - DNA, 25 bp, Probe sequence
gcacctgtttatagtaagcattatt

SEQ ID NO: 208707 - DNA, 25 bp, Probe sequence
gcaaagaaaaaacaggcgcgtcacc

SEQ ID NO: 208708 - DNA, 25 bp, Probe sequence
gaaggtatacgcacctgtttatagt

SEQ ID NO: 208709 - DNA, 25 bp, Probe sequence
gaaaaaacaggcgcgtcaccttatg

SEQ ID NO: 208710 - DNA, 25 bp, Probe sequence
gtatacgcacctgtttatagtaagc

SEQ ID NO: 208711 - DNA, 25 bp, Probe sequence
gtaagcattatttagcttcaaataa

SEQ ID NO: 208712 - DNA, 25 bp, Probe sequence
gtcaccttatgaaggtatacgcacc

SEQ ID NO: 208713 - DNA, 25 bp, Probe sequence
ggtatacgcacctgtttatagtaag

SEQ ID NO: 208714 - DNA, 25 bp, Probe sequence
ggcgcgtcaccttatgaaggtatac

SEQ ID NO: 208715 - DNA, 25 bp, Probe sequence
tacgcacctgtttatagtaagcatt

SEQ ID NO: 208716 - DNA, 25 bp, Probe sequence
tatagtaagcattatttagcttcaa

SEQ ID NO: 208717 - DNA, 25 bp, Probe sequence
ttatgaaggtatacgcacctgttta

SEQ ID NO: 208718 - DNA, 25 bp, Probe sequence
attattcatctcgtcaacagccgga

SEQ ID NO: 208719 - DNA, 25 bp, Probe sequence
atcttagcacctatctttattacag

SEQ ID NO: 208720 - DNA, 25 bp, Probe sequence
atggcttgacccctatacatatagt

SEQ ID NO: 208721 - DNA, 25 bp, Probe sequence
acagccggataagcattggcttcgc

SEQ ID NO: 208722 - DNA, 25 bp, Probe sequence
acatggcgtatcttagcacctatct

SEQ ID NO: 208723 - DNA, 25 bp, Probe sequence
acagtgctaatttcggtatcagaca

SEQ ID NO: 208724 - DNA, 25 bp, Probe sequence
aaatcatactgactttatcttttca

SEQ ID NO: 208725 - DNA, 25 bp, Probe sequence
aatcactggtattccattaccattt

SEQ ID NO: 208726 - DNA, 25 bp, Probe sequence
ctttacttgtgttccatattttaca

SEQ ID NO: 208727 - DNA, 25 bp, Probe sequence
ctgaatcacttaaagctatcggttc

SEQ ID NO: 208728 - DNA, 25 bp, Probe sequence
cgaatcaattcatggcttgacccct

SEQ ID NO: 208729 - DNA, 25 bp, Probe sequence
gcattagcgcgtgtcgtttctagac

SEQ ID NO: 208730 - DNA, 25 bp, Probe sequence
gcattggcttcgcaaagtagactgg

SEQ ID NO: 208731 - DNA, 25 bp, Probe sequence
gcaatttttgcaggtatcatcatgt

SEQ ID NO: 208732 - DNA, 25 bp, Probe sequence
gacaattcagttgttaccaatcact

SEQ ID NO: 208733 - DNA, 25 bp, Probe sequence
gatggctatcatttaactgaatcac

SEQ ID NO: 208734 - DNA, 25 bp, Probe sequence
ttaactcggcaatgggcggtggtca

SEQ ID NO: 208735 - DNA, 25 bp, Probe sequence
gtatcatcatgtttatttcacctaa

SEQ ID NO: 208736 - DNA, 25 bp, Probe sequence
gtagactgggtattagtagccacta

SEQ ID NO: 208737 - DNA, 25 bp, Probe sequence
gtagccactatagctgttttagcaa

SEQ ID NO: 208738 - DNA, 25 bp, Probe sequence
gtgtctcgttagtaccaagtatttt

SEQ ID NO: 208739 - DNA, 25 bp, Probe sequence
ggtgccaaaagttggtacacgtttg

SEQ ID NO: 208740 - DNA, 25 bp, Probe sequence
gggcggtggtcaatacagtgctaat

SEQ ID NO: 208741 - DNA, 25 bp, Probe sequence
ggtagtgcgctatggagtatgatga

SEQ ID NO: 208742 - DNA, 25 bp, Probe sequence
ggccctatcagtattcagccatctg

SEQ ID NO: 208743 - DNA, 25 bp, Probe sequence
tcagtgttctgcttattaactcggc

SEQ ID NO: 208744 - DNA, 25 bp, Probe sequence
tacacgtttggccctatcagtattc

SEQ ID NO: 208745 - DNA, 25 bp, Probe sequence
taggtattctatatgcacccgcatt

SEQ ID NO: 208746 - DNA, 25 bp, Probe sequence
tattcctgagtcacctattacacct

SEQ ID NO: 208747 - DNA, 25 bp, Probe sequence
tattgtatttcttaatctgtctatt

SEQ ID NO: 208748 - DNA, 25 bp, Probe sequence
ttttatttttaatcttccatctaat

SEQ ID NO: 208749 - DNA, 25 bp, Probe sequence
ttattaggtgtccaactgtatcaaa

SEQ ID NO: 208750 - DNA, 25 bp, Probe sequence
ttatcggttctgtcatattgatctt

SEQ ID NO: 208751 - DNA, 25 bp, Probe sequence
ttgctcgttattcctgagtcaccta

SEQ ID NO: 208752 - DNA, 25 bp, Probe sequence
cccgtttcgcaataaaggtggacat

SEQ ID NO: 208753 - DNA, 25 bp, Probe sequence
attcctaataaacctgaccatccgt

SEQ ID NO: 208754 - DNA, 25 bp, Probe sequence
attcggcttcattttatacttacta

SEQ ID NO: 208755 - DNA, 25 bp, Probe sequence
atacctgatcaagcctttttagatt

SEQ ID NO: 208756 - DNA, 25 bp, Probe sequence
atctgggcttggttactagtcttag

SEQ ID NO: 208757 - DNA, 25 bp, Probe sequence
atcgatttatattcaatctccctat

SEQ ID NO: 208758 - DNA, 25 bp, Probe sequence
atgatgacatgggttctcgtggact

SEQ ID NO: 208759 - DNA, 25 bp, Probe sequence
atgggttctcgtggactgcgtaaaa

SEQ ID NO: 208760 - DNA, 25 bp, Probe sequence
agcacgttatgctaagcgaagtctt

SEQ ID NO: 208761 - DNA, 25 bp, Probe sequence
acgacaatggctttttacactcaaa

SEQ ID NO: 208762 - DNA, 25 bp, Probe sequence
acttattattcgcctttaccattat

SEQ ID NO: 208763 - DNA, 25 bp, Probe sequence
acaagacatccgtaatgctactgat

SEQ ID NO: 208764 - DNA, 25 bp, Probe sequence
aaatagcttctagtggtcctgacga

SEQ ID NO: 208765 - DNA, 25 bp, Probe sequence
aacgcagcatttttaacaacagaca

SEQ ID NO: 208766 - DNA, 25 bp, Probe sequence
aagtatttcactacgacaatggctt

SEQ ID NO: 208767 - DNA, 25 bp, Probe sequence
aattcggctattggcgagatacgca

SEQ ID NO: 208768 - DNA, 25 bp, Probe sequence
aattgcggcattaggtggtgttgat

SEQ ID NO: 208769 - DNA, 25 bp, Probe sequence
cacaattattgtcacctatcttata

SEQ ID NO: 208770 - DNA, 25 bp, Probe sequence
cacgtgaccacatctcctatgatga

SEQ ID NO: 208771 - DNA, 25 bp, Probe sequence
catgctgaagcatttttcccatcaa

SEQ ID NO: 208772 - DNA, 25 bp, Probe sequence
ctagtcttagttttcttgcctttat

SEQ ID NO: 208773 - DNA, 25 bp, Probe sequence
ctcctatgatgatcgttatttccca

SEQ ID NO: 208774 - DNA, 25 bp, Probe sequence
gcattgcaattacgatttattctag

SEQ ID NO: 208775 - DNA, 25 bp, Probe sequence
gcagcatccttattagatgccggtg

SEQ ID NO: 208776 - DNA, 25 bp, Probe sequence
gaattcacaagccacacgtgaccac

SEQ ID NO: 208777 - DNA, 25 bp, Probe sequence
gagatacgcatttacgaattgtcgg

SEQ ID NO: 208778 - DNA, 25 bp, Probe sequence
gttggtggttttaatgttggtgatg

SEQ ID NO: 208779 - DNA, 25 bp, Probe sequence
gttctgccaattctatctgggcttg

SEQ ID NO: 208780 - DNA, 25 bp, Probe sequence
gttttcttgcctttattcggcttca

SEQ ID NO: 208781 - DNA, 25 bp, Probe sequence
ggaaagacgttctgccaattctatc

SEQ ID NO: 208782 - DNA, 25 bp, Probe sequence
ggaacagctaatatggaccatcgca

SEQ ID NO: 208783 - DNA, 25 bp, Probe sequence
tgaccatccgtttgttttttgggct

SEQ ID NO: 208784 - DNA, 25 bp, Probe sequence
tagagttattatccattgcactcaa

SEQ ID NO: 208785 - DNA, 25 bp, Probe sequence
tattcgcctttaccattattttcat

SEQ ID NO: 208786 - DNA, 25 bp, Probe sequence
attgcgcatgtatatcgtgtcactg

SEQ ID NO: 208787 - DNA, 25 bp, Probe sequence
atatcgtgtcactgctttagctaaa

SEQ ID NO: 208788 - DNA, 25 bp, Probe sequence
ataggcgctataggtgttgcacgaa

SEQ ID NO: 208789 - DNA, 25 bp, Probe sequence
atctgcaattaaacatttctttgaa

SEQ ID NO: 208790 - DNA, 25 bp, Probe sequence
agttgaacagttgccaccatctgca

SEQ ID NO: 208791 - DNA, 25 bp, Probe sequence
acgactttatgatgatgtacttgaa

SEQ ID NO: 208792 - DNA, 25 bp, Probe sequence
aagttagaatctttaatgcatacag

SEQ ID NO: 208793 - DNA, 25 bp, Probe sequence
aaggtcaaattgtcagggatgcaga

SEQ ID NO: 208794 - DNA, 25 bp, Probe sequence
aatttgcaggacactttggtgaacc

SEQ ID NO: 208795 - DNA, 25 bp, Probe sequence
cactatcaaccgaagatcaagagca

SEQ ID NO: 208796 - DNA, 25 bp, Probe sequence
cttcatgataccgttgacgaaaaag

SEQ ID NO: 208797 - DNA, 25 bp, Probe sequence
ctttagtcattgaactcgcatgttt

SEQ ID NO: 208798 - DNA, 25 bp, Probe sequence
gccaccatctgcaattaaacatttc

SEQ ID NO: 208799 - DNA, 25 bp, Probe sequence
gctttagctaaatcaatcgctgaaa

SEQ ID NO: 208800 - DNA, 25 bp, Probe sequence
gaaggtgttaatgatactttagtca

SEQ ID NO: 208801 - DNA, 25 bp, Probe sequence
gaacgtcacgactttatgatgatgt

SEQ ID NO: 208802 - DNA, 25 bp, Probe sequence
gaacatttcaatttgcaggacactt

SEQ ID NO: 208803 - DNA, 25 bp, Probe sequence
gaacagttgccaccatctgcaatta

SEQ ID NO: 208804 - DNA, 25 bp, Probe sequence
gatcgtcttgatgctataggcgcta

SEQ ID NO: 208805 - DNA, 25 bp, Probe sequence
gatcatgtcactttatctttagaag

SEQ ID NO: 208806 - DNA, 25 bp, Probe sequence
gatactttagtcattgaactcgcat

SEQ ID NO: 208807 - DNA, 25 bp, Probe sequence
gatacggcgaagatgattgctaaag

SEQ ID NO: 208808 - DNA, 25 bp, Probe sequence
gatttagttgaacagttgccaccat

SEQ ID NO: 208809 - DNA, 25 bp, Probe sequence
gttgaattgaagtcatttttatctt

SEQ ID NO: 208810 - DNA, 25 bp, Probe sequence
gtcagggatgcagatcgtcttgatg

SEQ ID NO: 208811 - DNA, 25 bp, Probe sequence
gtcactttatctttagaaggtcaaa

SEQ ID NO: 208812 - DNA, 25 bp, Probe sequence
gtcatttttatcttctttatcacta

SEQ ID NO: 208813 - DNA, 25 bp, Probe sequence
gtgtcactgctttagctaaatcaat

SEQ ID NO: 208814 - DNA, 25 bp, Probe sequence
ggtgttgcacgaacatttcaatttg

SEQ ID NO: 208815 - DNA, 25 bp, Probe sequence
ggatgcagatcgtcttgatgctata

SEQ ID NO: 208816 - DNA, 25 bp, Probe sequence
taatgcatacagatacggcgaagat

SEQ ID NO: 208817 - DNA, 25 bp, Probe sequence
tacaggccatgatattgcgcatgta

SEQ ID NO: 208818 - DNA, 25 bp, Probe sequence
ttatcttctttatcactatcaaccg

SEQ ID NO: 208819 - DNA, 25 bp, Probe sequence
ttaataatatgagctatcgcaatgg

SEQ ID NO: 208820 - DNA, 25 bp, Probe sequence
attgtgaatgaacacggcagaatta

SEQ ID NO: 208821 - DNA, 25 bp, Probe sequence
atttacactttacgtcaacagtatg

SEQ ID NO: 208822 - DNA, 25 bp, Probe sequence
atgagcattatgaaacatttaagga

SEQ ID NO: 208823 - DNA, 25 bp, Probe sequence
agctttatttgaatctactgtgaaa

SEQ ID NO: 208824 - DNA, 25 bp, Probe sequence
aaagcagtaaggtttcaaattgtga

SEQ ID NO: 208825 - DNA, 25 bp, Probe sequence
aaaacaacaatgtctatcgtatttg

SEQ ID NO: 208826 - DNA, 25 bp, Probe sequence
taaagaggaaagtggcacgggttgg

SEQ ID NO: 208827 - DNA, 25 bp, Probe sequence
caacaatgtctatcgtatttgaatg

SEQ ID NO: 208828 - DNA, 25 bp, Probe sequence
cactttacgtcaacagtatgctgaa

SEQ ID NO: 208829 - DNA, 25 bp, Probe sequence
cagccaatgatccagctttatttga

SEQ ID NO: 208830 - DNA, 25 bp, Probe sequence
cagttattggatattcgtgtcgtca

SEQ ID NO: 208831 - DNA, 25 bp, Probe sequence
cagtatgctgaaagtttattagaac

SEQ ID NO: 208832 - DNA, 25 bp, Probe sequence
catatttacactttacgtcaacagt

SEQ ID NO: 208833 - DNA, 25 bp, Probe sequence
cgtccagccaatgatccagctttat

SEQ ID NO: 208834 - DNA, 25 bp, Probe sequence
ccagccaatgatccagctttatttg

SEQ ID NO: 208835 - DNA, 25 bp, Probe sequence
gccaatgatccagctttatttgaat

SEQ ID NO: 208836 - DNA, 25 bp, Probe sequence
gaatgatgcagtctaaaccaaagtt

SEQ ID NO: 208837 - DNA, 25 bp, Probe sequence
gaacagttattggatattcgtgtcg

SEQ ID NO: 208838 - DNA, 25 bp, Probe sequence
gaaattgtcatttctaatgagcatt

SEQ ID NO: 208839 - DNA, 25 bp, Probe sequence
gatgatggattatctggtgaagaat

SEQ ID NO: 208840 - DNA, 25 bp, Probe sequence
gatgcagtctaaaccaaagttaaag

SEQ ID NO: 208841 - DNA, 25 bp, Probe sequence
gatattcgtgtcgtcatcacgcgtc

SEQ ID NO: 208842 - DNA, 25 bp, Probe sequence
gttattggatattcgtgtcgtcatc

SEQ ID NO: 208843 - DNA, 25 bp, Probe sequence
gtccagccaatgatccagctttatt

SEQ ID NO: 208844 - DNA, 25 bp, Probe sequence
ggaatatcaagacaatgaacagtta

SEQ ID NO: 208845 - DNA, 25 bp, Probe sequence
tggatattcgtgtcgtcatcacgcg

SEQ ID NO: 208846 - DNA, 25 bp, Probe sequence
tgaacacggcagaattatagaatat

SEQ ID NO: 208847 - DNA, 25 bp, Probe sequence
tgcttgaaattgtcatttctaatga

SEQ ID NO: 208848 - DNA, 25 bp, Probe sequence
taatcgaatgatgcagtctaaacca

SEQ ID NO: 208849 - DNA, 25 bp, Probe sequence
tacactttacgtcaacagtatgctg

SEQ ID NO: 208850 - DNA, 25 bp, Probe sequence
tagaacaacttattgatgatggatt

SEQ ID NO: 208851 - DNA, 25 bp, Probe sequence
tattggatattcgtgtcgtcatcac

SEQ ID NO: 208852 - DNA, 25 bp, Probe sequence
tttatttgaatctactgtgaaaagt

SEQ ID NO: 208853 - DNA, 25 bp, Probe sequence
ttacgtcaacagtatgctgaaagtt

SEQ ID NO: 208854 - DNA, 25 bp, Probe sequence
attcgcaccattttataatgatcaa

SEQ ID NO: 208855 - DNA, 25 bp, Probe sequence
atcgatttatctacaccaagaccta

SEQ ID NO: 208856 - DNA, 25 bp, Probe sequence
acattttatcgatttatctacacca

SEQ ID NO: 208857 - DNA, 25 bp, Probe sequence
aacacacaactaataggtatcttta

SEQ ID NO: 208858 - DNA, 25 bp, Probe sequence
aatctagccgaaaacttgacgctat

SEQ ID NO: 208859 - DNA, 25 bp, Probe sequence
aataggtatctttaataggctagaa

SEQ ID NO: 208860 - DNA, 25 bp, Probe sequence
aattcaaatggccgcccaatgttta

SEQ ID NO: 208861 - DNA, 25 bp, Probe sequence
cattctacatagtgatgagcgttta

SEQ ID NO: 208862 - DNA, 25 bp, Probe sequence
cttagatatcgatgtggtcttaata

SEQ ID NO: 208863 - DNA, 25 bp, Probe sequence
ctaaaacagatgatttccctgatca

SEQ ID NO: 208864 - DNA, 25 bp, Probe sequence
gccgaaaacttgacgctattaaaga

SEQ ID NO: 208865 - DNA, 25 bp, Probe sequence
gccgcccaatgtttaattcaagcaa

SEQ ID NO: 208866 - DNA, 25 bp, Probe sequence
gcattgaattatgtatactatgaca

SEQ ID NO: 208867 - DNA, 25 bp, Probe sequence
gaaagtttcattctacatagtgatg

SEQ ID NO: 208868 - DNA, 25 bp, Probe sequence
gaaattgactcaactgatcgtgtat

SEQ ID NO: 208869 - DNA, 25 bp, Probe sequence
gactcaactgatcgtgtattattat

SEQ ID NO: 208870 - DNA, 25 bp, Probe sequence
gatgatttacagtttttcgaaagtt

SEQ ID NO: 208871 - DNA, 25 bp, Probe sequence
gatgagcgtttaaaatctagccgaa

SEQ ID NO: 208872 - DNA, 25 bp, Probe sequence
gatcgtgtattattattcgcaccat

SEQ ID NO: 208873 - DNA, 25 bp, Probe sequence
gatcatctcgtacattttatcgatt

SEQ ID NO: 208874 - DNA, 25 bp, Probe sequence
gatcaagttgcattagatattcaaa

SEQ ID NO: 208875 - DNA, 25 bp, Probe sequence
gtttttcgaaagtttcattctacat

SEQ ID NO: 208876 - DNA, 25 bp, Probe sequence
gtcaaaaatcttaaacacacaacta

SEQ ID NO: 208877 - DNA, 25 bp, Probe sequence
ggttatgatgatttacagtttttcg

SEQ ID NO: 208878 - DNA, 25 bp, Probe sequence
tggccgcccaatgtttaattcaagc

SEQ ID NO: 208879 - DNA, 25 bp, Probe sequence
tggtcttaataagcaacaaacctaa

SEQ ID NO: 208880 - DNA, 25 bp, Probe sequence
tggtggcgaaggttatgtttatgta

SEQ ID NO: 208881 - DNA, 25 bp, Probe sequence
tgtattattattcgcaccattttat

SEQ ID NO: 208882 - DNA, 25 bp, Probe sequence
tccctgatcatctcgtacattttat

SEQ ID NO: 208883 - DNA, 25 bp, Probe sequence
ttagaaattcaaatggccgcccaat

SEQ ID NO: 208884 - DNA, 25 bp, Probe sequence
tcaagcaattggtggcgaaggttat

SEQ ID NO: 208885 - DNA, 25 bp, Probe sequence
tatactatgacatttatacacaaat

SEQ ID NO: 208886 - DNA, 25 bp, Probe sequence
tttccctgatcatctcgtacatttt

SEQ ID NO: 208887 - DNA, 25 bp, Probe sequence
ttatctacaccaagacctatagtct

SEQ ID NO: 208888 - DNA, 25 bp, Probe sequence
atatcgtttatatcggttcttcatt

SEQ ID NO: 208889 - DNA, 25 bp, Probe sequence
ataacgctttattacgcaaagttgt

SEQ ID NO: 208890 - DNA, 25 bp, Probe sequence
aggtgctattggtgcattatattta

SEQ ID NO: 208891 - DNA, 25 bp, Probe sequence
acggccaatcacaacgtcgtgtagg

SEQ ID NO: 208892 - DNA, 25 bp, Probe sequence
actgtgttacgcggttgcaaaccgt

SEQ ID NO: 208893 - DNA, 25 bp, Probe sequence
acaacgtcgtgtaggcggtatcggt

SEQ ID NO: 208894 - DNA, 25 bp, Probe sequence
aaaacggcgcattttcaggtgctat

SEQ ID NO: 208895 - DNA, 25 bp, Probe sequence
aacacggtgatcgtaacactatcga

SEQ ID NO: 208896 - DNA, 25 bp, Probe sequence
cactacattatttcgacggccaatc

SEQ ID NO: 208897 - DNA, 25 bp, Probe sequence
cagcagctaattttggtcatgtact

SEQ ID NO: 208898 - DNA, 25 bp, Probe sequence
cattcccggtgatttaacagcagct

SEQ ID NO: 208899 - DNA, 25 bp, Probe sequence
cctagcaataaattagcagccgtta

SEQ ID NO: 208900 - DNA, 25 bp, Probe sequence
gctgaaaacatcaacattcctgcac

SEQ ID NO: 208901 - DNA, 25 bp, Probe sequence
gcttaactggaggtaatgcaggtgt

SEQ ID NO: 208902 - DNA, 25 bp, Probe sequence
gaaagttggcattgacgctggcggt

SEQ ID NO: 208903 - DNA, 25 bp, Probe sequence
gacaatggccattactgttgcacgt

SEQ ID NO: 208904 - DNA, 25 bp, Probe sequence
gagcaaggccatgacttagcagatt

SEQ ID NO: 208905 - DNA, 25 bp, Probe sequence
gagcaagataaccaacgtactttta

SEQ ID NO: 208906 - DNA, 25 bp, Probe sequence
gatgctgattttacacctagcaata

SEQ ID NO: 208907 - DNA, 25 bp, Probe sequence
gatgctgcatctcaaggactaggta

SEQ ID NO: 208908 - DNA, 25 bp, Probe sequence
gtcatgtactacatcatttagatgc

SEQ ID NO: 208909 - DNA, 25 bp, Probe sequence
gtgtaggcggtatcggtacaggtgg

SEQ ID NO: 208910 - DNA, 25 bp, Probe sequence
tggtgtcgttggcgaagttgttacg

SEQ ID NO: 208911 - DNA, 25 bp, Probe sequence
ggtaccggtacgtcactacattatt

SEQ ID NO: 208912 - DNA, 25 bp, Probe sequence
ggttgcaaaccgtactatgttgaaa

SEQ ID NO: 208913 - DNA, 25 bp, Probe sequence
ggcatgattcaaggactcggttatt

SEQ ID NO: 208914 - DNA, 25 bp, Probe sequence
ggcgaagttgttacgacaatggcca

SEQ ID NO: 208915 - DNA, 25 bp, Probe sequence
ggccattactgttgcacgtgaattt

SEQ ID NO: 208916 - DNA, 25 bp, Probe sequence
tcaacattcctgcacaaatttttgt

SEQ ID NO: 208917 - DNA, 25 bp, Probe sequence
tagcagccgttattggtgtcgttgg

SEQ ID NO: 208918 - DNA, 25 bp, Probe sequence
tttttgtagagtttgatgctgcatc

SEQ ID NO: 208919 - DNA, 25 bp, Probe sequence
ttcaaggactcggttatttactaag

SEQ ID NO: 208920 - DNA, 25 bp, Probe sequence
ttaactgacatggcacaacacggtg

SEQ ID NO: 208921 - DNA, 25 bp, Probe sequence
ttgacgctggcggtacactaattaa

SEQ ID NO: 208922 - DNA, 25 bp, Probe sequence
atacgacattcgtttcaaacaacca

SEQ ID NO: 208923 - DNA, 25 bp, Probe sequence
aactatcgctcaagcatttctagac

SEQ ID NO: 208924 - DNA, 25 bp, Probe sequence
aacggagatgtcattcacaaatacg

SEQ ID NO: 208925 - DNA, 25 bp, Probe sequence
aactggtttctatgtatcatttatt

SEQ ID NO: 208926 - DNA, 25 bp, Probe sequence
aagtcctatgggttgccaaactggt

SEQ ID NO: 208927 - DNA, 25 bp, Probe sequence
ctatgggttgccaaactggtttcta

SEQ ID NO: 208928 - DNA, 25 bp, Probe sequence
ccatttattagattagcgggaacga

SEQ ID NO: 208929 - DNA, 25 bp, Probe sequence
cgctcaagcatttctagacaaacga

SEQ ID NO: 208930 - DNA, 25 bp, Probe sequence
gccaaactggtttctatgtatcatt

SEQ ID NO: 208931 - DNA, 25 bp, Probe sequence
gctaaaactatcgctcaagcatttc

SEQ ID NO: 208932 - DNA, 25 bp, Probe sequence
gcaagtcattcattagaaggtgcta

SEQ ID NO: 208933 - DNA, 25 bp, Probe sequence
gaatggcatgatgttttcggtacag

SEQ ID NO: 208934 - DNA, 25 bp, Probe sequence
gaaggtgctaaaactatcgctcaag

SEQ ID NO: 208935 - DNA, 25 bp, Probe sequence
gaagtacaatgtggctgggcagcaa

SEQ ID NO: 208936 - DNA, 25 bp, Probe sequence
gacaaacgaaacgaatggcatgatg

SEQ ID NO: 208937 - DNA, 25 bp, Probe sequence
gacattcgtttcaaacaaccaaaca

SEQ ID NO: 208938 - DNA, 25 bp, Probe sequence
gatttaagtcctatgggttgccaaa

SEQ ID NO: 208939 - DNA, 25 bp, Probe sequence
gttgatttaagtcctatgggttgcc

SEQ ID NO: 208940 - DNA, 25 bp, Probe sequence
gttgccccatttattagattagcgg

SEQ ID NO: 208941 - DNA, 25 bp, Probe sequence
gttgaagcaactttaaatgatgtgc

SEQ ID NO: 208942 - DNA, 25 bp, Probe sequence
gtcattcacaaatacgacattcgtt

SEQ ID NO: 208943 - DNA, 25 bp, Probe sequence
gtcctatgggttgccaaactggttt

SEQ ID NO: 208944 - DNA, 25 bp, Probe sequence
gtgcctgcttgtaatgaagtacaat

SEQ ID NO: 208945 - DNA, 25 bp, Probe sequence
gtggttgccccatttattagattag

SEQ ID NO: 208946 - DNA, 25 bp, Probe sequence
gtggctgggcagcaagtcattcatt

SEQ ID NO: 208947 - DNA, 25 bp, Probe sequence
gggcagcaagtcattcattagaagg

SEQ ID NO: 208948 - DNA, 25 bp, Probe sequence
gggttgccaaactggtttctatgta

SEQ ID NO: 208949 - DNA, 25 bp, Probe sequence
ggtttctatgtatcatttattaatc

SEQ ID NO: 208950 - DNA, 25 bp, Probe sequence
ggattaaacggagatgtcattcaca

SEQ ID NO: 208951 - DNA, 25 bp, Probe sequence
ggctgggcagcaagtcattcattag

SEQ ID NO: 208952 - DNA, 25 bp, Probe sequence
tggcatgatgttttcggtacaggaa

SEQ ID NO: 208953 - DNA, 25 bp, Probe sequence
tagcgggaacgatggaaggattaaa

SEQ ID NO: 208954 - DNA, 25 bp, Probe sequence
taaatgatgtgctaaatgctactga

SEQ ID NO: 208955 - DNA, 25 bp, Probe sequence
tatcgctcaagcatttctagacaaa

SEQ ID NO: 208956 - DNA, 25 bp, Probe sequence
aaatttggcgaccaagtgactggga

SEQ ID NO: 208957 - DNA, 25 bp, Probe sequence
atttggcgaccaagtgactgggaat

SEQ ID NO: 208958 - DNA, 25 bp, Probe sequence
aggcgttggttatttcctgtatact

SEQ ID NO: 208959 - DNA, 25 bp, Probe sequence
agactggtaaatttggcgaccaagt

SEQ ID NO: 208960 - DNA, 25 bp, Probe sequence
agaggcgttggttatttcctgtata

SEQ ID NO: 208961 - DNA, 25 bp, Probe sequence
actggtaaatttggcgaccaagtga

SEQ ID NO: 208962 - DNA, 25 bp, Probe sequence
aagaggcgttggttatttcctgtat

SEQ ID NO: 208963 - DNA, 25 bp, Probe sequence
aagtgactgggaatgaaagtttgaa

SEQ ID NO: 208964 - DNA, 25 bp, Probe sequence
aatttggcgaccaagtgactgggaa

SEQ ID NO: 208965 - DNA, 25 bp, Probe sequence
caagtgactgggaatgaaagtttga

SEQ ID NO: 208966 - DNA, 25 bp, Probe sequence
caaagaggcgttggttatttcctgt

SEQ ID NO: 208967 - DNA, 25 bp, Probe sequence
ctgggaatgaaagtttgaaccaaag

SEQ ID NO: 208968 - DNA, 25 bp, Probe sequence
cgaccaagtgactgggaatgaaagt

SEQ ID NO: 208969 - DNA, 25 bp, Probe sequence
cgttggttatttcctgtatacttag

SEQ ID NO: 208970 - DNA, 25 bp, Probe sequence
ccaaagaggcgttggttatttcctg

SEQ ID NO: 208971 - DNA, 25 bp, Probe sequence
ccaagtgactgggaatgaaagtttg

SEQ ID NO: 208972 - DNA, 25 bp, Probe sequence
gcgaccaagtgactgggaatgaaag

SEQ ID NO: 208973 - DNA, 25 bp, Probe sequence
gcgttggttatttcctgtatactta

SEQ ID NO: 208974 - DNA, 25 bp, Probe sequence
gaaagtttgaaccaaagaggcgttg

SEQ ID NO: 208975 - DNA, 25 bp, Probe sequence
gactgggaatgaaagtttgaaccaa

SEQ ID NO: 208976 - DNA, 25 bp, Probe sequence
gactggtaaatttggcgaccaagtg

SEQ ID NO: 208977 - DNA, 25 bp, Probe sequence
gaccaagtgactgggaatgaaagtt

SEQ ID NO: 208978 - DNA, 25 bp, Probe sequence
gaggcgttggttatttcctgtatac

SEQ ID NO: 208979 - DNA, 25 bp, Probe sequence
gtaaatttggcgaccaagtgactgg

SEQ ID NO: 208980 - DNA, 25 bp, Probe sequence
gtgactgggaatgaaagtttgaacc

SEQ ID NO: 208981 - DNA, 25 bp, Probe sequence
tggtaaatttggcgaccaagtgact

SEQ ID NO: 208982 - DNA, 25 bp, Probe sequence
ggtaaatttggcgaccaagtgactg

SEQ ID NO: 208983 - DNA, 25 bp, Probe sequence
tggcgaccaagtgactgggaatgaa

SEQ ID NO: 208984 - DNA, 25 bp, Probe sequence
ggcgaccaagtgactgggaatgaaa

SEQ ID NO: 208985 - DNA, 25 bp, Probe sequence
ggcgttggttatttcctgtatactt

SEQ ID NO: 208986 - DNA, 25 bp, Probe sequence
tgactgggaatgaaagtttgaacca

SEQ ID NO: 208987 - DNA, 25 bp, Probe sequence
taaatttggcgaccaagtgactggg

SEQ ID NO: 208988 - DNA, 25 bp, Probe sequence
tttggcgaccaagtgactgggaatg

SEQ ID NO: 208989 - DNA, 25 bp, Probe sequence
ttggcgaccaagtgactgggaatga

SEQ ID NO: 208990 - DNA, 25 bp, Probe sequence
attcgtatcggttcttgtggcgcat

SEQ ID NO: 208991 - DNA, 25 bp, Probe sequence
atttaaatgcgattcatgctggtaa

SEQ ID NO: 208992 - DNA, 25 bp, Probe sequence
atgggtattccaagtattggtattt

SEQ ID NO: 208993 - DNA, 25 bp, Probe sequence
agaacgtcaaaattcatttacacaa

SEQ ID NO: 208994 - DNA, 25 bp, Probe sequence
acgatgttattattgcacaagctgc

SEQ ID NO: 208995 - DNA, 25 bp, Probe sequence
acattttacaatgccgatccaacat

SEQ ID NO: 208996 - DNA, 25 bp, Probe sequence
acaccacatattcaaccaaatggag

SEQ ID NO: 208997 - DNA, 25 bp, Probe sequence
aaaggtacaccacatattcaaccaa

SEQ ID NO: 208998 - DNA, 25 bp, Probe sequence
aaagcacttggtattttcacagtaa

SEQ ID NO: 208999 - DNA, 25 bp, Probe sequence
aacgatgtacgtaacatgtttggtt

SEQ ID NO: 209000 - DNA, 25 bp, Probe sequence
aagaagtttctgtaatgggttctgg

SEQ ID NO: 209001 - DNA, 25 bp, Probe sequence
aagtgatcatattttacgtgacgaa

SEQ ID NO: 209002 - DNA, 25 bp, Probe sequence
aatggaatcagctggtttatattta

SEQ ID NO: 209003 - DNA, 25 bp, Probe sequence
caatattccaggtcatttcgcgcct

SEQ ID NO: 209004 - DNA, 25 bp, Probe sequence
caatcattcgtatcggttcttgtgg

SEQ ID NO: 209005 - DNA, 25 bp, Probe sequence
cgcctatcgctgacttcgagttagt

SEQ ID NO: 209006 - DNA, 25 bp, Probe sequence
ccaaatcggtgctactacacacgta

SEQ ID NO: 209007 - DNA, 25 bp, Probe sequence
gccgatccaacattcaatgatgctt

SEQ ID NO: 209008 - DNA, 25 bp, Probe sequence
gcacaagctgcatcaactaattcaa

SEQ ID NO: 209009 - DNA, 25 bp, Probe sequence
gaagctactacacctgaagaacgtc

SEQ ID NO: 209010 - DNA, 25 bp, Probe sequence
gaaatcgctttagaaatcgcagagt

SEQ ID NO: 209011 - DNA, 25 bp, Probe sequence
gagttatacaacttctttgatgtag

SEQ ID NO: 209012 - DNA, 25 bp, Probe sequence
gtattaatgcctggcgatccgctac

SEQ ID NO: 209013 - DNA, 25 bp, Probe sequence
gtattggtatttactcatatgagtt

SEQ ID NO: 209014 - DNA, 25 bp, Probe sequence
gtaggtaacgtattatcttctgata

SEQ ID NO: 209015 - DNA, 25 bp, Probe sequence
gtagatcaatacaatattccaggtc

SEQ ID NO: 209016 - DNA, 25 bp, Probe sequence
gtcgctgaccaaatcggtgctacta

SEQ ID NO: 209017 - DNA, 25 bp, Probe sequence
ggtgctactacacacgtaggtaacg

SEQ ID NO: 209018 - DNA, 25 bp, Probe sequence
tgtttggttacactggtacatataa

SEQ ID NO: 209019 - DNA, 25 bp, Probe sequence
tcgctgacttcgagttagtaactaa

SEQ ID NO: 209020 - DNA, 25 bp, Probe sequence
taaagctaaaaatgtcgctgaccaa

SEQ ID NO: 209021 - DNA, 25 bp, Probe sequence
tacgtgacgaagctactacacctga

SEQ ID NO: 209022 - DNA, 25 bp, Probe sequence
tatcggttcttgtggcgcattacaa

SEQ ID NO: 209023 - DNA, 25 bp, Probe sequence
ttatcttctgatacattttacaatg

SEQ ID NO: 209024 - DNA, 25 bp, Probe sequence
attacttaaaagtgtgcatcttgtg

SEQ ID NO: 209025 - DNA, 25 bp, Probe sequence
attagatgacatccacgtagcaact

SEQ ID NO: 209026 - DNA, 25 bp, Probe sequence
atctcaatcaaatgtctcgcaccaa

SEQ ID NO: 209027 - DNA, 25 bp, Probe sequence
atacagatacattagaacgcgtaac

SEQ ID NO: 209028 - DNA, 25 bp, Probe sequence
atcacgcgaatcatcctaaagaaag

SEQ ID NO: 209029 - DNA, 25 bp, Probe sequence
agtgttggtcacatttcacatcaat

SEQ ID NO: 209030 - DNA, 25 bp, Probe sequence
agatgacatccacgtagcaactatg

SEQ ID NO: 209031 - DNA, 25 bp, Probe sequence
aacgacaaggccaatcaatgattta

SEQ ID NO: 209032 - DNA, 25 bp, Probe sequence
aagcaagccatacatcacgcgaatc

SEQ ID NO: 209033 - DNA, 25 bp, Probe sequence
aaggccaatcaatgatttattcatt

SEQ ID NO: 209034 - DNA, 25 bp, Probe sequence
aatgtctcgcaccaattaaaattac

SEQ ID NO: 209035 - DNA, 25 bp, Probe sequence
aatcaaatgtctcgcaccaattaaa

SEQ ID NO: 209036 - DNA, 25 bp, Probe sequence
caagccatacatcacgcgaatcatc

SEQ ID NO: 209037 - DNA, 25 bp, Probe sequence
ctcaatcaaatgtctcgcaccaatt

SEQ ID NO: 209038 - DNA, 25 bp, Probe sequence
ccatacatcacgcgaatcatcctaa

SEQ ID NO: 209039 - DNA, 25 bp, Probe sequence
gcgattacaatcgaatacgtatcat

SEQ ID NO: 209040 - DNA, 25 bp, Probe sequence
gcaaaacgacaaggccaatcaatga

SEQ ID NO: 209041 - DNA, 25 bp, Probe sequence
gcaagtgttggtcacatttcacatc

SEQ ID NO: 209042 - DNA, 25 bp, Probe sequence
gaatacgtatcatggaattgttatc

SEQ ID NO: 209043 - DNA, 25 bp, Probe sequence
gaatcatcctaaagaaagtgggtta

SEQ ID NO: 209044 - DNA, 25 bp, Probe sequence
gaagcaagtgttggtcacatttcac

SEQ ID NO: 209045 - DNA, 25 bp, Probe sequence
gacatccacgtagcaactatgttaa

SEQ ID NO: 209046 - DNA, 25 bp, Probe sequence
gatacattagaacgcgtaactgaaa

SEQ ID NO: 209047 - DNA, 25 bp, Probe sequence
gatttattcattagatgacatccac

SEQ ID NO: 209048 - DNA, 25 bp, Probe sequence
gttggtcacatttcacatcaattga

SEQ ID NO: 209049 - DNA, 25 bp, Probe sequence
gttaaagcaagccatacatcacgcg

SEQ ID NO: 209050 - DNA, 25 bp, Probe sequence
gtatcatggaattgttatcagtcag

SEQ ID NO: 209051 - DNA, 25 bp, Probe sequence
gtagcaactatgttaaagcaagcca

SEQ ID NO: 209052 - DNA, 25 bp, Probe sequence
gtctcgcaccaattaaaattactta

SEQ ID NO: 209053 - DNA, 25 bp, Probe sequence
gtgcatcttgtgaaagcaaaacgac

SEQ ID NO: 209054 - DNA, 25 bp, Probe sequence
tcaaggcattaggcgattacaatcg

SEQ ID NO: 209055 - DNA, 25 bp, Probe sequence
tacatcacgcgaatcatcctaaaga

SEQ ID NO: 209056 - DNA, 25 bp, Probe sequence
ttatctcaatcaaatgtctcgcacc

SEQ ID NO: 209057 - DNA, 25 bp, Probe sequence
ttcacatcaattgaatttatctcaa

SEQ ID NO: 209058 - DNA, 25 bp, Probe sequence
gtttaaaggcggcgacacttcacac

SEQ ID NO: 209059 - DNA, 25 bp, Probe sequence
atatcgtttttaataatcggtctat

SEQ ID NO: 209060 - DNA, 25 bp, Probe sequence
atgtctcattcacatcatcatcatg

SEQ ID NO: 209061 - DNA, 25 bp, Probe sequence
agtactcgcagcgttatttaacggt

SEQ ID NO: 209062 - DNA, 25 bp, Probe sequence
acatcatcatcatgaccatatgcat

SEQ ID NO: 209063 - DNA, 25 bp, Probe sequence
acaatcgccgatcctatcgcaagta

SEQ ID NO: 209064 - DNA, 25 bp, Probe sequence
aaacgtttcgaagtactcgcagcgt

SEQ ID NO: 209065 - DNA, 25 bp, Probe sequence
aagtgtgcatgattgccatgtttgg

SEQ ID NO: 209066 - DNA, 25 bp, Probe sequence
aatcggtctatatatgtttatcgaa

SEQ ID NO: 209067 - DNA, 25 bp, Probe sequence
ccttgctaacagcttggcattacta

SEQ ID NO: 209068 - DNA, 25 bp, Probe sequence
gcgtggtgcttttctacatgttatc

SEQ ID NO: 209069 - DNA, 25 bp, Probe sequence
gcagctattttaatttgggcatttg

SEQ ID NO: 209070 - DNA, 25 bp, Probe sequence
gaatcgattatatgttcaggaacac

SEQ ID NO: 209071 - DNA, 25 bp, Probe sequence
gaccatatgcatagtcatgtaacta

SEQ ID NO: 209072 - DNA, 25 bp, Probe sequence
gattgccatgtttggacaatttcaa

SEQ ID NO: 209073 - DNA, 25 bp, Probe sequence
gttgtcatgttgttgtagaccatac

SEQ ID NO: 209074 - DNA, 25 bp, Probe sequence
gttgtagaccatacattgacaatga

SEQ ID NO: 209075 - DNA, 25 bp, Probe sequence
gttatcggagacttattaggttcag

SEQ ID NO: 209076 - DNA, 25 bp, Probe sequence
gtcaatatcgttgttgcattcttta

SEQ ID NO: 209077 - DNA, 25 bp, Probe sequence
gtctccttgctaacagcttggcatt

SEQ ID NO: 209078 - DNA, 25 bp, Probe sequence
gtgtaacgctttttgtaataagtat

SEQ ID NO: 209079 - DNA, 25 bp, Probe sequence
gggcatttggatggacaatcgccga

SEQ ID NO: 209080 - DNA, 25 bp, Probe sequence
ggtgcttttctacatgttatcggag

SEQ ID NO: 209081 - DNA, 25 bp, Probe sequence
ggattcacgaatacaaagtgtgcat

SEQ ID NO: 209082 - DNA, 25 bp, Probe sequence
ggaaggcacaccaagtgatgttgat

SEQ ID NO: 209083 - DNA, 25 bp, Probe sequence
ggcgacacttcacacaatttaaata

SEQ ID NO: 209084 - DNA, 25 bp, Probe sequence
tggcgccattactgcagctatttta

SEQ ID NO: 209085 - DNA, 25 bp, Probe sequence
tgctgaaaagaatgccacaactaca

SEQ ID NO: 209086 - DNA, 25 bp, Probe sequence
tcgcaagtattttagtttccgttat

SEQ ID NO: 209087 - DNA, 25 bp, Probe sequence
tcaggaacacatagtcattcacata

SEQ ID NO: 209088 - DNA, 25 bp, Probe sequence
taaatatgcgtggtgcttttctaca

SEQ ID NO: 209089 - DNA, 25 bp, Probe sequence
tatcgaaatcatcggcggtctcctt

SEQ ID NO: 209090 - DNA, 25 bp, Probe sequence
tagaaacgcctaatcacaaacatga

SEQ ID NO: 209091 - DNA, 25 bp, Probe sequence
tattaggttcagttggcgccattac

SEQ ID NO: 209092 - DNA, 25 bp, Probe sequence
atcattatttcacaaaactactcaa

SEQ ID NO: 209093 - DNA, 25 bp, Probe sequence
atgcaagtattatttcccgggaatt

SEQ ID NO: 209094 - DNA, 25 bp, Probe sequence
aggcaggcaaaacaacttatagatt

SEQ ID NO: 209095 - DNA, 25 bp, Probe sequence
aggacaacctttagatgaagcgtat

SEQ ID NO: 209096 - DNA, 25 bp, Probe sequence
agggtttaaagtgctgtttgaatgc

SEQ ID NO: 209097 - DNA, 25 bp, Probe sequence
agaagtgtttgatacgacagtgact

SEQ ID NO: 209098 - DNA, 25 bp, Probe sequence
acgggattatctgttgacttggtca

SEQ ID NO: 209099 - DNA, 25 bp, Probe sequence
acatagtcatcctgtcgttgcagct

SEQ ID NO: 209100 - DNA, 25 bp, Probe sequence
acttaccttttcgatatgtgtcata

SEQ ID NO: 209101 - DNA, 25 bp, Probe sequence
acattactttcattttgtcataact

SEQ ID NO: 209102 - DNA, 25 bp, Probe sequence
aagcataggcatttcacgttatgta

SEQ ID NO: 209103 - DNA, 25 bp, Probe sequence
aaggcttgccaacaattgaagcaac

SEQ ID NO: 209104 - DNA, 25 bp, Probe sequence
cactgttaagttgtatcgagccgaa

SEQ ID NO: 209105 - DNA, 25 bp, Probe sequence
gaattgttaacaagcttacatcaac

SEQ ID NO: 209106 - DNA, 25 bp, Probe sequence
gaagtgttagttggagactcattga

SEQ ID NO: 209107 - DNA, 25 bp, Probe sequence
gaagcaacgagacatagtcatcctg

SEQ ID NO: 209108 - DNA, 25 bp, Probe sequence
gaagcgataatggcacagggtttaa

SEQ ID NO: 209109 - DNA, 25 bp, Probe sequence
gaactcatttatcaatttaatccaa

SEQ ID NO: 209110 - DNA, 25 bp, Probe sequence
gaacaagtgacttacctcatagatg

SEQ ID NO: 209111 - DNA, 25 bp, Probe sequence
gaaactggtgtatctgaagtgttag

SEQ ID NO: 209112 - DNA, 25 bp, Probe sequence
gacagtgacttaccttttcgatatg

SEQ ID NO: 209113 - DNA, 25 bp, Probe sequence
gacttacctcatagatgctaatcca

SEQ ID NO: 209114 - DNA, 25 bp, Probe sequence
gacgcattggttcagtaaccgttga

SEQ ID NO: 209115 - DNA, 25 bp, Probe sequence
gagccgaatgatacatttgattttc

SEQ ID NO: 209116 - DNA, 25 bp, Probe sequence
gagacaaacgcttagtgcacatgac

SEQ ID NO: 209117 - DNA, 25 bp, Probe sequence
gaggtcctttgcataaaggcttgcc

SEQ ID NO: 209118 - DNA, 25 bp, Probe sequence
gattcgtatcgatcatagtacatca

SEQ ID NO: 209119 - DNA, 25 bp, Probe sequence
gattcaaccacagtttacgacgcaa

SEQ ID NO: 209120 - DNA, 25 bp, Probe sequence
gtcattcgttcggaaacgtcaagac

SEQ ID NO: 209121 - DNA, 25 bp, Probe sequence
gtcataactattatccaagaccaga

SEQ ID NO: 209122 - DNA, 25 bp, Probe sequence
gtcatcctgtcgttgcagctaaatt

SEQ ID NO: 209123 - DNA, 25 bp, Probe sequence
ggttaccaaatgatttttacatctg

SEQ ID NO: 209124 - DNA, 25 bp, Probe sequence
tacgacgcaacgacgcattggttca

SEQ ID NO: 209125 - DNA, 25 bp, Probe sequence
ttgacaggcttttcagtgtatttag

SEQ ID NO: 209126 - DNA, 25 bp, Probe sequence
attgcaatttattcacaatttgggc

SEQ ID NO: 209127 - DNA, 25 bp, Probe sequence
attactatacaaattattttctcca

SEQ ID NO: 209128 - DNA, 25 bp, Probe sequence
atagcagctgtagtttcactgtttg

SEQ ID NO: 209129 - DNA, 25 bp, Probe sequence
agttgtcactgaaccaaaaaataca

SEQ ID NO: 209130 - DNA, 25 bp, Probe sequence
agcatttgctgtaattgcagttgta

SEQ ID NO: 209131 - DNA, 25 bp, Probe sequence
aaatttaccgatttatttattgcat

SEQ ID NO: 209132 - DNA, 25 bp, Probe sequence
aaagcatcataatcattgttgtttt

SEQ ID NO: 209133 - DNA, 25 bp, Probe sequence
aaaacacacttagctaatggattta

SEQ ID NO: 209134 - DNA, 25 bp, Probe sequence
aaaaccaccagtagatgcatattta

SEQ ID NO: 209135 - DNA, 25 bp, Probe sequence
aagcaattattacttggttattgtt

SEQ ID NO: 209136 - DNA, 25 bp, Probe sequence
aatgggtatcgttcaatattactta

SEQ ID NO: 209137 - DNA, 25 bp, Probe sequence
caatttgggcaaaaaccaccagtag

SEQ ID NO: 209138 - DNA, 25 bp, Probe sequence
catttttcaaatttttcattggaat

SEQ ID NO: 209139 - DNA, 25 bp, Probe sequence
gctaatttccagcttgctaagtatg

SEQ ID NO: 209140 - DNA, 25 bp, Probe sequence
gctattacaactcaaagcatcataa

SEQ ID NO: 209141 - DNA, 25 bp, Probe sequence
gcaatcactctctcaaagtgttgca

SEQ ID NO: 209142 - DNA, 25 bp, Probe sequence
gatgcatatttaaaagttatcgctg

SEQ ID NO: 209143 - DNA, 25 bp, Probe sequence
gatatatgcacttatagcatttgct

SEQ ID NO: 209144 - DNA, 25 bp, Probe sequence
gttctttcacttctgacatcattac

SEQ ID NO: 209145 - DNA, 25 bp, Probe sequence
gttatcgctgtattacttatagcag

SEQ ID NO: 209146 - DNA, 25 bp, Probe sequence
gtatctatagcaatgattatcgttc

SEQ ID NO: 209147 - DNA, 25 bp, Probe sequence
ggtaattatttaaagagcgttctga

SEQ ID NO: 209148 - DNA, 25 bp, Probe sequence
ggttacttgatttcatttaatacgc

SEQ ID NO: 209149 - DNA, 25 bp, Probe sequence
tgattatcgttctttcacttctgac

SEQ ID NO: 209150 - DNA, 25 bp, Probe sequence
tgcagttgtatatttacttgctaat

SEQ ID NO: 209151 - DNA, 25 bp, Probe sequence
tcaatattacttaaaacgtggtcaa

SEQ ID NO: 209152 - DNA, 25 bp, Probe sequence
tagtttcactgtttgttttagttca

SEQ ID NO: 209153 - DNA, 25 bp, Probe sequence
tatcgttctttcacttctgacatca

SEQ ID NO: 209154 - DNA, 25 bp, Probe sequence
ttttcaactttatgactagtttcgt

SEQ ID NO: 209155 - DNA, 25 bp, Probe sequence
ttatgactagtttcgttgaatcaac

SEQ ID NO: 209156 - DNA, 25 bp, Probe sequence
ttacttgctaatttccagcttgcta

SEQ ID NO: 209157 - DNA, 25 bp, Probe sequence
ttaatacgcaatcactctctcaaag

SEQ ID NO: 209158 - DNA, 25 bp, Probe sequence
ttcacttctgacatcattactatac

SEQ ID NO: 209159 - DNA, 25 bp, Probe sequence
ttggtattgctattacaactcaaag

SEQ ID NO: 209160 - DNA, 25 bp, Probe sequence
attagtacatgcacacctacttcca

SEQ ID NO: 209161 - DNA, 25 bp, Probe sequence
atcaagctgcaaaagctggtcaatc

SEQ ID NO: 209162 - DNA, 25 bp, Probe sequence
atcatgttatttttgcctgcgatgc

SEQ ID NO: 209163 - DNA, 25 bp, Probe sequence
atgcgattaaccatggtgtattcac

SEQ ID NO: 209164 - DNA, 25 bp, Probe sequence
atgcatattttatcagtggcagttg

SEQ ID NO: 209165 - DNA, 25 bp, Probe sequence
atggtgctggaattatccacttctt

SEQ ID NO: 209166 - DNA, 25 bp, Probe sequence
agatgatgatcctgaagcgctattg

SEQ ID NO: 209167 - DNA, 25 bp, Probe sequence
agcgctattggataattacaacact

SEQ ID NO: 209168 - DNA, 25 bp, Probe sequence
acaaacaccaaatgccatccatatt

SEQ ID NO: 209169 - DNA, 25 bp, Probe sequence
acaattgaatctaaccctggaccag

SEQ ID NO: 209170 - DNA, 25 bp, Probe sequence
aactatgggggtcatcgttgcatta

SEQ ID NO: 209171 - DNA, 25 bp, Probe sequence
aagatgctcaattagttatcactca

SEQ ID NO: 209172 - DNA, 25 bp, Probe sequence
caccgcttggtgcagatcaagctgc

SEQ ID NO: 209173 - DNA, 25 bp, Probe sequence
catatgtattaatgcgtcctttatt

SEQ ID NO: 209174 - DNA, 25 bp, Probe sequence
ccaaatgccatccatatttcagtgg

SEQ ID NO: 209175 - DNA, 25 bp, Probe sequence
gctggtattttaggatttatcatga

SEQ ID NO: 209176 - DNA, 25 bp, Probe sequence
gcacacctacttccacttgtaagta

SEQ ID NO: 209177 - DNA, 25 bp, Probe sequence
gcacctagaggtgaattcttgcaca

SEQ ID NO: 209178 - DNA, 25 bp, Probe sequence
gcaacttatcaagcaacaggatttg

SEQ ID NO: 209179 - DNA, 25 bp, Probe sequence
gaagatgttgatgcacacaattaca

SEQ ID NO: 209180 - DNA, 25 bp, Probe sequence
gtatgggttctagtgcaatgggtgc

SEQ ID NO: 209181 - DNA, 25 bp, Probe sequence
gtaagtattttagtagagcctgcaa

SEQ ID NO: 209182 - DNA, 25 bp, Probe sequence
gtcgtttaatttatgatttacgtgg

SEQ ID NO: 209183 - DNA, 25 bp, Probe sequence
gtgtattcacaccgcttggtgcaga

SEQ ID NO: 209184 - DNA, 25 bp, Probe sequence
gtggcagttgaagcattagtacatg

SEQ ID NO: 209185 - DNA, 25 bp, Probe sequence
gtggataatttccttaattcaccaa

SEQ ID NO: 209186 - DNA, 25 bp, Probe sequence
gggtcatcgttgcattacctgatac

SEQ ID NO: 209187 - DNA, 25 bp, Probe sequence
ggaatgactggtgttgcaacttatc

SEQ ID NO: 209188 - DNA, 25 bp, Probe sequence
tgggtgcaagcatgttacgtaataa

SEQ ID NO: 209189 - DNA, 25 bp, Probe sequence
tgaaatttatttcccatatgtatta

SEQ ID NO: 209190 - DNA, 25 bp, Probe sequence
ttactgtttaaatgcacctagaggt

SEQ ID NO: 209191 - DNA, 25 bp, Probe sequence
ttacctgatacaccaatgttacttg

SEQ ID NO: 209192 - DNA, 25 bp, Probe sequence
ttaaaattttagcaccacttatgaa

SEQ ID NO: 209193 - DNA, 25 bp, Probe sequence
ttgcctgcgatgcgggtatgggttc

SEQ ID NO: 209194 - DNA, 25 bp, Probe sequence
attgctcagcaacttgcggtgtcct

SEQ ID NO: 209195 - DNA, 25 bp, Probe sequence
attgctttcattactatccatttac

SEQ ID NO: 209196 - DNA, 25 bp, Probe sequence
atcactatacacgacattgctcagc

SEQ ID NO: 209197 - DNA, 25 bp, Probe sequence
atgatggcattatttctactgtgaa

SEQ ID NO: 209198 - DNA, 25 bp, Probe sequence
atgattgttggcctgatttgatttt

SEQ ID NO: 209199 - DNA, 25 bp, Probe sequence
agatggactgacgctacaccttaat

SEQ ID NO: 209200 - DNA, 25 bp, Probe sequence
agtaccaactatctttatctcgaaa

SEQ ID NO: 209201 - DNA, 25 bp, Probe sequence
agttttacactttggtggctcgatt

SEQ ID NO: 209202 - DNA, 25 bp, Probe sequence
agcgaacttgctgataaacttggtc

SEQ ID NO: 209203 - DNA, 25 bp, Probe sequence
acaccttaatcctgcaatcaatcgt

SEQ ID NO: 209204 - DNA, 25 bp, Probe sequence
acaaagtctacgttccaagagacgc

SEQ ID NO: 209205 - DNA, 25 bp, Probe sequence
aaaatcattttgtctttcattcatt

SEQ ID NO: 209206 - DNA, 25 bp, Probe sequence
caaaccattgacttatctgttgaag

SEQ ID NO: 209207 - DNA, 25 bp, Probe sequence
cagtggcaaacatatatcgcagatt

SEQ ID NO: 209208 - DNA, 25 bp, Probe sequence
catattagtcgtttgcagcagtggt

SEQ ID NO: 209209 - DNA, 25 bp, Probe sequence
cggtgtcctctcgtactattcaccg

SEQ ID NO: 209210 - DNA, 25 bp, Probe sequence
gcatcagtcagcgatttgaagtcac

SEQ ID NO: 209211 - DNA, 25 bp, Probe sequence
gcaatcgattgcacaacatcaaacc

SEQ ID NO: 209212 - DNA, 25 bp, Probe sequence
gaacaaacttcatacttaacttcag

SEQ ID NO: 209213 - DNA, 25 bp, Probe sequence
gaaattggcgtttctgtccagactt

SEQ ID NO: 209214 - DNA, 25 bp, Probe sequence
gacatttgcagatttggatacttta

SEQ ID NO: 209215 - DNA, 25 bp, Probe sequence
gagcgtattacacaagcatcagtca

SEQ ID NO: 209216 - DNA, 25 bp, Probe sequence
gatccaacgtcattcgctgaactac

SEQ ID NO: 209217 - DNA, 25 bp, Probe sequence
gatacaagccaaggagccagttaaa

SEQ ID NO: 209218 - DNA, 25 bp, Probe sequence
gatagccctattgattaagtaccac

SEQ ID NO: 209219 - DNA, 25 bp, Probe sequence
gatatcagttatgtcgcacagtttt

SEQ ID NO: 209220 - DNA, 25 bp, Probe sequence
gtttgcaagctaatatcgagaccta

SEQ ID NO: 209221 - DNA, 25 bp, Probe sequence
tgcatcatatgcgttcgggtttaac

SEQ ID NO: 209222 - DNA, 25 bp, Probe sequence
tcgggtttaactttgcttgattcag

SEQ ID NO: 209223 - DNA, 25 bp, Probe sequence
tcgagacctataatccgttaacaga

SEQ ID NO: 209224 - DNA, 25 bp, Probe sequence
taatggactacctaagtgccttacc

SEQ ID NO: 209225 - DNA, 25 bp, Probe sequence
taactttaactgtccatatcgtgct

SEQ ID NO: 209226 - DNA, 25 bp, Probe sequence
taaacccattattaccagatagtga

SEQ ID NO: 209227 - DNA, 25 bp, Probe sequence
taccctaccaacttaccgaatcaag

SEQ ID NO: 209228 - DNA, 25 bp, Probe sequence
attcctcatggcacagatgaagcta

SEQ ID NO: 209229 - DNA, 25 bp, Probe sequence
attattacaaatccctgaaggcgtt

SEQ ID NO: 209230 - DNA, 25 bp, Probe sequence
atgagcgaattatttagtaatgaca

SEQ ID NO: 209231 - DNA, 25 bp, Probe sequence
atgttaacagccaaaatgaagcaat

SEQ ID NO: 209232 - DNA, 25 bp, Probe sequence
atggcacagatgaagctaaaacaaa

SEQ ID NO: 209233 - DNA, 25 bp, Probe sequence
agtaatgacaatatctttttaaatg

SEQ ID NO: 209234 - DNA, 25 bp, Probe sequence
agacttgttatctaaaattgcaatt

SEQ ID NO: 209235 - DNA, 25 bp, Probe sequence
agctaaaacaaatgtgattcactca

SEQ ID NO: 209236 - DNA, 25 bp, Probe sequence
acaaatccctgaaggcgttgactgg

SEQ ID NO: 209237 - DNA, 25 bp, Probe sequence
aaatgtgattcactcaggtttaaca

SEQ ID NO: 209238 - DNA, 25 bp, Probe sequence
aaagatggcgaacatttagacttgt

SEQ ID NO: 209239 - DNA, 25 bp, Probe sequence
aaaagcaggtaaagccttagttgat

SEQ ID NO: 209240 - DNA, 25 bp, Probe sequence
aatggcttagcaattcctcatggca

SEQ ID NO: 209241 - DNA, 25 bp, Probe sequence
gaaggcgttgactgggatggcgaag

SEQ ID NO: 209242 - DNA, 25 bp, Probe sequence
aattgcaattacatttagcgaagaa

SEQ ID NO: 209243 - DNA, 25 bp, Probe sequence
cgtatcgttcaagcaaaatctgcag

SEQ ID NO: 209244 - DNA, 25 bp, Probe sequence
cctgaaggcgttgactgggatggcg

SEQ ID NO: 209245 - DNA, 25 bp, Probe sequence
gccttagttgatagtggtgctgtaa

SEQ ID NO: 209246 - DNA, 25 bp, Probe sequence
gctggtaaagatggcgaacatttag

SEQ ID NO: 209247 - DNA, 25 bp, Probe sequence
gctgtaacagatgcttatattcaag

SEQ ID NO: 209248 - DNA, 25 bp, Probe sequence
gcttagcaattcctcatggcacaga

SEQ ID NO: 209249 - DNA, 25 bp, Probe sequence
gcaattcctcatggcacagatgaag

SEQ ID NO: 209250 - DNA, 25 bp, Probe sequence
gatagtggtgctgtaacagatgctt

SEQ ID NO: 209251 - DNA, 25 bp, Probe sequence
gtaaagccttagttgatagtggtgc

SEQ ID NO: 209252 - DNA, 25 bp, Probe sequence
gtgctgtaacagatgcttatattca

SEQ ID NO: 209253 - DNA, 25 bp, Probe sequence
gtgattcactcaggtttaacattat

SEQ ID NO: 209254 - DNA, 25 bp, Probe sequence
gggaaatggcttagcaattcctcat

SEQ ID NO: 209255 - DNA, 25 bp, Probe sequence
ggtttaacattattacaaatccctg

SEQ ID NO: 209256 - DNA, 25 bp, Probe sequence
ggcgttgactgggatggcgaagtag

SEQ ID NO: 209257 - DNA, 25 bp, Probe sequence
ggcgaacatttagacttgttatcta

SEQ ID NO: 209258 - DNA, 25 bp, Probe sequence
tggcttagcaattcctcatggcaca

SEQ ID NO: 209259 - DNA, 25 bp, Probe sequence
tcgttcaagcaaaatctgcagaaga

SEQ ID NO: 209260 - DNA, 25 bp, Probe sequence
ttagcaattcctcatggcacagatg

SEQ ID NO: 209261 - DNA, 25 bp, Probe sequence
ttgactgggatggcgaagtagttaa

SEQ ID NO: 209262 - DNA, 25 bp, Probe sequence
attactaatgaatttgattttactg

SEQ ID NO: 209263 - DNA, 25 bp, Probe sequence
attattacaacagctgttggtgtta

SEQ ID NO: 209264 - DNA, 25 bp, Probe sequence
atactacctattattgctaaatctt

SEQ ID NO: 209265 - DNA, 25 bp, Probe sequence
atacagctgcattgttattgaagta

SEQ ID NO: 209266 - DNA, 25 bp, Probe sequence
accatgttaatattgttgcttgtga

SEQ ID NO: 209267 - DNA, 25 bp, Probe sequence
acaattcttatttatctgatgaagt

SEQ ID NO: 209268 - DNA, 25 bp, Probe sequence
acaatattcattttgctaactcagc

SEQ ID NO: 209269 - DNA, 25 bp, Probe sequence
aagatttagaacgcactggtttatt

SEQ ID NO: 209270 - DNA, 25 bp, Probe sequence
cagcagaccaagaaactgttgagaa

SEQ ID NO: 209271 - DNA, 25 bp, Probe sequence
cattttgctaactcagcagttgata

SEQ ID NO: 209272 - DNA, 25 bp, Probe sequence
ctggcttacgccgtgttttagctga

SEQ ID NO: 209273 - DNA, 25 bp, Probe sequence
cgtttcaacaattcttatttatctg

SEQ ID NO: 209274 - DNA, 25 bp, Probe sequence
cctcttggtaacaatattcattttg

SEQ ID NO: 209275 - DNA, 25 bp, Probe sequence
gcttacgccgtgttttagctgaaac

SEQ ID NO: 209276 - DNA, 25 bp, Probe sequence
gcagttgatagaattgtaccattac

SEQ ID NO: 209277 - DNA, 25 bp, Probe sequence
gcactggtttattaaatacagctgc

SEQ ID NO: 209278 - DNA, 25 bp, Probe sequence
gaatatgctaaagttgacgatggct

SEQ ID NO: 209279 - DNA, 25 bp, Probe sequence
gaatacaggacatgcatatttagcg

SEQ ID NO: 209280 - DNA, 25 bp, Probe sequence
gaatgctattatggcaactgataca

SEQ ID NO: 209281 - DNA, 25 bp, Probe sequence
gacatgcatatttagcgtatgctgg

SEQ ID NO: 209282 - DNA, 25 bp, Probe sequence
gatggcttagccgatgaaataattg

SEQ ID NO: 209283 - DNA, 25 bp, Probe sequence
gatagttcaattgaagctggcttac

SEQ ID NO: 209284 - DNA, 25 bp, Probe sequence
gattttactgaagcggaacaagctg

SEQ ID NO: 209285 - DNA, 25 bp, Probe sequence
gatttaacaccatatattgagcgta

SEQ ID NO: 209286 - DNA, 25 bp, Probe sequence
gtatgatgatacagcagaccaagaa

SEQ ID NO: 209287 - DNA, 25 bp, Probe sequence
gggttgttgaaaaagatgcatggta

SEQ ID NO: 209288 - DNA, 25 bp, Probe sequence
tgaagctggcttacgccgtgtttta

SEQ ID NO: 209289 - DNA, 25 bp, Probe sequence
taaagttgacgatggcttagccgat

SEQ ID NO: 209290 - DNA, 25 bp, Probe sequence
tacgtaaaattggccctaaagatag

SEQ ID NO: 209291 - DNA, 25 bp, Probe sequence
tagacgttatggttgagccatttta

SEQ ID NO: 209292 - DNA, 25 bp, Probe sequence
tatattagacgttatggttgagcca

SEQ ID NO: 209293 - DNA, 25 bp, Probe sequence
tattgttgcttgtgagaatgctatt

SEQ ID NO: 209294 - DNA, 25 bp, Probe sequence
tattgctaaatcttttgcgcctttc

SEQ ID NO: 209295 - DNA, 25 bp, Probe sequence
ttgagcgtaaattattaactgtgaa

SEQ ID NO: 209296 - DNA, 25 bp, Probe sequence
attatcgatactgaagaccacgaat

SEQ ID NO: 209297 - DNA, 25 bp, Probe sequence
atattacacaagaccaagatattca

SEQ ID NO: 209298 - DNA, 25 bp, Probe sequence
atcaaaattcctacaagtgaaatta

SEQ ID NO: 209299 - DNA, 25 bp, Probe sequence
acgaatcgcgttattatcgatactg

SEQ ID NO: 209300 - DNA, 25 bp, Probe sequence
actgaagaccacgaatacattattt

SEQ ID NO: 209301 - DNA, 25 bp, Probe sequence
acattatttatactcaaaatgatca

SEQ ID NO: 209302 - DNA, 25 bp, Probe sequence
aaacgaatcgcgttattatcgatac

SEQ ID NO: 209303 - DNA, 25 bp, Probe sequence
aagatgtatctagaatcggctcaac

SEQ ID NO: 209304 - DNA, 25 bp, Probe sequence
caaagatgtatctagaatcggctca

SEQ ID NO: 209305 - DNA, 25 bp, Probe sequence
cacgaatacattatttatactcaaa

SEQ ID NO: 209306 - DNA, 25 bp, Probe sequence
gcgttattatcgatactgaagacca

SEQ ID NO: 209307 - DNA, 25 bp, Probe sequence
gcgtattcaatggagagttgctgat

SEQ ID NO: 209308 - DNA, 25 bp, Probe sequence
gctgatatcaaaattcctacaagtg

SEQ ID NO: 209309 - DNA, 25 bp, Probe sequence
gcagttcctaaattagacagcaaag

SEQ ID NO: 209310 - DNA, 25 bp, Probe sequence
gaatcgcgttattatcgatactgaa

SEQ ID NO: 209311 - DNA, 25 bp, Probe sequence
gaagtgcgtattcaatggagagttg

SEQ ID NO: 209312 - DNA, 25 bp, Probe sequence
gaagaccacgaatacattatttata

SEQ ID NO: 209313 - DNA, 25 bp, Probe sequence
gaccacgaatacattatttatactc

SEQ ID NO: 209314 - DNA, 25 bp, Probe sequence
gagagttgctgatatcaaaattcct

SEQ ID NO: 209315 - DNA, 25 bp, Probe sequence
gagttgctgatatcaaaattcctac

SEQ ID NO: 209316 - DNA, 25 bp, Probe sequence
gatactgaagaccacgaatacatta

SEQ ID NO: 209317 - DNA, 25 bp, Probe sequence
gatatcaaaattcctacaagtgaaa

SEQ ID NO: 209318 - DNA, 25 bp, Probe sequence
gttgctgatatcaaaattcctacaa

SEQ ID NO: 209319 - DNA, 25 bp, Probe sequence
gttcctaaattagacagcaaagatg

SEQ ID NO: 209320 - DNA, 25 bp, Probe sequence
gttattatcgatactgaagaccacg

SEQ ID NO: 209321 - DNA, 25 bp, Probe sequence
gtgcgtattcaatggagagttgctg

SEQ ID NO: 209322 - DNA, 25 bp, Probe sequence
ggtaaaacgaatcgcgttattatcg

SEQ ID NO: 209323 - DNA, 25 bp, Probe sequence
ggagagttgctgatatcaaaattcc

SEQ ID NO: 209324 - DNA, 25 bp, Probe sequence
tgctgatatcaaaattcctacaagt

SEQ ID NO: 209325 - DNA, 25 bp, Probe sequence
tcgcgttattatcgatactgaagac

SEQ ID NO: 209326 - DNA, 25 bp, Probe sequence
taaaaatattacacaagaccaagat

SEQ ID NO: 209327 - DNA, 25 bp, Probe sequence
tactgaagaccacgaatacattatt

SEQ ID NO: 209328 - DNA, 25 bp, Probe sequence
tatcgatactgaagaccacgaatac

SEQ ID NO: 209329 - DNA, 25 bp, Probe sequence
ttcaatggagagttgctgatatcaa

SEQ ID NO: 209330 - DNA, 25 bp, Probe sequence
attacacgagtacaccatccaaatg

SEQ ID NO: 209331 - DNA, 25 bp, Probe sequence
atacagtacatctcatttccatgaa

SEQ ID NO: 209332 - DNA, 25 bp, Probe sequence
atgaatcacctatcgtgacattgat

SEQ ID NO: 209333 - DNA, 25 bp, Probe sequence
atggtccactaatgacacgtatttt

SEQ ID NO: 209334 - DNA, 25 bp, Probe sequence
atggcattgcattagaggctcactt

SEQ ID NO: 209335 - DNA, 25 bp, Probe sequence
agttgcaacctacccatttaacaat

SEQ ID NO: 209336 - DNA, 25 bp, Probe sequence
agttcctaaatacccagctatgtcg

SEQ ID NO: 209337 - DNA, 25 bp, Probe sequence
agcactgtcaatgcaacatgattct

SEQ ID NO: 209338 - DNA, 25 bp, Probe sequence
agctatgtcgccacacatcaaattg

SEQ ID NO: 209339 - DNA, 25 bp, Probe sequence
acaaacgacgcacaatggtccacta

SEQ ID NO: 209340 - DNA, 25 bp, Probe sequence
aaatgctgctagtgatcaatttcag

SEQ ID NO: 209341 - DNA, 25 bp, Probe sequence
aaagcattgcttggtctcgtaatcc

SEQ ID NO: 209342 - DNA, 25 bp, Probe sequence
aaacgttatcaatcagctgcatcat

SEQ ID NO: 209343 - DNA, 25 bp, Probe sequence
aaacattatatgctcctatcactgg

SEQ ID NO: 209344 - DNA, 25 bp, Probe sequence
aacttagttaaagcgcgcactcaaa

SEQ ID NO: 209345 - DNA, 25 bp, Probe sequence
aagtcctatgcatcaacaattattg

SEQ ID NO: 209346 - DNA, 25 bp, Probe sequence
aatgattccacaagaagtcacacca

SEQ ID NO: 209347 - DNA, 25 bp, Probe sequence
cctatcactggagaacacgcctttg

SEQ ID NO: 209348 - DNA, 25 bp, Probe sequence
gcgaagatagttacttgcgttcaga

SEQ ID NO: 209349 - DNA, 25 bp, Probe sequence
gaacacgcctttgatcgaattgatg

SEQ ID NO: 209350 - DNA, 25 bp, Probe sequence
gacgtattacattctgattatcaag

SEQ ID NO: 209351 - DNA, 25 bp, Probe sequence
gaggctcacttgcaaaatgctattg

SEQ ID NO: 209352 - DNA, 25 bp, Probe sequence
gatgttgaaggccctttctacatta

SEQ ID NO: 209353 - DNA, 25 bp, Probe sequence
gatatctcaacgactcatatactag

SEQ ID NO: 209354 - DNA, 25 bp, Probe sequence
gattccttcaagcttagttgcaacc

SEQ ID NO: 209355 - DNA, 25 bp, Probe sequence
gtcacatcaatgcatcgcgaaaact

SEQ ID NO: 209356 - DNA, 25 bp, Probe sequence
gtggtatatcgttcgtgatgtacta

SEQ ID NO: 209357 - DNA, 25 bp, Probe sequence
tggtctcgtaatcccactagttact

SEQ ID NO: 209358 - DNA, 25 bp, Probe sequence
ggcgaattaattcttacaatctcta

SEQ ID NO: 209359 - DNA, 25 bp, Probe sequence
tgcgttcagagcaagccgttattga

SEQ ID NO: 209360 - DNA, 25 bp, Probe sequence
tctaccgttcaaaaccatttaggcg

SEQ ID NO: 209361 - DNA, 25 bp, Probe sequence
taaagataccatgttcgcgccattt

SEQ ID NO: 209362 - DNA, 25 bp, Probe sequence
tagaaatccagttcccacaagctaa

SEQ ID NO: 209363 - DNA, 25 bp, Probe sequence
ttattgaaggtcatccgctacatcc

SEQ ID NO: 209364 - DNA, 25 bp, Probe sequence
atgggtatgtgtggcatttctaagg

SEQ ID NO: 209365 - DNA, 25 bp, Probe sequence
agatgtcgttataggaattgccgcg

SEQ ID NO: 209366 - DNA, 25 bp, Probe sequence
acaatcggtgctacaacagtatcta

SEQ ID NO: 209367 - DNA, 25 bp, Probe sequence
aagtgaaattgcgcagtatccagta

SEQ ID NO: 209368 - DNA, 25 bp, Probe sequence
aatggtgacattgttaaacgagcaa

SEQ ID NO: 209369 - DNA, 25 bp, Probe sequence
aatatgatttcaaccatcacaatgg

SEQ ID NO: 209370 - DNA, 25 bp, Probe sequence
aattgcgcagtatccagtagaagtt

SEQ ID NO: 209371 - DNA, 25 bp, Probe sequence
ccatcacaatggttggtgtcggaaa

SEQ ID NO: 209372 - DNA, 25 bp, Probe sequence
gctacaacagtatctatttcatgca

SEQ ID NO: 209373 - DNA, 25 bp, Probe sequence
gcagttcgaaaggcaataccacaat

SEQ ID NO: 209374 - DNA, 25 bp, Probe sequence
gcaagtcccgttagcagttcgaaag

SEQ ID NO: 209375 - DNA, 25 bp, Probe sequence
gcaaccaatcaaaaactgatcgacc

SEQ ID NO: 209376 - DNA, 25 bp, Probe sequence
gcaatggcgttatatcaggtatctg

SEQ ID NO: 209377 - DNA, 25 bp, Probe sequence
gaagatcagcaagtcccgttagcag

SEQ ID NO: 209378 - DNA, 25 bp, Probe sequence
gaagcgacgatgcatcttgatgaaa

SEQ ID NO: 209379 - DNA, 25 bp, Probe sequence
gaagcgcgtaatgaagcgacgatgc

SEQ ID NO: 209380 - DNA, 25 bp, Probe sequence
gaaagttgcgacagttatgggtatg

SEQ ID NO: 209381 - DNA, 25 bp, Probe sequence
gaaattataggtattattgctggtg

SEQ ID NO: 209382 - DNA, 25 bp, Probe sequence
gacaacatgctatgacgatggctgt

SEQ ID NO: 209383 - DNA, 25 bp, Probe sequence
gacgatggctgtagaaggtgcggaa

SEQ ID NO: 209384 - DNA, 25 bp, Probe sequence
gaccgttcagtgcgtattattcaag

SEQ ID NO: 209385 - DNA, 25 bp, Probe sequence
gagcaatcagagatagacaacctta

SEQ ID NO: 209386 - DNA, 25 bp, Probe sequence
gagtgtgtacctacattcaatactg

SEQ ID NO: 209387 - DNA, 25 bp, Probe sequence
gatgcagcggagtgtgtacctacat

SEQ ID NO: 209388 - DNA, 25 bp, Probe sequence
gtttacgataacctcatgattgatg

SEQ ID NO: 209389 - DNA, 25 bp, Probe sequence
gtttaaagtctggtacagcacaaaa

SEQ ID NO: 209390 - DNA, 25 bp, Probe sequence
gtagaagttaaagttggtccagaag

SEQ ID NO: 209391 - DNA, 25 bp, Probe sequence
ggaaaatagtacgaccgaagcgcgt

SEQ ID NO: 209392 - DNA, 25 bp, Probe sequence
tgatcgaccgttcagtgcgtattat

SEQ ID NO: 209393 - DNA, 25 bp, Probe sequence
tgccgcgagtggcaaaacgccatat

SEQ ID NO: 209394 - DNA, 25 bp, Probe sequence
tgctggtggacaacatgctatgacg

SEQ ID NO: 209395 - DNA, 25 bp, Probe sequence
tcaggtatctgagcatgatgtgaaa

SEQ ID NO: 209396 - DNA, 25 bp, Probe sequence
ttataggcggtttaacatttgctaa

SEQ ID NO: 209397 - DNA, 25 bp, Probe sequence
ttgggtgtcttagatgcagcggagt

SEQ ID NO: 209398 - DNA, 25 bp, Probe sequence
taattgtggtggtgccattcgaccg

SEQ ID NO: 209399 - DNA, 25 bp, Probe sequence
atggcacgttaaatcgtttttattg

SEQ ID NO: 209400 - DNA, 25 bp, Probe sequence
agaacgtaatcaacaatctttaggt

SEQ ID NO: 209401 - DNA, 25 bp, Probe sequence
agaagatgatcctgaaggttttatc

SEQ ID NO: 209402 - DNA, 25 bp, Probe sequence
actaggttcatcactcgttgtacaa

SEQ ID NO: 209403 - DNA, 25 bp, Probe sequence
acatgacgacatggtttccgttgta

SEQ ID NO: 209404 - DNA, 25 bp, Probe sequence
acatggtttccgttgtaaaatcatt

SEQ ID NO: 209405 - DNA, 25 bp, Probe sequence
acaacctgccgcaggattaatatca

SEQ ID NO: 209406 - DNA, 25 bp, Probe sequence
aagccgtgattatttagaagatgat

SEQ ID NO: 209407 - DNA, 25 bp, Probe sequence
aatgttagatcaacctaccatcata

SEQ ID NO: 209408 - DNA, 25 bp, Probe sequence
aatgggtggcttatttgatgaaatt

SEQ ID NO: 209409 - DNA, 25 bp, Probe sequence
aataaagatcgaacaccttatgata

SEQ ID NO: 209410 - DNA, 25 bp, Probe sequence
aatatcgatggtttgcactcagacg

SEQ ID NO: 209411 - DNA, 25 bp, Probe sequence
aatatcgttcatgattggattgcaa

SEQ ID NO: 209412 - DNA, 25 bp, Probe sequence
caggtgctggtgtatctgtcgcaag

SEQ ID NO: 209413 - DNA, 25 bp, Probe sequence
cattgtgataattgtggtggtgcca

SEQ ID NO: 209414 - DNA, 25 bp, Probe sequence
gaatacttgttaagccgtgattatt

SEQ ID NO: 209415 - DNA, 25 bp, Probe sequence
gaaggttttatcaatttctgccata

SEQ ID NO: 209416 - DNA, 25 bp, Probe sequence
gacgctggaagtcaacatgttgatg

SEQ ID NO: 209417 - DNA, 25 bp, Probe sequence
gacgctactttggtcatacatgacg

SEQ ID NO: 209418 - DNA, 25 bp, Probe sequence
gaccggacatcgtattatacggtga

SEQ ID NO: 209419 - DNA, 25 bp, Probe sequence
gatttccgttcaatgggtggcttat

SEQ ID NO: 209420 - DNA, 25 bp, Probe sequence
gatagaactttgaaacattgtgata

SEQ ID NO: 209421 - DNA, 25 bp, Probe sequence
gatagttcgaatcgtattacatttt

SEQ ID NO: 209422 - DNA, 25 bp, Probe sequence
gttccagatttccgttcaatgggtg

SEQ ID NO: 209423 - DNA, 25 bp, Probe sequence
gttttatcaatttctgccataagcg

SEQ ID NO: 209424 - DNA, 25 bp, Probe sequence
gtttgcactcagacgctggaagtca

SEQ ID NO: 209425 - DNA, 25 bp, Probe sequence
gtgctggtgtatctgtcgcaagtgg

SEQ ID NO: 209426 - DNA, 25 bp, Probe sequence
tgttgatgaattacatggcacgtta

SEQ ID NO: 209427 - DNA, 25 bp, Probe sequence
tgccattcgaccggacatcgtatta

SEQ ID NO: 209428 - DNA, 25 bp, Probe sequence
tcatcactcgttgtacaacctgccg

SEQ ID NO: 209429 - DNA, 25 bp, Probe sequence
tcgttgtacaacctgccgcaggatt

SEQ ID NO: 209430 - DNA, 25 bp, Probe sequence
tcgatggtttgcactcagacgctgg

SEQ ID NO: 209431 - DNA, 25 bp, Probe sequence
tttcgccagaatacttgttaagccg

SEQ ID NO: 209432 - DNA, 25 bp, Probe sequence
attactgcattacatcgaacttact

SEQ ID NO: 209433 - DNA, 25 bp, Probe sequence
atttgttactgccactttagcattg

SEQ ID NO: 209434 - DNA, 25 bp, Probe sequence
atcatttgttactgccactttagca

SEQ ID NO: 209435 - DNA, 25 bp, Probe sequence
atggtattactgcattacatcgaac

SEQ ID NO: 209436 - DNA, 25 bp, Probe sequence
agtagatggtattactgcattacat

SEQ ID NO: 209437 - DNA, 25 bp, Probe sequence
agatggtattactgcattacatcga

SEQ ID NO: 209438 - DNA, 25 bp, Probe sequence
actaaaatcatttgttactgccact

SEQ ID NO: 209439 - DNA, 25 bp, Probe sequence
aaatcatttgttactgccactttag

SEQ ID NO: 209440 - DNA, 25 bp, Probe sequence
aaatgacgacgctaaaaattcaatt

SEQ ID NO: 209441 - DNA, 25 bp, Probe sequence
aaaaattcaattgatccaagtacaa

SEQ ID NO: 209442 - DNA, 25 bp, Probe sequence
aaaatcatttgttactgccacttta

SEQ ID NO: 209443 - DNA, 25 bp, Probe sequence
aactaaaatcatttgttactgccac

SEQ ID NO: 209444 - DNA, 25 bp, Probe sequence
aagcatctgcagatagtaataacgg

SEQ ID NO: 209445 - DNA, 25 bp, Probe sequence
aatcatttgttactgccactttagc

SEQ ID NO: 209446 - DNA, 25 bp, Probe sequence
aattcaattgatccaagtacaatca

SEQ ID NO: 209447 - DNA, 25 bp, Probe sequence
caattgatccaagtacaatcaaaca

SEQ ID NO: 209448 - DNA, 25 bp, Probe sequence
catttgttactgccactttagcatt

SEQ ID NO: 209449 - DNA, 25 bp, Probe sequence
ctaaaatcatttgttactgccactt

SEQ ID NO: 209450 - DNA, 25 bp, Probe sequence
gaatctaaagaaaaatgacgacgct

SEQ ID NO: 209451 - DNA, 25 bp, Probe sequence
gaagcatctgcagatagtaataacg

SEQ ID NO: 209452 - DNA, 25 bp, Probe sequence
gaaactaaaatcatttgttactgcc

SEQ ID NO: 209453 - DNA, 25 bp, Probe sequence
gacgacgctaaaaattcaattgatc

SEQ ID NO: 209454 - DNA, 25 bp, Probe sequence
gacgctaaaaattcaattgatccaa

SEQ ID NO: 209455 - DNA, 25 bp, Probe sequence
gtattactgcattacatcgaactta

SEQ ID NO: 209456 - DNA, 25 bp, Probe sequence
gtagatggtattactgcattacatc

SEQ ID NO: 209457 - DNA, 25 bp, Probe sequence
ggtattactgcattacatcgaactt

SEQ ID NO: 209458 - DNA, 25 bp, Probe sequence
tggtattactgcattacatcgaact

SEQ ID NO: 209459 - DNA, 25 bp, Probe sequence
tcatttgttactgccactttagcat

SEQ ID NO: 209460 - DNA, 25 bp, Probe sequence
taaaatcatttgttactgccacttt

SEQ ID NO: 209461 - DNA, 25 bp, Probe sequence
tactgcattacatcgaacttacttt

SEQ ID NO: 209462 - DNA, 25 bp, Probe sequence
tattactgcattacatcgaacttac

SEQ ID NO: 209463 - DNA, 25 bp, Probe sequence
tttgttactgccactttagcattgg

SEQ ID NO: 209464 - DNA, 25 bp, Probe sequence
ttactgcattacatcgaacttactt

SEQ ID NO: 209465 - DNA, 25 bp, Probe sequence
ttgttactgccactttagcattggg

SEQ ID NO: 209466 - DNA, 25 bp, Probe sequence
attagcgattatttttatagttata

SEQ ID NO: 209467 - DNA, 25 bp, Probe sequence
atttcacacttatattagcgattat

SEQ ID NO: 209468 - DNA, 25 bp, Probe sequence
atattagcgattatttttatagtta

SEQ ID NO: 209469 - DNA, 25 bp, Probe sequence
atacatttcacacttatattagcga

SEQ ID NO: 209470 - DNA, 25 bp, Probe sequence
atggtgtttcgattaataagccaca

SEQ ID NO: 209471 - DNA, 25 bp, Probe sequence
atggcggtttcaaaatggtgtttcg

SEQ ID NO: 209472 - DNA, 25 bp, Probe sequence
acatttcacacttatattagcgatt

SEQ ID NO: 209473 - DNA, 25 bp, Probe sequence
aatggtgtttcgattaataagccac

SEQ ID NO: 209474 - DNA, 25 bp, Probe sequence
caaaatggtgtttcgattaataagc

SEQ ID NO: 209475 - DNA, 25 bp, Probe sequence
cacacttatattagcgattattttt

SEQ ID NO: 209476 - DNA, 25 bp, Probe sequence
cacttatattagcgattatttttat

SEQ ID NO: 209477 - DNA, 25 bp, Probe sequence
catttcacacttatattagcgatta

SEQ ID NO: 209478 - DNA, 25 bp, Probe sequence
gcggtttcaaaatggtgtttcgatt

SEQ ID NO: 209479 - DNA, 25 bp, Probe sequence
gttttatggcggtttcaaaatggtg

SEQ ID NO: 209480 - DNA, 25 bp, Probe sequence
gtttcaaaatggtgtttcgattaat

SEQ ID NO: 209481 - DNA, 25 bp, Probe sequence
gtttcgattaataagccacagcaag

SEQ ID NO: 209482 - DNA, 25 bp, Probe sequence
gtgtttcgattaataagccacagca

SEQ ID NO: 209483 - DNA, 25 bp, Probe sequence
ggtgtttcgattaataagccacagc

SEQ ID NO: 209484 - DNA, 25 bp, Probe sequence
ggcggtttcaaaatggtgtttcgat

SEQ ID NO: 209485 - DNA, 25 bp, Probe sequence
tggcggtttcaaaatggtgtttcga

SEQ ID NO: 209486 - DNA, 25 bp, Probe sequence
tggtgtttcgattaataagccacag

SEQ ID NO: 209487 - DNA, 25 bp, Probe sequence
tgtttcgattaataagccacagcaa

SEQ ID NO: 209488 - DNA, 25 bp, Probe sequence
tcacacttatattagcgattatttt

SEQ ID NO: 209489 - DNA, 25 bp, Probe sequence
tacatttcacacttatattagcgat

SEQ ID NO: 209490 - DNA, 25 bp, Probe sequence
tagcgattatttttatagttataaa

SEQ ID NO: 209491 - DNA, 25 bp, Probe sequence
tatggcggtttcaaaatggtgtttc

SEQ ID NO: 209492 - DNA, 25 bp, Probe sequence
tatacatttcacacttatattagcg

SEQ ID NO: 209493 - DNA, 25 bp, Probe sequence
tttcgattaataagccacagcaaga

SEQ ID NO: 209494 - DNA, 25 bp, Probe sequence
tttcaaaatggtgtttcgattaata

SEQ ID NO: 209495 - DNA, 25 bp, Probe sequence
tttcacacttatattagcgattatt

SEQ ID NO: 209496 - DNA, 25 bp, Probe sequence
tttatggcggtttcaaaatggtgtt

SEQ ID NO: 209497 - DNA, 25 bp, Probe sequence
ttatggcggtttcaaaatggtgttt

SEQ ID NO: 209498 - DNA, 25 bp, Probe sequence
ttcacacttatattagcgattattt

SEQ ID NO: 209499 - DNA, 25 bp, Probe sequence
ttcgattaataagccacagcaagac

SEQ ID NO: 209500 - DNA, 25 bp, Probe sequence
atttcatacttatatttatcgattg

SEQ ID NO: 209501 - DNA, 25 bp, Probe sequence
atacatttcatacttatatttatcg

SEQ ID NO: 209502 - DNA, 25 bp, Probe sequence
atgagggatgttggattgattgatg

SEQ ID NO: 209503 - DNA, 25 bp, Probe sequence
atgttggattgattgatgtagagga

SEQ ID NO: 209504 - DNA, 25 bp, Probe sequence
atgtagaggattgttacgatatttt

SEQ ID NO: 209505 - DNA, 25 bp, Probe sequence
agggatgttggattgattgatgtag

SEQ ID NO: 209506 - DNA, 25 bp, Probe sequence
acatttcatacttatatttatcgat

SEQ ID NO: 209507 - DNA, 25 bp, Probe sequence
catacttatatttatcgattggttt

SEQ ID NO: 209508 - DNA, 25 bp, Probe sequence
catttcatacttatatttatcgatt

SEQ ID NO: 209509 - DNA, 25 bp, Probe sequence
gcgttgtgattatgagggatgttgg

SEQ ID NO: 209510 - DNA, 25 bp, Probe sequence
gagatataaaaagccacagcaagac

SEQ ID NO: 209511 - DNA, 25 bp, Probe sequence
gagggatgttggattgattgatgta

SEQ ID NO: 209512 - DNA, 25 bp, Probe sequence
gatgtagaggattgttacgatattt

SEQ ID NO: 209513 - DNA, 25 bp, Probe sequence
gatgttggattgattgatgtagagg

SEQ ID NO: 209514 - DNA, 25 bp, Probe sequence
gattatgagggatgttggattgatt

SEQ ID NO: 209515 - DNA, 25 bp, Probe sequence
gattgatgtagaggattgttacgat

SEQ ID NO: 209516 - DNA, 25 bp, Probe sequence
gattgattgatgtagaggattgtta

SEQ ID NO: 209517 - DNA, 25 bp, Probe sequence
gttgtgattatgagggatgttggat

SEQ ID NO: 209518 - DNA, 25 bp, Probe sequence
gttggattgattgatgtagaggatt

SEQ ID NO: 209519 - DNA, 25 bp, Probe sequence
gtgcgttgtgattatgagggatgtt

SEQ ID NO: 209520 - DNA, 25 bp, Probe sequence
gtgattatgagggatgttggattga

SEQ ID NO: 209521 - DNA, 25 bp, Probe sequence
gggatgttggattgattgatgtaga

SEQ ID NO: 209522 - DNA, 25 bp, Probe sequence
ggattgattgatgtagaggattgtt

SEQ ID NO: 209523 - DNA, 25 bp, Probe sequence
ggatgttggattgattgatgtagag

SEQ ID NO: 209524 - DNA, 25 bp, Probe sequence
ggagatataaaaagccacagcaaga

SEQ ID NO: 209525 - DNA, 25 bp, Probe sequence
tgtgcgttgtgattatgagggatgt

SEQ ID NO: 209526 - DNA, 25 bp, Probe sequence
tgagggatgttggattgattgatgt

SEQ ID NO: 209527 - DNA, 25 bp, Probe sequence
tgcgttgtgattatgagggatgttg

SEQ ID NO: 209528 - DNA, 25 bp, Probe sequence
tcatacttatatttatcgattggtt

SEQ ID NO: 209529 - DNA, 25 bp, Probe sequence
tacatttcatacttatatttatcga

SEQ ID NO: 209530 - DNA, 25 bp, Probe sequence
tacttatatttatcgattggtttta

SEQ ID NO: 209531 - DNA, 25 bp, Probe sequence
ttatgagggatgttggattgattga

SEQ ID NO: 209532 - DNA, 25 bp, Probe sequence
ttcatacttatatttatcgattggt

SEQ ID NO: 209533 - DNA, 25 bp, Probe sequence
ttgtgcgttgtgattatgagggatg

SEQ ID NO: 209534 - DNA, 25 bp, Probe sequence
attatcagcgccaacctatatacct

SEQ ID NO: 209535 - DNA, 25 bp, Probe sequence
attagacctatagcgattattccaa

SEQ ID NO: 209536 - DNA, 25 bp, Probe sequence
atagcgattattccaatatttggta

SEQ ID NO: 209537 - DNA, 25 bp, Probe sequence
atacctaataaaaatgctcgtgtca

SEQ ID NO: 209538 - DNA, 25 bp, Probe sequence
atcagcgccaacctatatacctaat

SEQ ID NO: 209539 - DNA, 25 bp, Probe sequence
atctttagcacttataggtatcttt

SEQ ID NO: 209540 - DNA, 25 bp, Probe sequence
atggaccaaaattatctttagcact

SEQ ID NO: 209541 - DNA, 25 bp, Probe sequence
atggcattccttttttaggtgcaac

SEQ ID NO: 209542 - DNA, 25 bp, Probe sequence
agcgccaacctatatacctaataaa

SEQ ID NO: 209543 - DNA, 25 bp, Probe sequence
actttatctaattcttactattata

SEQ ID NO: 209544 - DNA, 25 bp, Probe sequence
aatgattctatttgtcctagttgta

SEQ ID NO: 209545 - DNA, 25 bp, Probe sequence
aatgctcgtgtcatttacacacaat

SEQ ID NO: 209546 - DNA, 25 bp, Probe sequence
gcctttactctttaatgcattactt

SEQ ID NO: 209547 - DNA, 25 bp, Probe sequence
gctcgtgtcatttacacacaataca

SEQ ID NO: 209548 - DNA, 25 bp, Probe sequence
gcattccttttttaggtgcaacgtt

SEQ ID NO: 209549 - DNA, 25 bp, Probe sequence
gacctatagcgattattccaatatt

SEQ ID NO: 209550 - DNA, 25 bp, Probe sequence
gagtttttctatggcattccttttt

SEQ ID NO: 209551 - DNA, 25 bp, Probe sequence
gatggcagcctttactctttaatgc

SEQ ID NO: 209552 - DNA, 25 bp, Probe sequence
gattttatttttcctaatgattcta

SEQ ID NO: 209553 - DNA, 25 bp, Probe sequence
gattcattggattttatttttccta

SEQ ID NO: 209554 - DNA, 25 bp, Probe sequence
gtttattttaagttttggatggcag

SEQ ID NO: 209555 - DNA, 25 bp, Probe sequence
ggcagcctttactctttaatgcatt

SEQ ID NO: 209556 - DNA, 25 bp, Probe sequence
tggatggcagcctttactctttaat

SEQ ID NO: 209557 - DNA, 25 bp, Probe sequence
tggtatagtaggtagttttttagct

SEQ ID NO: 209558 - DNA, 25 bp, Probe sequence
tgtgagtttttctatggcattcctt

SEQ ID NO: 209559 - DNA, 25 bp, Probe sequence
tgtcctagttgtattatcagcgcca

SEQ ID NO: 209560 - DNA, 25 bp, Probe sequence
tgcattactttatctaattcttact

SEQ ID NO: 209561 - DNA, 25 bp, Probe sequence
tccccttcttaggaattttgattca

SEQ ID NO: 209562 - DNA, 25 bp, Probe sequence
tacacacaatacaaagatggacata

SEQ ID NO: 209563 - DNA, 25 bp, Probe sequence
tactttgtgagtttttctatggcat

SEQ ID NO: 209564 - DNA, 25 bp, Probe sequence
taggtatctttttaatactttgtga

SEQ ID NO: 209565 - DNA, 25 bp, Probe sequence
tttcctaatgattctatttgtccta

SEQ ID NO: 209566 - DNA, 25 bp, Probe sequence
ttgtattatcagcgccaacctatat

SEQ ID NO: 209567 - DNA, 25 bp, Probe sequence
ttttctatggcattccttttttagg

SEQ ID NO: 209568 - DNA, 25 bp, Probe sequence
attcacaacagtcaatcgccgagat

SEQ ID NO: 209569 - DNA, 25 bp, Probe sequence
attagaagaagatatgcaccaacca

SEQ ID NO: 209570 - DNA, 25 bp, Probe sequence
agaagcccgtacaagattagaagaa

SEQ ID NO: 209571 - DNA, 25 bp, Probe sequence
agacgaccatcatcatttgttttta

SEQ ID NO: 209572 - DNA, 25 bp, Probe sequence
accaaatatcattccttatcacaaa

SEQ ID NO: 209573 - DNA, 25 bp, Probe sequence
aaatacttcagttctcatgtagatt

SEQ ID NO: 209574 - DNA, 25 bp, Probe sequence
aagggttttatcgtgctttcagcaa

SEQ ID NO: 209575 - DNA, 25 bp, Probe sequence
aaggcattcaacaatacaaaccatt

SEQ ID NO: 209576 - DNA, 25 bp, Probe sequence
aatcgccgagattaaatacttcagt

SEQ ID NO: 209577 - DNA, 25 bp, Probe sequence
aatcatattgtcttttgcatacgat

SEQ ID NO: 209578 - DNA, 25 bp, Probe sequence
caacctgacgatgccgtctttaact

SEQ ID NO: 209579 - DNA, 25 bp, Probe sequence
cagttctcatgtagattaccgtttg

SEQ ID NO: 209580 - DNA, 25 bp, Probe sequence
catttgtttttatttgttagcgaag

SEQ ID NO: 209581 - DNA, 25 bp, Probe sequence
ctcatcgaacgatttaatggtctag

SEQ ID NO: 209582 - DNA, 25 bp, Probe sequence
gcgtatgcattgcaatatgcttttg

SEQ ID NO: 209583 - DNA, 25 bp, Probe sequence
gctttcagcaaattacacacaacta

SEQ ID NO: 209584 - DNA, 25 bp, Probe sequence
gcatcatacttatataaacttcctc

SEQ ID NO: 209585 - DNA, 25 bp, Probe sequence
gcaccaaccaaatatcattccttat

SEQ ID NO: 209586 - DNA, 25 bp, Probe sequence
gactattacatagaagcccgtacaa

SEQ ID NO: 209587 - DNA, 25 bp, Probe sequence
gatgtattaataaccgatgcgattg

SEQ ID NO: 209588 - DNA, 25 bp, Probe sequence
gatgcgattgaatcacctggtgtat

SEQ ID NO: 209589 - DNA, 25 bp, Probe sequence
gattaccgtttgaaaggtatcgctt

SEQ ID NO: 209590 - DNA, 25 bp, Probe sequence
gttataacttcactgactattacat

SEQ ID NO: 209591 - DNA, 25 bp, Probe sequence
gtaaaagatcaaacaatccctgaat

SEQ ID NO: 209592 - DNA, 25 bp, Probe sequence
gtggctgacaattatgtattatctg

SEQ ID NO: 209593 - DNA, 25 bp, Probe sequence
ggtctaggtttccatatcaactatg

SEQ ID NO: 209594 - DNA, 25 bp, Probe sequence
ggtatcgctttcgagttgcttgcgt

SEQ ID NO: 209595 - DNA, 25 bp, Probe sequence
tgacgatgccgtctttaacttttct

SEQ ID NO: 209596 - DNA, 25 bp, Probe sequence
tcgagttgcttgcgtatgcattgca

SEQ ID NO: 209597 - DNA, 25 bp, Probe sequence
taaacttcctcaacagtacaatgaa

SEQ ID NO: 209598 - DNA, 25 bp, Probe sequence
tacacacaactacatttaaatatca

SEQ ID NO: 209599 - DNA, 25 bp, Probe sequence
tatcattgatagtttagacgaccat

SEQ ID NO: 209600 - DNA, 25 bp, Probe sequence
tataccttgaaattgattcacaaca

SEQ ID NO: 209601 - DNA, 25 bp, Probe sequence
ttcaaattcgaatcacgtaacgtaa

SEQ ID NO: 209602 - DNA, 25 bp, Probe sequence
attgtcggtcttatttctggtgcat

SEQ ID NO: 209603 - DNA, 25 bp, Probe sequence
attatctttggtttaatcgccatga

SEQ ID NO: 209604 - DNA, 25 bp, Probe sequence
actggtgtagcacttacttcactta

SEQ ID NO: 209605 - DNA, 25 bp, Probe sequence
cacttttacctgctttattctgggg

SEQ ID NO: 209606 - DNA, 25 bp, Probe sequence
acagcacttaatctattgccaggtg

SEQ ID NO: 209607 - DNA, 25 bp, Probe sequence
aacatcacttaaatcaacagcactt

SEQ ID NO: 209608 - DNA, 25 bp, Probe sequence
aatcctactgtaattattgtcggtc

SEQ ID NO: 209609 - DNA, 25 bp, Probe sequence
cacagttacttgttatcgtttcaac

SEQ ID NO: 209610 - DNA, 25 bp, Probe sequence
cttccaatctgtcggtatggcaatt

SEQ ID NO: 209611 - DNA, 25 bp, Probe sequence
cttaatcgcacttttacctgcttta

SEQ ID NO: 209612 - DNA, 25 bp, Probe sequence
gcgaatcagcttaaatctattagtt

SEQ ID NO: 209613 - DNA, 25 bp, Probe sequence
gcggtggaccttacaaccaaattcg

SEQ ID NO: 209614 - DNA, 25 bp, Probe sequence
gctaggcgcactcattgttggatta

SEQ ID NO: 209615 - DNA, 25 bp, Probe sequence
gcaatttcttgatttcttaatcgca

SEQ ID NO: 209616 - DNA, 25 bp, Probe sequence
actatgccagtttctacaggtatgc

SEQ ID NO: 209617 - DNA, 25 bp, Probe sequence
gatgcattgttcttccaatctgtcg

SEQ ID NO: 209618 - DNA, 25 bp, Probe sequence
gatagctgctataattctaggtaat

SEQ ID NO: 209619 - DNA, 25 bp, Probe sequence
gttcatgttctattctcaaccaaaa

SEQ ID NO: 209620 - DNA, 25 bp, Probe sequence
gtttctcattatcacagttacttgt

SEQ ID NO: 209621 - DNA, 25 bp, Probe sequence
gtacttggtgacatctttggtgttg

SEQ ID NO: 209622 - DNA, 25 bp, Probe sequence
gtgtcgttcttattaatgtgttcgt

SEQ ID NO: 209623 - DNA, 25 bp, Probe sequence
gggcgtttggacaagcgaatcagct

SEQ ID NO: 209624 - DNA, 25 bp, Probe sequence
gggaattggtaacttgttcatgttc

SEQ ID NO: 209625 - DNA, 25 bp, Probe sequence
ggtgtagctacaagtttctcattat

SEQ ID NO: 209626 - DNA, 25 bp, Probe sequence
ggtgttggtggaactgatgcattgt

SEQ ID NO: 209627 - DNA, 25 bp, Probe sequence
ggtgaatggtcttcaatgactcaaa

SEQ ID NO: 209628 - DNA, 25 bp, Probe sequence
ggatatgtaggtttcgttgtacttg

SEQ ID NO: 209629 - DNA, 25 bp, Probe sequence
ggcaattggtggctttatcctatcc

SEQ ID NO: 209630 - DNA, 25 bp, Probe sequence
ggctttatcctatccatgaatcata

SEQ ID NO: 209631 - DNA, 25 bp, Probe sequence
tctggtgcattatgggcgtttggac

SEQ ID NO: 209632 - DNA, 25 bp, Probe sequence
taatgtgttcgtcggcggtggacct

SEQ ID NO: 209633 - DNA, 25 bp, Probe sequence
tattctggggaagtgtcgttcttat

SEQ ID NO: 209634 - DNA, 25 bp, Probe sequence
ttcgtggtacgacgctaggcgcact

SEQ ID NO: 209635 - DNA, 25 bp, Probe sequence
ttacttattactggtttcgcaaaat

SEQ ID NO: 209636 - DNA, 25 bp, Probe sequence
atatgattatgttcgtcttcaaggt

SEQ ID NO: 209637 - DNA, 25 bp, Probe sequence
atgattatgttcgtcttcaaggtga

SEQ ID NO: 209638 - DNA, 25 bp, Probe sequence
atgtctttagaaaaccaactagccg

SEQ ID NO: 209639 - DNA, 25 bp, Probe sequence
agccgaacttaaatatgattatgtt

SEQ ID NO: 209640 - DNA, 25 bp, Probe sequence
accaactagccgaacttaaatatga

SEQ ID NO: 209641 - DNA, 25 bp, Probe sequence
acgggaatctttgaatttagatact

SEQ ID NO: 209642 - DNA, 25 bp, Probe sequence
actagccgaacttaaatatgattat

SEQ ID NO: 209643 - DNA, 25 bp, Probe sequence
acttaaatatgattatgttcgtctt

SEQ ID NO: 209644 - DNA, 25 bp, Probe sequence
aaatatgattatgttcgtcttcaag

SEQ ID NO: 209645 - DNA, 25 bp, Probe sequence
aacttaaatatgattatgttcgtct

SEQ ID NO: 209646 - DNA, 25 bp, Probe sequence
aactagccgaacttaaatatgatta

SEQ ID NO: 209647 - DNA, 25 bp, Probe sequence
aaccaactagccgaacttaaatatg

SEQ ID NO: 209648 - DNA, 25 bp, Probe sequence
aatctttgaatttagatacttccgc

SEQ ID NO: 209649 - DNA, 25 bp, Probe sequence
aatatgattatgttcgtcttcaagg

SEQ ID NO: 209650 - DNA, 25 bp, Probe sequence
caactagccgaacttaaatatgatt

SEQ ID NO: 209651 - DNA, 25 bp, Probe sequence
cttgttcgtcaacttaaagatattg

SEQ ID NO: 209652 - DNA, 25 bp, Probe sequence
cttaaatatgattatgttcgtcttc

SEQ ID NO: 209653 - DNA, 25 bp, Probe sequence
ctagccgaacttaaatatgattatg

SEQ ID NO: 209654 - DNA, 25 bp, Probe sequence
cgggaatctttgaatttagatactt

SEQ ID NO: 209655 - DNA, 25 bp, Probe sequence
ccaactagccgaacttaaatatgat

SEQ ID NO: 209656 - DNA, 25 bp, Probe sequence
gccgaacttaaatatgattatgttc

SEQ ID NO: 209657 - DNA, 25 bp, Probe sequence
gaatctttgaatttagatacttccg

SEQ ID NO: 209658 - DNA, 25 bp, Probe sequence
gaacttaaatatgattatgttcgtc

SEQ ID NO: 209659 - DNA, 25 bp, Probe sequence
gttcgtcaacttaaagatattgaaa

SEQ ID NO: 209660 - DNA, 25 bp, Probe sequence
gggaatctttgaatttagatacttc

SEQ ID NO: 209661 - DNA, 25 bp, Probe sequence
tgtctttagaaaaccaactagccga

SEQ ID NO: 209662 - DNA, 25 bp, Probe sequence
ggaatctttgaatttagatacttcc

SEQ ID NO: 209663 - DNA, 25 bp, Probe sequence
tgattatgttcgtcttcaaggtgac

SEQ ID NO: 209664 - DNA, 25 bp, Probe sequence
tgttcgtcaacttaaagatattgaa

SEQ ID NO: 209665 - DNA, 25 bp, Probe sequence
taaatatgattatgttcgtcttcaa

SEQ ID NO: 209666 - DNA, 25 bp, Probe sequence
tagccgaacttaaatatgattatgt

SEQ ID NO: 209667 - DNA, 25 bp, Probe sequence
tatgattatgttcgtcttcaaggtg

SEQ ID NO: 209668 - DNA, 25 bp, Probe sequence
ttaaatatgattatgttcgtcttca

SEQ ID NO: 209669 - DNA, 25 bp, Probe sequence
ttgttcgtcaacttaaagatattga

SEQ ID NO: 209670 - DNA, 25 bp, Probe sequence
attttgagaattattatgggtgtgt

SEQ ID NO: 209671 - DNA, 25 bp, Probe sequence
attttactagcaatactttatctaa

SEQ ID NO: 209672 - DNA, 25 bp, Probe sequence
attttatctgattttactagcaata

SEQ ID NO: 209673 - DNA, 25 bp, Probe sequence
atctgattttactagcaatacttta

SEQ ID NO: 209674 - DNA, 25 bp, Probe sequence
atgcaattttatctgattttactag

SEQ ID NO: 209675 - DNA, 25 bp, Probe sequence
agaattattatgggtgtgttgttat

SEQ ID NO: 209676 - DNA, 25 bp, Probe sequence
agcaatactttatctaattgttagt

SEQ ID NO: 209677 - DNA, 25 bp, Probe sequence
actagcaatactttatctaattgtt

SEQ ID NO: 209678 - DNA, 25 bp, Probe sequence
aattttatctgattttactagcaat

SEQ ID NO: 209679 - DNA, 25 bp, Probe sequence
caatactttatctaattgttagttt

SEQ ID NO: 209680 - DNA, 25 bp, Probe sequence
ctagcaatactttatctaattgtta

SEQ ID NO: 209681 - DNA, 25 bp, Probe sequence
ctgattttactagcaatactttatc

SEQ ID NO: 209682 - DNA, 25 bp, Probe sequence
gcaatactttatctaattgttagtt

SEQ ID NO: 209683 - DNA, 25 bp, Probe sequence
gaattattatgggtgtgttgttatt

SEQ ID NO: 209684 - DNA, 25 bp, Probe sequence
gagaattattatgggtgtgttgtta

SEQ ID NO: 209685 - DNA, 25 bp, Probe sequence
gattttactagcaatactttatcta

SEQ ID NO: 209686 - DNA, 25 bp, Probe sequence
tgattttactagcaatactttatct

SEQ ID NO: 209687 - DNA, 25 bp, Probe sequence
tgagaattattatgggtgtgttgtt

SEQ ID NO: 209688 - DNA, 25 bp, Probe sequence
tctgattttactagcaatactttat

SEQ ID NO: 209689 - DNA, 25 bp, Probe sequence
tactagcaatactttatctaattgt

SEQ ID NO: 209690 - DNA, 25 bp, Probe sequence
tactttatctaattgttagttttat

SEQ ID NO: 209691 - DNA, 25 bp, Probe sequence
tagcaatactttatctaattgttag

SEQ ID NO: 209692 - DNA, 25 bp, Probe sequence
tatctgattttactagcaatacttt

SEQ ID NO: 209693 - DNA, 25 bp, Probe sequence
tttgagaattattatgggtgtgttg

SEQ ID NO: 209694 - DNA, 25 bp, Probe sequence
tttactagcaatactttatctaatt

SEQ ID NO: 209695 - DNA, 25 bp, Probe sequence
tttatctgattttactagcaatact

SEQ ID NO: 209696 - DNA, 25 bp, Probe sequence
ttttactagcaatactttatctaat

SEQ ID NO: 209697 - DNA, 25 bp, Probe sequence
ttttatctgattttactagcaatac

SEQ ID NO: 209698 - DNA, 25 bp, Probe sequence
ttttgagaattattatgggtgtgtt

SEQ ID NO: 209699 - DNA, 25 bp, Probe sequence
ttatctaattgttagttttattagt

SEQ ID NO: 209700 - DNA, 25 bp, Probe sequence
ttatctgattttactagcaatactt

SEQ ID NO: 209701 - DNA, 25 bp, Probe sequence
ttactagcaatactttatctaattg

SEQ ID NO: 209702 - DNA, 25 bp, Probe sequence
ttaaaatggaagttgtatttactcg

SEQ ID NO: 209703 - DNA, 25 bp, Probe sequence
ttgagaattattatgggtgtgttgt

SEQ ID NO: 209704 - DNA, 25 bp, Probe sequence
ttaactttaacacctaaagggcatg

SEQ ID NO: 209705 - DNA, 25 bp, Probe sequence
atagttttataacaatatatcgccc

SEQ ID NO: 209706 - DNA, 25 bp, Probe sequence
atcttacgcgatatcgctaaacatc

SEQ ID NO: 209707 - DNA, 25 bp, Probe sequence
atgctatcacaagaatttttcaata

SEQ ID NO: 209708 - DNA, 25 bp, Probe sequence
atgagattgtttgtcttgatgtaca

SEQ ID NO: 209709 - DNA, 25 bp, Probe sequence
atggttaatcttacgcgatatcgct

SEQ ID NO: 209710 - DNA, 25 bp, Probe sequence
agacgtgcaattgaaaagcctactg

SEQ ID NO: 209711 - DNA, 25 bp, Probe sequence
agcagtagttgccaaaacaaacatt

SEQ ID NO: 209712 - DNA, 25 bp, Probe sequence
agctccaacaagcagtagttgccaa

SEQ ID NO: 209713 - DNA, 25 bp, Probe sequence
acaaaagctccaacaagcagtagtt

SEQ ID NO: 209714 - DNA, 25 bp, Probe sequence
aaagctccaacaagcagtagttgcc

SEQ ID NO: 209715 - DNA, 25 bp, Probe sequence
aacacctaaagggcatgaattatat

SEQ ID NO: 209716 - DNA, 25 bp, Probe sequence
aagctctaatagaaaatgaccttat

SEQ ID NO: 209717 - DNA, 25 bp, Probe sequence
aagggcatgaattatatgagattgt

SEQ ID NO: 209718 - DNA, 25 bp, Probe sequence
aatgcaagaaaccataaatgtgatg

SEQ ID NO: 209719 - DNA, 25 bp, Probe sequence
caatggttaatcttacgcgatatcg

SEQ ID NO: 209720 - DNA, 25 bp, Probe sequence
cacaagaatttttcaatagttttat

SEQ ID NO: 209721 - DNA, 25 bp, Probe sequence
cagtagttgccaaaacaaacatttc

SEQ ID NO: 209722 - DNA, 25 bp, Probe sequence
gctccaacaagcagtagttgccaaa

SEQ ID NO: 209723 - DNA, 25 bp, Probe sequence
gcaattgaaaagcctactgcaagaa

SEQ ID NO: 209724 - DNA, 25 bp, Probe sequence
gaaaagcctactgcaagaaaaactt

SEQ ID NO: 209725 - DNA, 25 bp, Probe sequence
gaaaccataaatgtgatgaatcaaa

SEQ ID NO: 209726 - DNA, 25 bp, Probe sequence
gaaatttcacatagacgtgcaattg

SEQ ID NO: 209727 - DNA, 25 bp, Probe sequence
gacgtgcaattgaaaagcctactgc

SEQ ID NO: 209728 - DNA, 25 bp, Probe sequence
gatgtacaaaagctccaacaagcag

SEQ ID NO: 209729 - DNA, 25 bp, Probe sequence
gtacaaaagctccaacaagcagtag

SEQ ID NO: 209730 - DNA, 25 bp, Probe sequence
gtcttgatgtacaaaagctccaaca

SEQ ID NO: 209731 - DNA, 25 bp, Probe sequence
ggttaatcttacgcgatatcgctaa

SEQ ID NO: 209732 - DNA, 25 bp, Probe sequence
tggttaatcttacgcgatatcgcta

SEQ ID NO: 209733 - DNA, 25 bp, Probe sequence
tccaacaagcagtagttgccaaaac

SEQ ID NO: 209734 - DNA, 25 bp, Probe sequence
tcttacgcgatatcgctaaacatca

SEQ ID NO: 209735 - DNA, 25 bp, Probe sequence
taatagaaaatgaccttataacagt

SEQ ID NO: 209736 - DNA, 25 bp, Probe sequence
taatcttacgcgatatcgctaaaca

SEQ ID NO: 209737 - DNA, 25 bp, Probe sequence
ttgatgtacaaaagctccaacaagc

SEQ ID NO: 209738 - DNA, 25 bp, Probe sequence
attgcagcgatggctggtgctggac

SEQ ID NO: 209739 - DNA, 25 bp, Probe sequence
aggtgcattgccagttggtttccta

SEQ ID NO: 209740 - DNA, 25 bp, Probe sequence
aggtgcttggattacgcaacttata

SEQ ID NO: 209741 - DNA, 25 bp, Probe sequence
acgccgactattgcattgttgattg

SEQ ID NO: 209742 - DNA, 25 bp, Probe sequence
aactatctttatctttatgccatta

SEQ ID NO: 209743 - DNA, 25 bp, Probe sequence
caattgccaatatctttataccgtt

SEQ ID NO: 209744 - DNA, 25 bp, Probe sequence
cattaatctatggtgtgactttgcc

SEQ ID NO: 209745 - DNA, 25 bp, Probe sequence
gccattagcaggttttgtttcagac

SEQ ID NO: 209746 - DNA, 25 bp, Probe sequence
gctggtggattcgtttgtacatatt

SEQ ID NO: 209747 - DNA, 25 bp, Probe sequence
gcaagcttcctaccgttagttatgt

SEQ ID NO: 209748 - DNA, 25 bp, Probe sequence
gcaataggcccaagtggtgtgtcac

SEQ ID NO: 209749 - DNA, 25 bp, Probe sequence
gacttggtggcgtgattggtggtac

SEQ ID NO: 209750 - DNA, 25 bp, Probe sequence
gactttgccattaggtcgacctttc

SEQ ID NO: 209751 - DNA, 25 bp, Probe sequence
gagtaacttaatggtggcaggctat

SEQ ID NO: 209752 - DNA, 25 bp, Probe sequence
gatgcgacagacagatttgttgggt

SEQ ID NO: 209753 - DNA, 25 bp, Probe sequence
gatattattgtaacgccgactattg

SEQ ID NO: 209754 - DNA, 25 bp, Probe sequence
gattcctgcatttattggagctgga

SEQ ID NO: 209755 - DNA, 25 bp, Probe sequence
gttggacctggtacagtcaataaag

SEQ ID NO: 209756 - DNA, 25 bp, Probe sequence
gttagggcttcatcatatttttacg

SEQ ID NO: 209757 - DNA, 25 bp, Probe sequence
gtttcagacagtttagtttcagtag

SEQ ID NO: 209758 - DNA, 25 bp, Probe sequence
gtgctacttacttattgccaattgc

SEQ ID NO: 209759 - DNA, 25 bp, Probe sequence
ggtgccgcattagcactttgggtaa

SEQ ID NO: 209760 - DNA, 25 bp, Probe sequence
ggtggtattgcagcagtactgagta

SEQ ID NO: 209761 - DNA, 25 bp, Probe sequence
ggtggtattggtggcgctgtaatag

SEQ ID NO: 209762 - DNA, 25 bp, Probe sequence
ggtgctggacaagtaggtgccgcat

SEQ ID NO: 209763 - DNA, 25 bp, Probe sequence
ggagaaccattgcaacctggacaag

SEQ ID NO: 209764 - DNA, 25 bp, Probe sequence
ggaacgacaaaggcgatgcgacaga

SEQ ID NO: 209765 - DNA, 25 bp, Probe sequence
ggcaggctatatttcaggtgcttgg

SEQ ID NO: 209766 - DNA, 25 bp, Probe sequence
tggtggcgtatttagtggatttatc

SEQ ID NO: 209767 - DNA, 25 bp, Probe sequence
tcgacctttcttaactgcttgtatt

SEQ ID NO: 209768 - DNA, 25 bp, Probe sequence
taaactaggtgacccaataccacac

SEQ ID NO: 209769 - DNA, 25 bp, Probe sequence
tattgctgcagtaggtggtatggat

SEQ ID NO: 209770 - DNA, 25 bp, Probe sequence
tttgccgtttggattttaagtattg

SEQ ID NO: 209771 - DNA, 25 bp, Probe sequence
tttataccgttgattcctgcattta

SEQ ID NO: 209772 - DNA, 25 bp, Probe sequence
attatcacgcaattactttatttta

SEQ ID NO: 209773 - DNA, 25 bp, Probe sequence
agtaagcaagctttcgacgcttccg

SEQ ID NO: 209774 - DNA, 25 bp, Probe sequence
agcatcgttaattactagacctatt

SEQ ID NO: 209775 - DNA, 25 bp, Probe sequence
acctatgcatgtatttgttacttgt

SEQ ID NO: 209776 - DNA, 25 bp, Probe sequence
aatctattgcgataaaagtctcacc

SEQ ID NO: 209777 - DNA, 25 bp, Probe sequence
aatattacttgctggtgcttgccta

SEQ ID NO: 209778 - DNA, 25 bp, Probe sequence
caaaagaggccattcctgttgctgt

SEQ ID NO: 209779 - DNA, 25 bp, Probe sequence
tcgacgcttccgattcattagccgg

SEQ ID NO: 209780 - DNA, 25 bp, Probe sequence
gctatttctttatttgctatgctat

SEQ ID NO: 209781 - DNA, 25 bp, Probe sequence
gcttttttaatctttgtacgtctca

SEQ ID NO: 209782 - DNA, 25 bp, Probe sequence
gcatacgttacccctgttaatagaa

SEQ ID NO: 209783 - DNA, 25 bp, Probe sequence
gaaatttatcatctgcaatgcaatc

SEQ ID NO: 209784 - DNA, 25 bp, Probe sequence
gattcattagccggattagttgtag

SEQ ID NO: 209785 - DNA, 25 bp, Probe sequence
gttacttgtagttattgctggctat

SEQ ID NO: 209786 - DNA, 25 bp, Probe sequence
gtactattgcggcatacgttacccc

SEQ ID NO: 209787 - DNA, 25 bp, Probe sequence
gtgacaactgcaacaggtactattg

SEQ ID NO: 209788 - DNA, 25 bp, Probe sequence
gggttatttactcatatgttttcat

SEQ ID NO: 209789 - DNA, 25 bp, Probe sequence
ggtatcgcgacatctactttttacg

SEQ ID NO: 209790 - DNA, 25 bp, Probe sequence
ggacgtcatgtaactagaaatgcca

SEQ ID NO: 209791 - DNA, 25 bp, Probe sequence
ggcccatttctaggcatgttactta

SEQ ID NO: 209792 - DNA, 25 bp, Probe sequence
tcggtccatcattccttgggttatt

SEQ ID NO: 209793 - DNA, 25 bp, Probe sequence
tctagatgcaggtgtcggcttcggt

SEQ ID NO: 209794 - DNA, 25 bp, Probe sequence
tcattactatgcttgtttacttctt

SEQ ID NO: 209795 - DNA, 25 bp, Probe sequence
taattggtcgatttgctacaggtaa

SEQ ID NO: 209796 - DNA, 25 bp, Probe sequence
taaatcacctattttcaccaaaagt

SEQ ID NO: 209797 - DNA, 25 bp, Probe sequence
tactttttacgttggtctagatgca

SEQ ID NO: 209798 - DNA, 25 bp, Probe sequence
tagacctattgctggtagattgatg

SEQ ID NO: 209799 - DNA, 25 bp, Probe sequence
taggtacagcgattggcccatttct

SEQ ID NO: 209800 - DNA, 25 bp, Probe sequence
tatggccgctttagcaatcattact

SEQ ID NO: 209801 - DNA, 25 bp, Probe sequence
tattgatggatctttagctttttta

SEQ ID NO: 209802 - DNA, 25 bp, Probe sequence
ttttaattggcgttacctatgcgtc

SEQ ID NO: 209803 - DNA, 25 bp, Probe sequence
ttatcatgcttttcctttcatttgt

SEQ ID NO: 209804 - DNA, 25 bp, Probe sequence
ttacttcttaattcatggacgtcat

SEQ ID NO: 209805 - DNA, 25 bp, Probe sequence
ttgctggtgcttgcctaggtttagg

SEQ ID NO: 209806 - DNA, 25 bp, Probe sequence
attatgtcattcactcaacggaaaa

SEQ ID NO: 209807 - DNA, 25 bp, Probe sequence
atatgttgccaaaatagatagtaaa

SEQ ID NO: 209808 - DNA, 25 bp, Probe sequence
atctaaattatgtcattcactcaac

SEQ ID NO: 209809 - DNA, 25 bp, Probe sequence
atgcttttttcattattcgttgaaa

SEQ ID NO: 209810 - DNA, 25 bp, Probe sequence
atgataccaggtgtgaatgcgccac

SEQ ID NO: 209811 - DNA, 25 bp, Probe sequence
aggtgtgaatgcgccacctatgcat

SEQ ID NO: 209812 - DNA, 25 bp, Probe sequence
agtgccacatgttggcaattggtga

SEQ ID NO: 209813 - DNA, 25 bp, Probe sequence
agaagtaccacagtgccacatgttg

SEQ ID NO: 209814 - DNA, 25 bp, Probe sequence
accacagtgccacatgttggcaatt

SEQ ID NO: 209815 - DNA, 25 bp, Probe sequence
acctatgcatccttggtgtagaagt

SEQ ID NO: 209816 - DNA, 25 bp, Probe sequence
aaattatgtcattcactcaacggaa

SEQ ID NO: 209817 - DNA, 25 bp, Probe sequence
aacatctaaattatgtcattcactc

SEQ ID NO: 209818 - DNA, 25 bp, Probe sequence
aagaacttggtgaagatgacgaata

SEQ ID NO: 209819 - DNA, 25 bp, Probe sequence
aagtaccacagtgccacatgttggc

SEQ ID NO: 209820 - DNA, 25 bp, Probe sequence
cacagtgccacatgttggcaattgg

SEQ ID NO: 209821 - DNA, 25 bp, Probe sequence
ctaaattatgtcattcactcaacgg

SEQ ID NO: 209822 - DNA, 25 bp, Probe sequence
cgccacctatgcatccttggtgtag

SEQ ID NO: 209823 - DNA, 25 bp, Probe sequence
ccaggtgtgaatgcgccacctatgc

SEQ ID NO: 209824 - DNA, 25 bp, Probe sequence
gccacctatgcatccttggtgtaga

SEQ ID NO: 209825 - DNA, 25 bp, Probe sequence
gcatccttggtgtagaagtaccaca

SEQ ID NO: 209826 - DNA, 25 bp, Probe sequence
gaagtaccacagtgccacatgttgg

SEQ ID NO: 209827 - DNA, 25 bp, Probe sequence
gaagagtcacaaaagttaacatatt

SEQ ID NO: 209828 - DNA, 25 bp, Probe sequence
gagtcacaaaagttaacatatttaa

SEQ ID NO: 209829 - DNA, 25 bp, Probe sequence
gatgacgaatataaatatgttgcca

SEQ ID NO: 209830 - DNA, 25 bp, Probe sequence
gataccaggtgtgaatgcgccacct

SEQ ID NO: 209831 - DNA, 25 bp, Probe sequence
gttaaagatatgataccaggtgtga

SEQ ID NO: 209832 - DNA, 25 bp, Probe sequence
gtagaagtaccacagtgccacatgt

SEQ ID NO: 209833 - DNA, 25 bp, Probe sequence
gtaccacagtgccacatgttggcaa

SEQ ID NO: 209834 - DNA, 25 bp, Probe sequence
gtcattcactcaacggaaaaatatt

SEQ ID NO: 209835 - DNA, 25 bp, Probe sequence
gtgtagaagtaccacagtgccacat

SEQ ID NO: 209836 - DNA, 25 bp, Probe sequence
ggtgtagaagtaccacagtgccaca

SEQ ID NO: 209837 - DNA, 25 bp, Probe sequence
taccaggtgtgaatgcgccacctat

SEQ ID NO: 209838 - DNA, 25 bp, Probe sequence
tatgtcattcactcaacggaaaaat

SEQ ID NO: 209839 - DNA, 25 bp, Probe sequence
tatgcatccttggtgtagaagtacc

SEQ ID NO: 209840 - DNA, 25 bp, Probe sequence
attatgtagtgattcttaagagtgg

SEQ ID NO: 209841 - DNA, 25 bp, Probe sequence
atatcttttggacaacttgttgttt

SEQ ID NO: 209842 - DNA, 25 bp, Probe sequence
atatattacaactcaatggcatgga

SEQ ID NO: 209843 - DNA, 25 bp, Probe sequence
atgtagtgattcttaagagtgggat

SEQ ID NO: 209844 - DNA, 25 bp, Probe sequence
atggcatggagtgtgacatcaatgt

SEQ ID NO: 209845 - DNA, 25 bp, Probe sequence
agatttatatcttttggacaacttg

SEQ ID NO: 209846 - DNA, 25 bp, Probe sequence
acaactcaatggcatggagtgtgac

SEQ ID NO: 209847 - DNA, 25 bp, Probe sequence
aagatatattacaactcaatggcat

SEQ ID NO: 209848 - DNA, 25 bp, Probe sequence
aatggcatggagtgtgacatcaatg

SEQ ID NO: 209849 - DNA, 25 bp, Probe sequence
ctcaatggcatggagtgtgacatca

SEQ ID NO: 209850 - DNA, 25 bp, Probe sequence
gcatggagtgtgacatcaatgttaa

SEQ ID NO: 209851 - DNA, 25 bp, Probe sequence
gaaccactaaagatttattatgtag

SEQ ID NO: 209852 - DNA, 25 bp, Probe sequence
gacaacttgttgtttattcgacaac

SEQ ID NO: 209853 - DNA, 25 bp, Probe sequence
gacatcaatgttaaagaaccactaa

SEQ ID NO: 209854 - DNA, 25 bp, Probe sequence
gagtgggatagaaatgatattctca

SEQ ID NO: 209855 - DNA, 25 bp, Probe sequence
gatatattacaactcaatggcatgg

SEQ ID NO: 209856 - DNA, 25 bp, Probe sequence
gatttatatcttttggacaacttgt

SEQ ID NO: 209857 - DNA, 25 bp, Probe sequence
gtttattcgacaacatttataccta

SEQ ID NO: 209858 - DNA, 25 bp, Probe sequence
gtagtgattcttaagagtgggatag

SEQ ID NO: 209859 - DNA, 25 bp, Probe sequence
gtgacatcaatgttaaagaaccact

SEQ ID NO: 209860 - DNA, 25 bp, Probe sequence
ggacaacttgttgtttattcgacaa

SEQ ID NO: 209861 - DNA, 25 bp, Probe sequence
ggcatggagtgtgacatcaatgtta

SEQ ID NO: 209862 - DNA, 25 bp, Probe sequence
tggcatggagtgtgacatcaatgtt

SEQ ID NO: 209863 - DNA, 25 bp, Probe sequence
tcgacaacatttatacctaaaaaag

SEQ ID NO: 209864 - DNA, 25 bp, Probe sequence
tcaatggcatggagtgtgacatcaa

SEQ ID NO: 209865 - DNA, 25 bp, Probe sequence
tcaatgttaaagaaccactaaagat

SEQ ID NO: 209866 - DNA, 25 bp, Probe sequence
tagtgattcttaagagtgggataga

SEQ ID NO: 209867 - DNA, 25 bp, Probe sequence
tatatcttttggacaacttgttgtt

SEQ ID NO: 209868 - DNA, 25 bp, Probe sequence
tattacaactcaatggcatggagtg

SEQ ID NO: 209869 - DNA, 25 bp, Probe sequence
tattcgacaacatttatacctaaaa

SEQ ID NO: 209870 - DNA, 25 bp, Probe sequence
tttattcgacaacatttatacctaa

SEQ ID NO: 209871 - DNA, 25 bp, Probe sequence
tttatatcttttggacaacttgttg

SEQ ID NO: 209872 - DNA, 25 bp, Probe sequence
tttattatgtagtgattcttaagag

SEQ ID NO: 209873 - DNA, 25 bp, Probe sequence
ttattcgacaacatttatacctaaa

SEQ ID NO: 209874 - DNA, 25 bp, Probe sequence
attggcgaaacctaccttgaaagca

SEQ ID NO: 209875 - DNA, 25 bp, Probe sequence
atattaatcaacaaggccacgccaa

SEQ ID NO: 209876 - DNA, 25 bp, Probe sequence
ataacaccaataccaaaggcaatgt

SEQ ID NO: 209877 - DNA, 25 bp, Probe sequence
agcaagtctggcggtaaatctggag

SEQ ID NO: 209878 - DNA, 25 bp, Probe sequence
acgccaaaatggtcgatgtatcaga

SEQ ID NO: 209879 - DNA, 25 bp, Probe sequence
aacctaccttgaaagcaagtctggc

SEQ ID NO: 209880 - DNA, 25 bp, Probe sequence
aaatcgctggtattatggctgccaa

SEQ ID NO: 209881 - DNA, 25 bp, Probe sequence
aaatctggagattttcaacgccaat

SEQ ID NO: 209882 - DNA, 25 bp, Probe sequence
aaaaagaactgctgtcgctcattca

SEQ ID NO: 209883 - DNA, 25 bp, Probe sequence
aactggcaaaaccggtgttgaaatg

SEQ ID NO: 209884 - DNA, 25 bp, Probe sequence
aaggcaatgtattgaacactgctca

SEQ ID NO: 209885 - DNA, 25 bp, Probe sequence
aaggccacgccaaaatggtcgatgt

SEQ ID NO: 209886 - DNA, 25 bp, Probe sequence
caaacaactgtctctacaactggca

SEQ ID NO: 209887 - DNA, 25 bp, Probe sequence
catccattaccattgactggcatag

SEQ ID NO: 209888 - DNA, 25 bp, Probe sequence
ctgtctctacaactggcaaaaccgg

SEQ ID NO: 209889 - DNA, 25 bp, Probe sequence
ctgagtttactcatattaatcaaca

SEQ ID NO: 209890 - DNA, 25 bp, Probe sequence
gctgtcgctcattcaagcattactg

SEQ ID NO: 209891 - DNA, 25 bp, Probe sequence
gctgcatcagcaacggctttaacca

SEQ ID NO: 209892 - DNA, 25 bp, Probe sequence
gcagatttctaataacaccaatacc

SEQ ID NO: 209893 - DNA, 25 bp, Probe sequence
gcaacggctttaaccatttacgaca

SEQ ID NO: 209894 - DNA, 25 bp, Probe sequence
gaactgctgtcgctcattcaagcat

SEQ ID NO: 209895 - DNA, 25 bp, Probe sequence
gaacactgctcaaatcgctggtatt

SEQ ID NO: 209896 - DNA, 25 bp, Probe sequence
gaaacaaatgcacccctttatactt

SEQ ID NO: 209897 - DNA, 25 bp, Probe sequence
gaaatggaagctttaaccgctgcat

SEQ ID NO: 209898 - DNA, 25 bp, Probe sequence
gtatgattattggcgaaacctacct

SEQ ID NO: 209899 - DNA, 25 bp, Probe sequence
gggatgaaacaaatgcaccccttta

SEQ ID NO: 209900 - DNA, 25 bp, Probe sequence
ggctttaaccatttacgacatgacg

SEQ ID NO: 209901 - DNA, 25 bp, Probe sequence
tggaagctttaaccgctgcatcagc

SEQ ID NO: 209902 - DNA, 25 bp, Probe sequence
tgcacccctttatactttaaacatt

SEQ ID NO: 209903 - DNA, 25 bp, Probe sequence
taaccgctgcatcagcaacggcttt

SEQ ID NO: 209904 - DNA, 25 bp, Probe sequence
taaacattcaaacaactgtctctac

SEQ ID NO: 209905 - DNA, 25 bp, Probe sequence
tacgacatgacgaaagcagttgata

SEQ ID NO: 209906 - DNA, 25 bp, Probe sequence
tatggctgccaaaaatacatcaaca

SEQ ID NO: 209907 - DNA, 25 bp, Probe sequence
ttgactggcatagatgttcacttca

SEQ ID NO: 209908 - DNA, 25 bp, Probe sequence
attcgaaatggtggctttaatatat

SEQ ID NO: 209909 - DNA, 25 bp, Probe sequence
atacaacagatcaatatgtgacaga

SEQ ID NO: 209910 - DNA, 25 bp, Probe sequence
atcgctttcaatattccacaaaacg

SEQ ID NO: 209911 - DNA, 25 bp, Probe sequence
atgtgacagaatttccacttacaat

SEQ ID NO: 209912 - DNA, 25 bp, Probe sequence
aggtcaaccaattgttagatatgaa

SEQ ID NO: 209913 - DNA, 25 bp, Probe sequence
aaattattcaatacaacagatcaat

SEQ ID NO: 209914 - DNA, 25 bp, Probe sequence
aaagatttaggcgatcgctttcaat

SEQ ID NO: 209915 - DNA, 25 bp, Probe sequence
aacgcttgctgtaaccttagctaat

SEQ ID NO: 209916 - DNA, 25 bp, Probe sequence
aagatgtatctttaggtcaaccaat

SEQ ID NO: 209917 - DNA, 25 bp, Probe sequence
caaaccttgaggagttagtcattgg

SEQ ID NO: 209918 - DNA, 25 bp, Probe sequence
caaaacgaatgattgcatcttgttg

SEQ ID NO: 209919 - DNA, 25 bp, Probe sequence
cagcgacatattactgtccgagata

SEQ ID NO: 209920 - DNA, 25 bp, Probe sequence
cgacaacgcttgctgtaaccttagc

SEQ ID NO: 209921 - DNA, 25 bp, Probe sequence
gctaatgacctaaatattacggcag

SEQ ID NO: 209922 - DNA, 25 bp, Probe sequence
gcagtccaacaaaccttgaggagtt

SEQ ID NO: 209923 - DNA, 25 bp, Probe sequence
gaatttccacttacaattatggtga

SEQ ID NO: 209924 - DNA, 25 bp, Probe sequence
gaatggtgaagaatttgcgactgtt

SEQ ID NO: 209925 - DNA, 25 bp, Probe sequence
gaagaatttgcgactgttatatgca

SEQ ID NO: 209926 - DNA, 25 bp, Probe sequence
gacataacgctctagataaattata

SEQ ID NO: 209927 - DNA, 25 bp, Probe sequence
gagtcgtgagttttattttcaaaat

SEQ ID NO: 209928 - DNA, 25 bp, Probe sequence
gtatctttaggtcaaccaattgtta

SEQ ID NO: 209929 - DNA, 25 bp, Probe sequence
gttatatgcagtccaacaaaccttg

SEQ ID NO: 209930 - DNA, 25 bp, Probe sequence
gtcatatttaccaagaaacaggtgg

SEQ ID NO: 209931 - DNA, 25 bp, Probe sequence
gtggacgtatttcatcagaaatttt

SEQ ID NO: 209932 - DNA, 25 bp, Probe sequence
ggtgttggcgtcattttatctaaat

SEQ ID NO: 209933 - DNA, 25 bp, Probe sequence
ggtgccattttaaagcgagatgaat

SEQ ID NO: 209934 - DNA, 25 bp, Probe sequence
ggtttgacattttttgtacatcgac

SEQ ID NO: 209935 - DNA, 25 bp, Probe sequence
ggagttagtcattggatttctggct

SEQ ID NO: 209936 - DNA, 25 bp, Probe sequence
tgctgtaaccttagctaatgaccta

SEQ ID NO: 209937 - DNA, 25 bp, Probe sequence
tctggcttcggaaggtgccatttta

SEQ ID NO: 209938 - DNA, 25 bp, Probe sequence
taagcgatggtttgacattttttgt

SEQ ID NO: 209939 - DNA, 25 bp, Probe sequence
tagtcattggatttctggcttcgga

SEQ ID NO: 209940 - DNA, 25 bp, Probe sequence
tttttgtacatcgacaagacattgg

SEQ ID NO: 209941 - DNA, 25 bp, Probe sequence
ttggatttctggcttcggaaggtgc

SEQ ID NO: 209942 - DNA, 25 bp, Probe sequence
agttgcacgtcgtcgtaaagcacgt

SEQ ID NO: 209943 - DNA, 25 bp, Probe sequence
aaatcatcctgaggcattagcttta

SEQ ID NO: 209944 - DNA, 25 bp, Probe sequence
aagttaatcacagtacatcacccta

SEQ ID NO: 209945 - DNA, 25 bp, Probe sequence
aatgagttatggtagacaaattcta

SEQ ID NO: 209946 - DNA, 25 bp, Probe sequence
aatcacagtacatcaccctattgtt

SEQ ID NO: 209947 - DNA, 25 bp, Probe sequence
aattaatgattgtagtggcggcgga

SEQ ID NO: 209948 - DNA, 25 bp, Probe sequence
cacagtacatcaccctattgtttaa

SEQ ID NO: 209949 - DNA, 25 bp, Probe sequence
cgtcgtcgtaaagcacgtggtttga

SEQ ID NO: 209950 - DNA, 25 bp, Probe sequence
gcggaagttgcacgtcgtcgtaaag

SEQ ID NO: 209951 - DNA, 25 bp, Probe sequence
gcattagctttaatcagcgatgaat

SEQ ID NO: 209952 - DNA, 25 bp, Probe sequence
gcattttacacaacgagagcaagac

SEQ ID NO: 209953 - DNA, 25 bp, Probe sequence
gcacgcgatggtaagaccgttgcag

SEQ ID NO: 209954 - DNA, 25 bp, Probe sequence
gaagttgcacgtcgtcgtaaagcac

SEQ ID NO: 209955 - DNA, 25 bp, Probe sequence
gaaggtgcacgcgatggtaagaccg

SEQ ID NO: 209956 - DNA, 25 bp, Probe sequence
gaagatgtcatggatggtgtcgaac

SEQ ID NO: 209957 - DNA, 25 bp, Probe sequence
gaacacatgattacagatatcgaaa

SEQ ID NO: 209958 - DNA, 25 bp, Probe sequence
gaaactaaatcatcctgaggcatta

SEQ ID NO: 209959 - DNA, 25 bp, Probe sequence
gaccgttgcagagttaatgagttat

SEQ ID NO: 209960 - DNA, 25 bp, Probe sequence
gaggcattagctttaatcagcgatg

SEQ ID NO: 209961 - DNA, 25 bp, Probe sequence
gatgtcatggatggtgtcgaacaca

SEQ ID NO: 209962 - DNA, 25 bp, Probe sequence
gatggtaagaccgttgcagagttaa

SEQ ID NO: 209963 - DNA, 25 bp, Probe sequence
gattgtagtggcggcggaagttgca

SEQ ID NO: 209964 - DNA, 25 bp, Probe sequence
gttaatcacagtacatcaccctatt

SEQ ID NO: 209965 - DNA, 25 bp, Probe sequence
gtcgtaaagcacgtggtttgaaact

SEQ ID NO: 209966 - DNA, 25 bp, Probe sequence
gtggtttgaaactaaatcatcctga

SEQ ID NO: 209967 - DNA, 25 bp, Probe sequence
ggtgcacgcgatggtaagaccgttg

SEQ ID NO: 209968 - DNA, 25 bp, Probe sequence
ggtgtcgaacacatgattacagata

SEQ ID NO: 209969 - DNA, 25 bp, Probe sequence
ggtaagaccgttgcagagttaatga

SEQ ID NO: 209970 - DNA, 25 bp, Probe sequence
tgaattattagaaggtgcacgcgat

SEQ ID NO: 209971 - DNA, 25 bp, Probe sequence
tcatcctgaggcattagctttaatc

SEQ ID NO: 209972 - DNA, 25 bp, Probe sequence
tacacaacgagagcaagacaaatta

SEQ ID NO: 209973 - DNA, 25 bp, Probe sequence
tatcgaaatcgaggctacgttcccc

SEQ ID NO: 209974 - DNA, 25 bp, Probe sequence
tagtggcggcggaagttgcacgtcg

SEQ ID NO: 209975 - DNA, 25 bp, Probe sequence
ttccccgatggtactaagttaatca

SEQ ID NO: 209976 - DNA, 25 bp, Probe sequence
attcaagtgggctcacattttcatt

SEQ ID NO: 209977 - DNA, 25 bp, Probe sequence
atttttatgaagcaaatgcagcatt

SEQ ID NO: 209978 - DNA, 25 bp, Probe sequence
atatgctggcaaacgtaaaattttt

SEQ ID NO: 209979 - DNA, 25 bp, Probe sequence
atcctgaaacagttatcgaagttga

SEQ ID NO: 209980 - DNA, 25 bp, Probe sequence
accatcatcctgaaacagttatcga

SEQ ID NO: 209981 - DNA, 25 bp, Probe sequence
aatggtcctatcgatgagtcacgtg

SEQ ID NO: 209982 - DNA, 25 bp, Probe sequence
aagtgggctcacattttcattttta

SEQ ID NO: 209983 - DNA, 25 bp, Probe sequence
aatgcagcattagatttcgaacgtg

SEQ ID NO: 209984 - DNA, 25 bp, Probe sequence
caattagttgaatatgctggcaaac

SEQ ID NO: 209985 - DNA, 25 bp, Probe sequence
cctatcgatgagtcacgtgtctatc

SEQ ID NO: 209986 - DNA, 25 bp, Probe sequence
gaaaatacaggagatcgaccaattc

SEQ ID NO: 209987 - DNA, 25 bp, Probe sequence
gaaattaataaccatcatcctgaaa

SEQ ID NO: 209988 - DNA, 25 bp, Probe sequence
gaccaattcaagtgggctcacattt

SEQ ID NO: 209989 - DNA, 25 bp, Probe sequence
gagatcgaccaattcaagtgggctc

SEQ ID NO: 209990 - DNA, 25 bp, Probe sequence
gatcgaccaattcaagtgggctcac

SEQ ID NO: 209991 - DNA, 25 bp, Probe sequence
gtcaatggtcctatcgatgagtcac

SEQ ID NO: 209992 - DNA, 25 bp, Probe sequence
gtctatcgcccaactgatgaaaatg

SEQ ID NO: 209993 - DNA, 25 bp, Probe sequence
gtcctatcgatgagtcacgtgtcta

SEQ ID NO: 209994 - DNA, 25 bp, Probe sequence
gtgtctatcgcccaactgatgaaaa

SEQ ID NO: 209995 - DNA, 25 bp, Probe sequence
gtggtatggtcaatggtcctatcga

SEQ ID NO: 209996 - DNA, 25 bp, Probe sequence
gtgggctcacattttcatttttatg

SEQ ID NO: 209997 - DNA, 25 bp, Probe sequence
ggttttcgtggtatggtcaatggtc

SEQ ID NO: 209998 - DNA, 25 bp, Probe sequence
gggctcacattttcatttttatgaa

SEQ ID NO: 209999 - DNA, 25 bp, Probe sequence
ggtatggtcaatggtcctatcgatg

SEQ ID NO: 210000 - DNA, 25 bp, Probe sequence
tggtcaatggtcctatcgatgagtc

SEQ ID NO: 210001 - DNA, 25 bp, Probe sequence
tggtcctatcgatgagtcacgtgtc

SEQ ID NO: 210002 - DNA, 25 bp, Probe sequence
ttttggttttcgtggtatggtcaat

SEQ ID NO: 210003 - DNA, 25 bp, Probe sequence
tgcagcattagatttcgaacgtgaa

SEQ ID NO: 210004 - DNA, 25 bp, Probe sequence
tcgatgagtcacgtgtctatcgccc

SEQ ID NO: 210005 - DNA, 25 bp, Probe sequence
taataaccatcatcctgaaacagtt

SEQ ID NO: 210006 - DNA, 25 bp, Probe sequence
tacaggagatcgaccaattcaagtg

SEQ ID NO: 210007 - DNA, 25 bp, Probe sequence
tatcgcccaactgatgaaaatgatg

SEQ ID NO: 210008 - DNA, 25 bp, Probe sequence
ttcgtggtatggtcaatggtcctat

SEQ ID NO: 210009 - DNA, 25 bp, Probe sequence
ttcgaacgtgaaatggcatatggaa

SEQ ID NO: 210010 - DNA, 25 bp, Probe sequence
atattttcgccataggtaatgccgg

SEQ ID NO: 210011 - DNA, 25 bp, Probe sequence
atacgagcttatacggtccaactgt

SEQ ID NO: 210012 - DNA, 25 bp, Probe sequence
atggcgcaaaatcctcgtgtaacac

SEQ ID NO: 210013 - DNA, 25 bp, Probe sequence
atggctgctgttaaagaccgtgtac

SEQ ID NO: 210014 - DNA, 25 bp, Probe sequence
agaagctgccgaaggtttaccgatt

SEQ ID NO: 210015 - DNA, 25 bp, Probe sequence
aaatggttctatacctacatctgaa

SEQ ID NO: 210016 - DNA, 25 bp, Probe sequence
aacagatatcattgccgctgaaggt

SEQ ID NO: 210017 - DNA, 25 bp, Probe sequence
aagactatgcggtttatggtgaaga

SEQ ID NO: 210018 - DNA, 25 bp, Probe sequence
aatccaactttgccttatacacata

SEQ ID NO: 210019 - DNA, 25 bp, Probe sequence
catactgaaggtgctggtggcggtc

SEQ ID NO: 210020 - DNA, 25 bp, Probe sequence
gcggctattcctgaagatatcgcat

SEQ ID NO: 210021 - DNA, 25 bp, Probe sequence
gcaacaaatccaactgcactcattg

SEQ ID NO: 210022 - DNA, 25 bp, Probe sequence
gaaggtaaaatcgtcactgctggtg

SEQ ID NO: 210023 - DNA, 25 bp, Probe sequence
gaagaagctacttttggtggtggta

SEQ ID NO: 210024 - DNA, 25 bp, Probe sequence
gaacatggcaagtagcacatcgcat

SEQ ID NO: 210025 - DNA, 25 bp, Probe sequence
gaacgttgcagaccttgtcatttct

SEQ ID NO: 210026 - DNA, 25 bp, Probe sequence
gaacaacgtggtcctttagatggtg

SEQ ID NO: 210027 - DNA, 25 bp, Probe sequence
gacattcgtgtctaaaactgcttat

SEQ ID NO: 210028 - DNA, 25 bp, Probe sequence
gaccttgtcatttctaatgccgtta

SEQ ID NO: 210029 - DNA, 25 bp, Probe sequence
gaccgtgtacttcatatgtaccata

SEQ ID NO: 210030 - DNA, 25 bp, Probe sequence
gatatcgcattcgcagattcacgta

SEQ ID NO: 210031 - DNA, 25 bp, Probe sequence
gattactcaccatttaaatgcggct

SEQ ID NO: 210032 - DNA, 25 bp, Probe sequence
gtacatgaagactggggtgcaacac

SEQ ID NO: 210033 - DNA, 25 bp, Probe sequence
gtaactccaggtccatggcatattc

SEQ ID NO: 210034 - DNA, 25 bp, Probe sequence
gtcaatacggcggaaaccttacaag

SEQ ID NO: 210035 - DNA, 25 bp, Probe sequence
gtaatgccggcaacccagatataat

SEQ ID NO: 210036 - DNA, 25 bp, Probe sequence
gtgcaacaccatctgctttgagtca

SEQ ID NO: 210037 - DNA, 25 bp, Probe sequence
gtggtattgatactcatgttcattt

SEQ ID NO: 210038 - DNA, 25 bp, Probe sequence
ggcggattaattaactctgccgtaa

SEQ ID NO: 210039 - DNA, 25 bp, Probe sequence
tggtggcggtcatgcgcctgattta

SEQ ID NO: 210040 - DNA, 25 bp, Probe sequence
taggatctatcgagccgggcaaact

SEQ ID NO: 210041 - DNA, 25 bp, Probe sequence
taggtgatacgaatctatttgctca

SEQ ID NO: 210042 - DNA, 25 bp, Probe sequence
tattggtggtggtactggtgcttca

SEQ ID NO: 210043 - DNA, 25 bp, Probe sequence
ttaccttcatctacaaatccaactt

SEQ ID NO: 210044 - DNA, 25 bp, Probe sequence
atagcccatcaattaggaaatcgtc

SEQ ID NO: 210045 - DNA, 25 bp, Probe sequence
atacgcagatgaccataatatgatt

SEQ ID NO: 210046 - DNA, 25 bp, Probe sequence
atcgtcatttgccagcacaatttac

SEQ ID NO: 210047 - DNA, 25 bp, Probe sequence
atcccatatgttcgagaagaccgta

SEQ ID NO: 210048 - DNA, 25 bp, Probe sequence
atgattatttagttgaagatttatt

SEQ ID NO: 210049 - DNA, 25 bp, Probe sequence
aggaaatcgtcatttgccagcacaa

SEQ ID NO: 210050 - DNA, 25 bp, Probe sequence
agcccatcaattaggaaatcgtcat

SEQ ID NO: 210051 - DNA, 25 bp, Probe sequence
acagagactgaaatgctagtacaat

SEQ ID NO: 210052 - DNA, 25 bp, Probe sequence
aaatcgtcatttgccagcacaattt

SEQ ID NO: 210053 - DNA, 25 bp, Probe sequence
aaaagtttaggcatcccatatgttc

SEQ ID NO: 210054 - DNA, 25 bp, Probe sequence
aagcacgtcgaaaaagtataccttg

SEQ ID NO: 210055 - DNA, 25 bp, Probe sequence
aagtttaggcatcccatatgttcga

SEQ ID NO: 210056 - DNA, 25 bp, Probe sequence
aagtataccttgaaaattcagatct

SEQ ID NO: 210057 - DNA, 25 bp, Probe sequence
caacctattgacttacaatatggag

SEQ ID NO: 210058 - DNA, 25 bp, Probe sequence
gccagcacaatttacagagactgaa

SEQ ID NO: 210059 - DNA, 25 bp, Probe sequence
gcaatattgccaatttgtcaaattc

SEQ ID NO: 210060 - DNA, 25 bp, Probe sequence
gaagatcttttagtgattcaaccaa

SEQ ID NO: 210061 - DNA, 25 bp, Probe sequence
gaaatgctagtacaatatgattatt

SEQ ID NO: 210062 - DNA, 25 bp, Probe sequence
gatattttatacgcagatgaccata

SEQ ID NO: 210063 - DNA, 25 bp, Probe sequence
gattcaaccaagaacattgcaagaa

SEQ ID NO: 210064 - DNA, 25 bp, Probe sequence
gtttaggcatcccatatgttcgaga

SEQ ID NO: 210065 - DNA, 25 bp, Probe sequence
gtcatttgccagcacaatttacaga

SEQ ID NO: 210066 - DNA, 25 bp, Probe sequence
gtggatgttaattcagaagatcttt

SEQ ID NO: 210067 - DNA, 25 bp, Probe sequence
gggagatatagcccatcaattagga

SEQ ID NO: 210068 - DNA, 25 bp, Probe sequence
ggagatattttatacgcagatgacc

SEQ ID NO: 210069 - DNA, 25 bp, Probe sequence
ggcatcccatatgttcgagaagacc

SEQ ID NO: 210070 - DNA, 25 bp, Probe sequence
ggcattcgtttaaaacaacctattg

SEQ ID NO: 210071 - DNA, 25 bp, Probe sequence
tgaagaaatccaaggcaatattgcc

SEQ ID NO: 210072 - DNA, 25 bp, Probe sequence
tagtgattcaaccaagaacattgca

SEQ ID NO: 210073 - DNA, 25 bp, Probe sequence
tatgttcgagaagaccgtaaagtta

SEQ ID NO: 210074 - DNA, 25 bp, Probe sequence
tttgccagcacaatttacagagact

SEQ ID NO: 210075 - DNA, 25 bp, Probe sequence
ttaggcatcccatatgttcgagaag

SEQ ID NO: 210076 - DNA, 25 bp, Probe sequence
ttaggaaatcgtcatttgccagcac

SEQ ID NO: 210077 - DNA, 25 bp, Probe sequence
ttaaaacaacctattgacttacaat

SEQ ID NO: 210078 - DNA, 25 bp, Probe sequence
atgtttttacaagagcaacttacct

SEQ ID NO: 210079 - DNA, 25 bp, Probe sequence
acaggtgctttcagtcattcatttg

SEQ ID NO: 210080 - DNA, 25 bp, Probe sequence
aaatgctgttcgtgctattccactt

SEQ ID NO: 210081 - DNA, 25 bp, Probe sequence
aaacaaatggggactcgcatggtta

SEQ ID NO: 210082 - DNA, 25 bp, Probe sequence
aagaaacacgtgttggtgcaaaaca

SEQ ID NO: 210083 - DNA, 25 bp, Probe sequence
aagagcaacttacctattctgatgg

SEQ ID NO: 210084 - DNA, 25 bp, Probe sequence
aatccagctatttgttttactatgc

SEQ ID NO: 210085 - DNA, 25 bp, Probe sequence
cccatggattgcttggtatcatcaa

SEQ ID NO: 210086 - DNA, 25 bp, Probe sequence
gcgtttagtttatgatgcattggaa

SEQ ID NO: 210087 - DNA, 25 bp, Probe sequence
gctggtcaaaagatagttactcaca

SEQ ID NO: 210088 - DNA, 25 bp, Probe sequence
gctttcagtcattcatttggtcttg

SEQ ID NO: 210089 - DNA, 25 bp, Probe sequence
gaagcagattttggcatgacagcgc

SEQ ID NO: 210090 - DNA, 25 bp, Probe sequence
gaactaaatcaaatggcgcatgaga

SEQ ID NO: 210091 - DNA, 25 bp, Probe sequence
gaaagcaaagttaaatccagctatt

SEQ ID NO: 210092 - DNA, 25 bp, Probe sequence
gacagcgcctggtttagaactaaat

SEQ ID NO: 210093 - DNA, 25 bp, Probe sequence
gatcatacttttattgcttggttaa

SEQ ID NO: 210094 - DNA, 25 bp, Probe sequence
gatcatacacacttaagattatttc

SEQ ID NO: 210095 - DNA, 25 bp, Probe sequence
gatagttactcacatgattccttat

SEQ ID NO: 210096 - DNA, 25 bp, Probe sequence
gattatttcagttctgtgattcaca

SEQ ID NO: 210097 - DNA, 25 bp, Probe sequence
gattgcttggtatcatcaacaaatg

SEQ ID NO: 210098 - DNA, 25 bp, Probe sequence
gtttaactcaaaatgctgttcgtgc

SEQ ID NO: 210099 - DNA, 25 bp, Probe sequence
gtcaatgttagaattttcatatcat

SEQ ID NO: 210100 - DNA, 25 bp, Probe sequence
gtcattcatttggtcttgaaacata

SEQ ID NO: 210101 - DNA, 25 bp, Probe sequence
ggtttagccatgcgtttagtttatg

SEQ ID NO: 210102 - DNA, 25 bp, Probe sequence
ggactcgcatggttaaattggcttt

SEQ ID NO: 210103 - DNA, 25 bp, Probe sequence
tgttcgtgctattccacttggacaa

SEQ ID NO: 210104 - DNA, 25 bp, Probe sequence
tgatgtttgttcaaaacttacctaa

SEQ ID NO: 210105 - DNA, 25 bp, Probe sequence
tccacttggacaaactgctggtcaa

SEQ ID NO: 210106 - DNA, 25 bp, Probe sequence
tatttgttttactatgctaggccat

SEQ ID NO: 210107 - DNA, 25 bp, Probe sequence
tattgaaacgattattgattactat

SEQ ID NO: 210108 - DNA, 25 bp, Probe sequence
tttccaacaggtgctttcagtcatt

SEQ ID NO: 210109 - DNA, 25 bp, Probe sequence
ttacctattctgatggtttagccat

SEQ ID NO: 210110 - DNA, 25 bp, Probe sequence
ttactcacatgattccttatataga

SEQ ID NO: 210111 - DNA, 25 bp, Probe sequence
ttggcatgacagcgcctggtttaga

SEQ ID NO: 210112 - DNA, 25 bp, Probe sequence
attagtaaattcaggagttctacct

SEQ ID NO: 210113 - DNA, 25 bp, Probe sequence
attcaggagttctacctgaaagtcg

SEQ ID NO: 210114 - DNA, 25 bp, Probe sequence
atcggcgttattacaaatgatatat

SEQ ID NO: 210115 - DNA, 25 bp, Probe sequence
aggtatgattaagtcagatttcttt

SEQ ID NO: 210116 - DNA, 25 bp, Probe sequence
agaatctggtggcgataacttagca

SEQ ID NO: 210117 - DNA, 25 bp, Probe sequence
actgcgattcgtgaagatgcatcta

SEQ ID NO: 210118 - DNA, 25 bp, Probe sequence
acaaaactgatttagctccctatgt

SEQ ID NO: 210119 - DNA, 25 bp, Probe sequence
aactttgcagcaatagacgaattat

SEQ ID NO: 210120 - DNA, 25 bp, Probe sequence
aactggtggatgtcctcatactgcg

SEQ ID NO: 210121 - DNA, 25 bp, Probe sequence
aacgtcatgacgatatagaactaat

SEQ ID NO: 210122 - DNA, 25 bp, Probe sequence
cgaattattagaacgtcatgacgat

SEQ ID NO: 210123 - DNA, 25 bp, Probe sequence
gcgacactttactcaaaggattatc

SEQ ID NO: 210124 - DNA, 25 bp, Probe sequence
gcgataacttagcagcaacatttag

SEQ ID NO: 210125 - DNA, 25 bp, Probe sequence
gctcaaggtgaaaagattccacgta

SEQ ID NO: 210126 - DNA, 25 bp, Probe sequence
gaaggtttggatgaagttatcgatt

SEQ ID NO: 210127 - DNA, 25 bp, Probe sequence
gaagttatcgattggattgaacgcg

SEQ ID NO: 210128 - DNA, 25 bp, Probe sequence
gattccacgtaaaggtggtcaaggt

SEQ ID NO: 210129 - DNA, 25 bp, Probe sequence
gaacgcgacactttactcaaaggat

SEQ ID NO: 210130 - DNA, 25 bp, Probe sequence
gaactaattttcatagaatctggtg

SEQ ID NO: 210131 - DNA, 25 bp, Probe sequence
gaacaaatggctgaagatactaaag

SEQ ID NO: 210132 - DNA, 25 bp, Probe sequence
gatgcatctatgaactttgcagcaa

SEQ ID NO: 210133 - DNA, 25 bp, Probe sequence
gattggattgaacgcgacactttac

SEQ ID NO: 210134 - DNA, 25 bp, Probe sequence
ggtgttgaaactggtggatgtcctc

SEQ ID NO: 210135 - DNA, 25 bp, Probe sequence
ggtcctgtaggtgcaggtaaaacac

SEQ ID NO: 210136 - DNA, 25 bp, Probe sequence
ggtggtcaaggtatgattaagtcag

SEQ ID NO: 210137 - DNA, 25 bp, Probe sequence
ggtggcgataacttagcagcaacat

SEQ ID NO: 210138 - DNA, 25 bp, Probe sequence
ggtgcatcattagaacaaatggctg

SEQ ID NO: 210139 - DNA, 25 bp, Probe sequence
ggcaaatccgattaaaattggtatt

SEQ ID NO: 210140 - DNA, 25 bp, Probe sequence
tggattgaacgcgacactttactca

SEQ ID NO: 210141 - DNA, 25 bp, Probe sequence
tgtcctcatactgcgattcgtgaag

SEQ ID NO: 210142 - DNA, 25 bp, Probe sequence
tatattatcgatgttgctcaaggtg

SEQ ID NO: 210143 - DNA, 25 bp, Probe sequence
ttaacaaaactgatttagctcccta

SEQ ID NO: 210144 - DNA, 25 bp, Probe sequence
ttggtggtcctgtaggtgcaggtaa

SEQ ID NO: 210145 - DNA, 25 bp, Probe sequence
ttggtattggtggtcctgtaggtgc

SEQ ID NO: 210146 - DNA, 25 bp, Probe sequence
attgtactatcgatttgtagcatta

SEQ ID NO: 210147 - DNA, 25 bp, Probe sequence
attgcaaccaatccacatttagaat

SEQ ID NO: 210148 - DNA, 25 bp, Probe sequence
atttgcacagttattcacggtagat

SEQ ID NO: 210149 - DNA, 25 bp, Probe sequence
atgaaatgcgtatggcggctacaac

SEQ ID NO: 210150 - DNA, 25 bp, Probe sequence
atgcgattctagattgtataaccca

SEQ ID NO: 210151 - DNA, 25 bp, Probe sequence
agttgagtgattttacgaagacaga

SEQ ID NO: 210152 - DNA, 25 bp, Probe sequence
acttacccgaagatattgcaaccaa

SEQ ID NO: 210153 - DNA, 25 bp, Probe sequence
aacccaatcgaaaatggcacttgat

SEQ ID NO: 210154 - DNA, 25 bp, Probe sequence
aatacgatgcgatttgtagctacta

SEQ ID NO: 210155 - DNA, 25 bp, Probe sequence
cagtggctcaaattgcagactatgc

SEQ ID NO: 210156 - DNA, 25 bp, Probe sequence
gctagagcaacgaatacgatgcgat

SEQ ID NO: 210157 - DNA, 25 bp, Probe sequence
gcatcaattgttagatttagtcgga

SEQ ID NO: 210158 - DNA, 25 bp, Probe sequence
gcagtcaattgcacaggtggccaca

SEQ ID NO: 210159 - DNA, 25 bp, Probe sequence
gcagactatgcattgatttatggca

SEQ ID NO: 210160 - DNA, 25 bp, Probe sequence
gaaacgcatttacttgtgtcaacat

SEQ ID NO: 210161 - DNA, 25 bp, Probe sequence
gacacatcaaggttttcaagagcta

SEQ ID NO: 210162 - DNA, 25 bp, Probe sequence
gactattggtgatctttttcaaaag

SEQ ID NO: 210163 - DNA, 25 bp, Probe sequence
gagattgcatgatttttgtgacgaa

SEQ ID NO: 210164 - DNA, 25 bp, Probe sequence
gttacgaatgttagtacagcatcaa

SEQ ID NO: 210165 - DNA, 25 bp, Probe sequence
gttatctcgtattggcttaaatgtc

SEQ ID NO: 210166 - DNA, 25 bp, Probe sequence
gtattcccatcataactatatctag

SEQ ID NO: 210167 - DNA, 25 bp, Probe sequence
gtagctactaatattatggatgcgc

SEQ ID NO: 210168 - DNA, 25 bp, Probe sequence
gtacagctaataatccagtggctca

SEQ ID NO: 210169 - DNA, 25 bp, Probe sequence
gtcaggttattacatgaaacgcatt

SEQ ID NO: 210170 - DNA, 25 bp, Probe sequence
gtgatgtgttgaaaaatgccaggac

SEQ ID NO: 210171 - DNA, 25 bp, Probe sequence
ggtagtcatagtgaattgcagtcaa

SEQ ID NO: 210172 - DNA, 25 bp, Probe sequence
ggaagcatcttgcgacgatagattt

SEQ ID NO: 210173 - DNA, 25 bp, Probe sequence
ggcgcatcgagtttgactattggtg

SEQ ID NO: 210174 - DNA, 25 bp, Probe sequence
ggccacacattacagtattcccatc

SEQ ID NO: 210175 - DNA, 25 bp, Probe sequence
tgcacaggtggccacacattacagt

SEQ ID NO: 210176 - DNA, 25 bp, Probe sequence
taatcgctgattacattttaaagaa

SEQ ID NO: 210177 - DNA, 25 bp, Probe sequence
tttttatttggatttggcgcatcga

SEQ ID NO: 210178 - DNA, 25 bp, Probe sequence
ttgcgatatctcgatacttacccga

SEQ ID NO: 210179 - DNA, 25 bp, Probe sequence
ttgtgtcaacatttgcgacgcatga

SEQ ID NO: 210180 - DNA, 25 bp, Probe sequence
atctaccattcctacattttatata

SEQ ID NO: 210181 - DNA, 25 bp, Probe sequence
atgatcgtaaacttgattttctaag

SEQ ID NO: 210182 - DNA, 25 bp, Probe sequence
agatggagatcgttaccgtatgaat

SEQ ID NO: 210183 - DNA, 25 bp, Probe sequence
agcaatacattcgattgtcgtgttg

SEQ ID NO: 210184 - DNA, 25 bp, Probe sequence
actcctggttattcaaaaactggcg

SEQ ID NO: 210185 - DNA, 25 bp, Probe sequence
aaaactggcgaagccttcaagtatc

SEQ ID NO: 210186 - DNA, 25 bp, Probe sequence
aacgctaaagtgacattgacatctc

SEQ ID NO: 210187 - DNA, 25 bp, Probe sequence
aatatacaagacaccttccaatcat

SEQ ID NO: 210188 - DNA, 25 bp, Probe sequence
cagttagaatttttgcttatcgcac

SEQ ID NO: 210189 - DNA, 25 bp, Probe sequence
cagtttatgaaaccattagttctta

SEQ ID NO: 210190 - DNA, 25 bp, Probe sequence
catccaaagctatatcgcagaaaat

SEQ ID NO: 210191 - DNA, 25 bp, Probe sequence
ctatttctcaattgcctacacatgg

SEQ ID NO: 210192 - DNA, 25 bp, Probe sequence
gcacttaaagtgatacgtccagttt

SEQ ID NO: 210193 - DNA, 25 bp, Probe sequence
gaatcctaataaacaatcgatcaat

SEQ ID NO: 210194 - DNA, 25 bp, Probe sequence
gaagccttcaagtatcaatatatgc

SEQ ID NO: 210195 - DNA, 25 bp, Probe sequence
gacaccttccaatcatgttgagcag

SEQ ID NO: 210196 - DNA, 25 bp, Probe sequence
gacattgacatctcaaggtgcaaca

SEQ ID NO: 210197 - DNA, 25 bp, Probe sequence
gatacgtccagtttatctaaatcaa

SEQ ID NO: 210198 - DNA, 25 bp, Probe sequence
gttgctatttctcaattgcctacac

SEQ ID NO: 210199 - DNA, 25 bp, Probe sequence
gttcaatctcaataattctagttca

SEQ ID NO: 210200 - DNA, 25 bp, Probe sequence
gttaaccaaaaactaatcgattcag

SEQ ID NO: 210201 - DNA, 25 bp, Probe sequence
gttaccgtatgaatgtgaatgtcga

SEQ ID NO: 210202 - DNA, 25 bp, Probe sequence
gtcgctgatccaatcatcgcatatg

SEQ ID NO: 210203 - DNA, 25 bp, Probe sequence
gtgaatgtcgaagataacgctaaag

SEQ ID NO: 210204 - DNA, 25 bp, Probe sequence
gggcaacttgatttaacagtgtttt

SEQ ID NO: 210205 - DNA, 25 bp, Probe sequence
ggttatatggaacattactctcatt

SEQ ID NO: 210206 - DNA, 25 bp, Probe sequence
tgaacaacaatggactgggcaactt

SEQ ID NO: 210207 - DNA, 25 bp, Probe sequence
tctaaatcaatctaccattcctaca

SEQ ID NO: 210208 - DNA, 25 bp, Probe sequence
tctagttcattattttatactgata

SEQ ID NO: 210209 - DNA, 25 bp, Probe sequence
tatcaacacaatacgttcaatctca

SEQ ID NO: 210210 - DNA, 25 bp, Probe sequence
tatactgatattttaactcctggtt

SEQ ID NO: 210211 - DNA, 25 bp, Probe sequence
ttagaatatgtcgctgatccaatca

SEQ ID NO: 210212 - DNA, 25 bp, Probe sequence
ttcgattgtcgtgttgctatttctc

SEQ ID NO: 210213 - DNA, 25 bp, Probe sequence
ttgcttatcgcacacaaattataga

SEQ ID NO: 210214 - DNA, 25 bp, Probe sequence
atctcagctagccaagctgctggtt

SEQ ID NO: 210215 - DNA, 25 bp, Probe sequence
atcgctacagctactatcgcaactg

SEQ ID NO: 210216 - DNA, 25 bp, Probe sequence
atggccgttcaatctcaagtggtta

SEQ ID NO: 210217 - DNA, 25 bp, Probe sequence
aggaaatcaagctcatgcttctgag

SEQ ID NO: 210218 - DNA, 25 bp, Probe sequence
agtggttatacttcaggacgtaact

SEQ ID NO: 210219 - DNA, 25 bp, Probe sequence
aaacaactcaaggtgcatacggtca

SEQ ID NO: 210220 - DNA, 25 bp, Probe sequence
actgggctaacgcagctgcaagagc

SEQ ID NO: 210221 - DNA, 25 bp, Probe sequence
acttctggtcaatgtacatactacg

SEQ ID NO: 210222 - DNA, 25 bp, Probe sequence
acaaggtaactaccattacacatgg

SEQ ID NO: 210223 - DNA, 25 bp, Probe sequence
aaatcggttcaacttggggcaatgc

SEQ ID NO: 210224 - DNA, 25 bp, Probe sequence
aacacaaacagctaccgtactggtg

SEQ ID NO: 210225 - DNA, 25 bp, Probe sequence
aagataatggctactacagctatta

SEQ ID NO: 210226 - DNA, 25 bp, Probe sequence
cagcacttcaagcaacaatgttcaa

SEQ ID NO: 210227 - DNA, 25 bp, Probe sequence
cttcacgtacaatctcagctagcca

SEQ ID NO: 210228 - DNA, 25 bp, Probe sequence
ctatggctccatcatcaaatggccg

SEQ ID NO: 210229 - DNA, 25 bp, Probe sequence
cgtactggtggtttaggtgcaagct

SEQ ID NO: 210230 - DNA, 25 bp, Probe sequence
gcccaggtgttgtaacttcacgtac

SEQ ID NO: 210231 - DNA, 25 bp, Probe sequence
gctgctggttataacttcattcact

SEQ ID NO: 210232 - DNA, 25 bp, Probe sequence
gctgcaagagctggttacacagtga

SEQ ID NO: 210233 - DNA, 25 bp, Probe sequence
gctatacttacactattgatgcaca

SEQ ID NO: 210234 - DNA, 25 bp, Probe sequence
gcttctgagcaagataactacggtt

SEQ ID NO: 210235 - DNA, 25 bp, Probe sequence
gcatacggtcacgttgcatacgttg

SEQ ID NO: 210236 - DNA, 25 bp, Probe sequence
gaactatggttatggcccaggtgtt

SEQ ID NO: 210237 - DNA, 25 bp, Probe sequence
gacccaacatcatatagctatactt

SEQ ID NO: 210238 - DNA, 25 bp, Probe sequence
gattcgctacaatcgcaattgcatc

SEQ ID NO: 210239 - DNA, 25 bp, Probe sequence
gtacatactacgtatttgatcgtgt

SEQ ID NO: 210240 - DNA, 25 bp, Probe sequence
gtaactacaactatggctccatcat

SEQ ID NO: 210241 - DNA, 25 bp, Probe sequence
ggggcaatgcaagtaactgggctaa

SEQ ID NO: 210242 - DNA, 25 bp, Probe sequence
ggtgcaagctacagcacttcaagca

SEQ ID NO: 210243 - DNA, 25 bp, Probe sequence
ggacgtaacttatacacttctggtc

SEQ ID NO: 210244 - DNA, 25 bp, Probe sequence
ggaaaggtaactggcatccaagtca

SEQ ID NO: 210245 - DNA, 25 bp, Probe sequence
ggcatccaagtcaattaaaccaaga

SEQ ID NO: 210246 - DNA, 25 bp, Probe sequence
tacagccgttacaacaactactcaa

SEQ ID NO: 210247 - DNA, 25 bp, Probe sequence
tatcgcaactgcaggattcgctaca

SEQ ID NO: 210248 - DNA, 25 bp, Probe sequence
attgcgtgtgtcaaatattataatg

SEQ ID NO: 210249 - DNA, 25 bp, Probe sequence
attcacatctattattggtccactg

SEQ ID NO: 210250 - DNA, 25 bp, Probe sequence
atttattaagtttattcacatctat

SEQ ID NO: 210251 - DNA, 25 bp, Probe sequence
atcggtattttatccatattcgctt

SEQ ID NO: 210252 - DNA, 25 bp, Probe sequence
atcgcaaatccaatgatgagaacat

SEQ ID NO: 210253 - DNA, 25 bp, Probe sequence
accgaatcgcaaatccaatgatgag

SEQ ID NO: 210254 - DNA, 25 bp, Probe sequence
acgatttcttatattatttggtcta

SEQ ID NO: 210255 - DNA, 25 bp, Probe sequence
acgacgtaacaaatcatcaaccgaa

SEQ ID NO: 210256 - DNA, 25 bp, Probe sequence
actagttgatcgtgctggaaaaaat

SEQ ID NO: 210257 - DNA, 25 bp, Probe sequence
acattatggcgatgcttatctattt

SEQ ID NO: 210258 - DNA, 25 bp, Probe sequence
acaattattgcgtgtgtcaaatatt

SEQ ID NO: 210259 - DNA, 25 bp, Probe sequence
aatcatcaaccgaatcgcaaatcca

SEQ ID NO: 210260 - DNA, 25 bp, Probe sequence
aattatcttaactatacgatttctt

SEQ ID NO: 210261 - DNA, 25 bp, Probe sequence
ctatcgttttagtcgttatcacttt

SEQ ID NO: 210262 - DNA, 25 bp, Probe sequence
gaatcgaaactagttgatcgtgctg

SEQ ID NO: 210263 - DNA, 25 bp, Probe sequence
gaacgacgtaacaaatcatcaaccg

SEQ ID NO: 210264 - DNA, 25 bp, Probe sequence
gaaactagttgatcgtgctggaaaa

SEQ ID NO: 210265 - DNA, 25 bp, Probe sequence
gacaactgaaatgaacgacgtaaca

SEQ ID NO: 210266 - DNA, 25 bp, Probe sequence
gagaacattatggcgatgcttatct

SEQ ID NO: 210267 - DNA, 25 bp, Probe sequence
gtttattcacatctattattggtcc

SEQ ID NO: 210268 - DNA, 25 bp, Probe sequence
gtattcacaattattgcgtgtgtca

SEQ ID NO: 210269 - DNA, 25 bp, Probe sequence
gtgctggaaaaaattatcttaacta

SEQ ID NO: 210270 - DNA, 25 bp, Probe sequence
ggtctatcgttttagtcgttatcac

SEQ ID NO: 210271 - DNA, 25 bp, Probe sequence
ggtattttatccatattcgctttct

SEQ ID NO: 210272 - DNA, 25 bp, Probe sequence
ggcgatgcttatctatttattaagt

SEQ ID NO: 210273 - DNA, 25 bp, Probe sequence
tcacatctattattggtccactgat

SEQ ID NO: 210274 - DNA, 25 bp, Probe sequence
tcaaccgaatcgcaaatccaatgat

SEQ ID NO: 210275 - DNA, 25 bp, Probe sequence
tatggcgatgcttatctatttatta

SEQ ID NO: 210276 - DNA, 25 bp, Probe sequence
tatcttttgtattcacaattattgc

SEQ ID NO: 210277 - DNA, 25 bp, Probe sequence
tattttatccatattcgctttctca

SEQ ID NO: 210278 - DNA, 25 bp, Probe sequence
ttttatccatattcgctttctcaat

SEQ ID NO: 210279 - DNA, 25 bp, Probe sequence
ttatttggtctatcgttttagtcgt

SEQ ID NO: 210280 - DNA, 25 bp, Probe sequence
ttatcggtattttatccatattcgc

SEQ ID NO: 210281 - DNA, 25 bp, Probe sequence
ttggtctatcgttttagtcgttatc

SEQ ID NO: 210282 - DNA, 25 bp, Probe sequence
ataaaaccggatattcttcaagtgt

SEQ ID NO: 210283 - DNA, 25 bp, Probe sequence
attcttcaagtgtttctgcctatgg

SEQ ID NO: 210284 - DNA, 25 bp, Probe sequence
atattcttcaagtgtttctgcctat

SEQ ID NO: 210285 - DNA, 25 bp, Probe sequence
aggtttggttacagatggacaaaca

SEQ ID NO: 210286 - DNA, 25 bp, Probe sequence
agtgtttctgcctatggtaataata

SEQ ID NO: 210287 - DNA, 25 bp, Probe sequence
accgtcagatgattttaatactact

SEQ ID NO: 210288 - DNA, 25 bp, Probe sequence
aaatgacaaatggtcaattgtggaa

SEQ ID NO: 210289 - DNA, 25 bp, Probe sequence
aaaagataatgtaccgtcagatgat

SEQ ID NO: 210290 - DNA, 25 bp, Probe sequence
aacagtaactattcattgtaatgat

SEQ ID NO: 210291 - DNA, 25 bp, Probe sequence
aaccggatattcttcaagtgtttct

SEQ ID NO: 210292 - DNA, 25 bp, Probe sequence
aacgctttattgataaaatcacaat

SEQ ID NO: 210293 - DNA, 25 bp, Probe sequence
aagtctgacaatacaaaatcatctg

SEQ ID NO: 210294 - DNA, 25 bp, Probe sequence
aatacaaaatcatctgtttcaggta

SEQ ID NO: 210295 - DNA, 25 bp, Probe sequence
catctgtttcaggtaaagtaggagc

SEQ ID NO: 210296 - DNA, 25 bp, Probe sequence
ctgttagtggtgaagatagttggaa

SEQ ID NO: 210297 - DNA, 25 bp, Probe sequence
gcagatctgacaagtggcaatggaa

SEQ ID NO: 210298 - DNA, 25 bp, Probe sequence
gaactacattcaaaaaacgctttat

SEQ ID NO: 210299 - DNA, 25 bp, Probe sequence
gacaagtggcaatggaactacattc

SEQ ID NO: 210300 - DNA, 25 bp, Probe sequence
gacgatttttcaagtactccaagta

SEQ ID NO: 210301 - DNA, 25 bp, Probe sequence
gatggacaaacagtaactattcatt

SEQ ID NO: 210302 - DNA, 25 bp, Probe sequence
gatgattttaatactactgttagtg

SEQ ID NO: 210303 - DNA, 25 bp, Probe sequence
gataatgtaccgtcagatgatttta

SEQ ID NO: 210304 - DNA, 25 bp, Probe sequence
gatagttggaaaacacttacatcta

SEQ ID NO: 210305 - DNA, 25 bp, Probe sequence
gattcaaatattattagtggtaacg

SEQ ID NO: 210306 - DNA, 25 bp, Probe sequence
gttggaaaacacttacatctaaatt

SEQ ID NO: 210307 - DNA, 25 bp, Probe sequence
gttaaagattcattaattgattcaa

SEQ ID NO: 210308 - DNA, 25 bp, Probe sequence
ggtaaagtaggagcagatctgacaa

SEQ ID NO: 210309 - DNA, 25 bp, Probe sequence
ggatattcttcaagtgtttctgcct

SEQ ID NO: 210310 - DNA, 25 bp, Probe sequence
ggagcagatctgacaagtggcaatg

SEQ ID NO: 210311 - DNA, 25 bp, Probe sequence
tcttcaagtgtttctgcctatggta

SEQ ID NO: 210312 - DNA, 25 bp, Probe sequence
tcaagtactccaagtaatttttcta

SEQ ID NO: 210313 - DNA, 25 bp, Probe sequence
taatgacgatttttcaagtactcca

SEQ ID NO: 210314 - DNA, 25 bp, Probe sequence
ttcaagtgtttctgcctatggtaat

SEQ ID NO: 210315 - DNA, 25 bp, Probe sequence
ttctgcctatggtaataataatgac

SEQ ID NO: 210316 - DNA, 25 bp, Probe sequence
attagacgaaacttgtaagggagat

SEQ ID NO: 210317 - DNA, 25 bp, Probe sequence
attatttactttgcttgaatataca

SEQ ID NO: 210318 - DNA, 25 bp, Probe sequence
atttcagagaatgccgttacaacta

SEQ ID NO: 210319 - DNA, 25 bp, Probe sequence
atttgacgatagctctgattttgta

SEQ ID NO: 210320 - DNA, 25 bp, Probe sequence
atacaaaaagctgacggcgcaaccc

SEQ ID NO: 210321 - DNA, 25 bp, Probe sequence
atgcatttgaaactgaacgatgaag

SEQ ID NO: 210322 - DNA, 25 bp, Probe sequence
agggagatattaacataacatcatg

SEQ ID NO: 210323 - DNA, 25 bp, Probe sequence
agcttgttacgtttaaatcttaatg

SEQ ID NO: 210324 - DNA, 25 bp, Probe sequence
agcatatcctttaccttataatata

SEQ ID NO: 210325 - DNA, 25 bp, Probe sequence
acggcgcaacccatatgaaagcata

SEQ ID NO: 210326 - DNA, 25 bp, Probe sequence
actatagcttgttacgtttaaatct

SEQ ID NO: 210327 - DNA, 25 bp, Probe sequence
acaaaaagctgacggcgcaacccat

SEQ ID NO: 210328 - DNA, 25 bp, Probe sequence
aaagcaactataaatttcagagaat

SEQ ID NO: 210329 - DNA, 25 bp, Probe sequence
aactgaacgatgaagatttaaatta

SEQ ID NO: 210330 - DNA, 25 bp, Probe sequence
aatatatttgacgatagctctgatt

SEQ ID NO: 210331 - DNA, 25 bp, Probe sequence
ctgacggcgcaacccatatgaaagc

SEQ ID NO: 210332 - DNA, 25 bp, Probe sequence
gccgttacaactatagcttgttacg

SEQ ID NO: 210333 - DNA, 25 bp, Probe sequence
gaatactttttcactttaagctatt

SEQ ID NO: 210334 - DNA, 25 bp, Probe sequence
gaatgccgttacaactatagcttgt

SEQ ID NO: 210335 - DNA, 25 bp, Probe sequence
gaaactaatctattcatgagttggt

SEQ ID NO: 210336 - DNA, 25 bp, Probe sequence
gaaagcatatcctttaccttataat

SEQ ID NO: 210337 - DNA, 25 bp, Probe sequence
gaaatacttgaacaatacaacatta

SEQ ID NO: 210338 - DNA, 25 bp, Probe sequence
gacggcgcaacccatatgaaagcat

SEQ ID NO: 210339 - DNA, 25 bp, Probe sequence
gacgatagctctgattttgtaaaac

SEQ ID NO: 210340 - DNA, 25 bp, Probe sequence
gagaatgccgttacaactatagctt

SEQ ID NO: 210341 - DNA, 25 bp, Probe sequence
gatagctctgattttgtaaaacaat

SEQ ID NO: 210342 - DNA, 25 bp, Probe sequence
gttacaactatagcttgttacgttt

SEQ ID NO: 210343 - DNA, 25 bp, Probe sequence
gtaattctgaatactttttcacttt

SEQ ID NO: 210344 - DNA, 25 bp, Probe sequence
tgacggttttcataaaaactctaat

SEQ ID NO: 210345 - DNA, 25 bp, Probe sequence
taaagcctggaaaagcaactataaa

SEQ ID NO: 210346 - DNA, 25 bp, Probe sequence
taacatcatgtaattctgaatactt

SEQ ID NO: 210347 - DNA, 25 bp, Probe sequence
taaatcttaatgacggttttcataa

SEQ ID NO: 210348 - DNA, 25 bp, Probe sequence
tatgaaagcatatcctttaccttat

SEQ ID NO: 210349 - DNA, 25 bp, Probe sequence
tatcctttaccttataatatatttg

SEQ ID NO: 210350 - DNA, 25 bp, Probe sequence
attttattcacctatcgtcgattat

SEQ ID NO: 210351 - DNA, 25 bp, Probe sequence
ataaactaactgatcatggtgaaac

SEQ ID NO: 210352 - DNA, 25 bp, Probe sequence
atgcatgacaacacaattaaatcta

SEQ ID NO: 210353 - DNA, 25 bp, Probe sequence
agaattttattcacctatcgtcgat

SEQ ID NO: 210354 - DNA, 25 bp, Probe sequence
acagaatcaaagtttatcccattag

SEQ ID NO: 210355 - DNA, 25 bp, Probe sequence
acaagatgatattagcgaagcagta

SEQ ID NO: 210356 - DNA, 25 bp, Probe sequence
aaagtatcaacttctcaataatatt

SEQ ID NO: 210357 - DNA, 25 bp, Probe sequence
aatatatctttttcaggggatcgat

SEQ ID NO: 210358 - DNA, 25 bp, Probe sequence
aattttgattctaatgctagactta

SEQ ID NO: 210359 - DNA, 25 bp, Probe sequence
catgattatgttttggctatttccg

SEQ ID NO: 210360 - DNA, 25 bp, Probe sequence
gctagacttaatatcattacagaac

SEQ ID NO: 210361 - DNA, 25 bp, Probe sequence
gcagtatcaacaatgttgtctcaat

SEQ ID NO: 210362 - DNA, 25 bp, Probe sequence
gcaaaaaatgtccttttcgattgga

SEQ ID NO: 210363 - DNA, 25 bp, Probe sequence
gcaaagactattttgattacttaca

SEQ ID NO: 210364 - DNA, 25 bp, Probe sequence
gacgaagtgatgcaatattttctat

SEQ ID NO: 210365 - DNA, 25 bp, Probe sequence
gaggggaaatctaagttaatccata

SEQ ID NO: 210366 - DNA, 25 bp, Probe sequence
gatgcaatattttctatcaaacaga

SEQ ID NO: 210367 - DNA, 25 bp, Probe sequence
gatcatggtgaaactttatggaaca

SEQ ID NO: 210368 - DNA, 25 bp, Probe sequence
gatttatcctaatatatttcccgaa

SEQ ID NO: 210369 - DNA, 25 bp, Probe sequence
gttaatccatagtttcgaagcagta

SEQ ID NO: 210370 - DNA, 25 bp, Probe sequence
gttttggctatttccgagatcagtt

SEQ ID NO: 210371 - DNA, 25 bp, Probe sequence
gtttcgaagcagtatttccaggaga

SEQ ID NO: 210372 - DNA, 25 bp, Probe sequence
gtacaaaactacagtctagtcatcg

SEQ ID NO: 210373 - DNA, 25 bp, Probe sequence
gtctagtcatcgaaaataagcacat

SEQ ID NO: 210374 - DNA, 25 bp, Probe sequence
gtccttttcgattggaatgatgttg

SEQ ID NO: 210375 - DNA, 25 bp, Probe sequence
ggaacatggaacaattaggtataga

SEQ ID NO: 210376 - DNA, 25 bp, Probe sequence
ggctatttccgagatcagttatttg

SEQ ID NO: 210377 - DNA, 25 bp, Probe sequence
tcgtcgattattttggtgattctat

SEQ ID NO: 210378 - DNA, 25 bp, Probe sequence
taagtccttatttaaagacgaagtg

SEQ ID NO: 210379 - DNA, 25 bp, Probe sequence
tatatttcccgaatttaaggtagag

SEQ ID NO: 210380 - DNA, 25 bp, Probe sequence
taaacttatctcaagctattcatga

SEQ ID NO: 210381 - DNA, 25 bp, Probe sequence
ttcaggggatcgatataaactaact

SEQ ID NO: 210382 - DNA, 25 bp, Probe sequence
ttttggtgattctatttctgtaaat

SEQ ID NO: 210383 - DNA, 25 bp, Probe sequence
ttccaggagaagctacagagtatgt

SEQ ID NO: 210384 - DNA, 25 bp, Probe sequence
attactcagtctattactagctagt

SEQ ID NO: 210385 - DNA, 25 bp, Probe sequence
atttttatacacctgaagaagctca

SEQ ID NO: 210386 - DNA, 25 bp, Probe sequence
atagcgaccaaattttaagagaaat

SEQ ID NO: 210387 - DNA, 25 bp, Probe sequence
atcacacacaactacaaataaccct

SEQ ID NO: 210388 - DNA, 25 bp, Probe sequence
atcataacaatcaacaacaaagcaa

SEQ ID NO: 210389 - DNA, 25 bp, Probe sequence
atgattttagtcgcatgtgggaatg

SEQ ID NO: 210390 - DNA, 25 bp, Probe sequence
agagcacaagaaaatagcgaccaaa

SEQ ID NO: 210391 - DNA, 25 bp, Probe sequence
actcagtctattactagctagtaca

SEQ ID NO: 210392 - DNA, 25 bp, Probe sequence
acacacaactacaaataaccctatt

SEQ ID NO: 210393 - DNA, 25 bp, Probe sequence
acaactacaaataaccctattagag

SEQ ID NO: 210394 - DNA, 25 bp, Probe sequence
aacagacccgatatataaaagagag

SEQ ID NO: 210395 - DNA, 25 bp, Probe sequence
aagagaaatgggtctcgaaccagaa

SEQ ID NO: 210396 - DNA, 25 bp, Probe sequence
aatggacaatcacacacaactacaa

SEQ ID NO: 210397 - DNA, 25 bp, Probe sequence
aatgggtctcgaaccagaaagatat

SEQ ID NO: 210398 - DNA, 25 bp, Probe sequence
aatagtaatcataacaatcaacaac

SEQ ID NO: 210399 - DNA, 25 bp, Probe sequence
gctagtacaatgattttagtcgcat

SEQ ID NO: 210400 - DNA, 25 bp, Probe sequence
gagcaagttcaaaatgtcaataata

SEQ ID NO: 210401 - DNA, 25 bp, Probe sequence
gagaaacagacccgatatataaaag

SEQ ID NO: 210402 - DNA, 25 bp, Probe sequence
gagattactcagtctattactagct

SEQ ID NO: 210403 - DNA, 25 bp, Probe sequence
gaggagattactcagtctattacta

SEQ ID NO: 210404 - DNA, 25 bp, Probe sequence
gtagagggagaaacagacccgatat

SEQ ID NO: 210405 - DNA, 25 bp, Probe sequence
gtacaatgattttagtcgcatgtgg

SEQ ID NO: 210406 - DNA, 25 bp, Probe sequence
gtcaataataaacaaccagtcttaa

SEQ ID NO: 210407 - DNA, 25 bp, Probe sequence
gtcgcatgtgggaatgctaacaatg

SEQ ID NO: 210408 - DNA, 25 bp, Probe sequence
gtgggaatgctaacaatgaaaataa

SEQ ID NO: 210409 - DNA, 25 bp, Probe sequence
gggaatacagttacagaaatttata

SEQ ID NO: 210410 - DNA, 25 bp, Probe sequence
gggtctcgaaccagaaagatatgaa

SEQ ID NO: 210411 - DNA, 25 bp, Probe sequence
ggacaatcacacacaactacaaata

SEQ ID NO: 210412 - DNA, 25 bp, Probe sequence
taagcatttttatacacctgaagaa

SEQ ID NO: 210413 - DNA, 25 bp, Probe sequence
taaacaaccagtcttaaataataat

SEQ ID NO: 210414 - DNA, 25 bp, Probe sequence
tagaaaacgggaatacagttacaga

SEQ ID NO: 210415 - DNA, 25 bp, Probe sequence
tacacctgaagaagctcaaagagca

SEQ ID NO: 210416 - DNA, 25 bp, Probe sequence
tataatggacaatcacacacaacta

SEQ ID NO: 210417 - DNA, 25 bp, Probe sequence
tttagtcgcatgtgggaatgctaac

SEQ ID NO: 210418 - DNA, 25 bp, Probe sequence
atcaatttcacattctggtaactta

SEQ ID NO: 210419 - DNA, 25 bp, Probe sequence
accatttggtcacgttgcatatgta

SEQ ID NO: 210420 - DNA, 25 bp, Probe sequence
acgacaactacatcatcaatttcac

SEQ ID NO: 210421 - DNA, 25 bp, Probe sequence
actacaacacgactcaaactacaac

SEQ ID NO: 210422 - DNA, 25 bp, Probe sequence
acatcatcaatttcacattctggta

SEQ ID NO: 210423 - DNA, 25 bp, Probe sequence
acacgactcaaactacaacgactac

SEQ ID NO: 210424 - DNA, 25 bp, Probe sequence
acactgcaggacaatgtacttggta

SEQ ID NO: 210425 - DNA, 25 bp, Probe sequence
acaactacgacaactacatcatcaa

SEQ ID NO: 210426 - DNA, 25 bp, Probe sequence
aaaggcgctatcctacaatcttctg

SEQ ID NO: 210427 - DNA, 25 bp, Probe sequence
aacaactataactacaacacgactc

SEQ ID NO: 210428 - DNA, 25 bp, Probe sequence
aagtgtaaacagtgatggttcagtt

SEQ ID NO: 210429 - DNA, 25 bp, Probe sequence
aatgtacttggtatgtatatgataa

SEQ ID NO: 210430 - DNA, 25 bp, Probe sequence
caatcttctgaaggaccatttggtc

SEQ ID NO: 210431 - DNA, 25 bp, Probe sequence
caactacatcatcaatttcacattc

SEQ ID NO: 210432 - DNA, 25 bp, Probe sequence
cacattctggtaacttatacactgc

SEQ ID NO: 210433 - DNA, 25 bp, Probe sequence
caccttctaaaggcgctatcctaca

SEQ ID NO: 210434 - DNA, 25 bp, Probe sequence
cagcaactacgttaacagcaggaat

SEQ ID NO: 210435 - DNA, 25 bp, Probe sequence
catacaccttctaaaggcgctatcc

SEQ ID NO: 210436 - DNA, 25 bp, Probe sequence
ctataactacaacacgactcaaact

SEQ ID NO: 210437 - DNA, 25 bp, Probe sequence
gcgctatcctacaatcttctgaagg

SEQ ID NO: 210438 - DNA, 25 bp, Probe sequence
gctaataattgggctgctgctgcac

SEQ ID NO: 210439 - DNA, 25 bp, Probe sequence
gcacaaggtgctggattcacagtaa

SEQ ID NO: 210440 - DNA, 25 bp, Probe sequence
gaattatagtggcggacctttctca

SEQ ID NO: 210441 - DNA, 25 bp, Probe sequence
gaaggaccatttggtcacgttgcat

SEQ ID NO: 210442 - DNA, 25 bp, Probe sequence
gaactatttctgcaagtgaagcagg

SEQ ID NO: 210443 - DNA, 25 bp, Probe sequence
gtaacagcaactacgttaacagcag

SEQ ID NO: 210444 - DNA, 25 bp, Probe sequence
gtgatggttcagttacaatttcaga

SEQ ID NO: 210445 - DNA, 25 bp, Probe sequence
ggtaacttatacactgcaggacaat

SEQ ID NO: 210446 - DNA, 25 bp, Probe sequence
ggctgctgctgcacaaggtgctgga

SEQ ID NO: 210447 - DNA, 25 bp, Probe sequence
tggtcacgttgcatatgtagaaagt

SEQ ID NO: 210448 - DNA, 25 bp, Probe sequence
tgctgctgcacaaggtgctggattc

SEQ ID NO: 210449 - DNA, 25 bp, Probe sequence
tctacttggggaaatgctaataatt

SEQ ID NO: 210450 - DNA, 25 bp, Probe sequence
taattgggctgctgctgcacaaggt

SEQ ID NO: 210451 - DNA, 25 bp, Probe sequence
tatagtggcggacctttctcagtaa

SEQ ID NO: 210452 - DNA, 25 bp, Probe sequence
attaccgatgacttaaaatcactta

SEQ ID NO: 210453 - DNA, 25 bp, Probe sequence
attttatcactatcaacgctgctta

SEQ ID NO: 210454 - DNA, 25 bp, Probe sequence
atttgaagcacgtgacatgatgtct

SEQ ID NO: 210455 - DNA, 25 bp, Probe sequence
atgtagtattaacaccgcatattgg

SEQ ID NO: 210456 - DNA, 25 bp, Probe sequence
agtgccgttcaaggtgagaaaccac

SEQ ID NO: 210457 - DNA, 25 bp, Probe sequence
acgagaaatcggtgcaaaatatgta

SEQ ID NO: 210458 - DNA, 25 bp, Probe sequence
aacaccgcatattggtaatgctaca

SEQ ID NO: 210459 - DNA, 25 bp, Probe sequence
aagacttaaaaatcattgccaacta

SEQ ID NO: 210460 - DNA, 25 bp, Probe sequence
aatgaaattgaaggtgctgcacttg

SEQ ID NO: 210461 - DNA, 25 bp, Probe sequence
caattggattagtacttgcagtagc

SEQ ID NO: 210462 - DNA, 25 bp, Probe sequence
caatcggcattatcggtttaggtga

SEQ ID NO: 210463 - DNA, 25 bp, Probe sequence
cctctcgtggtccaatcgtgcacga

SEQ ID NO: 210464 - DNA, 25 bp, Probe sequence
cctaaagcatcaacaaacgcgactg

SEQ ID NO: 210465 - DNA, 25 bp, Probe sequence
gcgactgccttaattagtttattat

SEQ ID NO: 210466 - DNA, 25 bp, Probe sequence
gcacgaacaagcactagtgcaagca

SEQ ID NO: 210467 - DNA, 25 bp, Probe sequence
gaatgcagattttatcactatcaac

SEQ ID NO: 210468 - DNA, 25 bp, Probe sequence
gaaaaagtttatgttgctggtgcaa

SEQ ID NO: 210469 - DNA, 25 bp, Probe sequence
gacatgatgtctaaaattgttgcta

SEQ ID NO: 210470 - DNA, 25 bp, Probe sequence
gaccaattatcacgtacaactggat

SEQ ID NO: 210471 - DNA, 25 bp, Probe sequence
gagaaaccacaatttgtcgttaact

SEQ ID NO: 210472 - DNA, 25 bp, Probe sequence
gatgttacaaacacacctaaagcat

SEQ ID NO: 210473 - DNA, 25 bp, Probe sequence
gatgttatcgatgctggtaaagact

SEQ ID NO: 210474 - DNA, 25 bp, Probe sequence
gttgctggtgcaataccagaagtag

SEQ ID NO: 210475 - DNA, 25 bp, Probe sequence
gtatctgggaaaacaatcggcatta

SEQ ID NO: 210476 - DNA, 25 bp, Probe sequence
gtatttaatcaatgcctctcgtggt

SEQ ID NO: 210477 - DNA, 25 bp, Probe sequence
gtcgtgcaagagcatttgacatgga

SEQ ID NO: 210478 - DNA, 25 bp, Probe sequence
gtggtccaatcgtgcacgaacaagc

SEQ ID NO: 210479 - DNA, 25 bp, Probe sequence
ggtgctgcacttgatgtatatgaat

SEQ ID NO: 210480 - DNA, 25 bp, Probe sequence
ggtaatgctacatttgaagcacgtg

SEQ ID NO: 210481 - DNA, 25 bp, Probe sequence
ggattagtcgataaagacactttaa

SEQ ID NO: 210482 - DNA, 25 bp, Probe sequence
ggatgggcacctttatttttcagag

SEQ ID NO: 210483 - DNA, 25 bp, Probe sequence
ttaatcaatgcctctcgtggtccaa

SEQ ID NO: 210484 - DNA, 25 bp, Probe sequence
taatgctgcaattagtgccgttcaa

SEQ ID NO: 210485 - DNA, 25 bp, Probe sequence
taggtgaaattggtagtgcagtagc

SEQ ID NO: 210486 - DNA, 25 bp, Probe sequence
attcctgattacgaggttattcctg

SEQ ID NO: 210487 - DNA, 25 bp, Probe sequence
attatcagatcaatacagttacttt

SEQ ID NO: 210488 - DNA, 25 bp, Probe sequence
atttcacgttggatatgtgcctaga

SEQ ID NO: 210489 - DNA, 25 bp, Probe sequence
atcagactatggattacgaatacat

SEQ ID NO: 210490 - DNA, 25 bp, Probe sequence
atgtgcctagagagtatgcttcaag

SEQ ID NO: 210491 - DNA, 25 bp, Probe sequence
aggtgtatgaaattcctgattacga

SEQ ID NO: 210492 - DNA, 25 bp, Probe sequence
aaaatttcgttatcagacgtggtag

SEQ ID NO: 210493 - DNA, 25 bp, Probe sequence
acaatactgttgttactatttggaa

SEQ ID NO: 210494 - DNA, 25 bp, Probe sequence
aaaattcgacggagacaagaggaga

SEQ ID NO: 210495 - DNA, 25 bp, Probe sequence
aagaaccggataatccttatgatga

SEQ ID NO: 210496 - DNA, 25 bp, Probe sequence
aataatcagcgacagttgtgacata

SEQ ID NO: 210497 - DNA, 25 bp, Probe sequence
cagttactttgaaccaataatcagc

SEQ ID NO: 210498 - DNA, 25 bp, Probe sequence
cctttaacaggatttatctcaattt

SEQ ID NO: 210499 - DNA, 25 bp, Probe sequence
gaattgctttatgaagacaaggtgt

SEQ ID NO: 210500 - DNA, 25 bp, Probe sequence
gaatactctgaatttcacgttggat

SEQ ID NO: 210501 - DNA, 25 bp, Probe sequence
gaagacaccgtttcttgtaacgcat

SEQ ID NO: 210502 - DNA, 25 bp, Probe sequence
gacaccgtttcttgtaacgcatata

SEQ ID NO: 210503 - DNA, 25 bp, Probe sequence
gacgtggtagattacaatactgttg

SEQ ID NO: 210504 - DNA, 25 bp, Probe sequence
gacgctttctttttcttgtatagtg

SEQ ID NO: 210505 - DNA, 25 bp, Probe sequence
gaggttattcctggtgtattcttac

SEQ ID NO: 210506 - DNA, 25 bp, Probe sequence
gaggagaattggttctatattcatt

SEQ ID NO: 210507 - DNA, 25 bp, Probe sequence
gttgaaattttcgacgtcgtaggat

SEQ ID NO: 210508 - DNA, 25 bp, Probe sequence
gttgtgacataaaattcgacggaga

SEQ ID NO: 210509 - DNA, 25 bp, Probe sequence
gtatgcttcaaggttagtcaattat

SEQ ID NO: 210510 - DNA, 25 bp, Probe sequence
gtaggattaaattatgagggtcgta

SEQ ID NO: 210511 - DNA, 25 bp, Probe sequence
gtaacgcatatattaacggtggtaa

SEQ ID NO: 210512 - DNA, 25 bp, Probe sequence
tggaaaaaccaagcttctttaacat

SEQ ID NO: 210513 - DNA, 25 bp, Probe sequence
taatccttatgatgaaaacgcgata

SEQ ID NO: 210514 - DNA, 25 bp, Probe sequence
taacgacgctttctttttcttgtat

SEQ ID NO: 210515 - DNA, 25 bp, Probe sequence
tattcctggtgtattcttacaaaaa

SEQ ID NO: 210516 - DNA, 25 bp, Probe sequence
tattccagatgataatctacttatt

SEQ ID NO: 210517 - DNA, 25 bp, Probe sequence
ttcgtaacaaattctcctttaacag

SEQ ID NO: 210518 - DNA, 25 bp, Probe sequence
ttctttttcttgtatagtgatttga

SEQ ID NO: 210519 - DNA, 25 bp, Probe sequence
ttctatattcatttcacatgaggaa

SEQ ID NO: 210520 - DNA, 25 bp, Probe sequence
atcacctcatattcatatactcaat

SEQ ID NO: 210521 - DNA, 25 bp, Probe sequence
atcagcttttttcattgcctaaaaa

SEQ ID NO: 210522 - DNA, 25 bp, Probe sequence
atctgaattttctggccgtagaata

SEQ ID NO: 210523 - DNA, 25 bp, Probe sequence
acctcatattcatatactcaatctg

SEQ ID NO: 210524 - DNA, 25 bp, Probe sequence
acctctttatctacgcataaatact

SEQ ID NO: 210525 - DNA, 25 bp, Probe sequence
actcaatctgaattttctggccgta

SEQ ID NO: 210526 - DNA, 25 bp, Probe sequence
aaatcacctcatattcatatactca

SEQ ID NO: 210527 - DNA, 25 bp, Probe sequence
aaaatcacctcatattcatatactc

SEQ ID NO: 210528 - DNA, 25 bp, Probe sequence
aatctgaattttctggccgtagaat

SEQ ID NO: 210529 - DNA, 25 bp, Probe sequence
aatcacctcatattcatatactcaa

SEQ ID NO: 210530 - DNA, 25 bp, Probe sequence
caatctgaattttctggccgtagaa

SEQ ID NO: 210531 - DNA, 25 bp, Probe sequence
cacctcatattcatatactcaatct

SEQ ID NO: 210532 - DNA, 25 bp, Probe sequence
cagcttttttcattgcctaaaaact

SEQ ID NO: 210533 - DNA, 25 bp, Probe sequence
cattgcctaaaaacttaatgtcccg

SEQ ID NO: 210534 - DNA, 25 bp, Probe sequence
ctcaatctgaattttctggccgtag

SEQ ID NO: 210535 - DNA, 25 bp, Probe sequence
ctctttatctacgcataaatactta

SEQ ID NO: 210536 - DNA, 25 bp, Probe sequence
ctcatattcatatactcaatctgaa

SEQ ID NO: 210537 - DNA, 25 bp, Probe sequence
ctgaattttctggccgtagaataga

SEQ ID NO: 210538 - DNA, 25 bp, Probe sequence
cgacctctttatctacgcataaata

SEQ ID NO: 210539 - DNA, 25 bp, Probe sequence
ccgacctctttatctacgcataaat

SEQ ID NO: 210540 - DNA, 25 bp, Probe sequence
cctctttatctacgcataaatactt

SEQ ID NO: 210541 - DNA, 25 bp, Probe sequence
cctcatattcatatactcaatctga

SEQ ID NO: 210542 - DNA, 25 bp, Probe sequence
gaattttctggccgtagaatagaaa

SEQ ID NO: 210543 - DNA, 25 bp, Probe sequence
gaatagaaaaattacttcataacag

SEQ ID NO: 210544 - DNA, 25 bp, Probe sequence
gacctctttatctacgcataaatac

SEQ ID NO: 210545 - DNA, 25 bp, Probe sequence
gtttcataataaaatgcatatcaaa

SEQ ID NO: 210546 - DNA, 25 bp, Probe sequence
tgaattttctggccgtagaatagaa

SEQ ID NO: 210547 - DNA, 25 bp, Probe sequence
tctgaattttctggccgtagaatag

SEQ ID NO: 210548 - DNA, 25 bp, Probe sequence
tcagcttttttcattgcctaaaaac

SEQ ID NO: 210549 - DNA, 25 bp, Probe sequence
tcacctcatattcatatactcaatc

SEQ ID NO: 210550 - DNA, 25 bp, Probe sequence
tcaatctgaattttctggccgtaga

SEQ ID NO: 210551 - DNA, 25 bp, Probe sequence
tactcaatctgaattttctggccgt

SEQ ID NO: 210552 - DNA, 25 bp, Probe sequence
tattcagtttcataataaaatgcat

SEQ ID NO: 210553 - DNA, 25 bp, Probe sequence
ttatctacgcataaatacttattac

SEQ ID NO: 210554 - DNA, 25 bp, Probe sequence
attactcacgctttttcgattgaaa

SEQ ID NO: 210555 - DNA, 25 bp, Probe sequence
agttaagtgggtatgtttctgaaat

SEQ ID NO: 210556 - DNA, 25 bp, Probe sequence
aggcgaaaaaagtacgactctacat

SEQ ID NO: 210557 - DNA, 25 bp, Probe sequence
agttcacttacttcaatggcacaaa

SEQ ID NO: 210558 - DNA, 25 bp, Probe sequence
agaattttttgaacataatccgatc

SEQ ID NO: 210559 - DNA, 25 bp, Probe sequence
acgttgatagtttatctgcaggcct

SEQ ID NO: 210560 - DNA, 25 bp, Probe sequence
acaacatagatttattttcacgatt

SEQ ID NO: 210561 - DNA, 25 bp, Probe sequence
aaaaatagcaagaagttcacttact

SEQ ID NO: 210562 - DNA, 25 bp, Probe sequence
aatggcacaaaatgattctgaaatg

SEQ ID NO: 210563 - DNA, 25 bp, Probe sequence
aatccgatcaattttgactttactt

SEQ ID NO: 210564 - DNA, 25 bp, Probe sequence
aatatctcgtgttgcaaaagatgta

SEQ ID NO: 210565 - DNA, 25 bp, Probe sequence
aattaatgatgttttcgagggattt

SEQ ID NO: 210566 - DNA, 25 bp, Probe sequence
gactttacttttgatgaagaaccga

SEQ ID NO: 210567 - DNA, 25 bp, Probe sequence
gactttgaaattttagtagacgtcg

SEQ ID NO: 210568 - DNA, 25 bp, Probe sequence
gcaaacattactcacgctttttcga

SEQ ID NO: 210569 - DNA, 25 bp, Probe sequence
gcacatatctccttcagaatttttt

SEQ ID NO: 210570 - DNA, 25 bp, Probe sequence
gaagagctttttccaaataaaggcg

SEQ ID NO: 210571 - DNA, 25 bp, Probe sequence
gaactactgtcagaaagaggactaa

SEQ ID NO: 210572 - DNA, 25 bp, Probe sequence
gaaatagattgtctgaactactgtc

SEQ ID NO: 210573 - DNA, 25 bp, Probe sequence
gaaattttacaaactgatagccgtt

SEQ ID NO: 210574 - DNA, 25 bp, Probe sequence
gacgatattgaagagctttttccaa

SEQ ID NO: 210575 - DNA, 25 bp, Probe sequence
gataactaattcacaacatagattt

SEQ ID NO: 210576 - DNA, 25 bp, Probe sequence
gttatctgcacatatctccttcaga

SEQ ID NO: 210577 - DNA, 25 bp, Probe sequence
gtagacgtcgaattagataataggc

SEQ ID NO: 210578 - DNA, 25 bp, Probe sequence
gtacgactctacataaagaaatttt

SEQ ID NO: 210579 - DNA, 25 bp, Probe sequence
ggactaaaaatatctcgtgttgcaa

SEQ ID NO: 210580 - DNA, 25 bp, Probe sequence
tgtagttatctgcacatatctcctt

SEQ ID NO: 210581 - DNA, 25 bp, Probe sequence
tgcaggccttaaaaacttgttattt

SEQ ID NO: 210582 - DNA, 25 bp, Probe sequence
taactgcaaacattactcacgcttt

SEQ ID NO: 210583 - DNA, 25 bp, Probe sequence
taaattttgacttagacgtctcata

SEQ ID NO: 210584 - DNA, 25 bp, Probe sequence
tatctgcaggccttaaaaacttgtt

SEQ ID NO: 210585 - DNA, 25 bp, Probe sequence
tttcgattgaaaattttgactttga

SEQ ID NO: 210586 - DNA, 25 bp, Probe sequence
ttcgagggatttgaagtaactgcaa

SEQ ID NO: 210587 - DNA, 25 bp, Probe sequence
ttgacttagacgtctcatataaaga

SEQ ID NO: 210588 - DNA, 25 bp, Probe sequence
attcaaacgcatatttataaattta

SEQ ID NO: 210589 - DNA, 25 bp, Probe sequence
attcaatatcttaatttttatcata

SEQ ID NO: 210590 - DNA, 25 bp, Probe sequence
atatgagacaacaaattactaattt

SEQ ID NO: 210591 - DNA, 25 bp, Probe sequence
atgacagattggaacattcaaacgc

SEQ ID NO: 210592 - DNA, 25 bp, Probe sequence
atggtaacaaaattcaatatcttaa

SEQ ID NO: 210593 - DNA, 25 bp, Probe sequence
agattggaacattcaaacgcatatt

SEQ ID NO: 210594 - DNA, 25 bp, Probe sequence
acgaaactaagtatatgagacaaca

SEQ ID NO: 210595 - DNA, 25 bp, Probe sequence
actatctaacgcattatttgcaatt

SEQ ID NO: 210596 - DNA, 25 bp, Probe sequence
acagattggaacattcaaacgcata

SEQ ID NO: 210597 - DNA, 25 bp, Probe sequence
aacattcaaacgcatatttataaat

SEQ ID NO: 210598 - DNA, 25 bp, Probe sequence
aactatctaacgcattatttgcaat

SEQ ID NO: 210599 - DNA, 25 bp, Probe sequence
cccctccgacaagtcgactatggta

SEQ ID NO: 210600 - DNA, 25 bp, Probe sequence
aacgcattatttgcaattaaatttg

SEQ ID NO: 210601 - DNA, 25 bp, Probe sequence
aagtcgactatggtaacaaaattca

SEQ ID NO: 210602 - DNA, 25 bp, Probe sequence
ctccgacaagtcgactatggtaaca

SEQ ID NO: 210603 - DNA, 25 bp, Probe sequence
ccctccgacaagtcgactatggtaa

SEQ ID NO: 210604 - DNA, 25 bp, Probe sequence
ccgacaagtcgactatggtaacaaa

SEQ ID NO: 210605 - DNA, 25 bp, Probe sequence
gacaagtcgactatggtaacaaaat

SEQ ID NO: 210606 - DNA, 25 bp, Probe sequence
gaattgaataagttcaaaggctttg

SEQ ID NO: 210607 - DNA, 25 bp, Probe sequence
gacagattggaacattcaaacgcat

SEQ ID NO: 210608 - DNA, 25 bp, Probe sequence
gactatggtaacaaaattcaatatc

SEQ ID NO: 210609 - DNA, 25 bp, Probe sequence
gattcaaatcattgatacgattaaa

SEQ ID NO: 210610 - DNA, 25 bp, Probe sequence
gattggaacattcaaacgcatattt

SEQ ID NO: 210611 - DNA, 25 bp, Probe sequence
gtcgactatggtaacaaaattcaat

SEQ ID NO: 210612 - DNA, 25 bp, Probe sequence
ggaacattcaaacgcatatttataa

SEQ ID NO: 210613 - DNA, 25 bp, Probe sequence
tggaacattcaaacgcatatttata

SEQ ID NO: 210614 - DNA, 25 bp, Probe sequence
tccgacaagtcgactatggtaacaa

SEQ ID NO: 210615 - DNA, 25 bp, Probe sequence
tcccctccgacaagtcgactatggt

SEQ ID NO: 210616 - DNA, 25 bp, Probe sequence
tctaacgcattatttgcaattaaat

SEQ ID NO: 210617 - DNA, 25 bp, Probe sequence
tcaatatcttaatttttatcataca

SEQ ID NO: 210618 - DNA, 25 bp, Probe sequence
tatgaaattataacactacttaata

SEQ ID NO: 210619 - DNA, 25 bp, Probe sequence
tatctaacgcattatttgcaattaa

SEQ ID NO: 210620 - DNA, 25 bp, Probe sequence
tttgattcaaatcattgatacgatt

SEQ ID NO: 210621 - DNA, 25 bp, Probe sequence
ttaaccaaatagttactaatgaatt

SEQ ID NO: 210622 - DNA, 25 bp, Probe sequence
attactgatggcggttttcacgact

SEQ ID NO: 210623 - DNA, 25 bp, Probe sequence
attatcacgcatcattagatttcat

SEQ ID NO: 210624 - DNA, 25 bp, Probe sequence
atttgctcaaatgttcactattgat

SEQ ID NO: 210625 - DNA, 25 bp, Probe sequence
atattagtacatcatcagtcattcg

SEQ ID NO: 210626 - DNA, 25 bp, Probe sequence
atatggttttggcgcatcttttgta

SEQ ID NO: 210627 - DNA, 25 bp, Probe sequence
atcagtcattcgattcagcaagaaa

SEQ ID NO: 210628 - DNA, 25 bp, Probe sequence
atgcatatgggagcaacaacttcat

SEQ ID NO: 210629 - DNA, 25 bp, Probe sequence
agggataatcccgtagcacaggcat

SEQ ID NO: 210630 - DNA, 25 bp, Probe sequence
agcacaggcatcaaatattgtttta

SEQ ID NO: 210631 - DNA, 25 bp, Probe sequence
acatcatcagtcattcgattcagca

SEQ ID NO: 210632 - DNA, 25 bp, Probe sequence
aaagcatcatcaatttacaatgttg

SEQ ID NO: 210633 - DNA, 25 bp, Probe sequence
aaaatggctttagataactatcgta

SEQ ID NO: 210634 - DNA, 25 bp, Probe sequence
aatcccgtagcacaggcatcaaata

SEQ ID NO: 210635 - DNA, 25 bp, Probe sequence
aatatgttcctaaagcatcatcaat

SEQ ID NO: 210636 - DNA, 25 bp, Probe sequence
gctaccgacttataccaaaagttat

SEQ ID NO: 210637 - DNA, 25 bp, Probe sequence
caacaacttcattatttgctcaaat

SEQ ID NO: 210638 - DNA, 25 bp, Probe sequence
cataacacaatctaaaatggcttta

SEQ ID NO: 210639 - DNA, 25 bp, Probe sequence
ctgatggcggttttcacgacttgaa

SEQ ID NO: 210640 - DNA, 25 bp, Probe sequence
gcatcattagatttcataacacaat

SEQ ID NO: 210641 - DNA, 25 bp, Probe sequence
gaactaaactccatacacgtactac

SEQ ID NO: 210642 - DNA, 25 bp, Probe sequence
gaaagcacagaatctttaagaacta

SEQ ID NO: 210643 - DNA, 25 bp, Probe sequence
gagacgatttttatatatggttttg

SEQ ID NO: 210644 - DNA, 25 bp, Probe sequence
gaggtctcaagacttagcaagctta

SEQ ID NO: 210645 - DNA, 25 bp, Probe sequence
gttatgttgcattaaattatcacgc

SEQ ID NO: 210646 - DNA, 25 bp, Probe sequence
gttattgatgactaccatataccta

SEQ ID NO: 210647 - DNA, 25 bp, Probe sequence
gtagttgctaccgacttataccaaa

SEQ ID NO: 210648 - DNA, 25 bp, Probe sequence
gtactacacgcgcacttaatcatgc

SEQ ID NO: 210649 - DNA, 25 bp, Probe sequence
gtcattgtttaaaacgttctgagac

SEQ ID NO: 210650 - DNA, 25 bp, Probe sequence
ggcgcatcttttgtagttgctaccg

SEQ ID NO: 210651 - DNA, 25 bp, Probe sequence
tacacgtactacacgcgcacttaat

SEQ ID NO: 210652 - DNA, 25 bp, Probe sequence
tagcaagcttattagatattagtac

SEQ ID NO: 210653 - DNA, 25 bp, Probe sequence
tattagcaactcacaattcgaacga

SEQ ID NO: 210654 - DNA, 25 bp, Probe sequence
tattttatattatcgttatgttgca

SEQ ID NO: 210655 - DNA, 25 bp, Probe sequence
ttattcttattactaacaatggtac

SEQ ID NO: 210656 - DNA, 25 bp, Probe sequence
attaattctccagagcgcaagatta

SEQ ID NO: 210657 - DNA, 25 bp, Probe sequence
atcggtatggaaaaacctgacatcc

SEQ ID NO: 210658 - DNA, 25 bp, Probe sequence
acgactttaccgattgcattaatta

SEQ ID NO: 210659 - DNA, 25 bp, Probe sequence
aaataaaggaggtcgttcatcatga

SEQ ID NO: 210660 - DNA, 25 bp, Probe sequence
aaatcggtgtcatcactgggttaat

SEQ ID NO: 210661 - DNA, 25 bp, Probe sequence
aaaaacctgacatcctatatttagt

SEQ ID NO: 210662 - DNA, 25 bp, Probe sequence
aacacttgctttcatactcatttgt

SEQ ID NO: 210663 - DNA, 25 bp, Probe sequence
aacggtacaaatcggtgtcatcact

SEQ ID NO: 210664 - DNA, 25 bp, Probe sequence
aacctgacatcctatatttagttgg

SEQ ID NO: 210665 - DNA, 25 bp, Probe sequence
aattctccagagcgcaagattaaac

SEQ ID NO: 210666 - DNA, 25 bp, Probe sequence
cacttgctttcatactcatttgtct

SEQ ID NO: 210667 - DNA, 25 bp, Probe sequence
catcggtgtgattgctacgtttatt

SEQ ID NO: 210668 - DNA, 25 bp, Probe sequence
catcactgggttaatcatcggtgtg

SEQ ID NO: 210669 - DNA, 25 bp, Probe sequence
ctttaccgattgcattaattattgg

SEQ ID NO: 210670 - DNA, 25 bp, Probe sequence
cttgctttcatactcatttgtctta

SEQ ID NO: 210671 - DNA, 25 bp, Probe sequence
ctattattaattctccagagcgcaa

SEQ ID NO: 210672 - DNA, 25 bp, Probe sequence
ctccagagcgcaagattaaactcgg

SEQ ID NO: 210673 - DNA, 25 bp, Probe sequence
cggtgtgattgctacgtttatttgg

SEQ ID NO: 210674 - DNA, 25 bp, Probe sequence
cggtgtcatcactgggttaatcatc

SEQ ID NO: 210675 - DNA, 25 bp, Probe sequence
gcgccatatttttaacggtacaaat

SEQ ID NO: 210676 - DNA, 25 bp, Probe sequence
gctgtagcatttttcatcataaatt

SEQ ID NO: 210677 - DNA, 25 bp, Probe sequence
gctacgtttatttgggaattgattg

SEQ ID NO: 210678 - DNA, 25 bp, Probe sequence
gcatttttcatcataaattatatcg

SEQ ID NO: 210679 - DNA, 25 bp, Probe sequence
gcaacacttgctttcatactcattt

SEQ ID NO: 210680 - DNA, 25 bp, Probe sequence
gaagaactattattgcaacacttgc

SEQ ID NO: 210681 - DNA, 25 bp, Probe sequence
gacatcctatatttagttggaagaa

SEQ ID NO: 210682 - DNA, 25 bp, Probe sequence
gattgctacgtttatttgggaattg

SEQ ID NO: 210683 - DNA, 25 bp, Probe sequence
gtgtgattgctacgtttatttggga

SEQ ID NO: 210684 - DNA, 25 bp, Probe sequence
gtgtcatcactgggttaatcatcgg

SEQ ID NO: 210685 - DNA, 25 bp, Probe sequence
ggtacaaatcggtgtcatcactggg

SEQ ID NO: 210686 - DNA, 25 bp, Probe sequence
ggaaaaacctgacatcctatattta

SEQ ID NO: 210687 - DNA, 25 bp, Probe sequence
tgcaacacttgctttcatactcatt

SEQ ID NO: 210688 - DNA, 25 bp, Probe sequence
tgctttcatactcatttgtcttaca

SEQ ID NO: 210689 - DNA, 25 bp, Probe sequence
tttgctgtagcatttttcatcataa

SEQ ID NO: 210690 - DNA, 25 bp, Probe sequence
atttggtgacatgcatcgtctagtt

SEQ ID NO: 210691 - DNA, 25 bp, Probe sequence
atgtacttggtttctcagttgacta

SEQ ID NO: 210692 - DNA, 25 bp, Probe sequence
agatctatcgatgaacaagccctaa

SEQ ID NO: 210693 - DNA, 25 bp, Probe sequence
agtgcccgtattttacgtgataaat

SEQ ID NO: 210694 - DNA, 25 bp, Probe sequence
gactaccccttgtccaagttgaatt

SEQ ID NO: 210695 - DNA, 25 bp, Probe sequence
aaattacacaggcttattccgctac

SEQ ID NO: 210696 - DNA, 25 bp, Probe sequence
aaatgagcgtcatgcggacaaatta

SEQ ID NO: 210697 - DNA, 25 bp, Probe sequence
aaagccattgaatctttcgtggcag

SEQ ID NO: 210698 - DNA, 25 bp, Probe sequence
aagcgctttgttgaagcttatcgtt

SEQ ID NO: 210699 - DNA, 25 bp, Probe sequence
aatgattgtgccgacaccacacatg

SEQ ID NO: 210700 - DNA, 25 bp, Probe sequence
aatgcgtccgtatcaagtgtatgcg

SEQ ID NO: 210701 - DNA, 25 bp, Probe sequence
caaagtattcacgcgcttattaaat

SEQ ID NO: 210702 - DNA, 25 bp, Probe sequence
cagacgatgcactgagagtattctc

SEQ ID NO: 210703 - DNA, 25 bp, Probe sequence
gccgacaccacacatggttgatgac

SEQ ID NO: 210704 - DNA, 25 bp, Probe sequence
gaatttcaacgtctgttaacgatga

SEQ ID NO: 210705 - DNA, 25 bp, Probe sequence
gaatactgatggcaatgcgtccgta

SEQ ID NO: 210706 - DNA, 25 bp, Probe sequence
gaagtgccatatcattcacgtgaaa

SEQ ID NO: 210707 - DNA, 25 bp, Probe sequence
gaagagtcacatgttttattggagt

SEQ ID NO: 210708 - DNA, 25 bp, Probe sequence
gaagcacttattcaacaagcgactg

SEQ ID NO: 210709 - DNA, 25 bp, Probe sequence
gacaatgttgtaccttctttaaata

SEQ ID NO: 210710 - DNA, 25 bp, Probe sequence
gacgaatttttcaacagacacaact

SEQ ID NO: 210711 - DNA, 25 bp, Probe sequence
gacgcttatcgtgagcttaaaatga

SEQ ID NO: 210712 - DNA, 25 bp, Probe sequence
gagtgtcatcgcagtcaatttggtg

SEQ ID NO: 210713 - DNA, 25 bp, Probe sequence
gatttaattcaagcgtattcacgta

SEQ ID NO: 210714 - DNA, 25 bp, Probe sequence
gtttgccacttattgtaacgacgat

SEQ ID NO: 210715 - DNA, 25 bp, Probe sequence
ggaattagtaacacgacatatcatc

SEQ ID NO: 210716 - DNA, 25 bp, Probe sequence
ggtgttgaaacgcgatacttttcta

SEQ ID NO: 210717 - DNA, 25 bp, Probe sequence
ggtgttgtaaacccacatcacctta

SEQ ID NO: 210718 - DNA, 25 bp, Probe sequence
ggcataccaaagtgaatacgcatta

SEQ ID NO: 210719 - DNA, 25 bp, Probe sequence
ggcttattccgctacatacaaatgt

SEQ ID NO: 210720 - DNA, 25 bp, Probe sequence
taatcaacggactaccccttgtcca

SEQ ID NO: 210721 - DNA, 25 bp, Probe sequence
tttggttgaccgtaaagacttggat

SEQ ID NO: 210722 - DNA, 25 bp, Probe sequence
tcatgcagatgatccgacattgagg

SEQ ID NO: 210723 - DNA, 25 bp, Probe sequence
taatacctcgcaactggtacgccaa

SEQ ID NO: 210724 - DNA, 25 bp, Probe sequence
attagctttgtgccaaactaccgtg

SEQ ID NO: 210725 - DNA, 25 bp, Probe sequence
attattagctttgtgccaaactacc

SEQ ID NO: 210726 - DNA, 25 bp, Probe sequence
atcttaattgtacttatcatcgtga

SEQ ID NO: 210727 - DNA, 25 bp, Probe sequence
atgacaacagcattaattggtgtaa

SEQ ID NO: 210728 - DNA, 25 bp, Probe sequence
actaccgtgctatgaaatcagcaaa

SEQ ID NO: 210729 - DNA, 25 bp, Probe sequence
aacagcattaattggtgtaattgta

SEQ ID NO: 210730 - DNA, 25 bp, Probe sequence
aactaccgtgctatgaaatcagcaa

SEQ ID NO: 210731 - DNA, 25 bp, Probe sequence
aagtaatgcaacaagagctacaatt

SEQ ID NO: 210732 - DNA, 25 bp, Probe sequence
caaactaccgtgctatgaaatcagc

SEQ ID NO: 210733 - DNA, 25 bp, Probe sequence
ctttgtgccaaactaccgtgctatg

SEQ ID NO: 210734 - DNA, 25 bp, Probe sequence
ctaattattagctttgtgccaaact

SEQ ID NO: 210735 - DNA, 25 bp, Probe sequence
ccaaactaccgtgctatgaaatcag

SEQ ID NO: 210736 - DNA, 25 bp, Probe sequence
gccaaactaccgtgctatgaaatca

SEQ ID NO: 210737 - DNA, 25 bp, Probe sequence
gaacaaggaagtaatgcaacaagag

SEQ ID NO: 210738 - DNA, 25 bp, Probe sequence
gaaatcagcaaaagaacaaggaagt

SEQ ID NO: 210739 - DNA, 25 bp, Probe sequence
gacaacagcattaattggtgtaatt

SEQ ID NO: 210740 - DNA, 25 bp, Probe sequence
gtattaatcttactaattattagct

SEQ ID NO: 210741 - DNA, 25 bp, Probe sequence
gtaggcatagatattatcttaattg

SEQ ID NO: 210742 - DNA, 25 bp, Probe sequence
gtgccaaactaccgtgctatgaaat

SEQ ID NO: 210743 - DNA, 25 bp, Probe sequence
gtgtaattgtattaatcttactaat

SEQ ID NO: 210744 - DNA, 25 bp, Probe sequence
ggaagtaatgcaacaagagctacaa

SEQ ID NO: 210745 - DNA, 25 bp, Probe sequence
tgtgccaaactaccgtgctatgaaa

SEQ ID NO: 210746 - DNA, 25 bp, Probe sequence
tgccaaactaccgtgctatgaaatc

SEQ ID NO: 210747 - DNA, 25 bp, Probe sequence
ttagctttgtgccaaactaccgtgc

SEQ ID NO: 210748 - DNA, 25 bp, Probe sequence
tcttaattgtacttatcatcgtgac

SEQ ID NO: 210749 - DNA, 25 bp, Probe sequence
tactaattattagctttgtgccaaa

SEQ ID NO: 210750 - DNA, 25 bp, Probe sequence
taccgtgctatgaaatcagcaaaag

SEQ ID NO: 210751 - DNA, 25 bp, Probe sequence
tagctttgtgccaaactaccgtgct

SEQ ID NO: 210752 - DNA, 25 bp, Probe sequence
tattagctttgtgccaaactaccgt

SEQ ID NO: 210753 - DNA, 25 bp, Probe sequence
tttgtgccaaactaccgtgctatga

SEQ ID NO: 210754 - DNA, 25 bp, Probe sequence
tattatcttaattgtacttatcatc

SEQ ID NO: 210755 - DNA, 25 bp, Probe sequence
ttattagctttgtgccaaactaccg

SEQ ID NO: 210756 - DNA, 25 bp, Probe sequence
ttatcttaattgtacttatcatcgt

SEQ ID NO: 210757 - DNA, 25 bp, Probe sequence
ttgtgccaaactaccgtgctatgaa

SEQ ID NO: 210758 - DNA, 25 bp, Probe sequence
attgtctttatgttacttcaaatga

SEQ ID NO: 210759 - DNA, 25 bp, Probe sequence
attgacttatcttctaatatttatg

SEQ ID NO: 210760 - DNA, 25 bp, Probe sequence
atacaaacttttgatgacctcgaaa

SEQ ID NO: 210761 - DNA, 25 bp, Probe sequence
atcttaccattagcttatatagtta

SEQ ID NO: 210762 - DNA, 25 bp, Probe sequence
atctattttatctacttcgcaatta

SEQ ID NO: 210763 - DNA, 25 bp, Probe sequence
aagccgacagaactctagatattat

SEQ ID NO: 210764 - DNA, 25 bp, Probe sequence
aatggttggcaagtagctgaacaat

SEQ ID NO: 210765 - DNA, 25 bp, Probe sequence
aataattttggtgttcctgaacaat

SEQ ID NO: 210766 - DNA, 25 bp, Probe sequence
cagacttttcactaatatcaatgtt

SEQ ID NO: 210767 - DNA, 25 bp, Probe sequence
ccaggtattacctcaaatggttggc

SEQ ID NO: 210768 - DNA, 25 bp, Probe sequence
gaacaattaccaggtataccaggta

SEQ ID NO: 210769 - DNA, 25 bp, Probe sequence
gaatcaggtcattttcatacagact

SEQ ID NO: 210770 - DNA, 25 bp, Probe sequence
gaaatgctatcaagtcgtgaatatt

SEQ ID NO: 210771 - DNA, 25 bp, Probe sequence
gactgaccacaaacttagaacaatt

SEQ ID NO: 210772 - DNA, 25 bp, Probe sequence
gagaagctatccacagagtttctga

SEQ ID NO: 210773 - DNA, 25 bp, Probe sequence
gagtcacctttacaaattggcaatg

SEQ ID NO: 210774 - DNA, 25 bp, Probe sequence
gagtatttatatcttaccattagct

SEQ ID NO: 210775 - DNA, 25 bp, Probe sequence
gagtttctgaatcaatgtacatgaa

SEQ ID NO: 210776 - DNA, 25 bp, Probe sequence
gaggatgtgtacaagctattaaatt

SEQ ID NO: 210777 - DNA, 25 bp, Probe sequence
gatgcactagttatttttaaggacg

SEQ ID NO: 210778 - DNA, 25 bp, Probe sequence
gatttctttgaacctaccacggtag

SEQ ID NO: 210779 - DNA, 25 bp, Probe sequence
gattatatccaattgacttatcttc

SEQ ID NO: 210780 - DNA, 25 bp, Probe sequence
gtttttatctattttatctacttcg

SEQ ID NO: 210781 - DNA, 25 bp, Probe sequence
gtatcataagtgcagtgagtatcta

SEQ ID NO: 210782 - DNA, 25 bp, Probe sequence
gtagctgaacaattgactgaccaca

SEQ ID NO: 210783 - DNA, 25 bp, Probe sequence
ggtgttcctgaacaattaccaggta

SEQ ID NO: 210784 - DNA, 25 bp, Probe sequence
ggaaaagtcatgtttatgattcgag

SEQ ID NO: 210785 - DNA, 25 bp, Probe sequence
ggcaatgttatcttaaccccatctt

SEQ ID NO: 210786 - DNA, 25 bp, Probe sequence
tgaacctaccacggtagaccaaaat

SEQ ID NO: 210787 - DNA, 25 bp, Probe sequence
tcattttcatacagacttttcacta

SEQ ID NO: 210788 - DNA, 25 bp, Probe sequence
tcaaaaagccgacagaactctagat

SEQ ID NO: 210789 - DNA, 25 bp, Probe sequence
tacatcatttgtttatcttttaagt

SEQ ID NO: 210790 - DNA, 25 bp, Probe sequence
tatagttattgagtcacctttacaa

SEQ ID NO: 210791 - DNA, 25 bp, Probe sequence
tttacttttcagagaagctatccac

SEQ ID NO: 210792 - DNA, 25 bp, Probe sequence
atttcatttttaagttttcatcagt

SEQ ID NO: 210793 - DNA, 25 bp, Probe sequence
atatcaatctgcaaagcgtttcgat

SEQ ID NO: 210794 - DNA, 25 bp, Probe sequence
atacatcatcaacatcgccggttta

SEQ ID NO: 210795 - DNA, 25 bp, Probe sequence
atcatcaacatcgccggtttaaatg

SEQ ID NO: 210796 - DNA, 25 bp, Probe sequence
atcacactgatatcacttatacgtt

SEQ ID NO: 210797 - DNA, 25 bp, Probe sequence
atctgccaattatagatcgtcatct

SEQ ID NO: 210798 - DNA, 25 bp, Probe sequence
atcgacattctatctgccaattata

SEQ ID NO: 210799 - DNA, 25 bp, Probe sequence
agttttcatcagtatagtattttcc

SEQ ID NO: 210800 - DNA, 25 bp, Probe sequence
acaacttccatacttcatttcattt

SEQ ID NO: 210801 - DNA, 25 bp, Probe sequence
aacaaacagtttaatcagtatgtat

SEQ ID NO: 210802 - DNA, 25 bp, Probe sequence
aagcgtttcgatatcaatattgatg

SEQ ID NO: 210803 - DNA, 25 bp, Probe sequence
aatattgatggcttgcaagatgctt

SEQ ID NO: 210804 - DNA, 25 bp, Probe sequence
catcgccggtttaaatgaccgtact

SEQ ID NO: 210805 - DNA, 25 bp, Probe sequence
cttccatacttcatttcatttttaa

SEQ ID NO: 210806 - DNA, 25 bp, Probe sequence
cttatacgttgaataagtctcatgc

SEQ ID NO: 210807 - DNA, 25 bp, Probe sequence
ctatgagcaaagctcgtatatcata

SEQ ID NO: 210808 - DNA, 25 bp, Probe sequence
gctaaattgttacatacgattgcaa

SEQ ID NO: 210809 - DNA, 25 bp, Probe sequence
gcttaccaaagcaacaacttccata

SEQ ID NO: 210810 - DNA, 25 bp, Probe sequence
gcaacaacttccatacttcatttca

SEQ ID NO: 210811 - DNA, 25 bp, Probe sequence
gaattacttgattctgataatttat

SEQ ID NO: 210812 - DNA, 25 bp, Probe sequence
gaatatgttccaaaatcacactgat

SEQ ID NO: 210813 - DNA, 25 bp, Probe sequence
gaaacatacatcatcaacatcgccg

SEQ ID NO: 210814 - DNA, 25 bp, Probe sequence
gaaatatcgacattctatctgccaa

SEQ ID NO: 210815 - DNA, 25 bp, Probe sequence
gacaaagtcatcgatattatgaata

SEQ ID NO: 210816 - DNA, 25 bp, Probe sequence
gatggcttgcaagatgctttcatta

SEQ ID NO: 210817 - DNA, 25 bp, Probe sequence
gatgctttcattaaagacaaagtca

SEQ ID NO: 210818 - DNA, 25 bp, Probe sequence
gatgcgttgcaattctcaataaaca

SEQ ID NO: 210819 - DNA, 25 bp, Probe sequence
gatcgtcatctatgagcaaagctcg

SEQ ID NO: 210820 - DNA, 25 bp, Probe sequence
gttacatacgattgcaactagaaat

SEQ ID NO: 210821 - DNA, 25 bp, Probe sequence
gtatgtattagaaattagcttacca

SEQ ID NO: 210822 - DNA, 25 bp, Probe sequence
tgtacaattttgtgatgcgttgcaa

SEQ ID NO: 210823 - DNA, 25 bp, Probe sequence
tctgcaaagcgtttcgatatcaata

SEQ ID NO: 210824 - DNA, 25 bp, Probe sequence
tattttccaagtactttcaccaaag

SEQ ID NO: 210825 - DNA, 25 bp, Probe sequence
tttgtgatgcgttgcaattctcaat

SEQ ID NO: 210826 - DNA, 25 bp, Probe sequence
atacaagatttagcgcaattcacac

SEQ ID NO: 210827 - DNA, 25 bp, Probe sequence
atgagtatttactacataatgatat

SEQ ID NO: 210828 - DNA, 25 bp, Probe sequence
atgtcattgtacttcatgatgaaca

SEQ ID NO: 210829 - DNA, 25 bp, Probe sequence
acattcagttatttagaacgcgttg

SEQ ID NO: 210830 - DNA, 25 bp, Probe sequence
acataatcatgtcattgtacttcat

SEQ ID NO: 210831 - DNA, 25 bp, Probe sequence
acacattctacttaactgatggtac

SEQ ID NO: 210832 - DNA, 25 bp, Probe sequence
acacatgcctcgaatgcaaccattc

SEQ ID NO: 210833 - DNA, 25 bp, Probe sequence
acaacgtctatgtatccagtaacac

SEQ ID NO: 210834 - DNA, 25 bp, Probe sequence
aaacgttgcttcagaggcacagcgt

SEQ ID NO: 210835 - DNA, 25 bp, Probe sequence
aagataatacccttgctcaaaaagc

SEQ ID NO: 210836 - DNA, 25 bp, Probe sequence
aatgaaagataatacccttgctcaa

SEQ ID NO: 210837 - DNA, 25 bp, Probe sequence
aatgcatacagcttcaacaatatat

SEQ ID NO: 210838 - DNA, 25 bp, Probe sequence
aatactttatttctgttactacaat

SEQ ID NO: 210839 - DNA, 25 bp, Probe sequence
caaaaagcaaattacaacgtctatg

SEQ ID NO: 210840 - DNA, 25 bp, Probe sequence
caggtgaaacacatgaattattaga

SEQ ID NO: 210841 - DNA, 25 bp, Probe sequence
gcaattcacacatgcctcgaatgca

SEQ ID NO: 210842 - DNA, 25 bp, Probe sequence
gaacgcgttgattaccagcttctta

SEQ ID NO: 210843 - DNA, 25 bp, Probe sequence
gaaatcgatagtacattcagttatt

SEQ ID NO: 210844 - DNA, 25 bp, Probe sequence
gactattctagcttcatcagttatc

SEQ ID NO: 210845 - DNA, 25 bp, Probe sequence
gagtgaacctaatgatttattcttt

SEQ ID NO: 210846 - DNA, 25 bp, Probe sequence
gatggtacagactattctagcttca

SEQ ID NO: 210847 - DNA, 25 bp, Probe sequence
gattttgaacaagagtgaacctaat

SEQ ID NO: 210848 - DNA, 25 bp, Probe sequence
gttgcttcagaggcacagcgtatat

SEQ ID NO: 210849 - DNA, 25 bp, Probe sequence
gtatccagtaacacattctacttaa

SEQ ID NO: 210850 - DNA, 25 bp, Probe sequence
gtatggtacagggcgtgcacagtta

SEQ ID NO: 210851 - DNA, 25 bp, Probe sequence
gtaacaaacttgcttcaacttagac

SEQ ID NO: 210852 - DNA, 25 bp, Probe sequence
ggtacagactattctagcttcatca

SEQ ID NO: 210853 - DNA, 25 bp, Probe sequence
ggcgtgcacagttaaacgttgcttc

SEQ ID NO: 210854 - DNA, 25 bp, Probe sequence
tcatatattctttgaaacacttgta

SEQ ID NO: 210855 - DNA, 25 bp, Probe sequence
tagcttcatcagttatcatatattc

SEQ ID NO: 210856 - DNA, 25 bp, Probe sequence
tatagtgattttaaatcgtacctta

SEQ ID NO: 210857 - DNA, 25 bp, Probe sequence
aacttgcttcaacttagacaaaaat

SEQ ID NO: 210858 - DNA, 25 bp, Probe sequence
ttagcgcaattcacacatgcctcga

SEQ ID NO: 210859 - DNA, 25 bp, Probe sequence
ttctttattatttcattatcaggtg

SEQ ID NO: 210860 - DNA, 25 bp, Probe sequence
attgggactcttgaatctacgaatc

SEQ ID NO: 210861 - DNA, 25 bp, Probe sequence
attccgactaccctgaacagcaata

SEQ ID NO: 210862 - DNA, 25 bp, Probe sequence
atacttcttggctatcgtgaaatat

SEQ ID NO: 210863 - DNA, 25 bp, Probe sequence
atcattccgagattttattaccaat

SEQ ID NO: 210864 - DNA, 25 bp, Probe sequence
atggaagcagatttaggttatgact

SEQ ID NO: 210865 - DNA, 25 bp, Probe sequence
aggaatcttacattttattagcacc

SEQ ID NO: 210866 - DNA, 25 bp, Probe sequence
agccatctttaactgctacgattaa

SEQ ID NO: 210867 - DNA, 25 bp, Probe sequence
agccagccatctttaactgctacga

SEQ ID NO: 210868 - DNA, 25 bp, Probe sequence
aaagctgcacaatttttacatatta

SEQ ID NO: 210869 - DNA, 25 bp, Probe sequence
aacactccgaacaagtacatacatt

SEQ ID NO: 210870 - DNA, 25 bp, Probe sequence
aatcagcagttggatttgttcatct

SEQ ID NO: 210871 - DNA, 25 bp, Probe sequence
caaaaattctcaagtgcgcaaacac

SEQ ID NO: 210872 - DNA, 25 bp, Probe sequence
gaatctacgaatcaatggattgcga

SEQ ID NO: 210873 - DNA, 25 bp, Probe sequence
gaagaaatattcgtccaaatgtcgt

SEQ ID NO: 210874 - DNA, 25 bp, Probe sequence
gatgttgaaaatttgccactcatat

SEQ ID NO: 210875 - DNA, 25 bp, Probe sequence
gatcgattcgaatcagcagttggat

SEQ ID NO: 210876 - DNA, 25 bp, Probe sequence
gttatgcgagcgaattagttcaaca

SEQ ID NO: 210877 - DNA, 25 bp, Probe sequence
gtacaacaatgccaagattatttat

SEQ ID NO: 210878 - DNA, 25 bp, Probe sequence
gtcgttgtagaaacagatcgattcg

SEQ ID NO: 210879 - DNA, 25 bp, Probe sequence
gtgcgcaaacacttagatgactatt

SEQ ID NO: 210880 - DNA, 25 bp, Probe sequence
ggttacgctatcattccgagatttt

SEQ ID NO: 210881 - DNA, 25 bp, Probe sequence
ggttatgacttatttacacgttcaa

SEQ ID NO: 210882 - DNA, 25 bp, Probe sequence
ggcttaggttacgctatcattccga

SEQ ID NO: 210883 - DNA, 25 bp, Probe sequence
ggaatacagttttatcgttatgcga

SEQ ID NO: 210884 - DNA, 25 bp, Probe sequence
tacacgttcaacaaaagacatcaag

SEQ ID NO: 210885 - DNA, 25 bp, Probe sequence
tacatacattcgtacaacaatgcca

SEQ ID NO: 210886 - DNA, 25 bp, Probe sequence
taccctgaacagcaatatcgtttat

SEQ ID NO: 210887 - DNA, 25 bp, Probe sequence
tagttcaacaatatcgatccacgat

SEQ ID NO: 210888 - DNA, 25 bp, Probe sequence
tattcgtccaaatgtcgttgtagaa

SEQ ID NO: 210889 - DNA, 25 bp, Probe sequence
tatatggacttttagaggctcttta

SEQ ID NO: 210890 - DNA, 25 bp, Probe sequence
tttattaccaatcatttcacacgtc

SEQ ID NO: 210891 - DNA, 25 bp, Probe sequence
ttagaatacttcttggctatcgtga

SEQ ID NO: 210892 - DNA, 25 bp, Probe sequence
ttacatattagccagccatctttaa

SEQ ID NO: 210893 - DNA, 25 bp, Probe sequence
ttaagcgttacatcagaaccaagga

SEQ ID NO: 210894 - DNA, 25 bp, Probe sequence
attgctattgactggtaaaaaaact

SEQ ID NO: 210895 - DNA, 25 bp, Probe sequence
atttttatagagatattttacttgg

SEQ ID NO: 210896 - DNA, 25 bp, Probe sequence
atactggcacacttgagaacagatt

SEQ ID NO: 210897 - DNA, 25 bp, Probe sequence
atcatatatgcttttcagtcagaaa

SEQ ID NO: 210898 - DNA, 25 bp, Probe sequence
agaaaaagatataccacgtaatgaa

SEQ ID NO: 210899 - DNA, 25 bp, Probe sequence
agcttgcaggcctatggattgcttt

SEQ ID NO: 210900 - DNA, 25 bp, Probe sequence
aaatattggcatcagaggttaaaag

SEQ ID NO: 210901 - DNA, 25 bp, Probe sequence
aaaccacatatgacattttacaaat

SEQ ID NO: 210902 - DNA, 25 bp, Probe sequence
aaacgattcaatacatttttataga

SEQ ID NO: 210903 - DNA, 25 bp, Probe sequence
aaaatctattaatcatatatgcttt

SEQ ID NO: 210904 - DNA, 25 bp, Probe sequence
aagctagaattacatactggcacac

SEQ ID NO: 210905 - DNA, 25 bp, Probe sequence
aagaggctaaaccacatatgacatt

SEQ ID NO: 210906 - DNA, 25 bp, Probe sequence
cacttttcatatacacatatagctt

SEQ ID NO: 210907 - DNA, 25 bp, Probe sequence
caggcctatggattgctttaaatga

SEQ ID NO: 210908 - DNA, 25 bp, Probe sequence
cttgcaggcctatggattgctttaa

SEQ ID NO: 210909 - DNA, 25 bp, Probe sequence
gctagaattacatactggcacactt

SEQ ID NO: 210910 - DNA, 25 bp, Probe sequence
gctttcactatagatgacagcgaat

SEQ ID NO: 210911 - DNA, 25 bp, Probe sequence
gaattacatactggcacacttgaga

SEQ ID NO: 210912 - DNA, 25 bp, Probe sequence
gacagcgaatttaaatattggcatc

SEQ ID NO: 210913 - DNA, 25 bp, Probe sequence
gaccctgatggtcataagctagaat

SEQ ID NO: 210914 - DNA, 25 bp, Probe sequence
gagatagacaatcaatttactttac

SEQ ID NO: 210915 - DNA, 25 bp, Probe sequence
gaggctaaaccacatatgacatttt

SEQ ID NO: 210916 - DNA, 25 bp, Probe sequence
gtcagaaatttaaacgattcaatac

SEQ ID NO: 210917 - DNA, 25 bp, Probe sequence
ggaagagttagagatattagagata

SEQ ID NO: 210918 - DNA, 25 bp, Probe sequence
ggcacacttgagaacagattaaatt

SEQ ID NO: 210919 - DNA, 25 bp, Probe sequence
ggctaaaccacatatgacattttac

SEQ ID NO: 210920 - DNA, 25 bp, Probe sequence
ggcctatggattgctttaaatgaag

SEQ ID NO: 210921 - DNA, 25 bp, Probe sequence
tgactggtaaaaaaactgcttattt

SEQ ID NO: 210922 - DNA, 25 bp, Probe sequence
tcatatacacatatagctttcacta

SEQ ID NO: 210923 - DNA, 25 bp, Probe sequence
taatcatatatgcttttcagtcaga

SEQ ID NO: 210924 - DNA, 25 bp, Probe sequence
tagctttcactatagatgacagcga

SEQ ID NO: 210925 - DNA, 25 bp, Probe sequence
tagaattacatactggcacacttga

SEQ ID NO: 210926 - DNA, 25 bp, Probe sequence
tatatgcttttcagtcagaaattta

SEQ ID NO: 210927 - DNA, 25 bp, Probe sequence
ttacatactggcacacttgagaaca

SEQ ID NO: 210928 - DNA, 25 bp, Probe sequence
attggtgtcaaacactttatatttg

SEQ ID NO: 210929 - DNA, 25 bp, Probe sequence
attgctgcaatcatttgtatactcg

SEQ ID NO: 210930 - DNA, 25 bp, Probe sequence
attctaattattggtatgtacagct

SEQ ID NO: 210931 - DNA, 25 bp, Probe sequence
atacatttgcagatagctttatttt

SEQ ID NO: 210932 - DNA, 25 bp, Probe sequence
aaatttctggttttcaatgggcaat

SEQ ID NO: 210933 - DNA, 25 bp, Probe sequence
cagcctgaaagtaattgaacgtcta

SEQ ID NO: 210934 - DNA, 25 bp, Probe sequence
caggtgtagctactgcatcaacggt

SEQ ID NO: 210935 - DNA, 25 bp, Probe sequence
caggcttatcagtacctattacaca

SEQ ID NO: 210936 - DNA, 25 bp, Probe sequence
ctggttttcaatgggcaatgacgat

SEQ ID NO: 210937 - DNA, 25 bp, Probe sequence
cgaaccaagcattcatgaaggtact

SEQ ID NO: 210938 - DNA, 25 bp, Probe sequence
gcaggtttaaaattctcaatcagcc

SEQ ID NO: 210939 - DNA, 25 bp, Probe sequence
gcaccacaaagtgacgatttaacaa

SEQ ID NO: 210940 - DNA, 25 bp, Probe sequence
gcaatcatttgtatactcgttttca

SEQ ID NO: 210941 - DNA, 25 bp, Probe sequence
gaagaacttgagcctaataattatt

SEQ ID NO: 210942 - DNA, 25 bp, Probe sequence
gaagacagacgttcatcagttgtaa

SEQ ID NO: 210943 - DNA, 25 bp, Probe sequence
gaaactaatcatactgaggctgaaa

SEQ ID NO: 210944 - DNA, 25 bp, Probe sequence
gacgaaaccttgaagaacttgagcc

SEQ ID NO: 210945 - DNA, 25 bp, Probe sequence
gaggctgaaaaatcttcttcaaata

SEQ ID NO: 210946 - DNA, 25 bp, Probe sequence
gatctagcaccattaattgctgcaa

SEQ ID NO: 210947 - DNA, 25 bp, Probe sequence
gtacagctttaatacatttgcagat

SEQ ID NO: 210948 - DNA, 25 bp, Probe sequence
gtcagtagaatcagcagaatcagtt

SEQ ID NO: 210949 - DNA, 25 bp, Probe sequence
gtgacgatttaacaaacgattcaaa

SEQ ID NO: 210950 - DNA, 25 bp, Probe sequence
gtggctgacgaaccaagcattcatg

SEQ ID NO: 210951 - DNA, 25 bp, Probe sequence
ggcgttcgtagtagaattcggattc

SEQ ID NO: 210952 - DNA, 25 bp, Probe sequence
tgatgaagatcatgacatcacttcg

SEQ ID NO: 210953 - DNA, 25 bp, Probe sequence
tgaagttacagatctagcaccatta

SEQ ID NO: 210954 - DNA, 25 bp, Probe sequence
tgcagatagctttattttattacaa

SEQ ID NO: 210955 - DNA, 25 bp, Probe sequence
tgctagctttaattttacctttaat

SEQ ID NO: 210956 - DNA, 25 bp, Probe sequence
tccaacttgcaggtttaaaattctc

SEQ ID NO: 210957 - DNA, 25 bp, Probe sequence
tcaaactgaatctaatcatgatgaa

SEQ ID NO: 210958 - DNA, 25 bp, Probe sequence
taaaattctcaatcagcctgaaagt

SEQ ID NO: 210959 - DNA, 25 bp, Probe sequence
tatttagaccatgtcaatgacgatg

SEQ ID NO: 210960 - DNA, 25 bp, Probe sequence
tttattacaatcaacaggcttatca

SEQ ID NO: 210961 - DNA, 25 bp, Probe sequence
ttacaatggcgttatccattatgct

SEQ ID NO: 210962 - DNA, 25 bp, Probe sequence
atttctgtcaccaacaagacgcgat

SEQ ID NO: 210963 - DNA, 25 bp, Probe sequence
agatatgttacgatatgcactaaac

SEQ ID NO: 210964 - DNA, 25 bp, Probe sequence
agcgcatgtctacatctggtaaaac

SEQ ID NO: 210965 - DNA, 25 bp, Probe sequence
accaacaagacgcgataaacttcaa

SEQ ID NO: 210966 - DNA, 25 bp, Probe sequence
actaagatttcacaaacaacatggt

SEQ ID NO: 210967 - DNA, 25 bp, Probe sequence
acatctggtaaaacaggtttctatt

SEQ ID NO: 210968 - DNA, 25 bp, Probe sequence
acaacatggttatcttcaactggtt

SEQ ID NO: 210969 - DNA, 25 bp, Probe sequence
acaatccatttctgtcaccaacaag

SEQ ID NO: 210970 - DNA, 25 bp, Probe sequence
aaatgatcagctttacttaatacaa

SEQ ID NO: 210971 - DNA, 25 bp, Probe sequence
aacaaggctatgtatctccaaatga

SEQ ID NO: 210972 - DNA, 25 bp, Probe sequence
aatccaagatttgccttatagctcg

SEQ ID NO: 210973 - DNA, 25 bp, Probe sequence
aatatcgtttaggtgaagcgttaat

SEQ ID NO: 210974 - DNA, 25 bp, Probe sequence
aatattcctgatttagtgaagcgca

SEQ ID NO: 210975 - DNA, 25 bp, Probe sequence
caattcacgcaatttcgacaggaaa

SEQ ID NO: 210976 - DNA, 25 bp, Probe sequence
caagaagcaccaatcgaacatcgtt

SEQ ID NO: 210977 - DNA, 25 bp, Probe sequence
cacataaagcagtttgtgggtttag

SEQ ID NO: 210978 - DNA, 25 bp, Probe sequence
cgctctgctttagataaaactaaga

SEQ ID NO: 210979 - DNA, 25 bp, Probe sequence
gaacatcgtttatctgtacaacagc

SEQ ID NO: 210980 - DNA, 25 bp, Probe sequence
gaacaggcttataaagatcatggtg

SEQ ID NO: 210981 - DNA, 25 bp, Probe sequence
gacgaatctgatgtttactttggta

SEQ ID NO: 210982 - DNA, 25 bp, Probe sequence
gaggtttctgaaattagagaaccat

SEQ ID NO: 210983 - DNA, 25 bp, Probe sequence
gatatcaattcacgcaatttcgaca

SEQ ID NO: 210984 - DNA, 25 bp, Probe sequence
gtttcactggtgatgaacaggctta

SEQ ID NO: 210985 - DNA, 25 bp, Probe sequence
gtatctccaaatgatcagctttact

SEQ ID NO: 210986 - DNA, 25 bp, Probe sequence
gtgaagcgcatgtctacatctggta

SEQ ID NO: 210987 - DNA, 25 bp, Probe sequence
gtgaagcgttaattgaggtttctga

SEQ ID NO: 210988 - DNA, 25 bp, Probe sequence
ggttatcttcaactggtttcactgg

SEQ ID NO: 210989 - DNA, 25 bp, Probe sequence
ttccgggtattaaaacaaggctatg

SEQ ID NO: 210990 - DNA, 25 bp, Probe sequence
tgcactgtatcaagatgatttacct

SEQ ID NO: 210991 - DNA, 25 bp, Probe sequence
tgcactaaacaatccatttctgtca

SEQ ID NO: 210992 - DNA, 25 bp, Probe sequence
tcttcaactggtttcactggtgatg

SEQ ID NO: 210993 - DNA, 25 bp, Probe sequence
tcatgcgatgtttggagagaattta

SEQ ID NO: 210994 - DNA, 25 bp, Probe sequence
ttactttggtaatcaatatcgttta

SEQ ID NO: 210995 - DNA, 25 bp, Probe sequence
tttgccttatagctcgaaaagaccg

SEQ ID NO: 210996 - DNA, 25 bp, Probe sequence
agaaaggctacgaggtaacgaatgg

SEQ ID NO: 210997 - DNA, 25 bp, Probe sequence
attattgctagtccacgaatcggta

SEQ ID NO: 210998 - DNA, 25 bp, Probe sequence
atttatcaggataccactcaaacgt

SEQ ID NO: 210999 - DNA, 25 bp, Probe sequence
atgcatacgcatttactcattaatt

SEQ ID NO: 211000 - DNA, 25 bp, Probe sequence
atggatttcgttaataatgatacaa

SEQ ID NO: 211001 - DNA, 25 bp, Probe sequence
actaagaatcgtaaatatcctaaag

SEQ ID NO: 211002 - DNA, 25 bp, Probe sequence
aacattccacgggctatcgatggcg

SEQ ID NO: 211003 - DNA, 25 bp, Probe sequence
aatcagattgtatgtttcccgaaga

SEQ ID NO: 211004 - DNA, 25 bp, Probe sequence
caggctacatcgtggaaacggaagc

SEQ ID NO: 211005 - DNA, 25 bp, Probe sequence
catttgtgtctcgcatgcgtaaatc

SEQ ID NO: 211006 - DNA, 25 bp, Probe sequence
gctagtccacgaatcggtattccaa

SEQ ID NO: 211007 - DNA, 25 bp, Probe sequence
gcacatgtcatgcatacgcatttac

SEQ ID NO: 211008 - DNA, 25 bp, Probe sequence
gaaggtatacctgaaggcgtactta

SEQ ID NO: 211009 - DNA, 25 bp, Probe sequence
gaaaggtaatccatttgtgtctcgc

SEQ ID NO: 211010 - DNA, 25 bp, Probe sequence
gactaaggcatttaacattccacgg

SEQ ID NO: 211011 - DNA, 25 bp, Probe sequence
gactgtagattgtctattgatacta

SEQ ID NO: 211012 - DNA, 25 bp, Probe sequence
gtttatccgctatgttccgtaacag

SEQ ID NO: 211013 - DNA, 25 bp, Probe sequence
gtcattatataaacgtggtggtaca

SEQ ID NO: 211014 - DNA, 25 bp, Probe sequence
gtccacgaatcggtattccaaataa

SEQ ID NO: 211015 - DNA, 25 bp, Probe sequence
gtctcgcatgcgtaaatcagattgt

SEQ ID NO: 211016 - DNA, 25 bp, Probe sequence
ggtggtacaatttatgcacatgtca

SEQ ID NO: 211017 - DNA, 25 bp, Probe sequence
ggacacataaatctttacgttacac

SEQ ID NO: 211018 - DNA, 25 bp, Probe sequence
ggcatttaacattccacgggctatc

SEQ ID NO: 211019 - DNA, 25 bp, Probe sequence
tgtatgtttcccgaagatacttgga

SEQ ID NO: 211020 - DNA, 25 bp, Probe sequence
tgaatgatcgtgcggctcatggcta

SEQ ID NO: 211021 - DNA, 25 bp, Probe sequence
tccgctatgttccgtaacagaggta

SEQ ID NO: 211022 - DNA, 25 bp, Probe sequence
taatccatttgtgtctcgcatgcgt

SEQ ID NO: 211023 - DNA, 25 bp, Probe sequence
taacaaaatctgaaggtatacctga

SEQ ID NO: 211024 - DNA, 25 bp, Probe sequence
taaagatattattgctagtccacga

SEQ ID NO: 211025 - DNA, 25 bp, Probe sequence
taaatctttacgttacacagtgaaa

SEQ ID NO: 211026 - DNA, 25 bp, Probe sequence
taccactcaaacgtatacaggctac

SEQ ID NO: 211027 - DNA, 25 bp, Probe sequence
taggtgtcaaagtgatttatcagga

SEQ ID NO: 211028 - DNA, 25 bp, Probe sequence
tatacaggctacatcgtggaaacgg

SEQ ID NO: 211029 - DNA, 25 bp, Probe sequence
ttaggtttgaatgatcgtgcggctc

SEQ ID NO: 211030 - DNA, 25 bp, Probe sequence
atttgtataccagcaccagtgattg

SEQ ID NO: 211031 - DNA, 25 bp, Probe sequence
atttaatgccactgaagtattcttc

SEQ ID NO: 211032 - DNA, 25 bp, Probe sequence
atctcttgcgctaatgagcattcaa

SEQ ID NO: 211033 - DNA, 25 bp, Probe sequence
agatttcttcatgttagcattcttt

SEQ ID NO: 211034 - DNA, 25 bp, Probe sequence
agcattctttacgacaatcggtctt

SEQ ID NO: 211035 - DNA, 25 bp, Probe sequence
acgttataacttaaagcctcaacat

SEQ ID NO: 211036 - DNA, 25 bp, Probe sequence
acatagttggtgtatcactagcaaa

SEQ ID NO: 211037 - DNA, 25 bp, Probe sequence
aagcctcaacatagtgacgatacat

SEQ ID NO: 211038 - DNA, 25 bp, Probe sequence
aatgttccaatttacgttggctcat

SEQ ID NO: 211039 - DNA, 25 bp, Probe sequence
aatcggtcttggtgcatcattgaaa

SEQ ID NO: 211040 - DNA, 25 bp, Probe sequence
caatcgttgtattctgtatggcagt

SEQ ID NO: 211041 - DNA, 25 bp, Probe sequence
catgggcttggtgcaacgccaaatg

SEQ ID NO: 211042 - DNA, 25 bp, Probe sequence
gcgatgtcgcattaggtattttctt

SEQ ID NO: 211043 - DNA, 25 bp, Probe sequence
gcggctttggattcatttggcatgg

SEQ ID NO: 211044 - DNA, 25 bp, Probe sequence
gctatcgttaatcacgttaattttt

SEQ ID NO: 211045 - DNA, 25 bp, Probe sequence
gctgcaactttaggtcttgtatttg

SEQ ID NO: 211046 - DNA, 25 bp, Probe sequence
gctattatactttatgttttgtgct

SEQ ID NO: 211047 - DNA, 25 bp, Probe sequence
gatgctgcagtaatggtaggtggtt

SEQ ID NO: 211048 - DNA, 25 bp, Probe sequence
gatgcttcattcattcaagatttct

SEQ ID NO: 211049 - DNA, 25 bp, Probe sequence
gttgtacctattgttggtgcattct

SEQ ID NO: 211050 - DNA, 25 bp, Probe sequence
gttggtgcattcttaatcgatttaa

SEQ ID NO: 211051 - DNA, 25 bp, Probe sequence
gttttagttcaagttgtcgttatga

SEQ ID NO: 211052 - DNA, 25 bp, Probe sequence
gtattcttcattcaatttacaatcg

SEQ ID NO: 211053 - DNA, 25 bp, Probe sequence
gtcttgtatttggagggcttatcgg

SEQ ID NO: 211054 - DNA, 25 bp, Probe sequence
gtccgaaatatctctgaaagtttta

SEQ ID NO: 211055 - DNA, 25 bp, Probe sequence
gtcgttatgattttatttgctgttt

SEQ ID NO: 211056 - DNA, 25 bp, Probe sequence
ggtgcaacgccaaatgccatggcaa

SEQ ID NO: 211057 - DNA, 25 bp, Probe sequence
ggcagttggaagttatttcagtcat

SEQ ID NO: 211058 - DNA, 25 bp, Probe sequence
ggcttaatctttgctattttagttg

SEQ ID NO: 211059 - DNA, 25 bp, Probe sequence
taaacttgctatacctcttattatt

SEQ ID NO: 211060 - DNA, 25 bp, Probe sequence
taggtattttcttatctcttgcgct

SEQ ID NO: 211061 - DNA, 25 bp, Probe sequence
tttgtgctatcatttcagtcattca

SEQ ID NO: 211062 - DNA, 25 bp, Probe sequence
ttactaatcaaattggcgatgtcgc

SEQ ID NO: 211063 - DNA, 25 bp, Probe sequence
ttgctattttagttgcggctttgga

SEQ ID NO: 211064 - DNA, 25 bp, Probe sequence
attgtctcttggcgatgtatttact

SEQ ID NO: 211065 - DNA, 25 bp, Probe sequence
ataatatcatttttagtgacgtcgt

SEQ ID NO: 211066 - DNA, 25 bp, Probe sequence
atcatttttagtgacgtcgtgaatc

SEQ ID NO: 211067 - DNA, 25 bp, Probe sequence
agtgacgtcgtgaatcgttttaatt

SEQ ID NO: 211068 - DNA, 25 bp, Probe sequence
agaattgtctcttggcgatgtattt

SEQ ID NO: 211069 - DNA, 25 bp, Probe sequence
actatcacttggcctgaacaattag

SEQ ID NO: 211070 - DNA, 25 bp, Probe sequence
cacttggcctgaacaattaggacat

SEQ ID NO: 211071 - DNA, 25 bp, Probe sequence
acacatactcaaaccgtaacatctg

SEQ ID NO: 211072 - DNA, 25 bp, Probe sequence
acactagcatcaacaaatgaagtaa

SEQ ID NO: 211073 - DNA, 25 bp, Probe sequence
aagcggttgcatttatttttaacat

SEQ ID NO: 211074 - DNA, 25 bp, Probe sequence
aattaatcagcacacacgtcgttct

SEQ ID NO: 211075 - DNA, 25 bp, Probe sequence
caactttttacacatactcaaaccg

SEQ ID NO: 211076 - DNA, 25 bp, Probe sequence
caactatcacttggcctgaacaatt

SEQ ID NO: 211077 - DNA, 25 bp, Probe sequence
ctcaaaccgtaacatctgaattcat

SEQ ID NO: 211078 - DNA, 25 bp, Probe sequence
ctagaagaacatacgacatacctct

SEQ ID NO: 211079 - DNA, 25 bp, Probe sequence
gcacacacgtcgttctgatgctttt

SEQ ID NO: 211080 - DNA, 25 bp, Probe sequence
gcaattccacacaaaggagcattaa

SEQ ID NO: 211081 - DNA, 25 bp, Probe sequence
gaatcgttttaattacagccacggt

SEQ ID NO: 211082 - DNA, 25 bp, Probe sequence
gacataaaatagcaattccacacaa

SEQ ID NO: 211083 - DNA, 25 bp, Probe sequence
gaccataacaatcatatgcatgatg

SEQ ID NO: 211084 - DNA, 25 bp, Probe sequence
gattacgattataagcggttgcatt

SEQ ID NO: 211085 - DNA, 25 bp, Probe sequence
gttgcatttatttttaacattaact

SEQ ID NO: 211086 - DNA, 25 bp, Probe sequence
gttctgatgcttttcctgaatcatt

SEQ ID NO: 211087 - DNA, 25 bp, Probe sequence
gtcgtgaatcgttttaattacagcc

SEQ ID NO: 211088 - DNA, 25 bp, Probe sequence
gtctcttggcgatgtatttactgtt

SEQ ID NO: 211089 - DNA, 25 bp, Probe sequence
gggaattaatcagcacacacgtcgt

SEQ ID NO: 211090 - DNA, 25 bp, Probe sequence
ggcgatgtatttactgttactttat

SEQ ID NO: 211091 - DNA, 25 bp, Probe sequence
tcagcacacacgtcgttctgatgct

SEQ ID NO: 211092 - DNA, 25 bp, Probe sequence
tcgttctgatgcttttcctgaatca

SEQ ID NO: 211093 - DNA, 25 bp, Probe sequence
tcaacacaaatagcacactattata

SEQ ID NO: 211094 - DNA, 25 bp, Probe sequence
taattacagccacggtctttcttta

SEQ ID NO: 211095 - DNA, 25 bp, Probe sequence
tacagccacggtctttctttaaaag

SEQ ID NO: 211096 - DNA, 25 bp, Probe sequence
tttacactagaagaacatacgacat

SEQ ID NO: 211097 - DNA, 25 bp, Probe sequence
ttactgttactttatatatttatga

SEQ ID NO: 211098 - DNA, 25 bp, Probe sequence
ataccaatgacgaaactgcataaca

SEQ ID NO: 211099 - DNA, 25 bp, Probe sequence
atacactgagtgaagttcaaaaacc

SEQ ID NO: 211100 - DNA, 25 bp, Probe sequence
ataaaagtgatgttgttgatgaggc

SEQ ID NO: 211101 - DNA, 25 bp, Probe sequence
ataaactatatcattttcttaagga

SEQ ID NO: 211102 - DNA, 25 bp, Probe sequence
ataatgatttcacagagtatgatgt

SEQ ID NO: 211103 - DNA, 25 bp, Probe sequence
atgacgaaactgcataacaatatga

SEQ ID NO: 211104 - DNA, 25 bp, Probe sequence
atggctagatacaaagatacaacag

SEQ ID NO: 211105 - DNA, 25 bp, Probe sequence
agttcttgttatatttcgcaaaaat

SEQ ID NO: 211106 - DNA, 25 bp, Probe sequence
agtattgctgattttatattgttaa

SEQ ID NO: 211107 - DNA, 25 bp, Probe sequence
aaatcatatggatgtgccaacttat

SEQ ID NO: 211108 - DNA, 25 bp, Probe sequence
aagaaataccaatgacgaaactgca

SEQ ID NO: 211109 - DNA, 25 bp, Probe sequence
aagagttattgcacaaaatcatatg

SEQ ID NO: 211110 - DNA, 25 bp, Probe sequence
aatacaaagatgaatttttagcagc

SEQ ID NO: 211111 - DNA, 25 bp, Probe sequence
aatacaactactgcactttctgaga

SEQ ID NO: 211112 - DNA, 25 bp, Probe sequence
aattaagttcttgttatatttcgca

SEQ ID NO: 211113 - DNA, 25 bp, Probe sequence
caactactgcactttctgagatgcc

SEQ ID NO: 211114 - DNA, 25 bp, Probe sequence
caaaagcgatgtacaactttttacg

SEQ ID NO: 211115 - DNA, 25 bp, Probe sequence
gcgatgtacaactttttacgaaaag

SEQ ID NO: 211116 - DNA, 25 bp, Probe sequence
gaataaagttatggctagatacaaa

SEQ ID NO: 211117 - DNA, 25 bp, Probe sequence
gagtatgatgtgttatttgacgtgt

SEQ ID NO: 211118 - DNA, 25 bp, Probe sequence
gatgtgttatttgacgtgtttaaag

SEQ ID NO: 211119 - DNA, 25 bp, Probe sequence
gatgaggcatatgatttttatatac

SEQ ID NO: 211120 - DNA, 25 bp, Probe sequence
gatattacatcaaattgcaatcaaa

SEQ ID NO: 211121 - DNA, 25 bp, Probe sequence
gtgatgttgttgatgaggcatatga

SEQ ID NO: 211122 - DNA, 25 bp, Probe sequence
ggatgtgccaacttataatgatttc

SEQ ID NO: 211123 - DNA, 25 bp, Probe sequence
tgacgtgtttaaagaaataccaatg

SEQ ID NO: 211124 - DNA, 25 bp, Probe sequence
tgccaacttataatgatttcacaga

SEQ ID NO: 211125 - DNA, 25 bp, Probe sequence
taatcgtgtttttagtcaaaagata

SEQ ID NO: 211126 - DNA, 25 bp, Probe sequence
taactatcttaaaaagtcttatcgt

SEQ ID NO: 211127 - DNA, 25 bp, Probe sequence
taaaaagtcttatcgtaacgaatat

SEQ ID NO: 211128 - DNA, 25 bp, Probe sequence
tacaactactgcactttctgagatg

SEQ ID NO: 211129 - DNA, 25 bp, Probe sequence
tatgatgtgttatttgacgtgttta

SEQ ID NO: 211130 - DNA, 25 bp, Probe sequence
tatgattaatcgtgtttttagtcaa

SEQ ID NO: 211131 - DNA, 25 bp, Probe sequence
ttaatacaactactgcactttctga

SEQ ID NO: 211132 - DNA, 25 bp, Probe sequence
attccacgtcaattcgataattttt

SEQ ID NO: 211133 - DNA, 25 bp, Probe sequence
atacacttattggtgattttcactc

SEQ ID NO: 211134 - DNA, 25 bp, Probe sequence
atacattaacggaccagcaaatcag

SEQ ID NO: 211135 - DNA, 25 bp, Probe sequence
ataattttttagatcaattttatca

SEQ ID NO: 211136 - DNA, 25 bp, Probe sequence
atgcattacaacaaaagattcatat

SEQ ID NO: 211137 - DNA, 25 bp, Probe sequence
agggttatacattaacggaccagca

SEQ ID NO: 211138 - DNA, 25 bp, Probe sequence
agggcaatactttatcatcacacat

SEQ ID NO: 211139 - DNA, 25 bp, Probe sequence
actttatcatcacacatatcaatac

SEQ ID NO: 211140 - DNA, 25 bp, Probe sequence
acttagtgatattccacgtcaattc

SEQ ID NO: 211141 - DNA, 25 bp, Probe sequence
acagctaactttgcagaacttagtg

SEQ ID NO: 211142 - DNA, 25 bp, Probe sequence
aaaacagctaactttgcagaactta

SEQ ID NO: 211143 - DNA, 25 bp, Probe sequence
aatactttatcatcacacatatcaa

SEQ ID NO: 211144 - DNA, 25 bp, Probe sequence
cacttattggtgattttcactcaga

SEQ ID NO: 211145 - DNA, 25 bp, Probe sequence
cagcttgaagatcaacatttcctag

SEQ ID NO: 211146 - DNA, 25 bp, Probe sequence
catcacacatatcaatacacttatt

SEQ ID NO: 211147 - DNA, 25 bp, Probe sequence
catatggcttatgttcaaggacaaa

SEQ ID NO: 211148 - DNA, 25 bp, Probe sequence
cttatgttcaaggacaaaagcaagc

SEQ ID NO: 211149 - DNA, 25 bp, Probe sequence
gcttgaagatcaacatttcctagaa

SEQ ID NO: 211150 - DNA, 25 bp, Probe sequence
gcagaacttagtgatattccacgtc

SEQ ID NO: 211151 - DNA, 25 bp, Probe sequence
gcaatactttatcatcacacatatc

SEQ ID NO: 211152 - DNA, 25 bp, Probe sequence
gaacttagtgatattccacgtcaat

SEQ ID NO: 211153 - DNA, 25 bp, Probe sequence
gataatattatgactattgtggaac

SEQ ID NO: 211154 - DNA, 25 bp, Probe sequence
gataaaacagctaactttgcagaac

SEQ ID NO: 211155 - DNA, 25 bp, Probe sequence
gatattccacgtcaattcgataatt

SEQ ID NO: 211156 - DNA, 25 bp, Probe sequence
gatttattagatgatgttaagtttg

SEQ ID NO: 211157 - DNA, 25 bp, Probe sequence
gtcaattcgataattttttagatca

SEQ ID NO: 211158 - DNA, 25 bp, Probe sequence
gtgatattccacgtcaattcgataa

SEQ ID NO: 211159 - DNA, 25 bp, Probe sequence
gggcaatactttatcatcacacata

SEQ ID NO: 211160 - DNA, 25 bp, Probe sequence
ggtgattttcactcagaagctcatt

SEQ ID NO: 211161 - DNA, 25 bp, Probe sequence
tggtgattttcactcagaagctcat

SEQ ID NO: 211162 - DNA, 25 bp, Probe sequence
tgattttcactcagaagctcattaa

SEQ ID NO: 211163 - DNA, 25 bp, Probe sequence
tccacgtcaattcgataatttttta

SEQ ID NO: 211164 - DNA, 25 bp, Probe sequence
tagtgatattccacgtcaattcgat

SEQ ID NO: 211165 - DNA, 25 bp, Probe sequence
tatcatcacacatatcaatacactt

SEQ ID NO: 211166 - DNA, 25 bp, Probe sequence
attggtaagcatgattattcaaatc

SEQ ID NO: 211167 - DNA, 25 bp, Probe sequence
attatttaaatgtaccaccagatca

SEQ ID NO: 211168 - DNA, 25 bp, Probe sequence
atgacaaatccaaatcaacgattag

SEQ ID NO: 211169 - DNA, 25 bp, Probe sequence
acgagacaattggaaaaatgcatca

SEQ ID NO: 211170 - DNA, 25 bp, Probe sequence
acagcatgtggaaacaacccatttt

SEQ ID NO: 211171 - DNA, 25 bp, Probe sequence
aattgtatttaatcgcacagttcta

SEQ ID NO: 211172 - DNA, 25 bp, Probe sequence
caatcgctggatacagcatgtggaa

SEQ ID NO: 211173 - DNA, 25 bp, Probe sequence
caacgattagaaccatttgatgaga

SEQ ID NO: 211174 - DNA, 25 bp, Probe sequence
ctattcataacggcatcattttact

SEQ ID NO: 211175 - DNA, 25 bp, Probe sequence
cgtggtaagcgatatggtaagaaaa

SEQ ID NO: 211176 - DNA, 25 bp, Probe sequence
cccatttttaatattgtcttcacca

SEQ ID NO: 211177 - DNA, 25 bp, Probe sequence
gctgacgctattcataacggcatca

SEQ ID NO: 211178 - DNA, 25 bp, Probe sequence
gaatattcatcgtggtaagcgatat

SEQ ID NO: 211179 - DNA, 25 bp, Probe sequence
gaatcgatcgcttaattttagtctt

SEQ ID NO: 211180 - DNA, 25 bp, Probe sequence
gaaaaaacgttcattggtaagcatg

SEQ ID NO: 211181 - DNA, 25 bp, Probe sequence
gaagctgacgctattcataacggca

SEQ ID NO: 211182 - DNA, 25 bp, Probe sequence
gaaccatttgatgagacatttcaac

SEQ ID NO: 211183 - DNA, 25 bp, Probe sequence
gacgctattcataacggcatcattt

SEQ ID NO: 211184 - DNA, 25 bp, Probe sequence
gatcgcttaattttagtctttaacg

SEQ ID NO: 211185 - DNA, 25 bp, Probe sequence
gttataagcttattcttccgtaatc

SEQ ID NO: 211186 - DNA, 25 bp, Probe sequence
gtatcgttagcctagtcataacaat

SEQ ID NO: 211187 - DNA, 25 bp, Probe sequence
gtaccaccagatcaagtgattacag

SEQ ID NO: 211188 - DNA, 25 bp, Probe sequence
gtgattacagaagctgacgctattc

SEQ ID NO: 211189 - DNA, 25 bp, Probe sequence
ggtttacttgttataagcttattct

SEQ ID NO: 211190 - DNA, 25 bp, Probe sequence
tgtggaaacaacccatttttaatat

SEQ ID NO: 211191 - DNA, 25 bp, Probe sequence
tgggtaatatcaatgatttacaaca

SEQ ID NO: 211192 - DNA, 25 bp, Probe sequence
tcaaatcattgttgttatattaacc

SEQ ID NO: 211193 - DNA, 25 bp, Probe sequence
taatcgcacagttctaaaagtagta

SEQ ID NO: 211194 - DNA, 25 bp, Probe sequence
taagcttattcttccgtaatcgcat

SEQ ID NO: 211195 - DNA, 25 bp, Probe sequence
tactgacaattgtatttaatcgcac

SEQ ID NO: 211196 - DNA, 25 bp, Probe sequence
tagcctagtcataacaatactgaca

SEQ ID NO: 211197 - DNA, 25 bp, Probe sequence
tatgtatcgttagcctagtcataac

SEQ ID NO: 211198 - DNA, 25 bp, Probe sequence
tattgtcttcaccaaagaatctgta

SEQ ID NO: 211199 - DNA, 25 bp, Probe sequence
tttacaacaaggaatcgatcgctta

SEQ ID NO: 211200 - DNA, 25 bp, Probe sequence
attggctaatacgattaaacttcaa

SEQ ID NO: 211201 - DNA, 25 bp, Probe sequence
attaattggctttcgaatggttgta

SEQ ID NO: 211202 - DNA, 25 bp, Probe sequence
atttcttctaagcgcgctacatcat

SEQ ID NO: 211203 - DNA, 25 bp, Probe sequence
atagaaattcaaaacgcacttgttg

SEQ ID NO: 211204 - DNA, 25 bp, Probe sequence
atattaatcgttctactttttatga

SEQ ID NO: 211205 - DNA, 25 bp, Probe sequence
atatcataggcggtcaagctggggt

SEQ ID NO: 211206 - DNA, 25 bp, Probe sequence
atatccactaaaatgatttgcgcgt

SEQ ID NO: 211207 - DNA, 25 bp, Probe sequence
ataaacagctttatgttacatatat

SEQ ID NO: 211208 - DNA, 25 bp, Probe sequence
agcttaaactttataaattcttcat

SEQ ID NO: 211209 - DNA, 25 bp, Probe sequence
agttacctatccaatgaaaacatta

SEQ ID NO: 211210 - DNA, 25 bp, Probe sequence
actacagtaaccaataaacagcttt

SEQ ID NO: 211211 - DNA, 25 bp, Probe sequence
aaaattccaatttcttctaagcgcg

SEQ ID NO: 211212 - DNA, 25 bp, Probe sequence
aacgcacttgttgatttgatggctg

SEQ ID NO: 211213 - DNA, 25 bp, Probe sequence
aagacattttagttacctatccaat

SEQ ID NO: 211214 - DNA, 25 bp, Probe sequence
aatgatttgcgcgtattgtaatatt

SEQ ID NO: 211215 - DNA, 25 bp, Probe sequence
aatcgttctactttttatgattatt

SEQ ID NO: 211216 - DNA, 25 bp, Probe sequence
aattcttcattattattgctaagta

SEQ ID NO: 211217 - DNA, 25 bp, Probe sequence
cgcacttgttgatttgatggctgaa

SEQ ID NO: 211218 - DNA, 25 bp, Probe sequence
gcgtattgtaatattaatcgttcta

SEQ ID NO: 211219 - DNA, 25 bp, Probe sequence
gaatcacctgaagaagttgctgaca

SEQ ID NO: 211220 - DNA, 25 bp, Probe sequence
gaatgactatagtactacagtaacc

SEQ ID NO: 211221 - DNA, 25 bp, Probe sequence
gaatggttgtaatgaatcacctgaa

SEQ ID NO: 211222 - DNA, 25 bp, Probe sequence
gaagttgctgacattttattggcta

SEQ ID NO: 211223 - DNA, 25 bp, Probe sequence
gaaaacattattcatagactatata

SEQ ID NO: 211224 - DNA, 25 bp, Probe sequence
gaaacgacaagccaaaatagaaatt

SEQ ID NO: 211225 - DNA, 25 bp, Probe sequence
gatggctgaatatccttttcaagaa

SEQ ID NO: 211226 - DNA, 25 bp, Probe sequence
gatttgatggctgaatatccttttc

SEQ ID NO: 211227 - DNA, 25 bp, Probe sequence
gatttattggataccatcaactcaa

SEQ ID NO: 211228 - DNA, 25 bp, Probe sequence
gttgctgacattttattggctaata

SEQ ID NO: 211229 - DNA, 25 bp, Probe sequence
gttacatatatcataggcggtcaag

SEQ ID NO: 211230 - DNA, 25 bp, Probe sequence
tggataccatcaactcaaagcataa

SEQ ID NO: 211231 - DNA, 25 bp, Probe sequence
taagcgcgctacatcataatttcga

SEQ ID NO: 211232 - DNA, 25 bp, Probe sequence
tatccttttcaagaaatatccacta

SEQ ID NO: 211233 - DNA, 25 bp, Probe sequence
ttccaatttcttctaagcgcgctac

SEQ ID NO: 211234 - DNA, 25 bp, Probe sequence
atatactaatggaatctcactctat

SEQ ID NO: 211235 - DNA, 25 bp, Probe sequence
atcactttttcttacatgtgctcat

SEQ ID NO: 211236 - DNA, 25 bp, Probe sequence
atcagtattatcatgctattcaaac

SEQ ID NO: 211237 - DNA, 25 bp, Probe sequence
agatatttattttctcatacttcta

SEQ ID NO: 211238 - DNA, 25 bp, Probe sequence
acatacacaaactttttatattcta

SEQ ID NO: 211239 - DNA, 25 bp, Probe sequence
acaccaatgcttgcagcgcgtttag

SEQ ID NO: 211240 - DNA, 25 bp, Probe sequence
aacatgctacatcttagttgtcata

SEQ ID NO: 211241 - DNA, 25 bp, Probe sequence
aacgttatttgattgcacatggtgt

SEQ ID NO: 211242 - DNA, 25 bp, Probe sequence
aagtacgattcagtcacctattgtg

SEQ ID NO: 211243 - DNA, 25 bp, Probe sequence
catacaccatatcactttttcttac

SEQ ID NO: 211244 - DNA, 25 bp, Probe sequence
catacttctagtcgcttatttatta

SEQ ID NO: 211245 - DNA, 25 bp, Probe sequence
gccttacgactagcccaaaaattag

SEQ ID NO: 211246 - DNA, 25 bp, Probe sequence
gaagctttagctatgcaacgttatt

SEQ ID NO: 211247 - DNA, 25 bp, Probe sequence
gaaaggtttgtctatgtggttagct

SEQ ID NO: 211248 - DNA, 25 bp, Probe sequence
gacctatactttcccttggtctatg

SEQ ID NO: 211249 - DNA, 25 bp, Probe sequence
gttatctcgtttggacagtatcata

SEQ ID NO: 211250 - DNA, 25 bp, Probe sequence
gtttgtgtaacaagtcagtttcatg

SEQ ID NO: 211251 - DNA, 25 bp, Probe sequence
gtcatatcgatatttttgtcactca

SEQ ID NO: 211252 - DNA, 25 bp, Probe sequence
gtgttaggtgctggtatttttaccg

SEQ ID NO: 211253 - DNA, 25 bp, Probe sequence
ggttagctatattatgtctttccct

SEQ ID NO: 211254 - DNA, 25 bp, Probe sequence
ggcggacaaggaccagacgaaccaa

SEQ ID NO: 211255 - DNA, 25 bp, Probe sequence
ggaatctcactctataaatacatac

SEQ ID NO: 211256 - DNA, 25 bp, Probe sequence
tcaactatactctgacgttaaattt

SEQ ID NO: 211257 - DNA, 25 bp, Probe sequence
tacacatcagcacttctatttataa

SEQ ID NO: 211258 - DNA, 25 bp, Probe sequence
tactaacctttatttgttatctcgt

SEQ ID NO: 211259 - DNA, 25 bp, Probe sequence
tagcatcatgacctatactttccct

SEQ ID NO: 211260 - DNA, 25 bp, Probe sequence
taggtttatctatcgatggtgtcgg

SEQ ID NO: 211261 - DNA, 25 bp, Probe sequence
tatctaggcgtaatgtatcagtata

SEQ ID NO: 211262 - DNA, 25 bp, Probe sequence
tatcaacaacaagcatcagcaacaa

SEQ ID NO: 211263 - DNA, 25 bp, Probe sequence
tatacttatcgttatttgtccgtta

SEQ ID NO: 211264 - DNA, 25 bp, Probe sequence
tattatgtctttccctgttactaac

SEQ ID NO: 211265 - DNA, 25 bp, Probe sequence
tttgtactctacacatcagcacttc

SEQ ID NO: 211266 - DNA, 25 bp, Probe sequence
ttttgtcactcatctatagcatcat

SEQ ID NO: 211267 - DNA, 25 bp, Probe sequence
ttaccgaatttgtcacaccaatgct

SEQ ID NO: 211268 - DNA, 25 bp, Probe sequence
attaagcgactacgccaaagattaa

SEQ ID NO: 211269 - DNA, 25 bp, Probe sequence
atggtgcaatgtcttgttgtcgatg

SEQ ID NO: 211270 - DNA, 25 bp, Probe sequence
agtggtgaagctgcattaaaacttt

SEQ ID NO: 211271 - DNA, 25 bp, Probe sequence
acgatgacgttaccgaacaaggaat

SEQ ID NO: 211272 - DNA, 25 bp, Probe sequence
aaaaattaaatgccacacttacaat

SEQ ID NO: 211273 - DNA, 25 bp, Probe sequence
aacagcgtgtcgatattgcagtggt

SEQ ID NO: 211274 - DNA, 25 bp, Probe sequence
aaccaatcctatttggaactccaag

SEQ ID NO: 211275 - DNA, 25 bp, Probe sequence
aatgccacacttacaattgaaacag

SEQ ID NO: 211276 - DNA, 25 bp, Probe sequence
aattatatagctagccatttacaaa

SEQ ID NO: 211277 - DNA, 25 bp, Probe sequence
caattattatttatgcttgcagcac

SEQ ID NO: 211278 - DNA, 25 bp, Probe sequence
caaccaagtggtgaagctgcattaa

SEQ ID NO: 211279 - DNA, 25 bp, Probe sequence
cagcacgtcctaagcaaatctttac

SEQ ID NO: 211280 - DNA, 25 bp, Probe sequence
gcgtgtcgatattgcagtggtagat

SEQ ID NO: 211281 - DNA, 25 bp, Probe sequence
gcttgcagcacgtcctaagcaaatc

SEQ ID NO: 211282 - DNA, 25 bp, Probe sequence
gcagtggtagatattatgatggatg

SEQ ID NO: 211283 - DNA, 25 bp, Probe sequence
gaaacagtaagaggacaaggctata

SEQ ID NO: 211284 - DNA, 25 bp, Probe sequence
gacgttcatattaagcgactacgcc

SEQ ID NO: 211285 - DNA, 25 bp, Probe sequence
gaggacaaggctataaggtggagaa

SEQ ID NO: 211286 - DNA, 25 bp, Probe sequence
gatggatggtatggacggctttcaa

SEQ ID NO: 211287 - DNA, 25 bp, Probe sequence
gatgacgatcctcgaatcctaaatt

SEQ ID NO: 211288 - DNA, 25 bp, Probe sequence
gatgcacttagtgacaaagagcgtg

SEQ ID NO: 211289 - DNA, 25 bp, Probe sequence
gatcctcgaatcctaaattatatag

SEQ ID NO: 211290 - DNA, 25 bp, Probe sequence
gattatgatataccagttattatgt

SEQ ID NO: 211291 - DNA, 25 bp, Probe sequence
gttgtcgatgacgatcctcgaatcc

SEQ ID NO: 211292 - DNA, 25 bp, Probe sequence
gttgacgttcatattaagcgactac

SEQ ID NO: 211293 - DNA, 25 bp, Probe sequence
gtcttgttgtcgatgacgatcctcg

SEQ ID NO: 211294 - DNA, 25 bp, Probe sequence
gtgacaaagagcgtgcgtttataag

SEQ ID NO: 211295 - DNA, 25 bp, Probe sequence
tgacgttaccgaacaaggaatttca

SEQ ID NO: 211296 - DNA, 25 bp, Probe sequence
ggtatggacggctttcaattatgta

SEQ ID NO: 211297 - DNA, 25 bp, Probe sequence
ggacggctttcaattatgtaataca

SEQ ID NO: 211298 - DNA, 25 bp, Probe sequence
ggaactccaagtatctaataaaacg

SEQ ID NO: 211299 - DNA, 25 bp, Probe sequence
ggctataaggtggagaatcatgttt

SEQ ID NO: 211300 - DNA, 25 bp, Probe sequence
tttatgcttgcagcacgtcctaagc

SEQ ID NO: 211301 - DNA, 25 bp, Probe sequence
ttggggctatgattatgaaggagat

SEQ ID NO: 211302 - DNA, 25 bp, Probe sequence
attacaacgcagctgagcggattaa

SEQ ID NO: 211303 - DNA, 25 bp, Probe sequence
atttcattagttatcgcatcaacct

SEQ ID NO: 211304 - DNA, 25 bp, Probe sequence
atcaacgtttgttacatcaagcatt

SEQ ID NO: 211305 - DNA, 25 bp, Probe sequence
atcgcatcaacctattcaatcattc

SEQ ID NO: 211306 - DNA, 25 bp, Probe sequence
agtatacagatgttggtggtgccat

SEQ ID NO: 211307 - DNA, 25 bp, Probe sequence
accaacgcacattcaacaatatttc

SEQ ID NO: 211308 - DNA, 25 bp, Probe sequence
acctattcaatcattcgtccagtaa

SEQ ID NO: 211309 - DNA, 25 bp, Probe sequence
aaatccatcattgaattgcatcatg

SEQ ID NO: 211310 - DNA, 25 bp, Probe sequence
aaagcatctaatgacgcgaaaatca

SEQ ID NO: 211311 - DNA, 25 bp, Probe sequence
aaaccattcgcattattcgtaactg

SEQ ID NO: 211312 - DNA, 25 bp, Probe sequence
aacacctatcaaacaaacacgcaaa

SEQ ID NO: 211313 - DNA, 25 bp, Probe sequence
aacactctatgctagaattgcgatt

SEQ ID NO: 211314 - DNA, 25 bp, Probe sequence
aacaccattaacacatattcatcat

SEQ ID NO: 211315 - DNA, 25 bp, Probe sequence
aagcgagttacaacaaacttctgat

SEQ ID NO: 211316 - DNA, 25 bp, Probe sequence
aatcaccaacatttattattcgatg

SEQ ID NO: 211317 - DNA, 25 bp, Probe sequence
aatttgctgctgatgaaaagtcgtt

SEQ ID NO: 211318 - DNA, 25 bp, Probe sequence
aattgcgatttattccattacggtt

SEQ ID NO: 211319 - DNA, 25 bp, Probe sequence
cattcgacatgaacaatttgctgct

SEQ ID NO: 211320 - DNA, 25 bp, Probe sequence
gcgaccgaacgcttaattgatggtg

SEQ ID NO: 211321 - DNA, 25 bp, Probe sequence
gctgagcggattaacaactgaattg

SEQ ID NO: 211322 - DNA, 25 bp, Probe sequence
gcatcatggtacaatccaattcaca

SEQ ID NO: 211323 - DNA, 25 bp, Probe sequence
gaacaatcagctaaaccaacgcaca

SEQ ID NO: 211324 - DNA, 25 bp, Probe sequence
gacatcgctttgcaacatagtcaca

SEQ ID NO: 211325 - DNA, 25 bp, Probe sequence
gagagtcattgggacaagttgatca

SEQ ID NO: 211326 - DNA, 25 bp, Probe sequence
gatggtgattttgaaacacctatca

SEQ ID NO: 211327 - DNA, 25 bp, Probe sequence
gatactttatcacaaaatgctatta

SEQ ID NO: 211328 - DNA, 25 bp, Probe sequence
gttaaagctagcgaccgaacgctta

SEQ ID NO: 211329 - DNA, 25 bp, Probe sequence
gtaactggatttttcgacaatgtaa

SEQ ID NO: 211330 - DNA, 25 bp, Probe sequence
gtccacaagctgaagcacgtttatt

SEQ ID NO: 211331 - DNA, 25 bp, Probe sequence
ggttcaccaattagtccacaagctg

SEQ ID NO: 211332 - DNA, 25 bp, Probe sequence
ggaacattacagtatcactttaata

SEQ ID NO: 211333 - DNA, 25 bp, Probe sequence
taaccacctttactattacactgcc

SEQ ID NO: 211334 - DNA, 25 bp, Probe sequence
ttacggttattttatttagtgcatt

SEQ ID NO: 211335 - DNA, 25 bp, Probe sequence
ttggtggtgccattgacatcgcttt

SEQ ID NO: 211336 - DNA, 25 bp, Probe sequence
attattattagagccaaatggactt

SEQ ID NO: 211337 - DNA, 25 bp, Probe sequence
atttcattcgcatttccaaatcaga

SEQ ID NO: 211338 - DNA, 25 bp, Probe sequence
atgcagtcaatgatttagacaaatc

SEQ ID NO: 211339 - DNA, 25 bp, Probe sequence
agagccaaatggacttatacgtatg

SEQ ID NO: 211340 - DNA, 25 bp, Probe sequence
aaatctataaaggagcgcttatcaa

SEQ ID NO: 211341 - DNA, 25 bp, Probe sequence
aacatttcattcgcatttccaaatc

SEQ ID NO: 211342 - DNA, 25 bp, Probe sequence
aactcaatttatttatcaatgcaaa

SEQ ID NO: 211343 - DNA, 25 bp, Probe sequence
aagatgcacactacacctattcttc

SEQ ID NO: 211344 - DNA, 25 bp, Probe sequence
aagtattattaatgcagtcaatgat

SEQ ID NO: 211345 - DNA, 25 bp, Probe sequence
cacactacacctattcttctagacg

SEQ ID NO: 211346 - DNA, 25 bp, Probe sequence
cacatacattagtcggatacataga

SEQ ID NO: 211347 - DNA, 25 bp, Probe sequence
cacaacatttcattcgcatttccaa

SEQ ID NO: 211348 - DNA, 25 bp, Probe sequence
cactacacctattcttctagacgtt

SEQ ID NO: 211349 - DNA, 25 bp, Probe sequence
gccaaatggacttatacgtatgtat

SEQ ID NO: 211350 - DNA, 25 bp, Probe sequence
gaaatcgtcaacaagtattacattg

SEQ ID NO: 211351 - DNA, 25 bp, Probe sequence
gaaatccatatcattaatgtatcag

SEQ ID NO: 211352 - DNA, 25 bp, Probe sequence
gagacggaatcttatattgatatac

SEQ ID NO: 211353 - DNA, 25 bp, Probe sequence
gatgttataacattccaagttatta

SEQ ID NO: 211354 - DNA, 25 bp, Probe sequence
gatgaaactcaatttatttatcaat

SEQ ID NO: 211355 - DNA, 25 bp, Probe sequence
gatacatagacaaagaaatccatat

SEQ ID NO: 211356 - DNA, 25 bp, Probe sequence
gtatcagatgttataacattccaag

SEQ ID NO: 211357 - DNA, 25 bp, Probe sequence
ggacttatacgtatgtatcttaaag

SEQ ID NO: 211358 - DNA, 25 bp, Probe sequence
tccaaatcagaaatcgtcaacaagt

SEQ ID NO: 211359 - DNA, 25 bp, Probe sequence
taacagccattacaagcaatcaaaa

SEQ ID NO: 211360 - DNA, 25 bp, Probe sequence
tatcttaaagatgcacactacacct

SEQ ID NO: 211361 - DNA, 25 bp, Probe sequence
tacgactttatgaactagaaaaaca

SEQ ID NO: 211362 - DNA, 25 bp, Probe sequence
taccacaacatttcattcgcatttc

SEQ ID NO: 211363 - DNA, 25 bp, Probe sequence
tagacaaatcacatacattagtcgg

SEQ ID NO: 211364 - DNA, 25 bp, Probe sequence
tataaaggagcgcttatcaatatga

SEQ ID NO: 211365 - DNA, 25 bp, Probe sequence
tatattgatatacatgcacctaaaa

SEQ ID NO: 211366 - DNA, 25 bp, Probe sequence
ttaccacaacatttcattcgcattt

SEQ ID NO: 211367 - DNA, 25 bp, Probe sequence
ttcaaactaaaattacgactttatg

SEQ ID NO: 211368 - DNA, 25 bp, Probe sequence
ttaaagatgcacactacacctattc

SEQ ID NO: 211369 - DNA, 25 bp, Probe sequence
ttcattcgcatttccaaatcagaaa

SEQ ID NO: 211370 - DNA, 25 bp, Probe sequence
attatccactgaacccacaatcaac

SEQ ID NO: 211371 - DNA, 25 bp, Probe sequence
atttcacagaaactaccgtaatgtt

SEQ ID NO: 211372 - DNA, 25 bp, Probe sequence
atattatccactgaacccacaatca

SEQ ID NO: 211373 - DNA, 25 bp, Probe sequence
accgtaatgttgatttctatcattt

SEQ ID NO: 211374 - DNA, 25 bp, Probe sequence
actgaacccacaatcaactattggc

SEQ ID NO: 211375 - DNA, 25 bp, Probe sequence
actaccgtaatgttgatttctatca

SEQ ID NO: 211376 - DNA, 25 bp, Probe sequence
aactcattatttattagcttaatca

SEQ ID NO: 211377 - DNA, 25 bp, Probe sequence
aatattatccactgaacccacaatc

SEQ ID NO: 211378 - DNA, 25 bp, Probe sequence
caaatattatccactgaacccacaa

SEQ ID NO: 211379 - DNA, 25 bp, Probe sequence
cactgttctttagtatgttatttgc

SEQ ID NO: 211380 - DNA, 25 bp, Probe sequence
ctttcactgttctttagtatgttat

SEQ ID NO: 211381 - DNA, 25 bp, Probe sequence
ccctttcactgttctttagtatgtt

SEQ ID NO: 211382 - DNA, 25 bp, Probe sequence
gcagacggcaaatattatccactga

SEQ ID NO: 211383 - DNA, 25 bp, Probe sequence
gaaaaactcattatttattagctta

SEQ ID NO: 211384 - DNA, 25 bp, Probe sequence
gacggcaaatattatccactgaacc

SEQ ID NO: 211385 - DNA, 25 bp, Probe sequence
gagattttatctttaaatacacaga

SEQ ID NO: 211386 - DNA, 25 bp, Probe sequence
gttactcataggcgtcgtctttttc

SEQ ID NO: 211387 - DNA, 25 bp, Probe sequence
gatttctatcattttatggttactc

SEQ ID NO: 211388 - DNA, 25 bp, Probe sequence
gtctttttccttggagattttatct

SEQ ID NO: 211389 - DNA, 25 bp, Probe sequence
ggcaaatattatccactgaacccac

SEQ ID NO: 211390 - DNA, 25 bp, Probe sequence
tgaacccacaatcaactattggcat

SEQ ID NO: 211391 - DNA, 25 bp, Probe sequence
tgcatttcataacaacgtatgtcgg

SEQ ID NO: 211392 - DNA, 25 bp, Probe sequence
tccactgaacccacaatcaactatt

SEQ ID NO: 211393 - DNA, 25 bp, Probe sequence
tccctttcactgttctttagtatgt

SEQ ID NO: 211394 - DNA, 25 bp, Probe sequence
tcgtctttttccttggagattttat

SEQ ID NO: 211395 - DNA, 25 bp, Probe sequence
tcataacaacgtatgtcggattctt

SEQ ID NO: 211396 - DNA, 25 bp, Probe sequence
tactcataggcgtcgtctttttcct

SEQ ID NO: 211397 - DNA, 25 bp, Probe sequence
tatggttactcataggcgtcgtctt

SEQ ID NO: 211398 - DNA, 25 bp, Probe sequence
tatccactgaacccacaatcaacta

SEQ ID NO: 211399 - DNA, 25 bp, Probe sequence
tatttattagcttaatcattggttt

SEQ ID NO: 211400 - DNA, 25 bp, Probe sequence
tttagtatgttatttgcagacggca

SEQ ID NO: 211401 - DNA, 25 bp, Probe sequence
ttactcataggcgtcgtctttttcc

SEQ ID NO: 211402 - DNA, 25 bp, Probe sequence
ttccttggagattttatctttaaat

SEQ ID NO: 211403 - DNA, 25 bp, Probe sequence
ttgcagacggcaaatattatccact

SEQ ID NO: 211404 - DNA, 25 bp, Probe sequence
attgagtctcaaggtgttaacgaag

SEQ ID NO: 211405 - DNA, 25 bp, Probe sequence
attctgctgatgatattagccactt

SEQ ID NO: 211406 - DNA, 25 bp, Probe sequence
atttcggtcaatcatcgatcaacat

SEQ ID NO: 211407 - DNA, 25 bp, Probe sequence
atatcctaagtctatcgtggttgat

SEQ ID NO: 211408 - DNA, 25 bp, Probe sequence
aggcgcttgttgcaccaaagtatct

SEQ ID NO: 211409 - DNA, 25 bp, Probe sequence
aggtataatcgctggttgcaattcg

SEQ ID NO: 211410 - DNA, 25 bp, Probe sequence
agctcagtctgaaggttatacacat

SEQ ID NO: 211411 - DNA, 25 bp, Probe sequence
aaatgattgtcactatttcggtcaa

SEQ ID NO: 211412 - DNA, 25 bp, Probe sequence
aaagatcacatcgtttttatcggtg

SEQ ID NO: 211413 - DNA, 25 bp, Probe sequence
aatttcccaggcaataccagtgatt

SEQ ID NO: 211414 - DNA, 25 bp, Probe sequence
aattcaattacatcaaggcacacca

SEQ ID NO: 211415 - DNA, 25 bp, Probe sequence
aattctaatgtctgatgtcgttatc

SEQ ID NO: 211416 - DNA, 25 bp, Probe sequence
caatcgatggtcatgtcgtttttga

SEQ ID NO: 211417 - DNA, 25 bp, Probe sequence
cttttcctagtcaccaagcaaatgt

SEQ ID NO: 211418 - DNA, 25 bp, Probe sequence
cggcctgtatacgaagcaaccaaac

SEQ ID NO: 211419 - DNA, 25 bp, Probe sequence
gaagatatttggcgtcatctatcaa

SEQ ID NO: 211420 - DNA, 25 bp, Probe sequence
gactgcctgttattttgttactgac

SEQ ID NO: 211421 - DNA, 25 bp, Probe sequence
gatgtcgttatcactgattactcaa

SEQ ID NO: 211422 - DNA, 25 bp, Probe sequence
gatgcggttcaattatatcctaagt

SEQ ID NO: 211423 - DNA, 25 bp, Probe sequence
gatcaacattgccgattgggctcaa

SEQ ID NO: 211424 - DNA, 25 bp, Probe sequence
gattagtgagtgcgcaacaattacc

SEQ ID NO: 211425 - DNA, 25 bp, Probe sequence
gatatatgcgattcaacagactctt

SEQ ID NO: 211426 - DNA, 25 bp, Probe sequence
gatttagctttattgacacttctga

SEQ ID NO: 211427 - DNA, 25 bp, Probe sequence
gttactgacgatcgtcgcggaccac

SEQ ID NO: 211428 - DNA, 25 bp, Probe sequence
gtattggcttatggtaatcctaaac

SEQ ID NO: 211429 - DNA, 25 bp, Probe sequence
gtagcattatacactccaaatcaca

SEQ ID NO: 211430 - DNA, 25 bp, Probe sequence
gtggttgattatactgtggatggac

SEQ ID NO: 211431 - DNA, 25 bp, Probe sequence
taaacataatccaatgactgcctgt

SEQ ID NO: 211432 - DNA, 25 bp, Probe sequence
taccagaagaggcgcttgttgcacc

SEQ ID NO: 211433 - DNA, 25 bp, Probe sequence
tagaaacacctttttatcgtgctaa

SEQ ID NO: 211434 - DNA, 25 bp, Probe sequence
tatcatgttgtggttcagggtgttg

SEQ ID NO: 211435 - DNA, 25 bp, Probe sequence
tattctaccaagtttatgctaccta

SEQ ID NO: 211436 - DNA, 25 bp, Probe sequence
ttatcaaacggcttttcctagtcac

SEQ ID NO: 211437 - DNA, 25 bp, Probe sequence
ttcgcaacctttttatcgaggattc

SEQ ID NO: 211438 - DNA, 25 bp, Probe sequence
atattgtctattttgatgaggctaa

SEQ ID NO: 211439 - DNA, 25 bp, Probe sequence
atgcgcttggacaatttgaagaatt

SEQ ID NO: 211440 - DNA, 25 bp, Probe sequence
agacggtggcttttcgccattagct

SEQ ID NO: 211441 - DNA, 25 bp, Probe sequence
aggcatcattatggatccttttaat

SEQ ID NO: 211442 - DNA, 25 bp, Probe sequence
agttaagcattttgtctctgattct

SEQ ID NO: 211443 - DNA, 25 bp, Probe sequence
actgtggtgaaaaagcattctctat

SEQ ID NO: 211444 - DNA, 25 bp, Probe sequence
aaatactttgcaatactgtggtgaa

SEQ ID NO: 211445 - DNA, 25 bp, Probe sequence
aagcattctctataaatttagtagt

SEQ ID NO: 211446 - DNA, 25 bp, Probe sequence
aagttttttgaggctgtagataaat

SEQ ID NO: 211447 - DNA, 25 bp, Probe sequence
aatatgtagacggtggcttttcgcc

SEQ ID NO: 211448 - DNA, 25 bp, Probe sequence
aatagatcttatgcgcttggacaat

SEQ ID NO: 211449 - DNA, 25 bp, Probe sequence
aatattccaaacaaaggcatcatta

SEQ ID NO: 211450 - DNA, 25 bp, Probe sequence
caaaaagcttacttgggtccttctg

SEQ ID NO: 211451 - DNA, 25 bp, Probe sequence
ctatcatgcatcacctagaaattat

SEQ ID NO: 211452 - DNA, 25 bp, Probe sequence
gcttacttgggtccttctgatgaag

SEQ ID NO: 211453 - DNA, 25 bp, Probe sequence
gcattttgtctctgattctaataat

SEQ ID NO: 211454 - DNA, 25 bp, Probe sequence
gcattttcagactattctgttatag

SEQ ID NO: 211455 - DNA, 25 bp, Probe sequence
gaatagatacttggagtctcaaaat

SEQ ID NO: 211456 - DNA, 25 bp, Probe sequence
gaaccaattaaatatacaaccacat

SEQ ID NO: 211457 - DNA, 25 bp, Probe sequence
gaaactgttgcacatttaactgaaa

SEQ ID NO: 211458 - DNA, 25 bp, Probe sequence
gacgagttttatagcgacgatcacc

SEQ ID NO: 211459 - DNA, 25 bp, Probe sequence
gagaaaggtttgattggtgattgta

SEQ ID NO: 211460 - DNA, 25 bp, Probe sequence
gatggatacgtagcattttcagact

SEQ ID NO: 211461 - DNA, 25 bp, Probe sequence
gattagtaacgaaactgttgcacat

SEQ ID NO: 211462 - DNA, 25 bp, Probe sequence
gattggtgattgtattcaacctata

SEQ ID NO: 211463 - DNA, 25 bp, Probe sequence
gtattatccttatttgcgtgggaaa

SEQ ID NO: 211464 - DNA, 25 bp, Probe sequence
gtaaattgcgtaatattccaaacaa

SEQ ID NO: 211465 - DNA, 25 bp, Probe sequence
ggtttttgtaccagatgatagacac

SEQ ID NO: 211466 - DNA, 25 bp, Probe sequence
ggttatctatcatgcatcacctaga

SEQ ID NO: 211467 - DNA, 25 bp, Probe sequence
tggcttttcgccattagctattgcg

SEQ ID NO: 211468 - DNA, 25 bp, Probe sequence
tgaggctaatgagctaagagttaag

SEQ ID NO: 211469 - DNA, 25 bp, Probe sequence
taaactaagtcgtaatgttgattat

SEQ ID NO: 211470 - DNA, 25 bp, Probe sequence
tagcgacgatcacctttattataag

SEQ ID NO: 211471 - DNA, 25 bp, Probe sequence
tagctattgcgatacatattgtcta

SEQ ID NO: 211472 - DNA, 25 bp, Probe sequence
atcaattacttgaacttggtgccaa

SEQ ID NO: 211473 - DNA, 25 bp, Probe sequence
atgcgcgtgtaaaatcagaatggat

SEQ ID NO: 211474 - DNA, 25 bp, Probe sequence
agatgatcataaaaagccactcgca

SEQ ID NO: 211475 - DNA, 25 bp, Probe sequence
agccattatggcggttttagtgaat

SEQ ID NO: 211476 - DNA, 25 bp, Probe sequence
acatgagatcaagcaagttattaca

SEQ ID NO: 211477 - DNA, 25 bp, Probe sequence
acaattgttgaatccgaagcaccag

SEQ ID NO: 211478 - DNA, 25 bp, Probe sequence
aaagtacattactctggtataaatt

SEQ ID NO: 211479 - DNA, 25 bp, Probe sequence
aaaaagccactcgcatcatcaactt

SEQ ID NO: 211480 - DNA, 25 bp, Probe sequence
aagttatcgcaagtacaggtaaaca

SEQ ID NO: 211481 - DNA, 25 bp, Probe sequence
aatcgtatcctatgattccaggaat

SEQ ID NO: 211482 - DNA, 25 bp, Probe sequence
ctcgcatcatcaacttggcaagctt

SEQ ID NO: 211483 - DNA, 25 bp, Probe sequence
cggttttagtgaatatgcgcgtgta

SEQ ID NO: 211484 - DNA, 25 bp, Probe sequence
cgcattgttatcgatttcggtgtag

SEQ ID NO: 211485 - DNA, 25 bp, Probe sequence
gcagtcgtaaaatcgtatcctatga

SEQ ID NO: 211486 - DNA, 25 bp, Probe sequence
gcacagctggttatactgccggttt

SEQ ID NO: 211487 - DNA, 25 bp, Probe sequence
gcaagcttgtgtagaccctgttggt

SEQ ID NO: 211488 - DNA, 25 bp, Probe sequence
gaatcaatgatatatggcacagctg

SEQ ID NO: 211489 - DNA, 25 bp, Probe sequence
gaatccgaagcaccaggctttgaaa

SEQ ID NO: 211490 - DNA, 25 bp, Probe sequence
gacaccaactttcaaacaattatcg

SEQ ID NO: 211491 - DNA, 25 bp, Probe sequence
gatgaacttccagaacaacttaaca

SEQ ID NO: 211492 - DNA, 25 bp, Probe sequence
gtttggcgtcgtctcgcaaaagatt

SEQ ID NO: 211493 - DNA, 25 bp, Probe sequence
gttatactgccggtttagcaattga

SEQ ID NO: 211494 - DNA, 25 bp, Probe sequence
gttatcgatcgacttcctgttgaag

SEQ ID NO: 211495 - DNA, 25 bp, Probe sequence
gttattacatttgatgaacttccag

SEQ ID NO: 211496 - DNA, 25 bp, Probe sequence
gtactcatgcttaatgaacttggtt

SEQ ID NO: 211497 - DNA, 25 bp, Probe sequence
gtcggtactttagcagtactcatgc

SEQ ID NO: 211498 - DNA, 25 bp, Probe sequence
ggtgccaaagaagttatcgatcgac

SEQ ID NO: 211499 - DNA, 25 bp, Probe sequence
taagacagcgcgtttggcgtcgtct

SEQ ID NO: 211500 - DNA, 25 bp, Probe sequence
tgcttcaggtggtgtcggtacttta

SEQ ID NO: 211501 - DNA, 25 bp, Probe sequence
ttgaagatggtcctgtactcgttcg

SEQ ID NO: 211502 - DNA, 25 bp, Probe sequence
tcaagcttcctgatactttaacatt

SEQ ID NO: 211503 - DNA, 25 bp, Probe sequence
tactaattctgtattccctcacatt

SEQ ID NO: 211504 - DNA, 25 bp, Probe sequence
ttctgtattccctcacattttaaga

SEQ ID NO: 211505 - DNA, 25 bp, Probe sequence
ttgtaacgagttatgacctaggtgt

SEQ ID NO: 211506 - DNA, 25 bp, Probe sequence
atagtatgacagctaaaataacttt

SEQ ID NO: 211507 - DNA, 25 bp, Probe sequence
atgacagctaaaataactttacatc

SEQ ID NO: 211508 - DNA, 25 bp, Probe sequence
agtatgacagctaaaataactttac

SEQ ID NO: 211509 - DNA, 25 bp, Probe sequence
agcacatagtatgacagctaaaata

SEQ ID NO: 211510 - DNA, 25 bp, Probe sequence
agcgaagatatgacacaactgaatt

SEQ ID NO: 211511 - DNA, 25 bp, Probe sequence
acatagtatgacagctaaaataact

SEQ ID NO: 211512 - DNA, 25 bp, Probe sequence
acagctaaaataactttacatcaag

SEQ ID NO: 211513 - DNA, 25 bp, Probe sequence
acaaaaaagcgaagatatgacacaa

SEQ ID NO: 211514 - DNA, 25 bp, Probe sequence
aaagcgaagatatgacacaactgaa

SEQ ID NO: 211515 - DNA, 25 bp, Probe sequence
aaaaagcgaagatatgacacaactg

SEQ ID NO: 211516 - DNA, 25 bp, Probe sequence
aaaaaagcgaagatatgacacaact

SEQ ID NO: 211517 - DNA, 25 bp, Probe sequence
aaaagcgaagatatgacacaactga

SEQ ID NO: 211518 - DNA, 25 bp, Probe sequence
aagcgaagatatgacacaactgaat

SEQ ID NO: 211519 - DNA, 25 bp, Probe sequence
caaaaaagcgaagatatgacacaac

SEQ ID NO: 211520 - DNA, 25 bp, Probe sequence
cacatagtatgacagctaaaataac

SEQ ID NO: 211521 - DNA, 25 bp, Probe sequence
catagtatgacagctaaaataactt

SEQ ID NO: 211522 - DNA, 25 bp, Probe sequence
cgaagatatgacacaactgaatttg

SEQ ID NO: 211523 - DNA, 25 bp, Probe sequence
gcgaagatatgacacaactgaattt

SEQ ID NO: 211524 - DNA, 25 bp, Probe sequence
gcacatagtatgacagctaaaataa

SEQ ID NO: 211525 - DNA, 25 bp, Probe sequence
gacaaaaaagcgaagatatgacaca

SEQ ID NO: 211526 - DNA, 25 bp, Probe sequence
gacagctaaaataactttacatcaa

SEQ ID NO: 211527 - DNA, 25 bp, Probe sequence
gtatgacagctaaaataactttaca

SEQ ID NO: 211528 - DNA, 25 bp, Probe sequence
gtgacaaaaaagcgaagatatgaca

SEQ ID NO: 211529 - DNA, 25 bp, Probe sequence
tgacaaaaaagcgaagatatgacac

SEQ ID NO: 211530 - DNA, 25 bp, Probe sequence
tgacagctaaaataactttacatca

SEQ ID NO: 211531 - DNA, 25 bp, Probe sequence
tagcacatagtatgacagctaaaat

SEQ ID NO: 211532 - DNA, 25 bp, Probe sequence
tagtatgacagctaaaataacttta

SEQ ID NO: 211533 - DNA, 25 bp, Probe sequence
tatgacagctaaaataactttacat

SEQ ID NO: 211534 - DNA, 25 bp, Probe sequence
tttagcacatagtatgacagctaaa

SEQ ID NO: 211535 - DNA, 25 bp, Probe sequence
ttagcacatagtatgacagctaaaa

SEQ ID NO: 211536 - DNA, 25 bp, Probe sequence
attttacaattggaacgcacgagtc

SEQ ID NO: 211537 - DNA, 25 bp, Probe sequence
atcaaaccttgattcactaacttaa

SEQ ID NO: 211538 - DNA, 25 bp, Probe sequence
atgttactcgcagatatggaagatg

SEQ ID NO: 211539 - DNA, 25 bp, Probe sequence
agattaccattcgcgacataacaac

SEQ ID NO: 211540 - DNA, 25 bp, Probe sequence
aaaagattaccattcgcgacataac

SEQ ID NO: 211541 - DNA, 25 bp, Probe sequence
aacaagcgttcactaaattactaca

SEQ ID NO: 211542 - DNA, 25 bp, Probe sequence
aacagcccatttcagttgatgaatt

SEQ ID NO: 211543 - DNA, 25 bp, Probe sequence
aacacgcgctgatatcaatagaggg

SEQ ID NO: 211544 - DNA, 25 bp, Probe sequence
aaccgtttgcataaatcaaaccttg

SEQ ID NO: 211545 - DNA, 25 bp, Probe sequence
aagcgttcactaaattactacaaga

SEQ ID NO: 211546 - DNA, 25 bp, Probe sequence
caatttgatttgttacgcggttctt

SEQ ID NO: 211547 - DNA, 25 bp, Probe sequence
caaacagcccatttcagttgatgaa

SEQ ID NO: 211548 - DNA, 25 bp, Probe sequence
cagttacgtttccggagcaacaatt

SEQ ID NO: 211549 - DNA, 25 bp, Probe sequence
ctaacgacatatactcaatttgatt

SEQ ID NO: 211550 - DNA, 25 bp, Probe sequence
cgacataacaacacgcgctgatatc

SEQ ID NO: 211551 - DNA, 25 bp, Probe sequence
cctccattaaacaagcgttcactaa

SEQ ID NO: 211552 - DNA, 25 bp, Probe sequence
gcgctgatatcaatagagggacatt

SEQ ID NO: 211553 - DNA, 25 bp, Probe sequence
gaagacattgcgaatacttttgtaa

SEQ ID NO: 211554 - DNA, 25 bp, Probe sequence
gacattgcgaatacttttgtaaata

SEQ ID NO: 211555 - DNA, 25 bp, Probe sequence
gacattttacttacattacgaggat

SEQ ID NO: 211556 - DNA, 25 bp, Probe sequence
gagttttatcatactattttacaat

SEQ ID NO: 211557 - DNA, 25 bp, Probe sequence
gagggacattttacttacattacga

SEQ ID NO: 211558 - DNA, 25 bp, Probe sequence
tacgtttccggagcaacaatttcaa

SEQ ID NO: 211559 - DNA, 25 bp, Probe sequence
ggataaatatatgttactcgcagat

SEQ ID NO: 211560 - DNA, 25 bp, Probe sequence
ggacaaacagcccatttcagttgat

SEQ ID NO: 211561 - DNA, 25 bp, Probe sequence
ggaacgcacgagtcaattagaattg

SEQ ID NO: 211562 - DNA, 25 bp, Probe sequence
ggaagatgagtatatttcagaacta

SEQ ID NO: 211563 - DNA, 25 bp, Probe sequence
tccagagatgtatttttacagttac

SEQ ID NO: 211564 - DNA, 25 bp, Probe sequence
ttacagttacgtttccggagcaaca

SEQ ID NO: 211565 - DNA, 25 bp, Probe sequence
taacaacacgcgctgatatcaatag

SEQ ID NO: 211566 - DNA, 25 bp, Probe sequence
tttccggagcaacaatttcaattat

SEQ ID NO: 211567 - DNA, 25 bp, Probe sequence
ttaccattcgcgacataacaacacg

SEQ ID NO: 211568 - DNA, 25 bp, Probe sequence
ttcagaactaacgacatatactcaa

SEQ ID NO: 211569 - DNA, 25 bp, Probe sequence
ttgatttgttacgcggttcttcaat

SEQ ID NO: 211570 - DNA, 25 bp, Probe sequence
attttaactactattgccgaccatt

SEQ ID NO: 211571 - DNA, 25 bp, Probe sequence
atacgtgaccctttggactcagaag

SEQ ID NO: 211572 - DNA, 25 bp, Probe sequence
atacgcttccttattatctaatgat

SEQ ID NO: 211573 - DNA, 25 bp, Probe sequence
atcacaacatcatacgcttccttat

SEQ ID NO: 211574 - DNA, 25 bp, Probe sequence
atcttggattattgtggtaggtatt

SEQ ID NO: 211575 - DNA, 25 bp, Probe sequence
atcattattgatttacctatcgtca

SEQ ID NO: 211576 - DNA, 25 bp, Probe sequence
aggtatttcattaattcttgtcgta

SEQ ID NO: 211577 - DNA, 25 bp, Probe sequence
acctgaagactttatacgtgaccct

SEQ ID NO: 211578 - DNA, 25 bp, Probe sequence
acctatcgtcaattcaactaatcgt

SEQ ID NO: 211579 - DNA, 25 bp, Probe sequence
aaatttcacagcagatttgcattag

SEQ ID NO: 211580 - DNA, 25 bp, Probe sequence
aacaccattagatcatacagcgtca

SEQ ID NO: 211581 - DNA, 25 bp, Probe sequence
aacagaattacatcaacgtatctta

SEQ ID NO: 211582 - DNA, 25 bp, Probe sequence
aactaatcgtagcgttctatctttt

SEQ ID NO: 211583 - DNA, 25 bp, Probe sequence
aagttcccgtattgaatatgacgaa

SEQ ID NO: 211584 - DNA, 25 bp, Probe sequence
aatgtagtagaaccagaccgagaag

SEQ ID NO: 211585 - DNA, 25 bp, Probe sequence
aataaccaagccatcgaaacaacag

SEQ ID NO: 211586 - DNA, 25 bp, Probe sequence
ctcgtatttagtttcttcggtatga

SEQ ID NO: 211587 - DNA, 25 bp, Probe sequence
ccgaccattataatcgtaacttacg

SEQ ID NO: 211588 - DNA, 25 bp, Probe sequence
gccgttgccaattgatgaccatagt

SEQ ID NO: 211589 - DNA, 25 bp, Probe sequence
gaaaatttacctaagcgtgatatta

SEQ ID NO: 211590 - DNA, 25 bp, Probe sequence
gacattaacacttttcacggtacta

SEQ ID NO: 211591 - DNA, 25 bp, Probe sequence
gactcagaagaaagttcccgtattg

SEQ ID NO: 211592 - DNA, 25 bp, Probe sequence
gacgaagatactggttactcattaa

SEQ ID NO: 211593 - DNA, 25 bp, Probe sequence
gatcatacagcgtcatggattaatg

SEQ ID NO: 211594 - DNA, 25 bp, Probe sequence
gttctatcttttgtaacgattccat

SEQ ID NO: 211595 - DNA, 25 bp, Probe sequence
gtttagtatactttttagctgcctt

SEQ ID NO: 211596 - DNA, 25 bp, Probe sequence
gtatgaatgtgccgttgccaattga

SEQ ID NO: 211597 - DNA, 25 bp, Probe sequence
gtaacgattccattaggcattatta

SEQ ID NO: 211598 - DNA, 25 bp, Probe sequence
gtaattgttagtattttcttatggc

SEQ ID NO: 211599 - DNA, 25 bp, Probe sequence
ggcaacggtattatcgtaacagttt

SEQ ID NO: 211600 - DNA, 25 bp, Probe sequence
tgattacttcattcagacattctga

SEQ ID NO: 211601 - DNA, 25 bp, Probe sequence
taacagtttgtgacgctgaaaatga

SEQ ID NO: 211602 - DNA, 25 bp, Probe sequence
ttaggcattattattggcaacggta

SEQ ID NO: 211603 - DNA, 25 bp, Probe sequence
ttacctgcaattaaacgttttgaag

SEQ ID NO: 211604 - DNA, 25 bp, Probe sequence
attgttacacagtcaacagtcttac

SEQ ID NO: 211605 - DNA, 25 bp, Probe sequence
atcaaaactacttaaagctgatttt

SEQ ID NO: 211606 - DNA, 25 bp, Probe sequence
atgcttttgatcatatgtggggata

SEQ ID NO: 211607 - DNA, 25 bp, Probe sequence
atgtattgttacacagtcaacagtc

SEQ ID NO: 211608 - DNA, 25 bp, Probe sequence
atgtaatgcttttgatcatatgtgg

SEQ ID NO: 211609 - DNA, 25 bp, Probe sequence
agtcaacagtcttaccaaatgataa

SEQ ID NO: 211610 - DNA, 25 bp, Probe sequence
acagtcaacagtcttaccaaatgat

SEQ ID NO: 211611 - DNA, 25 bp, Probe sequence
acacagtcaacagtcttaccaaatg

SEQ ID NO: 211612 - DNA, 25 bp, Probe sequence
aaaaatgtgcgaatgaagaagaaag

SEQ ID NO: 211613 - DNA, 25 bp, Probe sequence
aacaatcaaaactacttaaagctga

SEQ ID NO: 211614 - DNA, 25 bp, Probe sequence
aacagtcttaccaaatgataaggaa

SEQ ID NO: 211615 - DNA, 25 bp, Probe sequence
aagtgtatgtaatgcttttgatcat

SEQ ID NO: 211616 - DNA, 25 bp, Probe sequence
aatgcttttgatcatatgtggggat

SEQ ID NO: 211617 - DNA, 25 bp, Probe sequence
aattgaaccgagtataggaagtgta

SEQ ID NO: 211618 - DNA, 25 bp, Probe sequence
caaaactacttaaagctgattttat

SEQ ID NO: 211619 - DNA, 25 bp, Probe sequence
cacagtcaacagtcttaccaaatga

SEQ ID NO: 211620 - DNA, 25 bp, Probe sequence
cagtcaacagtcttaccaaatgata

SEQ ID NO: 211621 - DNA, 25 bp, Probe sequence
catgtattgttacacagtcaacagt

SEQ ID NO: 211622 - DNA, 25 bp, Probe sequence
gctttgttaattgaaccgagtatag

SEQ ID NO: 211623 - DNA, 25 bp, Probe sequence
gcttttgatcatatgtggggatatt

SEQ ID NO: 211624 - DNA, 25 bp, Probe sequence
gaaccgagtataggaagtgtatgta

SEQ ID NO: 211625 - DNA, 25 bp, Probe sequence
gttacacagtcaacagtcttaccaa

SEQ ID NO: 211626 - DNA, 25 bp, Probe sequence
gtattgttacacagtcaacagtctt

SEQ ID NO: 211627 - DNA, 25 bp, Probe sequence
gtaatgcttttgatcatatgtgggg

SEQ ID NO: 211628 - DNA, 25 bp, Probe sequence
gtcaacagtcttaccaaatgataag

SEQ ID NO: 211629 - DNA, 25 bp, Probe sequence
gtgtatgtaatgcttttgatcatat

SEQ ID NO: 211630 - DNA, 25 bp, Probe sequence
ggaagtgtatgtaatgcttttgatc

SEQ ID NO: 211631 - DNA, 25 bp, Probe sequence
tgttacacagtcaacagtcttacca

SEQ ID NO: 211632 - DNA, 25 bp, Probe sequence
tgctttgttaattgaaccgagtata

SEQ ID NO: 211633 - DNA, 25 bp, Probe sequence
tacacagtcaacagtcttaccaaat

SEQ ID NO: 211634 - DNA, 25 bp, Probe sequence
taccaaatgataaggaatgctttaa

SEQ ID NO: 211635 - DNA, 25 bp, Probe sequence
tattaatggtaaaatcgacacccaa

SEQ ID NO: 211636 - DNA, 25 bp, Probe sequence
ttacacagtcaacagtcttaccaaa

SEQ ID NO: 211637 - DNA, 25 bp, Probe sequence
ttgttacacagtcaacagtcttacc

SEQ ID NO: 211638 - DNA, 25 bp, Probe sequence
attaccctaaaacggagcttgcagt

SEQ ID NO: 211639 - DNA, 25 bp, Probe sequence
attggccggttttaacagtcataca

SEQ ID NO: 211640 - DNA, 25 bp, Probe sequence
atattgttctaatctttttgttcga

SEQ ID NO: 211641 - DNA, 25 bp, Probe sequence
atcactaaaaaccaacactatcatc

SEQ ID NO: 211642 - DNA, 25 bp, Probe sequence
atgcattgcaacatctctgaatcat

SEQ ID NO: 211643 - DNA, 25 bp, Probe sequence
atggcggtggcattagctatcaatt

SEQ ID NO: 211644 - DNA, 25 bp, Probe sequence
agcgtgccaaagtatttgttcgatt

SEQ ID NO: 211645 - DNA, 25 bp, Probe sequence
acgccatcaatttattactttctac

SEQ ID NO: 211646 - DNA, 25 bp, Probe sequence
acaactgtttctgaattggccggtt

SEQ ID NO: 211647 - DNA, 25 bp, Probe sequence
aaacctgtcgttttcattgacgata

SEQ ID NO: 211648 - DNA, 25 bp, Probe sequence
aaactgcaacacatcttatcactaa

SEQ ID NO: 211649 - DNA, 25 bp, Probe sequence
aatattgatgcgcacttgtctttaa

SEQ ID NO: 211650 - DNA, 25 bp, Probe sequence
aatttatgctcgtattttgctctaa

SEQ ID NO: 211651 - DNA, 25 bp, Probe sequence
cactatcatcaaactgacactcatt

SEQ ID NO: 211652 - DNA, 25 bp, Probe sequence
gccgatttaatcagtacaccaacaa

SEQ ID NO: 211653 - DNA, 25 bp, Probe sequence
gcagcgtcttaaattccattattac

SEQ ID NO: 211654 - DNA, 25 bp, Probe sequence
gcaatcgctattaaatcaacacaac

SEQ ID NO: 211655 - DNA, 25 bp, Probe sequence
gaattacctcaagactctttgatga

SEQ ID NO: 211656 - DNA, 25 bp, Probe sequence
gaattacttgcattttagtcctaaa

SEQ ID NO: 211657 - DNA, 25 bp, Probe sequence
gaaactggtcgtacatttgaactca

SEQ ID NO: 211658 - DNA, 25 bp, Probe sequence
gaaacttattcaaccgtggaacaag

SEQ ID NO: 211659 - DNA, 25 bp, Probe sequence
gaaagatcgaagtcagcgtgccaaa

SEQ ID NO: 211660 - DNA, 25 bp, Probe sequence
gataacgtatcacaattcactgagt

SEQ ID NO: 211661 - DNA, 25 bp, Probe sequence
gattagccaaacgaattacaacctg

SEQ ID NO: 211662 - DNA, 25 bp, Probe sequence
gtttccaagattactgaaccaccac

SEQ ID NO: 211663 - DNA, 25 bp, Probe sequence
gtattaaacttgttaacgccatcaa

SEQ ID NO: 211664 - DNA, 25 bp, Probe sequence
gtgtgacagtcgatggctttttaga

SEQ ID NO: 211665 - DNA, 25 bp, Probe sequence
tggttcaattcaacatttgcttcca

SEQ ID NO: 211666 - DNA, 25 bp, Probe sequence
tgaaccaccacaaatacacttccaa

SEQ ID NO: 211667 - DNA, 25 bp, Probe sequence
tccgttcactcgtttccaagattac

SEQ ID NO: 211668 - DNA, 25 bp, Probe sequence
tagtcctaaacagttccgttcactc

SEQ ID NO: 211669 - DNA, 25 bp, Probe sequence
taactaccatttcttattattcaat

SEQ ID NO: 211670 - DNA, 25 bp, Probe sequence
tatggtgctattttcacttacaagt

SEQ ID NO: 211671 - DNA, 25 bp, Probe sequence
ttatgatgtcatgcagcgtcttaaa

SEQ ID NO: 211672 - DNA, 25 bp, Probe sequence
attaccttcgtatttatctccacat

SEQ ID NO: 211673 - DNA, 25 bp, Probe sequence
attattttcttatcactattgtgtt

SEQ ID NO: 211674 - DNA, 25 bp, Probe sequence
attatctctaattcgctttattggt

SEQ ID NO: 211675 - DNA, 25 bp, Probe sequence
atttataccattaatacctagaact

SEQ ID NO: 211676 - DNA, 25 bp, Probe sequence
atttctatgcgagtatgtttattta

SEQ ID NO: 211677 - DNA, 25 bp, Probe sequence
atatcacctcacactatttttatga

SEQ ID NO: 211678 - DNA, 25 bp, Probe sequence
atctccacatttcaatcatcaacat

SEQ ID NO: 211679 - DNA, 25 bp, Probe sequence
aggtcgcgacttaatgttactacaa

SEQ ID NO: 211680 - DNA, 25 bp, Probe sequence
actcgtgatagtttttctgcgggga

SEQ ID NO: 211681 - DNA, 25 bp, Probe sequence
aactattatgttagctgactatttc

SEQ ID NO: 211682 - DNA, 25 bp, Probe sequence
aatttatcattattaccttcgtatt

SEQ ID NO: 211683 - DNA, 25 bp, Probe sequence
gatagtttttctgcggggacggatt

SEQ ID NO: 211684 - DNA, 25 bp, Probe sequence
gaattttttatcgtcatcatatttt

SEQ ID NO: 211685 - DNA, 25 bp, Probe sequence
gatgggaagcattgtttctgttatt

SEQ ID NO: 211686 - DNA, 25 bp, Probe sequence
gatatctatctatcttcaacaaata

SEQ ID NO: 211687 - DNA, 25 bp, Probe sequence
gatatatgcttcagacgttttaaaa

SEQ ID NO: 211688 - DNA, 25 bp, Probe sequence
gatttgtcgtctcatttcttttagt

SEQ ID NO: 211689 - DNA, 25 bp, Probe sequence
gtttatatcatattagtccttttat

SEQ ID NO: 211690 - DNA, 25 bp, Probe sequence
gtcactattattatttatttcaact

SEQ ID NO: 211691 - DNA, 25 bp, Probe sequence
gtgcactaatatacttttcaacaat

SEQ ID NO: 211692 - DNA, 25 bp, Probe sequence
gggtgtttaatctatttttcacaga

SEQ ID NO: 211693 - DNA, 25 bp, Probe sequence
taatttttcgttgccaatttcaata

SEQ ID NO: 211694 - DNA, 25 bp, Probe sequence
taatcagttagctaatgcagttatt

SEQ ID NO: 211695 - DNA, 25 bp, Probe sequence
taacctcaaggttttttgtgcacta

SEQ ID NO: 211696 - DNA, 25 bp, Probe sequence
taaattgattttttcgtcactatta

SEQ ID NO: 211697 - DNA, 25 bp, Probe sequence
tttgtaggttacttatctcaacgta

SEQ ID NO: 211698 - DNA, 25 bp, Probe sequence
tagccttaatacttgtttcgttgtt

SEQ ID NO: 211699 - DNA, 25 bp, Probe sequence
tagattatatatcacctcacactat

SEQ ID NO: 211700 - DNA, 25 bp, Probe sequence
tagtccttttatatttaacctcaag

SEQ ID NO: 211701 - DNA, 25 bp, Probe sequence
tattcaatatggttctttttagggt

SEQ ID NO: 211702 - DNA, 25 bp, Probe sequence
tttacataaacctttcttctatatt

SEQ ID NO: 211703 - DNA, 25 bp, Probe sequence
ttattttcaacattttagccttaat

SEQ ID NO: 211704 - DNA, 25 bp, Probe sequence
ttcaacaatctcttatgtaattcaa

SEQ ID NO: 211705 - DNA, 25 bp, Probe sequence
ttctgttattggatttgtcgtctca

SEQ ID NO: 211706 - DNA, 25 bp, Probe sequence
attgtattaacaataatcgcatcat

SEQ ID NO: 211707 - DNA, 25 bp, Probe sequence
attctgggatgttaggcttttttat

SEQ ID NO: 211708 - DNA, 25 bp, Probe sequence
atttcttctctgcaatatttggttt

SEQ ID NO: 211709 - DNA, 25 bp, Probe sequence
atttgagattttagcacttttaatt

SEQ ID NO: 211710 - DNA, 25 bp, Probe sequence
agcacatggaatctatagcaatcaa

SEQ ID NO: 211711 - DNA, 25 bp, Probe sequence
aatcgcatcattattagaagtttat

SEQ ID NO: 211712 - DNA, 25 bp, Probe sequence
aatctattctattagtattagcgcc

SEQ ID NO: 211713 - DNA, 25 bp, Probe sequence
aatttaatttatttcttctctgcaa

SEQ ID NO: 211714 - DNA, 25 bp, Probe sequence
aatttatttcttctctgcaatattt

SEQ ID NO: 211715 - DNA, 25 bp, Probe sequence
aatttacaagagattttctttcata

SEQ ID NO: 211716 - DNA, 25 bp, Probe sequence
aattgcttcaacattctcattaggt

SEQ ID NO: 211717 - DNA, 25 bp, Probe sequence
cacttttaattgcttcaacattctc

SEQ ID NO: 211718 - DNA, 25 bp, Probe sequence
cattctcattaggttttttatcata

SEQ ID NO: 211719 - DNA, 25 bp, Probe sequence
ctgcaatatttggttttctgacact

SEQ ID NO: 211720 - DNA, 25 bp, Probe sequence
gccacacgctatatttgagatttta

SEQ ID NO: 211721 - DNA, 25 bp, Probe sequence
gcgccacacgctatatttgagattt

SEQ ID NO: 211722 - DNA, 25 bp, Probe sequence
gcttcaacattctcattaggttttt

SEQ ID NO: 211723 - DNA, 25 bp, Probe sequence
gaatctatagcaatcaattaaaatc

SEQ ID NO: 211724 - DNA, 25 bp, Probe sequence
gacacttggtctgttaaatataggt

SEQ ID NO: 211725 - DNA, 25 bp, Probe sequence
gagattttctttcataatttaattt

SEQ ID NO: 211726 - DNA, 25 bp, Probe sequence
gatgttccataattttgtaacaaca

SEQ ID NO: 211727 - DNA, 25 bp, Probe sequence
gttaggcttttttatagcacatgga

SEQ ID NO: 211728 - DNA, 25 bp, Probe sequence
gttttttatcatacctttatcaaag

SEQ ID NO: 211729 - DNA, 25 bp, Probe sequence
gtattagcgccacacgctatatttg

SEQ ID NO: 211730 - DNA, 25 bp, Probe sequence
gggatgttaggcttttttatagcac

SEQ ID NO: 211731 - DNA, 25 bp, Probe sequence
ggtaaaatgatagttgctcaagatt

SEQ ID NO: 211732 - DNA, 25 bp, Probe sequence
ggtatgttactcataaattctggga

SEQ ID NO: 211733 - DNA, 25 bp, Probe sequence
ggttttctgacacttggtctgttaa

SEQ ID NO: 211734 - DNA, 25 bp, Probe sequence
ggatgcttggtttattacttattaa

SEQ ID NO: 211735 - DNA, 25 bp, Probe sequence
tagttgctcaagatttaaatttaca

SEQ ID NO: 211736 - DNA, 25 bp, Probe sequence
tatttggttttctgacacttggtct

SEQ ID NO: 211737 - DNA, 25 bp, Probe sequence
tttctgacacttggtctgttaaata

SEQ ID NO: 211738 - DNA, 25 bp, Probe sequence
ttctattagtattagcgccacacgc

SEQ ID NO: 211739 - DNA, 25 bp, Probe sequence
ttgggatgcttggtttattacttat

SEQ ID NO: 211740 - DNA, 25 bp, Probe sequence
attctggaacactgacaccattact

SEQ ID NO: 211741 - DNA, 25 bp, Probe sequence
atgtagaaaacagctatcttagcaa

SEQ ID NO: 211742 - DNA, 25 bp, Probe sequence
atgatttaacctatactggttacat

SEQ ID NO: 211743 - DNA, 25 bp, Probe sequence
agattctggaacactgacaccatta

SEQ ID NO: 211744 - DNA, 25 bp, Probe sequence
agaaagattacgttgttcgaacacg

SEQ ID NO: 211745 - DNA, 25 bp, Probe sequence
acctacaaatttctctaacagaaca

SEQ ID NO: 211746 - DNA, 25 bp, Probe sequence
actggttacattgttttaatggcga

SEQ ID NO: 211747 - DNA, 25 bp, Probe sequence
acatttcagaacgagaagcatcaga

SEQ ID NO: 211748 - DNA, 25 bp, Probe sequence
acatcaaaaaattaggtgaacgtgt

SEQ ID NO: 211749 - DNA, 25 bp, Probe sequence
aacactgacaccattactaaagaaa

SEQ ID NO: 211750 - DNA, 25 bp, Probe sequence
aagattacgttgttcgaacacgtga

SEQ ID NO: 211751 - DNA, 25 bp, Probe sequence
aatgaattcaacatttcagaacgag

SEQ ID NO: 211752 - DNA, 25 bp, Probe sequence
caaatttctctaacagaacaaggta

SEQ ID NO: 211753 - DNA, 25 bp, Probe sequence
cactgacaccattactaaagaaatt

SEQ ID NO: 211754 - DNA, 25 bp, Probe sequence
ctggaacactgacaccattactaaa

SEQ ID NO: 211755 - DNA, 25 bp, Probe sequence
cgttgttcgaacacgtgaagagaaa

SEQ ID NO: 211756 - DNA, 25 bp, Probe sequence
cctatactggttacattgttttaat

SEQ ID NO: 211757 - DNA, 25 bp, Probe sequence
gaattcaacatttcagaacgagaag

SEQ ID NO: 211758 - DNA, 25 bp, Probe sequence
gaacactgacaccattactaaagaa

SEQ ID NO: 211759 - DNA, 25 bp, Probe sequence
gaaagatgaaagaaacctacaaatt

SEQ ID NO: 211760 - DNA, 25 bp, Probe sequence
gaaacctacaaatttctctaacaga

SEQ ID NO: 211761 - DNA, 25 bp, Probe sequence
gattctggaacactgacaccattac

SEQ ID NO: 211762 - DNA, 25 bp, Probe sequence
gttcgaacacgtgaagagaaagatg

SEQ ID NO: 211763 - DNA, 25 bp, Probe sequence
gttacattgttttaatggcgattga

SEQ ID NO: 211764 - DNA, 25 bp, Probe sequence
gtatgtagaaaacagctatcttagc

SEQ ID NO: 211765 - DNA, 25 bp, Probe sequence
ggaacactgacaccattactaaaga

SEQ ID NO: 211766 - DNA, 25 bp, Probe sequence
tctggaacactgacaccattactaa

SEQ ID NO: 211767 - DNA, 25 bp, Probe sequence
tcttagattctggaacactgacacc

SEQ ID NO: 211768 - DNA, 25 bp, Probe sequence
tcaacatttcagaacgagaagcatc

SEQ ID NO: 211769 - DNA, 25 bp, Probe sequence
tagattctggaacactgacaccatt

SEQ ID NO: 211770 - DNA, 25 bp, Probe sequence
ttctggaacactgacaccattacta

SEQ ID NO: 211771 - DNA, 25 bp, Probe sequence
tttaatggcgattgaaaatgatgaa

SEQ ID NO: 211772 - DNA, 25 bp, Probe sequence
ttagattctggaacactgacaccat

SEQ ID NO: 211773 - DNA, 25 bp, Probe sequence
ttcttagattctggaacactgacac

SEQ ID NO: 211774 - DNA, 25 bp, Probe sequence
atttgaaccattatatagatctaga

SEQ ID NO: 211775 - DNA, 25 bp, Probe sequence
agtaggcgctaaaatcataaacgat

SEQ ID NO: 211776 - DNA, 25 bp, Probe sequence
agaatagttaagttcattacagaga

SEQ ID NO: 211777 - DNA, 25 bp, Probe sequence
agctgattatattcgaagccttaaa

SEQ ID NO: 211778 - DNA, 25 bp, Probe sequence
aaatatttgatacgactaaggacat

SEQ ID NO: 211779 - DNA, 25 bp, Probe sequence
caagatggtacttttaactttgtgt

SEQ ID NO: 211780 - DNA, 25 bp, Probe sequence
caaagctggcgatgatggatttaga

SEQ ID NO: 211781 - DNA, 25 bp, Probe sequence
ccaccaaagggatttgcaacggcag

SEQ ID NO: 211782 - DNA, 25 bp, Probe sequence
gcaacggcaggaagattgaattcta

SEQ ID NO: 211783 - DNA, 25 bp, Probe sequence
gaatttagcgttctttctcgatatc

SEQ ID NO: 211784 - DNA, 25 bp, Probe sequence
gaataacaaatccaagcgatgaaca

SEQ ID NO: 211785 - DNA, 25 bp, Probe sequence
gaagttaaacctaagcataatgaca

SEQ ID NO: 211786 - DNA, 25 bp, Probe sequence
gaactaatgtcaccaccaaagggat

SEQ ID NO: 211787 - DNA, 25 bp, Probe sequence
gaagccttaaatatgacgggataat

SEQ ID NO: 211788 - DNA, 25 bp, Probe sequence
gaaaatttagatagacgagtgttgg

SEQ ID NO: 211789 - DNA, 25 bp, Probe sequence
gaaatcgtagaaatcattgcaaatg

SEQ ID NO: 211790 - DNA, 25 bp, Probe sequence
gaaatagcattaaaagacgactgga

SEQ ID NO: 211791 - DNA, 25 bp, Probe sequence
gacgggataatgtatgagagcatat

SEQ ID NO: 211792 - DNA, 25 bp, Probe sequence
gacgactggagtatatttaatgttg

SEQ ID NO: 211793 - DNA, 25 bp, Probe sequence
gagagcatattacaagatggtactt

SEQ ID NO: 211794 - DNA, 25 bp, Probe sequence
gagattatttaagaccagcattaga

SEQ ID NO: 211795 - DNA, 25 bp, Probe sequence
gagtgttggaagatttagtaggcgc

SEQ ID NO: 211796 - DNA, 25 bp, Probe sequence
gttctttctcgatatcactactaat

SEQ ID NO: 211797 - DNA, 25 bp, Probe sequence
gtagcaaataatgactgggatggat

SEQ ID NO: 211798 - DNA, 25 bp, Probe sequence
gtaatgcaatcaaagctggcgatga

SEQ ID NO: 211799 - DNA, 25 bp, Probe sequence
gtgacgttaaatatacattgactaa

SEQ ID NO: 211800 - DNA, 25 bp, Probe sequence
ggataagcgtattataccttagtac

SEQ ID NO: 211801 - DNA, 25 bp, Probe sequence
ggaatagattatttgccatttcaat

SEQ ID NO: 211802 - DNA, 25 bp, Probe sequence
tgggatggattttgtgagagcttga

SEQ ID NO: 211803 - DNA, 25 bp, Probe sequence
tagcgttctttctcgatatcactac

SEQ ID NO: 211804 - DNA, 25 bp, Probe sequence
tattgataacaatcatcttggtgtt

SEQ ID NO: 211805 - DNA, 25 bp, Probe sequence
ttaccagatacttttagcccaaaag

SEQ ID NO: 211806 - DNA, 25 bp, Probe sequence
ttctcgatatcactactaattacta

SEQ ID NO: 211807 - DNA, 25 bp, Probe sequence
ttgccatttcaatatttagctgatt

SEQ ID NO: 211808 - DNA, 25 bp, Probe sequence
atatattgattgggatggcggaagt

SEQ ID NO: 211809 - DNA, 25 bp, Probe sequence
atactatttataatcatttacattt

SEQ ID NO: 211810 - DNA, 25 bp, Probe sequence
atcgcggtggtgatggtggcatacc

SEQ ID NO: 211811 - DNA, 25 bp, Probe sequence
agaatcattgtatggtaaagcgcat

SEQ ID NO: 211812 - DNA, 25 bp, Probe sequence
acaacacttccagcacaaaaaataa

SEQ ID NO: 211813 - DNA, 25 bp, Probe sequence
aaatcataatatgcgctatcaatat

SEQ ID NO: 211814 - DNA, 25 bp, Probe sequence
aaacgaccgtgattcaattttcact

SEQ ID NO: 211815 - DNA, 25 bp, Probe sequence
aaacaaacatacctattgaagttgc

SEQ ID NO: 211816 - DNA, 25 bp, Probe sequence
aagcgcatattggaccgtgggtaac

SEQ ID NO: 211817 - DNA, 25 bp, Probe sequence
aagcatatatttgaatcgatgcctt

SEQ ID NO: 211818 - DNA, 25 bp, Probe sequence
aatacctgaataatgatttctggag

SEQ ID NO: 211819 - DNA, 25 bp, Probe sequence
caagtttctaactatcatttcacag

SEQ ID NO: 211820 - DNA, 25 bp, Probe sequence
ctatcatttcacagtattacttgga

SEQ ID NO: 211821 - DNA, 25 bp, Probe sequence
gccaaaaaccacttatgtatctaaa

SEQ ID NO: 211822 - DNA, 25 bp, Probe sequence
gccgggtatgcatgtggctatcact

SEQ ID NO: 211823 - DNA, 25 bp, Probe sequence
gctgccgggtatgcatgtggctatc

SEQ ID NO: 211824 - DNA, 25 bp, Probe sequence
gaaggattagctgaaaactatgtag

SEQ ID NO: 211825 - DNA, 25 bp, Probe sequence
gaaaagcttaattgcacatgaagta

SEQ ID NO: 211826 - DNA, 25 bp, Probe sequence
gaccgtgattcaattttcactaaag

SEQ ID NO: 211827 - DNA, 25 bp, Probe sequence
gaccaaatgtcaatacaatacctga

SEQ ID NO: 211828 - DNA, 25 bp, Probe sequence
gatggcggaagtttgattgaattga

SEQ ID NO: 211829 - DNA, 25 bp, Probe sequence
gattgggatggcggaagtttgattg

SEQ ID NO: 211830 - DNA, 25 bp, Probe sequence
gtatctaaataaaaatcgcggtggt

SEQ ID NO: 211831 - DNA, 25 bp, Probe sequence
gtacaagtacaattaattctatgaa

SEQ ID NO: 211832 - DNA, 25 bp, Probe sequence
gtaaagcgcatattggaccgtgggt

SEQ ID NO: 211833 - DNA, 25 bp, Probe sequence
ggtggcataccaggttatattatga

SEQ ID NO: 211834 - DNA, 25 bp, Probe sequence
ggtggtgatggtggcataccaggtt

SEQ ID NO: 211835 - DNA, 25 bp, Probe sequence
ggtatgcatgtggctatcacttggt

SEQ ID NO: 211836 - DNA, 25 bp, Probe sequence
tggaccgtgggtaacaaatactaat

SEQ ID NO: 211837 - DNA, 25 bp, Probe sequence
taatgatttctggagtaattgcgaa

SEQ ID NO: 211838 - DNA, 25 bp, Probe sequence
tatctcatgctgccgggtatgcatg

SEQ ID NO: 211839 - DNA, 25 bp, Probe sequence
tatttagtgccgagtacaagtacaa

SEQ ID NO: 211840 - DNA, 25 bp, Probe sequence
ttattagatcagattccgtctataa

SEQ ID NO: 211841 - DNA, 25 bp, Probe sequence
ttatgatttatttagtgccgagtac

SEQ ID NO: 211842 - DNA, 25 bp, Probe sequence
atattattaaatcaaagggcttcga

SEQ ID NO: 211843 - DNA, 25 bp, Probe sequence
agtctagttcgaacacacactgatg

SEQ ID NO: 211844 - DNA, 25 bp, Probe sequence
agttcgaacacacactgatgtgagt

SEQ ID NO: 211845 - DNA, 25 bp, Probe sequence
actgatgtgagtggttttctttatt

SEQ ID NO: 211846 - DNA, 25 bp, Probe sequence
acttacaagtctagttcgaacacac

SEQ ID NO: 211847 - DNA, 25 bp, Probe sequence
acaagtctagttcgaacacacactg

SEQ ID NO: 211848 - DNA, 25 bp, Probe sequence
aacacacactgatgtgagtggtttt

SEQ ID NO: 211849 - DNA, 25 bp, Probe sequence
aagttactagcattagcaaatatta

SEQ ID NO: 211850 - DNA, 25 bp, Probe sequence
aagtctagttcgaacacacactgat

SEQ ID NO: 211851 - DNA, 25 bp, Probe sequence
aatcagataagttactagcattagc

SEQ ID NO: 211852 - DNA, 25 bp, Probe sequence
caagtctagttcgaacacacactga

SEQ ID NO: 211853 - DNA, 25 bp, Probe sequence
cacacactgatgtgagtggttttct

SEQ ID NO: 211854 - DNA, 25 bp, Probe sequence
cacactgatgtgagtggttttcttt

SEQ ID NO: 211855 - DNA, 25 bp, Probe sequence
cttacaagtctagttcgaacacaca

SEQ ID NO: 211856 - DNA, 25 bp, Probe sequence
ctagttcgaacacacactgatgtga

SEQ ID NO: 211857 - DNA, 25 bp, Probe sequence
ctgatgtgagtggttttctttattt

SEQ ID NO: 211858 - DNA, 25 bp, Probe sequence
ctggaacttacaagtctagttcgaa

SEQ ID NO: 211859 - DNA, 25 bp, Probe sequence
gaacacacactgatgtgagtggttt

SEQ ID NO: 211860 - DNA, 25 bp, Probe sequence
gaacaatcagataagttactagcat

SEQ ID NO: 211861 - DNA, 25 bp, Probe sequence
gatgtgagtggttttctttatttta

SEQ ID NO: 211862 - DNA, 25 bp, Probe sequence
gataagttactagcattagcaaata

SEQ ID NO: 211863 - DNA, 25 bp, Probe sequence
gttcgaacacacactgatgtgagtg

SEQ ID NO: 211864 - DNA, 25 bp, Probe sequence
gttactagcattagcaaatattatt

SEQ ID NO: 211865 - DNA, 25 bp, Probe sequence
gtctagttcgaacacacactgatgt

SEQ ID NO: 211866 - DNA, 25 bp, Probe sequence
ggaacttacaagtctagttcgaaca

SEQ ID NO: 211867 - DNA, 25 bp, Probe sequence
tgatgtgagtggttttctttatttt

SEQ ID NO: 211868 - DNA, 25 bp, Probe sequence
tcgaacacacactgatgtgagtggt

SEQ ID NO: 211869 - DNA, 25 bp, Probe sequence
tctagttcgaacacacactgatgtg

SEQ ID NO: 211870 - DNA, 25 bp, Probe sequence
tctttattttaaacatgaacaatca

SEQ ID NO: 211871 - DNA, 25 bp, Probe sequence
tcagataagttactagcattagcaa

SEQ ID NO: 211872 - DNA, 25 bp, Probe sequence
tacaagtctagttcgaacacacact

SEQ ID NO: 211873 - DNA, 25 bp, Probe sequence
tagttcgaacacacactgatgtgag

SEQ ID NO: 211874 - DNA, 25 bp, Probe sequence
tattaaatcaaagggcttcgattca

SEQ ID NO: 211875 - DNA, 25 bp, Probe sequence
ttacaagtctagttcgaacacacac

SEQ ID NO: 211876 - DNA, 25 bp, Probe sequence
attccgtgagttaccatactttgaa

SEQ ID NO: 211877 - DNA, 25 bp, Probe sequence
atcaatcattagtagcatttttctt

SEQ ID NO: 211878 - DNA, 25 bp, Probe sequence
atcgcgggccagtgatggattatac

SEQ ID NO: 211879 - DNA, 25 bp, Probe sequence
atgaactttgtaacgttgacttcgg

SEQ ID NO: 211880 - DNA, 25 bp, Probe sequence
atgttaaagttggcgtatattgatt

SEQ ID NO: 211881 - DNA, 25 bp, Probe sequence
agttatacgatgaccacgccatgtt

SEQ ID NO: 211882 - DNA, 25 bp, Probe sequence
agcacgcacacttaaatttttcaaa

SEQ ID NO: 211883 - DNA, 25 bp, Probe sequence
acagctgaactctcaggtgttgaag

SEQ ID NO: 211884 - DNA, 25 bp, Probe sequence
aaatggattatcaaacgagacgtaa

SEQ ID NO: 211885 - DNA, 25 bp, Probe sequence
aaagcatttttcacattacacacaa

SEQ ID NO: 211886 - DNA, 25 bp, Probe sequence
aaaacgaaacgcacacagctagaac

SEQ ID NO: 211887 - DNA, 25 bp, Probe sequence
aagtttgctaaagcgcatcatattg

SEQ ID NO: 211888 - DNA, 25 bp, Probe sequence
aatggtcaagtgattgcaggatgct

SEQ ID NO: 211889 - DNA, 25 bp, Probe sequence
caacaattaacagctgaactctcag

SEQ ID NO: 211890 - DNA, 25 bp, Probe sequence
cgatgaccacgccatgttaaagttg

SEQ ID NO: 211891 - DNA, 25 bp, Probe sequence
gcgatgtgcatcttgtaggggttaa

SEQ ID NO: 211892 - DNA, 25 bp, Probe sequence
gcgtttacaacaaagcatttttcac

SEQ ID NO: 211893 - DNA, 25 bp, Probe sequence
gcattggaagaaagtcctaattcaa

SEQ ID NO: 211894 - DNA, 25 bp, Probe sequence
gcatcatattgatcgctataatttt

SEQ ID NO: 211895 - DNA, 25 bp, Probe sequence
gaaacgcacacagctagaacaacag

SEQ ID NO: 211896 - DNA, 25 bp, Probe sequence
gagttgatttaaaaggcgatgtgca

SEQ ID NO: 211897 - DNA, 25 bp, Probe sequence
ggtttcaaattccgtgagttaccat

SEQ ID NO: 211898 - DNA, 25 bp, Probe sequence
gtaggggttaaagatgacaatggtc

SEQ ID NO: 211899 - DNA, 25 bp, Probe sequence
gtttattacttatctagtggttcaa

SEQ ID NO: 211900 - DNA, 25 bp, Probe sequence
gtagcatttttctttaaagcattaa

SEQ ID NO: 211901 - DNA, 25 bp, Probe sequence
gtaacgttgacttcggatgagttca

SEQ ID NO: 211902 - DNA, 25 bp, Probe sequence
gtgattgcaggatgcttattgacag

SEQ ID NO: 211903 - DNA, 25 bp, Probe sequence
ggtgcctaccatttgcagtgggaaa

SEQ ID NO: 211904 - DNA, 25 bp, Probe sequence
ggatgagttcaatgcgtttacaaca

SEQ ID NO: 211905 - DNA, 25 bp, Probe sequence
tacacacaatcagctattcattaca

SEQ ID NO: 211906 - DNA, 25 bp, Probe sequence
tataatgcttatatgggtgcctacc

SEQ ID NO: 211907 - DNA, 25 bp, Probe sequence
tttacgcaatgcagacggtgaaatt

SEQ ID NO: 211908 - DNA, 25 bp, Probe sequence
ttattgacagaagcacgcacactta

SEQ ID NO: 211909 - DNA, 25 bp, Probe sequence
ttgtttatatgtccttgtagatcca

SEQ ID NO: 211910 - DNA, 25 bp, Probe sequence
atatctcgaagttgctagttggggc

SEQ ID NO: 211911 - DNA, 25 bp, Probe sequence
atcagcagcatatgaagctaactca

SEQ ID NO: 211912 - DNA, 25 bp, Probe sequence
agcaatcgttcgtcatgatgagcgt

SEQ ID NO: 211913 - DNA, 25 bp, Probe sequence
agcaccacacgataaatcagcagca

SEQ ID NO: 211914 - DNA, 25 bp, Probe sequence
agctcaagaaactgcatcatcaatc

SEQ ID NO: 211915 - DNA, 25 bp, Probe sequence
acttcaactaagcaccaaacaactc

SEQ ID NO: 211916 - DNA, 25 bp, Probe sequence
aaacacgcaacaaacttcaactaag

SEQ ID NO: 211917 - DNA, 25 bp, Probe sequence
aaacaactacgtaacagatcaacaa

SEQ ID NO: 211918 - DNA, 25 bp, Probe sequence
aatcaccaaaagttgaggttcctca

SEQ ID NO: 211919 - DNA, 25 bp, Probe sequence
aattattaggttactaccaatcatt

SEQ ID NO: 211920 - DNA, 25 bp, Probe sequence
caaaacattacgcgaacacccagaa

SEQ ID NO: 211921 - DNA, 25 bp, Probe sequence
cgcgaacacccagaacgtgcacaag

SEQ ID NO: 211922 - DNA, 25 bp, Probe sequence
ccagaccgacgtgttgcacaacaaa

SEQ ID NO: 211923 - DNA, 25 bp, Probe sequence
gctcctcaaattcaatcaccacaaa

SEQ ID NO: 211924 - DNA, 25 bp, Probe sequence
gaatcaccaaaagttgaagtccctc

SEQ ID NO: 211925 - DNA, 25 bp, Probe sequence
gcaagaacccagaccgacgtgttgc

SEQ ID NO: 211926 - DNA, 25 bp, Probe sequence
gcaccaaacaactcaaaacaactac

SEQ ID NO: 211927 - DNA, 25 bp, Probe sequence
gaatcagtacaatcttctaaagcta

SEQ ID NO: 211928 - DNA, 25 bp, Probe sequence
gaagttaacaaagcacctatggatg

SEQ ID NO: 211929 - DNA, 25 bp, Probe sequence
gaagaacaacgtaaccaatacatca

SEQ ID NO: 211930 - DNA, 25 bp, Probe sequence
gaagctaactcaaaattacctaaag

SEQ ID NO: 211931 - DNA, 25 bp, Probe sequence
gaacgtgcacaagaagtattctctg

SEQ ID NO: 211932 - DNA, 25 bp, Probe sequence
gaaaaccctgatagaagccaacaag

SEQ ID NO: 211933 - DNA, 25 bp, Probe sequence
gaggttcctcaatctaaattattag

SEQ ID NO: 211934 - DNA, 25 bp, Probe sequence
gatgagcgtgtgaaatcagcaaatg

SEQ ID NO: 211935 - DNA, 25 bp, Probe sequence
gatgctgaaaagaaagtggcgccaa

SEQ ID NO: 211936 - DNA, 25 bp, Probe sequence
gttgcacaacaaaacgctttttaca

SEQ ID NO: 211937 - DNA, 25 bp, Probe sequence
gtattctctgaatcacttaaagaca

SEQ ID NO: 211938 - DNA, 25 bp, Probe sequence
gtggcgccaaaagttgaggctcctc

SEQ ID NO: 211939 - DNA, 25 bp, Probe sequence
gtaactgagtcaatcaatactggta

SEQ ID NO: 211940 - DNA, 25 bp, Probe sequence
tgaggctcctcaaattcaatcacca

SEQ ID NO: 211941 - DNA, 25 bp, Probe sequence
taaagacagcaagaacccagaccga

SEQ ID NO: 211942 - DNA, 25 bp, Probe sequence
tatactttctaccaaaacccaacat

SEQ ID NO: 211943 - DNA, 25 bp, Probe sequence
ttccaagataacaaagcaccacacg

SEQ ID NO: 211944 - DNA, 25 bp, Probe sequence
attgatcaaacagtattaacagtac

SEQ ID NO: 211945 - DNA, 25 bp, Probe sequence
attaacagtactaggtagtggttct

SEQ ID NO: 211946 - DNA, 25 bp, Probe sequence
atgataaaaacggctacttagctaa

SEQ ID NO: 211947 - DNA, 25 bp, Probe sequence
aggtagtggttctaaatcttacatc

SEQ ID NO: 211948 - DNA, 25 bp, Probe sequence
agtaatttattatcattctggaaat

SEQ ID NO: 211949 - DNA, 25 bp, Probe sequence
agtactaggtagtggttctaaatct

SEQ ID NO: 211950 - DNA, 25 bp, Probe sequence
agttgatgataaaaacggctactta

SEQ ID NO: 211951 - DNA, 25 bp, Probe sequence
acagtactaggtagtggttctaaat

SEQ ID NO: 211952 - DNA, 25 bp, Probe sequence
aaaaacggctacttagctaaatcat

SEQ ID NO: 211953 - DNA, 25 bp, Probe sequence
aacagtattaacagtactaggtagt

SEQ ID NO: 211954 - DNA, 25 bp, Probe sequence
aagtaatttattatcattctggaaa

SEQ ID NO: 211955 - DNA, 25 bp, Probe sequence
caaacagtattaacagtactaggta

SEQ ID NO: 211956 - DNA, 25 bp, Probe sequence
cagtattaacagtactaggtagtgg

SEQ ID NO: 211957 - DNA, 25 bp, Probe sequence
cagtactaggtagtggttctaaatc

SEQ ID NO: 211958 - DNA, 25 bp, Probe sequence
ctaggtagtggttctaaatcttaca

SEQ ID NO: 211959 - DNA, 25 bp, Probe sequence
taggtagtggttctaaatcttacat

SEQ ID NO: 211960 - DNA, 25 bp, Probe sequence
gatgataaaaacggctacttagcta

SEQ ID NO: 211961 - DNA, 25 bp, Probe sequence
gatcaaacagtattaacagtactag

SEQ ID NO: 211962 - DNA, 25 bp, Probe sequence
gataaaaacggctacttagctaaat

SEQ ID NO: 211963 - DNA, 25 bp, Probe sequence
gttgatgataaaaacggctacttag

SEQ ID NO: 211964 - DNA, 25 bp, Probe sequence
gtattaacagtactaggtagtggtt

SEQ ID NO: 211965 - DNA, 25 bp, Probe sequence
gtagtggttctaaatcttacatcca

SEQ ID NO: 211966 - DNA, 25 bp, Probe sequence
gtactaggtagtggttctaaatctt

SEQ ID NO: 211967 - DNA, 25 bp, Probe sequence
gtaatttattatcattctggaaata

SEQ ID NO: 211968 - DNA, 25 bp, Probe sequence
ggtagtggttctaaatcttacatcc

SEQ ID NO: 211969 - DNA, 25 bp, Probe sequence
agtggttctaaatcttacatccaac

SEQ ID NO: 211970 - DNA, 25 bp, Probe sequence
tgatgataaaaacggctacttagct

SEQ ID NO: 211971 - DNA, 25 bp, Probe sequence
tgataaaaacggctacttagctaaa

SEQ ID NO: 211972 - DNA, 25 bp, Probe sequence
taacagtactaggtagtggttctaa

SEQ ID NO: 211973 - DNA, 25 bp, Probe sequence
taaaaacggctacttagctaaatca

SEQ ID NO: 211974 - DNA, 25 bp, Probe sequence
tactaggtagtggttctaaatctta

SEQ ID NO: 211975 - DNA, 25 bp, Probe sequence
tagtggttctaaatcttacatccaa

SEQ ID NO: 211976 - DNA, 25 bp, Probe sequence
ttgatgataaaaacggctacttagc

SEQ ID NO: 211977 - DNA, 25 bp, Probe sequence
ttaacagtactaggtagtggttcta

SEQ ID NO: 211978 - DNA, 25 bp, Probe sequence
attaaacctcttgaagtaagcaaag

SEQ ID NO: 211979 - DNA, 25 bp, Probe sequence
atacgcattctaccaaaaaccagaa

SEQ ID NO: 211980 - DNA, 25 bp, Probe sequence
atacattaaacctcttgaagtaagc

SEQ ID NO: 211981 - DNA, 25 bp, Probe sequence
ctttcaaaaacgctttaacaggcat

SEQ ID NO: 211982 - DNA, 25 bp, Probe sequence
atcggtagtggctatggttcataca

SEQ ID NO: 211983 - DNA, 25 bp, Probe sequence
agtgttatacgcattctaccaaaaa

SEQ ID NO: 211984 - DNA, 25 bp, Probe sequence
agtggctatggttcatacattaaac

SEQ ID NO: 211985 - DNA, 25 bp, Probe sequence
agcaaagaaagcgggaacttagcta

SEQ ID NO: 211986 - DNA, 25 bp, Probe sequence
acgctttaacaggcatattcaaatc

SEQ ID NO: 211987 - DNA, 25 bp, Probe sequence
acagttttaacaactatcggtagtg

SEQ ID NO: 211988 - DNA, 25 bp, Probe sequence
acaggcatattcaaatcattctgga

SEQ ID NO: 211989 - DNA, 25 bp, Probe sequence
acagcaacaactttcaaaaacgctt

SEQ ID NO: 211990 - DNA, 25 bp, Probe sequence
aaagtgttatacgcattctaccaaa

SEQ ID NO: 211991 - DNA, 25 bp, Probe sequence
aaaacgctttaacaggcatattcaa

SEQ ID NO: 211992 - DNA, 25 bp, Probe sequence
aacaactatcggtagtggctatggt

SEQ ID NO: 211993 - DNA, 25 bp, Probe sequence
aactatcggtagtggctatggttca

SEQ ID NO: 211994 - DNA, 25 bp, Probe sequence
aagtgttatacgcattctaccaaaa

SEQ ID NO: 211995 - DNA, 25 bp, Probe sequence
ctatcggtagtggctatggttcata

SEQ ID NO: 211996 - DNA, 25 bp, Probe sequence
ctcaagaaacagcaacaactttcaa

SEQ ID NO: 211997 - DNA, 25 bp, Probe sequence
gcattctaccaaaaaccagaattag

SEQ ID NO: 211998 - DNA, 25 bp, Probe sequence
gcacctatggatgtacaaaagcatt

SEQ ID NO: 211999 - DNA, 25 bp, Probe sequence
gaaagcgggaacttagctaaatcat

SEQ ID NO: 212000 - DNA, 25 bp, Probe sequence
gagtcaatcaacactggtaaagtgt

SEQ ID NO: 212001 - DNA, 25 bp, Probe sequence
gttcatacattaaacctcttgaagt

SEQ ID NO: 212002 - DNA, 25 bp, Probe sequence
gttttaacaactatcggtagtggct

SEQ ID NO: 212003 - DNA, 25 bp, Probe sequence
ggtagtggctatggttcatacatta

SEQ ID NO: 212004 - DNA, 25 bp, Probe sequence
ggatgtacaaaagcatttacagaaa

SEQ ID NO: 212005 - DNA, 25 bp, Probe sequence
ggcatattcaaatcattctggaaat

SEQ ID NO: 212006 - DNA, 25 bp, Probe sequence
ggctatggttcatacattaaacctc

SEQ ID NO: 212007 - DNA, 25 bp, Probe sequence
tggttcatacattaaacctcttgaa

SEQ ID NO: 212008 - DNA, 25 bp, Probe sequence
tgttatacgcattctaccaaaaacc

SEQ ID NO: 212009 - DNA, 25 bp, Probe sequence
taaagtgttatacgcattctaccaa

SEQ ID NO: 212010 - DNA, 25 bp, Probe sequence
ttatacgcattctaccaaaaaccag

SEQ ID NO: 212011 - DNA, 25 bp, Probe sequence
ttaacaggcatattcaaatcattct

SEQ ID NO: 212012 - DNA, 25 bp, Probe sequence
atcggcggaaacttccaatcagcgc

SEQ ID NO: 212013 - DNA, 25 bp, Probe sequence
attaggctataatatcggcggaaac

SEQ ID NO: 212014 - DNA, 25 bp, Probe sequence
atttattacaacattgtcacacgaa

SEQ ID NO: 212015 - DNA, 25 bp, Probe sequence
atacttatttgcacaagacccaact

SEQ ID NO: 212016 - DNA, 25 bp, Probe sequence
atcggaggcagtggctcattcaact

SEQ ID NO: 212017 - DNA, 25 bp, Probe sequence
atctgcatatgatcaatacttattt

SEQ ID NO: 212018 - DNA, 25 bp, Probe sequence
agctctagaacaacatattcagact

SEQ ID NO: 212019 - DNA, 25 bp, Probe sequence
aaattaaaagcatcacacctaagta

SEQ ID NO: 212020 - DNA, 25 bp, Probe sequence
aaatattaacagcaactttagcagt

SEQ ID NO: 212021 - DNA, 25 bp, Probe sequence
aaatcacttacggcagaaacatgga

SEQ ID NO: 212022 - DNA, 25 bp, Probe sequence
aaagatgccctagttgttaagatgc

SEQ ID NO: 212023 - DNA, 25 bp, Probe sequence
aaaattgattcagcagatgttagtc

SEQ ID NO: 212024 - DNA, 25 bp, Probe sequence
aacagcaactttagcagttggttta

SEQ ID NO: 212025 - DNA, 25 bp, Probe sequence
aagaatgatatggccatttcaatat

SEQ ID NO: 212026 - DNA, 25 bp, Probe sequence
aaggtgcagaaatcatcaaaagaac

SEQ ID NO: 212027 - DNA, 25 bp, Probe sequence
cacaagacccaactggtccagcagc

SEQ ID NO: 212028 - DNA, 25 bp, Probe sequence
cagcgccatcaatcggaggcagtgg

SEQ ID NO: 212029 - DNA, 25 bp, Probe sequence
cagtggctcattcaactactctaaa

SEQ ID NO: 212030 - DNA, 25 bp, Probe sequence
cttccaatcagcgccatcaatcgga

SEQ ID NO: 212031 - DNA, 25 bp, Probe sequence
cgaaagactctaatgttgatttaat

SEQ ID NO: 212032 - DNA, 25 bp, Probe sequence
cgaatggtcaagtatctgcatatga

SEQ ID NO: 212033 - DNA, 25 bp, Probe sequence
cccctttagccaatccatttataga

SEQ ID NO: 212034 - DNA, 25 bp, Probe sequence
gccgttgatagaaaacatgatgctt

SEQ ID NO: 212035 - DNA, 25 bp, Probe sequence
gcgagtttgaaatcacttacggcag

SEQ ID NO: 212036 - DNA, 25 bp, Probe sequence
gcagatgttagtcagaaattaggct

SEQ ID NO: 212037 - DNA, 25 bp, Probe sequence
gcaaacgattagctataactcaaaa

SEQ ID NO: 212038 - DNA, 25 bp, Probe sequence
gaacacaagacattactagcaaacg

SEQ ID NO: 212039 - DNA, 25 bp, Probe sequence
gagactatttcgtcccagataatca

SEQ ID NO: 212040 - DNA, 25 bp, Probe sequence
gttacaccgaatggtcaagtatctg

SEQ ID NO: 212041 - DNA, 25 bp, Probe sequence
gtagaaagtcagaactctaaaggtg

SEQ ID NO: 212042 - DNA, 25 bp, Probe sequence
ggctcattcaactactctaaaacaa

SEQ ID NO: 212043 - DNA, 25 bp, Probe sequence
tggctttaatccatcatttattaca

SEQ ID NO: 212044 - DNA, 25 bp, Probe sequence
tagctataactcaaaacattcaatt

SEQ ID NO: 212045 - DNA, 25 bp, Probe sequence
tagttgttaagatgcaaggcttcat

SEQ ID NO: 212046 - DNA, 25 bp, Probe sequence
ataaagtatcgaaccatagtagata

SEQ ID NO: 212047 - DNA, 25 bp, Probe sequence
ataagaataaagtatcgaaccatag

SEQ ID NO: 212048 - DNA, 25 bp, Probe sequence
atcagcctcataacattaaattatt

SEQ ID NO: 212049 - DNA, 25 bp, Probe sequence
atcgaaccatagtagatacacaaat

SEQ ID NO: 212050 - DNA, 25 bp, Probe sequence
agtatcgaaccatagtagatacaca

SEQ ID NO: 212051 - DNA, 25 bp, Probe sequence
agaataaagtatcgaaccatagtag

SEQ ID NO: 212052 - DNA, 25 bp, Probe sequence
agcctcataacattaaattatttta

SEQ ID NO: 212053 - DNA, 25 bp, Probe sequence
accatagtagatacacaaataatac

SEQ ID NO: 212054 - DNA, 25 bp, Probe sequence
acattaaattattttatcgtacatt

SEQ ID NO: 212055 - DNA, 25 bp, Probe sequence
aacattaaattattttatcgtacat

SEQ ID NO: 212056 - DNA, 25 bp, Probe sequence
aagaataaagtatcgaaccatagta

SEQ ID NO: 212057 - DNA, 25 bp, Probe sequence
aataaagtatcgaaccatagtagat

SEQ ID NO: 212058 - DNA, 25 bp, Probe sequence
aatcagcctcataacattaaattat

SEQ ID NO: 212059 - DNA, 25 bp, Probe sequence
aataataacaactgatttttataag

SEQ ID NO: 212060 - DNA, 25 bp, Probe sequence
aataacaactgatttttataagaat

SEQ ID NO: 212061 - DNA, 25 bp, Probe sequence
cagcctcataacattaaattatttt

SEQ ID NO: 212062 - DNA, 25 bp, Probe sequence
cattaaattattttatcgtacatta

SEQ ID NO: 212063 - DNA, 25 bp, Probe sequence
cgaaccatagtagatacacaaataa

SEQ ID NO: 212064 - DNA, 25 bp, Probe sequence
gcctcataacattaaattattttat

SEQ ID NO: 212065 - DNA, 25 bp, Probe sequence
gaatcagcctcataacattaaatta

SEQ ID NO: 212066 - DNA, 25 bp, Probe sequence
gaataaagtatcgaaccatagtaga

SEQ ID NO: 212067 - DNA, 25 bp, Probe sequence
gaaccatagtagatacacaaataat

SEQ ID NO: 212068 - DNA, 25 bp, Probe sequence
gatacacaaataatacaaatgaaac

SEQ ID NO: 212069 - DNA, 25 bp, Probe sequence
gtatcgaaccatagtagatacacaa

SEQ ID NO: 212070 - DNA, 25 bp, Probe sequence
tgaatcagcctcataacattaaatt

SEQ ID NO: 212071 - DNA, 25 bp, Probe sequence
tcgaaccatagtagatacacaaata

SEQ ID NO: 212072 - DNA, 25 bp, Probe sequence
tcagcctcataacattaaattattt

SEQ ID NO: 212073 - DNA, 25 bp, Probe sequence
taagaataaagtatcgaaccatagt

SEQ ID NO: 212074 - DNA, 25 bp, Probe sequence
taacattaaattattttatcgtaca

SEQ ID NO: 212075 - DNA, 25 bp, Probe sequence
taacaactgatttttataagaataa

SEQ ID NO: 212076 - DNA, 25 bp, Probe sequence
taaattattttatcgtacattaaat

SEQ ID NO: 212077 - DNA, 25 bp, Probe sequence
tatcgaaccatagtagatacacaaa

SEQ ID NO: 212078 - DNA, 25 bp, Probe sequence
tattttatcgtacattaaatttaat

SEQ ID NO: 212079 - DNA, 25 bp, Probe sequence
ttgaatcagcctcataacattaaat

SEQ ID NO: 212080 - DNA, 25 bp, Probe sequence
ataaatggggcgtgactcaaaatat

SEQ ID NO: 212081 - DNA, 25 bp, Probe sequence
aaagatgcaaggattcattagctct

SEQ ID NO: 212082 - DNA, 25 bp, Probe sequence
aagtgttttatggggcgtcaaagcg

SEQ ID NO: 212083 - DNA, 25 bp, Probe sequence
aatcgattagctatacacaacaaaa

SEQ ID NO: 212084 - DNA, 25 bp, Probe sequence
aattcattcgccactgaatcaggtc

SEQ ID NO: 212085 - DNA, 25 bp, Probe sequence
cattcgccactgaatcaggtcaaaa

SEQ ID NO: 212086 - DNA, 25 bp, Probe sequence
ctagagattatttcgttccagacag

SEQ ID NO: 212087 - DNA, 25 bp, Probe sequence
ctcttgccaatccgttattagaaaa

SEQ ID NO: 212088 - DNA, 25 bp, Probe sequence
ccctcttgccaatccgttattagaa

SEQ ID NO: 212089 - DNA, 25 bp, Probe sequence
gcgaattcattcgccactgaatcag

SEQ ID NO: 212090 - DNA, 25 bp, Probe sequence
gctacaaacctcatagtaaagatcc

SEQ ID NO: 212091 - DNA, 25 bp, Probe sequence
gatgtcactcatgccattaaaagat

SEQ ID NO: 212092 - DNA, 25 bp, Probe sequence
gatcctagagattatttcgttccag

SEQ ID NO: 212093 - DNA, 25 bp, Probe sequence
gatagcgatttatttgtaggctaca

SEQ ID NO: 212094 - DNA, 25 bp, Probe sequence
gattagctatacacaacaaaattat

SEQ ID NO: 212095 - DNA, 25 bp, Probe sequence
gtacaaagtggatttaacccttcat

SEQ ID NO: 212096 - DNA, 25 bp, Probe sequence
gtaataaatggggcgtgactcaaaa

SEQ ID NO: 212097 - DNA, 25 bp, Probe sequence
gtcactcatgccattaaaagatcaa

SEQ ID NO: 212098 - DNA, 25 bp, Probe sequence
gtgaagtagaacaacaaaactcaaa

SEQ ID NO: 212099 - DNA, 25 bp, Probe sequence
gtgttttatggggcgtcaaagcgaa

SEQ ID NO: 212100 - DNA, 25 bp, Probe sequence
gggcgtcaaagcgaattcattcgcc

SEQ ID NO: 212101 - DNA, 25 bp, Probe sequence
gtggatttaacccttcatttatcgc

SEQ ID NO: 212102 - DNA, 25 bp, Probe sequence
ggtggtaatttccaatcagccccat

SEQ ID NO: 212103 - DNA, 25 bp, Probe sequence
ggtaatggatcatttaactattcta

SEQ ID NO: 212104 - DNA, 25 bp, Probe sequence
ggatcatttaactattctaaatcga

SEQ ID NO: 212105 - DNA, 25 bp, Probe sequence
tggatgtcactcatgccattaaaag

SEQ ID NO: 212106 - DNA, 25 bp, Probe sequence
tggggcgtcaaagcgaattcattcg

SEQ ID NO: 212107 - DNA, 25 bp, Probe sequence
tgtaggctacaaacctcatagtaaa

SEQ ID NO: 212108 - DNA, 25 bp, Probe sequence
tcctagagattatttcgttccagac

SEQ ID NO: 212109 - DNA, 25 bp, Probe sequence
tcgccactgaatcaggtcaaaaatc

SEQ ID NO: 212110 - DNA, 25 bp, Probe sequence
taaatcgattagctatacacaacaa

SEQ ID NO: 212111 - DNA, 25 bp, Probe sequence
ttttatggggcgtcaaagcgaattc

SEQ ID NO: 212112 - DNA, 25 bp, Probe sequence
ttcattcgccactgaatcaggtcaa

SEQ ID NO: 212113 - DNA, 25 bp, Probe sequence
ttgccaatccgttattagaaaatgc

SEQ ID NO: 212114 - DNA, 25 bp, Probe sequence
attacagtaacttatcaacgtgaaa

SEQ ID NO: 212115 - DNA, 25 bp, Probe sequence
atatggtaatgaactcttcttagct

SEQ ID NO: 212116 - DNA, 25 bp, Probe sequence
atagcgcaacaccaaatgccattat

SEQ ID NO: 212117 - DNA, 25 bp, Probe sequence
atcaacgtgaaatggatttatacca

SEQ ID NO: 212118 - DNA, 25 bp, Probe sequence
atccagaatttttaagcgtactatc

SEQ ID NO: 212119 - DNA, 25 bp, Probe sequence
atgaactcttcttagctggcagaca

SEQ ID NO: 212120 - DNA, 25 bp, Probe sequence
agatagcttccacccaacatatggt

SEQ ID NO: 212121 - DNA, 25 bp, Probe sequence
agctggcagacaaagcagtgcatac

SEQ ID NO: 212122 - DNA, 25 bp, Probe sequence
accaaatgccattattatctagaag

SEQ ID NO: 212123 - DNA, 25 bp, Probe sequence
actcttcttagctggcagacaaagc

SEQ ID NO: 212124 - DNA, 25 bp, Probe sequence
actttaggctatacatttggtggtg

SEQ ID NO: 212125 - DNA, 25 bp, Probe sequence
acttcatagcgcaacaccaaatgcc

SEQ ID NO: 212126 - DNA, 25 bp, Probe sequence
aaagcagtgcatacgctggccaaaa

SEQ ID NO: 212127 - DNA, 25 bp, Probe sequence
aaaacttcatagcgcaacaccaaat

SEQ ID NO: 212128 - DNA, 25 bp, Probe sequence
aagcgtactatcacacagacaagat

SEQ ID NO: 212129 - DNA, 25 bp, Probe sequence
aagtcgcaacacaaattataaaaat

SEQ ID NO: 212130 - DNA, 25 bp, Probe sequence
aattagtcaaatcatccgttgctac

SEQ ID NO: 212131 - DNA, 25 bp, Probe sequence
gccaaaacttcatagcgcaacacca

SEQ ID NO: 212132 - DNA, 25 bp, Probe sequence
gccattattatctagaagtaacttc

SEQ ID NO: 212133 - DNA, 25 bp, Probe sequence
gctggccaaaacttcatagcgcaac

SEQ ID NO: 212134 - DNA, 25 bp, Probe sequence
gctttttctgaaacaattaattata

SEQ ID NO: 212135 - DNA, 25 bp, Probe sequence
gcatacgctggccaaaacttcatag

SEQ ID NO: 212136 - DNA, 25 bp, Probe sequence
gcaacaccaaatgccattattatct

SEQ ID NO: 212137 - DNA, 25 bp, Probe sequence
gaatttttaagcgtactatcacaca

SEQ ID NO: 212138 - DNA, 25 bp, Probe sequence
gaactcttcttagctggcagacaaa

SEQ ID NO: 212139 - DNA, 25 bp, Probe sequence
gaacaacattaagtcgcaacacaaa

SEQ ID NO: 212140 - DNA, 25 bp, Probe sequence
gacaaagcagtgcatacgctggcca

SEQ ID NO: 212141 - DNA, 25 bp, Probe sequence
gatagcttccacccaacatatggta

SEQ ID NO: 212142 - DNA, 25 bp, Probe sequence
gttacagaacaacattaagtcgcaa

SEQ ID NO: 212143 - DNA, 25 bp, Probe sequence
gtgcatacgctggccaaaacttcat

SEQ ID NO: 212144 - DNA, 25 bp, Probe sequence
ggtaatgaactcttcttagctggca

SEQ ID NO: 212145 - DNA, 25 bp, Probe sequence
taggctatacatttggtggtgacat

SEQ ID NO: 212146 - DNA, 25 bp, Probe sequence
ttttaagcgtactatcacacagaca

SEQ ID NO: 212147 - DNA, 25 bp, Probe sequence
ttggaatggcttctactgggcaggc

SEQ ID NO: 212148 - DNA, 25 bp, Probe sequence
atttcggtattgatagtgcctattc

SEQ ID NO: 212149 - DNA, 25 bp, Probe sequence
atacagtcatcgttaatgacccttt

SEQ ID NO: 212150 - DNA, 25 bp, Probe sequence
atacacatcatcatatggtaccggt

SEQ ID NO: 212151 - DNA, 25 bp, Probe sequence
atcaacatgtttacgatttcggtat

SEQ ID NO: 212152 - DNA, 25 bp, Probe sequence
atgaccctttaatgcgacctattga

SEQ ID NO: 212153 - DNA, 25 bp, Probe sequence
accaggttctggtgcagctggcggt

SEQ ID NO: 212154 - DNA, 25 bp, Probe sequence
acccttcattatgatatcattccga

SEQ ID NO: 212155 - DNA, 25 bp, Probe sequence
aaaattgtcatcgctcctgactcat

SEQ ID NO: 212156 - DNA, 25 bp, Probe sequence
aagcatgttatgcacgcgcagacga

SEQ ID NO: 212157 - DNA, 25 bp, Probe sequence
aatctcttcacctagcactttagaa

SEQ ID NO: 212158 - DNA, 25 bp, Probe sequence
aatcttgctcacattgcacaaatcg

SEQ ID NO: 212159 - DNA, 25 bp, Probe sequence
caatatcatattcctgtcatcgcga

SEQ ID NO: 212160 - DNA, 25 bp, Probe sequence
caactgacattgctcgtattctgaa

SEQ ID NO: 212161 - DNA, 25 bp, Probe sequence
cagctggcggtatgggcgcagcatt

SEQ ID NO: 212162 - DNA, 25 bp, Probe sequence
catcgcgatttgtggcagtctaggc

SEQ ID NO: 212163 - DNA, 25 bp, Probe sequence
gcagcgtcaggtttggatttattag

SEQ ID NO: 212164 - DNA, 25 bp, Probe sequence
gcagcattattagcgttttgtgaga

SEQ ID NO: 212165 - DNA, 25 bp, Probe sequence
gcacgcgcagacgaacaacaaattg

SEQ ID NO: 212166 - DNA, 25 bp, Probe sequence
gatgtttcaaatcctttattgggtg

SEQ ID NO: 212167 - DNA, 25 bp, Probe sequence
gatgcagacctcgttattactggag

SEQ ID NO: 212168 - DNA, 25 bp, Probe sequence
gttggatttcgcaatgtcgcattat

SEQ ID NO: 212169 - DNA, 25 bp, Probe sequence
gtatgaccgcacagcaagttggcaa

SEQ ID NO: 212170 - DNA, 25 bp, Probe sequence
gtaggcgttgcgttagctgcaaaac

SEQ ID NO: 212171 - DNA, 25 bp, Probe sequence
gtcgtctttgacattacagattttc

SEQ ID NO: 212172 - DNA, 25 bp, Probe sequence
gtgcctattctataatctcttcacc

SEQ ID NO: 212173 - DNA, 25 bp, Probe sequence
ggtggtacaggtatgctaagtgcac

SEQ ID NO: 212174 - DNA, 25 bp, Probe sequence
ggtgctacctatatttatggtcctc

SEQ ID NO: 212175 - DNA, 25 bp, Probe sequence
ggacgcatggattatcagaccatct

SEQ ID NO: 212176 - DNA, 25 bp, Probe sequence
ggaacgtaatcctttatacacatca

SEQ ID NO: 212177 - DNA, 25 bp, Probe sequence
ggcgctgatgcaaagatgataccaa

SEQ ID NO: 212178 - DNA, 25 bp, Probe sequence
tggtaaaacacccgtaggcgttgcg

SEQ ID NO: 212179 - DNA, 25 bp, Probe sequence
tggtcctcaaaaaggcgctgatgca

SEQ ID NO: 212180 - DNA, 25 bp, Probe sequence
tcattccgatggctgatggtggtga

SEQ ID NO: 212181 - DNA, 25 bp, Probe sequence
ttagggattggtggcagtgcaacaa

SEQ ID NO: 212182 - DNA, 25 bp, Probe sequence
attattcattttagcgttctcattg

SEQ ID NO: 212183 - DNA, 25 bp, Probe sequence
atatcgttgattttacctgtacttg

SEQ ID NO: 212184 - DNA, 25 bp, Probe sequence
atgccagaacatccaatatcgttga

SEQ ID NO: 212185 - DNA, 25 bp, Probe sequence
agcagtcatgggtggggtcgtatat

SEQ ID NO: 212186 - DNA, 25 bp, Probe sequence
accaattggtattatcagtgcgatg

SEQ ID NO: 212187 - DNA, 25 bp, Probe sequence
acgaaccttattttattcaattgtg

SEQ ID NO: 212188 - DNA, 25 bp, Probe sequence
acaagtattgctgcttctatcacgc

SEQ ID NO: 212189 - DNA, 25 bp, Probe sequence
acaagcacatttttcaacatacttt

SEQ ID NO: 212190 - DNA, 25 bp, Probe sequence
aaattggatattttgccaccatctt

SEQ ID NO: 212191 - DNA, 25 bp, Probe sequence
aaatgccattattccaattgtaacg

SEQ ID NO: 212192 - DNA, 25 bp, Probe sequence
aaagtcatccacacaaatacataaa

SEQ ID NO: 212193 - DNA, 25 bp, Probe sequence
aattgtcatggctgtgattgtcatc

SEQ ID NO: 212194 - DNA, 25 bp, Probe sequence
cattctgtatttttcaccgcttgat

SEQ ID NO: 212195 - DNA, 25 bp, Probe sequence
ctgcttctatcacgcgtatgacaag

SEQ ID NO: 212196 - DNA, 25 bp, Probe sequence
gcgattatgttttaactgcttatgc

SEQ ID NO: 212197 - DNA, 25 bp, Probe sequence
gcggcttatagcatactgggacaaa

SEQ ID NO: 212198 - DNA, 25 bp, Probe sequence
gcgtatgacaaggtcttctgtactt

SEQ ID NO: 212199 - DNA, 25 bp, Probe sequence
gcaacaaaggcacagatacatcaat

SEQ ID NO: 212200 - DNA, 25 bp, Probe sequence
gaaatagttggcttgatatcacgtt

SEQ ID NO: 212201 - DNA, 25 bp, Probe sequence
gataccatcaagggtgtttttacct

SEQ ID NO: 212202 - DNA, 25 bp, Probe sequence
gataaagtttttcttttctgctaag

SEQ ID NO: 212203 - DNA, 25 bp, Probe sequence
gttgtgactaaagcagttggcgaaa

SEQ ID NO: 212204 - DNA, 25 bp, Probe sequence
gattgtcatcattggtgttattgtc

SEQ ID NO: 212205 - DNA, 25 bp, Probe sequence
gtattacatcatcttaacgaacctt

SEQ ID NO: 212206 - DNA, 25 bp, Probe sequence
gtacttgaagtaatgcgcagcgatt

SEQ ID NO: 212207 - DNA, 25 bp, Probe sequence
ggcagagttactaggcggttcagca

SEQ ID NO: 212208 - DNA, 25 bp, Probe sequence
tgtattatcggtattaagcttgcca

SEQ ID NO: 212209 - DNA, 25 bp, Probe sequence
taattgtcgcagtattagcgctaat

SEQ ID NO: 212210 - DNA, 25 bp, Probe sequence
tactaggcggttcagcagtgacgga

SEQ ID NO: 212211 - DNA, 25 bp, Probe sequence
tagttggtcttctagtggcagagtt

SEQ ID NO: 212212 - DNA, 25 bp, Probe sequence
tattttatgctttaatcgatccaaa

SEQ ID NO: 212213 - DNA, 25 bp, Probe sequence
ttttcaccgcttgatgcggcttata

SEQ ID NO: 212214 - DNA, 25 bp, Probe sequence
ttatcgcagcaaaagtcatccacac

SEQ ID NO: 212215 - DNA, 25 bp, Probe sequence
ttgccaccatcttatatgccagaac

SEQ ID NO: 212216 - DNA, 25 bp, Probe sequence
attctcttaattattgtcgctattt

SEQ ID NO: 212217 - DNA, 25 bp, Probe sequence
attcatatcaatacgacaatcaaaa

SEQ ID NO: 212218 - DNA, 25 bp, Probe sequence
ataccgtgattcatatcaatacgac

SEQ ID NO: 212219 - DNA, 25 bp, Probe sequence
atcgtcgtcaatctgaagacgcatc

SEQ ID NO: 212220 - DNA, 25 bp, Probe sequence
agacgcatcgtatagacaacaatat

SEQ ID NO: 212221 - DNA, 25 bp, Probe sequence
acgcgccttacttaacaatgatagc

SEQ ID NO: 212222 - DNA, 25 bp, Probe sequence
actgataaataccgtgattcatatc

SEQ ID NO: 212223 - DNA, 25 bp, Probe sequence
acacgcgccttacttaacaatgata

SEQ ID NO: 212224 - DNA, 25 bp, Probe sequence
aaattcgacagtattaaatctaaat

SEQ ID NO: 212225 - DNA, 25 bp, Probe sequence
aaatcatcgtcgtcaatctgaagac

SEQ ID NO: 212226 - DNA, 25 bp, Probe sequence
aaacaatgcaagccaaggtaaaatt

SEQ ID NO: 212227 - DNA, 25 bp, Probe sequence
aatcaagacggccaaattaaccagc

SEQ ID NO: 212228 - DNA, 25 bp, Probe sequence
aacaaccaaaaaactgatgacatta

SEQ ID NO: 212229 - DNA, 25 bp, Probe sequence
aagacggccaaattaaccagcaagt

SEQ ID NO: 212230 - DNA, 25 bp, Probe sequence
caaaatcatcgtcgtcaatctgaag

SEQ ID NO: 212231 - DNA, 25 bp, Probe sequence
gccttacttaacaatgatagcgata

SEQ ID NO: 212232 - DNA, 25 bp, Probe sequence
gccgttcaaaaaaatggttatatat

SEQ ID NO: 212233 - DNA, 25 bp, Probe sequence
gctgattctaagctaactcaatttt

SEQ ID NO: 212234 - DNA, 25 bp, Probe sequence
gctaactcaattttatcaagaccaa

SEQ ID NO: 212235 - DNA, 25 bp, Probe sequence
gcacttaaaaacaatgcaagccaag

SEQ ID NO: 212236 - DNA, 25 bp, Probe sequence
gaacaaaacaaagctgattctaagc

SEQ ID NO: 212237 - DNA, 25 bp, Probe sequence
gacagaggcaaataatgcacttaaa

SEQ ID NO: 212238 - DNA, 25 bp, Probe sequence
gaccaaatcaacaaattgacagagg

SEQ ID NO: 212239 - DNA, 25 bp, Probe sequence
gaccctaaagtctctcaaaattata

SEQ ID NO: 212240 - DNA, 25 bp, Probe sequence
gttgaaaatcaagacggccaaatta

SEQ ID NO: 212241 - DNA, 25 bp, Probe sequence
gattctaagctaactcaattttatc

SEQ ID NO: 212242 - DNA, 25 bp, Probe sequence
gtaatgaccctaaagtctctcaaaa

SEQ ID NO: 212243 - DNA, 25 bp, Probe sequence
gtcaatctgaagacgcatcgtatag

SEQ ID NO: 212244 - DNA, 25 bp, Probe sequence
tgtcgctatttttgtcacacgcgcc

SEQ ID NO: 212245 - DNA, 25 bp, Probe sequence
tgaagaagaaaacgagaaatcccgc

SEQ ID NO: 212246 - DNA, 25 bp, Probe sequence
tcacacgcgccttacttaacaatga

SEQ ID NO: 212247 - DNA, 25 bp, Probe sequence
tagcgataaagttagtaatgaccct

SEQ ID NO: 212248 - DNA, 25 bp, Probe sequence
tagtaatgaccctaaagtctctcaa

SEQ ID NO: 212249 - DNA, 25 bp, Probe sequence
tattgtcgctatttttgtcacacgc

SEQ ID NO: 212250 - DNA, 25 bp, Probe sequence
attgtcagtcaagtcgttgctttat

SEQ ID NO: 212251 - DNA, 25 bp, Probe sequence
attgtggcactcatcattttaattg

SEQ ID NO: 212252 - DNA, 25 bp, Probe sequence
atttatcttaggtggcgctgttgca

SEQ ID NO: 212253 - DNA, 25 bp, Probe sequence
atctttggacctttatccgatgctt

SEQ ID NO: 212254 - DNA, 25 bp, Probe sequence
atcattttaattggcgtcgcttctc

SEQ ID NO: 212255 - DNA, 25 bp, Probe sequence
atccgtagcaacatggcgttctatt

SEQ ID NO: 212256 - DNA, 25 bp, Probe sequence
atctgcatcgccatttattactcaa

SEQ ID NO: 212257 - DNA, 25 bp, Probe sequence
atgtgtgtcctgtgacgtcaattgg

SEQ ID NO: 212258 - DNA, 25 bp, Probe sequence
aggtggcagtggtaacgcatcaagt

SEQ ID NO: 212259 - DNA, 25 bp, Probe sequence
acacttacattccatttaccacttt

SEQ ID NO: 212260 - DNA, 25 bp, Probe sequence
acagccattctattagtcagtctac

SEQ ID NO: 212261 - DNA, 25 bp, Probe sequence
aaagcctctgctggtgataaattta

SEQ ID NO: 212262 - DNA, 25 bp, Probe sequence
aaggtgattttggttctactacatc

SEQ ID NO: 212263 - DNA, 25 bp, Probe sequence
aaggcgaatttaatacatcaccata

SEQ ID NO: 212264 - DNA, 25 bp, Probe sequence
caggtttgtctatgtttgttgatca

SEQ ID NO: 212265 - DNA, 25 bp, Probe sequence
cgtcgcttctcaattacctaaaaca

SEQ ID NO: 212266 - DNA, 25 bp, Probe sequence
gcgctgttgcaccattagttggctt

SEQ ID NO: 212267 - DNA, 25 bp, Probe sequence
gacaccccaacaatttagtatcatg

SEQ ID NO: 212268 - DNA, 25 bp, Probe sequence
gatcaattgccattattcttaactt

SEQ ID NO: 212269 - DNA, 25 bp, Probe sequence
gatatgtacgtaccatcattaccta

SEQ ID NO: 212270 - DNA, 25 bp, Probe sequence
gttgctttaattatcctgacactta

SEQ ID NO: 212271 - DNA, 25 bp, Probe sequence
gtatcatgtttgctgttaacggtgt

SEQ ID NO: 212272 - DNA, 25 bp, Probe sequence
gtcagtctacaaatcatttacttta

SEQ ID NO: 212273 - DNA, 25 bp, Probe sequence
ggtggattagctttatccgtagcaa

SEQ ID NO: 212274 - DNA, 25 bp, Probe sequence
ggtgtaggtttaatcattgtcagtc

SEQ ID NO: 212275 - DNA, 25 bp, Probe sequence
ggtcttgcactaggccaatttatct

SEQ ID NO: 212276 - DNA, 25 bp, Probe sequence
ggcaacgcactcgctaaatttttag

SEQ ID NO: 212277 - DNA, 25 bp, Probe sequence
ggcatcatcactattcttgcaccat

SEQ ID NO: 212278 - DNA, 25 bp, Probe sequence
tcttactcatcgcattcttcttaaa

SEQ ID NO: 212279 - DNA, 25 bp, Probe sequence
tacttggcttattccaatttatctt

SEQ ID NO: 212280 - DNA, 25 bp, Probe sequence
taccactttgggtcttactcatcgc

SEQ ID NO: 212281 - DNA, 25 bp, Probe sequence
tatccgatgcttttggtcgcaaacg

SEQ ID NO: 212282 - DNA, 25 bp, Probe sequence
tattatcttcattacagccattcta

SEQ ID NO: 212283 - DNA, 25 bp, Probe sequence
ttagttattcatctgcatcgccatt

SEQ ID NO: 212284 - DNA, 25 bp, Probe sequence
ataggttgtgtaaatagtttcttat

SEQ ID NO: 212285 - DNA, 25 bp, Probe sequence
atgatagcagcttcttttgacaaag

SEQ ID NO: 212286 - DNA, 25 bp, Probe sequence
acctttttcttctggtaccatgata

SEQ ID NO: 212287 - DNA, 25 bp, Probe sequence
accatgatattcactccttgtacaa

SEQ ID NO: 212288 - DNA, 25 bp, Probe sequence
aaataatatgtttggaagcgttatg

SEQ ID NO: 212289 - DNA, 25 bp, Probe sequence
aacctttttcttctggtaccatgat

SEQ ID NO: 212290 - DNA, 25 bp, Probe sequence
aatggtttgaattttgcggttgcaa

SEQ ID NO: 212291 - DNA, 25 bp, Probe sequence
aatatgatagcagcttcttttgaca

SEQ ID NO: 212292 - DNA, 25 bp, Probe sequence
cactccttgtacaattggatttaaa

SEQ ID NO: 212293 - DNA, 25 bp, Probe sequence
catgatattcactccttgtacaatt

SEQ ID NO: 212294 - DNA, 25 bp, Probe sequence
cttctggtaccatgatattcactcc

SEQ ID NO: 212295 - DNA, 25 bp, Probe sequence
ctttttcttctggtaccatgatatt

SEQ ID NO: 212296 - DNA, 25 bp, Probe sequence
ctggtaccatgatattcactccttg

SEQ ID NO: 212297 - DNA, 25 bp, Probe sequence
ccttgtacaattggatttaaatctt

SEQ ID NO: 212298 - DNA, 25 bp, Probe sequence
ccatgatattcactccttgtacaat

SEQ ID NO: 212299 - DNA, 25 bp, Probe sequence
gcggttgcaaatatgatagcagctt

SEQ ID NO: 212300 - DNA, 25 bp, Probe sequence
gcagcttcttttgacaaagtaatag

SEQ ID NO: 212301 - DNA, 25 bp, Probe sequence
gaacctttttcttctggtaccatga

SEQ ID NO: 212302 - DNA, 25 bp, Probe sequence
gatagcagcttcttttgacaaagta

SEQ ID NO: 212303 - DNA, 25 bp, Probe sequence
gatattcactccttgtacaattgga

SEQ ID NO: 212304 - DNA, 25 bp, Probe sequence
ggtaccatgatattcactccttgta

SEQ ID NO: 212305 - DNA, 25 bp, Probe sequence
tggtaccatgatattcactccttgt

SEQ ID NO: 212306 - DNA, 25 bp, Probe sequence
tgtaaatagtttcttattgttacca

SEQ ID NO: 212307 - DNA, 25 bp, Probe sequence
tgatattcactccttgtacaattgg

SEQ ID NO: 212308 - DNA, 25 bp, Probe sequence
tctggtaccatgatattcactcctt

SEQ ID NO: 212309 - DNA, 25 bp, Probe sequence
taattctgttcttaaatggtttgaa

SEQ ID NO: 212310 - DNA, 25 bp, Probe sequence
tagaacctttttcttctggtaccat

SEQ ID NO: 212311 - DNA, 25 bp, Probe sequence
taagaaatggatttgtttttagtgg

SEQ ID NO: 212312 - DNA, 25 bp, Probe sequence
taccatgatattcactccttgtaca

SEQ ID NO: 212313 - DNA, 25 bp, Probe sequence
tagtttcttattgttaccaaataat

SEQ ID NO: 212314 - DNA, 25 bp, Probe sequence
tattcactccttgtacaattggatt

SEQ ID NO: 212315 - DNA, 25 bp, Probe sequence
tttcttctggtaccatgatattcac

SEQ ID NO: 212316 - DNA, 25 bp, Probe sequence
ttcactccttgtacaattggattta

SEQ ID NO: 212317 - DNA, 25 bp, Probe sequence
ttgcaaatatgatagcagcttcttt

SEQ ID NO: 212318 - DNA, 25 bp, Probe sequence
ccattactacgtgttttccgctttg

SEQ ID NO: 212319 - DNA, 25 bp, Probe sequence
attcacgtaacgttactcattgggt

SEQ ID NO: 212320 - DNA, 25 bp, Probe sequence
attactattatatcgatccactttg

SEQ ID NO: 212321 - DNA, 25 bp, Probe sequence
atatcgtagacggcactggtaaatc

SEQ ID NO: 212322 - DNA, 25 bp, Probe sequence
accaacatatccctgctacagaaat

SEQ ID NO: 212323 - DNA, 25 bp, Probe sequence
acagctttaattcaccaggaagaaa

SEQ ID NO: 212324 - DNA, 25 bp, Probe sequence
acaagtttcaaatattcacgtaacg

SEQ ID NO: 212325 - DNA, 25 bp, Probe sequence
acaatcctaatatcgtagacggcac

SEQ ID NO: 212326 - DNA, 25 bp, Probe sequence
gccatcattccaaatcgcaaacaaa

SEQ ID NO: 212327 - DNA, 25 bp, Probe sequence
gcatatgtaccatttttacaaaaat

SEQ ID NO: 212328 - DNA, 25 bp, Probe sequence
gacacatccgaacaatccacataaa

SEQ ID NO: 212329 - DNA, 25 bp, Probe sequence
gacatcacttattcattaagcttgg

SEQ ID NO: 212330 - DNA, 25 bp, Probe sequence
gatccactttggagtcatattcgtc

SEQ ID NO: 212331 - DNA, 25 bp, Probe sequence
gtaacgttactcattgggtacgatg

SEQ ID NO: 212332 - DNA, 25 bp, Probe sequence
gtattatcgatcaaggtcaacctgt

SEQ ID NO: 212333 - DNA, 25 bp, Probe sequence
gtcaacctgtgttaatataccatac

SEQ ID NO: 212334 - DNA, 25 bp, Probe sequence
gtcatattcgtcgtggcctagtttt

SEQ ID NO: 212335 - DNA, 25 bp, Probe sequence
gtgcaaccacattcatatacaattg

SEQ ID NO: 212336 - DNA, 25 bp, Probe sequence
gtgttaatataccatactaatcttg

SEQ ID NO: 212337 - DNA, 25 bp, Probe sequence
gggtacgatgattactattactatt

SEQ ID NO: 212338 - DNA, 25 bp, Probe sequence
ggttatgttggacatcacttattca

SEQ ID NO: 212339 - DNA, 25 bp, Probe sequence
ggaatacagctttaattcaccagga

SEQ ID NO: 212340 - DNA, 25 bp, Probe sequence
tggcctagttttacctgccatcatt

SEQ ID NO: 212341 - DNA, 25 bp, Probe sequence
tgcatttatgtgcaaccacattcat

SEQ ID NO: 212342 - DNA, 25 bp, Probe sequence
tcgtggcctagttttacctgccatc

SEQ ID NO: 212343 - DNA, 25 bp, Probe sequence
tccctgctacagaaattatgagaca

SEQ ID NO: 212344 - DNA, 25 bp, Probe sequence
tattcgtcgtggcctagttttacct

SEQ ID NO: 212345 - DNA, 25 bp, Probe sequence
taacaagccagcgaaacaagtttca

SEQ ID NO: 212346 - DNA, 25 bp, Probe sequence
tactacgtgttttccgctttgataa

SEQ ID NO: 212347 - DNA, 25 bp, Probe sequence
tatgagacattggccgacacatccg

SEQ ID NO: 212348 - DNA, 25 bp, Probe sequence
tttggagtcatattcgtcgtggcct

SEQ ID NO: 212349 - DNA, 25 bp, Probe sequence
tttccgctttgataacaagccagcg

SEQ ID NO: 212350 - DNA, 25 bp, Probe sequence
ttacctgccatcattccaaatcgca

SEQ ID NO: 212351 - DNA, 25 bp, Probe sequence
ttaagcttggcaattatcatcaaac

SEQ ID NO: 212352 - DNA, 25 bp, Probe sequence
attgctgtatattcattcattggta

SEQ ID NO: 212353 - DNA, 25 bp, Probe sequence
atgtcagacctaactgcgatgggac

SEQ ID NO: 212354 - DNA, 25 bp, Probe sequence
atgacagcggtcatttcagatatga

SEQ ID NO: 212355 - DNA, 25 bp, Probe sequence
atggacatgcatcattcacaaactt

SEQ ID NO: 212356 - DNA, 25 bp, Probe sequence
acgttacaacgttatcaactgtgtt

SEQ ID NO: 212357 - DNA, 25 bp, Probe sequence
actggtccatcactgttattcacat

SEQ ID NO: 212358 - DNA, 25 bp, Probe sequence
actattcgcttttatgcgcgcatta

SEQ ID NO: 212359 - DNA, 25 bp, Probe sequence
aacgaatagtcatggcgtgccttat

SEQ ID NO: 212360 - DNA, 25 bp, Probe sequence
cgtatcttattcggactgtcacaac

SEQ ID NO: 212361 - DNA, 25 bp, Probe sequence
cgatggttatcgttggtcttgtatt

SEQ ID NO: 212362 - DNA, 25 bp, Probe sequence
gcgcgcattaggcgaattgttgttg

SEQ ID NO: 212363 - DNA, 25 bp, Probe sequence
gcgatgggacaatactttgcatttt

SEQ ID NO: 212364 - DNA, 25 bp, Probe sequence
gcattacttatagcagccttgttaa

SEQ ID NO: 212365 - DNA, 25 bp, Probe sequence
gaactgggttattcctaggatcagg

SEQ ID NO: 212366 - DNA, 25 bp, Probe sequence
gatccaaatagtagccctttcgtta

SEQ ID NO: 212367 - DNA, 25 bp, Probe sequence
gttaactttgtcgtgctaactgccg

SEQ ID NO: 212368 - DNA, 25 bp, Probe sequence
gttagtttcatcaattgcattactt

SEQ ID NO: 212369 - DNA, 25 bp, Probe sequence
gtaattatgtcagtcataccttgga

SEQ ID NO: 212370 - DNA, 25 bp, Probe sequence
gtcccaaattggattaccgtgctat

SEQ ID NO: 212371 - DNA, 25 bp, Probe sequence
gggcaatgattattgtcgcttatct

SEQ ID NO: 212372 - DNA, 25 bp, Probe sequence
ggtcttgtattaatctttttctcat

SEQ ID NO: 212373 - DNA, 25 bp, Probe sequence
ggattgtatcaagtatgtcagacct

SEQ ID NO: 212374 - DNA, 25 bp, Probe sequence
ggattaccgtgctatttattgtttt

SEQ ID NO: 212375 - DNA, 25 bp, Probe sequence
ggctttgtcattggctggacttact

SEQ ID NO: 212376 - DNA, 25 bp, Probe sequence
ggcgtgccttatttatcaatgttag

SEQ ID NO: 212377 - DNA, 25 bp, Probe sequence
ttgggggcgcaattggaactgggtt

SEQ ID NO: 212378 - DNA, 25 bp, Probe sequence
tgtgttgtttttagttgtttgggca

SEQ ID NO: 212379 - DNA, 25 bp, Probe sequence
tgcattttggtatccacaagtccca

SEQ ID NO: 212380 - DNA, 25 bp, Probe sequence
tcttcttctttgtattcattttatt

SEQ ID NO: 212381 - DNA, 25 bp, Probe sequence
tacctatccgtattttattattcta

SEQ ID NO: 212382 - DNA, 25 bp, Probe sequence
tagcttcaacttattaggtgccaga

SEQ ID NO: 212383 - DNA, 25 bp, Probe sequence
tattattctatatcggtggtctatt

SEQ ID NO: 212384 - DNA, 25 bp, Probe sequence
tattggggttgtactattcgctttt

SEQ ID NO: 212385 - DNA, 25 bp, Probe sequence
ttaggcccttttggtggctttgtca

SEQ ID NO: 212386 - DNA, 25 bp, Probe sequence
atttcactttcaatggcacttacat

SEQ ID NO: 212387 - DNA, 25 bp, Probe sequence
atacattggatttggcctgccttac

SEQ ID NO: 212388 - DNA, 25 bp, Probe sequence
atggcactagtgtttgcaactgtag

SEQ ID NO: 212389 - DNA, 25 bp, Probe sequence
aggtatgacttatcaatctgccaaa

SEQ ID NO: 212390 - DNA, 25 bp, Probe sequence
agtggcgtgcacaacgtcgaaaaga

SEQ ID NO: 212391 - DNA, 25 bp, Probe sequence
agcagtatctgctattacacgcgga

SEQ ID NO: 212392 - DNA, 25 bp, Probe sequence
accgcaagctatgttccataaccac

SEQ ID NO: 212393 - DNA, 25 bp, Probe sequence
acagcaatcaaatcataccgcaagc

SEQ ID NO: 212394 - DNA, 25 bp, Probe sequence
acaatatcgttgcagctcaaattcg

SEQ ID NO: 212395 - DNA, 25 bp, Probe sequence
aactgtagtcggtgttggctatttt

SEQ ID NO: 212396 - DNA, 25 bp, Probe sequence
aagcgatgaagcactacaaagcctt

SEQ ID NO: 212397 - DNA, 25 bp, Probe sequence
aagttcatgcttcaggtatcattgc

SEQ ID NO: 212398 - DNA, 25 bp, Probe sequence
aatccatggtttagaacgcgaccgt

SEQ ID NO: 212399 - DNA, 25 bp, Probe sequence
aatcgaaacatctacacttgagcgt

SEQ ID NO: 212400 - DNA, 25 bp, Probe sequence
aattatcgcccagtattaaaccaat

SEQ ID NO: 212401 - DNA, 25 bp, Probe sequence
caatgccagccgcttttgcaatagc

SEQ ID NO: 212402 - DNA, 25 bp, Probe sequence
caaattcctactgcctttattcaaa

SEQ ID NO: 212403 - DNA, 25 bp, Probe sequence
cagagacacaccgtactgcatcatt

SEQ ID NO: 212404 - DNA, 25 bp, Probe sequence
cagagcctgacaacttttcattttt

SEQ ID NO: 212405 - DNA, 25 bp, Probe sequence
gcagttgtaatcgcaggtctaatcc

SEQ ID NO: 212406 - DNA, 25 bp, Probe sequence
gaacgcgaccgtttaattagagcac

SEQ ID NO: 212407 - DNA, 25 bp, Probe sequence
gaaattgtcttgtctttacagtcca

SEQ ID NO: 212408 - DNA, 25 bp, Probe sequence
gagtcgctcattaaagtggcgtgca

SEQ ID NO: 212409 - DNA, 25 bp, Probe sequence
gatattttccaaacagagcctgaca

SEQ ID NO: 212410 - DNA, 25 bp, Probe sequence
ggtgtcgttattttcattattccaa

SEQ ID NO: 212411 - DNA, 25 bp, Probe sequence
ggttttatgattcctactgtagtca

SEQ ID NO: 212412 - DNA, 25 bp, Probe sequence
tacccacgtctctcgaacaaaatta

SEQ ID NO: 212413 - DNA, 25 bp, Probe sequence
tggtaccttttcattattccaagct

SEQ ID NO: 212414 - DNA, 25 bp, Probe sequence
tgattcacatgaaacaccaccttct

SEQ ID NO: 212415 - DNA, 25 bp, Probe sequence
tactaggtgtacttattggtgcaat

SEQ ID NO: 212416 - DNA, 25 bp, Probe sequence
tacctttaattacaccatctgccga

SEQ ID NO: 212417 - DNA, 25 bp, Probe sequence
tagcgcaaattgttttacctttaat

SEQ ID NO: 212418 - DNA, 25 bp, Probe sequence
tatgcatgtcgatttgtttgggttt

SEQ ID NO: 212419 - DNA, 25 bp, Probe sequence
tattaactccttttgtcgtatactt

SEQ ID NO: 212420 - DNA, 25 bp, Probe sequence
attgtaattctgttattccttcata

SEQ ID NO: 212421 - DNA, 25 bp, Probe sequence
attctgttattccttcatacaaaga

SEQ ID NO: 212422 - DNA, 25 bp, Probe sequence
attaattgtaattctgttattcctt

SEQ ID NO: 212423 - DNA, 25 bp, Probe sequence
atgcgccatggtcaaattcttttgc

SEQ ID NO: 212424 - DNA, 25 bp, Probe sequence
atggtcaaattcttttgcgtagatc

SEQ ID NO: 212425 - DNA, 25 bp, Probe sequence
agcactaatcacaacattaattgca

SEQ ID NO: 212426 - DNA, 25 bp, Probe sequence
aaattagcactaatcacaacattaa

SEQ ID NO: 212427 - DNA, 25 bp, Probe sequence
aaatgcgccatggtcaaattctttt

SEQ ID NO: 212428 - DNA, 25 bp, Probe sequence
aatgcgccatggtcaaattcttttg

SEQ ID NO: 212429 - DNA, 25 bp, Probe sequence
aatcacaacattaattgcattattc

SEQ ID NO: 212430 - DNA, 25 bp, Probe sequence
aattcttttgcgtagatcaaaacgg

SEQ ID NO: 212431 - DNA, 25 bp, Probe sequence
aattctgttattccttcatacaaag

SEQ ID NO: 212432 - DNA, 25 bp, Probe sequence
aattgtaattctgttattccttcat

SEQ ID NO: 212433 - DNA, 25 bp, Probe sequence
caaatgcgccatggtcaaattcttt

SEQ ID NO: 212434 - DNA, 25 bp, Probe sequence
cacaacattaattgcattattcagt

SEQ ID NO: 212435 - DNA, 25 bp, Probe sequence
cgccatggtcaaattcttttgcgta

SEQ ID NO: 212436 - DNA, 25 bp, Probe sequence
ccatggtcaaattcttttgcgtaga

SEQ ID NO: 212437 - DNA, 25 bp, Probe sequence
gccatggtcaaattcttttgcgtag

SEQ ID NO: 212438 - DNA, 25 bp, Probe sequence
gcgccatggtcaaattcttttgcgt

SEQ ID NO: 212439 - DNA, 25 bp, Probe sequence
gcttggcaaatgcgccatggtcaaa

SEQ ID NO: 212440 - DNA, 25 bp, Probe sequence
gcaaatgcgccatggtcaaattctt

SEQ ID NO: 212441 - DNA, 25 bp, Probe sequence
gtaattctgttattccttcatacaa

SEQ ID NO: 212442 - DNA, 25 bp, Probe sequence
gtcaaattcttttgcgtagatcaaa

SEQ ID NO: 212443 - DNA, 25 bp, Probe sequence
ggtcaaattcttttgcgtagatcaa

SEQ ID NO: 212444 - DNA, 25 bp, Probe sequence
ggcaaatgcgccatggtcaaattct

SEQ ID NO: 212445 - DNA, 25 bp, Probe sequence
tgcttggcaaatgcgccatggtcaa

SEQ ID NO: 212446 - DNA, 25 bp, Probe sequence
tgcattattcagtacattaattgta

SEQ ID NO: 212447 - DNA, 25 bp, Probe sequence
tgcgccatggtcaaattcttttgcg

SEQ ID NO: 212448 - DNA, 25 bp, Probe sequence
tgcgtagatcaaaacggattgctgt

SEQ ID NO: 212449 - DNA, 25 bp, Probe sequence
tctgttattccttcatacaaagata

SEQ ID NO: 212450 - DNA, 25 bp, Probe sequence
taattgtaattctgttattccttca

SEQ ID NO: 212451 - DNA, 25 bp, Probe sequence
taattctgttattccttcatacaaa

SEQ ID NO: 212452 - DNA, 25 bp, Probe sequence
tattccttcatacaaagataacgaa

SEQ ID NO: 212453 - DNA, 25 bp, Probe sequence
ttgtaattctgttattccttcatac

SEQ ID NO: 212454 - DNA, 25 bp, Probe sequence
attcgacagttgcgtctatgctcaa

SEQ ID NO: 212455 - DNA, 25 bp, Probe sequence
atgtttatgtatcgctatagcactc

SEQ ID NO: 212456 - DNA, 25 bp, Probe sequence
agttggctaactttatgtttatgta

SEQ ID NO: 212457 - DNA, 25 bp, Probe sequence
actacagcatttattgcattattca

SEQ ID NO: 212458 - DNA, 25 bp, Probe sequence
aaacgttacgaagcaatcctataca

SEQ ID NO: 212459 - DNA, 25 bp, Probe sequence
aatcatcctgcgcaaatcaaaactt

SEQ ID NO: 212460 - DNA, 25 bp, Probe sequence
aattaacgttaactacagcatttat

SEQ ID NO: 212461 - DNA, 25 bp, Probe sequence
caagcgaagactccgtaacaaataa

SEQ ID NO: 212462 - DNA, 25 bp, Probe sequence
caagcctttgcatatgacacataca

SEQ ID NO: 212463 - DNA, 25 bp, Probe sequence
cagttgcgtctatgctcaatcaata

SEQ ID NO: 212464 - DNA, 25 bp, Probe sequence
catggctcaagcctttgcatatgac

SEQ ID NO: 212465 - DNA, 25 bp, Probe sequence
catacaacgacaattaagaaaccat

SEQ ID NO: 212466 - DNA, 25 bp, Probe sequence
catatgcttccggctggtttactaa

SEQ ID NO: 212467 - DNA, 25 bp, Probe sequence
gcgtcacgggaaaatcatcctgcgc

SEQ ID NO: 212468 - DNA, 25 bp, Probe sequence
cgctatagcactcatattatatgca

SEQ ID NO: 212469 - DNA, 25 bp, Probe sequence
cctgcgcaaatcaaaacttaccaca

SEQ ID NO: 212470 - DNA, 25 bp, Probe sequence
gcaaatcaaaacttaccacattttt

SEQ ID NO: 212471 - DNA, 25 bp, Probe sequence
gacagttgcgtctatgctcaatcaa

SEQ ID NO: 212472 - DNA, 25 bp, Probe sequence
gacacatacatcattcaaacaaaac

SEQ ID NO: 212473 - DNA, 25 bp, Probe sequence
gatacaattatcgaacatgatttac

SEQ ID NO: 212474 - DNA, 25 bp, Probe sequence
gatattcgacagttgcgtctatgct

SEQ ID NO: 212475 - DNA, 25 bp, Probe sequence
gttacgaagcaatcctatacaaaat

SEQ ID NO: 212476 - DNA, 25 bp, Probe sequence
gtatcgctatagcactcatattata

SEQ ID NO: 212477 - DNA, 25 bp, Probe sequence
ggaaaatcatcctgcgcaaatcaaa

SEQ ID NO: 212478 - DNA, 25 bp, Probe sequence
ggctcaagcctttgcatatgacaca

SEQ ID NO: 212479 - DNA, 25 bp, Probe sequence
tgcttccggctggtttactaataat

SEQ ID NO: 212480 - DNA, 25 bp, Probe sequence
tgcttggcaaatgcgtcacgggaaa

SEQ ID NO: 212481 - DNA, 25 bp, Probe sequence
tcagtatgttaattacacttctgtt

SEQ ID NO: 212482 - DNA, 25 bp, Probe sequence
taattatccaaaacgttacgaagca

SEQ ID NO: 212483 - DNA, 25 bp, Probe sequence
tacacttctgttaatattacataca

SEQ ID NO: 212484 - DNA, 25 bp, Probe sequence
taccacatttttaagttggctaact

SEQ ID NO: 212485 - DNA, 25 bp, Probe sequence
tatgcttccggctggtttactaata

SEQ ID NO: 212486 - DNA, 25 bp, Probe sequence
tattacaaattcatggctcaagcct

SEQ ID NO: 212487 - DNA, 25 bp, Probe sequence
tattacaagcgaagactccgtaaca

SEQ ID NO: 212488 - DNA, 25 bp, Probe sequence
atttgtcgccgttacaggtcgagtt

SEQ ID NO: 212489 - DNA, 25 bp, Probe sequence
atcatgggttcttggattcctagtc

SEQ ID NO: 212490 - DNA, 25 bp, Probe sequence
atcggcacaatgtttcctcaatcag

SEQ ID NO: 212491 - DNA, 25 bp, Probe sequence
atggacatatccctaaatttcttgg

SEQ ID NO: 212492 - DNA, 25 bp, Probe sequence
atggctctattagcacatacggatt

SEQ ID NO: 212493 - DNA, 25 bp, Probe sequence
agtagcctatttaactggcccaacg

SEQ ID NO: 212494 - DNA, 25 bp, Probe sequence
agcaatcatctttaatgccatcatt

SEQ ID NO: 212495 - DNA, 25 bp, Probe sequence
aatcgtgctatcaatactgtcattt

SEQ ID NO: 212496 - DNA, 25 bp, Probe sequence
cacatggctcattattaggctttat

SEQ ID NO: 212497 - DNA, 25 bp, Probe sequence
caggattcgacacttcaaattacgg

SEQ ID NO: 212498 - DNA, 25 bp, Probe sequence
ctatgcccagtatacacatggctca

SEQ ID NO: 212499 - DNA, 25 bp, Probe sequence
ctggcccaacgacagtgattgcatt

SEQ ID NO: 212500 - DNA, 25 bp, Probe sequence
gctagctgtatatctcatcattgtt

SEQ ID NO: 212501 - DNA, 25 bp, Probe sequence
gcatcaacttcaattcaccatttgc

SEQ ID NO: 212502 - DNA, 25 bp, Probe sequence
gcaagcacatttatgccttacggaa

SEQ ID NO: 212503 - DNA, 25 bp, Probe sequence
gaagtgcaccgatttttgctgcaac

SEQ ID NO: 212504 - DNA, 25 bp, Probe sequence
gaagcttttgtatcaccattcggta

SEQ ID NO: 212505 - DNA, 25 bp, Probe sequence
gaccaacaatgactcgtccatttag

SEQ ID NO: 212506 - DNA, 25 bp, Probe sequence
gagattggggtacgctagcagcagt

SEQ ID NO: 212507 - DNA, 25 bp, Probe sequence
gttcttggccgtggcattgggcgaa

SEQ ID NO: 212508 - DNA, 25 bp, Probe sequence
gattcactatccatttgactttatc

SEQ ID NO: 212509 - DNA, 25 bp, Probe sequence
gtttatcacttctatgcctcaatca

SEQ ID NO: 212510 - DNA, 25 bp, Probe sequence
gggcgaattgggtgtctttggtgac

SEQ ID NO: 212511 - DNA, 25 bp, Probe sequence
gggcaatgtggccaacaacggctga

SEQ ID NO: 212512 - DNA, 25 bp, Probe sequence
ggatctggttggctatttggtgcgt

SEQ ID NO: 212513 - DNA, 25 bp, Probe sequence
ggaaccattgcctataactacattg

SEQ ID NO: 212514 - DNA, 25 bp, Probe sequence
ggcaccattatcatttgtattagct

SEQ ID NO: 212515 - DNA, 25 bp, Probe sequence
taatacctatcgaagctgtgtcagc

SEQ ID NO: 212516 - DNA, 25 bp, Probe sequence
taggcgtacccatgttaaccatcat

SEQ ID NO: 212517 - DNA, 25 bp, Probe sequence
taggctttattgctgcttgggcgaa

SEQ ID NO: 212518 - DNA, 25 bp, Probe sequence
tttgaaagcgtctatttccgtcgcg

SEQ ID NO: 212519 - DNA, 25 bp, Probe sequence
tttccgtcgcgcaacacgaatcaat

SEQ ID NO: 212520 - DNA, 25 bp, Probe sequence
tttttcattcaattcattccagaca

SEQ ID NO: 212521 - DNA, 25 bp, Probe sequence
ttaccaatctacttcttctatgaat

SEQ ID NO: 212522 - DNA, 25 bp, Probe sequence
atcaaccggcacatttagtacaaaa

SEQ ID NO: 212523 - DNA, 25 bp, Probe sequence
attccttatgcagaaccaccagttc

SEQ ID NO: 212524 - DNA, 25 bp, Probe sequence
aaagcggtaaaatgccttggccgat

SEQ ID NO: 212525 - DNA, 25 bp, Probe sequence
atctttagcgattacacattgttat

SEQ ID NO: 212526 - DNA, 25 bp, Probe sequence
atcgcagtgcttaccatattctaga

SEQ ID NO: 212527 - DNA, 25 bp, Probe sequence
atgccttggccgatgtatcataatg

SEQ ID NO: 212528 - DNA, 25 bp, Probe sequence
atggtcagagccaattgatgcaact

SEQ ID NO: 212529 - DNA, 25 bp, Probe sequence
agtggcgcactacgattagacaccc

SEQ ID NO: 212530 - DNA, 25 bp, Probe sequence
agccgaactctatcaaccggcacat

SEQ ID NO: 212531 - DNA, 25 bp, Probe sequence
acctgacattgagccatacttccat

SEQ ID NO: 212532 - DNA, 25 bp, Probe sequence
acaacgaaaccaatttttgcatgtt

SEQ ID NO: 212533 - DNA, 25 bp, Probe sequence
aaaaattatcgccgcaacgctttat

SEQ ID NO: 212534 - DNA, 25 bp, Probe sequence
caaacgcacaactatggcttgctga

SEQ ID NO: 212535 - DNA, 25 bp, Probe sequence
cagccgatgaagcaatttttacaac

SEQ ID NO: 212536 - DNA, 25 bp, Probe sequence
ccaccgcaaccagacaacaaattag

SEQ ID NO: 212537 - DNA, 25 bp, Probe sequence
gcgcattaggatatttagactggtc

SEQ ID NO: 212538 - DNA, 25 bp, Probe sequence
gccgcaacgctttatcgacattatg

SEQ ID NO: 212539 - DNA, 25 bp, Probe sequence
gctaaaacaatctcgaggaccttct

SEQ ID NO: 212540 - DNA, 25 bp, Probe sequence
gcaattatcgtttaggcgcattagg

SEQ ID NO: 212541 - DNA, 25 bp, Probe sequence
gaacgtcgctattatcgcacatatc

SEQ ID NO: 212542 - DNA, 25 bp, Probe sequence
gaaacctgtcatcatttatttttat

SEQ ID NO: 212543 - DNA, 25 bp, Probe sequence
gactttacttaaaatacctgacatt

SEQ ID NO: 212544 - DNA, 25 bp, Probe sequence
gaggaccttctaaagggcttgattt

SEQ ID NO: 212545 - DNA, 25 bp, Probe sequence
gatattcttatgctgatggcgaagc

SEQ ID NO: 212546 - DNA, 25 bp, Probe sequence
ggtggcgacgctaataacattactt

SEQ ID NO: 212547 - DNA, 25 bp, Probe sequence
ggaaacttacaaatattagcagcac

SEQ ID NO: 212548 - DNA, 25 bp, Probe sequence
ggcttgctgaatttgcatggcatga

SEQ ID NO: 212549 - DNA, 25 bp, Probe sequence
tgcaactgaaatacaacccatccca

SEQ ID NO: 212550 - DNA, 25 bp, Probe sequence
taatgggtcagtctgcaggcagtat

SEQ ID NO: 212551 - DNA, 25 bp, Probe sequence
tactacaggtggtcaaattcatggt

SEQ ID NO: 212552 - DNA, 25 bp, Probe sequence
tagaagattttttctcctcacaatc

SEQ ID NO: 212553 - DNA, 25 bp, Probe sequence
tagatatcttcttaggcattcctta

SEQ ID NO: 212554 - DNA, 25 bp, Probe sequence
tatccaacaactgctcaccttaaat

SEQ ID NO: 212555 - DNA, 25 bp, Probe sequence
ttagcagcacatcaatatccaacaa

SEQ ID NO: 212556 - DNA, 25 bp, Probe sequence
attgcattatcagcttgtggtaaag

SEQ ID NO: 212557 - DNA, 25 bp, Probe sequence
attcgccaaatctgaaagtattttc

SEQ ID NO: 212558 - DNA, 25 bp, Probe sequence
atatgaaggtgatgttagtggtaaa

SEQ ID NO: 212559 - DNA, 25 bp, Probe sequence
atcagcttgtggtaaagaacaaacc

SEQ ID NO: 212560 - DNA, 25 bp, Probe sequence
atctgaaagtattttcaaagacctt

SEQ ID NO: 212561 - DNA, 25 bp, Probe sequence
aggcgtaaaatacaaagtagactat

SEQ ID NO: 212562 - DNA, 25 bp, Probe sequence
agtggtaaacatgtactaacttcta

SEQ ID NO: 212563 - DNA, 25 bp, Probe sequence
agtctacaatcaacacaattaaata

SEQ ID NO: 212564 - DNA, 25 bp, Probe sequence
agcaattgaacacttagacatagat

SEQ ID NO: 212565 - DNA, 25 bp, Probe sequence
acatgtactaacttctatcacatat

SEQ ID NO: 212566 - DNA, 25 bp, Probe sequence
acacttagacatagattacacagaa

SEQ ID NO: 212567 - DNA, 25 bp, Probe sequence
aaagttattcgccaaatctgaaagt

SEQ ID NO: 212568 - DNA, 25 bp, Probe sequence
aaagaacaaaccaaaacatatgaag

SEQ ID NO: 212569 - DNA, 25 bp, Probe sequence
aaacatgtactaacttctatcacat

SEQ ID NO: 212570 - DNA, 25 bp, Probe sequence
aaaacagtctacaatcaacacaatt

SEQ ID NO: 212571 - DNA, 25 bp, Probe sequence
aaaagcaattgaacacttagacata

SEQ ID NO: 212572 - DNA, 25 bp, Probe sequence
aacagtctacaatcaacacaattaa

SEQ ID NO: 212573 - DNA, 25 bp, Probe sequence
ctaacttctatcacatataaagatg

SEQ ID NO: 212574 - DNA, 25 bp, Probe sequence
gccaaaaagttattcgccaaatctg

SEQ ID NO: 212575 - DNA, 25 bp, Probe sequence
gcattatcagcttgtggtaaagaac

SEQ ID NO: 212576 - DNA, 25 bp, Probe sequence
gaagccaaaaagttattcgccaaat

SEQ ID NO: 212577 - DNA, 25 bp, Probe sequence
gaacacttagacatagattacacag

SEQ ID NO: 212578 - DNA, 25 bp, Probe sequence
gacatagattacacagaagttgaca

SEQ ID NO: 212579 - DNA, 25 bp, Probe sequence
gacgatctaggtatggataaagacg

SEQ ID NO: 212580 - DNA, 25 bp, Probe sequence
gattacacagaagttgacatgaaaa

SEQ ID NO: 212581 - DNA, 25 bp, Probe sequence
gttattcgccaaatctgaaagtatt

SEQ ID NO: 212582 - DNA, 25 bp, Probe sequence
gtaaacatgtactaacttctatcac

SEQ ID NO: 212583 - DNA, 25 bp, Probe sequence
ggtatggataaagacgaagccaaaa

SEQ ID NO: 212584 - DNA, 25 bp, Probe sequence
tgtactaacttctatcacatataaa

SEQ ID NO: 212585 - DNA, 25 bp, Probe sequence
tcattgcattatcagcttgtggtaa

SEQ ID NO: 212586 - DNA, 25 bp, Probe sequence
tttaaaacagtctacaatcaacaca

SEQ ID NO: 212587 - DNA, 25 bp, Probe sequence
ttatgttcattaattgtagtagcat

SEQ ID NO: 212588 - DNA, 25 bp, Probe sequence
ttaaatatgacgatctaggtatgga

SEQ ID NO: 212589 - DNA, 25 bp, Probe sequence
ttgaaaagcaattaaagcacagagg

SEQ ID NO: 212590 - DNA, 25 bp, Probe sequence
attgtgtcacaatttacatttgata

SEQ ID NO: 212591 - DNA, 25 bp, Probe sequence
attttataggtgatgcagtgcgtga

SEQ ID NO: 212592 - DNA, 25 bp, Probe sequence
acgttaccaacgtacatcgcaaata

SEQ ID NO: 212593 - DNA, 25 bp, Probe sequence
acggacaatgcgtgccagtgtttta

SEQ ID NO: 212594 - DNA, 25 bp, Probe sequence
acatttgatacgacattggctacta

SEQ ID NO: 212595 - DNA, 25 bp, Probe sequence
acaacggaacaaacatggaagcatc

SEQ ID NO: 212596 - DNA, 25 bp, Probe sequence
aaaggttatgtggccgatacgttct

SEQ ID NO: 212597 - DNA, 25 bp, Probe sequence
aaactactagacatcgtattgcgat

SEQ ID NO: 212598 - DNA, 25 bp, Probe sequence
aacacttggaatatcatatggcgtt

SEQ ID NO: 212599 - DNA, 25 bp, Probe sequence
aatataccatcatttgcacggacaa

SEQ ID NO: 212600 - DNA, 25 bp, Probe sequence
aattccatcattattgttagcggtg

SEQ ID NO: 212601 - DNA, 25 bp, Probe sequence
cacctgatgtagctgaatggggcaa

SEQ ID NO: 212602 - DNA, 25 bp, Probe sequence
gaatggggcaacattttacgtaccg

SEQ ID NO: 212603 - DNA, 25 bp, Probe sequence
ctatattgctgaaacattgctaatc

SEQ ID NO: 212604 - DNA, 25 bp, Probe sequence
ccgaatgcgattgcgcctatgattg

SEQ ID NO: 212605 - DNA, 25 bp, Probe sequence
gcgattatcgggttacttattttag

SEQ ID NO: 212606 - DNA, 25 bp, Probe sequence
gcactgttacatggaccgagtctag

SEQ ID NO: 212607 - DNA, 25 bp, Probe sequence
gcacagtaatttagctattgtacct

SEQ ID NO: 212608 - DNA, 25 bp, Probe sequence
gaacgaagctgacattttcaatttc

SEQ ID NO: 212609 - DNA, 25 bp, Probe sequence
gagacttatttacacgcgtagttgt

SEQ ID NO: 212610 - DNA, 25 bp, Probe sequence
gtagtaactacttggaaacgcacag

SEQ ID NO: 212611 - DNA, 25 bp, Probe sequence
gtattatgttcgtcgttttagcatt

SEQ ID NO: 212612 - DNA, 25 bp, Probe sequence
gtatcgtcgaagtgttgttattgtt

SEQ ID NO: 212613 - DNA, 25 bp, Probe sequence
gtagatgcagcacgtatcactggtg

SEQ ID NO: 212614 - DNA, 25 bp, Probe sequence
gtagtgtttgcaattccatcattat

SEQ ID NO: 212615 - DNA, 25 bp, Probe sequence
gtctagcctatccgtttggtactga

SEQ ID NO: 212616 - DNA, 25 bp, Probe sequence
tgttagcggtggcaattattgcatc

SEQ ID NO: 212617 - DNA, 25 bp, Probe sequence
ggtgtgttactaggcactatcgcag

SEQ ID NO: 212618 - DNA, 25 bp, Probe sequence
ggtactgatgatttcggtagagact

SEQ ID NO: 212619 - DNA, 25 bp, Probe sequence
ggcactatcgcaggttattttaatc

SEQ ID NO: 212620 - DNA, 25 bp, Probe sequence
tggccgatacgttctatattgctga

SEQ ID NO: 212621 - DNA, 25 bp, Probe sequence
tgcgaattttagatgtagtgtttgc

SEQ ID NO: 212622 - DNA, 25 bp, Probe sequence
tacatggaccgagtctagcctatcc

SEQ ID NO: 212623 - DNA, 25 bp, Probe sequence
ttgcgcctatgattgtacgtttttc

SEQ ID NO: 212624 - DNA, 25 bp, Probe sequence
attatttcactagctatttttcgtc

SEQ ID NO: 212625 - DNA, 25 bp, Probe sequence
atttactcgcagttattatttcact

SEQ ID NO: 212626 - DNA, 25 bp, Probe sequence
atcaattagcagttatactcgtttt

SEQ ID NO: 212627 - DNA, 25 bp, Probe sequence
atggcatattcttatatcatttaca

SEQ ID NO: 212628 - DNA, 25 bp, Probe sequence
accgtaattttatggtgagctattt

SEQ ID NO: 212629 - DNA, 25 bp, Probe sequence
actcgttttgcatattttcatgtaa

SEQ ID NO: 212630 - DNA, 25 bp, Probe sequence
acattagctatttactcgcagttat

SEQ ID NO: 212631 - DNA, 25 bp, Probe sequence
acatggtgggaattcattccagcat

SEQ ID NO: 212632 - DNA, 25 bp, Probe sequence
aatgaacattagctatttactcgca

SEQ ID NO: 212633 - DNA, 25 bp, Probe sequence
aattcattccagcattgatactagc

SEQ ID NO: 212634 - DNA, 25 bp, Probe sequence
cttttgggttagtagctgtattcac

SEQ ID NO: 212635 - DNA, 25 bp, Probe sequence
ctttactgtctttgacatttacccg

SEQ ID NO: 212636 - DNA, 25 bp, Probe sequence
ctcttttcctatttcaatgaacatt

SEQ ID NO: 212637 - DNA, 25 bp, Probe sequence
ctcgcagttattatttcactagcta

SEQ ID NO: 212638 - DNA, 25 bp, Probe sequence
gcagttatactcgttttgcatattt

SEQ ID NO: 212639 - DNA, 25 bp, Probe sequence
gaacattagctatttactcgcagtt

SEQ ID NO: 212640 - DNA, 25 bp, Probe sequence
gttagtagctgtattcactcaacaa

SEQ ID NO: 212641 - DNA, 25 bp, Probe sequence
gttatactcgttttgcatattttca

SEQ ID NO: 212642 - DNA, 25 bp, Probe sequence
gttattatttcactagctatttttc

SEQ ID NO: 212643 - DNA, 25 bp, Probe sequence
gttttttcaaacgtgatattggatt

SEQ ID NO: 212644 - DNA, 25 bp, Probe sequence
gtagtgcgacttacttatatttaaa

SEQ ID NO: 212645 - DNA, 25 bp, Probe sequence
gggaattcattccagcattgatact

SEQ ID NO: 212646 - DNA, 25 bp, Probe sequence
gggttagtagctgtattcactcaac

SEQ ID NO: 212647 - DNA, 25 bp, Probe sequence
ggtttctcttttcctatttcaatga

SEQ ID NO: 212648 - DNA, 25 bp, Probe sequence
tactgtctttgacatttacccgctc

SEQ ID NO: 212649 - DNA, 25 bp, Probe sequence
tactcgcagttattatttcactagc

SEQ ID NO: 212650 - DNA, 25 bp, Probe sequence
tagtagctgtattcactcaacaagc

SEQ ID NO: 212651 - DNA, 25 bp, Probe sequence
tatccatacattaatacatggtggg

SEQ ID NO: 212652 - DNA, 25 bp, Probe sequence
tatactcgttttgcatattttcatg

SEQ ID NO: 212653 - DNA, 25 bp, Probe sequence
tttctcttttcctatttcaatgaac

SEQ ID NO: 212654 - DNA, 25 bp, Probe sequence
ttttccgtcatattttaattcaaga

SEQ ID NO: 212655 - DNA, 25 bp, Probe sequence
ttattttccgtcatattttaattca

SEQ ID NO: 212656 - DNA, 25 bp, Probe sequence
ttagctatttactcgcagttattat

SEQ ID NO: 212657 - DNA, 25 bp, Probe sequence
ttagcagttatactcgttttgcata

SEQ ID NO: 212658 - DNA, 25 bp, Probe sequence
agtacctggattagtttatgggatt

SEQ ID NO: 212659 - DNA, 25 bp, Probe sequence
aaaatttctcagagttcccagcatt

SEQ ID NO: 212660 - DNA, 25 bp, Probe sequence
aacacgtatcgtttcagattctatt

SEQ ID NO: 212661 - DNA, 25 bp, Probe sequence
aacggtgtcggattaattattcttg

SEQ ID NO: 212662 - DNA, 25 bp, Probe sequence
caattaccaatccaattacaccgat

SEQ ID NO: 212663 - DNA, 25 bp, Probe sequence
caatgttaatccttatcggctttca

SEQ ID NO: 212664 - DNA, 25 bp, Probe sequence
gcatccaggtacgcatcaaaccatt

SEQ ID NO: 212665 - DNA, 25 bp, Probe sequence
gaagcgcatcggctaaatggggtat

SEQ ID NO: 212666 - DNA, 25 bp, Probe sequence
gaaataaattgccagatcctagcgt

SEQ ID NO: 212667 - DNA, 25 bp, Probe sequence
gagttcccagcattaggcttagtac

SEQ ID NO: 212668 - DNA, 25 bp, Probe sequence
gagtgtcgttgtattacttcctacg

SEQ ID NO: 212669 - DNA, 25 bp, Probe sequence
gatgcgccattaattaacggtgtcg

SEQ ID NO: 212670 - DNA, 25 bp, Probe sequence
gttgctatgaactggtactttatcg

SEQ ID NO: 212671 - DNA, 25 bp, Probe sequence
gtatctgttaagcatccaggtacgc

SEQ ID NO: 212672 - DNA, 25 bp, Probe sequence
gtactgagtgcaatggtcaacatgt

SEQ ID NO: 212673 - DNA, 25 bp, Probe sequence
ggtcaacatgttaatcggaagcgca

SEQ ID NO: 212674 - DNA, 25 bp, Probe sequence
ggaccaggtggaccgatattcgtta

SEQ ID NO: 212675 - DNA, 25 bp, Probe sequence
ggagccttactttctagtttaatgc

SEQ ID NO: 212676 - DNA, 25 bp, Probe sequence
ggcaaatatcagtttcatagtcaca

SEQ ID NO: 212677 - DNA, 25 bp, Probe sequence
ggcagcttactagacgatgcgccat

SEQ ID NO: 212678 - DNA, 25 bp, Probe sequence
ggcgatgctgtaggatcaatgggaa

SEQ ID NO: 212679 - DNA, 25 bp, Probe sequence
tgtgtgtgggcttagccattatgac

SEQ ID NO: 212680 - DNA, 25 bp, Probe sequence
taaacgcatgaaactcggagcctta

SEQ ID NO: 212681 - DNA, 25 bp, Probe sequence
taatgccgtattcaatcgcgctaag

SEQ ID NO: 212682 - DNA, 25 bp, Probe sequence
taacgatggcatatgcttccgctgt

SEQ ID NO: 212683 - DNA, 25 bp, Probe sequence
tacttcctacgatattgctagttac

SEQ ID NO: 212684 - DNA, 25 bp, Probe sequence
taggtatccctgttggaccaggtgg

SEQ ID NO: 212685 - DNA, 25 bp, Probe sequence
taggtagtacagccggcgatgctgc

SEQ ID NO: 212686 - DNA, 25 bp, Probe sequence
taggaccgatattcgtaccaatgtt

SEQ ID NO: 212687 - DNA, 25 bp, Probe sequence
tatcgttattgtgttttttgcagca

SEQ ID NO: 212688 - DNA, 25 bp, Probe sequence
tttctgttgtgaatcgcgcaccacg

SEQ ID NO: 212689 - DNA, 25 bp, Probe sequence
tttgcagcacagctacttgcgtatt

SEQ ID NO: 212690 - DNA, 25 bp, Probe sequence
ttatcgctgctgttaaaggtgccaa

SEQ ID NO: 212691 - DNA, 25 bp, Probe sequence
ttacaccgatgatgccgtacttacc

SEQ ID NO: 212692 - DNA, 25 bp, Probe sequence
atttcgtttatatatagcagacatg

SEQ ID NO: 212693 - DNA, 25 bp, Probe sequence
atatatagcagacatgatagaattt

SEQ ID NO: 212694 - DNA, 25 bp, Probe sequence
atatagcagacatgatagaatttta

SEQ ID NO: 212695 - DNA, 25 bp, Probe sequence
atagcagacatgatagaattttata

SEQ ID NO: 212696 - DNA, 25 bp, Probe sequence
atgactaaagccacatccaatatag

SEQ ID NO: 212697 - DNA, 25 bp, Probe sequence
agaattttatatgtaaatcttgtag

SEQ ID NO: 212698 - DNA, 25 bp, Probe sequence
agcagacatgatagaattttatatg

SEQ ID NO: 212699 - DNA, 25 bp, Probe sequence
agccacatccaatataggacgtggc

SEQ ID NO: 212700 - DNA, 25 bp, Probe sequence
actaaagccacatccaatataggac

SEQ ID NO: 212701 - DNA, 25 bp, Probe sequence
aaagccacatccaatataggacgtg

SEQ ID NO: 212702 - DNA, 25 bp, Probe sequence
aagccacatccaatataggacgtgg

SEQ ID NO: 212703 - DNA, 25 bp, Probe sequence
aattttatatgtaaatcttgtaggt

SEQ ID NO: 212704 - DNA, 25 bp, Probe sequence
cacatccaatataggacgtggcttt

SEQ ID NO: 212705 - DNA, 25 bp, Probe sequence
ctaaagccacatccaatataggacg

SEQ ID NO: 212706 - DNA, 25 bp, Probe sequence
cgtttatatatagcagacatgatag

SEQ ID NO: 212707 - DNA, 25 bp, Probe sequence
ccacatccaatataggacgtggctt

SEQ ID NO: 212708 - DNA, 25 bp, Probe sequence
gccacatccaatataggacgtggct

SEQ ID NO: 212709 - DNA, 25 bp, Probe sequence
gcagacatgatagaattttatatgt

SEQ ID NO: 212710 - DNA, 25 bp, Probe sequence
gaattttatatgtaaatcttgtagg

SEQ ID NO: 212711 - DNA, 25 bp, Probe sequence
gactaaagccacatccaatatagga

SEQ ID NO: 212712 - DNA, 25 bp, Probe sequence
gatagaattttatatgtaaatcttg

SEQ ID NO: 212713 - DNA, 25 bp, Probe sequence
gtttatatatagcagacatgataga

SEQ ID NO: 212714 - DNA, 25 bp, Probe sequence
tgactaaagccacatccaatatagg

SEQ ID NO: 212715 - DNA, 25 bp, Probe sequence
taaagccacatccaatataggacgt

SEQ ID NO: 212716 - DNA, 25 bp, Probe sequence
tagcagacatgatagaattttatat

SEQ ID NO: 212717 - DNA, 25 bp, Probe sequence
tagaattttatatgtaaatcttgta

SEQ ID NO: 212718 - DNA, 25 bp, Probe sequence
tatagcagacatgatagaattttat

SEQ ID NO: 212719 - DNA, 25 bp, Probe sequence
tatatagcagacatgatagaatttt

SEQ ID NO: 212720 - DNA, 25 bp, Probe sequence
tatatatagcagacatgatagaatt

SEQ ID NO: 212721 - DNA, 25 bp, Probe sequence
tttcgtttatatatagcagacatga

SEQ ID NO: 212722 - DNA, 25 bp, Probe sequence
tttatatgtaaatcttgtaggtaat

SEQ ID NO: 212723 - DNA, 25 bp, Probe sequence
tttatatatagcagacatgatagaa

SEQ ID NO: 212724 - DNA, 25 bp, Probe sequence
ttttatatgtaaatcttgtaggtaa

SEQ ID NO: 212725 - DNA, 25 bp, Probe sequence
ttatatatagcagacatgatagaat

SEQ ID NO: 212726 - DNA, 25 bp, Probe sequence
atttcacagctcactttagatatcg

SEQ ID NO: 212727 - DNA, 25 bp, Probe sequence
atggctacctatatttcacagctca

SEQ ID NO: 212728 - DNA, 25 bp, Probe sequence
acctatatttcacagctcactttag

SEQ ID NO: 212729 - DNA, 25 bp, Probe sequence
acttgtttcttcagagttacttgtt

SEQ ID NO: 212730 - DNA, 25 bp, Probe sequence
acattatcaaattcacctttaaatt

SEQ ID NO: 212731 - DNA, 25 bp, Probe sequence
aaatggctacctatatttcacagct

SEQ ID NO: 212732 - DNA, 25 bp, Probe sequence
aatggctacctatatttcacagctc

SEQ ID NO: 212733 - DNA, 25 bp, Probe sequence
aattttttgaaatggctacctatat

SEQ ID NO: 212734 - DNA, 25 bp, Probe sequence
cacagctcactttagatatcgaact

SEQ ID NO: 212735 - DNA, 25 bp, Probe sequence
cagctcactttagatatcgaacttg

SEQ ID NO: 212736 - DNA, 25 bp, Probe sequence
cagagttacttgttatattaccagg

SEQ ID NO: 212737 - DNA, 25 bp, Probe sequence
ctacctatatttcacagctcacttt

SEQ ID NO: 212738 - DNA, 25 bp, Probe sequence
cctatatttcacagctcactttaga

SEQ ID NO: 212739 - DNA, 25 bp, Probe sequence
gctcactttagatatcgaacttgtt

SEQ ID NO: 212740 - DNA, 25 bp, Probe sequence
gctacattatcaaattcacctttaa

SEQ ID NO: 212741 - DNA, 25 bp, Probe sequence
gctacctatatttcacagctcactt

SEQ ID NO: 212742 - DNA, 25 bp, Probe sequence
gaacttgtttcttcagagttacttg

SEQ ID NO: 212743 - DNA, 25 bp, Probe sequence
gagctacattatcaaattcaccttt

SEQ ID NO: 212744 - DNA, 25 bp, Probe sequence
gatatcgaacttgtttcttcagagt

SEQ ID NO: 212745 - DNA, 25 bp, Probe sequence
gtttcttcagagttacttgttatat

SEQ ID NO: 212746 - DNA, 25 bp, Probe sequence
ggctacctatatttcacagctcact

SEQ ID NO: 212747 - DNA, 25 bp, Probe sequence
tggctacctatatttcacagctcac

SEQ ID NO: 212748 - DNA, 25 bp, Probe sequence
tcgaacttgtttcttcagagttact

SEQ ID NO: 212749 - DNA, 25 bp, Probe sequence
tcacagctcactttagatatcgaac

SEQ ID NO: 212750 - DNA, 25 bp, Probe sequence
tcactttagatatcgaacttgtttc

SEQ ID NO: 212751 - DNA, 25 bp, Probe sequence
tacctatatttcacagctcacttta

SEQ ID NO: 212752 - DNA, 25 bp, Probe sequence
tagatatcgaacttgtttcttcaga

SEQ ID NO: 212753 - DNA, 25 bp, Probe sequence
tatcgaacttgtttcttcagagtta

SEQ ID NO: 212754 - DNA, 25 bp, Probe sequence
tatatttcacagctcactttagata

SEQ ID NO: 212755 - DNA, 25 bp, Probe sequence
tatttcacagctcactttagatatc

SEQ ID NO: 212756 - DNA, 25 bp, Probe sequence
tttcacagctcactttagatatcga

SEQ ID NO: 212757 - DNA, 25 bp, Probe sequence
tttagatatcgaacttgtttcttca

SEQ ID NO: 212758 - DNA, 25 bp, Probe sequence
ttcagagttacttgttatattacca

SEQ ID NO: 212759 - DNA, 25 bp, Probe sequence
ttgtttcttcagagttacttgttat

SEQ ID NO: 212760 - DNA, 25 bp, Probe sequence
ttcggtcttggtgaaggtcgactta

SEQ ID NO: 212761 - DNA, 25 bp, Probe sequence
attggcattaggtttagcgcgttat

SEQ ID NO: 212762 - DNA, 25 bp, Probe sequence
attggctatattcctaaatctgatt

SEQ ID NO: 212763 - DNA, 25 bp, Probe sequence
atacgcggaaaattcggtcttggtg

SEQ ID NO: 212764 - DNA, 25 bp, Probe sequence
atcatcgcgcttttgatcaagcagt

SEQ ID NO: 212765 - DNA, 25 bp, Probe sequence
atcgtattcaacaaacgtctcaatt

SEQ ID NO: 212766 - DNA, 25 bp, Probe sequence
atccaccgcaagagattcaaggact

SEQ ID NO: 212767 - DNA, 25 bp, Probe sequence
atgcattttcatacacatctattat

SEQ ID NO: 212768 - DNA, 25 bp, Probe sequence
aggatttatcgctttacgtccttct

SEQ ID NO: 212769 - DNA, 25 bp, Probe sequence
agcgcgttatttaaatgcccaaaca

SEQ ID NO: 212770 - DNA, 25 bp, Probe sequence
acgacaccggaattatcgttcgcgg

SEQ ID NO: 212771 - DNA, 25 bp, Probe sequence
acgggctttaaatttattgctcagg

SEQ ID NO: 212772 - DNA, 25 bp, Probe sequence
aaatgttattcgtgtcttatttgac

SEQ ID NO: 212773 - DNA, 25 bp, Probe sequence
cctgatacatataaaacgacaccgg

SEQ ID NO: 212774 - DNA, 25 bp, Probe sequence
gcacaatgtaaacctgatccgaatt

SEQ ID NO: 212775 - DNA, 25 bp, Probe sequence
gacatctttcaactgaattcgccca

SEQ ID NO: 212776 - DNA, 25 bp, Probe sequence
gagttacggttttctatcagagcct

SEQ ID NO: 212777 - DNA, 25 bp, Probe sequence
gatgccgtacaaattgtgccactca

SEQ ID NO: 212778 - DNA, 25 bp, Probe sequence
gatcaagcagtcgaacttgcaaata

SEQ ID NO: 212779 - DNA, 25 bp, Probe sequence
gatacattattctcgcatacgctag

SEQ ID NO: 212780 - DNA, 25 bp, Probe sequence
gatttacaagttgtgttcactagtt

SEQ ID NO: 212781 - DNA, 25 bp, Probe sequence
gttggcgatccattacagattgata

SEQ ID NO: 212782 - DNA, 25 bp, Probe sequence
gtcatgcagacttattaatatcaac

SEQ ID NO: 212783 - DNA, 25 bp, Probe sequence
gtgctaatcctgaagatcatcgcgc

SEQ ID NO: 212784 - DNA, 25 bp, Probe sequence
gtgccactcattataaaatacgctt

SEQ ID NO: 212785 - DNA, 25 bp, Probe sequence
ggggcgtatttctttataattcatt

SEQ ID NO: 212786 - DNA, 25 bp, Probe sequence
tgtaagggctttagttttcatgttt

SEQ ID NO: 212787 - DNA, 25 bp, Probe sequence
tccgttcaaatccaccgcaagagat

SEQ ID NO: 212788 - DNA, 25 bp, Probe sequence
tacgtccttctggtactgaacctaa

SEQ ID NO: 212789 - DNA, 25 bp, Probe sequence
tttggtactgcgggtatacgcggaa

SEQ ID NO: 212790 - DNA, 25 bp, Probe sequence
tttctatcagagccttttgtacgtg

SEQ ID NO: 212791 - DNA, 25 bp, Probe sequence
tattgtcttggggctgtgttttttt

SEQ ID NO: 212792 - DNA, 25 bp, Probe sequence
ttacagcaagtcataatccgaaaga

SEQ ID NO: 212793 - DNA, 25 bp, Probe sequence
ttaacaaagtcattagcacgctata

SEQ ID NO: 212794 - DNA, 25 bp, Probe sequence
attacttctagtcgtgatattcatc

SEQ ID NO: 212795 - DNA, 25 bp, Probe sequence
atttatacgctcctgttcgtaacat

SEQ ID NO: 212796 - DNA, 25 bp, Probe sequence
ataattgagcaacatactatgtcga

SEQ ID NO: 212797 - DNA, 25 bp, Probe sequence
atcagccataattgagcaacatact

SEQ ID NO: 212798 - DNA, 25 bp, Probe sequence
atcccatttatttcatgacaaaaga

SEQ ID NO: 212799 - DNA, 25 bp, Probe sequence
atgggcattatatctcttattgttt

SEQ ID NO: 212800 - DNA, 25 bp, Probe sequence
agatttatacgctcctgttcgtaac

SEQ ID NO: 212801 - DNA, 25 bp, Probe sequence
acgctcctgttcgtaacattacttc

SEQ ID NO: 212802 - DNA, 25 bp, Probe sequence
acagttccaacgcacatactttaaa

SEQ ID NO: 212803 - DNA, 25 bp, Probe sequence
acaaatacttttgattatgggcatt

SEQ ID NO: 212804 - DNA, 25 bp, Probe sequence
aaaaatccgacagttccaacgcaca

SEQ ID NO: 212805 - DNA, 25 bp, Probe sequence
aacattatgaacaaaaatccgacag

SEQ ID NO: 212806 - DNA, 25 bp, Probe sequence
cttctagtcgtgatattcatcccat

SEQ ID NO: 212807 - DNA, 25 bp, Probe sequence
ctatgtcgaatttagcgtctctaga

SEQ ID NO: 212808 - DNA, 25 bp, Probe sequence
ctagtcgtgatattcatcccattta

SEQ ID NO: 212809 - DNA, 25 bp, Probe sequence
ctctagatttatacgctcctgttcg

SEQ ID NO: 212810 - DNA, 25 bp, Probe sequence
gctcctgttcgtaacattacttcta

SEQ ID NO: 212811 - DNA, 25 bp, Probe sequence
gaaaggctctaaacaaatacttttg

SEQ ID NO: 212812 - DNA, 25 bp, Probe sequence
gacagttccaacgcacatactttaa

SEQ ID NO: 212813 - DNA, 25 bp, Probe sequence
gattatgggcattatatctcttatt

SEQ ID NO: 212814 - DNA, 25 bp, Probe sequence
gttcgtaacattacttctagtcgtg

SEQ ID NO: 212815 - DNA, 25 bp, Probe sequence
gtaacattacttctagtcgtgatat

SEQ ID NO: 212816 - DNA, 25 bp, Probe sequence
gtctctagatttatacgctcctgtt

SEQ ID NO: 212817 - DNA, 25 bp, Probe sequence
gtcgtgatattcatcccatttattt

SEQ ID NO: 212818 - DNA, 25 bp, Probe sequence
gtcgaatttagcgtctctagattta

SEQ ID NO: 212819 - DNA, 25 bp, Probe sequence
gtgatattcatcccatttatttcat

SEQ ID NO: 212820 - DNA, 25 bp, Probe sequence
ggcattatatctcttattgttttat

SEQ ID NO: 212821 - DNA, 25 bp, Probe sequence
tcatcatcagccataattgagcaac

SEQ ID NO: 212822 - DNA, 25 bp, Probe sequence
tactatgtcgaatttagcgtctcta

SEQ ID NO: 212823 - DNA, 25 bp, Probe sequence
tatctcttattgttttatttatttt

SEQ ID NO: 212824 - DNA, 25 bp, Probe sequence
tatacgctcctgttcgtaacattac

SEQ ID NO: 212825 - DNA, 25 bp, Probe sequence
tatttatttttacactattcatcat

SEQ ID NO: 212826 - DNA, 25 bp, Probe sequence
tattcatcccatttatttcatgaca

SEQ ID NO: 212827 - DNA, 25 bp, Probe sequence
ttatttttacactattcatcatggc

SEQ ID NO: 212828 - DNA, 25 bp, Probe sequence
attacttatcgcattattctacgtt

SEQ ID NO: 212829 - DNA, 25 bp, Probe sequence
attaggcatttatgtcgcaataact

SEQ ID NO: 212830 - DNA, 25 bp, Probe sequence
atagcattattacttatcgcattat

SEQ ID NO: 212831 - DNA, 25 bp, Probe sequence
atcgcattattctacgtttgctttt

SEQ ID NO: 212832 - DNA, 25 bp, Probe sequence
atgtcgcaataactaaagatttcac

SEQ ID NO: 212833 - DNA, 25 bp, Probe sequence
agtatggttatattaggcatttatg

SEQ ID NO: 212834 - DNA, 25 bp, Probe sequence
agcattattacttatcgcattattc

SEQ ID NO: 212835 - DNA, 25 bp, Probe sequence
acttatcgcattattctacgtttgc

SEQ ID NO: 212836 - DNA, 25 bp, Probe sequence
caataactaaagatttcacactaat

SEQ ID NO: 212837 - DNA, 25 bp, Probe sequence
cattattctacgtttgcttttataa

SEQ ID NO: 212838 - DNA, 25 bp, Probe sequence
cattcttatttttaacgatagcatt

SEQ ID NO: 212839 - DNA, 25 bp, Probe sequence
cttatcgcattattctacgtttgct

SEQ ID NO: 212840 - DNA, 25 bp, Probe sequence
cgcaataactaaagatttcacacta

SEQ ID NO: 212841 - DNA, 25 bp, Probe sequence
cgcattattctacgtttgcttttat

SEQ ID NO: 212842 - DNA, 25 bp, Probe sequence
gcattattctacgtttgcttttata

SEQ ID NO: 212843 - DNA, 25 bp, Probe sequence
gcattattacttatcgcattattct

SEQ ID NO: 212844 - DNA, 25 bp, Probe sequence
gttatattaggcatttatgtcgcaa

SEQ ID NO: 212845 - DNA, 25 bp, Probe sequence
gtcgcaataactaaagatttcacac

SEQ ID NO: 212846 - DNA, 25 bp, Probe sequence
ggttatattaggcatttatgtcgca

SEQ ID NO: 212847 - DNA, 25 bp, Probe sequence
ggcatttatgtcgcaataactaaag

SEQ ID NO: 212848 - DNA, 25 bp, Probe sequence
tggttatattaggcatttatgtcgc

SEQ ID NO: 212849 - DNA, 25 bp, Probe sequence
tcgcattattctacgtttgctttta

SEQ ID NO: 212850 - DNA, 25 bp, Probe sequence
tacttatcgcattattctacgtttg

SEQ ID NO: 212851 - DNA, 25 bp, Probe sequence
tagcattattacttatcgcattatt

SEQ ID NO: 212852 - DNA, 25 bp, Probe sequence
taggcatttatgtcgcaataactaa

SEQ ID NO: 212853 - DNA, 25 bp, Probe sequence
tatcgcattattctacgtttgcttt

SEQ ID NO: 212854 - DNA, 25 bp, Probe sequence
tattacttatcgcattattctacgt

SEQ ID NO: 212855 - DNA, 25 bp, Probe sequence
tatattaggcatttatgtcgcaata

SEQ ID NO: 212856 - DNA, 25 bp, Probe sequence
tattaggcatttatgtcgcaataac

SEQ ID NO: 212857 - DNA, 25 bp, Probe sequence
tattctacgtttgcttttataaaat

SEQ ID NO: 212858 - DNA, 25 bp, Probe sequence
ttattacttatcgcattattctacg

SEQ ID NO: 212859 - DNA, 25 bp, Probe sequence
ttatcgcattattctacgtttgctt

SEQ ID NO: 212860 - DNA, 25 bp, Probe sequence
ttacttatcgcattattctacgttt

SEQ ID NO: 212861 - DNA, 25 bp, Probe sequence
ttcttatttttaacgatagcattat

SEQ ID NO: 212862 - DNA, 25 bp, Probe sequence
atatcgatttaatttaacatttctt

SEQ ID NO: 212863 - DNA, 25 bp, Probe sequence
ataacactattaaaagcatattcac

SEQ ID NO: 212864 - DNA, 25 bp, Probe sequence
atcaaagaacgatcccttgcagatg

SEQ ID NO: 212865 - DNA, 25 bp, Probe sequence
atcaatgggctccaaaatatagcaa

SEQ ID NO: 212866 - DNA, 25 bp, Probe sequence
atcttatatgtaatatcatctcgaa

SEQ ID NO: 212867 - DNA, 25 bp, Probe sequence
atgaacgccgtatttttgtttcagt

SEQ ID NO: 212868 - DNA, 25 bp, Probe sequence
agattgcttgtgttattaatgagtt

SEQ ID NO: 212869 - DNA, 25 bp, Probe sequence
acatattttttctcactcaagagtt

SEQ ID NO: 212870 - DNA, 25 bp, Probe sequence
aaatgaacacagtatttcactaaaa

SEQ ID NO: 212871 - DNA, 25 bp, Probe sequence
aacatttcttgatttatctatctta

SEQ ID NO: 212872 - DNA, 25 bp, Probe sequence
aacgaagcagatgaacgccgtattt

SEQ ID NO: 212873 - DNA, 25 bp, Probe sequence
aagcgtacatattttttctcactca

SEQ ID NO: 212874 - DNA, 25 bp, Probe sequence
aagaacgatcccttgcagatgaaag

SEQ ID NO: 212875 - DNA, 25 bp, Probe sequence
aagaacattaagtcactatctaaaa

SEQ ID NO: 212876 - DNA, 25 bp, Probe sequence
aagtattagatttatgtatcctcaa

SEQ ID NO: 212877 - DNA, 25 bp, Probe sequence
ctcactcaagagttaaagcaacaat

SEQ ID NO: 212878 - DNA, 25 bp, Probe sequence
gcgtacatattttttctcactcaag

SEQ ID NO: 212879 - DNA, 25 bp, Probe sequence
gcatattcacagatacttccaagat

SEQ ID NO: 212880 - DNA, 25 bp, Probe sequence
gaacattatgtactcaaaagatttt

SEQ ID NO: 212881 - DNA, 25 bp, Probe sequence
gaaatcattggtgacatactttaca

SEQ ID NO: 212882 - DNA, 25 bp, Probe sequence
gactacataaaatatcaatgggctc

SEQ ID NO: 212883 - DNA, 25 bp, Probe sequence
gatcccttgcagatgaaaggattgt

SEQ ID NO: 212884 - DNA, 25 bp, Probe sequence
gatacttccaagattctcaaaccaa

SEQ ID NO: 212885 - DNA, 25 bp, Probe sequence
gatattagcatatttttattacaaa

SEQ ID NO: 212886 - DNA, 25 bp, Probe sequence
gtatttttgtttcagttactccaat

SEQ ID NO: 212887 - DNA, 25 bp, Probe sequence
gtttcagttactccaatacaacgta

SEQ ID NO: 212888 - DNA, 25 bp, Probe sequence
gtatcctcaaattgttaggtcagtt

SEQ ID NO: 212889 - DNA, 25 bp, Probe sequence
gtggactatcaaactttcgaaaagg

SEQ ID NO: 212890 - DNA, 25 bp, Probe sequence
ggtgacatactttacaaacaatctg

SEQ ID NO: 212891 - DNA, 25 bp, Probe sequence
ggtatgctaatcaaagaacgatccc

SEQ ID NO: 212892 - DNA, 25 bp, Probe sequence
tcttgatttatctatcttatatgta

SEQ ID NO: 212893 - DNA, 25 bp, Probe sequence
tacttccaagattctcaaaccaaga

SEQ ID NO: 212894 - DNA, 25 bp, Probe sequence
tttttatactttttatgaacattat

SEQ ID NO: 212895 - DNA, 25 bp, Probe sequence
ttcacagatacttccaagattctca

SEQ ID NO: 212896 - DNA, 25 bp, Probe sequence
attatcgcagtcatttactttgcta

SEQ ID NO: 212897 - DNA, 25 bp, Probe sequence
atcgcagtcatttactttgctatac

SEQ ID NO: 212898 - DNA, 25 bp, Probe sequence
atgttgtgacatttaccgttatttc

SEQ ID NO: 212899 - DNA, 25 bp, Probe sequence
atgtctgttaaatcacatttatcaa

SEQ ID NO: 212900 - DNA, 25 bp, Probe sequence
atggcgtatgggctgtatttatctg

SEQ ID NO: 212901 - DNA, 25 bp, Probe sequence
agctttggtatgttgatgactggtc

SEQ ID NO: 212902 - DNA, 25 bp, Probe sequence
acctgtattacgtgtattgattacc

SEQ ID NO: 212903 - DNA, 25 bp, Probe sequence
acattggcaaacgtaagagagtaaa

SEQ ID NO: 212904 - DNA, 25 bp, Probe sequence
aaagtatggcgtatgggctgtattt

SEQ ID NO: 212905 - DNA, 25 bp, Probe sequence
ctatcgtaccatcggaaattattct

SEQ ID NO: 212906 - DNA, 25 bp, Probe sequence
cgttttgggtatgcagccattttta

SEQ ID NO: 212907 - DNA, 25 bp, Probe sequence
gcgagcaaatgattggtttaaaaag

SEQ ID NO: 212908 - DNA, 25 bp, Probe sequence
gcgtatgggctgtatttatctgtcg

SEQ ID NO: 212909 - DNA, 25 bp, Probe sequence
gacatttaccgttatttcattaata

SEQ ID NO: 212910 - DNA, 25 bp, Probe sequence
gactggtcttcatacatattcacgt

SEQ ID NO: 212911 - DNA, 25 bp, Probe sequence
gatcgacacggtaagtggattaaat

SEQ ID NO: 212912 - DNA, 25 bp, Probe sequence
gttgtgacatttaccgttatttcat

SEQ ID NO: 212913 - DNA, 25 bp, Probe sequence
gtatgttgtcatcattatcgcagtc

SEQ ID NO: 212914 - DNA, 25 bp, Probe sequence
gtcatcattatcgcagtcatttact

SEQ ID NO: 212915 - DNA, 25 bp, Probe sequence
gtcatttactttgctatacgttaca

SEQ ID NO: 212916 - DNA, 25 bp, Probe sequence
gtgtaaaccgcatgaatgttgtgac

SEQ ID NO: 212917 - DNA, 25 bp, Probe sequence
gggtatgcagccatttttatattaa

SEQ ID NO: 212918 - DNA, 25 bp, Probe sequence
ggtcttcatacatattcacgtatta

SEQ ID NO: 212919 - DNA, 25 bp, Probe sequence
ggtatgttgatgactggtcttcata

SEQ ID NO: 212920 - DNA, 25 bp, Probe sequence
ggaacaaattatcactgaatttatt

SEQ ID NO: 212921 - DNA, 25 bp, Probe sequence
tgttgtcatcattatcgcagtcatt

SEQ ID NO: 212922 - DNA, 25 bp, Probe sequence
tgagcgatagctttggtatgttgat

SEQ ID NO: 212923 - DNA, 25 bp, Probe sequence
tacctatcgtaccatcggaaattat

SEQ ID NO: 212924 - DNA, 25 bp, Probe sequence
tacgtgtattgattaccattccagc

SEQ ID NO: 212925 - DNA, 25 bp, Probe sequence
tttattgatcgacacggtaagtgga

SEQ ID NO: 212926 - DNA, 25 bp, Probe sequence
tatgggctgtatttatctgtcgttt

SEQ ID NO: 212927 - DNA, 25 bp, Probe sequence
tttactttgctatacgttacattgg

SEQ ID NO: 212928 - DNA, 25 bp, Probe sequence
tattcacgtattatgtatgttgtca

SEQ ID NO: 212929 - DNA, 25 bp, Probe sequence
ttgctatacgttacattggcaaacg

SEQ ID NO: 212930 - DNA, 25 bp, Probe sequence
atacgcggccacttgtgatgacaca

SEQ ID NO: 212931 - DNA, 25 bp, Probe sequence
atacatttcctaggacaagcaagtt

SEQ ID NO: 212932 - DNA, 25 bp, Probe sequence
atgacggcattatttagttctacag

SEQ ID NO: 212933 - DNA, 25 bp, Probe sequence
acgacagatcaatcgatgcctcgag

SEQ ID NO: 212934 - DNA, 25 bp, Probe sequence
acgtttcaacgtaatccaggattca

SEQ ID NO: 212935 - DNA, 25 bp, Probe sequence
actggagagcgtgtatcggctgaag

SEQ ID NO: 212936 - DNA, 25 bp, Probe sequence
acgtgataaaaagtctgtgcctaac

SEQ ID NO: 212937 - DNA, 25 bp, Probe sequence
acactcttcggcaggcattttatct

SEQ ID NO: 212938 - DNA, 25 bp, Probe sequence
aaattacttaacacactcttcggca

SEQ ID NO: 212939 - DNA, 25 bp, Probe sequence
aaaggtatatttaagacgcatccaa

SEQ ID NO: 212940 - DNA, 25 bp, Probe sequence
aagccggcaattatgatatccaaat

SEQ ID NO: 212941 - DNA, 25 bp, Probe sequence
aatgcatatcaagcaacgtttcaac

SEQ ID NO: 212942 - DNA, 25 bp, Probe sequence
aattgcatcaccgattacaccactt

SEQ ID NO: 212943 - DNA, 25 bp, Probe sequence
cgattacaccacttgtcgatactgg

SEQ ID NO: 212944 - DNA, 25 bp, Probe sequence
gcaagtggcgcatacattatgacac

SEQ ID NO: 212945 - DNA, 25 bp, Probe sequence
gaagtggctcaaaagtcatcgaaag

SEQ ID NO: 212946 - DNA, 25 bp, Probe sequence
gacgcatccaaacttgagacaagca

SEQ ID NO: 212947 - DNA, 25 bp, Probe sequence
gatgaggacatcgatcagttgcgta

SEQ ID NO: 212948 - DNA, 25 bp, Probe sequence
gattatggtagctatcgtacacaac

SEQ ID NO: 212949 - DNA, 25 bp, Probe sequence
gttggattgccaaattcacgtgcat

SEQ ID NO: 212950 - DNA, 25 bp, Probe sequence
gttgaagtgaaaggcgagcgaccaa

SEQ ID NO: 212951 - DNA, 25 bp, Probe sequence
gttcaattgcgccgtcagtatattc

SEQ ID NO: 212952 - DNA, 25 bp, Probe sequence
gtccctacgaaatcagaagtggctc

SEQ ID NO: 212953 - DNA, 25 bp, Probe sequence
gtctgtgcctaacaataatacttac

SEQ ID NO: 212954 - DNA, 25 bp, Probe sequence
gtcgatactggtaacgagcaacgtc

SEQ ID NO: 212955 - DNA, 25 bp, Probe sequence
gtgacccgaactatgctatgacggc

SEQ ID NO: 212956 - DNA, 25 bp, Probe sequence
gtggttgtggtgtccctacgaaatc

SEQ ID NO: 212957 - DNA, 25 bp, Probe sequence
ggtgaaattcctacattggatccaa

SEQ ID NO: 212958 - DNA, 25 bp, Probe sequence
ggtatatggcgcctttatatggatc

SEQ ID NO: 212959 - DNA, 25 bp, Probe sequence
ggatccaatacgttcaattgcgccg

SEQ ID NO: 212960 - DNA, 25 bp, Probe sequence
ggacaagcacgtaatactggagagc

SEQ ID NO: 212961 - DNA, 25 bp, Probe sequence
tcgtacacaacgtcaagccggcaat

SEQ ID NO: 212962 - DNA, 25 bp, Probe sequence
tagagaacgagatacgcggccactt

SEQ ID NO: 212963 - DNA, 25 bp, Probe sequence
tagcgttggtattaagtggttgtgg

SEQ ID NO: 212964 - DNA, 25 bp, Probe sequence
attgtctcacaacttcatatggatg

SEQ ID NO: 212965 - DNA, 25 bp, Probe sequence
atcacaaactctatccttattatta

SEQ ID NO: 212966 - DNA, 25 bp, Probe sequence
atccttttatgtctggatatgaaaa

SEQ ID NO: 212967 - DNA, 25 bp, Probe sequence
aggaatatatccttttatgtctgga

SEQ ID NO: 212968 - DNA, 25 bp, Probe sequence
agctaaaacgtattctcttggtatg

SEQ ID NO: 212969 - DNA, 25 bp, Probe sequence
actttcttaatttcgagtcatattt

SEQ ID NO: 212970 - DNA, 25 bp, Probe sequence
acagaaacatcggaagaagaactta

SEQ ID NO: 212971 - DNA, 25 bp, Probe sequence
acaaactctatccttattattaaca

SEQ ID NO: 212972 - DNA, 25 bp, Probe sequence
aaaatcacaaactctatccttatta

SEQ ID NO: 212973 - DNA, 25 bp, Probe sequence
aaaattaggaattgctatagcattt

SEQ ID NO: 212974 - DNA, 25 bp, Probe sequence
aactctatccttattattaacaaag

SEQ ID NO: 212975 - DNA, 25 bp, Probe sequence
gctaaaacgtattctcttggtatga

SEQ ID NO: 212976 - DNA, 25 bp, Probe sequence
gaaaatccaggaatatatcctttta

SEQ ID NO: 212977 - DNA, 25 bp, Probe sequence
gaaagttatattaggttactctagt

SEQ ID NO: 212978 - DNA, 25 bp, Probe sequence
gatgtatcatttaagctgaaacgcg

SEQ ID NO: 212979 - DNA, 25 bp, Probe sequence
gataaaattgtctcacaacttcata

SEQ ID NO: 212980 - DNA, 25 bp, Probe sequence
gatatcgataaaattgtctcacaac

SEQ ID NO: 212981 - DNA, 25 bp, Probe sequence
gttaaaatcacaaactctatcctta

SEQ ID NO: 212982 - DNA, 25 bp, Probe sequence
gtatcatttaagctgaaacgcggac

SEQ ID NO: 212983 - DNA, 25 bp, Probe sequence
ggtaaaattgttacagaaacatcgg

SEQ ID NO: 212984 - DNA, 25 bp, Probe sequence
ggcttagatccaaaagctgtgcgag

SEQ ID NO: 212985 - DNA, 25 bp, Probe sequence
tgtctcacaacttcatatggatgaa

SEQ ID NO: 212986 - DNA, 25 bp, Probe sequence
tgaaacgcggacaaatagttggtct

SEQ ID NO: 212987 - DNA, 25 bp, Probe sequence
tgaatacattcataaaaaagctaaa

SEQ ID NO: 212988 - DNA, 25 bp, Probe sequence
tcatttaagctgaaacgcggacaaa

SEQ ID NO: 212989 - DNA, 25 bp, Probe sequence
tcaaaaaacactcaagatatcgata

SEQ ID NO: 212990 - DNA, 25 bp, Probe sequence
taatttcgagtcatattttaagtga

SEQ ID NO: 212991 - DNA, 25 bp, Probe sequence
tattaggttactctagtttccaaag

SEQ ID NO: 212992 - DNA, 25 bp, Probe sequence
tatattaggttactctagtttccaa

SEQ ID NO: 212993 - DNA, 25 bp, Probe sequence
taggttactctagtttccaaagcgg

SEQ ID NO: 212994 - DNA, 25 bp, Probe sequence
tagatccaaaagctgtgcgagatgt

SEQ ID NO: 212995 - DNA, 25 bp, Probe sequence
taggaattgctatagcatttttaaa

SEQ ID NO: 212996 - DNA, 25 bp, Probe sequence
tttatgtctggatatgaaaacttga

SEQ ID NO: 212997 - DNA, 25 bp, Probe sequence
ttaagctgaaacgcggacaaatagt

SEQ ID NO: 212998 - DNA, 25 bp, Probe sequence
attgttagcaaaatcatcacattat

SEQ ID NO: 212999 - DNA, 25 bp, Probe sequence
attgcttcaattgttattgggtctt

SEQ ID NO: 213000 - DNA, 25 bp, Probe sequence
attctactaatggttgctcaaggtt

SEQ ID NO: 213001 - DNA, 25 bp, Probe sequence
atttctattttcttaatacttgtag

SEQ ID NO: 213002 - DNA, 25 bp, Probe sequence
atattgcttatatttctattttctt

SEQ ID NO: 213003 - DNA, 25 bp, Probe sequence
atagactggctaaagtggaatccta

SEQ ID NO: 213004 - DNA, 25 bp, Probe sequence
atcatcacattatttattatttctt

SEQ ID NO: 213005 - DNA, 25 bp, Probe sequence
atggtttgcatttttattaattatt

SEQ ID NO: 213006 - DNA, 25 bp, Probe sequence
atggaatttcattacggtacgatta

SEQ ID NO: 213007 - DNA, 25 bp, Probe sequence
acatctgcttataatggtttttcat

SEQ ID NO: 213008 - DNA, 25 bp, Probe sequence
aaatttactctatcgtgaatattca

SEQ ID NO: 213009 - DNA, 25 bp, Probe sequence
aagaaatcaacttttatcgcaccta

SEQ ID NO: 213010 - DNA, 25 bp, Probe sequence
caagcaagtacaatcatttcaatgg

SEQ ID NO: 213011 - DNA, 25 bp, Probe sequence
caacttttatcgcacctattgtctt

SEQ ID NO: 213012 - DNA, 25 bp, Probe sequence
cagttattcaaacggcacttttaga

SEQ ID NO: 213013 - DNA, 25 bp, Probe sequence
gccattgctgtaggtattgtttttt

SEQ ID NO: 213014 - DNA, 25 bp, Probe sequence
gaatattcaagaacaactatgattg

SEQ ID NO: 213015 - DNA, 25 bp, Probe sequence
gaatattatgcttcaaacagttgaa

SEQ ID NO: 213016 - DNA, 25 bp, Probe sequence
gaatcaattattattagttagttta

SEQ ID NO: 213017 - DNA, 25 bp, Probe sequence
gaacttcatgaattgtttattggta

SEQ ID NO: 213018 - DNA, 25 bp, Probe sequence
gaaatcaacttttatcgcacctatt

SEQ ID NO: 213019 - DNA, 25 bp, Probe sequence
gactggctaaagtggaatcctatta

SEQ ID NO: 213020 - DNA, 25 bp, Probe sequence
gttattgggtctttattctttaatg

SEQ ID NO: 213021 - DNA, 25 bp, Probe sequence
gtagcggtaatcaattatctttatt

SEQ ID NO: 213022 - DNA, 25 bp, Probe sequence
gtagccattgctgtaggtattgttt

SEQ ID NO: 213023 - DNA, 25 bp, Probe sequence
gtacaatcatttcaatggaatttca

SEQ ID NO: 213024 - DNA, 25 bp, Probe sequence
gtggaatcctattaatatgatgaat

SEQ ID NO: 213025 - DNA, 25 bp, Probe sequence
ggtttttcatggtttgcatttttat

SEQ ID NO: 213026 - DNA, 25 bp, Probe sequence
tgggtctttattctttaatgattta

SEQ ID NO: 213027 - DNA, 25 bp, Probe sequence
tgttttttattttgcaagttctatt

SEQ ID NO: 213028 - DNA, 25 bp, Probe sequence
tactaatggttgctcaaggttatat

SEQ ID NO: 213029 - DNA, 25 bp, Probe sequence
tttgttattacaattattgcttcaa

SEQ ID NO: 213030 - DNA, 25 bp, Probe sequence
tttgcaagttctattttagcagtta

SEQ ID NO: 213031 - DNA, 25 bp, Probe sequence
ttagcagttattcaaacggcacttt

SEQ ID NO: 213032 - DNA, 25 bp, Probe sequence
atttactcattcatggttgtattcc

SEQ ID NO: 213033 - DNA, 25 bp, Probe sequence
atatgtctttcttgatgcgtaaagg

SEQ ID NO: 213034 - DNA, 25 bp, Probe sequence
atcatgtccgtaaatcatttgatga

SEQ ID NO: 213035 - DNA, 25 bp, Probe sequence
atggaaagatgcttgtcattgatgg

SEQ ID NO: 213036 - DNA, 25 bp, Probe sequence
agctttccaacacgtattacgcaac

SEQ ID NO: 213037 - DNA, 25 bp, Probe sequence
aacacgtattacgcaacggttctgg

SEQ ID NO: 213038 - DNA, 25 bp, Probe sequence
aacaactggcattgcaggctataca

SEQ ID NO: 213039 - DNA, 25 bp, Probe sequence
aacgcttagtcgtcgatcatttaca

SEQ ID NO: 213040 - DNA, 25 bp, Probe sequence
aattacgtcgtcatatgtctttctt

SEQ ID NO: 213041 - DNA, 25 bp, Probe sequence
caatctgaaaaattacgtcgtcata

SEQ ID NO: 213042 - DNA, 25 bp, Probe sequence
cacgtattacgcaacggttctggga

SEQ ID NO: 213043 - DNA, 25 bp, Probe sequence
cagtcaacaactggcattgcaggct

SEQ ID NO: 213044 - DNA, 25 bp, Probe sequence
catttcgtcagcgatttacatggtg

SEQ ID NO: 213045 - DNA, 25 bp, Probe sequence
cattcatggttgtattccagttgat

SEQ ID NO: 213046 - DNA, 25 bp, Probe sequence
gctgatggaaagatgcttgtcattg

SEQ ID NO: 213047 - DNA, 25 bp, Probe sequence
gcttagtcgtcgatcatttacacgt

SEQ ID NO: 213048 - DNA, 25 bp, Probe sequence
gcattattaatggtcacacaccagt

SEQ ID NO: 213049 - DNA, 25 bp, Probe sequence
gaagctttccaacacgtattacgca

SEQ ID NO: 213050 - DNA, 25 bp, Probe sequence
gtacaacgcttagtcgtcgatcatt

SEQ ID NO: 213051 - DNA, 25 bp, Probe sequence
gtcatatgtctttcttgatgcgtaa

SEQ ID NO: 213052 - DNA, 25 bp, Probe sequence
gtcgtcatatgtctttcttgatgcg

SEQ ID NO: 213053 - DNA, 25 bp, Probe sequence
gtgaagatgtgaatatggttcgtaa

SEQ ID NO: 213054 - DNA, 25 bp, Probe sequence
ggttgtattccagttgatgaaaatg

SEQ ID NO: 213055 - DNA, 25 bp, Probe sequence
tcgtcgatcatttacacgttgtcgg

SEQ ID NO: 213056 - DNA, 25 bp, Probe sequence
tcgtcagcgatttacatggtgaata

SEQ ID NO: 213057 - DNA, 25 bp, Probe sequence
tcttcaaaatatacgcgttcaaaac

SEQ ID NO: 213058 - DNA, 25 bp, Probe sequence
taatggtcacacaccagtgaaagaa

SEQ ID NO: 213059 - DNA, 25 bp, Probe sequence
tacgtcgtcatatgtctttcttgat

SEQ ID NO: 213060 - DNA, 25 bp, Probe sequence
tatggttcgtaaaatgctcagtgat

SEQ ID NO: 213061 - DNA, 25 bp, Probe sequence
tattgcagataaagcttctcataaa

SEQ ID NO: 213062 - DNA, 25 bp, Probe sequence
ttttcaaaagcttatcagtcaacaa

SEQ ID NO: 213063 - DNA, 25 bp, Probe sequence
ttagtttggtatttatggactggga

SEQ ID NO: 213064 - DNA, 25 bp, Probe sequence
ttcaatggggtaatcatgatgtgct

SEQ ID NO: 213065 - DNA, 25 bp, Probe sequence
ttgttcttcaaaatatacgcgttca

SEQ ID NO: 213066 - DNA, 25 bp, Probe sequence
tcgtgactcaacgttatacgggggc

SEQ ID NO: 213067 - DNA, 25 bp, Probe sequence
atgcatttgcgtcacgtttcagcgt

SEQ ID NO: 213068 - DNA, 25 bp, Probe sequence
atgtttatgttgtctttagctatta

SEQ ID NO: 213069 - DNA, 25 bp, Probe sequence
agcagacgttacttcatcattatta

SEQ ID NO: 213070 - DNA, 25 bp, Probe sequence
agcagaaatcattatcacctggatg

SEQ ID NO: 213071 - DNA, 25 bp, Probe sequence
aagtttcaacttaccgtattggctg

SEQ ID NO: 213072 - DNA, 25 bp, Probe sequence
aatggctgtcatcacttatattagt

SEQ ID NO: 213073 - DNA, 25 bp, Probe sequence
aattttccagtttttcacaagtcat

SEQ ID NO: 213074 - DNA, 25 bp, Probe sequence
caaattgctgctgccttcagcttct

SEQ ID NO: 213075 - DNA, 25 bp, Probe sequence
ctgccttcagcttcttatcagtgat

SEQ ID NO: 213076 - DNA, 25 bp, Probe sequence
ccggctttgctactggtcaagaaat

SEQ ID NO: 213077 - DNA, 25 bp, Probe sequence
cctggatggtggtttgatgcgatta

SEQ ID NO: 213078 - DNA, 25 bp, Probe sequence
gcctttgttggtgttgtcgttggtg

SEQ ID NO: 213079 - DNA, 25 bp, Probe sequence
gcgtattaccggcaaatctcatatc

SEQ ID NO: 213080 - DNA, 25 bp, Probe sequence
gcgtcaaccattcatcaaagtttca

SEQ ID NO: 213081 - DNA, 25 bp, Probe sequence
gcaacactgtttctaaaattcgatc

SEQ ID NO: 213082 - DNA, 25 bp, Probe sequence
gcaagcttgcaaattgctgctgcct

SEQ ID NO: 213083 - DNA, 25 bp, Probe sequence
gagtccattattgtggcatttgcct

SEQ ID NO: 213084 - DNA, 25 bp, Probe sequence
gatgcgattaactatgcaagcttgc

SEQ ID NO: 213085 - DNA, 25 bp, Probe sequence
gatacttgtcatctacaatactgtt

SEQ ID NO: 213086 - DNA, 25 bp, Probe sequence
gtacatttatcggtttcatttcatt

SEQ ID NO: 213087 - DNA, 25 bp, Probe sequence
gggattgttcggtttcatcttactc

SEQ ID NO: 213088 - DNA, 25 bp, Probe sequence
ggcatttgcctttgttggtgttgtc

SEQ ID NO: 213089 - DNA, 25 bp, Probe sequence
tggctgagcgcactcatattagtcg

SEQ ID NO: 213090 - DNA, 25 bp, Probe sequence
tgtcatgcatacaggtcatcatcta

SEQ ID NO: 213091 - DNA, 25 bp, Probe sequence
tgattgcggtctactatttcacaac

SEQ ID NO: 213092 - DNA, 25 bp, Probe sequence
tcgatcgtttaattgctgtgcttgg

SEQ ID NO: 213093 - DNA, 25 bp, Probe sequence
tcatcttactcatacctgtactcta

SEQ ID NO: 213094 - DNA, 25 bp, Probe sequence
tagctattattatgactgcaggtgg

SEQ ID NO: 213095 - DNA, 25 bp, Probe sequence
taccgtattggctgagcgcactcat

SEQ ID NO: 213096 - DNA, 25 bp, Probe sequence
tagcgacacaaatgtctccgtcaat

SEQ ID NO: 213097 - DNA, 25 bp, Probe sequence
tatacgggggcttgattggcggttt

SEQ ID NO: 213098 - DNA, 25 bp, Probe sequence
ttactgccgctaataatgatgctca

SEQ ID NO: 213099 - DNA, 25 bp, Probe sequence
ttgtcattatgattgcggtctacta

SEQ ID NO: 213100 - DNA, 25 bp, Probe sequence
attaacattgatcatacaggcgtat

SEQ ID NO: 213101 - DNA, 25 bp, Probe sequence
ataccgttttgtggataataatgaa

SEQ ID NO: 213102 - DNA, 25 bp, Probe sequence
atcacataccgttttgtggataata

SEQ ID NO: 213103 - DNA, 25 bp, Probe sequence
atcatacaggcgtatctgatgaact

SEQ ID NO: 213104 - DNA, 25 bp, Probe sequence
atgctttagctgaaatcacataccg

SEQ ID NO: 213105 - DNA, 25 bp, Probe sequence
agctgaaatcacataccgttttgtg

SEQ ID NO: 213106 - DNA, 25 bp, Probe sequence
acataccgttttgtggataataatg

SEQ ID NO: 213107 - DNA, 25 bp, Probe sequence
acattgatcatacaggcgtatctga

SEQ ID NO: 213108 - DNA, 25 bp, Probe sequence
acaaattctatattggtgatgatga

SEQ ID NO: 213109 - DNA, 25 bp, Probe sequence
aaaaagaagattcatatcaagatgt

SEQ ID NO: 213110 - DNA, 25 bp, Probe sequence
aacaaggcgagaacaaattctatat

SEQ ID NO: 213111 - DNA, 25 bp, Probe sequence
aacattgatcatacaggcgtatctg

SEQ ID NO: 213112 - DNA, 25 bp, Probe sequence
aatcacataccgttttgtggataat

SEQ ID NO: 213113 - DNA, 25 bp, Probe sequence
aattaacattgatcatacaggcgta

SEQ ID NO: 213114 - DNA, 25 bp, Probe sequence
cattgatcatacaggcgtatctgat

SEQ ID NO: 213115 - DNA, 25 bp, Probe sequence
ctttagctgaaatcacataccgttt

SEQ ID NO: 213116 - DNA, 25 bp, Probe sequence
ctgaaatcacataccgttttgtgga

SEQ ID NO: 213117 - DNA, 25 bp, Probe sequence
gctgaaatcacataccgttttgtgg

SEQ ID NO: 213118 - DNA, 25 bp, Probe sequence
gctttagctgaaatcacataccgtt

SEQ ID NO: 213119 - DNA, 25 bp, Probe sequence
gaacaaattctatattggtgatgat

SEQ ID NO: 213120 - DNA, 25 bp, Probe sequence
gaaatcacataccgttttgtggata

SEQ ID NO: 213121 - DNA, 25 bp, Probe sequence
gaaattaacattgatcatacaggcg

SEQ ID NO: 213122 - DNA, 25 bp, Probe sequence
gatcatacaggcgtatctgatgaac

SEQ ID NO: 213123 - DNA, 25 bp, Probe sequence
gttcatttgccaaacatatgttaga

SEQ ID NO: 213124 - DNA, 25 bp, Probe sequence
ggcgagaacaaattctatattggtg

SEQ ID NO: 213125 - DNA, 25 bp, Probe sequence
tggtcaaggtgttggcaaaaaacta

SEQ ID NO: 213126 - DNA, 25 bp, Probe sequence
tgttcatttgccaaacatatgttag

SEQ ID NO: 213127 - DNA, 25 bp, Probe sequence
tgctttagctgaaatcacataccgt

SEQ ID NO: 213128 - DNA, 25 bp, Probe sequence
tcatttgccaaacatatgttagaaa

SEQ ID NO: 213129 - DNA, 25 bp, Probe sequence
tagctgaaatcacataccgttttgt

SEQ ID NO: 213130 - DNA, 25 bp, Probe sequence
tttagctgaaatcacataccgtttt

SEQ ID NO: 213131 - DNA, 25 bp, Probe sequence
ttagctgaaatcacataccgttttg

SEQ ID NO: 213132 - DNA, 25 bp, Probe sequence
ttaacattgatcatacaggcgtatc

SEQ ID NO: 213133 - DNA, 25 bp, Probe sequence
ttgatcatacaggcgtatctgatga

SEQ ID NO: 213134 - DNA, 25 bp, Probe sequence
agggtttgacatcacagttcattca

SEQ ID NO: 213135 - DNA, 25 bp, Probe sequence
actgaggatctagctaacttcttat

SEQ ID NO: 213136 - DNA, 25 bp, Probe sequence
acatgtgtctgattttccacgtgcg

SEQ ID NO: 213137 - DNA, 25 bp, Probe sequence
acaaccgtattatctgttgggactg

SEQ ID NO: 213138 - DNA, 25 bp, Probe sequence
aacagcaacacaagtgacaaacatt

SEQ ID NO: 213139 - DNA, 25 bp, Probe sequence
aaggcatgattggacacttacattt

SEQ ID NO: 213140 - DNA, 25 bp, Probe sequence
aatactgaccttgttccagaaaaat

SEQ ID NO: 213141 - DNA, 25 bp, Probe sequence
aattaggattccaacatgtgtctga

SEQ ID NO: 213142 - DNA, 25 bp, Probe sequence
caacacatacatttacggcaccaga

SEQ ID NO: 213143 - DNA, 25 bp, Probe sequence
ctatcgcgatagaccttcatcttca

SEQ ID NO: 213144 - DNA, 25 bp, Probe sequence
cgacgcctcaacacatacatttacg

SEQ ID NO: 213145 - DNA, 25 bp, Probe sequence
cgaatcattatcaccatcatattgc

SEQ ID NO: 213146 - DNA, 25 bp, Probe sequence
tcaacgaccccgaaggtaatggtat

SEQ ID NO: 213147 - DNA, 25 bp, Probe sequence
gcgatagaccttcatcttcatggga

SEQ ID NO: 213148 - DNA, 25 bp, Probe sequence
gaagctttatatttcaacgaccccg

SEQ ID NO: 213149 - DNA, 25 bp, Probe sequence
gaccttcatcttcatgggaatggca

SEQ ID NO: 213150 - DNA, 25 bp, Probe sequence
gacgcagcatatcaatgttacattg

SEQ ID NO: 213151 - DNA, 25 bp, Probe sequence
gagacttagacttaatgacaacatt

SEQ ID NO: 213152 - DNA, 25 bp, Probe sequence
gttgatatttatcaacccgacgcct

SEQ ID NO: 213153 - DNA, 25 bp, Probe sequence
gttgggactggtggccatactctaa

SEQ ID NO: 213154 - DNA, 25 bp, Probe sequence
gttcattcaaatactgaccttgttc

SEQ ID NO: 213155 - DNA, 25 bp, Probe sequence
gtaatggtattgaagtctatcgcga

SEQ ID NO: 213156 - DNA, 25 bp, Probe sequence
gtcaacgaatcattatcaccatcat

SEQ ID NO: 213157 - DNA, 25 bp, Probe sequence
ggactatccgttaaaagttctgacg

SEQ ID NO: 213158 - DNA, 25 bp, Probe sequence
ggcatttcacgataaaacagcaaca

SEQ ID NO: 213159 - DNA, 25 bp, Probe sequence
ggcgctggtgatcatttagtaagtg

SEQ ID NO: 213160 - DNA, 25 bp, Probe sequence
ggccatactctaacgttacatttat

SEQ ID NO: 213161 - DNA, 25 bp, Probe sequence
tggcaatccaatcaagcaagacaaa

SEQ ID NO: 213162 - DNA, 25 bp, Probe sequence
tggtggccatactctaacgttacat

SEQ ID NO: 213163 - DNA, 25 bp, Probe sequence
ttagaagacggccgtcagacttccc

SEQ ID NO: 213164 - DNA, 25 bp, Probe sequence
taacttcttatatttcgtggcacaa

SEQ ID NO: 213165 - DNA, 25 bp, Probe sequence
tacatttattagaagacggccgtca

SEQ ID NO: 213166 - DNA, 25 bp, Probe sequence
tacggcaccagaagggtttgacatc

SEQ ID NO: 213167 - DNA, 25 bp, Probe sequence
ttttattaccaactactgaggatct

SEQ ID NO: 213168 - DNA, 25 bp, Probe sequence
atttctttacatgttccagcgaaca

SEQ ID NO: 213169 - DNA, 25 bp, Probe sequence
atatatgcaggatttggtgctacaa

SEQ ID NO: 213170 - DNA, 25 bp, Probe sequence
atcgccctacaattagtgcgtcgct

SEQ ID NO: 213171 - DNA, 25 bp, Probe sequence
atgacgtttatcctaaattagaatc

SEQ ID NO: 213172 - DNA, 25 bp, Probe sequence
agaattttagtaacaccacatattg

SEQ ID NO: 213173 - DNA, 25 bp, Probe sequence
agcacgtggtgcagtcatcaataca

SEQ ID NO: 213174 - DNA, 25 bp, Probe sequence
acgatggcgtaactacaatgcaatt

SEQ ID NO: 213175 - DNA, 25 bp, Probe sequence
acaaattgcacaacgtactgctgga

SEQ ID NO: 213176 - DNA, 25 bp, Probe sequence
aacgtactgctggatttgatatgta

SEQ ID NO: 213177 - DNA, 25 bp, Probe sequence
aagtaactacttctaaagagctatt

SEQ ID NO: 213178 - DNA, 25 bp, Probe sequence
aattagtgcgtcgcttcccagatat

SEQ ID NO: 213179 - DNA, 25 bp, Probe sequence
cacatgattttacttggcaagcaga

SEQ ID NO: 213180 - DNA, 25 bp, Probe sequence
ctaaagagctattatcaagtgctac

SEQ ID NO: 213181 - DNA, 25 bp, Probe sequence
ctgtttctatcgccctacaattagt

SEQ ID NO: 213182 - DNA, 25 bp, Probe sequence
cgcagcattatctgtcattaacact

SEQ ID NO: 213183 - DNA, 25 bp, Probe sequence
ccacatattgctttcttctctgatg

SEQ ID NO: 213184 - DNA, 25 bp, Probe sequence
gctttcttctctgatgaagcagtac

SEQ ID NO: 213185 - DNA, 25 bp, Probe sequence
gcatacttcacaaatgactggacta

SEQ ID NO: 213186 - DNA, 25 bp, Probe sequence
gcagagtattctgtttctatcgccc

SEQ ID NO: 213187 - DNA, 25 bp, Probe sequence
gaagcagtacaaaaccttgttgaag

SEQ ID NO: 213188 - DNA, 25 bp, Probe sequence
gaaatcatgtctaaaccagttaaaa

SEQ ID NO: 213189 - DNA, 25 bp, Probe sequence
gtcgcttcccagatattgaacgccg

SEQ ID NO: 213190 - DNA, 25 bp, Probe sequence
gatggtactttgttaggtgctgcga

SEQ ID NO: 213191 - DNA, 25 bp, Probe sequence
gatatgtatgatttagatttagcta

SEQ ID NO: 213192 - DNA, 25 bp, Probe sequence
gatattatttctttacatgttccag

SEQ ID NO: 213193 - DNA, 25 bp, Probe sequence
gtgcagtcatcaatacacctgattt

SEQ ID NO: 213194 - DNA, 25 bp, Probe sequence
ggtggtttaaacgcagcattatctg

SEQ ID NO: 213195 - DNA, 25 bp, Probe sequence
ggcaagcagaaatcatgtctaaacc

SEQ ID NO: 213196 - DNA, 25 bp, Probe sequence
tgcagtgaacgatggtactttgtta

SEQ ID NO: 213197 - DNA, 25 bp, Probe sequence
tcccagatattgaacgccgtgtaca

SEQ ID NO: 213198 - DNA, 25 bp, Probe sequence
taggtgctgcgattgatacttatga

SEQ ID NO: 213199 - DNA, 25 bp, Probe sequence
ttagttaacgcagcacgtggtgcag

SEQ ID NO: 213200 - DNA, 25 bp, Probe sequence
ttcacctgaaacaattgcagagtat

SEQ ID NO: 213201 - DNA, 25 bp, Probe sequence
ttggtgctacaattacagcttatga

SEQ ID NO: 213202 - DNA, 25 bp, Probe sequence
agcaataccgtctaacgtactacta

SEQ ID NO: 213203 - DNA, 25 bp, Probe sequence
atttatccgatttaagtgctttgcc

SEQ ID NO: 213204 - DNA, 25 bp, Probe sequence
atcgaagcaataccgtctaacgtac

SEQ ID NO: 213205 - DNA, 25 bp, Probe sequence
acatactaaacatcgaagcaatacc

SEQ ID NO: 213206 - DNA, 25 bp, Probe sequence
acatcgaagcaataccgtctaacgt

SEQ ID NO: 213207 - DNA, 25 bp, Probe sequence
aaacatcgaagcaataccgtctaac

SEQ ID NO: 213208 - DNA, 25 bp, Probe sequence
aaaactattatcaatattacacata

SEQ ID NO: 213209 - DNA, 25 bp, Probe sequence
aagaccttcaaatagaagagtacca

SEQ ID NO: 213210 - DNA, 25 bp, Probe sequence
caaacgctttagacaagaaaacagt

SEQ ID NO: 213211 - DNA, 25 bp, Probe sequence
caaagccatcaaactaaaactatta

SEQ ID NO: 213212 - DNA, 25 bp, Probe sequence
cgacaaacattcgataagatttata

SEQ ID NO: 213213 - DNA, 25 bp, Probe sequence
gccatcaaactaaaactattatcaa

SEQ ID NO: 213214 - DNA, 25 bp, Probe sequence
gatggtcaaaaacaaaagcttaaat

SEQ ID NO: 213215 - DNA, 25 bp, Probe sequence
gcaataccgtctaacgtactactaa

SEQ ID NO: 213216 - DNA, 25 bp, Probe sequence
gaagcaataccgtctaacgtactac

SEQ ID NO: 213217 - DNA, 25 bp, Probe sequence
gaagttacaaacgctttagacaaga

SEQ ID NO: 213218 - DNA, 25 bp, Probe sequence
gaagagtaccaatcaaaagaagaag

SEQ ID NO: 213219 - DNA, 25 bp, Probe sequence
gaagaagtcataaatgattacatta

SEQ ID NO: 213220 - DNA, 25 bp, Probe sequence
gaaaacaatcgacaaacattcgata

SEQ ID NO: 213221 - DNA, 25 bp, Probe sequence
gagtgatggtcaaaaacaaaagctt

SEQ ID NO: 213222 - DNA, 25 bp, Probe sequence
gatgaagttacaaacgctttagaca

SEQ ID NO: 213223 - DNA, 25 bp, Probe sequence
gattttattcaaagccatcaaacta

SEQ ID NO: 213224 - DNA, 25 bp, Probe sequence
gatttaagtgctttgccgggtaaat

SEQ ID NO: 213225 - DNA, 25 bp, Probe sequence
gtactactaaaaaacttgagtgatg

SEQ ID NO: 213226 - DNA, 25 bp, Probe sequence
gtgctttgccgggtaaatactttat

SEQ ID NO: 213227 - DNA, 25 bp, Probe sequence
tgctttgccgggtaaatactttatt

SEQ ID NO: 213228 - DNA, 25 bp, Probe sequence
tccgatttaagtgctttgccgggta

SEQ ID NO: 213229 - DNA, 25 bp, Probe sequence
taagtttcttattggaagatcatga

SEQ ID NO: 213230 - DNA, 25 bp, Probe sequence
tatccgatttaagtgctttgccggg

SEQ ID NO: 213231 - DNA, 25 bp, Probe sequence
tataacatactaaacatcgaagcaa

SEQ ID NO: 213232 - DNA, 25 bp, Probe sequence
tattacacataatttatccgattta

SEQ ID NO: 213233 - DNA, 25 bp, Probe sequence
tattcaaagccatcaaactaaaact

SEQ ID NO: 213234 - DNA, 25 bp, Probe sequence
tattggaagatcatgatttaatcat

SEQ ID NO: 213235 - DNA, 25 bp, Probe sequence
ttaagtgctttgccgggtaaatact

SEQ ID NO: 213236 - DNA, 25 bp, Probe sequence
attcttcgttcttctatttatagtt

SEQ ID NO: 213237 - DNA, 25 bp, Probe sequence
attttcactcgttatcttacaatat

SEQ ID NO: 213238 - DNA, 25 bp, Probe sequence
attttaatcagcttaggtatcagca

SEQ ID NO: 213239 - DNA, 25 bp, Probe sequence
atattggattggttcagtcatctta

SEQ ID NO: 213240 - DNA, 25 bp, Probe sequence
atatattcggatttctcacattact

SEQ ID NO: 213241 - DNA, 25 bp, Probe sequence
atcagcttaggtatcagcattgtat

SEQ ID NO: 213242 - DNA, 25 bp, Probe sequence
atcattcttcgttcttctatttata

SEQ ID NO: 213243 - DNA, 25 bp, Probe sequence
agttaatactattgtcttattacta

SEQ ID NO: 213244 - DNA, 25 bp, Probe sequence
aaaatatatttggtatcgttgctcc

SEQ ID NO: 213245 - DNA, 25 bp, Probe sequence
aatcttattttcactcgttatctta

SEQ ID NO: 213246 - DNA, 25 bp, Probe sequence
aataatcttattttcactcgttatc

SEQ ID NO: 213247 - DNA, 25 bp, Probe sequence
cactcgttatcttacaatatatctt

SEQ ID NO: 213248 - DNA, 25 bp, Probe sequence
cgatgtatcgtgccgtagaaaaaat

SEQ ID NO: 213249 - DNA, 25 bp, Probe sequence
cgttatcttacaatatatcttagtt

SEQ ID NO: 213250 - DNA, 25 bp, Probe sequence
cgttcttctatttatagttaatact

SEQ ID NO: 213251 - DNA, 25 bp, Probe sequence
gagatggttgaaaatcggtatgtag

SEQ ID NO: 213252 - DNA, 25 bp, Probe sequence
gattggttcagtcatcttagttgcc

SEQ ID NO: 213253 - DNA, 25 bp, Probe sequence
gtatcgtgccgtagaaaaaatattg

SEQ ID NO: 213254 - DNA, 25 bp, Probe sequence
gtcatcttagttgccattaataaaa

SEQ ID NO: 213255 - DNA, 25 bp, Probe sequence
gtgtccactttgaaattagaattta

SEQ ID NO: 213256 - DNA, 25 bp, Probe sequence
ggttcagtcatcttagttgccatta

SEQ ID NO: 213257 - DNA, 25 bp, Probe sequence
ggatttctcacattacttactatta

SEQ ID NO: 213258 - DNA, 25 bp, Probe sequence
ggaacgattagtatggtttcaccta

SEQ ID NO: 213259 - DNA, 25 bp, Probe sequence
tcttattttcactcgttatcttaca

SEQ ID NO: 213260 - DNA, 25 bp, Probe sequence
tcatttgttattgcatattttatta

SEQ ID NO: 213261 - DNA, 25 bp, Probe sequence
tcagcattgtatattggattggttc

SEQ ID NO: 213262 - DNA, 25 bp, Probe sequence
tactattgtcttattactaagtaga

SEQ ID NO: 213263 - DNA, 25 bp, Probe sequence
tatcattcttcgttcttctatttat

SEQ ID NO: 213264 - DNA, 25 bp, Probe sequence
tatatcttagttgttggaacgatta

SEQ ID NO: 213265 - DNA, 25 bp, Probe sequence
tattcggatttctcacattacttac

SEQ ID NO: 213266 - DNA, 25 bp, Probe sequence
tattttcatttgttattgcatattt

SEQ ID NO: 213267 - DNA, 25 bp, Probe sequence
ttcagtcatcttagttgccattaat

SEQ ID NO: 213268 - DNA, 25 bp, Probe sequence
ttctcacattacttactattaataa

SEQ ID NO: 213269 - DNA, 25 bp, Probe sequence
ttcggatttctcacattacttacta

SEQ ID NO: 213270 - DNA, 25 bp, Probe sequence
attggcgtgaaggtgattggattgt

SEQ ID NO: 213271 - DNA, 25 bp, Probe sequence
atagtagccatcctaatcgcattga

SEQ ID NO: 213272 - DNA, 25 bp, Probe sequence
ataagtatcattgctagtgttgcgc

SEQ ID NO: 213273 - DNA, 25 bp, Probe sequence
atcacatcctcttgcggctaaaatt

SEQ ID NO: 213274 - DNA, 25 bp, Probe sequence
atgacatttattcaatgggaccatc

SEQ ID NO: 213275 - DNA, 25 bp, Probe sequence
atgggaccatctagttctggcggta

SEQ ID NO: 213276 - DNA, 25 bp, Probe sequence
atgtattagatcaaggtggcaacgc

SEQ ID NO: 213277 - DNA, 25 bp, Probe sequence
agcatggtgttgtgtctgattgcat

SEQ ID NO: 213278 - DNA, 25 bp, Probe sequence
acgaccactaagtaacatggctcca

SEQ ID NO: 213279 - DNA, 25 bp, Probe sequence
aactgtcgctgtgccagcaattcca

SEQ ID NO: 213280 - DNA, 25 bp, Probe sequence
aatcataccgaaacaactcattttt

SEQ ID NO: 213281 - DNA, 25 bp, Probe sequence
catctagttctggcggtatcacggt

SEQ ID NO: 213282 - DNA, 25 bp, Probe sequence
gctagtgttgcgcaaacattaatca

SEQ ID NO: 213283 - DNA, 25 bp, Probe sequence
gaacaagggtttaatgcattttata

SEQ ID NO: 213284 - DNA, 25 bp, Probe sequence
gaaaaatattcgcgccagcaacacg

SEQ ID NO: 213285 - DNA, 25 bp, Probe sequence
gactacacatggtaaaactgtcgct

SEQ ID NO: 213286 - DNA, 25 bp, Probe sequence
gaggtgcctgtacagtcattaattg

SEQ ID NO: 213287 - DNA, 25 bp, Probe sequence
gataattttcatgaggtgcctgtac

SEQ ID NO: 213288 - DNA, 25 bp, Probe sequence
gattatattcacaagcgttatgcta

SEQ ID NO: 213289 - DNA, 25 bp, Probe sequence
gattggattgtacaacccgaattag

SEQ ID NO: 213290 - DNA, 25 bp, Probe sequence
gtttggcatggatattcagcaggct

SEQ ID NO: 213291 - DNA, 25 bp, Probe sequence
gtactggcagtataactgcgtttga

SEQ ID NO: 213292 - DNA, 25 bp, Probe sequence
gtaacatggctccaacgattgtgat

SEQ ID NO: 213293 - DNA, 25 bp, Probe sequence
gtgccagcaattccaaagctgtttg

SEQ ID NO: 213294 - DNA, 25 bp, Probe sequence
gtgtctgattgcattagtcatacag

SEQ ID NO: 213295 - DNA, 25 bp, Probe sequence
gtggtagaaccatttgcatcaggta

SEQ ID NO: 213296 - DNA, 25 bp, Probe sequence
gggttaatttccgtatcacatcctc

SEQ ID NO: 213297 - DNA, 25 bp, Probe sequence
ggagcctcaattttcacaatctaca

SEQ ID NO: 213298 - DNA, 25 bp, Probe sequence
tcagcaggctatagatgaacctaga

SEQ ID NO: 213299 - DNA, 25 bp, Probe sequence
taattaatcctgcaattgaactagc

SEQ ID NO: 213300 - DNA, 25 bp, Probe sequence
taatattgcttcatttacgacatca

SEQ ID NO: 213301 - DNA, 25 bp, Probe sequence
taatcgcattgaatgggagcctcaa

SEQ ID NO: 213302 - DNA, 25 bp, Probe sequence
tattaacagtaggtgcacctggtgc

SEQ ID NO: 213303 - DNA, 25 bp, Probe sequence
ttcagattaaagcgccaatcagtgc

SEQ ID NO: 213304 - DNA, 25 bp, Probe sequence
atttctatctatttagcacttatct

SEQ ID NO: 213305 - DNA, 25 bp, Probe sequence
atttgagtcttcctgaaatctcatt

SEQ ID NO: 213306 - DNA, 25 bp, Probe sequence
atcatggatctcttacgcaaaaaca

SEQ ID NO: 213307 - DNA, 25 bp, Probe sequence
atctttataacgttcacttcttatt

SEQ ID NO: 213308 - DNA, 25 bp, Probe sequence
agcacttatctttataacgttcact

SEQ ID NO: 213309 - DNA, 25 bp, Probe sequence
aaagttgcaatttctatctatttag

SEQ ID NO: 213310 - DNA, 25 bp, Probe sequence
aacatttgagtcttcctgaaatctc

SEQ ID NO: 213311 - DNA, 25 bp, Probe sequence
aacgttcacttcttatttagtcatt

SEQ ID NO: 213312 - DNA, 25 bp, Probe sequence
aattgagtcattccgttaaagttgc

SEQ ID NO: 213313 - DNA, 25 bp, Probe sequence
cagcattctcatcatggatctctta

SEQ ID NO: 213314 - DNA, 25 bp, Probe sequence
cttatctttataacgttcacttctt

SEQ ID NO: 213315 - DNA, 25 bp, Probe sequence
ctatctatttagcacttatctttat

SEQ ID NO: 213316 - DNA, 25 bp, Probe sequence
ctcatcatggatctcttacgcaaaa

SEQ ID NO: 213317 - DNA, 25 bp, Probe sequence
ctggacatgatgtatcacatttcgt

SEQ ID NO: 213318 - DNA, 25 bp, Probe sequence
gcattctcatcatggatctcttacg

SEQ ID NO: 213319 - DNA, 25 bp, Probe sequence
gcaaaaacatttgagtcttcctgaa

SEQ ID NO: 213320 - DNA, 25 bp, Probe sequence
gcaatttctatctatttagcactta

SEQ ID NO: 213321 - DNA, 25 bp, Probe sequence
gagtcattccgttaaagttgcaatt

SEQ ID NO: 213322 - DNA, 25 bp, Probe sequence
gagtatgactggacatgatgtatca

SEQ ID NO: 213323 - DNA, 25 bp, Probe sequence
gagtcttcctgaaatctcatttaaa

SEQ ID NO: 213324 - DNA, 25 bp, Probe sequence
gatagtcagcattctcatcatggat

SEQ ID NO: 213325 - DNA, 25 bp, Probe sequence
gttgcaatttctatctatttagcac

SEQ ID NO: 213326 - DNA, 25 bp, Probe sequence
gttcacttcttatttagtcattatt

SEQ ID NO: 213327 - DNA, 25 bp, Probe sequence
gtcagcattctcatcatggatctct

SEQ ID NO: 213328 - DNA, 25 bp, Probe sequence
gtcattccgttaaagttgcaatttc

SEQ ID NO: 213329 - DNA, 25 bp, Probe sequence
gtcttcctgaaatctcatttaaata

SEQ ID NO: 213330 - DNA, 25 bp, Probe sequence
gtgcaattgagtcattccgttaaag

SEQ ID NO: 213331 - DNA, 25 bp, Probe sequence
tggatctcttacgcaaaaacatttg

SEQ ID NO: 213332 - DNA, 25 bp, Probe sequence
tataacgttcacttcttatttagtc

SEQ ID NO: 213333 - DNA, 25 bp, Probe sequence
tatatacgagtatgactggacatga

SEQ ID NO: 213334 - DNA, 25 bp, Probe sequence
ttatttagtcattattttatatacg

SEQ ID NO: 213335 - DNA, 25 bp, Probe sequence
ttagatagtcagcattctcatcatg

SEQ ID NO: 213336 - DNA, 25 bp, Probe sequence
ttctcatcatggatctcttacgcaa

SEQ ID NO: 213337 - DNA, 25 bp, Probe sequence
ttccgttaaagttgcaatttctatc

SEQ ID NO: 213338 - DNA, 25 bp, Probe sequence
gtacgtcactgctcgacttgtagtc

SEQ ID NO: 213339 - DNA, 25 bp, Probe sequence
attatcggtggtaccgcactcgcat

SEQ ID NO: 213340 - DNA, 25 bp, Probe sequence
atatttagcgtattccaagatcgac

SEQ ID NO: 213341 - DNA, 25 bp, Probe sequence
agcagtctatggttacatgtggcat

SEQ ID NO: 213342 - DNA, 25 bp, Probe sequence
acattactacaatacattgcgccag

SEQ ID NO: 213343 - DNA, 25 bp, Probe sequence
acaggtaatgctgcgattgcaacat

SEQ ID NO: 213344 - DNA, 25 bp, Probe sequence
aaatcgtaggcatcattcttattat

SEQ ID NO: 213345 - DNA, 25 bp, Probe sequence
aactgttgaacctgtcgtagccgtt

SEQ ID NO: 213346 - DNA, 25 bp, Probe sequence
aaccgcttcggttcgattctaattg

SEQ ID NO: 213347 - DNA, 25 bp, Probe sequence
aatgcttatttctggtgttgcgatg

SEQ ID NO: 213348 - DNA, 25 bp, Probe sequence
cgcactcgcattttatttctttatc

SEQ ID NO: 213349 - DNA, 25 bp, Probe sequence
gcactcgctttttacacaatttatc

SEQ ID NO: 213350 - DNA, 25 bp, Probe sequence
gaataatcattcagctttgcgttta

SEQ ID NO: 213351 - DNA, 25 bp, Probe sequence
gatgtgcttgctattatcatgacac

SEQ ID NO: 213352 - DNA, 25 bp, Probe sequence
gttgcgatgaatttacgccatccaa

SEQ ID NO: 213353 - DNA, 25 bp, Probe sequence
gtagtcagtggtgttttcttactta

SEQ ID NO: 213354 - DNA, 25 bp, Probe sequence
gtacaaaatgatgcaacccaaacgt

SEQ ID NO: 213355 - DNA, 25 bp, Probe sequence
gtcaatcctgcaagtttattctggg

SEQ ID NO: 213356 - DNA, 25 bp, Probe sequence
gtcgggtgggcaatgcttatttctg

SEQ ID NO: 213357 - DNA, 25 bp, Probe sequence
gtcgtagccgttatcgcaagcagtc

SEQ ID NO: 213358 - DNA, 25 bp, Probe sequence
gtcggtgcttgtttatggggattag

SEQ ID NO: 213359 - DNA, 25 bp, Probe sequence
gtggcattcaaaccatttcaaatcg

SEQ ID NO: 213360 - DNA, 25 bp, Probe sequence
ggggattaggtggtactgtttctga

SEQ ID NO: 213361 - DNA, 25 bp, Probe sequence
ggtactgtttctgatttcttgttca

SEQ ID NO: 213362 - DNA, 25 bp, Probe sequence
tgttaggcaaattacttatcttcag

SEQ ID NO: 213363 - DNA, 25 bp, Probe sequence
tcgacagtttacaatacatatcagc

SEQ ID NO: 213364 - DNA, 25 bp, Probe sequence
taatgtcgattggtacgtcactgct

SEQ ID NO: 213365 - DNA, 25 bp, Probe sequence
tacgccatccaatttggcacattga

SEQ ID NO: 213366 - DNA, 25 bp, Probe sequence
tatacttgccattgtcggtgcttgt

SEQ ID NO: 213367 - DNA, 25 bp, Probe sequence
tttatccttcagacctacttaaccg

SEQ ID NO: 213368 - DNA, 25 bp, Probe sequence
ttattctggggtattttagctggtg

SEQ ID NO: 213369 - DNA, 25 bp, Probe sequence
ttagctggtgtagcactcgcttttt

SEQ ID NO: 213370 - DNA, 25 bp, Probe sequence
ttctaatttagtcgtcaatcctgca

SEQ ID NO: 213371 - DNA, 25 bp, Probe sequence
ttggtttgtcataagaggcgttgca

SEQ ID NO: 213372 - DNA, 25 bp, Probe sequence
attgtcatattttcgaacaaatcca

SEQ ID NO: 213373 - DNA, 25 bp, Probe sequence
atttccctagagaagtgaagagcca

SEQ ID NO: 213374 - DNA, 25 bp, Probe sequence
atcaagatagcaatttccctagaga

SEQ ID NO: 213375 - DNA, 25 bp, Probe sequence
atccatgtcctgaaagcatctcagt

SEQ ID NO: 213376 - DNA, 25 bp, Probe sequence
atgtcctgaaagcatctcagtacct

SEQ ID NO: 213377 - DNA, 25 bp, Probe sequence
agcatctcagtacctgtaattaaac

SEQ ID NO: 213378 - DNA, 25 bp, Probe sequence
acctgtaattaaacgggcactatca

SEQ ID NO: 213379 - DNA, 25 bp, Probe sequence
aaatccatgtcctgaaagcatctca

SEQ ID NO: 213380 - DNA, 25 bp, Probe sequence
aacaaatccatgtcctgaaagcatc

SEQ ID NO: 213381 - DNA, 25 bp, Probe sequence
aacgggcactatcagttttcaacca

SEQ ID NO: 213382 - DNA, 25 bp, Probe sequence
caaccaattcacaaatgtacaatga

SEQ ID NO: 213383 - DNA, 25 bp, Probe sequence
caaagttttcttggtgatgacacac

SEQ ID NO: 213384 - DNA, 25 bp, Probe sequence
cactatcagttttcaaccaattcac

SEQ ID NO: 213385 - DNA, 25 bp, Probe sequence
cgggcactatcagttttcaaccaat

SEQ ID NO: 213386 - DNA, 25 bp, Probe sequence
gaatttatgcaaagttttcttggtg

SEQ ID NO: 213387 - DNA, 25 bp, Probe sequence
gaaagcatctcagtacctgtaatta

SEQ ID NO: 213388 - DNA, 25 bp, Probe sequence
gacacaccattaggtgaattggttg

SEQ ID NO: 213389 - DNA, 25 bp, Probe sequence
gagccatagtgaaatattgtcatat

SEQ ID NO: 213390 - DNA, 25 bp, Probe sequence
gagaagtgaagagccatagtgaaat

SEQ ID NO: 213391 - DNA, 25 bp, Probe sequence
gatagcaatttccctagagaagtga

SEQ ID NO: 213392 - DNA, 25 bp, Probe sequence
gattaatcaagatagcaatttccct

SEQ ID NO: 213393 - DNA, 25 bp, Probe sequence
gttttcttggtgatgacacaccatt

SEQ ID NO: 213394 - DNA, 25 bp, Probe sequence
gttttcaaccaattcacaaatgtac

SEQ ID NO: 213395 - DNA, 25 bp, Probe sequence
gtacctgtaattaaacgggcactat

SEQ ID NO: 213396 - DNA, 25 bp, Probe sequence
gtcctgaaagcatctcagtacctgt

SEQ ID NO: 213397 - DNA, 25 bp, Probe sequence
ggtgaattggttgattggattaatc

SEQ ID NO: 213398 - DNA, 25 bp, Probe sequence
ggtgatgacacaccattaggtgaat

SEQ ID NO: 213399 - DNA, 25 bp, Probe sequence
ggcactatcagttttcaaccaattc

SEQ ID NO: 213400 - DNA, 25 bp, Probe sequence
tcgaacaaatccatgtcctgaaagc

SEQ ID NO: 213401 - DNA, 25 bp, Probe sequence
tcagttttcaaccaattcacaaatg

SEQ ID NO: 213402 - DNA, 25 bp, Probe sequence
tatgcaaagttttcttggtgatgac

SEQ ID NO: 213403 - DNA, 25 bp, Probe sequence
tatcagttttcaaccaattcacaaa

SEQ ID NO: 213404 - DNA, 25 bp, Probe sequence
ttttcgaacaaatccatgtcctgaa

SEQ ID NO: 213405 - DNA, 25 bp, Probe sequence
ttgagcttttacgaatttatgcaaa

SEQ ID NO: 213406 - DNA, 25 bp, Probe sequence
attggtattacaatgcacgtaaatc

SEQ ID NO: 213407 - DNA, 25 bp, Probe sequence
atttgctgtcatgcaatcaactgca

SEQ ID NO: 213408 - DNA, 25 bp, Probe sequence
atatgcgactggtcgtacaccaaga

SEQ ID NO: 213409 - DNA, 25 bp, Probe sequence
atcaatcgcatgccgcagttaatta

SEQ ID NO: 213410 - DNA, 25 bp, Probe sequence
atggtgggcatttaaacgtcgcgca

SEQ ID NO: 213411 - DNA, 25 bp, Probe sequence
aaacctgtttctaatagatggggca

SEQ ID NO: 213412 - DNA, 25 bp, Probe sequence
aaaccaatgtacatggtgggcattt

SEQ ID NO: 213413 - DNA, 25 bp, Probe sequence
aactgcaggatattatggacatgtc

SEQ ID NO: 213414 - DNA, 25 bp, Probe sequence
aaggcagcacgtaactttaactata

SEQ ID NO: 213415 - DNA, 25 bp, Probe sequence
aatccgtcgaacaaacgcatcaatc

SEQ ID NO: 213416 - DNA, 25 bp, Probe sequence
aatacaatacacgtgtactaagcaa

SEQ ID NO: 213417 - DNA, 25 bp, Probe sequence
caaacgcatcaatcgcatgccgcag

SEQ ID NO: 213418 - DNA, 25 bp, Probe sequence
catttaaacgtcgcgcacaagtcgg

SEQ ID NO: 213419 - DNA, 25 bp, Probe sequence
cgcatgccgcagttaattattatag

SEQ ID NO: 213420 - DNA, 25 bp, Probe sequence
cgcatcaatcgcatgccgcagttaa

SEQ ID NO: 213421 - DNA, 25 bp, Probe sequence
ccgtcgaacaaacgcatcaatcgca

SEQ ID NO: 213422 - DNA, 25 bp, Probe sequence
gcgactggtcgtacaccaagaaaat

SEQ ID NO: 213423 - DNA, 25 bp, Probe sequence
gctgtcatgcaatcaactgcaggat

SEQ ID NO: 213424 - DNA, 25 bp, Probe sequence
gcaggatattatggacatgtcgcag

SEQ ID NO: 213425 - DNA, 25 bp, Probe sequence
gcagcacgtaactttaactatattt

SEQ ID NO: 213426 - DNA, 25 bp, Probe sequence
gcacgtaactttaactatatttact

SEQ ID NO: 213427 - DNA, 25 bp, Probe sequence
gaatacaacttttatcgcccattaa

SEQ ID NO: 213428 - DNA, 25 bp, Probe sequence
gacatgtcgcagttgttgaacaagt

SEQ ID NO: 213429 - DNA, 25 bp, Probe sequence
gtaaatcaaaatatgcgactggtcg

SEQ ID NO: 213430 - DNA, 25 bp, Probe sequence
gtactaagcaaaaaggcagcacgta

SEQ ID NO: 213431 - DNA, 25 bp, Probe sequence
gtacaccaagaaaatttgctgtcat

SEQ ID NO: 213432 - DNA, 25 bp, Probe sequence
ggtgggcatttaaacgtcgcgcaca

SEQ ID NO: 213433 - DNA, 25 bp, Probe sequence
ggcatttaaacgtcgcgcacaagtc

SEQ ID NO: 213434 - DNA, 25 bp, Probe sequence
tgggcatttaaacgtcgcgcacaag

SEQ ID NO: 213435 - DNA, 25 bp, Probe sequence
tacaacttttatcgcccattaaaat

SEQ ID NO: 213436 - DNA, 25 bp, Probe sequence
tatggacatgtcgcagttgttgaac

SEQ ID NO: 213437 - DNA, 25 bp, Probe sequence
tatcgcccattaaaatacaatacac

SEQ ID NO: 213438 - DNA, 25 bp, Probe sequence
tatcaatccgtcgaacaaacgcatc

SEQ ID NO: 213439 - DNA, 25 bp, Probe sequence
ttcagaatacaacttttatcgccca

SEQ ID NO: 213440 - DNA, 25 bp, Probe sequence
atgaagatgctgttgcttacactga

SEQ ID NO: 213441 - DNA, 25 bp, Probe sequence
atgatttctggcgtccaactggaca

SEQ ID NO: 213442 - DNA, 25 bp, Probe sequence
atggattgaattcaggcggcgagcc

SEQ ID NO: 213443 - DNA, 25 bp, Probe sequence
agatcgtcatattttctacttatca

SEQ ID NO: 213444 - DNA, 25 bp, Probe sequence
agctggaatgaatacgcaaaacgtc

SEQ ID NO: 213445 - DNA, 25 bp, Probe sequence
acgtttatgatttctggcgtccaac

SEQ ID NO: 213446 - DNA, 25 bp, Probe sequence
acagatacagcacgttatggattga

SEQ ID NO: 213447 - DNA, 25 bp, Probe sequence
aaaggcattagagtcaatcattgat

SEQ ID NO: 213448 - DNA, 25 bp, Probe sequence
aaagatgcttatatccgctcattcc

SEQ ID NO: 213449 - DNA, 25 bp, Probe sequence
aactcaagagcgtttacgttcagga

SEQ ID NO: 213450 - DNA, 25 bp, Probe sequence
aagacatcgtttcaatgggcgctaa

SEQ ID NO: 213451 - DNA, 25 bp, Probe sequence
aagatgctgttcatgaagatcgtca

SEQ ID NO: 213452 - DNA, 25 bp, Probe sequence
aattagcagaagcacgccaagtaga

SEQ ID NO: 213453 - DNA, 25 bp, Probe sequence
cacaaggtgctggcgcagttgcgat

SEQ ID NO: 213454 - DNA, 25 bp, Probe sequence
cacataatccaagcattttggcatt

SEQ ID NO: 213455 - DNA, 25 bp, Probe sequence
caggcggcgagccaacacaaggtgc

SEQ ID NO: 213456 - DNA, 25 bp, Probe sequence
ctatgcttccatgttccatttacaa

SEQ ID NO: 213457 - DNA, 25 bp, Probe sequence
ctgaaatggctgttagtcctgtaaa

SEQ ID NO: 213458 - DNA, 25 bp, Probe sequence
ccgtactgaagtatctgttgatgca

SEQ ID NO: 213459 - DNA, 25 bp, Probe sequence
gctgttgcttacactgaagacgttt

SEQ ID NO: 213460 - DNA, 25 bp, Probe sequence
gcagccgctgttcaaattcacaact

SEQ ID NO: 213461 - DNA, 25 bp, Probe sequence
gaagcttgttatgctgcaacaccag

SEQ ID NO: 213462 - DNA, 25 bp, Probe sequence
gatgctgtagattataaccgttatg

SEQ ID NO: 213463 - DNA, 25 bp, Probe sequence
gatgctgctaaagcagccgctgttc

SEQ ID NO: 213464 - DNA, 25 bp, Probe sequence
gataacgctgatgaaacaactcaag

SEQ ID NO: 213465 - DNA, 25 bp, Probe sequence
gattatttagcaactagaccgaatg

SEQ ID NO: 213466 - DNA, 25 bp, Probe sequence
gtaattgtggcaactgaatcagcag

SEQ ID NO: 213467 - DNA, 25 bp, Probe sequence
gtgctggcgcagttgcgatggttat

SEQ ID NO: 213468 - DNA, 25 bp, Probe sequence
tgaaacattcttcaaacgttttgat

SEQ ID NO: 213469 - DNA, 25 bp, Probe sequence
tactggatcattatatttaagccta

SEQ ID NO: 213470 - DNA, 25 bp, Probe sequence
tatccgctcattccaacaaagctgg

SEQ ID NO: 213471 - DNA, 25 bp, Probe sequence
tattaggtattcaaccttttgcacg

SEQ ID NO: 213472 - DNA, 25 bp, Probe sequence
tttaagcctaatatcattacttgaa

SEQ ID NO: 213473 - DNA, 25 bp, Probe sequence
ttcagttatggctcaggttcagttg

SEQ ID NO: 213474 - DNA, 25 bp, Probe sequence
attccttaaccgcttcaacggcatc

SEQ ID NO: 213475 - DNA, 25 bp, Probe sequence
atcaaatgctggctttggcaatggc

SEQ ID NO: 213476 - DNA, 25 bp, Probe sequence
atcgttgaattcttacatttagata

SEQ ID NO: 213477 - DNA, 25 bp, Probe sequence
atgaaaaaattcttccgccctgaat

SEQ ID NO: 213478 - DNA, 25 bp, Probe sequence
agatgcgaaagattggttaattgaa

SEQ ID NO: 213479 - DNA, 25 bp, Probe sequence
aaatgctggctttggcaatggcaat

SEQ ID NO: 213480 - DNA, 25 bp, Probe sequence
aaatgattggtacaactgctggtta

SEQ ID NO: 213481 - DNA, 25 bp, Probe sequence
aacggcatcgttgaattcttacatt

SEQ ID NO: 213482 - DNA, 25 bp, Probe sequence
gaattccttaaccgcttcaacggca

SEQ ID NO: 213483 - DNA, 25 bp, Probe sequence
caaagtgcgcaagcttttcaacaag

SEQ ID NO: 213484 - DNA, 25 bp, Probe sequence
cagacgttaaacatgtggatataga

SEQ ID NO: 213485 - DNA, 25 bp, Probe sequence
cttaaccgcttcaacggcatcgttg

SEQ ID NO: 213486 - DNA, 25 bp, Probe sequence
gcgcaagcttttcaacaagcagcac

SEQ ID NO: 213487 - DNA, 25 bp, Probe sequence
gaagtgattcaggtagcaaagggtt

SEQ ID NO: 213488 - DNA, 25 bp, Probe sequence
gaacaaagtgcgcaagcttttcaac

SEQ ID NO: 213489 - DNA, 25 bp, Probe sequence
gaaatgaaaaaattcttccgccctg

SEQ ID NO: 213490 - DNA, 25 bp, Probe sequence
gactgatggtcaaggtaatgtcatc

SEQ ID NO: 213491 - DNA, 25 bp, Probe sequence
gatgatggtaatttgactgatggtc

SEQ ID NO: 213492 - DNA, 25 bp, Probe sequence
gatgttgaggataacgaattagtcg

SEQ ID NO: 213493 - DNA, 25 bp, Probe sequence
gatcatacagacgttaaacatgtgg

SEQ ID NO: 213494 - DNA, 25 bp, Probe sequence
gtagcaaagggttatctgatatttt

SEQ ID NO: 213495 - DNA, 25 bp, Probe sequence
gtacatcaaatgctggctttggcaa

SEQ ID NO: 213496 - DNA, 25 bp, Probe sequence
gtgcgcaagcttttcaacaagcagc

SEQ ID NO: 213497 - DNA, 25 bp, Probe sequence
ggtgccacaggaagtgattcaggta

SEQ ID NO: 213498 - DNA, 25 bp, Probe sequence
ggtcaaggtaatgtcatcaacttta

SEQ ID NO: 213499 - DNA, 25 bp, Probe sequence
ggtaatgtcatcaactttaaaaata

SEQ ID NO: 213500 - DNA, 25 bp, Probe sequence
tccttaaccgcttcaacggcatcgt

SEQ ID NO: 213501 - DNA, 25 bp, Probe sequence
ggcatcgttgaattcttacatttag

SEQ ID NO: 213502 - DNA, 25 bp, Probe sequence
tgattggtacaactgctggttatgt

SEQ ID NO: 213503 - DNA, 25 bp, Probe sequence
tgaaaaaattcttccgccctgaatt

SEQ ID NO: 213504 - DNA, 25 bp, Probe sequence
tgaattccttaaccgcttcaacggc

SEQ ID NO: 213505 - DNA, 25 bp, Probe sequence
tgctggctttggcaatggcaatgac

SEQ ID NO: 213506 - DNA, 25 bp, Probe sequence
tagacgatgtacaagttacattaga

SEQ ID NO: 213507 - DNA, 25 bp, Probe sequence
ttgtacatcaaatgctggctttggc

SEQ ID NO: 213508 - DNA, 25 bp, Probe sequence
atgcaaacagtaatttagaaacaag

SEQ ID NO: 213509 - DNA, 25 bp, Probe sequence
agttgcagagttgcttaaagagatt

SEQ ID NO: 213510 - DNA, 25 bp, Probe sequence
agttgcttaaagagattaatcgata

SEQ ID NO: 213511 - DNA, 25 bp, Probe sequence
agagttgcttaaagagattaatcga

SEQ ID NO: 213512 - DNA, 25 bp, Probe sequence
agaaacaagaaacaaccctgaactg

SEQ ID NO: 213513 - DNA, 25 bp, Probe sequence
actcaatttactaaaacatgcaaac

SEQ ID NO: 213514 - DNA, 25 bp, Probe sequence
actaaaacatgcaaacagtaattta

SEQ ID NO: 213515 - DNA, 25 bp, Probe sequence
acatgcaaacagtaatttagaaaca

SEQ ID NO: 213516 - DNA, 25 bp, Probe sequence
acaagaaacaaccctgaactgttgc

SEQ ID NO: 213517 - DNA, 25 bp, Probe sequence
aaactcaatttactaaaacatgcaa

SEQ ID NO: 213518 - DNA, 25 bp, Probe sequence
aaacatgcaaacagtaatttagaaa

SEQ ID NO: 213519 - DNA, 25 bp, Probe sequence
aaaacatgcaaacagtaatttagaa

SEQ ID NO: 213520 - DNA, 25 bp, Probe sequence
aaaactcaatttactaaaacatgca

SEQ ID NO: 213521 - DNA, 25 bp, Probe sequence
aacaagaaacaaccctgaactgttg

SEQ ID NO: 213522 - DNA, 25 bp, Probe sequence
aacatgcaaacagtaatttagaaac

SEQ ID NO: 213523 - DNA, 25 bp, Probe sequence
aactcaatttactaaaacatgcaaa

SEQ ID NO: 213524 - DNA, 25 bp, Probe sequence
aatttactaaaacatgcaaacagta

SEQ ID NO: 213525 - DNA, 25 bp, Probe sequence
caatttactaaaacatgcaaacagt

SEQ ID NO: 213526 - DNA, 25 bp, Probe sequence
caagaaacaaccctgaactgttgcg

SEQ ID NO: 213527 - DNA, 25 bp, Probe sequence
cagagttgcttaaagagattaatcg

SEQ ID NO: 213528 - DNA, 25 bp, Probe sequence
cagttgcagagttgcttaaagagat

SEQ ID NO: 213529 - DNA, 25 bp, Probe sequence
catgcaaacagtaatttagaaacaa

SEQ ID NO: 213530 - DNA, 25 bp, Probe sequence
ctcaatttactaaaacatgcaaaca

SEQ ID NO: 213531 - DNA, 25 bp, Probe sequence
gcagttgcagagttgcttaaagaga

SEQ ID NO: 213532 - DNA, 25 bp, Probe sequence
gcagagttgcttaaagagattaatc

SEQ ID NO: 213533 - DNA, 25 bp, Probe sequence
gaaacaagaaacaaccctgaactgt

SEQ ID NO: 213534 - DNA, 25 bp, Probe sequence
gagttgcttaaagagattaatcgat

SEQ ID NO: 213535 - DNA, 25 bp, Probe sequence
gttgcttaaagagattaatcgataa

SEQ ID NO: 213536 - DNA, 25 bp, Probe sequence
gttgcagagttgcttaaagagatta

SEQ ID NO: 213537 - DNA, 25 bp, Probe sequence
tgcaaacagtaatttagaaacaaga

SEQ ID NO: 213538 - DNA, 25 bp, Probe sequence
tgcagagttgcttaaagagattaat

SEQ ID NO: 213539 - DNA, 25 bp, Probe sequence
tcaatttactaaaacatgcaaacag

SEQ ID NO: 213540 - DNA, 25 bp, Probe sequence
tagaaacaagaaacaaccctgaact

SEQ ID NO: 213541 - DNA, 25 bp, Probe sequence
ttgcagagttgcttaaagagattaa

SEQ ID NO: 213542 - DNA, 25 bp, Probe sequence
attaattacaggcacagttgctatc

SEQ ID NO: 213543 - DNA, 25 bp, Probe sequence
attacaggcacagttgctatcttaa

SEQ ID NO: 213544 - DNA, 25 bp, Probe sequence
atattaattacaggcacagttgcta

SEQ ID NO: 213545 - DNA, 25 bp, Probe sequence
ataaagtcatccatcttaataattt

SEQ ID NO: 213546 - DNA, 25 bp, Probe sequence
atgcgaaagaatttaacccatctga

SEQ ID NO: 213547 - DNA, 25 bp, Probe sequence
atgagaatattaattacaggcacag

SEQ ID NO: 213548 - DNA, 25 bp, Probe sequence
agtcgtcagttgtcagacaacaaag

SEQ ID NO: 213549 - DNA, 25 bp, Probe sequence
agaatttaacccatctgatttcttt

SEQ ID NO: 213550 - DNA, 25 bp, Probe sequence
agaatattaattacaggcacagttg

SEQ ID NO: 213551 - DNA, 25 bp, Probe sequence
acatgcgaaagaatttaacccatct

SEQ ID NO: 213552 - DNA, 25 bp, Probe sequence
aaagaatttaacccatctgatttct

SEQ ID NO: 213553 - DNA, 25 bp, Probe sequence
aagaatttaacccatctgatttctt

SEQ ID NO: 213554 - DNA, 25 bp, Probe sequence
aatattaattacaggcacagttgct

SEQ ID NO: 213555 - DNA, 25 bp, Probe sequence
aattacaggcacagttgctatctta

SEQ ID NO: 213556 - DNA, 25 bp, Probe sequence
catgcgaaagaatttaacccatctg

SEQ ID NO: 213557 - DNA, 25 bp, Probe sequence
cgaaagaatttaacccatctgattt

SEQ ID NO: 213558 - DNA, 25 bp, Probe sequence
gcgaaagaatttaacccatctgatt

SEQ ID NO: 213559 - DNA, 25 bp, Probe sequence
gaatttaacccatctgatttctttt

SEQ ID NO: 213560 - DNA, 25 bp, Probe sequence
gaatattaattacaggcacagttgc

SEQ ID NO: 213561 - DNA, 25 bp, Probe sequence
gaaagaatttaacccatctgatttc

SEQ ID NO: 213562 - DNA, 25 bp, Probe sequence
gagaatattaattacaggcacagtt

SEQ ID NO: 213563 - DNA, 25 bp, Probe sequence
gataaagtcatccatcttaataatt

SEQ ID NO: 213564 - DNA, 25 bp, Probe sequence
gtcagttgtcagacaacaaagatga

SEQ ID NO: 213565 - DNA, 25 bp, Probe sequence
gtcgtcagttgtcagacaacaaaga

SEQ ID NO: 213566 - DNA, 25 bp, Probe sequence
tgagaatattaattacaggcacagt

SEQ ID NO: 213567 - DNA, 25 bp, Probe sequence
tgcgaaagaatttaacccatctgat

SEQ ID NO: 213568 - DNA, 25 bp, Probe sequence
tcgtcagttgtcagacaacaaagat

SEQ ID NO: 213569 - DNA, 25 bp, Probe sequence
taattacaggcacagttgctatctt

SEQ ID NO: 213570 - DNA, 25 bp, Probe sequence
tacatgcgaaagaatttaacccatc

SEQ ID NO: 213571 - DNA, 25 bp, Probe sequence
ttacatgcgaaagaatttaacccat

SEQ ID NO: 213572 - DNA, 25 bp, Probe sequence
tattaattacaggcacagttgctat

SEQ ID NO: 213573 - DNA, 25 bp, Probe sequence
tttacatgcgaaagaatttaaccca

SEQ ID NO: 213574 - DNA, 25 bp, Probe sequence
ttacaggcacagttgctatcttaat

SEQ ID NO: 213575 - DNA, 25 bp, Probe sequence
ttaattacaggcacagttgctatct

SEQ ID NO: 213576 - DNA, 25 bp, Probe sequence
attaacttatctagcatggtcatat

SEQ ID NO: 213577 - DNA, 25 bp, Probe sequence
atatgcacatcaagagttaaaaaag

SEQ ID NO: 213578 - DNA, 25 bp, Probe sequence
atctagcatggtcatatgcacatca

SEQ ID NO: 213579 - DNA, 25 bp, Probe sequence
agcatggtcatatgcacatcaagag

SEQ ID NO: 213580 - DNA, 25 bp, Probe sequence
acggattaacttatctagcatggtc

SEQ ID NO: 213581 - DNA, 25 bp, Probe sequence
acttatctagcatggtcatatgcac

SEQ ID NO: 213582 - DNA, 25 bp, Probe sequence
aaacggattaacttatctagcatgg

SEQ ID NO: 213583 - DNA, 25 bp, Probe sequence
aaaaacggattaacttatctagcat

SEQ ID NO: 213584 - DNA, 25 bp, Probe sequence
aaaacggattaacttatctagcatg

SEQ ID NO: 213585 - DNA, 25 bp, Probe sequence
aaaacgtgaatgatcatacagaaca

SEQ ID NO: 213586 - DNA, 25 bp, Probe sequence
aacttatctagcatggtcatatgca

SEQ ID NO: 213587 - DNA, 25 bp, Probe sequence
aacattatttgaacagttgaacagt

SEQ ID NO: 213588 - DNA, 25 bp, Probe sequence
aacgtgaatgatcatacagaacaaa

SEQ ID NO: 213589 - DNA, 25 bp, Probe sequence
aacggattaacttatctagcatggt

SEQ ID NO: 213590 - DNA, 25 bp, Probe sequence
cttatctagcatggtcatatgcaca

SEQ ID NO: 213591 - DNA, 25 bp, Probe sequence
ctagcatggtcatatgcacatcaag

SEQ ID NO: 213592 - DNA, 25 bp, Probe sequence
cggattaacttatctagcatggtca

SEQ ID NO: 213593 - DNA, 25 bp, Probe sequence
atggtcatatgcacatcaagagtta

SEQ ID NO: 213594 - DNA, 25 bp, Probe sequence
gcatggtcatatgcacatcaagagt

SEQ ID NO: 213595 - DNA, 25 bp, Probe sequence
gaacagttgaacagtaaaaacgtga

SEQ ID NO: 213596 - DNA, 25 bp, Probe sequence
gaacagtaaaaacgtgaatgatcat

SEQ ID NO: 213597 - DNA, 25 bp, Probe sequence
gactgaacaaacattatttgaacag

SEQ ID NO: 213598 - DNA, 25 bp, Probe sequence
gattaacttatctagcatggtcata

SEQ ID NO: 213599 - DNA, 25 bp, Probe sequence
gtcatatgcacatcaagagttaaaa

SEQ ID NO: 213600 - DNA, 25 bp, Probe sequence
gtgaatgatcatacagaacaaaaaa

SEQ ID NO: 213601 - DNA, 25 bp, Probe sequence
ggtcatatgcacatcaagagttaaa

SEQ ID NO: 213602 - DNA, 25 bp, Probe sequence
ggattaacttatctagcatggtcat

SEQ ID NO: 213603 - DNA, 25 bp, Probe sequence
tggtcatatgcacatcaagagttaa

SEQ ID NO: 213604 - DNA, 25 bp, Probe sequence
tctagcatggtcatatgcacatcaa

SEQ ID NO: 213605 - DNA, 25 bp, Probe sequence
tcatatgcacatcaagagttaaaaa

SEQ ID NO: 213606 - DNA, 25 bp, Probe sequence
tagcatggtcatatgcacatcaaga

SEQ ID NO: 213607 - DNA, 25 bp, Probe sequence
tatctagcatggtcatatgcacatc

SEQ ID NO: 213608 - DNA, 25 bp, Probe sequence
ttatctagcatggtcatatgcacat

SEQ ID NO: 213609 - DNA, 25 bp, Probe sequence
ttaacttatctagcatggtcatatg

SEQ ID NO: 213610 - DNA, 25 bp, Probe sequence
attatggtaggtactggtcgcgctg

SEQ ID NO: 213611 - DNA, 25 bp, Probe sequence
atttctggttatttcgttcctatcg

SEQ ID NO: 213612 - DNA, 25 bp, Probe sequence
ataccagcactatttacgaatccat

SEQ ID NO: 213613 - DNA, 25 bp, Probe sequence
atcactggtatgacttgtgccgcat

SEQ ID NO: 213614 - DNA, 25 bp, Probe sequence
aggtatgactgccatcgacgaatct

SEQ ID NO: 213615 - DNA, 25 bp, Probe sequence
agaaccacgccgtaaagatgcctag

SEQ ID NO: 213616 - DNA, 25 bp, Probe sequence
agcaaccattcgtaatattcgtcaa

SEQ ID NO: 213617 - DNA, 25 bp, Probe sequence
acgtcacgcaaagctgaagcgctac

SEQ ID NO: 213618 - DNA, 25 bp, Probe sequence
actggtatcatcgcagtggcagata

SEQ ID NO: 213619 - DNA, 25 bp, Probe sequence
aaatctattttgggcattcggctat

SEQ ID NO: 213620 - DNA, 25 bp, Probe sequence
aaaacactgctcaagccattgcaaa

SEQ ID NO: 213621 - DNA, 25 bp, Probe sequence
ctgaacacccattggcagaagccat

SEQ ID NO: 213622 - DNA, 25 bp, Probe sequence
ctcaaagttctaaagcgccgattca

SEQ ID NO: 213623 - DNA, 25 bp, Probe sequence
cgaagtctcaaacaaccaatgcgct

SEQ ID NO: 213624 - DNA, 25 bp, Probe sequence
gccatgggttgctggtgctgcaatg

SEQ ID NO: 213625 - DNA, 25 bp, Probe sequence
gcacttgttgcgagtatttccgttc

SEQ ID NO: 213626 - DNA, 25 bp, Probe sequence
gctgataaacttgtcactcgcattc

SEQ ID NO: 213627 - DNA, 25 bp, Probe sequence
gcaactgttgagtataaccctgatc

SEQ ID NO: 213628 - DNA, 25 bp, Probe sequence
gaaatggttcgttggctaaatggct

SEQ ID NO: 213629 - DNA, 25 bp, Probe sequence
gacttgctacaccaacttctattat

SEQ ID NO: 213630 - DNA, 25 bp, Probe sequence
gatattactattcttggtggcgact

SEQ ID NO: 213631 - DNA, 25 bp, Probe sequence
gatgcacctgcattagttaaagctg

SEQ ID NO: 213632 - DNA, 25 bp, Probe sequence
gttcctatcgttgttggtatcgcac

SEQ ID NO: 213633 - DNA, 25 bp, Probe sequence
gatatcggtatcgccattggtacag

SEQ ID NO: 213634 - DNA, 25 bp, Probe sequence
gtgccgcatgttcaaatcgtatcga

SEQ ID NO: 213635 - DNA, 25 bp, Probe sequence
ggtgaatctatccctgttgagaaga

SEQ ID NO: 213636 - DNA, 25 bp, Probe sequence
ggtacatttgaacctgcacttgttg

SEQ ID NO: 213637 - DNA, 25 bp, Probe sequence
ggttgcgatggttggtgacggtgta

SEQ ID NO: 213638 - DNA, 25 bp, Probe sequence
ggcgagtttgttgaacgcacacatc

SEQ ID NO: 213639 - DNA, 25 bp, Probe sequence
tggtggcgacttgatgcttattcct

SEQ ID NO: 213640 - DNA, 25 bp, Probe sequence
tgacttgtgctgcatgctcaagccg

SEQ ID NO: 213641 - DNA, 25 bp, Probe sequence
taatattgccggtatccctatagct

SEQ ID NO: 213642 - DNA, 25 bp, Probe sequence
tatggatgtacttgttgctgttggt

SEQ ID NO: 213643 - DNA, 25 bp, Probe sequence
ttccaatttattttagctacacctg

SEQ ID NO: 213644 - DNA, 25 bp, Probe sequence
atattgacggtgtcacttcagctga

SEQ ID NO: 213645 - DNA, 25 bp, Probe sequence
atgagctgtggtcactgcaaaagtg

SEQ ID NO: 213646 - DNA, 25 bp, Probe sequence
aggtatgagctgtggtcactgcaaa

SEQ ID NO: 213647 - DNA, 25 bp, Probe sequence
agtgctgttgaatctgcattaaata

SEQ ID NO: 213648 - DNA, 25 bp, Probe sequence
agatcaaggttacgatgtcgtttaa

SEQ ID NO: 213649 - DNA, 25 bp, Probe sequence
aaagtgctgttgaatctgcattaaa

SEQ ID NO: 213650 - DNA, 25 bp, Probe sequence
aaagttgctgtatctcaaatgaaag

SEQ ID NO: 213651 - DNA, 25 bp, Probe sequence
aaggtatgagctgtggtcactgcaa

SEQ ID NO: 213652 - DNA, 25 bp, Probe sequence
aatggtcaagtaagtgttcaatatg

SEQ ID NO: 213653 - DNA, 25 bp, Probe sequence
aatgttgaaggtatgagctgtggtc

SEQ ID NO: 213654 - DNA, 25 bp, Probe sequence
aatattgacggtgtcacttcagctg

SEQ ID NO: 213655 - DNA, 25 bp, Probe sequence
cactgcaaaagtgctgttgaatctg

SEQ ID NO: 213656 - DNA, 25 bp, Probe sequence
gctgtggtcactgcaaaagtgctgt

SEQ ID NO: 213657 - DNA, 25 bp, Probe sequence
gctgtatctcaaatgaaagacgcaa

SEQ ID NO: 213658 - DNA, 25 bp, Probe sequence
gctgttgaatctgcattaaataata

SEQ ID NO: 213659 - DNA, 25 bp, Probe sequence
gcaaaagtgctgttgaatctgcatt

SEQ ID NO: 213660 - DNA, 25 bp, Probe sequence
gaaggtatgagctgtggtcactgca

SEQ ID NO: 213661 - DNA, 25 bp, Probe sequence
gaatctgcattaaataatattgacg

SEQ ID NO: 213662 - DNA, 25 bp, Probe sequence
gaagatcaaggttacgatgtcgttt

SEQ ID NO: 213663 - DNA, 25 bp, Probe sequence
gacagtaaagttgctgtatctcaaa

SEQ ID NO: 213664 - DNA, 25 bp, Probe sequence
gagctgtggtcactgcaaaagtgct

SEQ ID NO: 213665 - DNA, 25 bp, Probe sequence
gacgcaattgaagatcaaggttacg

SEQ ID NO: 213666 - DNA, 25 bp, Probe sequence
gatgacagtaaagttgctgtatctc

SEQ ID NO: 213667 - DNA, 25 bp, Probe sequence
gttgaaggtatgagctgtggtcact

SEQ ID NO: 213668 - DNA, 25 bp, Probe sequence
gttgctgtatctcaaatgaaagacg

SEQ ID NO: 213669 - DNA, 25 bp, Probe sequence
gtatctcaaatgaaagacgcaattg

SEQ ID NO: 213670 - DNA, 25 bp, Probe sequence
gtatgagctgtggtcactgcaaaag

SEQ ID NO: 213671 - DNA, 25 bp, Probe sequence
gtaaagttgctgtatctcaaatgaa

SEQ ID NO: 213672 - DNA, 25 bp, Probe sequence
gtaagtgttcaatatgatgacagta

SEQ ID NO: 213673 - DNA, 25 bp, Probe sequence
gtggtcactgcaaaagtgctgttga

SEQ ID NO: 213674 - DNA, 25 bp, Probe sequence
ggtcactgcaaaagtgctgttgaat

SEQ ID NO: 213675 - DNA, 25 bp, Probe sequence
ggtatgagctgtggtcactgcaaaa

SEQ ID NO: 213676 - DNA, 25 bp, Probe sequence
tgaaggtatgagctgtggtcactgc

SEQ ID NO: 213677 - DNA, 25 bp, Probe sequence
tatgagctgtggtcactgcaaaagt

SEQ ID NO: 213678 - DNA, 25 bp, Probe sequence
atataccgataaattgacacaaaat

SEQ ID NO: 213679 - DNA, 25 bp, Probe sequence
atatcaacattcaccatttgatggt

SEQ ID NO: 213680 - DNA, 25 bp, Probe sequence
ataatgtcaaagtaggtgatcgagt

SEQ ID NO: 213681 - DNA, 25 bp, Probe sequence
atcataaaggacaaggacactcaaa

SEQ ID NO: 213682 - DNA, 25 bp, Probe sequence
atgacaaagcgaccaaaacgtattt

SEQ ID NO: 213683 - DNA, 25 bp, Probe sequence
atggagaatatcaccagtggtatct

SEQ ID NO: 213684 - DNA, 25 bp, Probe sequence
aggcgcacatttacattttcaaaga

SEQ ID NO: 213685 - DNA, 25 bp, Probe sequence
acctgatggggaacgtagcctatat

SEQ ID NO: 213686 - DNA, 25 bp, Probe sequence
acattcaccatttgatggtaagcat

SEQ ID NO: 213687 - DNA, 25 bp, Probe sequence
acaaacgacaggcgcacatttacat

SEQ ID NO: 213688 - DNA, 25 bp, Probe sequence
acaattatcatttttctttcactat

SEQ ID NO: 213689 - DNA, 25 bp, Probe sequence
aaacgtattttggcaacaattatca

SEQ ID NO: 213690 - DNA, 25 bp, Probe sequence
aacgacaggcgcacatttacatttt

SEQ ID NO: 213691 - DNA, 25 bp, Probe sequence
aagaatgaagggtggcgtaggtaat

SEQ ID NO: 213692 - DNA, 25 bp, Probe sequence
aagcaggtgatattattgcatattc

SEQ ID NO: 213693 - DNA, 25 bp, Probe sequence
aagtaacacgtatctttaataatga

SEQ ID NO: 213694 - DNA, 25 bp, Probe sequence
caccaattaaagcgccgacgaatgg

SEQ ID NO: 213695 - DNA, 25 bp, Probe sequence
cagttacctgatggggaacgtagcc

SEQ ID NO: 213696 - DNA, 25 bp, Probe sequence
catttttctttcactattatttacg

SEQ ID NO: 213697 - DNA, 25 bp, Probe sequence
ctttcactattatttacgattattt

SEQ ID NO: 213698 - DNA, 25 bp, Probe sequence
gcgccgacgaatggtaaagtaacac

SEQ ID NO: 213699 - DNA, 25 bp, Probe sequence
gcaaggtattacagattgccgaaga

SEQ ID NO: 213700 - DNA, 25 bp, Probe sequence
gaatatcaccagtggtatctacact

SEQ ID NO: 213701 - DNA, 25 bp, Probe sequence
gacaggcgcacatttacattttcaa

SEQ ID NO: 213702 - DNA, 25 bp, Probe sequence
ggtacaccaattaaagcgccgacga

SEQ ID NO: 213703 - DNA, 25 bp, Probe sequence
gtggtatctacacttagacaaatat

SEQ ID NO: 213704 - DNA, 25 bp, Probe sequence
gggaacgtagcctatatgatttgta

SEQ ID NO: 213705 - DNA, 25 bp, Probe sequence
ggtggcgtaggtaatgcatatgcag

SEQ ID NO: 213706 - DNA, 25 bp, Probe sequence
ggtgatattattgcatattcaggca

SEQ ID NO: 213707 - DNA, 25 bp, Probe sequence
ggcaacaattatcatttttctttca

SEQ ID NO: 213708 - DNA, 25 bp, Probe sequence
tggtttaaccaatataccgataaat

SEQ ID NO: 213709 - DNA, 25 bp, Probe sequence
tcaccagtggtatctacacttagac

SEQ ID NO: 213710 - DNA, 25 bp, Probe sequence
tttgcattgccaaaaggtacaccaa

SEQ ID NO: 213711 - DNA, 25 bp, Probe sequence
ttatcatttttctttcactattatt

SEQ ID NO: 213712 - DNA, 25 bp, Probe sequence
attggcaatttttcaaacatattgt

SEQ ID NO: 213713 - DNA, 25 bp, Probe sequence
atattgttacaatacacttttattt

SEQ ID NO: 213714 - DNA, 25 bp, Probe sequence
atacacttttattttatcttcattt

SEQ ID NO: 213715 - DNA, 25 bp, Probe sequence
atcttcatttttaaaatccattaat

SEQ ID NO: 213716 - DNA, 25 bp, Probe sequence
aggtacattatttgttaggagcgta

SEQ ID NO: 213717 - DNA, 25 bp, Probe sequence
agacattcaaatgcttaccaaaaag

SEQ ID NO: 213718 - DNA, 25 bp, Probe sequence
agaaagacattcaaatgcttaccaa

SEQ ID NO: 213719 - DNA, 25 bp, Probe sequence
acattcaaatgcttaccaaaaaggt

SEQ ID NO: 213720 - DNA, 25 bp, Probe sequence
acaatacacttttattttatcttca

SEQ ID NO: 213721 - DNA, 25 bp, Probe sequence
aaaggtacattatttgttaggagcg

SEQ ID NO: 213722 - DNA, 25 bp, Probe sequence
aaagacattcaaatgcttaccaaaa

SEQ ID NO: 213723 - DNA, 25 bp, Probe sequence
aagacattcaaatgcttaccaaaaa

SEQ ID NO: 213724 - DNA, 25 bp, Probe sequence
aaggtacattatttgttaggagcgt

SEQ ID NO: 213725 - DNA, 25 bp, Probe sequence
aatgcttaccaaaaaggtacattat

SEQ ID NO: 213726 - DNA, 25 bp, Probe sequence
aatacacttttattttatcttcatt

SEQ ID NO: 213727 - DNA, 25 bp, Probe sequence
aattggcaatttttcaaacatattg

SEQ ID NO: 213728 - DNA, 25 bp, Probe sequence
caatacacttttattttatcttcat

SEQ ID NO: 213729 - DNA, 25 bp, Probe sequence
cattcaaatgcttaccaaaaaggta

SEQ ID NO: 213730 - DNA, 25 bp, Probe sequence
gcaatttttcaaacatattgttaca

SEQ ID NO: 213731 - DNA, 25 bp, Probe sequence
gaagaaagacattcaaatgcttacc

SEQ ID NO: 213732 - DNA, 25 bp, Probe sequence
gaaagacattcaaatgcttaccaaa

SEQ ID NO: 213733 - DNA, 25 bp, Probe sequence
gacattcaaatgcttaccaaaaagg

SEQ ID NO: 213734 - DNA, 25 bp, Probe sequence
gttacaatacacttttattttatct

SEQ ID NO: 213735 - DNA, 25 bp, Probe sequence
gtacattatttgttaggagcgtatc

SEQ ID NO: 213736 - DNA, 25 bp, Probe sequence
ggtacattatttgttaggagcgtat

SEQ ID NO: 213737 - DNA, 25 bp, Probe sequence
ggcaatttttcaaacatattgttac

SEQ ID NO: 213738 - DNA, 25 bp, Probe sequence
tacaatacacttttattttatcttc

SEQ ID NO: 213739 - DNA, 25 bp, Probe sequence
tacacttttattttatcttcatttt

SEQ ID NO: 213740 - DNA, 25 bp, Probe sequence
tacattatttgttaggagcgtatca

SEQ ID NO: 213741 - DNA, 25 bp, Probe sequence
tattgttacaatacacttttatttt

SEQ ID NO: 213742 - DNA, 25 bp, Probe sequence
tttatcttcatttttaaaatccatt

SEQ ID NO: 213743 - DNA, 25 bp, Probe sequence
ttatcttcatttttaaaatccatta

SEQ ID NO: 213744 - DNA, 25 bp, Probe sequence
ttcatttttaaaatccattaataca

SEQ ID NO: 213745 - DNA, 25 bp, Probe sequence
ttgttacaatacacttttattttat

SEQ ID NO: 213746 - DNA, 25 bp, Probe sequence
atattaaccccatttctagagcaag

SEQ ID NO: 213747 - DNA, 25 bp, Probe sequence
agtagcaacttacaatcctaaaact

SEQ ID NO: 213748 - DNA, 25 bp, Probe sequence
agaaaacgcactaatcacttatgat

SEQ ID NO: 213749 - DNA, 25 bp, Probe sequence
agaatcaatatctcaccctgttagc

SEQ ID NO: 213750 - DNA, 25 bp, Probe sequence
agcaacttgaatttggtgatgtaaa

SEQ ID NO: 213751 - DNA, 25 bp, Probe sequence
accatgcaatattaaccccatttct

SEQ ID NO: 213752 - DNA, 25 bp, Probe sequence
aaaagaatcaatatctcaccctgtt

SEQ ID NO: 213753 - DNA, 25 bp, Probe sequence
aaaacgatgtaagtgttctgaggat

SEQ ID NO: 213754 - DNA, 25 bp, Probe sequence
aaaacgcactaatcacttatgatgc

SEQ ID NO: 213755 - DNA, 25 bp, Probe sequence
aaccccatttctagagcaagaaagc

SEQ ID NO: 213756 - DNA, 25 bp, Probe sequence
aatggcattcgctacaagatagttg

SEQ ID NO: 213757 - DNA, 25 bp, Probe sequence
aatcacttatgatgcgataccatgc

SEQ ID NO: 213758 - DNA, 25 bp, Probe sequence
caccctgttagccacgtgttggtta

SEQ ID NO: 213759 - DNA, 25 bp, Probe sequence
cacttatgatgcgataccatgcaat

SEQ ID NO: 213760 - DNA, 25 bp, Probe sequence
cacgtgttggttaatggcattcgct

SEQ ID NO: 213761 - DNA, 25 bp, Probe sequence
catgcaatattaaccccatttctag

SEQ ID NO: 213762 - DNA, 25 bp, Probe sequence
ctgttagccacgtgttggttaatgg

SEQ ID NO: 213763 - DNA, 25 bp, Probe sequence
ccctgttagccacgtgttggttaat

SEQ ID NO: 213764 - DNA, 25 bp, Probe sequence
gcgataccatgcaatattaacccca

SEQ ID NO: 213765 - DNA, 25 bp, Probe sequence
gcactaatcacttatgatgcgatac

SEQ ID NO: 213766 - DNA, 25 bp, Probe sequence
gcaacttacaatcctaaaactagca

SEQ ID NO: 213767 - DNA, 25 bp, Probe sequence
gcaatattaaccccatttctagagc

SEQ ID NO: 213768 - DNA, 25 bp, Probe sequence
gaacaagtagcaacttacaatccta

SEQ ID NO: 213769 - DNA, 25 bp, Probe sequence
gaaagcaacttgaatttggtgatgt

SEQ ID NO: 213770 - DNA, 25 bp, Probe sequence
gatgtaagtgttctgaggataaaag

SEQ ID NO: 213771 - DNA, 25 bp, Probe sequence
gatgcgataccatgcaatattaacc

SEQ ID NO: 213772 - DNA, 25 bp, Probe sequence
gataccatgcaatattaaccccatt

SEQ ID NO: 213773 - DNA, 25 bp, Probe sequence
gatagagttgtttttcaattagaac

SEQ ID NO: 213774 - DNA, 25 bp, Probe sequence
gttggttaatggcattcgctacaag

SEQ ID NO: 213775 - DNA, 25 bp, Probe sequence
gtgttggttaatggcattcgctaca

SEQ ID NO: 213776 - DNA, 25 bp, Probe sequence
ggttaatggcattcgctacaagata

SEQ ID NO: 213777 - DNA, 25 bp, Probe sequence
ggcattcgctacaagatagttgata

SEQ ID NO: 213778 - DNA, 25 bp, Probe sequence
tattaaccccatttctagagcaaga

SEQ ID NO: 213779 - DNA, 25 bp, Probe sequence
ttcgctacaagatagttgatacaag

SEQ ID NO: 213780 - DNA, 25 bp, Probe sequence
atttttaattcatcatatagcacat

SEQ ID NO: 213781 - DNA, 25 bp, Probe sequence
atcgcaaccttccatttttaattca

SEQ ID NO: 213782 - DNA, 25 bp, Probe sequence
atgtgtttatcgatcgcaaccttcc

SEQ ID NO: 213783 - DNA, 25 bp, Probe sequence
accttccatttttaattcatcatat

SEQ ID NO: 213784 - DNA, 25 bp, Probe sequence
acagccgatgtgtttatcgatcgca

SEQ ID NO: 213785 - DNA, 25 bp, Probe sequence
aaatcgtgcaacattttacgctcat

SEQ ID NO: 213786 - DNA, 25 bp, Probe sequence
aacaattgcttgtcgatgcttttct

SEQ ID NO: 213787 - DNA, 25 bp, Probe sequence
aagaagacctcctagactacacatt

SEQ ID NO: 213788 - DNA, 25 bp, Probe sequence
aagatgctgcaaagtcttgcgaatt

SEQ ID NO: 213789 - DNA, 25 bp, Probe sequence
aattcatcatatagcacatttttaa

SEQ ID NO: 213790 - DNA, 25 bp, Probe sequence
aattgcttgtcgatgcttttcttaa

SEQ ID NO: 213791 - DNA, 25 bp, Probe sequence
caaagcacatcaacgtattaataat

SEQ ID NO: 213792 - DNA, 25 bp, Probe sequence
caaagtcttgcgaattaaatagtga

SEQ ID NO: 213793 - DNA, 25 bp, Probe sequence
gcgagttatatcaaagatgctgcaa

SEQ ID NO: 213794 - DNA, 25 bp, Probe sequence
gcttgtcgatgcttttcttaaaatt

SEQ ID NO: 213795 - DNA, 25 bp, Probe sequence
gcattacattggtttaacacgagtc

SEQ ID NO: 213796 - DNA, 25 bp, Probe sequence
gcaaccttccatttttaattcatca

SEQ ID NO: 213797 - DNA, 25 bp, Probe sequence
gcaacaaagcacatcaacgtattaa

SEQ ID NO: 213798 - DNA, 25 bp, Probe sequence
gaagatatttttgcgattatgttag

SEQ ID NO: 213799 - DNA, 25 bp, Probe sequence
gaagcattttgcaacaaagcacatc

SEQ ID NO: 213800 - DNA, 25 bp, Probe sequence
gaaccaaacaattgcttgtcgatgc

SEQ ID NO: 213801 - DNA, 25 bp, Probe sequence
gagcatcaacgagatatcattgtaa

SEQ ID NO: 213802 - DNA, 25 bp, Probe sequence
gatccaagaatcgttagaaccaaac

SEQ ID NO: 213803 - DNA, 25 bp, Probe sequence
gatgcttttcttaaaatttctagag

SEQ ID NO: 213804 - DNA, 25 bp, Probe sequence
gataaagaagacctcctagactaca

SEQ ID NO: 213805 - DNA, 25 bp, Probe sequence
gtaaatccatagatccaagaatcgt

SEQ ID NO: 213806 - DNA, 25 bp, Probe sequence
ggcttagcattacattggtttaaca

SEQ ID NO: 213807 - DNA, 25 bp, Probe sequence
tcgtgcaacattttacgctcatttc

SEQ ID NO: 213808 - DNA, 25 bp, Probe sequence
tctgtaaccattttaaaagacttga

SEQ ID NO: 213809 - DNA, 25 bp, Probe sequence
tcaggcttagcattacattggttta

SEQ ID NO: 213810 - DNA, 25 bp, Probe sequence
taaagatatcactgatattgctacg

SEQ ID NO: 213811 - DNA, 25 bp, Probe sequence
tacattggtttaacacgagtcaaga

SEQ ID NO: 213812 - DNA, 25 bp, Probe sequence
ttttcatttcaattgcgagttatat

SEQ ID NO: 213813 - DNA, 25 bp, Probe sequence
ttgagcatttctaatgtcattaatg

SEQ ID NO: 213814 - DNA, 25 bp, Probe sequence
atcttcgccaacaatacggttatat

SEQ ID NO: 213815 - DNA, 25 bp, Probe sequence
atcggtcaggatgtcacaccagata

SEQ ID NO: 213816 - DNA, 25 bp, Probe sequence
atgatcttcgccaacaatacggtta

SEQ ID NO: 213817 - DNA, 25 bp, Probe sequence
agtggttgatccaatcggtcaggat

SEQ ID NO: 213818 - DNA, 25 bp, Probe sequence
accacttactgtagctgaaaaacaa

SEQ ID NO: 213819 - DNA, 25 bp, Probe sequence
aaagtggttgatccaatcggtcagg

SEQ ID NO: 213820 - DNA, 25 bp, Probe sequence
aaaaacaagaacaacatgcattgcg

SEQ ID NO: 213821 - DNA, 25 bp, Probe sequence
aaaagtggttgatccaatcggtcag

SEQ ID NO: 213822 - DNA, 25 bp, Probe sequence
aacaacattttccacaataaaagtg

SEQ ID NO: 213823 - DNA, 25 bp, Probe sequence
aagtattaacaacattttccacaat

SEQ ID NO: 213824 - DNA, 25 bp, Probe sequence
aagtggttgatccaatcggtcagga

SEQ ID NO: 213825 - DNA, 25 bp, Probe sequence
aatcggtcaggatgtcacaccagat

SEQ ID NO: 213826 - DNA, 25 bp, Probe sequence
caatcggtcaggatgtcacaccaga

SEQ ID NO: 213827 - DNA, 25 bp, Probe sequence
caagtattaacaacattttccacaa

SEQ ID NO: 213828 - DNA, 25 bp, Probe sequence
caaccacttactgtagctgaaaaac

SEQ ID NO: 213829 - DNA, 25 bp, Probe sequence
cttcgccaacaatacggttatattc

SEQ ID NO: 213830 - DNA, 25 bp, Probe sequence
cggtcaggatgtcacaccagataaa

SEQ ID NO: 213831 - DNA, 25 bp, Probe sequence
ccaatcggtcaggatgtcacaccag

SEQ ID NO: 213832 - DNA, 25 bp, Probe sequence
gccaacaatacggttatattcaaaa

SEQ ID NO: 213833 - DNA, 25 bp, Probe sequence
gatcttcgccaacaatacggttata

SEQ ID NO: 213834 - DNA, 25 bp, Probe sequence
gacaagtattaacaacattttccac

SEQ ID NO: 213835 - DNA, 25 bp, Probe sequence
gatccaatcggtcaggatgtcacac

SEQ ID NO: 213836 - DNA, 25 bp, Probe sequence
gatagaattaatgaacttgcaaata

SEQ ID NO: 213837 - DNA, 25 bp, Probe sequence
gttgatccaatcggtcaggatgtca

SEQ ID NO: 213838 - DNA, 25 bp, Probe sequence
gtattaacaacattttccacaataa

SEQ ID NO: 213839 - DNA, 25 bp, Probe sequence
gtcaggatgtcacaccagataaagt

SEQ ID NO: 213840 - DNA, 25 bp, Probe sequence
gtggttgatccaatcggtcaggatg

SEQ ID NO: 213841 - DNA, 25 bp, Probe sequence
ggttgatccaatcggtcaggatgtc

SEQ ID NO: 213842 - DNA, 25 bp, Probe sequence
tgatcttcgccaacaatacggttat

SEQ ID NO: 213843 - DNA, 25 bp, Probe sequence
tgatccaatcggtcaggatgtcaca

SEQ ID NO: 213844 - DNA, 25 bp, Probe sequence
tccaatcggtcaggatgtcacacca

SEQ ID NO: 213845 - DNA, 25 bp, Probe sequence
tcgccaacaatacggttatattcaa

SEQ ID NO: 213846 - DNA, 25 bp, Probe sequence
tcggtcaggatgtcacaccagataa

SEQ ID NO: 213847 - DNA, 25 bp, Probe sequence
tatgatcttcgccaacaatacggtt

SEQ ID NO: 213848 - DNA, 25 bp, Probe sequence
actaggtatcggtatggggacattg

SEQ ID NO: 213849 - DNA, 25 bp, Probe sequence
attatgaggttatgcaagtgtcgtt

SEQ ID NO: 213850 - DNA, 25 bp, Probe sequence
ataaggcactactgcaatgtattga

SEQ ID NO: 213851 - DNA, 25 bp, Probe sequence
acaaactttttgatgaagaaggcgt

SEQ ID NO: 213852 - DNA, 25 bp, Probe sequence
agcgatttatgctactacgtcatac

SEQ ID NO: 213853 - DNA, 25 bp, Probe sequence
accaaagcgcattttatcaagaatt

SEQ ID NO: 213854 - DNA, 25 bp, Probe sequence
actacgtcatacaaagagaccttga

SEQ ID NO: 213855 - DNA, 25 bp, Probe sequence
aaacattagtatgaatcgtattgct

SEQ ID NO: 213856 - DNA, 25 bp, Probe sequence
aaaagcgatttatgctactacgtca

SEQ ID NO: 213857 - DNA, 25 bp, Probe sequence
aagcgcattttatcaagaattattt

SEQ ID NO: 213858 - DNA, 25 bp, Probe sequence
aaggcactactgcaatgtattgaag

SEQ ID NO: 213859 - DNA, 25 bp, Probe sequence
aatagcgcacaaactttttgatgaa

SEQ ID NO: 213860 - DNA, 25 bp, Probe sequence
cacgaagttcaaaacagatatgctg

SEQ ID NO: 213861 - DNA, 25 bp, Probe sequence
gctactacgtcatacaaagagacct

SEQ ID NO: 213862 - DNA, 25 bp, Probe sequence
gcaagtgtcgttagattatctttta

SEQ ID NO: 213863 - DNA, 25 bp, Probe sequence
gaaggcgttgaaaacattagtatga

SEQ ID NO: 213864 - DNA, 25 bp, Probe sequence
gaatcgtattgctaaagaactaggt

SEQ ID NO: 213865 - DNA, 25 bp, Probe sequence
gaagaaatagcgcacaaactttttg

SEQ ID NO: 213866 - DNA, 25 bp, Probe sequence
gaactaggtatcggtatggggacat

SEQ ID NO: 213867 - DNA, 25 bp, Probe sequence
gagaccttgatatttttatcactca

SEQ ID NO: 213868 - DNA, 25 bp, Probe sequence
gaggttatgcaagtgtcgttagatt

SEQ ID NO: 213869 - DNA, 25 bp, Probe sequence
gatgactatcattctaattatgagg

SEQ ID NO: 213870 - DNA, 25 bp, Probe sequence
gatatttttatcactcattttaagc

SEQ ID NO: 213871 - DNA, 25 bp, Probe sequence
gatttatgctactacgtcatacaaa

SEQ ID NO: 213872 - DNA, 25 bp, Probe sequence
gttcaaaacagatatgctgttgcaa

SEQ ID NO: 213873 - DNA, 25 bp, Probe sequence
gttatgcaagtgtcgttagattatc

SEQ ID NO: 213874 - DNA, 25 bp, Probe sequence
gtttttaccaaagcgcattttatca

SEQ ID NO: 213875 - DNA, 25 bp, Probe sequence
gtatcggtatggggacattgtatcg

SEQ ID NO: 213876 - DNA, 25 bp, Probe sequence
gtatggggacattgtatcgacattt

SEQ ID NO: 213877 - DNA, 25 bp, Probe sequence
gtgtcgttagattatcttttacaat

SEQ ID NO: 213878 - DNA, 25 bp, Probe sequence
tgcaatgtattgaagcaggcaacaa

SEQ ID NO: 213879 - DNA, 25 bp, Probe sequence
taagcaaattaaagatgactatcat

SEQ ID NO: 213880 - DNA, 25 bp, Probe sequence
tttaccaaagcgcattttatcaaga

SEQ ID NO: 213881 - DNA, 25 bp, Probe sequence
tttttatcactcattttaagcaaat

SEQ ID NO: 213882 - DNA, 25 bp, Probe sequence
accccgaaacagctgaatctaaagt

SEQ ID NO: 213883 - DNA, 25 bp, Probe sequence
atggttacaaaccccgaaacagctg

SEQ ID NO: 213884 - DNA, 25 bp, Probe sequence
agcttattgttcgtctaaatcggca

SEQ ID NO: 213885 - DNA, 25 bp, Probe sequence
acctcgtgacgttgaagaagtatat

SEQ ID NO: 213886 - DNA, 25 bp, Probe sequence
acgtatcaagtggtttaggttcatt

SEQ ID NO: 213887 - DNA, 25 bp, Probe sequence
acattcgtccctctcttagaaaaat

SEQ ID NO: 213888 - DNA, 25 bp, Probe sequence
acaatgcaggtatatctggtcaatt

SEQ ID NO: 213889 - DNA, 25 bp, Probe sequence
aaattgacacctcgtgacgttgaag

SEQ ID NO: 213890 - DNA, 25 bp, Probe sequence
aaatctgaacaacctgttgtcgtca

SEQ ID NO: 213891 - DNA, 25 bp, Probe sequence
aacctgttgtcgtcaacgtatcaag

SEQ ID NO: 213892 - DNA, 25 bp, Probe sequence
aatgcttataacatgattgctgaaa

SEQ ID NO: 213893 - DNA, 25 bp, Probe sequence
aattcattagcttattgttcgtcta

SEQ ID NO: 213894 - DNA, 25 bp, Probe sequence
caaaaattaggtgttcattatgtac

SEQ ID NO: 213895 - DNA, 25 bp, Probe sequence
caaaccccgaaacagctgaatctaa

SEQ ID NO: 213896 - DNA, 25 bp, Probe sequence
ctaaatcggcagtaacaatgctaac

SEQ ID NO: 213897 - DNA, 25 bp, Probe sequence
gaagaagtatatcaaacgaatgtat

SEQ ID NO: 213898 - DNA, 25 bp, Probe sequence
gaacaacctgttgtcgtcaacgtat

SEQ ID NO: 213899 - DNA, 25 bp, Probe sequence
gaaacagctgaatctaaagtgaatt

SEQ ID NO: 213900 - DNA, 25 bp, Probe sequence
gatatcctcattaacaatgcaggta

SEQ ID NO: 213901 - DNA, 25 bp, Probe sequence
gatttagttggtgattttagtaata

SEQ ID NO: 213902 - DNA, 25 bp, Probe sequence
gttgtcgtcaacgtatcaagtggtt

SEQ ID NO: 213903 - DNA, 25 bp, Probe sequence
gtccctctcttagaaaaatctgaac

SEQ ID NO: 213904 - DNA, 25 bp, Probe sequence
gtcgtcaacgtatcaagtggtttag

SEQ ID NO: 213905 - DNA, 25 bp, Probe sequence
gtcttgatatcctcattaacaatgc

SEQ ID NO: 213906 - DNA, 25 bp, Probe sequence
gtgaattcattagcttattgttcgt

SEQ ID NO: 213907 - DNA, 25 bp, Probe sequence
gtggtttaggttcatttggaatggt

SEQ ID NO: 213908 - DNA, 25 bp, Probe sequence
tgacacctcgtgacgttgaagaagt

SEQ ID NO: 213909 - DNA, 25 bp, Probe sequence
tgcaggtatatctggtcaattttca

SEQ ID NO: 213910 - DNA, 25 bp, Probe sequence
tcaagccaatcattcaattagcaac

SEQ ID NO: 213911 - DNA, 25 bp, Probe sequence
tattgttcgtctaaatcggcagtaa

SEQ ID NO: 213912 - DNA, 25 bp, Probe sequence
ttaggttcatttggaatggttacaa

SEQ ID NO: 213913 - DNA, 25 bp, Probe sequence
ttacaaaccccgaaacagctgaatc

SEQ ID NO: 213914 - DNA, 25 bp, Probe sequence
ttcgtctaaatcggcagtaacaatg

SEQ ID NO: 213915 - DNA, 25 bp, Probe sequence
ttcgtccctctcttagaaaaatctg

SEQ ID NO: 213916 - DNA, 25 bp, Probe sequence
atgccgacgaattatcacatcatga

SEQ ID NO: 213917 - DNA, 25 bp, Probe sequence
atgacattattttcaaaacagctga

SEQ ID NO: 213918 - DNA, 25 bp, Probe sequence
aggctttgcaactttacctatcaat

SEQ ID NO: 213919 - DNA, 25 bp, Probe sequence
agtgacatttatcaatcatactata

SEQ ID NO: 213920 - DNA, 25 bp, Probe sequence
acctatcaatgagcctgaagccgca

SEQ ID NO: 213921 - DNA, 25 bp, Probe sequence
acgaagccacagtttgatttagtca

SEQ ID NO: 213922 - DNA, 25 bp, Probe sequence
aatcgctttgtaggctttgcaactt

SEQ ID NO: 213923 - DNA, 25 bp, Probe sequence
aaggtgcgctcattatgggacgtgc

SEQ ID NO: 213924 - DNA, 25 bp, Probe sequence
aatatcccaatcgctttgtaggctt

SEQ ID NO: 213925 - DNA, 25 bp, Probe sequence
cacatcatgatgaacgtatccaatt

SEQ ID NO: 213926 - DNA, 25 bp, Probe sequence
gccgcagcgcgagaattcgaacgtt

SEQ ID NO: 213927 - DNA, 25 bp, Probe sequence
ccgcgccagttaacagtgacattta

SEQ ID NO: 213928 - DNA, 25 bp, Probe sequence
gcctgaagccgcagcgcgagaattc

SEQ ID NO: 213929 - DNA, 25 bp, Probe sequence
gcggcaacatttgcttgttttggtt

SEQ ID NO: 213930 - DNA, 25 bp, Probe sequence
gcttgttttggttatggttggcaca

SEQ ID NO: 213931 - DNA, 25 bp, Probe sequence
gcaaatgatcaattggcaaactata

SEQ ID NO: 213932 - DNA, 25 bp, Probe sequence
gcaactttacctatcaatgagcctg

SEQ ID NO: 213933 - DNA, 25 bp, Probe sequence
gaattctttatgctgctgattatcc

SEQ ID NO: 213934 - DNA, 25 bp, Probe sequence
gaattcgaacgttgcatcaatgatt

SEQ ID NO: 213935 - DNA, 25 bp, Probe sequence
gaacgtatccaatttatgaataatc

SEQ ID NO: 213936 - DNA, 25 bp, Probe sequence
gaaagtaatgttagaaggccttgaa

SEQ ID NO: 213937 - DNA, 25 bp, Probe sequence
gacaggttttacaaatgccgacgaa

SEQ ID NO: 213938 - DNA, 25 bp, Probe sequence
gacgttcaaattcaagtcttatctt

SEQ ID NO: 213939 - DNA, 25 bp, Probe sequence
gagtttatcccattcttcttagaac

SEQ ID NO: 213940 - DNA, 25 bp, Probe sequence
gatttaggattcaaaggtgcgctca

SEQ ID NO: 213941 - DNA, 25 bp, Probe sequence
gattattggacattggggtgagttt

SEQ ID NO: 213942 - DNA, 25 bp, Probe sequence
gattatccatatattgagcctgaaa

SEQ ID NO: 213943 - DNA, 25 bp, Probe sequence
gttggtcagaaagccattgaattat

SEQ ID NO: 213944 - DNA, 25 bp, Probe sequence
ggggtgagtttatcccattcttctt

SEQ ID NO: 213945 - DNA, 25 bp, Probe sequence
ggtgtatttttagatgaactgggtt

SEQ ID NO: 213946 - DNA, 25 bp, Probe sequence
tgggacgtgcacaagatggttttct

SEQ ID NO: 213947 - DNA, 25 bp, Probe sequence
tatcccattcttcttagaacgtatg

SEQ ID NO: 213948 - DNA, 25 bp, Probe sequence
tagaacgtatggatgaagctttatt

SEQ ID NO: 213949 - DNA, 25 bp, Probe sequence
ttggttatggttggcacattgatgt

SEQ ID NO: 213950 - DNA, 25 bp, Probe sequence
atatcgcaccaattgatgcaaaaat

SEQ ID NO: 213951 - DNA, 25 bp, Probe sequence
atgacattgtgcatcaaattttaac

SEQ ID NO: 213952 - DNA, 25 bp, Probe sequence
agttcaggttcaatcgttgcgatgc

SEQ ID NO: 213953 - DNA, 25 bp, Probe sequence
acatttttaccagacagtacttatt

SEQ ID NO: 213954 - DNA, 25 bp, Probe sequence
aaacgcgacgcacaggacattgccg

SEQ ID NO: 213955 - DNA, 25 bp, Probe sequence
aaccctgacagtgattatcgtgtca

SEQ ID NO: 213956 - DNA, 25 bp, Probe sequence
aagaccattttactgttgtagccgt

SEQ ID NO: 213957 - DNA, 25 bp, Probe sequence
aagtcggacaaggacccgtgctcat

SEQ ID NO: 213958 - DNA, 25 bp, Probe sequence
aagtgatgaacctgtctatatatta

SEQ ID NO: 213959 - DNA, 25 bp, Probe sequence
aatgatgtctcaacctgctgatact

SEQ ID NO: 213960 - DNA, 25 bp, Probe sequence
caatcgttgcgatgcatgtgttaaa

SEQ ID NO: 213961 - DNA, 25 bp, Probe sequence
cgcacaggacattgccgaacttgca

SEQ ID NO: 213962 - DNA, 25 bp, Probe sequence
ccaccaattaatacatttttaccag

SEQ ID NO: 213963 - DNA, 25 bp, Probe sequence
gccgttgatcgtcgtgattatggag

SEQ ID NO: 213964 - DNA, 25 bp, Probe sequence
gctccttcccacaagatgttaactt

SEQ ID NO: 213965 - DNA, 25 bp, Probe sequence
gcatacctattgtagatattccagg

SEQ ID NO: 213966 - DNA, 25 bp, Probe sequence
gaaactttagaattacaaggcgcta

SEQ ID NO: 213967 - DNA, 25 bp, Probe sequence
gaaacattaaatatcgcaccaattg

SEQ ID NO: 213968 - DNA, 25 bp, Probe sequence
gaaattagacaatatacgcattcag

SEQ ID NO: 213969 - DNA, 25 bp, Probe sequence
gatattccaggcggtcacttaggtt

SEQ ID NO: 213970 - DNA, 25 bp, Probe sequence
gattatcgtgtcaaacgcgacgcac

SEQ ID NO: 213971 - DNA, 25 bp, Probe sequence
gttgtagccgttgatcgtcgtgatt

SEQ ID NO: 213972 - DNA, 25 bp, Probe sequence
gtacaaacgtacgatgttctggtca

SEQ ID NO: 213973 - DNA, 25 bp, Probe sequence
gtctcaacctgctgatactgaagaa

SEQ ID NO: 213974 - DNA, 25 bp, Probe sequence
gtgttaaaagattaccctgaagtcg

SEQ ID NO: 213975 - DNA, 25 bp, Probe sequence
gggacagattctagaggctccttcc

SEQ ID NO: 213976 - DNA, 25 bp, Probe sequence
ggacattgccgaacttgcaaagtca

SEQ ID NO: 213977 - DNA, 25 bp, Probe sequence
ggatgatttcacaaaatacagcgat

SEQ ID NO: 213978 - DNA, 25 bp, Probe sequence
ggcggtcacttaggttatattcaaa

SEQ ID NO: 213979 - DNA, 25 bp, Probe sequence
taccaccaagtcggacaaggacccg

SEQ ID NO: 213980 - DNA, 25 bp, Probe sequence
tattcctggtgcaaacggtaccgga

SEQ ID NO: 213981 - DNA, 25 bp, Probe sequence
tacgcattcagatattactttggat

SEQ ID NO: 213982 - DNA, 25 bp, Probe sequence
taggttcaagttcaggttcaatcgt

SEQ ID NO: 213983 - DNA, 25 bp, Probe sequence
ttcaaaaacctgaaggctttgctga

SEQ ID NO: 213984 - DNA, 25 bp, Probe sequence
atcacttgttattgaaggcccaggt

SEQ ID NO: 213985 - DNA, 25 bp, Probe sequence
atcatcttagcaaacacaacgcgac

SEQ ID NO: 213986 - DNA, 25 bp, Probe sequence
atggatttcgatggcttaaaagcac

SEQ ID NO: 213987 - DNA, 25 bp, Probe sequence
agatcatcattttgacaatgtcagt

SEQ ID NO: 213988 - DNA, 25 bp, Probe sequence
agaaggcggtttgagtggtcgtcca

SEQ ID NO: 213989 - DNA, 25 bp, Probe sequence
agcgattactgagacatttgacggt

SEQ ID NO: 213990 - DNA, 25 bp, Probe sequence
acgagatggtttaacttctgctaat

SEQ ID NO: 213991 - DNA, 25 bp, Probe sequence
acggtgcgtcacttattcaaattta

SEQ ID NO: 213992 - DNA, 25 bp, Probe sequence
actaacgtctgatatggatttcgat

SEQ ID NO: 213993 - DNA, 25 bp, Probe sequence
acaggcggcgtattcagtactgaag

SEQ ID NO: 213994 - DNA, 25 bp, Probe sequence
aaatgacaccttatgaagcgcgtta

SEQ ID NO: 213995 - DNA, 25 bp, Probe sequence
aaatgcttatcaagtacctgttggt

SEQ ID NO: 213996 - DNA, 25 bp, Probe sequence
aaagcactattaccagcgattactg

SEQ ID NO: 213997 - DNA, 25 bp, Probe sequence
aacacaacgcgacaacgagatggtt

SEQ ID NO: 213998 - DNA, 25 bp, Probe sequence
aacacgacgtttcatttttcacagt

SEQ ID NO: 213999 - DNA, 25 bp, Probe sequence
aagcattggaacaccttggattcgg

SEQ ID NO: 214000 - DNA, 25 bp, Probe sequence
aatccaattggcttagcagctggtt

SEQ ID NO: 214001 - DNA, 25 bp, Probe sequence
aatgatgcgtcacggtgcgtcactt

SEQ ID NO: 214002 - DNA, 25 bp, Probe sequence
aatcttgcgaagtaccaaaagcatt

SEQ ID NO: 214003 - DNA, 25 bp, Probe sequence
cacacggactaactatcgatgcatt

SEQ ID NO: 214004 - DNA, 25 bp, Probe sequence
gcagctggtttcgacaaatcttgcg

SEQ ID NO: 214005 - DNA, 25 bp, Probe sequence
gaatccaacgttatcacaaacgata

SEQ ID NO: 214006 - DNA, 25 bp, Probe sequence
gacatttgacggtatcatcttagca

SEQ ID NO: 214007 - DNA, 25 bp, Probe sequence
gtacctgttggtatcaatgttggtg

SEQ ID NO: 214008 - DNA, 25 bp, Probe sequence
gtggtatcacacctaaacctcaacc

SEQ ID NO: 214009 - DNA, 25 bp, Probe sequence
gtggtcgtccattatttgaacgtaa

SEQ ID NO: 214010 - DNA, 25 bp, Probe sequence
ggtaatacgtacgacaatccaattg

SEQ ID NO: 214011 - DNA, 25 bp, Probe sequence
tcgaacccgaaaaagcacacggact

SEQ ID NO: 214012 - DNA, 25 bp, Probe sequence
ggaacaccttggattcggtgcttta

SEQ ID NO: 214013 - DNA, 25 bp, Probe sequence
tcggtgctttagaattaggtggtat

SEQ ID NO: 214014 - DNA, 25 bp, Probe sequence
tattgaaggcccaggtttaactaag

SEQ ID NO: 214015 - DNA, 25 bp, Probe sequence
tcaaatttattcatcacttgttatt

SEQ ID NO: 214016 - DNA, 25 bp, Probe sequence
tataggtacaggcggcgtattcagt

SEQ ID NO: 214017 - DNA, 25 bp, Probe sequence
ttattcccagtcgtcgataaactat

SEQ ID NO: 214018 - DNA, 25 bp, Probe sequence
atatggcatttgggctaaagctacg

SEQ ID NO: 214019 - DNA, 25 bp, Probe sequence
ataagtgtcacttttttgatgaaaa

SEQ ID NO: 214020 - DNA, 25 bp, Probe sequence
atgcattatatccacatatgactgt

SEQ ID NO: 214021 - DNA, 25 bp, Probe sequence
aggtattcgagctgaagacattcat

SEQ ID NO: 214022 - DNA, 25 bp, Probe sequence
agttaaaagctgctggctacttaga

SEQ ID NO: 214023 - DNA, 25 bp, Probe sequence
agaaatatatgatgcccctaattgc

SEQ ID NO: 214024 - DNA, 25 bp, Probe sequence
acgaatggttgctggactagagtct

SEQ ID NO: 214025 - DNA, 25 bp, Probe sequence
actgaagcattgacgatggctagtc

SEQ ID NO: 214026 - DNA, 25 bp, Probe sequence
aacgtgttgctttgggcagagctat

SEQ ID NO: 214027 - DNA, 25 bp, Probe sequence
aagcgacttaatactacgacaattt

SEQ ID NO: 214028 - DNA, 25 bp, Probe sequence
gcaagtcggcacacctagagaaata

SEQ ID NO: 214029 - DNA, 25 bp, Probe sequence
gcaatttatcggctcaccagcaatg

SEQ ID NO: 214030 - DNA, 25 bp, Probe sequence
gaatcttgatgcgaagcttcgagta

SEQ ID NO: 214031 - DNA, 25 bp, Probe sequence
gaagcttcgagtacaaatgcgcaca

SEQ ID NO: 214032 - DNA, 25 bp, Probe sequence
gaacgacaagattacactagcattt

SEQ ID NO: 214033 - DNA, 25 bp, Probe sequence
gaaaaaacaggaaatcgtatcgtct

SEQ ID NO: 214034 - DNA, 25 bp, Probe sequence
gacattatgcaagtcggcacaccta

SEQ ID NO: 214035 - DNA, 25 bp, Probe sequence
gactagagtctatcacatctggaga

SEQ ID NO: 214036 - DNA, 25 bp, Probe sequence
gagatattgcgatggtatttcaaaa

SEQ ID NO: 214037 - DNA, 25 bp, Probe sequence
gatggctagtcgaattgttgttttg

SEQ ID NO: 214038 - DNA, 25 bp, Probe sequence
gattttaatctacatattactgaca

SEQ ID NO: 214039 - DNA, 25 bp, Probe sequence
gggcagagctattgttagggatgcg

SEQ ID NO: 214040 - DNA, 25 bp, Probe sequence
gggaacgcatgaacgatgttgaacc

SEQ ID NO: 214041 - DNA, 25 bp, Probe sequence
ggtcgtaaaccaaaagcgttatctg

SEQ ID NO: 214042 - DNA, 25 bp, Probe sequence
ggatgaaccattatcgaatcttgat

SEQ ID NO: 214043 - DNA, 25 bp, Probe sequence
ggagatttttatattgatggggaac

SEQ ID NO: 214044 - DNA, 25 bp, Probe sequence
ggacagcgtcaacgtgttgctttgg

SEQ ID NO: 214045 - DNA, 25 bp, Probe sequence
ggaccatcgggatgtggtaaatcaa

SEQ ID NO: 214046 - DNA, 25 bp, Probe sequence
ggctcaccagcaatgaatatgttga

SEQ ID NO: 214047 - DNA, 25 bp, Probe sequence
tgtggcgcaatttatcggctcacca

SEQ ID NO: 214048 - DNA, 25 bp, Probe sequence
tgttagggatgcgaaagtcttttta

SEQ ID NO: 214049 - DNA, 25 bp, Probe sequence
tcattgtatttgttggaccatcggg

SEQ ID NO: 214050 - DNA, 25 bp, Probe sequence
taactgagtatcttggtcgtaaacc

SEQ ID NO: 214051 - DNA, 25 bp, Probe sequence
ttgaatctgaagtagttgtatccga

SEQ ID NO: 214052 - DNA, 25 bp, Probe sequence
atcgtaaaacagatcttgatttaga

SEQ ID NO: 214053 - DNA, 25 bp, Probe sequence
agtagcgacttctgacaacaaagac

SEQ ID NO: 214054 - DNA, 25 bp, Probe sequence
agtgttttcacttatttcaacactt

SEQ ID NO: 214055 - DNA, 25 bp, Probe sequence
agaagatgaacgtcaaggtttgaat

SEQ ID NO: 214056 - DNA, 25 bp, Probe sequence
agcgacttctgacaacaaagacaca

SEQ ID NO: 214057 - DNA, 25 bp, Probe sequence
acttctgacaacaaagacacacagc

SEQ ID NO: 214058 - DNA, 25 bp, Probe sequence
acagtagcgacttctgacaacaaag

SEQ ID NO: 214059 - DNA, 25 bp, Probe sequence
acaaagacacacagcaacaaaatca

SEQ ID NO: 214060 - DNA, 25 bp, Probe sequence
aaacagtagcgacttctgacaacaa

SEQ ID NO: 214061 - DNA, 25 bp, Probe sequence
aaaaacagtagcgacttctgacaac

SEQ ID NO: 214062 - DNA, 25 bp, Probe sequence
aaaacagtagcgacttctgacaaca

SEQ ID NO: 214063 - DNA, 25 bp, Probe sequence
aacagtagcgacttctgacaacaaa

SEQ ID NO: 214064 - DNA, 25 bp, Probe sequence
aagtgttttcacttatttcaacact

SEQ ID NO: 214065 - DNA, 25 bp, Probe sequence
caacaaagacacacagcaacaaaat

SEQ ID NO: 214066 - DNA, 25 bp, Probe sequence
cagtagcgacttctgacaacaaaga

SEQ ID NO: 214067 - DNA, 25 bp, Probe sequence
cgacttctgacaacaaagacacaca

SEQ ID NO: 214068 - DNA, 25 bp, Probe sequence
gcgacttctgacaacaaagacacac

SEQ ID NO: 214069 - DNA, 25 bp, Probe sequence
gcaagagctacgtgaaatgatgaaa

SEQ ID NO: 214070 - DNA, 25 bp, Probe sequence
gaatggttatcgtaaaacagatctt

SEQ ID NO: 214071 - DNA, 25 bp, Probe sequence
gaagaagatgaacgtcaaggtttga

SEQ ID NO: 214072 - DNA, 25 bp, Probe sequence
gaacgtcaaggtttgaatggttatc

SEQ ID NO: 214073 - DNA, 25 bp, Probe sequence
gacaacaaagacacacagcaacaaa

SEQ ID NO: 214074 - DNA, 25 bp, Probe sequence
gagctacgtgaaatgatgaaaacag

SEQ ID NO: 214075 - DNA, 25 bp, Probe sequence
gagcaagagctacgtgaaatgatga

SEQ ID NO: 214076 - DNA, 25 bp, Probe sequence
gatgaacgtcaaggtttgaatggtt

SEQ ID NO: 214077 - DNA, 25 bp, Probe sequence
gtagcgacttctgacaacaaagaca

SEQ ID NO: 214078 - DNA, 25 bp, Probe sequence
gtaaaacagatcttgatttagaaat

SEQ ID NO: 214079 - DNA, 25 bp, Probe sequence
gtcaaggtttgaatggttatcgtaa

SEQ ID NO: 214080 - DNA, 25 bp, Probe sequence
ggttatcgtaaaacagatcttgatt

SEQ ID NO: 214081 - DNA, 25 bp, Probe sequence
tcattgtcattttagcaattataag

SEQ ID NO: 214082 - DNA, 25 bp, Probe sequence
tcaaggtttgaatggttatcgtaaa

SEQ ID NO: 214083 - DNA, 25 bp, Probe sequence
tagcgacttctgacaacaaagacac

SEQ ID NO: 214084 - DNA, 25 bp, Probe sequence
ttagcaattataagatttgttcata

SEQ ID NO: 214085 - DNA, 25 bp, Probe sequence
ttctgacaacaaagacacacagcaa

SEQ ID NO: 214086 - DNA, 25 bp, Probe sequence
attcttttggtcgcgctgacaaaat

SEQ ID NO: 214087 - DNA, 25 bp, Probe sequence
attaccgtttgctgaccaattctgg

SEQ ID NO: 214088 - DNA, 25 bp, Probe sequence
atagaattaccgtttgctgaccaat

SEQ ID NO: 214089 - DNA, 25 bp, Probe sequence
atacggtgttcgttggatgttacat

SEQ ID NO: 214090 - DNA, 25 bp, Probe sequence
atgacagcattattcccttatatcg

SEQ ID NO: 214091 - DNA, 25 bp, Probe sequence
agactatactgcaatccaacaataa

SEQ ID NO: 214092 - DNA, 25 bp, Probe sequence
agaagtatttggtgcaactgacgtt

SEQ ID NO: 214093 - DNA, 25 bp, Probe sequence
agcattattcccttatatcgctttt

SEQ ID NO: 214094 - DNA, 25 bp, Probe sequence
aatggcatatcattattaattgatt

SEQ ID NO: 214095 - DNA, 25 bp, Probe sequence
ccaattctggggtggcaaaatgggc

SEQ ID NO: 214096 - DNA, 25 bp, Probe sequence
aattaaagatcattcttcaattgaa

SEQ ID NO: 214097 - DNA, 25 bp, Probe sequence
catggtcaagactatactgcaatcc

SEQ ID NO: 214098 - DNA, 25 bp, Probe sequence
cattattcccttatatcgcttttga

SEQ ID NO: 214099 - DNA, 25 bp, Probe sequence
cccttatatcgcttttgaaaattca

SEQ ID NO: 214100 - DNA, 25 bp, Probe sequence
gcgaagaacaagcgtcacattttgg

SEQ ID NO: 214101 - DNA, 25 bp, Probe sequence
gctgataaagttgaagcattctatg

SEQ ID NO: 214102 - DNA, 25 bp, Probe sequence
gaagttggcgaagaacaagcgtcac

SEQ ID NO: 214103 - DNA, 25 bp, Probe sequence
gaaatagaattaccgtttgctgacc

SEQ ID NO: 214104 - DNA, 25 bp, Probe sequence
gacagcattattcccttatatcgct

SEQ ID NO: 214105 - DNA, 25 bp, Probe sequence
gtttgctgaccaattctggggtggc

SEQ ID NO: 214106 - DNA, 25 bp, Probe sequence
gtatttggtgcaactgacgttaaac

SEQ ID NO: 214107 - DNA, 25 bp, Probe sequence
gtcaagactatactgcaatccaaca

SEQ ID NO: 214108 - DNA, 25 bp, Probe sequence
gtgcaactgacgttaaacgtttaga

SEQ ID NO: 214109 - DNA, 25 bp, Probe sequence
ggtgttcgttggatgttacatggtc

SEQ ID NO: 214110 - DNA, 25 bp, Probe sequence
ggtcgcgctgacaaaattaataatg

SEQ ID NO: 214111 - DNA, 25 bp, Probe sequence
tggatgttacatggtcaagactata

SEQ ID NO: 214112 - DNA, 25 bp, Probe sequence
tggcgaagaacaagcgtcacatttt

SEQ ID NO: 214113 - DNA, 25 bp, Probe sequence
tgattcttttggtcgcgctgacaaa

SEQ ID NO: 214114 - DNA, 25 bp, Probe sequence
tttggtgcaactgacgttaaacgtt

SEQ ID NO: 214115 - DNA, 25 bp, Probe sequence
tgctgaccaattctggggtggcaaa

SEQ ID NO: 214116 - DNA, 25 bp, Probe sequence
tctttaccgataaatacggtgttcg

SEQ ID NO: 214117 - DNA, 25 bp, Probe sequence
taccgtttgctgaccaattctgggg

SEQ ID NO: 214118 - DNA, 25 bp, Probe sequence
tatgttctgattcttttggtcgcgc

SEQ ID NO: 214119 - DNA, 25 bp, Probe sequence
tattcccttatatcgcttttgaaaa

SEQ ID NO: 214120 - DNA, 25 bp, Probe sequence
attccgacatctagttttacacctg

SEQ ID NO: 214121 - DNA, 25 bp, Probe sequence
atatgggtgccctttggccaacatt

SEQ ID NO: 214122 - DNA, 25 bp, Probe sequence
atcacaaattaaaacacctctacta

SEQ ID NO: 214123 - DNA, 25 bp, Probe sequence
atctcgaacgccaaaaatcattctt

SEQ ID NO: 214124 - DNA, 25 bp, Probe sequence
atgtcgcacaatatgactctgaaga

SEQ ID NO: 214125 - DNA, 25 bp, Probe sequence
aggtatttttgcgagatggacagat

SEQ ID NO: 214126 - DNA, 25 bp, Probe sequence
agttaacttccctgattttaatcat

SEQ ID NO: 214127 - DNA, 25 bp, Probe sequence
agatggcaaattccctgtagttatg

SEQ ID NO: 214128 - DNA, 25 bp, Probe sequence
agaatcaccagacccaggattttgg

SEQ ID NO: 214129 - DNA, 25 bp, Probe sequence
acatcgttgtcgacagtgttcaata

SEQ ID NO: 214130 - DNA, 25 bp, Probe sequence
aaagttagatcgtcgtggtaatgaa

SEQ ID NO: 214131 - DNA, 25 bp, Probe sequence
aaagttgcattacgcggtagtgaca

SEQ ID NO: 214132 - DNA, 25 bp, Probe sequence
aacacctctactaacatgtgctagt

SEQ ID NO: 214133 - DNA, 25 bp, Probe sequence
aatggctatatgtgcatggacgtaa

SEQ ID NO: 214134 - DNA, 25 bp, Probe sequence
aattcaaatcagcgtcagcgttccc

SEQ ID NO: 214135 - DNA, 25 bp, Probe sequence
aattaactgtaactcatgtcaatga

SEQ ID NO: 214136 - DNA, 25 bp, Probe sequence
caaggtttgcacaaccgtggctctt

SEQ ID NO: 214137 - DNA, 25 bp, Probe sequence
caaccgtggctcttttgaaggattt

SEQ ID NO: 214138 - DNA, 25 bp, Probe sequence
cactgtggaaatgcgcgatggcgaa

SEQ ID NO: 214139 - DNA, 25 bp, Probe sequence
ccggtattaaccacatcgttgtcga

SEQ ID NO: 214140 - DNA, 25 bp, Probe sequence
gcgcaaccttggcataaacatgaaa

SEQ ID NO: 214141 - DNA, 25 bp, Probe sequence
gctagttggtctacacaaggtttgc

SEQ ID NO: 214142 - DNA, 25 bp, Probe sequence
gaaatcgaattgttaccttcaggca

SEQ ID NO: 214143 - DNA, 25 bp, Probe sequence
gatactggcttttatcgtttctgga

SEQ ID NO: 214144 - DNA, 25 bp, Probe sequence
gattggaaagatacgcctcatgtca

SEQ ID NO: 214145 - DNA, 25 bp, Probe sequence
gtttcttatcttgcggtgactcaat

SEQ ID NO: 214146 - DNA, 25 bp, Probe sequence
gggtcgcatcattaaatccaccaca

SEQ ID NO: 214147 - DNA, 25 bp, Probe sequence
ggtgactcaatggtgggtcgcatca

SEQ ID NO: 214148 - DNA, 25 bp, Probe sequence
ggttggttacgcgtatcacatcgtg

SEQ ID NO: 214149 - DNA, 25 bp, Probe sequence
ggcgtcttatctccatggtcaaaaa

SEQ ID NO: 214150 - DNA, 25 bp, Probe sequence
tccctgtagttatgtctgcagatac

SEQ ID NO: 214151 - DNA, 25 bp, Probe sequence
tcacaattaatcattcctatcgtta

SEQ ID NO: 214152 - DNA, 25 bp, Probe sequence
tacacctgaagaatcaccagaccca

SEQ ID NO: 214153 - DNA, 25 bp, Probe sequence
ttaccttcaggcacgctatttaaac

SEQ ID NO: 214154 - DNA, 25 bp, Probe sequence
attgcagtcaaaacacatcaacttg

SEQ ID NO: 214155 - DNA, 25 bp, Probe sequence
attgcctcatacaacgcttatcggg

SEQ ID NO: 214156 - DNA, 25 bp, Probe sequence
attcaaggctttatttatcgacgtg

SEQ ID NO: 214157 - DNA, 25 bp, Probe sequence
atttatcgacgtgcacgtgaacaca

SEQ ID NO: 214158 - DNA, 25 bp, Probe sequence
atactatttatagctttttacgcgc

SEQ ID NO: 214159 - DNA, 25 bp, Probe sequence
atcttgcacatgaggacacgctcat

SEQ ID NO: 214160 - DNA, 25 bp, Probe sequence
atgcacctgcacaagatattgttgt

SEQ ID NO: 214161 - DNA, 25 bp, Probe sequence
atgggaacgagcatgtattacgaca

SEQ ID NO: 214162 - DNA, 25 bp, Probe sequence
aggttatgaagatgtcacaaacaca

SEQ ID NO: 214163 - DNA, 25 bp, Probe sequence
agataatgcattaactcgacaattt

SEQ ID NO: 214164 - DNA, 25 bp, Probe sequence
acacgctcatcattttagcccaaaa

SEQ ID NO: 214165 - DNA, 25 bp, Probe sequence
aaatggttatggtcaactcgaacat

SEQ ID NO: 214166 - DNA, 25 bp, Probe sequence
aacttgggcattaattctatcacag

SEQ ID NO: 214167 - DNA, 25 bp, Probe sequence
aacgcttatcgggagacacgccaaa

SEQ ID NO: 214168 - DNA, 25 bp, Probe sequence
tcagttgcgattatcggcccaggcg

SEQ ID NO: 214169 - DNA, 25 bp, Probe sequence
caggcagaggggttaaacttttcag

SEQ ID NO: 214170 - DNA, 25 bp, Probe sequence
gcattaattctatcacagcactcgg

SEQ ID NO: 214171 - DNA, 25 bp, Probe sequence
gcatcagcaacctcttgaagtcgaa

SEQ ID NO: 214172 - DNA, 25 bp, Probe sequence
gcaatcatgcataatcctgaaatac

SEQ ID NO: 214173 - DNA, 25 bp, Probe sequence
gaattacaacaatcattgcctcata

SEQ ID NO: 214174 - DNA, 25 bp, Probe sequence
gaacaaactgtcgatactattatga

SEQ ID NO: 214175 - DNA, 25 bp, Probe sequence
gaaaggcgatgttgttacgcacttc

SEQ ID NO: 214176 - DNA, 25 bp, Probe sequence
gacaccccatatcttgatactattt

SEQ ID NO: 214177 - DNA, 25 bp, Probe sequence
gaggacacgctcatcattttagccc

SEQ ID NO: 214178 - DNA, 25 bp, Probe sequence
gttacgcacttcagagattatcaat

SEQ ID NO: 214179 - DNA, 25 bp, Probe sequence
gtatgccaagcagttgtctatataa

SEQ ID NO: 214180 - DNA, 25 bp, Probe sequence
gtaccacatgcacctgcacaagata

SEQ ID NO: 214181 - DNA, 25 bp, Probe sequence
ggtccaagacagtcaaatcgacatt

SEQ ID NO: 214182 - DNA, 25 bp, Probe sequence
ggttgtcgtgttgcacaggcagagg

SEQ ID NO: 214183 - DNA, 25 bp, Probe sequence
ggagacacgccaaaacaataacata

SEQ ID NO: 214184 - DNA, 25 bp, Probe sequence
tgactatatatcaaggttatcccga

SEQ ID NO: 214185 - DNA, 25 bp, Probe sequence
tcgacaatttagagatttggtccaa

SEQ ID NO: 214186 - DNA, 25 bp, Probe sequence
tattatactgtaccacatgcacctg

SEQ ID NO: 214187 - DNA, 25 bp, Probe sequence
ttactagatggttgtcgtgttgcac

SEQ ID NO: 214188 - DNA, 25 bp, Probe sequence
attacctttatatcctgtgttacca

SEQ ID NO: 214189 - DNA, 25 bp, Probe sequence
attattgctgctatcgttattttat

SEQ ID NO: 214190 - DNA, 25 bp, Probe sequence
atatgctggtgtttcaatgattttc

SEQ ID NO: 214191 - DNA, 25 bp, Probe sequence
atcggtttcgattctatcgcagcaa

SEQ ID NO: 214192 - DNA, 25 bp, Probe sequence
atcgcagcaaactcagcagaagcac

SEQ ID NO: 214193 - DNA, 25 bp, Probe sequence
atgcctagaggtattcttggttctt

SEQ ID NO: 214194 - DNA, 25 bp, Probe sequence
agaggatccggctatctatcaaaat

SEQ ID NO: 214195 - DNA, 25 bp, Probe sequence
agcagctattgttcaagctatctct

SEQ ID NO: 214196 - DNA, 25 bp, Probe sequence
agctatctctgttatcggtatgttt

SEQ ID NO: 214197 - DNA, 25 bp, Probe sequence
acgcggacttgtgaaaccaattggc

SEQ ID NO: 214198 - DNA, 25 bp, Probe sequence
acgtgacggcttattaccttcatgg

SEQ ID NO: 214199 - DNA, 25 bp, Probe sequence
aaagcgtacacttcgggtgcgtgat

SEQ ID NO: 214200 - DNA, 25 bp, Probe sequence
aactgcattattactatcacgtggt

SEQ ID NO: 214201 - DNA, 25 bp, Probe sequence
aattggttctatgttcccattcgca

SEQ ID NO: 214202 - DNA, 25 bp, Probe sequence
caattgtatcgacatctatctttac

SEQ ID NO: 214203 - DNA, 25 bp, Probe sequence
gccgtagcctttgttgcatcaggat

SEQ ID NO: 214204 - DNA, 25 bp, Probe sequence
gccgctatgccatttgcaggttcag

SEQ ID NO: 214205 - DNA, 25 bp, Probe sequence
gctgaacctgttggttgggctttac

SEQ ID NO: 214206 - DNA, 25 bp, Probe sequence
gaatattttatcgccgtagcctttg

SEQ ID NO: 214207 - DNA, 25 bp, Probe sequence
gcaggttcagcctattcttgggtca

SEQ ID NO: 214208 - DNA, 25 bp, Probe sequence
gcaggctcacgtttactttattcat

SEQ ID NO: 214209 - DNA, 25 bp, Probe sequence
gattttcttagcgtatatcggtttc

SEQ ID NO: 214210 - DNA, 25 bp, Probe sequence
gattctcagcgaatttacgcggact

SEQ ID NO: 214211 - DNA, 25 bp, Probe sequence
gttggtatgttccattactcacaat

SEQ ID NO: 214212 - DNA, 25 bp, Probe sequence
gttgcgttatcattcttactcgctg

SEQ ID NO: 214213 - DNA, 25 bp, Probe sequence
gttcccattcgcatttttagcacaa

SEQ ID NO: 214214 - DNA, 25 bp, Probe sequence
gtaactatgtgccatttattccaga

SEQ ID NO: 214215 - DNA, 25 bp, Probe sequence
gtggtcatggtgttgtagcagctat

SEQ ID NO: 214216 - DNA, 25 bp, Probe sequence
gggtgcgtgatttcttagctttagg

SEQ ID NO: 214217 - DNA, 25 bp, Probe sequence
ggtacacttgttgcatttatgttcg

SEQ ID NO: 214218 - DNA, 25 bp, Probe sequence
ggcggttttatcgatattattgctg

SEQ ID NO: 214219 - DNA, 25 bp, Probe sequence
tgcagaaatggctgccgctatgcca

SEQ ID NO: 214220 - DNA, 25 bp, Probe sequence
taactgctacaggtgactttggtgg

SEQ ID NO: 214221 - DNA, 25 bp, Probe sequence
ttactcgctgctattgttgctggtt

SEQ ID NO: 214222 - DNA, 25 bp, Probe sequence
attgttccatttcattgctgctatt

SEQ ID NO: 214223 - DNA, 25 bp, Probe sequence
attgctgctattttcatatcattca

SEQ ID NO: 214224 - DNA, 25 bp, Probe sequence
attttcatatcattcatgttgctat

SEQ ID NO: 214225 - DNA, 25 bp, Probe sequence
atttcattgctgctattttcatatc

SEQ ID NO: 214226 - DNA, 25 bp, Probe sequence
atgcgtttaaaagtattgttccatt

SEQ ID NO: 214227 - DNA, 25 bp, Probe sequence
agtattgttccatttcattgctgct

SEQ ID NO: 214228 - DNA, 25 bp, Probe sequence
aaaaggctttactatctatgttata

SEQ ID NO: 214229 - DNA, 25 bp, Probe sequence
aatcggttggattattacacatatt

SEQ ID NO: 214230 - DNA, 25 bp, Probe sequence
aatatgtcacttactaattggtagc

SEQ ID NO: 214231 - DNA, 25 bp, Probe sequence
cattcatgttgctatggatgaccat

SEQ ID NO: 214232 - DNA, 25 bp, Probe sequence
ctgtttcatacttctaaaaggcttt

SEQ ID NO: 214233 - DNA, 25 bp, Probe sequence
ctaattccttctgacaatacaccat

SEQ ID NO: 214234 - DNA, 25 bp, Probe sequence
gctgctattttcatatcattcatgt

SEQ ID NO: 214235 - DNA, 25 bp, Probe sequence
gctatggatgaccatgttgtttgac

SEQ ID NO: 214236 - DNA, 25 bp, Probe sequence
gcattgtatccctttttagtattta

SEQ ID NO: 214237 - DNA, 25 bp, Probe sequence
gcaacgtccaatttttcaatttagt

SEQ ID NO: 214238 - DNA, 25 bp, Probe sequence
gcaatcaatcacatttaaaagcttt

SEQ ID NO: 214239 - DNA, 25 bp, Probe sequence
gaaataatatgtcacttactaattg

SEQ ID NO: 214240 - DNA, 25 bp, Probe sequence
gattttctaattccttctgacaata

SEQ ID NO: 214241 - DNA, 25 bp, Probe sequence
gttggattattacacatattttctt

SEQ ID NO: 214242 - DNA, 25 bp, Probe sequence
gttccatttcattgctgctattttc

SEQ ID NO: 214243 - DNA, 25 bp, Probe sequence
gtcattaatggcgttagtcatacct

SEQ ID NO: 214244 - DNA, 25 bp, Probe sequence
gtccaatttttcaatttagtgtgac

SEQ ID NO: 214245 - DNA, 25 bp, Probe sequence
gtgtgacagaattaatcggttggat

SEQ ID NO: 214246 - DNA, 25 bp, Probe sequence
ggctttactatctatgttatatccc

SEQ ID NO: 214247 - DNA, 25 bp, Probe sequence
ggcgttagtcatacctagaataaaa

SEQ ID NO: 214248 - DNA, 25 bp, Probe sequence
tgcgcaacgtccaatttttcaattt

SEQ ID NO: 214249 - DNA, 25 bp, Probe sequence
taatggcgttagtcatacctagaat

SEQ ID NO: 214250 - DNA, 25 bp, Probe sequence
tatagcattgtatccctttttagta

SEQ ID NO: 214251 - DNA, 25 bp, Probe sequence
tattgcgcaacgtccaatttttcaa

SEQ ID NO: 214252 - DNA, 25 bp, Probe sequence
ttagtatttattgcgcaacgtccaa

SEQ ID NO: 214253 - DNA, 25 bp, Probe sequence
ttagattttctaattccttctgaca

SEQ ID NO: 214254 - DNA, 25 bp, Probe sequence
ttactatctatgttatatcccttta

SEQ ID NO: 214255 - DNA, 25 bp, Probe sequence
ttcttatttatagcattgtatccct

SEQ ID NO: 214256 - DNA, 25 bp, Probe sequence
attgccgcattagaccaaagtggtg

SEQ ID NO: 214257 - DNA, 25 bp, Probe sequence
atggaaaaggctttattgccgcatt

SEQ ID NO: 214258 - DNA, 25 bp, Probe sequence
accttcattctcaccagataaaatt

SEQ ID NO: 214259 - DNA, 25 bp, Probe sequence
acgacgcatctgtaaacaaaaacta

SEQ ID NO: 214260 - DNA, 25 bp, Probe sequence
acgtgtggtaacttcaccttcattc

SEQ ID NO: 214261 - DNA, 25 bp, Probe sequence
acttgttcacgatatgcgtacacgt

SEQ ID NO: 214262 - DNA, 25 bp, Probe sequence
aaggctttattgccgcattagacca

SEQ ID NO: 214263 - DNA, 25 bp, Probe sequence
aatacactgcagattacttagctga

SEQ ID NO: 214264 - DNA, 25 bp, Probe sequence
caatctacgacgcatctgtaaacaa

SEQ ID NO: 214265 - DNA, 25 bp, Probe sequence
cgttgtattatcaggtggttacagc

SEQ ID NO: 214266 - DNA, 25 bp, Probe sequence
ccaattatcgaaccagaagttaata

SEQ ID NO: 214267 - DNA, 25 bp, Probe sequence
gcgtacacgtgtggtaacttcacct

SEQ ID NO: 214268 - DNA, 25 bp, Probe sequence
gcattagctagtgatttaagagctg

SEQ ID NO: 214269 - DNA, 25 bp, Probe sequence
gcaaatacactgcagattacttagc

SEQ ID NO: 214270 - DNA, 25 bp, Probe sequence
gaatatggtgtaaacgaagatcaat

SEQ ID NO: 214271 - DNA, 25 bp, Probe sequence
gaatcaatctacgacgcatctgtaa

SEQ ID NO: 214272 - DNA, 25 bp, Probe sequence
gaagacgaaatgttccaacttgttc

SEQ ID NO: 214273 - DNA, 25 bp, Probe sequence
gaacaaacaatggatcgcgaagtag

SEQ ID NO: 214274 - DNA, 25 bp, Probe sequence
gaaatgttccaacttgttcacgata

SEQ ID NO: 214275 - DNA, 25 bp, Probe sequence
gacgaaatgttccaacttgttcacg

SEQ ID NO: 214276 - DNA, 25 bp, Probe sequence
gagcaaaatggtgttcaattaatga

SEQ ID NO: 214277 - DNA, 25 bp, Probe sequence
gttccaacttgttcacgatatgcgt

SEQ ID NO: 214278 - DNA, 25 bp, Probe sequence
gtacacgtgtggtaacttcaccttc

SEQ ID NO: 214279 - DNA, 25 bp, Probe sequence
ggtgctattcttttcgaacaaacaa

SEQ ID NO: 214280 - DNA, 25 bp, Probe sequence
ggtagtacaccaaaagcacttaaag

SEQ ID NO: 214281 - DNA, 25 bp, Probe sequence
ggtatcaaagacgttgttgaacaac

SEQ ID NO: 214282 - DNA, 25 bp, Probe sequence
ggctttattgccgcattagaccaaa

SEQ ID NO: 214283 - DNA, 25 bp, Probe sequence
tgtggtaacttcaccttcattctca

SEQ ID NO: 214284 - DNA, 25 bp, Probe sequence
tagaccaaagtggtggtagtacacc

SEQ ID NO: 214285 - DNA, 25 bp, Probe sequence
taatgaaaccaatcgacaacttaga

SEQ ID NO: 214286 - DNA, 25 bp, Probe sequence
tagacaaaggtcttgctgaagagca

SEQ ID NO: 214287 - DNA, 25 bp, Probe sequence
tagaatcaatctacgacgcatctgt

SEQ ID NO: 214288 - DNA, 25 bp, Probe sequence
ttatcaggtggttacagcagagaaa

SEQ ID NO: 214289 - DNA, 25 bp, Probe sequence
ttcaccttcattctcaccagataaa

SEQ ID NO: 214290 - DNA, 25 bp, Probe sequence
atcaatgtcgaagcagtaaaagatg

SEQ ID NO: 214291 - DNA, 25 bp, Probe sequence
atcgccgagaaagactttttcatct

SEQ ID NO: 214292 - DNA, 25 bp, Probe sequence
atgactcgttctcagaacaaacagc

SEQ ID NO: 214293 - DNA, 25 bp, Probe sequence
atggtgtttgaaggcagtatgacgc

SEQ ID NO: 214294 - DNA, 25 bp, Probe sequence
aggcagtatgacgcttgatgaaatg

SEQ ID NO: 214295 - DNA, 25 bp, Probe sequence
cagttaaccgaagcgattgaaagcg

SEQ ID NO: 214296 - DNA, 25 bp, Probe sequence
agctcagcttgatcatacacatgtt

SEQ ID NO: 214297 - DNA, 25 bp, Probe sequence
acaacaatttacgagaggaagccgc

SEQ ID NO: 214298 - DNA, 25 bp, Probe sequence
aaagcagtgatttaactgaagctga

SEQ ID NO: 214299 - DNA, 25 bp, Probe sequence
aaaagatgctcaagctattatcaat

SEQ ID NO: 214300 - DNA, 25 bp, Probe sequence
caagtatgagtgctggcgttaagaa

SEQ ID NO: 214301 - DNA, 25 bp, Probe sequence
ctgaagctgaaacacaagaggcaca

SEQ ID NO: 214302 - DNA, 25 bp, Probe sequence
gccgcaaacaacattttatcgccga

SEQ ID NO: 214303 - DNA, 25 bp, Probe sequence
gccgagaaagactttttcatctttt

SEQ ID NO: 214304 - DNA, 25 bp, Probe sequence
gcttgatcatacacatgtttattac

SEQ ID NO: 214305 - DNA, 25 bp, Probe sequence
gcaaaccaagtatgagtgctggcgt

SEQ ID NO: 214306 - DNA, 25 bp, Probe sequence
gcaaacaacattttatcgccgagaa

SEQ ID NO: 214307 - DNA, 25 bp, Probe sequence
gaagtgtaggaaacttatatggcac

SEQ ID NO: 214308 - DNA, 25 bp, Probe sequence
gaagccgcaaacaacattttatcgc

SEQ ID NO: 214309 - DNA, 25 bp, Probe sequence
gaagcgattgaaagcggtgaaattt

SEQ ID NO: 214310 - DNA, 25 bp, Probe sequence
gaacaaacagcaacaattagaacaa

SEQ ID NO: 214311 - DNA, 25 bp, Probe sequence
gacagacaatggatttgtatggcac

SEQ ID NO: 214312 - DNA, 25 bp, Probe sequence
gacgcttgatgaaatgcgtcatcaa

SEQ ID NO: 214313 - DNA, 25 bp, Probe sequence
gtttgaaggcagtatgacgcttgat

SEQ ID NO: 214314 - DNA, 25 bp, Probe sequence
gtaattaattcaattggacagacaa

SEQ ID NO: 214315 - DNA, 25 bp, Probe sequence
gtcatcaattgcaaatgagcaaacc

SEQ ID NO: 214316 - DNA, 25 bp, Probe sequence
gtgctggcgttaagaaattgcagga

SEQ ID NO: 214317 - DNA, 25 bp, Probe sequence
ggatttgtatggcactaatagaagt

SEQ ID NO: 214318 - DNA, 25 bp, Probe sequence
tcgttctcagaacaaacagcaacaa

SEQ ID NO: 214319 - DNA, 25 bp, Probe sequence
taaagctcagcttgatcatacacat

SEQ ID NO: 214320 - DNA, 25 bp, Probe sequence
tacacatgtttattacgaatggtta

SEQ ID NO: 214321 - DNA, 25 bp, Probe sequence
tttacgagaggaagccgcaaacaac

SEQ ID NO: 214322 - DNA, 25 bp, Probe sequence
ttagaacagttaaccgaagcgattg

SEQ ID NO: 214323 - DNA, 25 bp, Probe sequence
ttgcaggaatttgatattgttaaac

SEQ ID NO: 214324 - DNA, 25 bp, Probe sequence
attaatcgtaactgcatgtggccct

SEQ ID NO: 214325 - DNA, 25 bp, Probe sequence
atggtacgacaaagggtatcttcct

SEQ ID NO: 214326 - DNA, 25 bp, Probe sequence
atgatgtcatgattggtctttttaa

SEQ ID NO: 214327 - DNA, 25 bp, Probe sequence
atggtaagaatcctaaacaagcgtt

SEQ ID NO: 214328 - DNA, 25 bp, Probe sequence
acttacgatgtgggtggatggcgac

SEQ ID NO: 214329 - DNA, 25 bp, Probe sequence
acaagcgttagatgaggcgacgaat

SEQ ID NO: 214330 - DNA, 25 bp, Probe sequence
aaatgcaccgcaaacgttagaagaa

SEQ ID NO: 214331 - DNA, 25 bp, Probe sequence
aaccgatgcctaatattcctgaaat

SEQ ID NO: 214332 - DNA, 25 bp, Probe sequence
aagcacgtcatgctgaaccgatgcc

SEQ ID NO: 214333 - DNA, 25 bp, Probe sequence
aagcaagcacttaaagcgatgaatt

SEQ ID NO: 214334 - DNA, 25 bp, Probe sequence
aagtaggacaatttgtcactggacc

SEQ ID NO: 214335 - DNA, 25 bp, Probe sequence
aagtgtttgaaaagcaagcacgtca

SEQ ID NO: 214336 - DNA, 25 bp, Probe sequence
aatactggaagtgcctatctacaag

SEQ ID NO: 214337 - DNA, 25 bp, Probe sequence
aatattcctgaaatgcgacaagttt

SEQ ID NO: 214338 - DNA, 25 bp, Probe sequence
aattatccgtttttattcggcaatg

SEQ ID NO: 214339 - DNA, 25 bp, Probe sequence
cacgttagccgtggtaatgttatta

SEQ ID NO: 214340 - DNA, 25 bp, Probe sequence
catgtggccctaatcgttcgaaaga

SEQ ID NO: 214341 - DNA, 25 bp, Probe sequence
cctacagatggtggcaaacctatga

SEQ ID NO: 214342 - DNA, 25 bp, Probe sequence
cctatctacaaggcttagctgctga

SEQ ID NO: 214343 - DNA, 25 bp, Probe sequence
gcgacaagtttgggaaccgatgggc

SEQ ID NO: 214344 - DNA, 25 bp, Probe sequence
gcgaaattactggacgtgttgacgt

SEQ ID NO: 214345 - DNA, 25 bp, Probe sequence
gaagaagttgaagctaatgctgcca

SEQ ID NO: 214346 - DNA, 25 bp, Probe sequence
gacaagcctaaccaacttacgatgt

SEQ ID NO: 214347 - DNA, 25 bp, Probe sequence
gatggcgacaagcaaatggcgtttt

SEQ ID NO: 214348 - DNA, 25 bp, Probe sequence
gatattcatcagctaggactaaatt

SEQ ID NO: 214349 - DNA, 25 bp, Probe sequence
gtaactgcatgtggccctaatcgtt

SEQ ID NO: 214350 - DNA, 25 bp, Probe sequence
gtggcaaacctatgaaaccatttct

SEQ ID NO: 214351 - DNA, 25 bp, Probe sequence
gggtatcttcctaaggcagcaacac

SEQ ID NO: 214352 - DNA, 25 bp, Probe sequence
ggtgtacgtggttggtatttatctg

SEQ ID NO: 214353 - DNA, 25 bp, Probe sequence
ggtccagatatctttttcttagcac

SEQ ID NO: 214354 - DNA, 25 bp, Probe sequence
ggcttagctgctgaaatcaaattat

SEQ ID NO: 214355 - DNA, 25 bp, Probe sequence
tgggaaccgatgggcaatgcaagca

SEQ ID NO: 214356 - DNA, 25 bp, Probe sequence
taaggcagcaacacatgatgtcatg

SEQ ID NO: 214357 - DNA, 25 bp, Probe sequence
ttttcttagcacatgataatactgg

SEQ ID NO: 214358 - DNA, 25 bp, Probe sequence
aatggctaaaggtgaagaccctgaa

SEQ ID NO: 214359 - DNA, 25 bp, Probe sequence
atgccacttgcaatagatgcttcta

SEQ ID NO: 214360 - DNA, 25 bp, Probe sequence
atggtgccatcggtgttgacagtaa

SEQ ID NO: 214361 - DNA, 25 bp, Probe sequence
agatgcaacaccagcagcatatgct

SEQ ID NO: 214362 - DNA, 25 bp, Probe sequence
agcatatgctgcacacgtgacttct

SEQ ID NO: 214363 - DNA, 25 bp, Probe sequence
acacctgcaattgcgcaatccgata

SEQ ID NO: 214364 - DNA, 25 bp, Probe sequence
aaaggcacaaatcgtacatattcaa

SEQ ID NO: 214365 - DNA, 25 bp, Probe sequence
aaagtgcacttagtaagcttgagcg

SEQ ID NO: 214366 - DNA, 25 bp, Probe sequence
aaagccacaaaatttgcagttgcta

SEQ ID NO: 214367 - DNA, 25 bp, Probe sequence
aatgttatctttttagttggcgatg

SEQ ID NO: 214368 - DNA, 25 bp, Probe sequence
ctctactggtggtctaacaattggt

SEQ ID NO: 214369 - DNA, 25 bp, Probe sequence
ctggcggaacagcctttagttctgg

SEQ ID NO: 214370 - DNA, 25 bp, Probe sequence
cgatgacgccattcaatatgctaag

SEQ ID NO: 214371 - DNA, 25 bp, Probe sequence
cctactgcttttgattcatatttaa

SEQ ID NO: 214372 - DNA, 25 bp, Probe sequence
gcgcaatccgataaaagttctaaag

SEQ ID NO: 214373 - DNA, 25 bp, Probe sequence
gctgcacacgtgacttctagagatg

SEQ ID NO: 214374 - DNA, 25 bp, Probe sequence
gcagttgctaaccttattatcgtgt

SEQ ID NO: 214375 - DNA, 25 bp, Probe sequence
gcaacagcagatcactctactggtg

SEQ ID NO: 214376 - DNA, 25 bp, Probe sequence
gaaccatcattagctgatatgcaac

SEQ ID NO: 214377 - DNA, 25 bp, Probe sequence
gaaaaagcattcgatgacgccattc

SEQ ID NO: 214378 - DNA, 25 bp, Probe sequence
gaaacactctggatcatatatgaca

SEQ ID NO: 214379 - DNA, 25 bp, Probe sequence
gactggtcttgtttcaacagctgaa

SEQ ID NO: 214380 - DNA, 25 bp, Probe sequence
gatgaaagtttcgcggttggtaata

SEQ ID NO: 214381 - DNA, 25 bp, Probe sequence
gatacgaatggaatcctcaaccgat

SEQ ID NO: 214382 - DNA, 25 bp, Probe sequence
gatacacttgtcgttgcaacagcag

SEQ ID NO: 214383 - DNA, 25 bp, Probe sequence
gttggcgatggcatgggtccatcat

SEQ ID NO: 214384 - DNA, 25 bp, Probe sequence
gtaagtcgactggtcttgtttcaac

SEQ ID NO: 214385 - DNA, 25 bp, Probe sequence
ggtgcttctatagataaatcagcgc

SEQ ID NO: 214386 - DNA, 25 bp, Probe sequence
ggacttccgatggacatacaggcga

SEQ ID NO: 214387 - DNA, 25 bp, Probe sequence
ggacctagatcagaatcatttagtg

SEQ ID NO: 214388 - DNA, 25 bp, Probe sequence
tccatcatttaacacagcttatcgt

SEQ ID NO: 214389 - DNA, 25 bp, Probe sequence
tctgtcacacctgcaattgcgcaat

SEQ ID NO: 214390 - DNA, 25 bp, Probe sequence
tactgattctgcagctggcggaaca

SEQ ID NO: 214391 - DNA, 25 bp, Probe sequence
tttttaatggtcgaaggtgcttcta

SEQ ID NO: 214392 - DNA, 25 bp, Probe sequence
attaatcggagcacttgggttcgca

SEQ ID NO: 214393 - DNA, 25 bp, Probe sequence
attctacatcatcaagtaataacca

SEQ ID NO: 214394 - DNA, 25 bp, Probe sequence
attaccatcgtaattatcgtattaa

SEQ ID NO: 214395 - DNA, 25 bp, Probe sequence
atcggagcacttgggttcgcaattt

SEQ ID NO: 214396 - DNA, 25 bp, Probe sequence
agtcaatcgtcaacaaacaaccaaa

SEQ ID NO: 214397 - DNA, 25 bp, Probe sequence
agaacacaccacctgctaataaatc

SEQ ID NO: 214398 - DNA, 25 bp, Probe sequence
accatcgaatacgcaaccagctcag

SEQ ID NO: 214399 - DNA, 25 bp, Probe sequence
accacctgctaataaatcaaataat

SEQ ID NO: 214400 - DNA, 25 bp, Probe sequence
acctcaagcacaatcacctaaaaat

SEQ ID NO: 214401 - DNA, 25 bp, Probe sequence
actaatgacaatcaaccatcttcac

SEQ ID NO: 214402 - DNA, 25 bp, Probe sequence
acttgggttcgcaatttatgctgca

SEQ ID NO: 214403 - DNA, 25 bp, Probe sequence
acatcatcaagtaataaccaagaac

SEQ ID NO: 214404 - DNA, 25 bp, Probe sequence
aaacaaacacctcaagcacaatcac

SEQ ID NO: 214405 - DNA, 25 bp, Probe sequence
aacacaccacctgctaataaatcaa

SEQ ID NO: 214406 - DNA, 25 bp, Probe sequence
aacttcttattaccatcgtaattat

SEQ ID NO: 214407 - DNA, 25 bp, Probe sequence
aatgttcctaacaaccattcaacag

SEQ ID NO: 214408 - DNA, 25 bp, Probe sequence
caacagaacacaccacctgctaata

SEQ ID NO: 214409 - DNA, 25 bp, Probe sequence
caacaaacaaccaaaataatcaaca

SEQ ID NO: 214410 - DNA, 25 bp, Probe sequence
cacaccacctgctaataaatcaaat

SEQ ID NO: 214411 - DNA, 25 bp, Probe sequence
ccatcgaatacgcaaccagctcagc

SEQ ID NO: 214412 - DNA, 25 bp, Probe sequence
gcacttgggttcgcaatttatgctg

SEQ ID NO: 214413 - DNA, 25 bp, Probe sequence
gaaaccgaagaaaatgatcaacaag

SEQ ID NO: 214414 - DNA, 25 bp, Probe sequence
taatcggagcacttgggttcgcaat

SEQ ID NO: 214415 - DNA, 25 bp, Probe sequence
gtcaaatgttcctaacaaccattca

SEQ ID NO: 214416 - DNA, 25 bp, Probe sequence
ggagcacttgggttcgcaatttatg

SEQ ID NO: 214417 - DNA, 25 bp, Probe sequence
tggaggcgttatatttgaaaaaact

SEQ ID NO: 214418 - DNA, 25 bp, Probe sequence
tgggttcgcaatttatgctgcaata

SEQ ID NO: 214419 - DNA, 25 bp, Probe sequence
tgaaaaaacttcttattaccatcgt

SEQ ID NO: 214420 - DNA, 25 bp, Probe sequence
tcaacaacagaacacaccacctgct

SEQ ID NO: 214421 - DNA, 25 bp, Probe sequence
tcaagcacaatcacctaaaaattaa

SEQ ID NO: 214422 - DNA, 25 bp, Probe sequence
tcaacaagatgatagtgcagacaaa

SEQ ID NO: 214423 - DNA, 25 bp, Probe sequence
taatcaacaacagaacacaccacct

SEQ ID NO: 214424 - DNA, 25 bp, Probe sequence
ttatcgtattaatcggagcacttgg

SEQ ID NO: 214425 - DNA, 25 bp, Probe sequence
ttctaaacaaacacctcaagcacaa

SEQ ID NO: 214426 - DNA, 25 bp, Probe sequence
atttcgttcgaattcaacaatggtg

SEQ ID NO: 214427 - DNA, 25 bp, Probe sequence
atttccttgtcgtaaatactgaaca

SEQ ID NO: 214428 - DNA, 25 bp, Probe sequence
ataacacactatcactttgacaatg

SEQ ID NO: 214429 - DNA, 25 bp, Probe sequence
atcgagcgtcgtaccaaaacacaat

SEQ ID NO: 214430 - DNA, 25 bp, Probe sequence
atcgaatcagctttagagcgtgaga

SEQ ID NO: 214431 - DNA, 25 bp, Probe sequence
agcatatttacgtatcactcaaaac

SEQ ID NO: 214432 - DNA, 25 bp, Probe sequence
aaactattattatctatggcgtatc

SEQ ID NO: 214433 - DNA, 25 bp, Probe sequence
aaaactgtgctcaacgactatttcg

SEQ ID NO: 214434 - DNA, 25 bp, Probe sequence
aacaattcattttcaagctgccatc

SEQ ID NO: 214435 - DNA, 25 bp, Probe sequence
aacacactttttgaagcgattgata

SEQ ID NO: 214436 - DNA, 25 bp, Probe sequence
aacagcttttaattcatctcatttt

SEQ ID NO: 214437 - DNA, 25 bp, Probe sequence
aacgttacacgcatattcaatcata

SEQ ID NO: 214438 - DNA, 25 bp, Probe sequence
aatcaattatcatcagggcatgtac

SEQ ID NO: 214439 - DNA, 25 bp, Probe sequence
caatcacatgtgcttatttttcgca

SEQ ID NO: 214440 - DNA, 25 bp, Probe sequence
caatgtttcaaaccgcacagttcgc

SEQ ID NO: 214441 - DNA, 25 bp, Probe sequence
caagcacatcatgcgattgtagaag

SEQ ID NO: 214442 - DNA, 25 bp, Probe sequence
caaaccgcacagttcgcaatgatat

SEQ ID NO: 214443 - DNA, 25 bp, Probe sequence
cattttcaagctgccatcgagcgtc

SEQ ID NO: 214444 - DNA, 25 bp, Probe sequence
gcgtatcaactgctaatgcacaata

SEQ ID NO: 214445 - DNA, 25 bp, Probe sequence
gaattacctgattcacaccaaagga

SEQ ID NO: 214446 - DNA, 25 bp, Probe sequence
gagcgtgagaaatcatcttctacat

SEQ ID NO: 214447 - DNA, 25 bp, Probe sequence
gagacacttcaacaacatagtattg

SEQ ID NO: 214448 - DNA, 25 bp, Probe sequence
gatcgcttaatcgaattgatgcagc

SEQ ID NO: 214449 - DNA, 25 bp, Probe sequence
gatagacacttaaaactactccagt

SEQ ID NO: 214450 - DNA, 25 bp, Probe sequence
gatatcactaatgccatcatccatt

SEQ ID NO: 214451 - DNA, 25 bp, Probe sequence
gatatctcaatcttgcattaagcaa

SEQ ID NO: 214452 - DNA, 25 bp, Probe sequence
gttttcattctttattgcttatcat

SEQ ID NO: 214453 - DNA, 25 bp, Probe sequence
gtagtcattgcttgttattatggtc

SEQ ID NO: 214454 - DNA, 25 bp, Probe sequence
ggcatgtacatgttgaagacctaat

SEQ ID NO: 214455 - DNA, 25 bp, Probe sequence
ggcgattcctcatggagatcctgaa

SEQ ID NO: 214456 - DNA, 25 bp, Probe sequence
tggtctaggtgtgtcgaatttttta

SEQ ID NO: 214457 - DNA, 25 bp, Probe sequence
tgattcagtgaaccatttatgtagt

SEQ ID NO: 214458 - DNA, 25 bp, Probe sequence
tcaaggttgcaccattattttctga

SEQ ID NO: 214459 - DNA, 25 bp, Probe sequence
taggtaattttatggcgattcctca

SEQ ID NO: 214460 - DNA, 25 bp, Probe sequence
attgccgtaccaaacaacagtcagg

SEQ ID NO: 214461 - DNA, 25 bp, Probe sequence
attgtagctattacctcatgcccaa

SEQ ID NO: 214462 - DNA, 25 bp, Probe sequence
attcccattatttcatcggtcgttg

SEQ ID NO: 214463 - DNA, 25 bp, Probe sequence
atatatcgctgttagtatcgctgac

SEQ ID NO: 214464 - DNA, 25 bp, Probe sequence
acgccgttatgggtatggtcgcagt

SEQ ID NO: 214465 - DNA, 25 bp, Probe sequence
aaaaatacttcagcgcttatctaaa

SEQ ID NO: 214466 - DNA, 25 bp, Probe sequence
cccggtcttgttcctggtatgattg

SEQ ID NO: 214467 - DNA, 25 bp, Probe sequence
aatcggtgcaccaatttctaatatt

SEQ ID NO: 214468 - DNA, 25 bp, Probe sequence
catcgcgctgactctaggcggtgaa

SEQ ID NO: 214469 - DNA, 25 bp, Probe sequence
ttagtatcgctgacaagcccggtct

SEQ ID NO: 214470 - DNA, 25 bp, Probe sequence
ctgaaggtgctattcctttcgcagc

SEQ ID NO: 214471 - DNA, 25 bp, Probe sequence
cgtagttggtggactccttatcgcc

SEQ ID NO: 214472 - DNA, 25 bp, Probe sequence
gccttcgatatgggcggtccagtaa

SEQ ID NO: 214473 - DNA, 25 bp, Probe sequence
gccgttatgtagagcacacatcgca

SEQ ID NO: 214474 - DNA, 25 bp, Probe sequence
gctatcgctgctgacggtagttttt

SEQ ID NO: 214475 - DNA, 25 bp, Probe sequence
gcatttttatttggctcagcactta

SEQ ID NO: 214476 - DNA, 25 bp, Probe sequence
gacacagggcggtgttggtgctgaa

SEQ ID NO: 214477 - DNA, 25 bp, Probe sequence
gacggtgtcataattgcagctgata

SEQ ID NO: 214478 - DNA, 25 bp, Probe sequence
gagaggtctaattcaacgtatcatt

SEQ ID NO: 214479 - DNA, 25 bp, Probe sequence
gatgcaggcgcaggatttttaggtg

SEQ ID NO: 214480 - DNA, 25 bp, Probe sequence
gatgcgcctatttatcaatctgaaa

SEQ ID NO: 214481 - DNA, 25 bp, Probe sequence
gatagtaggtagtcttgtcacaatg

SEQ ID NO: 214482 - DNA, 25 bp, Probe sequence
gtatcgtttatggttccttttatcg

SEQ ID NO: 214483 - DNA, 25 bp, Probe sequence
gtatgattggcggcgctatcgctgc

SEQ ID NO: 214484 - DNA, 25 bp, Probe sequence
gtaaggcttccttcactatgggact

SEQ ID NO: 214485 - DNA, 25 bp, Probe sequence
ggagtctacgacagctattggcatg

SEQ ID NO: 214486 - DNA, 25 bp, Probe sequence
gtggctgtattaggtggtattgatc

SEQ ID NO: 214487 - DNA, 25 bp, Probe sequence
ggtggtattgttgctggtttcttag

SEQ ID NO: 214488 - DNA, 25 bp, Probe sequence
ggtcgcagttgctgtatgtacacca

SEQ ID NO: 214489 - DNA, 25 bp, Probe sequence
ggcatgaacgtggccattccacatg

SEQ ID NO: 214490 - DNA, 25 bp, Probe sequence
ggccattccacatgcaaagtctgat

SEQ ID NO: 214491 - DNA, 25 bp, Probe sequence
tgattgcatcagtcattgcagccat

SEQ ID NO: 214492 - DNA, 25 bp, Probe sequence
tgcctatcattattattcccattat

SEQ ID NO: 214493 - DNA, 25 bp, Probe sequence
tagcagtagatgcaccagcgcaaca

SEQ ID NO: 214494 - DNA, 25 bp, Probe sequence
atttctgcacatccaaatggtccta

SEQ ID NO: 214495 - DNA, 25 bp, Probe sequence
atgctgggcaatttctgcacatcca

SEQ ID NO: 214496 - DNA, 25 bp, Probe sequence
atgacatccaaaaaggttctagctt

SEQ ID NO: 214497 - DNA, 25 bp, Probe sequence
agtgctatagtaagtcatcctggat

SEQ ID NO: 214498 - DNA, 25 bp, Probe sequence
agcatttaactatgatatccctaat

SEQ ID NO: 214499 - DNA, 25 bp, Probe sequence
acgacataccgtatttatgactatg

SEQ ID NO: 214500 - DNA, 25 bp, Probe sequence
actactcctataacaactcacatcg

SEQ ID NO: 214501 - DNA, 25 bp, Probe sequence
acatccaaatggtcctaatacaatt

SEQ ID NO: 214502 - DNA, 25 bp, Probe sequence
acagaatttggggcggtcatgcatt

SEQ ID NO: 214503 - DNA, 25 bp, Probe sequence
acaactggtgaatgctgggcaattt

SEQ ID NO: 214504 - DNA, 25 bp, Probe sequence
aacgataagcactatgacatccaaa

SEQ ID NO: 214505 - DNA, 25 bp, Probe sequence
aaccacatgcttattgcttagttac

SEQ ID NO: 214506 - DNA, 25 bp, Probe sequence
aatcatgaaccaaatactactccta

SEQ ID NO: 214507 - DNA, 25 bp, Probe sequence
aatacaattatcaatggtccataca

SEQ ID NO: 214508 - DNA, 25 bp, Probe sequence
aattatatatggcgtacatgcacat

SEQ ID NO: 214509 - DNA, 25 bp, Probe sequence
cacgaaggcgaactaggtaaaacag

SEQ ID NO: 214510 - DNA, 25 bp, Probe sequence
ctttgtcggtaatattagtgctata

SEQ ID NO: 214511 - DNA, 25 bp, Probe sequence
ctcacatcgacacacacactgtaac

SEQ ID NO: 214512 - DNA, 25 bp, Probe sequence
ctggcactgtccatgccattggttc

SEQ ID NO: 214513 - DNA, 25 bp, Probe sequence
ccatgccattggttcgggtatttta

SEQ ID NO: 214514 - DNA, 25 bp, Probe sequence
gacagtcttttcaaacgtatacctg

SEQ ID NO: 214515 - DNA, 25 bp, Probe sequence
gacacacacactgtaactcaatttg

SEQ ID NO: 214516 - DNA, 25 bp, Probe sequence
gaggatattcactttgtcggtaata

SEQ ID NO: 214517 - DNA, 25 bp, Probe sequence
gatgcagccccaggtgctgaaatta

SEQ ID NO: 214518 - DNA, 25 bp, Probe sequence
gatcaactttggtcacaacatcgtg

SEQ ID NO: 214519 - DNA, 25 bp, Probe sequence
gtttccctctgctaactaaagtatt

SEQ ID NO: 214520 - DNA, 25 bp, Probe sequence
gtccatacaaggatatgaccctaga

SEQ ID NO: 214521 - DNA, 25 bp, Probe sequence
ggtcaattgcgtgatttgcacttag

SEQ ID NO: 214522 - DNA, 25 bp, Probe sequence
ggtatattttagatgcagccccagg

SEQ ID NO: 214523 - DNA, 25 bp, Probe sequence
ggatatgaccctagatcaactttgg

SEQ ID NO: 214524 - DNA, 25 bp, Probe sequence
tctagctttattttaactacggaag

SEQ ID NO: 214525 - DNA, 25 bp, Probe sequence
taatcatgaatttgacagtcttttc

SEQ ID NO: 214526 - DNA, 25 bp, Probe sequence
tttggggcggtcatgcattaaaagc

SEQ ID NO: 214527 - DNA, 25 bp, Probe sequence
ttcacgagatagtttccctctgcta

SEQ ID NO: 214528 - DNA, 25 bp, Probe sequence
attacggtcatgtagcatttgttga

SEQ ID NO: 214529 - DNA, 25 bp, Probe sequence
atttgctatcaactacgctcgtatt

SEQ ID NO: 214530 - DNA, 25 bp, Probe sequence
atcgagctcaataccgtgattatca

SEQ ID NO: 214531 - DNA, 25 bp, Probe sequence
agacgacagcacttcagactctaac

SEQ ID NO: 214532 - DNA, 25 bp, Probe sequence
actacgctcgtattacctactttag

SEQ ID NO: 214533 - DNA, 25 bp, Probe sequence
actacagctaagacaacatctcatg

SEQ ID NO: 214534 - DNA, 25 bp, Probe sequence
aaacctgctcaatcattcaataacg

SEQ ID NO: 214535 - DNA, 25 bp, Probe sequence
aacataaatctaaacctgctcaatc

SEQ ID NO: 214536 - DNA, 25 bp, Probe sequence
aagatgcaacatcacacttatctaa

SEQ ID NO: 214537 - DNA, 25 bp, Probe sequence
aatcaatgtcagattcggctttaga

SEQ ID NO: 214538 - DNA, 25 bp, Probe sequence
caatttggtacatctatctcaggtg

SEQ ID NO: 214539 - DNA, 25 bp, Probe sequence
cactaaaagattactctgaccttat

SEQ ID NO: 214540 - DNA, 25 bp, Probe sequence
catcagatgaattcaaacctttccg

SEQ ID NO: 214541 - DNA, 25 bp, Probe sequence
gctgctgttgtatttgaggctggac

SEQ ID NO: 214542 - DNA, 25 bp, Probe sequence
gcagctgccgctgaagaattatcat

SEQ ID NO: 214543 - DNA, 25 bp, Probe sequence
gcaaccaaattcgccaaagccaaca

SEQ ID NO: 214544 - DNA, 25 bp, Probe sequence
gcaatcttagaatctgactcaggtc

SEQ ID NO: 214545 - DNA, 25 bp, Probe sequence
gaatccacagttaccaacacaagat

SEQ ID NO: 214546 - DNA, 25 bp, Probe sequence
gactcaggtcgtagtgctttagcta

SEQ ID NO: 214547 - DNA, 25 bp, Probe sequence
gaggctggacaatttggtgcagatc

SEQ ID NO: 214548 - DNA, 25 bp, Probe sequence
gataacgatatttatgcgtctgtca

SEQ ID NO: 214549 - DNA, 25 bp, Probe sequence
gatacacgtcaatttgtcaaatcaa

SEQ ID NO: 214550 - DNA, 25 bp, Probe sequence
gatatttctgattacgaacaacctc

SEQ ID NO: 214551 - DNA, 25 bp, Probe sequence
gattaggtatcatttctcatagaac

SEQ ID NO: 214552 - DNA, 25 bp, Probe sequence
gattccgaaaatatccaagcacgaa

SEQ ID NO: 214553 - DNA, 25 bp, Probe sequence
gtatagtattaatgctggattccga

SEQ ID NO: 214554 - DNA, 25 bp, Probe sequence
gtcaccaaaccataatttattcggt

SEQ ID NO: 214555 - DNA, 25 bp, Probe sequence
gtgctttagctaagtcaccaaacca

SEQ ID NO: 214556 - DNA, 25 bp, Probe sequence
gtgatggttctatcgttatttcaga

SEQ ID NO: 214557 - DNA, 25 bp, Probe sequence
ggaattctgttccttttaacacatt

SEQ ID NO: 214558 - DNA, 25 bp, Probe sequence
tggtgcagatcaacattacggtcat

SEQ ID NO: 214559 - DNA, 25 bp, Probe sequence
tgcgtctgtcatgattgcccaagca

SEQ ID NO: 214560 - DNA, 25 bp, Probe sequence
tacaccaaaacgtcatgctgctgtt

SEQ ID NO: 214561 - DNA, 25 bp, Probe sequence
tatgctacagatccaaactatgcta

SEQ ID NO: 214562 - DNA, 25 bp, Probe sequence
atttattaggtcttgctactttaag

SEQ ID NO: 214563 - DNA, 25 bp, Probe sequence
agaacttgtaaaatacgtcggcatt

SEQ ID NO: 214564 - DNA, 25 bp, Probe sequence
acatttcgaagctggccaaggtaaa

SEQ ID NO: 214565 - DNA, 25 bp, Probe sequence
agctgcttacaaacatttcgaagct

SEQ ID NO: 214566 - DNA, 25 bp, Probe sequence
accaagccagtaaacctaaattgca

SEQ ID NO: 214567 - DNA, 25 bp, Probe sequence
acgtcggcattgcagaagcaactac

SEQ ID NO: 214568 - DNA, 25 bp, Probe sequence
actgctgctttatactcagctagct

SEQ ID NO: 214569 - DNA, 25 bp, Probe sequence
acaaacatttcgaagctggccaagg

SEQ ID NO: 214570 - DNA, 25 bp, Probe sequence
actcagctagctttatcaataaaaa

SEQ ID NO: 214571 - DNA, 25 bp, Probe sequence
actactgctgctttatactcagcta

SEQ ID NO: 214572 - DNA, 25 bp, Probe sequence
aaaacttgcgaaagagctataccaa

SEQ ID NO: 214573 - DNA, 25 bp, Probe sequence
aagccagtaaacctaaattgcaaga

SEQ ID NO: 214574 - DNA, 25 bp, Probe sequence
aagtttactagatacattttcttgt

SEQ ID NO: 214575 - DNA, 25 bp, Probe sequence
aaggtaaaaaaggtgcacaacatgc

SEQ ID NO: 214576 - DNA, 25 bp, Probe sequence
aatacgtcggcattgcagaagcaac

SEQ ID NO: 214577 - DNA, 25 bp, Probe sequence
gcgaaagagctataccaagccagta

SEQ ID NO: 214578 - DNA, 25 bp, Probe sequence
gctggccaaggtaaaaaaggtgcac

SEQ ID NO: 214579 - DNA, 25 bp, Probe sequence
gctgctttatactcagctagcttta

SEQ ID NO: 214580 - DNA, 25 bp, Probe sequence
gctataccaagccagtaaacctaaa

SEQ ID NO: 214581 - DNA, 25 bp, Probe sequence
gctttatactcagctagctttatca

SEQ ID NO: 214582 - DNA, 25 bp, Probe sequence
gcattgcagaagcaactactgctgc

SEQ ID NO: 214583 - DNA, 25 bp, Probe sequence
gcagaagcaactactgctgctttat

SEQ ID NO: 214584 - DNA, 25 bp, Probe sequence
gcaactactgctgctttatactcag

SEQ ID NO: 214585 - DNA, 25 bp, Probe sequence
gagctataccaagccagtaaaccta

SEQ ID NO: 214586 - DNA, 25 bp, Probe sequence
gataagggtatgattgaactgtttg

SEQ ID NO: 214587 - DNA, 25 bp, Probe sequence
gtaaaatacgtcggcattgcagaag

SEQ ID NO: 214588 - DNA, 25 bp, Probe sequence
gtaaacctaaattgcaagaagataa

SEQ ID NO: 214589 - DNA, 25 bp, Probe sequence
gggtatgattgaactgtttgaacat

SEQ ID NO: 214590 - DNA, 25 bp, Probe sequence
ggtcttgctactttaagtttactag

SEQ ID NO: 214591 - DNA, 25 bp, Probe sequence
tcaataaaaacatttctcgccttgc

SEQ ID NO: 214592 - DNA, 25 bp, Probe sequence
tactagatacattttcttgtaataa

SEQ ID NO: 214593 - DNA, 25 bp, Probe sequence
tattaggtcttgctactttaagttt

SEQ ID NO: 214594 - DNA, 25 bp, Probe sequence
tatactcagctagctttatcaataa

SEQ ID NO: 214595 - DNA, 25 bp, Probe sequence
ttgaactgtttgaacatacttttgg

SEQ ID NO: 214596 - DNA, 25 bp, Probe sequence
attactacgagacttttttagcaca

SEQ ID NO: 214597 - DNA, 25 bp, Probe sequence
atgactttattttcgtcgatttaca

SEQ ID NO: 214598 - DNA, 25 bp, Probe sequence
atcaaggcattaaacaggcttcata

SEQ ID NO: 214599 - DNA, 25 bp, Probe sequence
atggctggactcatatttgtaagtt

SEQ ID NO: 214600 - DNA, 25 bp, Probe sequence
agtgcttctatatttaggctatttg

SEQ ID NO: 214601 - DNA, 25 bp, Probe sequence
agttggtatccgacagtatactgga

SEQ ID NO: 214602 - DNA, 25 bp, Probe sequence
agcgaagtcagacacttgctggcgc

SEQ ID NO: 214603 - DNA, 25 bp, Probe sequence
acgcagcagtagttcttgtcgcatt

SEQ ID NO: 214604 - DNA, 25 bp, Probe sequence
acgttgtctaatgttcttgcactca

SEQ ID NO: 214605 - DNA, 25 bp, Probe sequence
aaaagtgcagttgtcgacgttggct

SEQ ID NO: 214606 - DNA, 25 bp, Probe sequence
aagtatgaaccgcttgccatgtgtt

SEQ ID NO: 214607 - DNA, 25 bp, Probe sequence
aaggtttcctttatatattttgatg

SEQ ID NO: 214608 - DNA, 25 bp, Probe sequence
ctatcgttgatcaagatgcaccata

SEQ ID NO: 214609 - DNA, 25 bp, Probe sequence
gcttgccatgtgttggatgttggtt

SEQ ID NO: 214610 - DNA, 25 bp, Probe sequence
gcattacatttttacttgcctgtta

SEQ ID NO: 214611 - DNA, 25 bp, Probe sequence
gacacttgctggcgcagtcaatact

SEQ ID NO: 214612 - DNA, 25 bp, Probe sequence
gacgttggctactgggatactgata

SEQ ID NO: 214613 - DNA, 25 bp, Probe sequence
gatgggctcaagggggacacgaagt

SEQ ID NO: 214614 - DNA, 25 bp, Probe sequence
gttcttgtcgcatttccaaaagcat

SEQ ID NO: 214615 - DNA, 25 bp, Probe sequence
gttcataacagcaaacttcttagac

SEQ ID NO: 214616 - DNA, 25 bp, Probe sequence
gttattcaatttacagtcgcactct

SEQ ID NO: 214617 - DNA, 25 bp, Probe sequence
gtcaatactatttcgggtgtcttca

SEQ ID NO: 214618 - DNA, 25 bp, Probe sequence
gtctatttactggattgtcggttca

SEQ ID NO: 214619 - DNA, 25 bp, Probe sequence
gtcgcactctttattgatagtcgct

SEQ ID NO: 214620 - DNA, 25 bp, Probe sequence
gtgcttggatgcagatactatcgtt

SEQ ID NO: 214621 - DNA, 25 bp, Probe sequence
gtggttacgcaacatggtcaagccc

SEQ ID NO: 214622 - DNA, 25 bp, Probe sequence
gggaggtctttggaagcaacgcgtg

SEQ ID NO: 214623 - DNA, 25 bp, Probe sequence
ggttccagaaacattgggaggtctt

SEQ ID NO: 214624 - DNA, 25 bp, Probe sequence
ggaaattgcatttacgtggatatcg

SEQ ID NO: 214625 - DNA, 25 bp, Probe sequence
ggaagcaacgcgtgagatgggctca

SEQ ID NO: 214626 - DNA, 25 bp, Probe sequence
tatttctactatcatcatttactat

SEQ ID NO: 214627 - DNA, 25 bp, Probe sequence
tttgcttttttatcctgtatttatg

SEQ ID NO: 214628 - DNA, 25 bp, Probe sequence
tttcgggtgtcttcactctatttaa

SEQ ID NO: 214629 - DNA, 25 bp, Probe sequence
ttgtcggttcaatttatttctattt

SEQ ID NO: 214630 - DNA, 25 bp, Probe sequence
attggtttttggggattgttcacat

SEQ ID NO: 214631 - DNA, 25 bp, Probe sequence
attattgtaaatcaccctgtcgtca

SEQ ID NO: 214632 - DNA, 25 bp, Probe sequence
attatttctatcttactcgttgctt

SEQ ID NO: 214633 - DNA, 25 bp, Probe sequence
atttacgccacagcgccattgttaa

SEQ ID NO: 214634 - DNA, 25 bp, Probe sequence
atattttttatctttttcatcagtt

SEQ ID NO: 214635 - DNA, 25 bp, Probe sequence
atctcaccaggtacattcttattga

SEQ ID NO: 214636 - DNA, 25 bp, Probe sequence
acgcttgttgcaacgacacttcaaa

SEQ ID NO: 214637 - DNA, 25 bp, Probe sequence
aacatgggtgcagttgtgtcattaa

SEQ ID NO: 214638 - DNA, 25 bp, Probe sequence
aatcaccctgtcgtcaaaggtaaga

SEQ ID NO: 214639 - DNA, 25 bp, Probe sequence
cgttattcacaattggcgtttggcg

SEQ ID NO: 214640 - DNA, 25 bp, Probe sequence
cgtaaccctaaattagcggcattat

SEQ ID NO: 214641 - DNA, 25 bp, Probe sequence
cgcctccgagacacacattagaatg

SEQ ID NO: 214642 - DNA, 25 bp, Probe sequence
gccacagcgccattgttaattatgc

SEQ ID NO: 214643 - DNA, 25 bp, Probe sequence
gcggcattattatctgttatacctg

SEQ ID NO: 214644 - DNA, 25 bp, Probe sequence
gcattagggctgtttttggcaatta

SEQ ID NO: 214645 - DNA, 25 bp, Probe sequence
gcagcagatatggatggtgcgtcta

SEQ ID NO: 214646 - DNA, 25 bp, Probe sequence
gaatgctggtagtacagatatcttg

SEQ ID NO: 214647 - DNA, 25 bp, Probe sequence
gacaagacgttcccatacttactaa

SEQ ID NO: 214648 - DNA, 25 bp, Probe sequence
gatatcttgggtgtataatctgaca

SEQ ID NO: 214649 - DNA, 25 bp, Probe sequence
gatatttgtagttgtatttccatta

SEQ ID NO: 214650 - DNA, 25 bp, Probe sequence
gattctcgtgtcttacttgcacaag

SEQ ID NO: 214651 - DNA, 25 bp, Probe sequence
gattgttcacattagggacagtacc

SEQ ID NO: 214652 - DNA, 25 bp, Probe sequence
gtacctaagttagacgattctcgtg

SEQ ID NO: 214653 - DNA, 25 bp, Probe sequence
gtccaccagtgtcagggcagaatgc

SEQ ID NO: 214654 - DNA, 25 bp, Probe sequence
ggatggtgcgtctagttggcaaaag

SEQ ID NO: 214655 - DNA, 25 bp, Probe sequence
ggacattagtatggacgcttgttgc

SEQ ID NO: 214656 - DNA, 25 bp, Probe sequence
tgggctgtaccatcatttgtgacaa

SEQ ID NO: 214657 - DNA, 25 bp, Probe sequence
tgttatacctggtttgggacagttt

SEQ ID NO: 214658 - DNA, 25 bp, Probe sequence
tcgcatttattcaattcagacgtac

SEQ ID NO: 214659 - DNA, 25 bp, Probe sequence
tcatcagattggtacgaagcagcag

SEQ ID NO: 214660 - DNA, 25 bp, Probe sequence
ttttcagtgttattacttggacatt

SEQ ID NO: 214661 - DNA, 25 bp, Probe sequence
ttaatcctaccttgggctgtaccat

SEQ ID NO: 214662 - DNA, 25 bp, Probe sequence
ttcccatacttactaatctcaccag

SEQ ID NO: 214663 - DNA, 25 bp, Probe sequence
ttggatttattgttgctattgtcgc

SEQ ID NO: 214664 - DNA, 25 bp, Probe sequence
atattgtttagttgttctactcgtt

SEQ ID NO: 214665 - DNA, 25 bp, Probe sequence
atacccaacgctaaaatcatcgcta

SEQ ID NO: 214666 - DNA, 25 bp, Probe sequence
agttgttctactcgtttatattggt

SEQ ID NO: 214667 - DNA, 25 bp, Probe sequence
acccaacgctaaaatcatcgctaaa

SEQ ID NO: 214668 - DNA, 25 bp, Probe sequence
actatgggcattttcgcgattatca

SEQ ID NO: 214669 - DNA, 25 bp, Probe sequence
aactatgggcattttcgcgattatc

SEQ ID NO: 214670 - DNA, 25 bp, Probe sequence
aagagaaacagcacttatcgctata

SEQ ID NO: 214671 - DNA, 25 bp, Probe sequence
aatacccaacgctaaaatcatcgct

SEQ ID NO: 214672 - DNA, 25 bp, Probe sequence
aatacgtgttgctttaaacattgaa

SEQ ID NO: 214673 - DNA, 25 bp, Probe sequence
aattcatgacgaaagtatcaataca

SEQ ID NO: 214674 - DNA, 25 bp, Probe sequence
caatacaatacgtgttgctttaaac

SEQ ID NO: 214675 - DNA, 25 bp, Probe sequence
gcattttcgcgattatcatttttgt

SEQ ID NO: 214676 - DNA, 25 bp, Probe sequence
gaaactatgggcattttcgcgatta

SEQ ID NO: 214677 - DNA, 25 bp, Probe sequence
gagaaacagcacttatcgctatatc

SEQ ID NO: 214678 - DNA, 25 bp, Probe sequence
gatatatttgaaactatgggcattt

SEQ ID NO: 214679 - DNA, 25 bp, Probe sequence
gttgctttaaacattgaaaatactg

SEQ ID NO: 214680 - DNA, 25 bp, Probe sequence
gttctactcgtttatattggtacta

SEQ ID NO: 214681 - DNA, 25 bp, Probe sequence
gtttagttgttctactcgtttatat

SEQ ID NO: 214682 - DNA, 25 bp, Probe sequence
gtatcaatacaatacgtgttgcttt

SEQ ID NO: 214683 - DNA, 25 bp, Probe sequence
gtgtcttttggatatattgtttagt

SEQ ID NO: 214684 - DNA, 25 bp, Probe sequence
gggcattttcgcgattatcattttt

SEQ ID NO: 214685 - DNA, 25 bp, Probe sequence
ggtactatatttgaaattcatgacg

SEQ ID NO: 214686 - DNA, 25 bp, Probe sequence
tgggcattttcgcgattatcatttt

SEQ ID NO: 214687 - DNA, 25 bp, Probe sequence
tctactcgtttatattggtactata

SEQ ID NO: 214688 - DNA, 25 bp, Probe sequence
tactcgtttatattggtactatatt

SEQ ID NO: 214689 - DNA, 25 bp, Probe sequence
tacccaacgctaaaatcatcgctaa

SEQ ID NO: 214690 - DNA, 25 bp, Probe sequence
tatgggcattttcgcgattatcatt

SEQ ID NO: 214691 - DNA, 25 bp, Probe sequence
tattgtttagttgttctactcgttt

SEQ ID NO: 214692 - DNA, 25 bp, Probe sequence
tttacaattagcatattgattcaaa

SEQ ID NO: 214693 - DNA, 25 bp, Probe sequence
ttagttgttctactcgtttatattg

SEQ ID NO: 214694 - DNA, 25 bp, Probe sequence
ttgaaactatgggcattttcgcgat

SEQ ID NO: 214695 - DNA, 25 bp, Probe sequence
ttgtttagttgttctactcgtttat

SEQ ID NO: 214696 - DNA, 25 bp, Probe sequence
ttgttctactcgtttatattggtac

SEQ ID NO: 214697 - DNA, 25 bp, Probe sequence
ttggatatattgtttagttgttcta

SEQ ID NO: 214698 - DNA, 25 bp, Probe sequence
ataaagaaaatagtgctctggcatt

SEQ ID NO: 214699 - DNA, 25 bp, Probe sequence
agcttctgaagctacaatcataaaa

SEQ ID NO: 214700 - DNA, 25 bp, Probe sequence
aaatggctaaaatcacatgatgcta

SEQ ID NO: 214701 - DNA, 25 bp, Probe sequence
aactatagcctatccttatggcttg

SEQ ID NO: 214702 - DNA, 25 bp, Probe sequence
aactttcacaacctcgatatgatta

SEQ ID NO: 214703 - DNA, 25 bp, Probe sequence
aatcacatgatgctaaatttttaac

SEQ ID NO: 214704 - DNA, 25 bp, Probe sequence
aattttagtgttgagtatcttgatc

SEQ ID NO: 214705 - DNA, 25 bp, Probe sequence
cacaacctcgatatgattagtaaaa

SEQ ID NO: 214706 - DNA, 25 bp, Probe sequence
cactccgaactccaatgattattac

SEQ ID NO: 214707 - DNA, 25 bp, Probe sequence
cagtcactccgaactccaatgatta

SEQ ID NO: 214708 - DNA, 25 bp, Probe sequence
ccaatgattattacatccctagaat

SEQ ID NO: 214709 - DNA, 25 bp, Probe sequence
gcctatccttatggcttgatgaatg

SEQ ID NO: 214710 - DNA, 25 bp, Probe sequence
gctctggcattaaattatcaccgtg

SEQ ID NO: 214711 - DNA, 25 bp, Probe sequence
gaatgacgataaattaccggtaatc

SEQ ID NO: 214712 - DNA, 25 bp, Probe sequence
gaaaatgcttatccaatcttaaaaa

SEQ ID NO: 214713 - DNA, 25 bp, Probe sequence
gaaaactttcacaacctcgatatga

SEQ ID NO: 214714 - DNA, 25 bp, Probe sequence
gagatgggacggattccatgaaaaa

SEQ ID NO: 214715 - DNA, 25 bp, Probe sequence
gagtatcttgatcatattgcctgta

SEQ ID NO: 214716 - DNA, 25 bp, Probe sequence
gatcatattgcctgtaagcacactg

SEQ ID NO: 214717 - DNA, 25 bp, Probe sequence
gtaagcacactggatggtcatcata

SEQ ID NO: 214718 - DNA, 25 bp, Probe sequence
ggaaaaagcagtcactccgaactcc

SEQ ID NO: 214719 - DNA, 25 bp, Probe sequence
gtcgcagaaaactatagcctatcct

SEQ ID NO: 214720 - DNA, 25 bp, Probe sequence
ggatggtcatcatattgcaaatgca

SEQ ID NO: 214721 - DNA, 25 bp, Probe sequence
ggaatttgaaacacatacccacgat

SEQ ID NO: 214722 - DNA, 25 bp, Probe sequence
ggcattaaattatcaccgtgtaaga

SEQ ID NO: 214723 - DNA, 25 bp, Probe sequence
tgggtttattatcacaggtcatgtt

SEQ ID NO: 214724 - DNA, 25 bp, Probe sequence
tgcttttgagcatttaattaagaga

SEQ ID NO: 214725 - DNA, 25 bp, Probe sequence
tccttatggcttgatgaatgacgat

SEQ ID NO: 214726 - DNA, 25 bp, Probe sequence
taattagtgatgatgcttttgagca

SEQ ID NO: 214727 - DNA, 25 bp, Probe sequence
tacatccctagaatattaattagtg

SEQ ID NO: 214728 - DNA, 25 bp, Probe sequence
tttattatcacaggtcatgttgggg

SEQ ID NO: 214729 - DNA, 25 bp, Probe sequence
ttatcaccgtgtaagaaaagcgaat

SEQ ID NO: 214730 - DNA, 25 bp, Probe sequence
ttatgaaaatgcttatccaatctta

SEQ ID NO: 214731 - DNA, 25 bp, Probe sequence
ttgcctgtaagcacactggatggtc

SEQ ID NO: 214732 - DNA, 25 bp, Probe sequence
attacatccaatcattctagactca

SEQ ID NO: 214733 - DNA, 25 bp, Probe sequence
atatgggttataactacgaacgtgt

SEQ ID NO: 214734 - DNA, 25 bp, Probe sequence
attatgattgtattagctgtagcta

SEQ ID NO: 214735 - DNA, 25 bp, Probe sequence
atattactttacgaacaacacagcg

SEQ ID NO: 214736 - DNA, 25 bp, Probe sequence
atcgttgttatcatgcaattcttta

SEQ ID NO: 214737 - DNA, 25 bp, Probe sequence
agcttttcatattcattaacaccat

SEQ ID NO: 214738 - DNA, 25 bp, Probe sequence
agctgtagctacttattttgtgttt

SEQ ID NO: 214739 - DNA, 25 bp, Probe sequence
agcgatatcactactattcatttta

SEQ ID NO: 214740 - DNA, 25 bp, Probe sequence
acgataccgtgctacactattatcc

SEQ ID NO: 214741 - DNA, 25 bp, Probe sequence
acagcaatcatttttatattacttt

SEQ ID NO: 214742 - DNA, 25 bp, Probe sequence
aaattaactataacctattcaacag

SEQ ID NO: 214743 - DNA, 25 bp, Probe sequence
aacacagcgtttcacgataccgtgc

SEQ ID NO: 214744 - DNA, 25 bp, Probe sequence
aacgttaccagcttttcatattcat

SEQ ID NO: 214745 - DNA, 25 bp, Probe sequence
caatggtctttctagcgatatcact

SEQ ID NO: 214746 - DNA, 25 bp, Probe sequence
caccttgctttattatcttgtcaca

SEQ ID NO: 214747 - DNA, 25 bp, Probe sequence
cttattttgtgtttattgcgttagc

SEQ ID NO: 214748 - DNA, 25 bp, Probe sequence
gctttctcattctttatttatttat

SEQ ID NO: 214749 - DNA, 25 bp, Probe sequence
gaattaccaaaaagtcacctataga

SEQ ID NO: 214750 - DNA, 25 bp, Probe sequence
gatacttaactacacgcgtaaaata

SEQ ID NO: 214751 - DNA, 25 bp, Probe sequence
gattagtgctttctcattctttatt

SEQ ID NO: 214752 - DNA, 25 bp, Probe sequence
gttactgacaaccttgaattaccaa

SEQ ID NO: 214753 - DNA, 25 bp, Probe sequence
gttatcttttattttacagcaatca

SEQ ID NO: 214754 - DNA, 25 bp, Probe sequence
gtattatgtttattgttatcttggg

SEQ ID NO: 214755 - DNA, 25 bp, Probe sequence
gtatggctattttatcgttgttatc

SEQ ID NO: 214756 - DNA, 25 bp, Probe sequence
gtcacctatagatacttaactacac

SEQ ID NO: 214757 - DNA, 25 bp, Probe sequence
gtcctattaggtcaatggtatggct

SEQ ID NO: 214758 - DNA, 25 bp, Probe sequence
ggagactattggaacgttaccagct

SEQ ID NO: 214759 - DNA, 25 bp, Probe sequence
ggataatacaatggtctttctagcg

SEQ ID NO: 214760 - DNA, 25 bp, Probe sequence
tatcttgggtatttgcacgcatttt

SEQ ID NO: 214761 - DNA, 25 bp, Probe sequence
tattcggatggattttttatttctt

SEQ ID NO: 214762 - DNA, 25 bp, Probe sequence
tattgcgtgaattctatatctttag

SEQ ID NO: 214763 - DNA, 25 bp, Probe sequence
tttattatcttgtcacagttactga

SEQ ID NO: 214764 - DNA, 25 bp, Probe sequence
ttttggtacaccttgctttattatc

SEQ ID NO: 214765 - DNA, 25 bp, Probe sequence
ttctagactcattgtttgcatatac

SEQ ID NO: 214766 - DNA, 25 bp, Probe sequence
atatggcacatatgcatgccgatga

SEQ ID NO: 214767 - DNA, 25 bp, Probe sequence
agctcttgaagatgatgacacagtc

SEQ ID NO: 214768 - DNA, 25 bp, Probe sequence
agctgaaggacatgcttttaagaaa

SEQ ID NO: 214769 - DNA, 25 bp, Probe sequence
aaatgcatgtacgtcctcgaaaaga

SEQ ID NO: 214770 - DNA, 25 bp, Probe sequence
aaatatttaggtgcatgctcttatg

SEQ ID NO: 214771 - DNA, 25 bp, Probe sequence
aacagtttgctcaggatcacttagc

SEQ ID NO: 214772 - DNA, 25 bp, Probe sequence
aactatcaagttcttttatattata

SEQ ID NO: 214773 - DNA, 25 bp, Probe sequence
aacggcacattatctggtacaaaag

SEQ ID NO: 214774 - DNA, 25 bp, Probe sequence
aagaaaatgcatgtacgtcctcgaa

SEQ ID NO: 214775 - DNA, 25 bp, Probe sequence
aatatttatcacctgtagaatttag

SEQ ID NO: 214776 - DNA, 25 bp, Probe sequence
cacaactggccaatatttatcacct

SEQ ID NO: 214777 - DNA, 25 bp, Probe sequence
gcgctaacccagaatgtaataaaca

SEQ ID NO: 214778 - DNA, 25 bp, Probe sequence
gaattcttgtttctacagaaggtat

SEQ ID NO: 214779 - DNA, 25 bp, Probe sequence
gaatttgatttaggtcatttccgag

SEQ ID NO: 214780 - DNA, 25 bp, Probe sequence
gaaggtattaacggcacattatctg

SEQ ID NO: 214781 - DNA, 25 bp, Probe sequence
gaacgattcaaagatatggtgttta

SEQ ID NO: 214782 - DNA, 25 bp, Probe sequence
gaaaccgaacaatatatggcacata

SEQ ID NO: 214783 - DNA, 25 bp, Probe sequence
gacacagtcattattgatgcacgta

SEQ ID NO: 214784 - DNA, 25 bp, Probe sequence
gacgtcgatccaagacacacaactg

SEQ ID NO: 214785 - DNA, 25 bp, Probe sequence
gacgattgatgaccctgaacagttt

SEQ ID NO: 214786 - DNA, 25 bp, Probe sequence
gagcgtaatcgttatgttcaagcaa

SEQ ID NO: 214787 - DNA, 25 bp, Probe sequence
gagtggcaacaacgtttaacaaact

SEQ ID NO: 214788 - DNA, 25 bp, Probe sequence
gatggcaaaccatgtgaacgttata

SEQ ID NO: 214789 - DNA, 25 bp, Probe sequence
gatccaagacacacaactggccaat

SEQ ID NO: 214790 - DNA, 25 bp, Probe sequence
gtgctaaacatgagcgtaatcgtta

SEQ ID NO: 214791 - DNA, 25 bp, Probe sequence
gtgaacgttatattaattgcgctaa

SEQ ID NO: 214792 - DNA, 25 bp, Probe sequence
tggtgtttaaaattgatgaagctga

SEQ ID NO: 214793 - DNA, 25 bp, Probe sequence
tgatgatttacatcaacatgcttag

SEQ ID NO: 214794 - DNA, 25 bp, Probe sequence
tatgcatgccgatgaacgattcaaa

SEQ ID NO: 214795 - DNA, 25 bp, Probe sequence
tattggtaaggattggtttgatggc

SEQ ID NO: 214796 - DNA, 25 bp, Probe sequence
tattgatgcacgtaatgattatgaa

SEQ ID NO: 214797 - DNA, 25 bp, Probe sequence
ttaggtcatttccgaggtgcaattc

SEQ ID NO: 214798 - DNA, 25 bp, Probe sequence
ttaattgcgctaacccagaatgtaa

SEQ ID NO: 214799 - DNA, 25 bp, Probe sequence
ttgatgaccctgaacagtttgctca

SEQ ID NO: 214800 - DNA, 25 bp, Probe sequence
atattattggcacacatacaatcga

SEQ ID NO: 214801 - DNA, 25 bp, Probe sequence
atcacttaggttatttacaagataa

SEQ ID NO: 214802 - DNA, 25 bp, Probe sequence
atcattatgatgttgtactagctat

SEQ ID NO: 214803 - DNA, 25 bp, Probe sequence
atgatgttgtactagctataggaca

SEQ ID NO: 214804 - DNA, 25 bp, Probe sequence
aggacaagctggtggtagaaatgcc

SEQ ID NO: 214805 - DNA, 25 bp, Probe sequence
agatagttgcaggtttgactgcagc

SEQ ID NO: 214806 - DNA, 25 bp, Probe sequence
accagttaaagcaatgactcaaagt

SEQ ID NO: 214807 - DNA, 25 bp, Probe sequence
acgtgtcgccattaatattgatgat

SEQ ID NO: 214808 - DNA, 25 bp, Probe sequence
aaataaaacgttggcatctaatcat

SEQ ID NO: 214809 - DNA, 25 bp, Probe sequence
aacgttggcatctaatcattatgat

SEQ ID NO: 214810 - DNA, 25 bp, Probe sequence
aaggacttcctggagcactttcaaa

SEQ ID NO: 214811 - DNA, 25 bp, Probe sequence
caaggacttcctggagcactttcaa

SEQ ID NO: 214812 - DNA, 25 bp, Probe sequence
cagaacgtgtcgccattaatattga

SEQ ID NO: 214813 - DNA, 25 bp, Probe sequence
ctttatcacttaggttatttacaag

SEQ ID NO: 214814 - DNA, 25 bp, Probe sequence
cgtattccagataatgatgattttc

SEQ ID NO: 214815 - DNA, 25 bp, Probe sequence
cgatacaccatctatgccattagaa

SEQ ID NO: 214816 - DNA, 25 bp, Probe sequence
ccccagaacgtgtcgccattaatat

SEQ ID NO: 214817 - DNA, 25 bp, Probe sequence
ccgatacaccatctatgccattaga

SEQ ID NO: 214818 - DNA, 25 bp, Probe sequence
ccattaatattgatgatgcacgtat

SEQ ID NO: 214819 - DNA, 25 bp, Probe sequence
gctataggacaagctggtggtagaa

SEQ ID NO: 214820 - DNA, 25 bp, Probe sequence
gaacgtgtcgccattaatattgatg

SEQ ID NO: 214821 - DNA, 25 bp, Probe sequence
gacttcctggagcactttcaaatag

SEQ ID NO: 214822 - DNA, 25 bp, Probe sequence
gtagaaatgccattaccccagaacg

SEQ ID NO: 214823 - DNA, 25 bp, Probe sequence
gattttcaacctattgatcaagcca

SEQ ID NO: 214824 - DNA, 25 bp, Probe sequence
gtactagctataggacaagctggtg

SEQ ID NO: 214825 - DNA, 25 bp, Probe sequence
gtcgccattaatattgatgatgcac

SEQ ID NO: 214826 - DNA, 25 bp, Probe sequence
ggtggtagaaatgccattaccccag

SEQ ID NO: 214827 - DNA, 25 bp, Probe sequence
ggacttcctggagcactttcaaata

SEQ ID NO: 214828 - DNA, 25 bp, Probe sequence
ggcacacatacaatcgataaattaa

SEQ ID NO: 214829 - DNA, 25 bp, Probe sequence
taatgatgattttcaacctattgat

SEQ ID NO: 214830 - DNA, 25 bp, Probe sequence
taaaacgttggcatctaatcattat

SEQ ID NO: 214831 - DNA, 25 bp, Probe sequence
tacaagataagcattaccctcacct

SEQ ID NO: 214832 - DNA, 25 bp, Probe sequence
ttattggcacacatacaatcgataa

SEQ ID NO: 214833 - DNA, 25 bp, Probe sequence
ttcaacctattgatcaagccattca

SEQ ID NO: 214834 - DNA, 25 bp, Probe sequence
attcggaaatggttcgtctccagat

SEQ ID NO: 214835 - DNA, 25 bp, Probe sequence
atcccacttcatgctggtaaaattg

SEQ ID NO: 214836 - DNA, 25 bp, Probe sequence
atggttcgtctccagatgaatggaa

SEQ ID NO: 214837 - DNA, 25 bp, Probe sequence
agttattagtattaaatgccattca

SEQ ID NO: 214838 - DNA, 25 bp, Probe sequence
agcctttttctaataccattcattg

SEQ ID NO: 214839 - DNA, 25 bp, Probe sequence
aaatggttcgtctccagatgaatgg

SEQ ID NO: 214840 - DNA, 25 bp, Probe sequence
aactgaagatgatttagcaattgaa

SEQ ID NO: 214841 - DNA, 25 bp, Probe sequence
aatggttcgtctccagatgaatgga

SEQ ID NO: 214842 - DNA, 25 bp, Probe sequence
ctttttctaataccattcattggca

SEQ ID NO: 214843 - DNA, 25 bp, Probe sequence
ctaataccattcattggcaatttgg

SEQ ID NO: 214844 - DNA, 25 bp, Probe sequence
cggaaatggttcgtctccagatgaa

SEQ ID NO: 214845 - DNA, 25 bp, Probe sequence
cccacttcatgctggtaaaattgaa

SEQ ID NO: 214846 - DNA, 25 bp, Probe sequence
cctttttctaataccattcattggc

SEQ ID NO: 214847 - DNA, 25 bp, Probe sequence
gcctttttctaataccattcattgg

SEQ ID NO: 214848 - DNA, 25 bp, Probe sequence
gaagatgatttagcaattgaattga

SEQ ID NO: 214849 - DNA, 25 bp, Probe sequence
gaaatggttcgtctccagatgaatg

SEQ ID NO: 214850 - DNA, 25 bp, Probe sequence
gagttattagtattaaatgccattc

SEQ ID NO: 214851 - DNA, 25 bp, Probe sequence
ggttcgtctccagatgaatggaagg

SEQ ID NO: 214852 - DNA, 25 bp, Probe sequence
ggaaatggttcgtctccagatgaat

SEQ ID NO: 214853 - DNA, 25 bp, Probe sequence
tggttcgtctccagatgaatggaag

SEQ ID NO: 214854 - DNA, 25 bp, Probe sequence
tcccacttcatgctggtaaaattga

SEQ ID NO: 214855 - DNA, 25 bp, Probe sequence
tcggaaatggttcgtctccagatga

SEQ ID NO: 214856 - DNA, 25 bp, Probe sequence
tctaataccattcattggcaatttg

SEQ ID NO: 214857 - DNA, 25 bp, Probe sequence
tagacctttattcggaaatggttcg

SEQ ID NO: 214858 - DNA, 25 bp, Probe sequence
taactgaagatgatttagcaattga

SEQ ID NO: 214859 - DNA, 25 bp, Probe sequence
tatagacctttattcggaaatggtt

SEQ ID NO: 214860 - DNA, 25 bp, Probe sequence
ttattcggaaatggttcgtctccag

SEQ ID NO: 214861 - DNA, 25 bp, Probe sequence
tattcggaaatggttcgtctccaga

SEQ ID NO: 214862 - DNA, 25 bp, Probe sequence
tttctaataccattcattggcaatt

SEQ ID NO: 214863 - DNA, 25 bp, Probe sequence
tttattcggaaatggttcgtctcca

SEQ ID NO: 214864 - DNA, 25 bp, Probe sequence
tttttctaataccattcattggcaa

SEQ ID NO: 214865 - DNA, 25 bp, Probe sequence
ttttctaataccattcattggcaat

SEQ ID NO: 214866 - DNA, 25 bp, Probe sequence
ttcggaaatggttcgtctccagatg

SEQ ID NO: 214867 - DNA, 25 bp, Probe sequence
ttctaataccattcattggcaattt

SEQ ID NO: 214868 - DNA, 25 bp, Probe sequence
attcgtcgcgacaatcattgcttgt

SEQ ID NO: 214869 - DNA, 25 bp, Probe sequence
atttaattctagcgcctgctacacc

SEQ ID NO: 214870 - DNA, 25 bp, Probe sequence
atcgtaagtttatactccctatcgt

SEQ ID NO: 214871 - DNA, 25 bp, Probe sequence
atcgcacttcatttcgtcaaattat

SEQ ID NO: 214872 - DNA, 25 bp, Probe sequence
agcttggatttattccttggttaag

SEQ ID NO: 214873 - DNA, 25 bp, Probe sequence
aatccattgctacaagtcttggtgg

SEQ ID NO: 214874 - DNA, 25 bp, Probe sequence
aattactgcggctatgtttttaact

SEQ ID NO: 214875 - DNA, 25 bp, Probe sequence
cattactaggcgttgccatcgcagc

SEQ ID NO: 214876 - DNA, 25 bp, Probe sequence
gccggtgcaccaccattattcagtg

SEQ ID NO: 214877 - DNA, 25 bp, Probe sequence
gcatctagcacatctaatgttcaca

SEQ ID NO: 214878 - DNA, 25 bp, Probe sequence
gcaagttctacagcacatatcagtg

SEQ ID NO: 214879 - DNA, 25 bp, Probe sequence
gaatcatgttcccaattatcaaatc

SEQ ID NO: 214880 - DNA, 25 bp, Probe sequence
gaaacaggtgcttggaacacattag

SEQ ID NO: 214881 - DNA, 25 bp, Probe sequence
gacatgaaaacggctgtcgctggtt

SEQ ID NO: 214882 - DNA, 25 bp, Probe sequence
gttctacttctattcacattactta

SEQ ID NO: 214883 - DNA, 25 bp, Probe sequence
gtatatgttcgcaatattcgtcgcg

SEQ ID NO: 214884 - DNA, 25 bp, Probe sequence
gtatgcagcattactaggcgttgcc

SEQ ID NO: 214885 - DNA, 25 bp, Probe sequence
gtggatccaacagcatggtatatgt

SEQ ID NO: 214886 - DNA, 25 bp, Probe sequence
ggtcattttaatattgttctacttc

SEQ ID NO: 214887 - DNA, 25 bp, Probe sequence
ggtttcgtctactttattatctgga

SEQ ID NO: 214888 - DNA, 25 bp, Probe sequence
ggatttacaatcatggtactcgttg

SEQ ID NO: 214889 - DNA, 25 bp, Probe sequence
ggattgtcggaagtttcattcatat

SEQ ID NO: 214890 - DNA, 25 bp, Probe sequence
ggattggtttaggatcactttggat

SEQ ID NO: 214891 - DNA, 25 bp, Probe sequence
ggctgtcgctggttttggtaataat

SEQ ID NO: 214892 - DNA, 25 bp, Probe sequence
tgtttttaactgcaatggccggtaa

SEQ ID NO: 214893 - DNA, 25 bp, Probe sequence
tggtactcgttggcattgttgacat

SEQ ID NO: 214894 - DNA, 25 bp, Probe sequence
tgatgcaactttaacggcctttatt

SEQ ID NO: 214895 - DNA, 25 bp, Probe sequence
taacctattagcttcaacaacacac

SEQ ID NO: 214896 - DNA, 25 bp, Probe sequence
ttacacaaccgatgccaattggggc

SEQ ID NO: 214897 - DNA, 25 bp, Probe sequence
tactccctatcgttgtaggtctcct

SEQ ID NO: 214898 - DNA, 25 bp, Probe sequence
tataaaatttatccaccaactgtta

SEQ ID NO: 214899 - DNA, 25 bp, Probe sequence
ttctgaatcatttggttcgaaaccg

SEQ ID NO: 214900 - DNA, 25 bp, Probe sequence
ttagcatattctatcgtcggtgtag

SEQ ID NO: 214901 - DNA, 25 bp, Probe sequence
ttctcttcaggttacgtgactcaaa

SEQ ID NO: 214902 - DNA, 25 bp, Probe sequence
attttattcgcatcaggtatgagtt

SEQ ID NO: 214903 - DNA, 25 bp, Probe sequence
atctttaccaattttattcgcatca

SEQ ID NO: 214904 - DNA, 25 bp, Probe sequence
atcgaatttgattatttaggctata

SEQ ID NO: 214905 - DNA, 25 bp, Probe sequence
agtgcttatcggtgtgttgaatcta

SEQ ID NO: 214906 - DNA, 25 bp, Probe sequence
agctattgtcattttgttacacgtt

SEQ ID NO: 214907 - DNA, 25 bp, Probe sequence
acttgttcgctaaattacgtcgtga

SEQ ID NO: 214908 - DNA, 25 bp, Probe sequence
aaattgcgttactcgctctttcttc

SEQ ID NO: 214909 - DNA, 25 bp, Probe sequence
acaatataacgattactgcgatatc

SEQ ID NO: 214910 - DNA, 25 bp, Probe sequence
aatcctattcgcaaaatctattaca

SEQ ID NO: 214911 - DNA, 25 bp, Probe sequence
aatctctttaattaacttgttcgct

SEQ ID NO: 214912 - DNA, 25 bp, Probe sequence
aattgggcattcttcaatcctattc

SEQ ID NO: 214913 - DNA, 25 bp, Probe sequence
gcattcttcaatcctattcgcaaaa

SEQ ID NO: 214914 - DNA, 25 bp, Probe sequence
gaatctaattattttaatctcttta

SEQ ID NO: 214915 - DNA, 25 bp, Probe sequence
gaaggatatattttgactgttttta

SEQ ID NO: 214916 - DNA, 25 bp, Probe sequence
gaaaagaccatcatatcttatttgg

SEQ ID NO: 214917 - DNA, 25 bp, Probe sequence
gagcgcttaagctggttaccataca

SEQ ID NO: 214918 - DNA, 25 bp, Probe sequence
gatacagctagtgaaattgcgttac

SEQ ID NO: 214919 - DNA, 25 bp, Probe sequence
gattgctggaaaagaccatcatatc

SEQ ID NO: 214920 - DNA, 25 bp, Probe sequence
gtttctcgatttgtaggaccttatt

SEQ ID NO: 214921 - DNA, 25 bp, Probe sequence
gtattgccacttggctttttatttg

SEQ ID NO: 214922 - DNA, 25 bp, Probe sequence
gtcattttgttacacgttattgggt

SEQ ID NO: 214923 - DNA, 25 bp, Probe sequence
gtcgtgaacacattgaagaagctga

SEQ ID NO: 214924 - DNA, 25 bp, Probe sequence
gggtttagttttttatggattgctg

SEQ ID NO: 214925 - DNA, 25 bp, Probe sequence
ggttaccatacatagctattgtcat

SEQ ID NO: 214926 - DNA, 25 bp, Probe sequence
ggcacgtattgccacttggcttttt

SEQ ID NO: 214927 - DNA, 25 bp, Probe sequence
tggtcgcatagaacacaaatggtct

SEQ ID NO: 214928 - DNA, 25 bp, Probe sequence
tcttatttggtatggggattcttgc

SEQ ID NO: 214929 - DNA, 25 bp, Probe sequence
tcaggtttctttttagtgcttatcg

SEQ ID NO: 214930 - DNA, 25 bp, Probe sequence
taatttggaagtttggtcgcataga

SEQ ID NO: 214931 - DNA, 25 bp, Probe sequence
taatcacgcgtagttggcacgtatt

SEQ ID NO: 214932 - DNA, 25 bp, Probe sequence
tagtgattgggatgattgaattgct

SEQ ID NO: 214933 - DNA, 25 bp, Probe sequence
ttggtggaacgattggtacactagt

SEQ ID NO: 214934 - DNA, 25 bp, Probe sequence
tttggacttggttttgatacagcta

SEQ ID NO: 214935 - DNA, 25 bp, Probe sequence
ttatcggaatcttatctttaccaat

SEQ ID NO: 214936 - DNA, 25 bp, Probe sequence
atttcacagtgtttgcagcaggggc

SEQ ID NO: 214937 - DNA, 25 bp, Probe sequence
ataccgatgaatgcctttttagtga

SEQ ID NO: 214938 - DNA, 25 bp, Probe sequence
atacgggctgattacatttttgatt

SEQ ID NO: 214939 - DNA, 25 bp, Probe sequence
atcgtattcttgttcttgcaacgct

SEQ ID NO: 214940 - DNA, 25 bp, Probe sequence
atcgctttgttggtcgtaaatacgg

SEQ ID NO: 214941 - DNA, 25 bp, Probe sequence
atgctttttctagatatcgctttgt

SEQ ID NO: 214942 - DNA, 25 bp, Probe sequence
atgcgtattttcttacaaattatgc

SEQ ID NO: 214943 - DNA, 25 bp, Probe sequence
agcagttgttgctttgttcaatttt

SEQ ID NO: 214944 - DNA, 25 bp, Probe sequence
actgtggacatttggcatttccctt

SEQ ID NO: 214945 - DNA, 25 bp, Probe sequence
aaattatgcttccattagctaagcc

SEQ ID NO: 214946 - DNA, 25 bp, Probe sequence
aaattatgcattcttactattcgat

SEQ ID NO: 214947 - DNA, 25 bp, Probe sequence
aagcaatcggtatttacagttttat

SEQ ID NO: 214948 - DNA, 25 bp, Probe sequence
aatacgcttatcgtagcatctgcaa

SEQ ID NO: 214949 - DNA, 25 bp, Probe sequence
caattatgattgcagtacctatagc

SEQ ID NO: 214950 - DNA, 25 bp, Probe sequence
caggtacgaacttgtatggtgccaa

SEQ ID NO: 214951 - DNA, 25 bp, Probe sequence
ccatttatggactttatattaccta

SEQ ID NO: 214952 - DNA, 25 bp, Probe sequence
gcatctgcaaatgcactgtttagtg

SEQ ID NO: 214953 - DNA, 25 bp, Probe sequence
gcagtacctatagcaatcgtattct

SEQ ID NO: 214954 - DNA, 25 bp, Probe sequence
gaagtcctgaaaaattcacattagc

SEQ ID NO: 214955 - DNA, 25 bp, Probe sequence
gacagtagtcaatacctgacttggt

SEQ ID NO: 214956 - DNA, 25 bp, Probe sequence
gaacttgatgaatctgccaaaattg

SEQ ID NO: 214957 - DNA, 25 bp, Probe sequence
gaaaggttacttcgatacgattcca

SEQ ID NO: 214958 - DNA, 25 bp, Probe sequence
gttccctgtattaatggcaatggtc

SEQ ID NO: 214959 - DNA, 25 bp, Probe sequence
gtttaacaacaggtgcgacaaaagg

SEQ ID NO: 214960 - DNA, 25 bp, Probe sequence
gtttgtcatcattttatatccacta

SEQ ID NO: 214961 - DNA, 25 bp, Probe sequence
gtgccaaaatgataccagacaatgc

SEQ ID NO: 214962 - DNA, 25 bp, Probe sequence
ggcatttcccttaatccaggtacga

SEQ ID NO: 214963 - DNA, 25 bp, Probe sequence
ggcaatggtcgcaatctatattttg

SEQ ID NO: 214964 - DNA, 25 bp, Probe sequence
tgcattcttactattcgatgacagt

SEQ ID NO: 214965 - DNA, 25 bp, Probe sequence
tcatcattttatatccactactgtg

SEQ ID NO: 214966 - DNA, 25 bp, Probe sequence
tcacattagcagttggattgttcaa

SEQ ID NO: 214967 - DNA, 25 bp, Probe sequence
tagattctttatttggactaacact

SEQ ID NO: 214968 - DNA, 25 bp, Probe sequence
ttgtcacgttaacagcatatgcttt

SEQ ID NO: 214969 - DNA, 25 bp, Probe sequence
ttgattttacaaatgttccctgtat

SEQ ID NO: 214970 - DNA, 25 bp, Probe sequence
attgcctgtgtgttaattccattca

SEQ ID NO: 214971 - DNA, 25 bp, Probe sequence
attattctgatgctcattatgttat

SEQ ID NO: 214972 - DNA, 25 bp, Probe sequence
atcatgaatttgctgtgaacttatt

SEQ ID NO: 214973 - DNA, 25 bp, Probe sequence
atctgcacaaatcttatttattttt

SEQ ID NO: 214974 - DNA, 25 bp, Probe sequence
atgctcattatgttattttggattt

SEQ ID NO: 214975 - DNA, 25 bp, Probe sequence
atgtggttattcttttcgtgttctt

SEQ ID NO: 214976 - DNA, 25 bp, Probe sequence
agtgtgtaacttttctataataatg

SEQ ID NO: 214977 - DNA, 25 bp, Probe sequence
agtttatttatgtactaatcctaat

SEQ ID NO: 214978 - DNA, 25 bp, Probe sequence
accagttgtcagatgtttaccatta

SEQ ID NO: 214979 - DNA, 25 bp, Probe sequence
acatatctagtgtgtaacttttcta

SEQ ID NO: 214980 - DNA, 25 bp, Probe sequence
aacacttttattattctgatgctca

SEQ ID NO: 214981 - DNA, 25 bp, Probe sequence
aacatgccaaaaacacttttattat

SEQ ID NO: 214982 - DNA, 25 bp, Probe sequence
aactcaatctgcacaaatcttattt

SEQ ID NO: 214983 - DNA, 25 bp, Probe sequence
aagggatattacggtttggatcata

SEQ ID NO: 214984 - DNA, 25 bp, Probe sequence
cagaaattattatttccaccttcga

SEQ ID NO: 214985 - DNA, 25 bp, Probe sequence
ctttcaatacttttggtcatatatc

SEQ ID NO: 214986 - DNA, 25 bp, Probe sequence
gaaggtggtatttcttttagtacat

SEQ ID NO: 214987 - DNA, 25 bp, Probe sequence
gaacgaaaaccagttgtcagatgtt

SEQ ID NO: 214988 - DNA, 25 bp, Probe sequence
gaacttatttagatatgtcatacaa

SEQ ID NO: 214989 - DNA, 25 bp, Probe sequence
gatttttatgagttttattttccag

SEQ ID NO: 214990 - DNA, 25 bp, Probe sequence
gtttaccattaattatatcttgttt

SEQ ID NO: 214991 - DNA, 25 bp, Probe sequence
gtcatatatcaaactcaatctgcac

SEQ ID NO: 214992 - DNA, 25 bp, Probe sequence
ggtatttcttttagtacatatctag

SEQ ID NO: 214993 - DNA, 25 bp, Probe sequence
ggaatttcgttgattattcaaggat

SEQ ID NO: 214994 - DNA, 25 bp, Probe sequence
ggaatagcatacattgcctgtgtgt

SEQ ID NO: 214995 - DNA, 25 bp, Probe sequence
tggttattcttttcgtgttctttat

SEQ ID NO: 214996 - DNA, 25 bp, Probe sequence
tcgcgttaattttagtttatttatg

SEQ ID NO: 214997 - DNA, 25 bp, Probe sequence
tcttttttagattcaatgacatcaa

SEQ ID NO: 214998 - DNA, 25 bp, Probe sequence
taattccattcaatttcttttttag

SEQ ID NO: 214999 - DNA, 25 bp, Probe sequence
taatcctactatttttactttcaat

SEQ ID NO: 215000 - DNA, 25 bp, Probe sequence
taagtacgttattcctattattata

SEQ ID NO: 215001 - DNA, 25 bp, Probe sequence
tagattttctaaattttgtcgcgtt

SEQ ID NO: 215002 - DNA, 25 bp, Probe sequence
ttttactttcaatacttttggtcat

SEQ ID NO: 215003 - DNA, 25 bp, Probe sequence
tattcctattattatactttttagt

SEQ ID NO: 215004 - DNA, 25 bp, Probe sequence
attacagtattctgccgacattaac

SEQ ID NO: 215005 - DNA, 25 bp, Probe sequence
atattatcagtgcaacatgtttcaa

SEQ ID NO: 215006 - DNA, 25 bp, Probe sequence
ataaataccctagcgaattatctgg

SEQ ID NO: 215007 - DNA, 25 bp, Probe sequence
atcaaaaagcacttgccaaattccg

SEQ ID NO: 215008 - DNA, 25 bp, Probe sequence
caggaaggacgttctaaacaggcct

SEQ ID NO: 215009 - DNA, 25 bp, Probe sequence
agtattaggtggtgtctcaaatgac

SEQ ID NO: 215010 - DNA, 25 bp, Probe sequence
agatggccaaattcatacacaactt

SEQ ID NO: 215011 - DNA, 25 bp, Probe sequence
agaactgcagcagcgagagcatttg

SEQ ID NO: 215012 - DNA, 25 bp, Probe sequence
acatcttcaatcagtattaggtggt

SEQ ID NO: 215013 - DNA, 25 bp, Probe sequence
acaggcgcactcgactcgaaaagtg

SEQ ID NO: 215014 - DNA, 25 bp, Probe sequence
aaatttctagcggtagcgtgattgc

SEQ ID NO: 215015 - DNA, 25 bp, Probe sequence
aaagcacacatttcaagcacttaaa

SEQ ID NO: 215016 - DNA, 25 bp, Probe sequence
aaacatacggtaaaaagcacacatt

SEQ ID NO: 215017 - DNA, 25 bp, Probe sequence
aaaaaggcgaattcgttgcgattat

SEQ ID NO: 215018 - DNA, 25 bp, Probe sequence
aagacattgtacatcttcaatcagt

SEQ ID NO: 215019 - DNA, 25 bp, Probe sequence
aattcatacacaactttatcaggaa

SEQ ID NO: 215020 - DNA, 25 bp, Probe sequence
aattcgttgcgattatggggccttc

SEQ ID NO: 215021 - DNA, 25 bp, Probe sequence
catcttccaagattacagtattctg

SEQ ID NO: 215022 - DNA, 25 bp, Probe sequence
cattatgttacctttatctgttcaa

SEQ ID NO: 215023 - DNA, 25 bp, Probe sequence
cctagcgaattatctggtggtcaac

SEQ ID NO: 215024 - DNA, 25 bp, Probe sequence
gcggtagcgtgattgctaacggaca

SEQ ID NO: 215025 - DNA, 25 bp, Probe sequence
gcagatgagccaacaggcgcactcg

SEQ ID NO: 215026 - DNA, 25 bp, Probe sequence
gcagcgagagcatttgttcacaaac

SEQ ID NO: 215027 - DNA, 25 bp, Probe sequence
gaatcattaggtttcatcttccaag

SEQ ID NO: 215028 - DNA, 25 bp, Probe sequence
gattgctaacggacaagagcttaat

SEQ ID NO: 215029 - DNA, 25 bp, Probe sequence
gttcaattgaccaaatttctagcgg

SEQ ID NO: 215030 - DNA, 25 bp, Probe sequence
ggggccttctggatcaggtaagaca

SEQ ID NO: 215031 - DNA, 25 bp, Probe sequence
gtgtcatcatgctaaaagatggcca

SEQ ID NO: 215032 - DNA, 25 bp, Probe sequence
ggtggtcaacaacaaagaactgcag

SEQ ID NO: 215033 - DNA, 25 bp, Probe sequence
ggttgcagcaagttttgcagaacgt

SEQ ID NO: 215034 - DNA, 25 bp, Probe sequence
tgttcacaaaccacaaatcatattt

SEQ ID NO: 215035 - DNA, 25 bp, Probe sequence
tgcgattatggggccttctggatca

SEQ ID NO: 215036 - DNA, 25 bp, Probe sequence
taagacaaccttattaaatgtacta

SEQ ID NO: 215037 - DNA, 25 bp, Probe sequence
tttgcagaacgtgtcatcatgctaa

SEQ ID NO: 215038 - DNA, 25 bp, Probe sequence
attacatgcagtattcgccgcaata

SEQ ID NO: 215039 - DNA, 25 bp, Probe sequence
atttcaggcgtattaggtattgcta

SEQ ID NO: 215040 - DNA, 25 bp, Probe sequence
atcaaacccttacatctatggcacc

SEQ ID NO: 215041 - DNA, 25 bp, Probe sequence
aggtgttgtcggtgtattatgtggc

SEQ ID NO: 215042 - DNA, 25 bp, Probe sequence
aactatggctatgacatcaccgttt

SEQ ID NO: 215043 - DNA, 25 bp, Probe sequence
aataacgttcatactttttatggat

SEQ ID NO: 215044 - DNA, 25 bp, Probe sequence
caatgccatcattacaaatacaaaa

SEQ ID NO: 215045 - DNA, 25 bp, Probe sequence
cgtacacgtgaatttgcgctatttc

SEQ ID NO: 215046 - DNA, 25 bp, Probe sequence
gcaggtgcacaattattgctttcca

SEQ ID NO: 215047 - DNA, 25 bp, Probe sequence
gcatcgtcttatatttcagttttac

SEQ ID NO: 215048 - DNA, 25 bp, Probe sequence
gcaattatttctgcagttacagtaa

SEQ ID NO: 215049 - DNA, 25 bp, Probe sequence
gaatttgcgctatttcagttgattg

SEQ ID NO: 215050 - DNA, 25 bp, Probe sequence
gaaaggtgctttagtcggatcaata

SEQ ID NO: 215051 - DNA, 25 bp, Probe sequence
gacatcaccgtttatcattttattt

SEQ ID NO: 215052 - DNA, 25 bp, Probe sequence
gaggtcgatgctactaacggtattc

SEQ ID NO: 215053 - DNA, 25 bp, Probe sequence
gatacatttcgaacctatggccctt

SEQ ID NO: 215054 - DNA, 25 bp, Probe sequence
gtattcgccgcaatagcatttatga

SEQ ID NO: 215055 - DNA, 25 bp, Probe sequence
gtattatgtggcattgcaggtgcac

SEQ ID NO: 215056 - DNA, 25 bp, Probe sequence
gtagcagctggatgtattatttata

SEQ ID NO: 215057 - DNA, 25 bp, Probe sequence
gtcatctttttaatgtatgccaatc

SEQ ID NO: 215058 - DNA, 25 bp, Probe sequence
gtcggatcaatatttttatttatca

SEQ ID NO: 215059 - DNA, 25 bp, Probe sequence
ggtgtaaataatgacgactcgatgg

SEQ ID NO: 215060 - DNA, 25 bp, Probe sequence
ggtttaccattattgattgctatat

SEQ ID NO: 215061 - DNA, 25 bp, Probe sequence
tgtctttaactatcattgcaattat

SEQ ID NO: 215062 - DNA, 25 bp, Probe sequence
tcagttgattggtttaacacgacaa

SEQ ID NO: 215063 - DNA, 25 bp, Probe sequence
taatgtatgccaatcatttattcgt

SEQ ID NO: 215064 - DNA, 25 bp, Probe sequence
taatcacaggtgttgtcggtgtatt

SEQ ID NO: 215065 - DNA, 25 bp, Probe sequence
taggtattgctatgattgcactagg

SEQ ID NO: 215066 - DNA, 25 bp, Probe sequence
tatttcagttttacaaccttacagt

SEQ ID NO: 215067 - DNA, 25 bp, Probe sequence
tattaaaacgcataggctttacgca

SEQ ID NO: 215068 - DNA, 25 bp, Probe sequence
tatttatcattattgtcatcttttt

SEQ ID NO: 215069 - DNA, 25 bp, Probe sequence
tattcttcagaagttccgtgtcact

SEQ ID NO: 215070 - DNA, 25 bp, Probe sequence
tttcaacttcggtttaccattattg

SEQ ID NO: 215071 - DNA, 25 bp, Probe sequence
ttcattattttttagcatcgtctta

SEQ ID NO: 215072 - DNA, 25 bp, Probe sequence
attgcgccatctaaactatttgcac

SEQ ID NO: 215073 - DNA, 25 bp, Probe sequence
atttgcactttgtttaactgattca

SEQ ID NO: 215074 - DNA, 25 bp, Probe sequence
atagccgtttgtaagttacccattg

SEQ ID NO: 215075 - DNA, 25 bp, Probe sequence
agccgtttgtaagttacccattgcg

SEQ ID NO: 215076 - DNA, 25 bp, Probe sequence
accagctaagtttgtagcttatgaa

SEQ ID NO: 215077 - DNA, 25 bp, Probe sequence
acccattgcgccatctaaactattt

SEQ ID NO: 215078 - DNA, 25 bp, Probe sequence
actttgtttaactgattcaacacca

SEQ ID NO: 215079 - DNA, 25 bp, Probe sequence
actatttgcactttgtttaactgat

SEQ ID NO: 215080 - DNA, 25 bp, Probe sequence
acaccagctaagtttgtagcttatg

SEQ ID NO: 215081 - DNA, 25 bp, Probe sequence
aactgattcaacaccagctaagttt

SEQ ID NO: 215082 - DNA, 25 bp, Probe sequence
cattgcgccatctaaactatttgca

SEQ ID NO: 215083 - DNA, 25 bp, Probe sequence
ctatttgcactttgtttaactgatt

SEQ ID NO: 215084 - DNA, 25 bp, Probe sequence
ctgattcaacaccagctaagtttgt

SEQ ID NO: 215085 - DNA, 25 bp, Probe sequence
cgtttgtaagttacccattgcgcca

SEQ ID NO: 215086 - DNA, 25 bp, Probe sequence
cgccatctaaactatttgcactttg

SEQ ID NO: 215087 - DNA, 25 bp, Probe sequence
cccattgcgccatctaaactatttg

SEQ ID NO: 215088 - DNA, 25 bp, Probe sequence
ccattgcgccatctaaactatttgc

SEQ ID NO: 215089 - DNA, 25 bp, Probe sequence
ccatctaaactatttgcactttgtt

SEQ ID NO: 215090 - DNA, 25 bp, Probe sequence
gccgtttgtaagttacccattgcgc

SEQ ID NO: 215091 - DNA, 25 bp, Probe sequence
gccatctaaactatttgcactttgt

SEQ ID NO: 215092 - DNA, 25 bp, Probe sequence
gcgccatctaaactatttgcacttt

SEQ ID NO: 215093 - DNA, 25 bp, Probe sequence
gcactttgtttaactgattcaacac

SEQ ID NO: 215094 - DNA, 25 bp, Probe sequence
gatagccgtttgtaagttacccatt

SEQ ID NO: 215095 - DNA, 25 bp, Probe sequence
gattcaacaccagctaagtttgtag

SEQ ID NO: 215096 - DNA, 25 bp, Probe sequence
gtttaactgattcaacaccagctaa

SEQ ID NO: 215097 - DNA, 25 bp, Probe sequence
tgatagccgtttgtaagttacccat

SEQ ID NO: 215098 - DNA, 25 bp, Probe sequence
tgcgccatctaaactatttgcactt

SEQ ID NO: 215099 - DNA, 25 bp, Probe sequence
tcaacaccagctaagtttgtagctt

SEQ ID NO: 215100 - DNA, 25 bp, Probe sequence
tagccgtttgtaagttacccattgc

SEQ ID NO: 215101 - DNA, 25 bp, Probe sequence
ttaactgattcaacaccagctaagt

SEQ ID NO: 215102 - DNA, 25 bp, Probe sequence
ttgatagccgtttgtaagttaccca

SEQ ID NO: 215103 - DNA, 25 bp, Probe sequence
ttgtttaactgattcaacaccagct

SEQ ID NO: 215104 - DNA, 25 bp, Probe sequence
ttgcgccatctaaactatttgcact

SEQ ID NO: 215105 - DNA, 25 bp, Probe sequence
ttgcactttgtttaactgattcaac

SEQ ID NO: 215106 - DNA, 25 bp, Probe sequence
ccgcctgcttttgaacctaggaaat

SEQ ID NO: 215107 - DNA, 25 bp, Probe sequence
attgtaaaattccgcctgcttttga

SEQ ID NO: 215108 - DNA, 25 bp, Probe sequence
attggtattaacgaacctatagata

SEQ ID NO: 215109 - DNA, 25 bp, Probe sequence
attagctgtgtcgcaaatacgatag

SEQ ID NO: 215110 - DNA, 25 bp, Probe sequence
atagacaatgctgctacgttagctg

SEQ ID NO: 215111 - DNA, 25 bp, Probe sequence
atacgatagacaatgctgctacgtt

SEQ ID NO: 215112 - DNA, 25 bp, Probe sequence
agacaatgctgctacgttagctgga

SEQ ID NO: 215113 - DNA, 25 bp, Probe sequence
acctaggaaatttatcaacacaata

SEQ ID NO: 215114 - DNA, 25 bp, Probe sequence
acgatagacaatgctgctacgttag

SEQ ID NO: 215115 - DNA, 25 bp, Probe sequence
actgattgtaaaattccgcctgctt

SEQ ID NO: 215116 - DNA, 25 bp, Probe sequence
aactgattgtaaaattccgcctgct

SEQ ID NO: 215117 - DNA, 25 bp, Probe sequence
aattaattagctgtgtcgcaaatac

SEQ ID NO: 215118 - DNA, 25 bp, Probe sequence
caatgctgctacgttagctggaaaa

SEQ ID NO: 215119 - DNA, 25 bp, Probe sequence
caacacaatagataacgcagatgcg

SEQ ID NO: 215120 - DNA, 25 bp, Probe sequence
gcctgcttttgaacctaggaaattt

SEQ ID NO: 215121 - DNA, 25 bp, Probe sequence
gcgattgctattggtattaacgaac

SEQ ID NO: 215122 - DNA, 25 bp, Probe sequence
gaataaattaattagctgtgtcgca

SEQ ID NO: 215123 - DNA, 25 bp, Probe sequence
gaacctaggaaatttatcaacacaa

SEQ ID NO: 215124 - DNA, 25 bp, Probe sequence
gacaatgctgctacgttagctggaa

SEQ ID NO: 215125 - DNA, 25 bp, Probe sequence
gatagacaatgctgctacgttagct

SEQ ID NO: 215126 - DNA, 25 bp, Probe sequence
gattgctattggtattaacgaacct

SEQ ID NO: 215127 - DNA, 25 bp, Probe sequence
gattggaatcagtttaattactaaa

SEQ ID NO: 215128 - DNA, 25 bp, Probe sequence
gtaactgattgtaaaattccgcctg

SEQ ID NO: 215129 - DNA, 25 bp, Probe sequence
tgtaaaattccgcctgcttttgaac

SEQ ID NO: 215130 - DNA, 25 bp, Probe sequence
tgattgtaaaattccgcctgctttt

SEQ ID NO: 215131 - DNA, 25 bp, Probe sequence
tgctattggtattaacgaacctata

SEQ ID NO: 215132 - DNA, 25 bp, Probe sequence
tgcttttgaacctaggaaatttatc

SEQ ID NO: 215133 - DNA, 25 bp, Probe sequence
ttccgcctgcttttgaacctaggaa

SEQ ID NO: 215134 - DNA, 25 bp, Probe sequence
tccgcctgcttttgaacctaggaaa

SEQ ID NO: 215135 - DNA, 25 bp, Probe sequence
tagctgtgtcgcaaatacgatagac

SEQ ID NO: 215136 - DNA, 25 bp, Probe sequence
tagataacgcagatgcgattgctat

SEQ ID NO: 215137 - DNA, 25 bp, Probe sequence
ttaacgaacctatagataaatggaa

SEQ ID NO: 215138 - DNA, 25 bp, Probe sequence
ttaattagctgtgtcgcaaatacga

SEQ ID NO: 215139 - DNA, 25 bp, Probe sequence
ttgtaaaattccgcctgcttttgaa

SEQ ID NO: 215140 - DNA, 25 bp, Probe sequence
attggaagtatttatgagtttcatc

SEQ ID NO: 215141 - DNA, 25 bp, Probe sequence
atccaagatgattatcaccttacga

SEQ ID NO: 215142 - DNA, 25 bp, Probe sequence
atgtatttcctaccaaagaaaacat

SEQ ID NO: 215143 - DNA, 25 bp, Probe sequence
aggagtttggacatcttgaaggaga

SEQ ID NO: 215144 - DNA, 25 bp, Probe sequence
agtgttgctcaaaaaatcaatcatc

SEQ ID NO: 215145 - DNA, 25 bp, Probe sequence
agatgataaacttgtccagcttaat

SEQ ID NO: 215146 - DNA, 25 bp, Probe sequence
actattgttggtcgtcgtcatggta

SEQ ID NO: 215147 - DNA, 25 bp, Probe sequence
aacataaggagtttggacatcttga

SEQ ID NO: 215148 - DNA, 25 bp, Probe sequence
aactcaatatgtatttcctaccaaa

SEQ ID NO: 215149 - DNA, 25 bp, Probe sequence
aatctttaggttatagaacaccatt

SEQ ID NO: 215150 - DNA, 25 bp, Probe sequence
cacagcgaggtttaaatgaacattc

SEQ ID NO: 215151 - DNA, 25 bp, Probe sequence
catatcatcagtgttgctcaaaaaa

SEQ ID NO: 215152 - DNA, 25 bp, Probe sequence
cttctcatatatttaaatcaattac

SEQ ID NO: 215153 - DNA, 25 bp, Probe sequence
gaacaccattggaagtatttatgag

SEQ ID NO: 215154 - DNA, 25 bp, Probe sequence
gagatactattgttggtcgtcgtca

SEQ ID NO: 215155 - DNA, 25 bp, Probe sequence
gagtatccaagatgattatcacctt

SEQ ID NO: 215156 - DNA, 25 bp, Probe sequence
gatcatatcatcagtgttgctcaaa

SEQ ID NO: 215157 - DNA, 25 bp, Probe sequence
gataaacttgtccagcttaatttga

SEQ ID NO: 215158 - DNA, 25 bp, Probe sequence
gatactattgttggtcgtcgtcatg

SEQ ID NO: 215159 - DNA, 25 bp, Probe sequence
gattgtggtaaggagttctcaaact

SEQ ID NO: 215160 - DNA, 25 bp, Probe sequence
gtttggacatcttgaaggagatact

SEQ ID NO: 215161 - DNA, 25 bp, Probe sequence
gtaactgtcacgatatatctatatt

SEQ ID NO: 215162 - DNA, 25 bp, Probe sequence
gtcgtcatggtagtgcaatcattac

SEQ ID NO: 215163 - DNA, 25 bp, Probe sequence
gtgcaatcattactttggtagaaag

SEQ ID NO: 215164 - DNA, 25 bp, Probe sequence
gtgctaaactcaatatgtatttcct

SEQ ID NO: 215165 - DNA, 25 bp, Probe sequence
ggtcgtcgtcatggtagtgcaatca

SEQ ID NO: 215166 - DNA, 25 bp, Probe sequence
ggtcgtaaggcaactgatatagaaa

SEQ ID NO: 215167 - DNA, 25 bp, Probe sequence
ggtagtgcaatcattactttggtag

SEQ ID NO: 215168 - DNA, 25 bp, Probe sequence
tgttggtcgtcgtcatggtagtgca

SEQ ID NO: 215169 - DNA, 25 bp, Probe sequence
tgtccagcttaatttgacaatctaa

SEQ ID NO: 215170 - DNA, 25 bp, Probe sequence
tcaattacttttgattgtggtaagg

SEQ ID NO: 215171 - DNA, 25 bp, Probe sequence
taaggagttctcaaactggaaaaca

SEQ ID NO: 215172 - DNA, 25 bp, Probe sequence
tatgtaactgtcacgatatatctat

SEQ ID NO: 215173 - DNA, 25 bp, Probe sequence
ttaggtcgtaaggcaactgatatag

SEQ ID NO: 215174 - DNA, 25 bp, Probe sequence
attcgcattaaaacatcacaatact

SEQ ID NO: 215175 - DNA, 25 bp, Probe sequence
attacgcgatcttacaaatactata

SEQ ID NO: 215176 - DNA, 25 bp, Probe sequence
atactgatacacaacaaaaagagca

SEQ ID NO: 215177 - DNA, 25 bp, Probe sequence
atgcaccactctcaacaaatatatt

SEQ ID NO: 215178 - DNA, 25 bp, Probe sequence
atgaagcaattacgcgatcttacaa

SEQ ID NO: 215179 - DNA, 25 bp, Probe sequence
atgattcatataatattcgcattaa

SEQ ID NO: 215180 - DNA, 25 bp, Probe sequence
agagcagtacatttgtcatgcacca

SEQ ID NO: 215181 - DNA, 25 bp, Probe sequence
agcagtacatttgtcatgcaccact

SEQ ID NO: 215182 - DNA, 25 bp, Probe sequence
accactctcaacaaatatatttttc

SEQ ID NO: 215183 - DNA, 25 bp, Probe sequence
acgcgatcttacaaatactataagt

SEQ ID NO: 215184 - DNA, 25 bp, Probe sequence
actctcaacaaatatatttttcaat

SEQ ID NO: 215185 - DNA, 25 bp, Probe sequence
aaacatcacaatactgatacacaac

SEQ ID NO: 215186 - DNA, 25 bp, Probe sequence
aagcaattacgcgatcttacaaata

SEQ ID NO: 215187 - DNA, 25 bp, Probe sequence
aagagcagtacatttgtcatgcacc

SEQ ID NO: 215188 - DNA, 25 bp, Probe sequence
aatgaagcaattacgcgatcttaca

SEQ ID NO: 215189 - DNA, 25 bp, Probe sequence
aatattcgcattaaaacatcacaat

SEQ ID NO: 215190 - DNA, 25 bp, Probe sequence
aattacgcgatcttacaaatactat

SEQ ID NO: 215191 - DNA, 25 bp, Probe sequence
caccactctcaacaaatatattttt

SEQ ID NO: 215192 - DNA, 25 bp, Probe sequence
catgcaccactctcaacaaatatat

SEQ ID NO: 215193 - DNA, 25 bp, Probe sequence
gcagtacatttgtcatgcaccactc

SEQ ID NO: 215194 - DNA, 25 bp, Probe sequence
gcaccactctcaacaaatatatttt

SEQ ID NO: 215195 - DNA, 25 bp, Probe sequence
gcaattacgcgatcttacaaatact

SEQ ID NO: 215196 - DNA, 25 bp, Probe sequence
gaagcaattacgcgatcttacaaat

SEQ ID NO: 215197 - DNA, 25 bp, Probe sequence
gagcagtacatttgtcatgcaccac

SEQ ID NO: 215198 - DNA, 25 bp, Probe sequence
tgtcatgcaccactctcaacaaata

SEQ ID NO: 215199 - DNA, 25 bp, Probe sequence
tgcaccactctcaacaaatatattt

SEQ ID NO: 215200 - DNA, 25 bp, Probe sequence
tcgcattaaaacatcacaatactga

SEQ ID NO: 215201 - DNA, 25 bp, Probe sequence
tcatgcaccactctcaacaaatata

SEQ ID NO: 215202 - DNA, 25 bp, Probe sequence
tcacaatactgatacacaacaaaaa

SEQ ID NO: 215203 - DNA, 25 bp, Probe sequence
tcaatgaagcaattacgcgatctta

SEQ ID NO: 215204 - DNA, 25 bp, Probe sequence
tttgtcatgcaccactctcaacaaa

SEQ ID NO: 215205 - DNA, 25 bp, Probe sequence
ttttcaatgaagcaattacgcgatc

SEQ ID NO: 215206 - DNA, 25 bp, Probe sequence
ttacgcgatcttacaaatactataa

SEQ ID NO: 215207 - DNA, 25 bp, Probe sequence
ttgtcatgcaccactctcaacaaat

SEQ ID NO: 215208 - DNA, 25 bp, Probe sequence
attcgtacatttctcaggtatcgct

SEQ ID NO: 215209 - DNA, 25 bp, Probe sequence
atttctcaggtatcgctagcgatgg

SEQ ID NO: 215210 - DNA, 25 bp, Probe sequence
atcgctagcgatggctacaaaactt

SEQ ID NO: 215211 - DNA, 25 bp, Probe sequence
acatttctcaggtatcgctagcgat

SEQ ID NO: 215212 - DNA, 25 bp, Probe sequence
aaatggcggagacgtattcgtacat

SEQ ID NO: 215213 - DNA, 25 bp, Probe sequence
aaagttactttcgaaatcactgaag

SEQ ID NO: 215214 - DNA, 25 bp, Probe sequence
caagcagttaacgtacaaactgttt

SEQ ID NO: 215215 - DNA, 25 bp, Probe sequence
caacgtggagaccaagcagttaacg

SEQ ID NO: 215216 - DNA, 25 bp, Probe sequence
caggtatcgctagcgatggctacaa

SEQ ID NO: 215217 - DNA, 25 bp, Probe sequence
catttctcaggtatcgctagcgatg

SEQ ID NO: 215218 - DNA, 25 bp, Probe sequence
ctttcgaaatcactgaaggtcaacg

SEQ ID NO: 215219 - DNA, 25 bp, Probe sequence
ctcaggtatcgctagcgatggctac

SEQ ID NO: 215220 - DNA, 25 bp, Probe sequence
ctagcgatggctacaaaactttaga

SEQ ID NO: 215221 - DNA, 25 bp, Probe sequence
cgtattcgtacatttctcaggtatc

SEQ ID NO: 215222 - DNA, 25 bp, Probe sequence
cgtacatttctcaggtatcgctagc

SEQ ID NO: 215223 - DNA, 25 bp, Probe sequence
gcgatggctacaaaactttagaaga

SEQ ID NO: 215224 - DNA, 25 bp, Probe sequence
gctacaaaactttagaagaaggtca

SEQ ID NO: 215225 - DNA, 25 bp, Probe sequence
gaaggtcaacgtggagaccaagcag

SEQ ID NO: 215226 - DNA, 25 bp, Probe sequence
gaaaatggcggagacgtattcgtac

SEQ ID NO: 215227 - DNA, 25 bp, Probe sequence
gagaccaagcagttaacgtacaaac

SEQ ID NO: 215228 - DNA, 25 bp, Probe sequence
gttactttcgaaatcactgaaggtc

SEQ ID NO: 215229 - DNA, 25 bp, Probe sequence
gtatcgctagcgatggctacaaaac

SEQ ID NO: 215230 - DNA, 25 bp, Probe sequence
gtattcgtacatttctcaggtatcg

SEQ ID NO: 215231 - DNA, 25 bp, Probe sequence
gtacagtaaaatggtttaacgcaga

SEQ ID NO: 215232 - DNA, 25 bp, Probe sequence
gtacatttctcaggtatcgctagcg

SEQ ID NO: 215233 - DNA, 25 bp, Probe sequence
gtcaacgtggagaccaagcagttaa

SEQ ID NO: 215234 - DNA, 25 bp, Probe sequence
gtggagaccaagcagttaacgtaca

SEQ ID NO: 215235 - DNA, 25 bp, Probe sequence
ggtttcatcgaacaagaaaatggcg

SEQ ID NO: 215236 - DNA, 25 bp, Probe sequence
ggttttctatatgaataacggtaca

SEQ ID NO: 215237 - DNA, 25 bp, Probe sequence
ggaggttttctatatgaataacggt

SEQ ID NO: 215238 - DNA, 25 bp, Probe sequence
ggagaccaagcagttaacgtacaaa

SEQ ID NO: 215239 - DNA, 25 bp, Probe sequence
tattcgtacatttctcaggtatcgc

SEQ ID NO: 215240 - DNA, 25 bp, Probe sequence
ttctcaggtatcgctagcgatggct

SEQ ID NO: 215241 - DNA, 25 bp, Probe sequence
ttcgtacatttctcaggtatcgcta

SEQ ID NO: 215242 - DNA, 25 bp, Probe sequence
attttagaagccagcgtttggcttg

SEQ ID NO: 215243 - DNA, 25 bp, Probe sequence
atattttagaagccagcgtttggct

SEQ ID NO: 215244 - DNA, 25 bp, Probe sequence
atataataacacgcaattcaataaa

SEQ ID NO: 215245 - DNA, 25 bp, Probe sequence
ataacacgcaattcaataaaatgtc

SEQ ID NO: 215246 - DNA, 25 bp, Probe sequence
ataataacacgcaattcaataaaat

SEQ ID NO: 215247 - DNA, 25 bp, Probe sequence
atgtcgtcttatttttacatttata

SEQ ID NO: 215248 - DNA, 25 bp, Probe sequence
acgcaattcaataaaatgtctaatc

SEQ ID NO: 215249 - DNA, 25 bp, Probe sequence
acacgcaattcaataaaatgtctaa

SEQ ID NO: 215250 - DNA, 25 bp, Probe sequence
aaatattttagaagccagcgtttgg

SEQ ID NO: 215251 - DNA, 25 bp, Probe sequence
aaaatattttagaagccagcgtttg

SEQ ID NO: 215252 - DNA, 25 bp, Probe sequence
aacacgcaattcaataaaatgtcta

SEQ ID NO: 215253 - DNA, 25 bp, Probe sequence
aatattttagaagccagcgtttggc

SEQ ID NO: 215254 - DNA, 25 bp, Probe sequence
cacgcaattcaataaaatgtctaat

SEQ ID NO: 215255 - DNA, 25 bp, Probe sequence
catgttcgcgcatgtcgtcttattt

SEQ ID NO: 215256 - DNA, 25 bp, Probe sequence
catgtcgtcttatttttacatttat

SEQ ID NO: 215257 - DNA, 25 bp, Probe sequence
cgtcttatttttacatttatataat

SEQ ID NO: 215258 - DNA, 25 bp, Probe sequence
cgcaattcaataaaatgtctaatca

SEQ ID NO: 215259 - DNA, 25 bp, Probe sequence
gcaattcaataaaatgtctaatcaa

SEQ ID NO: 215260 - DNA, 25 bp, Probe sequence
gacgacatgttcgcgcatgtcgtct

SEQ ID NO: 215261 - DNA, 25 bp, Probe sequence
gttcgcgcatgtcgtcttattttta

SEQ ID NO: 215262 - DNA, 25 bp, Probe sequence
gtcttatttttacatttatataata

SEQ ID NO: 215263 - DNA, 25 bp, Probe sequence
gtcgtcttatttttacatttatata

SEQ ID NO: 215264 - DNA, 25 bp, Probe sequence
tgtcgtcttatttttacatttatat

SEQ ID NO: 215265 - DNA, 25 bp, Probe sequence
ttttagaagccagcgtttggcttgc

SEQ ID NO: 215266 - DNA, 25 bp, Probe sequence
tcgtcttatttttacatttatataa

SEQ ID NO: 215267 - DNA, 25 bp, Probe sequence
taataacacgcaattcaataaaatg

SEQ ID NO: 215268 - DNA, 25 bp, Probe sequence
taacacgcaattcaataaaatgtct

SEQ ID NO: 215269 - DNA, 25 bp, Probe sequence
tatataataacacgcaattcaataa

SEQ ID NO: 215270 - DNA, 25 bp, Probe sequence
tattttagaagccagcgtttggctt

SEQ ID NO: 215271 - DNA, 25 bp, Probe sequence
tttagaagccagcgtttggcttgct

SEQ ID NO: 215272 - DNA, 25 bp, Probe sequence
tttatataataacacgcaattcaat

SEQ ID NO: 215273 - DNA, 25 bp, Probe sequence
ttatataataacacgcaattcaata

SEQ ID NO: 215274 - DNA, 25 bp, Probe sequence
ttagaagccagcgtttggcttgctt

SEQ ID NO: 215275 - DNA, 25 bp, Probe sequence
ttcgcgcatgtcgtcttatttttac

SEQ ID NO: 215276 - DNA, 25 bp, Probe sequence
atcagtctgcaaaatcaggcaaagc

SEQ ID NO: 215277 - DNA, 25 bp, Probe sequence
aggcgtcgacttttatgaaggtaat

SEQ ID NO: 215278 - DNA, 25 bp, Probe sequence
accagttgtgaaaccggaacaagca

SEQ ID NO: 215279 - DNA, 25 bp, Probe sequence
accggaacaagcaatggtagttaca

SEQ ID NO: 215280 - DNA, 25 bp, Probe sequence
actgacaatgcaaaggtttatgatg

SEQ ID NO: 215281 - DNA, 25 bp, Probe sequence
acactttataccaaacacgttgaat

SEQ ID NO: 215282 - DNA, 25 bp, Probe sequence
aacgcttggggttcatggaatccag

SEQ ID NO: 215283 - DNA, 25 bp, Probe sequence
aaaagcttggattgatgcagttgta

SEQ ID NO: 215284 - DNA, 25 bp, Probe sequence
aatgatcgcattttgtgacgtagac

SEQ ID NO: 215285 - DNA, 25 bp, Probe sequence
cttgaagcgatttatcagtctgcaa

SEQ ID NO: 215286 - DNA, 25 bp, Probe sequence
ccgcttgggcgattaattctttaga

SEQ ID NO: 215287 - DNA, 25 bp, Probe sequence
gcaagcacatgccaagtttacaaaa

SEQ ID NO: 215288 - DNA, 25 bp, Probe sequence
gaatccgcttgggcgattaattctt

SEQ ID NO: 215289 - DNA, 25 bp, Probe sequence
gaaaacaaaggcgtcgacttttatg

SEQ ID NO: 215290 - DNA, 25 bp, Probe sequence
gactcgcattgtgaaattactgtag

SEQ ID NO: 215291 - DNA, 25 bp, Probe sequence
gatggtctacgtattcatggtgaag

SEQ ID NO: 215292 - DNA, 25 bp, Probe sequence
gatgttatccatgtttgtacgccaa

SEQ ID NO: 215293 - DNA, 25 bp, Probe sequence
gatgacacgattgatgttatccatg

SEQ ID NO: 215294 - DNA, 25 bp, Probe sequence
gatagatacagctaaatcaacaggt

SEQ ID NO: 215295 - DNA, 25 bp, Probe sequence
gatttaacgttatggatgatggata

SEQ ID NO: 215296 - DNA, 25 bp, Probe sequence
gttggaatcattgggtgtggtggta

SEQ ID NO: 215297 - DNA, 25 bp, Probe sequence
gttgtaaatgatactgaaccagttg

SEQ ID NO: 215298 - DNA, 25 bp, Probe sequence
gtttgtacgccaaatgactcgcatt

SEQ ID NO: 215299 - DNA, 25 bp, Probe sequence
gtacgccaaatgactcgcattgtga

SEQ ID NO: 215300 - DNA, 25 bp, Probe sequence
gtgacgtagacatttcgaaagcagc

SEQ ID NO: 215301 - DNA, 25 bp, Probe sequence
gtgatgtgtgaaaaaccaatggcta

SEQ ID NO: 215302 - DNA, 25 bp, Probe sequence
ggtagttacaaaaattcttgaagcg

SEQ ID NO: 215303 - DNA, 25 bp, Probe sequence
ggtattgcgaatggcaagcacatgc

SEQ ID NO: 215304 - DNA, 25 bp, Probe sequence
ggataattatgaaccagaatcagtg

SEQ ID NO: 215305 - DNA, 25 bp, Probe sequence
ggatgaggcaaaatgttcattatca

SEQ ID NO: 215306 - DNA, 25 bp, Probe sequence
ggaatccagatgaatttacagttga

SEQ ID NO: 215307 - DNA, 25 bp, Probe sequence
ggctaaaacgacagcagaagctcaa

SEQ ID NO: 215308 - DNA, 25 bp, Probe sequence
tgggtgtggtggtattgcgaatggc

SEQ ID NO: 215309 - DNA, 25 bp, Probe sequence
tgcggcaaacgcttggggttcatgg

SEQ ID NO: 215310 - DNA, 25 bp, Probe sequence
attgctaagtactacaacagagatt

SEQ ID NO: 215311 - DNA, 25 bp, Probe sequence
atcaacactttaactttttgacatt

SEQ ID NO: 215312 - DNA, 25 bp, Probe sequence
atcatcacttttataaatcaacact

SEQ ID NO: 215313 - DNA, 25 bp, Probe sequence
agagatttacatgtcccatttaaag

SEQ ID NO: 215314 - DNA, 25 bp, Probe sequence
actacaacagagatttacatgtccc

SEQ ID NO: 215315 - DNA, 25 bp, Probe sequence
actttttgacattgttatcctatga

SEQ ID NO: 215316 - DNA, 25 bp, Probe sequence
acatgtcccatttaaagtatgtaaa

SEQ ID NO: 215317 - DNA, 25 bp, Probe sequence
acagagatttacatgtcccatttaa

SEQ ID NO: 215318 - DNA, 25 bp, Probe sequence
acaacagagatttacatgtcccatt

SEQ ID NO: 215319 - DNA, 25 bp, Probe sequence
aaatcatcacttttataaatcaaca

SEQ ID NO: 215320 - DNA, 25 bp, Probe sequence
aacagagatttacatgtcccattta

SEQ ID NO: 215321 - DNA, 25 bp, Probe sequence
aactttttgacattgttatcctatg

SEQ ID NO: 215322 - DNA, 25 bp, Probe sequence
aactcggtaatattgctaagtacta

SEQ ID NO: 215323 - DNA, 25 bp, Probe sequence
aagtatgtaaaatcatcacttttat

SEQ ID NO: 215324 - DNA, 25 bp, Probe sequence
aatcaacactttaactttttgacat

SEQ ID NO: 215325 - DNA, 25 bp, Probe sequence
aatattgctaagtactacaacagag

SEQ ID NO: 215326 - DNA, 25 bp, Probe sequence
caacagagatttacatgtcccattt

SEQ ID NO: 215327 - DNA, 25 bp, Probe sequence
caacactttaactttttgacattgt

SEQ ID NO: 215328 - DNA, 25 bp, Probe sequence
cactttaactttttgacattgttat

SEQ ID NO: 215329 - DNA, 25 bp, Probe sequence
cagagatttacatgtcccatttaaa

SEQ ID NO: 215330 - DNA, 25 bp, Probe sequence
catcacttttataaatcaacacttt

SEQ ID NO: 215331 - DNA, 25 bp, Probe sequence
ctcggtaatattgctaagtactaca

SEQ ID NO: 215332 - DNA, 25 bp, Probe sequence
gctaagtactacaacagagatttac

SEQ ID NO: 215333 - DNA, 25 bp, Probe sequence
gagatttacatgtcccatttaaagt

SEQ ID NO: 215334 - DNA, 25 bp, Probe sequence
gatttacatgtcccatttaaagtat

SEQ ID NO: 215335 - DNA, 25 bp, Probe sequence
gattaaactcggtaatattgctaag

SEQ ID NO: 215336 - DNA, 25 bp, Probe sequence
ggtaatattgctaagtactacaaca

SEQ ID NO: 215337 - DNA, 25 bp, Probe sequence
taaactcggtaatattgctaagtac

SEQ ID NO: 215338 - DNA, 25 bp, Probe sequence
tacaacagagatttacatgtcccat

SEQ ID NO: 215339 - DNA, 25 bp, Probe sequence
tataaatcaacactttaactttttg

SEQ ID NO: 215340 - DNA, 25 bp, Probe sequence
tttgacattgttatcctatgagatt

SEQ ID NO: 215341 - DNA, 25 bp, Probe sequence
tttacatgtcccatttaaagtatgt

SEQ ID NO: 215342 - DNA, 25 bp, Probe sequence
tttttgacattgttatcctatgaga

SEQ ID NO: 215343 - DNA, 25 bp, Probe sequence
ttaactttttgacattgttatccta

SEQ ID NO: 215344 - DNA, 25 bp, Probe sequence
attcacctatcattatttgtgacac

SEQ ID NO: 215345 - DNA, 25 bp, Probe sequence
atttttcatacttattcacctatca

SEQ ID NO: 215346 - DNA, 25 bp, Probe sequence
atttgtgacacttagccttatttta

SEQ ID NO: 215347 - DNA, 25 bp, Probe sequence
atatcagatatatttttcatactta

SEQ ID NO: 215348 - DNA, 25 bp, Probe sequence
atcattatttgtgacacttagcctt

SEQ ID NO: 215349 - DNA, 25 bp, Probe sequence
acgcctgccaatttggcaatatcag

SEQ ID NO: 215350 - DNA, 25 bp, Probe sequence
acttattcacctatcattatttgtg

SEQ ID NO: 215351 - DNA, 25 bp, Probe sequence
aacgcctgccaatttggcaatatca

SEQ ID NO: 215352 - DNA, 25 bp, Probe sequence
cacctatcattatttgtgacactta

SEQ ID NO: 215353 - DNA, 25 bp, Probe sequence
catacttattcacctatcattattt

SEQ ID NO: 215354 - DNA, 25 bp, Probe sequence
cattatttgtgacacttagccttat

SEQ ID NO: 215355 - DNA, 25 bp, Probe sequence
ctttttgaaacgcctgccaatttgg

SEQ ID NO: 215356 - DNA, 25 bp, Probe sequence
cctatcattatttgtgacacttagc

SEQ ID NO: 215357 - DNA, 25 bp, Probe sequence
gctttttgaaacgcctgccaatttg

SEQ ID NO: 215358 - DNA, 25 bp, Probe sequence
gaaacgcctgccaatttggcaatat

SEQ ID NO: 215359 - DNA, 25 bp, Probe sequence
gacacttagccttattttagcatat

SEQ ID NO: 215360 - DNA, 25 bp, Probe sequence
gatatatttttcatacttattcacc

SEQ ID NO: 215361 - DNA, 25 bp, Probe sequence
gtgacacttagccttattttagcat

SEQ ID NO: 215362 - DNA, 25 bp, Probe sequence
tgtgacacttagccttattttagca

SEQ ID NO: 215363 - DNA, 25 bp, Probe sequence
tgctttttgaaacgcctgccaattt

SEQ ID NO: 215364 - DNA, 25 bp, Probe sequence
tgccaatttggcaatatcagatata

SEQ ID NO: 215365 - DNA, 25 bp, Probe sequence
tcatacttattcacctatcattatt

SEQ ID NO: 215366 - DNA, 25 bp, Probe sequence
tacttattcacctatcattatttgt

SEQ ID NO: 215367 - DNA, 25 bp, Probe sequence
tatttgtgacacttagccttatttt

SEQ ID NO: 215368 - DNA, 25 bp, Probe sequence
tatatttttcatacttattcaccta

SEQ ID NO: 215369 - DNA, 25 bp, Probe sequence
tatttttcatacttattcacctatc

SEQ ID NO: 215370 - DNA, 25 bp, Probe sequence
tttgtgacacttagccttattttag

SEQ ID NO: 215371 - DNA, 25 bp, Probe sequence
tttcatacttattcacctatcatta

SEQ ID NO: 215372 - DNA, 25 bp, Probe sequence
tttttcatacttattcacctatcat

SEQ ID NO: 215373 - DNA, 25 bp, Probe sequence
ttttgaaacgcctgccaatttggca

SEQ ID NO: 215374 - DNA, 25 bp, Probe sequence
ttttcatacttattcacctatcatt

SEQ ID NO: 215375 - DNA, 25 bp, Probe sequence
ttcatacttattcacctatcattat

SEQ ID NO: 215376 - DNA, 25 bp, Probe sequence
ttgtgacacttagccttattttagc

SEQ ID NO: 215377 - DNA, 25 bp, Probe sequence
ttgaaacgcctgccaatttggcaat

SEQ ID NO: 215378 - DNA, 25 bp, Probe sequence
attatgatacaaccgtgcaaacgat

SEQ ID NO: 215379 - DNA, 25 bp, Probe sequence
atatgtagtataacttgtcaactta

SEQ ID NO: 215380 - DNA, 25 bp, Probe sequence
atacaaccgtgcaaacgatatgtag

SEQ ID NO: 215381 - DNA, 25 bp, Probe sequence
ataacttgtcaacttagaattattg

SEQ ID NO: 215382 - DNA, 25 bp, Probe sequence
atgtagtataacttgtcaacttaga

SEQ ID NO: 215383 - DNA, 25 bp, Probe sequence
atgatacaaccgtgcaaacgatatg

SEQ ID NO: 215384 - DNA, 25 bp, Probe sequence
agtataacttgtcaacttagaatta

SEQ ID NO: 215385 - DNA, 25 bp, Probe sequence
accgtgcaaacgatatgtagtataa

SEQ ID NO: 215386 - DNA, 25 bp, Probe sequence
acgatatgtagtataacttgtcaac

SEQ ID NO: 215387 - DNA, 25 bp, Probe sequence
acaaccgtgcaaacgatatgtagta

SEQ ID NO: 215388 - DNA, 25 bp, Probe sequence
acaattatgatacaaccgtgcaaac

SEQ ID NO: 215389 - DNA, 25 bp, Probe sequence
aaacgatatgtagtataacttgtca

SEQ ID NO: 215390 - DNA, 25 bp, Probe sequence
aacaattatgatacaaccgtgcaaa

SEQ ID NO: 215391 - DNA, 25 bp, Probe sequence
aacttgtcaacttagaattattgat

SEQ ID NO: 215392 - DNA, 25 bp, Probe sequence
aaccgtgcaaacgatatgtagtata

SEQ ID NO: 215393 - DNA, 25 bp, Probe sequence
caattatgatacaaccgtgcaaacg

SEQ ID NO: 215394 - DNA, 25 bp, Probe sequence
aattatgatacaaccgtgcaaacga

SEQ ID NO: 215395 - DNA, 25 bp, Probe sequence
caaccgtgcaaacgatatgtagtat

SEQ ID NO: 215396 - DNA, 25 bp, Probe sequence
ccgtgcaaacgatatgtagtataac

SEQ ID NO: 215397 - DNA, 25 bp, Probe sequence
gcaaacgatatgtagtataacttgt

SEQ ID NO: 215398 - DNA, 25 bp, Probe sequence
gaacaattatgatacaaccgtgcaa

SEQ ID NO: 215399 - DNA, 25 bp, Probe sequence
gatacaaccgtgcaaacgatatgta

SEQ ID NO: 215400 - DNA, 25 bp, Probe sequence
gatatgtagtataacttgtcaactt

SEQ ID NO: 215401 - DNA, 25 bp, Probe sequence
gtataacttgtcaacttagaattat

SEQ ID NO: 215402 - DNA, 25 bp, Probe sequence
gtagtataacttgtcaacttagaat

SEQ ID NO: 215403 - DNA, 25 bp, Probe sequence
gtgcaaacgatatgtagtataactt

SEQ ID NO: 215404 - DNA, 25 bp, Probe sequence
tgtagtataacttgtcaacttagaa

SEQ ID NO: 215405 - DNA, 25 bp, Probe sequence
tgatacaaccgtgcaaacgatatgt

SEQ ID NO: 215406 - DNA, 25 bp, Probe sequence
tgaacaattatgatacaaccgtgca

SEQ ID NO: 215407 - DNA, 25 bp, Probe sequence
tacaaccgtgcaaacgatatgtagt

SEQ ID NO: 215408 - DNA, 25 bp, Probe sequence
tagtataacttgtcaacttagaatt

SEQ ID NO: 215409 - DNA, 25 bp, Probe sequence
tatgtagtataacttgtcaacttag

SEQ ID NO: 215410 - DNA, 25 bp, Probe sequence
tatgatacaaccgtgcaaacgatat

SEQ ID NO: 215411 - DNA, 25 bp, Probe sequence
ttatgatacaaccgtgcaaacgata

SEQ ID NO: 215412 - DNA, 25 bp, Probe sequence
atatggattttcagtctctagtgat

SEQ ID NO: 215413 - DNA, 25 bp, Probe sequence
ataaacatgtattgcaaccactaaa

SEQ ID NO: 215414 - DNA, 25 bp, Probe sequence
atggattttcagtctctagtgataa

SEQ ID NO: 215415 - DNA, 25 bp, Probe sequence
agtctctagtgataaagagcaacat

SEQ ID NO: 215416 - DNA, 25 bp, Probe sequence
agatattggtattcaaactataaat

SEQ ID NO: 215417 - DNA, 25 bp, Probe sequence
agagcaacatatcttttcaacatac

SEQ ID NO: 215418 - DNA, 25 bp, Probe sequence
agaatatggattttcagtctctagt

SEQ ID NO: 215419 - DNA, 25 bp, Probe sequence
agcaacatatcttttcaacatacca

SEQ ID NO: 215420 - DNA, 25 bp, Probe sequence
acatatcttttcaacataccataca

SEQ ID NO: 215421 - DNA, 25 bp, Probe sequence
acatgtattgcaaccactaaaaaaa

SEQ ID NO: 215422 - DNA, 25 bp, Probe sequence
aaacatgtattgcaaccactaaaaa

SEQ ID NO: 215423 - DNA, 25 bp, Probe sequence
aaaaatgtgagtatcaaagatggat

SEQ ID NO: 215424 - DNA, 25 bp, Probe sequence
aacatgtattgcaaccactaaaaaa

SEQ ID NO: 215425 - DNA, 25 bp, Probe sequence
aacatatcttttcaacataccatac

SEQ ID NO: 215426 - DNA, 25 bp, Probe sequence
aagaatatggattttcagtctctag

SEQ ID NO: 215427 - DNA, 25 bp, Probe sequence
aagatggatagatattggtattcaa

SEQ ID NO: 215428 - DNA, 25 bp, Probe sequence
aatatggattttcagtctctagtga

SEQ ID NO: 215429 - DNA, 25 bp, Probe sequence
caacatatcttttcaacataccata

SEQ ID NO: 215430 - DNA, 25 bp, Probe sequence
catgtattgcaaccactaaaaaaat

SEQ ID NO: 215431 - DNA, 25 bp, Probe sequence
gcaacatatcttttcaacataccat

SEQ ID NO: 215432 - DNA, 25 bp, Probe sequence
gcaaccactaaaaaaatgtgagtat

SEQ ID NO: 215433 - DNA, 25 bp, Probe sequence
gaatatggattttcagtctctagtg

SEQ ID NO: 215434 - DNA, 25 bp, Probe sequence
gaagaatatggattttcagtctcta

SEQ ID NO: 215435 - DNA, 25 bp, Probe sequence
gagcaacatatcttttcaacatacc

SEQ ID NO: 215436 - DNA, 25 bp, Probe sequence
gatggatagatattggtattcaaac

SEQ ID NO: 215437 - DNA, 25 bp, Probe sequence
gattttcagtctctagtgataaaga

SEQ ID NO: 215438 - DNA, 25 bp, Probe sequence
ggattttcagtctctagtgataaag

SEQ ID NO: 215439 - DNA, 25 bp, Probe sequence
ggatagatattggtattcaaactat

SEQ ID NO: 215440 - DNA, 25 bp, Probe sequence
tggattttcagtctctagtgataaa

SEQ ID NO: 215441 - DNA, 25 bp, Probe sequence
tgtattgcaaccactaaaaaaatgt

SEQ ID NO: 215442 - DNA, 25 bp, Probe sequence
taaacatgtattgcaaccactaaaa

SEQ ID NO: 215443 - DNA, 25 bp, Probe sequence
tatggattttcagtctctagtgata

SEQ ID NO: 215444 - DNA, 25 bp, Probe sequence
ttttcagtctctagtgataaagagc

SEQ ID NO: 215445 - DNA, 25 bp, Probe sequence
ttcagtctctagtgataaagagcaa

SEQ ID NO: 215446 - DNA, 25 bp, Probe sequence
atcaattgagcaaacaaccgaatca

SEQ ID NO: 215447 - DNA, 25 bp, Probe sequence
atggtgccgcatgaagtgctaggaa

SEQ ID NO: 215448 - DNA, 25 bp, Probe sequence
agttgagacacctagcgagctgttt

SEQ ID NO: 215449 - DNA, 25 bp, Probe sequence
agacaggcgcgtaactttgtcaatg

SEQ ID NO: 215450 - DNA, 25 bp, Probe sequence
agatgattgatgttgcgaagcgctt

SEQ ID NO: 215451 - DNA, 25 bp, Probe sequence
agcgatttatcgtagcgatcttgat

SEQ ID NO: 215452 - DNA, 25 bp, Probe sequence
accgtcatattccagcattgctgaa

SEQ ID NO: 215453 - DNA, 25 bp, Probe sequence
aacgaagacattgctggtgagagac

SEQ ID NO: 215454 - DNA, 25 bp, Probe sequence
aagttggtgtgataggtgttggtgg

SEQ ID NO: 215455 - DNA, 25 bp, Probe sequence
aatgcccttatagaagcgatttatc

SEQ ID NO: 215456 - DNA, 25 bp, Probe sequence
aattccatgctgatctttctataga

SEQ ID NO: 215457 - DNA, 25 bp, Probe sequence
cttgttagacttatctttgtggcta

SEQ ID NO: 215458 - DNA, 25 bp, Probe sequence
gccaatcgagcaagcatgcagtttg

SEQ ID NO: 215459 - DNA, 25 bp, Probe sequence
gcgagctgtttaaacttgttgatgc

SEQ ID NO: 215460 - DNA, 25 bp, Probe sequence
gctgaaactcaaagacacagtctca

SEQ ID NO: 215461 - DNA, 25 bp, Probe sequence
gcatgcagtttgaatgttcgtggtc

SEQ ID NO: 215462 - DNA, 25 bp, Probe sequence
gcaaggtggcggtagtttaatcgat

SEQ ID NO: 215463 - DNA, 25 bp, Probe sequence
gaagcacgcaatgtaaatgccctta

SEQ ID NO: 215464 - DNA, 25 bp, Probe sequence
gacacagtctcattagttgcagtac

SEQ ID NO: 215465 - DNA, 25 bp, Probe sequence
gatgtcgatgatcatgttactagtt

SEQ ID NO: 215466 - DNA, 25 bp, Probe sequence
gttgatgcggtggtcatttgtacac

SEQ ID NO: 215467 - DNA, 25 bp, Probe sequence
gttgcgaagcgctttaatatacctc

SEQ ID NO: 215468 - DNA, 25 bp, Probe sequence
gttatatgacatttgccaatcgagc

SEQ ID NO: 215469 - DNA, 25 bp, Probe sequence
gtttaatcgattatggttgccactt

SEQ ID NO: 215470 - DNA, 25 bp, Probe sequence
gtagcacgtgtacaagcgatgcgta

SEQ ID NO: 215471 - DNA, 25 bp, Probe sequence
gtacaagcgatgcgtaggcgtaaag

SEQ ID NO: 215472 - DNA, 25 bp, Probe sequence
ggtgagagacaggcgcgtaactttg

SEQ ID NO: 215473 - DNA, 25 bp, Probe sequence
ggttgccacttgttagacttatctt

SEQ ID NO: 215474 - DNA, 25 bp, Probe sequence
ggcggtatcaatttatttccatttg

SEQ ID NO: 215475 - DNA, 25 bp, Probe sequence
tgcacaagaccgtcatattccagca

SEQ ID NO: 215476 - DNA, 25 bp, Probe sequence
tatgagccccgctttggaactattt

SEQ ID NO: 215477 - DNA, 25 bp, Probe sequence
taggtaaagatatggtgccgcatga

SEQ ID NO: 215478 - DNA, 25 bp, Probe sequence
tttgaaatatatgagccccgctttg

SEQ ID NO: 215479 - DNA, 25 bp, Probe sequence
ttgaatgttcgtggtctgcaaatat

SEQ ID NO: 215480 - DNA, 25 bp, Probe sequence
attatgtagtgatttttgggagtgg

SEQ ID NO: 215481 - DNA, 25 bp, Probe sequence
atcaatgttaaagagcccttaaaga

SEQ ID NO: 215482 - DNA, 25 bp, Probe sequence
atgtagtgatttttgggagtgggac

SEQ ID NO: 215483 - DNA, 25 bp, Probe sequence
agtgggacagaaataacattttcac

SEQ ID NO: 215484 - DNA, 25 bp, Probe sequence
agagcccttaaagattaattatgta

SEQ ID NO: 215485 - DNA, 25 bp, Probe sequence
agcccttaaagattaattatgtagt

SEQ ID NO: 215486 - DNA, 25 bp, Probe sequence
acagaaataacattttcacaaaatt

SEQ ID NO: 215487 - DNA, 25 bp, Probe sequence
acaactcaatgacttggagtgtgac

SEQ ID NO: 215488 - DNA, 25 bp, Probe sequence
aaagagcccttaaagattaattatg

SEQ ID NO: 215489 - DNA, 25 bp, Probe sequence
aagagcccttaaagattaattatgt

SEQ ID NO: 215490 - DNA, 25 bp, Probe sequence
aattatgtagtgatttttgggagtg

SEQ ID NO: 215491 - DNA, 25 bp, Probe sequence
cagaaataacattttcacaaaattt

SEQ ID NO: 215492 - DNA, 25 bp, Probe sequence
catcaatgttaaagagcccttaaag

SEQ ID NO: 215493 - DNA, 25 bp, Probe sequence
ctcaatgacttggagtgtgacatca

SEQ ID NO: 215494 - DNA, 25 bp, Probe sequence
gcccttaaagattaattatgtagtg

SEQ ID NO: 215495 - DNA, 25 bp, Probe sequence
gaaataacattttcacaaaatttat

SEQ ID NO: 215496 - DNA, 25 bp, Probe sequence
gacagaaataacattttcacaaaat

SEQ ID NO: 215497 - DNA, 25 bp, Probe sequence
gagcccttaaagattaattatgtag

SEQ ID NO: 215498 - DNA, 25 bp, Probe sequence
gagtgggacagaaataacattttca

SEQ ID NO: 215499 - DNA, 25 bp, Probe sequence
gtagtgatttttgggagtgggacag

SEQ ID NO: 215500 - DNA, 25 bp, Probe sequence
gtgggacagaaataacattttcaca

SEQ ID NO: 215501 - DNA, 25 bp, Probe sequence
gggacagaaataacattttcacaaa

SEQ ID NO: 215502 - DNA, 25 bp, Probe sequence
ggacagaaataacattttcacaaaa

SEQ ID NO: 215503 - DNA, 25 bp, Probe sequence
tgggacagaaataacattttcacaa

SEQ ID NO: 215504 - DNA, 25 bp, Probe sequence
tgtagtgatttttgggagtgggaca

SEQ ID NO: 215505 - DNA, 25 bp, Probe sequence
tgttaaagagcccttaaagattaat

SEQ ID NO: 215506 - DNA, 25 bp, Probe sequence
tcaatgttaaagagcccttaaagat

SEQ ID NO: 215507 - DNA, 25 bp, Probe sequence
taattatgtagtgatttttgggagt

SEQ ID NO: 215508 - DNA, 25 bp, Probe sequence
taacattttcacaaaatttatttcg

SEQ ID NO: 215509 - DNA, 25 bp, Probe sequence
taaagagcccttaaagattaattat

SEQ ID NO: 215510 - DNA, 25 bp, Probe sequence
tagtgatttttgggagtgggacaga

SEQ ID NO: 215511 - DNA, 25 bp, Probe sequence
tattacaactcaatgacttggagtg

SEQ ID NO: 215512 - DNA, 25 bp, Probe sequence
ttatgtagtgatttttgggagtggg

SEQ ID NO: 215513 - DNA, 25 bp, Probe sequence
attaaaagcattagcccgtgaatta

SEQ ID NO: 215514 - DNA, 25 bp, Probe sequence
atgttgactcaaaccgcttaagaac

SEQ ID NO: 215515 - DNA, 25 bp, Probe sequence
acagtctgtcttaggttcaattatt

SEQ ID NO: 215516 - DNA, 25 bp, Probe sequence
aacatattttccgtgcaatgatgca

SEQ ID NO: 215517 - DNA, 25 bp, Probe sequence
aagcgatggctttaaagacattcga

SEQ ID NO: 215518 - DNA, 25 bp, Probe sequence
caaatgacagcagggttcaaccgaa

SEQ ID NO: 215519 - DNA, 25 bp, Probe sequence
ttcaaggtagtggttcacgtgcgtc

SEQ ID NO: 215520 - DNA, 25 bp, Probe sequence
ctgtaggtaagactgcgttcgcact

SEQ ID NO: 215521 - DNA, 25 bp, Probe sequence
ctgcgttcgcacttaatattgcaca

SEQ ID NO: 215522 - DNA, 25 bp, Probe sequence
gtaccaacgacgcgaaatgttcagt

SEQ ID NO: 215523 - DNA, 25 bp, Probe sequence
gccacacgtatgatttgtagttctg

SEQ ID NO: 215524 - DNA, 25 bp, Probe sequence
gcagcgcgtccatctgtaggtaaga

SEQ ID NO: 215525 - DNA, 25 bp, Probe sequence
gcggtaggtaaattatcacgtacga

SEQ ID NO: 215526 - DNA, 25 bp, Probe sequence
gacattcgagacgtcttaggacaag

SEQ ID NO: 215527 - DNA, 25 bp, Probe sequence
gaacgtcgaattttagagctatcat

SEQ ID NO: 215528 - DNA, 25 bp, Probe sequence
gaacttgaactagatgcgattttaa

SEQ ID NO: 215529 - DNA, 25 bp, Probe sequence
gaaatctctcgtacattaaaagcat

SEQ ID NO: 215530 - DNA, 25 bp, Probe sequence
gacatgattgtgattgactacttac

SEQ ID NO: 215531 - DNA, 25 bp, Probe sequence
gactacttacagttgattcaaggta

SEQ ID NO: 215532 - DNA, 25 bp, Probe sequence
gagctatcatcttctcgtgaaagcg

SEQ ID NO: 215533 - DNA, 25 bp, Probe sequence
gatgatacaccgggtattcgaatta

SEQ ID NO: 215534 - DNA, 25 bp, Probe sequence
gtacgttgaatgaagcgggtggccc

SEQ ID NO: 215535 - DNA, 25 bp, Probe sequence
gatattcgtgaatctggttcgattg

SEQ ID NO: 215536 - DNA, 25 bp, Probe sequence
gtggcccgcaatatcttgcagagtt

SEQ ID NO: 215537 - DNA, 25 bp, Probe sequence
gggtgctgatcagttagccacacgt

SEQ ID NO: 215538 - DNA, 25 bp, Probe sequence
ggtccaacaggcacagttaagttac

SEQ ID NO: 215539 - DNA, 25 bp, Probe sequence
ggatcaattatcgacggaaggtacg

SEQ ID NO: 215540 - DNA, 25 bp, Probe sequence
ggagtcgttttactatagcggtagg

SEQ ID NO: 215541 - DNA, 25 bp, Probe sequence
tgtccagttatcgcattaagtcagt

SEQ ID NO: 215542 - DNA, 25 bp, Probe sequence
tctacaaatgtaccaacgacgcgaa

SEQ ID NO: 215543 - DNA, 25 bp, Probe sequence
tactgatatcgtttctaagcatgca

SEQ ID NO: 215544 - DNA, 25 bp, Probe sequence
taggggtgcccatcaacatattttc

SEQ ID NO: 215545 - DNA, 25 bp, Probe sequence
tttaattatccttgcagcgcgtcca

SEQ ID NO: 215546 - DNA, 25 bp, Probe sequence
ttaagtcagttatctcgtggtgttg

SEQ ID NO: 215547 - DNA, 25 bp, Probe sequence
atattggcaagatttagctgagttt

SEQ ID NO: 215548 - DNA, 25 bp, Probe sequence
atcacttccatgctaaagatacgta

SEQ ID NO: 215549 - DNA, 25 bp, Probe sequence
atcggtgctaacttagatcctagtc

SEQ ID NO: 215550 - DNA, 25 bp, Probe sequence
atgtatggtctaactgatatgcaac

SEQ ID NO: 215551 - DNA, 25 bp, Probe sequence
aaatctattagacgtgccagttgtt

SEQ ID NO: 215552 - DNA, 25 bp, Probe sequence
aaacaatccgtttagcaaatctatt

SEQ ID NO: 215553 - DNA, 25 bp, Probe sequence
aacaatccaatttctccagatccga

SEQ ID NO: 215554 - DNA, 25 bp, Probe sequence
aagccagcagacatgtggtgggcat

SEQ ID NO: 215555 - DNA, 25 bp, Probe sequence
aagcttgtcaaactttgaaatctgt

SEQ ID NO: 215556 - DNA, 25 bp, Probe sequence
aagttacgtgaggctacaaatgaat

SEQ ID NO: 215557 - DNA, 25 bp, Probe sequence
aagtattgaacatgaagatcctatt

SEQ ID NO: 215558 - DNA, 25 bp, Probe sequence
caagcatttatgaagtcaatcacag

SEQ ID NO: 215559 - DNA, 25 bp, Probe sequence
cagcctactctgaaatttatgatta

SEQ ID NO: 215560 - DNA, 25 bp, Probe sequence
cttggccaacagcctactctgaaat

SEQ ID NO: 215561 - DNA, 25 bp, Probe sequence
cctaattggcctgttacaccttggc

SEQ ID NO: 215562 - DNA, 25 bp, Probe sequence
ccgtacagttggttatggacatagt

SEQ ID NO: 215563 - DNA, 25 bp, Probe sequence
gctgcgattcgcatattaggccaag

SEQ ID NO: 215564 - DNA, 25 bp, Probe sequence
gcaaatgcaattcatcacttccatg

SEQ ID NO: 215565 - DNA, 25 bp, Probe sequence
gcaattcatcacttccatgctaaag

SEQ ID NO: 215566 - DNA, 25 bp, Probe sequence
gaagatcctattatgtcagtagaag

SEQ ID NO: 215567 - DNA, 25 bp, Probe sequence
gataccgctaaaaagcctaattggc

SEQ ID NO: 215568 - DNA, 25 bp, Probe sequence
gttggaacaggtggtaacccaggag

SEQ ID NO: 215569 - DNA, 25 bp, Probe sequence
gattcgcatattaggccaagcaaat

SEQ ID NO: 215570 - DNA, 25 bp, Probe sequence
gattggatatgattgaagttggaac

SEQ ID NO: 215571 - DNA, 25 bp, Probe sequence
gttaatacattttctggcattgcag

SEQ ID NO: 215572 - DNA, 25 bp, Probe sequence
gttaatatttacgacaagccagcag

SEQ ID NO: 215573 - DNA, 25 bp, Probe sequence
gtcataacaatccaatttctccaga

SEQ ID NO: 215574 - DNA, 25 bp, Probe sequence
gtccatatgtatgggcagatatcat

SEQ ID NO: 215575 - DNA, 25 bp, Probe sequence
tgaaaagttgataccatattggcaa

SEQ ID NO: 215576 - DNA, 25 bp, Probe sequence
tcaatcacagacagaggcttacaaa

SEQ ID NO: 215577 - DNA, 25 bp, Probe sequence
taagtggtttcagttgtcataacaa

SEQ ID NO: 215578 - DNA, 25 bp, Probe sequence
tagacgtgccagttgttaatacatt

SEQ ID NO: 215579 - DNA, 25 bp, Probe sequence
taggtgtattttcagtattatttta

SEQ ID NO: 215580 - DNA, 25 bp, Probe sequence
ttggcctgttacaccttggccaaca

SEQ ID NO: 215581 - DNA, 25 bp, Probe sequence
attggtttcacctctccaaaaattg

SEQ ID NO: 215582 - DNA, 25 bp, Probe sequence
attagacttagccattggtttcacc

SEQ ID NO: 215583 - DNA, 25 bp, Probe sequence
atgtctttactattagacttagcca

SEQ ID NO: 215584 - DNA, 25 bp, Probe sequence
agacttagccattggtttcacctct

SEQ ID NO: 215585 - DNA, 25 bp, Probe sequence
acctctccaaaaattgtaaatgtgt

SEQ ID NO: 215586 - DNA, 25 bp, Probe sequence
actattagacttagccattggtttc

SEQ ID NO: 215587 - DNA, 25 bp, Probe sequence
acataaaactgacatatttctttaa

SEQ ID NO: 215588 - DNA, 25 bp, Probe sequence
aactgacatatttctttaaaatatc

SEQ ID NO: 215589 - DNA, 25 bp, Probe sequence
cacctctccaaaaattgtaaatgtg

SEQ ID NO: 215590 - DNA, 25 bp, Probe sequence
cataaaactgacatatttctttaaa

SEQ ID NO: 215591 - DNA, 25 bp, Probe sequence
cattggtttcacctctccaaaaatt

SEQ ID NO: 215592 - DNA, 25 bp, Probe sequence
ctattagacttagccattggtttca

SEQ ID NO: 215593 - DNA, 25 bp, Probe sequence
ctttactattagacttagccattgg

SEQ ID NO: 215594 - DNA, 25 bp, Probe sequence
ccattggtttcacctctccaaaaat

SEQ ID NO: 215595 - DNA, 25 bp, Probe sequence
gttacataaaactgacatatttctt

SEQ ID NO: 215596 - DNA, 25 bp, Probe sequence
gtctttactattagacttagccatt

SEQ ID NO: 215597 - DNA, 25 bp, Probe sequence
gtgtatcatcaatatgaaagttaca

SEQ ID NO: 215598 - DNA, 25 bp, Probe sequence
tggtttcacctctccaaaaattgta

SEQ ID NO: 215599 - DNA, 25 bp, Probe sequence
tgtctttactattagacttagccat

SEQ ID NO: 215600 - DNA, 25 bp, Probe sequence
tgtaaatgtgtatcatcaatatgaa

SEQ ID NO: 215601 - DNA, 25 bp, Probe sequence
tctttactattagacttagccattg

SEQ ID NO: 215602 - DNA, 25 bp, Probe sequence
tcacctctccaaaaattgtaaatgt

SEQ ID NO: 215603 - DNA, 25 bp, Probe sequence
taaaactgacatatttctttaaaat

SEQ ID NO: 215604 - DNA, 25 bp, Probe sequence
tactattagacttagccattggttt

SEQ ID NO: 215605 - DNA, 25 bp, Probe sequence
tacataaaactgacatatttcttta

SEQ ID NO: 215606 - DNA, 25 bp, Probe sequence
tagacttagccattggtttcacctc

SEQ ID NO: 215607 - DNA, 25 bp, Probe sequence
tattagacttagccattggtttcac

SEQ ID NO: 215608 - DNA, 25 bp, Probe sequence
ttagacttagccattggtttcacct

SEQ ID NO: 215609 - DNA, 25 bp, Probe sequence
tttcacctctccaaaaattgtaaat

SEQ ID NO: 215610 - DNA, 25 bp, Probe sequence
tttactattagacttagccattggt

SEQ ID NO: 215611 - DNA, 25 bp, Probe sequence
ttacataaaactgacatatttcttt

SEQ ID NO: 215612 - DNA, 25 bp, Probe sequence
ttactattagacttagccattggtt

SEQ ID NO: 215613 - DNA, 25 bp, Probe sequence
ttggtttcacctctccaaaaattgt

SEQ ID NO: 215614 - DNA, 25 bp, Probe sequence
ttcacctctccaaaaattgtaaatg

SEQ ID NO: 215615 - DNA, 25 bp, Probe sequence
aggcccatacaccaagatagacatc

SEQ ID NO: 215616 - DNA, 25 bp, Probe sequence
accaacgcatgacccaagggcaaag

SEQ ID NO: 215617 - DNA, 25 bp, Probe sequence
acgcatgacccaagggcaaagcgac

SEQ ID NO: 215618 - DNA, 25 bp, Probe sequence
actacgcactatcattcagcaaaat

SEQ ID NO: 215619 - DNA, 25 bp, Probe sequence
acatcaaatgatgcgggttgtgtta

SEQ ID NO: 215620 - DNA, 25 bp, Probe sequence
acagtcattacattagaaatacaag

SEQ ID NO: 215621 - DNA, 25 bp, Probe sequence
acaccaagatagacatcatagaagt

SEQ ID NO: 215622 - DNA, 25 bp, Probe sequence
aaatcaccattttagctgtagggaa

SEQ ID NO: 215623 - DNA, 25 bp, Probe sequence
aaatgatgcgggttgtgttaattga

SEQ ID NO: 215624 - DNA, 25 bp, Probe sequence
tcaaacggcctgcacaaggacgtct

SEQ ID NO: 215625 - DNA, 25 bp, Probe sequence
aaacggcctgcacaaggacgtctta

SEQ ID NO: 215626 - DNA, 25 bp, Probe sequence
aacgtttaggcccatacaccaagat

SEQ ID NO: 215627 - DNA, 25 bp, Probe sequence
cagacgaaaaagcaccagaaaatat

SEQ ID NO: 215628 - DNA, 25 bp, Probe sequence
ctatcttccgaaggattggcccaag

SEQ ID NO: 215629 - DNA, 25 bp, Probe sequence
gcctgcacaaggacgtcttacaacg

SEQ ID NO: 215630 - DNA, 25 bp, Probe sequence
gcccatacaccaagatagacatcat

SEQ ID NO: 215631 - DNA, 25 bp, Probe sequence
gaatatgaaaaacgtttaggcccat

SEQ ID NO: 215632 - DNA, 25 bp, Probe sequence
gaattgaaccaacgcatgacccaag

SEQ ID NO: 215633 - DNA, 25 bp, Probe sequence
gaaggccaacgaatactagccaaaa

SEQ ID NO: 215634 - DNA, 25 bp, Probe sequence
gaaatattggaagcaagccatagca

SEQ ID NO: 215635 - DNA, 25 bp, Probe sequence
gatgctatcttccgaaggattggcc

SEQ ID NO: 215636 - DNA, 25 bp, Probe sequence
gtttaggcccatacaccaagataga

SEQ ID NO: 215637 - DNA, 25 bp, Probe sequence
gtaactacgcactatcattcagcaa

SEQ ID NO: 215638 - DNA, 25 bp, Probe sequence
gtcattggcggatcaaacggcctgc

SEQ ID NO: 215639 - DNA, 25 bp, Probe sequence
ggatcaaacggcctgcacaaggacg

SEQ ID NO: 215640 - DNA, 25 bp, Probe sequence
ggaagcaagccatagcagaatatga

SEQ ID NO: 215641 - DNA, 25 bp, Probe sequence
ggcccaagaattgaaccaacgcatg

SEQ ID NO: 215642 - DNA, 25 bp, Probe sequence
tgacccaagggcaaagcgactttgt

SEQ ID NO: 215643 - DNA, 25 bp, Probe sequence
tcaccattttagctgtagggaaact

SEQ ID NO: 215644 - DNA, 25 bp, Probe sequence
tgaaccaacgcatgacccaagggca

SEQ ID NO: 215645 - DNA, 25 bp, Probe sequence
tcttccgaaggattggcccaagaat

SEQ ID NO: 215646 - DNA, 25 bp, Probe sequence
tacaaggaaagatgctatcttccga

SEQ ID NO: 215647 - DNA, 25 bp, Probe sequence
ttcgtcattggcggatcaaacggcc

SEQ ID NO: 215648 - DNA, 25 bp, Probe sequence
ttggcggatcaaacggcctgcacaa

SEQ ID NO: 215649 - DNA, 25 bp, Probe sequence
atacgtttgacagtgcgtctacctt

SEQ ID NO: 215650 - DNA, 25 bp, Probe sequence
actaatcacattaatttaccaacga

SEQ ID NO: 215651 - DNA, 25 bp, Probe sequence
aaatctcatcatcattttagccatg

SEQ ID NO: 215652 - DNA, 25 bp, Probe sequence
aaatgtaccctaaatctcatcatca

SEQ ID NO: 215653 - DNA, 25 bp, Probe sequence
aaagtcaaagaccaaacacctaatg

SEQ ID NO: 215654 - DNA, 25 bp, Probe sequence
aaaaatcatctcattgttcagcaaa

SEQ ID NO: 215655 - DNA, 25 bp, Probe sequence
aaaatatcgttgcgtcagcgtctta

SEQ ID NO: 215656 - DNA, 25 bp, Probe sequence
aactataaagcgttactcaatgaga

SEQ ID NO: 215657 - DNA, 25 bp, Probe sequence
aacgataaatgctagtgactttctt

SEQ ID NO: 215658 - DNA, 25 bp, Probe sequence
aatggttgctgatatttcaattcat

SEQ ID NO: 215659 - DNA, 25 bp, Probe sequence
aattgccgaaattccacttacaaga

SEQ ID NO: 215660 - DNA, 25 bp, Probe sequence
cgcccatgttctacttactcaaaga

SEQ ID NO: 215661 - DNA, 25 bp, Probe sequence
cctcaacatgcacccgaatggacta

SEQ ID NO: 215662 - DNA, 25 bp, Probe sequence
gcctgaaagcatgattttaactcct

SEQ ID NO: 215663 - DNA, 25 bp, Probe sequence
gcgtcttatcgttctgatgaagcat

SEQ ID NO: 215664 - DNA, 25 bp, Probe sequence
gcgtcagcgtcttatcgttctgatg

SEQ ID NO: 215665 - DNA, 25 bp, Probe sequence
gcaactcatgttcaatacctgttca

SEQ ID NO: 215666 - DNA, 25 bp, Probe sequence
gaagtcttattaagtttgcctaatg

SEQ ID NO: 215667 - DNA, 25 bp, Probe sequence
gaagcattatatagcgaacgtacag

SEQ ID NO: 215668 - DNA, 25 bp, Probe sequence
gaacgatttgccgactttgatttca

SEQ ID NO: 215669 - DNA, 25 bp, Probe sequence
gaaatcatactattaagcctgaaag

SEQ ID NO: 215670 - DNA, 25 bp, Probe sequence
gacagcgtttatggaatgaagttga

SEQ ID NO: 215671 - DNA, 25 bp, Probe sequence
gagtgactaacattaatcgagcaac

SEQ ID NO: 215672 - DNA, 25 bp, Probe sequence
gatgatataaacaacccacacgccc

SEQ ID NO: 215673 - DNA, 25 bp, Probe sequence
gatagtcgttcttttgaagcgcaag

SEQ ID NO: 215674 - DNA, 25 bp, Probe sequence
gttcagcaaatgtaccctaaatctc

SEQ ID NO: 215675 - DNA, 25 bp, Probe sequence
gtgcgtctacctttggtcgtaaaat

SEQ ID NO: 215676 - DNA, 25 bp, Probe sequence
gtgactttcttatgtactatgcgaa

SEQ ID NO: 215677 - DNA, 25 bp, Probe sequence
gtgatgttggctattcagaggcgaa

SEQ ID NO: 215678 - DNA, 25 bp, Probe sequence
tgattttaactcctcaacatgcacc

SEQ ID NO: 215679 - DNA, 25 bp, Probe sequence
taatgcagacggtacttgggggaaa

SEQ ID NO: 215680 - DNA, 25 bp, Probe sequence
taatcgtggcgaagtatcacaatta

SEQ ID NO: 215681 - DNA, 25 bp, Probe sequence
tactcaaagaccgtttaatgcagac

SEQ ID NO: 215682 - DNA, 25 bp, Probe sequence
tatcgagtaccaacccgttacttat

SEQ ID NO: 215683 - DNA, 25 bp, Probe sequence
gttggacgggaataccgggtgtgat

SEQ ID NO: 215684 - DNA, 25 bp, Probe sequence
atgctcttctttatttactattttg

SEQ ID NO: 215685 - DNA, 25 bp, Probe sequence
actctgcattagcattttttctagg

SEQ ID NO: 215686 - DNA, 25 bp, Probe sequence
acttatgcgtccgagcgatagtgaa

SEQ ID NO: 215687 - DNA, 25 bp, Probe sequence
acatgtctcaagaaaaattagctga

SEQ ID NO: 215688 - DNA, 25 bp, Probe sequence
aaatatgtttactctgcattagcat

SEQ ID NO: 215689 - DNA, 25 bp, Probe sequence
aaagttaggggtatcgagacattct

SEQ ID NO: 215690 - DNA, 25 bp, Probe sequence
aaaaatgctcttctttatttactat

SEQ ID NO: 215691 - DNA, 25 bp, Probe sequence
aacacttatgcgtccgagcgatagt

SEQ ID NO: 215692 - DNA, 25 bp, Probe sequence
cactaaattatttaatgtttctcta

SEQ ID NO: 215693 - DNA, 25 bp, Probe sequence
cgagacattctatttctaattggga

SEQ ID NO: 215694 - DNA, 25 bp, Probe sequence
ccgggtgtgataggtatggtagaag

SEQ ID NO: 215695 - DNA, 25 bp, Probe sequence
ggtttcggggctcataagttttatg

SEQ ID NO: 215696 - DNA, 25 bp, Probe sequence
gcgtccgagcgatagtgaaaacaat

SEQ ID NO: 215697 - DNA, 25 bp, Probe sequence
gctcttctttatttactattttgtt

SEQ ID NO: 215698 - DNA, 25 bp, Probe sequence
gcattagcattttttctaggaggtt

SEQ ID NO: 215699 - DNA, 25 bp, Probe sequence
gacgggaataccgggtgtgataggt

SEQ ID NO: 215700 - DNA, 25 bp, Probe sequence
gaaagagaagtaagtaatcccgact

SEQ ID NO: 215701 - DNA, 25 bp, Probe sequence
gaaaaagtaaaaacatgtctcaaga

SEQ ID NO: 215702 - DNA, 25 bp, Probe sequence
gataggtatggtagaaggtgtttta

SEQ ID NO: 215703 - DNA, 25 bp, Probe sequence
gtttactctgcattagcattttttc

SEQ ID NO: 215704 - DNA, 25 bp, Probe sequence
gtatcgagacattctatttctaatt

SEQ ID NO: 215705 - DNA, 25 bp, Probe sequence
gtgttttaacacttatgcgtccgag

SEQ ID NO: 215706 - DNA, 25 bp, Probe sequence
ggggtatcgagacattctatttcta

SEQ ID NO: 215707 - DNA, 25 bp, Probe sequence
ggggctcataagttttatgttaaga

SEQ ID NO: 215708 - DNA, 25 bp, Probe sequence
ggagtggaaatcatgcaagttaata

SEQ ID NO: 215709 - DNA, 25 bp, Probe sequence
tctttatttactattttgttggacg

SEQ ID NO: 215710 - DNA, 25 bp, Probe sequence
taggaggtttcggggctcataagtt

SEQ ID NO: 215711 - DNA, 25 bp, Probe sequence
tatgcgtccgagcgatagtgaaaac

SEQ ID NO: 215712 - DNA, 25 bp, Probe sequence
ttttctaggaggtttcggggctcat

SEQ ID NO: 215713 - DNA, 25 bp, Probe sequence
tatttaatgtttctctaaatcaatt

SEQ ID NO: 215714 - DNA, 25 bp, Probe sequence
ttttaacacttatgcgtccgagcga

SEQ ID NO: 215715 - DNA, 25 bp, Probe sequence
ttagctgaaaagttaggggtatcga

SEQ ID NO: 215716 - DNA, 25 bp, Probe sequence
ttaacacttatgcgtccgagcgata

SEQ ID NO: 215717 - DNA, 25 bp, Probe sequence
attcgttttcggcgtgattacaaag

SEQ ID NO: 215718 - DNA, 25 bp, Probe sequence
attactttatatgctgttacatgga

SEQ ID NO: 215719 - DNA, 25 bp, Probe sequence
atgctgttacatggaacgttatgct

SEQ ID NO: 215720 - DNA, 25 bp, Probe sequence
atgaacacattcgttttcggcgtga

SEQ ID NO: 215721 - DNA, 25 bp, Probe sequence
atggtggcattagatagtgatgaat

SEQ ID NO: 215722 - DNA, 25 bp, Probe sequence
atggaacgttatgcttatcttttga

SEQ ID NO: 215723 - DNA, 25 bp, Probe sequence
acgttatgcttatcttttgaactaa

SEQ ID NO: 215724 - DNA, 25 bp, Probe sequence
acattcgttttcggcgtgattacaa

SEQ ID NO: 215725 - DNA, 25 bp, Probe sequence
acacattcgttttcggcgtgattac

SEQ ID NO: 215726 - DNA, 25 bp, Probe sequence
aaatgcccgaaaaacaggcactatt

SEQ ID NO: 215727 - DNA, 25 bp, Probe sequence
aaccatgcaaggctgaactaacaat

SEQ ID NO: 215728 - DNA, 25 bp, Probe sequence
aaggctgaactaacaatggtggcat

SEQ ID NO: 215729 - DNA, 25 bp, Probe sequence
caggcactatttgaagatttgtacc

SEQ ID NO: 215730 - DNA, 25 bp, Probe sequence
cggcgtgattacaaagcgattagaa

SEQ ID NO: 215731 - DNA, 25 bp, Probe sequence
gcccgaaaaacaggcactatttgaa

SEQ ID NO: 215732 - DNA, 25 bp, Probe sequence
gcaaggctgaactaacaatggtggc

SEQ ID NO: 215733 - DNA, 25 bp, Probe sequence
gaattgattcattactttatatgct

SEQ ID NO: 215734 - DNA, 25 bp, Probe sequence
gaacgttatgcttatcttttgaact

SEQ ID NO: 215735 - DNA, 25 bp, Probe sequence
gaacacattcgttttcggcgtgatt

SEQ ID NO: 215736 - DNA, 25 bp, Probe sequence
gaaataggttttaatgtacacaagg

SEQ ID NO: 215737 - DNA, 25 bp, Probe sequence
gagatacgttaaaccatgcaaggct

SEQ ID NO: 215738 - DNA, 25 bp, Probe sequence
gatacgttaaaccatgcaaggctga

SEQ ID NO: 215739 - DNA, 25 bp, Probe sequence
gatttgtaccattatgtgagatacg

SEQ ID NO: 215740 - DNA, 25 bp, Probe sequence
gattcattactttatatgctgttac

SEQ ID NO: 215741 - DNA, 25 bp, Probe sequence
gttaaaccatgcaaggctgaactaa

SEQ ID NO: 215742 - DNA, 25 bp, Probe sequence
gttacatggaacgttatgcttatct

SEQ ID NO: 215743 - DNA, 25 bp, Probe sequence
gttttcggcgtgattacaaagcgat

SEQ ID NO: 215744 - DNA, 25 bp, Probe sequence
gtaccattatgtgagatacgttaaa

SEQ ID NO: 215745 - DNA, 25 bp, Probe sequence
ggcactatttgaagatttgtaccat

SEQ ID NO: 215746 - DNA, 25 bp, Probe sequence
ggctgaactaacaatggtggcatta

SEQ ID NO: 215747 - DNA, 25 bp, Probe sequence
tggaacgttatgcttatcttttgaa

SEQ ID NO: 215748 - DNA, 25 bp, Probe sequence
tgaagatttgtaccattatgtgaga

SEQ ID NO: 215749 - DNA, 25 bp, Probe sequence
tcgttttcggcgtgattacaaagcg

SEQ ID NO: 215750 - DNA, 25 bp, Probe sequence
tacacaaggtgtttaaaatgcccga

SEQ ID NO: 215751 - DNA, 25 bp, Probe sequence
atcacatagatacattaaacataaa

SEQ ID NO: 215752 - DNA, 25 bp, Probe sequence
atgacttatcggaagtgcatatgct

SEQ ID NO: 215753 - DNA, 25 bp, Probe sequence
accatcctcagcattggctgtcgct

SEQ ID NO: 215754 - DNA, 25 bp, Probe sequence
acctgtgaatgttaatgagctagcc

SEQ ID NO: 215755 - DNA, 25 bp, Probe sequence
caccatcctcagcattggctgtcgc

SEQ ID NO: 215756 - DNA, 25 bp, Probe sequence
catcctcagcattggctgtcgctga

SEQ ID NO: 215757 - DNA, 25 bp, Probe sequence
catttgtatctgcgctatttggtaa

SEQ ID NO: 215758 - DNA, 25 bp, Probe sequence
ctccgtatacggttttggcaccatc

SEQ ID NO: 215759 - DNA, 25 bp, Probe sequence
ctccatttgtatctgcgctatttgg

SEQ ID NO: 215760 - DNA, 25 bp, Probe sequence
ccgtatacggttttggcaccatcct

SEQ ID NO: 215761 - DNA, 25 bp, Probe sequence
ccaaccatctccatttgtatctgcg

SEQ ID NO: 215762 - DNA, 25 bp, Probe sequence
gcgctatttggtaagttctctccgt

SEQ ID NO: 215763 - DNA, 25 bp, Probe sequence
gctgtcgctgaaaaacctgtgaatg

SEQ ID NO: 215764 - DNA, 25 bp, Probe sequence
gctatttggtaagttctctccgtat

SEQ ID NO: 215765 - DNA, 25 bp, Probe sequence
gcattggctgtcgctgaaaaacctg

SEQ ID NO: 215766 - DNA, 25 bp, Probe sequence
gaatttgtattttcattatcacata

SEQ ID NO: 215767 - DNA, 25 bp, Probe sequence
gaatgttaatgagctagccaataat

SEQ ID NO: 215768 - DNA, 25 bp, Probe sequence
gaagtgcatatgcttaacaattcac

SEQ ID NO: 215769 - DNA, 25 bp, Probe sequence
gttctctccgtatacggttttggca

SEQ ID NO: 215770 - DNA, 25 bp, Probe sequence
gatcgttttttcataaaattatctc

SEQ ID NO: 215771 - DNA, 25 bp, Probe sequence
gttggaagtaatgatcgttttttca

SEQ ID NO: 215772 - DNA, 25 bp, Probe sequence
gtatctgcgctatttggtaagttct

SEQ ID NO: 215773 - DNA, 25 bp, Probe sequence
ttggtaagttctctccgtatacggt

SEQ ID NO: 215774 - DNA, 25 bp, Probe sequence
tgaagtctacattagcccaaccatc

SEQ ID NO: 215775 - DNA, 25 bp, Probe sequence
tgcatatgcttaacaattcacaaat

SEQ ID NO: 215776 - DNA, 25 bp, Probe sequence
tcctcagcattggctgtcgctgaaa

SEQ ID NO: 215777 - DNA, 25 bp, Probe sequence
tctgcgctatttggtaagttctctc

SEQ ID NO: 215778 - DNA, 25 bp, Probe sequence
taagttctctccgtatacggttttg

SEQ ID NO: 215779 - DNA, 25 bp, Probe sequence
taatgagctagccaataataaagtt

SEQ ID NO: 215780 - DNA, 25 bp, Probe sequence
tatctcctttaatagaatttgtatt

SEQ ID NO: 215781 - DNA, 25 bp, Probe sequence
tatttggtaagttctctccgtatac

SEQ ID NO: 215782 - DNA, 25 bp, Probe sequence
ttttcataaaattatctcctttaat

SEQ ID NO: 215783 - DNA, 25 bp, Probe sequence
ttggctgtcgctgaaaaacctgtga

SEQ ID NO: 215784 - DNA, 25 bp, Probe sequence
ttgtattttcattatcacatagata

SEQ ID NO: 215785 - DNA, 25 bp, Probe sequence
atagtaggggttataatcacgttgt

SEQ ID NO: 215786 - DNA, 25 bp, Probe sequence
atttgtatctatagtagctcctatt

SEQ ID NO: 215787 - DNA, 25 bp, Probe sequence
atatttgtatctatagtagctccta

SEQ ID NO: 215788 - DNA, 25 bp, Probe sequence
atcatatttgtatctatagtagctc

SEQ ID NO: 215789 - DNA, 25 bp, Probe sequence
atctatagtagctcctattatagta

SEQ ID NO: 215790 - DNA, 25 bp, Probe sequence
atgttcagcatcatatttgtatcta

SEQ ID NO: 215791 - DNA, 25 bp, Probe sequence
agtagctcctattatagtaggggtt

SEQ ID NO: 215792 - DNA, 25 bp, Probe sequence
agctcctattatagtaggggttata

SEQ ID NO: 215793 - DNA, 25 bp, Probe sequence
acattggttgaataatcgtgataaa

SEQ ID NO: 215794 - DNA, 25 bp, Probe sequence
cagcatcatatttgtatctatagta

SEQ ID NO: 215795 - DNA, 25 bp, Probe sequence
catatttgtatctatagtagctcct

SEQ ID NO: 215796 - DNA, 25 bp, Probe sequence
gcatcatatttgtatctatagtagc

SEQ ID NO: 215797 - DNA, 25 bp, Probe sequence
gttgttttcacattggttgaataat

SEQ ID NO: 215798 - DNA, 25 bp, Probe sequence
gttcagcatcatatttgtatctata

SEQ ID NO: 215799 - DNA, 25 bp, Probe sequence
gttataatcacgttgttttcacatt

SEQ ID NO: 215800 - DNA, 25 bp, Probe sequence
gttttcacattggttgaataatcgt

SEQ ID NO: 215801 - DNA, 25 bp, Probe sequence
gtatctatagtagctcctattatag

SEQ ID NO: 215802 - DNA, 25 bp, Probe sequence
gtagctcctattatagtaggggtta

SEQ ID NO: 215803 - DNA, 25 bp, Probe sequence
gggttataatcacgttgttttcaca

SEQ ID NO: 215804 - DNA, 25 bp, Probe sequence
ggttataatcacgttgttttcacat

SEQ ID NO: 215805 - DNA, 25 bp, Probe sequence
ggttgaataatcgtgataaacaata

SEQ ID NO: 215806 - DNA, 25 bp, Probe sequence
tgtatctatagtagctcctattata

SEQ ID NO: 215807 - DNA, 25 bp, Probe sequence
tgttcagcatcatatttgtatctat

SEQ ID NO: 215808 - DNA, 25 bp, Probe sequence
tctatagtagctcctattatagtag

SEQ ID NO: 215809 - DNA, 25 bp, Probe sequence
tcagcatcatatttgtatctatagt

SEQ ID NO: 215810 - DNA, 25 bp, Probe sequence
tagtagctcctattatagtaggggt

SEQ ID NO: 215811 - DNA, 25 bp, Probe sequence
tagctcctattatagtaggggttat

SEQ ID NO: 215812 - DNA, 25 bp, Probe sequence
tagtaggggttataatcacgttgtt

SEQ ID NO: 215813 - DNA, 25 bp, Probe sequence
tatagtagctcctattatagtaggg

SEQ ID NO: 215814 - DNA, 25 bp, Probe sequence
tatctatagtagctcctattatagt

SEQ ID NO: 215815 - DNA, 25 bp, Probe sequence
tatttgtatctatagtagctcctat

SEQ ID NO: 215816 - DNA, 25 bp, Probe sequence
tttgtatctatagtagctcctatta

SEQ ID NO: 215817 - DNA, 25 bp, Probe sequence
ttcagcatcatatttgtatctatag

SEQ ID NO: 215818 - DNA, 25 bp, Probe sequence
ttgtatctatagtagctcctattat

SEQ ID NO: 215819 - DNA, 25 bp, Probe sequence
atccagttatgtcggttaatgaatc

SEQ ID NO: 215820 - DNA, 25 bp, Probe sequence
atgtcggttaatgaatcgatgaaaa

SEQ ID NO: 215821 - DNA, 25 bp, Probe sequence
agcgagtggattgttaaaggggact

SEQ ID NO: 215822 - DNA, 25 bp, Probe sequence
agtcaaaatccagttatgtcggtta

SEQ ID NO: 215823 - DNA, 25 bp, Probe sequence
agctcaagtaatgcttagaaattta

SEQ ID NO: 215824 - DNA, 25 bp, Probe sequence
acagtcaaaatccagttatgtcggt

SEQ ID NO: 215825 - DNA, 25 bp, Probe sequence
aaattttcaaagctcaagtaatgct

SEQ ID NO: 215826 - DNA, 25 bp, Probe sequence
aaatccagttatgtcggttaatgaa

SEQ ID NO: 215827 - DNA, 25 bp, Probe sequence
aacagtcaaaatccagttatgtcgg

SEQ ID NO: 215828 - DNA, 25 bp, Probe sequence
aaaattttcaaagctcaagtaatgc

SEQ ID NO: 215829 - DNA, 25 bp, Probe sequence
aaaatccagttatgtcggttaatga

SEQ ID NO: 215830 - DNA, 25 bp, Probe sequence
aagctattaagcgagtggattgtta

SEQ ID NO: 215831 - DNA, 25 bp, Probe sequence
aatccagttatgtcggttaatgaat

SEQ ID NO: 215832 - DNA, 25 bp, Probe sequence
caaaatccagttatgtcggttaatg

SEQ ID NO: 215833 - DNA, 25 bp, Probe sequence
cagtcaaaatccagttatgtcggtt

SEQ ID NO: 215834 - DNA, 25 bp, Probe sequence
cagttatgtcggttaatgaatcgat

SEQ ID NO: 215835 - DNA, 25 bp, Probe sequence
cgagtggattgttaaaggggactga

SEQ ID NO: 215836 - DNA, 25 bp, Probe sequence
ccagttatgtcggttaatgaatcga

SEQ ID NO: 215837 - DNA, 25 bp, Probe sequence
gcgagtggattgttaaaggggactg

SEQ ID NO: 215838 - DNA, 25 bp, Probe sequence
gctcaagtaatgcttagaaatttaa

SEQ ID NO: 215839 - DNA, 25 bp, Probe sequence
gctattaagcgagtggattgttaaa

SEQ ID NO: 215840 - DNA, 25 bp, Probe sequence
gaatattaacagtcaaaatccagtt

SEQ ID NO: 215841 - DNA, 25 bp, Probe sequence
gaaaattttcaaagctcaagtaatg

SEQ ID NO: 215842 - DNA, 25 bp, Probe sequence
gaaatttaaagctattaagcgagtg

SEQ ID NO: 215843 - DNA, 25 bp, Probe sequence
gttatgtcggttaatgaatcgatga

SEQ ID NO: 215844 - DNA, 25 bp, Probe sequence
gtcaaaatccagttatgtcggttaa

SEQ ID NO: 215845 - DNA, 25 bp, Probe sequence
gtgaatattaacagtcaaaatccag

SEQ ID NO: 215846 - DNA, 25 bp, Probe sequence
tccagttatgtcggttaatgaatcg

SEQ ID NO: 215847 - DNA, 25 bp, Probe sequence
tcggttaatgaatcgatgaaaattt

SEQ ID NO: 215848 - DNA, 25 bp, Probe sequence
tcaaaatccagttatgtcggttaat

SEQ ID NO: 215849 - DNA, 25 bp, Probe sequence
taagcgagtggattgttaaagggga

SEQ ID NO: 215850 - DNA, 25 bp, Probe sequence
ttttcaaagctcaagtaatgcttag

SEQ ID NO: 215851 - DNA, 25 bp, Probe sequence
ttatgtcggttaatgaatcgatgaa

SEQ ID NO: 215852 - DNA, 25 bp, Probe sequence
ttcaaagctcaagtaatgcttagaa

SEQ ID NO: 215853 - DNA, 25 bp, Probe sequence
attgctgatccaacacgtaacggtt

SEQ ID NO: 215854 - DNA, 25 bp, Probe sequence
attaggaatcgttgctttctatgaa

SEQ ID NO: 215855 - DNA, 25 bp, Probe sequence
atatcctgggaaatcctgttatatg

SEQ ID NO: 215856 - DNA, 25 bp, Probe sequence
atggattctatgtgtttcaaacgtc

SEQ ID NO: 215857 - DNA, 25 bp, Probe sequence
aggtcgtcgtgcaattgtagctatt

SEQ ID NO: 215858 - DNA, 25 bp, Probe sequence
agctattggctgtatgtttatgatt

SEQ ID NO: 215859 - DNA, 25 bp, Probe sequence
acatttcattgtttgcattaggtgc

SEQ ID NO: 215860 - DNA, 25 bp, Probe sequence
aactgggcaccgttatatgtgtcag

SEQ ID NO: 215861 - DNA, 25 bp, Probe sequence
aagattccgaacaaaggcattccat

SEQ ID NO: 215862 - DNA, 25 bp, Probe sequence
caacgatttcaagatgggcgccaag

SEQ ID NO: 215863 - DNA, 25 bp, Probe sequence
gcaggtggtgttgcactttggggtg

SEQ ID NO: 215864 - DNA, 25 bp, Probe sequence
cccatcggtgattgcattacttatt

SEQ ID NO: 215865 - DNA, 25 bp, Probe sequence
gcattattcctaggcatgattctat

SEQ ID NO: 215866 - DNA, 25 bp, Probe sequence
gacttaacggggtgttccaatcagt

SEQ ID NO: 215867 - DNA, 25 bp, Probe sequence
gaacgaaacgtggccgatacttagg

SEQ ID NO: 215868 - DNA, 25 bp, Probe sequence
gacaggttcattcgcgtatctattc

SEQ ID NO: 215869 - DNA, 25 bp, Probe sequence
gttccaatcagttggtggacctgca

SEQ ID NO: 215870 - DNA, 25 bp, Probe sequence
gttggtttggcggctattgctgatc

SEQ ID NO: 215871 - DNA, 25 bp, Probe sequence
gtatcgcaacattatttatcggaaa

SEQ ID NO: 215872 - DNA, 25 bp, Probe sequence
gtgtatcattgactggttttgttcc

SEQ ID NO: 215873 - DNA, 25 bp, Probe sequence
gtgttctttgtttatatggctatgt

SEQ ID NO: 215874 - DNA, 25 bp, Probe sequence
ggggtgctaatgtattcttccatgg

SEQ ID NO: 215875 - DNA, 25 bp, Probe sequence
ggtggacctgcaagttattcaacga

SEQ ID NO: 215876 - DNA, 25 bp, Probe sequence
ggtgcgttaatctttggtccgcaat

SEQ ID NO: 215877 - DNA, 25 bp, Probe sequence
ggcattccattatcggtacaacgta

SEQ ID NO: 215878 - DNA, 25 bp, Probe sequence
ggacagatgttttcatcgtcttcta

SEQ ID NO: 215879 - DNA, 25 bp, Probe sequence
tcgtcttctatgttgcattattcct

SEQ ID NO: 215880 - DNA, 25 bp, Probe sequence
tcttacttatcttatctgcgattac

SEQ ID NO: 215881 - DNA, 25 bp, Probe sequence
tagggatgttcattttcccatcggt

SEQ ID NO: 215882 - DNA, 25 bp, Probe sequence
tacatttgttgtcttattctacaca

SEQ ID NO: 215883 - DNA, 25 bp, Probe sequence
tacttggatattttgtcgatggacg

SEQ ID NO: 215884 - DNA, 25 bp, Probe sequence
tagcatttagtatcacgtacggttt

SEQ ID NO: 215885 - DNA, 25 bp, Probe sequence
tatggggctacgtatcagacttatt

SEQ ID NO: 215886 - DNA, 25 bp, Probe sequence
ttcgcgtatctattcggtgactcaa

SEQ ID NO: 215887 - DNA, 25 bp, Probe sequence
aggctgtcggcagtgccgaccaaaa

SEQ ID NO: 215888 - DNA, 25 bp, Probe sequence
agcaaaggggggttttgctctcgtg

SEQ ID NO: 215889 - DNA, 25 bp, Probe sequence
cacctcagcaaaggggggttttgct

SEQ ID NO: 215890 - DNA, 25 bp, Probe sequence
gcaaaggggggttttgctctcgtgc

SEQ ID NO: 215891 - DNA, 25 bp, Probe sequence
cagcaaaggggggttttgctctcgt

SEQ ID NO: 215892 - DNA, 25 bp, Probe sequence
ctcagcaaaggggggttttgctctc

SEQ ID NO: 215893 - DNA, 25 bp, Probe sequence
ctgtcggcagtgccgaccaaaacca

SEQ ID NO: 215894 - DNA, 25 bp, Probe sequence
ctgccacctcagcaaaggggggttt

SEQ ID NO: 215895 - DNA, 25 bp, Probe sequence
cctcagcaaaggggggttttgctct

SEQ ID NO: 215896 - DNA, 25 bp, Probe sequence
ctctgccacctcagcaaaggggggt

SEQ ID NO: 215897 - DNA, 25 bp, Probe sequence
cgaggctgtcggcagtgccgaccaa

SEQ ID NO: 215898 - DNA, 25 bp, Probe sequence
gcgaggctgtcggcagtgccgacca

SEQ ID NO: 215899 - DNA, 25 bp, Probe sequence
gccacctcagcaaaggggggttttg

SEQ ID NO: 215900 - DNA, 25 bp, Probe sequence
gctgtcggcagtgccgaccaaaacc

SEQ ID NO: 215901 - DNA, 25 bp, Probe sequence
gcagtgccgaccaaaaccataaaac

SEQ ID NO: 215902 - DNA, 25 bp, Probe sequence
gaggctgtcggcagtgccgaccaaa

SEQ ID NO: 215903 - DNA, 25 bp, Probe sequence
gtcggcagtgccgaccaaaaccata

SEQ ID NO: 215904 - DNA, 25 bp, Probe sequence
tgtcggcagtgccgaccaaaaccat

SEQ ID NO: 215905 - DNA, 25 bp, Probe sequence
ggctgtcggcagtgccgaccaaaac

SEQ ID NO: 215906 - DNA, 25 bp, Probe sequence
tctgccacctcagcaaaggggggtt

SEQ ID NO: 215907 - DNA, 25 bp, Probe sequence
ggcagtgccgaccaaaaccataaaa

SEQ ID NO: 215908 - DNA, 25 bp, Probe sequence
tcagcaaaggggggttttgctctcg

SEQ ID NO: 215909 - DNA, 25 bp, Probe sequence
tgcgaggctgtcggcagtgccgacc

SEQ ID NO: 215910 - DNA, 25 bp, Probe sequence
tcggcagtgccgaccaaaaccataa

SEQ ID NO: 215911 - DNA, 25 bp, Probe sequence
tgccacctcagcaaaggggggtttt

SEQ ID NO: 215912 - DNA, 25 bp, Probe sequence
aggtctctcgtatcttttattcagc

SEQ ID NO: 215913 - DNA, 25 bp, Probe sequence
agaggtctctcgtatcttttattca

SEQ ID NO: 215914 - DNA, 25 bp, Probe sequence
accgaaagccagactcagcaagaat

SEQ ID NO: 215915 - DNA, 25 bp, Probe sequence
aagagaggtctctcgtatcttttat

SEQ ID NO: 215916 - DNA, 25 bp, Probe sequence
cttaccgaaagccagactcagcaag

SEQ ID NO: 215917 - DNA, 25 bp, Probe sequence
ctagtgtaacggacaaaaccactca

SEQ ID NO: 215918 - DNA, 25 bp, Probe sequence
ctcgtatcttttattcagcaatcgc

SEQ ID NO: 215919 - DNA, 25 bp, Probe sequence
ctctcgtatcttttattcagcaatc

SEQ ID NO: 215920 - DNA, 25 bp, Probe sequence
cgtatcttttattcagcaatcgcgc

SEQ ID NO: 215921 - DNA, 25 bp, Probe sequence
gccagactcagcaagaataaaattt

SEQ ID NO: 215922 - DNA, 25 bp, Probe sequence
gcttaccgaaagccagactcagcaa

SEQ ID NO: 215923 - DNA, 25 bp, Probe sequence
gaaagccagactcagcaagaataaa

SEQ ID NO: 215924 - DNA, 25 bp, Probe sequence
gagaggtctctcgtatcttttattc

SEQ ID NO: 215925 - DNA, 25 bp, Probe sequence
gatacaagagaggtctctcgtatct

SEQ ID NO: 215926 - DNA, 25 bp, Probe sequence
gttttgtctagcttaccgaaagcca

SEQ ID NO: 215927 - DNA, 25 bp, Probe sequence
gtatcttttattcagcaatcgcgcc

SEQ ID NO: 215928 - DNA, 25 bp, Probe sequence
gtctagcttaccgaaagccagactc

SEQ ID NO: 215929 - DNA, 25 bp, Probe sequence
gtctctcgtatcttttattcagcaa

SEQ ID NO: 215930 - DNA, 25 bp, Probe sequence
ggtctctcgtatcttttattcagca

SEQ ID NO: 215931 - DNA, 25 bp, Probe sequence
tgtctttcggttttctagtgtaacg

SEQ ID NO: 215932 - DNA, 25 bp, Probe sequence
tgtaacggacaaaaccactcaaaat

SEQ ID NO: 215933 - DNA, 25 bp, Probe sequence
tccgttttgtctagcttaccgaaag

SEQ ID NO: 215934 - DNA, 25 bp, Probe sequence
tctctcgtatcttttattcagcaat

SEQ ID NO: 215935 - DNA, 25 bp, Probe sequence
tagcttaccgaaagccagactcagc

SEQ ID NO: 215936 - DNA, 25 bp, Probe sequence
tattcagcaatcgcgcccgattgct

SEQ ID NO: 215937 - DNA, 25 bp, Probe sequence
tattttgtccgttttgtctagctta

SEQ ID NO: 215938 - DNA, 25 bp, Probe sequence
tattgtctttcggttttctagtgta

SEQ ID NO: 215939 - DNA, 25 bp, Probe sequence
tttattcagcaatcgcgcccgattg

SEQ ID NO: 215940 - DNA, 25 bp, Probe sequence
tttattgtctttcggttttctagtg

SEQ ID NO: 215941 - DNA, 25 bp, Probe sequence
tttattttgtccgttttgtctagct

SEQ ID NO: 215942 - DNA, 25 bp, Probe sequence
ttattttgtccgttttgtctagctt

SEQ ID NO: 215943 - DNA, 25 bp, Probe sequence
ttaccgaaagccagactcagcaaga

SEQ ID NO: 215944 - DNA, 25 bp, Probe sequence
ttcagcaatcgcgcccgattgctga

SEQ ID NO: 215945 - DNA, 25 bp, Probe sequence
ttgtctagcttaccgaaagccagac

SEQ ID NO: 215946 - DNA, 25 bp, Probe sequence
atgcttggtttgtactttatccacc

SEQ ID NO: 215947 - DNA, 25 bp, Probe sequence
agggatgcttggtttgtactttatc

SEQ ID NO: 215948 - DNA, 25 bp, Probe sequence
accaagcaaagcgtcttcctgcttc

SEQ ID NO: 215949 - DNA, 25 bp, Probe sequence
acgttgatcgttgatgttgcactgt

SEQ ID NO: 215950 - DNA, 25 bp, Probe sequence
actttatccaccaagcaaagcgtct

SEQ ID NO: 215951 - DNA, 25 bp, Probe sequence
cacgttgatcgttgatgttgcactg

SEQ ID NO: 215952 - DNA, 25 bp, Probe sequence
cttcctgcttcacgttgatcgttga

SEQ ID NO: 215953 - DNA, 25 bp, Probe sequence
ctgcttcacgttgatcgttgatgtt

SEQ ID NO: 215954 - DNA, 25 bp, Probe sequence
cgttgatgttgcactgttctctgaa

SEQ ID NO: 215955 - DNA, 25 bp, Probe sequence
cctgcttcacgttgatcgttgatgt

SEQ ID NO: 215956 - DNA, 25 bp, Probe sequence
ccaagcaaagcgtcttcctgcttca

SEQ ID NO: 215957 - DNA, 25 bp, Probe sequence
ccaccaagcaaagcgtcttcctgct

SEQ ID NO: 215958 - DNA, 25 bp, Probe sequence
gcttggtttgtactttatccaccaa

SEQ ID NO: 215959 - DNA, 25 bp, Probe sequence
gcttcacgttgatcgttgatgttgc

SEQ ID NO: 215960 - DNA, 25 bp, Probe sequence
gatgcttggtttgtactttatccac

SEQ ID NO: 215961 - DNA, 25 bp, Probe sequence
gatcgttgatgttgcactgttctct

SEQ ID NO: 215962 - DNA, 25 bp, Probe sequence
gttgatcgttgatgttgcactgttc

SEQ ID NO: 215963 - DNA, 25 bp, Probe sequence
gttgatgttgcactgttctctgaat

SEQ ID NO: 215964 - DNA, 25 bp, Probe sequence
gtttgtactttatccaccaagcaaa

SEQ ID NO: 215965 - DNA, 25 bp, Probe sequence
gtactttatccaccaagcaaagcgt

SEQ ID NO: 215966 - DNA, 25 bp, Probe sequence
gtgggttagttcctataataatgaa

SEQ ID NO: 215967 - DNA, 25 bp, Probe sequence
ggtttgtactttatccaccaagcaa

SEQ ID NO: 215968 - DNA, 25 bp, Probe sequence
tgatgttgcactgttctctgaataa

SEQ ID NO: 215969 - DNA, 25 bp, Probe sequence
tgatcgttgatgttgcactgttctc

SEQ ID NO: 215970 - DNA, 25 bp, Probe sequence
tgaaagggatgcttggtttgtactt

SEQ ID NO: 215971 - DNA, 25 bp, Probe sequence
tcctgcttcacgttgatcgttgatg

SEQ ID NO: 215972 - DNA, 25 bp, Probe sequence
tcgttgatgttgcactgttctctga

SEQ ID NO: 215973 - DNA, 25 bp, Probe sequence
ttatccaccaagcaaagcgtcttcc

SEQ ID NO: 215974 - DNA, 25 bp, Probe sequence
taagtgggttagttcctataataat

SEQ ID NO: 215975 - DNA, 25 bp, Probe sequence
tttatccaccaagcaaagcgtcttc

SEQ ID NO: 215976 - DNA, 25 bp, Probe sequence
ttgtactttatccaccaagcaaagc

SEQ ID NO: 215977 - DNA, 25 bp, Probe sequence
ttcacgttgatcgttgatgttgcac

SEQ ID NO: 215978 - DNA, 25 bp, Probe sequence
ttcctgcttcacgttgatcgttgat

SEQ ID NO: 215979 - DNA, 25 bp, Probe sequence
ttgatgttgcactgttctctgaata

SEQ ID NO: 215980 - DNA, 25 bp, Probe sequence
atatccacagttaacaatccgtgta

SEQ ID NO: 215981 - DNA, 25 bp, Probe sequence
atctggtgcacaagttggtccaaac

SEQ ID NO: 215982 - DNA, 25 bp, Probe sequence
atggtatcgcatgttgtgtatcagc

SEQ ID NO: 215983 - DNA, 25 bp, Probe sequence
aacgttcaatgcaaccattcggtgg

SEQ ID NO: 215984 - DNA, 25 bp, Probe sequence
aatggttatacttagcataccttgc

SEQ ID NO: 215985 - DNA, 25 bp, Probe sequence
aatccgtgtatctggttacgctgtt

SEQ ID NO: 215986 - DNA, 25 bp, Probe sequence
aatttgctcgtacacctgattacaa

SEQ ID NO: 215987 - DNA, 25 bp, Probe sequence
cgtggacgtattatcggtgactatc

SEQ ID NO: 215988 - DNA, 25 bp, Probe sequence
gacggacgtaaagctggcgaaccat

SEQ ID NO: 215989 - DNA, 25 bp, Probe sequence
gcaaacccaatgcatggccgtgacc

SEQ ID NO: 215990 - DNA, 25 bp, Probe sequence
gcttgtgaagcttacggttacgaat

SEQ ID NO: 215991 - DNA, 25 bp, Probe sequence
gcaattcttcggtgcacgtgcgaac

SEQ ID NO: 215992 - DNA, 25 bp, Probe sequence
gaacgtgaacgtggcggcatgtggg

SEQ ID NO: 215993 - DNA, 25 bp, Probe sequence
gaaagctatggcgatgactatggta

SEQ ID NO: 215994 - DNA, 25 bp, Probe sequence
gaaattattgaccacttcatcatga

SEQ ID NO: 215995 - DNA, 25 bp, Probe sequence
tcgaaggcgacttccctaaatacgg

SEQ ID NO: 215996 - DNA, 25 bp, Probe sequence
gatatctatgctgaacgtgacctta

SEQ ID NO: 215997 - DNA, 25 bp, Probe sequence
gattcatttttagcaggaccaacag

SEQ ID NO: 215998 - DNA, 25 bp, Probe sequence
gtttcgatttaagccgtccagcaga

SEQ ID NO: 215999 - DNA, 25 bp, Probe sequence
gtagcagctgactcattatctgcaa

SEQ ID NO: 216000 - DNA, 25 bp, Probe sequence
gtagcttcaacaatcacatctcatg

SEQ ID NO: 216001 - DNA, 25 bp, Probe sequence
gtaatcactggtttacctgatgcat

SEQ ID NO: 216002 - DNA, 25 bp, Probe sequence
gtgactatcgtcgtgtagctttata

SEQ ID NO: 216003 - DNA, 25 bp, Probe sequence
gggtaactgaatctatcggtggtgt

SEQ ID NO: 216004 - DNA, 25 bp, Probe sequence
ggtggtgtaggtattgacggacgtc

SEQ ID NO: 216005 - DNA, 25 bp, Probe sequence
ggtgcagcaatgagtttaggtcgta

SEQ ID NO: 216006 - DNA, 25 bp, Probe sequence
ggattggctagcaggtgtttacatt

SEQ ID NO: 216007 - DNA, 25 bp, Probe sequence
ggcaacaggtatcgctggtttatca

SEQ ID NO: 216008 - DNA, 25 bp, Probe sequence
tgcacgacttcaacacgatgtctac

SEQ ID NO: 216009 - DNA, 25 bp, Probe sequence
tcattccgtttcttacactcattag

SEQ ID NO: 216010 - DNA, 25 bp, Probe sequence
tacgcaatgcaatgtggtcaccact

SEQ ID NO: 216011 - DNA, 25 bp, Probe sequence
taggtcgtacatcaacattcttaga

SEQ ID NO: 216012 - DNA, 25 bp, Probe sequence
tattctctggagacccaacttgggt

SEQ ID NO: 216013 - DNA, 25 bp, Probe sequence
ttgacggacgtccacttgttacgaa

SEQ ID NO: 216014 - DNA, 25 bp, Probe sequence
attttggttatatatgtctagttaa

SEQ ID NO: 216015 - DNA, 25 bp, Probe sequence
attttaacttcagtcataatgttct

SEQ ID NO: 216016 - DNA, 25 bp, Probe sequence
atattttaacttcagtcataatgtt

SEQ ID NO: 216017 - DNA, 25 bp, Probe sequence
atatgtagttggtttcccaattatt

SEQ ID NO: 216018 - DNA, 25 bp, Probe sequence
atatgtctagttaatcttataaaaa

SEQ ID NO: 216019 - DNA, 25 bp, Probe sequence
acatatgtagttggtttcccaatta

SEQ ID NO: 216020 - DNA, 25 bp, Probe sequence
acttcagtcataatgttctacatta

SEQ ID NO: 216021 - DNA, 25 bp, Probe sequence
aacttcagtcataatgttctacatt

SEQ ID NO: 216022 - DNA, 25 bp, Probe sequence
aatgttctacattaatggattaagt

SEQ ID NO: 216023 - DNA, 25 bp, Probe sequence
aatgatttgttagtaatgagtgtag

SEQ ID NO: 216024 - DNA, 25 bp, Probe sequence
catatgtagttggtttcccaattat

SEQ ID NO: 216025 - DNA, 25 bp, Probe sequence
gatttgttagtaatgagtgtagtat

SEQ ID NO: 216026 - DNA, 25 bp, Probe sequence
gttatatatgtctagttaatcttat

SEQ ID NO: 216027 - DNA, 25 bp, Probe sequence
ggttatatatgtctagttaatctta

SEQ ID NO: 216028 - DNA, 25 bp, Probe sequence
tggttatatatgtctagttaatctt

SEQ ID NO: 216029 - DNA, 25 bp, Probe sequence
tgtagttggtttcccaattatttat

SEQ ID NO: 216030 - DNA, 25 bp, Probe sequence
tgagtgtagtatatattttaacttc

SEQ ID NO: 216031 - DNA, 25 bp, Probe sequence
tcccaattatttattttggttatat

SEQ ID NO: 216032 - DNA, 25 bp, Probe sequence
tcagtcataatgttctacattaatg

SEQ ID NO: 216033 - DNA, 25 bp, Probe sequence
taacttcagtcataatgttctacat

SEQ ID NO: 216034 - DNA, 25 bp, Probe sequence
tacatatgtagttggtttcccaatt

SEQ ID NO: 216035 - DNA, 25 bp, Probe sequence
tatgtagttggtttcccaattattt

SEQ ID NO: 216036 - DNA, 25 bp, Probe sequence
tatatatgtctagttaatcttataa

SEQ ID NO: 216037 - DNA, 25 bp, Probe sequence
tatattttaacttcagtcataatgt

SEQ ID NO: 216038 - DNA, 25 bp, Probe sequence
tattttaacttcagtcataatgttc

SEQ ID NO: 216039 - DNA, 25 bp, Probe sequence
tatttattttggttatatatgtcta

SEQ ID NO: 216040 - DNA, 25 bp, Probe sequence
tttggttatatatgtctagttaatc

SEQ ID NO: 216041 - DNA, 25 bp, Probe sequence
tttaacttcagtcataatgttctac

SEQ ID NO: 216042 - DNA, 25 bp, Probe sequence
ttacatatgtagttggtttcccaat

SEQ ID NO: 216043 - DNA, 25 bp, Probe sequence
tttacatatgtagttggtttcccaa

SEQ ID NO: 216044 - DNA, 25 bp, Probe sequence
ttttaacttcagtcataatgttcta

SEQ ID NO: 216045 - DNA, 25 bp, Probe sequence
ttattttggttatatatgtctagtt

SEQ ID NO: 216046 - DNA, 25 bp, Probe sequence
ttaacttcagtcataatgttctaca

SEQ ID NO: 216047 - DNA, 25 bp, Probe sequence
ttgttagtaatgagtgtagtatata

SEQ ID NO: 216048 - DNA, 25 bp, Probe sequence
attcattaatatcatcactccttta

SEQ ID NO: 216049 - DNA, 25 bp, Probe sequence
attatgtgtttctatattaaaaaat

SEQ ID NO: 216050 - DNA, 25 bp, Probe sequence
atatcatcactcctttaattatgtg

SEQ ID NO: 216051 - DNA, 25 bp, Probe sequence
atcactcctttaattatgtgtttct

SEQ ID NO: 216052 - DNA, 25 bp, Probe sequence
atcatcactcctttaattatgtgtt

SEQ ID NO: 216053 - DNA, 25 bp, Probe sequence
agtgtctcgaagtttattcattaat

SEQ ID NO: 216054 - DNA, 25 bp, Probe sequence
agtagtgtctcgaagtttattcatt

SEQ ID NO: 216055 - DNA, 25 bp, Probe sequence
agaaaagtagtgtctcgaagtttat

SEQ ID NO: 216056 - DNA, 25 bp, Probe sequence
actcctttaattatgtgtttctata

SEQ ID NO: 216057 - DNA, 25 bp, Probe sequence
aaagtagtgtctcgaagtttattca

SEQ ID NO: 216058 - DNA, 25 bp, Probe sequence
aagtagtgtctcgaagtttattcat

SEQ ID NO: 216059 - DNA, 25 bp, Probe sequence
aatatcatcactcctttaattatgt

SEQ ID NO: 216060 - DNA, 25 bp, Probe sequence
cactcctttaattatgtgtttctat

SEQ ID NO: 216061 - DNA, 25 bp, Probe sequence
catcactcctttaattatgtgtttc

SEQ ID NO: 216062 - DNA, 25 bp, Probe sequence
cattaatatcatcactcctttaatt

SEQ ID NO: 216063 - DNA, 25 bp, Probe sequence
ctcctttaattatgtgtttctatat

SEQ ID NO: 216064 - DNA, 25 bp, Probe sequence
gaagtttattcattaatatcatcac

SEQ ID NO: 216065 - DNA, 25 bp, Probe sequence
gaaaagtagtgtctcgaagtttatt

SEQ ID NO: 216066 - DNA, 25 bp, Probe sequence
gatagaaaagtagtgtctcgaagtt

SEQ ID NO: 216067 - DNA, 25 bp, Probe sequence
gtttattcattaatatcatcactcc

SEQ ID NO: 216068 - DNA, 25 bp, Probe sequence
gtagtgtctcgaagtttattcatta

SEQ ID NO: 216069 - DNA, 25 bp, Probe sequence
gtctcgaagtttattcattaatatc

SEQ ID NO: 216070 - DNA, 25 bp, Probe sequence
gtgtctcgaagtttattcattaata

SEQ ID NO: 216071 - DNA, 25 bp, Probe sequence
tcctttaattatgtgtttctatatt

SEQ ID NO: 216072 - DNA, 25 bp, Probe sequence
tcattaatatcatcactcctttaat

SEQ ID NO: 216073 - DNA, 25 bp, Probe sequence
tcatcactcctttaattatgtgttt

SEQ ID NO: 216074 - DNA, 25 bp, Probe sequence
tcactcctttaattatgtgtttcta

SEQ ID NO: 216075 - DNA, 25 bp, Probe sequence
taatatcatcactcctttaattatg

SEQ ID NO: 216076 - DNA, 25 bp, Probe sequence
tagtgtctcgaagtttattcattaa

SEQ ID NO: 216077 - DNA, 25 bp, Probe sequence
tatcatcactcctttaattatgtgt

SEQ ID NO: 216078 - DNA, 25 bp, Probe sequence
tattcattaatatcatcactccttt

SEQ ID NO: 216079 - DNA, 25 bp, Probe sequence
ttattcattaatatcatcactcctt

SEQ ID NO: 216080 - DNA, 25 bp, Probe sequence
ttaatatcatcactcctttaattat

SEQ ID NO: 216081 - DNA, 25 bp, Probe sequence
ttcattaatatcatcactcctttaa

SEQ ID NO: 216082 - DNA, 25 bp, Probe sequence
attaattctcttgataacgtcgaaa

SEQ ID NO: 216083 - DNA, 25 bp, Probe sequence
atcggctggatgtgctaatgataca

SEQ ID NO: 216084 - DNA, 25 bp, Probe sequence
accatactttgatgcatcgggtggc

SEQ ID NO: 216085 - DNA, 25 bp, Probe sequence
acttgcttagacacatcggctggat

SEQ ID NO: 216086 - DNA, 25 bp, Probe sequence
aagtttgaaattctgccatatcatc

SEQ ID NO: 216087 - DNA, 25 bp, Probe sequence
aatattaccatacaaaccatacttt

SEQ ID NO: 216088 - DNA, 25 bp, Probe sequence
cttaacttcgcgcgcaaactgtcag

SEQ ID NO: 216089 - DNA, 25 bp, Probe sequence
cttcgcgcgcaaactgtcagatatg

SEQ ID NO: 216090 - DNA, 25 bp, Probe sequence
cttgtgcctggttattctgatgata

SEQ ID NO: 216091 - DNA, 25 bp, Probe sequence
gccatatcatcagttaggtgttcat

SEQ ID NO: 216092 - DNA, 25 bp, Probe sequence
gcacacttgcttagacacatcggct

SEQ ID NO: 216093 - DNA, 25 bp, Probe sequence
gaattagaagatgtcgaagcgcccg

SEQ ID NO: 216094 - DNA, 25 bp, Probe sequence
gcagcctaccgttatgttaacttca

SEQ ID NO: 216095 - DNA, 25 bp, Probe sequence
gaagctgttaaagcagcctaccgtt

SEQ ID NO: 216096 - DNA, 25 bp, Probe sequence
gaagcgcccgatgatgaagctgtta

SEQ ID NO: 216097 - DNA, 25 bp, Probe sequence
gaaccattgttacaaatgccattct

SEQ ID NO: 216098 - DNA, 25 bp, Probe sequence
gaaaatggtgtgcacacttgcttag

SEQ ID NO: 216099 - DNA, 25 bp, Probe sequence
gagccatcaagagaagtcacagttg

SEQ ID NO: 216100 - DNA, 25 bp, Probe sequence
gatggaccgggattaagatatatat

SEQ ID NO: 216101 - DNA, 25 bp, Probe sequence
gatgcatcgggtggcggtgtaacag

SEQ ID NO: 216102 - DNA, 25 bp, Probe sequence
gatgcttgtattgccacaatccaga

SEQ ID NO: 216103 - DNA, 25 bp, Probe sequence
gatacaaaagcatttcaaaggcatt

SEQ ID NO: 216104 - DNA, 25 bp, Probe sequence
gatatgaaacaacctgtatggattc

SEQ ID NO: 216105 - DNA, 25 bp, Probe sequence
gtattgccacaatccagatacttgg

SEQ ID NO: 216106 - DNA, 25 bp, Probe sequence
gtcagtggtggcgaaccattgttac

SEQ ID NO: 216107 - DNA, 25 bp, Probe sequence
gtggaaaacattgggcattgcatat

SEQ ID NO: 216108 - DNA, 25 bp, Probe sequence
gggacacttacattctgtcgaaagt

SEQ ID NO: 216109 - DNA, 25 bp, Probe sequence
ggaaagcctaatacacacatcctta

SEQ ID NO: 216110 - DNA, 25 bp, Probe sequence
ggcggtgtaacagtcagtggtggcg

SEQ ID NO: 216111 - DNA, 25 bp, Probe sequence
tgtccttgtgcctggttattctgat

SEQ ID NO: 216112 - DNA, 25 bp, Probe sequence
tgcttacttagatgcttgtattgcc

SEQ ID NO: 216113 - DNA, 25 bp, Probe sequence
taatacacacatccttaacttcgcg

SEQ ID NO: 216114 - DNA, 25 bp, Probe sequence
taggtactgtcgatggaccgggatt

SEQ ID NO: 216115 - DNA, 25 bp, Probe sequence
ttctgtcgaaagtttaggtactgtc

SEQ ID NO: 216116 - DNA, 25 bp, Probe sequence
atcccaatctccatgaatataaaaa

SEQ ID NO: 216117 - DNA, 25 bp, Probe sequence
aggatgcatcaatcgatatcgtcgt

SEQ ID NO: 216118 - DNA, 25 bp, Probe sequence
accaccaacatcaaaattctccaca

SEQ ID NO: 216119 - DNA, 25 bp, Probe sequence
aaaattctccacatcgcaacataac

SEQ ID NO: 216120 - DNA, 25 bp, Probe sequence
aaaattccaccaccaacatcaaaat

SEQ ID NO: 216121 - DNA, 25 bp, Probe sequence
aacatcaaaattctccacatcgcaa

SEQ ID NO: 216122 - DNA, 25 bp, Probe sequence
aagccgtttttgtttgtgtgtcatg

SEQ ID NO: 216123 - DNA, 25 bp, Probe sequence
caatcgatatcgtcgttaagccgtt

SEQ ID NO: 216124 - DNA, 25 bp, Probe sequence
aatataaaaattccaccaccaacat

SEQ ID NO: 216125 - DNA, 25 bp, Probe sequence
caccaacatcaaaattctccacatc

SEQ ID NO: 216126 - DNA, 25 bp, Probe sequence
catgaatcctatcccaatctccatg

SEQ ID NO: 216127 - DNA, 25 bp, Probe sequence
cctatcccaatctccatgaatataa

SEQ ID NO: 216128 - DNA, 25 bp, Probe sequence
ccaccaccaacatcaaaattctcca

SEQ ID NO: 216129 - DNA, 25 bp, Probe sequence
ccaacatcaaaattctccacatcgc

SEQ ID NO: 216130 - DNA, 25 bp, Probe sequence
gccgtttttgtttgtgtgtcatgaa

SEQ ID NO: 216131 - DNA, 25 bp, Probe sequence
gcatcaatcgatatcgtcgttaagc

SEQ ID NO: 216132 - DNA, 25 bp, Probe sequence
gatgcatcaatcgatatcgtcgtta

SEQ ID NO: 216133 - DNA, 25 bp, Probe sequence
gatatcgtcgttaagccgtttttgt

SEQ ID NO: 216134 - DNA, 25 bp, Probe sequence
gtttttgtttgtgtgtcatgaatcc

SEQ ID NO: 216135 - DNA, 25 bp, Probe sequence
gtttgtgtgtcatgaatcctatccc

SEQ ID NO: 216136 - DNA, 25 bp, Probe sequence
gtgcgcatagcttatacaaaaagga

SEQ ID NO: 216137 - DNA, 25 bp, Probe sequence
gtgtgtcatgaatcctatcccaatc

SEQ ID NO: 216138 - DNA, 25 bp, Probe sequence
tgtgtcatgaatcctatcccaatct

SEQ ID NO: 216139 - DNA, 25 bp, Probe sequence
tcgatatcgtcgttaagccgttttt

SEQ ID NO: 216140 - DNA, 25 bp, Probe sequence
tccacatcgcaacataaccaaatgt

SEQ ID NO: 216141 - DNA, 25 bp, Probe sequence
tcctatcccaatctccatgaatata

SEQ ID NO: 216142 - DNA, 25 bp, Probe sequence
tcgttaagccgtttttgtttgtgtg

SEQ ID NO: 216143 - DNA, 25 bp, Probe sequence
tctccacatcgcaacataaccaaat

SEQ ID NO: 216144 - DNA, 25 bp, Probe sequence
tcaaaattctccacatcgcaacata

SEQ ID NO: 216145 - DNA, 25 bp, Probe sequence
tataaaaattccaccaccaacatca

SEQ ID NO: 216146 - DNA, 25 bp, Probe sequence
ttaagccgtttttgtttgtgtgtca

SEQ ID NO: 216147 - DNA, 25 bp, Probe sequence
ttccaccaccaacatcaaaattctc

SEQ ID NO: 216148 - DNA, 25 bp, Probe sequence
ttggtgcgcatagcttatacaaaaa

SEQ ID NO: 216149 - DNA, 25 bp, Probe sequence
ttgtgtgtcatgaatcctatcccaa

SEQ ID NO: 216150 - DNA, 25 bp, Probe sequence
atttatctagggcttaagtttgatt

SEQ ID NO: 216151 - DNA, 25 bp, Probe sequence
attgcgattgcgataacttcttttc

SEQ ID NO: 216152 - DNA, 25 bp, Probe sequence
attgcgataacttcttttctctata

SEQ ID NO: 216153 - DNA, 25 bp, Probe sequence
atatacatatagtaacgtcttatct

SEQ ID NO: 216154 - DNA, 25 bp, Probe sequence
ataacttcttttctctatatacata

SEQ ID NO: 216155 - DNA, 25 bp, Probe sequence
acttcttttctctatatacatatag

SEQ ID NO: 216156 - DNA, 25 bp, Probe sequence
acatatagtaacgtcttatctaata

SEQ ID NO: 216157 - DNA, 25 bp, Probe sequence
aacttcttttctctatatacatata

SEQ ID NO: 216158 - DNA, 25 bp, Probe sequence
cagtatcaaatttatctagggctta

SEQ ID NO: 216159 - DNA, 25 bp, Probe sequence
cgattgcgataacttcttttctcta

SEQ ID NO: 216160 - DNA, 25 bp, Probe sequence
cgataacttcttttctctatataca

SEQ ID NO: 216161 - DNA, 25 bp, Probe sequence
gcgataacttcttttctctatatac

SEQ ID NO: 216162 - DNA, 25 bp, Probe sequence
gcgattgcgataacttcttttctct

SEQ ID NO: 216163 - DNA, 25 bp, Probe sequence
gcaggtttacctgataaaaatactt

SEQ ID NO: 216164 - DNA, 25 bp, Probe sequence
gataacttcttttctctatatacat

SEQ ID NO: 216165 - DNA, 25 bp, Probe sequence
gattgcgataacttcttttctctat

SEQ ID NO: 216166 - DNA, 25 bp, Probe sequence
gtttacattgagtgagggatattga

SEQ ID NO: 216167 - DNA, 25 bp, Probe sequence
gtttgatttttataataggcaggtt

SEQ ID NO: 216168 - DNA, 25 bp, Probe sequence
gtatcaaatttatctagggcttaag

SEQ ID NO: 216169 - DNA, 25 bp, Probe sequence
gtgtcagttattgcgattgcgataa

SEQ ID NO: 216170 - DNA, 25 bp, Probe sequence
ggtactacagtatcaaatttatcta

SEQ ID NO: 216171 - DNA, 25 bp, Probe sequence
tgcgattgcgataacttcttttctc

SEQ ID NO: 216172 - DNA, 25 bp, Probe sequence
tgcgataacttcttttctctatata

SEQ ID NO: 216173 - DNA, 25 bp, Probe sequence
tctagggcttaagtttgatttttat

SEQ ID NO: 216174 - DNA, 25 bp, Probe sequence
tcaaatttatctagggcttaagttt

SEQ ID NO: 216175 - DNA, 25 bp, Probe sequence
taacttcttttctctatatacatat

SEQ ID NO: 216176 - DNA, 25 bp, Probe sequence
taaaaaacatggtactacagtatca

SEQ ID NO: 216177 - DNA, 25 bp, Probe sequence
taaagtttacattgagtgagggata

SEQ ID NO: 216178 - DNA, 25 bp, Probe sequence
tacagtatcaaatttatctagggct

SEQ ID NO: 216179 - DNA, 25 bp, Probe sequence
tacctgataaaaatacttattcatt

SEQ ID NO: 216180 - DNA, 25 bp, Probe sequence
tatagtaacgtcttatctaataaaa

SEQ ID NO: 216181 - DNA, 25 bp, Probe sequence
ttttataataggcaggtttacctga

SEQ ID NO: 216182 - DNA, 25 bp, Probe sequence
ttgcgattgcgataacttcttttct

SEQ ID NO: 216183 - DNA, 25 bp, Probe sequence
ttgcgataacttcttttctctatat

SEQ ID NO: 216184 - DNA, 25 bp, Probe sequence
attggccatcgtggtttcgaagata

SEQ ID NO: 216185 - DNA, 25 bp, Probe sequence
attccgtcattgaaagctgctgcaa

SEQ ID NO: 216186 - DNA, 25 bp, Probe sequence
attccgttgcagtttggtcatttta

SEQ ID NO: 216187 - DNA, 25 bp, Probe sequence
attatttcaggagcaacatatcttg

SEQ ID NO: 216188 - DNA, 25 bp, Probe sequence
atcagtgtgttagtactgcacttaa

SEQ ID NO: 216189 - DNA, 25 bp, Probe sequence
atcggttataacatgtacttacttt

SEQ ID NO: 216190 - DNA, 25 bp, Probe sequence
atgtgcgtaaactcataggtgtacc

SEQ ID NO: 216191 - DNA, 25 bp, Probe sequence
agtgtggttatatcattccgttgca

SEQ ID NO: 216192 - DNA, 25 bp, Probe sequence
acccattgccaacctaggactaagt

SEQ ID NO: 216193 - DNA, 25 bp, Probe sequence
aagcgaatgtcgaatacgttgagtt

SEQ ID NO: 216194 - DNA, 25 bp, Probe sequence
aagggcgttttagcattaatgcctt

SEQ ID NO: 216195 - DNA, 25 bp, Probe sequence
aagtgttgcctttctgatttatgta

SEQ ID NO: 216196 - DNA, 25 bp, Probe sequence
aatatctccattattggccatcgtg

SEQ ID NO: 216197 - DNA, 25 bp, Probe sequence
gccagtgtgatacttcttattatat

SEQ ID NO: 216198 - DNA, 25 bp, Probe sequence
gaagcgccatatctcaagtgtggtt

SEQ ID NO: 216199 - DNA, 25 bp, Probe sequence
gaaccagcagattatacacaacgtg

SEQ ID NO: 216200 - DNA, 25 bp, Probe sequence
gaactcatcattggtgcgattttaa

SEQ ID NO: 216201 - DNA, 25 bp, Probe sequence
gaaacatacttcgatcgttctataa

SEQ ID NO: 216202 - DNA, 25 bp, Probe sequence
gatgacccagcattagctgatcaga

SEQ ID NO: 216203 - DNA, 25 bp, Probe sequence
gatttttcttattcgccaagacttg

SEQ ID NO: 216204 - DNA, 25 bp, Probe sequence
gttgaaaattctattccgtcattga

SEQ ID NO: 216205 - DNA, 25 bp, Probe sequence
gttaatgatacccattgccaaccta

SEQ ID NO: 216206 - DNA, 25 bp, Probe sequence
gtttttagtctcatcaattttattt

SEQ ID NO: 216207 - DNA, 25 bp, Probe sequence
gtattatcacagatgacccagcatt

SEQ ID NO: 216208 - DNA, 25 bp, Probe sequence
gtagagttttcattgttagtttata

SEQ ID NO: 216209 - DNA, 25 bp, Probe sequence
gtagctgggcaaagccaacttacga

SEQ ID NO: 216210 - DNA, 25 bp, Probe sequence
gtctaggttctttataatttcaatg

SEQ ID NO: 216211 - DNA, 25 bp, Probe sequence
tgtatccttagacgaatttattgaa

SEQ ID NO: 216212 - DNA, 25 bp, Probe sequence
tagatttctttgtcatcgaagattt

SEQ ID NO: 216213 - DNA, 25 bp, Probe sequence
taggtgtaccagttattttctttgt

SEQ ID NO: 216214 - DNA, 25 bp, Probe sequence
tatgccggctttgatcgacagatta

SEQ ID NO: 216215 - DNA, 25 bp, Probe sequence
tttacggtacctttatgattgctgt

SEQ ID NO: 216216 - DNA, 25 bp, Probe sequence
ttatatggtttatgccggctttgat

SEQ ID NO: 216217 - DNA, 25 bp, Probe sequence
ttaatgccttactattgcagttaat

SEQ ID NO: 216218 - DNA, 25 bp, Probe sequence
attgcttcaagcttttgtctatttt

SEQ ID NO: 216219 - DNA, 25 bp, Probe sequence
atttgagaagttacgacataataat

SEQ ID NO: 216220 - DNA, 25 bp, Probe sequence
ataaattgcttcaagcttttgtcta

SEQ ID NO: 216221 - DNA, 25 bp, Probe sequence
atcatttgagaagttacgacataat

SEQ ID NO: 216222 - DNA, 25 bp, Probe sequence
atgttaataaattgcttcaagcttt

SEQ ID NO: 216223 - DNA, 25 bp, Probe sequence
agatgttaataaattgcttcaagct

SEQ ID NO: 216224 - DNA, 25 bp, Probe sequence
agaagttacgacataataattctta

SEQ ID NO: 216225 - DNA, 25 bp, Probe sequence
aaattgcttcaagcttttgtctatt

SEQ ID NO: 216226 - DNA, 25 bp, Probe sequence
aaatcatttgagaagttacgacata

SEQ ID NO: 216227 - DNA, 25 bp, Probe sequence
tttgtctattttaaatcatttgaga

SEQ ID NO: 216228 - DNA, 25 bp, Probe sequence
aatcatttgagaagttacgacataa

SEQ ID NO: 216229 - DNA, 25 bp, Probe sequence
aataaattgcttcaagcttttgtct

SEQ ID NO: 216230 - DNA, 25 bp, Probe sequence
aattgcttcaagcttttgtctattt

SEQ ID NO: 216231 - DNA, 25 bp, Probe sequence
catttgagaagttacgacataataa

SEQ ID NO: 216232 - DNA, 25 bp, Probe sequence
cttttgtctattttaaatcatttga

SEQ ID NO: 216233 - DNA, 25 bp, Probe sequence
gcttcaagcttttgtctattttaaa

SEQ ID NO: 216234 - DNA, 25 bp, Probe sequence
gcttttgtctattttaaatcatttg

SEQ ID NO: 216235 - DNA, 25 bp, Probe sequence
gaagttacgacataataattcttaa

SEQ ID NO: 216236 - DNA, 25 bp, Probe sequence
gagaagttacgacataataattctt

SEQ ID NO: 216237 - DNA, 25 bp, Probe sequence
gatgttaataaattgcttcaagctt

SEQ ID NO: 216238 - DNA, 25 bp, Probe sequence
gttaataaattgcttcaagcttttg

SEQ ID NO: 216239 - DNA, 25 bp, Probe sequence
tgttaataaattgcttcaagctttt

SEQ ID NO: 216240 - DNA, 25 bp, Probe sequence
tgcttcaagcttttgtctattttaa

SEQ ID NO: 216241 - DNA, 25 bp, Probe sequence
tcatttgagaagttacgacataata

SEQ ID NO: 216242 - DNA, 25 bp, Probe sequence
taataaattgcttcaagcttttgtc

SEQ ID NO: 216243 - DNA, 25 bp, Probe sequence
taaatcatttgagaagttacgacat

SEQ ID NO: 216244 - DNA, 25 bp, Probe sequence
taaattgcttcaagcttttgtctat

SEQ ID NO: 216245 - DNA, 25 bp, Probe sequence
tagatgttaataaattgcttcaagc

SEQ ID NO: 216246 - DNA, 25 bp, Probe sequence
tttgagaagttacgacataataatt

SEQ ID NO: 216247 - DNA, 25 bp, Probe sequence
ttttgtctattttaaatcatttgag

SEQ ID NO: 216248 - DNA, 25 bp, Probe sequence
ttaataaattgcttcaagcttttgt

SEQ ID NO: 216249 - DNA, 25 bp, Probe sequence
ttcaagcttttgtctattttaaatc

SEQ ID NO: 216250 - DNA, 25 bp, Probe sequence
ttgagaagttacgacataataattc

SEQ ID NO: 216251 - DNA, 25 bp, Probe sequence
ttgcttcaagcttttgtctatttta

SEQ ID NO: 216252 - DNA, 25 bp, Probe sequence
attggaaccggtcacatttatgatg

SEQ ID NO: 216253 - DNA, 25 bp, Probe sequence
atgcgaagaagtcaagccagtattg

SEQ ID NO: 216254 - DNA, 25 bp, Probe sequence
agtcaagccagtattggaaccggtc

SEQ ID NO: 216255 - DNA, 25 bp, Probe sequence
agtattggaaccggtcacatttatg

SEQ ID NO: 216256 - DNA, 25 bp, Probe sequence
agaagtcaagccagtattggaaccg

SEQ ID NO: 216257 - DNA, 25 bp, Probe sequence
agccagtattggaaccggtcacatt

SEQ ID NO: 216258 - DNA, 25 bp, Probe sequence
aaccggtcacatttatgatgactaa

SEQ ID NO: 216259 - DNA, 25 bp, Probe sequence
aagccagtattggaaccggtcacat

SEQ ID NO: 216260 - DNA, 25 bp, Probe sequence
aagaagtcaagccagtattggaacc

SEQ ID NO: 216261 - DNA, 25 bp, Probe sequence
aagtcaagccagtattggaaccggt

SEQ ID NO: 216262 - DNA, 25 bp, Probe sequence
caagccagtattggaaccggtcaca

SEQ ID NO: 216263 - DNA, 25 bp, Probe sequence
cagtattggaaccggtcacatttat

SEQ ID NO: 216264 - DNA, 25 bp, Probe sequence
cgaagaagtcaagccagtattggaa

SEQ ID NO: 216265 - DNA, 25 bp, Probe sequence
ccagtattggaaccggtcacattta

SEQ ID NO: 216266 - DNA, 25 bp, Probe sequence
gccagtattggaaccggtcacattt

SEQ ID NO: 216267 - DNA, 25 bp, Probe sequence
gcgaagaagtcaagccagtattgga

SEQ ID NO: 216268 - DNA, 25 bp, Probe sequence
gaagtcaagccagtattggaaccgg

SEQ ID NO: 216269 - DNA, 25 bp, Probe sequence
gaagaagtcaagccagtattggaac

SEQ ID NO: 216270 - DNA, 25 bp, Probe sequence
gaaccggtcacatttatgatgacta

SEQ ID NO: 216271 - DNA, 25 bp, Probe sequence
gtcaagccagtattggaaccggtca

SEQ ID NO: 216272 - DNA, 25 bp, Probe sequence
gtattggaaccggtcacatttatga

SEQ ID NO: 216273 - DNA, 25 bp, Probe sequence
ggaaccggtcacatttatgatgact

SEQ ID NO: 216274 - DNA, 25 bp, Probe sequence
tggaaccggtcacatttatgatgac

SEQ ID NO: 216275 - DNA, 25 bp, Probe sequence
tgcgaagaagtcaagccagtattgg

SEQ ID NO: 216276 - DNA, 25 bp, Probe sequence
tcaagccagtattggaaccggtcac

SEQ ID NO: 216277 - DNA, 25 bp, Probe sequence
tattggaaccggtcacatttatgat

SEQ ID NO: 216278 - DNA, 25 bp, Probe sequence
ttggaaccggtcacatttatgatga

SEQ ID NO: 216279 - DNA, 25 bp, Probe sequence
attggatatttgccgattacacatt

SEQ ID NO: 216280 - DNA, 25 bp, Probe sequence
attgctgtgtgctagtactgagagg

SEQ ID NO: 216281 - DNA, 25 bp, Probe sequence
atttgccgattacacattcagctaa

SEQ ID NO: 216282 - DNA, 25 bp, Probe sequence
atggtgcatcaactttaatagagct

SEQ ID NO: 216283 - DNA, 25 bp, Probe sequence
atggacgcattaaacagtggtcgta

SEQ ID NO: 216284 - DNA, 25 bp, Probe sequence
atggcgatgattaccattttggtat

SEQ ID NO: 216285 - DNA, 25 bp, Probe sequence
agtgaacacagaattacagggtatt

SEQ ID NO: 216286 - DNA, 25 bp, Probe sequence
agctatcatgaaatgtcgccagcag

SEQ ID NO: 216287 - DNA, 25 bp, Probe sequence
acctgatgcgtattgctgtgtgcta

SEQ ID NO: 216288 - DNA, 25 bp, Probe sequence
acgttttaacacagtcagcggcatg

SEQ ID NO: 216289 - DNA, 25 bp, Probe sequence
acgacattggtaaaacaacatcatt

SEQ ID NO: 216290 - DNA, 25 bp, Probe sequence
acattcagctaatttgatgatgact

SEQ ID NO: 216291 - DNA, 25 bp, Probe sequence
acatcatttgtttaatccacctgca

SEQ ID NO: 216292 - DNA, 25 bp, Probe sequence
acagtggtcgtattgatggtgcatc

SEQ ID NO: 216293 - DNA, 25 bp, Probe sequence
acaaagtcgtgacgttttaacacag

SEQ ID NO: 216294 - DNA, 25 bp, Probe sequence
aaaccggggcattttagctatcatg

SEQ ID NO: 216295 - DNA, 25 bp, Probe sequence
aagtgtagacattatgacgcatcat

SEQ ID NO: 216296 - DNA, 25 bp, Probe sequence
aaggttaagcataatcgtcatcatt

SEQ ID NO: 216297 - DNA, 25 bp, Probe sequence
aatgtcgccagcagaaatgccagcc

SEQ ID NO: 216298 - DNA, 25 bp, Probe sequence
aatccacctgcatatgatgactttg

SEQ ID NO: 216299 - DNA, 25 bp, Probe sequence
aatcgtcatcattggaatctttata

SEQ ID NO: 216300 - DNA, 25 bp, Probe sequence
aattggccagatttaatggacgcat

SEQ ID NO: 216301 - DNA, 25 bp, Probe sequence
cagggtattctgtagccgaaccatt

SEQ ID NO: 216302 - DNA, 25 bp, Probe sequence
catgaaggcaatgtcattatgggac

SEQ ID NO: 216303 - DNA, 25 bp, Probe sequence
gaatgatcgcaagcaaagtgtagac

SEQ ID NO: 216304 - DNA, 25 bp, Probe sequence
gaaccgtcattgtataaggaggcat

SEQ ID NO: 216305 - DNA, 25 bp, Probe sequence
gacgcatcattttaaacaaagtcgt

SEQ ID NO: 216306 - DNA, 25 bp, Probe sequence
gatgactttgttgaaccgtcattgt

SEQ ID NO: 216307 - DNA, 25 bp, Probe sequence
gtagcgcaagcatttgtacaagatt

SEQ ID NO: 216308 - DNA, 25 bp, Probe sequence
gtagccgaaccattcggtgcactgg

SEQ ID NO: 216309 - DNA, 25 bp, Probe sequence
gtcagcggcatggacatcctatggt

SEQ ID NO: 216310 - DNA, 25 bp, Probe sequence
ggtgatgacgttatacctgatgcgt

SEQ ID NO: 216311 - DNA, 25 bp, Probe sequence
ggtaagactttgaaacatggtgatg

SEQ ID NO: 216312 - DNA, 25 bp, Probe sequence
ggacatcctatggtgatttaacaat

SEQ ID NO: 216313 - DNA, 25 bp, Probe sequence
ataggggctttaacagtaccattat

SEQ ID NO: 216314 - DNA, 25 bp, Probe sequence
atcatgttctttattggcggcgtat

SEQ ID NO: 216315 - DNA, 25 bp, Probe sequence
atcgctttcacagtaacatttattg

SEQ ID NO: 216316 - DNA, 25 bp, Probe sequence
agaacagcatggctttgaattcaaa

SEQ ID NO: 216317 - DNA, 25 bp, Probe sequence
acatggcatttgggatacatcttta

SEQ ID NO: 216318 - DNA, 25 bp, Probe sequence
aactacgccagcaatttgtgacata

SEQ ID NO: 216319 - DNA, 25 bp, Probe sequence
aatgcaaccaaatcaatcggtagac

SEQ ID NO: 216320 - DNA, 25 bp, Probe sequence
aatgtcccattattagatattgtct

SEQ ID NO: 216321 - DNA, 25 bp, Probe sequence
aatcgttattgtgtggatacttgta

SEQ ID NO: 216322 - DNA, 25 bp, Probe sequence
cacacgtgcgtggactgcgattggt

SEQ ID NO: 216323 - DNA, 25 bp, Probe sequence
cagtaccattatcgggtttgttctt

SEQ ID NO: 216324 - DNA, 25 bp, Probe sequence
gcgggtactgctaaaactacgccag

SEQ ID NO: 216325 - DNA, 25 bp, Probe sequence
gcgtggactgcgattggtggtcatt

SEQ ID NO: 216326 - DNA, 25 bp, Probe sequence
gcaggttatattttgaatttcgctt

SEQ ID NO: 216327 - DNA, 25 bp, Probe sequence
gagtattcatcgctttcacagtaac

SEQ ID NO: 216328 - DNA, 25 bp, Probe sequence
gatcaattcgaaaggtttggttctt

SEQ ID NO: 216329 - DNA, 25 bp, Probe sequence
gatattgtcttcacacgtgcgtgga

SEQ ID NO: 216330 - DNA, 25 bp, Probe sequence
gatttgtcgtttttagtgatcaatt

SEQ ID NO: 216331 - DNA, 25 bp, Probe sequence
gtgctgctattggtgcagggttcgc

SEQ ID NO: 216332 - DNA, 25 bp, Probe sequence
gtggtcatttagtttggtcagcgat

SEQ ID NO: 216333 - DNA, 25 bp, Probe sequence
ggtgcagggttcgcagtttttgaat

SEQ ID NO: 216334 - DNA, 25 bp, Probe sequence
ggtcagcgattgttggtgctgcaat

SEQ ID NO: 216335 - DNA, 25 bp, Probe sequence
ggttcgcagtttttgaatcagcagg

SEQ ID NO: 216336 - DNA, 25 bp, Probe sequence
ggttctttaacatttttcgatgcat

SEQ ID NO: 216337 - DNA, 25 bp, Probe sequence
ggatacttgtattcattttaatggg

SEQ ID NO: 216338 - DNA, 25 bp, Probe sequence
ggctcttttctcgagtattcatcgc

SEQ ID NO: 216339 - DNA, 25 bp, Probe sequence
ggcggcgtattttcattactaagta

SEQ ID NO: 216340 - DNA, 25 bp, Probe sequence
tgggggaagccatggctcttttctc

SEQ ID NO: 216341 - DNA, 25 bp, Probe sequence
tggattattaatcggtgctgctatt

SEQ ID NO: 216342 - DNA, 25 bp, Probe sequence
tccgggtctcatttttataggggct

SEQ ID NO: 216343 - DNA, 25 bp, Probe sequence
taacactaacgcgattccgggtctc

SEQ ID NO: 216344 - DNA, 25 bp, Probe sequence
ttattggattatgggtcatggcagc

SEQ ID NO: 216345 - DNA, 25 bp, Probe sequence
ttttcgatgcatttttagtaggatt

SEQ ID NO: 216346 - DNA, 25 bp, Probe sequence
ttaatattctttttatcagccgttg

SEQ ID NO: 216347 - DNA, 25 bp, Probe sequence
aggaggcacttggagtcacggtgtc

SEQ ID NO: 216348 - DNA, 25 bp, Probe sequence
atagagcgtattataacatttatta

SEQ ID NO: 216349 - DNA, 25 bp, Probe sequence
atgcatctacagaatacgcagaagg

SEQ ID NO: 216350 - DNA, 25 bp, Probe sequence
atggtgcaacagctattggaaaata

SEQ ID NO: 216351 - DNA, 25 bp, Probe sequence
atggtcataaaggacatggtgcaac

SEQ ID NO: 216352 - DNA, 25 bp, Probe sequence
agtatgtttggtcttattattatca

SEQ ID NO: 216353 - DNA, 25 bp, Probe sequence
agcagcttatgcatctacagaatac

SEQ ID NO: 216354 - DNA, 25 bp, Probe sequence
aaaggacatggtgcaacagctattg

SEQ ID NO: 216355 - DNA, 25 bp, Probe sequence
aaagcatcagctactaaacataatt

SEQ ID NO: 216356 - DNA, 25 bp, Probe sequence
cttggagtcacggtgtcggcagtaa

SEQ ID NO: 216357 - DNA, 25 bp, Probe sequence
cacggtgtcggcagtaagtatgttt

SEQ ID NO: 216358 - DNA, 25 bp, Probe sequence
caacagcagcttatgcatctacaga

SEQ ID NO: 216359 - DNA, 25 bp, Probe sequence
cacttggagtcacggtgtcggcagt

SEQ ID NO: 216360 - DNA, 25 bp, Probe sequence
gctactaaacataattgctgggtca

SEQ ID NO: 216361 - DNA, 25 bp, Probe sequence
gcttatgcatctacagaatacgcag

SEQ ID NO: 216362 - DNA, 25 bp, Probe sequence
gcagaaggaggcacttggagtcacg

SEQ ID NO: 216363 - DNA, 25 bp, Probe sequence
gcacttggattatcaacagcagctt

SEQ ID NO: 216364 - DNA, 25 bp, Probe sequence
gaatacgcagaaggaggcacttgga

SEQ ID NO: 216365 - DNA, 25 bp, Probe sequence
gatcatttagtggttatacaagagc

SEQ ID NO: 216366 - DNA, 25 bp, Probe sequence
gtttggtcttattattatcatggtc

SEQ ID NO: 216367 - DNA, 25 bp, Probe sequence
gtaaaagcaaaagcatcagctacta

SEQ ID NO: 216368 - DNA, 25 bp, Probe sequence
gtcacggtgtcggcagtaagtatgt

SEQ ID NO: 216369 - DNA, 25 bp, Probe sequence
gtcggcagtaagtatgtttggtctt

SEQ ID NO: 216370 - DNA, 25 bp, Probe sequence
gtgtcggcagtaagtatgtttggtc

SEQ ID NO: 216371 - DNA, 25 bp, Probe sequence
gtggttatacaagagctggtgtaaa

SEQ ID NO: 216372 - DNA, 25 bp, Probe sequence
ggagtcacggtgtcggcagtaagta

SEQ ID NO: 216373 - DNA, 25 bp, Probe sequence
ggacatggtgcaacagctattggaa

SEQ ID NO: 216374 - DNA, 25 bp, Probe sequence
tggtcttattattatcatggtcata

SEQ ID NO: 216375 - DNA, 25 bp, Probe sequence
tatcaacagcagcttatgcatctac

SEQ ID NO: 216376 - DNA, 25 bp, Probe sequence
tatatttaactttagcacttggatt

SEQ ID NO: 216377 - DNA, 25 bp, Probe sequence
tttttggcactatattatatttaac

SEQ ID NO: 216378 - DNA, 25 bp, Probe sequence
ttaactttagcacttggattatcaa

SEQ ID NO: 216379 - DNA, 25 bp, Probe sequence
ttgctgggtcaatagagcgtattat

SEQ ID NO: 216380 - DNA, 25 bp, Probe sequence
ttggattatcaacagcagcttatgc

SEQ ID NO: 216381 - DNA, 25 bp, Probe sequence
attgcgggtcaacctttgaagacat

SEQ ID NO: 216382 - DNA, 25 bp, Probe sequence
attcaagctaaaggtgccacttatt

SEQ ID NO: 216383 - DNA, 25 bp, Probe sequence
atttgatggtattttcttggtagct

SEQ ID NO: 216384 - DNA, 25 bp, Probe sequence
atcctgttgatattttagcgtatgc

SEQ ID NO: 216385 - DNA, 25 bp, Probe sequence
agcgaagcgttcgatgttgcgccac

SEQ ID NO: 216386 - DNA, 25 bp, Probe sequence
acatggaaattctctggtttaccta

SEQ ID NO: 216387 - DNA, 25 bp, Probe sequence
aacaaagcaagttcgcacattcagc

SEQ ID NO: 216388 - DNA, 25 bp, Probe sequence
aacgtgttataggttctggtacaat

SEQ ID NO: 216389 - DNA, 25 bp, Probe sequence
aacgtcctgagggcaaagcgcaaat

SEQ ID NO: 216390 - DNA, 25 bp, Probe sequence
aagctggcgaatacagtgattgtca

SEQ ID NO: 216391 - DNA, 25 bp, Probe sequence
aagatgtttatattggtgttccagc

SEQ ID NO: 216392 - DNA, 25 bp, Probe sequence
caacagttcgtgtgaaagctggcga

SEQ ID NO: 216393 - DNA, 25 bp, Probe sequence
caccatattctccaacaacagttcg

SEQ ID NO: 216394 - DNA, 25 bp, Probe sequence
gccacgtagcgtcgatgctcaaatt

SEQ ID NO: 216395 - DNA, 25 bp, Probe sequence
gcggatctagttgtcatctgtgctg

SEQ ID NO: 216396 - DNA, 25 bp, Probe sequence
gctggtgctgcacaaaaacctggag

SEQ ID NO: 216397 - DNA, 25 bp, Probe sequence
gcagcatatgacattattcaagcta

SEQ ID NO: 216398 - DNA, 25 bp, Probe sequence
gcaacgtcgtagaaatcccattaaa

SEQ ID NO: 216399 - DNA, 25 bp, Probe sequence
gaattaccagtatggtcacacgcta

SEQ ID NO: 216400 - DNA, 25 bp, Probe sequence
gacattacttgaacaacgtcctgag

SEQ ID NO: 216401 - DNA, 25 bp, Probe sequence
gaaacggtattcgcaacgtcgtaga

SEQ ID NO: 216402 - DNA, 25 bp, Probe sequence
gactctgcacgctttagattattgt

SEQ ID NO: 216403 - DNA, 25 bp, Probe sequence
gttgtcatctgtgctggtgctgcac

SEQ ID NO: 216404 - DNA, 25 bp, Probe sequence
gtgaacatggtgacactgaattacc

SEQ ID NO: 216405 - DNA, 25 bp, Probe sequence
gtgattgtcatgatgcggatctagt

SEQ ID NO: 216406 - DNA, 25 bp, Probe sequence
ggtgttgcaatgggattagctagaa

SEQ ID NO: 216407 - DNA, 25 bp, Probe sequence
ggtgccacttattatggtgttgcaa

SEQ ID NO: 216408 - DNA, 25 bp, Probe sequence
ggtcacacgctaatattgcgggtca

SEQ ID NO: 216409 - DNA, 25 bp, Probe sequence
ggtacaattttagactctgcacgct

SEQ ID NO: 216410 - DNA, 25 bp, Probe sequence
tggtgttccagcagtcatcaataga

SEQ ID NO: 216411 - DNA, 25 bp, Probe sequence
tcttggtagctacaaatcctgttga

SEQ ID NO: 216412 - DNA, 25 bp, Probe sequence
taaaacatgccacaccatattctcc

SEQ ID NO: 216413 - DNA, 25 bp, Probe sequence
ttcgcacattcagctaaaacattaa

SEQ ID NO: 216414 - DNA, 25 bp, Probe sequence
ttgttcaaacacgtgatgcagcata

SEQ ID NO: 216415 - DNA, 25 bp, Probe sequence
attgtagcgacaggtcctcttacga

SEQ ID NO: 216416 - DNA, 25 bp, Probe sequence
atgttacaggtaagcctgccaatgc

SEQ ID NO: 216417 - DNA, 25 bp, Probe sequence
agcagcgaagcgtgtttttgaaagt

SEQ ID NO: 216418 - DNA, 25 bp, Probe sequence
acagtcgcaggtaatcaatcagttg

SEQ ID NO: 216419 - DNA, 25 bp, Probe sequence
aatagcattaattttagcgggggca

SEQ ID NO: 216420 - DNA, 25 bp, Probe sequence
caagcagttgcaatgccagcatcag

SEQ ID NO: 216421 - DNA, 25 bp, Probe sequence
cacagttcgtcgtagaattattgca

SEQ ID NO: 216422 - DNA, 25 bp, Probe sequence
cactaacttatggcactatggctgt

SEQ ID NO: 216423 - DNA, 25 bp, Probe sequence
cattgaacatcaaagtccactaact

SEQ ID NO: 216424 - DNA, 25 bp, Probe sequence
gcaatgccagcatcagatgtgatta

SEQ ID NO: 216425 - DNA, 25 bp, Probe sequence
gaatctattactttgatgggtggtg

SEQ ID NO: 216426 - DNA, 25 bp, Probe sequence
gaatcgctgagcatattgaatctat

SEQ ID NO: 216427 - DNA, 25 bp, Probe sequence
gaagacatacaagactcactttaat

SEQ ID NO: 216428 - DNA, 25 bp, Probe sequence
gacagtccactagagatattagctg

SEQ ID NO: 216429 - DNA, 25 bp, Probe sequence
gatgtaacacatcaagttttagccg

SEQ ID NO: 216430 - DNA, 25 bp, Probe sequence
gatgacgagtgatacacctgtaaca

SEQ ID NO: 216431 - DNA, 25 bp, Probe sequence
gatacacctgtaacaattgtagcga

SEQ ID NO: 216432 - DNA, 25 bp, Probe sequence
gatattatgggacgccaagatatag

SEQ ID NO: 216433 - DNA, 25 bp, Probe sequence
gtagcgaaaggtgcggataggccgt

SEQ ID NO: 216434 - DNA, 25 bp, Probe sequence
gtagcaacggcattgattcgtgagc

SEQ ID NO: 216435 - DNA, 25 bp, Probe sequence
gtgatccaggacacgatgatgcaat

SEQ ID NO: 216436 - DNA, 25 bp, Probe sequence
gggtggtggtacatttggaaattgg

SEQ ID NO: 216437 - DNA, 25 bp, Probe sequence
ggggaatctggattagatggtccga

SEQ ID NO: 216438 - DNA, 25 bp, Probe sequence
ggtggtccaatacatgatgcttgta

SEQ ID NO: 216439 - DNA, 25 bp, Probe sequence
ggtcctcttacgaatgtagcaacgg

SEQ ID NO: 216440 - DNA, 25 bp, Probe sequence
ggacgcctacagcagaattcaatat

SEQ ID NO: 216441 - DNA, 25 bp, Probe sequence
ggaaattggacgcctacagcagaat

SEQ ID NO: 216442 - DNA, 25 bp, Probe sequence
tggtacccgttaatatcgacattga

SEQ ID NO: 216443 - DNA, 25 bp, Probe sequence
tgcctttgcttctgaaatacatggg

SEQ ID NO: 216444 - DNA, 25 bp, Probe sequence
tcgacaccatcacgtcaagcagttg

SEQ ID NO: 216445 - DNA, 25 bp, Probe sequence
taatcctgttgcacagttcgtcgta

SEQ ID NO: 216446 - DNA, 25 bp, Probe sequence
tagatggtccgaaactaccgtcgac

SEQ ID NO: 216447 - DNA, 25 bp, Probe sequence
tagcgggggcaattgacagtccact

SEQ ID NO: 216448 - DNA, 25 bp, Probe sequence
ttcgtgagccaagaatcgctgagca

SEQ ID NO: 216449 - DNA, 25 bp, Probe sequence
atatgtgttcaaagtgtgtacatcg

SEQ ID NO: 216450 - DNA, 25 bp, Probe sequence
atgataaattgagctcagatgctca

SEQ ID NO: 216451 - DNA, 25 bp, Probe sequence
atgtgttcaaagtgtgtacatcggt

SEQ ID NO: 216452 - DNA, 25 bp, Probe sequence
agtgtgtacatcggtgtgacgattg

SEQ ID NO: 216453 - DNA, 25 bp, Probe sequence
acatcggtgtgacgattgatgataa

SEQ ID NO: 216454 - DNA, 25 bp, Probe sequence
aaattgagctcagatgctcaaagga

SEQ ID NO: 216455 - DNA, 25 bp, Probe sequence
aaatatgtgttcaaagtgtgtacat

SEQ ID NO: 216456 - DNA, 25 bp, Probe sequence
aaagtgtgtacatcggtgtgacgat

SEQ ID NO: 216457 - DNA, 25 bp, Probe sequence
aagtgtgtacatcggtgtgacgatt

SEQ ID NO: 216458 - DNA, 25 bp, Probe sequence
aattgagctcagatgctcaaaggag

SEQ ID NO: 216459 - DNA, 25 bp, Probe sequence
aatatgtgttcaaagtgtgtacatc

SEQ ID NO: 216460 - DNA, 25 bp, Probe sequence
caaagtgtgtacatcggtgtgacga

SEQ ID NO: 216461 - DNA, 25 bp, Probe sequence
catcggtgtgacgattgatgataaa

SEQ ID NO: 216462 - DNA, 25 bp, Probe sequence
cggtgtgacgattgatgataaattg

SEQ ID NO: 216463 - DNA, 25 bp, Probe sequence
gatgataaattgagctcagatgctc

SEQ ID NO: 216464 - DNA, 25 bp, Probe sequence
gataaattgagctcagatgctcaaa

SEQ ID NO: 216465 - DNA, 25 bp, Probe sequence
gttcaaagtgtgtacatcggtgtga

SEQ ID NO: 216466 - DNA, 25 bp, Probe sequence
gtacatcggtgtgacgattgatgat

SEQ ID NO: 216467 - DNA, 25 bp, Probe sequence
gtgttcaaagtgtgtacatcggtgt

SEQ ID NO: 216468 - DNA, 25 bp, Probe sequence
gtgtgtacatcggtgtgacgattga

SEQ ID NO: 216469 - DNA, 25 bp, Probe sequence
gtgtacatcggtgtgacgattgatg

SEQ ID NO: 216470 - DNA, 25 bp, Probe sequence
ggtgtgacgattgatgataaattga

SEQ ID NO: 216471 - DNA, 25 bp, Probe sequence
tgtgttcaaagtgtgtacatcggtg

SEQ ID NO: 216472 - DNA, 25 bp, Probe sequence
tgtgtacatcggtgtgacgattgat

SEQ ID NO: 216473 - DNA, 25 bp, Probe sequence
tgtacatcggtgtgacgattgatga

SEQ ID NO: 216474 - DNA, 25 bp, Probe sequence
tgttcaaagtgtgtacatcggtgtg

SEQ ID NO: 216475 - DNA, 25 bp, Probe sequence
tgatgataaattgagctcagatgct

SEQ ID NO: 216476 - DNA, 25 bp, Probe sequence
tcggtgtgacgattgatgataaatt

SEQ ID NO: 216477 - DNA, 25 bp, Probe sequence
tcaaagtgtgtacatcggtgtgacg

SEQ ID NO: 216478 - DNA, 25 bp, Probe sequence
taaattgagctcagatgctcaaagg

SEQ ID NO: 216479 - DNA, 25 bp, Probe sequence
tacatcggtgtgacgattgatgata

SEQ ID NO: 216480 - DNA, 25 bp, Probe sequence
tatgtgttcaaagtgtgtacatcgg

SEQ ID NO: 216481 - DNA, 25 bp, Probe sequence
ttcaaagtgtgtacatcggtgtgac

SEQ ID NO: 216482 - DNA, 25 bp, Probe sequence
ttgatgataaattgagctcagatgc

SEQ ID NO: 216483 - DNA, 25 bp, Probe sequence
attagtcatcctcctttttagagtt

SEQ ID NO: 216484 - DNA, 25 bp, Probe sequence
attatgtatttacttaggatatcaa

SEQ ID NO: 216485 - DNA, 25 bp, Probe sequence
atagcactattagtcatcctccttt

SEQ ID NO: 216486 - DNA, 25 bp, Probe sequence
atcaaggtttaatttggttgctcga

SEQ ID NO: 216487 - DNA, 25 bp, Probe sequence
atgtcggacttgttttattatgtat

SEQ ID NO: 216488 - DNA, 25 bp, Probe sequence
agtcatcctcctttttagagttgga

SEQ ID NO: 216489 - DNA, 25 bp, Probe sequence
agttggactttctattttgcgattt

SEQ ID NO: 216490 - DNA, 25 bp, Probe sequence
actattagtcatcctcctttttaga

SEQ ID NO: 216491 - DNA, 25 bp, Probe sequence
aatagcactattagtcatcctcctt

SEQ ID NO: 216492 - DNA, 25 bp, Probe sequence
caaggtttaatttggttgctcgatt

SEQ ID NO: 216493 - DNA, 25 bp, Probe sequence
cactattagtcatcctcctttttag

SEQ ID NO: 216494 - DNA, 25 bp, Probe sequence
catcctcctttttagagttggactt

SEQ ID NO: 216495 - DNA, 25 bp, Probe sequence
ctattagtcatcctcctttttagag

SEQ ID NO: 216496 - DNA, 25 bp, Probe sequence
gctcgatttttttcaaataaatagt

SEQ ID NO: 216497 - DNA, 25 bp, Probe sequence
gagttggactttctattttgcgatt

SEQ ID NO: 216498 - DNA, 25 bp, Probe sequence
gactttctattttgcgatttttaat

SEQ ID NO: 216499 - DNA, 25 bp, Probe sequence
gacttgttttattatgtatttactt

SEQ ID NO: 216500 - DNA, 25 bp, Probe sequence
gatttttaatttatgtcggacttgt

SEQ ID NO: 216501 - DNA, 25 bp, Probe sequence
gttggactttctattttgcgatttt

SEQ ID NO: 216502 - DNA, 25 bp, Probe sequence
gttgctcgatttttttcaaataaat

SEQ ID NO: 216503 - DNA, 25 bp, Probe sequence
gtatttacttaggatatcaaggttt

SEQ ID NO: 216504 - DNA, 25 bp, Probe sequence
gtcatcctcctttttagagttggac

SEQ ID NO: 216505 - DNA, 25 bp, Probe sequence
gtcggacttgttttattatgtattt

SEQ ID NO: 216506 - DNA, 25 bp, Probe sequence
tggactttctattttgcgattttta

SEQ ID NO: 216507 - DNA, 25 bp, Probe sequence
taatttggttgctcgatttttttca

SEQ ID NO: 216508 - DNA, 25 bp, Probe sequence
taatagcactattagtcatcctcct

SEQ ID NO: 216509 - DNA, 25 bp, Probe sequence
tagtcatcctcctttttagagttgg

SEQ ID NO: 216510 - DNA, 25 bp, Probe sequence
tattagtcatcctcctttttagagt

SEQ ID NO: 216511 - DNA, 25 bp, Probe sequence
tattttgcgatttttaatttatgtc

SEQ ID NO: 216512 - DNA, 25 bp, Probe sequence
tttaccgcactttcaatttaacaat

SEQ ID NO: 216513 - DNA, 25 bp, Probe sequence
tttatgtcggacttgttttattatg

SEQ ID NO: 216514 - DNA, 25 bp, Probe sequence
ttaccgcactttcaatttaacaatt

SEQ ID NO: 216515 - DNA, 25 bp, Probe sequence
ttgagtatactaacaattattttaa

SEQ ID NO: 216516 - DNA, 25 bp, Probe sequence
ttggttgctcgatttttttcaaata

SEQ ID NO: 216517 - DNA, 25 bp, Probe sequence
atctgcatggagcacattttcattg

SEQ ID NO: 216518 - DNA, 25 bp, Probe sequence
atgccaaactcgcatcactcattta

SEQ ID NO: 216519 - DNA, 25 bp, Probe sequence
atgttgccccactttgcataaagta

SEQ ID NO: 216520 - DNA, 25 bp, Probe sequence
atggaagcagcacgtcttcacataa

SEQ ID NO: 216521 - DNA, 25 bp, Probe sequence
agtacttatcgttaactcaacgcaa

SEQ ID NO: 216522 - DNA, 25 bp, Probe sequence
agttgttcctattcacaaaaagcac

SEQ ID NO: 216523 - DNA, 25 bp, Probe sequence
agcacgtcttcacataaagtaccgg

SEQ ID NO: 216524 - DNA, 25 bp, Probe sequence
acttatcgttaactcaacgcaagtt

SEQ ID NO: 216525 - DNA, 25 bp, Probe sequence
acagttatctgcatggagcacattt

SEQ ID NO: 216526 - DNA, 25 bp, Probe sequence
aaagcacatacagttatctgcatgg

SEQ ID NO: 216527 - DNA, 25 bp, Probe sequence
aactcgcatcactcatttaatggaa

SEQ ID NO: 216528 - DNA, 25 bp, Probe sequence
aactcaacgcaagttgttcctattc

SEQ ID NO: 216529 - DNA, 25 bp, Probe sequence
aacgcaagttgttcctattcacaaa

SEQ ID NO: 216530 - DNA, 25 bp, Probe sequence
aagcagcacgtcttcacataaagta

SEQ ID NO: 216531 - DNA, 25 bp, Probe sequence
caaactcgcatcactcatttaatgg

SEQ ID NO: 216532 - DNA, 25 bp, Probe sequence
cacgtcttcacataaagtaccggtt

SEQ ID NO: 216533 - DNA, 25 bp, Probe sequence
catgttgccccactttgcataaagt

SEQ ID NO: 216534 - DNA, 25 bp, Probe sequence
catacagttatctgcatggagcaca

SEQ ID NO: 216535 - DNA, 25 bp, Probe sequence
ctcgcatcactcatttaatggaagc

SEQ ID NO: 216536 - DNA, 25 bp, Probe sequence
ccaaactcgcatcactcatttaatg

SEQ ID NO: 216537 - DNA, 25 bp, Probe sequence
gccccactttgcataaagtacttat

SEQ ID NO: 216538 - DNA, 25 bp, Probe sequence
gcagcacgtcttcacataaagtacc

SEQ ID NO: 216539 - DNA, 25 bp, Probe sequence
gcacatacagttatctgcatggagc

SEQ ID NO: 216540 - DNA, 25 bp, Probe sequence
gcaagttgttcctattcacaaaaag

SEQ ID NO: 216541 - DNA, 25 bp, Probe sequence
gttgccccactttgcataaagtact

SEQ ID NO: 216542 - DNA, 25 bp, Probe sequence
gttcctattcacaaaaagcacatac

SEQ ID NO: 216543 - DNA, 25 bp, Probe sequence
gttaactcaacgcaagttgttccta

SEQ ID NO: 216544 - DNA, 25 bp, Probe sequence
gttatctgcatggagcacattttca

SEQ ID NO: 216545 - DNA, 25 bp, Probe sequence
gtcttcacataaagtaccggttcct

SEQ ID NO: 216546 - DNA, 25 bp, Probe sequence
ggaagcagcacgtcttcacataaag

SEQ ID NO: 216547 - DNA, 25 bp, Probe sequence
tcacataaagtaccggttccttacg

SEQ ID NO: 216548 - DNA, 25 bp, Probe sequence
tcaacgcaagttgttcctattcaca

SEQ ID NO: 216549 - DNA, 25 bp, Probe sequence
taatggaagcagcacgtcttcacat

SEQ ID NO: 216550 - DNA, 25 bp, Probe sequence
tatgcatgttgccccactttgcata

SEQ ID NO: 216551 - DNA, 25 bp, Probe sequence
attgctattccacatgcatactctg

SEQ ID NO: 216552 - DNA, 25 bp, Probe sequence
attatcacagcaactcttgttacat

SEQ ID NO: 216553 - DNA, 25 bp, Probe sequence
attattgtacctattgctgctgttg

SEQ ID NO: 216554 - DNA, 25 bp, Probe sequence
aggaatcggctgacattgataagga

SEQ ID NO: 216555 - DNA, 25 bp, Probe sequence
agacattagatttagctgacttgat

SEQ ID NO: 216556 - DNA, 25 bp, Probe sequence
accattaatggatcgattgtcacac

SEQ ID NO: 216557 - DNA, 25 bp, Probe sequence
acgagttgcgaaacttatttccaga

SEQ ID NO: 216558 - DNA, 25 bp, Probe sequence
acggggataatcagcaaatactcag

SEQ ID NO: 216559 - DNA, 25 bp, Probe sequence
acggcaacaatgtcatttttagcat

SEQ ID NO: 216560 - DNA, 25 bp, Probe sequence
aaacacgtcgttattatttaatgct

SEQ ID NO: 216561 - DNA, 25 bp, Probe sequence
aaggcgctcaacttaacattcgaag

SEQ ID NO: 216562 - DNA, 25 bp, Probe sequence
aatactgtcattcacgatataaatc

SEQ ID NO: 216563 - DNA, 25 bp, Probe sequence
caagcaacggagattatgacgcaac

SEQ ID NO: 216564 - DNA, 25 bp, Probe sequence
catcgtcttttcaccaatgtttgtc

SEQ ID NO: 216565 - DNA, 25 bp, Probe sequence
gctgctgttgataaagtgacacact

SEQ ID NO: 216566 - DNA, 25 bp, Probe sequence
gcaatgtctctaaaccatttttcaa

SEQ ID NO: 216567 - DNA, 25 bp, Probe sequence
gcaattaagcgcatcatacaaagtc

SEQ ID NO: 216568 - DNA, 25 bp, Probe sequence
gaatcgatatttggtttgtctcgta

SEQ ID NO: 216569 - DNA, 25 bp, Probe sequence
gaaacaatcatgtcaatcgttaact

SEQ ID NO: 216570 - DNA, 25 bp, Probe sequence
gacattacagaactacgtgatggtt

SEQ ID NO: 216571 - DNA, 25 bp, Probe sequence
tacatgtcagatggcacagcaatcc

SEQ ID NO: 216572 - DNA, 25 bp, Probe sequence
gttcgccgtttcttcattaagttga

SEQ ID NO: 216573 - DNA, 25 bp, Probe sequence
gatgaatttgaagttcgccgtttct

SEQ ID NO: 216574 - DNA, 25 bp, Probe sequence
gattatgacatcgtcttttcaccaa

SEQ ID NO: 216575 - DNA, 25 bp, Probe sequence
gttacatttaacgcctgctttttat

SEQ ID NO: 216576 - DNA, 25 bp, Probe sequence
gtagacaactaggatatcgcattca

SEQ ID NO: 216577 - DNA, 25 bp, Probe sequence
gtcctttgtgtgattcgtagacgaa

SEQ ID NO: 216578 - DNA, 25 bp, Probe sequence
gtgacacacttaagagcgttactac

SEQ ID NO: 216579 - DNA, 25 bp, Probe sequence
ggtttgtcacttaagtattctcgaa

SEQ ID NO: 216580 - DNA, 25 bp, Probe sequence
ggcacagcaatccatattattgtac

SEQ ID NO: 216581 - DNA, 25 bp, Probe sequence
taaaagctattatcgtgtgtacaca

SEQ ID NO: 216582 - DNA, 25 bp, Probe sequence
tttaatgctcatgctttttagtaag

SEQ ID NO: 216583 - DNA, 25 bp, Probe sequence
ttttcttagatgcgatttcacttag

SEQ ID NO: 216584 - DNA, 25 bp, Probe sequence
ttatcaatccttatttcatatggtg

SEQ ID NO: 216585 - DNA, 25 bp, Probe sequence
attttttattttctacacttctgtg

SEQ ID NO: 216586 - DNA, 25 bp, Probe sequence
attttctacacttctgtgttttact

SEQ ID NO: 216587 - DNA, 25 bp, Probe sequence
atatacggtatgaagcgagcaacat

SEQ ID NO: 216588 - DNA, 25 bp, Probe sequence
atattttttattttctacacttctg

SEQ ID NO: 216589 - DNA, 25 bp, Probe sequence
atacggtatgaagcgagcaacatat

SEQ ID NO: 216590 - DNA, 25 bp, Probe sequence
atgaagcgagcaacatattggttaa

SEQ ID NO: 216591 - DNA, 25 bp, Probe sequence
agcgagcaacatattggttaaactt

SEQ ID NO: 216592 - DNA, 25 bp, Probe sequence
caatatacggtatgaagcgagcaac

SEQ ID NO: 216593 - DNA, 25 bp, Probe sequence
ctacacttctgtgttttacttttgt

SEQ ID NO: 216594 - DNA, 25 bp, Probe sequence
gcgagcaacatattggttaaactta

SEQ ID NO: 216595 - DNA, 25 bp, Probe sequence
gcaacatattggttaaacttattga

SEQ ID NO: 216596 - DNA, 25 bp, Probe sequence
gaatttttgttgcaatatacggtat

SEQ ID NO: 216597 - DNA, 25 bp, Probe sequence
gaagcgagcaacatattggttaaac

SEQ ID NO: 216598 - DNA, 25 bp, Probe sequence
gagcaacatattggttaaacttatt

SEQ ID NO: 216599 - DNA, 25 bp, Probe sequence
gatcggaatttttgttgcaatatac

SEQ ID NO: 216600 - DNA, 25 bp, Probe sequence
gttgcaatatacggtatgaagcgag

SEQ ID NO: 216601 - DNA, 25 bp, Probe sequence
ggtatgaagcgagcaacatattggt

SEQ ID NO: 216602 - DNA, 25 bp, Probe sequence
ggaatttttgttgcaatatacggta

SEQ ID NO: 216603 - DNA, 25 bp, Probe sequence
tcggaatttttgttgcaatatacgg

SEQ ID NO: 216604 - DNA, 25 bp, Probe sequence
tctacacttctgtgttttacttttg

SEQ ID NO: 216605 - DNA, 25 bp, Probe sequence
tacacttctgtgttttacttttgtt

SEQ ID NO: 216606 - DNA, 25 bp, Probe sequence
tattttttattttctacacttctgt

SEQ ID NO: 216607 - DNA, 25 bp, Probe sequence
tattttctacacttctgtgttttac

SEQ ID NO: 216608 - DNA, 25 bp, Probe sequence
tttctacacttctgtgttttacttt

SEQ ID NO: 216609 - DNA, 25 bp, Probe sequence
tttattttctacacttctgtgtttt

SEQ ID NO: 216610 - DNA, 25 bp, Probe sequence
ttttattttctacacttctgtgttt

SEQ ID NO: 216611 - DNA, 25 bp, Probe sequence
tttttgttgcaatatacggtatgaa

SEQ ID NO: 216612 - DNA, 25 bp, Probe sequence
tttttattttctacacttctgtgtt

SEQ ID NO: 216613 - DNA, 25 bp, Probe sequence
ttttctacacttctgtgttttactt

SEQ ID NO: 216614 - DNA, 25 bp, Probe sequence
ttttgttgcaatatacggtatgaag

SEQ ID NO: 216615 - DNA, 25 bp, Probe sequence
ttttttattttctacacttctgtgt

SEQ ID NO: 216616 - DNA, 25 bp, Probe sequence
ttattttctacacttctgtgtttta

SEQ ID NO: 216617 - DNA, 25 bp, Probe sequence
ttctacacttctgtgttttactttt

SEQ ID NO: 216618 - DNA, 25 bp, Probe sequence
ttgatcggaatttttgttgcaatat

SEQ ID NO: 216619 - DNA, 25 bp, Probe sequence
attgataagtattatcctatcctcg

SEQ ID NO: 216620 - DNA, 25 bp, Probe sequence
attttactataagcgtatactttgg

SEQ ID NO: 216621 - DNA, 25 bp, Probe sequence
atttactccttatattatgaaatgt

SEQ ID NO: 216622 - DNA, 25 bp, Probe sequence
atactttggcaatattcgaaggaaa

SEQ ID NO: 216623 - DNA, 25 bp, Probe sequence
ataagcgtatactttggcaatattc

SEQ ID NO: 216624 - DNA, 25 bp, Probe sequence
ataagtattatcctatcctcgaaaa

SEQ ID NO: 216625 - DNA, 25 bp, Probe sequence
agcgtatactttggcaatattcgaa

SEQ ID NO: 216626 - DNA, 25 bp, Probe sequence
actataagcgtatactttggcaata

SEQ ID NO: 216627 - DNA, 25 bp, Probe sequence
aagcgtatactttggcaatattcga

SEQ ID NO: 216628 - DNA, 25 bp, Probe sequence
aattttactataagcgtatactttg

SEQ ID NO: 216629 - DNA, 25 bp, Probe sequence
aatttactccttatattatgaaatg

SEQ ID NO: 216630 - DNA, 25 bp, Probe sequence
cagacactagtgaacaaaaatttta

SEQ ID NO: 216631 - DNA, 25 bp, Probe sequence
cgtatactttggcaatattcgaagg

SEQ ID NO: 216632 - DNA, 25 bp, Probe sequence
gcgtatactttggcaatattcgaag

SEQ ID NO: 216633 - DNA, 25 bp, Probe sequence
gaatttactccttatattatgaaat

SEQ ID NO: 216634 - DNA, 25 bp, Probe sequence
gacactagtgaacaaaaattttact

SEQ ID NO: 216635 - DNA, 25 bp, Probe sequence
gataagtattatcctatcctcgaaa

SEQ ID NO: 216636 - DNA, 25 bp, Probe sequence
gtatactttggcaatattcgaagga

SEQ ID NO: 216637 - DNA, 25 bp, Probe sequence
tgataagtattatcctatcctcgaa

SEQ ID NO: 216638 - DNA, 25 bp, Probe sequence
tgaatttactccttatattatgaaa

SEQ ID NO: 216639 - DNA, 25 bp, Probe sequence
taagcgtatactttggcaatattcg

SEQ ID NO: 216640 - DNA, 25 bp, Probe sequence
tactttggcaatattcgaaggaaaa

SEQ ID NO: 216641 - DNA, 25 bp, Probe sequence
tactataagcgtatactttggcaat

SEQ ID NO: 216642 - DNA, 25 bp, Probe sequence
tactccttatattatgaaatgttat

SEQ ID NO: 216643 - DNA, 25 bp, Probe sequence
tataagcgtatactttggcaatatt

SEQ ID NO: 216644 - DNA, 25 bp, Probe sequence
tatactttggcaatattcgaaggaa

SEQ ID NO: 216645 - DNA, 25 bp, Probe sequence
tattcgaaggaaaaacatggattaa

SEQ ID NO: 216646 - DNA, 25 bp, Probe sequence
tttggcaatattcgaaggaaaaaca

SEQ ID NO: 216647 - DNA, 25 bp, Probe sequence
ttttactataagcgtatactttggc

SEQ ID NO: 216648 - DNA, 25 bp, Probe sequence
tttactataagcgtatactttggca

SEQ ID NO: 216649 - DNA, 25 bp, Probe sequence
tttactccttatattatgaaatgtt

SEQ ID NO: 216650 - DNA, 25 bp, Probe sequence
ttactccttatattatgaaatgtta

SEQ ID NO: 216651 - DNA, 25 bp, Probe sequence
ttactataagcgtatactttggcaa

SEQ ID NO: 216652 - DNA, 25 bp, Probe sequence
ttgataagtattatcctatcctcga

SEQ ID NO: 216653 - DNA, 25 bp, Probe sequence
attgatgacactttatttaattttg

SEQ ID NO: 216654 - DNA, 25 bp, Probe sequence
atatctatactgtcacattgatgac

SEQ ID NO: 216655 - DNA, 25 bp, Probe sequence
atactgtcacattgatgacacttta

SEQ ID NO: 216656 - DNA, 25 bp, Probe sequence
atctatactgtcacattgatgacac

SEQ ID NO: 216657 - DNA, 25 bp, Probe sequence
agttgatttttgtttatattgagta

SEQ ID NO: 216658 - DNA, 25 bp, Probe sequence
actgtcacattgatgacactttatt

SEQ ID NO: 216659 - DNA, 25 bp, Probe sequence
actttttcaaaatatctatactgtc

SEQ ID NO: 216660 - DNA, 25 bp, Probe sequence
acattgatgacactttatttaattt

SEQ ID NO: 216661 - DNA, 25 bp, Probe sequence
acactttatttaattttgtcacatt

SEQ ID NO: 216662 - DNA, 25 bp, Probe sequence
aaatatctatactgtcacattgatg

SEQ ID NO: 216663 - DNA, 25 bp, Probe sequence
aaaatatctatactgtcacattgat

SEQ ID NO: 216664 - DNA, 25 bp, Probe sequence
aagttgatttttgtttatattgagt

SEQ ID NO: 216665 - DNA, 25 bp, Probe sequence
aatatctatactgtcacattgatga

SEQ ID NO: 216666 - DNA, 25 bp, Probe sequence
caaaatatctatactgtcacattga

SEQ ID NO: 216667 - DNA, 25 bp, Probe sequence
cacattgatgacactttatttaatt

SEQ ID NO: 216668 - DNA, 25 bp, Probe sequence
cactttatttaattttgtcacattt

SEQ ID NO: 216669 - DNA, 25 bp, Probe sequence
ctttatttaattttgtcacatttat

SEQ ID NO: 216670 - DNA, 25 bp, Probe sequence
ctatactgtcacattgatgacactt

SEQ ID NO: 216671 - DNA, 25 bp, Probe sequence
gttgatttttgtttatattgagtaa

SEQ ID NO: 216672 - DNA, 25 bp, Probe sequence
gttttgcaaatattttcacaataaa

SEQ ID NO: 216673 - DNA, 25 bp, Probe sequence
gtcacatttattttgacaaagttga

SEQ ID NO: 216674 - DNA, 25 bp, Probe sequence
tcacattgatgacactttatttaat

SEQ ID NO: 216675 - DNA, 25 bp, Probe sequence
tcaaaatatctatactgtcacattg

SEQ ID NO: 216676 - DNA, 25 bp, Probe sequence
taattttgtcacatttattttgaca

SEQ ID NO: 216677 - DNA, 25 bp, Probe sequence
tactgtcacattgatgacactttat

SEQ ID NO: 216678 - DNA, 25 bp, Probe sequence
tatactgtcacattgatgacacttt

SEQ ID NO: 216679 - DNA, 25 bp, Probe sequence
tatttaattttgtcacatttatttt

SEQ ID NO: 216680 - DNA, 25 bp, Probe sequence
tttcaaaatatctatactgtcacat

SEQ ID NO: 216681 - DNA, 25 bp, Probe sequence
tttaattttgtcacatttattttga

SEQ ID NO: 216682 - DNA, 25 bp, Probe sequence
tttttcaaaatatctatactgtcac

SEQ ID NO: 216683 - DNA, 25 bp, Probe sequence
ttttcaaaatatctatactgtcaca

SEQ ID NO: 216684 - DNA, 25 bp, Probe sequence
ttcaaaatatctatactgtcacatt

SEQ ID NO: 216685 - DNA, 25 bp, Probe sequence
ttgttttgcaaatattttcacaata

SEQ ID NO: 216686 - DNA, 25 bp, Probe sequence
ttgatgacactttatttaattttgt

SEQ ID NO: 216687 - DNA, 25 bp, Probe sequence
attgcgtgtttaatgacttggtttt

SEQ ID NO: 216688 - DNA, 25 bp, Probe sequence
atgacttggttttgtagcgattttt

SEQ ID NO: 216689 - DNA, 25 bp, Probe sequence
aatgacttggttttgtagcgatttt

SEQ ID NO: 216690 - DNA, 25 bp, Probe sequence
gcgtgtttaatgacttggttttgta

SEQ ID NO: 216691 - DNA, 25 bp, Probe sequence
gagttgcgtttttggaatttggagt

SEQ ID NO: 216692 - DNA, 25 bp, Probe sequence
gagtttggttttcggaattcgacat

SEQ ID NO: 216693 - DNA, 25 bp, Probe sequence
gacttggttttgtagcgatttttat

SEQ ID NO: 216694 - DNA, 25 bp, Probe sequence
gttttcggaattcgacatttggaat

SEQ ID NO: 216695 - DNA, 25 bp, Probe sequence
gttttgtagcgatttttatttgatg

SEQ ID NO: 216696 - DNA, 25 bp, Probe sequence
gtttaatgacttggttttgtagcga

SEQ ID NO: 216697 - DNA, 25 bp, Probe sequence
gtgtttaatgacttggttttgtagc

SEQ ID NO: 216698 - DNA, 25 bp, Probe sequence
gtggaaaattttaattattgcgtgt

SEQ ID NO: 216699 - DNA, 25 bp, Probe sequence
ggttttgtagcgatttttatttgat

SEQ ID NO: 216700 - DNA, 25 bp, Probe sequence
ggagttgcgtttttggaatttggag

SEQ ID NO: 216701 - DNA, 25 bp, Probe sequence
ggaattcagaattataatgagtgga

SEQ ID NO: 216702 - DNA, 25 bp, Probe sequence
tggttttcggaattcgacatttgga

SEQ ID NO: 216703 - DNA, 25 bp, Probe sequence
tggagttgcgtttttggaatttgga

SEQ ID NO: 216704 - DNA, 25 bp, Probe sequence
tgcgtttttggaatttggagtttgg

SEQ ID NO: 216705 - DNA, 25 bp, Probe sequence
tgacttggttttgtagcgattttta

SEQ ID NO: 216706 - DNA, 25 bp, Probe sequence
tgcgtgtttaatgacttggttttgt

SEQ ID NO: 216707 - DNA, 25 bp, Probe sequence
taatgacttggttttgtagcgattt

SEQ ID NO: 216708 - DNA, 25 bp, Probe sequence
tatttgatgaattgtttttttgttt

SEQ ID NO: 216709 - DNA, 25 bp, Probe sequence
tttggttttcggaattcgacatttg

SEQ ID NO: 216710 - DNA, 25 bp, Probe sequence
tattgcgtgtttaatgacttggttt

SEQ ID NO: 216711 - DNA, 25 bp, Probe sequence
tttgtagcgatttttatttgatgaa

SEQ ID NO: 216712 - DNA, 25 bp, Probe sequence
tttaatgacttggttttgtagcgat

SEQ ID NO: 216713 - DNA, 25 bp, Probe sequence
ttattgcgtgtttaatgacttggtt

SEQ ID NO: 216714 - DNA, 25 bp, Probe sequence
ttggttttgtagcgatttttatttg

SEQ ID NO: 216715 - DNA, 25 bp, Probe sequence
ttcgacatttggaattcagaattat

SEQ ID NO: 216716 - DNA, 25 bp, Probe sequence
ttggttttcggaattcgacatttgg

SEQ ID NO: 216717 - DNA, 25 bp, Probe sequence
ttgcgtttttggaatttggagtttg

SEQ ID NO: 216718 - DNA, 25 bp, Probe sequence
ttgcgtgtttaatgacttggttttg

SEQ ID NO: 216719 - DNA, 25 bp, Probe sequence
ttggagttgcgtttttggaatttgg

SEQ ID NO: 216720 - DNA, 25 bp, Probe sequence
ttgtagcgatttttatttgatgaat

SEQ ID NO: 216721 - DNA, 25 bp, Probe sequence
attgtctgtagaaattgggaatcca

SEQ ID NO: 216722 - DNA, 25 bp, Probe sequence
attgggaatccaatttctctttgtt

SEQ ID NO: 216723 - DNA, 25 bp, Probe sequence
attttcgcaaaatatatttcgtcgt

SEQ ID NO: 216724 - DNA, 25 bp, Probe sequence
accccaacttgcattgtctgtagaa

SEQ ID NO: 216725 - DNA, 25 bp, Probe sequence
acttgcattgtctgtagaaattggg

SEQ ID NO: 216726 - DNA, 25 bp, Probe sequence
aacttgcattgtctgtagaaattgg

SEQ ID NO: 216727 - DNA, 25 bp, Probe sequence
caacttgcattgtctgtagaaattg

SEQ ID NO: 216728 - DNA, 25 bp, Probe sequence
caacttgcacattattgtaagctga

SEQ ID NO: 216729 - DNA, 25 bp, Probe sequence
caccccaacttgcattgtctgtaga

SEQ ID NO: 216730 - DNA, 25 bp, Probe sequence
cttgcattgtctgtagaaattggga

SEQ ID NO: 216731 - DNA, 25 bp, Probe sequence
ctccccaacttgcacattattgtaa

SEQ ID NO: 216732 - DNA, 25 bp, Probe sequence
cgcaaaatatatttcgtcgtcccac

SEQ ID NO: 216733 - DNA, 25 bp, Probe sequence
cccaacttgcacattattgtaagct

SEQ ID NO: 216734 - DNA, 25 bp, Probe sequence
cccaacttgcattgtctgtagaaat

SEQ ID NO: 216735 - DNA, 25 bp, Probe sequence
ccccaacttgcacattattgtaagc

SEQ ID NO: 216736 - DNA, 25 bp, Probe sequence
ccccaacttgcattgtctgtagaaa

SEQ ID NO: 216737 - DNA, 25 bp, Probe sequence
cctccccaacttgcacattattgta

SEQ ID NO: 216738 - DNA, 25 bp, Probe sequence
ccaacttgcattgtctgtagaaatt

SEQ ID NO: 216739 - DNA, 25 bp, Probe sequence
ccaacttgcacattattgtaagctg

SEQ ID NO: 216740 - DNA, 25 bp, Probe sequence
gcattgtctgtagaaattgggaatc

SEQ ID NO: 216741 - DNA, 25 bp, Probe sequence
gcaaaatatatttcgtcgtcccacc

SEQ ID NO: 216742 - DNA, 25 bp, Probe sequence
gaatccaatttctctttgttggggc

SEQ ID NO: 216743 - DNA, 25 bp, Probe sequence
gggaatccaatttctctttgttggg

SEQ ID NO: 216744 - DNA, 25 bp, Probe sequence
ggaatccaatttctctttgttgggg

SEQ ID NO: 216745 - DNA, 25 bp, Probe sequence
tgggaatccaatttctctttgttgg

SEQ ID NO: 216746 - DNA, 25 bp, Probe sequence
tgcattgtctgtagaaattgggaat

SEQ ID NO: 216747 - DNA, 25 bp, Probe sequence
tccccaacttgcacattattgtaag

SEQ ID NO: 216748 - DNA, 25 bp, Probe sequence
tcgcaaaatatatttcgtcgtccca

SEQ ID NO: 216749 - DNA, 25 bp, Probe sequence
tttcgcaaaatatatttcgtcgtcc

SEQ ID NO: 216750 - DNA, 25 bp, Probe sequence
ttttcgcaaaatatatttcgtcgtc

SEQ ID NO: 216751 - DNA, 25 bp, Probe sequence
ttgcattgtctgtagaaattgggaa

SEQ ID NO: 216752 - DNA, 25 bp, Probe sequence
ttcgcaaaatatatttcgtcgtccc

SEQ ID NO: 216753 - DNA, 25 bp, Probe sequence
ttgtctgtagaaattgggaatccaa

SEQ ID NO: 216754 - DNA, 25 bp, Probe sequence
ttgggaatccaatttctctttgttg

SEQ ID NO: 216755 - DNA, 25 bp, Probe sequence
attttagcaacactaatcaatgatt

SEQ ID NO: 216756 - DNA, 25 bp, Probe sequence
atttgtcggcaactgataaagaatc

SEQ ID NO: 216757 - DNA, 25 bp, Probe sequence
atgctcaatttgtcggcaactgata

SEQ ID NO: 216758 - DNA, 25 bp, Probe sequence
atgtcagatgtgttatttcaaaatg

SEQ ID NO: 216759 - DNA, 25 bp, Probe sequence
atgtgttatttcaaaatgggttcgt

SEQ ID NO: 216760 - DNA, 25 bp, Probe sequence
atgggaacacttgatcaacagacag

SEQ ID NO: 216761 - DNA, 25 bp, Probe sequence
agatgtcgaacatattaaccataga

SEQ ID NO: 216762 - DNA, 25 bp, Probe sequence
accatagaacgataggtgtggctgt

SEQ ID NO: 216763 - DNA, 25 bp, Probe sequence
acgataggtgtggctgttctagaaa

SEQ ID NO: 216764 - DNA, 25 bp, Probe sequence
acagacagaagtgaaaatcgttttt

SEQ ID NO: 216765 - DNA, 25 bp, Probe sequence
aaatataatgctcaatttgtcggca

SEQ ID NO: 216766 - DNA, 25 bp, Probe sequence
aagtcaacgtttaaagatgcagtca

SEQ ID NO: 216767 - DNA, 25 bp, Probe sequence
gctcaatttgtcggcaactgataaa

SEQ ID NO: 216768 - DNA, 25 bp, Probe sequence
gctataccgcatacagatgtcgaac

SEQ ID NO: 216769 - DNA, 25 bp, Probe sequence
gaagtgaaaatcgtttttatgttag

SEQ ID NO: 216770 - DNA, 25 bp, Probe sequence
gaacgataggtgtggctgttctaga

SEQ ID NO: 216771 - DNA, 25 bp, Probe sequence
gaaatgggaacacttgatcaacaga

SEQ ID NO: 216772 - DNA, 25 bp, Probe sequence
gataggtgtggctgttctagaaaaa

SEQ ID NO: 216773 - DNA, 25 bp, Probe sequence
gttgatgcaaatttttcaaagtgaa

SEQ ID NO: 216774 - DNA, 25 bp, Probe sequence
gtttaaagatgcagtcatcgacaga

SEQ ID NO: 216775 - DNA, 25 bp, Probe sequence
gtattgtcacaaatgtcagatgtgt

SEQ ID NO: 216776 - DNA, 25 bp, Probe sequence
gtcaacgtttaaagatgcagtcatc

SEQ ID NO: 216777 - DNA, 25 bp, Probe sequence
gtcacaaatgtcagatgtgttattt

SEQ ID NO: 216778 - DNA, 25 bp, Probe sequence
gtgccgtttattgaaatgggaacac

SEQ ID NO: 216779 - DNA, 25 bp, Probe sequence
ggataaagtagatgatcaacttaag

SEQ ID NO: 216780 - DNA, 25 bp, Probe sequence
ggaacacttgatcaacagacagaag

SEQ ID NO: 216781 - DNA, 25 bp, Probe sequence
tgggacagcaattagtgcataaaga

SEQ ID NO: 216782 - DNA, 25 bp, Probe sequence
tgtcgaacatattaaccatagaacg

SEQ ID NO: 216783 - DNA, 25 bp, Probe sequence
taatgctcaatttgtcggcaactga

SEQ ID NO: 216784 - DNA, 25 bp, Probe sequence
tacaacagttgatgcaaatttttca

SEQ ID NO: 216785 - DNA, 25 bp, Probe sequence
taccgcatacagatgtcgaacatat

SEQ ID NO: 216786 - DNA, 25 bp, Probe sequence
taggtgtggctgttctagaaaaaga

SEQ ID NO: 216787 - DNA, 25 bp, Probe sequence
tataatgctcaatttgtcggcaact

SEQ ID NO: 216788 - DNA, 25 bp, Probe sequence
tataccgcatacagatgtcgaacat

SEQ ID NO: 216789 - DNA, 25 bp, Probe sequence
aatgaaaacccgctacaagtacaca

SEQ ID NO: 216790 - DNA, 25 bp, Probe sequence
attcactttggaaaatggactttat

SEQ ID NO: 216791 - DNA, 25 bp, Probe sequence
attatcaagccacttcatttcaatc

SEQ ID NO: 216792 - DNA, 25 bp, Probe sequence
atttcaatcgtcattcactttggaa

SEQ ID NO: 216793 - DNA, 25 bp, Probe sequence
atcactagtaaaatgaaaacccgct

SEQ ID NO: 216794 - DNA, 25 bp, Probe sequence
atcaagccacttcatttcaatcgtc

SEQ ID NO: 216795 - DNA, 25 bp, Probe sequence
atctccctttcgttaatcatattta

SEQ ID NO: 216796 - DNA, 25 bp, Probe sequence
atggactttatatttcatcactagt

SEQ ID NO: 216797 - DNA, 25 bp, Probe sequence
acccgctacaagtacacatctatat

SEQ ID NO: 216798 - DNA, 25 bp, Probe sequence
acaagattcattatcaagccacttc

SEQ ID NO: 216799 - DNA, 25 bp, Probe sequence
aaacccgctacaagtacacatctat

SEQ ID NO: 216800 - DNA, 25 bp, Probe sequence
aagccacttcatttcaatcgtcatt

SEQ ID NO: 216801 - DNA, 25 bp, Probe sequence
aagattcattatcaagccacttcat

SEQ ID NO: 216802 - DNA, 25 bp, Probe sequence
caatcgtcattcactttggaaaatg

SEQ ID NO: 216803 - DNA, 25 bp, Probe sequence
cacatctatatggagactcatttga

SEQ ID NO: 216804 - DNA, 25 bp, Probe sequence
cacttcatttcaatcgtcattcact

SEQ ID NO: 216805 - DNA, 25 bp, Probe sequence
cttcatttcaatcgtcattcacttt

SEQ ID NO: 216806 - DNA, 25 bp, Probe sequence
ctccctttcgttaatcatatttata

SEQ ID NO: 216807 - DNA, 25 bp, Probe sequence
cgctacaagtacacatctatatgga

SEQ ID NO: 216808 - DNA, 25 bp, Probe sequence
ccctttcgttaatcatatttatatt

SEQ ID NO: 216809 - DNA, 25 bp, Probe sequence
gccacttcatttcaatcgtcattca

SEQ ID NO: 216810 - DNA, 25 bp, Probe sequence
gaaaacccgctacaagtacacatct

SEQ ID NO: 216811 - DNA, 25 bp, Probe sequence
gattcattatcaagccacttcattt

SEQ ID NO: 216812 - DNA, 25 bp, Probe sequence
gtacacatctatatggagactcatt

SEQ ID NO: 216813 - DNA, 25 bp, Probe sequence
gtaatctccctttcgttaatcatat

SEQ ID NO: 216814 - DNA, 25 bp, Probe sequence
ggactttatatttcatcactagtaa

SEQ ID NO: 216815 - DNA, 25 bp, Probe sequence
tgtaatctccctttcgttaatcata

SEQ ID NO: 216816 - DNA, 25 bp, Probe sequence
tcatttcaatcgtcattcactttgg

SEQ ID NO: 216817 - DNA, 25 bp, Probe sequence
tcaagccacttcatttcaatcgtca

SEQ ID NO: 216818 - DNA, 25 bp, Probe sequence
taatctccctttcgttaatcatatt

SEQ ID NO: 216819 - DNA, 25 bp, Probe sequence
tattgttaccgttataatttacaag

SEQ ID NO: 216820 - DNA, 25 bp, Probe sequence
ttaccgttataatttacaagattca

SEQ ID NO: 216821 - DNA, 25 bp, Probe sequence
ttcaatcgtcattcactttggaaaa

SEQ ID NO: 216822 - DNA, 25 bp, Probe sequence
ttcattatcaagccacttcatttca

SEQ ID NO: 216823 - DNA, 25 bp, Probe sequence
aacgcccgagatgttaggcgaccat

SEQ ID NO: 216824 - DNA, 25 bp, Probe sequence
acctcctctctgcgttaaagtaacg

SEQ ID NO: 216825 - DNA, 25 bp, Probe sequence
aaagctgaagtcatgatgttaatta

SEQ ID NO: 216826 - DNA, 25 bp, Probe sequence
aaaaacgcaacaagacagccgctta

SEQ ID NO: 216827 - DNA, 25 bp, Probe sequence
aaaacgcaacaagacagccgcttaa

SEQ ID NO: 216828 - DNA, 25 bp, Probe sequence
aacgcaacaagacagccgcttaaag

SEQ ID NO: 216829 - DNA, 25 bp, Probe sequence
aagacagccgcttaaagctgaagtc

SEQ ID NO: 216830 - DNA, 25 bp, Probe sequence
aattgaacatccatcatacacctcc

SEQ ID NO: 216831 - DNA, 25 bp, Probe sequence
ctctctgcgttaaagtaacgcccga

SEQ ID NO: 216832 - DNA, 25 bp, Probe sequence
cgcaacaagacagccgcttaaagct

SEQ ID NO: 216833 - DNA, 25 bp, Probe sequence
gcccgagatgttaggcgaccattat

SEQ ID NO: 216834 - DNA, 25 bp, Probe sequence
gccgcttaaagctgaagtcatgatg

SEQ ID NO: 216835 - DNA, 25 bp, Probe sequence
gcgcgttcgtaaccaatgtgcaaaa

SEQ ID NO: 216836 - DNA, 25 bp, Probe sequence
gcgttcgtaaccaatgtgcaaaaaa

SEQ ID NO: 216837 - DNA, 25 bp, Probe sequence
gcaatattaaagttcgagtaaagcg

SEQ ID NO: 216838 - DNA, 25 bp, Probe sequence
gacagccgcttaaagctgaagtcat

SEQ ID NO: 216839 - DNA, 25 bp, Probe sequence
gagatgttaggcgaccattatatta

SEQ ID NO: 216840 - DNA, 25 bp, Probe sequence
gttgcgcgttcgtaaccaatgtgca

SEQ ID NO: 216841 - DNA, 25 bp, Probe sequence
gttaggcgaccattatattatatca

SEQ ID NO: 216842 - DNA, 25 bp, Probe sequence
gtttacgctactttaattactatct

SEQ ID NO: 216843 - DNA, 25 bp, Probe sequence
gtaaccaatgtgcaaaaaacgcaac

SEQ ID NO: 216844 - DNA, 25 bp, Probe sequence
gtaacgcccgagatgttaggcgacc

SEQ ID NO: 216845 - DNA, 25 bp, Probe sequence
ggcgaccattatattatatcattta

SEQ ID NO: 216846 - DNA, 25 bp, Probe sequence
tggtttacgctactttaattactat

SEQ ID NO: 216847 - DNA, 25 bp, Probe sequence
tgttgcgcgttcgtaaccaatgtgc

SEQ ID NO: 216848 - DNA, 25 bp, Probe sequence
tgcgcgttcgtaaccaatgtgcaaa

SEQ ID NO: 216849 - DNA, 25 bp, Probe sequence
taaagtaacgcccgagatgttaggc

SEQ ID NO: 216850 - DNA, 25 bp, Probe sequence
tttattgttgcgcgttcgtaaccaa

SEQ ID NO: 216851 - DNA, 25 bp, Probe sequence
tacgctactttaattactatctttt

SEQ ID NO: 216852 - DNA, 25 bp, Probe sequence
tattgttgcgcgttcgtaaccaatg

SEQ ID NO: 216853 - DNA, 25 bp, Probe sequence
ttttattgttgcgcgttcgtaacca

SEQ ID NO: 216854 - DNA, 25 bp, Probe sequence
ttatttattatatttcacgcaatat

SEQ ID NO: 216855 - DNA, 25 bp, Probe sequence
ttcacgcaatattaaagttcgagta

SEQ ID NO: 216856 - DNA, 25 bp, Probe sequence
ttgttgcgcgttcgtaaccaatgtg

SEQ ID NO: 216857 - DNA, 25 bp, Probe sequence
attcccagttatcaacgcacgtaat

SEQ ID NO: 216858 - DNA, 25 bp, Probe sequence
atttcttaactggtattggtattga

SEQ ID NO: 216859 - DNA, 25 bp, Probe sequence
atcaacgcacgtaatttcttaactg

SEQ ID NO: 216860 - DNA, 25 bp, Probe sequence
agttatcaacgcacgtaatttctta

SEQ ID NO: 216861 - DNA, 25 bp, Probe sequence
acgcacgtaatttcttaactggtat

SEQ ID NO: 216862 - DNA, 25 bp, Probe sequence
aattcccagttatcaacgcacgtaa

SEQ ID NO: 216863 - DNA, 25 bp, Probe sequence
aaattacagaagttggaccttatga

SEQ ID NO: 216864 - DNA, 25 bp, Probe sequence
aacaacaaatcttaacagagttaca

SEQ ID NO: 216865 - DNA, 25 bp, Probe sequence
caacgcacgtaatttcttaactggt

SEQ ID NO: 216866 - DNA, 25 bp, Probe sequence
cccagttatcaacgcacgtaatttc

SEQ ID NO: 216867 - DNA, 25 bp, Probe sequence
gcgtgtggtgcaggtattgcaacgt

SEQ ID NO: 216868 - DNA, 25 bp, Probe sequence
gcaggtattgcaacgtcaacagtag

SEQ ID NO: 216869 - DNA, 25 bp, Probe sequence
gcacgtaatttcttaactggtattg

SEQ ID NO: 216870 - DNA, 25 bp, Probe sequence
gcaacgtcaacagtagtaaataatg

SEQ ID NO: 216871 - DNA, 25 bp, Probe sequence
gaatataaattcccagttatcaacg

SEQ ID NO: 216872 - DNA, 25 bp, Probe sequence
gaagttggaccttatgaagacactg

SEQ ID NO: 216873 - DNA, 25 bp, Probe sequence
gaaacaagtattagtagcgtgtggt

SEQ ID NO: 216874 - DNA, 25 bp, Probe sequence
gaaacaaaacaacaaatcttaacag

SEQ ID NO: 216875 - DNA, 25 bp, Probe sequence
gaaatggcaaaggaacacaatatta

SEQ ID NO: 216876 - DNA, 25 bp, Probe sequence
gacactgcagatttattagttacaa

SEQ ID NO: 216877 - DNA, 25 bp, Probe sequence
gaccttatgaagacactgcagattt

SEQ ID NO: 216878 - DNA, 25 bp, Probe sequence
gttggaccttatgaagacactgcag

SEQ ID NO: 216879 - DNA, 25 bp, Probe sequence
gtattagtagcgtgtggtgcaggta

SEQ ID NO: 216880 - DNA, 25 bp, Probe sequence
gtagcgtgtggtgcaggtattgcaa

SEQ ID NO: 216881 - DNA, 25 bp, Probe sequence
gtaatttcttaactggtattggtat

SEQ ID NO: 216882 - DNA, 25 bp, Probe sequence
gtggtgcaggtattgcaacgtcaac

SEQ ID NO: 216883 - DNA, 25 bp, Probe sequence
gtgtggtgcaggtattgcaacgtca

SEQ ID NO: 216884 - DNA, 25 bp, Probe sequence
ggtgcaggtattgcaacgtcaacag

SEQ ID NO: 216885 - DNA, 25 bp, Probe sequence
ggtattgcaacgtcaacagtagtaa

SEQ ID NO: 216886 - DNA, 25 bp, Probe sequence
taaattcccagttatcaacgcacgt

SEQ ID NO: 216887 - DNA, 25 bp, Probe sequence
tagtagcgtgtggtgcaggtattgc

SEQ ID NO: 216888 - DNA, 25 bp, Probe sequence
tatgaagacactgcagatttattag

SEQ ID NO: 216889 - DNA, 25 bp, Probe sequence
ttattagttacaactgcaatgacaa

SEQ ID NO: 216890 - DNA, 25 bp, Probe sequence
ttcccagttatcaacgcacgtaatt

SEQ ID NO: 216891 - DNA, 25 bp, Probe sequence
ataggatatgctaaacactgccgtt

SEQ ID NO: 216892 - DNA, 25 bp, Probe sequence
atcaagctagcatcatgttggttgt

SEQ ID NO: 216893 - DNA, 25 bp, Probe sequence
atcgcctaacagcatttcctatgtg

SEQ ID NO: 216894 - DNA, 25 bp, Probe sequence
atgtgtatcaggacctctggacgcg

SEQ ID NO: 216895 - DNA, 25 bp, Probe sequence
aagcgtgtcggagggttggcttcgt

SEQ ID NO: 216896 - DNA, 25 bp, Probe sequence
acctttcgataaactacacacgtag

SEQ ID NO: 216897 - DNA, 25 bp, Probe sequence
aaacaataatttcgcagtagctgcc

SEQ ID NO: 216898 - DNA, 25 bp, Probe sequence
aacactgccgtttgaagtctgttta

SEQ ID NO: 216899 - DNA, 25 bp, Probe sequence
aataactggcaaatcaaacaataat

SEQ ID NO: 216900 - DNA, 25 bp, Probe sequence
cacttttcatgatgcgaaacctttc

SEQ ID NO: 216901 - DNA, 25 bp, Probe sequence
cttcgtcatcaacacacacagttta

SEQ ID NO: 216902 - DNA, 25 bp, Probe sequence
ctgcatcgcctaacagcatttccta

SEQ ID NO: 216903 - DNA, 25 bp, Probe sequence
ctgccgtttgaagtctgtttagaag

SEQ ID NO: 216904 - DNA, 25 bp, Probe sequence
cgagctcattaagcgtgtcggaggg

SEQ ID NO: 216905 - DNA, 25 bp, Probe sequence
cctctggacgcgggttcaaatcccg

SEQ ID NO: 216906 - DNA, 25 bp, Probe sequence
cccccgagctcattaagcgtgtcgg

SEQ ID NO: 216907 - DNA, 25 bp, Probe sequence
gctagcatcatgttggttgtttatc

SEQ ID NO: 216908 - DNA, 25 bp, Probe sequence
gcatttcctatgtgctgttaacgcg

SEQ ID NO: 216909 - DNA, 25 bp, Probe sequence
gcatcatgttggttgtttatcactt

SEQ ID NO: 216910 - DNA, 25 bp, Probe sequence
gaaacctttcgataaactacacacg

SEQ ID NO: 216911 - DNA, 25 bp, Probe sequence
gaagaaacttaatcaagctagcatc

SEQ ID NO: 216912 - DNA, 25 bp, Probe sequence
gaaagatgtgtatcaggacctctgg

SEQ ID NO: 216913 - DNA, 25 bp, Probe sequence
gatatgctaaacactgccgtttgaa

SEQ ID NO: 216914 - DNA, 25 bp, Probe sequence
gttcatggattcgacaggggtcccc

SEQ ID NO: 216915 - DNA, 25 bp, Probe sequence
gttgtttatcacttttcatgatgcg

SEQ ID NO: 216916 - DNA, 25 bp, Probe sequence
gtcatcaacacacacagtttataat

SEQ ID NO: 216917 - DNA, 25 bp, Probe sequence
gtgctgttaacgcgattcaacctta

SEQ ID NO: 216918 - DNA, 25 bp, Probe sequence
ggttggcttcgtcatcaacacacac

SEQ ID NO: 216919 - DNA, 25 bp, Probe sequence
ggacgttcatggattcgacaggggt

SEQ ID NO: 216920 - DNA, 25 bp, Probe sequence
tggacgcgggttcaaatcccgccgt

SEQ ID NO: 216921 - DNA, 25 bp, Probe sequence
tgttggttgtttatcacttttcatg

SEQ ID NO: 216922 - DNA, 25 bp, Probe sequence
tcctatgtgctgttaacgcgattca

SEQ ID NO: 216923 - DNA, 25 bp, Probe sequence
taacgcgattcaaccttaataggat

SEQ ID NO: 216924 - DNA, 25 bp, Probe sequence
ttcgcagtagctgcctaatcgcact

SEQ ID NO: 216925 - DNA, 25 bp, Probe sequence
aacgttttggcgcatttggagagtc

SEQ ID NO: 216926 - DNA, 25 bp, Probe sequence
atattggattggatgcggctgtagc

SEQ ID NO: 216927 - DNA, 25 bp, Probe sequence
atgtgattgatgtaggttggccagc

SEQ ID NO: 216928 - DNA, 25 bp, Probe sequence
aggtttaatgccagtttcagagtct

SEQ ID NO: 216929 - DNA, 25 bp, Probe sequence
agggccagcagcacaagcgatggtt

SEQ ID NO: 216930 - DNA, 25 bp, Probe sequence
agatgctgatcctgaaacaattcaa

SEQ ID NO: 216931 - DNA, 25 bp, Probe sequence
aaaatttaggcgtcagtctgaatgt

SEQ ID NO: 216932 - DNA, 25 bp, Probe sequence
gcggctgtagcattaggtcatccag

SEQ ID NO: 216933 - DNA, 25 bp, Probe sequence
gcagcaatggtttatgccgtatcag

SEQ ID NO: 216934 - DNA, 25 bp, Probe sequence
gaaacattattcattctgtcattgt

SEQ ID NO: 216935 - DNA, 25 bp, Probe sequence
gacagcattaattttagtacctatc

SEQ ID NO: 216936 - DNA, 25 bp, Probe sequence
gagtgagttctttgatttaccaggt

SEQ ID NO: 216937 - DNA, 25 bp, Probe sequence
gagtctgcaagaacatggctaaata

SEQ ID NO: 216938 - DNA, 25 bp, Probe sequence
gtacccggtctgaataagttagatg

SEQ ID NO: 216939 - DNA, 25 bp, Probe sequence
gttacaaacctggagacatcattaa

SEQ ID NO: 216940 - DNA, 25 bp, Probe sequence
gtagcagattggacagcaccgatga

SEQ ID NO: 216941 - DNA, 25 bp, Probe sequence
gtacctatcactgttttattagccg

SEQ ID NO: 216942 - DNA, 25 bp, Probe sequence
gtaatatcgttaactatcttatctt

SEQ ID NO: 216943 - DNA, 25 bp, Probe sequence
gtcgcgtttattgttggtgcagcaa

SEQ ID NO: 216944 - DNA, 25 bp, Probe sequence
ggtgtggcttttgtagggattttct

SEQ ID NO: 216945 - DNA, 25 bp, Probe sequence
gggattttcttagtcatcgatttat

SEQ ID NO: 216946 - DNA, 25 bp, Probe sequence
ggtattggtgtgttagcaggttaca

SEQ ID NO: 216947 - DNA, 25 bp, Probe sequence
ggttggccagcaacatcatctatcg

SEQ ID NO: 216948 - DNA, 25 bp, Probe sequence
ggcaagcgttattagcagcagttat

SEQ ID NO: 216949 - DNA, 25 bp, Probe sequence
ggcatcatctgtcgcagcatttatt

SEQ ID NO: 216950 - DNA, 25 bp, Probe sequence
tggagcggcatttaggtctggttta

SEQ ID NO: 216951 - DNA, 25 bp, Probe sequence
taccatttgttgtcgcgtttattgt

SEQ ID NO: 216952 - DNA, 25 bp, Probe sequence
taggtgcaactgttattttaccggt

SEQ ID NO: 216953 - DNA, 25 bp, Probe sequence
taggaatgtcaatggctgcagtaat

SEQ ID NO: 216954 - DNA, 25 bp, Probe sequence
tatgcaccaggtatttacttagtta

SEQ ID NO: 216955 - DNA, 25 bp, Probe sequence
tatcaggcagtatttggcaagcgtt

SEQ ID NO: 216956 - DNA, 25 bp, Probe sequence
tattcttgcttggcctattctttag

SEQ ID NO: 216957 - DNA, 25 bp, Probe sequence
tttaccggttgtcatattcttgctt

SEQ ID NO: 216958 - DNA, 25 bp, Probe sequence
ttggcattatacgtttacagcagca

SEQ ID NO: 216959 - DNA, 25 bp, Probe sequence
attatgcaggaatttgtggcacaga

SEQ ID NO: 216960 - DNA, 25 bp, Probe sequence
ataacagttgttggtagtagaagtc

SEQ ID NO: 216961 - DNA, 25 bp, Probe sequence
atcatggcgtttctaagattcaagt

SEQ ID NO: 216962 - DNA, 25 bp, Probe sequence
atgtgcacatcatggcgtttctaag

SEQ ID NO: 216963 - DNA, 25 bp, Probe sequence
aggacatggcaacttagaacttctt

SEQ ID NO: 216964 - DNA, 25 bp, Probe sequence
acttaagccgctcgatttagatgaa

SEQ ID NO: 216965 - DNA, 25 bp, Probe sequence
aaatgctgaagctttggtgacaaaa

SEQ ID NO: 216966 - DNA, 25 bp, Probe sequence
aaagtaaaggcgcaactgttgtggt

SEQ ID NO: 216967 - DNA, 25 bp, Probe sequence
aataggtatttttaaggatgctgaa

SEQ ID NO: 216968 - DNA, 25 bp, Probe sequence
cagttccagcagcacgacaaggttt

SEQ ID NO: 216969 - DNA, 25 bp, Probe sequence
gcagattgggaaccttcattgcaac

SEQ ID NO: 216970 - DNA, 25 bp, Probe sequence
gcagaagcattgcacatggattatg

SEQ ID NO: 216971 - DNA, 25 bp, Probe sequence
gcaacttatggcggatggtttagta

SEQ ID NO: 216972 - DNA, 25 bp, Probe sequence
gaatgttcaggtgcagttccagcag

SEQ ID NO: 216973 - DNA, 25 bp, Probe sequence
gaaccttcattgcaacttatggcgg

SEQ ID NO: 216974 - DNA, 25 bp, Probe sequence
gaagttgcaacaccgctagatgata

SEQ ID NO: 216975 - DNA, 25 bp, Probe sequence
gaagaaagtttgcatcatattccag

SEQ ID NO: 216976 - DNA, 25 bp, Probe sequence
gacattaggtcatgaattttctggt

SEQ ID NO: 216977 - DNA, 25 bp, Probe sequence
gtaatgggacctgggccaatcggat

SEQ ID NO: 216978 - DNA, 25 bp, Probe sequence
gacagaaccattagcatgtgcacat

SEQ ID NO: 216979 - DNA, 25 bp, Probe sequence
gactataatttatgcaaccatcgaa

SEQ ID NO: 216980 - DNA, 25 bp, Probe sequence
gattttaaagttggtgaccgtgtca

SEQ ID NO: 216981 - DNA, 25 bp, Probe sequence
gttggagcagacgttaaagatttta

SEQ ID NO: 216982 - DNA, 25 bp, Probe sequence
gttaattttccagtgacattaggtc

SEQ ID NO: 216983 - DNA, 25 bp, Probe sequence
gggacgaggcgtatcaacatttaaa

SEQ ID NO: 216984 - DNA, 25 bp, Probe sequence
ggtgaaatcgttgaagttggagcag

SEQ ID NO: 216985 - DNA, 25 bp, Probe sequence
ggtattggaacacaagttgatggcg

SEQ ID NO: 216986 - DNA, 25 bp, Probe sequence
ggcgcaactgttgtggtaactggat

SEQ ID NO: 216987 - DNA, 25 bp, Probe sequence
ggcgatgtagcagttgtaatgggac

SEQ ID NO: 216988 - DNA, 25 bp, Probe sequence
ggccaatcggattacttgtagcaca

SEQ ID NO: 216989 - DNA, 25 bp, Probe sequence
tcgtatcagtctgcagctatgacag

SEQ ID NO: 216990 - DNA, 25 bp, Probe sequence
tacggtgcagatgttgttgttgaat

SEQ ID NO: 216991 - DNA, 25 bp, Probe sequence
tacgcaaaaaaggtttctacagtca

SEQ ID NO: 216992 - DNA, 25 bp, Probe sequence
ttactaattatgtcattgcacgtga

SEQ ID NO: 216993 - DNA, 25 bp, Probe sequence
attggctcatatgaacctggatcgt

SEQ ID NO: 216994 - DNA, 25 bp, Probe sequence
attgccagcgcaaaatgttttaaag

SEQ ID NO: 216995 - DNA, 25 bp, Probe sequence
attactcggaataccatatgatgat

SEQ ID NO: 216996 - DNA, 25 bp, Probe sequence
atatgtggttcagacacgtcacgat

SEQ ID NO: 216997 - DNA, 25 bp, Probe sequence
ataccttgttatcaatgcgagtatt

SEQ ID NO: 216998 - DNA, 25 bp, Probe sequence
acctggatcgttcgcggaatatgtc

SEQ ID NO: 216999 - DNA, 25 bp, Probe sequence
aaattctgcgtaacgagttgacagt

SEQ ID NO: 217000 - DNA, 25 bp, Probe sequence
aaatcattacgccaatcaaatcgat

SEQ ID NO: 217001 - DNA, 25 bp, Probe sequence
aaagccagtcattgaaagtgcgaat

SEQ ID NO: 217002 - DNA, 25 bp, Probe sequence
aagagtggacggcaaccttacatta

SEQ ID NO: 217003 - DNA, 25 bp, Probe sequence
aatgggcacgaatatttggtgctgc

SEQ ID NO: 217004 - DNA, 25 bp, Probe sequence
aatgtaaagcctattatttctcatt

SEQ ID NO: 217005 - DNA, 25 bp, Probe sequence
aattcatcgaaaatcattacgccaa

SEQ ID NO: 217006 - DNA, 25 bp, Probe sequence
gcgacaaagtgacaggttgcccagc

SEQ ID NO: 217007 - DNA, 25 bp, Probe sequence
ccatcagccgttgttgcgcatgggt

SEQ ID NO: 217008 - DNA, 25 bp, Probe sequence
gcagtaatggggtgtggcagtatag

SEQ ID NO: 217009 - DNA, 25 bp, Probe sequence
gcagcaatggttgagccatcagccg

SEQ ID NO: 217010 - DNA, 25 bp, Probe sequence
gaatcatcaggtgctaaagttacga

SEQ ID NO: 217011 - DNA, 25 bp, Probe sequence
gaagtgatgttacgcatgttaatgt

SEQ ID NO: 217012 - DNA, 25 bp, Probe sequence
gaactgtttgtccagtaattttccg

SEQ ID NO: 217013 - DNA, 25 bp, Probe sequence
gactgttgcagtaatggggtgtggc

SEQ ID NO: 217014 - DNA, 25 bp, Probe sequence
gagattgatcgcgttcattttgaaa

SEQ ID NO: 217015 - DNA, 25 bp, Probe sequence
gatgccattggaagtgatgttacgc

SEQ ID NO: 217016 - DNA, 25 bp, Probe sequence
gttgacagtatgtggctcttggaac

SEQ ID NO: 217017 - DNA, 25 bp, Probe sequence
gttgcgcatgggttttataaatcga

SEQ ID NO: 217018 - DNA, 25 bp, Probe sequence
gtatgccatttggtcatgaattttc

SEQ ID NO: 217019 - DNA, 25 bp, Probe sequence
gtggctcttggaactgtttgtccag

SEQ ID NO: 217020 - DNA, 25 bp, Probe sequence
ggtggcgaggtggtattactcggaa

SEQ ID NO: 217021 - DNA, 25 bp, Probe sequence
ggttcagacacgtcacgatacaaaa

SEQ ID NO: 217022 - DNA, 25 bp, Probe sequence
ggacggcaaccttacattatatgaa

SEQ ID NO: 217023 - DNA, 25 bp, Probe sequence
ggaatatgtcaaattgccagcgcaa

SEQ ID NO: 217024 - DNA, 25 bp, Probe sequence
tcaaatattgacgctacctaaaaaa

SEQ ID NO: 217025 - DNA, 25 bp, Probe sequence
tacaacctggtatgactgttgcagt

SEQ ID NO: 217026 - DNA, 25 bp, Probe sequence
ttgttagctattcaatgggcacgaa

SEQ ID NO: 217027 - DNA, 25 bp, Probe sequence
atacaacattaaagtgacaacaccg

SEQ ID NO: 217028 - DNA, 25 bp, Probe sequence
ataacattacagatcaacgtgtcaa

SEQ ID NO: 217029 - DNA, 25 bp, Probe sequence
atgagattattatcgcaacgccagc

SEQ ID NO: 217030 - DNA, 25 bp, Probe sequence
agcaaatgccattattcaaggtgat

SEQ ID NO: 217031 - DNA, 25 bp, Probe sequence
actcatgatgccgtaagaccatttt

SEQ ID NO: 217032 - DNA, 25 bp, Probe sequence
acagtatccctgtaaggaatgaaat

SEQ ID NO: 217033 - DNA, 25 bp, Probe sequence
aaacagaacatacacagtatccctg

SEQ ID NO: 217034 - DNA, 25 bp, Probe sequence
aacaccacaatcatttaatattaaa

SEQ ID NO: 217035 - DNA, 25 bp, Probe sequence
aacgtgtcaaagtagttgcaggtgg

SEQ ID NO: 217036 - DNA, 25 bp, Probe sequence
aagaaatcttatcagatgcatgtaa

SEQ ID NO: 217037 - DNA, 25 bp, Probe sequence
aagtgacaacaccgtatgatttaaa

SEQ ID NO: 217038 - DNA, 25 bp, Probe sequence
caaggccaaacaccacaatcattta

SEQ ID NO: 217039 - DNA, 25 bp, Probe sequence
gccattattcaaggtgatattgccg

SEQ ID NO: 217040 - DNA, 25 bp, Probe sequence
gcagtagatacagtcattgaagcaa

SEQ ID NO: 217041 - DNA, 25 bp, Probe sequence
gcaattgatacgattgtaatgtcta

SEQ ID NO: 217042 - DNA, 25 bp, Probe sequence
gaacatacacagtatccctgtaagg

SEQ ID NO: 217043 - DNA, 25 bp, Probe sequence
gaaatgtatcaaggccaaacaccac

SEQ ID NO: 217044 - DNA, 25 bp, Probe sequence
gagattattatcgcaacgccagcac

SEQ ID NO: 217045 - DNA, 25 bp, Probe sequence
gatgtgattgtaactcatgatgccg

SEQ ID NO: 217046 - DNA, 25 bp, Probe sequence
gatgccgtaagaccatttttaactc

SEQ ID NO: 217047 - DNA, 25 bp, Probe sequence
gatacgattgtaatgtctaaagata

SEQ ID NO: 217048 - DNA, 25 bp, Probe sequence
gtatcaaggccaaacaccacaatca

SEQ ID NO: 217049 - DNA, 25 bp, Probe sequence
gtaactcatgatgccgtaagaccat

SEQ ID NO: 217050 - DNA, 25 bp, Probe sequence
gtgccattaccaaaacaatttttag

SEQ ID NO: 217051 - DNA, 25 bp, Probe sequence
gtgattgtaactcatgatgccgtaa

SEQ ID NO: 217052 - DNA, 25 bp, Probe sequence
ggccaaacaccacaatcatttaata

SEQ ID NO: 217053 - DNA, 25 bp, Probe sequence
tgccgtaagaccatttttaactcaa

SEQ ID NO: 217054 - DNA, 25 bp, Probe sequence
tcgcaacgccagcacagtggatttc

SEQ ID NO: 217055 - DNA, 25 bp, Probe sequence
taagaccatttttaactcaacgtat

SEQ ID NO: 217056 - DNA, 25 bp, Probe sequence
tagttgcaggtggtacggatcgaaa

SEQ ID NO: 217057 - DNA, 25 bp, Probe sequence
ttattatcgcaacgccagcacagtg

SEQ ID NO: 217058 - DNA, 25 bp, Probe sequence
ttatcgcaacgccagcacagtggat

SEQ ID NO: 217059 - DNA, 25 bp, Probe sequence
ttcaaggtgatattgccgatgatta

SEQ ID NO: 217060 - DNA, 25 bp, Probe sequence
ttgagaagttcattttagtgagtga

SEQ ID NO: 217061 - DNA, 25 bp, Probe sequence
cgtccacgtcgtgtaggttggtttg

SEQ ID NO: 217062 - DNA, 25 bp, Probe sequence
attttaccatatcacttagcacaag

SEQ ID NO: 217063 - DNA, 25 bp, Probe sequence
atgcaggccataccattcaatttgg

SEQ ID NO: 217064 - DNA, 25 bp, Probe sequence
acgtcactctcgtcgtgtaagtggt

SEQ ID NO: 217065 - DNA, 25 bp, Probe sequence
acggatttcttggcagaacagtcag

SEQ ID NO: 217066 - DNA, 25 bp, Probe sequence
aaagcttatacatcacgtgttggtg

SEQ ID NO: 217067 - DNA, 25 bp, Probe sequence
aaggtacttttcgaaggtgcgcaag

SEQ ID NO: 217068 - DNA, 25 bp, Probe sequence
aagtaatccaattgcaggtaacgtt

SEQ ID NO: 217069 - DNA, 25 bp, Probe sequence
aaggtatcggtccagcatatgtaga

SEQ ID NO: 217070 - DNA, 25 bp, Probe sequence
aatttctatcttctcagttggtcca

SEQ ID NO: 217071 - DNA, 25 bp, Probe sequence
gcaggtaacgttactgttggtacag

SEQ ID NO: 217072 - DNA, 25 bp, Probe sequence
gaacgtggcattcctacaagtaatt

SEQ ID NO: 217073 - DNA, 25 bp, Probe sequence
gaacagtcagatgttatcgcgcgtt

SEQ ID NO: 217074 - DNA, 25 bp, Probe sequence
gacaaagttcaacgtatcggtattc

SEQ ID NO: 217075 - DNA, 25 bp, Probe sequence
gaaattactgagtacccagcaaact

SEQ ID NO: 217076 - DNA, 25 bp, Probe sequence
gttggtacaggtgtaggtcctacat

SEQ ID NO: 217077 - DNA, 25 bp, Probe sequence
gttggtcgtgaatacggtacaacaa

SEQ ID NO: 217078 - DNA, 25 bp, Probe sequence
gttgggacacaatggggagacgaag

SEQ ID NO: 217079 - DNA, 25 bp, Probe sequence
gttgatccagttgcactattgaaag

SEQ ID NO: 217080 - DNA, 25 bp, Probe sequence
gttagatatcgaccatggtacatat

SEQ ID NO: 217081 - DNA, 25 bp, Probe sequence
gttttaacaggcctagacacagtga

SEQ ID NO: 217082 - DNA, 25 bp, Probe sequence
gtatcggtattcgtatggcagattt

SEQ ID NO: 217083 - DNA, 25 bp, Probe sequence
gtaccatctggtatcttttacaaag

SEQ ID NO: 217084 - DNA, 25 bp, Probe sequence
gtacccagcaaacttagatcaatta

SEQ ID NO: 217085 - DNA, 25 bp, Probe sequence
gtcatcaatcgtagtagttgggaca

SEQ ID NO: 217086 - DNA, 25 bp, Probe sequence
gtgttggtgatggtccattccctac

SEQ ID NO: 217087 - DNA, 25 bp, Probe sequence
ggtgcgcaaggtgtaatgttagata

SEQ ID NO: 217088 - DNA, 25 bp, Probe sequence
ggtccattccctactgaattattcg

SEQ ID NO: 217089 - DNA, 25 bp, Probe sequence
ggtacaacaacaggacgtccacgtc

SEQ ID NO: 217090 - DNA, 25 bp, Probe sequence
ggtacatatccattcgttacatcaa

SEQ ID NO: 217091 - DNA, 25 bp, Probe sequence
tcgtgcgcaagtgattttaccatat

SEQ ID NO: 217092 - DNA, 25 bp, Probe sequence
tcagttgtattacgtcactctcgtc

SEQ ID NO: 217093 - DNA, 25 bp, Probe sequence
tatcgcgcgtttttcaggtggtaat

SEQ ID NO: 217094 - DNA, 25 bp, Probe sequence
tttacgtatatctaatcgtgcgcaa

SEQ ID NO: 217095 - DNA, 25 bp, Probe sequence
attaagtcatttttcatttgtagat

SEQ ID NO: 217096 - DNA, 25 bp, Probe sequence
atacttgtctatttgtgcagctgat

SEQ ID NO: 217097 - DNA, 25 bp, Probe sequence
atcatgcatttgaatgtgttggagg

SEQ ID NO: 217098 - DNA, 25 bp, Probe sequence
atgaagctgttggtgaagttgtatt

SEQ ID NO: 217099 - DNA, 25 bp, Probe sequence
atgatggttttatgcaagactacgt

SEQ ID NO: 217100 - DNA, 25 bp, Probe sequence
aggcagtattgctttgttaggcgta

SEQ ID NO: 217101 - DNA, 25 bp, Probe sequence
acagttcgacgtcacatataataat

SEQ ID NO: 217102 - DNA, 25 bp, Probe sequence
aatcaagtatatcaactcgttgcac

SEQ ID NO: 217103 - DNA, 25 bp, Probe sequence
gcaccgagacagttcgacgtcacat

SEQ ID NO: 217104 - DNA, 25 bp, Probe sequence
gcaagactacgttgtgatggcacat

SEQ ID NO: 217105 - DNA, 25 bp, Probe sequence
gaacatatttcaccagaaggcagta

SEQ ID NO: 217106 - DNA, 25 bp, Probe sequence
gaaatggatttatcgacatcttggg

SEQ ID NO: 217107 - DNA, 25 bp, Probe sequence
gagcaagttgttgatttatatcgta

SEQ ID NO: 217108 - DNA, 25 bp, Probe sequence
gatggcacatgatcgtatcgttccg

SEQ ID NO: 217109 - DNA, 25 bp, Probe sequence
gatgcaagatatcgtccaagcgttt

SEQ ID NO: 217110 - DNA, 25 bp, Probe sequence
gatatcgtccaagcgtttgaaatgg

SEQ ID NO: 217111 - DNA, 25 bp, Probe sequence
gatttgagtacgatttcatacacag

SEQ ID NO: 217112 - DNA, 25 bp, Probe sequence
gatttatatcgtaagtacccagaca

SEQ ID NO: 217113 - DNA, 25 bp, Probe sequence
gttaggcgtaagtgaattacccgtg

SEQ ID NO: 217114 - DNA, 25 bp, Probe sequence
gtcgaagcggctctaaagattttga

SEQ ID NO: 217115 - DNA, 25 bp, Probe sequence
gttagtgtcagtaagttatcatgct

SEQ ID NO: 217116 - DNA, 25 bp, Probe sequence
gttatcatgctatacaacgatttga

SEQ ID NO: 217117 - DNA, 25 bp, Probe sequence
gtacgatttcatacacagagttagt

SEQ ID NO: 217118 - DNA, 25 bp, Probe sequence
gtgaattacccgtggaagtgaatac

SEQ ID NO: 217119 - DNA, 25 bp, Probe sequence
gtgaatacacgattagtacttgaaa

SEQ ID NO: 217120 - DNA, 25 bp, Probe sequence
ggatttatcgacatcttggggaaaa

SEQ ID NO: 217121 - DNA, 25 bp, Probe sequence
ggtattacacaggtcgaagagatga

SEQ ID NO: 217122 - DNA, 25 bp, Probe sequence
ggaagtcaagttgcacttcaacaaa

SEQ ID NO: 217123 - DNA, 25 bp, Probe sequence
tggtagtagtcgaagcggctctaaa

SEQ ID NO: 217124 - DNA, 25 bp, Probe sequence
ttgaacgtaaatctatacctttgaa

SEQ ID NO: 217125 - DNA, 25 bp, Probe sequence
tcaactcgttgcaccgagacagttc

SEQ ID NO: 217126 - DNA, 25 bp, Probe sequence
tgcagctgatcaaaggtattacaca

SEQ ID NO: 217127 - DNA, 25 bp, Probe sequence
tctagtggttatgatggttttatgc

SEQ ID NO: 217128 - DNA, 25 bp, Probe sequence
taggttatattactgctattttgct

SEQ ID NO: 217129 - DNA, 25 bp, Probe sequence
attgatcaagcttatgcggcattaa

SEQ ID NO: 217130 - DNA, 25 bp, Probe sequence
atttatttgtttatcatgaccagtt

SEQ ID NO: 217131 - DNA, 25 bp, Probe sequence
atcaccttacctcaagagaaatcag

SEQ ID NO: 217132 - DNA, 25 bp, Probe sequence
agagaaatcaggggtcattgcgaca

SEQ ID NO: 217133 - DNA, 25 bp, Probe sequence
acaatactttatcgatgtgtcagat

SEQ ID NO: 217134 - DNA, 25 bp, Probe sequence
aaatatcaagatggtcgctcaagtg

SEQ ID NO: 217135 - DNA, 25 bp, Probe sequence
aaagttattctattcgcaccgacat

SEQ ID NO: 217136 - DNA, 25 bp, Probe sequence
aaacaatattattcacatcagattc

SEQ ID NO: 217137 - DNA, 25 bp, Probe sequence
aaccgatattccattttatgctgaa

SEQ ID NO: 217138 - DNA, 25 bp, Probe sequence
aagaaattattcaagtgtggcatgc

SEQ ID NO: 217139 - DNA, 25 bp, Probe sequence
aaggtggcgtatcacaacatacggt

SEQ ID NO: 217140 - DNA, 25 bp, Probe sequence
ccatccattaatttatacggttcgc

SEQ ID NO: 217141 - DNA, 25 bp, Probe sequence
gaatacaatgagctgactacacaaa

SEQ ID NO: 217142 - DNA, 25 bp, Probe sequence
gaagcataatgcagttgtgttattc

SEQ ID NO: 217143 - DNA, 25 bp, Probe sequence
gaggtaatggtcacggtacggcaca

SEQ ID NO: 217144 - DNA, 25 bp, Probe sequence
gacgatgggtattatttaccaatgg

SEQ ID NO: 217145 - DNA, 25 bp, Probe sequence
gaccagttagagtatattggacaac

SEQ ID NO: 217146 - DNA, 25 bp, Probe sequence
gatgatttccatccattaatttata

SEQ ID NO: 217147 - DNA, 25 bp, Probe sequence
gatgcattaatggatgctttggaca

SEQ ID NO: 217148 - DNA, 25 bp, Probe sequence
gatgaagcttatgcaacacaaatta

SEQ ID NO: 217149 - DNA, 25 bp, Probe sequence
gttattcaaaatgcatccgttcgta

SEQ ID NO: 217150 - DNA, 25 bp, Probe sequence
gtatatgatgagttactacgccaaa

SEQ ID NO: 217151 - DNA, 25 bp, Probe sequence
gtaccaacaggtgtaccacgtactg

SEQ ID NO: 217152 - DNA, 25 bp, Probe sequence
gtgaagttaacgatattctctttgt

SEQ ID NO: 217153 - DNA, 25 bp, Probe sequence
gtgacgttaacgaatttgtatttga

SEQ ID NO: 217154 - DNA, 25 bp, Probe sequence
ggtcgctcaagtgaacgtttagtca

SEQ ID NO: 217155 - DNA, 25 bp, Probe sequence
ggtacggcacattatccatttttta

SEQ ID NO: 217156 - DNA, 25 bp, Probe sequence
tgcatccgttcgtaaaaaatagact

SEQ ID NO: 217157 - DNA, 25 bp, Probe sequence
tacgacgcgtgatttctatgaacca

SEQ ID NO: 217158 - DNA, 25 bp, Probe sequence
tatacggttcgctttagaccatcac

SEQ ID NO: 217159 - DNA, 25 bp, Probe sequence
tattctctttgttacagacttgttg

SEQ ID NO: 217160 - DNA, 25 bp, Probe sequence
tttcacgtgaacatagacaatactt

SEQ ID NO: 217161 - DNA, 25 bp, Probe sequence
ggttcgctttagaccatcacaagaa

SEQ ID NO: 217162 - DNA, 25 bp, Probe sequence
ttctattcgcaccgacatttagagg

SEQ ID NO: 217163 - DNA, 25 bp, Probe sequence
atatacgacttttaaattactatca

SEQ ID NO: 217164 - DNA, 25 bp, Probe sequence
atacttaactgaacatagcgatgcc

SEQ ID NO: 217165 - DNA, 25 bp, Probe sequence
atcagcgatgcgttagttaccgact

SEQ ID NO: 217166 - DNA, 25 bp, Probe sequence
atctagtgtcacctaatccatattc

SEQ ID NO: 217167 - DNA, 25 bp, Probe sequence
acaaatcgatgagactgcaaatgag

SEQ ID NO: 217168 - DNA, 25 bp, Probe sequence
aaaagagttgccaggtccaattgtt

SEQ ID NO: 217169 - DNA, 25 bp, Probe sequence
aatcaccgcgaacgacgtacttaca

SEQ ID NO: 217170 - DNA, 25 bp, Probe sequence
aatactcaaaattaccaagatggct

SEQ ID NO: 217171 - DNA, 25 bp, Probe sequence
caatgaaatggtttttagcgatgcc

SEQ ID NO: 217172 - DNA, 25 bp, Probe sequence
caaacagcactcattgatgcattaa

SEQ ID NO: 217173 - DNA, 25 bp, Probe sequence
cgccaacttggcgtgacgatgaagc

SEQ ID NO: 217174 - DNA, 25 bp, Probe sequence
gcgtcaagcgctggatgatgattat

SEQ ID NO: 217175 - DNA, 25 bp, Probe sequence
gcgtcacaacgaatttgccaaacga

SEQ ID NO: 217176 - DNA, 25 bp, Probe sequence
gaatttgccaaacgatttttaagtg

SEQ ID NO: 217177 - DNA, 25 bp, Probe sequence
gaagcacgaacggtattttatcaaa

SEQ ID NO: 217178 - DNA, 25 bp, Probe sequence
gaagctttgcgtcaagcgctggatg

SEQ ID NO: 217179 - DNA, 25 bp, Probe sequence
gaagcgattcgagaaggttcatatc

SEQ ID NO: 217180 - DNA, 25 bp, Probe sequence
gaacatagcgatgcccaattaatat

SEQ ID NO: 217181 - DNA, 25 bp, Probe sequence
gaaagctttcatggtaaacaataca

SEQ ID NO: 217182 - DNA, 25 bp, Probe sequence
gacttcggtgtattaaagcgtccgc

SEQ ID NO: 217183 - DNA, 25 bp, Probe sequence
gacgtacttacaaacatggcatggc

SEQ ID NO: 217184 - DNA, 25 bp, Probe sequence
gttaccgactactcatctgtcatgt

SEQ ID NO: 217185 - DNA, 25 bp, Probe sequence
gtaccatatgttacaaagttttcaa

SEQ ID NO: 217186 - DNA, 25 bp, Probe sequence
ggatgattaacacacgtacaccaga

SEQ ID NO: 217187 - DNA, 25 bp, Probe sequence
ggcgatgagcttagaggtttttaca

SEQ ID NO: 217188 - DNA, 25 bp, Probe sequence
ggcgtgacgatgaagcgattcgaga

SEQ ID NO: 217189 - DNA, 25 bp, Probe sequence
tcatctgtcatgttcgacttcggtg

SEQ ID NO: 217190 - DNA, 25 bp, Probe sequence
taaagcgtccgcaaattttctatgc

SEQ ID NO: 217191 - DNA, 25 bp, Probe sequence
tacaaacatggcatggcacgccatt

SEQ ID NO: 217192 - DNA, 25 bp, Probe sequence
tacgcatgcattatttagttgtgac

SEQ ID NO: 217193 - DNA, 25 bp, Probe sequence
tagcgatgccaagagcgaaagcgtg

SEQ ID NO: 217194 - DNA, 25 bp, Probe sequence
tagttgtgacacgtattgatgaaca

SEQ ID NO: 217195 - DNA, 25 bp, Probe sequence
ttaacacacgtacaccagattggtt

SEQ ID NO: 217196 - DNA, 25 bp, Probe sequence
ttcggatttatacttaatcagcgat

SEQ ID NO: 217197 - DNA, 25 bp, Probe sequence
atgctattattcgaggtggtattgc

SEQ ID NO: 217198 - DNA, 25 bp, Probe sequence
atgacgcatacgaaagatacactta

SEQ ID NO: 217199 - DNA, 25 bp, Probe sequence
aggtcaaacacctcaatcgtttaat

SEQ ID NO: 217200 - DNA, 25 bp, Probe sequence
aaggtggtagcgatcgtaacgatac

SEQ ID NO: 217201 - DNA, 25 bp, Probe sequence
acacctcaatcgtttaatattaatt

SEQ ID NO: 217202 - DNA, 25 bp, Probe sequence
aaagaaagctatgcacagttgagtg

SEQ ID NO: 217203 - DNA, 25 bp, Probe sequence
aacgattgatgcaattccagtgcgt

SEQ ID NO: 217204 - DNA, 25 bp, Probe sequence
aaccgattttaatccatacattaga

SEQ ID NO: 217205 - DNA, 25 bp, Probe sequence
aagaaaatattcaagctgctttaga

SEQ ID NO: 217206 - DNA, 25 bp, Probe sequence
aagagtattttatctgatgcttgta

SEQ ID NO: 217207 - DNA, 25 bp, Probe sequence
aatggtattaacgatgacgatgtca

SEQ ID NO: 217208 - DNA, 25 bp, Probe sequence
aatacgctggtattctagctggagg

SEQ ID NO: 217209 - DNA, 25 bp, Probe sequence
cattaaagtaacaacaccttacgat

SEQ ID NO: 217210 - DNA, 25 bp, Probe sequence
cgatgacgatgtcattgtgacacat

SEQ ID NO: 217211 - DNA, 25 bp, Probe sequence
cgctggtattctagctggaggtata

SEQ ID NO: 217212 - DNA, 25 bp, Probe sequence
gctatgcacagttgagtgatgagca

SEQ ID NO: 217213 - DNA, 25 bp, Probe sequence
gcagtagatacagtgattgatgcta

SEQ ID NO: 217214 - DNA, 25 bp, Probe sequence
gaagtcattcaaggtggtagcgatc

SEQ ID NO: 217215 - DNA, 25 bp, Probe sequence
gaaaaaattattatcgcgacgccac

SEQ ID NO: 217216 - DNA, 25 bp, Probe sequence
gacacatgatgcagttagaccattt

SEQ ID NO: 217217 - DNA, 25 bp, Probe sequence
gacgccacaacaatggatgacgcat

SEQ ID NO: 217218 - DNA, 25 bp, Probe sequence
gatgcaattccagtgcgtaatgaaa

SEQ ID NO: 217219 - DNA, 25 bp, Probe sequence
gatgcttgtaagattattgtagaaa

SEQ ID NO: 217220 - DNA, 25 bp, Probe sequence
gatacgattgttacatctaaagata

SEQ ID NO: 217221 - DNA, 25 bp, Probe sequence
gattgatgctatagatacgattgtt

SEQ ID NO: 217222 - DNA, 25 bp, Probe sequence
gttcgacttgtaaaaggtgagttat

SEQ ID NO: 217223 - DNA, 25 bp, Probe sequence
gtaccaaggtcaaacacctcaatcg

SEQ ID NO: 217224 - DNA, 25 bp, Probe sequence
gtgcgtaatgaaatgtaccaaggtc

SEQ ID NO: 217225 - DNA, 25 bp, Probe sequence
ggctcaagaatgggtaacgtacctt

SEQ ID NO: 217226 - DNA, 25 bp, Probe sequence
tctagctggaggtataggctcaaga

SEQ ID NO: 217227 - DNA, 25 bp, Probe sequence
tagacaacaaaccgattttaatcca

SEQ ID NO: 217228 - DNA, 25 bp, Probe sequence
tagaccatttttaacgcatcgtatt

SEQ ID NO: 217229 - DNA, 25 bp, Probe sequence
ttatcgcgacgccacaacaatggat

SEQ ID NO: 217230 - DNA, 25 bp, Probe sequence
ttcgaggtggtattgccgatgatta

SEQ ID NO: 217231 - DNA, 25 bp, Probe sequence
atttcaccagaaggaagcattgcac

SEQ ID NO: 217232 - DNA, 25 bp, Probe sequence
aggtgttggtgaggtcgtatttgac

SEQ ID NO: 217233 - DNA, 25 bp, Probe sequence
agacttatacattcaatacccagat

SEQ ID NO: 217234 - DNA, 25 bp, Probe sequence
aactatttaaaatcgagctacttca

SEQ ID NO: 217235 - DNA, 25 bp, Probe sequence
aacttaggttacattacagccattt

SEQ ID NO: 217236 - DNA, 25 bp, Probe sequence
aagatttccaagatgttgtagactt

SEQ ID NO: 217237 - DNA, 25 bp, Probe sequence
gcacctagacaatttgaagttacgt

SEQ ID NO: 217238 - DNA, 25 bp, Probe sequence
gaatgtcttatctcagaaattgcca

SEQ ID NO: 217239 - DNA, 25 bp, Probe sequence
gaaggcttaacatttgatcatgcat

SEQ ID NO: 217240 - DNA, 25 bp, Probe sequence
gaaattgccaatgtctttaattcat

SEQ ID NO: 217241 - DNA, 25 bp, Probe sequence
gacgatgtcattgctgaaaactatt

SEQ ID NO: 217242 - DNA, 25 bp, Probe sequence
gagctacttcagatcaagtggacat

SEQ ID NO: 217243 - DNA, 25 bp, Probe sequence
gagcttgtaacagtaagtttgcatg

SEQ ID NO: 217244 - DNA, 25 bp, Probe sequence
gagttcccagtagaagttaatacac

SEQ ID NO: 217245 - DNA, 25 bp, Probe sequence
gagtcacttctcatttgttgatgat

SEQ ID NO: 217246 - DNA, 25 bp, Probe sequence
gatattatactggtagccgtgatga

SEQ ID NO: 217247 - DNA, 25 bp, Probe sequence
gttaggtgtaagtgagttcccagta

SEQ ID NO: 217248 - DNA, 25 bp, Probe sequence
gttgatgatgtcttctttattaata

SEQ ID NO: 217249 - DNA, 25 bp, Probe sequence
gttacattacagccattttattacg

SEQ ID NO: 217250 - DNA, 25 bp, Probe sequence
gtttgcatgctattcgtcgttttga

SEQ ID NO: 217251 - DNA, 25 bp, Probe sequence
gtatatcaattagttgcacctagac

SEQ ID NO: 217252 - DNA, 25 bp, Probe sequence
gtaccactacctgatgatattgatt

SEQ ID NO: 217253 - DNA, 25 bp, Probe sequence
gtacgtcctttatatatgtcaattt

SEQ ID NO: 217254 - DNA, 25 bp, Probe sequence
gtgctgccgatcaaagatattatac

SEQ ID NO: 217255 - DNA, 25 bp, Probe sequence
gtgactatgtcattgtacgtccttt

SEQ ID NO: 217256 - DNA, 25 bp, Probe sequence
gtggacatgatgggtttatgcaaga

SEQ ID NO: 217257 - DNA, 25 bp, Probe sequence
ggtagtagtcgaagtggttcaaaag

SEQ ID NO: 217258 - DNA, 25 bp, Probe sequence
ggtagccgtgatgagaatgtcttat

SEQ ID NO: 217259 - DNA, 25 bp, Probe sequence
ggaagcattgcactgttaggtgtaa

SEQ ID NO: 217260 - DNA, 25 bp, Probe sequence
tgatagagctgtaccactacctgat

SEQ ID NO: 217261 - DNA, 25 bp, Probe sequence
tgatcttacagaagcttttgaagca

SEQ ID NO: 217262 - DNA, 25 bp, Probe sequence
gagtctaaaatatatgtctttggta

SEQ ID NO: 217263 - DNA, 25 bp, Probe sequence
tatgtcaatttgtgctgccgatcaa

SEQ ID NO: 217264 - DNA, 25 bp, Probe sequence
ttacgtaaattatatccagagtcta

SEQ ID NO: 217265 - DNA, 25 bp, Probe sequence
cttgccgggaagtatacaactagac

SEQ ID NO: 217266 - DNA, 25 bp, Probe sequence
atttcgagtctagcaatcatttgtc

SEQ ID NO: 217267 - DNA, 25 bp, Probe sequence
atatgtattctttttagattctgat

SEQ ID NO: 217268 - DNA, 25 bp, Probe sequence
atagtggaaatgctagcgtacctag

SEQ ID NO: 217269 - DNA, 25 bp, Probe sequence
atcaatattttgctactataaacga

SEQ ID NO: 217270 - DNA, 25 bp, Probe sequence
atgagcaaagctgaatatgtattct

SEQ ID NO: 217271 - DNA, 25 bp, Probe sequence
atgtcacacaaatattcaacttaaa

SEQ ID NO: 217272 - DNA, 25 bp, Probe sequence
agtgttcctaaagctatatttgaga

SEQ ID NO: 217273 - DNA, 25 bp, Probe sequence
agattctgatgatttacttcacgaa

SEQ ID NO: 217274 - DNA, 25 bp, Probe sequence
acggcgaaaaattacatagaaccat

SEQ ID NO: 217275 - DNA, 25 bp, Probe sequence
actagacttttaagacacggtcaga

SEQ ID NO: 217276 - DNA, 25 bp, Probe sequence
aaaccgactatgaatactatattgt

SEQ ID NO: 217277 - DNA, 25 bp, Probe sequence
aaaacgatttattagctgtgatgat

SEQ ID NO: 217278 - DNA, 25 bp, Probe sequence
aagacaccaacttgccgggaagtat

SEQ ID NO: 217279 - DNA, 25 bp, Probe sequence
aataaagtacctagagactcagata

SEQ ID NO: 217280 - DNA, 25 bp, Probe sequence
aattactcgataaaaaccgactatg

SEQ ID NO: 217281 - DNA, 25 bp, Probe sequence
cattctctaaaactgctgaagacca

SEQ ID NO: 217282 - DNA, 25 bp, Probe sequence
gccaacattcaataacggcgaaaaa

SEQ ID NO: 217283 - DNA, 25 bp, Probe sequence
gctgaagaccaattatttactatag

SEQ ID NO: 217284 - DNA, 25 bp, Probe sequence
gaagagtactgattacgaattaatt

SEQ ID NO: 217285 - DNA, 25 bp, Probe sequence
gaagaagtgttcctaaagctatatt

SEQ ID NO: 217286 - DNA, 25 bp, Probe sequence
gaaccattagttctgtattaaatca

SEQ ID NO: 217287 - DNA, 25 bp, Probe sequence
gacaatggtgagactttgaatgtta

SEQ ID NO: 217288 - DNA, 25 bp, Probe sequence
gagactcagataaatatgtcacaca

SEQ ID NO: 217289 - DNA, 25 bp, Probe sequence
gagtctagcaatcatttgtcagtaa

SEQ ID NO: 217290 - DNA, 25 bp, Probe sequence
gatttacttcacgaaagagcactag

SEQ ID NO: 217291 - DNA, 25 bp, Probe sequence
gtagtcaacgatttcgagtctagca

SEQ ID NO: 217292 - DNA, 25 bp, Probe sequence
gtagcgaaagctgatattattgata

SEQ ID NO: 217293 - DNA, 25 bp, Probe sequence
gtacaggaaatcaatattttgctac

SEQ ID NO: 217294 - DNA, 25 bp, Probe sequence
gtaagtgttataatgccaacattca

SEQ ID NO: 217295 - DNA, 25 bp, Probe sequence
gtgatgattgcagataagctattat

SEQ ID NO: 217296 - DNA, 25 bp, Probe sequence
tagcgtacctagaaatacaggctta

SEQ ID NO: 217297 - DNA, 25 bp, Probe sequence
tattttttatgctttatcagtacta

SEQ ID NO: 217298 - DNA, 25 bp, Probe sequence
ttcaaaacattctctaaaactgctg

SEQ ID NO: 217299 - DNA, 25 bp, Probe sequence
ataatctaagaggcacggttaatct

SEQ ID NO: 217300 - DNA, 25 bp, Probe sequence
atgtattttgtcactaacctatcta

SEQ ID NO: 217301 - DNA, 25 bp, Probe sequence
agaggcacggttaatctagacgaaa

SEQ ID NO: 217302 - DNA, 25 bp, Probe sequence
accaaacactttacatgaacgatta

SEQ ID NO: 217303 - DNA, 25 bp, Probe sequence
acactttacatgaacgattatgaag

SEQ ID NO: 217304 - DNA, 25 bp, Probe sequence
aaatgtattttgtcactaacctatc

SEQ ID NO: 217305 - DNA, 25 bp, Probe sequence
aaaccaaacactttacatgaacgat

SEQ ID NO: 217306 - DNA, 25 bp, Probe sequence
aaaacttgttcttgaaaatgttgat

SEQ ID NO: 217307 - DNA, 25 bp, Probe sequence
aaaatgtattttgtcactaacctat

SEQ ID NO: 217308 - DNA, 25 bp, Probe sequence
aacactttacatgaacgattatgaa

SEQ ID NO: 217309 - DNA, 25 bp, Probe sequence
aatctaagaggcacggttaatctag

SEQ ID NO: 217310 - DNA, 25 bp, Probe sequence
aaccaaacactttacatgaacgatt

SEQ ID NO: 217311 - DNA, 25 bp, Probe sequence
aagaggcacggttaatctagacgaa

SEQ ID NO: 217312 - DNA, 25 bp, Probe sequence
aatgtattttgtcactaacctatct

SEQ ID NO: 217313 - DNA, 25 bp, Probe sequence
aataatctaagaggcacggttaatc

SEQ ID NO: 217314 - DNA, 25 bp, Probe sequence
cacggttaatctagacgaaaaatgt

SEQ ID NO: 217315 - DNA, 25 bp, Probe sequence
caaacactttacatgaacgattatg

SEQ ID NO: 217316 - DNA, 25 bp, Probe sequence
ctaagaggcacggttaatctagacg

SEQ ID NO: 217317 - DNA, 25 bp, Probe sequence
ccaaacactttacatgaacgattat

SEQ ID NO: 217318 - DNA, 25 bp, Probe sequence
gcacggttaatctagacgaaaaatg

SEQ ID NO: 217319 - DNA, 25 bp, Probe sequence
gaacgattatgaagttgctaaagtt

SEQ ID NO: 217320 - DNA, 25 bp, Probe sequence
gaggcacggttaatctagacgaaaa

SEQ ID NO: 217321 - DNA, 25 bp, Probe sequence
gattatgaagttgctaaagtttctg

SEQ ID NO: 217322 - DNA, 25 bp, Probe sequence
gtattttgtcactaacctatctata

SEQ ID NO: 217323 - DNA, 25 bp, Probe sequence
gtatacaaagattatgaattactta

SEQ ID NO: 217324 - DNA, 25 bp, Probe sequence
ggttaatctagacgaaaaatgtatt

SEQ ID NO: 217325 - DNA, 25 bp, Probe sequence
ggcacggttaatctagacgaaaaat

SEQ ID NO: 217326 - DNA, 25 bp, Probe sequence
taagaggcacggttaatctagacga

SEQ ID NO: 217327 - DNA, 25 bp, Probe sequence
tgtattttgtcactaacctatctat

SEQ ID NO: 217328 - DNA, 25 bp, Probe sequence
tctgaaaaacatctaaacgaaaata

SEQ ID NO: 217329 - DNA, 25 bp, Probe sequence
taatctaagaggcacggttaatcta

SEQ ID NO: 217330 - DNA, 25 bp, Probe sequence
tacatgaacgattatgaagttgcta

SEQ ID NO: 217331 - DNA, 25 bp, Probe sequence
tatgaagttgctaaagtttctgaaa

SEQ ID NO: 217332 - DNA, 25 bp, Probe sequence
tattttgtcactaacctatctataa

SEQ ID NO: 217333 - DNA, 25 bp, Probe sequence
attgtgcaatcatttgacgcattaa

SEQ ID NO: 217334 - DNA, 25 bp, Probe sequence
attttgttgacgtttctgactttag

SEQ ID NO: 217335 - DNA, 25 bp, Probe sequence
atattgcacagttaaacccagatgt

SEQ ID NO: 217336 - DNA, 25 bp, Probe sequence
atctttgttgatgactttcacccat

SEQ ID NO: 217337 - DNA, 25 bp, Probe sequence
atgaatttgtccttgatgttgttgt

SEQ ID NO: 217338 - DNA, 25 bp, Probe sequence
agggtggaccatttattgattcatt

SEQ ID NO: 217339 - DNA, 25 bp, Probe sequence
agacgtggcatcatcgacaagttta

SEQ ID NO: 217340 - DNA, 25 bp, Probe sequence
agaaagtcattcttttcgcaccaac

SEQ ID NO: 217341 - DNA, 25 bp, Probe sequence
agcttatgtatcatctgaaaccgat

SEQ ID NO: 217342 - DNA, 25 bp, Probe sequence
aaaaagtcattccattcttagataa

SEQ ID NO: 217343 - DNA, 25 bp, Probe sequence
aaccgatattccattctacgctgaa

SEQ ID NO: 217344 - DNA, 25 bp, Probe sequence
aagttattcaagtatggcatgccgt

SEQ ID NO: 217345 - DNA, 25 bp, Probe sequence
aatttcttattgcagacttacctaa

SEQ ID NO: 217346 - DNA, 25 bp, Probe sequence
catcagactctagaccaacgatgtc

SEQ ID NO: 217347 - DNA, 25 bp, Probe sequence
cattcttttcgcaccaacatttaga

SEQ ID NO: 217348 - DNA, 25 bp, Probe sequence
cggtttatactgttacacctgaaat

SEQ ID NO: 217349 - DNA, 25 bp, Probe sequence
gcatgccgttggtgcctttaaaaca

SEQ ID NO: 217350 - DNA, 25 bp, Probe sequence
gaagcttatgcgacacagatcaaac

SEQ ID NO: 217351 - DNA, 25 bp, Probe sequence
gactttcacccattgatttatacag

SEQ ID NO: 217352 - DNA, 25 bp, Probe sequence
gacgcattaatggacgccttggaca

SEQ ID NO: 217353 - DNA, 25 bp, Probe sequence
gaccaacgatgtctggaaactttga

SEQ ID NO: 217354 - DNA, 25 bp, Probe sequence
gaggtagtggtcatggtacagcaca

SEQ ID NO: 217355 - DNA, 25 bp, Probe sequence
gatgttgttgtaacgactccggaag

SEQ ID NO: 217356 - DNA, 25 bp, Probe sequence
gatattcacactgtttttaaagcga

SEQ ID NO: 217357 - DNA, 25 bp, Probe sequence
gtaagtatttccgcaaacaatcatt

SEQ ID NO: 217358 - DNA, 25 bp, Probe sequence
gtcgtttcaatgtagctatcttaga

SEQ ID NO: 217359 - DNA, 25 bp, Probe sequence
gggaatcaattcgtttgtcgtttca

SEQ ID NO: 217360 - DNA, 25 bp, Probe sequence
gggaaggcagactacatctttgttg

SEQ ID NO: 217361 - DNA, 25 bp, Probe sequence
tagtgcctacaggtgttccacgtac

SEQ ID NO: 217362 - DNA, 25 bp, Probe sequence
taatacgacgaaatttttccacttg

SEQ ID NO: 217363 - DNA, 25 bp, Probe sequence
tacagtgcgttttagacgttctcaa

SEQ ID NO: 217364 - DNA, 25 bp, Probe sequence
tacagcacattacccatttttcaaa

SEQ ID NO: 217365 - DNA, 25 bp, Probe sequence
tacacctgaaatttctagcgatgtt

SEQ ID NO: 217366 - DNA, 25 bp, Probe sequence
ttcattaaatcatcgtagctataca

SEQ ID NO: 217367 - DNA, 25 bp, Probe sequence
aggtcaatactaccgttttgatatt

SEQ ID NO: 217368 - DNA, 25 bp, Probe sequence
agtggttgtagttgatgactgttca

SEQ ID NO: 217369 - DNA, 25 bp, Probe sequence
agattaacaccgtatttcacaaaag

SEQ ID NO: 217370 - DNA, 25 bp, Probe sequence
agccttgcgaaacaagattttccga

SEQ ID NO: 217371 - DNA, 25 bp, Probe sequence
actcgaaacaaattctggtggtcca

SEQ ID NO: 217372 - DNA, 25 bp, Probe sequence
aacatttcgttatactttacagcta

SEQ ID NO: 217373 - DNA, 25 bp, Probe sequence
aaggcattgatatcgctaagccaaa

SEQ ID NO: 217374 - DNA, 25 bp, Probe sequence
aattacgaccattgttgcactacgc

SEQ ID NO: 217375 - DNA, 25 bp, Probe sequence
caatggattaatgctctaggagact

SEQ ID NO: 217376 - DNA, 25 bp, Probe sequence
cagttccagaacgtgtagatgcatt

SEQ ID NO: 217377 - DNA, 25 bp, Probe sequence
cattgttgcactacgcgagagcgaa

SEQ ID NO: 217378 - DNA, 25 bp, Probe sequence
cgtggtgtaccacaatctatgttta

SEQ ID NO: 217379 - DNA, 25 bp, Probe sequence
gaatttgtattatttgtggactccg

SEQ ID NO: 217380 - DNA, 25 bp, Probe sequence
gaatggcttctcacttaaagttaaa

SEQ ID NO: 217381 - DNA, 25 bp, Probe sequence
gaagcacacaatgtatgtaccttta

SEQ ID NO: 217382 - DNA, 25 bp, Probe sequence
gaaaggtgttaatggtcgtggtgta

SEQ ID NO: 217383 - DNA, 25 bp, Probe sequence
gaaacagcacctgaagttactttgt

SEQ ID NO: 217384 - DNA, 25 bp, Probe sequence
gactgttcaacagatcaaacgttac

SEQ ID NO: 217385 - DNA, 25 bp, Probe sequence
gagtagtgcgtatgtttcacctgaa

SEQ ID NO: 217386 - DNA, 25 bp, Probe sequence
gatgcagcagcatttattgatgaac

SEQ ID NO: 217387 - DNA, 25 bp, Probe sequence
gttaccgtcaaggtcaatactaccg

SEQ ID NO: 217388 - DNA, 25 bp, Probe sequence
gtaatagttccaacatacaattcag

SEQ ID NO: 217389 - DNA, 25 bp, Probe sequence
gtcagacttaaattacattcacgaa

SEQ ID NO: 217390 - DNA, 25 bp, Probe sequence
gtggactccgatgactatataaaca

SEQ ID NO: 217391 - DNA, 25 bp, Probe sequence
gggatgttttcttagaagtccaaat

SEQ ID NO: 217392 - DNA, 25 bp, Probe sequence
ggtctggatcgtggttatgtatttg

SEQ ID NO: 217393 - DNA, 25 bp, Probe sequence
ggagactttatacaagcagttccag

SEQ ID NO: 217394 - DNA, 25 bp, Probe sequence
ggaagtatttgaagtgcgtgttggt

SEQ ID NO: 217395 - DNA, 25 bp, Probe sequence
tgtacctttaagtgtcaatgcgaat

SEQ ID NO: 217396 - DNA, 25 bp, Probe sequence
tctggtggtccaggtaaacctagaa

SEQ ID NO: 217397 - DNA, 25 bp, Probe sequence
tcattttaactggtctggatcgtgg

SEQ ID NO: 217398 - DNA, 25 bp, Probe sequence
tacagctattacattaacggattca

SEQ ID NO: 217399 - DNA, 25 bp, Probe sequence
tttctcgtacgaatggcttctcact

SEQ ID NO: 217400 - DNA, 25 bp, Probe sequence
ttatctatactttaagcccgactaa

SEQ ID NO: 217401 - DNA, 25 bp, Probe sequence
ataaacgcaccaagatttcaaatca

SEQ ID NO: 217402 - DNA, 25 bp, Probe sequence
atgattatataaacgcaccaagatt

SEQ ID NO: 217403 - DNA, 25 bp, Probe sequence
aggtgacggtattgctacgtacggt

SEQ ID NO: 217404 - DNA, 25 bp, Probe sequence
agaaaaatcaagacgcttattatga

SEQ ID NO: 217405 - DNA, 25 bp, Probe sequence
actcgactttaaattgagacagtat

SEQ ID NO: 217406 - DNA, 25 bp, Probe sequence
acagtgttttcatatggtggtgtca

SEQ ID NO: 217407 - DNA, 25 bp, Probe sequence
aacgtcattgcatcaaactgtaaat

SEQ ID NO: 217408 - DNA, 25 bp, Probe sequence
aacgcaccaagatttcaaatcaaga

SEQ ID NO: 217409 - DNA, 25 bp, Probe sequence
aagaactcgactttaaattgagaca

SEQ ID NO: 217410 - DNA, 25 bp, Probe sequence
aatccgggattagacatatttgttg

SEQ ID NO: 217411 - DNA, 25 bp, Probe sequence
aataacgtcattgcatcaaactgta

SEQ ID NO: 217412 - DNA, 25 bp, Probe sequence
aattacaaacaaatcgcatgagtga

SEQ ID NO: 217413 - DNA, 25 bp, Probe sequence
cgtcattgcatcaaactgtaaatgc

SEQ ID NO: 217414 - DNA, 25 bp, Probe sequence
gctacgtacggtagagtacactaca

SEQ ID NO: 217415 - DNA, 25 bp, Probe sequence
gaaggtgacggtattgctacgtacg

SEQ ID NO: 217416 - DNA, 25 bp, Probe sequence
gaaaaaatagaagccaacattagat

SEQ ID NO: 217417 - DNA, 25 bp, Probe sequence
gacggtattgctacgtacggtagag

SEQ ID NO: 217418 - DNA, 25 bp, Probe sequence
gagagatgaaggtgacggtattgct

SEQ ID NO: 217419 - DNA, 25 bp, Probe sequence
gagatgaaggtgacggtattgctac

SEQ ID NO: 217420 - DNA, 25 bp, Probe sequence
gagtacactacatttataaagaaga

SEQ ID NO: 217421 - DNA, 25 bp, Probe sequence
gatatctttgacttaagagattact

SEQ ID NO: 217422 - DNA, 25 bp, Probe sequence
gttttcatatggtggtgtcactaag

SEQ ID NO: 217423 - DNA, 25 bp, Probe sequence
gtacggtagagtacactacatttat

SEQ ID NO: 217424 - DNA, 25 bp, Probe sequence
gtgacggtattgctacgtacggtag

SEQ ID NO: 217425 - DNA, 25 bp, Probe sequence
gtgttttcatatggtggtgtcacta

SEQ ID NO: 217426 - DNA, 25 bp, Probe sequence
gggattagacatatttgttgttaaa

SEQ ID NO: 217427 - DNA, 25 bp, Probe sequence
ggtattgctacgtacggtagagtac

SEQ ID NO: 217428 - DNA, 25 bp, Probe sequence
ggaacaataacgtcattgcatcaaa

SEQ ID NO: 217429 - DNA, 25 bp, Probe sequence
tggtggtgtcactaagaaaaatcaa

SEQ ID NO: 217430 - DNA, 25 bp, Probe sequence
tcaagacgcttattatgattatata

SEQ ID NO: 217431 - DNA, 25 bp, Probe sequence
taagagattactatagtggcgcaag

SEQ ID NO: 217432 - DNA, 25 bp, Probe sequence
tagcaacaggaacaataacgtcatt

SEQ ID NO: 217433 - DNA, 25 bp, Probe sequence
tttagcattaggtattttagcaaca

SEQ ID NO: 217434 - DNA, 25 bp, Probe sequence
ttaggtattttagcaacaggaacaa

SEQ ID NO: 217435 - DNA, 25 bp, Probe sequence
attttgttggcttgcttggtaaaga

SEQ ID NO: 217436 - DNA, 25 bp, Probe sequence
attattttgttggcttgcttggtaa

SEQ ID NO: 217437 - DNA, 25 bp, Probe sequence
agattattttgttggcttgcttggt

SEQ ID NO: 217438 - DNA, 25 bp, Probe sequence
aaagattattttgttggcttgcttg

SEQ ID NO: 217439 - DNA, 25 bp, Probe sequence
aaaataccctcaaggtgagcatgat

SEQ ID NO: 217440 - DNA, 25 bp, Probe sequence
aactgttaatggaagacaatattca

SEQ ID NO: 217441 - DNA, 25 bp, Probe sequence
aagaaaaattatatggtgctgttaa

SEQ ID NO: 217442 - DNA, 25 bp, Probe sequence
aaggagtatatgtttggaaggatcg

SEQ ID NO: 217443 - DNA, 25 bp, Probe sequence
aatcttgatggtttgtatagacaga

SEQ ID NO: 217444 - DNA, 25 bp, Probe sequence
aataccctcaaggtgagcatgataa

SEQ ID NO: 217445 - DNA, 25 bp, Probe sequence
catttttagtcatcgaggaggaaac

SEQ ID NO: 217446 - DNA, 25 bp, Probe sequence
ccctcaaggtgagcatgataagcaa

SEQ ID NO: 217447 - DNA, 25 bp, Probe sequence
gaatttagtaaagaagtcgatgtta

SEQ ID NO: 217448 - DNA, 25 bp, Probe sequence
gaatcatcggaaaagtctaaagata

SEQ ID NO: 217449 - DNA, 25 bp, Probe sequence
gaaaagattattttgttggcttgct

SEQ ID NO: 217450 - DNA, 25 bp, Probe sequence
gaaaaataccctcaaggtgagcatg

SEQ ID NO: 217451 - DNA, 25 bp, Probe sequence
gacagaaagtgacagataaaggagt

SEQ ID NO: 217452 - DNA, 25 bp, Probe sequence
gagttaaaaaatcttgatggtttgt

SEQ ID NO: 217453 - DNA, 25 bp, Probe sequence
gatggtttgtatagacagaaagtga

SEQ ID NO: 217454 - DNA, 25 bp, Probe sequence
gatgaatcatcggaaaagtctaaag

SEQ ID NO: 217455 - DNA, 25 bp, Probe sequence
gatattgaaaaataccctcaaggtg

SEQ ID NO: 217456 - DNA, 25 bp, Probe sequence
gattattttgttggcttgcttggta

SEQ ID NO: 217457 - DNA, 25 bp, Probe sequence
gttggcttgcttggtaaagatattg

SEQ ID NO: 217458 - DNA, 25 bp, Probe sequence
gtatatgtttggaaggatcgaaaag

SEQ ID NO: 217459 - DNA, 25 bp, Probe sequence
gtcatcgaggaggaaactgttaatg

SEQ ID NO: 217460 - DNA, 25 bp, Probe sequence
ggtgagcatgataagcaagatgcat

SEQ ID NO: 217461 - DNA, 25 bp, Probe sequence
ggaggaaactgttaatggaagacaa

SEQ ID NO: 217462 - DNA, 25 bp, Probe sequence
ggagtatatgtttggaaggatcgaa

SEQ ID NO: 217463 - DNA, 25 bp, Probe sequence
tgcatttttagtcatcgaggaggaa

SEQ ID NO: 217464 - DNA, 25 bp, Probe sequence
tattttgttggcttgcttggtaaag

SEQ ID NO: 217465 - DNA, 25 bp, Probe sequence
tatatggtgctgttaataatagaaa

SEQ ID NO: 217466 - DNA, 25 bp, Probe sequence
tttgttggcttgcttggtaaagata

SEQ ID NO: 217467 - DNA, 25 bp, Probe sequence
ttattttgttggcttgcttggtaaa

SEQ ID NO: 217468 - DNA, 25 bp, Probe sequence
ttagtcatcgaggaggaaactgtta

SEQ ID NO: 217469 - DNA, 25 bp, Probe sequence
attggcattaggcttattaactact

SEQ ID NO: 217470 - DNA, 25 bp, Probe sequence
attaactactggtgtgattacatca

SEQ ID NO: 217471 - DNA, 25 bp, Probe sequence
atcgatactactcatcagaaagttt

SEQ ID NO: 217472 - DNA, 25 bp, Probe sequence
agtgtatggcggaaatttagatgca

SEQ ID NO: 217473 - DNA, 25 bp, Probe sequence
agaagtttcactgaaagaacttgat

SEQ ID NO: 217474 - DNA, 25 bp, Probe sequence
agcaacattggcattaggcttatta

SEQ ID NO: 217475 - DNA, 25 bp, Probe sequence
actactggtgtgattacatcagaag

SEQ ID NO: 217476 - DNA, 25 bp, Probe sequence
actcatcagaaagttttgaattcag

SEQ ID NO: 217477 - DNA, 25 bp, Probe sequence
actactcatcagaaagttttgaatt

SEQ ID NO: 217478 - DNA, 25 bp, Probe sequence
aaagcaacattggcattaggcttat

SEQ ID NO: 217479 - DNA, 25 bp, Probe sequence
aacattggcattaggcttattaact

SEQ ID NO: 217480 - DNA, 25 bp, Probe sequence
caacattggcattaggcttattaac

SEQ ID NO: 217481 - DNA, 25 bp, Probe sequence
cagtaatattagtggtaaggttgaa

SEQ ID NO: 217482 - DNA, 25 bp, Probe sequence
cattggcattaggcttattaactac

SEQ ID NO: 217483 - DNA, 25 bp, Probe sequence
ctggtgtgattacatcagaaggcca

SEQ ID NO: 217484 - DNA, 25 bp, Probe sequence
gcaacattggcattaggcttattaa

SEQ ID NO: 217485 - DNA, 25 bp, Probe sequence
gaattcagtaatattagtggtaagg

SEQ ID NO: 217486 - DNA, 25 bp, Probe sequence
gaaagttttgaattcagtaatatta

SEQ ID NO: 217487 - DNA, 25 bp, Probe sequence
gatactactcatcagaaagttttga

SEQ ID NO: 217488 - DNA, 25 bp, Probe sequence
gtatggcggaaatttagatgcatca

SEQ ID NO: 217489 - DNA, 25 bp, Probe sequence
ggtacgactaaatacggtaagatca

SEQ ID NO: 217490 - DNA, 25 bp, Probe sequence
gtgattacatcagaaggccaagcag

SEQ ID NO: 217491 - DNA, 25 bp, Probe sequence
gtgtgattacatcagaaggccaagc

SEQ ID NO: 217492 - DNA, 25 bp, Probe sequence
ggtgtgattacatcagaaggccaag

SEQ ID NO: 217493 - DNA, 25 bp, Probe sequence
ggcattaggcttattaactactggt

SEQ ID NO: 217494 - DNA, 25 bp, Probe sequence
tggcattaggcttattaactactgg

SEQ ID NO: 217495 - DNA, 25 bp, Probe sequence
tgattacatcagaaggccaagcagt

SEQ ID NO: 217496 - DNA, 25 bp, Probe sequence
tcgatactactcatcagaaagtttt

SEQ ID NO: 217497 - DNA, 25 bp, Probe sequence
taactactggtgtgattacatcaga

SEQ ID NO: 217498 - DNA, 25 bp, Probe sequence
tactggtgtgattacatcagaaggc

SEQ ID NO: 217499 - DNA, 25 bp, Probe sequence
tacgactaaatacggtaagatcact

SEQ ID NO: 217500 - DNA, 25 bp, Probe sequence
tatggtttatataaaggtacgacta

SEQ ID NO: 217501 - DNA, 25 bp, Probe sequence
tatggcggaaatttagatgcatcaa

SEQ ID NO: 217502 - DNA, 25 bp, Probe sequence
ttggcattaggcttattaactactg

SEQ ID NO: 217503 - DNA, 25 bp, Probe sequence
attcaggacctagttatgagttaac

SEQ ID NO: 217504 - DNA, 25 bp, Probe sequence
attatgactctaacgttttgctttt

SEQ ID NO: 217505 - DNA, 25 bp, Probe sequence
atttgagtctctaagaacgccgaac

SEQ ID NO: 217506 - DNA, 25 bp, Probe sequence
atggtttagatgtctttgcggtacc

SEQ ID NO: 217507 - DNA, 25 bp, Probe sequence
agtggccaaagtcaaggttattatg

SEQ ID NO: 217508 - DNA, 25 bp, Probe sequence
agacggtttttctattgatgaattt

SEQ ID NO: 217509 - DNA, 25 bp, Probe sequence
acatcaatactattcaggacctagt

SEQ ID NO: 217510 - DNA, 25 bp, Probe sequence
acagaaaatcaatcggttaatgcaa

SEQ ID NO: 217511 - DNA, 25 bp, Probe sequence
aaatgaaccgtttatatgatacaaa

SEQ ID NO: 217512 - DNA, 25 bp, Probe sequence
aaacacatggtttagatgtctttgc

SEQ ID NO: 217513 - DNA, 25 bp, Probe sequence
aacaaatgttagtggccaaagtcaa

SEQ ID NO: 217514 - DNA, 25 bp, Probe sequence
aagaatatttagtgttagtggtgta

SEQ ID NO: 217515 - DNA, 25 bp, Probe sequence
aatgttagtggccaaagtcaaggtt

SEQ ID NO: 217516 - DNA, 25 bp, Probe sequence
aatatttgagtctctaagaacgccg

SEQ ID NO: 217517 - DNA, 25 bp, Probe sequence
caatactattcaggacctagttatg

SEQ ID NO: 217518 - DNA, 25 bp, Probe sequence
gcgtatggcagatgtcattaatagt

SEQ ID NO: 217519 - DNA, 25 bp, Probe sequence
gagtctctaagaacgccgaacttac

SEQ ID NO: 217520 - DNA, 25 bp, Probe sequence
gacgataaagacggtttttctattg

SEQ ID NO: 217521 - DNA, 25 bp, Probe sequence
gagcgtatggcagatgtcattaata

SEQ ID NO: 217522 - DNA, 25 bp, Probe sequence
gataaagacggtttttctattgatg

SEQ ID NO: 217523 - DNA, 25 bp, Probe sequence
gatacaaacaagttacatcaatact

SEQ ID NO: 217524 - DNA, 25 bp, Probe sequence
gttagtggccaaagtcaaggttatt

SEQ ID NO: 217525 - DNA, 25 bp, Probe sequence
gtcaaggttattatgactctaacgt

SEQ ID NO: 217526 - DNA, 25 bp, Probe sequence
gtctctaagaacgccgaacttacta

SEQ ID NO: 217527 - DNA, 25 bp, Probe sequence
ggacctagttatgagttaacaaatg

SEQ ID NO: 217528 - DNA, 25 bp, Probe sequence
ggaagaatatttagtgttagtggtg

SEQ ID NO: 217529 - DNA, 25 bp, Probe sequence
ggcagatgtcattaatagtgaacaa

SEQ ID NO: 217530 - DNA, 25 bp, Probe sequence
tcgagcgtatggcagatgtcattaa

SEQ ID NO: 217531 - DNA, 25 bp, Probe sequence
tctaagaacgccgaacttactagtt

SEQ ID NO: 217532 - DNA, 25 bp, Probe sequence
tactattcaggacctagttatgagt

SEQ ID NO: 217533 - DNA, 25 bp, Probe sequence
tatgactctaacgttttgcttttta

SEQ ID NO: 217534 - DNA, 25 bp, Probe sequence
tttcgagcgtatggcagatgtcatt

SEQ ID NO: 217535 - DNA, 25 bp, Probe sequence
ttattatgactctaacgttttgctt

SEQ ID NO: 217536 - DNA, 25 bp, Probe sequence
ttgagtctctaagaacgccgaactt

SEQ ID NO: 217537 - DNA, 25 bp, Probe sequence
attacaggcacaagtgagtccacat

SEQ ID NO: 217538 - DNA, 25 bp, Probe sequence
attattttggcctatgtgttgatga

SEQ ID NO: 217539 - DNA, 25 bp, Probe sequence
actttttggtgtgtacttccttatg

SEQ ID NO: 217540 - DNA, 25 bp, Probe sequence
acttttgtggaacgtcaacttgcag

SEQ ID NO: 217541 - DNA, 25 bp, Probe sequence
aatcgacatcgagcggtaccacttt

SEQ ID NO: 217542 - DNA, 25 bp, Probe sequence
aagacgcaagcgttacccgagtatt

SEQ ID NO: 217543 - DNA, 25 bp, Probe sequence
aagtgtgtacttccgtttagatgat

SEQ ID NO: 217544 - DNA, 25 bp, Probe sequence
aatcgtcgacgtacatggaaagcac

SEQ ID NO: 217545 - DNA, 25 bp, Probe sequence
cactcgaacaagcacgttatccagg

SEQ ID NO: 217546 - DNA, 25 bp, Probe sequence
gcatatgcggttgacctcatatcat

SEQ ID NO: 217547 - DNA, 25 bp, Probe sequence
gaattgcccgcttagagcagctatc

SEQ ID NO: 217548 - DNA, 25 bp, Probe sequence
gaacttggtgaagccgaaacgcaaa

SEQ ID NO: 217549 - DNA, 25 bp, Probe sequence
gaaactgcaacacatgtacgtatta

SEQ ID NO: 217550 - DNA, 25 bp, Probe sequence
gacctcatatcattaattgcactac

SEQ ID NO: 217551 - DNA, 25 bp, Probe sequence
gagcagctatcgtgataccacttga

SEQ ID NO: 217552 - DNA, 25 bp, Probe sequence
gagtgtatatgggtggggcggatgc

SEQ ID NO: 217553 - DNA, 25 bp, Probe sequence
gagtccacattttttcttcaattca

SEQ ID NO: 217554 - DNA, 25 bp, Probe sequence
gatgcatggttctatcgtcggtaca

SEQ ID NO: 217555 - DNA, 25 bp, Probe sequence
gtatctttagctaacacacgtgtat

SEQ ID NO: 217556 - DNA, 25 bp, Probe sequence
gtaggtctatttgttggcgttattt

SEQ ID NO: 217557 - DNA, 25 bp, Probe sequence
gtctaatttaactggtatcgtcatc

SEQ ID NO: 217558 - DNA, 25 bp, Probe sequence
gtgcgtgcatacttatcactcgaac

SEQ ID NO: 217559 - DNA, 25 bp, Probe sequence
gtgtcgcaggattagttggtggccc

SEQ ID NO: 217560 - DNA, 25 bp, Probe sequence
ggggcggatgcacaagtttatctta

SEQ ID NO: 217561 - DNA, 25 bp, Probe sequence
tgagcattttaacattttcccacga

SEQ ID NO: 217562 - DNA, 25 bp, Probe sequence
tgcttgtaccaccatttttaattca

SEQ ID NO: 217563 - DNA, 25 bp, Probe sequence
taattgctggttattttggcttaca

SEQ ID NO: 217564 - DNA, 25 bp, Probe sequence
tatcgtcatcgatcatcaacatagt

SEQ ID NO: 217565 - DNA, 25 bp, Probe sequence
tttcccacgacaaagcatatgcggt

SEQ ID NO: 217566 - DNA, 25 bp, Probe sequence
ttggttgtagtcatccgaattgccc

SEQ ID NO: 217567 - DNA, 25 bp, Probe sequence
ttcagtttgtttgccttaatgtcta

SEQ ID NO: 217568 - DNA, 25 bp, Probe sequence
ttggcttacaagctcaaagacgcaa

SEQ ID NO: 217569 - DNA, 25 bp, Probe sequence
ttggtggcccttttgtaggtctatt

SEQ ID NO: 217570 - DNA, 25 bp, Probe sequence
ttggcgttatttcaggtattttcag

SEQ ID NO: 217571 - DNA, 25 bp, Probe sequence
attgggattggcacacataatggta

SEQ ID NO: 217572 - DNA, 25 bp, Probe sequence
atttgaattaaatgcgacagactat

SEQ ID NO: 217573 - DNA, 25 bp, Probe sequence
atatgtcggcgaattttgatcaaag

SEQ ID NO: 217574 - DNA, 25 bp, Probe sequence
atagatgatgagccattagcacgta

SEQ ID NO: 217575 - DNA, 25 bp, Probe sequence
atacgtattcatcgttcatatatta

SEQ ID NO: 217576 - DNA, 25 bp, Probe sequence
acgaatcataaatacgaaacaacag

SEQ ID NO: 217577 - DNA, 25 bp, Probe sequence
acagagccattgaatcgttatgaaa

SEQ ID NO: 217578 - DNA, 25 bp, Probe sequence
acaaccatacatacaacgaatcata

SEQ ID NO: 217579 - DNA, 25 bp, Probe sequence
aaagatgaaagagccacctgcgatt

SEQ ID NO: 217580 - DNA, 25 bp, Probe sequence
aagaagtgcaacaatggtttaacta

SEQ ID NO: 217581 - DNA, 25 bp, Probe sequence
aagaaacattggaagcactactgat

SEQ ID NO: 217582 - DNA, 25 bp, Probe sequence
aagagccacctgcgattatttttgc

SEQ ID NO: 217583 - DNA, 25 bp, Probe sequence
aatattattgggattggcacacata

SEQ ID NO: 217584 - DNA, 25 bp, Probe sequence
cagactatattttgaaaccgtttgg

SEQ ID NO: 217585 - DNA, 25 bp, Probe sequence
cgtgcgactaaagccaaagatgata

SEQ ID NO: 217586 - DNA, 25 bp, Probe sequence
cctgcgattatttttgcaactgcac

SEQ ID NO: 217587 - DNA, 25 bp, Probe sequence
gccacctgcgattatttttgcaact

SEQ ID NO: 217588 - DNA, 25 bp, Probe sequence
gcgacagactatattttgaaaccgt

SEQ ID NO: 217589 - DNA, 25 bp, Probe sequence
gcacatgaccaatacgcagtacagg

SEQ ID NO: 217590 - DNA, 25 bp, Probe sequence
gcaattgcgaatgatatgtcggcga

SEQ ID NO: 217591 - DNA, 25 bp, Probe sequence
gaaacaacagagccattgaatcgtt

SEQ ID NO: 217592 - DNA, 25 bp, Probe sequence
gaaagagccacctgcgattattttt

SEQ ID NO: 217593 - DNA, 25 bp, Probe sequence
gacgataaaattcacatgttaaagc

SEQ ID NO: 217594 - DNA, 25 bp, Probe sequence
gaccaatacgcagtacaggcatttg

SEQ ID NO: 217595 - DNA, 25 bp, Probe sequence
gatgagccattagcacgtaatgaat

SEQ ID NO: 217596 - DNA, 25 bp, Probe sequence
gattggcacacataatggtattaca

SEQ ID NO: 217597 - DNA, 25 bp, Probe sequence
gtattcatcgttcatatattattaa

SEQ ID NO: 217598 - DNA, 25 bp, Probe sequence
ggtgtcaagatgcaagttggacgtt

SEQ ID NO: 217599 - DNA, 25 bp, Probe sequence
ggtattacaaccatacatacaacga

SEQ ID NO: 217600 - DNA, 25 bp, Probe sequence
tgaaagattttaaagcgtcgatagg

SEQ ID NO: 217601 - DNA, 25 bp, Probe sequence
tgcaagttggacgttcatttatgaa

SEQ ID NO: 217602 - DNA, 25 bp, Probe sequence
tacgcagtacaggcatttgaattaa

SEQ ID NO: 217603 - DNA, 25 bp, Probe sequence
tatttttagatgtcaatttaatgga

SEQ ID NO: 217604 - DNA, 25 bp, Probe sequence
ttgcaactgcacatgaccaatacgc

SEQ ID NO: 217605 - DNA, 25 bp, Probe sequence
attggcgcacgtatacagcgttgaa

SEQ ID NO: 217606 - DNA, 25 bp, Probe sequence
attgcacctgaagttgttatgtggc

SEQ ID NO: 217607 - DNA, 25 bp, Probe sequence
atattggcgcacgtatacagcgttg

SEQ ID NO: 217608 - DNA, 25 bp, Probe sequence
atgggcattgcacctgaagttgtta

SEQ ID NO: 217609 - DNA, 25 bp, Probe sequence
atgtggcgagatgttggggatatag

SEQ ID NO: 217610 - DNA, 25 bp, Probe sequence
agatattggcgcacgtatacagcgt

SEQ ID NO: 217611 - DNA, 25 bp, Probe sequence
acctgaagttgttatgtggcgagat

SEQ ID NO: 217612 - DNA, 25 bp, Probe sequence
cgagatattggcgcacgtatacagc

SEQ ID NO: 217613 - DNA, 25 bp, Probe sequence
gcgcacgtatacagcgttgaaccag

SEQ ID NO: 217614 - DNA, 25 bp, Probe sequence
gcgagatattggcgcacgtatacag

SEQ ID NO: 217615 - DNA, 25 bp, Probe sequence
gcattgcacctgaagttgttatgtg

SEQ ID NO: 217616 - DNA, 25 bp, Probe sequence
gcacctgaagttgttatgtggcgag

SEQ ID NO: 217617 - DNA, 25 bp, Probe sequence
gaagttgttatgtggcgagatgttg

SEQ ID NO: 217618 - DNA, 25 bp, Probe sequence
gagatattggcgcacgtatacagcg

SEQ ID NO: 217619 - DNA, 25 bp, Probe sequence
gagatgttggggatatagatggtgt

SEQ ID NO: 217620 - DNA, 25 bp, Probe sequence
gatggtgttgtatgtggcgagatat

SEQ ID NO: 217621 - DNA, 25 bp, Probe sequence
gatattggcgcacgtatacagcgtt

SEQ ID NO: 217622 - DNA, 25 bp, Probe sequence
gttgttatgtggcgagatgttgggg

SEQ ID NO: 217623 - DNA, 25 bp, Probe sequence
gggcattgcacctgaagttgttatg

SEQ ID NO: 217624 - DNA, 25 bp, Probe sequence
gtggcgagatattggcgcacgtata

SEQ ID NO: 217625 - DNA, 25 bp, Probe sequence
gtggcgagatgttggggatatagat

SEQ ID NO: 217626 - DNA, 25 bp, Probe sequence
ggtgttgtatgtggcgagatattgg

SEQ ID NO: 217627 - DNA, 25 bp, Probe sequence
ggcattgcacctgaagttgttatgt

SEQ ID NO: 217628 - DNA, 25 bp, Probe sequence
ggcgagatgttggggatatagatgg

SEQ ID NO: 217629 - DNA, 25 bp, Probe sequence
ggcgcacgtatacagcgttgaacca

SEQ ID NO: 217630 - DNA, 25 bp, Probe sequence
tggcgcacgtatacagcgttgaacc

SEQ ID NO: 217631 - DNA, 25 bp, Probe sequence
tggcgagatattggcgcacgtatac

SEQ ID NO: 217632 - DNA, 25 bp, Probe sequence
tgtggcgagatattggcgcacgtat

SEQ ID NO: 217633 - DNA, 25 bp, Probe sequence
tgggcattgcacctgaagttgttat

SEQ ID NO: 217634 - DNA, 25 bp, Probe sequence
tgttatgtggcgagatgttggggat

SEQ ID NO: 217635 - DNA, 25 bp, Probe sequence
tgttggggatatagatggtgttgta

SEQ ID NO: 217636 - DNA, 25 bp, Probe sequence
tgcacctgaagttgttatgtggcga

SEQ ID NO: 217637 - DNA, 25 bp, Probe sequence
tagatggtgttgtatgtggcgagat

SEQ ID NO: 217638 - DNA, 25 bp, Probe sequence
tattggcgcacgtatacagcgttga

SEQ ID NO: 217639 - DNA, 25 bp, Probe sequence
atattgtgatttatccagacgcata

SEQ ID NO: 217640 - DNA, 25 bp, Probe sequence
atgggacaagtaatgacacgtgaac

SEQ ID NO: 217641 - DNA, 25 bp, Probe sequence
atggggctatgattactttggcgat

SEQ ID NO: 217642 - DNA, 25 bp, Probe sequence
aacttacgtcgtcattactcacaac

SEQ ID NO: 217643 - DNA, 25 bp, Probe sequence
aaccgattgctgatattttagaatt

SEQ ID NO: 217644 - DNA, 25 bp, Probe sequence
aagtgcttggtttagaactaggtgc

SEQ ID NO: 217645 - DNA, 25 bp, Probe sequence
catcgtgaatttgaattgttccatt

SEQ ID NO: 217646 - DNA, 25 bp, Probe sequence
ctagatatcatgttacctggtcgtg

SEQ ID NO: 217647 - DNA, 25 bp, Probe sequence
ccgtttagtacgcgtgaattaatcg

SEQ ID NO: 217648 - DNA, 25 bp, Probe sequence
cgattcgtcgtttacgtgaaaagat

SEQ ID NO: 217649 - DNA, 25 bp, Probe sequence
gcagatgactatgtaacgaaaccgt

SEQ ID NO: 217650 - DNA, 25 bp, Probe sequence
gaatatattgtgacgcgtagaggcg

SEQ ID NO: 217651 - DNA, 25 bp, Probe sequence
gaagatgatccgtcacatcctgaat

SEQ ID NO: 217652 - DNA, 25 bp, Probe sequence
gaagaaccagacatcgtattactag

SEQ ID NO: 217653 - DNA, 25 bp, Probe sequence
gaaaagttgttgtagttgatgatga

SEQ ID NO: 217654 - DNA, 25 bp, Probe sequence
gacacgtgaacatttattacaaaca

SEQ ID NO: 217655 - DNA, 25 bp, Probe sequence
gatggtaatgatgcagtcgacttaa

SEQ ID NO: 217656 - DNA, 25 bp, Probe sequence
gatgatgaaaaaccgattgctgata

SEQ ID NO: 217657 - DNA, 25 bp, Probe sequence
gatgcagtcgacttaatttatgaag

SEQ ID NO: 217658 - DNA, 25 bp, Probe sequence
gatccgtcacatcctgaatatattg

SEQ ID NO: 217659 - DNA, 25 bp, Probe sequence
gatattgaattaacacatcgtgaat

SEQ ID NO: 217660 - DNA, 25 bp, Probe sequence
gtagaggcgttggatatttcctcca

SEQ ID NO: 217661 - DNA, 25 bp, Probe sequence
gtcgatgtaacgattcgtcgtttac

SEQ ID NO: 217662 - DNA, 25 bp, Probe sequence
gtgaattaatcgcacgtgtgaaagc

SEQ ID NO: 217663 - DNA, 25 bp, Probe sequence
gtgtactgtgcatacgatggtaatg

SEQ ID NO: 217664 - DNA, 25 bp, Probe sequence
gtgtgaaagcgaacttacgtcgtca

SEQ ID NO: 217665 - DNA, 25 bp, Probe sequence
ggtcgtgatggtatggaagtatgtc

SEQ ID NO: 217666 - DNA, 25 bp, Probe sequence
ggtttagaactaggtgcagatgact

SEQ ID NO: 217667 - DNA, 25 bp, Probe sequence
ggatacgatgtgtactgtgcatacg

SEQ ID NO: 217668 - DNA, 25 bp, Probe sequence
ggatatttcctccaacaacatgagt

SEQ ID NO: 217669 - DNA, 25 bp, Probe sequence
ggaagtatgtcgtgaagtgcgcaaa

SEQ ID NO: 217670 - DNA, 25 bp, Probe sequence
taatgcttactgctaaagattcaga

SEQ ID NO: 217671 - DNA, 25 bp, Probe sequence
ttatccagacgcatattctattaaa

SEQ ID NO: 217672 - DNA, 25 bp, Probe sequence
ttactcacaaccagcacaagacact

SEQ ID NO: 217673 - DNA, 25 bp, Probe sequence
attgaatcatttatgccaattccta

SEQ ID NO: 217674 - DNA, 25 bp, Probe sequence
atcggtttagtattattatttgtat

SEQ ID NO: 217675 - DNA, 25 bp, Probe sequence
aggaacgacactaacaaataacatt

SEQ ID NO: 217676 - DNA, 25 bp, Probe sequence
agttgttaactctttaggtgtcatt

SEQ ID NO: 217677 - DNA, 25 bp, Probe sequence
agcaccatttttaatcattggacta

SEQ ID NO: 217678 - DNA, 25 bp, Probe sequence
aacattggcttactcttcgtaccag

SEQ ID NO: 217679 - DNA, 25 bp, Probe sequence
aagacgcatcaaaaccagcacactt

SEQ ID NO: 217680 - DNA, 25 bp, Probe sequence
aataacattggcttactcttcgtac

SEQ ID NO: 217681 - DNA, 25 bp, Probe sequence
aatcgtctcaacaatactattactt

SEQ ID NO: 217682 - DNA, 25 bp, Probe sequence
aattgctttagtactctttgtatcg

SEQ ID NO: 217683 - DNA, 25 bp, Probe sequence
caaaaccagcacacttttttcacca

SEQ ID NO: 217684 - DNA, 25 bp, Probe sequence
cagccggtatctcagttgttaactc

SEQ ID NO: 217685 - DNA, 25 bp, Probe sequence
cattggcttactcttcgtaccagcc

SEQ ID NO: 217686 - DNA, 25 bp, Probe sequence
gctgttaagttaggcgaagtcgaaa

SEQ ID NO: 217687 - DNA, 25 bp, Probe sequence
ccagcacacttttttcaccaagtca

SEQ ID NO: 217688 - DNA, 25 bp, Probe sequence
gctttagtactctttgtatcgaaaa

SEQ ID NO: 217689 - DNA, 25 bp, Probe sequence
gcacacttttttcaccaagtcattg

SEQ ID NO: 217690 - DNA, 25 bp, Probe sequence
gaaagttacttcgagatctaaaggt

SEQ ID NO: 217691 - DNA, 25 bp, Probe sequence
gtactggtgctgttaagttaggcga

SEQ ID NO: 217692 - DNA, 25 bp, Probe sequence
gtactggctatgtcacacaaattat

SEQ ID NO: 217693 - DNA, 25 bp, Probe sequence
gtgtcattagccaagcaccattttt

SEQ ID NO: 217694 - DNA, 25 bp, Probe sequence
ggctatgtcacacaaattattatga

SEQ ID NO: 217695 - DNA, 25 bp, Probe sequence
taccagccggtatctcagttgttaa

SEQ ID NO: 217696 - DNA, 25 bp, Probe sequence
tcgagatctaaaggtgacaaagtca

SEQ ID NO: 217697 - DNA, 25 bp, Probe sequence
tcgtaccagccggtatctcagttgt

SEQ ID NO: 217698 - DNA, 25 bp, Probe sequence
tcattggactaataatcgtctcaac

SEQ ID NO: 217699 - DNA, 25 bp, Probe sequence
tcatttatgccaattcctatgcctg

SEQ ID NO: 217700 - DNA, 25 bp, Probe sequence
tcaccaagtcattgtaattgcttta

SEQ ID NO: 217701 - DNA, 25 bp, Probe sequence
taactctttaggtgtcattagccaa

SEQ ID NO: 217702 - DNA, 25 bp, Probe sequence
tactattacttatttgtactggcta

SEQ ID NO: 217703 - DNA, 25 bp, Probe sequence
tagccaagcaccatttttaatcatt

SEQ ID NO: 217704 - DNA, 25 bp, Probe sequence
tagaggaggcacaagctcatgatta

SEQ ID NO: 217705 - DNA, 25 bp, Probe sequence
ttatttgtattattatgtactggtg

SEQ ID NO: 217706 - DNA, 25 bp, Probe sequence
ttatttgtactggctatgtcacaca

SEQ ID NO: 217707 - DNA, 25 bp, Probe sequence
attcagcgtattatacgtggaacat

SEQ ID NO: 217708 - DNA, 25 bp, Probe sequence
attatacgtggaacatgtttgtggg

SEQ ID NO: 217709 - DNA, 25 bp, Probe sequence
atacgtggaacatgtttgtgggaag

SEQ ID NO: 217710 - DNA, 25 bp, Probe sequence
agacaattcagcgtattatacgtgg

SEQ ID NO: 217711 - DNA, 25 bp, Probe sequence
agcgtattatacgtggaacatgttt

SEQ ID NO: 217712 - DNA, 25 bp, Probe sequence
acgtggaacatgtttgtgggaagta

SEQ ID NO: 217713 - DNA, 25 bp, Probe sequence
acatgtttgtgggaagtagcttttt

SEQ ID NO: 217714 - DNA, 25 bp, Probe sequence
acaattcagcgtattatacgtggaa

SEQ ID NO: 217715 - DNA, 25 bp, Probe sequence
aacatgtttgtgggaagtagctttt

SEQ ID NO: 217716 - DNA, 25 bp, Probe sequence
aagacaattcagcgtattatacgtg

SEQ ID NO: 217717 - DNA, 25 bp, Probe sequence
aattcagcgtattatacgtggaaca

SEQ ID NO: 217718 - DNA, 25 bp, Probe sequence
caattcagcgtattatacgtggaac

SEQ ID NO: 217719 - DNA, 25 bp, Probe sequence
cagcgtattatacgtggaacatgtt

SEQ ID NO: 217720 - DNA, 25 bp, Probe sequence
catgtttgtgggaagtagctttttt

SEQ ID NO: 217721 - DNA, 25 bp, Probe sequence
cgtggaacatgtttgtgggaagtag

SEQ ID NO: 217722 - DNA, 25 bp, Probe sequence
cgtattatacgtggaacatgtttgt

SEQ ID NO: 217723 - DNA, 25 bp, Probe sequence
gcgtattatacgtggaacatgtttg

SEQ ID NO: 217724 - DNA, 25 bp, Probe sequence
gaagacaattcagcgtattatacgt

SEQ ID NO: 217725 - DNA, 25 bp, Probe sequence
gaacatgtttgtgggaagtagcttt

SEQ ID NO: 217726 - DNA, 25 bp, Probe sequence
gacaattcagcgtattatacgtgga

SEQ ID NO: 217727 - DNA, 25 bp, Probe sequence
gtattatacgtggaacatgtttgtg

SEQ ID NO: 217728 - DNA, 25 bp, Probe sequence
gtggaacatgtttgtgggaagtagc

SEQ ID NO: 217729 - DNA, 25 bp, Probe sequence
ggaacatgtttgtgggaagtagctt

SEQ ID NO: 217730 - DNA, 25 bp, Probe sequence
tggaacatgtttgtgggaagtagct

SEQ ID NO: 217731 - DNA, 25 bp, Probe sequence
tgtttgtgggaagtagcttttttat

SEQ ID NO: 217732 - DNA, 25 bp, Probe sequence
tgaagacaattcagcgtattatacg

SEQ ID NO: 217733 - DNA, 25 bp, Probe sequence
tcagcgtattatacgtggaacatgt

SEQ ID NO: 217734 - DNA, 25 bp, Probe sequence
tacgtggaacatgtttgtgggaagt

SEQ ID NO: 217735 - DNA, 25 bp, Probe sequence
tatacgtggaacatgtttgtgggaa

SEQ ID NO: 217736 - DNA, 25 bp, Probe sequence
tattatacgtggaacatgtttgtgg

SEQ ID NO: 217737 - DNA, 25 bp, Probe sequence
tttgtgggaagtagcttttttatat

SEQ ID NO: 217738 - DNA, 25 bp, Probe sequence
ttatacgtggaacatgtttgtggga

SEQ ID NO: 217739 - DNA, 25 bp, Probe sequence
ttcagcgtattatacgtggaacatg

SEQ ID NO: 217740 - DNA, 25 bp, Probe sequence
ttgaagacaattcagcgtattatac

SEQ ID NO: 217741 - DNA, 25 bp, Probe sequence
attactaaccctattgcccgaggat

SEQ ID NO: 217742 - DNA, 25 bp, Probe sequence
atcaatggcaagtatagctttagtg

SEQ ID NO: 217743 - DNA, 25 bp, Probe sequence
aggacctgtagaagaatcaatggca

SEQ ID NO: 217744 - DNA, 25 bp, Probe sequence
agcaccagccaaagaattaggacct

SEQ ID NO: 217745 - DNA, 25 bp, Probe sequence
agcagttgtgcctgtctttgtagca

SEQ ID NO: 217746 - DNA, 25 bp, Probe sequence
agctttagtgttagttggtgtagtt

SEQ ID NO: 217747 - DNA, 25 bp, Probe sequence
agcgtgaagtgcttgttaaacattg

SEQ ID NO: 217748 - DNA, 25 bp, Probe sequence
acaccttacttcggaatactgttat

SEQ ID NO: 217749 - DNA, 25 bp, Probe sequence
acacattaggtgtagcaccagccaa

SEQ ID NO: 217750 - DNA, 25 bp, Probe sequence
acaatttgccaatgatgttatttta

SEQ ID NO: 217751 - DNA, 25 bp, Probe sequence
aaccctattgcccgaggattagcac

SEQ ID NO: 217752 - DNA, 25 bp, Probe sequence
aatggtgtcattatttatgccctag

SEQ ID NO: 217753 - DNA, 25 bp, Probe sequence
caactacagcgattgcgttaccagt

SEQ ID NO: 217754 - DNA, 25 bp, Probe sequence
ctgttttgcgattccgttatataaa

SEQ ID NO: 217755 - DNA, 25 bp, Probe sequence
gcccgaggattagcacttggaacaa

SEQ ID NO: 217756 - DNA, 25 bp, Probe sequence
gcctgtctttgtagcaatattcttc

SEQ ID NO: 217757 - DNA, 25 bp, Probe sequence
gcgattgcgttaccagtatcagctg

SEQ ID NO: 217758 - DNA, 25 bp, Probe sequence
gcttgttaaacattggcatcgtatc

SEQ ID NO: 217759 - DNA, 25 bp, Probe sequence
gcaacaatctgttttgcgattccgt

SEQ ID NO: 217760 - DNA, 25 bp, Probe sequence
gacattatttacttcttcttagaac

SEQ ID NO: 217761 - DNA, 25 bp, Probe sequence
gtatcagctggtatcggtggtataa

SEQ ID NO: 217762 - DNA, 25 bp, Probe sequence
gtgtcattatttatgccctaggtaa

SEQ ID NO: 217763 - DNA, 25 bp, Probe sequence
gtgtagttgttgtagcagttgtgcc

SEQ ID NO: 217764 - DNA, 25 bp, Probe sequence
ggtggagacattatttacttcttct

SEQ ID NO: 217765 - DNA, 25 bp, Probe sequence
ggtacagttgtagcgttattaatta

SEQ ID NO: 217766 - DNA, 25 bp, Probe sequence
ggaggtattggtatcggtacagttg

SEQ ID NO: 217767 - DNA, 25 bp, Probe sequence
ggaacaagtggtcacacattaggtg

SEQ ID NO: 217768 - DNA, 25 bp, Probe sequence
ggaatactgttatccgttataccat

SEQ ID NO: 217769 - DNA, 25 bp, Probe sequence
tacctcaagcagcaactacagcgat

SEQ ID NO: 217770 - DNA, 25 bp, Probe sequence
tatggtatttggtgtggccttcctc

SEQ ID NO: 217771 - DNA, 25 bp, Probe sequence
tatccgttataccatttttcttagc

SEQ ID NO: 217772 - DNA, 25 bp, Probe sequence
ttcttattcgcaccgctatttgtca

SEQ ID NO: 217773 - DNA, 25 bp, Probe sequence
ttcgcaccgctatttgtcagtatgg

SEQ ID NO: 217774 - DNA, 25 bp, Probe sequence
ttgcgaagttagcacaatttgccaa

SEQ ID NO: 217775 - DNA, 25 bp, Probe sequence
attggattatcgaattagatctatg

SEQ ID NO: 217776 - DNA, 25 bp, Probe sequence
attagatctatggttatggtgtgtt

SEQ ID NO: 217777 - DNA, 25 bp, Probe sequence
ataaatgcggttaatgactatgcaa

SEQ ID NO: 217778 - DNA, 25 bp, Probe sequence
atctatggttatggtgtgttggtgc

SEQ ID NO: 217779 - DNA, 25 bp, Probe sequence
atgactatgcaaatgaaattctttt

SEQ ID NO: 217780 - DNA, 25 bp, Probe sequence
atggtgtgttggtgctattaatttg

SEQ ID NO: 217781 - DNA, 25 bp, Probe sequence
atggttatggtgtgttggtgctatt

SEQ ID NO: 217782 - DNA, 25 bp, Probe sequence
agatctatggttatggtgtgttggt

SEQ ID NO: 217783 - DNA, 25 bp, Probe sequence
aaatgcggttaatgactatgcaaat

SEQ ID NO: 217784 - DNA, 25 bp, Probe sequence
aatgcggttaatgactatgcaaatg

SEQ ID NO: 217785 - DNA, 25 bp, Probe sequence
aattagatctatggttatggtgtgt

SEQ ID NO: 217786 - DNA, 25 bp, Probe sequence
ctatggttatggtgtgttggtgcta

SEQ ID NO: 217787 - DNA, 25 bp, Probe sequence
gcggttaatgactatgcaaatgaaa

SEQ ID NO: 217788 - DNA, 25 bp, Probe sequence
gaattagatctatggttatggtgtg

SEQ ID NO: 217789 - DNA, 25 bp, Probe sequence
gatctatggttatggtgtgttggtg

SEQ ID NO: 217790 - DNA, 25 bp, Probe sequence
gattatcgaattagatctatggtta

SEQ ID NO: 217791 - DNA, 25 bp, Probe sequence
gttggtgctattaatttgataaatg

SEQ ID NO: 217792 - DNA, 25 bp, Probe sequence
gttatggtgtgttggtgctattaat

SEQ ID NO: 217793 - DNA, 25 bp, Probe sequence
gtgaattggattatcgaattagatc

SEQ ID NO: 217794 - DNA, 25 bp, Probe sequence
gtgttggtgctattaatttgataaa

SEQ ID NO: 217795 - DNA, 25 bp, Probe sequence
gtgtgttggtgctattaatttgata

SEQ ID NO: 217796 - DNA, 25 bp, Probe sequence
ggtgtgttggtgctattaatttgat

SEQ ID NO: 217797 - DNA, 25 bp, Probe sequence
ggtgctattaatttgataaatgcgg

SEQ ID NO: 217798 - DNA, 25 bp, Probe sequence
ggttatggtgtgttggtgctattaa

SEQ ID NO: 217799 - DNA, 25 bp, Probe sequence
ggattatcgaattagatctatggtt

SEQ ID NO: 217800 - DNA, 25 bp, Probe sequence
tggttatggtgtgttggtgctatta

SEQ ID NO: 217801 - DNA, 25 bp, Probe sequence
tggtgtgttggtgctattaatttga

SEQ ID NO: 217802 - DNA, 25 bp, Probe sequence
tgataaatgcggttaatgactatgc

SEQ ID NO: 217803 - DNA, 25 bp, Probe sequence
tctatggttatggtgtgttggtgct

SEQ ID NO: 217804 - DNA, 25 bp, Probe sequence
tagatctatggttatggtgtgttgg

SEQ ID NO: 217805 - DNA, 25 bp, Probe sequence
tatggttatggtgtgttggtgctat

SEQ ID NO: 217806 - DNA, 25 bp, Probe sequence
tatggtgtgttggtgctattaattt

SEQ ID NO: 217807 - DNA, 25 bp, Probe sequence
ttatggtgtgttggtgctattaatt

SEQ ID NO: 217808 - DNA, 25 bp, Probe sequence
ttagatctatggttatggtgtgttg

SEQ ID NO: 217809 - DNA, 25 bp, Probe sequence
attccttctacagcaaatgaagtga

SEQ ID NO: 217810 - DNA, 25 bp, Probe sequence
atataaagaacaagcccaagacatt

SEQ ID NO: 217811 - DNA, 25 bp, Probe sequence
atatgcaacatacaattccttctac

SEQ ID NO: 217812 - DNA, 25 bp, Probe sequence
atgcaacatacaattccttctacag

SEQ ID NO: 217813 - DNA, 25 bp, Probe sequence
agtgcattacaattcatatgcaaca

SEQ ID NO: 217814 - DNA, 25 bp, Probe sequence
agacattcttacagctgtaggtggt

SEQ ID NO: 217815 - DNA, 25 bp, Probe sequence
agcccaagacattcttacagctgta

SEQ ID NO: 217816 - DNA, 25 bp, Probe sequence
acgaagtgcattacaattcatatgc

SEQ ID NO: 217817 - DNA, 25 bp, Probe sequence
acagcgattaattaagaatgctaat

SEQ ID NO: 217818 - DNA, 25 bp, Probe sequence
aaaacattgttgatgcaacgtatga

SEQ ID NO: 217819 - DNA, 25 bp, Probe sequence
aacatacaattccttctacagcaaa

SEQ ID NO: 217820 - DNA, 25 bp, Probe sequence
caagcccaagacattcttacagctg

SEQ ID NO: 217821 - DNA, 25 bp, Probe sequence
catacaattccttctacagcaaatg

SEQ ID NO: 217822 - DNA, 25 bp, Probe sequence
cattcttacagctgtaggtggtgtc

SEQ ID NO: 217823 - DNA, 25 bp, Probe sequence
gctgtaggtggtgtcgaaaacattg

SEQ ID NO: 217824 - DNA, 25 bp, Probe sequence
gaaggtaaagggttcaagtgctttg

SEQ ID NO: 217825 - DNA, 25 bp, Probe sequence
gcaacatacaattccttctacagca

SEQ ID NO: 217826 - DNA, 25 bp, Probe sequence
gaatgctaatgtcgaagagagtgag

SEQ ID NO: 217827 - DNA, 25 bp, Probe sequence
gaagtgtatcagcaattacagcgat

SEQ ID NO: 217828 - DNA, 25 bp, Probe sequence
gaacaagcccaagacattcttacag

SEQ ID NO: 217829 - DNA, 25 bp, Probe sequence
gaaacaaatagttgatgtgacatct

SEQ ID NO: 217830 - DNA, 25 bp, Probe sequence
gagagtgagaatactgacaatatta

SEQ ID NO: 217831 - DNA, 25 bp, Probe sequence
gttgatgtgacatctgtagcagaaa

SEQ ID NO: 217832 - DNA, 25 bp, Probe sequence
gtcgatgaagtgtatcagcaattac

SEQ ID NO: 217833 - DNA, 25 bp, Probe sequence
gtgtcgaaaacattgttgatgcaac

SEQ ID NO: 217834 - DNA, 25 bp, Probe sequence
gtgtatcagcaattacagcgattaa

SEQ ID NO: 217835 - DNA, 25 bp, Probe sequence
ggtggtgtcgaaaacattgttgatg

SEQ ID NO: 217836 - DNA, 25 bp, Probe sequence
ggaaatgtcgatgaagtgtatcagc

SEQ ID NO: 217837 - DNA, 25 bp, Probe sequence
tgcaacatacaattccttctacagc

SEQ ID NO: 217838 - DNA, 25 bp, Probe sequence
tcttacagctgtaggtggtgtcgaa

SEQ ID NO: 217839 - DNA, 25 bp, Probe sequence
tcaagtaaaagtaacaacaccaatt

SEQ ID NO: 217840 - DNA, 25 bp, Probe sequence
taaagggttcaagtgctttgtaaag

SEQ ID NO: 217841 - DNA, 25 bp, Probe sequence
tacagctgtaggtggtgtcgaaaac

SEQ ID NO: 217842 - DNA, 25 bp, Probe sequence
tacaattccttctacagcaaatgaa

SEQ ID NO: 217843 - DNA, 25 bp, Probe sequence
atttccattctattatcaagttgag

SEQ ID NO: 217844 - DNA, 25 bp, Probe sequence
atgctcaagacatccttacagctgt

SEQ ID NO: 217845 - DNA, 25 bp, Probe sequence
atgcaattccttctactgctaatga

SEQ ID NO: 217846 - DNA, 25 bp, Probe sequence
atgtatcgtatgatacggtacgcat

SEQ ID NO: 217847 - DNA, 25 bp, Probe sequence
agctgtggggggtgtcgaaaatatt

SEQ ID NO: 217848 - DNA, 25 bp, Probe sequence
agatggcgtggcgtcagttgatgaa

SEQ ID NO: 217849 - DNA, 25 bp, Probe sequence
agacatccttacagctgtggggggt

SEQ ID NO: 217850 - DNA, 25 bp, Probe sequence
agcaaaagtgacaacaccaatttta

SEQ ID NO: 217851 - DNA, 25 bp, Probe sequence
agcgcaagcaaaagtgacaacacca

SEQ ID NO: 217852 - DNA, 25 bp, Probe sequence
acgcatgaccattcatatgcatcat

SEQ ID NO: 217853 - DNA, 25 bp, Probe sequence
acaaatagatggcgtggcgtcagtt

SEQ ID NO: 217854 - DNA, 25 bp, Probe sequence
aaaggattcgagtgctttgtaaagc

SEQ ID NO: 217855 - DNA, 25 bp, Probe sequence
aagattatgctcaagacatccttac

SEQ ID NO: 217856 - DNA, 25 bp, Probe sequence
aatggtaggcgaaggcttggcaatc

SEQ ID NO: 217857 - DNA, 25 bp, Probe sequence
gcatcatgcaattccttctactgct

SEQ ID NO: 217858 - DNA, 25 bp, Probe sequence
gaatcatgatgctgtggatactcaa

SEQ ID NO: 217859 - DNA, 25 bp, Probe sequence
gaagatacgaatcatgatgctgtgg

SEQ ID NO: 217860 - DNA, 25 bp, Probe sequence
gaaacacagttagttatcgtattta

SEQ ID NO: 217861 - DNA, 25 bp, Probe sequence
gaaacagaacagaaagcgcaagcaa

SEQ ID NO: 217862 - DNA, 25 bp, Probe sequence
gacgccaagcatcaagaagatacga

SEQ ID NO: 217863 - DNA, 25 bp, Probe sequence
gagggggtaatacttatgggcaata

SEQ ID NO: 217864 - DNA, 25 bp, Probe sequence
gatacggtacgcatgaccattcata

SEQ ID NO: 217865 - DNA, 25 bp, Probe sequence
gataagtcatatatttccattctat

SEQ ID NO: 217866 - DNA, 25 bp, Probe sequence
gttaatggacgacgccaagcatcaa

SEQ ID NO: 217867 - DNA, 25 bp, Probe sequence
gtaggcgaaggcttggcaatcaaag

SEQ ID NO: 217868 - DNA, 25 bp, Probe sequence
gtcatatatttccattctattatca

SEQ ID NO: 217869 - DNA, 25 bp, Probe sequence
gggggtgtcgaaaatattgttaatg

SEQ ID NO: 217870 - DNA, 25 bp, Probe sequence
ggacgacgccaagcatcaagaagat

SEQ ID NO: 217871 - DNA, 25 bp, Probe sequence
ggcgtggcgtcagttgatgaaaatg

SEQ ID NO: 217872 - DNA, 25 bp, Probe sequence
tggaaggtaaaggattcgagtgctt

SEQ ID NO: 217873 - DNA, 25 bp, Probe sequence
tccttacagctgtggggggtgtcga

SEQ ID NO: 217874 - DNA, 25 bp, Probe sequence
tgatgctgtggatactcaagaaaca

SEQ ID NO: 217875 - DNA, 25 bp, Probe sequence
tgaccattcatatgcatcatgcaat

SEQ ID NO: 217876 - DNA, 25 bp, Probe sequence
ttccttctactgctaatgaagtaac

SEQ ID NO: 217877 - DNA, 25 bp, Probe sequence
attagtgttaattgtagcgcatccc

SEQ ID NO: 217878 - DNA, 25 bp, Probe sequence
attatcaatatcaattattagtgtt

SEQ ID NO: 217879 - DNA, 25 bp, Probe sequence
attattagtgttaattgtagcgcat

SEQ ID NO: 217880 - DNA, 25 bp, Probe sequence
atcaatatcaattattagtgttaat

SEQ ID NO: 217881 - DNA, 25 bp, Probe sequence
atgttgttaacaactcctataagat

SEQ ID NO: 217882 - DNA, 25 bp, Probe sequence
agtgttaattgtagcgcatcccaat

SEQ ID NO: 217883 - DNA, 25 bp, Probe sequence
actcctataagattatatttaattg

SEQ ID NO: 217884 - DNA, 25 bp, Probe sequence
acaactcctataagattatatttaa

SEQ ID NO: 217885 - DNA, 25 bp, Probe sequence
aacaactcctataagattatattta

SEQ ID NO: 217886 - DNA, 25 bp, Probe sequence
aactcctataagattatatttaatt

SEQ ID NO: 217887 - DNA, 25 bp, Probe sequence
aattatcaatatcaattattagtgt

SEQ ID NO: 217888 - DNA, 25 bp, Probe sequence
caactcctataagattatatttaat

SEQ ID NO: 217889 - DNA, 25 bp, Probe sequence
catgttgttaacaactcctataaga

SEQ ID NO: 217890 - DNA, 25 bp, Probe sequence
gttgttaacaactcctataagatta

SEQ ID NO: 217891 - DNA, 25 bp, Probe sequence
gttcatgttgttaacaactcctata

SEQ ID NO: 217892 - DNA, 25 bp, Probe sequence
gttaacaactcctataagattatat

SEQ ID NO: 217893 - DNA, 25 bp, Probe sequence
tgttaacaactcctataagattata

SEQ ID NO: 217894 - DNA, 25 bp, Probe sequence
tgttcatgttgttaacaactcctat

SEQ ID NO: 217895 - DNA, 25 bp, Probe sequence
tgttgttaacaactcctataagatt

SEQ ID NO: 217896 - DNA, 25 bp, Probe sequence
tcatgttgttaacaactcctataag

SEQ ID NO: 217897 - DNA, 25 bp, Probe sequence
taacaactcctataagattatattt

SEQ ID NO: 217898 - DNA, 25 bp, Probe sequence
tagtgttaattgtagcgcatcccaa

SEQ ID NO: 217899 - DNA, 25 bp, Probe sequence
tatcaatatcaattattagtgttaa

SEQ ID NO: 217900 - DNA, 25 bp, Probe sequence
tattagtgttaattgtagcgcatcc

SEQ ID NO: 217901 - DNA, 25 bp, Probe sequence
ttagtgttaattgtagcgcatccca

SEQ ID NO: 217902 - DNA, 25 bp, Probe sequence
ttattagtgttaattgtagcgcatc

SEQ ID NO: 217903 - DNA, 25 bp, Probe sequence
ttatcaatatcaattattagtgtta

SEQ ID NO: 217904 - DNA, 25 bp, Probe sequence
ttaacaactcctataagattatatt

SEQ ID NO: 217905 - DNA, 25 bp, Probe sequence
ttcatgttgttaacaactcctataa

SEQ ID NO: 217906 - DNA, 25 bp, Probe sequence
ttgttaacaactcctataagattat

SEQ ID NO: 217907 - DNA, 25 bp, Probe sequence
ttgttcatgttgttaacaactccta

SEQ ID NO: 217908 - DNA, 25 bp, Probe sequence
attgaacctgttgtgacgttatcac

SEQ ID NO: 217909 - DNA, 25 bp, Probe sequence
attgatgttatgacgagtggtgcac

SEQ ID NO: 217910 - DNA, 25 bp, Probe sequence
attattttgtgcattttgcgcgtgt

SEQ ID NO: 217911 - DNA, 25 bp, Probe sequence
atgaacttttagccagtgctttagc

SEQ ID NO: 217912 - DNA, 25 bp, Probe sequence
agaggttattatccaagctatgcta

SEQ ID NO: 217913 - DNA, 25 bp, Probe sequence
acgagtgattggggttgggcgattg

SEQ ID NO: 217914 - DNA, 25 bp, Probe sequence
aaatggttttggtgcagttgatgaa

SEQ ID NO: 217915 - DNA, 25 bp, Probe sequence
aaagcacatattacagcagcgatag

SEQ ID NO: 217916 - DNA, 25 bp, Probe sequence
ggacacgtatctttccgaatgggga

SEQ ID NO: 217917 - DNA, 25 bp, Probe sequence
aagattcgttctattggtatcaaca

SEQ ID NO: 217918 - DNA, 25 bp, Probe sequence
caacggtggtttgaatcattctgtg

SEQ ID NO: 217919 - DNA, 25 bp, Probe sequence
catttatccatattcgtgtcatccg

SEQ ID NO: 217920 - DNA, 25 bp, Probe sequence
cctatctttttatggacgaattctg

SEQ ID NO: 217921 - DNA, 25 bp, Probe sequence
gccttttatgatcgtatctttgatg

SEQ ID NO: 217922 - DNA, 25 bp, Probe sequence
gctttagttattacatgtctacggc

SEQ ID NO: 217923 - DNA, 25 bp, Probe sequence
gcattttgcgcgtgttgtatttgaa

SEQ ID NO: 217924 - DNA, 25 bp, Probe sequence
gaaggggacgacagtattttacagc

SEQ ID NO: 217925 - DNA, 25 bp, Probe sequence
gaagtcttgtatcaagtagcacatc

SEQ ID NO: 217926 - DNA, 25 bp, Probe sequence
gaaaacaacatcgtcaacggtggtt

SEQ ID NO: 217927 - DNA, 25 bp, Probe sequence
gacacatcaaatcctatctttttat

SEQ ID NO: 217928 - DNA, 25 bp, Probe sequence
gatggaagcacaaattgcgaatcgc

SEQ ID NO: 217929 - DNA, 25 bp, Probe sequence
gatttcacatgtacccatttatcca

SEQ ID NO: 217930 - DNA, 25 bp, Probe sequence
gttgggcgattgatccagatggctt

SEQ ID NO: 217931 - DNA, 25 bp, Probe sequence
gtattttacagcagggcacggttga

SEQ ID NO: 217932 - DNA, 25 bp, Probe sequence
gtagcacatcatgaacttttagcca

SEQ ID NO: 217933 - DNA, 25 bp, Probe sequence
gtctacggctgtaaaacatgatgtt

SEQ ID NO: 217934 - DNA, 25 bp, Probe sequence
ggagaatccgcatatcgcaacgagt

SEQ ID NO: 217935 - DNA, 25 bp, Probe sequence
gggcacggttgattatattggcttt

SEQ ID NO: 217936 - DNA, 25 bp, Probe sequence
ggattgaaatgtttacgtacgtcga

SEQ ID NO: 217937 - DNA, 25 bp, Probe sequence
ggacgaattctggggtagcattgac

SEQ ID NO: 217938 - DNA, 25 bp, Probe sequence
ggaacaatgatttcacatgtaccca

SEQ ID NO: 217939 - DNA, 25 bp, Probe sequence
tggcacgatggaacgcttgaaaaaa

SEQ ID NO: 217940 - DNA, 25 bp, Probe sequence
tgcgaatcgcttacgtttctttttc

SEQ ID NO: 217941 - DNA, 25 bp, Probe sequence
tatacaccgtggggaatcattgata

SEQ ID NO: 217942 - DNA, 25 bp, Probe sequence
attgcgagtaaaagtttgccttgga

SEQ ID NO: 217943 - DNA, 25 bp, Probe sequence
attaaatcactaaagcctgatgcag

SEQ ID NO: 217944 - DNA, 25 bp, Probe sequence
attaatacttttctgcagtgttatt

SEQ ID NO: 217945 - DNA, 25 bp, Probe sequence
atcactaaagcctgatgcagattgg

SEQ ID NO: 217946 - DNA, 25 bp, Probe sequence
atcgttcaattaaatcactaaagcc

SEQ ID NO: 217947 - DNA, 25 bp, Probe sequence
atgcagattggattagaattgcgag

SEQ ID NO: 217948 - DNA, 25 bp, Probe sequence
agcctgatgcagattggattagaat

SEQ ID NO: 217949 - DNA, 25 bp, Probe sequence
aaatcactaaagcctgatgcagatt

SEQ ID NO: 217950 - DNA, 25 bp, Probe sequence
aaagtttgccttggattattctaat

SEQ ID NO: 217951 - DNA, 25 bp, Probe sequence
aatacttttctgcagtgttattaac

SEQ ID NO: 217952 - DNA, 25 bp, Probe sequence
aatacttttacttatctagcttaat

SEQ ID NO: 217953 - DNA, 25 bp, Probe sequence
aatttttgcagatcgttcaattaaa

SEQ ID NO: 217954 - DNA, 25 bp, Probe sequence
aattaatacttttctgcagtgttat

SEQ ID NO: 217955 - DNA, 25 bp, Probe sequence
cactaaagcctgatgcagattggat

SEQ ID NO: 217956 - DNA, 25 bp, Probe sequence
cttttacttatctagcttaatgatt

SEQ ID NO: 217957 - DNA, 25 bp, Probe sequence
cttttctgcagtgttattaactcaa

SEQ ID NO: 217958 - DNA, 25 bp, Probe sequence
cgttcaattaaatcactaaagcctg

SEQ ID NO: 217959 - DNA, 25 bp, Probe sequence
gcgagtaaaagtttgccttggatta

SEQ ID NO: 217960 - DNA, 25 bp, Probe sequence
gcagtgttattaactcaattgtact

SEQ ID NO: 217961 - DNA, 25 bp, Probe sequence
gcagatcgttcaattaaatcactaa

SEQ ID NO: 217962 - DNA, 25 bp, Probe sequence
gaattgcgagtaaaagtttgccttg

SEQ ID NO: 217963 - DNA, 25 bp, Probe sequence
gtaaaagtttgccttggattattct

SEQ ID NO: 217964 - DNA, 25 bp, Probe sequence
gtctataatttttgcagatcgttca

SEQ ID NO: 217965 - DNA, 25 bp, Probe sequence
gtgttattaactcaattgtactaat

SEQ ID NO: 217966 - DNA, 25 bp, Probe sequence
tctgcagtgttattaactcaattgt

SEQ ID NO: 217967 - DNA, 25 bp, Probe sequence
taatgattattttaagctttttctt

SEQ ID NO: 217968 - DNA, 25 bp, Probe sequence
taaagcctgatgcagattggattag

SEQ ID NO: 217969 - DNA, 25 bp, Probe sequence
taaattaatacttttctgcagtgtt

SEQ ID NO: 217970 - DNA, 25 bp, Probe sequence
tacttttacttatctagcttaatga

SEQ ID NO: 217971 - DNA, 25 bp, Probe sequence
tacttttctgcagtgttattaactc

SEQ ID NO: 217972 - DNA, 25 bp, Probe sequence
tacttatctagcttaatgattattt

SEQ ID NO: 217973 - DNA, 25 bp, Probe sequence
tataatttttgcagatcgttcaatt

SEQ ID NO: 217974 - DNA, 25 bp, Probe sequence
tttgcagatcgttcaattaaatcac

SEQ ID NO: 217975 - DNA, 25 bp, Probe sequence
ttgtctataatttttgcagatcgtt

SEQ ID NO: 217976 - DNA, 25 bp, Probe sequence
attgaactatgtgattgaaaaattt

SEQ ID NO: 217977 - DNA, 25 bp, Probe sequence
atattgaactatgtgattgaaaaat

SEQ ID NO: 217978 - DNA, 25 bp, Probe sequence
ataccttttaatgattatgataaca

SEQ ID NO: 217979 - DNA, 25 bp, Probe sequence
atgatgtatattgaactatgtgatt

SEQ ID NO: 217980 - DNA, 25 bp, Probe sequence
atgattatgataacaagaattttaa

SEQ ID NO: 217981 - DNA, 25 bp, Probe sequence
atgtatattgaactatgtgattgaa

SEQ ID NO: 217982 - DNA, 25 bp, Probe sequence
tattgaactatgtgattgaaaaatt

SEQ ID NO: 217983 - DNA, 25 bp, Probe sequence
aggttaataccttttaatgattatg

SEQ ID NO: 217984 - DNA, 25 bp, Probe sequence
agaattttaaaatgtttattgtgat

SEQ ID NO: 217985 - DNA, 25 bp, Probe sequence
accttttaatgattatgataacaag

SEQ ID NO: 217986 - DNA, 25 bp, Probe sequence
aaatgatgtatattgaactatgtga

SEQ ID NO: 217987 - DNA, 25 bp, Probe sequence
aatgatgtatattgaactatgtgat

SEQ ID NO: 217988 - DNA, 25 bp, Probe sequence
aataccttttaatgattatgataac

SEQ ID NO: 217989 - DNA, 25 bp, Probe sequence
ccttttaatgattatgataacaaga

SEQ ID NO: 217990 - DNA, 25 bp, Probe sequence
gaactatgtgattgaaaaattttaa

SEQ ID NO: 217991 - DNA, 25 bp, Probe sequence
gacgagagaatatattattaaggtt

SEQ ID NO: 217992 - DNA, 25 bp, Probe sequence
gagacgagagaatatattattaagg

SEQ ID NO: 217993 - DNA, 25 bp, Probe sequence
gatgtatattgaactatgtgattga

SEQ ID NO: 217994 - DNA, 25 bp, Probe sequence
gttaataccttttaatgattatgat

SEQ ID NO: 217995 - DNA, 25 bp, Probe sequence
gtatattgaactatgtgattgaaaa

SEQ ID NO: 217996 - DNA, 25 bp, Probe sequence
ggttaataccttttaatgattatga

SEQ ID NO: 217997 - DNA, 25 bp, Probe sequence
tgtatattgaactatgtgattgaaa

SEQ ID NO: 217998 - DNA, 25 bp, Probe sequence
tgatgtatattgaactatgtgattg

SEQ ID NO: 217999 - DNA, 25 bp, Probe sequence
tgaactatgtgattgaaaaatttta

SEQ ID NO: 218000 - DNA, 25 bp, Probe sequence
taataccttttaatgattatgataa

SEQ ID NO: 218001 - DNA, 25 bp, Probe sequence
taccttttaatgattatgataacaa

SEQ ID NO: 218002 - DNA, 25 bp, Probe sequence
tatattgaactatgtgattgaaaaa

SEQ ID NO: 218003 - DNA, 25 bp, Probe sequence
ttaataccttttaatgattatgata

SEQ ID NO: 218004 - DNA, 25 bp, Probe sequence
ttgaactatgtgattgaaaaatttt

SEQ ID NO: 218005 - DNA, 25 bp, Probe sequence
ttgagacgagagaatatattattaa

SEQ ID NO: 218006 - DNA, 25 bp, Probe sequence
atttgaaaatggccattttgtctaa

SEQ ID NO: 218007 - DNA, 25 bp, Probe sequence
atgatgctgttaatcgtattgtgtt

SEQ ID NO: 218008 - DNA, 25 bp, Probe sequence
aggtcagaaacaacgcgtgatattt

SEQ ID NO: 218009 - DNA, 25 bp, Probe sequence
acgattatttcattcaagacatttg

SEQ ID NO: 218010 - DNA, 25 bp, Probe sequence
aagatggatggttatttagaaaaat

SEQ ID NO: 218011 - DNA, 25 bp, Probe sequence
aatcgtattgtgttaaaagatggat

SEQ ID NO: 218012 - DNA, 25 bp, Probe sequence
caaggtcagaaacaacgcgtgatat

SEQ ID NO: 218013 - DNA, 25 bp, Probe sequence
aaagagttcgaatatggtcgtttgt

SEQ ID NO: 218014 - DNA, 25 bp, Probe sequence
cagaaacaacgcgtgatatttgaaa

SEQ ID NO: 218015 - DNA, 25 bp, Probe sequence
catatgatgctgttaatcgtattgt

SEQ ID NO: 218016 - DNA, 25 bp, Probe sequence
cgattatttcattcaagacatttga

SEQ ID NO: 218017 - DNA, 25 bp, Probe sequence
gcgtgatatttgaaaatggccattt

SEQ ID NO: 218018 - DNA, 25 bp, Probe sequence
gctgttaatcgtattgtgttaaaag

SEQ ID NO: 218019 - DNA, 25 bp, Probe sequence
gcacgattatttcattcaagacatt

SEQ ID NO: 218020 - DNA, 25 bp, Probe sequence
gaaacagtagaattatcatatgatg

SEQ ID NO: 218021 - DNA, 25 bp, Probe sequence
gaaatatccagaaaaagagttcgaa

SEQ ID NO: 218022 - DNA, 25 bp, Probe sequence
gatgctgttaatcgtattgtgttaa

SEQ ID NO: 218023 - DNA, 25 bp, Probe sequence
gatacgtttttaatgtgcacgatta

SEQ ID NO: 218024 - DNA, 25 bp, Probe sequence
gttttttagaattgaaatatccaga

SEQ ID NO: 218025 - DNA, 25 bp, Probe sequence
gtttttaatgtgcacgattatttca

SEQ ID NO: 218026 - DNA, 25 bp, Probe sequence
gtttgttagttggacaacataaacg

SEQ ID NO: 218027 - DNA, 25 bp, Probe sequence
gtcagaaacaacgcgtgatatttga

SEQ ID NO: 218028 - DNA, 25 bp, Probe sequence
gtcgtttgttagttggacaacataa

SEQ ID NO: 218029 - DNA, 25 bp, Probe sequence
gtgcacgattatttcattcaagaca

SEQ ID NO: 218030 - DNA, 25 bp, Probe sequence
gtgttaaaatacggtacatctaaat

SEQ ID NO: 218031 - DNA, 25 bp, Probe sequence
ggtacatctaaattaatgttaactg

SEQ ID NO: 218032 - DNA, 25 bp, Probe sequence
tgtgcacgattatttcattcaagac

SEQ ID NO: 218033 - DNA, 25 bp, Probe sequence
taatgtgcacgattatttcattcaa

SEQ ID NO: 218034 - DNA, 25 bp, Probe sequence
taaaatacggtacatctaaattaat

SEQ ID NO: 218035 - DNA, 25 bp, Probe sequence
taaattaatgttaactgattttcaa

SEQ ID NO: 218036 - DNA, 25 bp, Probe sequence
tacgtttttaatgtgcacgattatt

SEQ ID NO: 218037 - DNA, 25 bp, Probe sequence
tattcaaggtcagaaacaacgcgtg

SEQ ID NO: 218038 - DNA, 25 bp, Probe sequence
ttatcatatgatgctgttaatcgta

SEQ ID NO: 218039 - DNA, 25 bp, Probe sequence
ttcaaggtcagaaacaacgcgtgat

SEQ ID NO: 218040 - DNA, 25 bp, Probe sequence
atacccattgcatacctttagtgac

SEQ ID NO: 218041 - DNA, 25 bp, Probe sequence
ataaaactccatgccgcttgtaacg

SEQ ID NO: 218042 - DNA, 25 bp, Probe sequence
atcagtccatgctgactttacgcca

SEQ ID NO: 218043 - DNA, 25 bp, Probe sequence
accgcaccacctaaagcaagtacac

SEQ ID NO: 218044 - DNA, 25 bp, Probe sequence
actacaggtactacgctcgctatta

SEQ ID NO: 218045 - DNA, 25 bp, Probe sequence
gactaatcttgctgctaatggcccc

SEQ ID NO: 218046 - DNA, 25 bp, Probe sequence
acttagcttctgcttcagcgatatc

SEQ ID NO: 218047 - DNA, 25 bp, Probe sequence
acttgcgcatttatatttccaccta

SEQ ID NO: 218048 - DNA, 25 bp, Probe sequence
acaaagccagcgccggctattgcta

SEQ ID NO: 218049 - DNA, 25 bp, Probe sequence
aaaggttccacaccgttgttgcaat

SEQ ID NO: 218050 - DNA, 25 bp, Probe sequence
aaacccttgagattgtcctacttgt

SEQ ID NO: 218051 - DNA, 25 bp, Probe sequence
aactaatcctcttgcaatgttcccg

SEQ ID NO: 218052 - DNA, 25 bp, Probe sequence
aatagctgtccatatcgtcataact

SEQ ID NO: 218053 - DNA, 25 bp, Probe sequence
aattgcgtttagcatttctgccgtt

SEQ ID NO: 218054 - DNA, 25 bp, Probe sequence
ctcttccattcctcttgaaatacca

SEQ ID NO: 218055 - DNA, 25 bp, Probe sequence
gctacacttgcttcaatagtcgctt

SEQ ID NO: 218056 - DNA, 25 bp, Probe sequence
gctataggagccatcgctgttgcga

SEQ ID NO: 218057 - DNA, 25 bp, Probe sequence
gaaaccgcctgcagcacttaatagc

SEQ ID NO: 218058 - DNA, 25 bp, Probe sequence
gacacgtttcttttctagttctgat

SEQ ID NO: 218059 - DNA, 25 bp, Probe sequence
gacctaatctatccaaccaatcagc

SEQ ID NO: 218060 - DNA, 25 bp, Probe sequence
gaccattccctaaacttagctgtca

SEQ ID NO: 218061 - DNA, 25 bp, Probe sequence
gatgctacaccgctattttgagccc

SEQ ID NO: 218062 - DNA, 25 bp, Probe sequence
gataattccattccataacccttgt

SEQ ID NO: 218063 - DNA, 25 bp, Probe sequence
gtttgatctgctactcttttgaatt

SEQ ID NO: 218064 - DNA, 25 bp, Probe sequence
gtatcgacatctacctttgttgttt

SEQ ID NO: 218065 - DNA, 25 bp, Probe sequence
ggatcatatcagcacctgcagacac

SEQ ID NO: 218066 - DNA, 25 bp, Probe sequence
tggccccagaaaatccattaccgct

SEQ ID NO: 218067 - DNA, 25 bp, Probe sequence
tgtcctacttgttcagaccattccc

SEQ ID NO: 218068 - DNA, 25 bp, Probe sequence
tgaccagccatttgtccaatacctc

SEQ ID NO: 218069 - DNA, 25 bp, Probe sequence
taagtacactttgagacgcctcttc

SEQ ID NO: 218070 - DNA, 25 bp, Probe sequence
taaacgtttttatcgcattccaagc

SEQ ID NO: 218071 - DNA, 25 bp, Probe sequence
tagctggatgcgcctcaaacaagtt

SEQ ID NO: 218072 - DNA, 25 bp, Probe sequence
tagcgttccaaaccttagttgccac

SEQ ID NO: 218073 - DNA, 25 bp, Probe sequence
tattagctaaattccccatctgtct

SEQ ID NO: 218074 - DNA, 25 bp, Probe sequence
attccggtataaaatatagctacgc

SEQ ID NO: 218075 - DNA, 25 bp, Probe sequence
atctacaaaaatttatcgaacacct

SEQ ID NO: 218076 - DNA, 25 bp, Probe sequence
atcgaacacctaattctttgttaga

SEQ ID NO: 218077 - DNA, 25 bp, Probe sequence
agtggatatattttttggtgatgta

SEQ ID NO: 218078 - DNA, 25 bp, Probe sequence
agctgctattgaacacagaaactct

SEQ ID NO: 218079 - DNA, 25 bp, Probe sequence
agcgatttagctagtatatacaacg

SEQ ID NO: 218080 - DNA, 25 bp, Probe sequence
acgcaaatgatttaccggcttcttt

SEQ ID NO: 218081 - DNA, 25 bp, Probe sequence
aaacattcagtcaaagctgctattg

SEQ ID NO: 218082 - DNA, 25 bp, Probe sequence
aaaaaggctagctacatcactactt

SEQ ID NO: 218083 - DNA, 25 bp, Probe sequence
aactcattctgacttatatttatca

SEQ ID NO: 218084 - DNA, 25 bp, Probe sequence
aagtcatacatgattttcaaatgtt

SEQ ID NO: 218085 - DNA, 25 bp, Probe sequence
aatgtttaacttgagcgatttagct

SEQ ID NO: 218086 - DNA, 25 bp, Probe sequence
caaatgatttaccggcttctttaag

SEQ ID NO: 218087 - DNA, 25 bp, Probe sequence
cagaaactctattatgcatggtatt

SEQ ID NO: 218088 - DNA, 25 bp, Probe sequence
gctgtctaatgtatataagtctctt

SEQ ID NO: 218089 - DNA, 25 bp, Probe sequence
gcttatgattgctttatgtctgaaa

SEQ ID NO: 218090 - DNA, 25 bp, Probe sequence
gaatatcagtttttacagaggttta

SEQ ID NO: 218091 - DNA, 25 bp, Probe sequence
gaaagatctttcgagaagttaagtg

SEQ ID NO: 218092 - DNA, 25 bp, Probe sequence
gacaaggattttgaaactcatatag

SEQ ID NO: 218093 - DNA, 25 bp, Probe sequence
gacgaaatagctaagctgtctaatg

SEQ ID NO: 218094 - DNA, 25 bp, Probe sequence
gagcgctagaactaatgtgtaggct

SEQ ID NO: 218095 - DNA, 25 bp, Probe sequence
gagtacaattcgataattcaaacat

SEQ ID NO: 218096 - DNA, 25 bp, Probe sequence
gaggtttaatttatattcacggtgg

SEQ ID NO: 218097 - DNA, 25 bp, Probe sequence
gataaaaatactggatacttcccct

SEQ ID NO: 218098 - DNA, 25 bp, Probe sequence
gtaggctgatattgaacaagtttga

SEQ ID NO: 218099 - DNA, 25 bp, Probe sequence
gggtcagaaggcatgcaagcgaaga

SEQ ID NO: 218100 - DNA, 25 bp, Probe sequence
ggctagctacatcactacttttagg

SEQ ID NO: 218101 - DNA, 25 bp, Probe sequence
tgcaattgcgcattattattttgaa

SEQ ID NO: 218102 - DNA, 25 bp, Probe sequence
tcacggtgggtcagaaggcatgcaa

SEQ ID NO: 218103 - DNA, 25 bp, Probe sequence
tacttttaggtagagcgctagaact

SEQ ID NO: 218104 - DNA, 25 bp, Probe sequence
tagctacgcagatttgaatatcagt

SEQ ID NO: 218105 - DNA, 25 bp, Probe sequence
tatacaacgacgatgcaattgcgca

SEQ ID NO: 218106 - DNA, 25 bp, Probe sequence
ttattttgaaactcattctgactta

SEQ ID NO: 218107 - DNA, 25 bp, Probe sequence
ttaaacaaacacctgattacaagag

SEQ ID NO: 218108 - DNA, 25 bp, Probe sequence
atacgaccccacattatcggtaact

SEQ ID NO: 218109 - DNA, 25 bp, Probe sequence
attcccgaatctaaaaatacaccat

SEQ ID NO: 218110 - DNA, 25 bp, Probe sequence
attttaaatctgtattcccgaatct

SEQ ID NO: 218111 - DNA, 25 bp, Probe sequence
atcacaaatgatacttctcgtcagc

SEQ ID NO: 218112 - DNA, 25 bp, Probe sequence
atgaagcgtgggtttgaacgtaaga

SEQ ID NO: 218113 - DNA, 25 bp, Probe sequence
atggatactcggacaatcaaccctt

SEQ ID NO: 218114 - DNA, 25 bp, Probe sequence
ggttcggaaatatccctattggcaa

SEQ ID NO: 218115 - DNA, 25 bp, Probe sequence
accacaagctaaatttatcactcgt

SEQ ID NO: 218116 - DNA, 25 bp, Probe sequence
actgttattttattctggtcttaga

SEQ ID NO: 218117 - DNA, 25 bp, Probe sequence
actcggacaatcaaccctttgaata

SEQ ID NO: 218118 - DNA, 25 bp, Probe sequence
acttctcgtcagctaactagactgt

SEQ ID NO: 218119 - DNA, 25 bp, Probe sequence
acaccatttaagacactcgtacgct

SEQ ID NO: 218120 - DNA, 25 bp, Probe sequence
aaagcagttatcaattacgccaaaa

SEQ ID NO: 218121 - DNA, 25 bp, Probe sequence
aacgtactctcatttatatactgat

SEQ ID NO: 218122 - DNA, 25 bp, Probe sequence
aagatgccaaactagctgaaagcga

SEQ ID NO: 218123 - DNA, 25 bp, Probe sequence
aatgaggcattctaacattacagaa

SEQ ID NO: 218124 - DNA, 25 bp, Probe sequence
ctattcccagaacaaaaccacaagc

SEQ ID NO: 218125 - DNA, 25 bp, Probe sequence
ctattggcaaaatcactactacgca

SEQ ID NO: 218126 - DNA, 25 bp, Probe sequence
gcgaactacagaatataatactcac

SEQ ID NO: 218127 - DNA, 25 bp, Probe sequence
gcattacaagctcttatacgacccc

SEQ ID NO: 218128 - DNA, 25 bp, Probe sequence
gcaggtctttctgttgactatgcac

SEQ ID NO: 218129 - DNA, 25 bp, Probe sequence
gaatatatattttttgatcgtttaa

SEQ ID NO: 218130 - DNA, 25 bp, Probe sequence
gaagctttagctttgcagtggaaag

SEQ ID NO: 218131 - DNA, 25 bp, Probe sequence
gaacctattagatacgttacttatt

SEQ ID NO: 218132 - DNA, 25 bp, Probe sequence
gaaaatctttctgcacgctcaatag

SEQ ID NO: 218133 - DNA, 25 bp, Probe sequence
gaaacaattcaaacgtactctcatt

SEQ ID NO: 218134 - DNA, 25 bp, Probe sequence
gacactcgtacgctagctatttaat

SEQ ID NO: 218135 - DNA, 25 bp, Probe sequence
gactatgcacgatctgtgtgggcag

SEQ ID NO: 218136 - DNA, 25 bp, Probe sequence
gttacttattcgtatcattttaaat

SEQ ID NO: 218137 - DNA, 25 bp, Probe sequence
gtgtgggcaggttttaaagcagtta

SEQ ID NO: 218138 - DNA, 25 bp, Probe sequence
ggataatacctgtaccaaatttaat

SEQ ID NO: 218139 - DNA, 25 bp, Probe sequence
tactacgcaatgtactgctttcagg

SEQ ID NO: 218140 - DNA, 25 bp, Probe sequence
ttatcggtaactcctattcccagaa

SEQ ID NO: 218141 - DNA, 25 bp, Probe sequence
ttgttaaacgatgcaggtctttctg

SEQ ID NO: 218142 - DNA, 25 bp, Probe sequence
atttccgaggttatagttcatatgg

SEQ ID NO: 218143 - DNA, 25 bp, Probe sequence
atatcaatatttctccttatccagc

SEQ ID NO: 218144 - DNA, 25 bp, Probe sequence
ataccgattggaattgtacgtccgc

SEQ ID NO: 218145 - DNA, 25 bp, Probe sequence
atcactatacgatgtatcagaccgt

SEQ ID NO: 218146 - DNA, 25 bp, Probe sequence
atcggtgaagttccgccattgcatt

SEQ ID NO: 218147 - DNA, 25 bp, Probe sequence
atggtgttaatgaacatggcgttgc

SEQ ID NO: 218148 - DNA, 25 bp, Probe sequence
aggtggatttacttcaactgagcgc

SEQ ID NO: 218149 - DNA, 25 bp, Probe sequence
agtagcattaaagctcacagatgat

SEQ ID NO: 218150 - DNA, 25 bp, Probe sequence
acacaatatttccgaggttatagtt

SEQ ID NO: 218151 - DNA, 25 bp, Probe sequence
aagcatcccaaatacatgttgtagc

SEQ ID NO: 218152 - DNA, 25 bp, Probe sequence
aagtacttcttggacgcacgatgga

SEQ ID NO: 218153 - DNA, 25 bp, Probe sequence
gccattgcattatcatgtttccgat

SEQ ID NO: 218154 - DNA, 25 bp, Probe sequence
gcctgagaagcatatcactattaga

SEQ ID NO: 218155 - DNA, 25 bp, Probe sequence
gcacaggattcacaatacaaacttt

SEQ ID NO: 218156 - DNA, 25 bp, Probe sequence
gaattgtacgtccgcatgatgctga

SEQ ID NO: 218157 - DNA, 25 bp, Probe sequence
gaagcaggtacatttggattgccag

SEQ ID NO: 218158 - DNA, 25 bp, Probe sequence
gaaacaacaagcatcccaaatacat

SEQ ID NO: 218159 - DNA, 25 bp, Probe sequence
gatgctgacaatcactatacgatgt

SEQ ID NO: 218160 - DNA, 25 bp, Probe sequence
gattatccattagatggttcgccag

SEQ ID NO: 218161 - DNA, 25 bp, Probe sequence
gatttttaagcctgagaagcatatc

SEQ ID NO: 218162 - DNA, 25 bp, Probe sequence
gtatcagaccgtaataaatttaact

SEQ ID NO: 218163 - DNA, 25 bp, Probe sequence
gtacgtccgcatgatgctgacaatc

SEQ ID NO: 218164 - DNA, 25 bp, Probe sequence
gtgaagttccgccattgcattatca

SEQ ID NO: 218165 - DNA, 25 bp, Probe sequence
gtgacgcctagaaattatcgttgga

SEQ ID NO: 218166 - DNA, 25 bp, Probe sequence
ggattgccaggtggatttacttcaa

SEQ ID NO: 218167 - DNA, 25 bp, Probe sequence
ggacgcacgatggattatgattatc

SEQ ID NO: 218168 - DNA, 25 bp, Probe sequence
ggaaggttttatttatggtgatggt

SEQ ID NO: 218169 - DNA, 25 bp, Probe sequence
tcgccagcagtgacgcctagaaatt

SEQ ID NO: 218170 - DNA, 25 bp, Probe sequence
tacttcaactgagcgctttgtgaga

SEQ ID NO: 218171 - DNA, 25 bp, Probe sequence
tttctccttatccagcaacagcaaa

SEQ ID NO: 218172 - DNA, 25 bp, Probe sequence
tattaagtattatggcagcaatgaa

SEQ ID NO: 218173 - DNA, 25 bp, Probe sequence
ttagatggttcgccagcagtgacgc

SEQ ID NO: 218174 - DNA, 25 bp, Probe sequence
ttgaacctttaggcaatgaagcagg

SEQ ID NO: 218175 - DNA, 25 bp, Probe sequence
ttggtgtcttaacaaatcatccaga

SEQ ID NO: 218176 - DNA, 25 bp, Probe sequence
gtgaaaagggttgtttatggggcat

SEQ ID NO: 218177 - DNA, 25 bp, Probe sequence
attctacttttcttattgattctgt

SEQ ID NO: 218178 - DNA, 25 bp, Probe sequence
attagcatgttgattctacttttct

SEQ ID NO: 218179 - DNA, 25 bp, Probe sequence
atcaagcattcactttattaattag

SEQ ID NO: 218180 - DNA, 25 bp, Probe sequence
atgttgattctacttttcttattga

SEQ ID NO: 218181 - DNA, 25 bp, Probe sequence
agcatgttgattctacttttcttat

SEQ ID NO: 218182 - DNA, 25 bp, Probe sequence
acttttcttattgattctgtttgga

SEQ ID NO: 218183 - DNA, 25 bp, Probe sequence
aactgcttgttcatcaagcattcac

SEQ ID NO: 218184 - DNA, 25 bp, Probe sequence
aagggttgtttatggggcattagca

SEQ ID NO: 218185 - DNA, 25 bp, Probe sequence
catgttgattctacttttcttattg

SEQ ID NO: 218186 - DNA, 25 bp, Probe sequence
cttgttcatcaagcattcactttat

SEQ ID NO: 218187 - DNA, 25 bp, Probe sequence
cttttcttattgattctgtttggaa

SEQ ID NO: 218188 - DNA, 25 bp, Probe sequence
ctacttttcttattgattctgtttg

SEQ ID NO: 218189 - DNA, 25 bp, Probe sequence
gcattagcatgttgattctactttt

SEQ ID NO: 218190 - DNA, 25 bp, Probe sequence
gcatgttgattctacttttcttatt

SEQ ID NO: 218191 - DNA, 25 bp, Probe sequence
gattctacttttcttattgattctg

SEQ ID NO: 218192 - DNA, 25 bp, Probe sequence
gattctgtttggaataactgcttgt

SEQ ID NO: 218193 - DNA, 25 bp, Probe sequence
gttgtttatggggcattagcatgtt

SEQ ID NO: 218194 - DNA, 25 bp, Probe sequence
gttgattctacttttcttattgatt

SEQ ID NO: 218195 - DNA, 25 bp, Probe sequence
gttcatcaagcattcactttattaa

SEQ ID NO: 218196 - DNA, 25 bp, Probe sequence
gtttatggggcattagcatgttgat

SEQ ID NO: 218197 - DNA, 25 bp, Probe sequence
gtttggaataactgcttgttcatca

SEQ ID NO: 218198 - DNA, 25 bp, Probe sequence
gggcattagcatgttgattctactt

SEQ ID NO: 218199 - DNA, 25 bp, Probe sequence
gggttgtttatggggcattagcatg

SEQ ID NO: 218200 - DNA, 25 bp, Probe sequence
ggggcattagcatgttgattctact

SEQ ID NO: 218201 - DNA, 25 bp, Probe sequence
tggggcattagcatgttgattctac

SEQ ID NO: 218202 - DNA, 25 bp, Probe sequence
tgttcatcaagcattcactttatta

SEQ ID NO: 218203 - DNA, 25 bp, Probe sequence
tctgtttggaataactgcttgttca

SEQ ID NO: 218204 - DNA, 25 bp, Probe sequence
tcatcaagcattcactttattaatt

SEQ ID NO: 218205 - DNA, 25 bp, Probe sequence
tatggggcattagcatgttgattct

SEQ ID NO: 218206 - DNA, 25 bp, Probe sequence
ttagcatgttgattctacttttctt

SEQ ID NO: 218207 - DNA, 25 bp, Probe sequence
ttctacttttcttattgattctgtt

SEQ ID NO: 218208 - DNA, 25 bp, Probe sequence
ttgattctacttttcttattgattc

SEQ ID NO: 218209 - DNA, 25 bp, Probe sequence
ttggaataactgcttgttcatcaag

SEQ ID NO: 218210 - DNA, 25 bp, Probe sequence
atttacaatggcgcatcaagcagat

SEQ ID NO: 218211 - DNA, 25 bp, Probe sequence
atatggacaatatcacggtggtggt

SEQ ID NO: 218212 - DNA, 25 bp, Probe sequence
atcaatcaaatgtaggtccagacgc

SEQ ID NO: 218213 - DNA, 25 bp, Probe sequence
atcaatatgcagtagacccaacgtc

SEQ ID NO: 218214 - DNA, 25 bp, Probe sequence
atcacggtggtggtgcgcattacgg

SEQ ID NO: 218215 - DNA, 25 bp, Probe sequence
atgcagtagacccaacgtcatactt

SEQ ID NO: 218216 - DNA, 25 bp, Probe sequence
atggggattatcatcacacacctga

SEQ ID NO: 218217 - DNA, 25 bp, Probe sequence
agaaacgacaaacacccaacaagca

SEQ ID NO: 218218 - DNA, 25 bp, Probe sequence
acacttccaacgtatgtctggtggc

SEQ ID NO: 218219 - DNA, 25 bp, Probe sequence
aaagccaacagcatattaatcaata

SEQ ID NO: 218220 - DNA, 25 bp, Probe sequence
aactgtttcagctggtgataaagtc

SEQ ID NO: 218221 - DNA, 25 bp, Probe sequence
aataatcgtttaactgtttcagctg

SEQ ID NO: 218222 - DNA, 25 bp, Probe sequence
aatatagctatacattcgtagatgc

SEQ ID NO: 218223 - DNA, 25 bp, Probe sequence
cacacacctgatggtaactggaatc

SEQ ID NO: 218224 - DNA, 25 bp, Probe sequence
cggtgtcgactatgcaatgcctgaa

SEQ ID NO: 218225 - DNA, 25 bp, Probe sequence
cctcacgtacacttccaacgtatgt

SEQ ID NO: 218226 - DNA, 25 bp, Probe sequence
gcctgaaaattcaccagtttactca

SEQ ID NO: 218227 - DNA, 25 bp, Probe sequence
gctggtgaccaaattgcatattcag

SEQ ID NO: 218228 - DNA, 25 bp, Probe sequence
gcaggttggagtaactatggtggcg

SEQ ID NO: 218229 - DNA, 25 bp, Probe sequence
gaagcgaacagtaataactaccaat

SEQ ID NO: 218230 - DNA, 25 bp, Probe sequence
gacgtatcttatggtacttattata

SEQ ID NO: 218231 - DNA, 25 bp, Probe sequence
gacgcaagctggttaacaagtcgta

SEQ ID NO: 218232 - DNA, 25 bp, Probe sequence
gattgcaacgatgggcttcgctaca

SEQ ID NO: 218233 - DNA, 25 bp, Probe sequence
gtaacaacaaccaagcgtataacag

SEQ ID NO: 218234 - DNA, 25 bp, Probe sequence
gtaaacaactacaaccatatggaca

SEQ ID NO: 218235 - DNA, 25 bp, Probe sequence
gtctggtggcatcggtaatcaatat

SEQ ID NO: 218236 - DNA, 25 bp, Probe sequence
gtggtcatgcgaaagacgcaagctg

SEQ ID NO: 218237 - DNA, 25 bp, Probe sequence
ggtccagacgcgagctattattcac

SEQ ID NO: 218238 - DNA, 25 bp, Probe sequence
ggagataacaatgactacacagcga

SEQ ID NO: 218239 - DNA, 25 bp, Probe sequence
tggtgcgcattacggtgtcgactat

SEQ ID NO: 218240 - DNA, 25 bp, Probe sequence
tgggcttcgctacatttacaatggc

SEQ ID NO: 218241 - DNA, 25 bp, Probe sequence
tcaacacaatcacaagacgtatctt

SEQ ID NO: 218242 - DNA, 25 bp, Probe sequence
tacacagcgagtcaaagccaacagc

SEQ ID NO: 218243 - DNA, 25 bp, Probe sequence
ttaacagcagcagcgattgcaacga

SEQ ID NO: 218244 - DNA, 25 bp, Probe sequence
atcatttaaaaatagtggtcttcct

SEQ ID NO: 218245 - DNA, 25 bp, Probe sequence
atatctgaatacaccacttgctgaa

SEQ ID NO: 218246 - DNA, 25 bp, Probe sequence
atacaccacttgctgaagatagaaa

SEQ ID NO: 218247 - DNA, 25 bp, Probe sequence
atcagtacacaccatcattcagcga

SEQ ID NO: 218248 - DNA, 25 bp, Probe sequence
aggaatcagtacacaccatcattca

SEQ ID NO: 218249 - DNA, 25 bp, Probe sequence
agatgaacgtttgagaaattattta

SEQ ID NO: 218250 - DNA, 25 bp, Probe sequence
acggcaggaatcagtacacaccatc

SEQ ID NO: 218251 - DNA, 25 bp, Probe sequence
acaccatcattcagcgaaagctttt

SEQ ID NO: 218252 - DNA, 25 bp, Probe sequence
acacaccatcattcagcgaaagctt

SEQ ID NO: 218253 - DNA, 25 bp, Probe sequence
aaaggagagtctaaatcatcttatg

SEQ ID NO: 218254 - DNA, 25 bp, Probe sequence
aaggttactatacagtatatctgaa

SEQ ID NO: 218255 - DNA, 25 bp, Probe sequence
cagtacacaccatcattcagcgaaa

SEQ ID NO: 218256 - DNA, 25 bp, Probe sequence
catcttatgtaattaatggtcctgg

SEQ ID NO: 218257 - DNA, 25 bp, Probe sequence
cattcagcgaaagcttttacttttg

SEQ ID NO: 218258 - DNA, 25 bp, Probe sequence
ccatcattcagcgaaagcttttact

SEQ ID NO: 218259 - DNA, 25 bp, Probe sequence
gcaggaatcagtacacaccatcatt

SEQ ID NO: 218260 - DNA, 25 bp, Probe sequence
gcaacaacagttttagcattaagtt

SEQ ID NO: 218261 - DNA, 25 bp, Probe sequence
gaatcagtacacaccatcattcagc

SEQ ID NO: 218262 - DNA, 25 bp, Probe sequence
gaatacaccacttgctgaagataga

SEQ ID NO: 218263 - DNA, 25 bp, Probe sequence
gaaattagcaacaacagttttagca

SEQ ID NO: 218264 - DNA, 25 bp, Probe sequence
gagtctaaatcatcttatgtaatta

SEQ ID NO: 218265 - DNA, 25 bp, Probe sequence
gtacacaccatcattcagcgaaagc

SEQ ID NO: 218266 - DNA, 25 bp, Probe sequence
ggagagtctaaatcatcttatgtaa

SEQ ID NO: 218267 - DNA, 25 bp, Probe sequence
ggaaaattagatgaacgtttgagaa

SEQ ID NO: 218268 - DNA, 25 bp, Probe sequence
ggcaggaatcagtacacaccatcat

SEQ ID NO: 218269 - DNA, 25 bp, Probe sequence
tgaaccgtttcctacaaatgaagaa

SEQ ID NO: 218270 - DNA, 25 bp, Probe sequence
tctgaatacaccacttgctgaagat

SEQ ID NO: 218271 - DNA, 25 bp, Probe sequence
tcagtacacaccatcattcagcgaa

SEQ ID NO: 218272 - DNA, 25 bp, Probe sequence
tcagcgaaagcttttacttttgaac

SEQ ID NO: 218273 - DNA, 25 bp, Probe sequence
taacggcaggaatcagtacacacca

SEQ ID NO: 218274 - DNA, 25 bp, Probe sequence
tttgaaccgtttcctacaaatgaag

SEQ ID NO: 218275 - DNA, 25 bp, Probe sequence
tagcattaagttttttaacggcagg

SEQ ID NO: 218276 - DNA, 25 bp, Probe sequence
tatctgaatacaccacttgctgaag

SEQ ID NO: 218277 - DNA, 25 bp, Probe sequence
tatatctgaatacaccacttgctga

SEQ ID NO: 218278 - DNA, 25 bp, Probe sequence
atcaatccaactgctatctctactt

SEQ ID NO: 218279 - DNA, 25 bp, Probe sequence
aaatgattttccacatcctttcaaa

SEQ ID NO: 218280 - DNA, 25 bp, Probe sequence
aaacgagaacgatttacatattcaa

SEQ ID NO: 218281 - DNA, 25 bp, Probe sequence
aagtatggcaattaaacaatcttta

SEQ ID NO: 218282 - DNA, 25 bp, Probe sequence
aaggaactctataggtttgatgatg

SEQ ID NO: 218283 - DNA, 25 bp, Probe sequence
cataaatttattttctgacttcaaa

SEQ ID NO: 218284 - DNA, 25 bp, Probe sequence
ctaatggcattgcagcaggtgctga

SEQ ID NO: 218285 - DNA, 25 bp, Probe sequence
ctgacttcaaagtagactttcatct

SEQ ID NO: 218286 - DNA, 25 bp, Probe sequence
ccatcaattcgacctatccaataaa

SEQ ID NO: 218287 - DNA, 25 bp, Probe sequence
ccaactgctatctctactttggctg

SEQ ID NO: 218288 - DNA, 25 bp, Probe sequence
gcgtaattctttttcatctctaaca

SEQ ID NO: 218289 - DNA, 25 bp, Probe sequence
gctatctctactttggctgaagcca

SEQ ID NO: 218290 - DNA, 25 bp, Probe sequence
gcagcaggtgctgacattcaaatct

SEQ ID NO: 218291 - DNA, 25 bp, Probe sequence
gcacaacagaccattagagattttt

SEQ ID NO: 218292 - DNA, 25 bp, Probe sequence
gacacgatgaatttgtcaaacgtat

SEQ ID NO: 218293 - DNA, 25 bp, Probe sequence
gactttcatctaaacaacttaattg

SEQ ID NO: 218294 - DNA, 25 bp, Probe sequence
gagcaaagtacctacaagagacacg

SEQ ID NO: 218295 - DNA, 25 bp, Probe sequence
gagatttttatatcaatccaactgc

SEQ ID NO: 218296 - DNA, 25 bp, Probe sequence
gatggtctaatggcattgcagcagg

SEQ ID NO: 218297 - DNA, 25 bp, Probe sequence
gatgatgagattgtacttcaagcac

SEQ ID NO: 218298 - DNA, 25 bp, Probe sequence
gatagttgctatagtttgtttatta

SEQ ID NO: 218299 - DNA, 25 bp, Probe sequence
gattttccacatcctttcaaaaagt

SEQ ID NO: 218300 - DNA, 25 bp, Probe sequence
gtacctacaagagacacgatgaatt

SEQ ID NO: 218301 - DNA, 25 bp, Probe sequence
gtacttcaagcacaacagaccatta

SEQ ID NO: 218302 - DNA, 25 bp, Probe sequence
ggtgctgacattcaaatctttgtaa

SEQ ID NO: 218303 - DNA, 25 bp, Probe sequence
tggctgaagccatcaattcgaccta

SEQ ID NO: 218304 - DNA, 25 bp, Probe sequence
tgaagccatcaattcgacctatcca

SEQ ID NO: 218305 - DNA, 25 bp, Probe sequence
tcgacctattgttcacattctaaaa

SEQ ID NO: 218306 - DNA, 25 bp, Probe sequence
tattaagttttttatcgacctattg

SEQ ID NO: 218307 - DNA, 25 bp, Probe sequence
tttgcgtaattctttttcatctcta

SEQ ID NO: 218308 - DNA, 25 bp, Probe sequence
tttatcgacctattgttcacattct

SEQ ID NO: 218309 - DNA, 25 bp, Probe sequence
ttctttttcatctctaacatttcaa

SEQ ID NO: 218310 - DNA, 25 bp, Probe sequence
ttcgacctatccaataaatgagcaa

SEQ ID NO: 218311 - DNA, 25 bp, Probe sequence
ttggtgtatattgatcctttaaaaa

SEQ ID NO: 218312 - DNA, 25 bp, Probe sequence
atataacatttattaatttcacaaa

SEQ ID NO: 218313 - DNA, 25 bp, Probe sequence
atacctaccagaagctttaattact

SEQ ID NO: 218314 - DNA, 25 bp, Probe sequence
atggacataatcgcgatttgtatcg

SEQ ID NO: 218315 - DNA, 25 bp, Probe sequence
agctttaattacttggtcgatgaca

SEQ ID NO: 218316 - DNA, 25 bp, Probe sequence
acgttcaaacctatacgatataaag

SEQ ID NO: 218317 - DNA, 25 bp, Probe sequence
agcctgttatcatagaatcgcggac

SEQ ID NO: 218318 - DNA, 25 bp, Probe sequence
aacatcgatgttatacctaccagaa

SEQ ID NO: 218319 - DNA, 25 bp, Probe sequence
aactactccattccatttactttag

SEQ ID NO: 218320 - DNA, 25 bp, Probe sequence
aagataaaaactactccattccatt

SEQ ID NO: 218321 - DNA, 25 bp, Probe sequence
aagtttcccatttctgttattgacg

SEQ ID NO: 218322 - DNA, 25 bp, Probe sequence
aatttcacaaagtttcccatttctg

SEQ ID NO: 218323 - DNA, 25 bp, Probe sequence
ctccattccatttactttaggacct

SEQ ID NO: 218324 - DNA, 25 bp, Probe sequence
gcaaataaggtaagtgctctttcca

SEQ ID NO: 218325 - DNA, 25 bp, Probe sequence
gaatcgcggacagaacaccgagaat

SEQ ID NO: 218326 - DNA, 25 bp, Probe sequence
gaatgtacttttttgctcgaagaat

SEQ ID NO: 218327 - DNA, 25 bp, Probe sequence
gaacaccgagaatcagagccacaag

SEQ ID NO: 218328 - DNA, 25 bp, Probe sequence
gacagagttaacatcagcaaataag

SEQ ID NO: 218329 - DNA, 25 bp, Probe sequence
gactatcaaagtcactaccaacaaa

SEQ ID NO: 218330 - DNA, 25 bp, Probe sequence
gagccacaagtgacagagttaacat

SEQ ID NO: 218331 - DNA, 25 bp, Probe sequence
gatgttatacctaccagaagcttta

SEQ ID NO: 218332 - DNA, 25 bp, Probe sequence
gttattgacgttgaatttgatatta

SEQ ID NO: 218333 - DNA, 25 bp, Probe sequence
gtttcttactgactgcacttaaata

SEQ ID NO: 218334 - DNA, 25 bp, Probe sequence
gtgatatgggaatgggatgtgacta

SEQ ID NO: 218335 - DNA, 25 bp, Probe sequence
gggaatgggatgtgactatcaaagt

SEQ ID NO: 218336 - DNA, 25 bp, Probe sequence
ggtcgatgacaaatcaagttacaac

SEQ ID NO: 218337 - DNA, 25 bp, Probe sequence
ggacagaacaccgagaatcagagcc

SEQ ID NO: 218338 - DNA, 25 bp, Probe sequence
taaagcctgttatcatagaatcgcg

SEQ ID NO: 218339 - DNA, 25 bp, Probe sequence
tactgactgcacttaaatattattt

SEQ ID NO: 218340 - DNA, 25 bp, Probe sequence
tttgtatcgcaatttttagtttctt

SEQ ID NO: 218341 - DNA, 25 bp, Probe sequence
tttgctcgaagaatatccagtgata

SEQ ID NO: 218342 - DNA, 25 bp, Probe sequence
tttagtttcttactgactgcactta

SEQ ID NO: 218343 - DNA, 25 bp, Probe sequence
ttcacaaagtttcccatttctgtta

SEQ ID NO: 218344 - DNA, 25 bp, Probe sequence
ttccatttactttaggaccttatga

SEQ ID NO: 218345 - DNA, 25 bp, Probe sequence
ttcccatttctgttattgacgttga

SEQ ID NO: 218346 - DNA, 25 bp, Probe sequence
gaaaagccgggtgccagcgaaaact

SEQ ID NO: 218347 - DNA, 25 bp, Probe sequence
agttttgaaaagccgggtgccagcg

SEQ ID NO: 218348 - DNA, 25 bp, Probe sequence
atggtggtgagaattttatggcgga

SEQ ID NO: 218349 - DNA, 25 bp, Probe sequence
agcactttatcagaaaaagctaaga

SEQ ID NO: 218350 - DNA, 25 bp, Probe sequence
aaagcactttatcagaaaaagctaa

SEQ ID NO: 218351 - DNA, 25 bp, Probe sequence
aaaaagcactttatcagaaaaagct

SEQ ID NO: 218352 - DNA, 25 bp, Probe sequence
aaaagcactttatcagaaaaagcta

SEQ ID NO: 218353 - DNA, 25 bp, Probe sequence
aagcactttatcagaaaaagctaag

SEQ ID NO: 218354 - DNA, 25 bp, Probe sequence
aatggtggtgagaattttatggcgg

SEQ ID NO: 218355 - DNA, 25 bp, Probe sequence
gccagcgaaaacttaaaaagcactt

SEQ ID NO: 218356 - DNA, 25 bp, Probe sequence
gcactttatcagaaaaagctaagaa

SEQ ID NO: 218357 - DNA, 25 bp, Probe sequence
gaatggtggtgagaattttatggcg

SEQ ID NO: 218358 - DNA, 25 bp, Probe sequence
gaaaacttaaaaagcactttatcag

SEQ ID NO: 218359 - DNA, 25 bp, Probe sequence
gttttgaaaagccgggtgccagcga

SEQ ID NO: 218360 - DNA, 25 bp, Probe sequence
gtgccagcgaaaacttaaaaagcac

SEQ ID NO: 218361 - DNA, 25 bp, Probe sequence
gtggtgagaattttatggcggataa

SEQ ID NO: 218362 - DNA, 25 bp, Probe sequence
ggtgagaattttatggcggataaaa

SEQ ID NO: 218363 - DNA, 25 bp, Probe sequence
ggtggtgagaattttatggcggata

SEQ ID NO: 218364 - DNA, 25 bp, Probe sequence
ggtgccagcgaaaacttaaaaagca

SEQ ID NO: 218365 - DNA, 25 bp, Probe sequence
tgaaaagccgggtgccagcgaaaac

SEQ ID NO: 218366 - DNA, 25 bp, Probe sequence
tggtggtgagaattttatggcggat

SEQ ID NO: 218367 - DNA, 25 bp, Probe sequence
tggtgagaattttatggcggataaa

SEQ ID NO: 218368 - DNA, 25 bp, Probe sequence
tgccagcgaaaacttaaaaagcact

SEQ ID NO: 218369 - DNA, 25 bp, Probe sequence
ttttgaaaagccgggtgccagcgaa

SEQ ID NO: 218370 - DNA, 25 bp, Probe sequence
tttgaaaagccgggtgccagcgaaa

SEQ ID NO: 218371 - DNA, 25 bp, Probe sequence
ttgaaaagccgggtgccagcgaaaa

SEQ ID NO: 218372 - DNA, 25 bp, Probe sequence
ataccaattattacatcgcacgcat

SEQ ID NO: 218373 - DNA, 25 bp, Probe sequence
ataatgctttgaaatcagcctgtag

SEQ ID NO: 218374 - DNA, 25 bp, Probe sequence
atgaaaacacgttgttacgatggta

SEQ ID NO: 218375 - DNA, 25 bp, Probe sequence
aggttttagaacaaagcgtgaagct

SEQ ID NO: 218376 - DNA, 25 bp, Probe sequence
acatcgcacgcattaagacacactc

SEQ ID NO: 218377 - DNA, 25 bp, Probe sequence
acactcattgttcttatttactagc

SEQ ID NO: 218378 - DNA, 25 bp, Probe sequence
aagaaaaattcatctcggtaactga

SEQ ID NO: 218379 - DNA, 25 bp, Probe sequence
aacactatatttattgacgagcgaa

SEQ ID NO: 218380 - DNA, 25 bp, Probe sequence
aatacctaccgtcattatagaaatg

SEQ ID NO: 218381 - DNA, 25 bp, Probe sequence
aattctgctggactagacaagttaa

SEQ ID NO: 218382 - DNA, 25 bp, Probe sequence
caaacggtgctattcggtcagcttt

SEQ ID NO: 218383 - DNA, 25 bp, Probe sequence
cataatgatttgtacgggttgtcgt

SEQ ID NO: 218384 - DNA, 25 bp, Probe sequence
cgcacgcattaagacacactcattg

SEQ ID NO: 218385 - DNA, 25 bp, Probe sequence
gcgtgaagctaattctgctggacta

SEQ ID NO: 218386 - DNA, 25 bp, Probe sequence
gctatgatggttacattttcaaaga

SEQ ID NO: 218387 - DNA, 25 bp, Probe sequence
gaagagaactcgttcatcattagcg

SEQ ID NO: 218388 - DNA, 25 bp, Probe sequence
gaaatcagcctgtagagtcaataat

SEQ ID NO: 218389 - DNA, 25 bp, Probe sequence
gaaatactaaaagatcacgtcagaa

SEQ ID NO: 218390 - DNA, 25 bp, Probe sequence
gatcacgtcagaaagaagagaactc

SEQ ID NO: 218391 - DNA, 25 bp, Probe sequence
gatatgaaacacattatggacgtca

SEQ ID NO: 218392 - DNA, 25 bp, Probe sequence
gtacgggttgtcgtgtcagtggtgc

SEQ ID NO: 218393 - DNA, 25 bp, Probe sequence
gtgtattctcatttgttagaagaaa

SEQ ID NO: 218394 - DNA, 25 bp, Probe sequence
ggtgtatctatacattacatttcta

SEQ ID NO: 218395 - DNA, 25 bp, Probe sequence
ggtgctattcggtcagctttagatg

SEQ ID NO: 218396 - DNA, 25 bp, Probe sequence
ggttgtcgtgtcagtggtgcaagaa

SEQ ID NO: 218397 - DNA, 25 bp, Probe sequence
ggaaaacctacgaagtcagaacaag

SEQ ID NO: 218398 - DNA, 25 bp, Probe sequence
ggacgtcataagtacatttgcaatt

SEQ ID NO: 218399 - DNA, 25 bp, Probe sequence
tgagcatatcaaccaagtgaaaaac

SEQ ID NO: 218400 - DNA, 25 bp, Probe sequence
tcagctttagatgacgcattatatg

SEQ ID NO: 218401 - DNA, 25 bp, Probe sequence
tcagtatcgctaaatctgatatgaa

SEQ ID NO: 218402 - DNA, 25 bp, Probe sequence
taaagaaaatacctaccgtcattat

SEQ ID NO: 218403 - DNA, 25 bp, Probe sequence
tacttcccctagatatatcagtatc

SEQ ID NO: 218404 - DNA, 25 bp, Probe sequence
tagacaagtttatcagaaattcata

SEQ ID NO: 218405 - DNA, 25 bp, Probe sequence
tttgcaattagctatgatggttaca

SEQ ID NO: 218406 - DNA, 25 bp, Probe sequence
accaatcaccgatatgcgtaaccag

SEQ ID NO: 218407 - DNA, 25 bp, Probe sequence
attgcgacgacgaagcagtctaacc

SEQ ID NO: 218408 - DNA, 25 bp, Probe sequence
atcacatgagttacgtacaccttta

SEQ ID NO: 218409 - DNA, 25 bp, Probe sequence
atctatctttatcacacttccatgt

SEQ ID NO: 218410 - DNA, 25 bp, Probe sequence
aaacgtgtacaagaagcgcaggcta

SEQ ID NO: 218411 - DNA, 25 bp, Probe sequence
aaaacaactacaatcccttcatact

SEQ ID NO: 218412 - DNA, 25 bp, Probe sequence
aagtgagtatgccaaccgtcaagaa

SEQ ID NO: 218413 - DNA, 25 bp, Probe sequence
aatccactttataatcgaatgacga

SEQ ID NO: 218414 - DNA, 25 bp, Probe sequence
aattatcgactttaacatgttcatt

SEQ ID NO: 218415 - DNA, 25 bp, Probe sequence
aattggcgaattagctttagcattt

SEQ ID NO: 218416 - DNA, 25 bp, Probe sequence
gccacaatttttatctgttacccgt

SEQ ID NO: 218417 - DNA, 25 bp, Probe sequence
gaatgattcgactggtcaatgactt

SEQ ID NO: 218418 - DNA, 25 bp, Probe sequence
gaaggtctaatcgcacgtgttaact

SEQ ID NO: 218419 - DNA, 25 bp, Probe sequence
gaagcagtctaaccgtagtctaatc

SEQ ID NO: 218420 - DNA, 25 bp, Probe sequence
gaaaagggctccgtaaatgcacaaa

SEQ ID NO: 218421 - DNA, 25 bp, Probe sequence
gactggactcagttatcacccatat

SEQ ID NO: 218422 - DNA, 25 bp, Probe sequence
gacgattttcacagaatttgatcct

SEQ ID NO: 218423 - DNA, 25 bp, Probe sequence
gagcgtcgtgaatttgttgccaatg

SEQ ID NO: 218424 - DNA, 25 bp, Probe sequence
gaggcgataaacgtgtcgagttcca

SEQ ID NO: 218425 - DNA, 25 bp, Probe sequence
gatgaggaacttgcgccacaatttt

SEQ ID NO: 218426 - DNA, 25 bp, Probe sequence
gatattcgaccgattctatcgtgta

SEQ ID NO: 218427 - DNA, 25 bp, Probe sequence
gtgtcgagttccacgtgaaacaaaa

SEQ ID NO: 218428 - DNA, 25 bp, Probe sequence
gttctgtccaaaaagcactatcact

SEQ ID NO: 218429 - DNA, 25 bp, Probe sequence
gttatatcgctgtgttacatgacgt

SEQ ID NO: 218430 - DNA, 25 bp, Probe sequence
gtcaatgacttgctacagttatcta

SEQ ID NO: 218431 - DNA, 25 bp, Probe sequence
gtcatcctaggattctttatagcgc

SEQ ID NO: 218432 - DNA, 25 bp, Probe sequence
gtccagaggtaactatacgcaacgt

SEQ ID NO: 218433 - DNA, 25 bp, Probe sequence
ggtggtaaggaccgtgtctgggtat

SEQ ID NO: 218434 - DNA, 25 bp, Probe sequence
gggtggtactggattaggactagcc

SEQ ID NO: 218435 - DNA, 25 bp, Probe sequence
ggattaggactagccatttcgaaag

SEQ ID NO: 218436 - DNA, 25 bp, Probe sequence
tgttggtacagctatttcattatta

SEQ ID NO: 218437 - DNA, 25 bp, Probe sequence
tcattattaatcacagtcatcctag

SEQ ID NO: 218438 - DNA, 25 bp, Probe sequence
tacgtacacctttaacttctatgaa

SEQ ID NO: 218439 - DNA, 25 bp, Probe sequence
tagcgcgaacgattaccaaaccaat

SEQ ID NO: 218440 - DNA, 25 bp, Probe sequence
attgtctaggtattatcttgatgtt

SEQ ID NO: 218441 - DNA, 25 bp, Probe sequence
atagttcctgtaacacagcaagaag

SEQ ID NO: 218442 - DNA, 25 bp, Probe sequence
atagggttaagtatattcatcaata

SEQ ID NO: 218443 - DNA, 25 bp, Probe sequence
atcctgcagttaatgccatagcaat

SEQ ID NO: 218444 - DNA, 25 bp, Probe sequence
atggcctttacagctgtaattttga

SEQ ID NO: 218445 - DNA, 25 bp, Probe sequence
agtctaatagttcctgtaacacagc

SEQ ID NO: 218446 - DNA, 25 bp, Probe sequence
acgcgattatgtttttctacgctaa

SEQ ID NO: 218447 - DNA, 25 bp, Probe sequence
acgttattgtgggatatactttgcc

SEQ ID NO: 218448 - DNA, 25 bp, Probe sequence
aaatcctaatcctgcagttaatgcc

SEQ ID NO: 218449 - DNA, 25 bp, Probe sequence
aagaccatacttgactgtattggga

SEQ ID NO: 218450 - DNA, 25 bp, Probe sequence
aattgcctatgtatttactggtgtt

SEQ ID NO: 218451 - DNA, 25 bp, Probe sequence
ctttgccattgctttttgtatctat

SEQ ID NO: 218452 - DNA, 25 bp, Probe sequence
gccattgctttttgtatctatttac

SEQ ID NO: 218453 - DNA, 25 bp, Probe sequence
gcaagaagagatttttatagggtta

SEQ ID NO: 218454 - DNA, 25 bp, Probe sequence
gatgttttcaattattgtctaggta

SEQ ID NO: 218455 - DNA, 25 bp, Probe sequence
gatagtgaaaatcctaatcctgcag

SEQ ID NO: 218456 - DNA, 25 bp, Probe sequence
gatatctcacacttaacgttattgt

SEQ ID NO: 218457 - DNA, 25 bp, Probe sequence
gttgatgctcttcttgttaggtcat

SEQ ID NO: 218458 - DNA, 25 bp, Probe sequence
gtatctatttacgtttttggtgtag

SEQ ID NO: 218459 - DNA, 25 bp, Probe sequence
gtagttgcagtttcattattttttg

SEQ ID NO: 218460 - DNA, 25 bp, Probe sequence
gtcggttttggatttgatgttttca

SEQ ID NO: 218461 - DNA, 25 bp, Probe sequence
gtgtttatggcctttacagctgtaa

SEQ ID NO: 218462 - DNA, 25 bp, Probe sequence
gggatatactttgccattgcttttt

SEQ ID NO: 218463 - DNA, 25 bp, Probe sequence
gggagtatttgtagttgcagtttca

SEQ ID NO: 218464 - DNA, 25 bp, Probe sequence
ggtcatattttaattacgcgttata

SEQ ID NO: 218465 - DNA, 25 bp, Probe sequence
tgtggttagatatctcacacttaac

SEQ ID NO: 218466 - DNA, 25 bp, Probe sequence
tgctcttcttgttaggtcatatttt

SEQ ID NO: 218467 - DNA, 25 bp, Probe sequence
tactggtgtttatggcctttacagc

SEQ ID NO: 218468 - DNA, 25 bp, Probe sequence
tataattgttgatgctcttcttgtt

SEQ ID NO: 218469 - DNA, 25 bp, Probe sequence
tttggtgtagtcggttttggatttg

SEQ ID NO: 218470 - DNA, 25 bp, Probe sequence
tttgcttttggaggaatattttata

SEQ ID NO: 218471 - DNA, 25 bp, Probe sequence
ttttctacgctaaactatatgataa

SEQ ID NO: 218472 - DNA, 25 bp, Probe sequence
ttatcttgatgttatttatttcttg

SEQ ID NO: 218473 - DNA, 25 bp, Probe sequence
ttcattattttttgacgcgattatg

SEQ ID NO: 218474 - DNA, 25 bp, Probe sequence
atagcactgctgatgccgttcaaga

SEQ ID NO: 218475 - DNA, 25 bp, Probe sequence
atcttacgggcaaggttcagaccaa

SEQ ID NO: 218476 - DNA, 25 bp, Probe sequence
atctgatttaacacgtgcacaaggt

SEQ ID NO: 218477 - DNA, 25 bp, Probe sequence
agagcaattccaacaacttagtcct

SEQ ID NO: 218478 - DNA, 25 bp, Probe sequence
agcaattccaacaacttagtcctaa

SEQ ID NO: 218479 - DNA, 25 bp, Probe sequence
actgggaaggtcaagctttcagccg

SEQ ID NO: 218480 - DNA, 25 bp, Probe sequence
acaacaattgaatagcactgctgat

SEQ ID NO: 218481 - DNA, 25 bp, Probe sequence
aagctttcagccgtttcgaagagca

SEQ ID NO: 218482 - DNA, 25 bp, Probe sequence
aatcgcaatcttacgggcaaggttc

SEQ ID NO: 218483 - DNA, 25 bp, Probe sequence
aatccgtcaaattttatctgattta

SEQ ID NO: 218484 - DNA, 25 bp, Probe sequence
caattccaacaacttagtcctaaag

SEQ ID NO: 218485 - DNA, 25 bp, Probe sequence
caaggtgaaattgcagcgaactggg

SEQ ID NO: 218486 - DNA, 25 bp, Probe sequence
ctttctaataatttcggtttgcaat

SEQ ID NO: 218487 - DNA, 25 bp, Probe sequence
gggcaaggttcagaccaaatccgtc

SEQ ID NO: 218488 - DNA, 25 bp, Probe sequence
gcgaactgggaaggtcaagctttca

SEQ ID NO: 218489 - DNA, 25 bp, Probe sequence
gggaaggtcaagctttcagccgttt

SEQ ID NO: 218490 - DNA, 25 bp, Probe sequence
gctttcagccgtttcgaagagcaat

SEQ ID NO: 218491 - DNA, 25 bp, Probe sequence
gcaaaatcgcaatcttacgggcaag

SEQ ID NO: 218492 - DNA, 25 bp, Probe sequence
gcaaggttcagaccaaatccgtcaa

SEQ ID NO: 218493 - DNA, 25 bp, Probe sequence
gcaatcttacgggcaaggttcagac

SEQ ID NO: 218494 - DNA, 25 bp, Probe sequence
gaatagcactgctgatgccgttcaa

SEQ ID NO: 218495 - DNA, 25 bp, Probe sequence
gaaggtcaagctttcagccgtttcg

SEQ ID NO: 218496 - DNA, 25 bp, Probe sequence
gaaattgcagcgaactgggaaggtc

SEQ ID NO: 218497 - DNA, 25 bp, Probe sequence
gaccaaatccgtcaaattttatctg

SEQ ID NO: 218498 - DNA, 25 bp, Probe sequence
gaccaacaactttctaataatttcg

SEQ ID NO: 218499 - DNA, 25 bp, Probe sequence
gagcaaaatcgcaatcttacgggca

SEQ ID NO: 218500 - DNA, 25 bp, Probe sequence
gagtccagaggaaatcagagcaaaa

SEQ ID NO: 218501 - DNA, 25 bp, Probe sequence
gatttaacacgtgcacaaggtgaaa

SEQ ID NO: 218502 - DNA, 25 bp, Probe sequence
gtcctaaagtagaaaaatttgcaca

SEQ ID NO: 218503 - DNA, 25 bp, Probe sequence
ggttcagaccaaatccgtcaaattt

SEQ ID NO: 218504 - DNA, 25 bp, Probe sequence
ggcaatgattaagatgagtccagag

SEQ ID NO: 218505 - DNA, 25 bp, Probe sequence
tccaacaacttagtcctaaagtaga

SEQ ID NO: 218506 - DNA, 25 bp, Probe sequence
tcaagctttcagccgtttcgaagag

SEQ ID NO: 218507 - DNA, 25 bp, Probe sequence
ttttatctgatttaacacgtgcaca

SEQ ID NO: 218508 - DNA, 25 bp, Probe sequence
atatcgataacatgttcttcaatta

SEQ ID NO: 218509 - DNA, 25 bp, Probe sequence
atcataaccttgatggtcgcttatc

SEQ ID NO: 218510 - DNA, 25 bp, Probe sequence
aggtaaaatctatcggtatgttctt

SEQ ID NO: 218511 - DNA, 25 bp, Probe sequence
agttgaagtcaatggcgttgctaaa

SEQ ID NO: 218512 - DNA, 25 bp, Probe sequence
agacttacaagatgcgctaaatagc

SEQ ID NO: 218513 - DNA, 25 bp, Probe sequence
accaagtcatgattgttatcccaga

SEQ ID NO: 218514 - DNA, 25 bp, Probe sequence
acaagactttatagctgcaggttta

SEQ ID NO: 218515 - DNA, 25 bp, Probe sequence
aaagcatttatgagtaatccggttc

SEQ ID NO: 218516 - DNA, 25 bp, Probe sequence
aaaccgttagcagaacacattaatt

SEQ ID NO: 218517 - DNA, 25 bp, Probe sequence
aacgaggatcaaccaacgacatata

SEQ ID NO: 218518 - DNA, 25 bp, Probe sequence
aatgcagagcatcctataggcttgg

SEQ ID NO: 218519 - DNA, 25 bp, Probe sequence
aagttccatgtattagctggctata

SEQ ID NO: 218520 - DNA, 25 bp, Probe sequence
aagtagctgtgttacatcaaattga

SEQ ID NO: 218521 - DNA, 25 bp, Probe sequence
aagtgttcaactcgatacatctaac

SEQ ID NO: 218522 - DNA, 25 bp, Probe sequence
aattagacgctaaaacaccatcgaa

SEQ ID NO: 218523 - DNA, 25 bp, Probe sequence
aattgagtgcattatctaggtttga

SEQ ID NO: 218524 - DNA, 25 bp, Probe sequence
caatcacaagagtcaccattttcaa

SEQ ID NO: 218525 - DNA, 25 bp, Probe sequence
ctgttgcaacagatcctcattttaa

SEQ ID NO: 218526 - DNA, 25 bp, Probe sequence
cggtatgttcttaatgattgctgca

SEQ ID NO: 218527 - DNA, 25 bp, Probe sequence
gaacaatgctcaattcgctgaaaac

SEQ ID NO: 218528 - DNA, 25 bp, Probe sequence
gaaacgttgctgagtctggtttgaa

SEQ ID NO: 218529 - DNA, 25 bp, Probe sequence
gacaggtcgagcattaggcgtaaga

SEQ ID NO: 218530 - DNA, 25 bp, Probe sequence
gacgcgtgaacatggtgtgaatagt

SEQ ID NO: 218531 - DNA, 25 bp, Probe sequence
gttggcgctattatgacgcgtgaac

SEQ ID NO: 218532 - DNA, 25 bp, Probe sequence
gatggcgacagacaaaaccaagcat

SEQ ID NO: 218533 - DNA, 25 bp, Probe sequence
gatggacagccaaattgatcaacaa

SEQ ID NO: 218534 - DNA, 25 bp, Probe sequence
gatggtcgcttatcgaaagatgcat

SEQ ID NO: 218535 - DNA, 25 bp, Probe sequence
gatgcattaagccagcaattgagtg

SEQ ID NO: 218536 - DNA, 25 bp, Probe sequence
gattacgataaccaagttgcgcaag

SEQ ID NO: 218537 - DNA, 25 bp, Probe sequence
gattgctgcattgggtctatacttt

SEQ ID NO: 218538 - DNA, 25 bp, Probe sequence
gttgagctgggtcaagcatttatta

SEQ ID NO: 218539 - DNA, 25 bp, Probe sequence
gttgcgcaagacacaagtagtttga

SEQ ID NO: 218540 - DNA, 25 bp, Probe sequence
gggtctatactttgtagctatgaat

SEQ ID NO: 218541 - DNA, 25 bp, Probe sequence
ggatttatgcattaattgtcacttt

SEQ ID NO: 218542 - DNA, 25 bp, Probe sequence
attgtgataaggagtttaggatggt

SEQ ID NO: 218543 - DNA, 25 bp, Probe sequence
atattttatggaacaacttcgaaat

SEQ ID NO: 218544 - DNA, 25 bp, Probe sequence
atatcgtatacatgtgttctttaaa

SEQ ID NO: 218545 - DNA, 25 bp, Probe sequence
atacatgtgttctttaaaattgtga

SEQ ID NO: 218546 - DNA, 25 bp, Probe sequence
atcgtatacatgtgttctttaaaat

SEQ ID NO: 218547 - DNA, 25 bp, Probe sequence
atgtgttctttaaaattgtgataag

SEQ ID NO: 218548 - DNA, 25 bp, Probe sequence
atggaacaacttcgaaatttaatat

SEQ ID NO: 218549 - DNA, 25 bp, Probe sequence
acatgtgttctttaaaattgtgata

SEQ ID NO: 218550 - DNA, 25 bp, Probe sequence
aaatatcgtatacatgtgttcttta

SEQ ID NO: 218551 - DNA, 25 bp, Probe sequence
aaaatatcgtatacatgtgttcttt

SEQ ID NO: 218552 - DNA, 25 bp, Probe sequence
aatatcgtatacatgtgttctttaa

SEQ ID NO: 218553 - DNA, 25 bp, Probe sequence
aattgtgataaggagtttaggatgg

SEQ ID NO: 218554 - DNA, 25 bp, Probe sequence
caacttcgaaatttaatatacaaat

SEQ ID NO: 218555 - DNA, 25 bp, Probe sequence
catgtgttctttaaaattgtgataa

SEQ ID NO: 218556 - DNA, 25 bp, Probe sequence
cgtatacatgtgttctttaaaattg

SEQ ID NO: 218557 - DNA, 25 bp, Probe sequence
gaacaacttcgaaatttaatataca

SEQ ID NO: 218558 - DNA, 25 bp, Probe sequence
gataaggagtttaggatggtttatt

SEQ ID NO: 218559 - DNA, 25 bp, Probe sequence
gttctttaaaattgtgataaggagt

SEQ ID NO: 218560 - DNA, 25 bp, Probe sequence
gtatacatgtgttctttaaaattgt

SEQ ID NO: 218561 - DNA, 25 bp, Probe sequence
gtgataaggagtttaggatggttta

SEQ ID NO: 218562 - DNA, 25 bp, Probe sequence
gtgttctttaaaattgtgataagga

SEQ ID NO: 218563 - DNA, 25 bp, Probe sequence
tggaacaacttcgaaatttaatata

SEQ ID NO: 218564 - DNA, 25 bp, Probe sequence
tgtgataaggagtttaggatggttt

SEQ ID NO: 218565 - DNA, 25 bp, Probe sequence
tgttctttaaaattgtgataaggag

SEQ ID NO: 218566 - DNA, 25 bp, Probe sequence
tcgtatacatgtgttctttaaaatt

SEQ ID NO: 218567 - DNA, 25 bp, Probe sequence
taatattttatggaacaacttcgaa

SEQ ID NO: 218568 - DNA, 25 bp, Probe sequence
tacatgtgttctttaaaattgtgat

SEQ ID NO: 218569 - DNA, 25 bp, Probe sequence
tatggaacaacttcgaaatttaata

SEQ ID NO: 218570 - DNA, 25 bp, Probe sequence
tatcgtatacatgtgttctttaaaa

SEQ ID NO: 218571 - DNA, 25 bp, Probe sequence
tatacatgtgttctttaaaattgtg

SEQ ID NO: 218572 - DNA, 25 bp, Probe sequence
tattttatggaacaacttcgaaatt

SEQ ID NO: 218573 - DNA, 25 bp, Probe sequence
ttatggaacaacttcgaaatttaat

SEQ ID NO: 218574 - DNA, 25 bp, Probe sequence
ttaatattttatggaacaacttcga

SEQ ID NO: 218575 - DNA, 25 bp, Probe sequence
ttgtgataaggagtttaggatggtt

SEQ ID NO: 218576 - DNA, 25 bp, Probe sequence
atctaacttagaaaagacttcggag

SEQ ID NO: 218577 - DNA, 25 bp, Probe sequence
atgatacaacgctatttaataaaga

SEQ ID NO: 218578 - DNA, 25 bp, Probe sequence
actcgactcgcttgaatgaaactaa

SEQ ID NO: 218579 - DNA, 25 bp, Probe sequence
acagcatctagcaataatggcggac

SEQ ID NO: 218580 - DNA, 25 bp, Probe sequence
aaatattcccgtacattttgatgtc

SEQ ID NO: 218581 - DNA, 25 bp, Probe sequence
aaatcaatatgatacaacgctattt

SEQ ID NO: 218582 - DNA, 25 bp, Probe sequence
aaagcccctatattcaaaacaagca

SEQ ID NO: 218583 - DNA, 25 bp, Probe sequence
aatagcgtgattgctttaacttttt

SEQ ID NO: 218584 - DNA, 25 bp, Probe sequence
cattttgatgtctgtaggggctttt

SEQ ID NO: 218585 - DNA, 25 bp, Probe sequence
ctagcaataatggcggacttaatat

SEQ ID NO: 218586 - DNA, 25 bp, Probe sequence
gcccctatattcaaaacaagcagga

SEQ ID NO: 218587 - DNA, 25 bp, Probe sequence
gcagaaaaaagaacgacaacaacaa

SEQ ID NO: 218588 - DNA, 25 bp, Probe sequence
gcatctagcaataatggcggactta

SEQ ID NO: 218589 - DNA, 25 bp, Probe sequence
gaagaggaaaagcgaatcaataatg

SEQ ID NO: 218590 - DNA, 25 bp, Probe sequence
gacttcggagagtgataaaagcccc

SEQ ID NO: 218591 - DNA, 25 bp, Probe sequence
gactttaggatttgtcattttttca

SEQ ID NO: 218592 - DNA, 25 bp, Probe sequence
gactcgcttgaatgaaactaaaaaa

SEQ ID NO: 218593 - DNA, 25 bp, Probe sequence
gacgaacgaaaaatgaatcagcacg

SEQ ID NO: 218594 - DNA, 25 bp, Probe sequence
gagagtgataaaagcccctatattc

SEQ ID NO: 218595 - DNA, 25 bp, Probe sequence
gagtcactcgactcgcttgaatgaa

SEQ ID NO: 218596 - DNA, 25 bp, Probe sequence
gagtgataaaagcccctatattcaa

SEQ ID NO: 218597 - DNA, 25 bp, Probe sequence
gatgtctgtaggggcttttttgact

SEQ ID NO: 218598 - DNA, 25 bp, Probe sequence
gataaaagcccctatattcaaaaca

SEQ ID NO: 218599 - DNA, 25 bp, Probe sequence
gttgatgaatagcgtgattgcttta

SEQ ID NO: 218600 - DNA, 25 bp, Probe sequence
gtttcaaaatcaagcgagtcactcg

SEQ ID NO: 218601 - DNA, 25 bp, Probe sequence
gtcactcgactcgcttgaatgaaac

SEQ ID NO: 218602 - DNA, 25 bp, Probe sequence
gtgttattttccaaatctaacttag

SEQ ID NO: 218603 - DNA, 25 bp, Probe sequence
ggatttgtcattttttcaattcata

SEQ ID NO: 218604 - DNA, 25 bp, Probe sequence
tgtcattttttcaattcataaaggg

SEQ ID NO: 218605 - DNA, 25 bp, Probe sequence
tctgtaggggcttttttgactttag

SEQ ID NO: 218606 - DNA, 25 bp, Probe sequence
tcccgtacattttgatgtctgtagg

SEQ ID NO: 218607 - DNA, 25 bp, Probe sequence
tattcccgtacattttgatgtctgt

SEQ ID NO: 218608 - DNA, 25 bp, Probe sequence
ttaacttttttaacagcatctagca

SEQ ID NO: 218609 - DNA, 25 bp, Probe sequence
ttgatgtctgtaggggcttttttga

SEQ ID NO: 218610 - DNA, 25 bp, Probe sequence
attgattatcaaatcgctgatggag

SEQ ID NO: 218611 - DNA, 25 bp, Probe sequence
attacggcacatatgacttagcagt

SEQ ID NO: 218612 - DNA, 25 bp, Probe sequence
attataattacggcacatatgactt

SEQ ID NO: 218613 - DNA, 25 bp, Probe sequence
atagctttagtattggatagtttgg

SEQ ID NO: 218614 - DNA, 25 bp, Probe sequence
ataattacggcacatatgacttagc

SEQ ID NO: 218615 - DNA, 25 bp, Probe sequence
atcaaatcgctgatggagatatttt

SEQ ID NO: 218616 - DNA, 25 bp, Probe sequence
atgacttagcagtaccagcatattt

SEQ ID NO: 218617 - DNA, 25 bp, Probe sequence
agtttggacatttcaatatttgatg

SEQ ID NO: 218618 - DNA, 25 bp, Probe sequence
agtattggatagtttggacatttca

SEQ ID NO: 218619 - DNA, 25 bp, Probe sequence
agcagtaccagcatatttaccgata

SEQ ID NO: 218620 - DNA, 25 bp, Probe sequence
acggcacatatgacttagcagtacc

SEQ ID NO: 218621 - DNA, 25 bp, Probe sequence
acttagcagtaccagcatatttacc

SEQ ID NO: 218622 - DNA, 25 bp, Probe sequence
acatatgacttagcagtaccagcat

SEQ ID NO: 218623 - DNA, 25 bp, Probe sequence
cagtaccagcatatttaccgataaa

SEQ ID NO: 218624 - DNA, 25 bp, Probe sequence
catatgacttagcagtaccagcata

SEQ ID NO: 218625 - DNA, 25 bp, Probe sequence
cggcacatatgacttagcagtacca

SEQ ID NO: 218626 - DNA, 25 bp, Probe sequence
gcagtaccagcatatttaccgataa

SEQ ID NO: 218627 - DNA, 25 bp, Probe sequence
gcacatatgacttagcagtaccagc

SEQ ID NO: 218628 - DNA, 25 bp, Probe sequence
gacgaaaggtcaattacttgttgaa

SEQ ID NO: 218629 - DNA, 25 bp, Probe sequence
gatgacgaaaggtcaattacttgtt

SEQ ID NO: 218630 - DNA, 25 bp, Probe sequence
gattatcaaatcgctgatggagata

SEQ ID NO: 218631 - DNA, 25 bp, Probe sequence
gtaccagcatatttaccgataaaaa

SEQ ID NO: 218632 - DNA, 25 bp, Probe sequence
ggatagtttggacatttcaatattt

SEQ ID NO: 218633 - DNA, 25 bp, Probe sequence
ggcacatatgacttagcagtaccag

SEQ ID NO: 218634 - DNA, 25 bp, Probe sequence
tgatggagatattttgaagttacta

SEQ ID NO: 218635 - DNA, 25 bp, Probe sequence
tgacttagcagtaccagcatattta

SEQ ID NO: 218636 - DNA, 25 bp, Probe sequence
tcgctgatggagatattttgaagtt

SEQ ID NO: 218637 - DNA, 25 bp, Probe sequence
taattacggcacatatgacttagca

SEQ ID NO: 218638 - DNA, 25 bp, Probe sequence
taacatttgattttactaattataa

SEQ ID NO: 218639 - DNA, 25 bp, Probe sequence
tagcagtaccagcatatttaccgat

SEQ ID NO: 218640 - DNA, 25 bp, Probe sequence
ttacggcacatatgacttagcagta

SEQ ID NO: 218641 - DNA, 25 bp, Probe sequence
ttagcagtaccagcatatttaccga

SEQ ID NO: 218642 - DNA, 25 bp, Probe sequence
ttcaatatttgatgtcaatacacaa

SEQ ID NO: 218643 - DNA, 25 bp, Probe sequence
ttgatgtcaatacacaaattaaagt

SEQ ID NO: 218644 - DNA, 25 bp, Probe sequence
attacgcttagatatgagagagatt

SEQ ID NO: 218645 - DNA, 25 bp, Probe sequence
atggaattaggacaaggacatcttg

SEQ ID NO: 218646 - DNA, 25 bp, Probe sequence
agtttccaaatacattatgacatta

SEQ ID NO: 218647 - DNA, 25 bp, Probe sequence
agcagctaaaacaaaattacgctta

SEQ ID NO: 218648 - DNA, 25 bp, Probe sequence
acgcaagtactaaatacgtatgatg

SEQ ID NO: 218649 - DNA, 25 bp, Probe sequence
acggcatttttagatgaacagtatc

SEQ ID NO: 218650 - DNA, 25 bp, Probe sequence
acatttatgccaaaagttatatcca

SEQ ID NO: 218651 - DNA, 25 bp, Probe sequence
aagactacttattatattggatgga

SEQ ID NO: 218652 - DNA, 25 bp, Probe sequence
aaggataccaagcatttgtaaagga

SEQ ID NO: 218653 - DNA, 25 bp, Probe sequence
aatgacaatcatacaccttttgata

SEQ ID NO: 218654 - DNA, 25 bp, Probe sequence
caattaaaccagaacattttcattt

SEQ ID NO: 218655 - DNA, 25 bp, Probe sequence
cataccgttttcaaatgggttgcta

SEQ ID NO: 218656 - DNA, 25 bp, Probe sequence
cattctccatattttatagatgctg

SEQ ID NO: 218657 - DNA, 25 bp, Probe sequence
ctaaagttattgaagcggcaacgtt

SEQ ID NO: 218658 - DNA, 25 bp, Probe sequence
ctggttatctgtgcattcaatgaga

SEQ ID NO: 218659 - DNA, 25 bp, Probe sequence
gaagcggcaacgttagatttactaa

SEQ ID NO: 218660 - DNA, 25 bp, Probe sequence
gaacgccatttgaaactaaagttat

SEQ ID NO: 218661 - DNA, 25 bp, Probe sequence
gaactacataaaggaacgccatttg

SEQ ID NO: 218662 - DNA, 25 bp, Probe sequence
gaacaacattctccatattttatag

SEQ ID NO: 218663 - DNA, 25 bp, Probe sequence
gacaccaaattcaaacaaagactac

SEQ ID NO: 218664 - DNA, 25 bp, Probe sequence
gagaaacaatcatttgatgctttag

SEQ ID NO: 218665 - DNA, 25 bp, Probe sequence
gagagagattcctaagtcttcaatt

SEQ ID NO: 218666 - DNA, 25 bp, Probe sequence
gatgctgaattaactgaactacgtg

SEQ ID NO: 218667 - DNA, 25 bp, Probe sequence
gatattacaaagttagcgttgatta

SEQ ID NO: 218668 - DNA, 25 bp, Probe sequence
gatttactaacggcatttttagatg

SEQ ID NO: 218669 - DNA, 25 bp, Probe sequence
gattcctaagtcttcaattaaacca

SEQ ID NO: 218670 - DNA, 25 bp, Probe sequence
gtacttattagaacaacattctcca

SEQ ID NO: 218671 - DNA, 25 bp, Probe sequence
ggacatcttgatgaagcgattaata

SEQ ID NO: 218672 - DNA, 25 bp, Probe sequence
tacaaaatgttgttgatccattacc

SEQ ID NO: 218673 - DNA, 25 bp, Probe sequence
tagcctttttatatttttcagtaat

SEQ ID NO: 218674 - DNA, 25 bp, Probe sequence
tagtcaaaattatgcatatgtacgc

SEQ ID NO: 218675 - DNA, 25 bp, Probe sequence
tatcgaatgataaacgttctgaaga

SEQ ID NO: 218676 - DNA, 25 bp, Probe sequence
tatttttcacaagagatggattacc

SEQ ID NO: 218677 - DNA, 25 bp, Probe sequence
tattgccacttatttagatgataac

SEQ ID NO: 218678 - DNA, 25 bp, Probe sequence
atttgcgtatccttcaattcaagat

SEQ ID NO: 218679 - DNA, 25 bp, Probe sequence
atcaagtggctaactttgccgaaga

SEQ ID NO: 218680 - DNA, 25 bp, Probe sequence
atcggcgatgacagaattttataaa

SEQ ID NO: 218681 - DNA, 25 bp, Probe sequence
atccgagagaaattgcgcatattgc

SEQ ID NO: 218682 - DNA, 25 bp, Probe sequence
atgtctttattcttattgataactt

SEQ ID NO: 218683 - DNA, 25 bp, Probe sequence
agaagattttaagtcagtatcgtgt

SEQ ID NO: 218684 - DNA, 25 bp, Probe sequence
accgccacagccaatacagaagaac

SEQ ID NO: 218685 - DNA, 25 bp, Probe sequence
acattaatatgaaaacgcgtatcgc

SEQ ID NO: 218686 - DNA, 25 bp, Probe sequence
acagattgatgttgcacgtaaaatg

SEQ ID NO: 218687 - DNA, 25 bp, Probe sequence
acaagaatcacaatacgtacgcatt

SEQ ID NO: 218688 - DNA, 25 bp, Probe sequence
aaaggaccagaacttggcttgaaca

SEQ ID NO: 218689 - DNA, 25 bp, Probe sequence
aagacattaaagcgattcatcaact

SEQ ID NO: 218690 - DNA, 25 bp, Probe sequence
aaggcgatacgtatatttaatgatg

SEQ ID NO: 218691 - DNA, 25 bp, Probe sequence
aatgcgtatgatgatatggttattc

SEQ ID NO: 218692 - DNA, 25 bp, Probe sequence
aatacgtacgcattgtgcacgataa

SEQ ID NO: 218693 - DNA, 25 bp, Probe sequence
cgtgaagggctagcattagacatgc

SEQ ID NO: 218694 - DNA, 25 bp, Probe sequence
gcatcatttgcgtatccttcaattc

SEQ ID NO: 218695 - DNA, 25 bp, Probe sequence
gaaccagcaatgatttcatcagaaa

SEQ ID NO: 218696 - DNA, 25 bp, Probe sequence
gaacttggcttgaacattttatttg

SEQ ID NO: 218697 - DNA, 25 bp, Probe sequence
gaacattttatttgtcggcattcat

SEQ ID NO: 218698 - DNA, 25 bp, Probe sequence
gatattcctatgatgccagatgaaa

SEQ ID NO: 218699 - DNA, 25 bp, Probe sequence
gatttattcaacgagaacctgttat

SEQ ID NO: 218700 - DNA, 25 bp, Probe sequence
gtatttcagaccaacaattctttaa

SEQ ID NO: 218701 - DNA, 25 bp, Probe sequence
gtatcattccatattggccaaccat

SEQ ID NO: 218702 - DNA, 25 bp, Probe sequence
ggtgctttaccaattggattagatt

SEQ ID NO: 218703 - DNA, 25 bp, Probe sequence
ggtattcgtatttcagaccaacaat

SEQ ID NO: 218704 - DNA, 25 bp, Probe sequence
tgatatggttattcaaagcttgatg

SEQ ID NO: 218705 - DNA, 25 bp, Probe sequence
taagattgaaagaccgccacagcca

SEQ ID NO: 218706 - DNA, 25 bp, Probe sequence
taatgatgaagtatcggcgatgaca

SEQ ID NO: 218707 - DNA, 25 bp, Probe sequence
taaccaatttagtataggtattcgt

SEQ ID NO: 218708 - DNA, 25 bp, Probe sequence
tagacatgcaagtaaccttaactgc

SEQ ID NO: 218709 - DNA, 25 bp, Probe sequence
tttgacgcagtaaaagattcacctt

SEQ ID NO: 218710 - DNA, 25 bp, Probe sequence
ttcttattgataactttgacgcagt

SEQ ID NO: 218711 - DNA, 25 bp, Probe sequence
ttggccaaccatttaaacatgatga

SEQ ID NO: 218712 - DNA, 25 bp, Probe sequence
aggtgttgcgacagaaccaatgcca

SEQ ID NO: 218713 - DNA, 25 bp, Probe sequence
attatcgataactacgacacggtga

SEQ ID NO: 218714 - DNA, 25 bp, Probe sequence
atttgcgtacccttcgattcaagat

SEQ ID NO: 218715 - DNA, 25 bp, Probe sequence
aggacaaacatataacgagcgcatt

SEQ ID NO: 218716 - DNA, 25 bp, Probe sequence
aggaccgatggtattgcaattgaaa

SEQ ID NO: 218717 - DNA, 25 bp, Probe sequence
agaccaccacaaccaatacagaaga

SEQ ID NO: 218718 - DNA, 25 bp, Probe sequence
agctattaattttcaccctcatgaa

SEQ ID NO: 218719 - DNA, 25 bp, Probe sequence
acttcacacagttccaaattgcgca

SEQ ID NO: 218720 - DNA, 25 bp, Probe sequence
acatgtcgctgattactttacagta

SEQ ID NO: 218721 - DNA, 25 bp, Probe sequence
acaagagttgcgctgtacctctttg

SEQ ID NO: 218722 - DNA, 25 bp, Probe sequence
aacatattccaatgatgccagataa

SEQ ID NO: 218723 - DNA, 25 bp, Probe sequence
aattgcgcaaccatttgaattagca

SEQ ID NO: 218724 - DNA, 25 bp, Probe sequence
caatttgttatcttggttgatgcag

SEQ ID NO: 218725 - DNA, 25 bp, Probe sequence
cgtccatggttaccaccattaccag

SEQ ID NO: 218726 - DNA, 25 bp, Probe sequence
gccagtattcagaagatgtaacctc

SEQ ID NO: 218727 - DNA, 25 bp, Probe sequence
gcgctgtacctctttgaaaacaatg

SEQ ID NO: 218728 - DNA, 25 bp, Probe sequence
gctaatccaattgtcaacgttccat

SEQ ID NO: 218729 - DNA, 25 bp, Probe sequence
gaaactcaatatgtgcgcatcgtgc

SEQ ID NO: 218730 - DNA, 25 bp, Probe sequence
gacaagattgcgaaggcgatacgga

SEQ ID NO: 218731 - DNA, 25 bp, Probe sequence
gactatactcagatacaattggtgc

SEQ ID NO: 218732 - DNA, 25 bp, Probe sequence
gatacatgatattatttctgagcga

SEQ ID NO: 218733 - DNA, 25 bp, Probe sequence
gatataccacatgtcgctgattact

SEQ ID NO: 218734 - DNA, 25 bp, Probe sequence
gtaacctcttattattcagcaccat

SEQ ID NO: 218735 - DNA, 25 bp, Probe sequence
gggtatacatcattctttcaggatc

SEQ ID NO: 218736 - DNA, 25 bp, Probe sequence
ggtttagcgttaggggtatacatca

SEQ ID NO: 218737 - DNA, 25 bp, Probe sequence
ggattagactttgaggatgtggaac

SEQ ID NO: 218738 - DNA, 25 bp, Probe sequence
ggagtggtgcaacatatgacattga

SEQ ID NO: 218739 - DNA, 25 bp, Probe sequence
ggagattatccaaaacatattccaa

SEQ ID NO: 218740 - DNA, 25 bp, Probe sequence
tgatgccagtcacagatataccaca

SEQ ID NO: 218741 - DNA, 25 bp, Probe sequence
tcagcaccatcagatttgagcaaca

SEQ ID NO: 218742 - DNA, 25 bp, Probe sequence
tcaccctcatgaagttgcattccta

SEQ ID NO: 218743 - DNA, 25 bp, Probe sequence
tattatcattattgcaagtggacta

SEQ ID NO: 218744 - DNA, 25 bp, Probe sequence
ttagatctgacaagttcttcgattg

SEQ ID NO: 218745 - DNA, 25 bp, Probe sequence
ttagaagcggttatcgatcatatcg

SEQ ID NO: 218746 - DNA, 25 bp, Probe sequence
attgaagttcgttctggatatttaa

SEQ ID NO: 218747 - DNA, 25 bp, Probe sequence
atgaaattgaagttcgttctggata

SEQ ID NO: 218748 - DNA, 25 bp, Probe sequence
agcaaaggacgtacaaactgcaaaa

SEQ ID NO: 218749 - DNA, 25 bp, Probe sequence
agcatgctgaagagattgcgcatga

SEQ ID NO: 218750 - DNA, 25 bp, Probe sequence
acagcaaaggacgtacaaactgcaa

SEQ ID NO: 218751 - DNA, 25 bp, Probe sequence
acaaaagcttgaaatgttgggtgaa

SEQ ID NO: 218752 - DNA, 25 bp, Probe sequence
aaatgttgggtgaagatatcgataa

SEQ ID NO: 218753 - DNA, 25 bp, Probe sequence
aaagatattaaaaagcatgctgaag

SEQ ID NO: 218754 - DNA, 25 bp, Probe sequence
aaagcacagcaaaggacgtacaaac

SEQ ID NO: 218755 - DNA, 25 bp, Probe sequence
aaagcatgctgaagagattgcgcat

SEQ ID NO: 218756 - DNA, 25 bp, Probe sequence
aaagcttgaaatgttgggtgaagat

SEQ ID NO: 218757 - DNA, 25 bp, Probe sequence
aaaagcatgctgaagagattgcgca

SEQ ID NO: 218758 - DNA, 25 bp, Probe sequence
aagcacagcaaaggacgtacaaact

SEQ ID NO: 218759 - DNA, 25 bp, Probe sequence
aaggcaagtgaatattttaataaag

SEQ ID NO: 218760 - DNA, 25 bp, Probe sequence
aattgaagttcgttctggatattta

SEQ ID NO: 218761 - DNA, 25 bp, Probe sequence
gcgcatgaaattgaagttcgttctg

SEQ ID NO: 218762 - DNA, 25 bp, Probe sequence
gctgaagagattgcgcatgaaattg

SEQ ID NO: 218763 - DNA, 25 bp, Probe sequence
gcatgaaattgaagttcgttctgga

SEQ ID NO: 218764 - DNA, 25 bp, Probe sequence
gcacagcaaaggacgtacaaactgc

SEQ ID NO: 218765 - DNA, 25 bp, Probe sequence
gaagttcgttctggatatttaagaa

SEQ ID NO: 218766 - DNA, 25 bp, Probe sequence
gaagagattgcgcatgaaattgaag

SEQ ID NO: 218767 - DNA, 25 bp, Probe sequence
gaacaatataagcgattagaattta

SEQ ID NO: 218768 - DNA, 25 bp, Probe sequence
gaaaagctgaacaatataagcgatt

SEQ ID NO: 218769 - DNA, 25 bp, Probe sequence
gaaagcacagcaaaggacgtacaaa

SEQ ID NO: 218770 - DNA, 25 bp, Probe sequence
gaaattgaagttcgttctggatatt

SEQ ID NO: 218771 - DNA, 25 bp, Probe sequence
gagattgcgcatgaaattgaagttc

SEQ ID NO: 218772 - DNA, 25 bp, Probe sequence
gattgcgcatgaaattgaagttcgt

SEQ ID NO: 218773 - DNA, 25 bp, Probe sequence
gttcgttctggatatttaagaaaag

SEQ ID NO: 218774 - DNA, 25 bp, Probe sequence
tgaagttcgttctggatatttaaga

SEQ ID NO: 218775 - DNA, 25 bp, Probe sequence
tgaaagcacagcaaaggacgtacaa

SEQ ID NO: 218776 - DNA, 25 bp, Probe sequence
taaagaatccctccaaaaagctaag

SEQ ID NO: 218777 - DNA, 25 bp, Probe sequence
ttgcgcatgaaattgaagttcgttc

SEQ ID NO: 218778 - DNA, 25 bp, Probe sequence
ttgaaatgttgggtgaagatatcga

SEQ ID NO: 218779 - DNA, 25 bp, Probe sequence
ttgaagttcgttctggatatttaag

SEQ ID NO: 218780 - DNA, 25 bp, Probe sequence
attatggcaaagtttcaagaagaat

SEQ ID NO: 218781 - DNA, 25 bp, Probe sequence
ataacttaagtcaaaatctagcgaa

SEQ ID NO: 218782 - DNA, 25 bp, Probe sequence
aggacagttcgccaataaggtgaaa

SEQ ID NO: 218783 - DNA, 25 bp, Probe sequence
agcaaacgcaacagctcgctgagta

SEQ ID NO: 218784 - DNA, 25 bp, Probe sequence
acgcaacagctcgctgagtatatcg

SEQ ID NO: 218785 - DNA, 25 bp, Probe sequence
acgatacattatcaattaagcaagg

SEQ ID NO: 218786 - DNA, 25 bp, Probe sequence
acagctcgctgagtatatcgaaggt

SEQ ID NO: 218787 - DNA, 25 bp, Probe sequence
aaagcaaacgcaacagctcgctgag

SEQ ID NO: 218788 - DNA, 25 bp, Probe sequence
aaacgcaacagctcgctgagtatat

SEQ ID NO: 218789 - DNA, 25 bp, Probe sequence
aaaagcaaacgcaacagctcgctga

SEQ ID NO: 218790 - DNA, 25 bp, Probe sequence
aaaatctagcgaaatacgatacatt

SEQ ID NO: 218791 - DNA, 25 bp, Probe sequence
aacagctcgctgagtatatcgaagg

SEQ ID NO: 218792 - DNA, 25 bp, Probe sequence
aagcaaacgcaacagctcgctgagt

SEQ ID NO: 218793 - DNA, 25 bp, Probe sequence
caacagctcgctgagtatatcgaag

SEQ ID NO: 218794 - DNA, 25 bp, Probe sequence
caaaagcaaacgcaacagctcgctg

SEQ ID NO: 218795 - DNA, 25 bp, Probe sequence
cagctcgctgagtatatcgaaggta

SEQ ID NO: 218796 - DNA, 25 bp, Probe sequence
cgcaacagctcgctgagtatatcga

SEQ ID NO: 218797 - DNA, 25 bp, Probe sequence
cgctgagtatatcgaaggtagtgat

SEQ ID NO: 218798 - DNA, 25 bp, Probe sequence
gctcgctgagtatatcgaaggtagt

SEQ ID NO: 218799 - DNA, 25 bp, Probe sequence
gctgaccatcaaaaagcaattgata

SEQ ID NO: 218800 - DNA, 25 bp, Probe sequence
gcatgtcaaaagcaaacgcaacagc

SEQ ID NO: 218801 - DNA, 25 bp, Probe sequence
gcaaacgcaacagctcgctgagtat

SEQ ID NO: 218802 - DNA, 25 bp, Probe sequence
gaaggacagttcgccaataaggtga

SEQ ID NO: 218803 - DNA, 25 bp, Probe sequence
gaaggtagtgattgggaaggacagt

SEQ ID NO: 218804 - DNA, 25 bp, Probe sequence
gaagcatgtcaaaagcaaacgcaac

SEQ ID NO: 218805 - DNA, 25 bp, Probe sequence
gacagttcgccaataaggtgaaaga

SEQ ID NO: 218806 - DNA, 25 bp, Probe sequence
gattgggaaggacagttcgccaata

SEQ ID NO: 218807 - DNA, 25 bp, Probe sequence
gtcaaaagcaaacgcaacagctcgc

SEQ ID NO: 218808 - DNA, 25 bp, Probe sequence
gtgattgggaaggacagttcgccaa

SEQ ID NO: 218809 - DNA, 25 bp, Probe sequence
gggaaggacagttcgccaataaggt

SEQ ID NO: 218810 - DNA, 25 bp, Probe sequence
tcgccaataaggtgaaagatgtgtt

SEQ ID NO: 218811 - DNA, 25 bp, Probe sequence
tctagcgaaatacgatacattatca

SEQ ID NO: 218812 - DNA, 25 bp, Probe sequence
taagtcaaaatctagcgaaatacga

SEQ ID NO: 218813 - DNA, 25 bp, Probe sequence
tagtgattgggaaggacagttcgcc

SEQ ID NO: 218814 - DNA, 25 bp, Probe sequence
gaactcgtaccgcgttggtatgtag

SEQ ID NO: 218815 - DNA, 25 bp, Probe sequence
atcaaattcaagtcacttggggtga

SEQ ID NO: 218816 - DNA, 25 bp, Probe sequence
acgacgcatgtttttgcaccaagta

SEQ ID NO: 218817 - DNA, 25 bp, Probe sequence
acgccatttcagattattcattcga

SEQ ID NO: 218818 - DNA, 25 bp, Probe sequence
acatcgctatcggttacgaaatgca

SEQ ID NO: 218819 - DNA, 25 bp, Probe sequence
aaaagtaacaaacatcgctatcggt

SEQ ID NO: 218820 - DNA, 25 bp, Probe sequence
aacatatcgcatggtatttaacacg

SEQ ID NO: 218821 - DNA, 25 bp, Probe sequence
aacctttaacgacacctatgacagc

SEQ ID NO: 218822 - DNA, 25 bp, Probe sequence
aagcttagcgaacaatagtgatatt

SEQ ID NO: 218823 - DNA, 25 bp, Probe sequence
aatggtcatggtggtttcttaaacg

SEQ ID NO: 218824 - DNA, 25 bp, Probe sequence
aatgctatactatttgacgattcaa

SEQ ID NO: 218825 - DNA, 25 bp, Probe sequence
aatacaggtgtcgcaaactataacg

SEQ ID NO: 218826 - DNA, 25 bp, Probe sequence
ctactcgtcttgatgagtgtcgtat

SEQ ID NO: 218827 - DNA, 25 bp, Probe sequence
ccaggaacctttgattttattaatg

SEQ ID NO: 218828 - DNA, 25 bp, Probe sequence
gcaaccatacacagatatcatcaca

SEQ ID NO: 218829 - DNA, 25 bp, Probe sequence
gaacatgaatgcgaaagtaccaaat

SEQ ID NO: 218830 - DNA, 25 bp, Probe sequence
gaaacgattccaggaacctttgatt

SEQ ID NO: 218831 - DNA, 25 bp, Probe sequence
gacacctatgacagccaaaatggat

SEQ ID NO: 218832 - DNA, 25 bp, Probe sequence
gagtctgtacgttcaagcttagcga

SEQ ID NO: 218833 - DNA, 25 bp, Probe sequence
gatcgtacgacgcatgtttttgcac

SEQ ID NO: 218834 - DNA, 25 bp, Probe sequence
gatcataatcacattgaagtgcaga

SEQ ID NO: 218835 - DNA, 25 bp, Probe sequence
gataatatcgtgctttatgctataa

SEQ ID NO: 218836 - DNA, 25 bp, Probe sequence
gatttaccgttatcaacatatcttg

SEQ ID NO: 218837 - DNA, 25 bp, Probe sequence
gattaacagtgaactcgtaccgcgt

SEQ ID NO: 218838 - DNA, 25 bp, Probe sequence
gattcaaccatcgttcgtagttcaa

SEQ ID NO: 218839 - DNA, 25 bp, Probe sequence
gttgccgaaattagagtctgtacgt

SEQ ID NO: 218840 - DNA, 25 bp, Probe sequence
gtttataacgatgggaggcttgaat

SEQ ID NO: 218841 - DNA, 25 bp, Probe sequence
gtaccaaatcatttcaatttcaatc

SEQ ID NO: 218842 - DNA, 25 bp, Probe sequence
gtgaagtccgtggaacatgttcgtc

SEQ ID NO: 218843 - DNA, 25 bp, Probe sequence
ggatacaactattacgccatttcag

SEQ ID NO: 218844 - DNA, 25 bp, Probe sequence
tgatcattttttagatgcattagca

SEQ ID NO: 218845 - DNA, 25 bp, Probe sequence
tagtacgaataatcagtcaggcgag

SEQ ID NO: 218846 - DNA, 25 bp, Probe sequence
tattcgattttacgtatgatttacc

SEQ ID NO: 218847 - DNA, 25 bp, Probe sequence
tttgcaccaagtaaacctgaaaagt

SEQ ID NO: 218848 - DNA, 25 bp, Probe sequence
atacgattgggcgtgttttagaaat

SEQ ID NO: 218849 - DNA, 25 bp, Probe sequence
atcatcaaggtgaccctcaacaaag

SEQ ID NO: 218850 - DNA, 25 bp, Probe sequence
atgtattttgcaccatttagctatg

SEQ ID NO: 218851 - DNA, 25 bp, Probe sequence
aaattttgaattgtttgatccatca

SEQ ID NO: 218852 - DNA, 25 bp, Probe sequence
aagcgaatagattatttttcttacg

SEQ ID NO: 218853 - DNA, 25 bp, Probe sequence
aagacattgcatggtggtcgattgt

SEQ ID NO: 218854 - DNA, 25 bp, Probe sequence
caatcatcaaggtgaccctcaacaa

SEQ ID NO: 218855 - DNA, 25 bp, Probe sequence
catttatacgagaattatttggatt

SEQ ID NO: 218856 - DNA, 25 bp, Probe sequence
cgattgtacaatcatatcctttatt

SEQ ID NO: 218857 - DNA, 25 bp, Probe sequence
cctctcgtaaattttgaattgtttg

SEQ ID NO: 218858 - DNA, 25 bp, Probe sequence
gcaggttttaaagtggctacattag

SEQ ID NO: 218859 - DNA, 25 bp, Probe sequence
gcaccatttagctatgaaaaagatg

SEQ ID NO: 218860 - DNA, 25 bp, Probe sequence
gaattaatgatatgtattttgcacc

SEQ ID NO: 218861 - DNA, 25 bp, Probe sequence
gaatagattatttttcttacgaaga

SEQ ID NO: 218862 - DNA, 25 bp, Probe sequence
gaatgacaagttaactgatgcaggt

SEQ ID NO: 218863 - DNA, 25 bp, Probe sequence
gacattgcatggtggtcgattgtac

SEQ ID NO: 218864 - DNA, 25 bp, Probe sequence
gaccctcaacaaagtttatataaca

SEQ ID NO: 218865 - DNA, 25 bp, Probe sequence
gatgaatatattttgttaagccggt

SEQ ID NO: 218866 - DNA, 25 bp, Probe sequence
gatatgtattttgcaccatttagct

SEQ ID NO: 218867 - DNA, 25 bp, Probe sequence
gattgggcgtgttttagaaattgaa

SEQ ID NO: 218868 - DNA, 25 bp, Probe sequence
gattgggactttaaacaaattgacg

SEQ ID NO: 218869 - DNA, 25 bp, Probe sequence
ggtgaccctcaacaaagtttatata

SEQ ID NO: 218870 - DNA, 25 bp, Probe sequence
gtttgatccatcaaattttgaagaa

SEQ ID NO: 218871 - DNA, 25 bp, Probe sequence
gtatcgatacgattgggcgtgtttt

SEQ ID NO: 218872 - DNA, 25 bp, Probe sequence
gtcattaatacatttatacgagaat

SEQ ID NO: 218873 - DNA, 25 bp, Probe sequence
gggactttaaacaaattgacgatga

SEQ ID NO: 218874 - DNA, 25 bp, Probe sequence
ggtggtcgattgtacaatcatatcc

SEQ ID NO: 218875 - DNA, 25 bp, Probe sequence
tgatgcaggttttaaagtggctaca

SEQ ID NO: 218876 - DNA, 25 bp, Probe sequence
tgaatatattttgttaagccggttt

SEQ ID NO: 218877 - DNA, 25 bp, Probe sequence
tgcatggtggtcgattgtacaatca

SEQ ID NO: 218878 - DNA, 25 bp, Probe sequence
tcattcgatacccattaaaagataa

SEQ ID NO: 218879 - DNA, 25 bp, Probe sequence
tcaaggtgaccctcaacaaagttta

SEQ ID NO: 218880 - DNA, 25 bp, Probe sequence
tacaatcatcaaggtgaccctcaac

SEQ ID NO: 218881 - DNA, 25 bp, Probe sequence
tattttgcaccatttagctatgaaa

SEQ ID NO: 218882 - DNA, 25 bp, Probe sequence
caaaggtccattgagtacactcggt

SEQ ID NO: 218883 - DNA, 25 bp, Probe sequence
gtcattagtggtctcaaaggtccat

SEQ ID NO: 218884 - DNA, 25 bp, Probe sequence
attagtggtctcaaaggtccattga

SEQ ID NO: 218885 - DNA, 25 bp, Probe sequence
atttgccaagctttactataatatt

SEQ ID NO: 218886 - DNA, 25 bp, Probe sequence
atagtagtgctgcaacagtcattag

SEQ ID NO: 218887 - DNA, 25 bp, Probe sequence
aggtccattgagtacactcggtggt

SEQ ID NO: 218888 - DNA, 25 bp, Probe sequence
agtagtgctgcaacagtcattagtg

SEQ ID NO: 218889 - DNA, 25 bp, Probe sequence
agctttactataatattgagggata

SEQ ID NO: 218890 - DNA, 25 bp, Probe sequence
acggaatttgccaagctttactata

SEQ ID NO: 218891 - DNA, 25 bp, Probe sequence
acagtcattagtggtctcaaaggtc

SEQ ID NO: 218892 - DNA, 25 bp, Probe sequence
aagctgaaacgattgcacatgttgt

SEQ ID NO: 218893 - DNA, 25 bp, Probe sequence
ctgcaacagtcattagtggtctcaa

SEQ ID NO: 218894 - DNA, 25 bp, Probe sequence
gccaagctttactataatattgagg

SEQ ID NO: 218895 - DNA, 25 bp, Probe sequence
gcgcaattaaattactacagtagtg

SEQ ID NO: 218896 - DNA, 25 bp, Probe sequence
gctgcaacagtcattagtggtctca

SEQ ID NO: 218897 - DNA, 25 bp, Probe sequence
gcagatgaacattggggtacggaat

SEQ ID NO: 218898 - DNA, 25 bp, Probe sequence
gcacaaaagttctttgaagcagatg

SEQ ID NO: 218899 - DNA, 25 bp, Probe sequence
gcaacagtcattagtggtctcaaag

SEQ ID NO: 218900 - DNA, 25 bp, Probe sequence
gaattcagcacaaaagttctttgaa

SEQ ID NO: 218901 - DNA, 25 bp, Probe sequence
gaagcagatgaacattggggtacgg

SEQ ID NO: 218902 - DNA, 25 bp, Probe sequence
gacgttgagtggaaaaattagtgtt

SEQ ID NO: 218903 - DNA, 25 bp, Probe sequence
gtccattgagtacactcggtggtgg

SEQ ID NO: 218904 - DNA, 25 bp, Probe sequence
gtacggaatttgccaagctttacta

SEQ ID NO: 218905 - DNA, 25 bp, Probe sequence
gtcatgaattcagcacaaaagttct

SEQ ID NO: 218906 - DNA, 25 bp, Probe sequence
gtgctgcaacagtcattagtggtct

SEQ ID NO: 218907 - DNA, 25 bp, Probe sequence
gtgttaaagctgaaacgattgcaca

SEQ ID NO: 218908 - DNA, 25 bp, Probe sequence
gtggtctcaaaggtccattgagtac

SEQ ID NO: 218909 - DNA, 25 bp, Probe sequence
ggtacggaatttgccaagctttact

SEQ ID NO: 218910 - DNA, 25 bp, Probe sequence
ggaatttgccaagctttactataat

SEQ ID NO: 218911 - DNA, 25 bp, Probe sequence
ggctatagtagtgctgcaacagtca

SEQ ID NO: 218912 - DNA, 25 bp, Probe sequence
tggggtacggaatttgccaagcttt

SEQ ID NO: 218913 - DNA, 25 bp, Probe sequence
tgaacattggggtacggaatttgcc

SEQ ID NO: 218914 - DNA, 25 bp, Probe sequence
tgatgaaatagctcaaaactttgga

SEQ ID NO: 218915 - DNA, 25 bp, Probe sequence
tgaaacgattgcacatgttgtaaaa

SEQ ID NO: 218916 - DNA, 25 bp, Probe sequence
attgtccaaaacgtgctgatgacat

SEQ ID NO: 218917 - DNA, 25 bp, Probe sequence
attttttattgtccaaaacgtgctg

SEQ ID NO: 218918 - DNA, 25 bp, Probe sequence
atatcagtcgacagactataaacgg

SEQ ID NO: 218919 - DNA, 25 bp, Probe sequence
atggaatatcagtcgacagactata

SEQ ID NO: 218920 - DNA, 25 bp, Probe sequence
agtcgacagactataaacggaggta

SEQ ID NO: 218921 - DNA, 25 bp, Probe sequence
agtatggaatatcagtcgacagact

SEQ ID NO: 218922 - DNA, 25 bp, Probe sequence
agcaagtatggaatatcagtcgaca

SEQ ID NO: 218923 - DNA, 25 bp, Probe sequence
aaacgtgctgatgacattttaaaag

SEQ ID NO: 218924 - DNA, 25 bp, Probe sequence
aaaacgtgctgatgacattttaaaa

SEQ ID NO: 218925 - DNA, 25 bp, Probe sequence
aacgtgctgatgacattttaaaagc

SEQ ID NO: 218926 - DNA, 25 bp, Probe sequence
aagcaagtatggaatatcagtcgac

SEQ ID NO: 218927 - DNA, 25 bp, Probe sequence
aagtatggaatatcagtcgacagac

SEQ ID NO: 218928 - DNA, 25 bp, Probe sequence
caagtatggaatatcagtcgacaga

SEQ ID NO: 218929 - DNA, 25 bp, Probe sequence
caaaacgtgctgatgacattttaaa

SEQ ID NO: 218930 - DNA, 25 bp, Probe sequence
cagtcgacagactataaacggaggt

SEQ ID NO: 218931 - DNA, 25 bp, Probe sequence
ctgatgacattttaaaagcaagtat

SEQ ID NO: 218932 - DNA, 25 bp, Probe sequence
ccaaaacgtgctgatgacattttaa

SEQ ID NO: 218933 - DNA, 25 bp, Probe sequence
gcaagtatggaatatcagtcgacag

SEQ ID NO: 218934 - DNA, 25 bp, Probe sequence
gaatatcagtcgacagactataaac

SEQ ID NO: 218935 - DNA, 25 bp, Probe sequence
gacagactataaacggaggtatatc

SEQ ID NO: 218936 - DNA, 25 bp, Probe sequence
gactataaacggaggtatatctcat

SEQ ID NO: 218937 - DNA, 25 bp, Probe sequence
gtatggaatatcagtcgacagacta

SEQ ID NO: 218938 - DNA, 25 bp, Probe sequence
gtcgacagactataaacggaggtat

SEQ ID NO: 218939 - DNA, 25 bp, Probe sequence
gtccaaaacgtgctgatgacatttt

SEQ ID NO: 218940 - DNA, 25 bp, Probe sequence
ggaatatcagtcgacagactataaa

SEQ ID NO: 218941 - DNA, 25 bp, Probe sequence
tccaaaacgtgctgatgacatttta

SEQ ID NO: 218942 - DNA, 25 bp, Probe sequence
tattgtccaaaacgtgctgatgaca

SEQ ID NO: 218943 - DNA, 25 bp, Probe sequence
tattttttattgtccaaaacgtgct

SEQ ID NO: 218944 - DNA, 25 bp, Probe sequence
ttttttattgtccaaaacgtgctga

SEQ ID NO: 218945 - DNA, 25 bp, Probe sequence
tttattgtccaaaacgtgctgatga

SEQ ID NO: 218946 - DNA, 25 bp, Probe sequence
ttttattgtccaaaacgtgctgatg

SEQ ID NO: 218947 - DNA, 25 bp, Probe sequence
tttttattgtccaaaacgtgctgat

SEQ ID NO: 218948 - DNA, 25 bp, Probe sequence
ttattgtccaaaacgtgctgatgac

SEQ ID NO: 218949 - DNA, 25 bp, Probe sequence
ttgtccaaaacgtgctgatgacatt

SEQ ID NO: 218950 - DNA, 25 bp, Probe sequence
atgggtcaaaacataaagcgtgctg

SEQ ID NO: 218951 - DNA, 25 bp, Probe sequence
aggcaaacatagtataagtagccat

SEQ ID NO: 218952 - DNA, 25 bp, Probe sequence
agtagccatgaaatgaattcatcaa

SEQ ID NO: 218953 - DNA, 25 bp, Probe sequence
agaagtgaaggcaaacatagtataa

SEQ ID NO: 218954 - DNA, 25 bp, Probe sequence
actacaccaaggttgaattcggaga

SEQ ID NO: 218955 - DNA, 25 bp, Probe sequence
aaacataaagcgtgctgttacacca

SEQ ID NO: 218956 - DNA, 25 bp, Probe sequence
aaaaatgatgactcagggcgcttct

SEQ ID NO: 218957 - DNA, 25 bp, Probe sequence
aaaatgatgactcagggcgcttctt

SEQ ID NO: 218958 - DNA, 25 bp, Probe sequence
aactacaccaaggttgaattcggag

SEQ ID NO: 218959 - DNA, 25 bp, Probe sequence
aagagtggcaagagttcttaaactc

SEQ ID NO: 218960 - DNA, 25 bp, Probe sequence
aatggaagtaaaatatagcggtaat

SEQ ID NO: 218961 - DNA, 25 bp, Probe sequence
aattcggagaacactatgcaagact

SEQ ID NO: 218962 - DNA, 25 bp, Probe sequence
caccaaggttgaattcggagaacac

SEQ ID NO: 218963 - DNA, 25 bp, Probe sequence
cggagaacactatgcaagacttaga

SEQ ID NO: 218964 - DNA, 25 bp, Probe sequence
ccttgtggcacaaagtaaatttatc

SEQ ID NO: 218965 - DNA, 25 bp, Probe sequence
ccaaggttgaattcggagaacacta

SEQ ID NO: 218966 - DNA, 25 bp, Probe sequence
gcggaagagctagaggagcaaaaga

SEQ ID NO: 218967 - DNA, 25 bp, Probe sequence
gctgaagcggaagagctagaggagc

SEQ ID NO: 218968 - DNA, 25 bp, Probe sequence
gaattcggagaacactatgcaagac

SEQ ID NO: 218969 - DNA, 25 bp, Probe sequence
gaagcggaagagctagaggagcaaa

SEQ ID NO: 218970 - DNA, 25 bp, Probe sequence
gaaaaaatgatgactcagggcgctt

SEQ ID NO: 218971 - DNA, 25 bp, Probe sequence
gaaatgaattcatcaaagtatgttg

SEQ ID NO: 218972 - DNA, 25 bp, Probe sequence
gagttcttaaactctgggaaagagg

SEQ ID NO: 218973 - DNA, 25 bp, Probe sequence
gttgaattcggagaacactatgcaa

SEQ ID NO: 218974 - DNA, 25 bp, Probe sequence
gtcaaaacataaagcgtgctgttac

SEQ ID NO: 218975 - DNA, 25 bp, Probe sequence
gtggcaagagttcttaaactctggg

SEQ ID NO: 218976 - DNA, 25 bp, Probe sequence
ggtataatcttgagaaagagtggca

SEQ ID NO: 218977 - DNA, 25 bp, Probe sequence
ggttgaattcggagaacactatgca

SEQ ID NO: 218978 - DNA, 25 bp, Probe sequence
ggcaagagttcttaaactctgggaa

SEQ ID NO: 218979 - DNA, 25 bp, Probe sequence
tgtggcacaaagtaaatttatcaac

SEQ ID NO: 218980 - DNA, 25 bp, Probe sequence
tacaccaaggttgaattcggagaac

SEQ ID NO: 218981 - DNA, 25 bp, Probe sequence
tagcggtaatagtcaaagaccgact

SEQ ID NO: 218982 - DNA, 25 bp, Probe sequence
ttcatcaaagtatgttgaatcacca

SEQ ID NO: 218983 - DNA, 25 bp, Probe sequence
ttcggagaacactatgcaagactta

SEQ ID NO: 218984 - DNA, 25 bp, Probe sequence
atcgccagaatgtttggtgggtcaa

SEQ ID NO: 218985 - DNA, 25 bp, Probe sequence
atcggactgatcataaagggcgcat

SEQ ID NO: 218986 - DNA, 25 bp, Probe sequence
atgatgactcaaggtgcttcttgtg

SEQ ID NO: 218987 - DNA, 25 bp, Probe sequence
atgtttggtgggtcaaaagacatag

SEQ ID NO: 218988 - DNA, 25 bp, Probe sequence
atgggtcaaaacatgaaacgtgctg

SEQ ID NO: 218989 - DNA, 25 bp, Probe sequence
atggggtattatcaaaatgagctat

SEQ ID NO: 218990 - DNA, 25 bp, Probe sequence
atggcggtggtcatggtagagatac

SEQ ID NO: 218991 - DNA, 25 bp, Probe sequence
aggtaaacatagtgtaagtagccat

SEQ ID NO: 218992 - DNA, 25 bp, Probe sequence
acaccaaggtcaaatatggagagca

SEQ ID NO: 218993 - DNA, 25 bp, Probe sequence
aaactacaccaaggtcaaatatgga

SEQ ID NO: 218994 - DNA, 25 bp, Probe sequence
aaacatgaaacgtgctgttacacca

SEQ ID NO: 218995 - DNA, 25 bp, Probe sequence
aaaaatggcggtggtcatggtagag

SEQ ID NO: 218996 - DNA, 25 bp, Probe sequence
aagacatagataaccttgtagcaca

SEQ ID NO: 218997 - DNA, 25 bp, Probe sequence
aatggtgattggtacaagttggaaa

SEQ ID NO: 218998 - DNA, 25 bp, Probe sequence
aatatacaacaccaactggtcacat

SEQ ID NO: 218999 - DNA, 25 bp, Probe sequence
aatatatcaaccgttcatttaagga

SEQ ID NO: 219000 - DNA, 25 bp, Probe sequence
caaagtaaatatatcaaccgttcat

SEQ ID NO: 219001 - DNA, 25 bp, Probe sequence
ctttctctaaaagatggcggtcgta

SEQ ID NO: 219002 - DNA, 25 bp, Probe sequence
gactcaaggtgcttcttgtgattac

SEQ ID NO: 219003 - DNA, 25 bp, Probe sequence
gactgatcataaagggcgcataaaa

SEQ ID NO: 219004 - DNA, 25 bp, Probe sequence
gatggaggtcacttaatcgccagaa

SEQ ID NO: 219005 - DNA, 25 bp, Probe sequence
gatggcggtcgtaataaccatgcac

SEQ ID NO: 219006 - DNA, 25 bp, Probe sequence
gtagccatgaaataaatttatcaaa

SEQ ID NO: 219007 - DNA, 25 bp, Probe sequence
gggaaaaggcaatcaagtctggaaa

SEQ ID NO: 219008 - DNA, 25 bp, Probe sequence
ggtcacttaatcgccagaatgtttg

SEQ ID NO: 219009 - DNA, 25 bp, Probe sequence
ggaggtcacttaatcgccagaatgt

SEQ ID NO: 219010 - DNA, 25 bp, Probe sequence
ggcaatcaagtctggaaaatcaata

SEQ ID NO: 219011 - DNA, 25 bp, Probe sequence
ggcggtcgtaataaccatgcacaaa

SEQ ID NO: 219012 - DNA, 25 bp, Probe sequence
tggagagcaatatgcaagacttaga

SEQ ID NO: 219013 - DNA, 25 bp, Probe sequence
tggtcacatatatcggactgatcat

SEQ ID NO: 219014 - DNA, 25 bp, Probe sequence
taatcgccagaatgtttggtgggtc

SEQ ID NO: 219015 - DNA, 25 bp, Probe sequence
tagaatatacaacaccaactggtca

SEQ ID NO: 219016 - DNA, 25 bp, Probe sequence
tagataaccttgtagcacaaagtaa

SEQ ID NO: 219017 - DNA, 25 bp, Probe sequence
tatcaaccgttcatttaaggaaaat

SEQ ID NO: 219018 - DNA, 25 bp, Probe sequence
atttgatgatttatggatggattta

SEQ ID NO: 219019 - DNA, 25 bp, Probe sequence
atcatgtgaatttgactttacaaga

SEQ ID NO: 219020 - DNA, 25 bp, Probe sequence
atggacatcatgtgaatttgacttt

SEQ ID NO: 219021 - DNA, 25 bp, Probe sequence
atggatggatttatatgatttgttt

SEQ ID NO: 219022 - DNA, 25 bp, Probe sequence
atggcttatatagatgatggaggag

SEQ ID NO: 219023 - DNA, 25 bp, Probe sequence
agaaccatggacatcatgtgaattt

SEQ ID NO: 219024 - DNA, 25 bp, Probe sequence
accatggacatcatgtgaatttgac

SEQ ID NO: 219025 - DNA, 25 bp, Probe sequence
acatcatgtgaatttgactttacaa

SEQ ID NO: 219026 - DNA, 25 bp, Probe sequence
acaatggcttatatagatgatggag

SEQ ID NO: 219027 - DNA, 25 bp, Probe sequence
aaccatggacatcatgtgaatttga

SEQ ID NO: 219028 - DNA, 25 bp, Probe sequence
aagtatttgatgatttatggatgga

SEQ ID NO: 219029 - DNA, 25 bp, Probe sequence
aatggcttatatagatgatggagga

SEQ ID NO: 219030 - DNA, 25 bp, Probe sequence
catgtgaatttgactttacaagaga

SEQ ID NO: 219031 - DNA, 25 bp, Probe sequence
catcatgtgaatttgactttacaag

SEQ ID NO: 219032 - DNA, 25 bp, Probe sequence
ctgtgcaagtatttgatgatttatg

SEQ ID NO: 219033 - DNA, 25 bp, Probe sequence
gcaagtatttgatgatttatggatg

SEQ ID NO: 219034 - DNA, 25 bp, Probe sequence
gaaccatggacatcatgtgaatttg

SEQ ID NO: 219035 - DNA, 25 bp, Probe sequence
gacatcatgtgaatttgactttaca

SEQ ID NO: 219036 - DNA, 25 bp, Probe sequence
gatgatttatggatggatttatatg

SEQ ID NO: 219037 - DNA, 25 bp, Probe sequence
tgataccggtagagtgggaaaaagt

SEQ ID NO: 219038 - DNA, 25 bp, Probe sequence
gtatttgatgatttatggatggatt

SEQ ID NO: 219039 - DNA, 25 bp, Probe sequence
ggaaaaagtatatacaatggcttat

SEQ ID NO: 219040 - DNA, 25 bp, Probe sequence
ggacatcatgtgaatttgactttac

SEQ ID NO: 219041 - DNA, 25 bp, Probe sequence
tggacatcatgtgaatttgacttta

SEQ ID NO: 219042 - DNA, 25 bp, Probe sequence
tggcttatatagatgatggaggagg

SEQ ID NO: 219043 - DNA, 25 bp, Probe sequence
tgcaagtatttgatgatttatggat

SEQ ID NO: 219044 - DNA, 25 bp, Probe sequence
tcatgtgaatttgactttacaagag

SEQ ID NO: 219045 - DNA, 25 bp, Probe sequence
tacaatggcttatatagatgatgga

SEQ ID NO: 219046 - DNA, 25 bp, Probe sequence
tagaaccatggacatcatgtgaatt

SEQ ID NO: 219047 - DNA, 25 bp, Probe sequence
tatgataccggtagagtgggaaaaa

SEQ ID NO: 219048 - DNA, 25 bp, Probe sequence
tttgatgatttatggatggatttat

SEQ ID NO: 219049 - DNA, 25 bp, Probe sequence
tttctgtgcaagtatttgatgattt

SEQ ID NO: 219050 - DNA, 25 bp, Probe sequence
ttagaaccatggacatcatgtgaat

SEQ ID NO: 219051 - DNA, 25 bp, Probe sequence
ttctgtgcaagtatttgatgattta

SEQ ID NO: 219052 - DNA, 25 bp, Probe sequence
attttactatacgagcgtgttaaat

SEQ ID NO: 219053 - DNA, 25 bp, Probe sequence
atatgcaatggcttatgtaaatgaa

SEQ ID NO: 219054 - DNA, 25 bp, Probe sequence
atgataccggtagaatgggaaaagg

SEQ ID NO: 219055 - DNA, 25 bp, Probe sequence
agatcagaatttatggactcagtat

SEQ ID NO: 219056 - DNA, 25 bp, Probe sequence
aaattagcagtatgataccggtaga

SEQ ID NO: 219057 - DNA, 25 bp, Probe sequence
aaaggtatatgcaatggcttatgta

SEQ ID NO: 219058 - DNA, 25 bp, Probe sequence
aagcaatttgataaactaagagatt

SEQ ID NO: 219059 - DNA, 25 bp, Probe sequence
aagaatatgccataaattgggtaaa

SEQ ID NO: 219060 - DNA, 25 bp, Probe sequence
aagaagaaggactcgaaccatggac

SEQ ID NO: 219061 - DNA, 25 bp, Probe sequence
aagaaggactcgaaccatggacatc

SEQ ID NO: 219062 - DNA, 25 bp, Probe sequence
aaggactcgaaccatggacatcatg

SEQ ID NO: 219063 - DNA, 25 bp, Probe sequence
catttgattatattgattgggcgaa

SEQ ID NO: 219064 - DNA, 25 bp, Probe sequence
gcagtatgataccggtagaatggga

SEQ ID NO: 219065 - DNA, 25 bp, Probe sequence
gaattcagagtttggacaaatggga

SEQ ID NO: 219066 - DNA, 25 bp, Probe sequence
gaatttatggactcagtatatgaat

SEQ ID NO: 219067 - DNA, 25 bp, Probe sequence
gaattattttactatacgagcgtgt

SEQ ID NO: 219068 - DNA, 25 bp, Probe sequence
gaatttggcctgaaaaagaatatgc

SEQ ID NO: 219069 - DNA, 25 bp, Probe sequence
gaatttgactttacaagagacggca

SEQ ID NO: 219070 - DNA, 25 bp, Probe sequence
gaatgtttcatttgattatattgat

SEQ ID NO: 219071 - DNA, 25 bp, Probe sequence
gaaggactcgaaccatggacatcat

SEQ ID NO: 219072 - DNA, 25 bp, Probe sequence
gaagtggagaagtgttctacaatta

SEQ ID NO: 219073 - DNA, 25 bp, Probe sequence
gaaccatggacatcatgtgaatttg

SEQ ID NO: 219074 - DNA, 25 bp, Probe sequence
gaaccaagaagtgatgaattatttt

SEQ ID NO: 219075 - DNA, 25 bp, Probe sequence
gaaaaactaagtcaaatgtacaatg

SEQ ID NO: 219076 - DNA, 25 bp, Probe sequence
gactcgaaccatggacatcatgtga

SEQ ID NO: 219077 - DNA, 25 bp, Probe sequence
gagacggcaaattgaatgtttcatt

SEQ ID NO: 219078 - DNA, 25 bp, Probe sequence
gattgggcgaattcagagtttggac

SEQ ID NO: 219079 - DNA, 25 bp, Probe sequence
gtgttctacaattatactgaaccaa

SEQ ID NO: 219080 - DNA, 25 bp, Probe sequence
gggaagagaacattattacatgtat

SEQ ID NO: 219081 - DNA, 25 bp, Probe sequence
ggagaagtgttctacaattatactg

SEQ ID NO: 219082 - DNA, 25 bp, Probe sequence
ggacatcatgtgaatttgactttac

SEQ ID NO: 219083 - DNA, 25 bp, Probe sequence
tgggcgaattcagagtttggacaaa

SEQ ID NO: 219084 - DNA, 25 bp, Probe sequence
tcaagatcagaatttatggactcag

SEQ ID NO: 219085 - DNA, 25 bp, Probe sequence
ttgactttacaagagacggcaaatt

SEQ ID NO: 219086 - DNA, 25 bp, Probe sequence
attaactgcgttgagctcatttata

SEQ ID NO: 219087 - DNA, 25 bp, Probe sequence
atattgatactcttcgaaagccagg

SEQ ID NO: 219088 - DNA, 25 bp, Probe sequence
attttgcagctgtacaaaaccatta

SEQ ID NO: 219089 - DNA, 25 bp, Probe sequence
attattaactgcgttgagctcattt

SEQ ID NO: 219090 - DNA, 25 bp, Probe sequence
attattttgcagctgtacaaaacca

SEQ ID NO: 219091 - DNA, 25 bp, Probe sequence
atcactgtagtatttgcactgtgta

SEQ ID NO: 219092 - DNA, 25 bp, Probe sequence
atgtgttaactactatcactgtagt

SEQ ID NO: 219093 - DNA, 25 bp, Probe sequence
actactatcactgtagtatttgcac

SEQ ID NO: 219094 - DNA, 25 bp, Probe sequence
actatcactgtagtatttgcactgt

SEQ ID NO: 219095 - DNA, 25 bp, Probe sequence
aaatattgatactcttcgaaagcca

SEQ ID NO: 219096 - DNA, 25 bp, Probe sequence
aaatgtgttaactactatcactgta

SEQ ID NO: 219097 - DNA, 25 bp, Probe sequence
aaaaaatatatgctcgatttttagt

SEQ ID NO: 219098 - DNA, 25 bp, Probe sequence
aaaatattgatactcttcgaaagcc

SEQ ID NO: 219099 - DNA, 25 bp, Probe sequence
aactgcgttgagctcatttatatat

SEQ ID NO: 219100 - DNA, 25 bp, Probe sequence
aatgtgttaactactatcactgtag

SEQ ID NO: 219101 - DNA, 25 bp, Probe sequence
aatattgatactcttcgaaagccag

SEQ ID NO: 219102 - DNA, 25 bp, Probe sequence
caagccttaagtttaatatcattgt

SEQ ID NO: 219103 - DNA, 25 bp, Probe sequence
cttaagtttaatatcattgtttttg

SEQ ID NO: 219104 - DNA, 25 bp, Probe sequence
ctatcactgtagtatttgcactgtg

SEQ ID NO: 219105 - DNA, 25 bp, Probe sequence
ctactatcactgtagtatttgcact

SEQ ID NO: 219106 - DNA, 25 bp, Probe sequence
gccttaagtttaatatcattgtttt

SEQ ID NO: 219107 - DNA, 25 bp, Probe sequence
gttaactactatcactgtagtattt

SEQ ID NO: 219108 - DNA, 25 bp, Probe sequence
gtgttaactactatcactgtagtat

SEQ ID NO: 219109 - DNA, 25 bp, Probe sequence
tcattgtttttgatacttttttcat

SEQ ID NO: 219110 - DNA, 25 bp, Probe sequence
tcactgtagtatttgcactgtgtaa

SEQ ID NO: 219111 - DNA, 25 bp, Probe sequence
taactgcgttgagctcatttatata

SEQ ID NO: 219112 - DNA, 25 bp, Probe sequence
tagctatttattattagtaattggc

SEQ ID NO: 219113 - DNA, 25 bp, Probe sequence
tatcactgtagtatttgcactgtgt

SEQ ID NO: 219114 - DNA, 25 bp, Probe sequence
tattattaactgcgttgagctcatt

SEQ ID NO: 219115 - DNA, 25 bp, Probe sequence
tattaactgcgttgagctcatttat

SEQ ID NO: 219116 - DNA, 25 bp, Probe sequence
ttattattaactgcgttgagctcat

SEQ ID NO: 219117 - DNA, 25 bp, Probe sequence
ttattaactgcgttgagctcattta

SEQ ID NO: 219118 - DNA, 25 bp, Probe sequence
ttaactgcgttgagctcatttatat

SEQ ID NO: 219119 - DNA, 25 bp, Probe sequence
ttcaatcataattagctatttatta

SEQ ID NO: 219120 - DNA, 25 bp, Probe sequence
attgcctataatcatctatgccatt

SEQ ID NO: 219121 - DNA, 25 bp, Probe sequence
atttttcatactcagcttatttatc

SEQ ID NO: 219122 - DNA, 25 bp, Probe sequence
atttaactgctgtgatgtattctga

SEQ ID NO: 219123 - DNA, 25 bp, Probe sequence
atattatatatttaactgctgtgat

SEQ ID NO: 219124 - DNA, 25 bp, Probe sequence
atctcatttttcatactcagcttat

SEQ ID NO: 219125 - DNA, 25 bp, Probe sequence
agggattatttctttgatagtagct

SEQ ID NO: 219126 - DNA, 25 bp, Probe sequence
acattacagatagttcaagtggaat

SEQ ID NO: 219127 - DNA, 25 bp, Probe sequence
acacgtgacttaagtatctcatttt

SEQ ID NO: 219128 - DNA, 25 bp, Probe sequence
aactgctgtgatgtattctgaaaaa

SEQ ID NO: 219129 - DNA, 25 bp, Probe sequence
aatgtgattttgtatatggggagtt

SEQ ID NO: 219130 - DNA, 25 bp, Probe sequence
aattcagttgaaagcttacgtataa

SEQ ID NO: 219131 - DNA, 25 bp, Probe sequence
cttattattaattgtcgtagccgga

SEQ ID NO: 219132 - DNA, 25 bp, Probe sequence
ctcatttttcatactcagcttattt

SEQ ID NO: 219133 - DNA, 25 bp, Probe sequence
gcttttgttgtaataaggccaatat

SEQ ID NO: 219134 - DNA, 25 bp, Probe sequence
gcttatttatcattattatatttgc

SEQ ID NO: 219135 - DNA, 25 bp, Probe sequence
gaaacacgtgacttaagtatctcat

SEQ ID NO: 219136 - DNA, 25 bp, Probe sequence
gagtttgttttatgcatggatggct

SEQ ID NO: 219137 - DNA, 25 bp, Probe sequence
gattatttctttgatagtagctata

SEQ ID NO: 219138 - DNA, 25 bp, Probe sequence
gtttgcttttgttgtaataaggcca

SEQ ID NO: 219139 - DNA, 25 bp, Probe sequence
gtattgcctataatcatctatgcca

SEQ ID NO: 219140 - DNA, 25 bp, Probe sequence
gtatctcatttttcatactcagctt

SEQ ID NO: 219141 - DNA, 25 bp, Probe sequence
gtagctatagtactaacggtattaa

SEQ ID NO: 219142 - DNA, 25 bp, Probe sequence
gtagccggactgtattatattatat

SEQ ID NO: 219143 - DNA, 25 bp, Probe sequence
gtactaacggtattaatgacattaa

SEQ ID NO: 219144 - DNA, 25 bp, Probe sequence
gtgacttaagtatctcatttttcat

SEQ ID NO: 219145 - DNA, 25 bp, Probe sequence
ggagttcttattattaattgtcgta

SEQ ID NO: 219146 - DNA, 25 bp, Probe sequence
ggagcgtttgcttttgttgtaataa

SEQ ID NO: 219147 - DNA, 25 bp, Probe sequence
tggggagtttgttttatgcatggat

SEQ ID NO: 219148 - DNA, 25 bp, Probe sequence
taattgtcgtagccggactgtatta

SEQ ID NO: 219149 - DNA, 25 bp, Probe sequence
tactcagcttatttatcattattat

SEQ ID NO: 219150 - DNA, 25 bp, Probe sequence
tagagttagaaaaggagcgtttgct

SEQ ID NO: 219151 - DNA, 25 bp, Probe sequence
tagtagtattgcctataatcatcta

SEQ ID NO: 219152 - DNA, 25 bp, Probe sequence
ttcatactcagcttatttatcatta

SEQ ID NO: 219153 - DNA, 25 bp, Probe sequence
ttgtcgtagccggactgtattatat

SEQ ID NO: 219154 - DNA, 25 bp, Probe sequence
atttaataccccagaatgaccattc

SEQ ID NO: 219155 - DNA, 25 bp, Probe sequence
attctttagcaaaatcaactgatcc

SEQ ID NO: 219156 - DNA, 25 bp, Probe sequence
ataacacaacattttcttccacaac

SEQ ID NO: 219157 - DNA, 25 bp, Probe sequence
ataatcttgttgaaagctgcaccca

SEQ ID NO: 219158 - DNA, 25 bp, Probe sequence
atcaactgatccgaaaattttacca

SEQ ID NO: 219159 - DNA, 25 bp, Probe sequence
atcttgttgaaagctgcacccatca

SEQ ID NO: 219160 - DNA, 25 bp, Probe sequence
atgatattttctactaatgaagata

SEQ ID NO: 219161 - DNA, 25 bp, Probe sequence
acccatcacaacagcaattgctaaa

SEQ ID NO: 219162 - DNA, 25 bp, Probe sequence
acagcaattgctaaatctaagacgt

SEQ ID NO: 219163 - DNA, 25 bp, Probe sequence
aaatgtaacctcaattatacaacaa

SEQ ID NO: 219164 - DNA, 25 bp, Probe sequence
aacacaacattttcttccacaactg

SEQ ID NO: 219165 - DNA, 25 bp, Probe sequence
aagctgcacccatcacaacagcaat

SEQ ID NO: 219166 - DNA, 25 bp, Probe sequence
caactgatccgaaaattttaccaat

SEQ ID NO: 219167 - DNA, 25 bp, Probe sequence
caaacgcgatgataataaagtcgat

SEQ ID NO: 219168 - DNA, 25 bp, Probe sequence
cttttaacattacactcaacctctc

SEQ ID NO: 219169 - DNA, 25 bp, Probe sequence
ctgcacccatcacaacagcaattgc

SEQ ID NO: 219170 - DNA, 25 bp, Probe sequence
gcgaactctttgaattcttttaaca

SEQ ID NO: 219171 - DNA, 25 bp, Probe sequence
gcacccatcacaacagcaattgcta

SEQ ID NO: 219172 - DNA, 25 bp, Probe sequence
gaattcttttaacattacactcaac

SEQ ID NO: 219173 - DNA, 25 bp, Probe sequence
gaatgaccattctttagcaaaatca

SEQ ID NO: 219174 - DNA, 25 bp, Probe sequence
gaactctttgaattcttttaacatt

SEQ ID NO: 219175 - DNA, 25 bp, Probe sequence
gaccattctttagcaaaatcaactg

SEQ ID NO: 219176 - DNA, 25 bp, Probe sequence
gatgaataaagcaaacgcgatgata

SEQ ID NO: 219177 - DNA, 25 bp, Probe sequence
gatccgaaaattttaccaattaatg

SEQ ID NO: 219178 - DNA, 25 bp, Probe sequence
gttgaaagctgcacccatcacaaca

SEQ ID NO: 219179 - DNA, 25 bp, Probe sequence
tgctaaatctaagacgttacctttt

SEQ ID NO: 219180 - DNA, 25 bp, Probe sequence
tgaaagctgcacccatcacaacagc

SEQ ID NO: 219181 - DNA, 25 bp, Probe sequence
tctctgatttcagttaataacacaa

SEQ ID NO: 219182 - DNA, 25 bp, Probe sequence
taaggcgaactctttgaattctttt

SEQ ID NO: 219183 - DNA, 25 bp, Probe sequence
tttaaggcgaactctttgaattctt

SEQ ID NO: 219184 - DNA, 25 bp, Probe sequence
taaagtcgataacagattggataaa

SEQ ID NO: 219185 - DNA, 25 bp, Probe sequence
taccccagaatgaccattctttagc

SEQ ID NO: 219186 - DNA, 25 bp, Probe sequence
ttttaacattacactcaacctctct

SEQ ID NO: 219187 - DNA, 25 bp, Probe sequence
ttgttgaaagctgcacccatcacaa

SEQ ID NO: 219188 - DNA, 25 bp, Probe sequence
attaacagtagttacaccgctattt

SEQ ID NO: 219189 - DNA, 25 bp, Probe sequence
atttattagcatatttaggtttaag

SEQ ID NO: 219190 - DNA, 25 bp, Probe sequence
atttggtattggaagtattgtttgt

SEQ ID NO: 219191 - DNA, 25 bp, Probe sequence
agttacaccgctatttggtattgga

SEQ ID NO: 219192 - DNA, 25 bp, Probe sequence
agtagttacaccgctatttggtatt

SEQ ID NO: 219193 - DNA, 25 bp, Probe sequence
acagtagttacaccgctatttggta

SEQ ID NO: 219194 - DNA, 25 bp, Probe sequence
acaccgctatttggtattggaagta

SEQ ID NO: 219195 - DNA, 25 bp, Probe sequence
aaattgcaattatcgtaacaataat

SEQ ID NO: 219196 - DNA, 25 bp, Probe sequence
aacagtagttacaccgctatttggt

SEQ ID NO: 219197 - DNA, 25 bp, Probe sequence
aatggcttaaaaattgcaacatggg

SEQ ID NO: 219198 - DNA, 25 bp, Probe sequence
aattgcaacatgggtatttattgta

SEQ ID NO: 219199 - DNA, 25 bp, Probe sequence
caccgctatttggtattggaagtat

SEQ ID NO: 219200 - DNA, 25 bp, Probe sequence
cagtagttacaccgctatttggtat

SEQ ID NO: 219201 - DNA, 25 bp, Probe sequence
ccgctatttggtattggaagtattg

SEQ ID NO: 219202 - DNA, 25 bp, Probe sequence
gctatttggtattggaagtattgtt

SEQ ID NO: 219203 - DNA, 25 bp, Probe sequence
gaagtattgtttgtagtattaatta

SEQ ID NO: 219204 - DNA, 25 bp, Probe sequence
gaaaaccaaaaacaaggcaatggct

SEQ ID NO: 219205 - DNA, 25 bp, Probe sequence
gttacaccgctatttggtattggaa

SEQ ID NO: 219206 - DNA, 25 bp, Probe sequence
gtattggaagtattgtttgtagtat

SEQ ID NO: 219207 - DNA, 25 bp, Probe sequence
gtattaacagtagttacaccgctat

SEQ ID NO: 219208 - DNA, 25 bp, Probe sequence
gtagttacaccgctatttggtattg

SEQ ID NO: 219209 - DNA, 25 bp, Probe sequence
gggtatttattgtattaacagtagt

SEQ ID NO: 219210 - DNA, 25 bp, Probe sequence
ggtattggaagtattgtttgtagta

SEQ ID NO: 219211 - DNA, 25 bp, Probe sequence
ggcttaaaaattgcaacatgggtat

SEQ ID NO: 219212 - DNA, 25 bp, Probe sequence
taacagtagttacaccgctatttgg

SEQ ID NO: 219213 - DNA, 25 bp, Probe sequence
tacaccgctatttggtattggaagt

SEQ ID NO: 219214 - DNA, 25 bp, Probe sequence
tagttacaccgctatttggtattgg

SEQ ID NO: 219215 - DNA, 25 bp, Probe sequence
tattaacagtagttacaccgctatt

SEQ ID NO: 219216 - DNA, 25 bp, Probe sequence
tattagcatatttaggtttaagata

SEQ ID NO: 219217 - DNA, 25 bp, Probe sequence
ttttgttttaaatttattagcatat

SEQ ID NO: 219218 - DNA, 25 bp, Probe sequence
ttacaccgctatttggtattggaag

SEQ ID NO: 219219 - DNA, 25 bp, Probe sequence
ttaacagtagttacaccgctatttg

SEQ ID NO: 219220 - DNA, 25 bp, Probe sequence
ttggtattggaagtattgtttgtag

SEQ ID NO: 219221 - DNA, 25 bp, Probe sequence
ttggaagtattgtttgtagtattaa

SEQ ID NO: 219222 - DNA, 25 bp, Probe sequence
attggcatgcatcttatgaagaatt

SEQ ID NO: 219223 - DNA, 25 bp, Probe sequence
attaattggcatgcatcttatgaag

SEQ ID NO: 219224 - DNA, 25 bp, Probe sequence
atagaagtcgccttgttcgttttca

SEQ ID NO: 219225 - DNA, 25 bp, Probe sequence
atactcagatagaagtcgccttgtt

SEQ ID NO: 219226 - DNA, 25 bp, Probe sequence
ataaacaaggcgatttctatcatac

SEQ ID NO: 219227 - DNA, 25 bp, Probe sequence
atcatactcagatagaagtcgcctt

SEQ ID NO: 219228 - DNA, 25 bp, Probe sequence
aggcgatttctatcatactcagata

SEQ ID NO: 219229 - DNA, 25 bp, Probe sequence
agatagaagtcgccttgttcgtttt

SEQ ID NO: 219230 - DNA, 25 bp, Probe sequence
agaattaattggcatgcatcttatg

SEQ ID NO: 219231 - DNA, 25 bp, Probe sequence
actcagatagaagtcgccttgttcg

SEQ ID NO: 219232 - DNA, 25 bp, Probe sequence
acaaggcgatttctatcatactcag

SEQ ID NO: 219233 - DNA, 25 bp, Probe sequence
aaacaaggcgatttctatcatactc

SEQ ID NO: 219234 - DNA, 25 bp, Probe sequence
aacaaggcgatttctatcatactca

SEQ ID NO: 219235 - DNA, 25 bp, Probe sequence
aaggcgatttctatcatactcagat

SEQ ID NO: 219236 - DNA, 25 bp, Probe sequence
aattaattggcatgcatcttatgaa

SEQ ID NO: 219237 - DNA, 25 bp, Probe sequence
aattggcatgcatcttatgaagaat

SEQ ID NO: 219238 - DNA, 25 bp, Probe sequence
caaggcgatttctatcatactcaga

SEQ ID NO: 219239 - DNA, 25 bp, Probe sequence
cagatagaagtcgccttgttcgttt

SEQ ID NO: 219240 - DNA, 25 bp, Probe sequence
catactcagatagaagtcgccttgt

SEQ ID NO: 219241 - DNA, 25 bp, Probe sequence
ctcagatagaagtcgccttgttcgt

SEQ ID NO: 219242 - DNA, 25 bp, Probe sequence
gaattaattggcatgcatcttatga

SEQ ID NO: 219243 - DNA, 25 bp, Probe sequence
gatagaagtcgccttgttcgttttc

SEQ ID NO: 219244 - DNA, 25 bp, Probe sequence
gtcgccttgttcgttttcaaagaat

SEQ ID NO: 219245 - DNA, 25 bp, Probe sequence
ggcgatttctatcatactcagatag

SEQ ID NO: 219246 - DNA, 25 bp, Probe sequence
tggcatgcatcttatgaagaattat

SEQ ID NO: 219247 - DNA, 25 bp, Probe sequence
tcgccttgttcgttttcaaagaatt

SEQ ID NO: 219248 - DNA, 25 bp, Probe sequence
tcatactcagatagaagtcgccttg

SEQ ID NO: 219249 - DNA, 25 bp, Probe sequence
tcagatagaagtcgccttgttcgtt

SEQ ID NO: 219250 - DNA, 25 bp, Probe sequence
tcaaagaattaattggcatgcatct

SEQ ID NO: 219251 - DNA, 25 bp, Probe sequence
tagaagtcgccttgttcgttttcaa

SEQ ID NO: 219252 - DNA, 25 bp, Probe sequence
taattggcatgcatcttatgaagaa

SEQ ID NO: 219253 - DNA, 25 bp, Probe sequence
taaacaaggcgatttctatcatact

SEQ ID NO: 219254 - DNA, 25 bp, Probe sequence
tactcagatagaagtcgccttgttc

SEQ ID NO: 219255 - DNA, 25 bp, Probe sequence
ttaattggcatgcatcttatgaaga

SEQ ID NO: 219256 - DNA, 25 bp, Probe sequence
attgcatatgtggacgatggaggtg

SEQ ID NO: 219257 - DNA, 25 bp, Probe sequence
attcgagtatcgttgaagattataa

SEQ ID NO: 219258 - DNA, 25 bp, Probe sequence
attataccaagcccagaaatgatga

SEQ ID NO: 219259 - DNA, 25 bp, Probe sequence
atattttattataccaagcccagaa

SEQ ID NO: 219260 - DNA, 25 bp, Probe sequence
atatgtggacgatggaggtgggcaa

SEQ ID NO: 219261 - DNA, 25 bp, Probe sequence
atcgttgaagattataatgttttag

SEQ ID NO: 219262 - DNA, 25 bp, Probe sequence
atgatgagctgtattattattcgag

SEQ ID NO: 219263 - DNA, 25 bp, Probe sequence
atgtaattgcatatgtggacgatgg

SEQ ID NO: 219264 - DNA, 25 bp, Probe sequence
atgtggacgatggaggtgggcaagt

SEQ ID NO: 219265 - DNA, 25 bp, Probe sequence
aggtgggcaagttatattttattat

SEQ ID NO: 219266 - DNA, 25 bp, Probe sequence
accaagcccagaaatgatgagctgt

SEQ ID NO: 219267 - DNA, 25 bp, Probe sequence
aagcccagaaatgatgagctgtatt

SEQ ID NO: 219268 - DNA, 25 bp, Probe sequence
gctgtattattattcgagtatcgtt

SEQ ID NO: 219269 - DNA, 25 bp, Probe sequence
gcatatgtggacgatggaggtgggc

SEQ ID NO: 219270 - DNA, 25 bp, Probe sequence
gaaatgatgagctgtattattattc

SEQ ID NO: 219271 - DNA, 25 bp, Probe sequence
gacgatggaggtgggcaagttatat

SEQ ID NO: 219272 - DNA, 25 bp, Probe sequence
gagctgtattattattcgagtatcg

SEQ ID NO: 219273 - DNA, 25 bp, Probe sequence
gatggaggtgggcaagttatatttt

SEQ ID NO: 219274 - DNA, 25 bp, Probe sequence
gatgagctgtattattattcgagta

SEQ ID NO: 219275 - DNA, 25 bp, Probe sequence
gtattattattcgagtatcgttgaa

SEQ ID NO: 219276 - DNA, 25 bp, Probe sequence
gtaattgcatatgtggacgatggag

SEQ ID NO: 219277 - DNA, 25 bp, Probe sequence
gtggacgatggaggtgggcaagtta

SEQ ID NO: 219278 - DNA, 25 bp, Probe sequence
ggacgatggaggtgggcaagttata

SEQ ID NO: 219279 - DNA, 25 bp, Probe sequence
ggaggtgggcaagttatattttatt

SEQ ID NO: 219280 - DNA, 25 bp, Probe sequence
ggccaagaaaactactataactata

SEQ ID NO: 219281 - DNA, 25 bp, Probe sequence
tgattggaagaatacagaatttgat

SEQ ID NO: 219282 - DNA, 25 bp, Probe sequence
tgagctgtattattattcgagtatc

SEQ ID NO: 219283 - DNA, 25 bp, Probe sequence
tcaattaggccaagaaaactactat

SEQ ID NO: 219284 - DNA, 25 bp, Probe sequence
tagaaaattcggaattataccagaa

SEQ ID NO: 219285 - DNA, 25 bp, Probe sequence
tataccaagcccagaaatgatgagc

SEQ ID NO: 219286 - DNA, 25 bp, Probe sequence
tattttattataccaagcccagaaa

SEQ ID NO: 219287 - DNA, 25 bp, Probe sequence
ttttattataccaagcccagaaatg

SEQ ID NO: 219288 - DNA, 25 bp, Probe sequence
ttattataccaagcccagaaatgat

SEQ ID NO: 219289 - DNA, 25 bp, Probe sequence
ttaaagaagaaagtcttgaaccatg

SEQ ID NO: 219290 - DNA, 25 bp, Probe sequence
attacaccgatatacctaaggagta

SEQ ID NO: 219291 - DNA, 25 bp, Probe sequence
atttctgtgcaagtatttgatgatt

SEQ ID NO: 219292 - DNA, 25 bp, Probe sequence
agagcaagaagaagctgaactatag

SEQ ID NO: 219293 - DNA, 25 bp, Probe sequence
aaattagtagcatgataccagtaga

SEQ ID NO: 219294 - DNA, 25 bp, Probe sequence
aatggcttatatagatgatggagga

SEQ ID NO: 219295 - DNA, 25 bp, Probe sequence
catttgattatattgattgggcgaa

SEQ ID NO: 219296 - DNA, 25 bp, Probe sequence
cctaaggagtataacatttctgtgc

SEQ ID NO: 219297 - DNA, 25 bp, Probe sequence
gcgaattcagagtttgggccaatgg

SEQ ID NO: 219298 - DNA, 25 bp, Probe sequence
gcaagtatttgatgatttatggatg

SEQ ID NO: 219299 - DNA, 25 bp, Probe sequence
gaattcagagtttgggccaatggga

SEQ ID NO: 219300 - DNA, 25 bp, Probe sequence
gaattattacaccgatatacctaag

SEQ ID NO: 219301 - DNA, 25 bp, Probe sequence
gaatttggcctgaaaaagaatatgc

SEQ ID NO: 219302 - DNA, 25 bp, Probe sequence
gaatttgattttacaagagacggca

SEQ ID NO: 219303 - DNA, 25 bp, Probe sequence
gaatatgccataaattgggttgaaa

SEQ ID NO: 219304 - DNA, 25 bp, Probe sequence
gaatgtttcatttgattatattgat

SEQ ID NO: 219305 - DNA, 25 bp, Probe sequence
gaaggacatgaaccatggacatcat

SEQ ID NO: 219306 - DNA, 25 bp, Probe sequence
gaaccatggacatcatgcgaatttg

SEQ ID NO: 219307 - DNA, 25 bp, Probe sequence
gagacggcaaattgaatgtttcatt

SEQ ID NO: 219308 - DNA, 25 bp, Probe sequence
gatgaattgaattattacaccgata

SEQ ID NO: 219309 - DNA, 25 bp, Probe sequence
gattgggcgaattcagagtttgggc

SEQ ID NO: 219310 - DNA, 25 bp, Probe sequence
gtttgggccaatgggaagagaacat

SEQ ID NO: 219311 - DNA, 25 bp, Probe sequence
gtatttgatgatttatggatggatt

SEQ ID NO: 219312 - DNA, 25 bp, Probe sequence
gtagcatgataccagtagaatggga

SEQ ID NO: 219313 - DNA, 25 bp, Probe sequence
gggcgaattcagagtttgggccaat

SEQ ID NO: 219314 - DNA, 25 bp, Probe sequence
ggatttatatgatttgtttgaggaa

SEQ ID NO: 219315 - DNA, 25 bp, Probe sequence
ggaggtgaagtattctttaattata

SEQ ID NO: 219316 - DNA, 25 bp, Probe sequence
ggatggatttatatgatttgtttga

SEQ ID NO: 219317 - DNA, 25 bp, Probe sequence
ggacatgaaccatggacatcatgcg

SEQ ID NO: 219318 - DNA, 25 bp, Probe sequence
ggaaaaggtatatacaatggcttat

SEQ ID NO: 219319 - DNA, 25 bp, Probe sequence
ggacatcatgcgaatttgattttac

SEQ ID NO: 219320 - DNA, 25 bp, Probe sequence
tgatggaggaggtgaagtattcttt

SEQ ID NO: 219321 - DNA, 25 bp, Probe sequence
ggagtataacatttctgtgcaagta

SEQ ID NO: 219322 - DNA, 25 bp, Probe sequence
tcagagtttgggccaatgggaagag

SEQ ID NO: 219323 - DNA, 25 bp, Probe sequence
taacatttctgtgcaagtatttgat

SEQ ID NO: 219324 - DNA, 25 bp, Probe sequence
attgggttaatacggagtttgatca

SEQ ID NO: 219325 - DNA, 25 bp, Probe sequence
attgattgggttaatacggagtttg

SEQ ID NO: 219326 - DNA, 25 bp, Probe sequence
attacaccgatatacctaaggagta

SEQ ID NO: 219327 - DNA, 25 bp, Probe sequence
atttctgtgcaagtatttgatgatt

SEQ ID NO: 219328 - DNA, 25 bp, Probe sequence
aaattagtagcatgataccagtaga

SEQ ID NO: 219329 - DNA, 25 bp, Probe sequence
aactaaatgaaatgtacaacgagat

SEQ ID NO: 219330 - DNA, 25 bp, Probe sequence
aagaaggactagaaccatggacatc

SEQ ID NO: 219331 - DNA, 25 bp, Probe sequence
aatggcttatatagatgatggagga

SEQ ID NO: 219332 - DNA, 25 bp, Probe sequence
cctaaggagtataacatttctgtgc

SEQ ID NO: 219333 - DNA, 25 bp, Probe sequence
gcaagtatttgatgatttatggatg

SEQ ID NO: 219334 - DNA, 25 bp, Probe sequence
gaattattacaccgatatacctaag

SEQ ID NO: 219335 - DNA, 25 bp, Probe sequence
gaaggactagaaccatggacatcat

SEQ ID NO: 219336 - DNA, 25 bp, Probe sequence
gaaccatggacatcatgcgaatttg

SEQ ID NO: 219337 - DNA, 25 bp, Probe sequence
gactagaaccatggacatcatgcga

SEQ ID NO: 219338 - DNA, 25 bp, Probe sequence
gagaaggtacattgaatgtatcttt

SEQ ID NO: 219339 - DNA, 25 bp, Probe sequence
gatgaattgaattattacaccgata

SEQ ID NO: 219340 - DNA, 25 bp, Probe sequence
gtttgatcaattaggccgtgaaaat

SEQ ID NO: 219341 - DNA, 25 bp, Probe sequence
gtatttgatgatttatggatggatt

SEQ ID NO: 219342 - DNA, 25 bp, Probe sequence
gtatcttttgattatattgattggg

SEQ ID NO: 219343 - DNA, 25 bp, Probe sequence
gtagcatgataccagtagaatggga

SEQ ID NO: 219344 - DNA, 25 bp, Probe sequence
gggttaatacggagtttgatcaatt

SEQ ID NO: 219345 - DNA, 25 bp, Probe sequence
ggatttatatgatttgtttgaggaa

SEQ ID NO: 219346 - DNA, 25 bp, Probe sequence
ggagtttgatcaattaggccgtgaa

SEQ ID NO: 219347 - DNA, 25 bp, Probe sequence
ggaggtgaagtattctttaattata

SEQ ID NO: 219348 - DNA, 25 bp, Probe sequence
ggatggatttatatgatttgtttga

SEQ ID NO: 219349 - DNA, 25 bp, Probe sequence
ggagtataacatttctgtgcaagta

SEQ ID NO: 219350 - DNA, 25 bp, Probe sequence
ggaaaaggtatatacaatggcttat

SEQ ID NO: 219351 - DNA, 25 bp, Probe sequence
ggacatcatgcgaatttgattttac

SEQ ID NO: 219352 - DNA, 25 bp, Probe sequence
ggccgtgaaaattattatatgtaca

SEQ ID NO: 219353 - DNA, 25 bp, Probe sequence
tgatggaggaggtgaagtattcttt

SEQ ID NO: 219354 - DNA, 25 bp, Probe sequence
tcatgcgaatttgattttacaagag

SEQ ID NO: 219355 - DNA, 25 bp, Probe sequence
taacatttctgtgcaagtatttgat

SEQ ID NO: 219356 - DNA, 25 bp, Probe sequence
tacattgaatgtatcttttgattat

SEQ ID NO: 219357 - DNA, 25 bp, Probe sequence
tttggggttataccagaaatggaat

SEQ ID NO: 219358 - DNA, 25 bp, Probe sequence
attcgtaatcgagtcttccaattat

SEQ ID NO: 219359 - DNA, 25 bp, Probe sequence
attcatccaaagagacatgtcgata

SEQ ID NO: 219360 - DNA, 25 bp, Probe sequence
atattcatccaaagagacatgtcga

SEQ ID NO: 219361 - DNA, 25 bp, Probe sequence
atccaaagagacatgtcgatagaaa

SEQ ID NO: 219362 - DNA, 25 bp, Probe sequence
atgatattcatccaaagagacatgt

SEQ ID NO: 219363 - DNA, 25 bp, Probe sequence
atggtttaacattcgtaatcgagtc

SEQ ID NO: 219364 - DNA, 25 bp, Probe sequence
agttgcatgatattcatccaaagag

SEQ ID NO: 219365 - DNA, 25 bp, Probe sequence
acattcgtaatcgagtcttccaatt

SEQ ID NO: 219366 - DNA, 25 bp, Probe sequence
aaatggtttaacattcgtaatcgag

SEQ ID NO: 219367 - DNA, 25 bp, Probe sequence
aacattcgtaatcgagtcttccaat

SEQ ID NO: 219368 - DNA, 25 bp, Probe sequence
aagagacatgtcgatagaaatgata

SEQ ID NO: 219369 - DNA, 25 bp, Probe sequence
aatggtttaacattcgtaatcgagt

SEQ ID NO: 219370 - DNA, 25 bp, Probe sequence
cattcgtaatcgagtcttccaatta

SEQ ID NO: 219371 - DNA, 25 bp, Probe sequence
catccaaagagacatgtcgatagaa

SEQ ID NO: 219372 - DNA, 25 bp, Probe sequence
catgatattcatccaaagagacatg

SEQ ID NO: 219373 - DNA, 25 bp, Probe sequence
gcatgatattcatccaaagagacat

SEQ ID NO: 219374 - DNA, 25 bp, Probe sequence
gaaaatggtttaacattcgtaatcg

SEQ ID NO: 219375 - DNA, 25 bp, Probe sequence
gacatgtcgatagaaatgataatta

SEQ ID NO: 219376 - DNA, 25 bp, Probe sequence
gagacatgtcgatagaaatgataat

SEQ ID NO: 219377 - DNA, 25 bp, Probe sequence
gatattcatccaaagagacatgtcg

SEQ ID NO: 219378 - DNA, 25 bp, Probe sequence
gttgcatgatattcatccaaagaga

SEQ ID NO: 219379 - DNA, 25 bp, Probe sequence
gtttaacattcgtaatcgagtcttc

SEQ ID NO: 219380 - DNA, 25 bp, Probe sequence
ggtttaacattcgtaatcgagtctt

SEQ ID NO: 219381 - DNA, 25 bp, Probe sequence
tggtttaacattcgtaatcgagtct

SEQ ID NO: 219382 - DNA, 25 bp, Probe sequence
tgatattcatccaaagagacatgtc

SEQ ID NO: 219383 - DNA, 25 bp, Probe sequence
tgcatgatattcatccaaagagaca

SEQ ID NO: 219384 - DNA, 25 bp, Probe sequence
tccaaagagacatgtcgatagaaat

SEQ ID NO: 219385 - DNA, 25 bp, Probe sequence
tcatccaaagagacatgtcgataga

SEQ ID NO: 219386 - DNA, 25 bp, Probe sequence
taacattcgtaatcgagtcttccaa

SEQ ID NO: 219387 - DNA, 25 bp, Probe sequence
tattcatccaaagagacatgtcgat

SEQ ID NO: 219388 - DNA, 25 bp, Probe sequence
tttaacattcgtaatcgagtcttcc

SEQ ID NO: 219389 - DNA, 25 bp, Probe sequence
ttaacattcgtaatcgagtcttcca

SEQ ID NO: 219390 - DNA, 25 bp, Probe sequence
ttcatccaaagagacatgtcgatag

SEQ ID NO: 219391 - DNA, 25 bp, Probe sequence
ttgcatgatattcatccaaagagac

SEQ ID NO: 219392 - DNA, 25 bp, Probe sequence
atcaagatcgtatagatatcccaga

SEQ ID NO: 219393 - DNA, 25 bp, Probe sequence
atcccagaattacctgaagatgctg

SEQ ID NO: 219394 - DNA, 25 bp, Probe sequence
agtgcgtgaaacacgtcgcggtaaa

SEQ ID NO: 219395 - DNA, 25 bp, Probe sequence
acctgaagatgctggttctttctta

SEQ ID NO: 219396 - DNA, 25 bp, Probe sequence
aaagttagaacatcaagatcgtata

SEQ ID NO: 219397 - DNA, 25 bp, Probe sequence
caaaatggttcttgcaagacgttga

SEQ ID NO: 219398 - DNA, 25 bp, Probe sequence
ctttcttaatcattcatcaaggtga

SEQ ID NO: 219399 - DNA, 25 bp, Probe sequence
gcgtgaaacacgtcgcggtaaaaag

SEQ ID NO: 219400 - DNA, 25 bp, Probe sequence
gctggttctttcttaatcattcatc

SEQ ID NO: 219401 - DNA, 25 bp, Probe sequence
gcaagacgttgaagtattaattaat

SEQ ID NO: 219402 - DNA, 25 bp, Probe sequence
gaattacctgaagatgctggttctt

SEQ ID NO: 219403 - DNA, 25 bp, Probe sequence
gaatctggtggtcaagcaaaatggt

SEQ ID NO: 219404 - DNA, 25 bp, Probe sequence
gaagggattattgaatctggtggtc

SEQ ID NO: 219405 - DNA, 25 bp, Probe sequence
gaagatgctggttctttcttaatca

SEQ ID NO: 219406 - DNA, 25 bp, Probe sequence
gagacattaatttaggtcaatttct

SEQ ID NO: 219407 - DNA, 25 bp, Probe sequence
gatcgtatagatatcccagaattac

SEQ ID NO: 219408 - DNA, 25 bp, Probe sequence
gtcgcggtaaaaagttagaacatca

SEQ ID NO: 219409 - DNA, 25 bp, Probe sequence
gatgctggttctttcttaatcattc

SEQ ID NO: 219410 - DNA, 25 bp, Probe sequence
gatatcccagaattacctgaagatg

SEQ ID NO: 219411 - DNA, 25 bp, Probe sequence
gttctttcttaatcattcatcaagg

SEQ ID NO: 219412 - DNA, 25 bp, Probe sequence
gtattaattaatggagtgcgtgaaa

SEQ ID NO: 219413 - DNA, 25 bp, Probe sequence
gtatagatatcccagaattacctga

SEQ ID NO: 219414 - DNA, 25 bp, Probe sequence
gtagtagaaggagacattaatttag

SEQ ID NO: 219415 - DNA, 25 bp, Probe sequence
gtgattattttggttcaagaagttg

SEQ ID NO: 219416 - DNA, 25 bp, Probe sequence
gtggtcaagcaaaatggttcttgca

SEQ ID NO: 219417 - DNA, 25 bp, Probe sequence
ggttcttgcaagacgttgaagtatt

SEQ ID NO: 219418 - DNA, 25 bp, Probe sequence
ggattattgaatctggtggtcaagc

SEQ ID NO: 219419 - DNA, 25 bp, Probe sequence
ggagtgcgtgaaacacgtcgcggta

SEQ ID NO: 219420 - DNA, 25 bp, Probe sequence
tggttctttcttaatcattcatcaa

SEQ ID NO: 219421 - DNA, 25 bp, Probe sequence
tgctggttctttcttaatcattcat

SEQ ID NO: 219422 - DNA, 25 bp, Probe sequence
tctggtggtcaagcaaaatggttct

SEQ ID NO: 219423 - DNA, 25 bp, Probe sequence
taatcattcatcaaggtgaacaatg

SEQ ID NO: 219424 - DNA, 25 bp, Probe sequence
ttttggttcaagaagttgtagtaga

SEQ ID NO: 219425 - DNA, 25 bp, Probe sequence
ttacctgaagatgctggttctttct

SEQ ID NO: 219426 - DNA, 25 bp, Probe sequence
attatattataatcgttacttgaaa

SEQ ID NO: 219427 - DNA, 25 bp, Probe sequence
atgatggatgacattaagcccacag

SEQ ID NO: 219428 - DNA, 25 bp, Probe sequence
atggtgcagataagaagcatcaagt

SEQ ID NO: 219429 - DNA, 25 bp, Probe sequence
agtcaatcgctcacacattaatgaa

SEQ ID NO: 219430 - DNA, 25 bp, Probe sequence
agacacttttcattttcgtgtttat

SEQ ID NO: 219431 - DNA, 25 bp, Probe sequence
agcccacagatggtgcagataagaa

SEQ ID NO: 219432 - DNA, 25 bp, Probe sequence
acgaatgttcaattgttacaaccaa

SEQ ID NO: 219433 - DNA, 25 bp, Probe sequence
aaagtcaatcgctcacacattaatg

SEQ ID NO: 219434 - DNA, 25 bp, Probe sequence
aaagcaatcgaggcattatattata

SEQ ID NO: 219435 - DNA, 25 bp, Probe sequence
aaggtcagtgacaataacttaaaag

SEQ ID NO: 219436 - DNA, 25 bp, Probe sequence
aataaagtcaatcgctcacacatta

SEQ ID NO: 219437 - DNA, 25 bp, Probe sequence
caatcggtaaaggtcagtgacaata

SEQ ID NO: 219438 - DNA, 25 bp, Probe sequence
cattaagcccacagatggtgcagat

SEQ ID NO: 219439 - DNA, 25 bp, Probe sequence
cttttcattttcgtgtttattcttg

SEQ ID NO: 219440 - DNA, 25 bp, Probe sequence
gcgattcggatttgaccacatcaga

SEQ ID NO: 219441 - DNA, 25 bp, Probe sequence
gaaacgaatgttcaattgttacaac

SEQ ID NO: 219442 - DNA, 25 bp, Probe sequence
gacattaagcccacagatggtgcag

SEQ ID NO: 219443 - DNA, 25 bp, Probe sequence
gatggatgacattaagcccacagat

SEQ ID NO: 219444 - DNA, 25 bp, Probe sequence
gatttgaccacatcagatggtggaa

SEQ ID NO: 219445 - DNA, 25 bp, Probe sequence
gattcggatttgaccacatcagatg

SEQ ID NO: 219446 - DNA, 25 bp, Probe sequence
gttaataaagtcaatcgctcacaca

SEQ ID NO: 219447 - DNA, 25 bp, Probe sequence
gtgagaaaagcaatcgaggcattat

SEQ ID NO: 219448 - DNA, 25 bp, Probe sequence
ggtgatgaagtcattaatgctagac

SEQ ID NO: 219449 - DNA, 25 bp, Probe sequence
ggatgacattaagcccacagatggt

SEQ ID NO: 219450 - DNA, 25 bp, Probe sequence
ggcgattcggatttgaccacatcag

SEQ ID NO: 219451 - DNA, 25 bp, Probe sequence
tcggatttgaccacatcagatggtg

SEQ ID NO: 219452 - DNA, 25 bp, Probe sequence
tcgtgtttattcttgtcaacatcgt

SEQ ID NO: 219453 - DNA, 25 bp, Probe sequence
tcattttcgtgtttattcttgtcaa

SEQ ID NO: 219454 - DNA, 25 bp, Probe sequence
tcaattgttacaaccaaactgggaa

SEQ ID NO: 219455 - DNA, 25 bp, Probe sequence
tcaatcgctcacacattaatgaagt

SEQ ID NO: 219456 - DNA, 25 bp, Probe sequence
taagcccacagatggtgcagataag

SEQ ID NO: 219457 - DNA, 25 bp, Probe sequence
tttcattttcgtgtttattcttgtc

SEQ ID NO: 219458 - DNA, 25 bp, Probe sequence
tttcgtgtttattcttgtcaacatc

SEQ ID NO: 219459 - DNA, 25 bp, Probe sequence
ttaaagtgaagcatgacggtaagga

SEQ ID NO: 219460 - DNA, 25 bp, Probe sequence
atatgaacagcccttgcgaagttgc

SEQ ID NO: 219461 - DNA, 25 bp, Probe sequence
gaagtggaaagtgtaatccctattt

SEQ ID NO: 219462 - DNA, 25 bp, Probe sequence
atgcactttttgatatttcagtatt

SEQ ID NO: 219463 - DNA, 25 bp, Probe sequence
agaagtgacgtaactgcaaaaacag

SEQ ID NO: 219464 - DNA, 25 bp, Probe sequence
agcaaatattctaactctccaacta

SEQ ID NO: 219465 - DNA, 25 bp, Probe sequence
acattatatgcctaagcaatacatt

SEQ ID NO: 219466 - DNA, 25 bp, Probe sequence
aaatttgacgtgctagctttatcga

SEQ ID NO: 219467 - DNA, 25 bp, Probe sequence
aaatatctttagaagcttccacgca

SEQ ID NO: 219468 - DNA, 25 bp, Probe sequence
aagatgtcatattaaaagcacctaa

SEQ ID NO: 219469 - DNA, 25 bp, Probe sequence
aaggagcttatatcagaagtgacgt

SEQ ID NO: 219470 - DNA, 25 bp, Probe sequence
aatttgtgtagcttatatgatatcg

SEQ ID NO: 219471 - DNA, 25 bp, Probe sequence
aattattatgacttacctgttccaa

SEQ ID NO: 219472 - DNA, 25 bp, Probe sequence
cagatattttagtcgaaggtgttca

SEQ ID NO: 219473 - DNA, 25 bp, Probe sequence
ctgttccaaacttcatgtatgtcga

SEQ ID NO: 219474 - DNA, 25 bp, Probe sequence
gcccttgcgaagttgctgtatcttt

SEQ ID NO: 219475 - DNA, 25 bp, Probe sequence
gcttccacgcaatctctagttttaa

SEQ ID NO: 219476 - DNA, 25 bp, Probe sequence
gcagtcttagactttgaaactatga

SEQ ID NO: 219477 - DNA, 25 bp, Probe sequence
gaatcacatttaattattgctcata

SEQ ID NO: 219478 - DNA, 25 bp, Probe sequence
gaatgaacatatgaacagcccttgc

SEQ ID NO: 219479 - DNA, 25 bp, Probe sequence
gaagttgctgtatctttaattaagg

SEQ ID NO: 219480 - DNA, 25 bp, Probe sequence
gaagatgttgatatcactcgctaaa

SEQ ID NO: 219481 - DNA, 25 bp, Probe sequence
gaaaagctcgagaatatgttggaaa

SEQ ID NO: 219482 - DNA, 25 bp, Probe sequence
gacttacctgttccaaacttcatgt

SEQ ID NO: 219483 - DNA, 25 bp, Probe sequence
gacgtgctagctttatcgaagatgt

SEQ ID NO: 219484 - DNA, 25 bp, Probe sequence
gatgtgaacggactagtttcaaaac

SEQ ID NO: 219485 - DNA, 25 bp, Probe sequence
tctaactctccaactaaacttttcg

SEQ ID NO: 219486 - DNA, 25 bp, Probe sequence
taatcctcctaataatagatataac

SEQ ID NO: 219487 - DNA, 25 bp, Probe sequence
taaaagcacctaaatatccagatat

SEQ ID NO: 219488 - DNA, 25 bp, Probe sequence
taaacttttcgattcaggatttcaa

SEQ ID NO: 219489 - DNA, 25 bp, Probe sequence
tacattctgctaaatttgacgtgct

SEQ ID NO: 219490 - DNA, 25 bp, Probe sequence
tattcatcttatattaatcctccta

SEQ ID NO: 219491 - DNA, 25 bp, Probe sequence
tattgctcataatgcactttttgat

SEQ ID NO: 219492 - DNA, 25 bp, Probe sequence
tttacaggtaattttgacactgaaa

SEQ ID NO: 219493 - DNA, 25 bp, Probe sequence
ttaccaagaaattctctatctttta

SEQ ID NO: 219494 - DNA, 25 bp, Probe sequence
attactttcaatttacgtcggtgtg

SEQ ID NO: 219495 - DNA, 25 bp, Probe sequence
ataccttgacagatctaaaagaatc

SEQ ID NO: 219496 - DNA, 25 bp, Probe sequence
atcgttagacaatctgatatcacca

SEQ ID NO: 219497 - DNA, 25 bp, Probe sequence
agtatattactttcaatttacgtcg

SEQ ID NO: 219498 - DNA, 25 bp, Probe sequence
agcgaactatataatttactacgaa

SEQ ID NO: 219499 - DNA, 25 bp, Probe sequence
actatataatttactacgaagttag

SEQ ID NO: 219500 - DNA, 25 bp, Probe sequence
actttcaatttacgtcggtgtgaat

SEQ ID NO: 219501 - DNA, 25 bp, Probe sequence
aaaaacatgtattcttagttataga

SEQ ID NO: 219502 - DNA, 25 bp, Probe sequence
aagaatcgttagacaatctgatatc

SEQ ID NO: 219503 - DNA, 25 bp, Probe sequence
aagactaattctaaatcagggaaat

SEQ ID NO: 219504 - DNA, 25 bp, Probe sequence
aatttatataccttgacagatctaa

SEQ ID NO: 219505 - DNA, 25 bp, Probe sequence
ccttgacagatctaaaagaatcgtt

SEQ ID NO: 219506 - DNA, 25 bp, Probe sequence
gaatcagctaacgaaaatgatgtag

SEQ ID NO: 219507 - DNA, 25 bp, Probe sequence
gaatcgttagacaatctgatatcac

SEQ ID NO: 219508 - DNA, 25 bp, Probe sequence
gaaatttatataccttgacagatct

SEQ ID NO: 219509 - DNA, 25 bp, Probe sequence
gaaattgtttattccaaaaatatag

SEQ ID NO: 219510 - DNA, 25 bp, Probe sequence
gacaatctgatatcaccaaaataga

SEQ ID NO: 219511 - DNA, 25 bp, Probe sequence
gatgtagatttttataatttactga

SEQ ID NO: 219512 - DNA, 25 bp, Probe sequence
gatgctgtttttggaaaaagtatat

SEQ ID NO: 219513 - DNA, 25 bp, Probe sequence
gatatcaccaaaatagaatcagcta

SEQ ID NO: 219514 - DNA, 25 bp, Probe sequence
gatttttataatttactgaagaaag

SEQ ID NO: 219515 - DNA, 25 bp, Probe sequence
gttagacaatctgatatcaccaaaa

SEQ ID NO: 219516 - DNA, 25 bp, Probe sequence
gggaaatttatataccttgacagat

SEQ ID NO: 219517 - DNA, 25 bp, Probe sequence
ggaaatttatataccttgacagatc

SEQ ID NO: 219518 - DNA, 25 bp, Probe sequence
tcgttagacaatctgatatcaccaa

SEQ ID NO: 219519 - DNA, 25 bp, Probe sequence
tcaccaaaatagaatcagctaacga

SEQ ID NO: 219520 - DNA, 25 bp, Probe sequence
taaatacaatttagcgaactatata

SEQ ID NO: 219521 - DNA, 25 bp, Probe sequence
tagaagatgaaaaccataatcacag

SEQ ID NO: 219522 - DNA, 25 bp, Probe sequence
tagacaatctgatatcaccaaaata

SEQ ID NO: 219523 - DNA, 25 bp, Probe sequence
tatattactttcaatttacgtcggt

SEQ ID NO: 219524 - DNA, 25 bp, Probe sequence
tattactttcaatttacgtcggtgt

SEQ ID NO: 219525 - DNA, 25 bp, Probe sequence
ttatataccttgacagatctaaaag

SEQ ID NO: 219526 - DNA, 25 bp, Probe sequence
ttactttcaatttacgtcggtgtga

SEQ ID NO: 219527 - DNA, 25 bp, Probe sequence
ttcaatttacgtcggtgtgaataaa

SEQ ID NO: 219528 - DNA, 25 bp, Probe sequence
ataagaaagttaccacgcacacatt

SEQ ID NO: 219529 - DNA, 25 bp, Probe sequence
ataacaggtacaattcaccgcatta

SEQ ID NO: 219530 - DNA, 25 bp, Probe sequence
atcaagtaacccgtcaactcggaga

SEQ ID NO: 219531 - DNA, 25 bp, Probe sequence
atcgcattttaattgccagcatctt

SEQ ID NO: 219532 - DNA, 25 bp, Probe sequence
accaagtcctacagatacgtgatca

SEQ ID NO: 219533 - DNA, 25 bp, Probe sequence
acagatacgtgatcatatactaaat

SEQ ID NO: 219534 - DNA, 25 bp, Probe sequence
aaattatcagatatctattctcaaa

SEQ ID NO: 219535 - DNA, 25 bp, Probe sequence
aaaacaaccattcgcatatatactc

SEQ ID NO: 219536 - DNA, 25 bp, Probe sequence
aataatcaaatcgccggtgtgctta

SEQ ID NO: 219537 - DNA, 25 bp, Probe sequence
aagggaatcctttatgtaataatca

SEQ ID NO: 219538 - DNA, 25 bp, Probe sequence
catacacacataactttattagtag

SEQ ID NO: 219539 - DNA, 25 bp, Probe sequence
cgagctatgttgacagagggttcat

SEQ ID NO: 219540 - DNA, 25 bp, Probe sequence
gccagcatcttagaagtacaggctt

SEQ ID NO: 219541 - DNA, 25 bp, Probe sequence
gcgaaatcgcattttaattgccagc

SEQ ID NO: 219542 - DNA, 25 bp, Probe sequence
gctctgagaacttgcttttaaacaa

SEQ ID NO: 219543 - DNA, 25 bp, Probe sequence
gcacacatttagacatacacacata

SEQ ID NO: 219544 - DNA, 25 bp, Probe sequence
gaaaagggtaggacatgtagatgaa

SEQ ID NO: 219545 - DNA, 25 bp, Probe sequence
gaaatgaaccaagtcctacagatac

SEQ ID NO: 219546 - DNA, 25 bp, Probe sequence
gacagagggttcatattcacaacaa

SEQ ID NO: 219547 - DNA, 25 bp, Probe sequence
gacactacaaagactataagttcaa

SEQ ID NO: 219548 - DNA, 25 bp, Probe sequence
gatggaattcgagctatgttgacag

SEQ ID NO: 219549 - DNA, 25 bp, Probe sequence
gatagagaactaactcaaaaactcg

SEQ ID NO: 219550 - DNA, 25 bp, Probe sequence
gttaccacgcacacatttagacata

SEQ ID NO: 219551 - DNA, 25 bp, Probe sequence
gtatcagcatcaattctagaaccgt

SEQ ID NO: 219552 - DNA, 25 bp, Probe sequence
gtacaggctttaactggtatgcgca

SEQ ID NO: 219553 - DNA, 25 bp, Probe sequence
gtacaattcaccgcattaaatacga

SEQ ID NO: 219554 - DNA, 25 bp, Probe sequence
gtaacccgtcaactcggagatatga

SEQ ID NO: 219555 - DNA, 25 bp, Probe sequence
ggattcggatacaaagacactacaa

SEQ ID NO: 219556 - DNA, 25 bp, Probe sequence
tcgccggtgtgcttaagaaaactac

SEQ ID NO: 219557 - DNA, 25 bp, Probe sequence
tggtatgcgcataggagaactacaa

SEQ ID NO: 219558 - DNA, 25 bp, Probe sequence
tcaaaaactcgaaaacattccaagt

SEQ ID NO: 219559 - DNA, 25 bp, Probe sequence
taggagaactacaagcactgcagga

SEQ ID NO: 219560 - DNA, 25 bp, Probe sequence
tattctcaaaatcaagtaacccgtc

SEQ ID NO: 219561 - DNA, 25 bp, Probe sequence
ttcgcatatatactcatgtaactga

SEQ ID NO: 219562 - DNA, 25 bp, Probe sequence
attggtgcccaatgtcgtagaatcc

SEQ ID NO: 219563 - DNA, 25 bp, Probe sequence
attcttcgaaagccaggtgcacaag

SEQ ID NO: 219564 - DNA, 25 bp, Probe sequence
atatagacattcttcgaaagccagg

SEQ ID NO: 219565 - DNA, 25 bp, Probe sequence
attattaaccgcgttgagcgcattt

SEQ ID NO: 219566 - DNA, 25 bp, Probe sequence
attattggttgatgggtacgatttc

SEQ ID NO: 219567 - DNA, 25 bp, Probe sequence
atatgcccgatttttagttattata

SEQ ID NO: 219568 - DNA, 25 bp, Probe sequence
atacttttttcatgtctaactttct

SEQ ID NO: 219569 - DNA, 25 bp, Probe sequence
atcgaatatatattggtgcccaatg

SEQ ID NO: 219570 - DNA, 25 bp, Probe sequence
atgacctattcaattattggttgat

SEQ ID NO: 219571 - DNA, 25 bp, Probe sequence
atggattagatttatagatttcgaa

SEQ ID NO: 219572 - DNA, 25 bp, Probe sequence
agaatccaagtttgtcataatggta

SEQ ID NO: 219573 - DNA, 25 bp, Probe sequence
aaatcattatgacctattcaattat

SEQ ID NO: 219574 - DNA, 25 bp, Probe sequence
aaatgtgctaactactatcaccgca

SEQ ID NO: 219575 - DNA, 25 bp, Probe sequence
aaccgcgttgagcgcatttatatat

SEQ ID NO: 219576 - DNA, 25 bp, Probe sequence
aatgtcgtagaatccaagtttgtca

SEQ ID NO: 219577 - DNA, 25 bp, Probe sequence
aattggcggaatgttcacgttatta

SEQ ID NO: 219578 - DNA, 25 bp, Probe sequence
caagccttaagtttagcatcattat

SEQ ID NO: 219579 - DNA, 25 bp, Probe sequence
ctatcaccgcagtatttgcaacatg

SEQ ID NO: 219580 - DNA, 25 bp, Probe sequence
cgcagtatttgcaacatgtaacctt

SEQ ID NO: 219581 - DNA, 25 bp, Probe sequence
gctaactactatcaccgcagtattt

SEQ ID NO: 219582 - DNA, 25 bp, Probe sequence
gcatcattatttatgatactttttt

SEQ ID NO: 219583 - DNA, 25 bp, Probe sequence
gcaacatgtaacctttattattttg

SEQ ID NO: 219584 - DNA, 25 bp, Probe sequence
gaaaaggaaagcgcacagaaatata

SEQ ID NO: 219585 - DNA, 25 bp, Probe sequence
gacattcttcgaaagccaggtgcac

SEQ ID NO: 219586 - DNA, 25 bp, Probe sequence
gttgatgggtacgatttcaatcata

SEQ ID NO: 219587 - DNA, 25 bp, Probe sequence
gttgctgtacaaaatcattatgacc

SEQ ID NO: 219588 - DNA, 25 bp, Probe sequence
gtatttgcaacatgtaacctttatt

SEQ ID NO: 219589 - DNA, 25 bp, Probe sequence
gtatcattattattgcttgtacaca

SEQ ID NO: 219590 - DNA, 25 bp, Probe sequence
ggtgcccaatgtcgtagaatccaag

SEQ ID NO: 219591 - DNA, 25 bp, Probe sequence
ggcggaatgttcacgttattaaaat

SEQ ID NO: 219592 - DNA, 25 bp, Probe sequence
tgtgctaactactatcaccgcagta

SEQ ID NO: 219593 - DNA, 25 bp, Probe sequence
tagttatttgttattagtaattggc

SEQ ID NO: 219594 - DNA, 25 bp, Probe sequence
tattgcttgtacacaatttgtggca

SEQ ID NO: 219595 - DNA, 25 bp, Probe sequence
ttcatgtctaactttcttttttggt

SEQ ID NO: 219596 - DNA, 25 bp, Probe sequence
atttacgcctcatttccaaaagaca

SEQ ID NO: 219597 - DNA, 25 bp, Probe sequence
atatatttacgcctcatttccaaaa

SEQ ID NO: 219598 - DNA, 25 bp, Probe sequence
atatttacgcctcatttccaaaaga

SEQ ID NO: 219599 - DNA, 25 bp, Probe sequence
atatatatttacgcctcatttccaa

SEQ ID NO: 219600 - DNA, 25 bp, Probe sequence
atacttcggtttaatcatatatatt

SEQ ID NO: 219601 - DNA, 25 bp, Probe sequence
atcatatatatttacgcctcatttc

SEQ ID NO: 219602 - DNA, 25 bp, Probe sequence
atgtattcagctggtttagttaatt

SEQ ID NO: 219603 - DNA, 25 bp, Probe sequence
agacattatatctaaaattacttta

SEQ ID NO: 219604 - DNA, 25 bp, Probe sequence
acgcctcatttccaaaagacattat

SEQ ID NO: 219605 - DNA, 25 bp, Probe sequence
cacttatacttcggtttaatcatat

SEQ ID NO: 219606 - DNA, 25 bp, Probe sequence
cagctggtttagttaatttccactt

SEQ ID NO: 219607 - DNA, 25 bp, Probe sequence
catatatatttacgcctcatttcca

SEQ ID NO: 219608 - DNA, 25 bp, Probe sequence
cttatacttcggtttaatcatatat

SEQ ID NO: 219609 - DNA, 25 bp, Probe sequence
cgcctcatttccaaaagacattata

SEQ ID NO: 219610 - DNA, 25 bp, Probe sequence
ccacttatacttcggtttaatcata

SEQ ID NO: 219611 - DNA, 25 bp, Probe sequence
gcctcatttccaaaagacattatat

SEQ ID NO: 219612 - DNA, 25 bp, Probe sequence
gctggtttagttaatttccacttat

SEQ ID NO: 219613 - DNA, 25 bp, Probe sequence
gtttaatcatatatatttacgcctc

SEQ ID NO: 219614 - DNA, 25 bp, Probe sequence
gtattcagctggtttagttaatttc

SEQ ID NO: 219615 - DNA, 25 bp, Probe sequence
tccacttatacttcggtttaatcat

SEQ ID NO: 219616 - DNA, 25 bp, Probe sequence
tcatatatatttacgcctcatttcc

SEQ ID NO: 219617 - DNA, 25 bp, Probe sequence
tcatttccaaaagacattatatcta

SEQ ID NO: 219618 - DNA, 25 bp, Probe sequence
tcagctggtttagttaatttccact

SEQ ID NO: 219619 - DNA, 25 bp, Probe sequence
taatcatatatatttacgcctcatt

SEQ ID NO: 219620 - DNA, 25 bp, Probe sequence
tacgcctcatttccaaaagacatta

SEQ ID NO: 219621 - DNA, 25 bp, Probe sequence
tagttaatttccacttatacttcgg

SEQ ID NO: 219622 - DNA, 25 bp, Probe sequence
tatatttacgcctcatttccaaaag

SEQ ID NO: 219623 - DNA, 25 bp, Probe sequence
tatatatttacgcctcatttccaaa

SEQ ID NO: 219624 - DNA, 25 bp, Probe sequence
tatttacgcctcatttccaaaagac

SEQ ID NO: 219625 - DNA, 25 bp, Probe sequence
tattcagctggtttagttaatttcc

SEQ ID NO: 219626 - DNA, 25 bp, Probe sequence
tttacgcctcatttccaaaagacat

SEQ ID NO: 219627 - DNA, 25 bp, Probe sequence
ttagttaatttccacttatacttcg

SEQ ID NO: 219628 - DNA, 25 bp, Probe sequence
ttacgcctcatttccaaaagacatt

SEQ ID NO: 219629 - DNA, 25 bp, Probe sequence
ttccacttatacttcggtttaatca

SEQ ID NO: 219630 - DNA, 25 bp, Probe sequence
attagcttatcggtatccatacatc

SEQ ID NO: 219631 - DNA, 25 bp, Probe sequence
atcaccctcgttttacatttgattc

SEQ ID NO: 219632 - DNA, 25 bp, Probe sequence
atcggtatccatacatcatggataa

SEQ ID NO: 219633 - DNA, 25 bp, Probe sequence
agtcaattagcttatcggtatccat

SEQ ID NO: 219634 - DNA, 25 bp, Probe sequence
agattatttgcaacttaaaaagtca

SEQ ID NO: 219635 - DNA, 25 bp, Probe sequence
agcttatcggtatccatacatcatg

SEQ ID NO: 219636 - DNA, 25 bp, Probe sequence
aaatcaccctcgttttacatttgat

SEQ ID NO: 219637 - DNA, 25 bp, Probe sequence
aaagtcaattagcttatcggtatcc

SEQ ID NO: 219638 - DNA, 25 bp, Probe sequence
aaaaagtcaattagcttatcggtat

SEQ ID NO: 219639 - DNA, 25 bp, Probe sequence
aaaagtcaattagcttatcggtatc

SEQ ID NO: 219640 - DNA, 25 bp, Probe sequence
aagataagattatttgcaacttaaa

SEQ ID NO: 219641 - DNA, 25 bp, Probe sequence
aagtcaattagcttatcggtatcca

SEQ ID NO: 219642 - DNA, 25 bp, Probe sequence
aatcaccctcgttttacatttgatt

SEQ ID NO: 219643 - DNA, 25 bp, Probe sequence
aattagcttatcggtatccatacat

SEQ ID NO: 219644 - DNA, 25 bp, Probe sequence
caattagcttatcggtatccataca

SEQ ID NO: 219645 - DNA, 25 bp, Probe sequence
caaaatcaccctcgttttacatttg

SEQ ID NO: 219646 - DNA, 25 bp, Probe sequence
caccctcgttttacatttgattcaa

SEQ ID NO: 219647 - DNA, 25 bp, Probe sequence
cttatcggtatccatacatcatgga

SEQ ID NO: 219648 - DNA, 25 bp, Probe sequence
ctcgttttacatttgattcaaagaa

SEQ ID NO: 219649 - DNA, 25 bp, Probe sequence
ccctcgttttacatttgattcaaag

SEQ ID NO: 219650 - DNA, 25 bp, Probe sequence
cctcgttttacatttgattcaaaga

SEQ ID NO: 219651 - DNA, 25 bp, Probe sequence
gcaaaatcaccctcgttttacattt

SEQ ID NO: 219652 - DNA, 25 bp, Probe sequence
gcttatcggtatccatacatcatgg

SEQ ID NO: 219653 - DNA, 25 bp, Probe sequence
gtcaattagcttatcggtatccata

SEQ ID NO: 219654 - DNA, 25 bp, Probe sequence
gtgcaaaatcaccctcgttttacat

SEQ ID NO: 219655 - DNA, 25 bp, Probe sequence
tgcaaaatcaccctcgttttacatt

SEQ ID NO: 219656 - DNA, 25 bp, Probe sequence
tcggtatccatacatcatggataaa

SEQ ID NO: 219657 - DNA, 25 bp, Probe sequence
tcaccctcgttttacatttgattca

SEQ ID NO: 219658 - DNA, 25 bp, Probe sequence
tcaattagcttatcggtatccatac

SEQ ID NO: 219659 - DNA, 25 bp, Probe sequence
taaaaagtcaattagcttatcggta

SEQ ID NO: 219660 - DNA, 25 bp, Probe sequence
tagcttatcggtatccatacatcat

SEQ ID NO: 219661 - DNA, 25 bp, Probe sequence
tatcggtatccatacatcatggata

SEQ ID NO: 219662 - DNA, 25 bp, Probe sequence
ttatcggtatccatacatcatggat

SEQ ID NO: 219663 - DNA, 25 bp, Probe sequence
ttagcttatcggtatccatacatca

SEQ ID NO: 219664 - DNA, 25 bp, Probe sequence
attccaacgccaatatatacaatat

SEQ ID NO: 219665 - DNA, 25 bp, Probe sequence
aggtatgatacgtggcagcgatgcg

SEQ ID NO: 219666 - DNA, 25 bp, Probe sequence
agcaagtggtagtacaggtaacgcc

SEQ ID NO: 219667 - DNA, 25 bp, Probe sequence
acgcatgagtgtattagcaagtggt

SEQ ID NO: 219668 - DNA, 25 bp, Probe sequence
aaatctattgcaggtttcgatgttg

SEQ ID NO: 219669 - DNA, 25 bp, Probe sequence
aaagctattccaacgccaatatata

SEQ ID NO: 219670 - DNA, 25 bp, Probe sequence
aacaacgtattttaggcgatatggg

SEQ ID NO: 219671 - DNA, 25 bp, Probe sequence
aagatttggcgcgtatgagtgttgg

SEQ ID NO: 219672 - DNA, 25 bp, Probe sequence
cagaaattcatttttaatccttatg

SEQ ID NO: 219673 - DNA, 25 bp, Probe sequence
gcgcgtaaatatcaattgccaattt

SEQ ID NO: 219674 - DNA, 25 bp, Probe sequence
gcaggtttcgatgttgaatcgttta

SEQ ID NO: 219675 - DNA, 25 bp, Probe sequence
gaatcgtttaacgtgtcacatgatg

SEQ ID NO: 219676 - DNA, 25 bp, Probe sequence
gaatgtgtcgttatccatggaagac

SEQ ID NO: 219677 - DNA, 25 bp, Probe sequence
gaagtattgctatgtgatacggata

SEQ ID NO: 219678 - DNA, 25 bp, Probe sequence
gaagaattgtttagtcaaattgacc

SEQ ID NO: 219679 - DNA, 25 bp, Probe sequence
gaacgaacacgatattgatacggaa

SEQ ID NO: 219680 - DNA, 25 bp, Probe sequence
gaaagatagtcgcatccctatggat

SEQ ID NO: 219681 - DNA, 25 bp, Probe sequence
gacgaaacaacgtattttaggcgat

SEQ ID NO: 219682 - DNA, 25 bp, Probe sequence
gatccgcaattttatattttccata

SEQ ID NO: 219683 - DNA, 25 bp, Probe sequence
gatacgtggcagcgatgcgtttatt

SEQ ID NO: 219684 - DNA, 25 bp, Probe sequence
gatagtcgcatccctatggatcaga

SEQ ID NO: 219685 - DNA, 25 bp, Probe sequence
gtagtacaggtaacgccacttttgt

SEQ ID NO: 219686 - DNA, 25 bp, Probe sequence
gtagtctattagttgatgttggttt

SEQ ID NO: 219687 - DNA, 25 bp, Probe sequence
gtaatcatgacgtcgatatgttgag

SEQ ID NO: 219688 - DNA, 25 bp, Probe sequence
gtcaaattgaccgtaatattcaaga

SEQ ID NO: 219689 - DNA, 25 bp, Probe sequence
gtcgcatccctatggatcagaaatt

SEQ ID NO: 219690 - DNA, 25 bp, Probe sequence
gtggcagcgatgcgtttatttttga

SEQ ID NO: 219691 - DNA, 25 bp, Probe sequence
ggtaacgccacttttgtagaaaatg

SEQ ID NO: 219692 - DNA, 25 bp, Probe sequence
ggtattttagtaacccatgaacata

SEQ ID NO: 219693 - DNA, 25 bp, Probe sequence
tgagccgcttgatacgcatgagtgt

SEQ ID NO: 219694 - DNA, 25 bp, Probe sequence
ttatccatggaagacgaaacaacgt

SEQ ID NO: 219695 - DNA, 25 bp, Probe sequence
tcaattgccaatttatgcgaatgaa

SEQ ID NO: 219696 - DNA, 25 bp, Probe sequence
tacggataaagctattccaacgcca

SEQ ID NO: 219697 - DNA, 25 bp, Probe sequence
tatgttgagaatgtgtcgttatcca

SEQ ID NO: 219698 - DNA, 25 bp, Probe sequence
attggtagtatttttaatgttagca

SEQ ID NO: 219699 - DNA, 25 bp, Probe sequence
attgcctcgaaagtacaaaacacta

SEQ ID NO: 219700 - DNA, 25 bp, Probe sequence
atgaataaaattgcctcgaaagtac

SEQ ID NO: 219701 - DNA, 25 bp, Probe sequence
atggtaaagtcattgttattggtat

SEQ ID NO: 219702 - DNA, 25 bp, Probe sequence
acaaaacactattaaaacagacatt

SEQ ID NO: 219703 - DNA, 25 bp, Probe sequence
aaatgtattatttcgcatatgaaat

SEQ ID NO: 219704 - DNA, 25 bp, Probe sequence
aaagatggtaaggcagagattaata

SEQ ID NO: 219705 - DNA, 25 bp, Probe sequence
aaagatcgtgaaaaaatgtattatt

SEQ ID NO: 219706 - DNA, 25 bp, Probe sequence
aaacagacattaaacaagaagacag

SEQ ID NO: 219707 - DNA, 25 bp, Probe sequence
aaacaagaagacagtaatacacatg

SEQ ID NO: 219708 - DNA, 25 bp, Probe sequence
aaaaatgtattatttcgcatatgaa

SEQ ID NO: 219709 - DNA, 25 bp, Probe sequence
aagatgaaaatgtagaagtggaaaa

SEQ ID NO: 219710 - DNA, 25 bp, Probe sequence
aagtcattgttattggtattcaatt

SEQ ID NO: 219711 - DNA, 25 bp, Probe sequence
aagtgtacaaagaacagaatcaaat

SEQ ID NO: 219712 - DNA, 25 bp, Probe sequence
aatagagaaatagacccaattaagt

SEQ ID NO: 219713 - DNA, 25 bp, Probe sequence
aatagacccaattaagtatatgaaa

SEQ ID NO: 219714 - DNA, 25 bp, Probe sequence
aattgcctcgaaagtacaaaacact

SEQ ID NO: 219715 - DNA, 25 bp, Probe sequence
gcctcgaaagtacaaaacactatta

SEQ ID NO: 219716 - DNA, 25 bp, Probe sequence
gcaggttgttctaataaaggtgaaa

SEQ ID NO: 219717 - DNA, 25 bp, Probe sequence
gaataaaattgcctcgaaagtacaa

SEQ ID NO: 219718 - DNA, 25 bp, Probe sequence
gaatcaaatgaataaaattgcctcg

SEQ ID NO: 219719 - DNA, 25 bp, Probe sequence
gaaatagacccaattaagtatatga

SEQ ID NO: 219720 - DNA, 25 bp, Probe sequence
gacccaattaagtatatgaaagacc

SEQ ID NO: 219721 - DNA, 25 bp, Probe sequence
gagaaatagacccaattaagtatat

SEQ ID NO: 219722 - DNA, 25 bp, Probe sequence
gatggtaaggcagagattaatagag

SEQ ID NO: 219723 - DNA, 25 bp, Probe sequence
gattaatagagaaatagacccaatt

SEQ ID NO: 219724 - DNA, 25 bp, Probe sequence
gtacaaaacactattaaaacagaca

SEQ ID NO: 219725 - DNA, 25 bp, Probe sequence
gtaaagtcattgttattggtattca

SEQ ID NO: 219726 - DNA, 25 bp, Probe sequence
ggtaaagtcattgttattggtattc

SEQ ID NO: 219727 - DNA, 25 bp, Probe sequence
ggtagtatttttaatgttagcaatt

SEQ ID NO: 219728 - DNA, 25 bp, Probe sequence
tgaataaaattgcctcgaaagtaca

SEQ ID NO: 219729 - DNA, 25 bp, Probe sequence
taaagtcattgttattggtattcaa

SEQ ID NO: 219730 - DNA, 25 bp, Probe sequence
tatgaaagaccataaagcagattat

SEQ ID NO: 219731 - DNA, 25 bp, Probe sequence
ttgcctcgaaagtacaaaacactat

SEQ ID NO: 219732 - DNA, 25 bp, Probe sequence
attggggatcatttaaaactaatga

SEQ ID NO: 219733 - DNA, 25 bp, Probe sequence
atagtgttggaacgatagttggtga

SEQ ID NO: 219734 - DNA, 25 bp, Probe sequence
aggtacaaaaagtattggggatcat

SEQ ID NO: 219735 - DNA, 25 bp, Probe sequence
agtgttggaacgatagttggtgaag

SEQ ID NO: 219736 - DNA, 25 bp, Probe sequence
agatagtgttggaacgatagttggt

SEQ ID NO: 219737 - DNA, 25 bp, Probe sequence
aaaaataccacagaaaaagctgtag

SEQ ID NO: 219738 - DNA, 25 bp, Probe sequence
cgatagttggtgaaggtacaaaaag

SEQ ID NO: 219739 - DNA, 25 bp, Probe sequence
gaacgatagttggtgaaggtacaaa

SEQ ID NO: 219740 - DNA, 25 bp, Probe sequence
gatagtgttggaacgatagttggtg

SEQ ID NO: 219741 - DNA, 25 bp, Probe sequence
tttaaaaataccacagaaaaagctg

SEQ ID NO: 219742 - DNA, 25 bp, Probe sequence
gttggaacgatagttggtgaaggta

SEQ ID NO: 219743 - DNA, 25 bp, Probe sequence
gtattggggatcatttaaaactaat

SEQ ID NO: 219744 - DNA, 25 bp, Probe sequence
gtagatagtgttggaacgatagttg

SEQ ID NO: 219745 - DNA, 25 bp, Probe sequence
gtacaaaaagtattggggatcattt

SEQ ID NO: 219746 - DNA, 25 bp, Probe sequence
gtgttggaacgatagttggtgaagg

SEQ ID NO: 219747 - DNA, 25 bp, Probe sequence
gggatcatttaaaactaatgaaacg

SEQ ID NO: 219748 - DNA, 25 bp, Probe sequence
ggtacaaaaagtattggggatcatt

SEQ ID NO: 219749 - DNA, 25 bp, Probe sequence
ggatcatttaaaactaatgaaacgg

SEQ ID NO: 219750 - DNA, 25 bp, Probe sequence
ggaacgatagttggtgaaggtacaa

SEQ ID NO: 219751 - DNA, 25 bp, Probe sequence
tggaacgatagttggtgaaggtaca

SEQ ID NO: 219752 - DNA, 25 bp, Probe sequence
tgttggaacgatagttggtgaaggt

SEQ ID NO: 219753 - DNA, 25 bp, Probe sequence
tggggatcatttaaaactaatgaaa

SEQ ID NO: 219754 - DNA, 25 bp, Probe sequence
tgtagatagtgttggaacgatagtt

SEQ ID NO: 219755 - DNA, 25 bp, Probe sequence
tattggggatcatttaaaactaatg

SEQ ID NO: 219756 - DNA, 25 bp, Probe sequence
tagatagtgttggaacgatagttgg

SEQ ID NO: 219757 - DNA, 25 bp, Probe sequence
tagtgttggaacgatagttggtgaa

SEQ ID NO: 219758 - DNA, 25 bp, Probe sequence
ttggggatcatttaaaactaatgaa

SEQ ID NO: 219759 - DNA, 25 bp, Probe sequence
ttggaacgatagttggtgaaggtac

SEQ ID NO: 219760 - DNA, 25 bp, Probe sequence
attttaggtgcaatcggtatgttta

SEQ ID NO: 219761 - DNA, 25 bp, Probe sequence
atattgttgattattggagctgtaa

SEQ ID NO: 219762 - DNA, 25 bp, Probe sequence
atcggtatgtttaaagcatctaaaa

SEQ ID NO: 219763 - DNA, 25 bp, Probe sequence
atgcagaaacagcagcagcaatttt

SEQ ID NO: 219764 - DNA, 25 bp, Probe sequence
atggtgaggttgacccagttgatgc

SEQ ID NO: 219765 - DNA, 25 bp, Probe sequence
atggttttagcagcatcaggtgtaa

SEQ ID NO: 219766 - DNA, 25 bp, Probe sequence
agcaacggtatttagtttactattg

SEQ ID NO: 219767 - DNA, 25 bp, Probe sequence
agcagcatcaggtgtaatgactaca

SEQ ID NO: 219768 - DNA, 25 bp, Probe sequence
agcagcagcaattttcactgtatta

SEQ ID NO: 219769 - DNA, 25 bp, Probe sequence
agcatcaggtgtaatgactacagat

SEQ ID NO: 219770 - DNA, 25 bp, Probe sequence
acataattacatttgctttatggtt

SEQ ID NO: 219771 - DNA, 25 bp, Probe sequence
aacagcagcagcaattttcactgta

SEQ ID NO: 219772 - DNA, 25 bp, Probe sequence
aattattttaggtgcaatcggtatg

SEQ ID NO: 219773 - DNA, 25 bp, Probe sequence
caagcctaaagatgaaataagcgac

SEQ ID NO: 219774 - DNA, 25 bp, Probe sequence
cctattcatatttggaatcatttca

SEQ ID NO: 219775 - DNA, 25 bp, Probe sequence
gcagcaattttcactgtattattct

SEQ ID NO: 219776 - DNA, 25 bp, Probe sequence
gcaatcggtatgtttaaagcatcta

SEQ ID NO: 219777 - DNA, 25 bp, Probe sequence
gcaattttcactgtattattcttat

SEQ ID NO: 219778 - DNA, 25 bp, Probe sequence
gaaacagcagcagcaattttcactg

SEQ ID NO: 219779 - DNA, 25 bp, Probe sequence
gactacagatgtgtcaacaacagtt

SEQ ID NO: 219780 - DNA, 25 bp, Probe sequence
gacccagttgatgcagaaacagcag

SEQ ID NO: 219781 - DNA, 25 bp, Probe sequence
gaggttgacccagttgatgcagaaa

SEQ ID NO: 219782 - DNA, 25 bp, Probe sequence
gatgtgtcaacaacagttaatggtg

SEQ ID NO: 219783 - DNA, 25 bp, Probe sequence
gttgatgcagaaacagcagcagcaa

SEQ ID NO: 219784 - DNA, 25 bp, Probe sequence
gttaatggtgaggttgacccagttg

SEQ ID NO: 219785 - DNA, 25 bp, Probe sequence
gtttactattgatggttttagcagc

SEQ ID NO: 219786 - DNA, 25 bp, Probe sequence
gtgaggttgacccagttgatgcaga

SEQ ID NO: 219787 - DNA, 25 bp, Probe sequence
gtggtaacataattacatttgcttt

SEQ ID NO: 219788 - DNA, 25 bp, Probe sequence
ggttgacccagttgatgcagaaaca

SEQ ID NO: 219789 - DNA, 25 bp, Probe sequence
ggttttagcagcatcaggtgtaatg

SEQ ID NO: 219790 - DNA, 25 bp, Probe sequence
tggaatcatttcaattattttaggt

SEQ ID NO: 219791 - DNA, 25 bp, Probe sequence
taggtgcaatcggtatgtttaaagc

SEQ ID NO: 219792 - DNA, 25 bp, Probe sequence
ttggagctgtaataagtggtaacat

SEQ ID NO: 219793 - DNA, 25 bp, Probe sequence
ttagcaacggtatttagtttactat

SEQ ID NO: 219794 - DNA, 25 bp, Probe sequence
aaacctttcccagaaggttggcatg

SEQ ID NO: 219795 - DNA, 25 bp, Probe sequence
attctccatatcaaggctatgcatc

SEQ ID NO: 219796 - DNA, 25 bp, Probe sequence
atatatcattttccctaacccaatg

SEQ ID NO: 219797 - DNA, 25 bp, Probe sequence
atattatggcagtggcttggtatca

SEQ ID NO: 219798 - DNA, 25 bp, Probe sequence
atgctattaagcaattcgatcctaa

SEQ ID NO: 219799 - DNA, 25 bp, Probe sequence
atgaatgggtacaagctgctaaagc

SEQ ID NO: 219800 - DNA, 25 bp, Probe sequence
aggatcataaacttgtcatgctatt

SEQ ID NO: 219801 - DNA, 25 bp, Probe sequence
agcaattcgatcctaaaacaggcga

SEQ ID NO: 219802 - DNA, 25 bp, Probe sequence
aaagttctgctgaagttcaacaaac

SEQ ID NO: 219803 - DNA, 25 bp, Probe sequence
aaaacaacaaggtatccctcaagct

SEQ ID NO: 219804 - DNA, 25 bp, Probe sequence
aacaagcttctataccagcatcaca

SEQ ID NO: 219805 - DNA, 25 bp, Probe sequence
aacttgtcatgctatttggagataa

SEQ ID NO: 219806 - DNA, 25 bp, Probe sequence
aagagtaaagaatcacgcagacaaa

SEQ ID NO: 219807 - DNA, 25 bp, Probe sequence
aatttattagactttacagatccaa

SEQ ID NO: 219808 - DNA, 25 bp, Probe sequence
caaggtatccctcaagctaagaaga

SEQ ID NO: 219809 - DNA, 25 bp, Probe sequence
cattatcggtagcggttacagtttc

SEQ ID NO: 219810 - DNA, 25 bp, Probe sequence
gcgtttgccaaaagttctgctgaag

SEQ ID NO: 219811 - DNA, 25 bp, Probe sequence
gctgctaaagctaaacctgtctatg

SEQ ID NO: 219812 - DNA, 25 bp, Probe sequence
gctaaacctgtctatggcgcaaaag

SEQ ID NO: 219813 - DNA, 25 bp, Probe sequence
gctgaatctcgtgaagcattaattg

SEQ ID NO: 219814 - DNA, 25 bp, Probe sequence
gcttctataccagcatcacaaaagg

SEQ ID NO: 219815 - DNA, 25 bp, Probe sequence
gcaccacaaacgacaaattctacag

SEQ ID NO: 219816 - DNA, 25 bp, Probe sequence
gcaatagcatcattatcggtagcgg

SEQ ID NO: 219817 - DNA, 25 bp, Probe sequence
gaattcttgaaatatgctgacaaaa

SEQ ID NO: 219818 - DNA, 25 bp, Probe sequence
gaagctacagctgaatctcgtgaag

SEQ ID NO: 219819 - DNA, 25 bp, Probe sequence
gaaacagttttagataattctccat

SEQ ID NO: 219820 - DNA, 25 bp, Probe sequence
gacaaattctacagcgtttgccaaa

SEQ ID NO: 219821 - DNA, 25 bp, Probe sequence
gttagctattgctttggatttagat

SEQ ID NO: 219822 - DNA, 25 bp, Probe sequence
gtctatggcgcaaaagaattcttga

SEQ ID NO: 219823 - DNA, 25 bp, Probe sequence
gtggcttggtatcaaaattcagctg

SEQ ID NO: 219824 - DNA, 25 bp, Probe sequence
ggttggcatgaatgggtacaagctg

SEQ ID NO: 219825 - DNA, 25 bp, Probe sequence
tgtcgatatctactatatttctgat

SEQ ID NO: 219826 - DNA, 25 bp, Probe sequence
tacagatccaaaagaagctacagct

SEQ ID NO: 219827 - DNA, 25 bp, Probe sequence
tttccctaacccaatgtatggtagt

SEQ ID NO: 219828 - DNA, 25 bp, Probe sequence
attgtgttaatgattgtctctgtat

SEQ ID NO: 219829 - DNA, 25 bp, Probe sequence
atttggtacggcatttggcttactg

SEQ ID NO: 219830 - DNA, 25 bp, Probe sequence
atttttacctgatgcagtacctgtc

SEQ ID NO: 219831 - DNA, 25 bp, Probe sequence
atagatccgttaaaggcgattgggt

SEQ ID NO: 219832 - DNA, 25 bp, Probe sequence
atgcagtacctgtcaaattcgatgt

SEQ ID NO: 219833 - DNA, 25 bp, Probe sequence
agttccgagtttaatagaagggcat

SEQ ID NO: 219834 - DNA, 25 bp, Probe sequence
acaggcgttacaggtgcatttttac

SEQ ID NO: 219835 - DNA, 25 bp, Probe sequence
aaaccaagagcttgaagcggtaagt

SEQ ID NO: 219836 - DNA, 25 bp, Probe sequence
aactgtgcaacaatctgtttttaac

SEQ ID NO: 219837 - DNA, 25 bp, Probe sequence
aacgatgattagttacttgctattt

SEQ ID NO: 219838 - DNA, 25 bp, Probe sequence
aagatgccaatcaaactgtgcaaca

SEQ ID NO: 219839 - DNA, 25 bp, Probe sequence
aagtcatcatttttagttccgagtt

SEQ ID NO: 219840 - DNA, 25 bp, Probe sequence
aattgcatatcgtaggttttacaga

SEQ ID NO: 219841 - DNA, 25 bp, Probe sequence
cattcttatttgtcatttcagctac

SEQ ID NO: 219842 - DNA, 25 bp, Probe sequence
ctcgtatttgcaattgtgttaatga

SEQ ID NO: 219843 - DNA, 25 bp, Probe sequence
gccattgttctaaataaagatgcca

SEQ ID NO: 219844 - DNA, 25 bp, Probe sequence
gctcaaggatttacgaatggctatt

SEQ ID NO: 219845 - DNA, 25 bp, Probe sequence
gaagggcataaagcgactaaagata

SEQ ID NO: 219846 - DNA, 25 bp, Probe sequence
gaagtttattctccattttaacaat

SEQ ID NO: 219847 - DNA, 25 bp, Probe sequence
gacacattatcactatctcaatcag

SEQ ID NO: 219848 - DNA, 25 bp, Probe sequence
gattgtctctgtattaggaagttta

SEQ ID NO: 219849 - DNA, 25 bp, Probe sequence
gttacttgctatttttattatctgg

SEQ ID NO: 219850 - DNA, 25 bp, Probe sequence
gtttggactaattattggtgtgtta

SEQ ID NO: 219851 - DNA, 25 bp, Probe sequence
gtgttcggtgttgaaaagtcatcat

SEQ ID NO: 219852 - DNA, 25 bp, Probe sequence
ggcatttggcttactgttaacaggc

SEQ ID NO: 219853 - DNA, 25 bp, Probe sequence
ggcgaatggtcttatcaatatgaat

SEQ ID NO: 219854 - DNA, 25 bp, Probe sequence
tcacgaatgacgctaccattgccaa

SEQ ID NO: 219855 - DNA, 25 bp, Probe sequence
ttagcttggaatgaaatacggcgca

SEQ ID NO: 219856 - DNA, 25 bp, Probe sequence
taaactttatgatttcattcttatt

SEQ ID NO: 219857 - DNA, 25 bp, Probe sequence
tacctgtcaaattcgatgtactaac

SEQ ID NO: 219858 - DNA, 25 bp, Probe sequence
tataaaccacagaacttaacattaa

SEQ ID NO: 219859 - DNA, 25 bp, Probe sequence
ttatctggattggcgaatggtctta

SEQ ID NO: 219860 - DNA, 25 bp, Probe sequence
ttaatgcagttgttgtacgtgatac

SEQ ID NO: 219861 - DNA, 25 bp, Probe sequence
ttgtcatttcagctacagttatagg

SEQ ID NO: 219862 - DNA, 25 bp, Probe sequence
attgttacacatgatgaacgactta

SEQ ID NO: 219863 - DNA, 25 bp, Probe sequence
attgcttaataagttaccttcagaa

SEQ ID NO: 219864 - DNA, 25 bp, Probe sequence
atttctaactatggcaggtgcttta

SEQ ID NO: 219865 - DNA, 25 bp, Probe sequence
atcagcaacttatgtcacaattagg

SEQ ID NO: 219866 - DNA, 25 bp, Probe sequence
acgaatccgtcgattattttagcgg

SEQ ID NO: 219867 - DNA, 25 bp, Probe sequence
actatcagcaacttatgtcacaatt

SEQ ID NO: 219868 - DNA, 25 bp, Probe sequence
aaagtacatttctaactatggcagg

SEQ ID NO: 219869 - DNA, 25 bp, Probe sequence
aaagcgttatatacgaatccgtcga

SEQ ID NO: 219870 - DNA, 25 bp, Probe sequence
aaccaagatattacgacaatgaagc

SEQ ID NO: 219871 - DNA, 25 bp, Probe sequence
caggtggtcagaaacaacgtgtggc

SEQ ID NO: 219872 - DNA, 25 bp, Probe sequence
cttctggctctggtaaaagtacatt

SEQ ID NO: 219873 - DNA, 25 bp, Probe sequence
cgtcgattattttagcggatgaacc

SEQ ID NO: 219874 - DNA, 25 bp, Probe sequence
ccgacatctgggcacattttaatca

SEQ ID NO: 219875 - DNA, 25 bp, Probe sequence
cctaccgcggcgttagatactgaaa

SEQ ID NO: 219876 - DNA, 25 bp, Probe sequence
gcgtccttaatcttgaaaatgaaac

SEQ ID NO: 219877 - DNA, 25 bp, Probe sequence
gcggcgttagatactgaaaatgcga

SEQ ID NO: 219878 - DNA, 25 bp, Probe sequence
atatcatatgaaagatggcgtcctt

SEQ ID NO: 219879 - DNA, 25 bp, Probe sequence
gaagtcattaaaattctacgtgatc

SEQ ID NO: 219880 - DNA, 25 bp, Probe sequence
gaagcaaaaagcattggcaaaagtt

SEQ ID NO: 219881 - DNA, 25 bp, Probe sequence
gaacctaccgcggcgttagatactg

SEQ ID NO: 219882 - DNA, 25 bp, Probe sequence
gaagcggttaaagatacaaattttg

SEQ ID NO: 219883 - DNA, 25 bp, Probe sequence
gaacgacttaaagcatattgtgatc

SEQ ID NO: 219884 - DNA, 25 bp, Probe sequence
gaaagcatgtattattgttacacat

SEQ ID NO: 219885 - DNA, 25 bp, Probe sequence
gatgaacctaccgcggcgttagata

SEQ ID NO: 219886 - DNA, 25 bp, Probe sequence
gatgggaatcgtaacattgaagcgg

SEQ ID NO: 219887 - DNA, 25 bp, Probe sequence
gatggcgtccttaatcttgaaaatg

SEQ ID NO: 219888 - DNA, 25 bp, Probe sequence
gatactgaaaatgcgattgaagtca

SEQ ID NO: 219889 - DNA, 25 bp, Probe sequence
gtcagaaacaacgtgtggcgatagc

SEQ ID NO: 219890 - DNA, 25 bp, Probe sequence
gtctaatgaagactatcagcaactt

SEQ ID NO: 219891 - DNA, 25 bp, Probe sequence
gggcacattttaatcaataaccaag

SEQ ID NO: 219892 - DNA, 25 bp, Probe sequence
taactatggcaggtgctttacaaac

SEQ ID NO: 219893 - DNA, 25 bp, Probe sequence
taaaattctacgtgatcaagccaaa

SEQ ID NO: 219894 - DNA, 25 bp, Probe sequence
tagcggatgaacctaccgcggcgtt

SEQ ID NO: 219895 - DNA, 25 bp, Probe sequence
taccttcagaaatttcaggtggtca

SEQ ID NO: 219896 - DNA, 25 bp, Probe sequence
atcatgggtatcattttaggtggta

SEQ ID NO: 219897 - DNA, 25 bp, Probe sequence
atgcagcaatcgcaacatttttagt

SEQ ID NO: 219898 - DNA, 25 bp, Probe sequence
agccgcgtgcggtggtatggattta

SEQ ID NO: 219899 - DNA, 25 bp, Probe sequence
acagctacaccgattgcaggatttt

SEQ ID NO: 219900 - DNA, 25 bp, Probe sequence
aaatttctttggtggtgcgattgct

SEQ ID NO: 219901 - DNA, 25 bp, Probe sequence
aacgggtgtacctatggctattggt

SEQ ID NO: 219902 - DNA, 25 bp, Probe sequence
aagacatgattaatcgaggtgcagt

SEQ ID NO: 219903 - DNA, 25 bp, Probe sequence
aatggcgattgtaggtgcgcttgca

SEQ ID NO: 219904 - DNA, 25 bp, Probe sequence
aatatgtgccggatggtgtcgactt

SEQ ID NO: 219905 - DNA, 25 bp, Probe sequence
ccaggtttctttgcgggttatatga

SEQ ID NO: 219906 - DNA, 25 bp, Probe sequence
gccggatggtgtcgacttaattgga

SEQ ID NO: 219907 - DNA, 25 bp, Probe sequence
gcgggaggtctaggtggtgtcgctg

SEQ ID NO: 219908 - DNA, 25 bp, Probe sequence
gccaatccaattccaatctatatta

SEQ ID NO: 219909 - DNA, 25 bp, Probe sequence
gagctaggagacgctgcgggaggtc

SEQ ID NO: 219910 - DNA, 25 bp, Probe sequence
gcattagttatagcagccgcgtgcg

SEQ ID NO: 219911 - DNA, 25 bp, Probe sequence
gcagtattattaacgccagtagtga

SEQ ID NO: 219912 - DNA, 25 bp, Probe sequence
gacgctattccatcgcttaaaatta

SEQ ID NO: 219913 - DNA, 25 bp, Probe sequence
gatgcgacaggtacagctacaccga

SEQ ID NO: 219914 - DNA, 25 bp, Probe sequence
gattaacagcattagctatcggtgt

SEQ ID NO: 219915 - DNA, 25 bp, Probe sequence
gtattgaacctttatcacaagcaga

SEQ ID NO: 219916 - DNA, 25 bp, Probe sequence
gtatcagccaatccaattccaatct

SEQ ID NO: 219917 - DNA, 25 bp, Probe sequence
gtacgaatacgaatccaattatcat

SEQ ID NO: 219918 - DNA, 25 bp, Probe sequence
gtgtcgctgccgctggattaacagc

SEQ ID NO: 219919 - DNA, 25 bp, Probe sequence
ggtgatattatccaaagtagtacga

SEQ ID NO: 219920 - DNA, 25 bp, Probe sequence
ggatttattaccaggtttctttgcg

SEQ ID NO: 219921 - DNA, 25 bp, Probe sequence
ggcattgacagcattattaggttta

SEQ ID NO: 219922 - DNA, 25 bp, Probe sequence
ggctattggtgccatggcagcattt

SEQ ID NO: 219923 - DNA, 25 bp, Probe sequence
tggcagcatttagttcggcatttat

SEQ ID NO: 219924 - DNA, 25 bp, Probe sequence
tggtggtgcgattgctggtttaatt

SEQ ID NO: 219925 - DNA, 25 bp, Probe sequence
tgaatgggacgctattccatcgctt

SEQ ID NO: 219926 - DNA, 25 bp, Probe sequence
tgcgcttgcaggttatcttggttca

SEQ ID NO: 219927 - DNA, 25 bp, Probe sequence
tcttagcgccattagctcgtcttat

SEQ ID NO: 219928 - DNA, 25 bp, Probe sequence
ttagctcgtcttattgcagtattat

SEQ ID NO: 219929 - DNA, 25 bp, Probe sequence
ttggatcgattgtcatcttagcgcc

SEQ ID NO: 219930 - DNA, 25 bp, Probe sequence
attggcgcagcgaatgtagatcgta

SEQ ID NO: 219931 - DNA, 25 bp, Probe sequence
attatcctattgtttgtattggcgc

SEQ ID NO: 219932 - DNA, 25 bp, Probe sequence
atatgcctgattcattacatgctat

SEQ ID NO: 219933 - DNA, 25 bp, Probe sequence
agctggttaaatgggatgtctactg

SEQ ID NO: 219934 - DNA, 25 bp, Probe sequence
aacacgctctattggtggcgtagca

SEQ ID NO: 219935 - DNA, 25 bp, Probe sequence
aagtcagttatgccatcaaatagtg

SEQ ID NO: 219936 - DNA, 25 bp, Probe sequence
aatcctgtaacgtcaacacgctcta

SEQ ID NO: 219937 - DNA, 25 bp, Probe sequence
aatagctgctaaacgctggaatgat

SEQ ID NO: 219938 - DNA, 25 bp, Probe sequence
aattaagcgttcacacttattgaaa

SEQ ID NO: 219939 - DNA, 25 bp, Probe sequence
caaattagttatcaccacggtttct

SEQ ID NO: 219940 - DNA, 25 bp, Probe sequence
cattacatgctattgattggattat

SEQ ID NO: 219941 - DNA, 25 bp, Probe sequence
cgattgtccacaccatttatgaatt

SEQ ID NO: 219942 - DNA, 25 bp, Probe sequence
gcctataccacgaaacatcaaatca

SEQ ID NO: 219943 - DNA, 25 bp, Probe sequence
gcgaaacggtcgcttttttatctgc

SEQ ID NO: 219944 - DNA, 25 bp, Probe sequence
gctgagaacttaggtaggcttggcg

SEQ ID NO: 219945 - DNA, 25 bp, Probe sequence
gcaaaacctagatcaacagcaactt

SEQ ID NO: 219946 - DNA, 25 bp, Probe sequence
gaatttggatcatgttcaacaattt

SEQ ID NO: 219947 - DNA, 25 bp, Probe sequence
gaagtgtttgactacattacgcctg

SEQ ID NO: 219948 - DNA, 25 bp, Probe sequence
gataatccgtttatttcacaacgtg

SEQ ID NO: 219949 - DNA, 25 bp, Probe sequence
gactacattacgcctgaatttttaa

SEQ ID NO: 219950 - DNA, 25 bp, Probe sequence
gacccagcgtagcaaacattatttc

SEQ ID NO: 219951 - DNA, 25 bp, Probe sequence
gattaaacgattgtccacaccattt

SEQ ID NO: 219952 - DNA, 25 bp, Probe sequence
gttgcagaaacatcaaatcctgtaa

SEQ ID NO: 219953 - DNA, 25 bp, Probe sequence
gtaggcttggcgaaacggtcgcttt

SEQ ID NO: 219954 - DNA, 25 bp, Probe sequence
gtagatcgtaagttttatgtgcata

SEQ ID NO: 219955 - DNA, 25 bp, Probe sequence
ggtcgcttttttatctgctagtgga

SEQ ID NO: 219956 - DNA, 25 bp, Probe sequence
ggattatctagacccagcgtagcaa

SEQ ID NO: 219957 - DNA, 25 bp, Probe sequence
ggcgtgaaagaactcatttatcgaa

SEQ ID NO: 219958 - DNA, 25 bp, Probe sequence
ggcgacatgacatatggcttagcag

SEQ ID NO: 219959 - DNA, 25 bp, Probe sequence
tgctgaggcaattggattatctaga

SEQ ID NO: 219960 - DNA, 25 bp, Probe sequence
tcaacagcaactttatcacgatatg

SEQ ID NO: 219961 - DNA, 25 bp, Probe sequence
tacaggttcatatacagctttaatt

SEQ ID NO: 219962 - DNA, 25 bp, Probe sequence
ttcacaacgtgaacttgctgaggca

SEQ ID NO: 219963 - DNA, 25 bp, Probe sequence
ttaaacttcttatgtgcctatacca

SEQ ID NO: 219964 - DNA, 25 bp, Probe sequence
atacagttggatgctaacgcaccaa

SEQ ID NO: 219965 - DNA, 25 bp, Probe sequence
atacagttggttgctaatgcaccaa

SEQ ID NO: 219966 - DNA, 25 bp, Probe sequence
aggaatacagttggatgctaacgca

SEQ ID NO: 219967 - DNA, 25 bp, Probe sequence
aggaatacagttggttgctaatgca

SEQ ID NO: 219968 - DNA, 25 bp, Probe sequence
agttggatgctaacgcaccaactgc

SEQ ID NO: 219969 - DNA, 25 bp, Probe sequence
accaacagcaaaagagcccctaatt

SEQ ID NO: 219970 - DNA, 25 bp, Probe sequence
acagcaaaagagcccctaattaata

SEQ ID NO: 219971 - DNA, 25 bp, Probe sequence
acagttggatgctaacgcaccaact

SEQ ID NO: 219972 - DNA, 25 bp, Probe sequence
aacagcaaaagagcccctaattaat

SEQ ID NO: 219973 - DNA, 25 bp, Probe sequence
aaggaatacagttggttgctaatgc

SEQ ID NO: 219974 - DNA, 25 bp, Probe sequence
aaggaatacagttggatgctaacgc

SEQ ID NO: 219975 - DNA, 25 bp, Probe sequence
aatacagttggttgctaatgcacca

SEQ ID NO: 219976 - DNA, 25 bp, Probe sequence
aatacagttggatgctaacgcacca

SEQ ID NO: 219977 - DNA, 25 bp, Probe sequence
caacagcaaaagagcccctaattaa

SEQ ID NO: 219978 - DNA, 25 bp, Probe sequence
cagcaaaagagcccctaattaataa

SEQ ID NO: 219979 - DNA, 25 bp, Probe sequence
caccaacagcaaaagagcccctaat

SEQ ID NO: 219980 - DNA, 25 bp, Probe sequence
cagttggatgctaacgcaccaactg

SEQ ID NO: 219981 - DNA, 25 bp, Probe sequence
ccaacagcaaaagagcccctaatta

SEQ ID NO: 219982 - DNA, 25 bp, Probe sequence
gaatacagttggttgctaatgcacc

SEQ ID NO: 219983 - DNA, 25 bp, Probe sequence
gaatacagttggatgctaacgcacc

SEQ ID NO: 219984 - DNA, 25 bp, Probe sequence
ggaatacagttggttgctaatgcac

SEQ ID NO: 219985 - DNA, 25 bp, Probe sequence
ggaatacagttggatgctaacgcac

SEQ ID NO: 219986 - DNA, 25 bp, Probe sequence
tacagttggatgctaacgcaccaac

SEQ ID NO: 219987 - DNA, 25 bp, Probe sequence
tacagttggttgctaatgcaccaac

SEQ ID NO: 219988 - DNA, 25 bp, Probe sequence
attgctgtcgctgttaataaattat

SEQ ID NO: 219989 - DNA, 25 bp, Probe sequence
ataatggtgccattccagcaaccat

SEQ ID NO: 219990 - DNA, 25 bp, Probe sequence
atgaattgccagcattcttcactcg

SEQ ID NO: 219991 - DNA, 25 bp, Probe sequence
aggcgttccagttattggatatcaa

SEQ ID NO: 219992 - DNA, 25 bp, Probe sequence
acagcagttaaatcttgaaggtggc

SEQ ID NO: 219993 - DNA, 25 bp, Probe sequence
aagacgttgctaaagtatctagaag

SEQ ID NO: 219994 - DNA, 25 bp, Probe sequence
aatggctggtattcaattttttgtt

SEQ ID NO: 219995 - DNA, 25 bp, Probe sequence
aatcaaccgattgtagcattagaat

SEQ ID NO: 219996 - DNA, 25 bp, Probe sequence
aattccatatgagcatgccttatca

SEQ ID NO: 219997 - DNA, 25 bp, Probe sequence
cttcactcgcgaaagcggtgttaag

SEQ ID NO: 219998 - DNA, 25 bp, Probe sequence
ccattccagcaaccatagccattat

SEQ ID NO: 219999 - DNA, 25 bp, Probe sequence
gccaaatcaattttagacttaccta

SEQ ID NO: 220000 - DNA, 25 bp, Probe sequence
gcgacgacgatgatatgtgctgcaa

SEQ ID NO: 220001 - DNA, 25 bp, Probe sequence
gcattcttcactcgcgaaagcggtg

SEQ ID NO: 220002 - DNA, 25 bp, Probe sequence
gcatggtatgccgtacccacaaaat

SEQ ID NO: 220003 - DNA, 25 bp, Probe sequence
gaacgacttgctgacattcatttaa

SEQ ID NO: 220004 - DNA, 25 bp, Probe sequence
gaaacaaaaggcgttccagttattg

SEQ ID NO: 220005 - DNA, 25 bp, Probe sequence
gaaacgccagaacgacttgctgaca

SEQ ID NO: 220006 - DNA, 25 bp, Probe sequence
gacattcatttaacaaaacagcagt

SEQ ID NO: 220007 - DNA, 25 bp, Probe sequence
gagcatgccttatcaaaagcatata

SEQ ID NO: 220008 - DNA, 25 bp, Probe sequence
gttgttgctaatccaattccatatg

SEQ ID NO: 220009 - DNA, 25 bp, Probe sequence
gtattctcgagaagttcagcaagca

SEQ ID NO: 220010 - DNA, 25 bp, Probe sequence
gttatctgtgcaggtgccaaatcaa

SEQ ID NO: 220011 - DNA, 25 bp, Probe sequence
gtatgccgtacccacaaaatgttga

SEQ ID NO: 220012 - DNA, 25 bp, Probe sequence
gtcactgttatctgtgcaggtgcca

SEQ ID NO: 220013 - DNA, 25 bp, Probe sequence
gggtgctaaaattgctgtcgctgtt

SEQ ID NO: 220014 - DNA, 25 bp, Probe sequence
ggtggcattgttgttgctaatccaa

SEQ ID NO: 220015 - DNA, 25 bp, Probe sequence
ggtgctactactgtagcgacgacga

SEQ ID NO: 220016 - DNA, 25 bp, Probe sequence
tattaaaggtaaggacgccacaccg

SEQ ID NO: 220017 - DNA, 25 bp, Probe sequence
tccagcaaccatagccattatagat

SEQ ID NO: 220018 - DNA, 25 bp, Probe sequence
taacaagttcggttgaaacgccaga

SEQ ID NO: 220019 - DNA, 25 bp, Probe sequence
taaaggtgcagaacatacgatggac

SEQ ID NO: 220020 - DNA, 25 bp, Probe sequence
tacgatggacatttcagcagactta

SEQ ID NO: 220021 - DNA, 25 bp, Probe sequence
tatgtgctgcaatggctggtattca

SEQ ID NO: 220022 - DNA, 25 bp, Probe sequence
atttatgatgaacacaacgattggt

SEQ ID NO: 220023 - DNA, 25 bp, Probe sequence
atcatcgtaggttcaattaaaggca

SEQ ID NO: 220024 - DNA, 25 bp, Probe sequence
atcgcattcttaatggggattccat

SEQ ID NO: 220025 - DNA, 25 bp, Probe sequence
atgttgttagcatttatttcattaa

SEQ ID NO: 220026 - DNA, 25 bp, Probe sequence
agtgtaatcaatccctataaatctg

SEQ ID NO: 220027 - DNA, 25 bp, Probe sequence
agtttacttagtaagcttcgctaat

SEQ ID NO: 220028 - DNA, 25 bp, Probe sequence
agcttattggctatgtgtttgcacc

SEQ ID NO: 220029 - DNA, 25 bp, Probe sequence
acggttggtatcatcgtaggttcaa

SEQ ID NO: 220030 - DNA, 25 bp, Probe sequence
aaatcgctgttgtagtagccgtaat

SEQ ID NO: 220031 - DNA, 25 bp, Probe sequence
aaggtatcatttcagtttacttagt

SEQ ID NO: 220032 - DNA, 25 bp, Probe sequence
aatatttttagtgcgcttatcatcg

SEQ ID NO: 220033 - DNA, 25 bp, Probe sequence
caaatgagtttgtagcaatgcttga

SEQ ID NO: 220034 - DNA, 25 bp, Probe sequence
ctatttgttgcgtttttattcagtt

SEQ ID NO: 220035 - DNA, 25 bp, Probe sequence
gcttcgctaattttggtacggttgg

SEQ ID NO: 220036 - DNA, 25 bp, Probe sequence
gctcgaacacaaggtatcatttcag

SEQ ID NO: 220037 - DNA, 25 bp, Probe sequence
gcatttgcactatttgttgcgtttt

SEQ ID NO: 220038 - DNA, 25 bp, Probe sequence
gcaccaatcgcattcttaatgggga

SEQ ID NO: 220039 - DNA, 25 bp, Probe sequence
gaatattttattcgctatcacaggg

SEQ ID NO: 220040 - DNA, 25 bp, Probe sequence
gaagctgttccagctggctctttaa

SEQ ID NO: 220041 - DNA, 25 bp, Probe sequence
gttgtagtagccgtaatgttgttag

SEQ ID NO: 220042 - DNA, 25 bp, Probe sequence
gtagcaatgcttgattttaaaaatg

SEQ ID NO: 220043 - DNA, 25 bp, Probe sequence
gtgttggtttgaactttaaacagct

SEQ ID NO: 220044 - DNA, 25 bp, Probe sequence
gtgtttgcaccaatcgcattcttaa

SEQ ID NO: 220045 - DNA, 25 bp, Probe sequence
ggattccatggagcgaagctgttcc

SEQ ID NO: 220046 - DNA, 25 bp, Probe sequence
ggagcgaagctgttccagctggctc

SEQ ID NO: 220047 - DNA, 25 bp, Probe sequence
ggaagcaattaatatcatgtttggt

SEQ ID NO: 220048 - DNA, 25 bp, Probe sequence
ggctatgtgtttgcaccaatcgcat

SEQ ID NO: 220049 - DNA, 25 bp, Probe sequence
tcgctaattttggtacggttggtat

SEQ ID NO: 220050 - DNA, 25 bp, Probe sequence
taaggtattaccatttattatcaaa

SEQ ID NO: 220051 - DNA, 25 bp, Probe sequence
tatcacagggatagcatttgcacta

SEQ ID NO: 220052 - DNA, 25 bp, Probe sequence
tatcatgtttggtagtgttggtttg

SEQ ID NO: 220053 - DNA, 25 bp, Probe sequence
ttccagctggctctttaatggcgac

SEQ ID NO: 220054 - DNA, 25 bp, Probe sequence
ttaaaaatgtcctgggtgatgtatc

SEQ ID NO: 220055 - DNA, 25 bp, Probe sequence
ttgaactttaaacagcttattggct

SEQ ID NO: 220056 - DNA, 25 bp, Probe sequence
atatcgagccgaaagttgcacacta

SEQ ID NO: 220057 - DNA, 25 bp, Probe sequence
atatcaagcagaacggatcttttgt

SEQ ID NO: 220058 - DNA, 25 bp, Probe sequence
atcactgtctccttatgtcaaagta

SEQ ID NO: 220059 - DNA, 25 bp, Probe sequence
atcagcaggcgttgttgatgaacaa

SEQ ID NO: 220060 - DNA, 25 bp, Probe sequence
atgatgtaaacgctgcattactagg

SEQ ID NO: 220061 - DNA, 25 bp, Probe sequence
agcacacatgtgccagtattgtttg

SEQ ID NO: 220062 - DNA, 25 bp, Probe sequence
aaatcggcagttattgataagcaat

SEQ ID NO: 220063 - DNA, 25 bp, Probe sequence
aaagactatgtttatgcaccaatac

SEQ ID NO: 220064 - DNA, 25 bp, Probe sequence
aacgccggacaacaaaagtgagctt

SEQ ID NO: 220065 - DNA, 25 bp, Probe sequence
aagtgagcttattactgacaaagta

SEQ ID NO: 220066 - DNA, 25 bp, Probe sequence
aaggtgtattacatcgcaatcgata

SEQ ID NO: 220067 - DNA, 25 bp, Probe sequence
cagggccaaccattccgaattataa

SEQ ID NO: 220068 - DNA, 25 bp, Probe sequence
gccgaaagttgcacactatttacca

SEQ ID NO: 220069 - DNA, 25 bp, Probe sequence
gcacactatttaccaaaagactatg

SEQ ID NO: 220070 - DNA, 25 bp, Probe sequence
gcaacgtgctgcaacgagtgcattg

SEQ ID NO: 220071 - DNA, 25 bp, Probe sequence
gcaatcgatattggaggcactcaaa

SEQ ID NO: 220072 - DNA, 25 bp, Probe sequence
gaagcagctgaagaaggtgatgata

SEQ ID NO: 220073 - DNA, 25 bp, Probe sequence
gaacggatcttttgtatgacgcttg

SEQ ID NO: 220074 - DNA, 25 bp, Probe sequence
gagtgcattgaaaaagcgcatgatt

SEQ ID NO: 220075 - DNA, 25 bp, Probe sequence
gagtgggcagaagatgtagcagaag

SEQ ID NO: 220076 - DNA, 25 bp, Probe sequence
gatgcagcattatatggctgtttgc

SEQ ID NO: 220077 - DNA, 25 bp, Probe sequence
gattattaaaatcactgtctcctta

SEQ ID NO: 220078 - DNA, 25 bp, Probe sequence
gtatgacgcttggtacaggcattgg

SEQ ID NO: 220079 - DNA, 25 bp, Probe sequence
gtagcagaagggattgcccaaatac

SEQ ID NO: 220080 - DNA, 25 bp, Probe sequence
gtcatgtatgatccagggcttatat

SEQ ID NO: 220081 - DNA, 25 bp, Probe sequence
gtcataggtatttcatcagcaggcg

SEQ ID NO: 220082 - DNA, 25 bp, Probe sequence
gtgccagtattgtttgaagcagctg

SEQ ID NO: 220083 - DNA, 25 bp, Probe sequence
gggtatttattgtatcgtccaactg

SEQ ID NO: 220084 - DNA, 25 bp, Probe sequence
ggtatttcatcagcaggcgttgttg

SEQ ID NO: 220085 - DNA, 25 bp, Probe sequence
ggaggcactcaaattaaatcggcag

SEQ ID NO: 220086 - DNA, 25 bp, Probe sequence
ggaggatttacgagaagcacacatg

SEQ ID NO: 220087 - DNA, 25 bp, Probe sequence
tgatccaacctgtcataggtatttc

SEQ ID NO: 220088 - DNA, 25 bp, Probe sequence
tacaacgtttgagcaacgtgctgca

SEQ ID NO: 220089 - DNA, 25 bp, Probe sequence
ttatgcaccaatacaaacgactaag

SEQ ID NO: 220090 - DNA, 25 bp, Probe sequence
aatagtttacgagaggttgccgatg

SEQ ID NO: 220091 - DNA, 25 bp, Probe sequence
acctgagaaaagtagttttacagca

SEQ ID NO: 220092 - DNA, 25 bp, Probe sequence
aaatttgatgaacatgcatggcgaa

SEQ ID NO: 220093 - DNA, 25 bp, Probe sequence
aaacgacagaacgaaagcatttagc

SEQ ID NO: 220094 - DNA, 25 bp, Probe sequence
aacgatagtgtcacctttacctgag

SEQ ID NO: 220095 - DNA, 25 bp, Probe sequence
aacgatgtaacaacaaagtatcaca

SEQ ID NO: 220096 - DNA, 25 bp, Probe sequence
aatgttcttctgagcgattaaactt

SEQ ID NO: 220097 - DNA, 25 bp, Probe sequence
aatcgcataaaatgttcttctgagc

SEQ ID NO: 220098 - DNA, 25 bp, Probe sequence
aatattgctaacttcagaggacggc

SEQ ID NO: 220099 - DNA, 25 bp, Probe sequence
gctaacttcagaggacggcaaggtc

SEQ ID NO: 220100 - DNA, 25 bp, Probe sequence
gcataaaatgttcttctgagcgatt

SEQ ID NO: 220101 - DNA, 25 bp, Probe sequence
gcaaaatttcaagtgttgcccaaag

SEQ ID NO: 220102 - DNA, 25 bp, Probe sequence
gaatttgatattggcaacattgtca

SEQ ID NO: 220103 - DNA, 25 bp, Probe sequence
gaaacgatagtgtcacctttacctg

SEQ ID NO: 220104 - DNA, 25 bp, Probe sequence
gaaacagatttaatattgctaactt

SEQ ID NO: 220105 - DNA, 25 bp, Probe sequence
gaggatggaaaatggtacacaccaa

SEQ ID NO: 220106 - DNA, 25 bp, Probe sequence
gaggacggcaaggtccttgaatttg

SEQ ID NO: 220107 - DNA, 25 bp, Probe sequence
gatgaacatgcatggcgaaatgaat

SEQ ID NO: 220108 - DNA, 25 bp, Probe sequence
gatagtgtcacctttacctgagaaa

SEQ ID NO: 220109 - DNA, 25 bp, Probe sequence
gatttcttaaaaggatgcatgcgtg

SEQ ID NO: 220110 - DNA, 25 bp, Probe sequence
gtttacgagaggttgccgatgtcca

SEQ ID NO: 220111 - DNA, 25 bp, Probe sequence
gtagttttacagcaaaatttcaagt

SEQ ID NO: 220112 - DNA, 25 bp, Probe sequence
gtgacaaacttgttgaaaaagactt

SEQ ID NO: 220113 - DNA, 25 bp, Probe sequence
gtgtcacctttacctgagaaaagta

SEQ ID NO: 220114 - DNA, 25 bp, Probe sequence
ggtccttgaatttgatattggcaac

SEQ ID NO: 220115 - DNA, 25 bp, Probe sequence
ggtacacaccaagttataaagatga

SEQ ID NO: 220116 - DNA, 25 bp, Probe sequence
ggatgcatgcgtgattatttaatag

SEQ ID NO: 220117 - DNA, 25 bp, Probe sequence
ggcaaggtccttgaatttgatattg

SEQ ID NO: 220118 - DNA, 25 bp, Probe sequence
ggcaacattgtcattgaagaggatg

SEQ ID NO: 220119 - DNA, 25 bp, Probe sequence
ggcgaaatgaattaaacgatgtaac

SEQ ID NO: 220120 - DNA, 25 bp, Probe sequence
taatagatagtgacaaacttgttga

SEQ ID NO: 220121 - DNA, 25 bp, Probe sequence
tacgagaggttgccgatgtccacct

SEQ ID NO: 220122 - DNA, 25 bp, Probe sequence
ttacttatcatactaatcgcataaa

SEQ ID NO: 220123 - DNA, 25 bp, Probe sequence
ttcttctgagcgattaaactttaaa

SEQ ID NO: 220124 - DNA, 25 bp, Probe sequence
attcttgtatacgtaaattatcgat

SEQ ID NO: 220125 - DNA, 25 bp, Probe sequence
attactactgttataagctttatcc

SEQ ID NO: 220126 - DNA, 25 bp, Probe sequence
ataagctttatccttgtatacgcat

SEQ ID NO: 220127 - DNA, 25 bp, Probe sequence
atccttgtatacgcattaattcacg

SEQ ID NO: 220128 - DNA, 25 bp, Probe sequence
atgattattgtttatattgtgctgt

SEQ ID NO: 220129 - DNA, 25 bp, Probe sequence
agaatatatgttgttcgtttgatag

SEQ ID NO: 220130 - DNA, 25 bp, Probe sequence
agctttatccttgtatacgcattaa

SEQ ID NO: 220131 - DNA, 25 bp, Probe sequence
actgttataagctttatccttgtat

SEQ ID NO: 220132 - DNA, 25 bp, Probe sequence
actactgttataagctttatccttg

SEQ ID NO: 220133 - DNA, 25 bp, Probe sequence
acaattactactgttataagcttta

SEQ ID NO: 220134 - DNA, 25 bp, Probe sequence
aagctttatccttgtatacgcatta

SEQ ID NO: 220135 - DNA, 25 bp, Probe sequence
ccttgtatacgcattaattcacgaa

SEQ ID NO: 220136 - DNA, 25 bp, Probe sequence
gctgttgttaattcttgtatacgta

SEQ ID NO: 220137 - DNA, 25 bp, Probe sequence
gctttatccttgtatacgcattaat

SEQ ID NO: 220138 - DNA, 25 bp, Probe sequence
gaatcgattgctatctgaaaataga

SEQ ID NO: 220139 - DNA, 25 bp, Probe sequence
gattattgtttatattgtgctgttg

SEQ ID NO: 220140 - DNA, 25 bp, Probe sequence
gattagtgaatcgattgctatctga

SEQ ID NO: 220141 - DNA, 25 bp, Probe sequence
gttgttaattcttgtatacgtaaat

SEQ ID NO: 220142 - DNA, 25 bp, Probe sequence
gttataagctttatccttgtatacg

SEQ ID NO: 220143 - DNA, 25 bp, Probe sequence
gtttatattgtgctgttgttaattc

SEQ ID NO: 220144 - DNA, 25 bp, Probe sequence
gtatacgtaaattatcgattagtga

SEQ ID NO: 220145 - DNA, 25 bp, Probe sequence
gtgctgttgttaattcttgtatacg

SEQ ID NO: 220146 - DNA, 25 bp, Probe sequence
gtgaatcgattgctatctgaaaata

SEQ ID NO: 220147 - DNA, 25 bp, Probe sequence
taagctttatccttgtatacgcatt

SEQ ID NO: 220148 - DNA, 25 bp, Probe sequence
tactgttataagctttatccttgta

SEQ ID NO: 220149 - DNA, 25 bp, Probe sequence
tatccttgtatacgcattaattcac

SEQ ID NO: 220150 - DNA, 25 bp, Probe sequence
tatattgtgctgttgttaattcttg

SEQ ID NO: 220151 - DNA, 25 bp, Probe sequence
tattgtgctgttgttaattcttgta

SEQ ID NO: 220152 - DNA, 25 bp, Probe sequence
tattgtttatattgtgctgttgtta

SEQ ID NO: 220153 - DNA, 25 bp, Probe sequence
tttatccttgtatacgcattaattc

SEQ ID NO: 220154 - DNA, 25 bp, Probe sequence
ttataagctttatccttgtatacgc

SEQ ID NO: 220155 - DNA, 25 bp, Probe sequence
ttagtgaatcgattgctatctgaaa

SEQ ID NO: 220156 - DNA, 25 bp, Probe sequence
ttgtatacgcattaattcacgaact

SEQ ID NO: 220157 - DNA, 25 bp, Probe sequence
ttgtgctgttgttaattcttgtata

SEQ ID NO: 220158 - DNA, 25 bp, Probe sequence
atcactttcaccacgaatgtttgct

SEQ ID NO: 220159 - DNA, 25 bp, Probe sequence
agagggtatgttagacttcccgatg

SEQ ID NO: 220160 - DNA, 25 bp, Probe sequence
aggaaacgcgattgcagatgctatg

SEQ ID NO: 220161 - DNA, 25 bp, Probe sequence
accatttggaaatacgattgcgcaa

SEQ ID NO: 220162 - DNA, 25 bp, Probe sequence
acaaacaggtacagcacttgcgaat

SEQ ID NO: 220163 - DNA, 25 bp, Probe sequence
acaacaagcctcaacacaaaaacca

SEQ ID NO: 220164 - DNA, 25 bp, Probe sequence
aaatgatatccatggccgactagcc

SEQ ID NO: 220165 - DNA, 25 bp, Probe sequence
aaagggcgtgtcatcggtatggcta

SEQ ID NO: 220166 - DNA, 25 bp, Probe sequence
aaagcctgatttaatgttagacgca

SEQ ID NO: 220167 - DNA, 25 bp, Probe sequence
aacaagtgtatggctcgttttgctt

SEQ ID NO: 220168 - DNA, 25 bp, Probe sequence
aagactgactttgccgtgacaaatg

SEQ ID NO: 220169 - DNA, 25 bp, Probe sequence
caagctgatcaaacatttagagcac

SEQ ID NO: 220170 - DNA, 25 bp, Probe sequence
cggcaaccaacgtatcagcatcagc

SEQ ID NO: 220171 - DNA, 25 bp, Probe sequence
cgccaacaaaggaagcggctcatca

SEQ ID NO: 220172 - DNA, 25 bp, Probe sequence
gctaaaacagcatcactttcaccac

SEQ ID NO: 220173 - DNA, 25 bp, Probe sequence
gcaggagacgccttccaaggtttac

SEQ ID NO: 220174 - DNA, 25 bp, Probe sequence
gcagtaggttatgatgctatggcag

SEQ ID NO: 220175 - DNA, 25 bp, Probe sequence
gaaggtatttcattagatcaagtac

SEQ ID NO: 220176 - DNA, 25 bp, Probe sequence
gaagcggcaaccaacgtatcagcat

SEQ ID NO: 220177 - DNA, 25 bp, Probe sequence
gacaaatggtggaggtattcgtgcc

SEQ ID NO: 220178 - DNA, 25 bp, Probe sequence
gagatgacgttagaacgcgtgaaac

SEQ ID NO: 220179 - DNA, 25 bp, Probe sequence
gagatccattacaaagtgtgacagc

SEQ ID NO: 220180 - DNA, 25 bp, Probe sequence
gatgtaaaaggttcagacgtctgga

SEQ ID NO: 220181 - DNA, 25 bp, Probe sequence
gatccttcaacacaagaaacatggc

SEQ ID NO: 220182 - DNA, 25 bp, Probe sequence
gtattcgtgcctctatcgcaaaagg

SEQ ID NO: 220183 - DNA, 25 bp, Probe sequence
gtatggctcgttttgctttttagtg

SEQ ID NO: 220184 - DNA, 25 bp, Probe sequence
gtaacgacaccagaaacaaagacga

SEQ ID NO: 220185 - DNA, 25 bp, Probe sequence
gtaacaccgaacaaagcattagctg

SEQ ID NO: 220186 - DNA, 25 bp, Probe sequence
gtaaggtgacacgctatgatttaat

SEQ ID NO: 220187 - DNA, 25 bp, Probe sequence
gtgaacaaccagctaaaggacaaca

SEQ ID NO: 220188 - DNA, 25 bp, Probe sequence
ggtacagcacttgcgaatatcggta

SEQ ID NO: 220189 - DNA, 25 bp, Probe sequence
tgttagacgcaggagacgccttcca

SEQ ID NO: 220190 - DNA, 25 bp, Probe sequence
tgaatgacttcacagcatcaggtgg

SEQ ID NO: 220191 - DNA, 25 bp, Probe sequence
tatccatggccgactagccgaagaa

SEQ ID NO: 220192 - DNA, 25 bp, Probe sequence
atattagaacacatgcaccgaacgt

SEQ ID NO: 220193 - DNA, 25 bp, Probe sequence
atacgcaaggacaattactttatca

SEQ ID NO: 220194 - DNA, 25 bp, Probe sequence
atgaaggtggtgctgttggtattcg

SEQ ID NO: 220195 - DNA, 25 bp, Probe sequence
atgtgaagtcattgcattggatgca

SEQ ID NO: 220196 - DNA, 25 bp, Probe sequence
acgacgttacatggctatactagtt

SEQ ID NO: 220197 - DNA, 25 bp, Probe sequence
aaacgttagacgaattagtatcata

SEQ ID NO: 220198 - DNA, 25 bp, Probe sequence
aagttattgcggaaggtaatgtcat

SEQ ID NO: 220199 - DNA, 25 bp, Probe sequence
aatcatggctgatatcgcgaccgtt

SEQ ID NO: 220200 - DNA, 25 bp, Probe sequence
cagtcgttggtggtgcgataacacg

SEQ ID NO: 220201 - DNA, 25 bp, Probe sequence
gctgcgtatgaaggtggtgctgttg

SEQ ID NO: 220202 - DNA, 25 bp, Probe sequence
gcattggatgcaacgttacagcaac

SEQ ID NO: 220203 - DNA, 25 bp, Probe sequence
gcattcatcttttattatgtcgaaa

SEQ ID NO: 220204 - DNA, 25 bp, Probe sequence
gcaccgaacgttgaaatcatggctg

SEQ ID NO: 220205 - DNA, 25 bp, Probe sequence
gaaccattgcattcatcttttatta

SEQ ID NO: 220206 - DNA, 25 bp, Probe sequence
gaactgatagaaagccaatgtgaag

SEQ ID NO: 220207 - DNA, 25 bp, Probe sequence
gaacacatgcaccgaacgttgaaat

SEQ ID NO: 220208 - DNA, 25 bp, Probe sequence
gatgtactacaaagtgttgatgcaa

SEQ ID NO: 220209 - DNA, 25 bp, Probe sequence
gatttaccagttattggcattgtga

SEQ ID NO: 220210 - DNA, 25 bp, Probe sequence
gattaatagtatcttgtcaggcact

SEQ ID NO: 220211 - DNA, 25 bp, Probe sequence
gttaccacatggattaatagtatct

SEQ ID NO: 220212 - DNA, 25 bp, Probe sequence
gtaatgtcattacaccggatatgta

SEQ ID NO: 220213 - DNA, 25 bp, Probe sequence
gtcgaaaatggcattagctgcgtat

SEQ ID NO: 220214 - DNA, 25 bp, Probe sequence
gtgcgataacacgaccaaaagaaat

SEQ ID NO: 220215 - DNA, 25 bp, Probe sequence
gtgatggacttaggcgttcattgtt

SEQ ID NO: 220216 - DNA, 25 bp, Probe sequence
ggctatactagttatacgcaaggac

SEQ ID NO: 220217 - DNA, 25 bp, Probe sequence
ggctgatatcgcgaccgttgaagaa

SEQ ID NO: 220218 - DNA, 25 bp, Probe sequence
tggatgcaacgttacagcaacgtcc

SEQ ID NO: 220219 - DNA, 25 bp, Probe sequence
tactttatcaaaatgacttccaatt

SEQ ID NO: 220220 - DNA, 25 bp, Probe sequence
taggcgttcattgttcagtcgttgg

SEQ ID NO: 220221 - DNA, 25 bp, Probe sequence
tatcgcgaccgttgaagaagctaaa

SEQ ID NO: 220222 - DNA, 25 bp, Probe sequence
tattggcattgtgaaacgtgactat

SEQ ID NO: 220223 - DNA, 25 bp, Probe sequence
ttcattgttcagtcgttggtggtgc

SEQ ID NO: 220224 - DNA, 25 bp, Probe sequence
ttggcacgacgttacatggctatac

SEQ ID NO: 220225 - DNA, 25 bp, Probe sequence
ttgattatattggcacgacgttaca

SEQ ID NO: 220226 - DNA, 25 bp, Probe sequence
atcacaacattagcaacaccacata

SEQ ID NO: 220227 - DNA, 25 bp, Probe sequence
atgataaagcagcaccaacttcaac

SEQ ID NO: 220228 - DNA, 25 bp, Probe sequence
aggcgtggtgtcagtgttagcggct

SEQ ID NO: 220229 - DNA, 25 bp, Probe sequence
atggcgcagcacatgcagctaaata

SEQ ID NO: 220230 - DNA, 25 bp, Probe sequence
agtacaaccacttaacaaatatcca

SEQ ID NO: 220231 - DNA, 25 bp, Probe sequence
accattattcactggtggtcataac

SEQ ID NO: 220232 - DNA, 25 bp, Probe sequence
actaatcaaagatgcgcttcaagcg

SEQ ID NO: 220233 - DNA, 25 bp, Probe sequence
aaatacccatcatgctgaacgtaat

SEQ ID NO: 220234 - DNA, 25 bp, Probe sequence
aaatatccagttgtttttgtacatg

SEQ ID NO: 220235 - DNA, 25 bp, Probe sequence
aaaactgcacctaaatcaacaaaag

SEQ ID NO: 220236 - DNA, 25 bp, Probe sequence
aacatatcgatggtcaaaattcccc

SEQ ID NO: 220237 - DNA, 25 bp, Probe sequence
aaccatccattccggcacaaaaggt

SEQ ID NO: 220238 - DNA, 25 bp, Probe sequence
aatggatcacaatcgacaacgtcac

SEQ ID NO: 220239 - DNA, 25 bp, Probe sequence
aattgcctatcataaagcgcatggt

SEQ ID NO: 220240 - DNA, 25 bp, Probe sequence
cacgttcgactacaaatgcagcagc

SEQ ID NO: 220241 - DNA, 25 bp, Probe sequence
catcacatgaagcacaagcctcgga

SEQ ID NO: 220242 - DNA, 25 bp, Probe sequence
ccacataatggttcacaagcagctg

SEQ ID NO: 220243 - DNA, 25 bp, Probe sequence
gcttcaagcgcctaaaacacgttcg

SEQ ID NO: 220244 - DNA, 25 bp, Probe sequence
gcagatgctaaaaaggttcgaccac

SEQ ID NO: 220245 - DNA, 25 bp, Probe sequence
gcaaccacggacaaacatccaaatc

SEQ ID NO: 220246 - DNA, 25 bp, Probe sequence
gaatcatgcctaattgggaacctgg

SEQ ID NO: 220247 - DNA, 25 bp, Probe sequence
gaaaaatcatgttcgctttaaatcg

SEQ ID NO: 220248 - DNA, 25 bp, Probe sequence
gacaacgtcacaatcgaatgatgtt

SEQ ID NO: 220249 - DNA, 25 bp, Probe sequence
gataacgtcacatcaaatgcagtca

SEQ ID NO: 220250 - DNA, 25 bp, Probe sequence
gtatgggtggtcaaacaattcgttt

SEQ ID NO: 220251 - DNA, 25 bp, Probe sequence
gtaggcgataatgcacctgctttat

SEQ ID NO: 220252 - DNA, 25 bp, Probe sequence
gtgttagcggctacaatgtttgttg

SEQ ID NO: 220253 - DNA, 25 bp, Probe sequence
gtggtcgcgtagattatggcgcagc

SEQ ID NO: 220254 - DNA, 25 bp, Probe sequence
ggtacatcttgtagggcatagtatg

SEQ ID NO: 220255 - DNA, 25 bp, Probe sequence
ggttcgaccacttaaagcgaatcaa

SEQ ID NO: 220256 - DNA, 25 bp, Probe sequence
tgataaatcacaaccatccattccg

SEQ ID NO: 220257 - DNA, 25 bp, Probe sequence
tcctgatttaggtacatttttctta

SEQ ID NO: 220258 - DNA, 25 bp, Probe sequence
ttaggattaacgcaatggggcttta

SEQ ID NO: 220259 - DNA, 25 bp, Probe sequence
ttacgaatgatgaacctgccacacg

SEQ ID NO: 220260 - DNA, 25 bp, Probe sequence
attgatccgaatagcaaaggtgatt

SEQ ID NO: 220261 - DNA, 25 bp, Probe sequence
atagatcagcaaaatacaagtatta

SEQ ID NO: 220262 - DNA, 25 bp, Probe sequence
ataaagtagataatgcagctgattt

SEQ ID NO: 220263 - DNA, 25 bp, Probe sequence
ataatgcagctgatttatctgaaag

SEQ ID NO: 220264 - DNA, 25 bp, Probe sequence
atccgaatagcaaaggtgatttagc

SEQ ID NO: 220265 - DNA, 25 bp, Probe sequence
atggtcatattgatccgaatagcaa

SEQ ID NO: 220266 - DNA, 25 bp, Probe sequence
agaaaactttgaggatgtcactaat

SEQ ID NO: 220267 - DNA, 25 bp, Probe sequence
actttgaggatgtcactaatagtgt

SEQ ID NO: 220268 - DNA, 25 bp, Probe sequence
aaagtagataatgcagctgatttat

SEQ ID NO: 220269 - DNA, 25 bp, Probe sequence
aaactttgaggatgtcactaatagt

SEQ ID NO: 220270 - DNA, 25 bp, Probe sequence
aactttgaggatgtcactaatagtg

SEQ ID NO: 220271 - DNA, 25 bp, Probe sequence
aatggtcatattgatccgaatagca

SEQ ID NO: 220272 - DNA, 25 bp, Probe sequence
aatgcattaatagatcagcaaaata

SEQ ID NO: 220273 - DNA, 25 bp, Probe sequence
catattgatccgaatagcaaaggtg

SEQ ID NO: 220274 - DNA, 25 bp, Probe sequence
ctttgaggatgtcactaatagtgtg

SEQ ID NO: 220275 - DNA, 25 bp, Probe sequence
ccagaaaactttgaggatgtcacta

SEQ ID NO: 220276 - DNA, 25 bp, Probe sequence
gaatccagaaaactttgaggatgtc

SEQ ID NO: 220277 - DNA, 25 bp, Probe sequence
gaaaactttgaggatgtcactaata

SEQ ID NO: 220278 - DNA, 25 bp, Probe sequence
gatccgaatagcaaaggtgatttag

SEQ ID NO: 220279 - DNA, 25 bp, Probe sequence
gttgttaatggtcatattgatccga

SEQ ID NO: 220280 - DNA, 25 bp, Probe sequence
gttactttgtgaatccagaaaactt

SEQ ID NO: 220281 - DNA, 25 bp, Probe sequence
gttaatggtcatattgatccgaata

SEQ ID NO: 220282 - DNA, 25 bp, Probe sequence
gtcatattgatccgaatagcaaagg

SEQ ID NO: 220283 - DNA, 25 bp, Probe sequence
ggtcatattgatccgaatagcaaag

SEQ ID NO: 220284 - DNA, 25 bp, Probe sequence
tggtcatattgatccgaatagcaaa

SEQ ID NO: 220285 - DNA, 25 bp, Probe sequence
tgttaatggtcatattgatccgaat

SEQ ID NO: 220286 - DNA, 25 bp, Probe sequence
tgaggatgtcactaatagtgtgaat

SEQ ID NO: 220287 - DNA, 25 bp, Probe sequence
tctgaaagttactttgtgaatccag

SEQ ID NO: 220288 - DNA, 25 bp, Probe sequence
tcagatagtgattccgactccgaca

SEQ ID NO: 220289 - DNA, 25 bp, Probe sequence
taatggtcatattgatccgaatagc

SEQ ID NO: 220290 - DNA, 25 bp, Probe sequence
tactttgtgaatccagaaaactttg

SEQ ID NO: 220291 - DNA, 25 bp, Probe sequence
ttactttgtgaatccagaaaacttt

SEQ ID NO: 220292 - DNA, 25 bp, Probe sequence
ttaatagatcagcaaaatacaagta

SEQ ID NO: 220293 - DNA, 25 bp, Probe sequence
ttgttaatggtcatattgatccgaa

SEQ ID NO: 220294 - DNA, 25 bp, Probe sequence
attatgtgaatcctagcgattttga

SEQ ID NO: 220295 - DNA, 25 bp, Probe sequence
atcaagttagaatttcatttccaaa

SEQ ID NO: 220296 - DNA, 25 bp, Probe sequence
atccaagcggagataacgttgtgtt

SEQ ID NO: 220297 - DNA, 25 bp, Probe sequence
atcctgctagtacaggtgatttagc

SEQ ID NO: 220298 - DNA, 25 bp, Probe sequence
atgtgacattgacaactggcatagg

SEQ ID NO: 220299 - DNA, 25 bp, Probe sequence
agattctggcagtgattctacatca

SEQ ID NO: 220300 - DNA, 25 bp, Probe sequence
agaatttcctacggacgatgaccaa

SEQ ID NO: 220301 - DNA, 25 bp, Probe sequence
acgttgtgttacctgccttaacagg

SEQ ID NO: 220302 - DNA, 25 bp, Probe sequence
actattgactctggtacgactgtgt

SEQ ID NO: 220303 - DNA, 25 bp, Probe sequence
aaataatacgtatcgccaaacaatt

SEQ ID NO: 220304 - DNA, 25 bp, Probe sequence
aatggccatattgatcctgctagta

SEQ ID NO: 220305 - DNA, 25 bp, Probe sequence
aatccaagtacgcctagaatgagag

SEQ ID NO: 220306 - DNA, 25 bp, Probe sequence
caccggcagctggcacagatattac

SEQ ID NO: 220307 - DNA, 25 bp, Probe sequence
ctggtacgactgtgtatccgcacca

SEQ ID NO: 220308 - DNA, 25 bp, Probe sequence
cggttaatccaagtacgcctagaat

SEQ ID NO: 220309 - DNA, 25 bp, Probe sequence
gcactacgttcgacattttatggtt

SEQ ID NO: 220310 - DNA, 25 bp, Probe sequence
gacattttatggttatgattctaat

SEQ ID NO: 220311 - DNA, 25 bp, Probe sequence
gactctggtacgactgtgtatccgc

SEQ ID NO: 220312 - DNA, 25 bp, Probe sequence
gatgtgaaagttactattgactctg

SEQ ID NO: 220313 - DNA, 25 bp, Probe sequence
gataacgttgtgttacctgccttaa

SEQ ID NO: 220314 - DNA, 25 bp, Probe sequence
gtagttagtcaagcggttaatccaa

SEQ ID NO: 220315 - DNA, 25 bp, Probe sequence
gtatcgccaaacaatttatgtcaat

SEQ ID NO: 220316 - DNA, 25 bp, Probe sequence
gtaagacagtattaatcgactatga

SEQ ID NO: 220317 - DNA, 25 bp, Probe sequence
gtgatttagcactacgttcgacatt

SEQ ID NO: 220318 - DNA, 25 bp, Probe sequence
ggacgatgaccaaattacaacaccg

SEQ ID NO: 220319 - DNA, 25 bp, Probe sequence
ggcataggaaccaatactgctagta

SEQ ID NO: 220320 - DNA, 25 bp, Probe sequence
ggccatattgatcctgctagtacag

SEQ ID NO: 220321 - DNA, 25 bp, Probe sequence
tggacaattccataatttatcaatt

SEQ ID NO: 220322 - DNA, 25 bp, Probe sequence
tcctagcgattttgaagatgtaact

SEQ ID NO: 220323 - DNA, 25 bp, Probe sequence
tcatttccaaatgctaatcaataca

SEQ ID NO: 220324 - DNA, 25 bp, Probe sequence
taacagctaatattactatgccagc

SEQ ID NO: 220325 - DNA, 25 bp, Probe sequence
tactatgccagcttatattgaccct

SEQ ID NO: 220326 - DNA, 25 bp, Probe sequence
tacgaatcagttgacagatgtgaaa

SEQ ID NO: 220327 - DNA, 25 bp, Probe sequence
tatatggagatctatgtcatgggac

SEQ ID NO: 220328 - DNA, 25 bp, Probe sequence
atgcaactacagaagaaacaccggt

SEQ ID NO: 220329 - DNA, 25 bp, Probe sequence
atgcaccggctgctggcaaagatat

SEQ ID NO: 220330 - DNA, 25 bp, Probe sequence
agttactactacggcaacgaatcaa

SEQ ID NO: 220331 - DNA, 25 bp, Probe sequence
actttgaagatgtcactgatagtgt

SEQ ID NO: 220332 - DNA, 25 bp, Probe sequence
aaatgcggaagaatcagtgaatcaa

SEQ ID NO: 220333 - DNA, 25 bp, Probe sequence
aaaagtggtactaatgcttcaaata

SEQ ID NO: 220334 - DNA, 25 bp, Probe sequence
aactggtgaagttactactacggca

SEQ ID NO: 220335 - DNA, 25 bp, Probe sequence
aacgaatgtagcgcaaaatccagca

SEQ ID NO: 220336 - DNA, 25 bp, Probe sequence
aatttggcgatcaatgtcatgggat

SEQ ID NO: 220337 - DNA, 25 bp, Probe sequence
caaacgtgagtgattctaatacaac

SEQ ID NO: 220338 - DNA, 25 bp, Probe sequence
cgcaagacatttcaactgaagcaac

SEQ ID NO: 220339 - DNA, 25 bp, Probe sequence
gaattatgggttctcagtaccaaat

SEQ ID NO: 220340 - DNA, 25 bp, Probe sequence
gaatccagataactttgaagatgtc

SEQ ID NO: 220341 - DNA, 25 bp, Probe sequence
gagagcaaaagtaatgatccaagta

SEQ ID NO: 220342 - DNA, 25 bp, Probe sequence
gagatacagtttatccgcaccaagc

SEQ ID NO: 220343 - DNA, 25 bp, Probe sequence
gaggctgttcaaggtgacacattca

SEQ ID NO: 220344 - DNA, 25 bp, Probe sequence
gatgatcaaataacaacaccatata

SEQ ID NO: 220345 - DNA, 25 bp, Probe sequence
gattctaatacaacgacaaacacta

SEQ ID NO: 220346 - DNA, 25 bp, Probe sequence
gttgataatgcatcagacttgtctg

SEQ ID NO: 220347 - DNA, 25 bp, Probe sequence
gtgacattggctactggcataggta

SEQ ID NO: 220348 - DNA, 25 bp, Probe sequence
gtgattcgaatagcgattccgattc

SEQ ID NO: 220349 - DNA, 25 bp, Probe sequence
ggtaatgtgacattggctactggca

SEQ ID NO: 220350 - DNA, 25 bp, Probe sequence
ggttctcagtaccaaatgaggctgt

SEQ ID NO: 220351 - DNA, 25 bp, Probe sequence
ggctgctggcaaagatattacgaat

SEQ ID NO: 220352 - DNA, 25 bp, Probe sequence
tggtattgactctggagatacagtt

SEQ ID NO: 220353 - DNA, 25 bp, Probe sequence
tgatccaagtagcgttaatgctgca

SEQ ID NO: 220354 - DNA, 25 bp, Probe sequence
tcgaatagcgattccgattcaggtt

SEQ ID NO: 220355 - DNA, 25 bp, Probe sequence
taactgtgcccaaagaattaaactt

SEQ ID NO: 220356 - DNA, 25 bp, Probe sequence
ttaaagcaactttgaccatgcccgc

SEQ ID NO: 220357 - DNA, 25 bp, Probe sequence
tagtgacgaaacgaatgtagcgcaa

SEQ ID NO: 220358 - DNA, 25 bp, Probe sequence
tttgaccatgcccgcttatattgac

SEQ ID NO: 220359 - DNA, 25 bp, Probe sequence
ttaatgggcatattgatcctaatag

SEQ ID NO: 220360 - DNA, 25 bp, Probe sequence
ttcaacaacgcaagacatttcaact

SEQ ID NO: 220361 - DNA, 25 bp, Probe sequence
ttccgattcagattcaacgagtgac

SEQ ID NO: 220362 - DNA, 25 bp, Probe sequence
atttaatgtctgtaattaatcaatg

SEQ ID NO: 220363 - DNA, 25 bp, Probe sequence
atcaatgtattgaactagaaaattt

SEQ ID NO: 220364 - DNA, 25 bp, Probe sequence
atgtctgtaattaatcaatgtattg

SEQ ID NO: 220365 - DNA, 25 bp, Probe sequence
agtatttagctaataaccgcagaaa

SEQ ID NO: 220366 - DNA, 25 bp, Probe sequence
agttctctacctaattgatagagaa

SEQ ID NO: 220367 - DNA, 25 bp, Probe sequence
agagaacaaaagtatttagctaata

SEQ ID NO: 220368 - DNA, 25 bp, Probe sequence
acaaaagaatttaatgtctgtaatt

SEQ ID NO: 220369 - DNA, 25 bp, Probe sequence
aaagttctctacctaattgatagag

SEQ ID NO: 220370 - DNA, 25 bp, Probe sequence
aaagtatttagctaataaccgcaga

SEQ ID NO: 220371 - DNA, 25 bp, Probe sequence
aaaaagttctctacctaattgatag

SEQ ID NO: 220372 - DNA, 25 bp, Probe sequence
caaaagtatttagctaataaccgca

SEQ ID NO: 220373 - DNA, 25 bp, Probe sequence
aaaagtatttagctaataaccgcag

SEQ ID NO: 220374 - DNA, 25 bp, Probe sequence
aaaagttctctacctaattgataga

SEQ ID NO: 220375 - DNA, 25 bp, Probe sequence
aacaaaagaatttaatgtctgtaat

SEQ ID NO: 220376 - DNA, 25 bp, Probe sequence
aagaatttaatgtctgtaattaatc

SEQ ID NO: 220377 - DNA, 25 bp, Probe sequence
aagttctctacctaattgatagaga

SEQ ID NO: 220378 - DNA, 25 bp, Probe sequence
aagtatttagctaataaccgcagaa

SEQ ID NO: 220379 - DNA, 25 bp, Probe sequence
aatgtctgtaattaatcaatgtatt

SEQ ID NO: 220380 - DNA, 25 bp, Probe sequence
aatttaatgtctgtaattaatcaat

SEQ ID NO: 220381 - DNA, 25 bp, Probe sequence
caaaagaatttaatgtctgtaatta

SEQ ID NO: 220382 - DNA, 25 bp, Probe sequence
gaatttaatgtctgtaattaatcaa

SEQ ID NO: 220383 - DNA, 25 bp, Probe sequence
gaagatatgaaagaactttattctt

SEQ ID NO: 220384 - DNA, 25 bp, Probe sequence
gaactagaaaatttttcttacactg

SEQ ID NO: 220385 - DNA, 25 bp, Probe sequence
gatatgaaagaactttattctttaa

SEQ ID NO: 220386 - DNA, 25 bp, Probe sequence
gtatttagctaataaccgcagaaaa

SEQ ID NO: 220387 - DNA, 25 bp, Probe sequence
gtctgtaattaatcaatgtattgaa

SEQ ID NO: 220388 - DNA, 25 bp, Probe sequence
ggaagatatgaaagaactttattct

SEQ ID NO: 220389 - DNA, 25 bp, Probe sequence
tgtctgtaattaatcaatgtattga

SEQ ID NO: 220390 - DNA, 25 bp, Probe sequence
tctacctaattgatagagaacaaaa

SEQ ID NO: 220391 - DNA, 25 bp, Probe sequence
taatgtctgtaattaatcaatgtat

SEQ ID NO: 220392 - DNA, 25 bp, Probe sequence
taaaaaagttctctacctaattgat

SEQ ID NO: 220393 - DNA, 25 bp, Probe sequence
tagaaaatttttcttacactgaaat

SEQ ID NO: 220394 - DNA, 25 bp, Probe sequence
tatttagctaataaccgcagaaaaa

SEQ ID NO: 220395 - DNA, 25 bp, Probe sequence
tttagctaataaccgcagaaaaaca

SEQ ID NO: 220396 - DNA, 25 bp, Probe sequence
attatttggtatatctttttcatcc

SEQ ID NO: 220397 - DNA, 25 bp, Probe sequence
atagtaaagttccttggatttcaat

SEQ ID NO: 220398 - DNA, 25 bp, Probe sequence
aggcatatacttatctttgaatcaa

SEQ ID NO: 220399 - DNA, 25 bp, Probe sequence
aggatattctcatggatcaataaga

SEQ ID NO: 220400 - DNA, 25 bp, Probe sequence
aggtgtatcaaagactactaaaaat

SEQ ID NO: 220401 - DNA, 25 bp, Probe sequence
agttccttggatttcaatatatgat

SEQ ID NO: 220402 - DNA, 25 bp, Probe sequence
agaactatttaatgaattagcttca

SEQ ID NO: 220403 - DNA, 25 bp, Probe sequence
acttatctttgaatcaaggatggtc

SEQ ID NO: 220404 - DNA, 25 bp, Probe sequence
aaagtatttaatgtagaagctattc

SEQ ID NO: 220405 - DNA, 25 bp, Probe sequence
aatactggaagattttattacgcag

SEQ ID NO: 220406 - DNA, 25 bp, Probe sequence
aatattcagttgtagggaaggttgc

SEQ ID NO: 220407 - DNA, 25 bp, Probe sequence
cacggtcatggctatgatttagtag

SEQ ID NO: 220408 - DNA, 25 bp, Probe sequence
catcaggatattctcatggatcaat

SEQ ID NO: 220409 - DNA, 25 bp, Probe sequence
gcattaactttatcttccgaactca

SEQ ID NO: 220410 - DNA, 25 bp, Probe sequence
gaaccacaattttattttatagatc

SEQ ID NO: 220411 - DNA, 25 bp, Probe sequence
gagcattaactttatcttccgaact

SEQ ID NO: 220412 - DNA, 25 bp, Probe sequence
gagaaacgtaccaataatgtagtta

SEQ ID NO: 220413 - DNA, 25 bp, Probe sequence
gataagttacccaagcagttaaaag

SEQ ID NO: 220414 - DNA, 25 bp, Probe sequence
gatttagtagcttttgatccaacaa

SEQ ID NO: 220415 - DNA, 25 bp, Probe sequence
gtttccgcgggataaaaatgctgca

SEQ ID NO: 220416 - DNA, 25 bp, Probe sequence
gtagcttttgatccaacaaatacag

SEQ ID NO: 220417 - DNA, 25 bp, Probe sequence
gtccatgataagttacccaagcagt

SEQ ID NO: 220418 - DNA, 25 bp, Probe sequence
gggaaggttgctactgggaactata

SEQ ID NO: 220419 - DNA, 25 bp, Probe sequence
ggttgctactgggaactatagtaaa

SEQ ID NO: 220420 - DNA, 25 bp, Probe sequence
ggagaaggcatatacttatctttga

SEQ ID NO: 220421 - DNA, 25 bp, Probe sequence
ggaaccattttttatgtcgctaaat

SEQ ID NO: 220422 - DNA, 25 bp, Probe sequence
tgaggaaccattttttatgtcgcta

SEQ ID NO: 220423 - DNA, 25 bp, Probe sequence
tgaattagcttcaaaagttacaaaa

SEQ ID NO: 220424 - DNA, 25 bp, Probe sequence
tccgcgggataaaaatgctgcaaaa

SEQ ID NO: 220425 - DNA, 25 bp, Probe sequence
tctcaacacggtcatggctatgatt

SEQ ID NO: 220426 - DNA, 25 bp, Probe sequence
tatgtcgctaaatgaaatgtttgct

SEQ ID NO: 220427 - DNA, 25 bp, Probe sequence
tatcttccgaactcaataaatatat

SEQ ID NO: 220428 - DNA, 25 bp, Probe sequence
tttagtccatgataagttacccaag

SEQ ID NO: 220429 - DNA, 25 bp, Probe sequence
ttaactttatcttccgaactcaata

SEQ ID NO: 220430 - DNA, 25 bp, Probe sequence
ataccgaagaagacttttctgactt

SEQ ID NO: 220431 - DNA, 25 bp, Probe sequence
atccgttcgacaataccgaagaaga

SEQ ID NO: 220432 - DNA, 25 bp, Probe sequence
agacgggcgattacaaacacgcagt

SEQ ID NO: 220433 - DNA, 25 bp, Probe sequence
accaacaacacaacggacaaactca

SEQ ID NO: 220434 - DNA, 25 bp, Probe sequence
acaacacaacggacaaactcaaact

SEQ ID NO: 220435 - DNA, 25 bp, Probe sequence
aaacagaataaccaacaacacaacg

SEQ ID NO: 220436 - DNA, 25 bp, Probe sequence
aaacacgcagttacgataacaaaga

SEQ ID NO: 220437 - DNA, 25 bp, Probe sequence
aactggtaataatccgttcgacaat

SEQ ID NO: 220438 - DNA, 25 bp, Probe sequence
aacatttacaaatgctcaaggcgag

SEQ ID NO: 220439 - DNA, 25 bp, Probe sequence
aagaagggcgacgtgtatttgtgac

SEQ ID NO: 220440 - DNA, 25 bp, Probe sequence
aagggcgacgtgtatttgtgacaga

SEQ ID NO: 220441 - DNA, 25 bp, Probe sequence
aataatccgttcgacaataccgaag

SEQ ID NO: 220442 - DNA, 25 bp, Probe sequence
caacacaacggacaaactcaaactg

SEQ ID NO: 220443 - DNA, 25 bp, Probe sequence
caacaaacagaataaccaacaacac

SEQ ID NO: 220444 - DNA, 25 bp, Probe sequence
ctggtaataatccgttcgacaatac

SEQ ID NO: 220445 - DNA, 25 bp, Probe sequence
cgacaataccgaagaagacttttct

SEQ ID NO: 220446 - DNA, 25 bp, Probe sequence
gcgattacaaacacgcagttacgat

SEQ ID NO: 220447 - DNA, 25 bp, Probe sequence
gcaggtgtagacgggcgattacaaa

SEQ ID NO: 220448 - DNA, 25 bp, Probe sequence
gaagaagacttttctgacttaccgt

SEQ ID NO: 220449 - DNA, 25 bp, Probe sequence
gaataaccaacaacacaacggacaa

SEQ ID NO: 220450 - DNA, 25 bp, Probe sequence
gaagacttttctgacttaccgttct

SEQ ID NO: 220451 - DNA, 25 bp, Probe sequence
gaagggcgacgtgtatttgtgacag

SEQ ID NO: 220452 - DNA, 25 bp, Probe sequence
gacgggcgattacaaacacgcagtt

SEQ ID NO: 220453 - DNA, 25 bp, Probe sequence
gattacaaacacgcagttacgataa

SEQ ID NO: 220454 - DNA, 25 bp, Probe sequence
gttacgataacaaagaagggcgacg

SEQ ID NO: 220455 - DNA, 25 bp, Probe sequence
gtagacgggcgattacaaacacgca

SEQ ID NO: 220456 - DNA, 25 bp, Probe sequence
gtaataatccgttcgacaataccga

SEQ ID NO: 220457 - DNA, 25 bp, Probe sequence
gggcgattacaaacacgcagttacg

SEQ ID NO: 220458 - DNA, 25 bp, Probe sequence
gggcgacgtgtatttgtgacagaag

SEQ ID NO: 220459 - DNA, 25 bp, Probe sequence
ggtgtagacgggcgattacaaacac

SEQ ID NO: 220460 - DNA, 25 bp, Probe sequence
ggcaggtgtagacgggcgattacaa

SEQ ID NO: 220461 - DNA, 25 bp, Probe sequence
taatccgttcgacaataccgaagaa

SEQ ID NO: 220462 - DNA, 25 bp, Probe sequence
taaccaacaacacaacggacaaact

SEQ ID NO: 220463 - DNA, 25 bp, Probe sequence
tacaaacacgcagttacgataacaa

SEQ ID NO: 220464 - DNA, 25 bp, Probe sequence
atatgcggaaagcctcacgctgacc

SEQ ID NO: 220465 - DNA, 25 bp, Probe sequence
ataccacttagctacaaaacgagta

SEQ ID NO: 220466 - DNA, 25 bp, Probe sequence
atacaggtcaaccaatggactatat

SEQ ID NO: 220467 - DNA, 25 bp, Probe sequence
atgacataccacttagctacaaaac

SEQ ID NO: 220468 - DNA, 25 bp, Probe sequence
agctacaaaacgagtaatctactga

SEQ ID NO: 220469 - DNA, 25 bp, Probe sequence
acgcttgactggacgttctacaatg

SEQ ID NO: 220470 - DNA, 25 bp, Probe sequence
actggtcaactgttaaccgcaactg

SEQ ID NO: 220471 - DNA, 25 bp, Probe sequence
aacatgcgattggcgttaagtcgtt

SEQ ID NO: 220472 - DNA, 25 bp, Probe sequence
aactgtgtaatatgcggaaagcctc

SEQ ID NO: 220473 - DNA, 25 bp, Probe sequence
aacgagtaatctactgaaacaagat

SEQ ID NO: 220474 - DNA, 25 bp, Probe sequence
aagaaacattactacttgataacgg

SEQ ID NO: 220475 - DNA, 25 bp, Probe sequence
catagaagaacatacaggtcaacca

SEQ ID NO: 220476 - DNA, 25 bp, Probe sequence
cttatactggtcaactgttaaccgc

SEQ ID NO: 220477 - DNA, 25 bp, Probe sequence
gcaacgcttgactggacgttctaca

SEQ ID NO: 220478 - DNA, 25 bp, Probe sequence
gcttgactggacgttctacaatgac

SEQ ID NO: 220479 - DNA, 25 bp, Probe sequence
gaagcaacgcttgactggacgttct

SEQ ID NO: 220480 - DNA, 25 bp, Probe sequence
gaacatacaggtcaaccaatggact

SEQ ID NO: 220481 - DNA, 25 bp, Probe sequence
gacaaacatgtattagcgttatgtc

SEQ ID NO: 220482 - DNA, 25 bp, Probe sequence
gacataccacttagctacaaaacga

SEQ ID NO: 220483 - DNA, 25 bp, Probe sequence
gactggacgttctacaatgacatac

SEQ ID NO: 220484 - DNA, 25 bp, Probe sequence
gagcaacatgcgattggcgttaagt

SEQ ID NO: 220485 - DNA, 25 bp, Probe sequence
gagaacacaagcaagtcaaatcatt

SEQ ID NO: 220486 - DNA, 25 bp, Probe sequence
gagacatatgttcatcgagtttgta

SEQ ID NO: 220487 - DNA, 25 bp, Probe sequence
gttctacaatgacataccacttagc

SEQ ID NO: 220488 - DNA, 25 bp, Probe sequence
gtattagcgttatgtcgcgaacatc

SEQ ID NO: 220489 - DNA, 25 bp, Probe sequence
gtacgagaacacaagcaagtcaaat

SEQ ID NO: 220490 - DNA, 25 bp, Probe sequence
gtcaaccaatggactatatgagaca

SEQ ID NO: 220491 - DNA, 25 bp, Probe sequence
gtcaactgttaaccgcaactgtgta

SEQ ID NO: 220492 - DNA, 25 bp, Probe sequence
gtcaaatcattgaagcaacgcttga

SEQ ID NO: 220493 - DNA, 25 bp, Probe sequence
ggacgttctacaatgacataccact

SEQ ID NO: 220494 - DNA, 25 bp, Probe sequence
tgcgattggcgttaagtcgtttgat

SEQ ID NO: 220495 - DNA, 25 bp, Probe sequence
tcatcgagtttgtaagaacgtacta

SEQ ID NO: 220496 - DNA, 25 bp, Probe sequence
tacaatgacataccacttagctaca

SEQ ID NO: 220497 - DNA, 25 bp, Probe sequence
tagcgttatgtcgcgaacatcacaa

SEQ ID NO: 220498 - DNA, 25 bp, Probe sequence
attttaattgcaccatctgaatcag

SEQ ID NO: 220499 - DNA, 25 bp, Probe sequence
atttaacctcaatatacctagtgga

SEQ ID NO: 220500 - DNA, 25 bp, Probe sequence
atatacctagtggaaattttaattg

SEQ ID NO: 220501 - DNA, 25 bp, Probe sequence
atgttcgtttgctaccattttattt

SEQ ID NO: 220502 - DNA, 25 bp, Probe sequence
atggtagcaaaacatgttcgtttgc

SEQ ID NO: 220503 - DNA, 25 bp, Probe sequence
agggctatttaacctcaatatacct

SEQ ID NO: 220504 - DNA, 25 bp, Probe sequence
acctcaatatacctagtggaaattt

SEQ ID NO: 220505 - DNA, 25 bp, Probe sequence
acatgttcgtttgctaccattttat

SEQ ID NO: 220506 - DNA, 25 bp, Probe sequence
aaattttaattgcaccatctgaatc

SEQ ID NO: 220507 - DNA, 25 bp, Probe sequence
aaacatgttcgtttgctaccatttt

SEQ ID NO: 220508 - DNA, 25 bp, Probe sequence
aaaacatgttcgtttgctaccattt

SEQ ID NO: 220509 - DNA, 25 bp, Probe sequence
aacatgttcgtttgctaccatttta

SEQ ID NO: 220510 - DNA, 25 bp, Probe sequence
aacctcaatatacctagtggaaatt

SEQ ID NO: 220511 - DNA, 25 bp, Probe sequence
aattttaattgcaccatctgaatca

SEQ ID NO: 220512 - DNA, 25 bp, Probe sequence
aattgcaccatctgaatcagtgaca

SEQ ID NO: 220513 - DNA, 25 bp, Probe sequence
caaaacatgttcgtttgctaccatt

SEQ ID NO: 220514 - DNA, 25 bp, Probe sequence
catgttcgtttgctaccattttatt

SEQ ID NO: 220515 - DNA, 25 bp, Probe sequence
ctatttaacctcaatatacctagtg

SEQ ID NO: 220516 - DNA, 25 bp, Probe sequence
gctatttaacctcaatatacctagt

SEQ ID NO: 220517 - DNA, 25 bp, Probe sequence
gcaaaacatgttcgtttgctaccat

SEQ ID NO: 220518 - DNA, 25 bp, Probe sequence
gaaattttaattgcaccatctgaat

SEQ ID NO: 220519 - DNA, 25 bp, Probe sequence
gatgagggctatttaacctcaatat

SEQ ID NO: 220520 - DNA, 25 bp, Probe sequence
gtatagtgatgagggctatttaacc

SEQ ID NO: 220521 - DNA, 25 bp, Probe sequence
gtgatgagggctatttaacctcaat

SEQ ID NO: 220522 - DNA, 25 bp, Probe sequence
gggctatttaacctcaatataccta

SEQ ID NO: 220523 - DNA, 25 bp, Probe sequence
ggaaattttaattgcaccatctgaa

SEQ ID NO: 220524 - DNA, 25 bp, Probe sequence
ggctatttaacctcaatatacctag

SEQ ID NO: 220525 - DNA, 25 bp, Probe sequence
taattgcaccatctgaatcagtgac

SEQ ID NO: 220526 - DNA, 25 bp, Probe sequence
taacctcaatatacctagtggaaat

SEQ ID NO: 220527 - DNA, 25 bp, Probe sequence
tttaattgcaccatctgaatcagtg

SEQ ID NO: 220528 - DNA, 25 bp, Probe sequence
tttaacctcaatatacctagtggaa

SEQ ID NO: 220529 - DNA, 25 bp, Probe sequence
ttttaattgcaccatctgaatcagt

SEQ ID NO: 220530 - DNA, 25 bp, Probe sequence
ttaacctcaatatacctagtggaaa

SEQ ID NO: 220531 - DNA, 25 bp, Probe sequence
ttaattgcaccatctgaatcagtga

SEQ ID NO: 220532 - DNA, 25 bp, Probe sequence
attgaagagattattttcggttctg

SEQ ID NO: 220533 - DNA, 25 bp, Probe sequence
attgtctatgatgaactgaaatctt

SEQ ID NO: 220534 - DNA, 25 bp, Probe sequence
attgagtcacaggattcatataaaa

SEQ ID NO: 220535 - DNA, 25 bp, Probe sequence
atctatggtagtgaaatcaaacggg

SEQ ID NO: 220536 - DNA, 25 bp, Probe sequence
atcaaacgggagaaattagagaatt

SEQ ID NO: 220537 - DNA, 25 bp, Probe sequence
atcattgagtcacaggattcatata

SEQ ID NO: 220538 - DNA, 25 bp, Probe sequence
atgataatataatctatggtagtga

SEQ ID NO: 220539 - DNA, 25 bp, Probe sequence
atggtagtgaaatcaaacgggagaa

SEQ ID NO: 220540 - DNA, 25 bp, Probe sequence
agagattattttcggttctgttgca

SEQ ID NO: 220541 - DNA, 25 bp, Probe sequence
acaatcattgagtcacaggattcat

SEQ ID NO: 220542 - DNA, 25 bp, Probe sequence
aacattgtctatgatgaactgaaat

SEQ ID NO: 220543 - DNA, 25 bp, Probe sequence
aagaacattgtctatgatgaactga

SEQ ID NO: 220544 - DNA, 25 bp, Probe sequence
aagagattattttcggttctgttgc

SEQ ID NO: 220545 - DNA, 25 bp, Probe sequence
aatttgtcattattcattgactata

SEQ ID NO: 220546 - DNA, 25 bp, Probe sequence
caatcattgagtcacaggattcata

SEQ ID NO: 220547 - DNA, 25 bp, Probe sequence
gaatttatttaatcaatttgctata

SEQ ID NO: 220548 - DNA, 25 bp, Probe sequence
gaagagattattttcggttctgttg

SEQ ID NO: 220549 - DNA, 25 bp, Probe sequence
gaacattgtctatgatgaactgaaa

SEQ ID NO: 220550 - DNA, 25 bp, Probe sequence
gaaaagaacattgtctatgatgaac

SEQ ID NO: 220551 - DNA, 25 bp, Probe sequence
gaaatctttagatattacaatcatt

SEQ ID NO: 220552 - DNA, 25 bp, Probe sequence
gagaatttatttaatcaatttgcta

SEQ ID NO: 220553 - DNA, 25 bp, Probe sequence
gagattattttcggttctgttgcaa

SEQ ID NO: 220554 - DNA, 25 bp, Probe sequence
gagtcacaggattcatataaaaata

SEQ ID NO: 220555 - DNA, 25 bp, Probe sequence
gagtgataatttgtcattattcatt

SEQ ID NO: 220556 - DNA, 25 bp, Probe sequence
gataatttgtcattattcattgact

SEQ ID NO: 220557 - DNA, 25 bp, Probe sequence
gatattacaatcattgagtcacagg

SEQ ID NO: 220558 - DNA, 25 bp, Probe sequence
gtagtgaaatcaaacgggagaaatt

SEQ ID NO: 220559 - DNA, 25 bp, Probe sequence
gtcattattcattgactatatcaat

SEQ ID NO: 220560 - DNA, 25 bp, Probe sequence
gtctatgatgaactgaaatctttag

SEQ ID NO: 220561 - DNA, 25 bp, Probe sequence
tgatgaactgaaatctttagatatt

SEQ ID NO: 220562 - DNA, 25 bp, Probe sequence
tgaagagattattttcggttctgtt

SEQ ID NO: 220563 - DNA, 25 bp, Probe sequence
tcattgagtcacaggattcatataa

SEQ ID NO: 220564 - DNA, 25 bp, Probe sequence
ttacaatcattgagtcacaggattc

SEQ ID NO: 220565 - DNA, 25 bp, Probe sequence
ttgtcattattcattgactatatca

SEQ ID NO: 220566 - DNA, 25 bp, Probe sequence
atgaacccgccatacggtcgaagta

SEQ ID NO: 220567 - DNA, 25 bp, Probe sequence
attcctacgcggtcgtctgaagttt

SEQ ID NO: 220568 - DNA, 25 bp, Probe sequence
atacccgcaagaacagacacgacat

SEQ ID NO: 220569 - DNA, 25 bp, Probe sequence
ctacgcggtcgtctgaagtttggag

SEQ ID NO: 220570 - DNA, 25 bp, Probe sequence
acagacgagaacgccaaatgccgga

SEQ ID NO: 220571 - DNA, 25 bp, Probe sequence
agaacagacacgacatattggcatg

SEQ ID NO: 220572 - DNA, 25 bp, Probe sequence
aaaacagcgctccttttcctagcgc

SEQ ID NO: 220573 - DNA, 25 bp, Probe sequence
aacgagtggacaacaccacaacatt

SEQ ID NO: 220574 - DNA, 25 bp, Probe sequence
aagactggtctgaggacattgtttt

SEQ ID NO: 220575 - DNA, 25 bp, Probe sequence
aatgggttaattcaagactggtctg

SEQ ID NO: 220576 - DNA, 25 bp, Probe sequence
aattatcgtttatagaggtgcacaa

SEQ ID NO: 220577 - DNA, 25 bp, Probe sequence
gcgttgggtcaagaaggcttacgaa

SEQ ID NO: 220578 - DNA, 25 bp, Probe sequence
ctccttttcctagcgcaattatcgt

SEQ ID NO: 220579 - DNA, 25 bp, Probe sequence
ccacaacatttatttgatgacctaa

SEQ ID NO: 220580 - DNA, 25 bp, Probe sequence
gccaaatgccggaagtattatacag

SEQ ID NO: 220581 - DNA, 25 bp, Probe sequence
gcggtcgtctgaagtttggagatag

SEQ ID NO: 220582 - DNA, 25 bp, Probe sequence
gaattcagttttacattagatcctt

SEQ ID NO: 220583 - DNA, 25 bp, Probe sequence
gaaagtttgaaaggcgcaacggtag

SEQ ID NO: 220584 - DNA, 25 bp, Probe sequence
gacacgacatattggcatgattaca

SEQ ID NO: 220585 - DNA, 25 bp, Probe sequence
gacatattggcatgattacattttt

SEQ ID NO: 220586 - DNA, 25 bp, Probe sequence
gagaacgccaaatgccggaagtatt

SEQ ID NO: 220587 - DNA, 25 bp, Probe sequence
gatgacctaagcgaagaattcagtt

SEQ ID NO: 220588 - DNA, 25 bp, Probe sequence
gatataagattcctacgcggtcgtc

SEQ ID NO: 220589 - DNA, 25 bp, Probe sequence
gattacatttttaataaggctgatg

SEQ ID NO: 220590 - DNA, 25 bp, Probe sequence
gttttacattagatccttgttcaac

SEQ ID NO: 220591 - DNA, 25 bp, Probe sequence
gtttgtttaatacccgcaagaacag

SEQ ID NO: 220592 - DNA, 25 bp, Probe sequence
ggtcgaagtattaagcgttgggtca

SEQ ID NO: 220593 - DNA, 25 bp, Probe sequence
ggacattgtttttatgaacccgcca

SEQ ID NO: 220594 - DNA, 25 bp, Probe sequence
ggctgatgatataagattcctacgc

SEQ ID NO: 220595 - DNA, 25 bp, Probe sequence
tgtttttatgaacccgccatacggt

SEQ ID NO: 220596 - DNA, 25 bp, Probe sequence
tgaaaggcgcaacggtagtttgttt

SEQ ID NO: 220597 - DNA, 25 bp, Probe sequence
tagtaaaaacagcgctccttttcct

SEQ ID NO: 220598 - DNA, 25 bp, Probe sequence
tttcctagcgcaattatcgtttata

SEQ ID NO: 220599 - DNA, 25 bp, Probe sequence
ttagatccttgttcaacagacgaga

SEQ ID NO: 220600 - DNA, 25 bp, Probe sequence
atgaacacaaacatgctaacaacaa

SEQ ID NO: 220601 - DNA, 25 bp, Probe sequence
atgataccgatgatggtcgtttttt

SEQ ID NO: 220602 - DNA, 25 bp, Probe sequence
acatgataccgatgatggtcgtttt

SEQ ID NO: 220603 - DNA, 25 bp, Probe sequence
acatgctaacaacaaattgctaaaa

SEQ ID NO: 220604 - DNA, 25 bp, Probe sequence
acacaaacatgctaacaacaaattg

SEQ ID NO: 220605 - DNA, 25 bp, Probe sequence
acaaacatgctaacaacaaattgct

SEQ ID NO: 220606 - DNA, 25 bp, Probe sequence
acaacaaattgctaaaacatagttt

SEQ ID NO: 220607 - DNA, 25 bp, Probe sequence
aaacatgctaacaacaaattgctaa

SEQ ID NO: 220608 - DNA, 25 bp, Probe sequence
aacacaaacatgctaacaacaaatt

SEQ ID NO: 220609 - DNA, 25 bp, Probe sequence
aacatgctaacaacaaattgctaaa

SEQ ID NO: 220610 - DNA, 25 bp, Probe sequence
aatgaacacaaacatgctaacaaca

SEQ ID NO: 220611 - DNA, 25 bp, Probe sequence
caaacatgctaacaacaaattgcta

SEQ ID NO: 220612 - DNA, 25 bp, Probe sequence
caaattgctaaaacatagtttgatt

SEQ ID NO: 220613 - DNA, 25 bp, Probe sequence
cacaaacatgctaacaacaaattgc

SEQ ID NO: 220614 - DNA, 25 bp, Probe sequence
catgataccgatgatggtcgttttt

SEQ ID NO: 220615 - DNA, 25 bp, Probe sequence
catgctaacaacaaattgctaaaac

SEQ ID NO: 220616 - DNA, 25 bp, Probe sequence
cttttgtaacgaccatacatgatac

SEQ ID NO: 220617 - DNA, 25 bp, Probe sequence
gaacacaaacatgctaacaacaaat

SEQ ID NO: 220618 - DNA, 25 bp, Probe sequence
gataccgatgatggtcgttttttta

SEQ ID NO: 220619 - DNA, 25 bp, Probe sequence
gtttttttaatgaacacaaacatgc

SEQ ID NO: 220620 - DNA, 25 bp, Probe sequence
tgataccgatgatggtcgttttttt

SEQ ID NO: 220621 - DNA, 25 bp, Probe sequence
tgtaacgaccatacatgataccgat

SEQ ID NO: 220622 - DNA, 25 bp, Probe sequence
tgaacacaaacatgctaacaacaaa

SEQ ID NO: 220623 - DNA, 25 bp, Probe sequence
tcgtttttttaatgaacacaaacat

SEQ ID NO: 220624 - DNA, 25 bp, Probe sequence
tacatgataccgatgatggtcgttt

SEQ ID NO: 220625 - DNA, 25 bp, Probe sequence
taatgaacacaaacatgctaacaac

SEQ ID NO: 220626 - DNA, 25 bp, Probe sequence
tttgtaacgaccatacatgataccg

SEQ ID NO: 220627 - DNA, 25 bp, Probe sequence
tttaatgaacacaaacatgctaaca

SEQ ID NO: 220628 - DNA, 25 bp, Probe sequence
ttttttaatgaacacaaacatgcta

SEQ ID NO: 220629 - DNA, 25 bp, Probe sequence
tttttttaatgaacacaaacatgct

SEQ ID NO: 220630 - DNA, 25 bp, Probe sequence
ttttaatgaacacaaacatgctaac

SEQ ID NO: 220631 - DNA, 25 bp, Probe sequence
ttttgtaacgaccatacatgatacc

SEQ ID NO: 220632 - DNA, 25 bp, Probe sequence
ttaatgaacacaaacatgctaacaa

SEQ ID NO: 220633 - DNA, 25 bp, Probe sequence
ttgtaacgaccatacatgataccga

SEQ ID NO: 220634 - DNA, 25 bp, Probe sequence
atgagtatcgtaaagattaacggta

SEQ ID NO: 220635 - DNA, 25 bp, Probe sequence
atggtatgcgcttagctgagtataa

SEQ ID NO: 220636 - DNA, 25 bp, Probe sequence
acgtaagaagaagccacatttgttt

SEQ ID NO: 220637 - DNA, 25 bp, Probe sequence
aagagtacgaggtggctgggcgttg

SEQ ID NO: 220638 - DNA, 25 bp, Probe sequence
acatgcaccttatggtatgcgctta

SEQ ID NO: 220639 - DNA, 25 bp, Probe sequence
aaatggctaggcaacgacgtaaaga

SEQ ID NO: 220640 - DNA, 25 bp, Probe sequence
aaagaggctgaactacgtaagaaga

SEQ ID NO: 220641 - DNA, 25 bp, Probe sequence
aaaccatataaatttaccgaacatg

SEQ ID NO: 220642 - DNA, 25 bp, Probe sequence
aagccttacatgcaccttatggtat

SEQ ID NO: 220643 - DNA, 25 bp, Probe sequence
aagaagaagccacatttgtttaatg

SEQ ID NO: 220644 - DNA, 25 bp, Probe sequence
caccttatggtatgcgcttagctga

SEQ ID NO: 220645 - DNA, 25 bp, Probe sequence
cgaggtggctgggcgttgttagaag

SEQ ID NO: 220646 - DNA, 25 bp, Probe sequence
ccttatggtatgcgcttagctgagt

SEQ ID NO: 220647 - DNA, 25 bp, Probe sequence
gccttacatgcaccttatggtatgc

SEQ ID NO: 220648 - DNA, 25 bp, Probe sequence
gcgttgttagaagccttacatgcac

SEQ ID NO: 220649 - DNA, 25 bp, Probe sequence
gctgggcgttgttagaagccttaca

SEQ ID NO: 220650 - DNA, 25 bp, Probe sequence
gtacgaggtggctgggcgttgttag

SEQ ID NO: 220651 - DNA, 25 bp, Probe sequence
gaagccttacatgcaccttatggta

SEQ ID NO: 220652 - DNA, 25 bp, Probe sequence
gaactacgtaagaagaagccacatt

SEQ ID NO: 220653 - DNA, 25 bp, Probe sequence
gagcgtgaaatggctaggcaacgac

SEQ ID NO: 220654 - DNA, 25 bp, Probe sequence
gagtacgaggtggctgggcgttgtt

SEQ ID NO: 220655 - DNA, 25 bp, Probe sequence
gttgttagaagccttacatgcacct

SEQ ID NO: 220656 - DNA, 25 bp, Probe sequence
gttagaagccttacatgcaccttat

SEQ ID NO: 220657 - DNA, 25 bp, Probe sequence
gtgaaatggctaggcaacgacgtaa

SEQ ID NO: 220658 - DNA, 25 bp, Probe sequence
gtgttatccaaaatcatggagcgag

SEQ ID NO: 220659 - DNA, 25 bp, Probe sequence
gtggctgggcgttgttagaagcctt

SEQ ID NO: 220660 - DNA, 25 bp, Probe sequence
gggcgttgttagaagccttacatgc

SEQ ID NO: 220661 - DNA, 25 bp, Probe sequence
ggagcgagagagcaaagagcgtgaa

SEQ ID NO: 220662 - DNA, 25 bp, Probe sequence
ggcaacgacgtaaagaggctgaact

SEQ ID NO: 220663 - DNA, 25 bp, Probe sequence
ggaatggttgcaaaaagagtacgag

SEQ ID NO: 220664 - DNA, 25 bp, Probe sequence
tgcaccttatggtatgcgcttagct

SEQ ID NO: 220665 - DNA, 25 bp, Probe sequence
tagaagccttacatgcaccttatgg

SEQ ID NO: 220666 - DNA, 25 bp, Probe sequence
tatgcgcttagctgagtataaagaa

SEQ ID NO: 220667 - DNA, 25 bp, Probe sequence
ttacatgcaccttatggtatgcgct

SEQ ID NO: 220668 - DNA, 25 bp, Probe sequence
attatttattctgatgtttattttc

SEQ ID NO: 220669 - DNA, 25 bp, Probe sequence
atttattctgatgtttattttcgga

SEQ ID NO: 220670 - DNA, 25 bp, Probe sequence
atatgcgtagtattattatttagta

SEQ ID NO: 220671 - DNA, 25 bp, Probe sequence
ataccacatttgccaattatattat

SEQ ID NO: 220672 - DNA, 25 bp, Probe sequence
atgacacatttgacaaaggttttag

SEQ ID NO: 220673 - DNA, 25 bp, Probe sequence
atgtttattttcggagtaccttctg

SEQ ID NO: 220674 - DNA, 25 bp, Probe sequence
accacatttgccaattatattattt

SEQ ID NO: 220675 - DNA, 25 bp, Probe sequence
acataccacatttgccaattatatt

SEQ ID NO: 220676 - DNA, 25 bp, Probe sequence
acactaactggaatatgcgtagtat

SEQ ID NO: 220677 - DNA, 25 bp, Probe sequence
aaacataccacatttgccaattata

SEQ ID NO: 220678 - DNA, 25 bp, Probe sequence
aaaacataccacatttgccaattat

SEQ ID NO: 220679 - DNA, 25 bp, Probe sequence
aacataccacatttgccaattatat

SEQ ID NO: 220680 - DNA, 25 bp, Probe sequence
cacatttgccaattatattatttat

SEQ ID NO: 220681 - DNA, 25 bp, Probe sequence
gctagaaaacataccacatttgcca

SEQ ID NO: 220682 - DNA, 25 bp, Probe sequence
gaaaacataccacatttgccaatta

SEQ ID NO: 220683 - DNA, 25 bp, Probe sequence
gatgtttattttcggagtaccttct

SEQ ID NO: 220684 - DNA, 25 bp, Probe sequence
gatacactaactggaatatgcgtag

SEQ ID NO: 220685 - DNA, 25 bp, Probe sequence
gtatgcaaatatggtgtttgattgg

SEQ ID NO: 220686 - DNA, 25 bp, Probe sequence
ggagtaccttctgaaatgataaaag

SEQ ID NO: 220687 - DNA, 25 bp, Probe sequence
ggaatttaagatggtatttgctaga

SEQ ID NO: 220688 - DNA, 25 bp, Probe sequence
tgtttattttcggagtaccttctga

SEQ ID NO: 220689 - DNA, 25 bp, Probe sequence
tgatgtttattttcggagtaccttc

SEQ ID NO: 220690 - DNA, 25 bp, Probe sequence
tctgatgtttattttcggagtacct

SEQ ID NO: 220691 - DNA, 25 bp, Probe sequence
tagaaaacataccacatttgccaat

SEQ ID NO: 220692 - DNA, 25 bp, Probe sequence
tagatacactaactggaatatgcgt

SEQ ID NO: 220693 - DNA, 25 bp, Probe sequence
tatggtgtttgattggaatttaaga

SEQ ID NO: 220694 - DNA, 25 bp, Probe sequence
tattttcggagtaccttctgaaatg

SEQ ID NO: 220695 - DNA, 25 bp, Probe sequence
tatttgctagaaaacataccacatt

SEQ ID NO: 220696 - DNA, 25 bp, Probe sequence
tattctgatgtttattttcggagta

SEQ ID NO: 220697 - DNA, 25 bp, Probe sequence
ttttcggagtaccttctgaaatgat

SEQ ID NO: 220698 - DNA, 25 bp, Probe sequence
ttattttcggagtaccttctgaaat

SEQ ID NO: 220699 - DNA, 25 bp, Probe sequence
ttctgatgtttattttcggagtacc

SEQ ID NO: 220700 - DNA, 25 bp, Probe sequence
ttcggagtaccttctgaaatgataa

SEQ ID NO: 220701 - DNA, 25 bp, Probe sequence
ttgacaaaggttttagatacactaa

SEQ ID NO: 220702 - DNA, 25 bp, Probe sequence
atagaagaccatatcagaacatata

SEQ ID NO: 220703 - DNA, 25 bp, Probe sequence
atcagtcgaagaatacgaaacattc

SEQ ID NO: 220704 - DNA, 25 bp, Probe sequence
atctagagagcaattatcagtcgaa

SEQ ID NO: 220705 - DNA, 25 bp, Probe sequence
acagtatagaagaccatatcagaac

SEQ ID NO: 220706 - DNA, 25 bp, Probe sequence
acacaagatccatattcaaaagtat

SEQ ID NO: 220707 - DNA, 25 bp, Probe sequence
aacattctttaacagatttgataat

SEQ ID NO: 220708 - DNA, 25 bp, Probe sequence
aacgtgaattgacacaagatccata

SEQ ID NO: 220709 - DNA, 25 bp, Probe sequence
aagaatttgatttcgaacgtgaatt

SEQ ID NO: 220710 - DNA, 25 bp, Probe sequence
aatacgaaacattctttaacagatt

SEQ ID NO: 220711 - DNA, 25 bp, Probe sequence
aattgacacaagatccatattcaaa

SEQ ID NO: 220712 - DNA, 25 bp, Probe sequence
caagatccatattcaaaagtatact

SEQ ID NO: 220713 - DNA, 25 bp, Probe sequence
cattctttaacagatttgataatca

SEQ ID NO: 220714 - DNA, 25 bp, Probe sequence
ctagagagcaattatcagtcgaaga

SEQ ID NO: 220715 - DNA, 25 bp, Probe sequence
cgtgaattgacacaagatccatatt

SEQ ID NO: 220716 - DNA, 25 bp, Probe sequence
gaattgacacaagatccatattcaa

SEQ ID NO: 220717 - DNA, 25 bp, Probe sequence
gaatttgatttcgaacgtgaattga

SEQ ID NO: 220718 - DNA, 25 bp, Probe sequence
gaatctagagagcaattatcagtcg

SEQ ID NO: 220719 - DNA, 25 bp, Probe sequence
gaagaccatatcagaacatataaga

SEQ ID NO: 220720 - DNA, 25 bp, Probe sequence
gaacgtgaattgacacaagatccat

SEQ ID NO: 220721 - DNA, 25 bp, Probe sequence
gaaacattctttaacagatttgata

SEQ ID NO: 220722 - DNA, 25 bp, Probe sequence
gacacaagatccatattcaaaagta

SEQ ID NO: 220723 - DNA, 25 bp, Probe sequence
gagcaattatcagtcgaagaatacg

SEQ ID NO: 220724 - DNA, 25 bp, Probe sequence
gagagcaattatcagtcgaagaata

SEQ ID NO: 220725 - DNA, 25 bp, Probe sequence
gatccatattcaaaagtatacttat

SEQ ID NO: 220726 - DNA, 25 bp, Probe sequence
gatttcgaacgtgaattgacacaag

SEQ ID NO: 220727 - DNA, 25 bp, Probe sequence
gtatagaagaccatatcagaacata

SEQ ID NO: 220728 - DNA, 25 bp, Probe sequence
gtgaattgacacaagatccatattc

SEQ ID NO: 220729 - DNA, 25 bp, Probe sequence
tcgaacgtgaattgacacaagatcc

SEQ ID NO: 220730 - DNA, 25 bp, Probe sequence
tctagagagcaattatcagtcgaag

SEQ ID NO: 220731 - DNA, 25 bp, Probe sequence
tcaagaatttgatttcgaacgtgaa

SEQ ID NO: 220732 - DNA, 25 bp, Probe sequence
tacgaaacattctttaacagatttg

SEQ ID NO: 220733 - DNA, 25 bp, Probe sequence
tagagagcaattatcagtcgaagaa

SEQ ID NO: 220734 - DNA, 25 bp, Probe sequence
tatacagtatagaagaccatatcag

SEQ ID NO: 220735 - DNA, 25 bp, Probe sequence
tttgatttcgaacgtgaattgacac

SEQ ID NO: 220736 - DNA, 25 bp, Probe sequence
attgaatcaatcacacttattgagg

SEQ ID NO: 220737 - DNA, 25 bp, Probe sequence
atatttacgcaagtactataatcaa

SEQ ID NO: 220738 - DNA, 25 bp, Probe sequence
atgacgagttttaatggttatattt

SEQ ID NO: 220739 - DNA, 25 bp, Probe sequence
atggttatatttacgcaagtactat

SEQ ID NO: 220740 - DNA, 25 bp, Probe sequence
agaatgacgagttttaatggttata

SEQ ID NO: 220741 - DNA, 25 bp, Probe sequence
acgattgaatcaatcacacttattg

SEQ ID NO: 220742 - DNA, 25 bp, Probe sequence
aaatatgttgaaagaatgacgagtt

SEQ ID NO: 220743 - DNA, 25 bp, Probe sequence
aagaatgacgagttttaatggttat

SEQ ID NO: 220744 - DNA, 25 bp, Probe sequence
aatggttatatttacgcaagtacta

SEQ ID NO: 220745 - DNA, 25 bp, Probe sequence
aatgacgagttttaatggttatatt

SEQ ID NO: 220746 - DNA, 25 bp, Probe sequence
cgattgaatcaatcacacttattga

SEQ ID NO: 220747 - DNA, 25 bp, Probe sequence
gctgaaccttttgaaaaatatgttg

SEQ ID NO: 220748 - DNA, 25 bp, Probe sequence
gaatcaatcacacttattgaggagc

SEQ ID NO: 220749 - DNA, 25 bp, Probe sequence
gaatgacgagttttaatggttatat

SEQ ID NO: 220750 - DNA, 25 bp, Probe sequence
gaaagaatgacgagttttaatggtt

SEQ ID NO: 220751 - DNA, 25 bp, Probe sequence
gagttttaatggttatatttacgca

SEQ ID NO: 220752 - DNA, 25 bp, Probe sequence
gatacgattgaatcaatcacactta

SEQ ID NO: 220753 - DNA, 25 bp, Probe sequence
gttgaaagaatgacgagttttaatg

SEQ ID NO: 220754 - DNA, 25 bp, Probe sequence
gttttaatggttatatttacgcaag

SEQ ID NO: 220755 - DNA, 25 bp, Probe sequence
gattgaatcaatcacacttattgag

SEQ ID NO: 220756 - DNA, 25 bp, Probe sequence
ggttatatttacgcaagtactataa

SEQ ID NO: 220757 - DNA, 25 bp, Probe sequence
ttttaatggttatatttacgcaagt

SEQ ID NO: 220758 - DNA, 25 bp, Probe sequence
tggttatatttacgcaagtactata

SEQ ID NO: 220759 - DNA, 25 bp, Probe sequence
tgacgagttttaatggttatattta

SEQ ID NO: 220760 - DNA, 25 bp, Probe sequence
tgaaccttttgaaaaatatgttgaa

SEQ ID NO: 220761 - DNA, 25 bp, Probe sequence
tgaatcaatcacacttattgaggag

SEQ ID NO: 220762 - DNA, 25 bp, Probe sequence
taatggttatatttacgcaagtact

SEQ ID NO: 220763 - DNA, 25 bp, Probe sequence
taaaacagatacgattgaatcaatc

SEQ ID NO: 220764 - DNA, 25 bp, Probe sequence
tatgttgaaagaatgacgagtttta

SEQ ID NO: 220765 - DNA, 25 bp, Probe sequence
tatttacgcaagtactataatcaag

SEQ ID NO: 220766 - DNA, 25 bp, Probe sequence
tatatttacgcaagtactataatca

SEQ ID NO: 220767 - DNA, 25 bp, Probe sequence
tttaatggttatatttacgcaagta

SEQ ID NO: 220768 - DNA, 25 bp, Probe sequence
ttaatggttatatttacgcaagtac

SEQ ID NO: 220769 - DNA, 25 bp, Probe sequence
ttgaatcaatcacacttattgagga

SEQ ID NO: 220770 - DNA, 25 bp, Probe sequence
attacatgacggtagtagtttgata

SEQ ID NO: 220771 - DNA, 25 bp, Probe sequence
attatggcagagaacttgtattgaa

SEQ ID NO: 220772 - DNA, 25 bp, Probe sequence
attttattacatgacggtagtagtt

SEQ ID NO: 220773 - DNA, 25 bp, Probe sequence
atcagctgagaattttattacatga

SEQ ID NO: 220774 - DNA, 25 bp, Probe sequence
atgacggtagtagtttgatattaca

SEQ ID NO: 220775 - DNA, 25 bp, Probe sequence
atggcagagaacttgtattgaacaa

SEQ ID NO: 220776 - DNA, 25 bp, Probe sequence
agattatggcagagaacttgtattg

SEQ ID NO: 220777 - DNA, 25 bp, Probe sequence
agctgagaattttattacatgacgg

SEQ ID NO: 220778 - DNA, 25 bp, Probe sequence
acggtagtagtttgatattacatga

SEQ ID NO: 220779 - DNA, 25 bp, Probe sequence
acatgacggtagtagtttgatatta

SEQ ID NO: 220780 - DNA, 25 bp, Probe sequence
aatcagctgagaattttattacatg

SEQ ID NO: 220781 - DNA, 25 bp, Probe sequence
cagctgagaattttattacatgacg

SEQ ID NO: 220782 - DNA, 25 bp, Probe sequence
ctgagaattttattacatgacggta

SEQ ID NO: 220783 - DNA, 25 bp, Probe sequence
gctgagaattttattacatgacggt

SEQ ID NO: 220784 - DNA, 25 bp, Probe sequence
gaattttattacatgacggtagtag

SEQ ID NO: 220785 - DNA, 25 bp, Probe sequence
gaatcagctgagaattttattacat

SEQ ID NO: 220786 - DNA, 25 bp, Probe sequence
gaaatgatgatgactatttaacgat

SEQ ID NO: 220787 - DNA, 25 bp, Probe sequence
gacggtagtagtttgatattacatg

SEQ ID NO: 220788 - DNA, 25 bp, Probe sequence
gagaattttattacatgacggtagt

SEQ ID NO: 220789 - DNA, 25 bp, Probe sequence
gagaacttgtattgaacaaaggtta

SEQ ID NO: 220790 - DNA, 25 bp, Probe sequence
gatgatgactatttaacgatagaaa

SEQ ID NO: 220791 - DNA, 25 bp, Probe sequence
gattatggcagagaacttgtattga

SEQ ID NO: 220792 - DNA, 25 bp, Probe sequence
ggtagtagtttgatattacatgaag

SEQ ID NO: 220793 - DNA, 25 bp, Probe sequence
ggcagagaacttgtattgaacaaag

SEQ ID NO: 220794 - DNA, 25 bp, Probe sequence
tgaacaaaggttatatagttgggat

SEQ ID NO: 220795 - DNA, 25 bp, Probe sequence
tgaatcagctgagaattttattaca

SEQ ID NO: 220796 - DNA, 25 bp, Probe sequence
tcagctgagaattttattacatgac

SEQ ID NO: 220797 - DNA, 25 bp, Probe sequence
tagtttgatattacatgaagatgaa

SEQ ID NO: 220798 - DNA, 25 bp, Probe sequence
tagtatttgttttggacaattttag

SEQ ID NO: 220799 - DNA, 25 bp, Probe sequence
tatggcagagaacttgtattgaaca

SEQ ID NO: 220800 - DNA, 25 bp, Probe sequence
ttattacatgacggtagtagtttga

SEQ ID NO: 220801 - DNA, 25 bp, Probe sequence
ttatggcagagaacttgtattgaac

SEQ ID NO: 220802 - DNA, 25 bp, Probe sequence
ttacatgacggtagtagtttgatat

SEQ ID NO: 220803 - DNA, 25 bp, Probe sequence
ttgttttggacaattttagaaatga

SEQ ID NO: 220804 - DNA, 25 bp, Probe sequence
attagtctctcgcacatactattcc

SEQ ID NO: 220805 - DNA, 25 bp, Probe sequence
attttcatttttatacgcattctta

SEQ ID NO: 220806 - DNA, 25 bp, Probe sequence
atcttacgattttgtacgtgcatgc

SEQ ID NO: 220807 - DNA, 25 bp, Probe sequence
atgcttatttttttatcttacgatt

SEQ ID NO: 220808 - DNA, 25 bp, Probe sequence
aggcgtcagcacttacaaaatcggt

SEQ ID NO: 220809 - DNA, 25 bp, Probe sequence
gggtatggctcgagccattagtctc

SEQ ID NO: 220810 - DNA, 25 bp, Probe sequence
aaattgcagataagaggtttgttaa

SEQ ID NO: 220811 - DNA, 25 bp, Probe sequence
catttttatacgcattcttactgag

SEQ ID NO: 220812 - DNA, 25 bp, Probe sequence
cttgcctaggggtatggctcgagcc

SEQ ID NO: 220813 - DNA, 25 bp, Probe sequence
cttacgattttgtacgtgcatgctt

SEQ ID NO: 220814 - DNA, 25 bp, Probe sequence
cgattttgtacgtgcatgcttgcct

SEQ ID NO: 220815 - DNA, 25 bp, Probe sequence
cctcaggcgtcagcacttacaaaat

SEQ ID NO: 220816 - DNA, 25 bp, Probe sequence
ccattagtctctcgcacatactatt

SEQ ID NO: 220817 - DNA, 25 bp, Probe sequence
gcctaggggtatggctcgagccatt

SEQ ID NO: 220818 - DNA, 25 bp, Probe sequence
gcgtcagcacttacaaaatcggttg

SEQ ID NO: 220819 - DNA, 25 bp, Probe sequence
gcttgcctaggggtatggctcgagc

SEQ ID NO: 220820 - DNA, 25 bp, Probe sequence
gcattcttactgagattatactaat

SEQ ID NO: 220821 - DNA, 25 bp, Probe sequence
gaggtttgttaaaagcagttctaag

SEQ ID NO: 220822 - DNA, 25 bp, Probe sequence
gattttgtacgtgcatgcttgccta

SEQ ID NO: 220823 - DNA, 25 bp, Probe sequence
gttgtaattttcatttttatacgca

SEQ ID NO: 220824 - DNA, 25 bp, Probe sequence
gtaattttcatttttatacgcattc

SEQ ID NO: 220825 - DNA, 25 bp, Probe sequence
gtcagcacttacaaaatcggttgta

SEQ ID NO: 220826 - DNA, 25 bp, Probe sequence
tgcctaggggtatggctcgagccat

SEQ ID NO: 220827 - DNA, 25 bp, Probe sequence
tgcttatttttttatcttacgattt

SEQ ID NO: 220828 - DNA, 25 bp, Probe sequence
tcaggcgtcagcacttacaaaatcg

SEQ ID NO: 220829 - DNA, 25 bp, Probe sequence
tcgagccattagtctctcgcacata

SEQ ID NO: 220830 - DNA, 25 bp, Probe sequence
tacgtgcatgcttgcctaggggtat

SEQ ID NO: 220831 - DNA, 25 bp, Probe sequence
tacgcattcttactgagattatact

SEQ ID NO: 220832 - DNA, 25 bp, Probe sequence
tatggctcgagccattagtctctcg

SEQ ID NO: 220833 - DNA, 25 bp, Probe sequence
tttgtacgtgcatgcttgcctaggg

SEQ ID NO: 220834 - DNA, 25 bp, Probe sequence
tttatcttacgattttgtacgtgca

SEQ ID NO: 220835 - DNA, 25 bp, Probe sequence
ttttgtacgtgcatgcttgcctagg

SEQ ID NO: 220836 - DNA, 25 bp, Probe sequence
tttttatacgcattcttactgagat

SEQ ID NO: 220837 - DNA, 25 bp, Probe sequence
ttatacgcattcttactgagattat

SEQ ID NO: 220838 - DNA, 25 bp, Probe sequence
attaatttggctagtcgcgaagatg

SEQ ID NO: 220839 - DNA, 25 bp, Probe sequence
atttggctagtcgcgaagatgcatt

SEQ ID NO: 220840 - DNA, 25 bp, Probe sequence
atacaagcaattgaactttattacg

SEQ ID NO: 220841 - DNA, 25 bp, Probe sequence
agtcgcgaagatgcatttttctaaa

SEQ ID NO: 220842 - DNA, 25 bp, Probe sequence
acaagcaattgaactttattacgga

SEQ ID NO: 220843 - DNA, 25 bp, Probe sequence
aaatacaagcaattgaactttatta

SEQ ID NO: 220844 - DNA, 25 bp, Probe sequence
aaaaatacaagcaattgaactttat

SEQ ID NO: 220845 - DNA, 25 bp, Probe sequence
aaaatacaagcaattgaactttatt

SEQ ID NO: 220846 - DNA, 25 bp, Probe sequence
aatttggctagtcgcgaagatgcat

SEQ ID NO: 220847 - DNA, 25 bp, Probe sequence
aatacaagcaattgaactttattac

SEQ ID NO: 220848 - DNA, 25 bp, Probe sequence
caagcaattgaactttattacggaa

SEQ ID NO: 220849 - DNA, 25 bp, Probe sequence
ctattaatttggctagtcgcgaaga

SEQ ID NO: 220850 - DNA, 25 bp, Probe sequence
ctagtcgcgaagatgcatttttcta

SEQ ID NO: 220851 - DNA, 25 bp, Probe sequence
cgcgaagatgcatttttctaaaatg

SEQ ID NO: 220852 - DNA, 25 bp, Probe sequence
gctagtcgcgaagatgcatttttct

SEQ ID NO: 220853 - DNA, 25 bp, Probe sequence
gcaattgaactttattacggaaaat

SEQ ID NO: 220854 - DNA, 25 bp, Probe sequence
gtcgcgaagatgcatttttctaaaa

SEQ ID NO: 220855 - DNA, 25 bp, Probe sequence
ggctagtcgcgaagatgcatttttc

SEQ ID NO: 220856 - DNA, 25 bp, Probe sequence
tggctagtcgcgaagatgcattttt

SEQ ID NO: 220857 - DNA, 25 bp, Probe sequence
tcgcgaagatgcatttttctaaaat

SEQ ID NO: 220858 - DNA, 25 bp, Probe sequence
taatttggctagtcgcgaagatgca

SEQ ID NO: 220859 - DNA, 25 bp, Probe sequence
tacaagcaattgaactttattacgg

SEQ ID NO: 220860 - DNA, 25 bp, Probe sequence
tacggaaaatcaaacttttcaatga

SEQ ID NO: 220861 - DNA, 25 bp, Probe sequence
tagtcgcgaagatgcatttttctaa

SEQ ID NO: 220862 - DNA, 25 bp, Probe sequence
tattaatttggctagtcgcgaagat

SEQ ID NO: 220863 - DNA, 25 bp, Probe sequence
tttggctagtcgcgaagatgcattt

SEQ ID NO: 220864 - DNA, 25 bp, Probe sequence
ttaatttggctagtcgcgaagatgc

SEQ ID NO: 220865 - DNA, 25 bp, Probe sequence
ttacggaaaatcaaacttttcaatg

SEQ ID NO: 220866 - DNA, 25 bp, Probe sequence
ttggctagtcgcgaagatgcatttt

SEQ ID NO: 220867 - DNA, 25 bp, Probe sequence
attcaccgttatgttcaacagaact

SEQ ID NO: 220868 - DNA, 25 bp, Probe sequence
ataatcctaacaacttgtatcactc

SEQ ID NO: 220869 - DNA, 25 bp, Probe sequence
atcactctcatttagatggttacaa

SEQ ID NO: 220870 - DNA, 25 bp, Probe sequence
atcctaacaacttgtatcactctca

SEQ ID NO: 220871 - DNA, 25 bp, Probe sequence
actatcataatcctaacaacttgta

SEQ ID NO: 220872 - DNA, 25 bp, Probe sequence
acaacttgtatcactctcatttaga

SEQ ID NO: 220873 - DNA, 25 bp, Probe sequence
aacaacttgtatcactctcatttag

SEQ ID NO: 220874 - DNA, 25 bp, Probe sequence
aacttgtatcactctcatttagatg

SEQ ID NO: 220875 - DNA, 25 bp, Probe sequence
aatcctaacaacttgtatcactctc

SEQ ID NO: 220876 - DNA, 25 bp, Probe sequence
caacttgtatcactctcatttagat

SEQ ID NO: 220877 - DNA, 25 bp, Probe sequence
ctgggcgactatcataatcctaaca

SEQ ID NO: 220878 - DNA, 25 bp, Probe sequence
cattcaccgttatgttcaacagaac

SEQ ID NO: 220879 - DNA, 25 bp, Probe sequence
cttgtatcactctcatttagatggt

SEQ ID NO: 220880 - DNA, 25 bp, Probe sequence
ctaacaacttgtatcactctcattt

SEQ ID NO: 220881 - DNA, 25 bp, Probe sequence
cgccattcaccgttatgttcaacag

SEQ ID NO: 220882 - DNA, 25 bp, Probe sequence
cctaacaacttgtatcactctcatt

SEQ ID NO: 220883 - DNA, 25 bp, Probe sequence
gccattcaccgttatgttcaacaga

SEQ ID NO: 220884 - DNA, 25 bp, Probe sequence
gcgactatcataatcctaacaactt

SEQ ID NO: 220885 - DNA, 25 bp, Probe sequence
gactatcataatcctaacaacttgt

SEQ ID NO: 220886 - DNA, 25 bp, Probe sequence
gatggttacaatgacatcgccattc

SEQ ID NO: 220887 - DNA, 25 bp, Probe sequence
gttacaatgacatcgccattcaccg

SEQ ID NO: 220888 - DNA, 25 bp, Probe sequence
gtatcactctcatttagatggttac

SEQ ID NO: 220889 - DNA, 25 bp, Probe sequence
gggcgactatcataatcctaacaac

SEQ ID NO: 220890 - DNA, 25 bp, Probe sequence
ggttacaatgacatcgccattcacc

SEQ ID NO: 220891 - DNA, 25 bp, Probe sequence
ggcgactatcataatcctaacaact

SEQ ID NO: 220892 - DNA, 25 bp, Probe sequence
tggttacaatgacatcgccattcac

SEQ ID NO: 220893 - DNA, 25 bp, Probe sequence
tgggcgactatcataatcctaacaa

SEQ ID NO: 220894 - DNA, 25 bp, Probe sequence
tcgccattcaccgttatgttcaaca

SEQ ID NO: 220895 - DNA, 25 bp, Probe sequence
tcaccgttatgttcaacagaactta

SEQ ID NO: 220896 - DNA, 25 bp, Probe sequence
tcactctcatttagatggttacaat

SEQ ID NO: 220897 - DNA, 25 bp, Probe sequence
taacaacttgtatcactctcattta

SEQ ID NO: 220898 - DNA, 25 bp, Probe sequence
tacaatgacatcgccattcaccgtt

SEQ ID NO: 220899 - DNA, 25 bp, Probe sequence
tatcataatcctaacaacttgtatc

SEQ ID NO: 220900 - DNA, 25 bp, Probe sequence
ttacaatgacatcgccattcaccgt

SEQ ID NO: 220901 - DNA, 25 bp, Probe sequence
attcttaatactggttgcgcttgtt

SEQ ID NO: 220902 - DNA, 25 bp, Probe sequence
atattttctcattcttaatactggt

SEQ ID NO: 220903 - DNA, 25 bp, Probe sequence
atactggttgcgcttgtttctaaac

SEQ ID NO: 220904 - DNA, 25 bp, Probe sequence
actggttgcgcttgtttctaaacta

SEQ ID NO: 220905 - DNA, 25 bp, Probe sequence
aacatcttatattttctcattctta

SEQ ID NO: 220906 - DNA, 25 bp, Probe sequence
aacttaatgccggtgatagtaatgt

SEQ ID NO: 220907 - DNA, 25 bp, Probe sequence
aactagacgacaaagaacatcataa

SEQ ID NO: 220908 - DNA, 25 bp, Probe sequence
aatactggttgcgcttgtttctaaa

SEQ ID NO: 220909 - DNA, 25 bp, Probe sequence
catcttatattttctcattcttaat

SEQ ID NO: 220910 - DNA, 25 bp, Probe sequence
cattcttaatactggttgcgcttgt

SEQ ID NO: 220911 - DNA, 25 bp, Probe sequence
cttaatactggttgcgcttgtttct

SEQ ID NO: 220912 - DNA, 25 bp, Probe sequence
ctcattcttaatactggttgcgctt

SEQ ID NO: 220913 - DNA, 25 bp, Probe sequence
ctgagtttcaacttaatgccggtga

SEQ ID NO: 220914 - DNA, 25 bp, Probe sequence
ctggttgcgcttgtttctaaactaa

SEQ ID NO: 220915 - DNA, 25 bp, Probe sequence
cgaggtttaacatcttatattttct

SEQ ID NO: 220916 - DNA, 25 bp, Probe sequence
gagtttcaacttaatgccggtgata

SEQ ID NO: 220917 - DNA, 25 bp, Probe sequence
gatattcgaggtttaacatcttata

SEQ ID NO: 220918 - DNA, 25 bp, Probe sequence
gttgcgcttgtttctaaactaattt

SEQ ID NO: 220919 - DNA, 25 bp, Probe sequence
gtttcaacttaatgccggtgatagt

SEQ ID NO: 220920 - DNA, 25 bp, Probe sequence
gggatattcgaggtttaacatctta

SEQ ID NO: 220921 - DNA, 25 bp, Probe sequence
ggtttaacatcttatattttctcat

SEQ ID NO: 220922 - DNA, 25 bp, Probe sequence
ggttgcgcttgtttctaaactaatt

SEQ ID NO: 220923 - DNA, 25 bp, Probe sequence
tgcgcttgtttctaaactaatttta

SEQ ID NO: 220924 - DNA, 25 bp, Probe sequence
tcttaatactggttgcgcttgtttc

SEQ ID NO: 220925 - DNA, 25 bp, Probe sequence
tcttatattttctcattcttaatac

SEQ ID NO: 220926 - DNA, 25 bp, Probe sequence
taatactggttgcgcttgtttctaa

SEQ ID NO: 220927 - DNA, 25 bp, Probe sequence
taacatcttatattttctcattctt

SEQ ID NO: 220928 - DNA, 25 bp, Probe sequence
tactggttgcgcttgtttctaaact

SEQ ID NO: 220929 - DNA, 25 bp, Probe sequence
ttttaatatttataactagacgaca

SEQ ID NO: 220930 - DNA, 25 bp, Probe sequence
tttaacatcttatattttctcattc

SEQ ID NO: 220931 - DNA, 25 bp, Probe sequence
ttttctcattcttaatactggttgc

SEQ ID NO: 220932 - DNA, 25 bp, Probe sequence
ttaatactggttgcgcttgtttcta

SEQ ID NO: 220933 - DNA, 25 bp, Probe sequence
ttcaacttaatgccggtgatagtaa

SEQ ID NO: 220934 - DNA, 25 bp, Probe sequence
ttctcattcttaatactggttgcgc

SEQ ID NO: 220935 - DNA, 25 bp, Probe sequence
attttttcatcattcaaactccttt

SEQ ID NO: 220936 - DNA, 25 bp, Probe sequence
ataactgctaattttttcatcattc

SEQ ID NO: 220937 - DNA, 25 bp, Probe sequence
atgcgaagtataaaccgccaactaa

SEQ ID NO: 220938 - DNA, 25 bp, Probe sequence
atgttaggtgcttggttaacacgtt

SEQ ID NO: 220939 - DNA, 25 bp, Probe sequence
aggtgcttggttaacacgttcttgg

SEQ ID NO: 220940 - DNA, 25 bp, Probe sequence
actgctaattttttcatcattcaaa

SEQ ID NO: 220941 - DNA, 25 bp, Probe sequence
aaatgcgaagtataaaccgccaact

SEQ ID NO: 220942 - DNA, 25 bp, Probe sequence
aactgctaattttttcatcattcaa

SEQ ID NO: 220943 - DNA, 25 bp, Probe sequence
aatgcgaagtataaaccgccaacta

SEQ ID NO: 220944 - DNA, 25 bp, Probe sequence
aataactgctaattttttcatcatt

SEQ ID NO: 220945 - DNA, 25 bp, Probe sequence
aattttttcatcattcaaactcctt

SEQ ID NO: 220946 - DNA, 25 bp, Probe sequence
ctaattttttcatcattcaaactcc

SEQ ID NO: 220947 - DNA, 25 bp, Probe sequence
ctgctaattttttcatcattcaaac

SEQ ID NO: 220948 - DNA, 25 bp, Probe sequence
cgaagtataaaccgccaactaatgt

SEQ ID NO: 220949 - DNA, 25 bp, Probe sequence
ccgccaactaatgttaaaataactg

SEQ ID NO: 220950 - DNA, 25 bp, Probe sequence
gccaactaatgttaaaataactgct

SEQ ID NO: 220951 - DNA, 25 bp, Probe sequence
gcgaagtataaaccgccaactaatg

SEQ ID NO: 220952 - DNA, 25 bp, Probe sequence
gctaattttttcatcattcaaactc

SEQ ID NO: 220953 - DNA, 25 bp, Probe sequence
gcttggttaacacgttcttggtatt

SEQ ID NO: 220954 - DNA, 25 bp, Probe sequence
gaagtataaaccgccaactaatgtt

SEQ ID NO: 220955 - DNA, 25 bp, Probe sequence
gttaggtgcttggttaacacgttct

SEQ ID NO: 220956 - DNA, 25 bp, Probe sequence
ggtgcttggttaacacgttcttggt

SEQ ID NO: 220957 - DNA, 25 bp, Probe sequence
gtgcttggttaacacgttcttggta

SEQ ID NO: 220958 - DNA, 25 bp, Probe sequence
tgcttggttaacacgttcttggtat

SEQ ID NO: 220959 - DNA, 25 bp, Probe sequence
tgttaggtgcttggttaacacgttc

SEQ ID NO: 220960 - DNA, 25 bp, Probe sequence
taaatgcgaagtataaaccgccaac

SEQ ID NO: 220961 - DNA, 25 bp, Probe sequence
tgctaattttttcatcattcaaact

SEQ ID NO: 220962 - DNA, 25 bp, Probe sequence
tgcgaagtataaaccgccaactaat

SEQ ID NO: 220963 - DNA, 25 bp, Probe sequence
taattttttcatcattcaaactcct

SEQ ID NO: 220964 - DNA, 25 bp, Probe sequence
taactgctaattttttcatcattca

SEQ ID NO: 220965 - DNA, 25 bp, Probe sequence
taggtgcttggttaacacgttcttg

SEQ ID NO: 220966 - DNA, 25 bp, Probe sequence
tttaaatgcgaagtataaaccgcca

SEQ ID NO: 220967 - DNA, 25 bp, Probe sequence
ttttttcatcattcaaactcctttc

SEQ ID NO: 220968 - DNA, 25 bp, Probe sequence
ttaggtgcttggttaacacgttctt

SEQ ID NO: 220969 - DNA, 25 bp, Probe sequence
attctgagtcgctcactgaagtcga

SEQ ID NO: 220970 - DNA, 25 bp, Probe sequence
agtcgctcactgaagtcgagttgta

SEQ ID NO: 220971 - DNA, 25 bp, Probe sequence
agttgtacgttgaaccggacatact

SEQ ID NO: 220972 - DNA, 25 bp, Probe sequence
accggacatactttgtgacattgaa

SEQ ID NO: 220973 - DNA, 25 bp, Probe sequence
acgttgaaccggacatactttgtga

SEQ ID NO: 220974 - DNA, 25 bp, Probe sequence
aaccggacatactttgtgacattga

SEQ ID NO: 220975 - DNA, 25 bp, Probe sequence
cactgaagtcgagttgtacgttgaa

SEQ ID NO: 220976 - DNA, 25 bp, Probe sequence
ctcactgaagtcgagttgtacgttg

SEQ ID NO: 220977 - DNA, 25 bp, Probe sequence
cgagttgtacgttgaaccggacata

SEQ ID NO: 220978 - DNA, 25 bp, Probe sequence
ctgaagtcgagttgtacgttgaacc

SEQ ID NO: 220979 - DNA, 25 bp, Probe sequence
ctgagtcgctcactgaagtcgagtt

SEQ ID NO: 220980 - DNA, 25 bp, Probe sequence
cggacatactttgtgacattgaaac

SEQ ID NO: 220981 - DNA, 25 bp, Probe sequence
gagtcgctcactgaagtcgagttgt

SEQ ID NO: 220982 - DNA, 25 bp, Probe sequence
cgctcactgaagtcgagttgtacgt

SEQ ID NO: 220983 - DNA, 25 bp, Probe sequence
gctcactgaagtcgagttgtacgtt

SEQ ID NO: 220984 - DNA, 25 bp, Probe sequence
tctgagtcgctcactgaagtcgagt

SEQ ID NO: 220985 - DNA, 25 bp, Probe sequence
gaagtcgagttgtacgttgaaccgg

SEQ ID NO: 220986 - DNA, 25 bp, Probe sequence
gaaccggacatactttgtgacattg

SEQ ID NO: 220987 - DNA, 25 bp, Probe sequence
gagttgtacgttgaaccggacatac

SEQ ID NO: 220988 - DNA, 25 bp, Probe sequence
gattctgagtcgctcactgaagtcg

SEQ ID NO: 220989 - DNA, 25 bp, Probe sequence
gttgaaccggacatactttgtgaca

SEQ ID NO: 220990 - DNA, 25 bp, Probe sequence
gttgtacgttgaaccggacatactt

SEQ ID NO: 220991 - DNA, 25 bp, Probe sequence
gtacgttgaaccggacatactttgt

SEQ ID NO: 220992 - DNA, 25 bp, Probe sequence
gtcgagttgtacgttgaaccggaca

SEQ ID NO: 220993 - DNA, 25 bp, Probe sequence
gtcgctcactgaagtcgagttgtac

SEQ ID NO: 220994 - DNA, 25 bp, Probe sequence
tgattctgagtcgctcactgaagtc

SEQ ID NO: 220995 - DNA, 25 bp, Probe sequence
tgagtcgctcactgaagtcgagttg

SEQ ID NO: 220996 - DNA, 25 bp, Probe sequence
tgaaccggacatactttgtgacatt

SEQ ID NO: 220997 - DNA, 25 bp, Probe sequence
tcgagttgtacgttgaaccggacat

SEQ ID NO: 220998 - DNA, 25 bp, Probe sequence
tcgctcactgaagtcgagttgtacg

SEQ ID NO: 220999 - DNA, 25 bp, Probe sequence
tacgttgaaccggacatactttgtg

SEQ ID NO: 221000 - DNA, 25 bp, Probe sequence
ttgtacgttgaaccggacatacttt

SEQ ID NO: 221001 - DNA, 25 bp, Probe sequence
ttgaaccggacatactttgtgacat

SEQ ID NO: 221002 - DNA, 25 bp, Probe sequence
ttctgagtcgctcactgaagtcgag

SEQ ID NO: 221003 - DNA, 25 bp, Probe sequence
attcacttgcgcttgctgagttact

SEQ ID NO: 221004 - DNA, 25 bp, Probe sequence
atgaatcagattcactcacgctttc

SEQ ID NO: 221005 - DNA, 25 bp, Probe sequence
agattcactctctgaaccacttaat

SEQ ID NO: 221006 - DNA, 25 bp, Probe sequence
acttgtactttctgatgttgagcca

SEQ ID NO: 221007 - DNA, 25 bp, Probe sequence
acttgtacttcttgatgtgctttgt

SEQ ID NO: 221008 - DNA, 25 bp, Probe sequence
aacctgattggctcgtacttttaga

SEQ ID NO: 221009 - DNA, 25 bp, Probe sequence
cacttgcacttgttgagatactttg

SEQ ID NO: 221010 - DNA, 25 bp, Probe sequence
cttgctgatcctgagttacttgtac

SEQ ID NO: 221011 - DNA, 25 bp, Probe sequence
cttacactttctgattttcttaatg

SEQ ID NO: 221012 - DNA, 25 bp, Probe sequence
ctcgcacttgttgagtctgatgttg

SEQ ID NO: 221013 - DNA, 25 bp, Probe sequence
cgaaccagatgtactcgcacttgtt

SEQ ID NO: 221014 - DNA, 25 bp, Probe sequence
gcgatgttgacgtacttgctgatcc

SEQ ID NO: 221015 - DNA, 25 bp, Probe sequence
gcgaggtagactcgcttacgctttc

SEQ ID NO: 221016 - DNA, 25 bp, Probe sequence
gcttacgctttctgaaccacttaat

SEQ ID NO: 221017 - DNA, 25 bp, Probe sequence
gaatcggattcacttgtactttctg

SEQ ID NO: 221018 - DNA, 25 bp, Probe sequence
gaatcgcttagtgacgttgatgtcg

SEQ ID NO: 221019 - DNA, 25 bp, Probe sequence
gaacttcttagtgacgtcgatacac

SEQ ID NO: 221020 - DNA, 25 bp, Probe sequence
gacgttgaatcactcatacttgttg

SEQ ID NO: 221021 - DNA, 25 bp, Probe sequence
gacgttgagacgctcaatgagccag

SEQ ID NO: 221022 - DNA, 25 bp, Probe sequence
gagtcggagtcacttgtactagtag

SEQ ID NO: 221023 - DNA, 25 bp, Probe sequence
gatgttgattcactttggcttgttg

SEQ ID NO: 221024 - DNA, 25 bp, Probe sequence
gatgacgaatcgcttgtgcttactg

SEQ ID NO: 221025 - DNA, 25 bp, Probe sequence
gatgctgatgtgctttgtgaatcgg

SEQ ID NO: 221026 - DNA, 25 bp, Probe sequence
gatccacttaatgagtcggagtcac

SEQ ID NO: 221027 - DNA, 25 bp, Probe sequence
gttgatgttgatgtacttgctgatc

SEQ ID NO: 221028 - DNA, 25 bp, Probe sequence
gttacttgtacttgttgagtcactg

SEQ ID NO: 221029 - DNA, 25 bp, Probe sequence
gtactacgagagtcacttgttgatg

SEQ ID NO: 221030 - DNA, 25 bp, Probe sequence
gtgaatcagatatgcttgcgctcat

SEQ ID NO: 221031 - DNA, 25 bp, Probe sequence
ggtcgacatgcggtttgaagttgat

SEQ ID NO: 221032 - DNA, 25 bp, Probe sequence
tgtgcttactgaatcgctcatcgat

SEQ ID NO: 221033 - DNA, 25 bp, Probe sequence
tgatgttgacgcactttctgatgtt

SEQ ID NO: 221034 - DNA, 25 bp, Probe sequence
tgaatcggattcactgctttgcatt

SEQ ID NO: 221035 - DNA, 25 bp, Probe sequence
tgcttgcgctcattacttcactagc

SEQ ID NO: 221036 - DNA, 25 bp, Probe sequence
ttacttcactagccgatgttgatgt

SEQ ID NO: 221037 - DNA, 25 bp, Probe sequence
atcacttgtcgacattgatgtactt

SEQ ID NO: 221038 - DNA, 25 bp, Probe sequence
atgacgtactctcacttgtcgaact

SEQ ID NO: 221039 - DNA, 25 bp, Probe sequence
agattctgatgtactgtctgataat

SEQ ID NO: 221040 - DNA, 25 bp, Probe sequence
acgttgacgttgattcactgatact

SEQ ID NO: 221041 - DNA, 25 bp, Probe sequence
acgtgctctctgaagcagatattgc

SEQ ID NO: 221042 - DNA, 25 bp, Probe sequence
actcactgactctgatgttgattca

SEQ ID NO: 221043 - DNA, 25 bp, Probe sequence
actatcacttgtggaatcacttaat

SEQ ID NO: 221044 - DNA, 25 bp, Probe sequence
actttcacttgtagaaccacttaat

SEQ ID NO: 221045 - DNA, 25 bp, Probe sequence
aatggaatcagatttacttgtactg

SEQ ID NO: 221046 - DNA, 25 bp, Probe sequence
cactctcgctcttaaacgttgacgt

SEQ ID NO: 221047 - DNA, 25 bp, Probe sequence
cagactctgatgtacttaagcttgt

SEQ ID NO: 221048 - DNA, 25 bp, Probe sequence
ctgattgaatcacttgtcgacattg

SEQ ID NO: 221049 - DNA, 25 bp, Probe sequence
gatgtcgaagtacttaccgaaccag

SEQ ID NO: 221050 - DNA, 25 bp, Probe sequence
cgaactactcactgactctgatgtt

SEQ ID NO: 221051 - DNA, 25 bp, Probe sequence
cgctcgttgacgttgattcacttat

SEQ ID NO: 221052 - DNA, 25 bp, Probe sequence
gctcgtagaagcactttgtgatatt

SEQ ID NO: 221053 - DNA, 25 bp, Probe sequence
gaattacttgtacttaacgatgtcg

SEQ ID NO: 221054 - DNA, 25 bp, Probe sequence
gaatcagacttactatcacttgtgg

SEQ ID NO: 221055 - DNA, 25 bp, Probe sequence
gacaaacttgtactcgttgacatac

SEQ ID NO: 221056 - DNA, 25 bp, Probe sequence
gatgttgatgtgctaccagattctg

SEQ ID NO: 221057 - DNA, 25 bp, Probe sequence
gattcactgatacttgtcgatgttg

SEQ ID NO: 221058 - DNA, 25 bp, Probe sequence
gattctgaatcgctagtactatttg

SEQ ID NO: 221059 - DNA, 25 bp, Probe sequence
gttgatatgctcattgaatcggatt

SEQ ID NO: 221060 - DNA, 25 bp, Probe sequence
gttgattcagacgtactttcactta

SEQ ID NO: 221061 - DNA, 25 bp, Probe sequence
gttgatgtacgttctgaattacttg

SEQ ID NO: 221062 - DNA, 25 bp, Probe sequence
gtactttcacttaatgattcactta

SEQ ID NO: 221063 - DNA, 25 bp, Probe sequence
gtctgataatgacgtactctcactt

SEQ ID NO: 221064 - DNA, 25 bp, Probe sequence
ggcagatgcactttgtgattctgaa

SEQ ID NO: 221065 - DNA, 25 bp, Probe sequence
tgtacttaagcttgtggaatcactc

SEQ ID NO: 221066 - DNA, 25 bp, Probe sequence
tgatgttgaaacactctcgctctta

SEQ ID NO: 221067 - DNA, 25 bp, Probe sequence
tcgctagtactatttgattcactta

SEQ ID NO: 221068 - DNA, 25 bp, Probe sequence
tctcacttgtcgaactactcactga

SEQ ID NO: 221069 - DNA, 25 bp, Probe sequence
ttaccgaaccagatgtgctcgtaga

SEQ ID NO: 221070 - DNA, 25 bp, Probe sequence
ttcacttattgaatcagactctgat

SEQ ID NO: 221071 - DNA, 25 bp, Probe sequence
attgatgtactttgtgaatctgatt

SEQ ID NO: 221072 - DNA, 25 bp, Probe sequence
attctgatgtactcatcgattttga

SEQ ID NO: 221073 - DNA, 25 bp, Probe sequence
atctgatttgcttgttgacgcactt

SEQ ID NO: 221074 - DNA, 25 bp, Probe sequence
atgattctgatgtactcatcgattt

SEQ ID NO: 221075 - DNA, 25 bp, Probe sequence
atgtactttgtgaatctgatttgct

SEQ ID NO: 221076 - DNA, 25 bp, Probe sequence
atgtactcatcgattttgaatcact

SEQ ID NO: 221077 - DNA, 25 bp, Probe sequence
actcatcgattttgaatcacttgta

SEQ ID NO: 221078 - DNA, 25 bp, Probe sequence
actttgtgaatctgatttgcttgtt

SEQ ID NO: 221079 - DNA, 25 bp, Probe sequence
aatgattctgatgtactcatcgatt

SEQ ID NO: 221080 - DNA, 25 bp, Probe sequence
aatctgatttgcttgttgacgcact

SEQ ID NO: 221081 - DNA, 25 bp, Probe sequence
caatgattctgatgtactcatcgat

SEQ ID NO: 221082 - DNA, 25 bp, Probe sequence
cacttgtacttaatgatattgatgt

SEQ ID NO: 221083 - DNA, 25 bp, Probe sequence
catcgattttgaatcacttgtactt

SEQ ID NO: 221084 - DNA, 25 bp, Probe sequence
ctgatttgcttgttgacgcactttg

SEQ ID NO: 221085 - DNA, 25 bp, Probe sequence
gaatctgatttgcttgttgacgcac

SEQ ID NO: 221086 - DNA, 25 bp, Probe sequence
gaatcacttgtacttaatgatattg

SEQ ID NO: 221087 - DNA, 25 bp, Probe sequence
gacattgatttactgtctgatgcag

SEQ ID NO: 221088 - DNA, 25 bp, Probe sequence
gatgtactttgtgaatctgatttgc

SEQ ID NO: 221089 - DNA, 25 bp, Probe sequence
gatgtactcatcgattttgaatcac

SEQ ID NO: 221090 - DNA, 25 bp, Probe sequence
gatattgatgtactttgtgaatctg

SEQ ID NO: 221091 - DNA, 25 bp, Probe sequence
gattctgatgtactcatcgattttg

SEQ ID NO: 221092 - DNA, 25 bp, Probe sequence
gtactttgtgaatctgatttgcttg

SEQ ID NO: 221093 - DNA, 25 bp, Probe sequence
gtactcatcgattttgaatcacttg

SEQ ID NO: 221094 - DNA, 25 bp, Probe sequence
gtgaatctgatttgcttgttgacgc

SEQ ID NO: 221095 - DNA, 25 bp, Probe sequence
tgtactcatcgattttgaatcactt

SEQ ID NO: 221096 - DNA, 25 bp, Probe sequence
tgtgaatctgatttgcttgttgacg

SEQ ID NO: 221097 - DNA, 25 bp, Probe sequence
tgattctgatgtactcatcgatttt

SEQ ID NO: 221098 - DNA, 25 bp, Probe sequence
tgatttgcttgttgacgcactttga

SEQ ID NO: 221099 - DNA, 25 bp, Probe sequence
tgaatctgatttgcttgttgacgca

SEQ ID NO: 221100 - DNA, 25 bp, Probe sequence
tctgatttgcttgttgacgcacttt

SEQ ID NO: 221101 - DNA, 25 bp, Probe sequence
tcatcgattttgaatcacttgtact

SEQ ID NO: 221102 - DNA, 25 bp, Probe sequence
taatgatattgatgtactttgtgaa

SEQ ID NO: 221103 - DNA, 25 bp, Probe sequence
tactcatcgattttgaatcacttgt

SEQ ID NO: 221104 - DNA, 25 bp, Probe sequence
ttctgatgtactcatcgattttgaa

SEQ ID NO: 221105 - DNA, 25 bp, Probe sequence
atagtacttgtaccaatgtttgttg

SEQ ID NO: 221106 - DNA, 25 bp, Probe sequence
atcactcatgctatttcttgttact

SEQ ID NO: 221107 - DNA, 25 bp, Probe sequence
atgcactcacagaatcagataggct

SEQ ID NO: 221108 - DNA, 25 bp, Probe sequence
agtccgaggtgctagctgactcgct

SEQ ID NO: 221109 - DNA, 25 bp, Probe sequence
acggaatcactcatgctatttcttg

SEQ ID NO: 221110 - DNA, 25 bp, Probe sequence
actcatgctatttcttgttacttca

SEQ ID NO: 221111 - DNA, 25 bp, Probe sequence
caatgtttgttggtgtaccactaat

SEQ ID NO: 221112 - DNA, 25 bp, Probe sequence
cactattactttcagatgtgcttaa

SEQ ID NO: 221113 - DNA, 25 bp, Probe sequence
ctcgttgatgcactttgtgagtcag

SEQ ID NO: 221114 - DNA, 25 bp, Probe sequence
gctatttcttgttacttcatattta

SEQ ID NO: 221115 - DNA, 25 bp, Probe sequence
gcttaatgacttagatgcactcaca

SEQ ID NO: 221116 - DNA, 25 bp, Probe sequence
gcactttgtgagtcagctttacttg

SEQ ID NO: 221117 - DNA, 25 bp, Probe sequence
gaatcagataggcttacacttgtcg

SEQ ID NO: 221118 - DNA, 25 bp, Probe sequence
gaaatactgatagagtccgaggtgc

SEQ ID NO: 221119 - DNA, 25 bp, Probe sequence
gacatgcttgatgatacactttgtg

SEQ ID NO: 221120 - DNA, 25 bp, Probe sequence
gacttagatgcactcacagaatcag

SEQ ID NO: 221121 - DNA, 25 bp, Probe sequence
gagcttgatacactattactttcag

SEQ ID NO: 221122 - DNA, 25 bp, Probe sequence
gatgatacactttgtgaattcacta

SEQ ID NO: 221123 - DNA, 25 bp, Probe sequence
gatgcactttgtgagtcagctttac

SEQ ID NO: 221124 - DNA, 25 bp, Probe sequence
gatagagtccgaggtgctagctgac

SEQ ID NO: 221125 - DNA, 25 bp, Probe sequence
gataggcttacacttgtcgatttcg

SEQ ID NO: 221126 - DNA, 25 bp, Probe sequence
gattgttgtgtacttcctgatgttg

SEQ ID NO: 221127 - DNA, 25 bp, Probe sequence
gtagataccacaatcgatcctgatg

SEQ ID NO: 221128 - DNA, 25 bp, Probe sequence
gtgaattcactaaacttgtgcttgt

SEQ ID NO: 221129 - DNA, 25 bp, Probe sequence
gtgtacttcctgatgttgatacgga

SEQ ID NO: 221130 - DNA, 25 bp, Probe sequence
ggcttacacttgtcgatttcgaggt

SEQ ID NO: 221131 - DNA, 25 bp, Probe sequence
tgtgcttgttgagcttgatacacta

SEQ ID NO: 221132 - DNA, 25 bp, Probe sequence
tgatacggaatcactcatgctattt

SEQ ID NO: 221133 - DNA, 25 bp, Probe sequence
tcactaaacttgtgcttgttgagct

SEQ ID NO: 221134 - DNA, 25 bp, Probe sequence
tactttcagatgtgcttaatgactt

SEQ ID NO: 221135 - DNA, 25 bp, Probe sequence
tagactttcggatttttcagtactg

SEQ ID NO: 221136 - DNA, 25 bp, Probe sequence
tttgtgagtcagctttacttgttga

SEQ ID NO: 221137 - DNA, 25 bp, Probe sequence
ttgtcgatttcgaggtactagctga

SEQ ID NO: 221138 - DNA, 25 bp, Probe sequence
ttgttgatagactttcggatttttc

SEQ ID NO: 221139 - DNA, 25 bp, Probe sequence
atggcgttgtgctttgtgaagtgtt

SEQ ID NO: 221140 - DNA, 25 bp, Probe sequence
agttgaccgaagatggcgttgtgct

SEQ ID NO: 221141 - DNA, 25 bp, Probe sequence
agttgacgttgtgctagttttgttt

SEQ ID NO: 221142 - DNA, 25 bp, Probe sequence
agttcgaagttttactggtgcggtg

SEQ ID NO: 221143 - DNA, 25 bp, Probe sequence
agatggcgttgtgctttgtgaagtg

SEQ ID NO: 221144 - DNA, 25 bp, Probe sequence
aagttttactggtgcggtgctagtt

SEQ ID NO: 221145 - DNA, 25 bp, Probe sequence
ctggtgcggtgctagttgacgttgt

SEQ ID NO: 221146 - DNA, 25 bp, Probe sequence
cgaagttttactggtgcggtgctag

SEQ ID NO: 221147 - DNA, 25 bp, Probe sequence
ccgaagatggcgttgtgctttgtga

SEQ ID NO: 221148 - DNA, 25 bp, Probe sequence
gcggtgctagttgacgttgtgctag

SEQ ID NO: 221149 - DNA, 25 bp, Probe sequence
gctttgtgaagtgttatttgatgca

SEQ ID NO: 221150 - DNA, 25 bp, Probe sequence
gaagttttactggtgcggtgctagt

SEQ ID NO: 221151 - DNA, 25 bp, Probe sequence
gaagatggcgttgtgctttgtgaag

SEQ ID NO: 221152 - DNA, 25 bp, Probe sequence
gaaagttcgaagttttactggtgcg

SEQ ID NO: 221153 - DNA, 25 bp, Probe sequence
gacgttgtgctagttttgtttaagt

SEQ ID NO: 221154 - DNA, 25 bp, Probe sequence
gaccgaagatggcgttgtgctttgt

SEQ ID NO: 221155 - DNA, 25 bp, Probe sequence
gttgaccgaagatggcgttgtgctt

SEQ ID NO: 221156 - DNA, 25 bp, Probe sequence
gttgtgctagttttgtttaagttga

SEQ ID NO: 221157 - DNA, 25 bp, Probe sequence
gttgtgctttgtgaagtgttatttg

SEQ ID NO: 221158 - DNA, 25 bp, Probe sequence
gttttactggtgcggtgctagttga

SEQ ID NO: 221159 - DNA, 25 bp, Probe sequence
gttttgtttaagttgaccgaagatg

SEQ ID NO: 221160 - DNA, 25 bp, Probe sequence
tgaccgaagatggcgttgtgctttg

SEQ ID NO: 221161 - DNA, 25 bp, Probe sequence
gtgctagttttgtttaagttgaccg

SEQ ID NO: 221162 - DNA, 25 bp, Probe sequence
gtgcggtgctagttgacgttgtgct

SEQ ID NO: 221163 - DNA, 25 bp, Probe sequence
gtgaagtgttatttgatgcagtact

SEQ ID NO: 221164 - DNA, 25 bp, Probe sequence
ggtgctagttgacgttgtgctagtt

SEQ ID NO: 221165 - DNA, 25 bp, Probe sequence
tgctagttttgtttaagttgaccga

SEQ ID NO: 221166 - DNA, 25 bp, Probe sequence
ggcgttgtgctttgtgaagtgttat

SEQ ID NO: 221167 - DNA, 25 bp, Probe sequence
tgcggtgctagttgacgttgtgcta

SEQ ID NO: 221168 - DNA, 25 bp, Probe sequence
tttactggtgcggtgctagttgacg

SEQ ID NO: 221169 - DNA, 25 bp, Probe sequence
tactggtgcggtgctagttgacgtt

SEQ ID NO: 221170 - DNA, 25 bp, Probe sequence
ttactggtgcggtgctagttgacgt

SEQ ID NO: 221171 - DNA, 25 bp, Probe sequence
ttcgaagttttactggtgcggtgct

SEQ ID NO: 221172 - DNA, 25 bp, Probe sequence
ttgacgttgtgctagttttgtttaa

SEQ ID NO: 221173 - DNA, 25 bp, Probe sequence
attgcatcatttaaagctgcttcag

SEQ ID NO: 221174 - DNA, 25 bp, Probe sequence
attccatacaacttcgtttcgtgaa

SEQ ID NO: 221175 - DNA, 25 bp, Probe sequence
atttgccaactttcgatgatgtagt

SEQ ID NO: 221176 - DNA, 25 bp, Probe sequence
atgctaactgtatatggacatagag

SEQ ID NO: 221177 - DNA, 25 bp, Probe sequence
atgtccggggaaataactgaattga

SEQ ID NO: 221178 - DNA, 25 bp, Probe sequence
agctccggaaaatacaattgcatca

SEQ ID NO: 221179 - DNA, 25 bp, Probe sequence
aaaccagcacgtgcaaaccaacttg

SEQ ID NO: 221180 - DNA, 25 bp, Probe sequence
aacactgaagatgccaaacttacta

SEQ ID NO: 221181 - DNA, 25 bp, Probe sequence
aacagagcagttatattccatacaa

SEQ ID NO: 221182 - DNA, 25 bp, Probe sequence
aacttgcagaagaaatcatgccaca

SEQ ID NO: 221183 - DNA, 25 bp, Probe sequence
aaggtattactggaccgaatggact

SEQ ID NO: 221184 - DNA, 25 bp, Probe sequence
gaacggactacaaatatgtccgggg

SEQ ID NO: 221185 - DNA, 25 bp, Probe sequence
catgatgattatttagaacggacta

SEQ ID NO: 221186 - DNA, 25 bp, Probe sequence
cttgctaattggggagttgatggta

SEQ ID NO: 221187 - DNA, 25 bp, Probe sequence
gcacgtgcaaaccaacttgctaatt

SEQ ID NO: 221188 - DNA, 25 bp, Probe sequence
gaattgaacgtatggactgtaaaca

SEQ ID NO: 221189 - DNA, 25 bp, Probe sequence
gaatggactagcactttctaaaagt

SEQ ID NO: 221190 - DNA, 25 bp, Probe sequence
gaagcgggttatgaattgaacgtat

SEQ ID NO: 221191 - DNA, 25 bp, Probe sequence
gaacacttttagattactgtaatgc

SEQ ID NO: 221192 - DNA, 25 bp, Probe sequence
gaacaactgattatcattcatgatg

SEQ ID NO: 221193 - DNA, 25 bp, Probe sequence
gaaatcatgccacaatataacagag

SEQ ID NO: 221194 - DNA, 25 bp, Probe sequence
gactggagaacacttttagattact

SEQ ID NO: 221195 - DNA, 25 bp, Probe sequence
gaggattacctagtaaagctccgga

SEQ ID NO: 221196 - DNA, 25 bp, Probe sequence
gatggtatctttacagacaatgcag

SEQ ID NO: 221197 - DNA, 25 bp, Probe sequence
gatgcttctgcaggatcttggtttg

SEQ ID NO: 221198 - DNA, 25 bp, Probe sequence
gatgaacatttgccaactttcgatg

SEQ ID NO: 221199 - DNA, 25 bp, Probe sequence
gataaaatggtgcatttgtctcaat

SEQ ID NO: 221200 - DNA, 25 bp, Probe sequence
gttgtgcttgttaaacttgcagaag

SEQ ID NO: 221201 - DNA, 25 bp, Probe sequence
gggagttgatggtatctttacagac

SEQ ID NO: 221202 - DNA, 25 bp, Probe sequence
ggttggagttagatgttgcaattac

SEQ ID NO: 221203 - DNA, 25 bp, Probe sequence
ggactgtaaacaaaccagcacgtgc

SEQ ID NO: 221204 - DNA, 25 bp, Probe sequence
ggaccgaatggactagcactttcta

SEQ ID NO: 221205 - DNA, 25 bp, Probe sequence
tctgcaggatcttggtttggtgaaa

SEQ ID NO: 221206 - DNA, 25 bp, Probe sequence
ttcgtttcgtgaagactggagaaca

SEQ ID NO: 221207 - DNA, 25 bp, Probe sequence
attaaacctgcacataatcctccaa

SEQ ID NO: 221208 - DNA, 25 bp, Probe sequence
atagctgaaattaaacctgcacata

SEQ ID NO: 221209 - DNA, 25 bp, Probe sequence
ataacaaaaatatcaatactttagt

SEQ ID NO: 221210 - DNA, 25 bp, Probe sequence
ataatcctccaatgccatataacat

SEQ ID NO: 221211 - DNA, 25 bp, Probe sequence
atcctccaatgccatataacatatc

SEQ ID NO: 221212 - DNA, 25 bp, Probe sequence
acataatcctccaatgccatataac

SEQ ID NO: 221213 - DNA, 25 bp, Probe sequence
aatactttagttgagattttcttcg

SEQ ID NO: 221214 - DNA, 25 bp, Probe sequence
aaattaaacctgcacataatcctcc

SEQ ID NO: 221215 - DNA, 25 bp, Probe sequence
aaacctgcacataatcctccaatgc

SEQ ID NO: 221216 - DNA, 25 bp, Probe sequence
aatcctccaatgccatataacatat

SEQ ID NO: 221217 - DNA, 25 bp, Probe sequence
aatagctgaaattaaacctgcacat

SEQ ID NO: 221218 - DNA, 25 bp, Probe sequence
aattaaacctgcacataatcctcca

SEQ ID NO: 221219 - DNA, 25 bp, Probe sequence
caatgccatataacatatctgaaaa

SEQ ID NO: 221220 - DNA, 25 bp, Probe sequence
cacataatcctccaatgccatataa

SEQ ID NO: 221221 - DNA, 25 bp, Probe sequence
cataatcctccaatgccatataaca

SEQ ID NO: 221222 - DNA, 25 bp, Probe sequence
catatctgaaaaaccaaattgtaca

SEQ ID NO: 221223 - DNA, 25 bp, Probe sequence
ctccaatgccatataacatatctga

SEQ ID NO: 221224 - DNA, 25 bp, Probe sequence
cctccaatgccatataacatatctg

SEQ ID NO: 221225 - DNA, 25 bp, Probe sequence
gccatataacatatctgaaaaacca

SEQ ID NO: 221226 - DNA, 25 bp, Probe sequence
gctgaaattaaacctgcacataatc

SEQ ID NO: 221227 - DNA, 25 bp, Probe sequence
gaatagctgaaattaaacctgcaca

SEQ ID NO: 221228 - DNA, 25 bp, Probe sequence
gaaattaaacctgcacataatcctc

SEQ ID NO: 221229 - DNA, 25 bp, Probe sequence
gagattttcttcgaaagaatagctg

SEQ ID NO: 221230 - DNA, 25 bp, Probe sequence
tgtacagacgaaagttttaaaacat

SEQ ID NO: 221231 - DNA, 25 bp, Probe sequence
tgaaaaaccaaattgtacagacgaa

SEQ ID NO: 221232 - DNA, 25 bp, Probe sequence
tccaatgccatataacatatctgaa

SEQ ID NO: 221233 - DNA, 25 bp, Probe sequence
tcctccaatgccatataacatatct

SEQ ID NO: 221234 - DNA, 25 bp, Probe sequence
taatcctccaatgccatataacata

SEQ ID NO: 221235 - DNA, 25 bp, Probe sequence
taaacctgcacataatcctccaatg

SEQ ID NO: 221236 - DNA, 25 bp, Probe sequence
tactttagttgagattttcttcgaa

SEQ ID NO: 221237 - DNA, 25 bp, Probe sequence
tagctgaaattaaacctgcacataa

SEQ ID NO: 221238 - DNA, 25 bp, Probe sequence
tagttgagattttcttcgaaagaat

SEQ ID NO: 221239 - DNA, 25 bp, Probe sequence
tttagttgagattttcttcgaaaga

SEQ ID NO: 221240 - DNA, 25 bp, Probe sequence
ttaaacctgcacataatcctccaat

SEQ ID NO: 221241 - DNA, 25 bp, Probe sequence
atacccaggtaatacattgtacgtt

SEQ ID NO: 221242 - DNA, 25 bp, Probe sequence
atctggcatgcatacactttcaata

SEQ ID NO: 221243 - DNA, 25 bp, Probe sequence
acactttcaatatcatttaaattat

SEQ ID NO: 221244 - DNA, 25 bp, Probe sequence
aaaggtatcattgcatctggcatgc

SEQ ID NO: 221245 - DNA, 25 bp, Probe sequence
aacaaaaagccttcatattacagaa

SEQ ID NO: 221246 - DNA, 25 bp, Probe sequence
aacattcaaaacaaaaagccttcat

SEQ ID NO: 221247 - DNA, 25 bp, Probe sequence
aacttttgatcctcaatatatgcat

SEQ ID NO: 221248 - DNA, 25 bp, Probe sequence
aatggactcgttacagtgtcacttt

SEQ ID NO: 221249 - DNA, 25 bp, Probe sequence
aattatccaatttgcaacaactttt

SEQ ID NO: 221250 - DNA, 25 bp, Probe sequence
caatttgcaacaacttttgatcctc

SEQ ID NO: 221251 - DNA, 25 bp, Probe sequence
cagtgtcactttcaacatacaatga

SEQ ID NO: 221252 - DNA, 25 bp, Probe sequence
cattgtacgttatcgctgaaattac

SEQ ID NO: 221253 - DNA, 25 bp, Probe sequence
ctcgttacagtgtcactttcaacat

SEQ ID NO: 221254 - DNA, 25 bp, Probe sequence
ctggcatgcatacactttcaatatc

SEQ ID NO: 221255 - DNA, 25 bp, Probe sequence
gcatctggcatgcatacactttcaa

SEQ ID NO: 221256 - DNA, 25 bp, Probe sequence
gcatacactttcaatatcatttaaa

SEQ ID NO: 221257 - DNA, 25 bp, Probe sequence
gcatgcatacactttcaatatcatt

SEQ ID NO: 221258 - DNA, 25 bp, Probe sequence
gcaacaacttttgatcctcaatata

SEQ ID NO: 221259 - DNA, 25 bp, Probe sequence
gaaaatggactcgttacagtgtcac

SEQ ID NO: 221260 - DNA, 25 bp, Probe sequence
gaaatacgatgattttatagtagga

SEQ ID NO: 221261 - DNA, 25 bp, Probe sequence
gactcgttacagtgtcactttcaac

SEQ ID NO: 221262 - DNA, 25 bp, Probe sequence
gtatcattgcatctggcatgcatac

SEQ ID NO: 221263 - DNA, 25 bp, Probe sequence
gtagcaggaacacaaatgaataacg

SEQ ID NO: 221264 - DNA, 25 bp, Probe sequence
gtaatacattgtacgttatcgctga

SEQ ID NO: 221265 - DNA, 25 bp, Probe sequence
ggagaagaagttgtagcaggaacac

SEQ ID NO: 221266 - DNA, 25 bp, Probe sequence
tggactcgttacagtgtcactttca

SEQ ID NO: 221267 - DNA, 25 bp, Probe sequence
tattaaacctgtatacccaggtaat

SEQ ID NO: 221268 - DNA, 25 bp, Probe sequence
taagggagaagtaacagcacttatt

SEQ ID NO: 221269 - DNA, 25 bp, Probe sequence
tacattgtacgttatcgctgaaatt

SEQ ID NO: 221270 - DNA, 25 bp, Probe sequence
tacgttatcgctgaaattacaaata

SEQ ID NO: 221271 - DNA, 25 bp, Probe sequence
tttgcaacaacttttgatcctcaat

SEQ ID NO: 221272 - DNA, 25 bp, Probe sequence
ttacagtgtcactttcaacatacaa

SEQ ID NO: 221273 - DNA, 25 bp, Probe sequence
ttaaaggtatcattgcatctggcat

SEQ ID NO: 221274 - DNA, 25 bp, Probe sequence
ttgatcctcaatatatgcatataga

SEQ ID NO: 221275 - DNA, 25 bp, Probe sequence
aggcgaaaaatggtccgataactag

SEQ ID NO: 221276 - DNA, 25 bp, Probe sequence
atggtccgataactagatataaggc

SEQ ID NO: 221277 - DNA, 25 bp, Probe sequence
atggcgaaaatgcaatttcaaatga

SEQ ID NO: 221278 - DNA, 25 bp, Probe sequence
cagtctaggtaaggcgaaaaatggt

SEQ ID NO: 221279 - DNA, 25 bp, Probe sequence
aaatggtccgataactagatataag

SEQ ID NO: 221280 - DNA, 25 bp, Probe sequence
aaatggcgaaaatgcaatttcaaat

SEQ ID NO: 221281 - DNA, 25 bp, Probe sequence
aaaaatggtccgataactagatata

SEQ ID NO: 221282 - DNA, 25 bp, Probe sequence
aaaatggtccgataactagatataa

SEQ ID NO: 221283 - DNA, 25 bp, Probe sequence
aactagatataaggcaatcgtgaaa

SEQ ID NO: 221284 - DNA, 25 bp, Probe sequence
aatggtccgataactagatataagg

SEQ ID NO: 221285 - DNA, 25 bp, Probe sequence
ctagatataaggcaatcgtgaaaat

SEQ ID NO: 221286 - DNA, 25 bp, Probe sequence
cgaaaaatggtccgataactagata

SEQ ID NO: 221287 - DNA, 25 bp, Probe sequence
gccagtctaggtaaggcgaaaaatg

SEQ ID NO: 221288 - DNA, 25 bp, Probe sequence
gcgaaaaatggtccgataactagat

SEQ ID NO: 221289 - DNA, 25 bp, Probe sequence
gcgaaaatgcaatttcaaatgatgt

SEQ ID NO: 221290 - DNA, 25 bp, Probe sequence
gctttggtgataaaaatggcgaaaa

SEQ ID NO: 221291 - DNA, 25 bp, Probe sequence
taaggcgaaaaatggtccgataact

SEQ ID NO: 221292 - DNA, 25 bp, Probe sequence
gaaaaatggtccgataactagatat

SEQ ID NO: 221293 - DNA, 25 bp, Probe sequence
gataactagatataaggcaatcgtg

SEQ ID NO: 221294 - DNA, 25 bp, Probe sequence
gatttgctttggtgataaaaatggc

SEQ ID NO: 221295 - DNA, 25 bp, Probe sequence
gttgccagtctaggtaaggcgaaaa

SEQ ID NO: 221296 - DNA, 25 bp, Probe sequence
gtccgataactagatataaggcaat

SEQ ID NO: 221297 - DNA, 25 bp, Probe sequence
gtgatttgctttggtgataaaaatg

SEQ ID NO: 221298 - DNA, 25 bp, Probe sequence
ggtccgataactagatataaggcaa

SEQ ID NO: 221299 - DNA, 25 bp, Probe sequence
ggcgaaaaatggtccgataactaga

SEQ ID NO: 221300 - DNA, 25 bp, Probe sequence
tggtccgataactagatataaggca

SEQ ID NO: 221301 - DNA, 25 bp, Probe sequence
tctaggtaaggcgaaaaatggtccg

SEQ ID NO: 221302 - DNA, 25 bp, Probe sequence
tgccagtctaggtaaggcgaaaaat

SEQ ID NO: 221303 - DNA, 25 bp, Probe sequence
taactagatataaggcaatcgtgaa

SEQ ID NO: 221304 - DNA, 25 bp, Probe sequence
taggtaaggcgaaaaatggtccgat

SEQ ID NO: 221305 - DNA, 25 bp, Probe sequence
tttgctttggtgataaaaatggcga

SEQ ID NO: 221306 - DNA, 25 bp, Probe sequence
ttgctttggtgataaaaatggcgaa

SEQ ID NO: 221307 - DNA, 25 bp, Probe sequence
ttgccagtctaggtaaggcgaaaaa

SEQ ID NO: 221308 - DNA, 25 bp, Probe sequence
ttggtgataaaaatggcgaaaatgc

SEQ ID NO: 221309 - DNA, 25 bp, Probe sequence
attcagtgacacttgcaaaattagc

SEQ ID NO: 221310 - DNA, 25 bp, Probe sequence
atttccaagcatcaacgattaaaat

SEQ ID NO: 221311 - DNA, 25 bp, Probe sequence
atacgttaggtgtccaaccacacat

SEQ ID NO: 221312 - DNA, 25 bp, Probe sequence
ataacgaagcggaagtagcagcatt

SEQ ID NO: 221313 - DNA, 25 bp, Probe sequence
aggtgatggcatctgtatttgtcat

SEQ ID NO: 221314 - DNA, 25 bp, Probe sequence
agcagatcgacttggctttaagcga

SEQ ID NO: 221315 - DNA, 25 bp, Probe sequence
acatcataatgtaccagcgtttgcg

SEQ ID NO: 221316 - DNA, 25 bp, Probe sequence
aaatcctacatatgatagttacgat

SEQ ID NO: 221317 - DNA, 25 bp, Probe sequence
aaccacacattgatcattttccaga

SEQ ID NO: 221318 - DNA, 25 bp, Probe sequence
aagtgcgcatacgttaggtgtccaa

SEQ ID NO: 221319 - DNA, 25 bp, Probe sequence
aatcgtattgatttaggtattggta

SEQ ID NO: 221320 - DNA, 25 bp, Probe sequence
aatagctgccgaactaggtataggg

SEQ ID NO: 221321 - DNA, 25 bp, Probe sequence
cagcgtttgcgtgtagtagtccaga

SEQ ID NO: 221322 - DNA, 25 bp, Probe sequence
catgccttagatgtttggttattag

SEQ ID NO: 221323 - DNA, 25 bp, Probe sequence
catctgccaaaatagctgccgaact

SEQ ID NO: 221324 - DNA, 25 bp, Probe sequence
gctacgtttgaagttgatgaggtgt

SEQ ID NO: 221325 - DNA, 25 bp, Probe sequence
gctaccagatataaatgcgatacat

SEQ ID NO: 221326 - DNA, 25 bp, Probe sequence
gcattttagaatgatggcagcgtta

SEQ ID NO: 221327 - DNA, 25 bp, Probe sequence
gatgatgcatacattggcgcagaca

SEQ ID NO: 221328 - DNA, 25 bp, Probe sequence
gatgaatcgatttcgttattacgtg

SEQ ID NO: 221329 - DNA, 25 bp, Probe sequence
gtagtccagaacttttgatgatgca

SEQ ID NO: 221330 - DNA, 25 bp, Probe sequence
gtgttagtagcaccgcttattccag

SEQ ID NO: 221331 - DNA, 25 bp, Probe sequence
gggctttctgttggaacatttttgc

SEQ ID NO: 221332 - DNA, 25 bp, Probe sequence
ggtactactatggtaaagcaagctt

SEQ ID NO: 221333 - DNA, 25 bp, Probe sequence
ggaacatttttgctaccagatataa

SEQ ID NO: 221334 - DNA, 25 bp, Probe sequence
ggcagcgttatatccaaatcgtatt

SEQ ID NO: 221335 - DNA, 25 bp, Probe sequence
ggcgcagacaaatcacatacgagtt

SEQ ID NO: 221336 - DNA, 25 bp, Probe sequence
tggacgcaaaggtgatggcatctgt

SEQ ID NO: 221337 - DNA, 25 bp, Probe sequence
tgccgcactatcgaccttataaaat

SEQ ID NO: 221338 - DNA, 25 bp, Probe sequence
tcgaccttataaaattgctgagcat

SEQ ID NO: 221339 - DNA, 25 bp, Probe sequence
taagcgtattagactatgccttaat

SEQ ID NO: 221340 - DNA, 25 bp, Probe sequence
tagatgatttcattgctacgtttga

SEQ ID NO: 221341 - DNA, 25 bp, Probe sequence
taggtatagggctttctgttggaac

SEQ ID NO: 221342 - DNA, 25 bp, Probe sequence
ttcgttattacgtgattatcttaca

SEQ ID NO: 221343 - DNA, 25 bp, Probe sequence
attgatgtgcaaacgccattgtcag

SEQ ID NO: 221344 - DNA, 25 bp, Probe sequence
atgatgtcgataaagaagcattcct

SEQ ID NO: 221345 - DNA, 25 bp, Probe sequence
atgtgcaaacgccattgtcaggaac

SEQ ID NO: 221346 - DNA, 25 bp, Probe sequence
agtatgacacctgaattgcaagatg

SEQ ID NO: 221347 - DNA, 25 bp, Probe sequence
acgccattgtcaggaacgattattg

SEQ ID NO: 221348 - DNA, 25 bp, Probe sequence
acggtcattgatgtgcaaacgccat

SEQ ID NO: 221349 - DNA, 25 bp, Probe sequence
aaacggtcattgatgtgcaaacgcc

SEQ ID NO: 221350 - DNA, 25 bp, Probe sequence
aaacgccattgtcaggaacgattat

SEQ ID NO: 221351 - DNA, 25 bp, Probe sequence
aagtaggagatttgtatgtgtttag

SEQ ID NO: 221352 - DNA, 25 bp, Probe sequence
aagtggatgatgaaattgtgagtat

SEQ ID NO: 221353 - DNA, 25 bp, Probe sequence
cagatgaagttaaagtggatgatga

SEQ ID NO: 221354 - DNA, 25 bp, Probe sequence
gccattgtcaggaacgattattgag

SEQ ID NO: 221355 - DNA, 25 bp, Probe sequence
gcaaacgccattgtcaggaacgatt

SEQ ID NO: 221356 - DNA, 25 bp, Probe sequence
gaagaaccgacaattttaaactctg

SEQ ID NO: 221357 - DNA, 25 bp, Probe sequence
gaaaattggttgttcaaattggatg

SEQ ID NO: 221358 - DNA, 25 bp, Probe sequence
gaaattgtgagtatcgaagcatcga

SEQ ID NO: 221359 - DNA, 25 bp, Probe sequence
gacacctgaattgcaagatgatatt

SEQ ID NO: 221360 - DNA, 25 bp, Probe sequence
gatgtgcaaacgccattgtcaggaa

SEQ ID NO: 221361 - DNA, 25 bp, Probe sequence
gatgatattgggacagtaggttatg

SEQ ID NO: 221362 - DNA, 25 bp, Probe sequence
gttagccaattatttatgggtagaa

SEQ ID NO: 221363 - DNA, 25 bp, Probe sequence
gtttagtatgacacctgaattgcaa

SEQ ID NO: 221364 - DNA, 25 bp, Probe sequence
gtatgtgtttagtatgacacctgaa

SEQ ID NO: 221365 - DNA, 25 bp, Probe sequence
gtgcaaacgccattgtcaggaacga

SEQ ID NO: 221366 - DNA, 25 bp, Probe sequence
ggtcattgatgtgcaaacgccattg

SEQ ID NO: 221367 - DNA, 25 bp, Probe sequence
ggttgttcaaattggatgatgtcga

SEQ ID NO: 221368 - DNA, 25 bp, Probe sequence
ggacagtaggttatgttgaattcgt

SEQ ID NO: 221369 - DNA, 25 bp, Probe sequence
ggagatttgtatgtgtttagtatga

SEQ ID NO: 221370 - DNA, 25 bp, Probe sequence
ggaacgattattgagcgaaatacaa

SEQ ID NO: 221371 - DNA, 25 bp, Probe sequence
tgatgtgcaaacgccattgtcagga

SEQ ID NO: 221372 - DNA, 25 bp, Probe sequence
tgaaaaagttagccaattatttatg

SEQ ID NO: 221373 - DNA, 25 bp, Probe sequence
tcgaagcatcgaaaacggtcattga

SEQ ID NO: 221374 - DNA, 25 bp, Probe sequence
tcattgatgtgcaaacgccattgtc

SEQ ID NO: 221375 - DNA, 25 bp, Probe sequence
ttgagcgaaatacaaaagcggaaga

SEQ ID NO: 221376 - DNA, 25 bp, Probe sequence
ttgtcaggaacgattattgagcgaa

SEQ ID NO: 221377 - DNA, 25 bp, Probe sequence
attatgtcacataagatttggttat

SEQ ID NO: 221378 - DNA, 25 bp, Probe sequence
atttggttattagtgctcgtctcca

SEQ ID NO: 221379 - DNA, 25 bp, Probe sequence
atatcgaattttacattttcaaaag

SEQ ID NO: 221380 - DNA, 25 bp, Probe sequence
atctgacacgacttcttcggttagt

SEQ ID NO: 221381 - DNA, 25 bp, Probe sequence
atcgaaatgtatctgacacgacttc

SEQ ID NO: 221382 - DNA, 25 bp, Probe sequence
atgtatctgacacgacttcttcggt

SEQ ID NO: 221383 - DNA, 25 bp, Probe sequence
acgacttcttcggttagtcatatgt

SEQ ID NO: 221384 - DNA, 25 bp, Probe sequence
acttcttcggttagtcatatgttag

SEQ ID NO: 221385 - DNA, 25 bp, Probe sequence
acacgacttcttcggttagtcatat

SEQ ID NO: 221386 - DNA, 25 bp, Probe sequence
aaatgtatctgacacgacttcttcg

SEQ ID NO: 221387 - DNA, 25 bp, Probe sequence
aacaatcatctgttacgaaagactt

SEQ ID NO: 221388 - DNA, 25 bp, Probe sequence
aatgtatctgacacgacttcttcgg

SEQ ID NO: 221389 - DNA, 25 bp, Probe sequence
aataccattttacaaaatatcgaat

SEQ ID NO: 221390 - DNA, 25 bp, Probe sequence
ctgacacgacttcttcggttagtca

SEQ ID NO: 221391 - DNA, 25 bp, Probe sequence
tctgacacgacttcttcggttagtc

SEQ ID NO: 221392 - DNA, 25 bp, Probe sequence
ctccacgttaattccattaatacca

SEQ ID NO: 221393 - DNA, 25 bp, Probe sequence
gaaatgtatctgacacgacttcttc

SEQ ID NO: 221394 - DNA, 25 bp, Probe sequence
gacacgacttcttcggttagtcata

SEQ ID NO: 221395 - DNA, 25 bp, Probe sequence
gatggtcaacaatcatctgttacga

SEQ ID NO: 221396 - DNA, 25 bp, Probe sequence
gatgaatcgaaatgtatctgacacg

SEQ ID NO: 221397 - DNA, 25 bp, Probe sequence
gatttggttattagtgctcgtctcc

SEQ ID NO: 221398 - DNA, 25 bp, Probe sequence
gttagtcatatgttagatggtcaac

SEQ ID NO: 221399 - DNA, 25 bp, Probe sequence
gtatctgacacgacttcttcggtta

SEQ ID NO: 221400 - DNA, 25 bp, Probe sequence
gtctccacgttaattccattaatac

SEQ ID NO: 221401 - DNA, 25 bp, Probe sequence
ggtcaacaatcatctgttacgaaag

SEQ ID NO: 221402 - DNA, 25 bp, Probe sequence
tgtatctgacacgacttcttcggtt

SEQ ID NO: 221403 - DNA, 25 bp, Probe sequence
tgacacgacttcttcggttagtcat

SEQ ID NO: 221404 - DNA, 25 bp, Probe sequence
tcgtctccacgttaattccattaat

SEQ ID NO: 221405 - DNA, 25 bp, Probe sequence
tttggttattagtgctcgtctccac

SEQ ID NO: 221406 - DNA, 25 bp, Probe sequence
tatctgacacgacttcttcggttag

SEQ ID NO: 221407 - DNA, 25 bp, Probe sequence
tatactcaaaatattatgtcacata

SEQ ID NO: 221408 - DNA, 25 bp, Probe sequence
ttattagtgctcgtctccacgttaa

SEQ ID NO: 221409 - DNA, 25 bp, Probe sequence
ttaattccattaataccattttaca

SEQ ID NO: 221410 - DNA, 25 bp, Probe sequence
ttcttcggttagtcatatgttagat

SEQ ID NO: 221411 - DNA, 25 bp, Probe sequence
atatactcaaatgttacgaaagact

SEQ ID NO: 221412 - DNA, 25 bp, Probe sequence
atatcgcttttaatacaagcaccgt

SEQ ID NO: 221413 - DNA, 25 bp, Probe sequence
atcgcttttaatacaagcaccgtta

SEQ ID NO: 221414 - DNA, 25 bp, Probe sequence
atgtagtatatcgcttttaatacaa

SEQ ID NO: 221415 - DNA, 25 bp, Probe sequence
atggaggtgtagaaggtgttatcat

SEQ ID NO: 221416 - DNA, 25 bp, Probe sequence
aggtgtagaaggtgttatcatcttt

SEQ ID NO: 221417 - DNA, 25 bp, Probe sequence
agtatatcgcttttaatacaagcac

SEQ ID NO: 221418 - DNA, 25 bp, Probe sequence
aaatatactcaaatgttacgaaaga

SEQ ID NO: 221419 - DNA, 25 bp, Probe sequence
aaaatatactcaaatgttacgaaag

SEQ ID NO: 221420 - DNA, 25 bp, Probe sequence
aatatactcaaatgttacgaaagac

SEQ ID NO: 221421 - DNA, 25 bp, Probe sequence
cttttaatacaagcaccgttactat

SEQ ID NO: 221422 - DNA, 25 bp, Probe sequence
cgcttttaatacaagcaccgttact

SEQ ID NO: 221423 - DNA, 25 bp, Probe sequence
gcttttaatacaagcaccgttacta

SEQ ID NO: 221424 - DNA, 25 bp, Probe sequence
gaggtgtagaaggtgttatcatctt

SEQ ID NO: 221425 - DNA, 25 bp, Probe sequence
gtatatcgcttttaatacaagcacc

SEQ ID NO: 221426 - DNA, 25 bp, Probe sequence
gtatgtagtatatcgcttttaatac

SEQ ID NO: 221427 - DNA, 25 bp, Probe sequence
gtagtatatcgcttttaatacaagc

SEQ ID NO: 221428 - DNA, 25 bp, Probe sequence
ggtgtagaaggtgttatcatctttt

SEQ ID NO: 221429 - DNA, 25 bp, Probe sequence
ggaggtgtagaaggtgttatcatct

SEQ ID NO: 221430 - DNA, 25 bp, Probe sequence
tggaggtgtagaaggtgttatcatc

SEQ ID NO: 221431 - DNA, 25 bp, Probe sequence
tgtagtatatcgcttttaatacaag

SEQ ID NO: 221432 - DNA, 25 bp, Probe sequence
tcgcttttaatacaagcaccgttac

SEQ ID NO: 221433 - DNA, 25 bp, Probe sequence
taaaatatactcaaatgttacgaaa

SEQ ID NO: 221434 - DNA, 25 bp, Probe sequence
tagtatatcgcttttaatacaagca

SEQ ID NO: 221435 - DNA, 25 bp, Probe sequence
tatgtagtatatcgcttttaataca

SEQ ID NO: 221436 - DNA, 25 bp, Probe sequence
tatcgcttttaatacaagcaccgtt

SEQ ID NO: 221437 - DNA, 25 bp, Probe sequence
tatatcgcttttaatacaagcaccg

SEQ ID NO: 221438 - DNA, 25 bp, Probe sequence
tatactcaaatgttacgaaagactt

SEQ ID NO: 221439 - DNA, 25 bp, Probe sequence
ttttaatacaagcaccgttactatc

SEQ ID NO: 221440 - DNA, 25 bp, Probe sequence
attcgacaacaagggcgcaatgaag

SEQ ID NO: 221441 - DNA, 25 bp, Probe sequence
agtcgtgttcaatgtatttacagat

SEQ ID NO: 221442 - DNA, 25 bp, Probe sequence
agctgtacaagatgctatgttaagt

SEQ ID NO: 221443 - DNA, 25 bp, Probe sequence
aaagcgggtgttcaagttcgacttg

SEQ ID NO: 221444 - DNA, 25 bp, Probe sequence
aaagcgagacttgaatatttaatca

SEQ ID NO: 221445 - DNA, 25 bp, Probe sequence
aagatgctatgttaagtgatttgaa

SEQ ID NO: 221446 - DNA, 25 bp, Probe sequence
aagttcgacttgattgtgcagagat

SEQ ID NO: 221447 - DNA, 25 bp, Probe sequence
aagggcgcaatgaaggtgtaggtaa

SEQ ID NO: 221448 - DNA, 25 bp, Probe sequence
aaggtgacaatatctttgtttggca

SEQ ID NO: 221449 - DNA, 25 bp, Probe sequence
aatacgtcgattgcctgtttcaaag

SEQ ID NO: 221450 - DNA, 25 bp, Probe sequence
aatattattcatacaaaagcgggtg

SEQ ID NO: 221451 - DNA, 25 bp, Probe sequence
aattcaacattgaaagtcgtgttca

SEQ ID NO: 221452 - DNA, 25 bp, Probe sequence
catgactgcattgataatattattc

SEQ ID NO: 221453 - DNA, 25 bp, Probe sequence
cttttcctcaagatgaagcagcaga

SEQ ID NO: 221454 - DNA, 25 bp, Probe sequence
ccggcattacctgtaagtgatgaat

SEQ ID NO: 221455 - DNA, 25 bp, Probe sequence
gcaagctaatcatgactgcattgat

SEQ ID NO: 221456 - DNA, 25 bp, Probe sequence
gaagatttgtgggaattatatcgag

SEQ ID NO: 221457 - DNA, 25 bp, Probe sequence
gaagcagcagaaattgctgttcgaa

SEQ ID NO: 221458 - DNA, 25 bp, Probe sequence
gaaagctatctcaaagaaacaaatt

SEQ ID NO: 221459 - DNA, 25 bp, Probe sequence
gacgtattggtaatgccatcttcat

SEQ ID NO: 221460 - DNA, 25 bp, Probe sequence
gagagagaaatgacaatgacgtatt

SEQ ID NO: 221461 - DNA, 25 bp, Probe sequence
gttcgaacagtagaaagctatctca

SEQ ID NO: 221462 - DNA, 25 bp, Probe sequence
gtgatgaatatttagctgtacaaga

SEQ ID NO: 221463 - DNA, 25 bp, Probe sequence
gtgtatttgcttttcctcaagatga

SEQ ID NO: 221464 - DNA, 25 bp, Probe sequence
ggtccgcaaatacgtcgattgcctg

SEQ ID NO: 221465 - DNA, 25 bp, Probe sequence
ggatgtatgcaagctaatcatgact

SEQ ID NO: 221466 - DNA, 25 bp, Probe sequence
ggcaaggtgatatcacgacgttaaa

SEQ ID NO: 221467 - DNA, 25 bp, Probe sequence
tggtaatgccatcttcatttgaaga

SEQ ID NO: 221468 - DNA, 25 bp, Probe sequence
tgaatcaggacttgttagctaaatg

SEQ ID NO: 221469 - DNA, 25 bp, Probe sequence
tacaggtgtatttgcttttcctcaa

SEQ ID NO: 221470 - DNA, 25 bp, Probe sequence
tacggttggtccgcaaatacgtcga

SEQ ID NO: 221471 - DNA, 25 bp, Probe sequence
tatataattcatacggttggtccgc

SEQ ID NO: 221472 - DNA, 25 bp, Probe sequence
tttgtttggcaaggtgatatcacga

SEQ ID NO: 221473 - DNA, 25 bp, Probe sequence
ttttgctgtatatctacaggtgtat

SEQ ID NO: 221474 - DNA, 25 bp, Probe sequence
agtattcaagtagttcgccgagata

SEQ ID NO: 221475 - DNA, 25 bp, Probe sequence
agttcgccgagatactggtggtggc

SEQ ID NO: 221476 - DNA, 25 bp, Probe sequence
acacagtattcaagtagttcgccga

SEQ ID NO: 221477 - DNA, 25 bp, Probe sequence
aaaggtgccgttaatatgtgttgta

SEQ ID NO: 221478 - DNA, 25 bp, Probe sequence
aatcgtatttatggcggttattcgc

SEQ ID NO: 221479 - DNA, 25 bp, Probe sequence
aatactgctatagaagtgaatcaag

SEQ ID NO: 221480 - DNA, 25 bp, Probe sequence
aattagacatcgtttattattttgg

SEQ ID NO: 221481 - DNA, 25 bp, Probe sequence
aattggacgttttcaaaatactgct

SEQ ID NO: 221482 - DNA, 25 bp, Probe sequence
cgccgagatactggtggtggcgctg

SEQ ID NO: 221483 - DNA, 25 bp, Probe sequence
gcctaatcgcaaaaagattgcatcg

SEQ ID NO: 221484 - DNA, 25 bp, Probe sequence
gcggttattcgctattacttgatgt

SEQ ID NO: 221485 - DNA, 25 bp, Probe sequence
gcatcagttaaagcaattagacatc

SEQ ID NO: 221486 - DNA, 25 bp, Probe sequence
gcatcgaaagggattaaatctgtgc

SEQ ID NO: 221487 - DNA, 25 bp, Probe sequence
gcacgtgttggtcatcttagagaag

SEQ ID NO: 221488 - DNA, 25 bp, Probe sequence
gaacaagacacttcaatttatggtg

SEQ ID NO: 221489 - DNA, 25 bp, Probe sequence
gacgttttcaaaatactgctataga

SEQ ID NO: 221490 - DNA, 25 bp, Probe sequence
gagaatatattactgatggtgcgat

SEQ ID NO: 221491 - DNA, 25 bp, Probe sequence
gatgaagatattttattcccttatt

SEQ ID NO: 221492 - DNA, 25 bp, Probe sequence
gatattttattcccttattattgtg

SEQ ID NO: 221493 - DNA, 25 bp, Probe sequence
gatttctttggacaaggtgatataa

SEQ ID NO: 221494 - DNA, 25 bp, Probe sequence
gattttgggaatcgatgacattaaa

SEQ ID NO: 221495 - DNA, 25 bp, Probe sequence
gttattcgctattacttgatgttaa

SEQ ID NO: 221496 - DNA, 25 bp, Probe sequence
gtattttagaacaagacacttcaat

SEQ ID NO: 221497 - DNA, 25 bp, Probe sequence
gtagttcgccgagatactggtggtg

SEQ ID NO: 221498 - DNA, 25 bp, Probe sequence
gtgccgttaatatgtgttgtatttt

SEQ ID NO: 221499 - DNA, 25 bp, Probe sequence
gtgtatgttgataaaggtgccgtta

SEQ ID NO: 221500 - DNA, 25 bp, Probe sequence
gtggtggcgctgtgtatgttgataa

SEQ ID NO: 221501 - DNA, 25 bp, Probe sequence
gtggcgctgtgtatgttgataaagg

SEQ ID NO: 221502 - DNA, 25 bp, Probe sequence
tggtcatcttagagaagcactggat

SEQ ID NO: 221503 - DNA, 25 bp, Probe sequence
taaagtgttaaagcctaatcgcaaa

SEQ ID NO: 221504 - DNA, 25 bp, Probe sequence
tatggcggttattcgctattacttg

SEQ ID NO: 221505 - DNA, 25 bp, Probe sequence
tatggtgattttcaacgattttatc

SEQ ID NO: 221506 - DNA, 25 bp, Probe sequence
tatattactgatggtgcgattgcac

SEQ ID NO: 221507 - DNA, 25 bp, Probe sequence
tattcccttattattgtgatccaaa

SEQ ID NO: 221508 - DNA, 25 bp, Probe sequence
attgaagccttttggtaaaacagct

SEQ ID NO: 221509 - DNA, 25 bp, Probe sequence
atcctgctacaaatggtggcatctc

SEQ ID NO: 221510 - DNA, 25 bp, Probe sequence
atgtcgattgaaatacaagcagata

SEQ ID NO: 221511 - DNA, 25 bp, Probe sequence
atggctgcaataagtaatcctgcta

SEQ ID NO: 221512 - DNA, 25 bp, Probe sequence
atggcactacagatgatgtattgaa

SEQ ID NO: 221513 - DNA, 25 bp, Probe sequence
agatgatgtattgaagccttttggt

SEQ ID NO: 221514 - DNA, 25 bp, Probe sequence
agccttttggtaaaacagcttcatg

SEQ ID NO: 221515 - DNA, 25 bp, Probe sequence
acagatgatgtattgaagccttttg

SEQ ID NO: 221516 - DNA, 25 bp, Probe sequence
acaaatggtggcatctcagtcaaaa

SEQ ID NO: 221517 - DNA, 25 bp, Probe sequence
aaaatggctgcaataagtaatcctg

SEQ ID NO: 221518 - DNA, 25 bp, Probe sequence
aagtaatcctgctacaaatggtggc

SEQ ID NO: 221519 - DNA, 25 bp, Probe sequence
aatggtggcatctcagtcaaaatga

SEQ ID NO: 221520 - DNA, 25 bp, Probe sequence
aatgaaatatggcactacagatgat

SEQ ID NO: 221521 - DNA, 25 bp, Probe sequence
aatcctgctacaaatggtggcatct

SEQ ID NO: 221522 - DNA, 25 bp, Probe sequence
caaatggtggcatctcagtcaaaat

SEQ ID NO: 221523 - DNA, 25 bp, Probe sequence
ctacaaatggtggcatctcagtcaa

SEQ ID NO: 221524 - DNA, 25 bp, Probe sequence
cctgctacaaatggtggcatctcag

SEQ ID NO: 221525 - DNA, 25 bp, Probe sequence
ccttttggtaaaacagcttcatgtg

SEQ ID NO: 221526 - DNA, 25 bp, Probe sequence
gctgcaataagtaatcctgctacaa

SEQ ID NO: 221527 - DNA, 25 bp, Probe sequence
gctacaaatggtggcatctcagtca

SEQ ID NO: 221528 - DNA, 25 bp, Probe sequence
gcaataagtaatcctgctacaaatg

SEQ ID NO: 221529 - DNA, 25 bp, Probe sequence
gaaatatggcactacagatgatgta

SEQ ID NO: 221530 - DNA, 25 bp, Probe sequence
gatgtattgaagccttttggtaaaa

SEQ ID NO: 221531 - DNA, 25 bp, Probe sequence
gatgatgtattgaagccttttggta

SEQ ID NO: 221532 - DNA, 25 bp, Probe sequence
gtaatcctgctacaaatggtggcat

SEQ ID NO: 221533 - DNA, 25 bp, Probe sequence
gtcaaaatgaaatatggcactacag

SEQ ID NO: 221534 - DNA, 25 bp, Probe sequence
gtggcatctcagtcaaaatgaaata

SEQ ID NO: 221535 - DNA, 25 bp, Probe sequence
ggctgcaataagtaatcctgctaca

SEQ ID NO: 221536 - DNA, 25 bp, Probe sequence
tggtggcatctcagtcaaaatgaaa

SEQ ID NO: 221537 - DNA, 25 bp, Probe sequence
tgtattgaagccttttggtaaaaca

SEQ ID NO: 221538 - DNA, 25 bp, Probe sequence
tcctgctacaaatggtggcatctca

SEQ ID NO: 221539 - DNA, 25 bp, Probe sequence
tacaaatggtggcatctcagtcaaa

SEQ ID NO: 221540 - DNA, 25 bp, Probe sequence
tacaagcagatatagaatttaaact

SEQ ID NO: 221541 - DNA, 25 bp, Probe sequence
tagatgaaatggtagactgtgcagc

SEQ ID NO: 221542 - DNA, 25 bp, Probe sequence
atttcacgattattagaacaaggtt

SEQ ID NO: 221543 - DNA, 25 bp, Probe sequence
atcacaagatgaacattgggatgaa

SEQ ID NO: 221544 - DNA, 25 bp, Probe sequence
atcatcaagctaaagaaggtaaact

SEQ ID NO: 221545 - DNA, 25 bp, Probe sequence
atgactgcaaactttggtgcagttg

SEQ ID NO: 221546 - DNA, 25 bp, Probe sequence
atgtttgtcgaagcggatttatcac

SEQ ID NO: 221547 - DNA, 25 bp, Probe sequence
atggcatttccacagagcgattaat

SEQ ID NO: 221548 - DNA, 25 bp, Probe sequence
aatttgccacaatcaatccagttgc

SEQ ID NO: 221549 - DNA, 25 bp, Probe sequence
caatcaatccagttgcaatttttgg

SEQ ID NO: 221550 - DNA, 25 bp, Probe sequence
cgatgcagaagtgatggcgaagcct

SEQ ID NO: 221551 - DNA, 25 bp, Probe sequence
gcaaactttggtgcagttggtttta

SEQ ID NO: 221552 - DNA, 25 bp, Probe sequence
gccacaatcaatccagttgcaattt

SEQ ID NO: 221553 - DNA, 25 bp, Probe sequence
gcagcgtgggattttgttgagaatg

SEQ ID NO: 221554 - DNA, 25 bp, Probe sequence
gaaggtaaacttttattagatatga

SEQ ID NO: 221555 - DNA, 25 bp, Probe sequence
gaagatgaaccaggcttatcagtat

SEQ ID NO: 221556 - DNA, 25 bp, Probe sequence
gaagcggatttatcacaagatgaac

SEQ ID NO: 221557 - DNA, 25 bp, Probe sequence
gaaccaggcttatcagtatatgaaa

SEQ ID NO: 221558 - DNA, 25 bp, Probe sequence
gacaatggcatttccacagagcgat

SEQ ID NO: 221559 - DNA, 25 bp, Probe sequence
gatgaaccaggcttatcagtatatg

SEQ ID NO: 221560 - DNA, 25 bp, Probe sequence
gatacgtgatttaagtaaagctgat

SEQ ID NO: 221561 - DNA, 25 bp, Probe sequence
gattaatgtttgtcgaagcggattt

SEQ ID NO: 221562 - DNA, 25 bp, Probe sequence
gttggcatgcgaattatttcacgat

SEQ ID NO: 221563 - DNA, 25 bp, Probe sequence
gtagaatttgccacaatcaatccag

SEQ ID NO: 221564 - DNA, 25 bp, Probe sequence
gtctaggtgctaaatttaatcatca

SEQ ID NO: 221565 - DNA, 25 bp, Probe sequence
gtcgaagcggatttatcacaagatg

SEQ ID NO: 221566 - DNA, 25 bp, Probe sequence
ggtgctaaatttaatcatcaagcta

SEQ ID NO: 221567 - DNA, 25 bp, Probe sequence
ggacaaatgaagatgaaccaggctt

SEQ ID NO: 221568 - DNA, 25 bp, Probe sequence
ggcatgcgaattatttcacgattat

SEQ ID NO: 221569 - DNA, 25 bp, Probe sequence
tggttgggaaccgattgcgacacaa

SEQ ID NO: 221570 - DNA, 25 bp, Probe sequence
tgcaagacaatggcatttccacaga

SEQ ID NO: 221571 - DNA, 25 bp, Probe sequence
tgcgaattatttcacgattattaga

SEQ ID NO: 221572 - DNA, 25 bp, Probe sequence
tttgttggcatgcgaattatttcac

SEQ ID NO: 221573 - DNA, 25 bp, Probe sequence
ttttcggtaaaacagacgatgcaga

SEQ ID NO: 221574 - DNA, 25 bp, Probe sequence
ttttgagtctaggtgctaaatttaa

SEQ ID NO: 221575 - DNA, 25 bp, Probe sequence
ttccacagagcgattaatgtttgtc

SEQ ID NO: 221576 - DNA, 25 bp, Probe sequence
atggctgatacgcttactacaccga

SEQ ID NO: 221577 - DNA, 25 bp, Probe sequence
aggtattttaatttcagttgctagt

SEQ ID NO: 221578 - DNA, 25 bp, Probe sequence
agtaaagcgacggggatggtgatta

SEQ ID NO: 221579 - DNA, 25 bp, Probe sequence
accaaatgatgatgagtttccagac

SEQ ID NO: 221580 - DNA, 25 bp, Probe sequence
acgcttactacaccgacgacaaatt

SEQ ID NO: 221581 - DNA, 25 bp, Probe sequence
accgacgacaaatttagtactcatt

SEQ ID NO: 221582 - DNA, 25 bp, Probe sequence
acaccgacgacaaatttagtactca

SEQ ID NO: 221583 - DNA, 25 bp, Probe sequence
aaagataatggctgatacgcttact

SEQ ID NO: 221584 - DNA, 25 bp, Probe sequence
aaagcgacggggatggtgattaata

SEQ ID NO: 221585 - DNA, 25 bp, Probe sequence
aatgatgatgagtttccagacaggt

SEQ ID NO: 221586 - DNA, 25 bp, Probe sequence
aatttcagttgctagtatacatggc

SEQ ID NO: 221587 - DNA, 25 bp, Probe sequence
aatttagtactcattgcagctttag

SEQ ID NO: 221588 - DNA, 25 bp, Probe sequence
ctgatacgcttactacaccgacgac

SEQ ID NO: 221589 - DNA, 25 bp, Probe sequence
ctcattgcagctttagttactaaca

SEQ ID NO: 221590 - DNA, 25 bp, Probe sequence
cggggatggtgattaatagcgacaa

SEQ ID NO: 221591 - DNA, 25 bp, Probe sequence
gccacgcgtaaaaaccaaatgatga

SEQ ID NO: 221592 - DNA, 25 bp, Probe sequence
gctagtatacatggcactaatgctg

SEQ ID NO: 221593 - DNA, 25 bp, Probe sequence
gcttactacaccgacgacaaattta

SEQ ID NO: 221594 - DNA, 25 bp, Probe sequence
gcagctttagttactaacaaagatg

SEQ ID NO: 221595 - DNA, 25 bp, Probe sequence
gacaaatttagtactcattgcagct

SEQ ID NO: 221596 - DNA, 25 bp, Probe sequence
gacaggtattttaatttcagttgct

SEQ ID NO: 221597 - DNA, 25 bp, Probe sequence
gacggggatggtgattaatagcgac

SEQ ID NO: 221598 - DNA, 25 bp, Probe sequence
gagtttccagacaggtattttaatt

SEQ ID NO: 221599 - DNA, 25 bp, Probe sequence
gatgagtttccagacaggtatttta

SEQ ID NO: 221600 - DNA, 25 bp, Probe sequence
gatgatgagtttccagacaggtatt

SEQ ID NO: 221601 - DNA, 25 bp, Probe sequence
gataatggctgatacgcttactaca

SEQ ID NO: 221602 - DNA, 25 bp, Probe sequence
gtatacatggcactaatgctgagaa

SEQ ID NO: 221603 - DNA, 25 bp, Probe sequence
gtactcattgcagctttagttacta

SEQ ID NO: 221604 - DNA, 25 bp, Probe sequence
tggctgatacgcttactacaccgac

SEQ ID NO: 221605 - DNA, 25 bp, Probe sequence
tggcactaatgctgagaaaaagata

SEQ ID NO: 221606 - DNA, 25 bp, Probe sequence
tgatacgcttactacaccgacgaca

SEQ ID NO: 221607 - DNA, 25 bp, Probe sequence
tcagttgctagtatacatggcacta

SEQ ID NO: 221608 - DNA, 25 bp, Probe sequence
taatggctgatacgcttactacacc

SEQ ID NO: 221609 - DNA, 25 bp, Probe sequence
tagtactcattgcagctttagttac

SEQ ID NO: 221610 - DNA, 25 bp, Probe sequence
attcacttattcgtatttatttaga

SEQ ID NO: 221611 - DNA, 25 bp, Probe sequence
atacgttaggttatctttatgcaca

SEQ ID NO: 221612 - DNA, 25 bp, Probe sequence
atctttatgcacatcaacaagatgg

SEQ ID NO: 221613 - DNA, 25 bp, Probe sequence
atggaattcacttattcgtatttat

SEQ ID NO: 221614 - DNA, 25 bp, Probe sequence
agctgatctatcgctatgtcgatgc

SEQ ID NO: 221615 - DNA, 25 bp, Probe sequence
agaagcattcacttcgatatttgat

SEQ ID NO: 221616 - DNA, 25 bp, Probe sequence
acgttaggttatctttatgcacatc

SEQ ID NO: 221617 - DNA, 25 bp, Probe sequence
actaaaatgttatctagtttacaat

SEQ ID NO: 221618 - DNA, 25 bp, Probe sequence
acaacgaacaggtccaactgtcagt

SEQ ID NO: 221619 - DNA, 25 bp, Probe sequence
aaaagctgatctatcgctatgtcga

SEQ ID NO: 221620 - DNA, 25 bp, Probe sequence
aacactcgtatcgcagttatctgaa

SEQ ID NO: 221621 - DNA, 25 bp, Probe sequence
aacgaacaggtccaactgtcagtaa

SEQ ID NO: 221622 - DNA, 25 bp, Probe sequence
aagcattacaacgaacaggtccaac

SEQ ID NO: 221623 - DNA, 25 bp, Probe sequence
aagcattcacttcgatatttgatga

SEQ ID NO: 221624 - DNA, 25 bp, Probe sequence
aagttagagcaatttgatattacaa

SEQ ID NO: 221625 - DNA, 25 bp, Probe sequence
aaggctgatcaaaagttagagcaat

SEQ ID NO: 221626 - DNA, 25 bp, Probe sequence
caaacactcgtatcgcagttatctg

SEQ ID NO: 221627 - DNA, 25 bp, Probe sequence
cactcgtatcgcagttatctgaaga

SEQ ID NO: 221628 - DNA, 25 bp, Probe sequence
caggtccaactgtcagtaatttatt

SEQ ID NO: 221629 - DNA, 25 bp, Probe sequence
ctcgtatcgcagttatctgaagaag

SEQ ID NO: 221630 - DNA, 25 bp, Probe sequence
gctaaagcattacaacgaacaggtc

SEQ ID NO: 221631 - DNA, 25 bp, Probe sequence
gcattacaacgaacaggtccaactg

SEQ ID NO: 221632 - DNA, 25 bp, Probe sequence
gaacaggtccaactgtcagtaattt

SEQ ID NO: 221633 - DNA, 25 bp, Probe sequence
gacacaaaatgatattgctaaagca

SEQ ID NO: 221634 - DNA, 25 bp, Probe sequence
gagatgaaacaaaaggctgatcaaa

SEQ ID NO: 221635 - DNA, 25 bp, Probe sequence
gttaggttatctttatgcacatcaa

SEQ ID NO: 221636 - DNA, 25 bp, Probe sequence
gtatttatttagaatgattagtcat

SEQ ID NO: 221637 - DNA, 25 bp, Probe sequence
gtatcgcagttatctgaagaagaaa

SEQ ID NO: 221638 - DNA, 25 bp, Probe sequence
gtcagtaatttattaaggaaccttg

SEQ ID NO: 221639 - DNA, 25 bp, Probe sequence
ggttatctttatgcacatcaacaag

SEQ ID NO: 221640 - DNA, 25 bp, Probe sequence
ggaaccttgaacgtaaaaagctgat

SEQ ID NO: 221641 - DNA, 25 bp, Probe sequence
tgatctatcgctatgtcgatgcaca

SEQ ID NO: 221642 - DNA, 25 bp, Probe sequence
tcacttcgatatttgatgaaatgga

SEQ ID NO: 221643 - DNA, 25 bp, Probe sequence
taggttatctttatgcacatcaaca

SEQ ID NO: 221644 - DNA, 25 bp, Probe sequence
attgccaatgatgatagggacttta

SEQ ID NO: 221645 - DNA, 25 bp, Probe sequence
atagccacatgatttctgctatctc

SEQ ID NO: 221646 - DNA, 25 bp, Probe sequence
atggtatctcatttagacttgtgca

SEQ ID NO: 221647 - DNA, 25 bp, Probe sequence
aggatttttagaagatagccacatg

SEQ ID NO: 221648 - DNA, 25 bp, Probe sequence
agacttgtgcaatttccagaactta

SEQ ID NO: 221649 - DNA, 25 bp, Probe sequence
agcacattatggaaacttcgcgatt

SEQ ID NO: 221650 - DNA, 25 bp, Probe sequence
accattcagtgatcaaatcgcagca

SEQ ID NO: 221651 - DNA, 25 bp, Probe sequence
aaacgttgttggtgcagctttgggt

SEQ ID NO: 221652 - DNA, 25 bp, Probe sequence
aacactgccagtatttgctatctta

SEQ ID NO: 221653 - DNA, 25 bp, Probe sequence
aattggacatcatatggtcggacta

SEQ ID NO: 221654 - DNA, 25 bp, Probe sequence
cagtaatgttgctgctgctctgttc

SEQ ID NO: 221655 - DNA, 25 bp, Probe sequence
gcgagaggtgaaacgttagctttaa

SEQ ID NO: 221656 - DNA, 25 bp, Probe sequence
gcgatgatgcatttctcattgccaa

SEQ ID NO: 221657 - DNA, 25 bp, Probe sequence
gcagctttgggtactgcaatcagta

SEQ ID NO: 221658 - DNA, 25 bp, Probe sequence
gcaccttttgtaattttgttcttca

SEQ ID NO: 221659 - DNA, 25 bp, Probe sequence
gaaagacgttatcaaagcagttatc

SEQ ID NO: 221660 - DNA, 25 bp, Probe sequence
gagtatcttaatgggattcacagga

SEQ ID NO: 221661 - DNA, 25 bp, Probe sequence
gttgagatggcgacatttattttga

SEQ ID NO: 221662 - DNA, 25 bp, Probe sequence
gtagtttctctatttatggtggtat

SEQ ID NO: 221663 - DNA, 25 bp, Probe sequence
gtaatgtttttaagtgcaccttttg

SEQ ID NO: 221664 - DNA, 25 bp, Probe sequence
gtgcaggaacttatatttcacgttt

SEQ ID NO: 221665 - DNA, 25 bp, Probe sequence
gtgatcgtttgacagttgatacatc

SEQ ID NO: 221666 - DNA, 25 bp, Probe sequence
gtggtattgcactaggacttatcgt

SEQ ID NO: 221667 - DNA, 25 bp, Probe sequence
ggtgctacaattatggccattttac

SEQ ID NO: 221668 - DNA, 25 bp, Probe sequence
ggtcggactatttactactgatcaa

SEQ ID NO: 221669 - DNA, 25 bp, Probe sequence
ggtaatttatttggcgttggtgcag

SEQ ID NO: 221670 - DNA, 25 bp, Probe sequence
ggtattcctgcatttttaatgagta

SEQ ID NO: 221671 - DNA, 25 bp, Probe sequence
tgattggtatgttagctagtgtagg

SEQ ID NO: 221672 - DNA, 25 bp, Probe sequence
tcgcgattgcaagttatggtatctc

SEQ ID NO: 221673 - DNA, 25 bp, Probe sequence
tcaaagcagttatcatgtctatcgg

SEQ ID NO: 221674 - DNA, 25 bp, Probe sequence
taggtttcttgtttactggtatgct

SEQ ID NO: 221675 - DNA, 25 bp, Probe sequence
tattagaacaatttgcacgtgcaat

SEQ ID NO: 221676 - DNA, 25 bp, Probe sequence
ttcacgtttattaggtgcgaaagac

SEQ ID NO: 221677 - DNA, 25 bp, Probe sequence
ttaattgctgagtcactttgtgctt

SEQ ID NO: 221678 - DNA, 25 bp, Probe sequence
attgaagagtttgctgattacctga

SEQ ID NO: 221679 - DNA, 25 bp, Probe sequence
atatttcgtgacatgttggacaaaa

SEQ ID NO: 221680 - DNA, 25 bp, Probe sequence
atcaagggaaaatggcttttagagt

SEQ ID NO: 221681 - DNA, 25 bp, Probe sequence
atcaattgaataaaacagcagggca

SEQ ID NO: 221682 - DNA, 25 bp, Probe sequence
atggctactttctatttcctaggga

SEQ ID NO: 221683 - DNA, 25 bp, Probe sequence
agataattataatcggccatacaaa

SEQ ID NO: 221684 - DNA, 25 bp, Probe sequence
agagtttgctgattacctgattgtt

SEQ ID NO: 221685 - DNA, 25 bp, Probe sequence
acctgattgttgctgttatcgatga

SEQ ID NO: 221686 - DNA, 25 bp, Probe sequence
acaccgactaaatcgggatatttcg

SEQ ID NO: 221687 - DNA, 25 bp, Probe sequence
aaatggctactttctatttcctagg

SEQ ID NO: 221688 - DNA, 25 bp, Probe sequence
aaacagcagggcaaacacaaaagtg

SEQ ID NO: 221689 - DNA, 25 bp, Probe sequence
aatcggccatacaaaattgaagagt

SEQ ID NO: 221690 - DNA, 25 bp, Probe sequence
aatcgggatatttcgtgacatgttg

SEQ ID NO: 221691 - DNA, 25 bp, Probe sequence
cgggatatttcgtgacatgttggac

SEQ ID NO: 221692 - DNA, 25 bp, Probe sequence
gctgattacctgattgttgctgtta

SEQ ID NO: 221693 - DNA, 25 bp, Probe sequence
gaagagtttgctgattacctgattg

SEQ ID NO: 221694 - DNA, 25 bp, Probe sequence
gaaaaaggtatcttagcttcatcta

SEQ ID NO: 221695 - DNA, 25 bp, Probe sequence
gactaaatcgggatatttcgtgaca

SEQ ID NO: 221696 - DNA, 25 bp, Probe sequence
gacgaagataattataatcggccat

SEQ ID NO: 221697 - DNA, 25 bp, Probe sequence
gagtttgctgattacctgattgttg

SEQ ID NO: 221698 - DNA, 25 bp, Probe sequence
gatgaattaaatggctactttctat

SEQ ID NO: 221699 - DNA, 25 bp, Probe sequence
gattacctgattgttgctgttatcg

SEQ ID NO: 221700 - DNA, 25 bp, Probe sequence
gattgttgctgttatcgatgatgaa

SEQ ID NO: 221701 - DNA, 25 bp, Probe sequence
gtttgctgattacctgattgttgct

SEQ ID NO: 221702 - DNA, 25 bp, Probe sequence
gtgacatgttggacaaaagacgaag

SEQ ID NO: 221703 - DNA, 25 bp, Probe sequence
ggtatcttagcttcatctaagtatc

SEQ ID NO: 221704 - DNA, 25 bp, Probe sequence
ggatatttcgtgacatgttggacaa

SEQ ID NO: 221705 - DNA, 25 bp, Probe sequence
ggctactttctatttcctagggaat

SEQ ID NO: 221706 - DNA, 25 bp, Probe sequence
tagcttcatctaagtatcaagggaa

SEQ ID NO: 221707 - DNA, 25 bp, Probe sequence
tataatcggccatacaaaattgaag

SEQ ID NO: 221708 - DNA, 25 bp, Probe sequence
ttacctgattgttgctgttatcgat

SEQ ID NO: 221709 - DNA, 25 bp, Probe sequence
ttaaatggctactttctatttccta

SEQ ID NO: 221710 - DNA, 25 bp, Probe sequence
ttgctgattacctgattgttgctgt

SEQ ID NO: 221711 - DNA, 25 bp, Probe sequence
ttgttgctgttatcgatgatgaatt

SEQ ID NO: 221712 - DNA, 25 bp, Probe sequence
attttaggaatagggccagtcgaat

SEQ ID NO: 221713 - DNA, 25 bp, Probe sequence
atagtagggcatcatcacatatcca

SEQ ID NO: 221714 - DNA, 25 bp, Probe sequence
agggccagtcgaattaagagttaga

SEQ ID NO: 221715 - DNA, 25 bp, Probe sequence
agtaccaaatcaagcggcacttcat

SEQ ID NO: 221716 - DNA, 25 bp, Probe sequence
acttgcctgactttttagaagcaga

SEQ ID NO: 221717 - DNA, 25 bp, Probe sequence
acacaaatgtccttggattacgatt

SEQ ID NO: 221718 - DNA, 25 bp, Probe sequence
aagacaatccttcaatgtatcattt

SEQ ID NO: 221719 - DNA, 25 bp, Probe sequence
aatcaagcggcacttcattattttg

SEQ ID NO: 221720 - DNA, 25 bp, Probe sequence
aataaatcattcgatgtgctgacat

SEQ ID NO: 221721 - DNA, 25 bp, Probe sequence
aattgaacttgcctgactttttaga

SEQ ID NO: 221722 - DNA, 25 bp, Probe sequence
cgcctggatttactattgatacacc

SEQ ID NO: 221723 - DNA, 25 bp, Probe sequence
gccaggtactgaaacgatttatcga

SEQ ID NO: 221724 - DNA, 25 bp, Probe sequence
gcagcgcgtacggtagaatttttgg

SEQ ID NO: 221725 - DNA, 25 bp, Probe sequence
gcaccacaaggtttatattcggatt

SEQ ID NO: 221726 - DNA, 25 bp, Probe sequence
gaatttgcgactgaagcgcctggat

SEQ ID NO: 221727 - DNA, 25 bp, Probe sequence
gaagtaccacatcaatggcaacata

SEQ ID NO: 221728 - DNA, 25 bp, Probe sequence
gactgaagcgcctggatttactatt

SEQ ID NO: 221729 - DNA, 25 bp, Probe sequence
gacgaggttatatccatcatattgc

SEQ ID NO: 221730 - DNA, 25 bp, Probe sequence
gagttagaaatgcagcgcgtacggt

SEQ ID NO: 221731 - DNA, 25 bp, Probe sequence
gatgtgctgacattagcaccacaag

SEQ ID NO: 221732 - DNA, 25 bp, Probe sequence
gttattgagcaacagggacaacgtg

SEQ ID NO: 221733 - DNA, 25 bp, Probe sequence
tggggacgaagtaggtacagccgga

SEQ ID NO: 221734 - DNA, 25 bp, Probe sequence
gtatcatttgttttatggggacgaa

SEQ ID NO: 221735 - DNA, 25 bp, Probe sequence
gtctgaacgtttgtactatcttgga

SEQ ID NO: 221736 - DNA, 25 bp, Probe sequence
gggacaacgtgaaagacctggacga

SEQ ID NO: 221737 - DNA, 25 bp, Probe sequence
ggtataattgatcgctatttcttta

SEQ ID NO: 221738 - DNA, 25 bp, Probe sequence
ggatttttacacaaatgtccttgga

SEQ ID NO: 221739 - DNA, 25 bp, Probe sequence
ggaaaatgtcttaggttatcgcaaa

SEQ ID NO: 221740 - DNA, 25 bp, Probe sequence
ggcatcatcacatatccatgtatac

SEQ ID NO: 221741 - DNA, 25 bp, Probe sequence
tgcgggtcataagcagccaggtact

SEQ ID NO: 221742 - DNA, 25 bp, Probe sequence
tctttaaatcattatactatcgcca

SEQ ID NO: 221743 - DNA, 25 bp, Probe sequence
taggtacagccggaacaattttaag

SEQ ID NO: 221744 - DNA, 25 bp, Probe sequence
tatactatcgccataattcaattat

SEQ ID NO: 221745 - DNA, 25 bp, Probe sequence
tattcggattttgtagttattgagc

SEQ ID NO: 221746 - DNA, 25 bp, Probe sequence
attacttggtctggaaaatatcgtc

SEQ ID NO: 221747 - DNA, 25 bp, Probe sequence
atacagggatgtcatttattcgtgg

SEQ ID NO: 221748 - DNA, 25 bp, Probe sequence
acccttggtggcccagcaatgaact

SEQ ID NO: 221749 - DNA, 25 bp, Probe sequence
actgaagcaggtttcgatgcttcgc

SEQ ID NO: 221750 - DNA, 25 bp, Probe sequence
aactgagcgtattacttggtctgga

SEQ ID NO: 221751 - DNA, 25 bp, Probe sequence
aagcgggaaaacaaggtgtgccaat

SEQ ID NO: 221752 - DNA, 25 bp, Probe sequence
aagtttcaagttcttcaacgattat

SEQ ID NO: 221753 - DNA, 25 bp, Probe sequence
caatatggcgtgctgttggtggtcc

SEQ ID NO: 221754 - DNA, 25 bp, Probe sequence
cctcttgagtttggtttgtattcct

SEQ ID NO: 221755 - DNA, 25 bp, Probe sequence
gaagcgctaatggttggaagcccgc

SEQ ID NO: 221756 - DNA, 25 bp, Probe sequence
gaaaatattcccaagaccaatcgat

SEQ ID NO: 221757 - DNA, 25 bp, Probe sequence
gacttcgcgacattagatttgattt

SEQ ID NO: 221758 - DNA, 25 bp, Probe sequence
gagagaattttatccacatttgaat

SEQ ID NO: 221759 - DNA, 25 bp, Probe sequence
gatttgatttctcatggtagagccg

SEQ ID NO: 221760 - DNA, 25 bp, Probe sequence
gattttggcggtgtgccatttgaaa

SEQ ID NO: 221761 - DNA, 25 bp, Probe sequence
gattattagtgcaacagatcctgta

SEQ ID NO: 221762 - DNA, 25 bp, Probe sequence
gtagctggcagagcatcaagaacag

SEQ ID NO: 221763 - DNA, 25 bp, Probe sequence
gtaagagtatttgaagacttcgcga

SEQ ID NO: 221764 - DNA, 25 bp, Probe sequence
ggtgtgccaatgatgattacaaccc

SEQ ID NO: 221765 - DNA, 25 bp, Probe sequence
ggtgcaattgcccaagcgacaaagc

SEQ ID NO: 221766 - DNA, 25 bp, Probe sequence
ggtcatcaacgttttatggcacagc

SEQ ID NO: 221767 - DNA, 25 bp, Probe sequence
ggtagagccgaaattgtagctggca

SEQ ID NO: 221768 - DNA, 25 bp, Probe sequence
ggttgtgttaggtgcaattgcccaa

SEQ ID NO: 221769 - DNA, 25 bp, Probe sequence
ggtttgtattccttaggtgatcatt

SEQ ID NO: 221770 - DNA, 25 bp, Probe sequence
ggtattgatgtttttgcagttggtg

SEQ ID NO: 221771 - DNA, 25 bp, Probe sequence
ggttatccgaaacagcaatttgcta

SEQ ID NO: 221772 - DNA, 25 bp, Probe sequence
ggttctatagatgcttatcgtcaag

SEQ ID NO: 221773 - DNA, 25 bp, Probe sequence
ggaagcccgcaacaaattattgaaa

SEQ ID NO: 221774 - DNA, 25 bp, Probe sequence
tggtggcccagcaatgaactttaaa

SEQ ID NO: 221775 - DNA, 25 bp, Probe sequence
tgttggtggtccacctgcaagtgct

SEQ ID NO: 221776 - DNA, 25 bp, Probe sequence
tgatgattacaacccttggtggccc

SEQ ID NO: 221777 - DNA, 25 bp, Probe sequence
taggtgatcatttattgaatccatt

SEQ ID NO: 221778 - DNA, 25 bp, Probe sequence
tatggcacagcttgattttggcggt

SEQ ID NO: 221779 - DNA, 25 bp, Probe sequence
ttttgacttgtttggctatgattta

SEQ ID NO: 221780 - DNA, 25 bp, Probe sequence
atgatttagctcaataccaacgtat

SEQ ID NO: 221781 - DNA, 25 bp, Probe sequence
agagtcgttagctaaaccgattcat

SEQ ID NO: 221782 - DNA, 25 bp, Probe sequence
agcaaagtcgtctaactcaatatat

SEQ ID NO: 221783 - DNA, 25 bp, Probe sequence
accgattcatgctggtatcacaaat

SEQ ID NO: 221784 - DNA, 25 bp, Probe sequence
acggctttgtccattaaattagctg

SEQ ID NO: 221785 - DNA, 25 bp, Probe sequence
aaagtaactgataaacgtgcacatt

SEQ ID NO: 221786 - DNA, 25 bp, Probe sequence
aacatttgtcactacgacatctgta

SEQ ID NO: 221787 - DNA, 25 bp, Probe sequence
aacgctaaattgtatcgtattaatc

SEQ ID NO: 221788 - DNA, 25 bp, Probe sequence
aatgtggttctatttgcgccagaag

SEQ ID NO: 221789 - DNA, 25 bp, Probe sequence
cgaggcattagcttattcggaccac

SEQ ID NO: 221790 - DNA, 25 bp, Probe sequence
cgtgcacattttattcaagagctag

SEQ ID NO: 221791 - DNA, 25 bp, Probe sequence
gcaacgtacaacggctttgtccatt

SEQ ID NO: 221792 - DNA, 25 bp, Probe sequence
gctcaaaatgaagcggcacgacttg

SEQ ID NO: 221793 - DNA, 25 bp, Probe sequence
gcatttattaagtacgattcagcat

SEQ ID NO: 221794 - DNA, 25 bp, Probe sequence
gaatcaatttataccttagctttag

SEQ ID NO: 221795 - DNA, 25 bp, Probe sequence
gaaattatgtctattcttagcgata

SEQ ID NO: 221796 - DNA, 25 bp, Probe sequence
gacacggcacgatgccattaacaat

SEQ ID NO: 221797 - DNA, 25 bp, Probe sequence
gacgacgctttatagatatggagtt

SEQ ID NO: 221798 - DNA, 25 bp, Probe sequence
gagcttagttatagacacggcacga

SEQ ID NO: 221799 - DNA, 25 bp, Probe sequence
gatgattcgcgtcaaacgcatttat

SEQ ID NO: 221800 - DNA, 25 bp, Probe sequence
gtcatcctgacgtgaatatcctcat

SEQ ID NO: 221801 - DNA, 25 bp, Probe sequence
ggggaatatcccatcttattattag

SEQ ID NO: 221802 - DNA, 25 bp, Probe sequence
ggttacgttgaaatgtcatcctgac

SEQ ID NO: 221803 - DNA, 25 bp, Probe sequence
ggatgctcaaacatatggttctcaa

SEQ ID NO: 221804 - DNA, 25 bp, Probe sequence
ggagttgggccaaatttctgctgtt

SEQ ID NO: 221805 - DNA, 25 bp, Probe sequence
ggaactcatacgttttaatgctgat

SEQ ID NO: 221806 - DNA, 25 bp, Probe sequence
ggctctcctcaaataagacgacgct

SEQ ID NO: 221807 - DNA, 25 bp, Probe sequence
ggccaaatttctgctgtttacttaa

SEQ ID NO: 221808 - DNA, 25 bp, Probe sequence
tggttctcaaggacagcaacgtaca

SEQ ID NO: 221809 - DNA, 25 bp, Probe sequence
tgaagttaaatacactccaattaga

SEQ ID NO: 221810 - DNA, 25 bp, Probe sequence
taaagcagttacaattaggccaaaa

SEQ ID NO: 221811 - DNA, 25 bp, Probe sequence
tattagacgatgtactcagtgaatt

SEQ ID NO: 221812 - DNA, 25 bp, Probe sequence
ttgatgtgaatggcatggatgctca

SEQ ID NO: 221813 - DNA, 25 bp, Probe sequence
ttgaatattgtaaaaggctctcctc

SEQ ID NO: 221814 - DNA, 25 bp, Probe sequence
atccaccagatcttcaaaaaatggc

SEQ ID NO: 221815 - DNA, 25 bp, Probe sequence
atgagagttcaagttagacgcctat

SEQ ID NO: 221816 - DNA, 25 bp, Probe sequence
agaattaatggcaagtcagcaataa

SEQ ID NO: 221817 - DNA, 25 bp, Probe sequence
accagatcttcaaaaaatggctgtg

SEQ ID NO: 221818 - DNA, 25 bp, Probe sequence
aaatggctgtggaacaagttgtaga

SEQ ID NO: 221819 - DNA, 25 bp, Probe sequence
aagagccattgcacatgagttaact

SEQ ID NO: 221820 - DNA, 25 bp, Probe sequence
aagagttaagagccattgcacatga

SEQ ID NO: 221821 - DNA, 25 bp, Probe sequence
cagctaaagaagctttgggcgataa

SEQ ID NO: 221822 - DNA, 25 bp, Probe sequence
gccattgcacatgagttaactaaaa

SEQ ID NO: 221823 - DNA, 25 bp, Probe sequence
gcagaattaatggcaagtcagcaat

SEQ ID NO: 221824 - DNA, 25 bp, Probe sequence
gaagctttgggcgataaagagttaa

SEQ ID NO: 221825 - DNA, 25 bp, Probe sequence
gaaacagctaaagaagctttgggcg

SEQ ID NO: 221826 - DNA, 25 bp, Probe sequence
gacgcctattaaagaaatatggcta

SEQ ID NO: 221827 - DNA, 25 bp, Probe sequence
gagccattgcacatgagttaactaa

SEQ ID NO: 221828 - DNA, 25 bp, Probe sequence
gagcaagcagaattaatggcaagtc

SEQ ID NO: 221829 - DNA, 25 bp, Probe sequence
gagagttcaagttagacgcctatta

SEQ ID NO: 221830 - DNA, 25 bp, Probe sequence
gagttcaagttagacgcctattaaa

SEQ ID NO: 221831 - DNA, 25 bp, Probe sequence
gagttaagagccattgcacatgagt

SEQ ID NO: 221832 - DNA, 25 bp, Probe sequence
gatcttcaaaaaatggctgtggaac

SEQ ID NO: 221833 - DNA, 25 bp, Probe sequence
gataacatgagtgttgattggtcta

SEQ ID NO: 221834 - DNA, 25 bp, Probe sequence
gataaagagttaagagccattgcac

SEQ ID NO: 221835 - DNA, 25 bp, Probe sequence
gattggtctaaacgagacagtgcta

SEQ ID NO: 221836 - DNA, 25 bp, Probe sequence
gttcaagttagacgcctattaaaga

SEQ ID NO: 221837 - DNA, 25 bp, Probe sequence
gttaagagccattgcacatgagtta

SEQ ID NO: 221838 - DNA, 25 bp, Probe sequence
gtatgtagtatatcgagcttcacat

SEQ ID NO: 221839 - DNA, 25 bp, Probe sequence
gtagtatatcgagcttcacatgaaa

SEQ ID NO: 221840 - DNA, 25 bp, Probe sequence
gtgctaaagctaaaatgagagttca

SEQ ID NO: 221841 - DNA, 25 bp, Probe sequence
ggctatccaccagatcttcaaaaaa

SEQ ID NO: 221842 - DNA, 25 bp, Probe sequence
ggctgtggaacaagttgtagagcaa

SEQ ID NO: 221843 - DNA, 25 bp, Probe sequence
tgtggaacaagttgtagagcaagca

SEQ ID NO: 221844 - DNA, 25 bp, Probe sequence
tgcacatgagttaactaaaacagtt

SEQ ID NO: 221845 - DNA, 25 bp, Probe sequence
tctaaacgagacagtgctaaagcta

SEQ ID NO: 221846 - DNA, 25 bp, Probe sequence
taaacgagacagtgctaaagctaaa

SEQ ID NO: 221847 - DNA, 25 bp, Probe sequence
tagtatatcgagcttcacatgaaac

SEQ ID NO: 221848 - DNA, 25 bp, Probe sequence
atcgttcaagaaattcacttaggga

SEQ ID NO: 221849 - DNA, 25 bp, Probe sequence
aggaacgctagttggtgtcatcggt

SEQ ID NO: 221850 - DNA, 25 bp, Probe sequence
atggtaatggatttcagtgtggcat

SEQ ID NO: 221851 - DNA, 25 bp, Probe sequence
agtgccgcagttaataatgaaaaaa

SEQ ID NO: 221852 - DNA, 25 bp, Probe sequence
agcgcttttcaatttagtcaatcgt

SEQ ID NO: 221853 - DNA, 25 bp, Probe sequence
acgctagttggtgtcatcggtttac

SEQ ID NO: 221854 - DNA, 25 bp, Probe sequence
aaatggtatttattcatcgagttac

SEQ ID NO: 221855 - DNA, 25 bp, Probe sequence
aatggttaccttgggtagatgcaac

SEQ ID NO: 221856 - DNA, 25 bp, Probe sequence
catgggattatgacacaagcagttg

SEQ ID NO: 221857 - DNA, 25 bp, Probe sequence
catgacacagaagcgcttttcaatt

SEQ ID NO: 221858 - DNA, 25 bp, Probe sequence
catcgagttacatctatagtttatt

SEQ ID NO: 221859 - DNA, 25 bp, Probe sequence
ctagttggtgtcatcggtttacatg

SEQ ID NO: 221860 - DNA, 25 bp, Probe sequence
gctattcctgaaaggctgggattta

SEQ ID NO: 221861 - DNA, 25 bp, Probe sequence
gcttttcaatttagtcaatcgttca

SEQ ID NO: 221862 - DNA, 25 bp, Probe sequence
gcagttgaggcattgataaagtatt

SEQ ID NO: 221863 - DNA, 25 bp, Probe sequence
ttcctgaaaggctgggatttactag

SEQ ID NO: 221864 - DNA, 25 bp, Probe sequence
gaaggaacgctagttggtgtcatcg

SEQ ID NO: 221865 - DNA, 25 bp, Probe sequence
gaaggtatgttacgtgacaatgaat

SEQ ID NO: 221866 - DNA, 25 bp, Probe sequence
gaagcgcttttcaatttagtcaatc

SEQ ID NO: 221867 - DNA, 25 bp, Probe sequence
gaacgctagttggtgtcatcggttt

SEQ ID NO: 221868 - DNA, 25 bp, Probe sequence
gacacaagcagttgaggcattgata

SEQ ID NO: 221869 - DNA, 25 bp, Probe sequence
gacacagaagcgcttttcaatttag

SEQ ID NO: 221870 - DNA, 25 bp, Probe sequence
gagttacatctatagtttattaaaa

SEQ ID NO: 221871 - DNA, 25 bp, Probe sequence
gagggtcatgggattatgacacaag

SEQ ID NO: 221872 - DNA, 25 bp, Probe sequence
gttacgtgacaatgaattactaaat

SEQ ID NO: 221873 - DNA, 25 bp, Probe sequence
gtcaatcgttcaagaaattcactta

SEQ ID NO: 221874 - DNA, 25 bp, Probe sequence
gtggcatttggtatgaaggaacgct

SEQ ID NO: 221875 - DNA, 25 bp, Probe sequence
gggaatggttaccttgggtagatgc

SEQ ID NO: 221876 - DNA, 25 bp, Probe sequence
ggtatttattcatcgagttacatct

SEQ ID NO: 221877 - DNA, 25 bp, Probe sequence
ggattatgacacaagcagttgaggc

SEQ ID NO: 221878 - DNA, 25 bp, Probe sequence
ggatttcagtgtggcatttggtatg

SEQ ID NO: 221879 - DNA, 25 bp, Probe sequence
ttcacttagggaatggttaccttgg

SEQ ID NO: 221880 - DNA, 25 bp, Probe sequence
tattcatcgagttacatctatagtt

SEQ ID NO: 221881 - DNA, 25 bp, Probe sequence
tttcaatttagtcaatcgttcaaga

SEQ ID NO: 221882 - DNA, 25 bp, Probe sequence
atacattagatatcacaccaaaatt

SEQ ID NO: 221883 - DNA, 25 bp, Probe sequence
atgttacaaggttctgttgacctat

SEQ ID NO: 221884 - DNA, 25 bp, Probe sequence
agatcctaaaattgatgcacgtctt

SEQ ID NO: 221885 - DNA, 25 bp, Probe sequence
aaagttaacaacgctattattagca

SEQ ID NO: 221886 - DNA, 25 bp, Probe sequence
aagaccgtaaagcatttgcggatgc

SEQ ID NO: 221887 - DNA, 25 bp, Probe sequence
aacaacggcggttatgagtcatttg

SEQ ID NO: 221888 - DNA, 25 bp, Probe sequence
aacgctctgaaccagttgcagaagc

SEQ ID NO: 221889 - DNA, 25 bp, Probe sequence
aagaattgcatgccaaagctgatac

SEQ ID NO: 221890 - DNA, 25 bp, Probe sequence
aagatgatggtgttaaagcagaatt

SEQ ID NO: 221891 - DNA, 25 bp, Probe sequence
aatgcattaggagagccactaagta

SEQ ID NO: 221892 - DNA, 25 bp, Probe sequence
aattgctgcatgtgggaacgacgat

SEQ ID NO: 221893 - DNA, 25 bp, Probe sequence
aattgatgcacgtcttgcagatatg

SEQ ID NO: 221894 - DNA, 25 bp, Probe sequence
gctgcatgtgggaacgacgatagta

SEQ ID NO: 221895 - DNA, 25 bp, Probe sequence
gcatgccaaagctgatacattagat

SEQ ID NO: 221896 - DNA, 25 bp, Probe sequence
gctattattagcatcaacgttatta

SEQ ID NO: 221897 - DNA, 25 bp, Probe sequence
gcatcaacgttattaattgctgcat

SEQ ID NO: 221898 - DNA, 25 bp, Probe sequence
gcaaaagcgttatatccaaaagttc

SEQ ID NO: 221899 - DNA, 25 bp, Probe sequence
gaatggtcaggatatcataagattg

SEQ ID NO: 221900 - DNA, 25 bp, Probe sequence
gaagaaatttattcacatacagatt

SEQ ID NO: 221901 - DNA, 25 bp, Probe sequence
gaaccagttgcagaagcatttggag

SEQ ID NO: 221902 - DNA, 25 bp, Probe sequence
gaaaataatgatatggcccaagcaa

SEQ ID NO: 221903 - DNA, 25 bp, Probe sequence
gacctattaaatgaagttgcaactt

SEQ ID NO: 221904 - DNA, 25 bp, Probe sequence
gatgcacgtcttgcagatatgaaag

SEQ ID NO: 221905 - DNA, 25 bp, Probe sequence
gatatggcccaagcaaaagcgttat

SEQ ID NO: 221906 - DNA, 25 bp, Probe sequence
gatatcacaccaaaattaatgttac

SEQ ID NO: 221907 - DNA, 25 bp, Probe sequence
gttgcaacttctaaaatcacaggtg

SEQ ID NO: 221908 - DNA, 25 bp, Probe sequence
gtatgtattatgaacgctctgaacc

SEQ ID NO: 221909 - DNA, 25 bp, Probe sequence
ggttctgttgacctattaaatgaag

SEQ ID NO: 221910 - DNA, 25 bp, Probe sequence
ggcccaagcaaaagcgttatatcca

SEQ ID NO: 221911 - DNA, 25 bp, Probe sequence
taaaatggctgtgattactgaatga

SEQ ID NO: 221912 - DNA, 25 bp, Probe sequence
tatgaacgctctgaaccagttgcag

SEQ ID NO: 221913 - DNA, 25 bp, Probe sequence
tatgacttatttaaacctattttag

SEQ ID NO: 221914 - DNA, 25 bp, Probe sequence
tatccaaaagttcgtatgtattatg

SEQ ID NO: 221915 - DNA, 25 bp, Probe sequence
ttgcggatgctgttaatgcattagg

SEQ ID NO: 221916 - DNA, 25 bp, Probe sequence
attacacatagaggttctgcttcat

SEQ ID NO: 221917 - DNA, 25 bp, Probe sequence
atattgttaaggtacgttgggcgca

SEQ ID NO: 221918 - DNA, 25 bp, Probe sequence
atctagtaaaattcccgatgccttt

SEQ ID NO: 221919 - DNA, 25 bp, Probe sequence
agtggacggttatggctgatcgtat

SEQ ID NO: 221920 - DNA, 25 bp, Probe sequence
agggaggataccttggtgaaacatt

SEQ ID NO: 221921 - DNA, 25 bp, Probe sequence
agttcgtccatttcgagatattgtt

SEQ ID NO: 221922 - DNA, 25 bp, Probe sequence
agacgattacagcgatggtgatatt

SEQ ID NO: 221923 - DNA, 25 bp, Probe sequence
acgcaattttcaagacgtacatttt

SEQ ID NO: 221924 - DNA, 25 bp, Probe sequence
acattgaaacgtgggatcgtactgc

SEQ ID NO: 221925 - DNA, 25 bp, Probe sequence
acacccacgcaaaaaacatgcaatt

SEQ ID NO: 221926 - DNA, 25 bp, Probe sequence
aagaacaagaggctacatttggtcg

SEQ ID NO: 221927 - DNA, 25 bp, Probe sequence
aagcgaaagatagtcatggcgagta

SEQ ID NO: 221928 - DNA, 25 bp, Probe sequence
aagcatgctcaaatgattcgcaagt

SEQ ID NO: 221929 - DNA, 25 bp, Probe sequence
aatgttaggtattggcggtgccggt

SEQ ID NO: 221930 - DNA, 25 bp, Probe sequence
cgttgggcgcaatctggttttatct

SEQ ID NO: 221931 - DNA, 25 bp, Probe sequence
cggtgccggtgttgcaattggcgca

SEQ ID NO: 221932 - DNA, 25 bp, Probe sequence
gcaagcaagttaacgattacctttg

SEQ ID NO: 221933 - DNA, 25 bp, Probe sequence
gcaagtatcctttcatgcggttcat

SEQ ID NO: 221934 - DNA, 25 bp, Probe sequence
gcaatctggttttatctctgctaaa

SEQ ID NO: 221935 - DNA, 25 bp, Probe sequence
gaccgcacaggtaacttcgaaacag

SEQ ID NO: 221936 - DNA, 25 bp, Probe sequence
gacggatgggcgaaacatggaactt

SEQ ID NO: 221937 - DNA, 25 bp, Probe sequence
gatggtacggatgaccgcacaggta

SEQ ID NO: 221938 - DNA, 25 bp, Probe sequence
gatttaccgcattttccgaatgatc

SEQ ID NO: 221939 - DNA, 25 bp, Probe sequence
gttctgcttcatttttagtattacc

SEQ ID NO: 221940 - DNA, 25 bp, Probe sequence
gttcaatacaccagaagatccggaa

SEQ ID NO: 221941 - DNA, 25 bp, Probe sequence
gtcaattttacgtagagcctttaat

SEQ ID NO: 221942 - DNA, 25 bp, Probe sequence
gtgatattatgattcaagcatgctc

SEQ ID NO: 221943 - DNA, 25 bp, Probe sequence
gtgtttattgatgacggatgggcga

SEQ ID NO: 221944 - DNA, 25 bp, Probe sequence
gtggtctttcaaatcaatgttcaat

SEQ ID NO: 221945 - DNA, 25 bp, Probe sequence
ggtgttggtagcatgtggtctttca

SEQ ID NO: 221946 - DNA, 25 bp, Probe sequence
ggcgcaagtggtgttggtagcatgt

SEQ ID NO: 221947 - DNA, 25 bp, Probe sequence
ggctgatcgtatgatggatggtgat

SEQ ID NO: 221948 - DNA, 25 bp, Probe sequence
tgcggttcataatttagttcgtcca

SEQ ID NO: 221949 - DNA, 25 bp, Probe sequence
tcccgatgcctttaaagatttaccg

SEQ ID NO: 221950 - DNA, 25 bp, Probe sequence
attggtttaatatctgtgttgcgtg

SEQ ID NO: 221951 - DNA, 25 bp, Probe sequence
attcgcaattatgacgcaaatcaat

SEQ ID NO: 221952 - DNA, 25 bp, Probe sequence
attaatgtttatcgttggtgtttgg

SEQ ID NO: 221953 - DNA, 25 bp, Probe sequence
atattatggtagttgctatcttaat

SEQ ID NO: 221954 - DNA, 25 bp, Probe sequence
atatggacaaattgaagtcgcatta

SEQ ID NO: 221955 - DNA, 25 bp, Probe sequence
aggttgttggccatagttatagctt

SEQ ID NO: 221956 - DNA, 25 bp, Probe sequence
agagaaggcgattaaagctatcgac

SEQ ID NO: 221957 - DNA, 25 bp, Probe sequence
actgcaagtgtgattggtggtgcaa

SEQ ID NO: 221958 - DNA, 25 bp, Probe sequence
acatgcttggacaacttttaaatca

SEQ ID NO: 221959 - DNA, 25 bp, Probe sequence
acactttcgcaattaacgaagtcat

SEQ ID NO: 221960 - DNA, 25 bp, Probe sequence
aaatctgcactttctaataattcga

SEQ ID NO: 221961 - DNA, 25 bp, Probe sequence
aaatgcttggcgtaagtattcaaaa

SEQ ID NO: 221962 - DNA, 25 bp, Probe sequence
aaagtgtcacatgcttggacaactt

SEQ ID NO: 221963 - DNA, 25 bp, Probe sequence
aaagatacactttcgcaattaacga

SEQ ID NO: 221964 - DNA, 25 bp, Probe sequence
aacgaagtcattaattgcttatgaa

SEQ ID NO: 221965 - DNA, 25 bp, Probe sequence
caattgtcggatgctgatgctgcgc

SEQ ID NO: 221966 - DNA, 25 bp, Probe sequence
aattggctagtaaagatgcgggttc

SEQ ID NO: 221967 - DNA, 25 bp, Probe sequence
ctgatgctgcgcttacacattttat

SEQ ID NO: 221968 - DNA, 25 bp, Probe sequence
gctgcgcttacacattttatagaaa

SEQ ID NO: 221969 - DNA, 25 bp, Probe sequence
gcactttctaataattcgatatcga

SEQ ID NO: 221970 - DNA, 25 bp, Probe sequence
gcaattgagcaagtggtaagtgcag

SEQ ID NO: 221971 - DNA, 25 bp, Probe sequence
gaaggattcccaacgattaactggt

SEQ ID NO: 221972 - DNA, 25 bp, Probe sequence
gaggttatcattttctatatgggga

SEQ ID NO: 221973 - DNA, 25 bp, Probe sequence
gatgtgatgattatctttttacgtg

SEQ ID NO: 221974 - DNA, 25 bp, Probe sequence
gatcaataccatgtatcacaattaa

SEQ ID NO: 221975 - DNA, 25 bp, Probe sequence
gttgcggtcatattaatgtttatcg

SEQ ID NO: 221976 - DNA, 25 bp, Probe sequence
gtgcagttaagaaattatcgcttga

SEQ ID NO: 221977 - DNA, 25 bp, Probe sequence
gtgatgtatatagtgtgataacgga

SEQ ID NO: 221978 - DNA, 25 bp, Probe sequence
ggtattgttagcgacgattggttta

SEQ ID NO: 221979 - DNA, 25 bp, Probe sequence
tggtggtgcaattgccggacttgta

SEQ ID NO: 221980 - DNA, 25 bp, Probe sequence
taatatctgtgttgcgtgaaggtgt

SEQ ID NO: 221981 - DNA, 25 bp, Probe sequence
taaagaggttgttggccatagttat

SEQ ID NO: 221982 - DNA, 25 bp, Probe sequence
tatgggattcaaaatgcttggcgta

SEQ ID NO: 221983 - DNA, 25 bp, Probe sequence
ttgtcggatgctgatgctgcgctta

SEQ ID NO: 221984 - DNA, 25 bp, Probe sequence
atattgatacgaacacaccaaagta

SEQ ID NO: 221985 - DNA, 25 bp, Probe sequence
atagcattaaccggatgtggattaa

SEQ ID NO: 221986 - DNA, 25 bp, Probe sequence
ataacaacatagcattaaccggatg

SEQ ID NO: 221987 - DNA, 25 bp, Probe sequence
atgactgataatactaagtttatta

SEQ ID NO: 221988 - DNA, 25 bp, Probe sequence
agttgagcggtatcaatggtagaga

SEQ ID NO: 221989 - DNA, 25 bp, Probe sequence
agcattaaccggatgtggattaata

SEQ ID NO: 221990 - DNA, 25 bp, Probe sequence
agatactacatacatcaacaatatt

SEQ ID NO: 221991 - DNA, 25 bp, Probe sequence
acgaacacaccaaagtatcgagtta

SEQ ID NO: 221992 - DNA, 25 bp, Probe sequence
acaacatagcattaaccggatgtgg

SEQ ID NO: 221993 - DNA, 25 bp, Probe sequence
aaagttgagcggtatcaatggtaga

SEQ ID NO: 221994 - DNA, 25 bp, Probe sequence
aacatagcattaaccggatgtggat

SEQ ID NO: 221995 - DNA, 25 bp, Probe sequence
aacacaccaaagtatcgagttaata

SEQ ID NO: 221996 - DNA, 25 bp, Probe sequence
aaccggatgtggattaataattagg

SEQ ID NO: 221997 - DNA, 25 bp, Probe sequence
aatggtagagatactacatacatca

SEQ ID NO: 221998 - DNA, 25 bp, Probe sequence
aataacaacatagcattaaccggat

SEQ ID NO: 221999 - DNA, 25 bp, Probe sequence
cacaccaaagtatcgagttaataaa

SEQ ID NO: 222000 - DNA, 25 bp, Probe sequence
catcaacaatattgtcaccaataac

SEQ ID NO: 222001 - DNA, 25 bp, Probe sequence
catagcattaaccggatgtggatta

SEQ ID NO: 222002 - DNA, 25 bp, Probe sequence
catacatcaacaatattgtcaccaa

SEQ ID NO: 222003 - DNA, 25 bp, Probe sequence
ctacatacatcaacaatattgtcac

SEQ ID NO: 222004 - DNA, 25 bp, Probe sequence
ccaataacaacatagcattaaccgg

SEQ ID NO: 222005 - DNA, 25 bp, Probe sequence
gaacacaccaaagtatcgagttaat

SEQ ID NO: 222006 - DNA, 25 bp, Probe sequence
gatactacatacatcaacaatattg

SEQ ID NO: 222007 - DNA, 25 bp, Probe sequence
gttaataaaaagttgagcggtatca

SEQ ID NO: 222008 - DNA, 25 bp, Probe sequence
gtcaccaataacaacatagcattaa

SEQ ID NO: 222009 - DNA, 25 bp, Probe sequence
gtggattaataattaggtcacctat

SEQ ID NO: 222010 - DNA, 25 bp, Probe sequence
ggattaataattaggtcacctatat

SEQ ID NO: 222011 - DNA, 25 bp, Probe sequence
taatattgatacgaacacaccaaag

SEQ ID NO: 222012 - DNA, 25 bp, Probe sequence
tacatcaacaatattgtcaccaata

SEQ ID NO: 222013 - DNA, 25 bp, Probe sequence
tactacatacatcaacaatattgtc

SEQ ID NO: 222014 - DNA, 25 bp, Probe sequence
tacgaacacaccaaagtatcgagtt

SEQ ID NO: 222015 - DNA, 25 bp, Probe sequence
tattaatattgatacgaacacacca

SEQ ID NO: 222016 - DNA, 25 bp, Probe sequence
tattgtcaccaataacaacatagca

SEQ ID NO: 222017 - DNA, 25 bp, Probe sequence
ttgagcggtatcaatggtagagata

SEQ ID NO: 222018 - DNA, 25 bp, Probe sequence
attgctattttcatatataacgcct

SEQ ID NO: 222019 - DNA, 25 bp, Probe sequence
attttttgctagtgctattttcaat

SEQ ID NO: 222020 - DNA, 25 bp, Probe sequence
ataccattttttgctagtgctattt

SEQ ID NO: 222021 - DNA, 25 bp, Probe sequence
agtttgctacttatcattgctattt

SEQ ID NO: 222022 - DNA, 25 bp, Probe sequence
accattttttgctagtgctattttc

SEQ ID NO: 222023 - DNA, 25 bp, Probe sequence
acttatcattgctattttcatatat

SEQ ID NO: 222024 - DNA, 25 bp, Probe sequence
acactgaaaagcgattggaaatatt

SEQ ID NO: 222025 - DNA, 25 bp, Probe sequence
aagctttagtttgctacttatcatt

SEQ ID NO: 222026 - DNA, 25 bp, Probe sequence
aattgcagataagaattacactgaa

SEQ ID NO: 222027 - DNA, 25 bp, Probe sequence
caaagacgtgcattgaagtataagc

SEQ ID NO: 222028 - DNA, 25 bp, Probe sequence
ctattttcatatataacgcctttag

SEQ ID NO: 222029 - DNA, 25 bp, Probe sequence
ctacttatcattgctattttcatat

SEQ ID NO: 222030 - DNA, 25 bp, Probe sequence
gcgattggaaatattggatgaaggt

SEQ ID NO: 222031 - DNA, 25 bp, Probe sequence
gctacttatcattgctattttcata

SEQ ID NO: 222032 - DNA, 25 bp, Probe sequence
gctagtgctattttcaatacacaat

SEQ ID NO: 222033 - DNA, 25 bp, Probe sequence
gctattttcatatataacgccttta

SEQ ID NO: 222034 - DNA, 25 bp, Probe sequence
gctttagtttgctacttatcattgc

SEQ ID NO: 222035 - DNA, 25 bp, Probe sequence
gaattaattgcattatttaaaacat

SEQ ID NO: 222036 - DNA, 25 bp, Probe sequence
gatgaatcaaagacgtgcattgaag

SEQ ID NO: 222037 - DNA, 25 bp, Probe sequence
gtttgctacttatcattgctatttt

SEQ ID NO: 222038 - DNA, 25 bp, Probe sequence
gtgctattttcaatacacaatttac

SEQ ID NO: 222039 - DNA, 25 bp, Probe sequence
tgctacttatcattgctattttcat

SEQ ID NO: 222040 - DNA, 25 bp, Probe sequence
tcaaagctttagtttgctacttatc

SEQ ID NO: 222041 - DNA, 25 bp, Probe sequence
taataccattttttgctagtgctat

SEQ ID NO: 222042 - DNA, 25 bp, Probe sequence
taatcaaagctttagtttgctactt

SEQ ID NO: 222043 - DNA, 25 bp, Probe sequence
tatcattgctattttcatatataac

SEQ ID NO: 222044 - DNA, 25 bp, Probe sequence
tattgaagagaagacgtttttatta

SEQ ID NO: 222045 - DNA, 25 bp, Probe sequence
tttgctacttatcattgctattttc

SEQ ID NO: 222046 - DNA, 25 bp, Probe sequence
tttaataccattttttgctagtgct

SEQ ID NO: 222047 - DNA, 25 bp, Probe sequence
tttagtttgctacttatcattgcta

SEQ ID NO: 222048 - DNA, 25 bp, Probe sequence
ttttgctagtgctattttcaataca

SEQ ID NO: 222049 - DNA, 25 bp, Probe sequence
ttaataccattttttgctagtgcta

SEQ ID NO: 222050 - DNA, 25 bp, Probe sequence
ttgctacttatcattgctattttca

SEQ ID NO: 222051 - DNA, 25 bp, Probe sequence
ttgctagtgctattttcaatacaca

SEQ ID NO: 222052 - DNA, 25 bp, Probe sequence
attctagtaggcaatcgacataaag

SEQ ID NO: 222053 - DNA, 25 bp, Probe sequence
atattctagtaggcaatcgacataa

SEQ ID NO: 222054 - DNA, 25 bp, Probe sequence
atcgacataaagataacggtagtat

SEQ ID NO: 222055 - DNA, 25 bp, Probe sequence
agcatttaatcattgcttctagatt

SEQ ID NO: 222056 - DNA, 25 bp, Probe sequence
ttgataaagtatttcaatctattta

SEQ ID NO: 222057 - DNA, 25 bp, Probe sequence
acgattgcgctttctcatgatgtga

SEQ ID NO: 222058 - DNA, 25 bp, Probe sequence
aaatggctcaggtaaatcgacatta

SEQ ID NO: 222059 - DNA, 25 bp, Probe sequence
aactttttcaagagggatgcgaatg

SEQ ID NO: 222060 - DNA, 25 bp, Probe sequence
aaatcataatgcgaggtgaagtata

SEQ ID NO: 222061 - DNA, 25 bp, Probe sequence
aagatgcatctttaacgatttctac

SEQ ID NO: 222062 - DNA, 25 bp, Probe sequence
aaggtggaggcatcttaatatcatc

SEQ ID NO: 222063 - DNA, 25 bp, Probe sequence
caagatgcatctttaacgatttcta

SEQ ID NO: 222064 - DNA, 25 bp, Probe sequence
ctttaaaacacattgatgacgctac

SEQ ID NO: 222065 - DNA, 25 bp, Probe sequence
ctaagcatttaatcattgcttctag

SEQ ID NO: 222066 - DNA, 25 bp, Probe sequence
cgattgcgctttctcatgatgtgaa

SEQ ID NO: 222067 - DNA, 25 bp, Probe sequence
gaacagaaagatatacttttagcac

SEQ ID NO: 222068 - DNA, 25 bp, Probe sequence
gaaaaatggctcaggtaaatcgaca

SEQ ID NO: 222069 - DNA, 25 bp, Probe sequence
gacattaattaatattctagtaggc

SEQ ID NO: 222070 - DNA, 25 bp, Probe sequence
gacgaatgattttaactgaacagaa

SEQ ID NO: 222071 - DNA, 25 bp, Probe sequence
gagacagttggattaattgggaaaa

SEQ ID NO: 222072 - DNA, 25 bp, Probe sequence
gagggatgcgaatgaagatagcttt

SEQ ID NO: 222073 - DNA, 25 bp, Probe sequence
gatggacgaatgattttaactgaac

SEQ ID NO: 222074 - DNA, 25 bp, Probe sequence
gatgatgtcgaatataaagaacaca

SEQ ID NO: 222075 - DNA, 25 bp, Probe sequence
gattgcgctttctcatgatgtgaag

SEQ ID NO: 222076 - DNA, 25 bp, Probe sequence
gattaattgggaaaaatggctcagg

SEQ ID NO: 222077 - DNA, 25 bp, Probe sequence
gtcgaatataaagaacacataggtg

SEQ ID NO: 222078 - DNA, 25 bp, Probe sequence
gggaaaaatggctcaggtaaatcga

SEQ ID NO: 222079 - DNA, 25 bp, Probe sequence
gtgtttatgaaagatggacgaatga

SEQ ID NO: 222080 - DNA, 25 bp, Probe sequence
ggacgaatgattttaactgaacaga

SEQ ID NO: 222081 - DNA, 25 bp, Probe sequence
ggaatagtcaaaaattctttgattt

SEQ ID NO: 222082 - DNA, 25 bp, Probe sequence
ggcaatcgacataaagataacggta

SEQ ID NO: 222083 - DNA, 25 bp, Probe sequence
tggctcaggtaaatcgacattaatt

SEQ ID NO: 222084 - DNA, 25 bp, Probe sequence
tctagtaggcaatcgacataaagat

SEQ ID NO: 222085 - DNA, 25 bp, Probe sequence
taatattctagtaggcaatcgacat

SEQ ID NO: 222086 - DNA, 25 bp, Probe sequence
attcctctggatattgctgatgcta

SEQ ID NO: 222087 - DNA, 25 bp, Probe sequence
atactaatcctaatcctgaatatga

SEQ ID NO: 222088 - DNA, 25 bp, Probe sequence
ataaatactaatcctaatcctgaat

SEQ ID NO: 222089 - DNA, 25 bp, Probe sequence
atcctaatcctgaatatgatatggc

SEQ ID NO: 222090 - DNA, 25 bp, Probe sequence
atgaagcagcaacagctcttgaaat

SEQ ID NO: 222091 - DNA, 25 bp, Probe sequence
atgataaatactaatcctaatcctg

SEQ ID NO: 222092 - DNA, 25 bp, Probe sequence
agcaacagctcttgaaatattttca

SEQ ID NO: 222093 - DNA, 25 bp, Probe sequence
actaatcctaatcctgaatatgata

SEQ ID NO: 222094 - DNA, 25 bp, Probe sequence
acaattcctctggatattgctgatg

SEQ ID NO: 222095 - DNA, 25 bp, Probe sequence
aaatactaatcctaatcctgaatat

SEQ ID NO: 222096 - DNA, 25 bp, Probe sequence
aaaacagcagcaaaagtgatattaa

SEQ ID NO: 222097 - DNA, 25 bp, Probe sequence
aacttaatgaagcagcaacagctct

SEQ ID NO: 222098 - DNA, 25 bp, Probe sequence
aagcagcaacagctcttgaaatatt

SEQ ID NO: 222099 - DNA, 25 bp, Probe sequence
aatgctaatacaaataatccaacta

SEQ ID NO: 222100 - DNA, 25 bp, Probe sequence
aataattggacaaaacagcagcaaa

SEQ ID NO: 222101 - DNA, 25 bp, Probe sequence
aatagatagaatgcctaaacttaat

SEQ ID NO: 222102 - DNA, 25 bp, Probe sequence
aattcctctggatattgctgatgct

SEQ ID NO: 222103 - DNA, 25 bp, Probe sequence
ctctggatattgctgatgctaataa

SEQ ID NO: 222104 - DNA, 25 bp, Probe sequence
gcctaaacttaatgaagcagcaaca

SEQ ID NO: 222105 - DNA, 25 bp, Probe sequence
gctgatgctaataaaataattggac

SEQ ID NO: 222106 - DNA, 25 bp, Probe sequence
gctaatacaaataatccaactatag

SEQ ID NO: 222107 - DNA, 25 bp, Probe sequence
gcagcaacagctcttgaaatatttt

SEQ ID NO: 222108 - DNA, 25 bp, Probe sequence
gcaacagctcttgaaatattttcaa

SEQ ID NO: 222109 - DNA, 25 bp, Probe sequence
gaatgcctaaacttaatgaagcagc

SEQ ID NO: 222110 - DNA, 25 bp, Probe sequence
gaagcagcaacagctcttgaaatat

SEQ ID NO: 222111 - DNA, 25 bp, Probe sequence
gatactggtataaggatgacaaaaa

SEQ ID NO: 222112 - DNA, 25 bp, Probe sequence
gtattctaaaatcttaaatatgaca

SEQ ID NO: 222113 - DNA, 25 bp, Probe sequence
ggcaaaaaatacattactaattgag

SEQ ID NO: 222114 - DNA, 25 bp, Probe sequence
tggatattgctgatgctaataaaat

SEQ ID NO: 222115 - DNA, 25 bp, Probe sequence
tcctctggatattgctgatgctaat

SEQ ID NO: 222116 - DNA, 25 bp, Probe sequence
taatgaagcagcaacagctcttgaa

SEQ ID NO: 222117 - DNA, 25 bp, Probe sequence
taatcctgaatatgatatggcaaaa

SEQ ID NO: 222118 - DNA, 25 bp, Probe sequence
taatccaactatagatactggtata

SEQ ID NO: 222119 - DNA, 25 bp, Probe sequence
ttcctctggatattgctgatgctaa

SEQ ID NO: 222120 - DNA, 25 bp, Probe sequence
atccgttgatgagttcggcaatggc

SEQ ID NO: 222121 - DNA, 25 bp, Probe sequence
atgaaaggtatgttcctaagtagtt

SEQ ID NO: 222122 - DNA, 25 bp, Probe sequence
agttcggcaatggctggggttatgt

SEQ ID NO: 222123 - DNA, 25 bp, Probe sequence
agtagtttttatgcaacgagaaagc

SEQ ID NO: 222124 - DNA, 25 bp, Probe sequence
actctatcattttcccattgacatt

SEQ ID NO: 222125 - DNA, 25 bp, Probe sequence
aagactcaagatggatgtattatgt

SEQ ID NO: 222126 - DNA, 25 bp, Probe sequence
catatatttattttatagtcgctat

SEQ ID NO: 222127 - DNA, 25 bp, Probe sequence
catttaaatttggcgctgaaaactc

SEQ ID NO: 222128 - DNA, 25 bp, Probe sequence
cattgacatttaaatttggcgctga

SEQ ID NO: 222129 - DNA, 25 bp, Probe sequence
cttattcggtgcaagtttaatgatt

SEQ ID NO: 222130 - DNA, 25 bp, Probe sequence
cggcaatggctggggttatgttaat

SEQ ID NO: 222131 - DNA, 25 bp, Probe sequence
gccttttatttaatcttattcggtg

SEQ ID NO: 222132 - DNA, 25 bp, Probe sequence
gcatactctatcattttcccattga

SEQ ID NO: 222133 - DNA, 25 bp, Probe sequence
gatgagttcggcaatggctggggtt

SEQ ID NO: 222134 - DNA, 25 bp, Probe sequence
gatgattggtattatgtcaggttta

SEQ ID NO: 222135 - DNA, 25 bp, Probe sequence
gttcctaagtagtttttatgcaacg

SEQ ID NO: 222136 - DNA, 25 bp, Probe sequence
gtcaggtttaatgagttttggtatc

SEQ ID NO: 222137 - DNA, 25 bp, Probe sequence
gtcatactttgccttttatttaatc

SEQ ID NO: 222138 - DNA, 25 bp, Probe sequence
gtgacccaaagtgtgatgattggta

SEQ ID NO: 222139 - DNA, 25 bp, Probe sequence
ggggcatactctatcattttcccat

SEQ ID NO: 222140 - DNA, 25 bp, Probe sequence
ggtatcataggggcatactctatca

SEQ ID NO: 222141 - DNA, 25 bp, Probe sequence
ggatgtattatgtatctactttacc

SEQ ID NO: 222142 - DNA, 25 bp, Probe sequence
tgagttttggtatcataggggcata

SEQ ID NO: 222143 - DNA, 25 bp, Probe sequence
tgattggattagttgtgactacgat

SEQ ID NO: 222144 - DNA, 25 bp, Probe sequence
tctttcgtggtctttttctttatat

SEQ ID NO: 222145 - DNA, 25 bp, Probe sequence
taatcttattcggtgcaagtttaat

SEQ ID NO: 222146 - DNA, 25 bp, Probe sequence
taagtcatactttgccttttattta

SEQ ID NO: 222147 - DNA, 25 bp, Probe sequence
tactttgcagtatttaatccgttga

SEQ ID NO: 222148 - DNA, 25 bp, Probe sequence
tactttgccttttatttaatcttat

SEQ ID NO: 222149 - DNA, 25 bp, Probe sequence
taccggttaaacgtagtgattatat

SEQ ID NO: 222150 - DNA, 25 bp, Probe sequence
tatcattttcccattgacatttaaa

SEQ ID NO: 222151 - DNA, 25 bp, Probe sequence
tatattaagtcatactttgcctttt

SEQ ID NO: 222152 - DNA, 25 bp, Probe sequence
tattatgtatctactttaccggtta

SEQ ID NO: 222153 - DNA, 25 bp, Probe sequence
tttgcagtatttaatccgttgatga

SEQ ID NO: 222154 - DNA, 25 bp, Probe sequence
atatcgaaccattggcagtgcttga

SEQ ID NO: 222155 - DNA, 25 bp, Probe sequence
atgacatcgtgctagctggcggtat

SEQ ID NO: 222156 - DNA, 25 bp, Probe sequence
aggaatcaatgatggtgctgcgatg
